United States Patent Application Publication US 2008/0113351 A1 - sequence listing, part 32

SEQ ID NO: 785504 - DNA, 19 bp, Mus musculus
  siRNA target sequence for 5730577I03Rik (NM_175110.2,565-583).
gaaagtctctgggtattct

SEQ ID NO: 785505 - DNA, 19 bp, Mus musculus
  siRNA target sequence for 5730577I03Rik (NM_175110.2,571-589).
ctctgggtattctttaagt

SEQ ID NO: 785506 - DNA, 19 bp, Mus musculus
  siRNA target sequence for 5730577I03Rik (NM_175110.2,573-591).
ctgggtattctttaagtct

SEQ ID NO: 785507 - DNA, 19 bp, Mus musculus
  siRNA target sequence for 5730577I03Rik (NM_175110.2,575-593).
gggtattctttaagtctta

SEQ ID NO: 785508 - DNA, 19 bp, Mus musculus
  siRNA target sequence for 5730577I03Rik (NM_175110.2,576-594).
ggtattctttaagtcttaa

SEQ ID NO: 785509 - DNA, 19 bp, Mus musculus
  siRNA target sequence for 5730577I03Rik (NM_175110.2,582-600).
ctttaagtcttaatagtca

SEQ ID NO: 785510 - DNA, 19 bp, Mus musculus
  siRNA target sequence for 5730577I03Rik (NM_175110.2,669-687).
caagtctaactgaacactt

SEQ ID NO: 785511 - DNA, 19 bp, Mus musculus
  siRNA target sequence for 5730577I03Rik (NM_175110.2,678-696).
ctgaacacttcaaactaga

SEQ ID NO: 785512 - DNA, 19 bp, Mus musculus
  siRNA target sequence for 5730577I03Rik (NM_175110.2,741-759).
gcactcaggactttcttca

SEQ ID NO: 785513 - DNA, 19 bp, Mus musculus
  siRNA target sequence for 5730577I03Rik (NM_175110.2,751-769).
ctttcttcacgtgtataaa

SEQ ID NO: 785514 - DNA, 19 bp, Mus musculus
  siRNA target sequence for 5730577I03Rik (NM_175110.2,755-773).
cttcacgtgtataaacaca

SEQ ID NO: 785515 - DNA, 19 bp, Mus musculus
  siRNA target sequence for Hspbap1 (NM_175111.2,122-140).
gtgaacctgtcaaaccttt

SEQ ID NO: 785516 - DNA, 19 bp, Mus musculus
  siRNA target sequence for Hspbap1 (NM_175111.2,124-142).
gaacctgtcaaacctttta

SEQ ID NO: 785517 - DNA, 19 bp, Mus musculus
  siRNA target sequence for Hspbap1 (NM_175111.2,150-168).
gaaagcgaaagagattata

SEQ ID NO: 785518 - DNA, 19 bp, Mus musculus
  siRNA target sequence for Hspbap1 (NM_175111.2,154-172).
gcgaaagagattataatgt

SEQ ID NO: 785519 - DNA, 19 bp, Mus musculus
  siRNA target sequence for Hspbap1 (NM_175111.2,195-213).
ctgtaacatggttttcgat

SEQ ID NO: 785520 - DNA, 19 bp, Mus musculus
  siRNA target sequence for Hspbap1 (NM_175111.2,233-251).
ctgcgaaacacctttcgaa

SEQ ID NO: 785521 - DNA, 19 bp, Mus musculus
  siRNA target sequence for Hspbap1 (NM_175111.2,315-333).
gtatgaaaccgaatgtagt

SEQ ID NO: 785522 - DNA, 19 bp, Mus musculus
  siRNA target sequence for Hspbap1 (NM_175111.2,343-361).
gcgacgctcgaggagtttt

SEQ ID NO: 785523 - DNA, 19 bp, Mus musculus
  siRNA target sequence for Hspbap1 (NM_175111.2,344-362).
cgacgctcgaggagttttt

SEQ ID NO: 785524 - DNA, 19 bp, Mus musculus
  siRNA target sequence for Hspbap1 (NM_175111.2,390-408).
ctctggaccattcaaagat

SEQ ID NO: 785525 - DNA, 19 bp, Mus musculus
  siRNA target sequence for Hspbap1 (NM_175111.2,395-413).
gaccattcaaagattatga

SEQ ID NO: 785526 - DNA, 19 bp, Mus musculus
  siRNA target sequence for Hspbap1 (NM_175111.2,406-424).
gattatgaacattctaaat

SEQ ID NO: 785527 - DNA, 19 bp, Mus musculus
  siRNA target sequence for Hspbap1 (NM_175111.2,426-444).
ctgggcttacgctgactat

SEQ ID NO: 785528 - DNA, 19 bp, Mus musculus
  siRNA target sequence for Hspbap1 (NM_175111.2,428-446).
gggcttacgctgactataa

SEQ ID NO: 785529 - DNA, 19 bp, Mus musculus
  siRNA target sequence for Hspbap1 (NM_175111.2,430-448).
gcttacgctgactataagt

SEQ ID NO: 785530 - DNA, 19 bp, Mus musculus
  siRNA target sequence for Hspbap1 (NM_175111.2,431-449).
cttacgctgactataagta

SEQ ID NO: 785531 - DNA, 19 bp, Mus musculus
  siRNA target sequence for Hspbap1 (NM_175111.2,437-455).
ctgactataagtattttgt

SEQ ID NO: 785532 - DNA, 19 bp, Mus musculus
  siRNA target sequence for Hspbap1 (NM_175111.2,580-598).
catctggactcctatggtt

SEQ ID NO: 785533 - DNA, 19 bp, Mus musculus
  siRNA target sequence for Hspbap1 (NM_175111.2,588-606).
ctcctatggttgcaactta

SEQ ID NO: 785534 - DNA, 19 bp, Mus musculus
  siRNA target sequence for Hspbap1 (NM_175111.2,596-614).
gttgcaacttagtattcca

SEQ ID NO: 785535 - DNA, 19 bp, Mus musculus
  siRNA target sequence for Hspbap1 (NM_175111.2,615-633).
ggtacaaggaaggaaaaga

SEQ ID NO: 785536 - DNA, 19 bp, Mus musculus
  siRNA target sequence for Hspbap1 (NM_175111.2,626-644).
ggaaaagatggcatctctt

SEQ ID NO: 785537 - DNA, 19 bp, Mus musculus
  siRNA target sequence for Hspbap1 (NM_175111.2,652-670).
gaagatacgcctttccttt

SEQ ID NO: 785538 - DNA, 19 bp, Mus musculus
  siRNA target sequence for Hspbap1 (NM_175111.2,701-719).
gtgtgttcagtaaaatcaa

SEQ ID NO: 785539 - DNA, 19 bp, Mus musculus
  siRNA target sequence for Hspbap1 (NM_175111.2,705-723).
gttcagtaaaatcaatgtt

SEQ ID NO: 785540 - DNA, 19 bp, Mus musculus
  siRNA target sequence for Hspbap1 (NM_175111.2,710-728).
gtaaaatcaatgttgtcaa

SEQ ID NO: 785541 - DNA, 19 bp, Mus musculus
  siRNA target sequence for Hspbap1 (NM_175111.2,724-742).
gtcaaccctgatttgaagt

SEQ ID NO: 785542 - DNA, 19 bp, Mus musculus
  siRNA target sequence for Hspbap1 (NM_175111.2,1029-1047).
cttgaacagtgctgtttgt

SEQ ID NO: 785543 - DNA, 19 bp, Mus musculus
  siRNA target sequence for Hspbap1 (NM_175111.2,1170-1188).
cacatcgagggctgagaaa

SEQ ID NO: 785544 - DNA, 19 bp, Mus musculus
  siRNA target sequence for Hspbap1 (NM_175111.2,1268-1286).
gcgacagcgaagaatctgt

SEQ ID NO: 785545 - DNA, 19 bp, Mus musculus
  siRNA target sequence for Hspbap1 (NM_175111.2,1290-1308).
cagtaatggaggacacttt

SEQ ID NO: 785546 - DNA, 19 bp, Mus musculus
  siRNA target sequence for Hspbap1 (NM_175111.2,1428-1446).
gctggactgcctagttaat

SEQ ID NO: 785547 - DNA, 19 bp, Mus musculus
  siRNA target sequence for Hspbap1 (NM_175111.2,1437-1455).
cctagttaatccacaagta

SEQ ID NO: 785548 - DNA, 19 bp, Mus musculus
  siRNA target sequence for Hspbap1 (NM_175111.2,1464-1482).
ggtggcccagcttttgata

SEQ ID NO: 785549 - DNA, 19 bp, Mus musculus
  siRNA target sequence for Hspbap1 (NM_175111.2,1483-1501).
caaggaaaaagctgtgata

SEQ ID NO: 785550 - DNA, 19 bp, Mus musculus
  siRNA target sequence for Rae1 (NM_175112.2,302-320).
ggagcacaaccacagataa

SEQ ID NO: 785551 - DNA, 19 bp, Mus musculus
  siRNA target sequence for Rae1 (NM_175112.2,305-323).
gcacaaccacagataacca

SEQ ID NO: 785552 - DNA, 19 bp, Mus musculus
  siRNA target sequence for Rae1 (NM_175112.2,314-332).
cagataaccacaatccaat

SEQ ID NO: 785553 - DNA, 19 bp, Mus musculus
  siRNA target sequence for Rae1 (NM_175112.2,337-355).
gatatcgaagtgacatctt

SEQ ID NO: 785554 - DNA, 19 bp, Mus musculus
  siRNA target sequence for Rae1 (NM_175112.2,425-443).
gatcatgggcgaatgatgt

SEQ ID NO: 785555 - DNA, 19 bp, Mus musculus
  siRNA target sequence for Rae1 (NM_175112.2,462-480).
ggacagtgggcaaaccatt

SEQ ID NO: 785556 - DNA, 19 bp, Mus musculus
  siRNA target sequence for Rae1 (NM_175112.2,532-550).
gatgatgggagcaaagtat

SEQ ID NO: 785557 - DNA, 19 bp, Mus musculus
  siRNA target sequence for Rae1 (NM_175112.2,535-553).
gatgggagcaaagtattca

SEQ ID NO: 785558 - DNA, 19 bp, Mus musculus
  siRNA target sequence for Rae1 (NM_175112.2,684-702).
cgggagctgggataagact

SEQ ID NO: 785559 - DNA, 19 bp, Mus musculus
  siRNA target sequence for Rae1 (NM_175112.2,714-732).
ggatacgcggtcctcaaat

SEQ ID NO: 785560 - DNA, 19 bp, Mus musculus
  siRNA target sequence for Rae1 (NM_175112.2,719-737).
cgcggtcctcaaatcctat

SEQ ID NO: 785561 - DNA, 19 bp, Mus musculus
  siRNA target sequence for Rae1 (NM_175112.2,751-769).
ctccctgaacgctgttact

SEQ ID NO: 785562 - DNA, 19 bp, Mus musculus
  siRNA target sequence for Rae1 (NM_175112.2,809-827).
cagagaggggcctgattgt

SEQ ID NO: 785563 - DNA, 19 bp, Mus musculus
  siRNA target sequence for Rae1 (NM_175112.2,813-831).
gaggggcctgattgtctat

SEQ ID NO: 785564 - DNA, 19 bp, Mus musculus
  siRNA target sequence for Rae1 (NM_175112.2,815-833).
ggggcctgattgtctatca

SEQ ID NO: 785565 - DNA, 19 bp, Mus musculus
  siRNA target sequence for Rae1 (NM_175112.2,958-976).
gggagagttgccattcact

SEQ ID NO: 785566 - DNA, 19 bp, Mus musculus
  siRNA target sequence for Rae1 (NM_175112.2,962-980).
gagttgccattcactacat

SEQ ID NO: 785567 - DNA, 19 bp, Mus musculus
  siRNA target sequence for Rae1 (NM_175112.2,964-982).
gttgccattcactacatca

SEQ ID NO: 785568 - DNA, 19 bp, Mus musculus
  siRNA target sequence for Rae1 (NM_175112.2,988-1006).
ccaaatccggccaaagata

SEQ ID NO: 785569 - DNA, 19 bp, Mus musculus
  siRNA target sequence for Rae1 (NM_175112.2,989-1007).
caaatccggccaaagataa

SEQ ID NO: 785570 - DNA, 19 bp, Mus musculus
  siRNA target sequence for Rae1 (NM_175112.2,1003-1021).
gataacttcaccttcaaat

SEQ ID NO: 785571 - DNA, 19 bp, Mus musculus
  siRNA target sequence for Rae1 (NM_175112.2,1046-1064).
cttcggctcctcaagacat

SEQ ID NO: 785572 - DNA, 19 bp, Mus musculus
  siRNA target sequence for Rae1 (NM_175112.2,1158-1176).
caggaccaaactaaagact

SEQ ID NO: 785573 - DNA, 19 bp, Mus musculus
  siRNA target sequence for Rae1 (NM_175112.2,1173-1191).
gacttcggaacagttagat

SEQ ID NO: 785574 - DNA, 19 bp, Mus musculus
  siRNA target sequence for Rae1 (NM_175112.2,1175-1193).
cttcggaacagttagatca

SEQ ID NO: 785575 - DNA, 19 bp, Mus musculus
  siRNA target sequence for Rae1 (NM_175112.2,1200-1218).
cgcagcttgctgcttcaat

SEQ ID NO: 785576 - DNA, 19 bp, Mus musculus
  siRNA target sequence for 2310001H13Rik (NM_175114.2,2335-2353).
gtgtcacacctattcattt

SEQ ID NO: 785577 - DNA, 19 bp, Mus musculus
  siRNA target sequence for 2310001H13Rik (NM_175114.2,2337-2355).
gtcacacctattcattttt

SEQ ID NO: 785578 - DNA, 19 bp, Mus musculus
  siRNA target sequence for 2310001H13Rik (NM_175114.2,2339-2357).
cacacctattcatttttct

SEQ ID NO: 785579 - DNA, 19 bp, Mus musculus
  siRNA target sequence for 2310001H13Rik (NM_175114.2,2372-2390).
ccacgctgttggtttgagt

SEQ ID NO: 785580 - DNA, 19 bp, Mus musculus
  siRNA target sequence for 2310001H13Rik (NM_175114.2,2373-2391).
cacgctgttggtttgagtt

SEQ ID NO: 785581 - DNA, 19 bp, Mus musculus
  siRNA target sequence for 2610034F18Rik (NM_175115.4,475-493).
gtgtcacttatgtccattt

SEQ ID NO: 785582 - DNA, 19 bp, Mus musculus
  siRNA target sequence for 2610034F18Rik (NM_175115.4,479-497).
cacttatgtccatttgcat

SEQ ID NO: 785583 - DNA, 19 bp, Mus musculus
  siRNA target sequence for 2610034F18Rik (NM_175115.4,611-629).
cgaaggcgcaaacataaaa

SEQ ID NO: 785584 - DNA, 19 bp, Mus musculus
  siRNA target sequence for 2610034F18Rik (NM_175115.4,644-662).
ggtaccaggtcttccttaa

SEQ ID NO: 785585 - DNA, 19 bp, Mus musculus
  siRNA target sequence for 2610034F18Rik (NM_175115.4,883-901).
ggttgacaaccctttgaat

SEQ ID NO: 785586 - DNA, 19 bp, Mus musculus
  siRNA target sequence for 2610034F18Rik (NM_175115.4,957-975).
ctgcctctcctgatgtaga

SEQ ID NO: 785587 - DNA, 19 bp, Mus musculus
  siRNA target sequence for 2610034F18Rik (NM_175115.4,1097-1115).
catagtcagaggaactaca

SEQ ID NO: 785588 - DNA, 19 bp, Mus musculus
  siRNA target sequence for 2610034F18Rik (NM_175115.4,1332-1350).
gtgggtgcaaatgtaaaga

SEQ ID NO: 785589 - DNA, 19 bp, Mus musculus
  siRNA target sequence for 2610034F18Rik (NM_175115.4,1344-1362).
gtaaagacaagtacgattt

SEQ ID NO: 785590 - DNA, 19 bp, Mus musculus
  siRNA target sequence for 2610034F18Rik (NM_175115.4,1357-1375).
cgattttgcctgtcatttt

SEQ ID NO: 785591 - DNA, 19 bp, Mus musculus
  siRNA target sequence for 2610312A07Rik (NM_175117.2,2489-2507).
gcttgaacaacaaaatgta

SEQ ID NO: 785592 - DNA, 19 bp, Mus musculus
  siRNA target sequence for 2610312A07Rik (NM_175117.2,2496-2514).
caacaaaatgtatatgtca

SEQ ID NO: 785593 - DNA, 19 bp, Mus musculus
  siRNA target sequence for 2610312A07Rik (NM_175117.2,2515-2533).
ggatgctgtacctcacaat

SEQ ID NO: 785594 - DNA, 19 bp, Mus musculus
  siRNA target sequence for 2610312A07Rik (NM_175117.2,2554-2572).
ctgtgctgatggatagaat

SEQ ID NO: 785595 - DNA, 19 bp, Mus musculus
  siRNA target sequence for 2610312A07Rik (NM_175117.2,2558-2576).
gctgatggatagaatagta

SEQ ID NO: 785596 - DNA, 19 bp, Mus musculus
  siRNA target sequence for 2610312A07Rik (NM_175117.2,2559-2577).
ctgatggatagaatagtat

SEQ ID NO: 785597 - DNA, 19 bp, Mus musculus
  siRNA target sequence for 2610312A07Rik (NM_175117.2,2565-2583).
gatagaatagtattgttga

SEQ ID NO: 785598 - DNA, 19 bp, Mus musculus
  siRNA target sequence for 2610312A07Rik (NM_175117.2,2596-2614).
gggaattaagaggaataat

SEQ ID NO: 785599 - DNA, 19 bp, Mus musculus
  siRNA target sequence for 1300007C21Rik (NM_175119.1,418-436).
cgtaaccactcctttgagt

SEQ ID NO: 785600 - DNA, 19 bp, Mus musculus
  siRNA target sequence for 1300007C21Rik (NM_175119.1,1941-1959).
ctaaggactgcccaaagaa

SEQ ID NO: 785601 - DNA, 19 bp, Mus musculus
  siRNA target sequence for 4930515G01Rik (NM_175120.2,393-411).
ggtcagaaaccattttgga

SEQ ID NO: 785602 - DNA, 19 bp, Mus musculus
  siRNA target sequence for 4930515G01Rik (NM_175120.2,416-434).
ggcaacgggaactcgtttt

SEQ ID NO: 785603 - DNA, 19 bp, Mus musculus
  siRNA target sequence for 4930515G01Rik (NM_175120.2,418-436).
caacgggaactcgttttca

SEQ ID NO: 785604 - DNA, 19 bp, Mus musculus
  siRNA target sequence for 4930515G01Rik (NM_175120.2,466-484).
ccagatactctcctgataa

SEQ ID NO: 785605 - DNA, 19 bp, Mus musculus
  siRNA target sequence for 4930515G01Rik (NM_175120.2,478-496).
ctgataacggggtagttgt

SEQ ID NO: 785606 - DNA, 19 bp, Mus musculus
  siRNA target sequence for 1110051M20Rik (NM_175123.2,153-171).
ggcattgcccggttcttca

SEQ ID NO: 785607 - DNA, 19 bp, Mus musculus
  siRNA target sequence for 1110051M20Rik (NM_175123.2,278-296).
gagatgcttccgaactgta

SEQ ID NO: 785608 - DNA, 19 bp, Mus musculus
  siRNA target sequence for 1110051M20Rik (NM_175123.2,420-438).
gactgcctgatgtcttttt

SEQ ID NO: 785609 - DNA, 19 bp, Mus musculus
  siRNA target sequence for 1110051M20Rik (NM_175123.2,493-511).
gtgtggctgccatctatca

SEQ ID NO: 785610 - DNA, 19 bp, Mus musculus
  siRNA target sequence for 1110051M20Rik (NM_175123.2,526-544).
ggaaaaaccccaatacagt

SEQ ID NO: 785611 - DNA, 19 bp, Mus musculus
  siRNA target sequence for 1110051M20Rik (NM_175123.2,685-703).
caccagcgcttgtcaaaga

SEQ ID NO: 785612 - DNA, 19 bp, Mus musculus
  siRNA target sequence for 1110051M20Rik (NM_175123.2,688-706).
cagcgcttgtcaaagagat

SEQ ID NO: 785613 - DNA, 19 bp, Mus musculus
  siRNA target sequence for 1110051M20Rik (NM_175123.2,724-742).
ggctgactttctatggatt

SEQ ID NO: 785614 - DNA, 19 bp, Mus musculus
  siRNA target sequence for 1300004K21Rik (NM_175124.3,128-146).
gcatccgaaatctgtaaga

SEQ ID NO: 785615 - DNA, 19 bp, Mus musculus
  siRNA target sequence for 1300004K21Rik (NM_175124.3,248-266).
cacctggagaggctctata

SEQ ID NO: 785616 - DNA, 19 bp, Mus musculus
  siRNA target sequence for 1300004K21Rik (NM_175124.3,332-350).
ctgtaccttcactcaaata

SEQ ID NO: 785617 - DNA, 19 bp, Mus musculus
  siRNA target sequence for 1300004K21Rik (NM_175124.3,454-472).
gagagcgttgcgtcatctt

SEQ ID NO: 785618 - DNA, 19 bp, Mus musculus
  siRNA target sequence for 1300004K21Rik (NM_175124.3,459-477).
cgttgcgtcatcttcgatt

SEQ ID NO: 785619 - DNA, 19 bp, Mus musculus
  siRNA target sequence for 1300004K21Rik (NM_175124.3,460-478).
gttgcgtcatcttcgatta

SEQ ID NO: 785620 - DNA, 19 bp, Mus musculus
  siRNA target sequence for 1300004K21Rik (NM_175124.3,463-481).
gcgtcatcttcgattagct

SEQ ID NO: 785621 - DNA, 19 bp, Mus musculus
  siRNA target sequence for 1300004K21Rik (NM_175124.3,464-482).
cgtcatcttcgattagcta

SEQ ID NO: 785622 - DNA, 19 bp, Mus musculus
  siRNA target sequence for 1300004K21Rik (NM_175124.3,465-483).
gtcatcttcgattagctaa

SEQ ID NO: 785623 - DNA, 19 bp, Mus musculus
  siRNA target sequence for 1300004K21Rik (NM_175124.3,467-485).
catcttcgattagctaata

SEQ ID NO: 785624 - DNA, 19 bp, Mus musculus
  siRNA target sequence for 1300004K21Rik (NM_175124.3,506-524).
ccagaggttggcgatttga

SEQ ID NO: 785625 - DNA, 19 bp, Mus musculus
  siRNA target sequence for 1300004K21Rik (NM_175124.3,507-525).
cagaggttggcgatttgaa

SEQ ID NO: 785626 - DNA, 19 bp, Mus musculus
  siRNA target sequence for 1300004K21Rik (NM_175124.3,530-548).
ctgcagacactagacattt

SEQ ID NO: 785627 - DNA, 19 bp, Mus musculus
  siRNA target sequence for 1300004K21Rik (NM_175124.3,552-570).
gcaatcgcttgctagcttt

SEQ ID NO: 785628 - DNA, 19 bp, Mus musculus
  siRNA target sequence for 1300004K21Rik (NM_175124.3,553-571).
caatcgcttgctagcttta

SEQ ID NO: 785629 - DNA, 19 bp, Mus musculus
  siRNA target sequence for 1300004K21Rik (NM_175124.3,782-800).
ccctcatacctctacaaca

SEQ ID NO: 785630 - DNA, 19 bp, Mus musculus
  siRNA target sequence for 1300004K21Rik (NM_175124.3,784-802).
ctcatacctctacaacaaa

SEQ ID NO: 785631 - DNA, 19 bp, Mus musculus
  siRNA target sequence for 1300004K21Rik (NM_175124.3,786-804).
catacctctacaacaaagt

SEQ ID NO: 785632 - DNA, 19 bp, Mus musculus
  siRNA target sequence for 1300004K21Rik (NM_175124.3,822-840).
gtggcatccccatccaatt

SEQ ID NO: 785633 - DNA, 19 bp, Mus musculus
  siRNA target sequence for 1300004K21Rik (NM_175124.3,824-842).
ggcatccccatccaattgt

SEQ ID NO: 785634 - DNA, 19 bp, Mus musculus
  siRNA target sequence for 1300004K21Rik (NM_175124.3,826-844).
catccccatccaattgtca

SEQ ID NO: 785635 - DNA, 19 bp, Mus musculus
  siRNA target sequence for 1300004K21Rik (NM_175124.3,893-911).
ccagcagaggtgaagacaa

SEQ ID NO: 785636 - DNA, 19 bp, Mus musculus
  siRNA target sequence for 1300004K21Rik (NM_175124.3,894-912).
cagcagaggtgaagacaat

SEQ ID NO: 785637 - DNA, 19 bp, Mus musculus
  siRNA target sequence for 1300004K21Rik (NM_175124.3,1075-1093).
gtgtagtgagcccatgttt

SEQ ID NO: 785638 - DNA, 19 bp, Mus musculus
  siRNA target sequence for 1300004K21Rik (NM_175124.3,1196-1214).
cagtgtctgcggactttta

SEQ ID NO: 785639 - DNA, 19 bp, Mus musculus
  siRNA target sequence for 1300004K21Rik (NM_175124.3,1200-1218).
gtctgcggacttttaacct

SEQ ID NO: 785640 - DNA, 19 bp, Mus musculus
  siRNA target sequence for D1Ertd578e (NM_175127.1,561-579).
gtactgagatatgtcaatt

SEQ ID NO: 785641 - DNA, 19 bp, Mus musculus
  siRNA target sequence for D1Ertd578e (NM_175127.1,641-659).
ggcgatggagtactttgat

SEQ ID NO: 785642 - DNA, 19 bp, Mus musculus
  siRNA target sequence for D1Ertd578e (NM_175127.1,793-811).
ccagacaagaggttaccaa

SEQ ID NO: 785643 - DNA, 19 bp, Mus musculus
  siRNA target sequence for D1Ertd578e (NM_175127.1,794-812).
cagacaagaggttaccaaa

SEQ ID NO: 785644 - DNA, 19 bp, Mus musculus
  siRNA target sequence for D1Ertd578e (NM_175127.1,852-870).
gtcctcaggcgtgagattt

SEQ ID NO: 785645 - DNA, 19 bp, Mus musculus
  siRNA target sequence for D1Ertd578e (NM_175127.1,854-872).
cctcaggcgtgagatttct

SEQ ID NO: 785646 - DNA, 19 bp, Mus musculus
  siRNA target sequence for D1Ertd578e (NM_175127.1,988-1006).
gcaagctccgggaagtcat

SEQ ID NO: 785647 - DNA, 19 bp, Mus musculus
  siRNA target sequence for D1Ertd578e (NM_175127.1,1084-1102).
ccatagactctcttaggaa

SEQ ID NO: 785648 - DNA, 19 bp, Mus musculus
  siRNA target sequence for D1Ertd578e (NM_175127.1,1091-1109).
ctctcttaggaaatccaaa

SEQ ID NO: 785649 - DNA, 19 bp, Mus musculus
  siRNA target sequence for 4930430F08Rik (NM_175128.1,178-196).
cgggagcatcagccattta

SEQ ID NO: 785650 - DNA, 19 bp, Mus musculus
  siRNA target sequence for 4930430F08Rik (NM_175128.1,179-197).
gggagcatcagccatttaa

SEQ ID NO: 785651 - DNA, 19 bp, Mus musculus
  siRNA target sequence for 4930430F08Rik (NM_175128.1,183-201).
gcatcagccatttaaagtt

SEQ ID NO: 785652 - DNA, 19 bp, Mus musculus
  siRNA target sequence for 4930430F08Rik (NM_175128.1,249-267).
caatgcggttgcaacagaa

SEQ ID NO: 785653 - DNA, 19 bp, Mus musculus
  siRNA target sequence for 4930430F08Rik (NM_175128.1,254-272).
cggttgcaacagaaaaagt

SEQ ID NO: 785654 - DNA, 19 bp, Mus musculus
  siRNA target sequence for 4930430F08Rik (NM_175128.1,281-299).
catgctgctatgttactaa

SEQ ID NO: 785655 - DNA, 19 bp, Mus musculus
  siRNA target sequence for 4930430F08Rik (NM_175128.1,324-342).
ggctcgactagatagaaaa

SEQ ID NO: 785656 - DNA, 19 bp, Mus musculus
  siRNA target sequence for 4930430F08Rik (NM_175128.1,328-346).
cgactagatagaaaaccta

SEQ ID NO: 785657 - DNA, 19 bp, Mus musculus
  siRNA target sequence for 4930430F08Rik (NM_175128.1,329-347).
gactagatagaaaacctaa

SEQ ID NO: 785658 - DNA, 19 bp, Mus musculus
  siRNA target sequence for 4930430F08Rik (NM_175128.1,354-372).
ggctgacaagagatttaaa

SEQ ID NO: 785659 - DNA, 19 bp, Mus musculus
  siRNA target sequence for 4930430F08Rik (NM_175128.1,355-373).
gctgacaagagatttaaaa

SEQ ID NO: 785660 - DNA, 19 bp, Mus musculus
  siRNA target sequence for 4930430F08Rik (NM_175128.1,356-374).
ctgacaagagatttaaaaa

SEQ ID NO: 785661 - DNA, 19 bp, Mus musculus
  siRNA target sequence for 4930430F08Rik (NM_175128.1,521-539).
gttgggtaccagtagagaa

SEQ ID NO: 785662 - DNA, 19 bp, Mus musculus
  siRNA target sequence for 4930430F08Rik (NM_175128.1,560-578).
ggcactcgtcggtagtgaa

SEQ ID NO: 785663 - DNA, 19 bp, Mus musculus
  siRNA target sequence for 4930430F08Rik (NM_175128.1,561-579).
gcactcgtcggtagtgaat

SEQ ID NO: 785664 - DNA, 19 bp, Mus musculus
  siRNA target sequence for 4930430F08Rik (NM_175128.1,562-580).
cactcgtcggtagtgaatt

SEQ ID NO: 785665 - DNA, 19 bp, Mus musculus
  siRNA target sequence for 4930430F08Rik (NM_175128.1,566-584).
cgtcggtagtgaattacga

SEQ ID NO: 785666 - DNA, 19 bp, Mus musculus
  siRNA target sequence for 4930430F08Rik (NM_175128.1,574-592).
gtgaattacgagtttggaa

SEQ ID NO: 785667 - DNA, 19 bp, Mus musculus
  siRNA target sequence for 4930430F08Rik (NM_175128.1,576-594).
gaattacgagtttggaatt

SEQ ID NO: 785668 - DNA, 19 bp, Mus musculus
  siRNA target sequence for 4930430F08Rik (NM_175128.1,589-607).
ggaattgccctggtactaa

SEQ ID NO: 785669 - DNA, 19 bp, Mus musculus
  siRNA target sequence for 4930430F08Rik (NM_175128.1,685-703).
ctgataggcacgagtatca

SEQ ID NO: 785670 - DNA, 19 bp, Mus musculus
  siRNA target sequence for 4930430F08Rik (NM_175128.1,687-705).
gataggcacgagtatcaat

SEQ ID NO: 785671 - DNA, 19 bp, Mus musculus
  siRNA target sequence for 4930430F08Rik (NM_175128.1,691-709).
ggcacgagtatcaatggaa

SEQ ID NO: 785672 - DNA, 19 bp, Mus musculus
  siRNA target sequence for 4930430F08Rik (NM_175128.1,729-747).
caagaaatccccgttacat

SEQ ID NO: 785673 - DNA, 19 bp, Mus musculus
  siRNA target sequence for 4930430F08Rik (NM_175128.1,830-848).
gcagagagggtcaaattga

SEQ ID NO: 785674 - DNA, 19 bp, Mus musculus
  siRNA target sequence for 4930430F08Rik (NM_175128.1,831-849).
cagagagggtcaaattgaa

SEQ ID NO: 785675 - DNA, 19 bp, Mus musculus
  siRNA target sequence for 4930430F08Rik (NM_175128.1,841-859).
caaattgaagggattgtgt

SEQ ID NO: 785676 - DNA, 19 bp, Mus musculus
  siRNA target sequence for 4930430F08Rik (NM_175128.1,866-884).
gcggtgacggctgtttaat

SEQ ID NO: 785677 - DNA, 19 bp, Mus musculus
  siRNA target sequence for 4930430F08Rik (NM_175128.1,867-885).
cggtgacggctgtttaatt

SEQ ID NO: 785678 - DNA, 19 bp, Mus musculus
  siRNA target sequence for 4930430F08Rik (NM_175128.1,895-913).
cgtcaccatcttggtttat

SEQ ID NO: 785679 - DNA, 19 bp, Mus musculus
  siRNA target sequence for 4930430F08Rik (NM_175128.1,898-916).
caccatcttggtttatgct

SEQ ID NO: 785680 - DNA, 19 bp, Mus musculus
  siRNA target sequence for 4930430F08Rik (NM_175128.1,919-937).
ccacttccagatacttaca

SEQ ID NO: 785681 - DNA, 19 bp, Mus musculus
  siRNA target sequence for 4930430F08Rik (NM_175128.1,939-957).
gaattccaaaccagttatt

SEQ ID NO: 785682 - DNA, 19 bp, Mus musculus
  siRNA target sequence for 4930430F08Rik (NM_175128.1,949-967).
ccagttattattaacatga

SEQ ID NO: 785683 - DNA, 19 bp, Mus musculus
  siRNA target sequence for 4930430F08Rik (NM_175128.1,1000-1018).
gataaccagtctttgttta

SEQ ID NO: 785684 - DNA, 19 bp, Mus musculus
  siRNA target sequence for 4930430F08Rik (NM_175128.1,1044-1062).
gaaatttgagagactcaaa

SEQ ID NO: 785685 - DNA, 19 bp, Mus musculus
  siRNA target sequence for 4930430F08Rik (NM_175128.1,1059-1077).
caaagacataatacttgat

SEQ ID NO: 785686 - DNA, 19 bp, Mus musculus
  siRNA target sequence for 1110054N06Rik (NM_175134.2,168-186).
gtcctacgtttttgtgaat

SEQ ID NO: 785687 - DNA, 19 bp, Mus musculus
  siRNA target sequence for 1110054N06Rik (NM_175134.2,171-189).
ctacgtttttgtgaatgat

SEQ ID NO: 785688 - DNA, 19 bp, Mus musculus
  siRNA target sequence for 1110054N06Rik (NM_175134.2,232-250).
ggggacttcacctattcca

SEQ ID NO: 785689 - DNA, 19 bp, Mus musculus
  siRNA target sequence for 1110054N06Rik (NM_175134.2,266-284).
gtggctttgatccaaatat

SEQ ID NO: 785690 - DNA, 19 bp, Mus musculus
  siRNA target sequence for 1110054N06Rik (NM_175134.2,347-365).
gccagctgctgcataagtt

SEQ ID NO: 785691 - DNA, 19 bp, Mus musculus
  siRNA target sequence for 1110054N06Rik (NM_175134.2,429-447).
ggacaccattcagttctta

SEQ ID NO: 785692 - DNA, 19 bp, Mus musculus
  siRNA target sequence for 1110054N06Rik (NM_175134.2,488-506).
gtgctacccctttagttct

SEQ ID NO: 785693 - DNA, 19 bp, Mus musculus
  siRNA target sequence for 1110054N06Rik (NM_175134.2,521-539).
gtgtgaacaaagatgtcat

SEQ ID NO: 785694 - DNA, 19 bp, Mus musculus
  siRNA target sequence for 1110054N06Rik (NM_175134.2,707-725).
ccacgtggcaggagtttgt

SEQ ID NO: 785695 - DNA, 19 bp, Mus musculus
  siRNA target sequence for 1110063C11Rik (NM_175136.1,320-338).
gtgtaacgggtgtttctgt

SEQ ID NO: 785696 - DNA, 19 bp, Mus musculus
  siRNA target sequence for 1110063C11Rik (NM_175136.1,373-391).
caatgccaccgatcagttt

SEQ ID NO: 785697 - DNA, 19 bp, Mus musculus
  siRNA target sequence for 1110063C11Rik (NM_175136.1,377-395).
gccaccgatcagtttccaa

SEQ ID NO: 785698 - DNA, 19 bp, Mus musculus
  siRNA target sequence for 1110063C11Rik (NM_175136.1,393-411).
caagaccttcccctcaata

SEQ ID NO: 785699 - DNA, 19 bp, Mus musculus
  siRNA target sequence for 1110063C11Rik (NM_175136.1,396-414).
gaccttcccctcaatatct

SEQ ID NO: 785700 - DNA, 19 bp, Mus musculus
  siRNA target sequence for 1110063C11Rik (NM_175136.1,544-562).
gtgatgctaagaagttaca

SEQ ID NO: 785701 - DNA, 19 bp, Mus musculus
  siRNA target sequence for 1110063C11Rik (NM_175136.1,659-677).
ggtgaagtggctagaagta

SEQ ID NO: 785702 - DNA, 19 bp, Mus musculus
  siRNA target sequence for Dnaic1 (NM_175138.2,204-222).
cctcgaaacagattcgtaa

SEQ ID NO: 785703 - DNA, 19 bp, Mus musculus
  siRNA target sequence for Dnaic1 (NM_175138.2,249-267).
ccaggagacgagatgaaga

SEQ ID NO: 785704 - DNA, 19 bp, Mus musculus
  siRNA target sequence for Dnaic1 (NM_175138.2,250-268).
caggagacgagatgaagat

SEQ ID NO: 785705 - DNA, 19 bp, Mus musculus
  siRNA target sequence for Dnaic1 (NM_175138.2,284-302).
ggagaaggaactgatgaat

SEQ ID NO: 785706 - DNA, 19 bp, Mus musculus
  siRNA target sequence for Dnaic1 (NM_175138.2,347-365).
ctgaccgatgcggagttaa

SEQ ID NO: 785707 - DNA, 19 bp, Mus musculus
  siRNA target sequence for Dnaic1 (NM_175138.2,351-369).
ccgatgcggagttaaagga

SEQ ID NO: 785708 - DNA, 19 bp, Mus musculus
  siRNA target sequence for Dnaic1 (NM_175138.2,407-425).
gcaccccagaatattgtca

SEQ ID NO: 785709 - DNA, 19 bp, Mus musculus
  siRNA target sequence for Dnaic1 (NM_175138.2,436-454).
caaagagggcacatataaa

SEQ ID NO: 785710 - DNA, 19 bp, Mus musculus
  siRNA target sequence for Dnaic1 (NM_175138.2,564-582).
caggttcacaggagtctat

SEQ ID NO: 785711 - DNA, 19 bp, Mus musculus
  siRNA target sequence for Dnaic1 (NM_175138.2,764-782).
ctcacgaaccagtttaact

SEQ ID NO: 785712 - DNA, 19 bp, Mus musculus
  siRNA target sequence for Dnaic1 (NM_175138.2,795-813).
catcccagaccttcaacaa

SEQ ID NO: 785713 - DNA, 19 bp, Mus musculus
  siRNA target sequence for Dnaic1 (NM_175138.2,848-866).
ccaccgaggacgaactttt

SEQ ID NO: 785714 - DNA, 19 bp, Mus musculus
  siRNA target sequence for Dnaic1 (NM_175138.2,955-973).
gactccagtggctaagaaa

SEQ ID NO: 785715 - DNA, 19 bp, Mus musculus
  siRNA target sequence for Dnaic1 (NM_175138.2,1009-1027).
ggagtcccagagtgatgat

SEQ ID NO: 785716 - DNA, 19 bp, Mus musculus
  siRNA target sequence for Dnaic1 (NM_175138.2,1010-1028).
gagtcccagagtgatgata

SEQ ID NO: 785717 - DNA, 19 bp, Mus musculus
  siRNA target sequence for Dnaic1 (NM_175138.2,1037-1055).
gtgacccaagctgctaaaa

SEQ ID NO: 785718 - DNA, 19 bp, Mus musculus
  siRNA target sequence for Dnaic1 (NM_175138.2,1061-1079).
gagcgaatggtcaaccaaa

SEQ ID NO: 785719 - DNA, 19 bp, Mus musculus
  siRNA target sequence for Dnaic1 (NM_175138.2,1063-1081).
gcgaatggtcaaccaaaat

SEQ ID NO: 785720 - DNA, 19 bp, Mus musculus
  siRNA target sequence for Dnaic1 (NM_175138.2,1064-1082).
cgaatggtcaaccaaaata

SEQ ID NO: 785721 - DNA, 19 bp, Mus musculus
  siRNA target sequence for Dnaic1 (NM_175138.2,1069-1087).
ggtcaaccaaaatacgtat

SEQ ID NO: 785722 - DNA, 19 bp, Mus musculus
  siRNA target sequence for Dnaic1 (NM_175138.2,1072-1090).
caaccaaaatacgtatgat

SEQ ID NO: 785723 - DNA, 19 bp, Mus musculus
  siRNA target sequence for Dnaic1 (NM_175138.2,1075-1093).
ccaaaatacgtatgatgat

SEQ ID NO: 785724 - DNA, 19 bp, Mus musculus
  siRNA target sequence for Dnaic1 (NM_175138.2,1121-1139).
gatactgctgatgaataca

SEQ ID NO: 785725 - DNA, 19 bp, Mus musculus
  siRNA target sequence for Dnaic1 (NM_175138.2,1226-1244).
ccaaagtacaaggatcttt

SEQ ID NO: 785726 - DNA, 19 bp, Mus musculus
  siRNA target sequence for Dnaic1 (NM_175138.2,1254-1272).
gacacggctcctatgactt

SEQ ID NO: 785727 - DNA, 19 bp, Mus musculus
  siRNA target sequence for Dnaic1 (NM_175138.2,1320-1338).
ctagctttcccgagtacat

SEQ ID NO: 785728 - DNA, 19 bp, Mus musculus
  siRNA target sequence for Dnaic1 (NM_175138.2,1323-1341).
gctttcccgagtacatgtt

SEQ ID NO: 785729 - DNA, 19 bp, Mus musculus
  siRNA target sequence for Dnaic1 (NM_175138.2,1399-1417).
ggtcgtgggctactatgat

SEQ ID NO: 785730 - DNA, 19 bp, Mus musculus
  siRNA target sequence for Dnaic1 (NM_175138.2,1610-1628).
ctggttcacatcgacatta

SEQ ID NO: 785731 - DNA, 19 bp, Mus musculus
  siRNA target sequence for Dnaic1 (NM_175138.2,1782-1800).
cctactccagccagttctt

SEQ ID NO: 785732 - DNA, 19 bp, Mus musculus
  siRNA target sequence for Dnaic1 (NM_175138.2,1967-1985).
gcctgggcaccgtactctt

SEQ ID NO: 785733 - DNA, 19 bp, Mus musculus
  siRNA target sequence for Dnaic1 (NM_175138.2,1978-1996).
gtactcttccactgtgttt

SEQ ID NO: 785734 - DNA, 19 bp, Mus musculus
  siRNA target sequence for Dnaic1 (NM_175138.2,2016-2034).
ggaaggcccatgtgtttga

SEQ ID NO: 785735 - DNA, 19 bp, Mus musculus
  siRNA target sequence for Dnaic1 (NM_175138.2,2033-2051).
gacttagcggtcaacaagt

SEQ ID NO: 785736 - DNA, 19 bp, Mus musculus
  siRNA target sequence for Dnaic1 (NM_175138.2,2035-2053).
cttagcggtcaacaagtat

SEQ ID NO: 785737 - DNA, 19 bp, Mus musculus
  siRNA target sequence for Dnaic1 (NM_175138.2,2275-2293).
cctcgtgagggaagtaaaa

SEQ ID NO: 785738 - DNA, 19 bp, Mus musculus
  siRNA target sequence for 1810030O07Rik (NM_175141.2,36-54).
caattgcgccgagtacaaa

SEQ ID NO: 785739 - DNA, 19 bp, Mus musculus
  siRNA target sequence for 1810030O07Rik (NM_175141.2,404-422).
gtgatgcagttgctctttt

SEQ ID NO: 785740 - DNA, 19 bp, Mus musculus
  siRNA target sequence for 1810030O07Rik (NM_175141.2,406-424).
gatgcagttgctcttttaa

SEQ ID NO: 785741 - DNA, 19 bp, Mus musculus
  siRNA target sequence for 1810030O07Rik (NM_175141.2,418-436).
cttttaagtctcatcaact

SEQ ID NO: 785742 - DNA, 19 bp, Mus musculus
  siRNA target sequence for 1810030O07Rik (NM_175141.2,530-548).
ctacctggcttcgagattt

SEQ ID NO: 785743 - DNA, 19 bp, Mus musculus
  siRNA target sequence for 1810030O07Rik (NM_175141.2,536-554).
ggcttcgagattttcagat

SEQ ID NO: 785744 - DNA, 19 bp, Mus musculus
  siRNA target sequence for 1810030O07Rik (NM_175141.2,550-568).
cagatcaagatccaaaatt

SEQ ID NO: 785745 - DNA, 19 bp, Mus musculus
  siRNA target sequence for 1810030O07Rik (NM_175141.2,562-580).
caaaattttctgaacgaat

SEQ ID NO: 785746 - DNA, 19 bp, Mus musculus
  siRNA target sequence for 1810030O07Rik (NM_175141.2,585-603).
gaatatcccagagattgta

SEQ ID NO: 785747 - DNA, 19 bp, Mus musculus
  siRNA target sequence for 1810030O07Rik (NM_175141.2,593-611).
cagagattgtagcagtata

SEQ ID NO: 785748 - DNA, 19 bp, Mus musculus
  siRNA target sequence for 1810030O07Rik (NM_175141.2,595-613).
gagattgtagcagtatatt

SEQ ID NO: 785749 - DNA, 19 bp, Mus musculus
  siRNA target sequence for 1810030O07Rik (NM_175141.2,638-656).
ctgactgggctgttcacat

SEQ ID NO: 785750 - DNA, 19 bp, Mus musculus
  siRNA target sequence for 1810030O07Rik (NM_175141.2,691-709).
gaaataggaagttacttga

SEQ ID NO: 785751 - DNA, 19 bp, Mus musculus
  siRNA target sequence for 1810030O07Rik (NM_175141.2,716-734).
gccaaatccacgaaattga

SEQ ID NO: 785752 - DNA, 19 bp, Mus musculus
  siRNA target sequence for 1810030O07Rik (NM_175141.2,724-742).
cacgaaattgaaatagaat

SEQ ID NO: 785753 - DNA, 19 bp, Mus musculus
  siRNA target sequence for 1810030O07Rik (NM_175141.2,844-862).
ggaagcaacacagatctta

SEQ ID NO: 785754 - DNA, 19 bp, Mus musculus
  siRNA target sequence for 2610028H07Rik (NM_175143.2,727-745).
gcatatcccacatcaacaa

SEQ ID NO: 785755 - DNA, 19 bp, Mus musculus
  siRNA target sequence for 2610028H07Rik (NM_175143.2,728-746).
catatcccacatcaacaaa

SEQ ID NO: 785756 - DNA, 19 bp, Mus musculus
  siRNA target sequence for 2610028H07Rik (NM_175143.2,786-804).
gccagcaaattcaaattca

SEQ ID NO: 785757 - DNA, 19 bp, Mus musculus
  siRNA target sequence for 2610028H07Rik (NM_175143.2,986-1004).
cagcaacagagttatgtgt

SEQ ID NO: 785758 - DNA, 19 bp, Mus musculus
  siRNA target sequence for 2610028H07Rik (NM_175143.2,1052-1070).
gccactgggaccataacta

SEQ ID NO: 785759 - DNA, 19 bp, Mus musculus
  siRNA target sequence for 2610028H07Rik (NM_175143.2,1090-1108).
gaccatccctgtttattct

SEQ ID NO: 785760 - DNA, 19 bp, Mus musculus
  siRNA target sequence for 2610028H07Rik (NM_175143.2,1127-1145).
cctcagcagcagagcatta

SEQ ID NO: 785761 - DNA, 19 bp, Mus musculus
  siRNA target sequence for 2610028H07Rik (NM_175143.2,1252-1270).
caccacatctgtagtgaaa

SEQ ID NO: 785762 - DNA, 19 bp, Mus musculus
  siRNA target sequence for 2610028H07Rik (NM_175143.2,1389-1407).
cggctcagactgtacatat

SEQ ID NO: 785763 - DNA, 19 bp, Mus musculus
  siRNA target sequence for 2610028H07Rik (NM_175143.2,1390-1408).
ggctcagactgtacatata

SEQ ID NO: 785764 - DNA, 19 bp, Mus musculus
  siRNA target sequence for 2610028H07Rik (NM_175143.2,1483-1501).
gctgcaggtcacttgttca

SEQ ID NO: 785765 - DNA, 19 bp, Mus musculus
  siRNA target sequence for 2610028H07Rik (NM_175143.2,1595-1613).
gggcttgaagtatggaaaa

SEQ ID NO: 785766 - DNA, 19 bp, Mus musculus
  siRNA target sequence for 2610028H07Rik (NM_175143.2,1624-1642).
gaccaagaatgctgaacta

SEQ ID NO: 785767 - DNA, 19 bp, Mus musculus
  siRNA target sequence for 2610028H07Rik (NM_175143.2,1680-1698).
ggcgacagttgctacgatt

SEQ ID NO: 785768 - DNA, 19 bp, Mus musculus
  siRNA target sequence for 2610028H07Rik (NM_175143.2,1681-1699).
gcgacagttgctacgattt

SEQ ID NO: 785769 - DNA, 19 bp, Mus musculus
  siRNA target sequence for 2610028H07Rik (NM_175143.2,1716-1734).
cctctgctgtggctgaatt

SEQ ID NO: 785770 - DNA, 19 bp, Mus musculus
  siRNA target sequence for 2610028H07Rik (NM_175143.2,1799-1817).
gatgtactctactacattt

SEQ ID NO: 785771 - DNA, 19 bp, Mus musculus
  siRNA target sequence for 2610028H07Rik (NM_175143.2,1822-1840).
gtgtatacagaagtatctt

SEQ ID NO: 785772 - DNA, 19 bp, Mus musculus
  siRNA target sequence for 2610028H07Rik (NM_175143.2,1824-1842).
gtatacagaagtatctttt

SEQ ID NO: 785773 - DNA, 19 bp, Mus musculus
  siRNA target sequence for 2610028H07Rik (NM_175143.2,1894-1912).
caccgaatggctacatgaa

SEQ ID NO: 785774 - DNA, 19 bp, Mus musculus
  siRNA target sequence for 2610028H07Rik (NM_175143.2,1935-1953).
gggtcactccacttggtaa

SEQ ID NO: 785775 - DNA, 19 bp, Mus musculus
  siRNA target sequence for 2610028H07Rik (NM_175143.2,1946-1964).
cttggtaagagtttaccta

SEQ ID NO: 785776 - DNA, 19 bp, Mus musculus
  siRNA target sequence for 1700008J07Rik (NM_175144.2,683-701).
gtgtctcctgcctcatcta

SEQ ID NO: 785777 - DNA, 19 bp, Mus musculus
  siRNA target sequence for 1700008J07Rik (NM_175144.2,728-746).
ggcatctccccccaacata

SEQ ID NO: 785778 - DNA, 19 bp, Mus musculus
  siRNA target sequence for 1700008J07Rik (NM_175144.2,729-747).
gcatctccccccaacatat

SEQ ID NO: 785779 - DNA, 19 bp, Mus musculus
  siRNA target sequence for 1700008J07Rik (NM_175144.2,730-748).
catctccccccaacatata

SEQ ID NO: 785780 - DNA, 19 bp, Mus musculus
  siRNA target sequence for 1700008J07Rik (NM_175144.2,739-757).
ccaacatatagctcaagat

SEQ ID NO: 785781 - DNA, 19 bp, Mus musculus
  siRNA target sequence for 1700008J07Rik (NM_175144.2,740-758).
caacatatagctcaagatt

SEQ ID NO: 785782 - DNA, 19 bp, Mus musculus
  siRNA target sequence for 1700008J07Rik (NM_175144.2,954-972).
cattgaaaaggctacctaa

SEQ ID NO: 785783 - DNA, 19 bp, Mus musculus
  siRNA target sequence for 2310003P10Rik (NM_175145.2,391-409).
ggacgtgctgggctatgta

SEQ ID NO: 785784 - DNA, 19 bp, Mus musculus
  siRNA target sequence for 2310003P10Rik (NM_175145.2,392-410).
gacgtgctgggctatgtaa

SEQ ID NO: 785785 - DNA, 19 bp, Mus musculus
  siRNA target sequence for 2310003P10Rik (NM_175145.2,412-430).
cccggatctgctaaaagat

SEQ ID NO: 785786 - DNA, 19 bp, Mus musculus
  siRNA target sequence for 2310003P10Rik (NM_175145.2,413-431).
ccggatctgctaaaagatt

SEQ ID NO: 785787 - DNA, 19 bp, Mus musculus
  siRNA target sequence for 2310003P10Rik (NM_175145.2,416-434).
gatctgctaaaagatttct

SEQ ID NO: 785788 - DNA, 19 bp, Mus musculus
  siRNA target sequence for 2310003P10Rik (NM_175145.2,676-694).
ccacggctcccaagtctat

SEQ ID NO: 785789 - DNA, 19 bp, Mus musculus
  siRNA target sequence for 2310003P10Rik (NM_175145.2,800-818).
caagcactggagctactat

SEQ ID NO: 785790 - DNA, 19 bp, Mus musculus
  siRNA target sequence for 2310003P10Rik (NM_175145.2,838-856).
cccctacccagcagagtat

SEQ ID NO: 785791 - DNA, 19 bp, Mus musculus
  siRNA target sequence for 2310007F12Rik (NM_175146.2,153-171).
gtgcagtggaggattactt

SEQ ID NO: 785792 - DNA, 19 bp, Mus musculus
  siRNA target sequence for 2310007F12Rik (NM_175146.2,194-212).
ctggaagagatagaagatt

SEQ ID NO: 785793 - DNA, 19 bp, Mus musculus
  siRNA target sequence for 2310007F12Rik (NM_175146.2,223-241).
gctgatgaccactgagttt

SEQ ID NO: 785794 - DNA, 19 bp, Mus musculus
  siRNA target sequence for 2310007F12Rik (NM_175146.2,229-247).
gaccactgagtttgataca

SEQ ID NO: 785795 - DNA, 19 bp, Mus musculus
  siRNA target sequence for 2310007F12Rik (NM_175146.2,232-250).
cactgagtttgatacagtt

SEQ ID NO: 785796 - DNA, 19 bp, Mus musculus
  siRNA target sequence for 2310007F12Rik (NM_175146.2,379-397).
ggctaccccacttatgaca

SEQ ID NO: 785797 - DNA, 19 bp, Mus musculus
  siRNA target sequence for 2310007F12Rik (NM_175146.2,428-446).
gtggacagcgtggaagaaa

SEQ ID NO: 785798 - DNA, 19 bp, Mus musculus
  siRNA target sequence for 2310007F12Rik (NM_175146.2,448-466).
ggaggtgacagctactaat

SEQ ID NO: 785799 - DNA, 19 bp, Mus musculus
  siRNA target sequence for 2310007F12Rik (NM_175146.2,515-533).
ccagacacccagactatta

SEQ ID NO: 785800 - DNA, 19 bp, Mus musculus
  siRNA target sequence for Etd (NM_175147.2,240-258).
ggtcccaccgaaaaagtca

SEQ ID NO: 785801 - DNA, 19 bp, Mus musculus
  siRNA target sequence for Etd (NM_175147.2,243-261).
cccaccgaaaaagtcaaaa

SEQ ID NO: 785802 - DNA, 19 bp, Mus musculus
  siRNA target sequence for Etd (NM_175147.2,247-265).
ccgaaaaagtcaaaaagca

SEQ ID NO: 785803 - DNA, 19 bp, Mus musculus
  siRNA target sequence for Etd (NM_175147.2,272-290).
ctgccaatattctgatcta

SEQ ID NO: 785804 - DNA, 19 bp, Mus musculus
  siRNA target sequence for Etd (NM_175147.2,309-327).
ggggaggcccagaaatgat

SEQ ID NO: 785805 - DNA, 19 bp, Mus musculus
  siRNA target sequence for Etd (NM_175147.2,310-328).
gggaggcccagaaatgata

SEQ ID NO: 785806 - DNA, 19 bp, Mus musculus
  siRNA target sequence for Etd (NM_175147.2,314-332).
ggcccagaaatgatatgga

SEQ ID NO: 785807 - DNA, 19 bp, Mus musculus
  siRNA target sequence for Etd (NM_175147.2,340-358).
gaatgggtttggacactaa

SEQ ID NO: 785808 - DNA, 19 bp, Mus musculus
  siRNA target sequence for 2300002M23Rik (NM_175148.2,203-221).
ccttcaccagcctccttaa

SEQ ID NO: 785809 - DNA, 19 bp, Mus musculus
  siRNA target sequence for 2300002M23Rik (NM_175148.2,243-261).
gccagaccctgtgaataat

SEQ ID NO: 785810 - DNA, 19 bp, Mus musculus
  siRNA target sequence for 2300002M23Rik (NM_175148.2,251-269).
ctgtgaataatgagttact

SEQ ID NO: 785811 - DNA, 19 bp, Mus musculus
  siRNA target sequence for 2300002M23Rik (NM_175148.2,448-466).
gaagccctgccataccttt

SEQ ID NO: 785812 - DNA, 19 bp, Mus musculus
  siRNA target sequence for 2300002M23Rik (NM_175148.2,723-741).
gccatatccttctggaata

SEQ ID NO: 785813 - DNA, 19 bp, Mus musculus
  siRNA target sequence for 2300002M23Rik (NM_175148.2,743-761).
ggggtagcaatggtttagt

SEQ ID NO: 785814 - DNA, 19 bp, Mus musculus
  siRNA target sequence for 2300002M23Rik (NM_175148.2,745-763).
ggtagcaatggtttagtat

SEQ ID NO: 785815 - DNA, 19 bp, Mus musculus
  siRNA target sequence for 2300002M23Rik (NM_175148.2,790-808).
ccttacccagtaagaatct

SEQ ID NO: 785816 - DNA, 19 bp, Mus musculus
  siRNA target sequence for 2300002M23Rik (NM_175148.2,820-838).
ggttggtacccattaagga

SEQ ID NO: 785817 - DNA, 19 bp, Mus musculus
  siRNA target sequence for 2300002M23Rik (NM_175148.2,821-839).
gttggtacccattaaggat

SEQ ID NO: 785818 - DNA, 19 bp, Mus musculus
  siRNA target sequence for 2300002M23Rik (NM_175148.2,837-855).
gatcttggggggtaatggt

SEQ ID NO: 785819 - DNA, 19 bp, Mus musculus
  siRNA target sequence for 2300002M23Rik (NM_175148.2,1014-1032).
cagccggaggcccaattgt

SEQ ID NO: 785820 - DNA, 19 bp, Mus musculus
  siRNA target sequence for 2300002M23Rik (NM_175148.2,1020-1038).
gaggcccaattgtcgatat

SEQ ID NO: 785821 - DNA, 19 bp, Mus musculus
  siRNA target sequence for 2300002M23Rik (NM_175148.2,1023-1041).
gcccaattgtcgatatcca

SEQ ID NO: 785822 - DNA, 19 bp, Mus musculus
  siRNA target sequence for 2300002M23Rik (NM_175148.2,1043-1061).
caggtagctggggaactaa

SEQ ID NO: 785823 - DNA, 19 bp, Mus musculus
  siRNA target sequence for 2310022B05Rik (NM_175149.2,90-108).
cgcttcacctacttctcat

SEQ ID NO: 785824 - DNA, 19 bp, Mus musculus
  siRNA target sequence for 2310022B05Rik (NM_175149.2,195-213).
gcgcagcaggacgaaatca

SEQ ID NO: 785825 - DNA, 19 bp, Mus musculus
  siRNA target sequence for 2310022B05Rik (NM_175149.2,196-214).
cgcagcaggacgaaatcat

SEQ ID NO: 785826 - DNA, 19 bp, Mus musculus
  siRNA target sequence for 2310022B05Rik (NM_175149.2,332-350).
cggcgacgaggacataact

SEQ ID NO: 785827 - DNA, 19 bp, Mus musculus
  siRNA target sequence for 2310022B05Rik (NM_175149.2,388-406).
cgaggagtcagatggaatt

SEQ ID NO: 785828 - DNA, 19 bp, Mus musculus
  siRNA target sequence for 2310022B05Rik (NM_175149.2,488-506).
gggcacacagggttccaaa

SEQ ID NO: 785829 - DNA, 19 bp, Mus musculus
  siRNA target sequence for 2310022B05Rik (NM_175149.2,866-884).
ccagcgggacgaagatgat

SEQ ID NO: 785830 - DNA, 19 bp, Mus musculus
  siRNA target sequence for 2310022B05Rik (NM_175149.2,914-932).
gcagatcagctccagtaat

SEQ ID NO: 785831 - DNA, 19 bp, Mus musculus
  siRNA target sequence for 2310079P03Rik (NM_175151.2,40-58).
cttcaagttcgtggatatt

SEQ ID NO: 785832 - DNA, 19 bp, Mus musculus
  siRNA target sequence for 2310079P03Rik (NM_175151.2,77-95).
cctatgttcagaggaattt

SEQ ID NO: 785833 - DNA, 19 bp, Mus musculus
  siRNA target sequence for 2310079P03Rik (NM_175151.2,103-121).
ggtgcagaagcatcaagat

SEQ ID NO: 785834 - DNA, 19 bp, Mus musculus
  siRNA target sequence for 2310079P03Rik (NM_175151.2,147-165).
ctatccagattggtgttaa

SEQ ID NO: 785835 - DNA, 19 bp, Mus musculus
  siRNA target sequence for 2310079P03Rik (NM_175151.2,154-172).
gattggtgttaaaaagttt

SEQ ID NO: 785836 - DNA, 19 bp, Mus musculus
  siRNA target sequence for 2310079P03Rik (NM_175151.2,158-176).
ggtgttaaaaagtttatga

SEQ ID NO: 785837 - DNA, 19 bp, Mus musculus
  siRNA target sequence for 2310079P03Rik (NM_175151.2,159-177).
gtgttaaaaagtttatgat

SEQ ID NO: 785838 - DNA, 19 bp, Mus musculus
  siRNA target sequence for 2310079P03Rik (NM_175151.2,186-204).
gaagtctccaagacagtaa

SEQ ID NO: 785839 - DNA, 19 bp, Mus musculus
  siRNA target sequence for 2310079P03Rik (NM_175151.2,222-240).
cacaaacaaatgacatgtt

SEQ ID NO: 785840 - DNA, 19 bp, Mus musculus
  siRNA target sequence for 2310079P03Rik (NM_175151.2,264-282).
ccacgagatgtgatgagtt

SEQ ID NO: 785841 - DNA, 19 bp, Mus musculus
  siRNA target sequence for 2310079P03Rik (NM_175151.2,267-285).
cgagatgtgatgagtttga

SEQ ID NO: 785842 - DNA, 19 bp, Mus musculus
  siRNA target sequence for 2310079P03Rik (NM_175151.2,392-410).
cagttttgtcccaaagata

SEQ ID NO: 785843 - DNA, 19 bp, Mus musculus
  siRNA target sequence for 2310079P03Rik (NM_175151.2,407-425).
gatactcaactcaaatatt

SEQ ID NO: 785844 - DNA, 19 bp, Mus musculus
  siRNA target sequence for 2310079P03Rik (NM_175151.2,411-429).
ctcaactcaaatattttga

SEQ ID NO: 785845 - DNA, 19 bp, Mus musculus
  siRNA target sequence for 2310079P03Rik (NM_175151.2,476-494).
cattgtcgcaattcacata

SEQ ID NO: 785846 - DNA, 19 bp, Mus musculus
  siRNA target sequence for 2310079P03Rik (NM_175151.2,480-498).
gtcgcaattcacatactga

SEQ ID NO: 785847 - DNA, 19 bp, Mus musculus
  siRNA target sequence for 2310079P03Rik (NM_175151.2,495-513).
ctgagtttttagatattat

SEQ ID NO: 785848 - DNA, 19 bp, Mus musculus
  siRNA target sequence for 2310079P03Rik (NM_175151.2,540-558).
gtggagtggtccattcgtt

SEQ ID NO: 785849 - DNA, 19 bp, Mus musculus
  siRNA target sequence for 2310079P03Rik (NM_175151.2,669-687).
ctagtgaaaaactaatgat

SEQ ID NO: 785850 - DNA, 19 bp, Mus musculus
  siRNA target sequence for 2310079P03Rik (NM_175151.2,672-690).
gtgaaaaactaatgattga

SEQ ID NO: 785851 - DNA, 19 bp, Mus musculus
  siRNA target sequence for 2310079P03Rik (NM_175151.2,720-738).
gtacacatgctggatcaaa

SEQ ID NO: 785852 - DNA, 19 bp, Mus musculus
  siRNA target sequence for 2310079P03Rik (NM_175151.2,728-746).
gctggatcaaaatacataa

SEQ ID NO: 785853 - DNA, 19 bp, Mus musculus
  siRNA target sequence for 2310079P03Rik (NM_175151.2,731-749).
ggatcaaaatacataaaca

SEQ ID NO: 785854 - DNA, 19 bp, Mus musculus
  siRNA target sequence for 2310079P03Rik (NM_175151.2,781-799).
cgggcactgcttaaaagat

SEQ ID NO: 785855 - DNA, 19 bp, Mus musculus
  siRNA target sequence for 2310079P03Rik (NM_175151.2,784-802).
gcactgcttaaaagataga

SEQ ID NO: 785856 - DNA, 19 bp, Mus musculus
  siRNA target sequence for 2010321M09Rik (NM_175153.2,867-885).
ctgatggtcccctttacga

SEQ ID NO: 785857 - DNA, 19 bp, Mus musculus
  siRNA target sequence for 2010321M09Rik (NM_175153.2,1195-1213).
gccttgaacgactcataga

SEQ ID NO: 785858 - DNA, 19 bp, Mus musculus
  siRNA target sequence for 2010321M09Rik (NM_175153.2,1232-1250).
gcaaatttttactattgat

SEQ ID NO: 785859 - DNA, 19 bp, Mus musculus
  siRNA target sequence for 2010321M09Rik (NM_175153.2,1861-1879).
ccaaaaacaaacgaagtta

SEQ ID NO: 785860 - DNA, 19 bp, Mus musculus
  siRNA target sequence for 2010321M09Rik (NM_175153.2,1862-1880).
caaaaacaaacgaagttat

SEQ ID NO: 785861 - DNA, 19 bp, Mus musculus
  siRNA target sequence for 2010321M09Rik (NM_175153.2,1934-1952).
gaagatcttaagaaatgca

SEQ ID NO: 785862 - DNA, 19 bp, Mus musculus
  siRNA target sequence for 2500002E12Rik (NM_175155.3,112-130).
ggtgtctccgagtcaatct

SEQ ID NO: 785863 - DNA, 19 bp, Mus musculus
  siRNA target sequence for 2500002E12Rik (NM_175155.3,393-411).
gtaccctctccataaatca

SEQ ID NO: 785864 - DNA, 19 bp, Mus musculus
  siRNA target sequence for 2500002E12Rik (NM_175155.3,538-556).
gtagccagcgagattacga

SEQ ID NO: 785865 - DNA, 19 bp, Mus musculus
  siRNA target sequence for 2500002E12Rik (NM_175155.3,625-643).
ctcgccaggctgaaggaat

SEQ ID NO: 785866 - DNA, 19 bp, Mus musculus
  siRNA target sequence for 2500002E12Rik (NM_175155.3,629-647).
ccaggctgaaggaatacga

SEQ ID NO: 785867 - DNA, 19 bp, Mus musculus
  siRNA target sequence for 2500002E12Rik (NM_175155.3,699-717).
ctcctacccgacattggat

SEQ ID NO: 785868 - DNA, 19 bp, Mus musculus
  siRNA target sequence for 2500002E12Rik (NM_175155.3,761-779).
cagaggactcggtgaagtt

SEQ ID NO: 785869 - DNA, 19 bp, Mus musculus
  siRNA target sequence for 2500002E12Rik (NM_175155.3,763-781).
gaggactcggtgaagttta

SEQ ID NO: 785870 - DNA, 19 bp, Mus musculus
  siRNA target sequence for 2500002E12Rik (NM_175155.3,785-803).
ggttgcacaagctggtaaa

SEQ ID NO: 785871 - DNA, 19 bp, Mus musculus
  siRNA target sequence for 2500002E12Rik (NM_175155.3,789-807).
gcacaagctggtaaactct

SEQ ID NO: 785872 - DNA, 19 bp, Mus musculus
  siRNA target sequence for 2500002E12Rik (NM_175155.3,790-808).
cacaagctggtaaactcta

SEQ ID NO: 785873 - DNA, 19 bp, Mus musculus
  siRNA target sequence for 2500002E12Rik (NM_175155.3,806-824).
ctactcgaagagtcagaaa

SEQ ID NO: 785874 - DNA, 19 bp, Mus musculus
  siRNA target sequence for 2500002E12Rik (NM_175155.3,876-894).
ggaacatgtatttgagaat

SEQ ID NO: 785875 - DNA, 19 bp, Mus musculus
  siRNA target sequence for 2500002E12Rik (NM_175155.3,1045-1063).
ggccggaagttggtcaaaa

SEQ ID NO: 785876 - DNA, 19 bp, Mus musculus
  siRNA target sequence for 2500002E12Rik (NM_175155.3,1048-1066).
cggaagttggtcaaaacct

SEQ ID NO: 785877 - DNA, 19 bp, Mus musculus
  siRNA target sequence for 2500002E12Rik (NM_175155.3,1258-1276).
ctgcatgttggcagtaata

SEQ ID NO: 785878 - DNA, 19 bp, Mus musculus
  siRNA target sequence for 2500002E12Rik (NM_175155.3,1280-1298).
ctgaccctgcgggtaaaga

SEQ ID NO: 785879 - DNA, 19 bp, Mus musculus
  siRNA target sequence for 2500002E12Rik (NM_175155.3,1289-1307).
cgggtaaagagggagattt

SEQ ID NO: 785880 - DNA, 19 bp, Mus musculus
  siRNA target sequence for 2500002E12Rik (NM_175155.3,1299-1317).
gggagattttgtgtacaaa

SEQ ID NO: 785881 - DNA, 19 bp, Mus musculus
  siRNA target sequence for 2500002E12Rik (NM_175155.3,1744-1762).
ggagatatcattgacataa

SEQ ID NO: 785882 - DNA, 19 bp, Mus musculus
  siRNA target sequence for 2500002E12Rik (NM_175155.3,1752-1770).
cattgacataattagcaaa

SEQ ID NO: 785883 - DNA, 19 bp, Mus musculus
  siRNA target sequence for 2500002E12Rik (NM_175155.3,1791-1809).
gggcctgctgaacaacaaa

SEQ ID NO: 785884 - DNA, 19 bp, Mus musculus
  siRNA target sequence for 2500002E12Rik (NM_175155.3,1810-1828).
gtcggcacgttcaagttca

SEQ ID NO: 785885 - DNA, 19 bp, Mus musculus
  siRNA target sequence for 2500002E12Rik (NM_175155.3,1814-1832).
gcacgttcaagttcatcta

SEQ ID NO: 785886 - DNA, 19 bp, Mus musculus
  siRNA target sequence for 2500002E12Rik (NM_175155.3,1830-1848).
ctacgtggatgtgctaaat

SEQ ID NO: 785887 - DNA, 19 bp, Mus musculus
  siRNA target sequence for 2500002E12Rik (NM_175155.3,1935-1953).
ccggatcaacctgaaagaa

SEQ ID NO: 785888 - DNA, 19 bp, Mus musculus
  siRNA target sequence for 2500002E12Rik (NM_175155.3,1968-1986).
cctgttcaatggctatgaa

SEQ ID NO: 785889 - DNA, 19 bp, Mus musculus
  siRNA target sequence for 2500002E12Rik (NM_175155.3,2176-2194).
gactccggatgctacgaaa

SEQ ID NO: 785890 - DNA, 19 bp, Mus musculus
  siRNA target sequence for 2500002E12Rik (NM_175155.3,2195-2213).
gcagcgagaacttggaaaa

SEQ ID NO: 785891 - DNA, 19 bp, Mus musculus
  siRNA target sequence for 2500002E12Rik (NM_175155.3,2205-2223).
cttggaaaacgccaaaact

SEQ ID NO: 785892 - DNA, 19 bp, Mus musculus
  siRNA target sequence for 2500002E12Rik (NM_175155.3,2253-2271).
gtccacggagtccaactta

SEQ ID NO: 785893 - DNA, 19 bp, Mus musculus
  siRNA target sequence for 2500002E12Rik (NM_175155.3,2255-2273).
ccacggagtccaacttaaa

SEQ ID NO: 785894 - DNA, 19 bp, Mus musculus
  siRNA target sequence for 2500002E12Rik (NM_175155.3,2404-2422).
gtgccctctgtgactgatt

SEQ ID NO: 785895 - DNA, 19 bp, Mus musculus
  siRNA target sequence for 2500002E12Rik (NM_175155.3,2407-2425).
ccctctgtgactgatttga

SEQ ID NO: 785896 - DNA, 19 bp, Mus musculus
  siRNA target sequence for 2500002E12Rik (NM_175155.3,2409-2427).
ctctgtgactgatttgagt

SEQ ID NO: 785897 - DNA, 19 bp, Mus musculus
  siRNA target sequence for 2500002E12Rik (NM_175155.3,2682-2700).
gacccaaagcaagagattt

SEQ ID NO: 785898 - DNA, 19 bp, Mus musculus
  siRNA target sequence for 2500002E12Rik (NM_175155.3,2711-2729).
cgaaaacaatggctaagaa

SEQ ID NO: 785899 - DNA, 19 bp, Mus musculus
  siRNA target sequence for 2500002E12Rik (NM_175155.3,2799-2817).
ggcccagccgcctgttaaa

SEQ ID NO: 785900 - DNA, 19 bp, Mus musculus
  siRNA target sequence for 2500002E12Rik (NM_175155.3,2812-2830).
gttaaacccggcttaacaa

SEQ ID NO: 785901 - DNA, 19 bp, Mus musculus
  siRNA target sequence for 2500002E12Rik (NM_175155.3,3279-3297).
gcaggcggagggcattgat

SEQ ID NO: 785902 - DNA, 19 bp, Mus musculus
  siRNA target sequence for 2500002E12Rik (NM_175155.3,3304-3322).
gaggagccctactctgata

SEQ ID NO: 785903 - DNA, 19 bp, Mus musculus
  siRNA target sequence for 2500002E12Rik (NM_175155.3,3309-3327).
gccctactctgataagcat

SEQ ID NO: 785904 - DNA, 19 bp, Mus musculus
  siRNA target sequence for 2500002E12Rik (NM_175155.3,3466-3484).
ggtgggctgacggaaatct

SEQ ID NO: 785905 - DNA, 19 bp, Mus musculus
  siRNA target sequence for 2500002E12Rik (NM_175155.3,3646-3664).
gaggagagacacataagga

SEQ ID NO: 785906 - DNA, 19 bp, Mus musculus
  siRNA target sequence for 2810407A14Rik (NM_175156.2,1190-1208).
gaggcaggcatttcataga

SEQ ID NO: 785907 - DNA, 19 bp, Mus musculus
  siRNA target sequence for 2810407A14Rik (NM_175156.2,1326-1344).
ggaaggggaggattgatca

SEQ ID NO: 785908 - DNA, 19 bp, Mus musculus
  siRNA target sequence for 2810407A14Rik (NM_175156.2,1408-1426).
gtacgaaggaaaatttaca

SEQ ID NO: 785909 - DNA, 19 bp, Mus musculus
  siRNA target sequence for 2810407A14Rik (NM_175156.2,1471-1489).
gacggcccagggaggattt

SEQ ID NO: 785910 - DNA, 19 bp, Mus musculus
  siRNA target sequence for 2810407A14Rik (NM_175156.2,1473-1491).
cggcccagggaggatttat

SEQ ID NO: 785911 - DNA, 19 bp, Mus musculus
  siRNA target sequence for 2810407A14Rik (NM_175156.2,1474-1492).
ggcccagggaggatttatt

SEQ ID NO: 785912 - DNA, 19 bp, Mus musculus
  siRNA target sequence for 2810407A14Rik (NM_175156.2,1475-1493).
gcccagggaggatttattt

SEQ ID NO: 785913 - DNA, 19 bp, Mus musculus
  siRNA target sequence for 2610204G22Rik (NM_175157.2,456-474).
gccaagcgtgcataagaat

SEQ ID NO: 785914 - DNA, 19 bp, Mus musculus
  siRNA target sequence for 2610204G22Rik (NM_175157.2,457-475).
ccaagcgtgcataagaata

SEQ ID NO: 785915 - DNA, 19 bp, Mus musculus
  siRNA target sequence for 2610204G22Rik (NM_175157.2,458-476).
caagcgtgcataagaataa

SEQ ID NO: 785916 - DNA, 19 bp, Mus musculus
  siRNA target sequence for 2610204G22Rik (NM_175157.2,524-542).
gcaccattctgctacgatt

SEQ ID NO: 785917 - DNA, 19 bp, Mus musculus
  siRNA target sequence for 2610204G22Rik (NM_175157.2,564-582).
cgatcctctttggtgtttt

SEQ ID NO: 785918 - DNA, 19 bp, Mus musculus
  siRNA target sequence for 2610204G22Rik (NM_175157.2,609-627).
ctgctgctttgcagtacaa

SEQ ID NO: 785919 - DNA, 19 bp, Mus musculus
  siRNA target sequence for 2610204G22Rik (NM_175157.2,658-676).
gcagagggtacattacact

SEQ ID NO: 785920 - DNA, 19 bp, Mus musculus
  siRNA target sequence for 2610204G22Rik (NM_175157.2,673-691).
cactcaggagctacttaga

SEQ ID NO: 785921 - DNA, 19 bp, Mus musculus
  siRNA target sequence for Zdhhc1 (NM_175160.2,524-542).
ccagcgctctcgaaggaat

SEQ ID NO: 785922 - DNA, 19 bp, Mus musculus
  siRNA target sequence for Zdhhc1 (NM_175160.2,528-546).
cgctctcgaaggaatggat

SEQ ID NO: 785923 - DNA, 19 bp, Mus musculus
  siRNA target sequence for Zdhhc1 (NM_175160.2,790-808).
gccagcatgcgcatgtcat

SEQ ID NO: 785924 - DNA, 19 bp, Mus musculus
  siRNA target sequence for Zdhhc1 (NM_175160.2,791-809).
ccagcatgcgcatgtcatt

SEQ ID NO: 785925 - DNA, 19 bp, Mus musculus
  siRNA target sequence for Zdhhc1 (NM_175160.2,813-831).
gacctgcactgcaacctat

SEQ ID NO: 785926 - DNA, 19 bp, Mus musculus
  siRNA target sequence for Zdhhc1 (NM_175160.2,842-860).
cgtgagtgcgcgatccaaa

SEQ ID NO: 785927 - DNA, 19 bp, Mus musculus
  siRNA target sequence for Zdhhc1 (NM_175160.2,926-944).
cgtgggcgagaggaactat

SEQ ID NO: 785928 - DNA, 19 bp, Mus musculus
  siRNA target sequence for Zdhhc1 (NM_175160.2,1087-1105).
cggatgtgtggtttgtgtt

SEQ ID NO: 785929 - DNA, 19 bp, Mus musculus
  siRNA target sequence for Zdhhc1 (NM_175160.2,1206-1224).
ctgctctgcttccacattt

SEQ ID NO: 785930 - DNA, 19 bp, Mus musculus
  siRNA target sequence for Zdhhc1 (NM_175160.2,1344-1362).
gagatggagttctacatga

SEQ ID NO: 785931 - DNA, 19 bp, Mus musculus
  siRNA target sequence for Zdhhc1 (NM_175160.2,1400-1418).
ggctaggacagcagcatta

SEQ ID NO: 785932 - DNA, 19 bp, Mus musculus
  siRNA target sequence for Zdhhc1 (NM_175160.2,1401-1419).
gctaggacagcagcattaa

SEQ ID NO: 785933 - DNA, 19 bp, Mus musculus
  siRNA target sequence for Zdhhc1 (NM_175160.2,1402-1420).
ctaggacagcagcattaaa

SEQ ID NO: 785934 - DNA, 19 bp, Mus musculus
  siRNA target sequence for Zdhhc1 (NM_175160.2,1413-1431).
gcattaaatgccaatcctt

SEQ ID NO: 785935 - DNA, 19 bp, Mus musculus
  siRNA target sequence for Zdhhc1 (NM_175160.2,1424-1442).
caatccttcccagtttctt

SEQ ID NO: 785936 - DNA, 19 bp, Mus musculus
  siRNA target sequence for Zdhhc1 (NM_175160.2,1526-1544).
gaggaagcggcgagtgtat

SEQ ID NO: 785937 - DNA, 19 bp, Mus musculus
  siRNA target sequence for Zdhhc1 (NM_175160.2,1529-1547).
gaagcggcgagtgtataga

SEQ ID NO: 785938 - DNA, 19 bp, Mus musculus
  siRNA target sequence for Zdhhc1 (NM_175160.2,1702-1720).
ctgagtccatggaagagat

SEQ ID NO: 785939 - DNA, 19 bp, Mus musculus
  siRNA target sequence for Zdhhc1 (NM_175160.2,1807-1825).
gttcgcctgctgtttttgt

SEQ ID NO: 785940 - DNA, 19 bp, Mus musculus
  siRNA target sequence for 4931422A03Rik (NM_175161.2,637-655).
gtcacaggtcagtcactta

SEQ ID NO: 785941 - DNA, 19 bp, Mus musculus
  siRNA target sequence for 4931422A03Rik (NM_175161.2,702-720).
cggatggcaagctgcaaaa

SEQ ID NO: 785942 - DNA, 19 bp, Mus musculus
  siRNA target sequence for 4931422A03Rik (NM_175161.2,748-766).
cgatgtgtctggaattcaa

SEQ ID NO: 785943 - DNA, 19 bp, Mus musculus
  siRNA target sequence for 4931422A03Rik (NM_175161.2,749-767).
gatgtgtctggaattcaaa

SEQ ID NO: 785944 - DNA, 19 bp, Mus musculus
  siRNA target sequence for 4931422A03Rik (NM_175161.2,904-922).
ctgcgattgcccttactca

SEQ ID NO: 785945 - DNA, 19 bp, Mus musculus
  siRNA target sequence for 4931422A03Rik (NM_175161.2,914-932).
ccttactcaagggcattaa

SEQ ID NO: 785946 - DNA, 19 bp, Mus musculus
  siRNA target sequence for 4933409N07Rik (NM_175162.2,161-179).
catcagtcagtctcagttt

SEQ ID NO: 785947 - DNA, 19 bp, Mus musculus
  siRNA target sequence for 4933409N07Rik (NM_175162.2,183-201).
ccactcggggaaatccttt

SEQ ID NO: 785948 - DNA, 19 bp, Mus musculus
  siRNA target sequence for 4933409N07Rik (NM_175162.2,207-225).
gccatctctgcaatgaact

SEQ ID NO: 785949 - DNA, 19 bp, Mus musculus
  siRNA target sequence for 4933409N07Rik (NM_175162.2,312-330).
ctacggcataccctaaaca

SEQ ID NO: 785950 - DNA, 19 bp, Mus musculus
  siRNA target sequence for 4933409N07Rik (NM_175162.2,336-354).
gtacgggagaggaaaatct

SEQ ID NO: 785951 - DNA, 19 bp, Mus musculus
  siRNA target sequence for 4933409N07Rik (NM_175162.2,358-376).
cgactccggatggctattt

SEQ ID NO: 785952 - DNA, 19 bp, Mus musculus
  siRNA target sequence for 4933409N07Rik (NM_175162.2,364-382).
cggatggctatttcattgt

SEQ ID NO: 785953 - DNA, 19 bp, Mus musculus
  siRNA target sequence for 4933409N07Rik (NM_175162.2,366-384).
gatggctatttcattgtga

SEQ ID NO: 785954 - DNA, 19 bp, Mus musculus
  siRNA target sequence for 4933409N07Rik (NM_175162.2,409-427).
cctccctcataagaactaa

SEQ ID NO: 785955 - DNA, 19 bp, Mus musculus
  siRNA target sequence for 4933409N07Rik (NM_175162.2,482-500).
gccacaaccaggaaccata

SEQ ID NO: 785956 - DNA, 19 bp, Mus musculus
  siRNA target sequence for 4933409N07Rik (NM_175162.2,521-539).
cgtcagggaaaggacatta

SEQ ID NO: 785957 - DNA, 19 bp, Mus musculus
  siRNA target sequence for 4933409N07Rik (NM_175162.2,670-688).
cgcccactgaaaaaagcaa

SEQ ID NO: 785958 - DNA, 19 bp, Mus musculus
  siRNA target sequence for 4933409N07Rik (NM_175162.2,671-689).
gcccactgaaaaaagcaaa

SEQ ID NO: 785959 - DNA, 19 bp, Mus musculus
  siRNA target sequence for 4933409N07Rik (NM_175162.2,685-703).
gcaaaagcactataaattt

SEQ ID NO: 785960 - DNA, 19 bp, Mus musculus
  siRNA target sequence for 4933409N07Rik (NM_175162.2,717-735).
gaaactctctcgaaaccta

SEQ ID NO: 785961 - DNA, 19 bp, Mus musculus
  siRNA target sequence for 4933409N07Rik (NM_175162.2,741-759).
ggtgaaaagcagtccaaaa

SEQ ID NO: 785962 - DNA, 19 bp, Mus musculus
  siRNA target sequence for 4933409N07Rik (NM_175162.2,773-791).
gttattccggctgagtttt

SEQ ID NO: 785963 - DNA, 19 bp, Mus musculus
  siRNA target sequence for 4933409N07Rik (NM_175162.2,779-797).
ccggctgagttttaagaaa

SEQ ID NO: 785964 - DNA, 19 bp, Mus musculus
  siRNA target sequence for 4933409N07Rik (NM_175162.2,925-943).
cagacttgacggtggaaaa

SEQ ID NO: 785965 - DNA, 19 bp, Mus musculus
  siRNA target sequence for 4933409N07Rik (NM_175162.2,1141-1159).
ccggtgagagggagtatga

SEQ ID NO: 785966 - DNA, 19 bp, Mus musculus
  siRNA target sequence for 4933409N07Rik (NM_175162.2,1142-1160).
cggtgagagggagtatgaa

SEQ ID NO: 785967 - DNA, 19 bp, Mus musculus
  siRNA target sequence for 4933409N07Rik (NM_175162.2,1195-1213).
gctgcttcatcattgaaca

SEQ ID NO: 785968 - DNA, 19 bp, Mus musculus
  siRNA target sequence for 4933409N07Rik (NM_175162.2,1198-1216).
gcttcatcattgaacacaa

SEQ ID NO: 785969 - DNA, 19 bp, Mus musculus
  siRNA target sequence for 4933409N07Rik (NM_175162.2,1199-1217).
cttcatcattgaacacaaa

SEQ ID NO: 785970 - DNA, 19 bp, Mus musculus
  siRNA target sequence for 4933409N07Rik (NM_175162.2,1221-1239).
gacaacttcatcatgcata

SEQ ID NO: 785971 - DNA, 19 bp, Mus musculus
  siRNA target sequence for 4933409N07Rik (NM_175162.2,1395-1413).
cggagatccaggaatgaga

SEQ ID NO: 785972 - DNA, 19 bp, Mus musculus
  siRNA target sequence for 4933409N07Rik (NM_175162.2,1433-1451).
gagatccaggtctatggat

SEQ ID NO: 785973 - DNA, 19 bp, Mus musculus
  siRNA target sequence for 4933409N07Rik (NM_175162.2,1435-1453).
gatccaggtctatggataa

SEQ ID NO: 785974 - DNA, 19 bp, Mus musculus
  siRNA target sequence for 4933409N07Rik (NM_175162.2,1527-1545).
caaacaccgagccaatcat

SEQ ID NO: 785975 - DNA, 19 bp, Mus musculus
  siRNA target sequence for 4933409N07Rik (NM_175162.2,1531-1549).
caccgagccaatcatacat

SEQ ID NO: 785976 - DNA, 19 bp, Mus musculus
  siRNA target sequence for 4933409N07Rik (NM_175162.2,1534-1552).
cgagccaatcatacattga

SEQ ID NO: 785977 - DNA, 19 bp, Mus musculus
  siRNA target sequence for 4933409N07Rik (NM_175162.2,1574-1592).
gcaaacgattggtcatcaa

SEQ ID NO: 785978 - DNA, 19 bp, Mus musculus
  siRNA target sequence for 4933409N07Rik (NM_175162.2,1575-1593).
caaacgattggtcatcaaa

SEQ ID NO: 785979 - DNA, 19 bp, Mus musculus
  siRNA target sequence for 4933409N07Rik (NM_175162.2,1585-1603).
gtcatcaaagggctcatat

SEQ ID NO: 785980 - DNA, 19 bp, Mus musculus
  siRNA target sequence for 4933409N07Rik (NM_175162.2,1590-1608).
caaagggctcatattcctt

SEQ ID NO: 785981 - DNA, 19 bp, Mus musculus
  siRNA target sequence for 4933409N07Rik (NM_175162.2,1615-1633).
gctacaaagaggtatgcat

SEQ ID NO: 785982 - DNA, 19 bp, Mus musculus
  siRNA target sequence for 4933409N07Rik (NM_175162.2,1625-1643).
ggtatgcattccagaaata

SEQ ID NO: 785983 - DNA, 19 bp, Mus musculus
  siRNA target sequence for 4933409N07Rik (NM_175162.2,1693-1711).
gcaaaacccctgagagtat

SEQ ID NO: 785984 - DNA, 19 bp, Mus musculus
  siRNA target sequence for 4933409N07Rik (NM_175162.2,1753-1771).
ctgtggatgactattttca

SEQ ID NO: 785985 - DNA, 19 bp, Mus musculus
  siRNA target sequence for 4933409N07Rik (NM_175162.2,2001-2019).
cgccttgtccaacatcata

SEQ ID NO: 785986 - DNA, 19 bp, Mus musculus
  siRNA target sequence for 4933409N07Rik (NM_175162.2,2267-2285).
ggaggcttcttttgactat

SEQ ID NO: 785987 - DNA, 19 bp, Mus musculus
  siRNA target sequence for 4933409N07Rik (NM_175162.2,2268-2286).
gaggcttcttttgactatt

SEQ ID NO: 785988 - DNA, 19 bp, Mus musculus
  siRNA target sequence for 4933409N07Rik (NM_175162.2,2271-2289).
gcttcttttgactattaca

SEQ ID NO: 785989 - DNA, 19 bp, Mus musculus
  siRNA target sequence for 4933409N07Rik (NM_175162.2,2272-2290).
cttcttttgactattacaa

SEQ ID NO: 785990 - DNA, 19 bp, Mus musculus
  siRNA target sequence for 4933409N07Rik (NM_175162.2,2493-2511).
cggctggacagcatggata

SEQ ID NO: 785991 - DNA, 19 bp, Mus musculus
  siRNA target sequence for 4933432P15Rik (NM_175164.2,253-271).
ccgcacaattggacagtat

SEQ ID NO: 785992 - DNA, 19 bp, Mus musculus
  siRNA target sequence for 4933432P15Rik (NM_175164.2,268-286).
gtatcggcttcagcataat

SEQ ID NO: 785993 - DNA, 19 bp, Mus musculus
  siRNA target sequence for 4933432P15Rik (NM_175164.2,413-431).
gacagaaactgatatctgt

SEQ ID NO: 785994 - DNA, 19 bp, Mus musculus
  siRNA target sequence for 4933432P15Rik (NM_175164.2,489-507).
ccaggacccctcatgatgt

SEQ ID NO: 785995 - DNA, 19 bp, Mus musculus
  siRNA target sequence for 4933432P15Rik (NM_175164.2,490-508).
caggacccctcatgatgta

SEQ ID NO: 785996 - DNA, 19 bp, Mus musculus
  siRNA target sequence for 4933432P15Rik (NM_175164.2,506-524).
gtaccagtttcaaagaagt

SEQ ID NO: 785997 - DNA, 19 bp, Mus musculus
  siRNA target sequence for 4933432P15Rik (NM_175164.2,792-810).
gagaaccatgagaagatat

SEQ ID NO: 785998 - DNA, 19 bp, Mus musculus
  siRNA target sequence for 4933432P15Rik (NM_175164.2,997-1015).
gtgcaaacagcatccttaa

SEQ ID NO: 785999 - DNA, 19 bp, Mus musculus
  siRNA target sequence for 4933432P15Rik (NM_175164.2,1028-1046).
cctgcagcccaatctgaat

SEQ ID NO: 786000 - DNA, 19 bp, Mus musculus
  siRNA target sequence for 4933432P15Rik (NM_175164.2,1032-1050).
cagcccaatctgaattcca

SEQ ID NO: 786001 - DNA, 19 bp, Mus musculus
  siRNA target sequence for 4933432P15Rik (NM_175164.2,1308-1326).
gcgggcaccgtcttcgata

SEQ ID NO: 786002 - DNA, 19 bp, Mus musculus
  siRNA target sequence for 4933432P15Rik (NM_175164.2,1309-1327).
cgggcaccgtcttcgataa

SEQ ID NO: 786003 - DNA, 19 bp, Mus musculus
  siRNA target sequence for 4933432P15Rik (NM_175164.2,1310-1328).
gggcaccgtcttcgataat

SEQ ID NO: 786004 - DNA, 19 bp, Mus musculus
  siRNA target sequence for 4933432P15Rik (NM_175164.2,1312-1330).
gcaccgtcttcgataatgt

SEQ ID NO: 786005 - DNA, 19 bp, Mus musculus
  siRNA target sequence for 4933432P15Rik (NM_175164.2,1313-1331).
caccgtcttcgataatgtt

SEQ ID NO: 786006 - DNA, 19 bp, Mus musculus
  siRNA target sequence for 4933432P15Rik (NM_175164.2,1315-1333).
ccgtcttcgataatgttca

SEQ ID NO: 786007 - DNA, 19 bp, Mus musculus
  siRNA target sequence for 4933432P15Rik (NM_175164.2,1316-1334).
cgtcttcgataatgttcat

SEQ ID NO: 786008 - DNA, 19 bp, Mus musculus
  siRNA target sequence for 4933432P15Rik (NM_175164.2,1359-1377).
gaggggactctgaatggaa

SEQ ID NO: 786009 - DNA, 19 bp, Mus musculus
  siRNA target sequence for 4933432P15Rik (NM_175164.2,1384-1402).
gcctcatcccagagaacta

SEQ ID NO: 786010 - DNA, 19 bp, Mus musculus
  siRNA target sequence for 5430420C16Rik (NM_175165.2,244-262).
gattccagcccgtgtcttt

SEQ ID NO: 786011 - DNA, 19 bp, Mus musculus
  siRNA target sequence for 5430420C16Rik (NM_175165.2,336-354).
ccaggatcaaggaggattt

SEQ ID NO: 786012 - DNA, 19 bp, Mus musculus
  siRNA target sequence for 5430420C16Rik (NM_175165.2,339-357).
ggatcaaggaggatttcaa

SEQ ID NO: 786013 - DNA, 19 bp, Mus musculus
  siRNA target sequence for 5430420C16Rik (NM_175165.2,358-376).
gacagcagagtataactaa

SEQ ID NO: 786014 - DNA, 19 bp, Mus musculus
  siRNA target sequence for 5430420C16Rik (NM_175165.2,382-400).
cactgtaccccaatcctta

SEQ ID NO: 786015 - DNA, 19 bp, Mus musculus
  siRNA target sequence for 5430420C16Rik (NM_175165.2,438-456).
cggccaggggccattgaga

SEQ ID NO: 786016 - DNA, 19 bp, Mus musculus
  siRNA target sequence for 5430420C16Rik (NM_175165.2,520-538).
ggctcctgacagagattga

SEQ ID NO: 786017 - DNA, 19 bp, Mus musculus
  siRNA target sequence for 5430420C16Rik (NM_175165.2,521-539).
gctcctgacagagattgat

SEQ ID NO: 786018 - DNA, 19 bp, Mus musculus
  siRNA target sequence for 5430420C16Rik (NM_175165.2,533-551).
gattgatcactggaacaat

SEQ ID NO: 786019 - DNA, 19 bp, Mus musculus
  siRNA target sequence for 5430420C16Rik (NM_175165.2,668-686).
ctgtctgggcaagtttgtt

SEQ ID NO: 786020 - DNA, 19 bp, Mus musculus
  siRNA target sequence for 5430420C16Rik (NM_175165.2,849-867).
cttgagatctgcaagttgt

SEQ ID NO: 786021 - DNA, 19 bp, Mus musculus
  siRNA target sequence for 5430420C16Rik (NM_175165.2,899-917).
cgagaatgcccacaagaat

SEQ ID NO: 786022 - DNA, 19 bp, Mus musculus
  siRNA target sequence for 5430420C16Rik (NM_175165.2,950-968).
ggtgttaacccaacctata

SEQ ID NO: 786023 - DNA, 19 bp, Mus musculus
  siRNA target sequence for 5430420C16Rik (NM_175165.2,960-978).
caacctatactgattgaga

SEQ ID NO: 786024 - DNA, 19 bp, Mus musculus
  siRNA target sequence for 5430420C16Rik (NM_175165.2,990-1008).
ctcatgtcattcattggaa

SEQ ID NO: 786025 - DNA, 19 bp, Mus musculus
  siRNA target sequence for 5430420C16Rik (NM_175165.2,1001-1019).
cattggaaaccgcaacaaa

SEQ ID NO: 786026 - DNA, 19 bp, Mus musculus
  siRNA target sequence for 9130415E20Rik (NM_175169.2,63-81).
gggcaccacgcatctgttt

SEQ ID NO: 786027 - DNA, 19 bp, Mus musculus
  siRNA target sequence for 9130415E20Rik (NM_175169.2,66-84).
caccacgcatctgttttgt

SEQ ID NO: 786028 - DNA, 19 bp, Mus musculus
  siRNA target sequence for 9130415E20Rik (NM_175169.2,103-121).
ctcccaaatcccgatttct

SEQ ID NO: 786029 - DNA, 19 bp, Mus musculus
  siRNA target sequence for 9130415E20Rik (NM_175169.2,123-141).
ctgtcatagcctctattca

SEQ ID NO: 786030 - DNA, 19 bp, Mus musculus
  siRNA target sequence for 9130415E20Rik (NM_175169.2,125-143).
gtcatagcctctattcaat

SEQ ID NO: 786031 - DNA, 19 bp, Mus musculus
  siRNA target sequence for 9130415E20Rik (NM_175169.2,127-145).
catagcctctattcaattt

SEQ ID NO: 786032 - DNA, 19 bp, Mus musculus
  siRNA target sequence for 9130415E20Rik (NM_175169.2,162-180).
ctccacttatacaatcgta

SEQ ID NO: 786033 - DNA, 19 bp, Mus musculus
  siRNA target sequence for 9130415E20Rik (NM_175169.2,461-479).
gcagtgttctgcgtacttt

SEQ ID NO: 786034 - DNA, 19 bp, Mus musculus
  siRNA target sequence for 9130415E20Rik (NM_175169.2,464-482).
gtgttctgcgtactttaga

SEQ ID NO: 786035 - DNA, 19 bp, Mus musculus
  siRNA target sequence for 9130415E20Rik (NM_175169.2,469-487).
ctgcgtactttagatacta

SEQ ID NO: 786036 - DNA, 19 bp, Mus musculus
  siRNA target sequence for 9130415E20Rik (NM_175169.2,471-489).
gcgtactttagatactact

SEQ ID NO: 786037 - DNA, 19 bp, Mus musculus
  siRNA target sequence for 4930506M07Rik (NM_175172.2,612-630).
gcaagccattggcgaatat

SEQ ID NO: 786038 - DNA, 19 bp, Mus musculus
  siRNA target sequence for 4930506M07Rik (NM_175172.2,691-709).
cgagatgaagctgttaaaa

SEQ ID NO: 786039 - DNA, 19 bp, Mus musculus
  siRNA target sequence for 4930506M07Rik (NM_175172.2,813-831).
cttggcgacaaagctaaat

SEQ ID NO: 786040 - DNA, 19 bp, Mus musculus
  siRNA target sequence for 4930506M07Rik (NM_175172.2,854-872).
gaatcagcatgctatacat

SEQ ID NO: 786041 - DNA, 19 bp, Mus musculus
  siRNA target sequence for 4930506M07Rik (NM_175172.2,880-898).
ctggggccagacgtaatta

SEQ ID NO: 786042 - DNA, 19 bp, Mus musculus
  siRNA target sequence for 4930506M07Rik (NM_175172.2,882-900).
ggggccagacgtaattaca

SEQ ID NO: 786043 - DNA, 19 bp, Mus musculus
  siRNA target sequence for 4930506M07Rik (NM_175172.2,990-1008).
caaagaacttcgagatcaa

SEQ ID NO: 786044 - DNA, 19 bp, Mus musculus
  siRNA target sequence for 4930506M07Rik (NM_175172.2,997-1015).
cttcgagatcaaattgtgt

SEQ ID NO: 786045 - DNA, 19 bp, Mus musculus
  siRNA target sequence for 4930506M07Rik (NM_175172.2,1087-1105).
gaggaggtaaataaagtta

SEQ ID NO: 786046 - DNA, 19 bp, Mus musculus
  siRNA target sequence for 4930506M07Rik (NM_175172.2,1107-1125).
gcaagaaaaagctgtttta

SEQ ID NO: 786047 - DNA, 19 bp, Mus musculus
  siRNA target sequence for 4930506M07Rik (NM_175172.2,1143-1161).
gcagaggaaagtcttagaa

SEQ ID NO: 786048 - DNA, 19 bp, Mus musculus
  siRNA target sequence for 4930506M07Rik (NM_175172.2,1176-1194).
gtccatgttggctgttgaa

SEQ ID NO: 786049 - DNA, 19 bp, Mus musculus
  siRNA target sequence for 4930506M07Rik (NM_175172.2,1178-1196).
ccatgttggctgttgaaga

SEQ ID NO: 786050 - DNA, 19 bp, Mus musculus
  siRNA target sequence for 4930506M07Rik (NM_175172.2,1357-1375).
gacgaaaacgcaaaactta

SEQ ID NO: 786051 - DNA, 19 bp, Mus musculus
  siRNA target sequence for 4930506M07Rik (NM_175172.2,1453-1471).
cttcacaaagagatccata

SEQ ID NO: 786052 - DNA, 19 bp, Mus musculus
  siRNA target sequence for 4930506M07Rik (NM_175172.2,1553-1571).
ggaacctgaagcattcagt

SEQ ID NO: 786053 - DNA, 19 bp, Mus musculus
  siRNA target sequence for 4930506M07Rik (NM_175172.2,1568-1586).
cagtggatgaacttcagaa

SEQ ID NO: 786054 - DNA, 19 bp, Mus musculus
  siRNA target sequence for 4930506M07Rik (NM_175172.2,1591-1609).
gtgaaccagtctgagaatt

SEQ ID NO: 786055 - DNA, 19 bp, Mus musculus
  siRNA target sequence for 4930506M07Rik (NM_175172.2,1669-1687).
cggtccctcatgtctatga

SEQ ID NO: 786056 - DNA, 19 bp, Mus musculus
  siRNA target sequence for 4930506M07Rik (NM_175172.2,1712-1730).
gcaatagtgctaagaaaga

SEQ ID NO: 786057 - DNA, 19 bp, Mus musculus
  siRNA target sequence for 0610012K18Rik (NM_175173.2,72-90).
ccacactcgagctatagtt

SEQ ID NO: 786058 - DNA, 19 bp, Mus musculus
  siRNA target sequence for 0610012K18Rik (NM_175173.2,73-91).
cacactcgagctatagtta

SEQ ID NO: 786059 - DNA, 19 bp, Mus musculus
  siRNA target sequence for 0610012K18Rik (NM_175173.2,103-121).
gtggttgagtcgaagaagt

SEQ ID NO: 786060 - DNA, 19 bp, Mus musculus
  siRNA target sequence for 0610012K18Rik (NM_175173.2,159-177).
ctgtgctttccctttagat

SEQ ID NO: 786061 - DNA, 19 bp, Mus musculus
  siRNA target sequence for 0610012K18Rik (NM_175173.2,232-250).
ctacaaggacaccatcaat

SEQ ID NO: 786062 - DNA, 19 bp, Mus musculus
  siRNA target sequence for 0610012K18Rik (NM_175173.2,238-256).
ggacaccatcaattgatta

SEQ ID NO: 786063 - DNA, 19 bp, Mus musculus
  siRNA target sequence for 0610012K18Rik (NM_175173.2,302-320).
ctgcatcagaggattatat

SEQ ID NO: 786064 - DNA, 19 bp, Mus musculus
  siRNA target sequence for 0610012K18Rik (NM_175173.2,304-322).
gcatcagaggattatatta

SEQ ID NO: 786065 - DNA, 19 bp, Mus musculus
  siRNA target sequence for 0610012K18Rik (NM_175173.2,308-326).
cagaggattatattataat

SEQ ID NO: 786066 - DNA, 19 bp, Mus musculus
  siRNA target sequence for 0610012K18Rik (NM_175173.2,310-328).
gaggattatattataatgt

SEQ ID NO: 786067 - DNA, 19 bp, Mus musculus
  siRNA target sequence for 0610012K18Rik (NM_175173.2,390-408).
gggctcccttttacaaaca

SEQ ID NO: 786068 - DNA, 19 bp, Mus musculus
  siRNA target sequence for 0610012K18Rik (NM_175173.2,392-410).
gctcccttttacaaacagt

SEQ ID NO: 786069 - DNA, 19 bp, Mus musculus
  siRNA target sequence for 0610012K18Rik (NM_175173.2,409-427).
gtgttgtgtttgcgattta

SEQ ID NO: 786070 - DNA, 19 bp, Mus musculus
  siRNA target sequence for 0610012K18Rik (NM_175173.2,411-429).
gttgtgtttgcgatttagt

SEQ ID NO: 786071 - DNA, 19 bp, Mus musculus
  siRNA target sequence for 0610012K18Rik (NM_175173.2,497-515).
ctgtgctggtagagttgaa

SEQ ID NO: 786072 - DNA, 19 bp, Mus musculus
  siRNA target sequence for 0610012K18Rik (NM_175173.2,617-635).
gtgtgggatccttgatata

SEQ ID NO: 786073 - DNA, 19 bp, Mus musculus
  siRNA target sequence for 0610012K18Rik (NM_175173.2,621-639).
gggatccttgatatacagt

SEQ ID NO: 786074 - DNA, 19 bp, Mus musculus
  siRNA target sequence for 0610012K18Rik (NM_175173.2,622-640).
ggatccttgatatacagtt

SEQ ID NO: 786075 - DNA, 19 bp, Mus musculus
  siRNA target sequence for 0610012K18Rik (NM_175173.2,630-648).
gatatacagttcatccatt

SEQ ID NO: 786076 - DNA, 19 bp, Mus musculus
  siRNA target sequence for 0610012K18Rik (NM_175173.2,656-674).
cttaccctctcctaaattt

SEQ ID NO: 786077 - DNA, 19 bp, Mus musculus
  siRNA target sequence for 0610012K18Rik (NM_175173.2,660-678).
ccctctcctaaatttgctt

SEQ ID NO: 786078 - DNA, 19 bp, Mus musculus
  siRNA target sequence for 0610012K18Rik (NM_175173.2,661-679).
cctctcctaaatttgctta

SEQ ID NO: 786079 - DNA, 19 bp, Mus musculus
  siRNA target sequence for 0610012K18Rik (NM_175173.2,662-680).
ctctcctaaatttgcttat

SEQ ID NO: 786080 - DNA, 19 bp, Mus musculus
  siRNA target sequence for 0610012K18Rik (NM_175173.2,664-682).
ctcctaaatttgcttatca

SEQ ID NO: 786081 - DNA, 19 bp, Mus musculus
  siRNA target sequence for 0610012K18Rik (NM_175173.2,666-684).
cctaaatttgcttatcaat

SEQ ID NO: 786082 - DNA, 19 bp, Mus musculus
  siRNA target sequence for 0610012K18Rik (NM_175173.2,721-739).
ggccagctgtggatcttta

SEQ ID NO: 786083 - DNA, 19 bp, Mus musculus
  siRNA target sequence for 0610012K18Rik (NM_175173.2,724-742).
cagctgtggatctttagtt

SEQ ID NO: 786084 - DNA, 19 bp, Mus musculus
  siRNA target sequence for 0610012K18Rik (NM_175173.2,773-791).
cacatgtggacgtaaggaa

SEQ ID NO: 786085 - DNA, 19 bp, Mus musculus
  siRNA target sequence for 0610012K18Rik (NM_175173.2,803-821).
ctttcaccacccgaagaat

SEQ ID NO: 786086 - DNA, 19 bp, Mus musculus
  siRNA target sequence for 0610012K18Rik (NM_175173.2,867-885).
cagacatgaggcggataaa

SEQ ID NO: 786087 - DNA, 19 bp, Mus musculus
  siRNA target sequence for 0610012K18Rik (NM_175173.2,974-992).
ctgagtgcaccaaatgtct

SEQ ID NO: 786088 - DNA, 19 bp, Mus musculus
  siRNA target sequence for 0610012K18Rik (NM_175173.2,1010-1028).
cagctctattcatattgaa

SEQ ID NO: 786089 - DNA, 19 bp, Mus musculus
  siRNA target sequence for 0610012K18Rik (NM_175173.2,1032-1050).
ggcaagctttgaattggaa

SEQ ID NO: 786090 - DNA, 19 bp, Mus musculus
  siRNA target sequence for 0610012K18Rik (NM_175173.2,1169-1187).
gtaagattgctgtattgga

SEQ ID NO: 786091 - DNA, 19 bp, Mus musculus
  siRNA target sequence for 0610012K18Rik (NM_175173.2,1177-1195).
gctgtattggaaattgact

SEQ ID NO: 786092 - DNA, 19 bp, Mus musculus
  siRNA target sequence for 0610012K18Rik (NM_175173.2,1178-1196).
ctgtattggaaattgactt

SEQ ID NO: 786093 - DNA, 19 bp, Mus musculus
  siRNA target sequence for 0610012K18Rik (NM_175173.2,1282-1300).
ccactgtattttggaatta

SEQ ID NO: 786094 - DNA, 19 bp, Mus musculus
  siRNA target sequence for 0610012K18Rik (NM_175173.2,1315-1333).
cctaagcttgccaatacca

SEQ ID NO: 786095 - DNA, 19 bp, Mus musculus
  siRNA target sequence for 0610012K18Rik (NM_175173.2,1394-1412).
ggtcgtccggctatacatt

SEQ ID NO: 786096 - DNA, 19 bp, Mus musculus
  siRNA target sequence for 0610012K18Rik (NM_175173.2,1445-1463).
ctaacatcaaacatcataa

SEQ ID NO: 786097 - DNA, 19 bp, Mus musculus
  siRNA target sequence for 0610012K18Rik (NM_175173.2,1469-1487).
gatcttcaaagtacaagaa

SEQ ID NO: 786098 - DNA, 19 bp, Mus musculus
  siRNA target sequence for 0610012K18Rik (NM_175173.2,1472-1490).
cttcaaagtacaagaacaa

SEQ ID NO: 786099 - DNA, 19 bp, Mus musculus
  siRNA target sequence for 0610012K18Rik (NM_175173.2,1841-1859).
ctgcacagttctactacat

SEQ ID NO: 786100 - DNA, 19 bp, Mus musculus
  siRNA target sequence for 0610012K18Rik (NM_175173.2,1935-1953).
catacgaaggtataaacca

SEQ ID NO: 786101 - DNA, 19 bp, Mus musculus
  siRNA target sequence for 0610012K18Rik (NM_175173.2,1939-1957).
cgaaggtataaaccaaaaa

SEQ ID NO: 786102 - DNA, 19 bp, Mus musculus
  siRNA target sequence for 0610012K18Rik (NM_175173.2,1958-1976).
gcaggtataagcctatttt

SEQ ID NO: 786103 - DNA, 19 bp, Mus musculus
  siRNA target sequence for 0610012K18Rik (NM_175173.2,2018-2036).
cagcggtgaacgactttta

SEQ ID NO: 786104 - DNA, 19 bp, Mus musculus
  siRNA target sequence for 0610012K18Rik (NM_175173.2,2020-2038).
gcggtgaacgacttttatt

SEQ ID NO: 786105 - DNA, 19 bp, Mus musculus
  siRNA target sequence for 0610012K18Rik (NM_175173.2,2063-2081).
gcgaccgggctgttgaagt

SEQ ID NO: 786106 - DNA, 19 bp, Mus musculus
  siRNA target sequence for 0610012K18Rik (NM_175173.2,2064-2082).
cgaccgggctgttgaagtt

SEQ ID NO: 786107 - DNA, 19 bp, Mus musculus
  siRNA target sequence for 0610012K18Rik (NM_175173.2,2065-2083).
gaccgggctgttgaagttt

SEQ ID NO: 786108 - DNA, 19 bp, Mus musculus
  siRNA target sequence for 0610012K18Rik (NM_175173.2,2067-2085).
ccgggctgttgaagttttt

SEQ ID NO: 786109 - DNA, 19 bp, Mus musculus
  siRNA target sequence for 0610012K18Rik (NM_175173.2,2132-2150).
ccaggcctgttcatcgaat

SEQ ID NO: 786110 - DNA, 19 bp, Mus musculus
  siRNA target sequence for 0610012K18Rik (NM_175173.2,2133-2151).
caggcctgttcatcgaatt

SEQ ID NO: 786111 - DNA, 19 bp, Mus musculus
  siRNA target sequence for 0610012K18Rik (NM_175173.2,2136-2154).
gcctgttcatcgaatttgt

SEQ ID NO: 786112 - DNA, 19 bp, Mus musculus
  siRNA target sequence for 0610012K18Rik (NM_175173.2,2140-2158).
gttcatcgaatttgtcaaa

SEQ ID NO: 786113 - DNA, 19 bp, Mus musculus
  siRNA target sequence for 1700013E18Rik (NM_175176.2,266-284).
ctcccacacattaacagtt

SEQ ID NO: 786114 - DNA, 19 bp, Mus musculus
  siRNA target sequence for 1700013E18Rik (NM_175176.2,415-433).
caaggatcctggaaggatt

SEQ ID NO: 786115 - DNA, 19 bp, Mus musculus
  siRNA target sequence for 1700013E18Rik (NM_175176.2,422-440).
cctggaaggatttataaaa

SEQ ID NO: 786116 - DNA, 19 bp, Mus musculus
  siRNA target sequence for 1700013E18Rik (NM_175176.2,447-465).
cgcatagcaatgcagttat

SEQ ID NO: 786117 - DNA, 19 bp, Mus musculus
  siRNA target sequence for 1700013E18Rik (NM_175176.2,453-471).
gcaatgcagttatcacaat

SEQ ID NO: 786118 - DNA, 19 bp, Mus musculus
  siRNA target sequence for 1700013E18Rik (NM_175176.2,461-479).
gttatcacaatggtctatt

SEQ ID NO: 786119 - DNA, 19 bp, Mus musculus
  siRNA target sequence for 1700013E18Rik (NM_175176.2,496-514).
cctatcttatgatgacata

SEQ ID NO: 786120 - DNA, 19 bp, Mus musculus
  siRNA target sequence for 1700013E18Rik (NM_175176.2,501-519).
cttatgatgacatagactt

SEQ ID NO: 786121 - DNA, 19 bp, Mus musculus
  siRNA target sequence for 1700013E18Rik (NM_175176.2,520-538).
ccgagatgaaatcaagatt

SEQ ID NO: 786122 - DNA, 19 bp, Mus musculus
  siRNA target sequence for 1700013E18Rik (NM_175176.2,521-539).
cgagatgaaatcaagattt

SEQ ID NO: 786123 - DNA, 19 bp, Mus musculus
  siRNA target sequence for 1700013E18Rik (NM_175176.2,562-580).
gaacctttgtgtctacaaa

SEQ ID NO: 786124 - DNA, 19 bp, Mus musculus
  siRNA target sequence for 1700013E18Rik (NM_175176.2,687-705).
gctcctgctgcgagttcaa

SEQ ID NO: 786125 - DNA, 19 bp, Mus musculus
  siRNA target sequence for 1700013E18Rik (NM_175176.2,777-795).
cttgctacaggtgcattat

SEQ ID NO: 786126 - DNA, 19 bp, Mus musculus
  siRNA target sequence for 1700013E18Rik (NM_175176.2,781-799).
ctacaggtgcattattgca

SEQ ID NO: 786127 - DNA, 19 bp, Mus musculus
  siRNA target sequence for 1700013E18Rik (NM_175176.2,798-816).
caatgggccttgacagaaa

SEQ ID NO: 786128 - DNA, 19 bp, Mus musculus
  siRNA target sequence for 1700013E18Rik (NM_175176.2,818-836).
ccatcttcaacgaaaccta

SEQ ID NO: 786129 - DNA, 19 bp, Mus musculus
  siRNA target sequence for 1700013E18Rik (NM_175176.2,819-837).
catcttcaacgaaacctaa

SEQ ID NO: 786130 - DNA, 19 bp, Mus musculus
  siRNA target sequence for 1700013E18Rik (NM_175176.2,822-840).
cttcaacgaaacctaagaa

SEQ ID NO: 786131 - DNA, 19 bp, Mus musculus
  siRNA target sequence for 1700013E18Rik (NM_175176.2,828-846).
cgaaacctaagaaggaaaa

SEQ ID NO: 786132 - DNA, 19 bp, Mus musculus
  siRNA target sequence for 1700013E18Rik (NM_175176.2,863-881).
gaggagccaccaaacaaga

SEQ ID NO: 786133 - DNA, 19 bp, Mus musculus
  siRNA target sequence for 1700013E18Rik (NM_175176.2,1070-1088).
caggacaacgctgttaaat

SEQ ID NO: 786134 - DNA, 19 bp, Mus musculus
  siRNA target sequence for 1700013E18Rik (NM_175176.2,1191-1209).
cacccaccgaaagtgaaaa

SEQ ID NO: 786135 - DNA, 19 bp, Mus musculus
  siRNA target sequence for 1700013E18Rik (NM_175176.2,1216-1234).
ccggaaccccgaaaagaaa

SEQ ID NO: 786136 - DNA, 19 bp, Mus musculus
  siRNA target sequence for 1700013E18Rik (NM_175176.2,1255-1273).
ggcccatgacagtgagaat

SEQ ID NO: 786137 - DNA, 19 bp, Mus musculus
  siRNA target sequence for 1700013E18Rik (NM_175176.2,1356-1374).
cctactctagcgaaagtga

SEQ ID NO: 786138 - DNA, 19 bp, Mus musculus
  siRNA target sequence for 1700013E18Rik (NM_175176.2,1357-1375).
ctactctagcgaaagtgaa

SEQ ID NO: 786139 - DNA, 19 bp, Mus musculus
  siRNA target sequence for 1700013E18Rik (NM_175176.2,1450-1468).
ggatctgcgggaaaatgat

SEQ ID NO: 786140 - DNA, 19 bp, Mus musculus
  siRNA target sequence for 1700013E18Rik (NM_175176.2,1471-1489).
cccaggaaaaccacacttt

SEQ ID NO: 786141 - DNA, 19 bp, Mus musculus
  siRNA target sequence for 1700013E18Rik (NM_175176.2,1564-1582).
cgagctcagcggtatgcat

SEQ ID NO: 786142 - DNA, 19 bp, Mus musculus
  siRNA target sequence for 1700013E18Rik (NM_175176.2,1570-1588).
cagcggtatgcatgttact

SEQ ID NO: 786143 - DNA, 19 bp, Mus musculus
  siRNA target sequence for 1700013E18Rik (NM_175176.2,1572-1590).
gcggtatgcatgttactga

SEQ ID NO: 786144 - DNA, 19 bp, Mus musculus
  siRNA target sequence for 1700013E18Rik (NM_175176.2,1583-1601).
gttactgagggaaaaccaa

SEQ ID NO: 786145 - DNA, 19 bp, Mus musculus
  siRNA target sequence for 1700013E18Rik (NM_175176.2,1587-1605).
ctgagggaaaaccaactat

SEQ ID NO: 786146 - DNA, 19 bp, Mus musculus
  siRNA target sequence for 1700013E18Rik (NM_175176.2,1602-1620).
ctatgggaatccaagcttt

SEQ ID NO: 786147 - DNA, 19 bp, Mus musculus
  siRNA target sequence for 2810002O09Rik (NM_175179.2,440-458).
ggcaagaagggaatctgta

SEQ ID NO: 786148 - DNA, 19 bp, Mus musculus
  siRNA target sequence for 2810002O09Rik (NM_175179.2,456-474).
gtactctgcctagtttctt

SEQ ID NO: 786149 - DNA, 19 bp, Mus musculus
  siRNA target sequence for 2810002O09Rik (NM_175179.2,508-526).
cagctctaagaaaagtcta

SEQ ID NO: 786150 - DNA, 19 bp, Mus musculus
  siRNA target sequence for 2810002O09Rik (NM_175179.2,538-556).
gactcacgatggtctaagt

SEQ ID NO: 786151 - DNA, 19 bp, Mus musculus
  siRNA target sequence for 2810002O09Rik (NM_175179.2,540-558).
ctcacgatggtctaagtga

SEQ ID NO: 786152 - DNA, 19 bp, Mus musculus
  siRNA target sequence for 2810002O09Rik (NM_175179.2,831-849).
caggggccaaggaacttga

SEQ ID NO: 786153 - DNA, 19 bp, Mus musculus
  siRNA target sequence for 2810002O09Rik (NM_175179.2,1043-1061).
cctgtgcctcagagttcat

SEQ ID NO: 786154 - DNA, 19 bp, Mus musculus
  siRNA target sequence for 2600010E01Rik (NM_175181.3,323-341).
ggcctagaccacgctttat

SEQ ID NO: 786155 - DNA, 19 bp, Mus musculus
  siRNA target sequence for 2600010E01Rik (NM_175181.3,325-343).
cctagaccacgctttatga

SEQ ID NO: 786156 - DNA, 19 bp, Mus musculus
  siRNA target sequence for 2600010E01Rik (NM_175181.3,388-406).
caggctctgcagctaagtt

SEQ ID NO: 786157 - DNA, 19 bp, Mus musculus
  siRNA target sequence for 2600010E01Rik (NM_175181.3,434-452).
cagctgtgatcaacgtttt

SEQ ID NO: 786158 - DNA, 19 bp, Mus musculus
  siRNA target sequence for 2600010E01Rik (NM_175181.3,481-499).
ctgtatgcactgaacgaaa

SEQ ID NO: 786159 - DNA, 19 bp, Mus musculus
  siRNA target sequence for 2600010E01Rik (NM_175181.3,521-539).
gtgaacttggatcattcat

SEQ ID NO: 786160 - DNA, 19 bp, Mus musculus
  siRNA target sequence for 2600010E01Rik (NM_175181.3,523-541).
gaacttggatcattcatta

SEQ ID NO: 786161 - DNA, 19 bp, Mus musculus
  siRNA target sequence for 2600010E01Rik (NM_175181.3,533-551).
cattcattactgactattt

SEQ ID NO: 786162 - DNA, 19 bp, Mus musculus
  siRNA target sequence for 2600010E01Rik (NM_175181.3,673-691).
cctaccctgcaggcaatat

SEQ ID NO: 786163 - DNA, 19 bp, Mus musculus
  siRNA target sequence for 2600010E01Rik (NM_175181.3,677-695).
ccctgcaggcaatatttta

SEQ ID NO: 786164 - DNA, 19 bp, Mus musculus
  siRNA target sequence for 2600010E01Rik (NM_175181.3,801-819).
gtccaagttgccttcttct

SEQ ID NO: 786165 - DNA, 19 bp, Mus musculus
  siRNA target sequence for 2600010E01Rik (NM_175181.3,1062-1080).
ggtcttgacccctctaaca

SEQ ID NO: 786166 - DNA, 19 bp, Mus musculus
  siRNA target sequence for 2600010E01Rik (NM_175181.3,1065-1083).
cttgacccctctaacagaa

SEQ ID NO: 786167 - DNA, 19 bp, Mus musculus
  siRNA target sequence for 2600010E01Rik (NM_175181.3,1298-1316).
ccgatgaactggaactaga

SEQ ID NO: 786168 - DNA, 19 bp, Mus musculus
  siRNA target sequence for 2600010E01Rik (NM_175181.3,1299-1317).
cgatgaactggaactagaa

SEQ ID NO: 786169 - DNA, 19 bp, Mus musculus
  siRNA target sequence for 2610204M12Rik (NM_175182.2,1248-1266).
gtggctctagatgtagatt

SEQ ID NO: 786170 - DNA, 19 bp, Mus musculus
  siRNA target sequence for 2610204M12Rik (NM_175182.2,1250-1268).
ggctctagatgtagattta

SEQ ID NO: 786171 - DNA, 19 bp, Mus musculus
  siRNA target sequence for 2610204M12Rik (NM_175182.2,1285-1303).
cggaaacctgtttattcca

SEQ ID NO: 786172 - DNA, 19 bp, Mus musculus
  siRNA target sequence for 2610204M12Rik (NM_175182.2,1330-1348).
cgagttgggaagaggaaat

SEQ ID NO: 786173 - DNA, 19 bp, Mus musculus
  siRNA target sequence for 2610204M12Rik (NM_175182.2,1333-1351).
gttgggaagaggaaatgca

SEQ ID NO: 786174 - DNA, 19 bp, Mus musculus
  siRNA target sequence for 2610204M12Rik (NM_175182.2,1433-1451).
cttacacgaggcagaatgt

SEQ ID NO: 786175 - DNA, 19 bp, Mus musculus
  siRNA target sequence for 2610528J18Rik (NM_175183.2,858-876).
gccctgcccatgatgactt

SEQ ID NO: 786176 - DNA, 19 bp, Mus musculus
  siRNA target sequence for 2610528J18Rik (NM_175183.2,934-952).
gcattgcgaaagaagacat

SEQ ID NO: 786177 - DNA, 19 bp, Mus musculus
  siRNA target sequence for 2610528J18Rik (NM_175183.2,1011-1029).
ctcaaaaatgccatgtagt

SEQ ID NO: 786178 - DNA, 19 bp, Mus musculus
  siRNA target sequence for 2610528J18Rik (NM_175183.2,1055-1073).
gccccaggttccaccaaaa

SEQ ID NO: 786179 - DNA, 19 bp, Mus musculus
  siRNA target sequence for 2610528J18Rik (NM_175183.2,1267-1285).
caaggactcccctggaaaa

SEQ ID NO: 786180 - DNA, 19 bp, Mus musculus
  siRNA target sequence for 2610528J18Rik (NM_175183.2,1416-1434).
ctaaaacccaccgaaagat

SEQ ID NO: 786181 - DNA, 19 bp, Mus musculus
  siRNA target sequence for 2610528J18Rik (NM_175183.2,1461-1479).
ggcagtgcggggtcataaa

SEQ ID NO: 786182 - DNA, 19 bp, Mus musculus
  siRNA target sequence for 2610528J18Rik (NM_175183.2,1462-1480).
gcagtgcggggtcataaat

SEQ ID NO: 786183 - DNA, 19 bp, Mus musculus
  siRNA target sequence for 2610528J18Rik (NM_175183.2,1465-1483).
gtgcggggtcataaatcca

SEQ ID NO: 786184 - DNA, 19 bp, Mus musculus
  siRNA target sequence for 2610528J18Rik (NM_175183.2,1557-1575).
gcagggccaaggactttga

SEQ ID NO: 786185 - DNA, 19 bp, Mus musculus
  siRNA target sequence for 2610528J18Rik (NM_175183.2,1558-1576).
cagggccaaggactttgat

SEQ ID NO: 786186 - DNA, 19 bp, Mus musculus
  siRNA target sequence for 2610528J18Rik (NM_175183.2,1900-1918).
ggaggaggggatatctgat

SEQ ID NO: 786187 - DNA, 19 bp, Mus musculus
  siRNA target sequence for 2610528J18Rik (NM_175183.2,2006-2024).
ccaggatgctatgtgttta

SEQ ID NO: 786188 - DNA, 19 bp, Mus musculus
  siRNA target sequence for 2610528J18Rik (NM_175183.2,2318-2336).
ggcggtagccaggctatta

SEQ ID NO: 786189 - DNA, 19 bp, Mus musculus
  siRNA target sequence for 2610528J18Rik (NM_175183.2,2321-2339).
ggtagccaggctattacct

SEQ ID NO: 786190 - DNA, 19 bp, Mus musculus
  siRNA target sequence for 2610528J18Rik (NM_175183.2,2395-2413).
ggccagcaagtcatccaaa

SEQ ID NO: 786191 - DNA, 19 bp, Mus musculus
  siRNA target sequence for 2610528K11Rik (NM_175184.3,788-806).
ggaaggacggcttattcaa

SEQ ID NO: 786192 - DNA, 19 bp, Mus musculus
  siRNA target sequence for 2610528K11Rik (NM_175184.3,819-837).
cagatacctgtgtttcaca

SEQ ID NO: 786193 - DNA, 19 bp, Mus musculus
  siRNA target sequence for 2610528K11Rik (NM_175184.3,979-997).
cggctctgcattaagttta

SEQ ID NO: 786194 - DNA, 19 bp, Mus musculus
  siRNA target sequence for 2610528K11Rik (NM_175184.3,1076-1094).
cgtttatcggggaactgaa

SEQ ID NO: 786195 - DNA, 19 bp, Mus musculus
  siRNA target sequence for 2610528K11Rik (NM_175184.3,1168-1186).
cagtcatcagcctcttcta

SEQ ID NO: 786196 - DNA, 19 bp, Mus musculus
  siRNA target sequence for 2610528K11Rik (NM_175184.3,1208-1226).
ggcacatctccctaacact

SEQ ID NO: 786197 - DNA, 19 bp, Mus musculus
  siRNA target sequence for 2610528K11Rik (NM_175184.3,1209-1227).
gcacatctccctaacacta

SEQ ID NO: 786198 - DNA, 19 bp, Mus musculus
  siRNA target sequence for 2610528K11Rik (NM_175184.3,1256-1274).
ccagcacagactatgagta

SEQ ID NO: 786199 - DNA, 19 bp, Mus musculus
  siRNA target sequence for 2610528K11Rik (NM_175184.3,1272-1290).
gtaccagctctccaatcta

SEQ ID NO: 786200 - DNA, 19 bp, Mus musculus
  siRNA target sequence for 2610528K11Rik (NM_175184.3,1275-1293).
ccagctctccaatctatat

SEQ ID NO: 786201 - DNA, 19 bp, Mus musculus
  siRNA target sequence for 2610528K11Rik (NM_175184.3,1284-1302).
caatctatatgccatatca

SEQ ID NO: 786202 - DNA, 19 bp, Mus musculus
  siRNA target sequence for 2610528K11Rik (NM_175184.3,1395-1413).
gtctctggcagaaattgaa

SEQ ID NO: 786203 - DNA, 19 bp, Mus musculus
  siRNA target sequence for 2700022J23Rik (NM_175186.2,82-100).
ggaagtttatctaacacat

SEQ ID NO: 786204 - DNA, 19 bp, Mus musculus
  siRNA target sequence for 2700022J23Rik (NM_175186.2,92-110).
ctaacacatggaatgaaaa

SEQ ID NO: 786205 - DNA, 19 bp, Mus musculus
  siRNA target sequence for 2700022J23Rik (NM_175186.2,264-282).
ggcaatgatcccacagaaa

SEQ ID NO: 786206 - DNA, 19 bp, Mus musculus
  siRNA target sequence for 2700022J23Rik (NM_175186.2,265-283).
gcaatgatcccacagaaat

SEQ ID NO: 786207 - DNA, 19 bp, Mus musculus
  siRNA target sequence for 2700022J23Rik (NM_175186.2,266-284).
caatgatcccacagaaatt

SEQ ID NO: 786208 - DNA, 19 bp, Mus musculus
  siRNA target sequence for 2700022J23Rik (NM_175186.2,324-342).
gaagattggttttcgatta

SEQ ID NO: 786209 - DNA, 19 bp, Mus musculus
  siRNA target sequence for 2700022J23Rik (NM_175186.2,338-356).
gattacggaacctactcaa

SEQ ID NO: 786210 - DNA, 19 bp, Mus musculus
  siRNA target sequence for 2700022J23Rik (NM_175186.2,430-448).
gataatgacttttgtgtat

SEQ ID NO: 786211 - DNA, 19 bp, Mus musculus
  siRNA target sequence for 2700022J23Rik (NM_175186.2,494-512).
gagtagaatggggaaaaat

SEQ ID NO: 786212 - DNA, 19 bp, Mus musculus
  siRNA target sequence for 2700022J23Rik (NM_175186.2,539-557).
gatgttcttctgcattttt

SEQ ID NO: 786213 - DNA, 19 bp, Mus musculus
  siRNA target sequence for 2700022J23Rik (NM_175186.2,569-587).
gatcagccttaaaacagaa

SEQ ID NO: 786214 - DNA, 19 bp, Mus musculus
  siRNA target sequence for 2700022J23Rik (NM_175186.2,594-612).
gaaaatcaggctgttacaa

SEQ ID NO: 786215 - DNA, 19 bp, Mus musculus
  siRNA target sequence for 2700022J23Rik (NM_175186.2,663-681).
ccctctacccctggttatt

SEQ ID NO: 786216 - DNA, 19 bp, Mus musculus
  siRNA target sequence for 2700022J23Rik (NM_175186.2,723-741).
cctgtttactggtcagata

SEQ ID NO: 786217 - DNA, 19 bp, Mus musculus
  siRNA target sequence for 2700022J23Rik (NM_175186.2,748-766).
gtggacactcttaatgcta

SEQ ID NO: 786218 - DNA, 19 bp, Mus musculus
  siRNA target sequence for 2700022J23Rik (NM_175186.2,810-828).
cattcctgactatgaagtt

SEQ ID NO: 786219 - DNA, 19 bp, Mus musculus
  siRNA target sequence for 2700022J23Rik (NM_175186.2,883-901).
cggccttctcggtttttta

SEQ ID NO: 786220 - DNA, 19 bp, Mus musculus
  siRNA target sequence for 2700022J23Rik (NM_175186.2,884-902).
ggccttctcggttttttat

SEQ ID NO: 786221 - DNA, 19 bp, Mus musculus
  siRNA target sequence for 2700022J23Rik (NM_175186.2,886-904).
ccttctcggttttttatga

SEQ ID NO: 786222 - DNA, 19 bp, Mus musculus
  siRNA target sequence for 2700022J23Rik (NM_175186.2,950-968).
cagatggcgatcctttact

SEQ ID NO: 786223 - DNA, 19 bp, Mus musculus
  siRNA target sequence for 2700022J23Rik (NM_175186.2,1050-1068).
ggtgactaagttatcaaaa

SEQ ID NO: 786224 - DNA, 19 bp, Mus musculus
  siRNA target sequence for 2700022J23Rik (NM_175186.2,1051-1069).
gtgactaagttatcaaaaa

SEQ ID NO: 786225 - DNA, 19 bp, Mus musculus
  siRNA target sequence for 2700022J23Rik (NM_175186.2,1053-1071).
gactaagttatcaaaaatt

SEQ ID NO: 786226 - DNA, 19 bp, Mus musculus
  siRNA target sequence for 2700022J23Rik (NM_175186.2,1055-1073).
ctaagttatcaaaaattct

SEQ ID NO: 786227 - DNA, 19 bp, Mus musculus
  siRNA target sequence for 2700022J23Rik (NM_175186.2,1064-1082).
caaaaattctcatgattaa

SEQ ID NO: 786228 - DNA, 19 bp, Mus musculus
  siRNA target sequence for 2700022J23Rik (NM_175186.2,1151-1169).
ccattggcattgagtttca

SEQ ID NO: 786229 - DNA, 19 bp, Mus musculus
  siRNA target sequence for 2700022J23Rik (NM_175186.2,1258-1276).
gaggtgagtggcgtatatt

SEQ ID NO: 786230 - DNA, 19 bp, Mus musculus
  siRNA target sequence for 2700022J23Rik (NM_175186.2,1261-1279).
gtgagtggcgtatattgct

SEQ ID NO: 786231 - DNA, 19 bp, Mus musculus
  siRNA target sequence for 2700022J23Rik (NM_175186.2,1263-1281).
gagtggcgtatattgcttt

SEQ ID NO: 786232 - DNA, 19 bp, Mus musculus
  siRNA target sequence for 2700022J23Rik (NM_175186.2,1267-1285).
ggcgtatattgctttcact

SEQ ID NO: 786233 - DNA, 19 bp, Mus musculus
  siRNA target sequence for 2700022J23Rik (NM_175186.2,1438-1456).
catgcacagcctaatgtgt

SEQ ID NO: 786234 - DNA, 19 bp, Mus musculus
  siRNA target sequence for 2700022J23Rik (NM_175186.2,1446-1464).
gcctaatgtgtgttgcttt

SEQ ID NO: 786235 - DNA, 19 bp, Mus musculus
  siRNA target sequence for 2700022J23Rik (NM_175186.2,1478-1496).
gttatttgaagcttaatga

SEQ ID NO: 786236 - DNA, 19 bp, Mus musculus
  siRNA target sequence for 2810446P07Rik (NM_175187.3,121-139).
ggtatacagctggttgtta

SEQ ID NO: 786237 - DNA, 19 bp, Mus musculus
  siRNA target sequence for 2810446P07Rik (NM_175187.3,165-183).
gaagattatacctcactat

SEQ ID NO: 786238 - DNA, 19 bp, Mus musculus
  siRNA target sequence for 2810446P07Rik (NM_175187.3,168-186).
gattatacctcactattct

SEQ ID NO: 786239 - DNA, 19 bp, Mus musculus
  siRNA target sequence for 2810446P07Rik (NM_175187.3,204-222).
ctgtaatggcagtttgaga

SEQ ID NO: 786240 - DNA, 19 bp, Mus musculus
  siRNA target sequence for 2810446P07Rik (NM_175187.3,235-253).
ccttccgaagaagaattaa

SEQ ID NO: 786241 - DNA, 19 bp, Mus musculus
  siRNA target sequence for 2810446P07Rik (NM_175187.3,327-345).
gccactaaccattccaaaa

SEQ ID NO: 786242 - DNA, 19 bp, Mus musculus
  siRNA target sequence for 2810446P07Rik (NM_175187.3,329-347).
cactaaccattccaaaaga

SEQ ID NO: 786243 - DNA, 19 bp, Mus musculus
  siRNA target sequence for 2810446P07Rik (NM_175187.3,331-349).
ctaaccattccaaaagaca

SEQ ID NO: 786244 - DNA, 19 bp, Mus musculus
  siRNA target sequence for 2810446P07Rik (NM_175187.3,335-353).
ccattccaaaagacattga

SEQ ID NO: 786245 - DNA, 19 bp, Mus musculus
  siRNA target sequence for 2810446P07Rik (NM_175187.3,444-462).
ggctgctaccattgtctat

SEQ ID NO: 786246 - DNA, 19 bp, Mus musculus
  siRNA target sequence for 2810446P07Rik (NM_175187.3,475-493).
gtctattacagcttcatga

SEQ ID NO: 786247 - DNA, 19 bp, Mus musculus
  siRNA target sequence for 2810446P07Rik (NM_175187.3,497-515).
ctacacaggaaatgaatat

SEQ ID NO: 786248 - DNA, 19 bp, Mus musculus
  siRNA target sequence for 2810446P07Rik (NM_175187.3,528-546).
gtgcctcctggttttgtct

SEQ ID NO: 786249 - DNA, 19 bp, Mus musculus
  siRNA target sequence for 2810446P07Rik (NM_175187.3,605-623).
gtgaaaggtcagtttgtgt

SEQ ID NO: 786250 - DNA, 19 bp, Mus musculus
  siRNA target sequence for 2810446P07Rik (NM_175187.3,616-634).
gtttgtgtcacctttggat

SEQ ID NO: 786251 - DNA, 19 bp, Mus musculus
  siRNA target sequence for 2810446P07Rik (NM_175187.3,659-677).
cagttttgatcgtaacaga

SEQ ID NO: 786252 - DNA, 19 bp, Mus musculus
  siRNA target sequence for 2810446P07Rik (NM_175187.3,696-714).
ccttgaaacagggtttaca

SEQ ID NO: 786253 - DNA, 19 bp, Mus musculus
  siRNA target sequence for 2810446P07Rik (NM_175187.3,697-715).
cttgaaacagggtttacaa

SEQ ID NO: 786254 - DNA, 19 bp, Mus musculus
  siRNA target sequence for 2810446P07Rik (NM_175187.3,707-725).
ggtttacaaatttttcaga

SEQ ID NO: 786255 - DNA, 19 bp, Mus musculus
  siRNA target sequence for 2810446P07Rik (NM_175187.3,726-744).
cagtgcaatgcagtttctt

SEQ ID NO: 786256 - DNA, 19 bp, Mus musculus
  siRNA target sequence for 2810446P07Rik (NM_175187.3,771-789).
ccctgtttcaaaacttact

SEQ ID NO: 786257 - DNA, 19 bp, Mus musculus
  siRNA target sequence for 2810446P07Rik (NM_175187.3,848-866).
gattacggctggctcaaat

SEQ ID NO: 786258 - DNA, 19 bp, Mus musculus
  siRNA target sequence for 2810446P07Rik (NM_175187.3,933-951).
ggcacctttatttatggtt

SEQ ID NO: 786259 - DNA, 19 bp, Mus musculus
  siRNA target sequence for 2810446P07Rik (NM_175187.3,968-986).
caatcaccaaagactatat

SEQ ID NO: 786260 - DNA, 19 bp, Mus musculus
  siRNA target sequence for 2810446P07Rik (NM_175187.3,1011-1029).
gagtgtccctctaatgaca

SEQ ID NO: 786261 - DNA, 19 bp, Mus musculus
  siRNA target sequence for 2810446P07Rik (NM_175187.3,1046-1064).
ctcttcgactctggttaat

SEQ ID NO: 786262 - DNA, 19 bp, Mus musculus
  siRNA target sequence for 2810446P07Rik (NM_175187.3,1159-1177).
gaagctggccgaataagta

SEQ ID NO: 786263 - DNA, 19 bp, Mus musculus
  siRNA target sequence for 2810446P07Rik (NM_175187.3,1365-1383).
ctcggcttaccctgaacta

SEQ ID NO: 786264 - DNA, 19 bp, Mus musculus
  siRNA target sequence for 2810446P07Rik (NM_175187.3,1408-1426).
gtaactgttacacaaatca

SEQ ID NO: 786265 - DNA, 19 bp, Mus musculus
  siRNA target sequence for 2810446P07Rik (NM_175187.3,1429-1447).
gtggccctgagcagcttaa

SEQ ID NO: 786266 - DNA, 19 bp, Mus musculus
  siRNA target sequence for 2810446P07Rik (NM_175187.3,1455-1473).
cttcacgcctctccttttt

SEQ ID NO: 786267 - DNA, 19 bp, Mus musculus
  siRNA target sequence for 2810446P07Rik (NM_175187.3,1458-1476).
cacgcctctcctttttcga

SEQ ID NO: 786268 - DNA, 19 bp, Mus musculus
  siRNA target sequence for 2810446P07Rik (NM_175187.3,1477-1495).
ggacttctgtcatttttga

SEQ ID NO: 786269 - DNA, 19 bp, Mus musculus
  siRNA target sequence for 2810446P07Rik (NM_175187.3,1538-1556).
ggcttttctatcatcagta

SEQ ID NO: 786270 - DNA, 19 bp, Mus musculus
  siRNA target sequence for 2810446P07Rik (NM_175187.3,1545-1563).
ctatcatcagtatttgaca

SEQ ID NO: 786271 - DNA, 19 bp, Mus musculus
  siRNA target sequence for 2900024D24Rik (NM_175188.2,309-327).
ctccaccaatggatcaaga

SEQ ID NO: 786272 - DNA, 19 bp, Mus musculus
  siRNA target sequence for 2900024D24Rik (NM_175188.2,355-373).
gcaagtatgacttcataat

SEQ ID NO: 786273 - DNA, 19 bp, Mus musculus
  siRNA target sequence for 2900024D24Rik (NM_175188.2,424-442).
cgagcgaaaggaggaaaat

SEQ ID NO: 786274 - DNA, 19 bp, Mus musculus
  siRNA target sequence for 2900024D24Rik (NM_175188.2,494-512).
cttgtatgtgttgatagat

SEQ ID NO: 786275 - DNA, 19 bp, Mus musculus
  siRNA target sequence for 2900024D24Rik (NM_175188.2,604-622).
cgggaggtctcgtcttcat

SEQ ID NO: 786276 - DNA, 19 bp, Mus musculus
  siRNA target sequence for 2900024D24Rik (NM_175188.2,607-625).
gaggtctcgtcttcatgta

SEQ ID NO: 786277 - DNA, 19 bp, Mus musculus
  siRNA target sequence for 2900024D24Rik (NM_175188.2,610-628).
gtctcgtcttcatgtatgt

SEQ ID NO: 786278 - DNA, 19 bp, Mus musculus
  siRNA target sequence for 2900024D24Rik (NM_175188.2,681-699).
gtgatctttgtgcagaatt

SEQ ID NO: 786279 - DNA, 19 bp, Mus musculus
  siRNA target sequence for 2900024D24Rik (NM_175188.2,725-743).
gaagaacttcccgtgtaat

SEQ ID NO: 786280 - DNA, 19 bp, Mus musculus
  siRNA target sequence for 2900042E01Rik (NM_175189.2,678-696).
gtcaagatcactgtgtata

SEQ ID NO: 786281 - DNA, 19 bp, Mus musculus
  siRNA target sequence for 2900042E01Rik (NM_175189.2,680-698).
caagatcactgtgtataga

SEQ ID NO: 786282 - DNA, 19 bp, Mus musculus
  siRNA target sequence for 2900042E01Rik (NM_175189.2,683-701).
gatcactgtgtatagaaga

SEQ ID NO: 786283 - DNA, 19 bp, Mus musculus
  siRNA target sequence for 2900042E01Rik (NM_175189.2,708-726).
ctctatatcatcttgtcta

SEQ ID NO: 786284 - DNA, 19 bp, Mus musculus
  siRNA target sequence for 2900042E01Rik (NM_175189.2,830-848).
ggaatacatggatcagaat

SEQ ID NO: 786285 - DNA, 19 bp, Mus musculus
  siRNA target sequence for 2900042E01Rik (NM_175189.2,908-926).
gaacccaatggcactctat

SEQ ID NO: 786286 - DNA, 19 bp, Mus musculus
  siRNA target sequence for 2900010J23Rik (NM_175190.2,242-260).
gccttgagctctgacatta

SEQ ID NO: 786287 - DNA, 19 bp, Mus musculus
  siRNA target sequence for 2900010J23Rik (NM_175190.2,249-267).
gctctgacattaagaaact

SEQ ID NO: 786288 - DNA, 19 bp, Mus musculus
  siRNA target sequence for 2900010J23Rik (NM_175190.2,295-313).
ggagatctcccagttaata

SEQ ID NO: 786289 - DNA, 19 bp, Mus musculus
  siRNA target sequence for 2900010J23Rik (NM_175190.2,354-372).
ccctcctccatgagtacaa

SEQ ID NO: 786290 - DNA, 19 bp, Mus musculus
  siRNA target sequence for 2900010J23Rik (NM_175190.2,355-373).
cctcctccatgagtacaat

SEQ ID NO: 786291 - DNA, 19 bp, Mus musculus
  siRNA target sequence for 2900010J23Rik (NM_175190.2,428-446).
gttaccaccaaggagttat

SEQ ID NO: 786292 - DNA, 19 bp, Mus musculus
  siRNA target sequence for 2900010J23Rik (NM_175190.2,433-451).
caccaaggagttatatcca

SEQ ID NO: 786293 - DNA, 19 bp, Mus musculus
  siRNA target sequence for 2900010J23Rik (NM_175190.2,439-457).
ggagttatatccagatttt

SEQ ID NO: 786294 - DNA, 19 bp, Mus musculus
  siRNA target sequence for 2900052N01Rik (NM_175192.2,544-562).
ccccctggttatactatga

SEQ ID NO: 786295 - DNA, 19 bp, Mus musculus
  siRNA target sequence for 2900052N01Rik (NM_175192.2,545-563).
cccctggttatactatgat

SEQ ID NO: 786296 - DNA, 19 bp, Mus musculus
  siRNA target sequence for 2900052N01Rik (NM_175192.2,551-569).
gttatactatgatgtttca

SEQ ID NO: 786297 - DNA, 19 bp, Mus musculus
  siRNA target sequence for 2900052N01Rik (NM_175192.2,638-656).
caaaagaaatttctattct

SEQ ID NO: 786298 - DNA, 19 bp, Mus musculus
  siRNA target sequence for 2900052N01Rik (NM_175192.2,704-722).
gttctaaagcaatgataga

SEQ ID NO: 786299 - DNA, 19 bp, Mus musculus
  siRNA target sequence for 2900052N01Rik (NM_175192.2,707-725).
ctaaagcaatgatagataa

SEQ ID NO: 786300 - DNA, 19 bp, Mus musculus
  siRNA target sequence for 3110027H23Rik (NM_175193.2,737-755).
gcccagttgcaagttgtat

SEQ ID NO: 786301 - DNA, 19 bp, Mus musculus
  siRNA target sequence for 3110027H23Rik (NM_175193.2,738-756).
cccagttgcaagttgtata

SEQ ID NO: 786302 - DNA, 19 bp, Mus musculus
  siRNA target sequence for 3110027H23Rik (NM_175193.2,739-757).
ccagttgcaagttgtatat

SEQ ID NO: 786303 - DNA, 19 bp, Mus musculus
  siRNA target sequence for 3110027H23Rik (NM_175193.2,742-760).
gttgcaagttgtatatgaa

SEQ ID NO: 786304 - DNA, 19 bp, Mus musculus
  siRNA target sequence for 3110027H23Rik (NM_175193.2,763-781).
cagatcaagattagagaaa

SEQ ID NO: 786305 - DNA, 19 bp, Mus musculus
  siRNA target sequence for 3110027H23Rik (NM_175193.2,768-786).
caagattagagaaatcttt

SEQ ID NO: 786306 - DNA, 19 bp, Mus musculus
  siRNA target sequence for 3110027H23Rik (NM_175193.2,820-838).
ggaagatttccttgtttat

SEQ ID NO: 786307 - DNA, 19 bp, Mus musculus
  siRNA target sequence for 3110027H23Rik (NM_175193.2,878-896).
gattccaatagcagatata

SEQ ID NO: 786308 - DNA, 19 bp, Mus musculus
  siRNA target sequence for 3110027H23Rik (NM_175193.2,888-906).
gcagatatagtgcattgaa

SEQ ID NO: 786309 - DNA, 19 bp, Mus musculus
  siRNA target sequence for 3110027H23Rik (NM_175193.2,889-907).
cagatatagtgcattgaat

SEQ ID NO: 786310 - DNA, 19 bp, Mus musculus
  siRNA target sequence for 3110027H23Rik (NM_175193.2,891-909).
gatatagtgcattgaatgt

SEQ ID NO: 786311 - DNA, 19 bp, Mus musculus
  siRNA target sequence for 3110027H23Rik (NM_175193.2,900-918).
cattgaatgtccaacatca

SEQ ID NO: 786312 - DNA, 19 bp, Mus musculus
  siRNA target sequence for 3110027H23Rik (NM_175193.2,997-1015).
cttcagtagaacgttcaat

SEQ ID NO: 786313 - DNA, 19 bp, Mus musculus
  siRNA target sequence for 3110027H23Rik (NM_175193.2,1103-1121).
gagaatagacaactaagaa

SEQ ID NO: 786314 - DNA, 19 bp, Mus musculus
  siRNA target sequence for 3110027H23Rik (NM_175193.2,1119-1137).
gaaaagcacaccaagacat

SEQ ID NO: 786315 - DNA, 19 bp, Mus musculus
  siRNA target sequence for 3110027H23Rik (NM_175193.2,1201-1219).
gaacaggattccaagcttt

SEQ ID NO: 786316 - DNA, 19 bp, Mus musculus
  siRNA target sequence for 3110027H23Rik (NM_175193.2,1207-1225).
gattccaagctttcgaaat

SEQ ID NO: 786317 - DNA, 19 bp, Mus musculus
  siRNA target sequence for 3110027H23Rik (NM_175193.2,1231-1249).
cccagtcgagcagcaaaat

SEQ ID NO: 786318 - DNA, 19 bp, Mus musculus
  siRNA target sequence for 3110027H23Rik (NM_175193.2,1235-1253).
gtcgagcagcaaaatgtca

SEQ ID NO: 786319 - DNA, 19 bp, Mus musculus
  siRNA target sequence for 3110027H23Rik (NM_175193.2,1339-1357).
cgaagcagggcctagaaga

SEQ ID NO: 786320 - DNA, 19 bp, Mus musculus
  siRNA target sequence for 3110027H23Rik (NM_175193.2,1340-1358).
gaagcagggcctagaagaa

SEQ ID NO: 786321 - DNA, 19 bp, Mus musculus
  siRNA target sequence for 3110027H23Rik (NM_175193.2,1646-1664).
gcagctacaaacttccaat

SEQ ID NO: 786322 - DNA, 19 bp, Mus musculus
  siRNA target sequence for 3110027H23Rik (NM_175193.2,1723-1741).
ccagcggctgagagaacat

SEQ ID NO: 786323 - DNA, 19 bp, Mus musculus
  siRNA target sequence for 3110027H23Rik (NM_175193.2,1766-1784).
ctccatgggcagttgctaa

SEQ ID NO: 786324 - DNA, 19 bp, Mus musculus
  siRNA target sequence for 3110027H23Rik (NM_175193.2,1881-1899).
ggcagcaagctcattacaa

SEQ ID NO: 786325 - DNA, 19 bp, Mus musculus
  siRNA target sequence for 3110027H23Rik (NM_175193.2,1965-1983).
cctatgacagagataacca

SEQ ID NO: 786326 - DNA, 19 bp, Mus musculus
  siRNA target sequence for 3110027H23Rik (NM_175193.2,2116-2134).
caatcaaggcgaagatgaa

SEQ ID NO: 786327 - DNA, 19 bp, Mus musculus
  siRNA target sequence for 3110027H23Rik (NM_175193.2,2146-2164).
cgagcaagtgagagaagaa

SEQ ID NO: 786328 - DNA, 19 bp, Mus musculus
  siRNA target sequence for 3110027H23Rik (NM_175193.2,2263-2281).
gcaggaggataatgttgat

SEQ ID NO: 786329 - DNA, 19 bp, Mus musculus
  siRNA target sequence for 3110027H23Rik (NM_175193.2,2343-2361).
gggaaatggagcataatgt

SEQ ID NO: 786330 - DNA, 19 bp, Mus musculus
  siRNA target sequence for 3110027H23Rik (NM_175193.2,2375-2393).
ggtgaacatcctgatgata

SEQ ID NO: 786331 - DNA, 19 bp, Mus musculus
  siRNA target sequence for 3110027H23Rik (NM_175193.2,2381-2399).
catcctgatgataagaata

SEQ ID NO: 786332 - DNA, 19 bp, Mus musculus
  siRNA target sequence for 3110027H23Rik (NM_175193.2,2425-2443).
caacagggcgcatcctaaa

SEQ ID NO: 786333 - DNA, 19 bp, Mus musculus
  siRNA target sequence for 3110027H23Rik (NM_175193.2,2428-2446).
cagggcgcatcctaaagga

SEQ ID NO: 786334 - DNA, 19 bp, Mus musculus
  siRNA target sequence for 3110027H23Rik (NM_175193.2,2510-2528).
catcgcagagctgaaatgt

SEQ ID NO: 786335 - DNA, 19 bp, Mus musculus
  siRNA target sequence for 3110056O03Rik (NM_175195.2,801-819).
gcctggtctacgtgatcat

SEQ ID NO: 786336 - DNA, 19 bp, Mus musculus
  siRNA target sequence for 3110056O03Rik (NM_175195.2,812-830).
gtgatcattggaatcttct

SEQ ID NO: 786337 - DNA, 19 bp, Mus musculus
  siRNA target sequence for 3110056O03Rik (NM_175195.2,996-1014).
ggggtatcttccgaaatga

SEQ ID NO: 786338 - DNA, 19 bp, Mus musculus
  siRNA target sequence for 3110056O03Rik (NM_175195.2,1354-1372).
ctactgtcacaggtttgat

SEQ ID NO: 786339 - DNA, 19 bp, Mus musculus
  siRNA target sequence for 3110056O03Rik (NM_175195.2,1359-1377).
gtcacaggtttgatatcca

SEQ ID NO: 786340 - DNA, 19 bp, Mus musculus
  siRNA target sequence for 3110056O03Rik (NM_175195.2,1378-1396).
ggtgcagtcctccagaatt

SEQ ID NO: 786341 - DNA, 19 bp, Mus musculus
  siRNA target sequence for 3110056O03Rik (NM_175195.2,1379-1397).
gtgcagtcctccagaattt

SEQ ID NO: 786342 - DNA, 19 bp, Mus musculus
  siRNA target sequence for 3110056O03Rik (NM_175195.2,1384-1402).
gtcctccagaatttacttt

SEQ ID NO: 786343 - DNA, 19 bp, Mus musculus
  siRNA target sequence for 1700055D18Rik (NM_175197.2,91-109).
gcgagcttcacaatgagta

SEQ ID NO: 786344 - DNA, 19 bp, Mus musculus
  siRNA target sequence for 1700055D18Rik (NM_175197.2,96-114).
cttcacaatgagtaggaaa

SEQ ID NO: 786345 - DNA, 19 bp, Mus musculus
  siRNA target sequence for 1700055D18Rik (NM_175197.2,111-129).
gaaatgccgtcggtctaat

SEQ ID NO: 786346 - DNA, 19 bp, Mus musculus
  siRNA target sequence for 1700055D18Rik (NM_175197.2,172-190).
cagacgtccagcatagcaa

SEQ ID NO: 786347 - DNA, 19 bp, Mus musculus
  siRNA target sequence for 1700055D18Rik (NM_175197.2,229-247).
gccatcaactccagaatca

SEQ ID NO: 786348 - DNA, 19 bp, Mus musculus
  siRNA target sequence for 1700055D18Rik (NM_175197.2,230-248).
ccatcaactccagaatcaa

SEQ ID NO: 786349 - DNA, 19 bp, Mus musculus
  siRNA target sequence for 1700055D18Rik (NM_175197.2,254-272).
cagtcgccaccaccttaaa

SEQ ID NO: 786350 - DNA, 19 bp, Mus musculus
  siRNA target sequence for 1700055D18Rik (NM_175197.2,356-374).
ggcctcttgcggtatacca

SEQ ID NO: 786351 - DNA, 19 bp, Mus musculus
  siRNA target sequence for 1700055D18Rik (NM_175197.2,375-393).
ccgagcagtaaaatcaaga

SEQ ID NO: 786352 - DNA, 19 bp, Mus musculus
  siRNA target sequence for 1700055D18Rik (NM_175197.2,376-394).
cgagcagtaaaatcaagat

SEQ ID NO: 786353 - DNA, 19 bp, Mus musculus
  siRNA target sequence for 1700055D18Rik (NM_175197.2,459-477).
gtgtttactgggcttatca

SEQ ID NO: 786354 - DNA, 19 bp, Mus musculus
  siRNA target sequence for 1700055D18Rik (NM_175197.2,468-486).
gggcttatcaccatggttt

SEQ ID NO: 786355 - DNA, 19 bp, Mus musculus
  siRNA target sequence for 1700055D18Rik (NM_175197.2,508-526).
caaacaaaccgtagactaa

SEQ ID NO: 786356 - DNA, 19 bp, Mus musculus
  siRNA target sequence for 1700055D18Rik (NM_175197.2,512-530).
caaaccgtagactaaagct

SEQ ID NO: 786357 - DNA, 19 bp, Mus musculus
  siRNA target sequence for 1700058C01Rik (NM_175198.2,729-747).
ggacccgggtgaaagaaca

SEQ ID NO: 786358 - DNA, 19 bp, Mus musculus
  siRNA target sequence for 1700058C01Rik (NM_175198.2,1182-1200).
ggagaagtgcctataagga

SEQ ID NO: 786359 - DNA, 19 bp, Mus musculus
  siRNA target sequence for 1700058C01Rik (NM_175198.2,1271-1289).
ctggcaaggcctctagatt

SEQ ID NO: 786360 - DNA, 19 bp, Mus musculus
  siRNA target sequence for 1700058C01Rik (NM_175198.2,1314-1332).
gaggagtccctagatcata

SEQ ID NO: 786361 - DNA, 19 bp, Mus musculus
  siRNA target sequence for 1700058C01Rik (NM_175198.2,1317-1335).
gagtccctagatcatatca

SEQ ID NO: 786362 - DNA, 19 bp, Mus musculus
  siRNA target sequence for 1700058C01Rik (NM_175198.2,1319-1337).
gtccctagatcatatcaga

SEQ ID NO: 786363 - DNA, 19 bp, Mus musculus
  siRNA target sequence for 1700058C01Rik (NM_175198.2,1334-1352).
cagagtcccctaccaaatt

SEQ ID NO: 786364 - DNA, 19 bp, Mus musculus
  siRNA target sequence for 1700058C01Rik (NM_175198.2,1336-1354).
gagtcccctaccaaattgt

SEQ ID NO: 786365 - DNA, 19 bp, Mus musculus
  siRNA target sequence for 1700058C01Rik (NM_175198.2,1374-1392).
cccacacctgggaaaatca

SEQ ID NO: 786366 - DNA, 19 bp, Mus musculus
  siRNA target sequence for 1700058C01Rik (NM_175198.2,1666-1684).
cctgaagaaggccaaacta

SEQ ID NO: 786367 - DNA, 19 bp, Mus musculus
  siRNA target sequence for 1700058C01Rik (NM_175198.2,1904-1922).
gttctcaatacacactata

SEQ ID NO: 786368 - DNA, 19 bp, Mus musculus
  siRNA target sequence for 1700058C01Rik (NM_175198.2,2000-2018).
gtcttggcagggaaagatt

SEQ ID NO: 786369 - DNA, 19 bp, Mus musculus
  siRNA target sequence for 1700058C01Rik (NM_175198.2,2041-2059).
catttacaaggttatctca

SEQ ID NO: 786370 - DNA, 19 bp, Mus musculus
  siRNA target sequence for 1700058C01Rik (NM_175198.2,2077-2095).
cccagagatgctcaaatca

SEQ ID NO: 786371 - DNA, 19 bp, Mus musculus
  siRNA target sequence for 1700052H20Rik (NM_175200.2,428-446).
ggtctcagagtgatgaaat

SEQ ID NO: 786372 - DNA, 19 bp, Mus musculus
  siRNA target sequence for 1700052H20Rik (NM_175200.2,439-457).
gatgaaatggcaatagcaa

SEQ ID NO: 786373 - DNA, 19 bp, Mus musculus
  siRNA target sequence for 1700052H20Rik (NM_175200.2,464-482).
caccgaacttgataccatt

SEQ ID NO: 786374 - DNA, 19 bp, Mus musculus
  siRNA target sequence for 1700052H20Rik (NM_175200.2,496-514).
ggctgtctggcgattcaca

SEQ ID NO: 786375 - DNA, 19 bp, Mus musculus
  siRNA target sequence for 1700052H20Rik (NM_175200.2,498-516).
ctgtctggcgattcacata

SEQ ID NO: 786376 - DNA, 19 bp, Mus musculus
  siRNA target sequence for 1700052H20Rik (NM_175200.2,500-518).
gtctggcgattcacataaa

SEQ ID NO: 786377 - DNA, 19 bp, Mus musculus
  siRNA target sequence for 1700052H20Rik (NM_175200.2,502-520).
ctggcgattcacataaaga

SEQ ID NO: 786378 - DNA, 19 bp, Mus musculus
  siRNA target sequence for 1700052H20Rik (NM_175200.2,521-539).
gctgtagacagttttctca

SEQ ID NO: 786379 - DNA, 19 bp, Mus musculus
  siRNA target sequence for 1700052H20Rik (NM_175200.2,617-635).
gtcacttgaaagctgttaa

SEQ ID NO: 786380 - DNA, 19 bp, Mus musculus
  siRNA target sequence for 1700052H20Rik (NM_175200.2,624-642).
gaaagctgttaataatgaa

SEQ ID NO: 786381 - DNA, 19 bp, Mus musculus
  siRNA target sequence for 1700052H20Rik (NM_175200.2,645-663).
gaaccttgtacttaggttt

SEQ ID NO: 786382 - DNA, 19 bp, Mus musculus
  siRNA target sequence for 1700052H20Rik (NM_175200.2,664-682).
ggcgagatgaagtactttt

SEQ ID NO: 786383 - DNA, 19 bp, Mus musculus
  siRNA target sequence for 1700052H20Rik (NM_175200.2,666-684).
cgagatgaagtacttttct

SEQ ID NO: 786384 - DNA, 19 bp, Mus musculus
  siRNA target sequence for 1700052H20Rik (NM_175200.2,706-724).
gatgatgagcggaatttta

SEQ ID NO: 786385 - DNA, 19 bp, Mus musculus
  siRNA target sequence for 1700052H20Rik (NM_175200.2,709-727).
gatgagcggaattttattt

SEQ ID NO: 786386 - DNA, 19 bp, Mus musculus
  siRNA target sequence for 1700052H20Rik (NM_175200.2,777-795).
cttaggcggtgcagaatca

SEQ ID NO: 786387 - DNA, 19 bp, Mus musculus
  siRNA target sequence for 1700052H20Rik (NM_175200.2,788-806).
cagaatcacatctttatga

SEQ ID NO: 786388 - DNA, 19 bp, Mus musculus
  siRNA target sequence for 1700052H20Rik (NM_175200.2,816-834).
gaaaggctgctttactgaa

SEQ ID NO: 786389 - DNA, 19 bp, Mus musculus
  siRNA target sequence for 1700052H20Rik (NM_175200.2,820-838).
ggctgctttactgaagtaa

SEQ ID NO: 786390 - DNA, 19 bp, Mus musculus
  siRNA target sequence for 1700052H20Rik (NM_175200.2,821-839).
gctgctttactgaagtaat

SEQ ID NO: 786391 - DNA, 19 bp, Mus musculus
  siRNA target sequence for 1700052H20Rik (NM_175200.2,830-848).
ctgaagtaatgcacttgat

SEQ ID NO: 786392 - DNA, 19 bp, Mus musculus
  siRNA target sequence for 1700052H20Rik (NM_175200.2,1002-1020).
ccctgtcacaaatgttatt

SEQ ID NO: 786393 - DNA, 19 bp, Mus musculus
  siRNA target sequence for 1700052H20Rik (NM_175200.2,1003-1021).
cctgtcacaaatgttatta

SEQ ID NO: 786394 - DNA, 19 bp, Mus musculus
  siRNA target sequence for 1700052H20Rik (NM_175200.2,1036-1054).
gaatacccggcattcttat

SEQ ID NO: 786395 - DNA, 19 bp, Mus musculus
  siRNA target sequence for 1700052H20Rik (NM_175200.2,1139-1157).
gggaaaggttggaaagaat

SEQ ID NO: 786396 - DNA, 19 bp, Mus musculus
  siRNA target sequence for 1700052H20Rik (NM_175200.2,1187-1205).
ggatagaaaaagctgatta

SEQ ID NO: 786397 - DNA, 19 bp, Mus musculus
  siRNA target sequence for 1700052H20Rik (NM_175200.2,1188-1206).
gatagaaaaagctgattat

SEQ ID NO: 786398 - DNA, 19 bp, Mus musculus
  siRNA target sequence for 1700052H20Rik (NM_175200.2,1242-1260).
ggataataagggaagtagt

SEQ ID NO: 786399 - DNA, 19 bp, Mus musculus
  siRNA target sequence for 1700052H20Rik (NM_175200.2,1243-1261).
gataataagggaagtagta

SEQ ID NO: 786400 - DNA, 19 bp, Mus musculus
  siRNA target sequence for 1700052H20Rik (NM_175200.2,1294-1312).
gagcttgaaaggacaacat

SEQ ID NO: 786401 - DNA, 19 bp, Mus musculus
  siRNA target sequence for 1700052H20Rik (NM_175200.2,1300-1318).
gaaaggacaacatacgata

SEQ ID NO: 786402 - DNA, 19 bp, Mus musculus
  siRNA target sequence for 1700052H20Rik (NM_175200.2,1304-1322).
ggacaacatacgatattca

SEQ ID NO: 786403 - DNA, 19 bp, Mus musculus
  siRNA target sequence for 1700052H20Rik (NM_175200.2,1305-1323).
gacaacatacgatattcat

SEQ ID NO: 786404 - DNA, 19 bp, Mus musculus
  siRNA target sequence for 1700052H20Rik (NM_175200.2,1307-1325).
caacatacgatattcatca

SEQ ID NO: 786405 - DNA, 19 bp, Mus musculus
  siRNA target sequence for 1700052H20Rik (NM_175200.2,1314-1332).
cgatattcatcacagaaaa

SEQ ID NO: 786406 - DNA, 19 bp, Mus musculus
  siRNA target sequence for 1700052H20Rik (NM_175200.2,1336-1354).
gaagctatttcaaatgagt

SEQ ID NO: 786407 - DNA, 19 bp, Mus musculus
  siRNA target sequence for 1700052H20Rik (NM_175200.2,1372-1390).
cgggtcataccagttttaa

SEQ ID NO: 786408 - DNA, 19 bp, Mus musculus
  siRNA target sequence for 1700052H20Rik (NM_175200.2,1373-1391).
gggtcataccagttttaaa

SEQ ID NO: 786409 - DNA, 19 bp, Mus musculus
  siRNA target sequence for 1700052H20Rik (NM_175200.2,1392-1410).
ggtgttggaccaaaattat

SEQ ID NO: 786410 - DNA, 19 bp, Mus musculus
  siRNA target sequence for 1700052H20Rik (NM_175200.2,1393-1411).
gtgttggaccaaaattatt

SEQ ID NO: 786411 - DNA, 19 bp, Mus musculus
  siRNA target sequence for 1700052H20Rik (NM_175200.2,1412-1430).
cagaggtatttttacctaa

SEQ ID NO: 786412 - DNA, 19 bp, Mus musculus
  siRNA target sequence for 1700052H20Rik (NM_175200.2,1414-1432).
gaggtatttttacctaaaa

SEQ ID NO: 786413 - DNA, 19 bp, Mus musculus
  siRNA target sequence for 1700052H20Rik (NM_175200.2,1443-1461).
cacaccgctggaagatgtt

SEQ ID NO: 786414 - DNA, 19 bp, Mus musculus
  siRNA target sequence for 1700052H20Rik (NM_175200.2,1555-1573).
gagaggaaaagtatagtat

SEQ ID NO: 786415 - DNA, 19 bp, Mus musculus
  siRNA target sequence for 1700052H20Rik (NM_175200.2,1641-1659).
ggtaaagttgagacattta

SEQ ID NO: 786416 - DNA, 19 bp, Mus musculus
  siRNA target sequence for 1700052H20Rik (NM_175200.2,1661-1679).
ccataagtcctgagagaat

SEQ ID NO: 786417 - DNA, 19 bp, Mus musculus
  siRNA target sequence for 1700052H20Rik (NM_175200.2,1686-1704).
gaggaatttaggtttctct

SEQ ID NO: 786418 - DNA, 19 bp, Mus musculus
  siRNA target sequence for Rnf38 (NM_175201.2,387-405).
ccaagtgatcagaacacta

SEQ ID NO: 786419 - DNA, 19 bp, Mus musculus
  siRNA target sequence for Rnf38 (NM_175201.2,476-494).
cctctctcattcagtcttt

SEQ ID NO: 786420 - DNA, 19 bp, Mus musculus
  siRNA target sequence for Rnf38 (NM_175201.2,479-497).
ctctcattcagtctttgat

SEQ ID NO: 786421 - DNA, 19 bp, Mus musculus
  siRNA target sequence for Rnf38 (NM_175201.2,672-690).
cgtctgtctcgacataatt

SEQ ID NO: 786422 - DNA, 19 bp, Mus musculus
  siRNA target sequence for Rnf38 (NM_175201.2,675-693).
ctgtctcgacataattcca

SEQ ID NO: 786423 - DNA, 19 bp, Mus musculus
  siRNA target sequence for Rnf38 (NM_175201.2,761-779).
cttccaccctccgaatgta

SEQ ID NO: 786424 - DNA, 19 bp, Mus musculus
  siRNA target sequence for Rnf38 (NM_175201.2,873-891).
gtctcctacacggtaacta

SEQ ID NO: 786425 - DNA, 19 bp, Mus musculus
  siRNA target sequence for Rnf38 (NM_175201.2,1043-1061).
gcacttaccagtaccatat

SEQ ID NO: 786426 - DNA, 19 bp, Mus musculus
  siRNA target sequence for Rnf38 (NM_175201.2,1046-1064).
cttaccagtaccatatgct

SEQ ID NO: 786427 - DNA, 19 bp, Mus musculus
  siRNA target sequence for Rnf38 (NM_175201.2,1084-1102).
ctagcgatccgtttcttat

SEQ ID NO: 786428 - DNA, 19 bp, Mus musculus
  siRNA target sequence for Rnf38 (NM_175201.2,1087-1105).
gcgatccgtttcttataca

SEQ ID NO: 786429 - DNA, 19 bp, Mus musculus
  siRNA target sequence for Rnf38 (NM_175201.2,1088-1106).
cgatccgtttcttatacat

SEQ ID NO: 786430 - DNA, 19 bp, Mus musculus
  siRNA target sequence for Rnf38 (NM_175201.2,1154-1172).
ccaatttgtccctttccaa

SEQ ID NO: 786431 - DNA, 19 bp, Mus musculus
  siRNA target sequence for Rnf38 (NM_175201.2,1217-1235).
ggagctcttaggagaacat

SEQ ID NO: 786432 - DNA, 19 bp, Mus musculus
  siRNA target sequence for Rnf38 (NM_175201.2,1236-1254).
cttcaagtaggcagtttta

SEQ ID NO: 786433 - DNA, 19 bp, Mus musculus
  siRNA target sequence for Rnf38 (NM_175201.2,1313-1331).
gacacatgaccctttgcat

SEQ ID NO: 786434 - DNA, 19 bp, Mus musculus
  siRNA target sequence for Rnf38 (NM_175201.2,1380-1398).
ctcacaggacgtagtagat

SEQ ID NO: 786435 - DNA, 19 bp, Mus musculus
  siRNA target sequence for Rnf38 (NM_175201.2,1446-1464).
ctaccatacgtgctatcaa

SEQ ID NO: 786436 - DNA, 19 bp, Mus musculus
  siRNA target sequence for Rnf38 (NM_175201.2,1491-1509).
ccaaccttcagctttgaat

SEQ ID NO: 786437 - DNA, 19 bp, Mus musculus
  siRNA target sequence for Rnf38 (NM_175201.2,1595-1613).
gactaaagcagatattgaa

SEQ ID NO: 786438 - DNA, 19 bp, Mus musculus
  siRNA target sequence for Rnf38 (NM_175201.2,1597-1615).
ctaaagcagatattgaaca

SEQ ID NO: 786439 - DNA, 19 bp, Mus musculus
  siRNA target sequence for Rnf38 (NM_175201.2,1658-1676).
gcagactttgtgtgtagta

SEQ ID NO: 786440 - DNA, 19 bp, Mus musculus
  siRNA target sequence for Rnf38 (NM_175201.2,1663-1681).
ctttgtgtgtagtatgcat

SEQ ID NO: 786441 - DNA, 19 bp, Mus musculus
  siRNA target sequence for Rnf38 (NM_175201.2,1700-1718).
gcagcttcttagagtctta

SEQ ID NO: 786442 - DNA, 19 bp, Mus musculus
  siRNA target sequence for 4833408A19Rik (NM_175203.2,192-210).
ggcgggttttgctgctatt

SEQ ID NO: 786443 - DNA, 19 bp, Mus musculus
  siRNA target sequence for 4833408A19Rik (NM_175203.2,277-295).
cagagcgccacctaaagga

SEQ ID NO: 786444 - DNA, 19 bp, Mus musculus
  siRNA target sequence for 4833408A19Rik (NM_175203.2,339-357).
ggccagcttcgcttgagtt

SEQ ID NO: 786445 - DNA, 19 bp, Mus musculus
  siRNA target sequence for 4833408A19Rik (NM_175203.2,344-362).
gcttcgcttgagtttcttt

SEQ ID NO: 786446 - DNA, 19 bp, Mus musculus
  siRNA target sequence for 4833408A19Rik (NM_175203.2,364-382).
cagggacttccctatctgt

SEQ ID NO: 786447 - DNA, 19 bp, Mus musculus
  siRNA target sequence for 4833408A19Rik (NM_175203.2,408-426).
ctccggaacgcttgagtaa

SEQ ID NO: 786448 - DNA, 19 bp, Mus musculus
  siRNA target sequence for 1110004B15Rik (NM_175206.2,175-193).
ctctcgcagagctcaagaa

SEQ ID NO: 786449 - DNA, 19 bp, Mus musculus
  siRNA target sequence for 1110004B15Rik (NM_175206.2,317-335).
gcacgagagcctggttaat

SEQ ID NO: 786450 - DNA, 19 bp, Mus musculus
  siRNA target sequence for 1110004B15Rik (NM_175206.2,320-338).
cgagagcctggttaatgat

SEQ ID NO: 786451 - DNA, 19 bp, Mus musculus
  siRNA target sequence for 1110004B15Rik (NM_175206.2,321-339).
gagagcctggttaatgatt

SEQ ID NO: 786452 - DNA, 19 bp, Mus musculus
  siRNA target sequence for 1110004B15Rik (NM_175206.2,325-343).
gcctggttaatgatttcct

SEQ ID NO: 786453 - DNA, 19 bp, Mus musculus
  siRNA target sequence for 1110004B15Rik (NM_175206.2,690-708).
gctgcaccggggagacaaa

SEQ ID NO: 786454 - DNA, 19 bp, Mus musculus
  siRNA target sequence for Ankrd9 (NM_175207.2,1279-1297).
cgccaccctccctctttgt

SEQ ID NO: 786455 - DNA, 19 bp, Mus musculus
  siRNA target sequence for Ankrd9 (NM_175207.2,1313-1331).
gttggtcaccactatctca

SEQ ID NO: 786456 - DNA, 19 bp, Mus musculus
  siRNA target sequence for Ankrd9 (NM_175207.2,1340-1358).
cttcccggaggccttagat

SEQ ID NO: 786457 - DNA, 19 bp, Mus musculus
  siRNA target sequence for Ankrd9 (NM_175207.2,1343-1361).
cccggaggccttagatgaa

SEQ ID NO: 786458 - DNA, 19 bp, Mus musculus
  siRNA target sequence for Ankrd9 (NM_175207.2,1345-1363).
cggaggccttagatgaact

SEQ ID NO: 786459 - DNA, 19 bp, Mus musculus
  siRNA target sequence for 4931431C16Rik (NM_175208.2,572-590).
cttgagaagtataaatagt

SEQ ID NO: 786460 - DNA, 19 bp, Mus musculus
  siRNA target sequence for 4931431C16Rik (NM_175208.2,615-633).
cagtcctcagacactacaa

SEQ ID NO: 786461 - DNA, 19 bp, Mus musculus
  siRNA target sequence for 4931431C16Rik (NM_175208.2,620-638).
ctcagacactacaaattca

SEQ ID NO: 786462 - DNA, 19 bp, Mus musculus
  siRNA target sequence for 4931431C16Rik (NM_175208.2,624-642).
gacactacaaattcaactt

SEQ ID NO: 786463 - DNA, 19 bp, Mus musculus
  siRNA target sequence for 4931431C16Rik (NM_175208.2,682-700).
gccgagcagattgtaaaaa

SEQ ID NO: 786464 - DNA, 19 bp, Mus musculus
  siRNA target sequence for 4931431C16Rik (NM_175208.2,718-736).
ctcccgctagcgagtatga

SEQ ID NO: 786465 - DNA, 19 bp, Mus musculus
  siRNA target sequence for 4931431C16Rik (NM_175208.2,721-739).
ccgctagcgagtatgatgt

SEQ ID NO: 786466 - DNA, 19 bp, Mus musculus
  siRNA target sequence for 4931431C16Rik (NM_175208.2,848-866).
gattcgtggtcctagtcaa

SEQ ID NO: 786467 - DNA, 19 bp, Mus musculus
  siRNA target sequence for 4931431C16Rik (NM_175208.2,870-888).
ggcgtctggaggacactat

SEQ ID NO: 786468 - DNA, 19 bp, Mus musculus
  siRNA target sequence for 8430417A20Rik (NM_175209.1,271-289).
gcactgctgaggatatgga

SEQ ID NO: 786469 - DNA, 19 bp, Mus musculus
  siRNA target sequence for 8430417A20Rik (NM_175209.1,320-338).
cttagcaagtgcatcacaa

SEQ ID NO: 786470 - DNA, 19 bp, Mus musculus
  siRNA target sequence for 8430417A20Rik (NM_175209.1,324-342).
gcaagtgcatcacaaagaa

SEQ ID NO: 786471 - DNA, 19 bp, Mus musculus
  siRNA target sequence for 8430417A20Rik (NM_175209.1,367-385).
cggaggaaaggcatgagaa

SEQ ID NO: 786472 - DNA, 19 bp, Mus musculus
  siRNA target sequence for 8430417A20Rik (NM_175209.1,405-423).
gcctgccataaaagtgttt

SEQ ID NO: 786473 - DNA, 19 bp, Mus musculus
  siRNA target sequence for 8430417A20Rik (NM_175209.1,410-428).
ccataaaagtgtttacgta

SEQ ID NO: 786474 - DNA, 19 bp, Mus musculus
  siRNA target sequence for 8430417A20Rik (NM_175209.1,463-481).
cacaggctccaaaatcctt

SEQ ID NO: 786475 - DNA, 19 bp, Mus musculus
  siRNA target sequence for 8430417A20Rik (NM_175209.1,491-509).
gtttcaaagatttacagaa

SEQ ID NO: 786476 - DNA, 19 bp, Mus musculus
  siRNA target sequence for 8430417A20Rik (NM_175209.1,514-532).
gtatccagagaccaatgaa

SEQ ID NO: 786477 - DNA, 19 bp, Mus musculus
  siRNA target sequence for 4833417A11Rik (NM_175210.2,354-372).
cggatcctggtgtggaaaa

SEQ ID NO: 786478 - DNA, 19 bp, Mus musculus
  siRNA target sequence for 4833417A11Rik (NM_175210.2,397-415).
cgctttggacacttgtctt

SEQ ID NO: 786479 - DNA, 19 bp, Mus musculus
  siRNA target sequence for 4833417A11Rik (NM_175210.2,449-467).
ggctattacccggacaaaa

SEQ ID NO: 786480 - DNA, 19 bp, Mus musculus
  siRNA target sequence for 4833417A11Rik (NM_175210.2,450-468).
gctattacccggacaaaat

SEQ ID NO: 786481 - DNA, 19 bp, Mus musculus
  siRNA target sequence for 4833417A11Rik (NM_175210.2,497-515).
cctcgcacctcgaaacctt

SEQ ID NO: 786482 - DNA, 19 bp, Mus musculus
  siRNA target sequence for 4833417A11Rik (NM_175210.2,608-626).
ccgcaggaaggggattgat

SEQ ID NO: 786483 - DNA, 19 bp, Mus musculus
  siRNA target sequence for 4833417A11Rik (NM_175210.2,620-638).
gattgatggaccgctattt

SEQ ID NO: 786484 - DNA, 19 bp, Mus musculus
  siRNA target sequence for 4833417A11Rik (NM_175210.2,672-690).
ccgaagagggacagcaatt

SEQ ID NO: 786485 - DNA, 19 bp, Mus musculus
  siRNA target sequence for 4833417A11Rik (NM_175210.2,673-691).
cgaagagggacagcaattt

SEQ ID NO: 786486 - DNA, 19 bp, Mus musculus
  siRNA target sequence for 4833417A11Rik (NM_175210.2,679-697).
gggacagcaatttatcact

SEQ ID NO: 786487 - DNA, 19 bp, Mus musculus
  siRNA target sequence for 4833417A11Rik (NM_175210.2,717-735).
gaaagaagtcacacatcat

SEQ ID NO: 786488 - DNA, 19 bp, Mus musculus
  siRNA target sequence for 4833417A11Rik (NM_175210.2,754-772).
gaccaagctatgatttgga

SEQ ID NO: 786489 - DNA, 19 bp, Mus musculus
  siRNA target sequence for 4833417A11Rik (NM_175210.2,794-812).
caatggtagccaattgctt

SEQ ID NO: 786490 - DNA, 19 bp, Mus musculus
  siRNA target sequence for 4833417A11Rik (NM_175210.2,906-924).
gcggactatgccttctctt

SEQ ID NO: 786491 - DNA, 19 bp, Mus musculus
  siRNA target sequence for 4833417A11Rik (NM_175210.2,929-947).
caccctaggaaaaaacgtt

SEQ ID NO: 786492 - DNA, 19 bp, Mus musculus
  siRNA target sequence for 4833417A11Rik (NM_175210.2,933-951).
ctaggaaaaaacgttttta

SEQ ID NO: 786493 - DNA, 19 bp, Mus musculus
  siRNA target sequence for 4833417A11Rik (NM_175210.2,967-985).
cgaacatgacacttttaga

SEQ ID NO: 786494 - DNA, 19 bp, Mus musculus
  siRNA target sequence for 4833417A11Rik (NM_175210.2,991-1009).
cactccaggaactaaaata

SEQ ID NO: 786495 - DNA, 19 bp, Mus musculus
  siRNA target sequence for 4833417A11Rik (NM_175210.2,1027-1045).
caagtgaccccgacaatca

SEQ ID NO: 786496 - DNA, 19 bp, Mus musculus
  siRNA target sequence for 4833417A11Rik (NM_175210.2,1030-1048).
gtgaccccgacaatcagaa

SEQ ID NO: 786497 - DNA, 19 bp, Mus musculus
  siRNA target sequence for 4833417A11Rik (NM_175210.2,1160-1178).
ctcattgagcagtctattt

SEQ ID NO: 786498 - DNA, 19 bp, Mus musculus
  siRNA target sequence for 4833417A11Rik (NM_175210.2,1223-1241).
ggtttacccacgtgttcaa

SEQ ID NO: 786499 - DNA, 19 bp, Mus musculus
  siRNA target sequence for 4833417A11Rik (NM_175210.2,1224-1242).
gtttacccacgtgttcaaa

SEQ ID NO: 786500 - DNA, 19 bp, Mus musculus
  siRNA target sequence for 4833417A11Rik (NM_175210.2,1229-1247).
cccacgtgttcaaactgat

SEQ ID NO: 786501 - DNA, 19 bp, Mus musculus
  siRNA target sequence for 4833417A11Rik (NM_175210.2,1265-1283).
ccagaagtctgttaaacat

SEQ ID NO: 786502 - DNA, 19 bp, Mus musculus
  siRNA target sequence for 4833417A11Rik (NM_175210.2,1328-1346).
gcacgcatggagtgatgat

SEQ ID NO: 786503 - DNA, 19 bp, Mus musculus
  siRNA target sequence for 4833417A11Rik (NM_175210.2,1386-1404).
ctcctgatcctggaaaact

SEQ ID NO: 786504 - DNA, 19 bp, Mus musculus
  siRNA target sequence for 4833417A11Rik (NM_175210.2,1388-1406).
cctgatcctggaaaacttt

SEQ ID NO: 786505 - DNA, 19 bp, Mus musculus
  siRNA target sequence for 4833417A11Rik (NM_175210.2,1413-1431).
gccatcttgaacatatcat

SEQ ID NO: 786506 - DNA, 19 bp, Mus musculus
  siRNA target sequence for 4833417A11Rik (NM_175210.2,1449-1467).
ccttatttggcgtgtgtaa

SEQ ID NO: 786507 - DNA, 19 bp, Mus musculus
  siRNA target sequence for 4833417A11Rik (NM_175210.2,1468-1486).
ggaacatgactgacaactt

SEQ ID NO: 786508 - DNA, 19 bp, Mus musculus
  siRNA target sequence for 4833417A11Rik (NM_175210.2,1495-1513).
gatcaccagacaatctaaa

SEQ ID NO: 786509 - DNA, 19 bp, Mus musculus
  siRNA target sequence for 4833417A11Rik (NM_175210.2,1571-1589).
ggacagcttccctccattt

SEQ ID NO: 786510 - DNA, 19 bp, Mus musculus
  siRNA target sequence for 4833417A11Rik (NM_175210.2,1624-1642).
gaaatttgacggaacttct

SEQ ID NO: 786511 - DNA, 19 bp, Mus musculus
  siRNA target sequence for 4833417A11Rik (NM_175210.2,1726-1744).
cctttcacgtgcaactgat

SEQ ID NO: 786512 - DNA, 19 bp, Mus musculus
  siRNA target sequence for 4833417A11Rik (NM_175210.2,1780-1798).
gcttactgtaccatgacaa

SEQ ID NO: 786513 - DNA, 19 bp, Mus musculus
  siRNA target sequence for 4833417A11Rik (NM_175210.2,1785-1803).
ctgtaccatgacaatataa

SEQ ID NO: 786514 - DNA, 19 bp, Mus musculus
  siRNA target sequence for 4833417A11Rik (NM_175210.2,1787-1805).
gtaccatgacaatataata

SEQ ID NO: 786515 - DNA, 19 bp, Mus musculus
  siRNA target sequence for 4833417A11Rik (NM_175210.2,1790-1808).
ccatgacaatataatatct

SEQ ID NO: 786516 - DNA, 19 bp, Mus musculus
  siRNA target sequence for 4833417A11Rik (NM_175210.2,1831-1849).
ctggagatcccagcaaaat

SEQ ID NO: 786517 - DNA, 19 bp, Mus musculus
  siRNA target sequence for 4833417A11Rik (NM_175210.2,1833-1851).
ggagatcccagcaaaatta

SEQ ID NO: 786518 - DNA, 19 bp, Mus musculus
  siRNA target sequence for 4833417A11Rik (NM_175210.2,1839-1857).
cccagcaaaattaatctca

SEQ ID NO: 786519 - DNA, 19 bp, Mus musculus
  siRNA target sequence for 4833417A11Rik (NM_175210.2,1878-1896).
caggcattgcaaatgaatt

SEQ ID NO: 786520 - DNA, 19 bp, Mus musculus
  siRNA target sequence for 4833417A11Rik (NM_175210.2,1881-1899).
gcattgcaaatgaattact

SEQ ID NO: 786521 - DNA, 19 bp, Mus musculus
  siRNA target sequence for 4833417A11Rik (NM_175210.2,1882-1900).
cattgcaaatgaattactt

SEQ ID NO: 786522 - DNA, 19 bp, Mus musculus
  siRNA target sequence for 4833417A11Rik (NM_175210.2,1971-1989).
gagaagccaggtcaattaa

SEQ ID NO: 786523 - DNA, 19 bp, Mus musculus
  siRNA target sequence for 4833417A11Rik (NM_175210.2,1976-1994).
gccaggtcaattaagagaa

SEQ ID NO: 786524 - DNA, 19 bp, Mus musculus
  siRNA target sequence for 4833417A11Rik (NM_175210.2,1978-1996).
caggtcaattaagagaaat

SEQ ID NO: 786525 - DNA, 19 bp, Mus musculus
  siRNA target sequence for 4833417A11Rik (NM_175210.2,2006-2024).
catagatttgctgaaagaa

SEQ ID NO: 786526 - DNA, 19 bp, Mus musculus
  siRNA target sequence for 4833417A11Rik (NM_175210.2,2040-2058).
gggatgtccaacacaagta

SEQ ID NO: 786527 - DNA, 19 bp, Mus musculus
  siRNA target sequence for 4833417A11Rik (NM_175210.2,2041-2059).
ggatgtccaacacaagtat

SEQ ID NO: 786528 - DNA, 19 bp, Mus musculus
  siRNA target sequence for 4833417A11Rik (NM_175210.2,2120-2138).
ctggttgcactcatgtgat

SEQ ID NO: 786529 - DNA, 19 bp, Mus musculus
  siRNA target sequence for 4833417A11Rik (NM_175210.2,2234-2252).
cacccttctgcactactta

SEQ ID NO: 786530 - DNA, 19 bp, Mus musculus
  siRNA target sequence for 4833417A11Rik (NM_175210.2,2294-2312).
ggatcaaaagccaatggaa

SEQ ID NO: 786531 - DNA, 19 bp, Mus musculus
  siRNA target sequence for 4833417A11Rik (NM_175210.2,2330-2348).
cataaagctgagagagatt

SEQ ID NO: 786532 - DNA, 19 bp, Mus musculus
  siRNA target sequence for 4833417A11Rik (NM_175210.2,2341-2359).
gagagattctcaatcagtt

SEQ ID NO: 786533 - DNA, 19 bp, Mus musculus
  siRNA target sequence for 4833417A11Rik (NM_175210.2,2417-2435).
gcccaggagtgttccatta

SEQ ID NO: 786534 - DNA, 19 bp, Mus musculus
  siRNA target sequence for 4833417A11Rik (NM_175210.2,2418-2436).
cccaggagtgttccattaa

SEQ ID NO: 786535 - DNA, 19 bp, Mus musculus
  siRNA target sequence for 4833417A11Rik (NM_175210.2,2420-2438).
caggagtgttccattaaca

SEQ ID NO: 786536 - DNA, 19 bp, Mus musculus
  siRNA target sequence for 4833417A11Rik (NM_175210.2,2422-2440).
ggagtgttccattaacaca

SEQ ID NO: 786537 - DNA, 19 bp, Mus musculus
  siRNA target sequence for 4833417A11Rik (NM_175210.2,2475-2493).
gcaggatcgttcagtacta

SEQ ID NO: 786538 - DNA, 19 bp, Mus musculus
  siRNA target sequence for 4833417A11Rik (NM_175210.2,2476-2494).
caggatcgttcagtactat

SEQ ID NO: 786539 - DNA, 19 bp, Mus musculus
  siRNA target sequence for 4833417A11Rik (NM_175210.2,2478-2496).
ggatcgttcagtactatct

SEQ ID NO: 786540 - DNA, 19 bp, Mus musculus
  siRNA target sequence for 4833417A11Rik (NM_175210.2,2518-2536).
ggatcaccaccgagtactt

SEQ ID NO: 786541 - DNA, 19 bp, Mus musculus
  siRNA target sequence for 4833417A11Rik (NM_175210.2,2519-2537).
gatcaccaccgagtactta

SEQ ID NO: 786542 - DNA, 19 bp, Mus musculus
  siRNA target sequence for 4833417A11Rik (NM_175210.2,2522-2540).
caccaccgagtacttaact

SEQ ID NO: 786543 - DNA, 19 bp, Mus musculus
  siRNA target sequence for 4833417A11Rik (NM_175210.2,2571-2589).
ggcaaccacaccaaggatt

SEQ ID NO: 786544 - DNA, 19 bp, Mus musculus
  siRNA target sequence for 4833417A11Rik (NM_175210.2,2572-2590).
gcaaccacaccaaggattt

SEQ ID NO: 786545 - DNA, 19 bp, Mus musculus
  siRNA target sequence for 4833417A11Rik (NM_175210.2,2585-2603).
ggattttctcacttataaa

SEQ ID NO: 786546 - DNA, 19 bp, Mus musculus
  siRNA target sequence for 4833417A11Rik (NM_175210.2,2626-2644).
caaaatacgggattccttt

SEQ ID NO: 786547 - DNA, 19 bp, Mus musculus
  siRNA target sequence for 4833417A11Rik (NM_175210.2,2633-2651).
cgggattcctttaaatgct

SEQ ID NO: 786548 - DNA, 19 bp, Mus musculus
  siRNA target sequence for 4833417A11Rik (NM_175210.2,2634-2652).
gggattcctttaaatgcta

SEQ ID NO: 786549 - DNA, 19 bp, Mus musculus
  siRNA target sequence for 4833417A11Rik (NM_175210.2,2662-2680).
gcttctccctttacaaaga

SEQ ID NO: 786550 - DNA, 19 bp, Mus musculus
  siRNA target sequence for 4833417A11Rik (NM_175210.2,2668-2686).
ccctttacaaagacatcat

SEQ ID NO: 786551 - DNA, 19 bp, Mus musculus
  siRNA target sequence for 4833417A11Rik (NM_175210.2,2670-2688).
ctttacaaagacatcatta

SEQ ID NO: 786552 - DNA, 19 bp, Mus musculus
  siRNA target sequence for 4833417A11Rik (NM_175210.2,2706-2724).
gtgatttgggccttcttga

SEQ ID NO: 786553 - DNA, 19 bp, Mus musculus
  siRNA target sequence for 4833417A11Rik (NM_175210.2,2735-2753).
gttgggaaagattttatat

SEQ ID NO: 786554 - DNA, 19 bp, Mus musculus
  siRNA target sequence for 4833417A11Rik (NM_175210.2,2757-2775).
ccatataacccaactacaa

SEQ ID NO: 786555 - DNA, 19 bp, Mus musculus
  siRNA target sequence for 4833417A11Rik (NM_175210.2,2758-2776).
catataacccaactacaaa

SEQ ID NO: 786556 - DNA, 19 bp, Mus musculus
  siRNA target sequence for 4833417A11Rik (NM_175210.2,2823-2841).
gggggtactgttactgttt

SEQ ID NO: 786557 - DNA, 19 bp, Mus musculus
  siRNA target sequence for 4833417A11Rik (NM_175210.2,2824-2842).
ggggtactgttactgtttt

SEQ ID NO: 786558 - DNA, 19 bp, Mus musculus
  siRNA target sequence for 4833417A11Rik (NM_175210.2,2826-2844).
ggtactgttactgttttaa

SEQ ID NO: 786559 - DNA, 19 bp, Mus musculus
  siRNA target sequence for 4930438D12Rik (NM_175212.2,744-762).
ggagctgcttgctcaaaga

SEQ ID NO: 786560 - DNA, 19 bp, Mus musculus
  siRNA target sequence for 4930438D12Rik (NM_175212.2,876-894).
cggccgaaaggggaaactt

SEQ ID NO: 786561 - DNA, 19 bp, Mus musculus
  siRNA target sequence for 4930438D12Rik (NM_175212.2,877-895).
ggccgaaaggggaaacttt

SEQ ID NO: 786562 - DNA, 19 bp, Mus musculus
  siRNA target sequence for 4930486G11Rik (NM_175213.2,230-248).
cactggcgttggcgattat

SEQ ID NO: 786563 - DNA, 19 bp, Mus musculus
  siRNA target sequence for 4930486G11Rik (NM_175213.2,240-258).
ggcgattatccactcaaaa

SEQ ID NO: 786564 - DNA, 19 bp, Mus musculus
  siRNA target sequence for 4930486G11Rik (NM_175213.2,243-261).
gattatccactcaaaacca

SEQ ID NO: 786565 - DNA, 19 bp, Mus musculus
  siRNA target sequence for 4930486G11Rik (NM_175213.2,326-344).
catggaaatcaaaacttga

SEQ ID NO: 786566 - DNA, 19 bp, Mus musculus
  siRNA target sequence for 4930486G11Rik (NM_175213.2,382-400).
cttctcctgagtaggattt

SEQ ID NO: 786567 - DNA, 19 bp, Mus musculus
  siRNA target sequence for 4930486G11Rik (NM_175213.2,448-466).
gatcaggaacctacaagtt

SEQ ID NO: 786568 - DNA, 19 bp, Mus musculus
  siRNA target sequence for 4930486G11Rik (NM_175213.2,453-471).
ggaacctacaagttctgaa

SEQ ID NO: 786569 - DNA, 19 bp, Mus musculus
  siRNA target sequence for 4930486G11Rik (NM_175213.2,497-515).
ctggatgtgttttatcaaa

SEQ ID NO: 786570 - DNA, 19 bp, Mus musculus
  siRNA target sequence for 4930486G11Rik (NM_175213.2,582-600).
ccccctgcctcttgagaaa

SEQ ID NO: 786571 - DNA, 19 bp, Mus musculus
  siRNA target sequence for 4930486G11Rik (NM_175213.2,605-623).
cacgcacgaccctggaaaa

SEQ ID NO: 786572 - DNA, 19 bp, Mus musculus
  siRNA target sequence for 4930486G11Rik (NM_175213.2,632-650).
cttctcacatgcagttctt

SEQ ID NO: 786573 - DNA, 19 bp, Mus musculus
  siRNA target sequence for 4930486G11Rik (NM_175213.2,667-685).
ctcaagaaatggacagaat

SEQ ID NO: 786574 - DNA, 19 bp, Mus musculus
  siRNA target sequence for 4930486G11Rik (NM_175213.2,686-704).
ccagtagtctgaaagtata

SEQ ID NO: 786575 - DNA, 19 bp, Mus musculus
  siRNA target sequence for 4930486G11Rik (NM_175213.2,746-764).
cagtttcacagttgttaga

SEQ ID NO: 786576 - DNA, 19 bp, Mus musculus
  siRNA target sequence for 4930486G11Rik (NM_175213.2,766-784).
gccctgatcacattttaca

SEQ ID NO: 786577 - DNA, 19 bp, Mus musculus
  siRNA target sequence for 4930486G11Rik (NM_175213.2,844-862).
ctggcaagtgattttaatt

SEQ ID NO: 786578 - DNA, 19 bp, Mus musculus
  siRNA target sequence for 4930486G11Rik (NM_175213.2,922-940).
ctccaggctattttagaga

SEQ ID NO: 786579 - DNA, 19 bp, Mus musculus
  siRNA target sequence for 4930486G11Rik (NM_175213.2,961-979).
caggtacagcgttatgtct

SEQ ID NO: 786580 - DNA, 19 bp, Mus musculus
  siRNA target sequence for 4930486G11Rik (NM_175213.2,1000-1018).
ggaagttgcagcttgttga

SEQ ID NO: 786581 - DNA, 19 bp, Mus musculus
  siRNA target sequence for 4930486G11Rik (NM_175213.2,1010-1028).
gcttgttgaggaagtctat

SEQ ID NO: 786582 - DNA, 19 bp, Mus musculus
  siRNA target sequence for 4930486G11Rik (NM_175213.2,1014-1032).
gttgaggaagtctattata

SEQ ID NO: 786583 - DNA, 19 bp, Mus musculus
  siRNA target sequence for 4930486G11Rik (NM_175213.2,1089-1107).
ggatcaaggcatttatgat

SEQ ID NO: 786584 - DNA, 19 bp, Mus musculus
  siRNA target sequence for 4930486G11Rik (NM_175213.2,1105-1123).
gatgtgacacgctatgaaa

SEQ ID NO: 786585 - DNA, 19 bp, Mus musculus
  siRNA target sequence for 4930486G11Rik (NM_175213.2,1108-1126).
gtgacacgctatgaaaata

SEQ ID NO: 786586 - DNA, 19 bp, Mus musculus
  siRNA target sequence for 4930486G11Rik (NM_175213.2,1258-1276).
ctttcggatgcctttcctt

SEQ ID NO: 786587 - DNA, 19 bp, Mus musculus
  siRNA target sequence for 4930486G11Rik (NM_175213.2,1262-1280).
cggatgcctttcctttatt

SEQ ID NO: 786588 - DNA, 19 bp, Mus musculus
  siRNA target sequence for 4930486G11Rik (NM_175213.2,1273-1291).
cctttatttgcgttctact

SEQ ID NO: 786589 - DNA, 19 bp, Mus musculus
  siRNA target sequence for 4930486G11Rik (NM_175213.2,1274-1292).
ctttatttgcgttctactt

SEQ ID NO: 786590 - DNA, 19 bp, Mus musculus
  siRNA target sequence for 4930486G11Rik (NM_175213.2,1300-1318).
ctcggtgttctcttgaact

SEQ ID NO: 786591 - DNA, 19 bp, Mus musculus
  siRNA target sequence for 4930506C02Rik (NM_175216.2,933-951).
gagcttacactgatctttt

SEQ ID NO: 786592 - DNA, 19 bp, Mus musculus
  siRNA target sequence for 4930506C02Rik (NM_175216.2,1011-1029).
cccaagactggatttcagt

SEQ ID NO: 786593 - DNA, 19 bp, Mus musculus
  siRNA target sequence for 4930506C02Rik (NM_175216.2,1094-1112).
cagctcttgacgtttttat

SEQ ID NO: 786594 - DNA, 19 bp, Mus musculus
  siRNA target sequence for 4930544M13Rik (NM_175218.2,323-341).
cttccctgctggctttaga

SEQ ID NO: 786595 - DNA, 19 bp, Mus musculus
  siRNA target sequence for 4930544M13Rik (NM_175218.2,326-344).
ccctgctggctttagatca

SEQ ID NO: 786596 - DNA, 19 bp, Mus musculus
  siRNA target sequence for 4930544M13Rik (NM_175218.2,394-412).
ggcttcaagtaaaaatgat

SEQ ID NO: 786597 - DNA, 19 bp, Mus musculus
  siRNA target sequence for 4930544M13Rik (NM_175218.2,524-542).
ggcaaacactgaagagtta

SEQ ID NO: 786598 - DNA, 19 bp, Mus musculus
  siRNA target sequence for 4930544M13Rik (NM_175218.2,525-543).
gcaaacactgaagagttat

SEQ ID NO: 786599 - DNA, 19 bp, Mus musculus
  siRNA target sequence for 4930544M13Rik (NM_175218.2,571-589).
gcgatccactggagaatga

SEQ ID NO: 786600 - DNA, 19 bp, Mus musculus
  siRNA target sequence for 4930544M13Rik (NM_175218.2,572-590).
cgatccactggagaatgat

SEQ ID NO: 786601 - DNA, 19 bp, Mus musculus
  siRNA target sequence for 4930544M13Rik (NM_175218.2,579-597).
ctggagaatgataatctaa

SEQ ID NO: 786602 - DNA, 19 bp, Mus musculus
  siRNA target sequence for 4930599N23Rik (NM_175221.2,174-192).
gaaaagccgagcgaagttt

SEQ ID NO: 786603 - DNA, 19 bp, Mus musculus
  siRNA target sequence for 4930599N23Rik (NM_175221.2,267-285).
gccaaagcgggctttagca

SEQ ID NO: 786604 - DNA, 19 bp, Mus musculus
  siRNA target sequence for 4930599N23Rik (NM_175221.2,322-340).
caccgcaccccggaacaaa

SEQ ID NO: 786605 - DNA, 19 bp, Mus musculus
  siRNA target sequence for 1700023A09Rik (NM_175223.2,105-123).
gttggtgagccggaataca

SEQ ID NO: 786606 - DNA, 19 bp, Mus musculus
  siRNA target sequence for 1700023A09Rik (NM_175223.2,138-156).
cacggctcggccactgaaa

SEQ ID NO: 786607 - DNA, 19 bp, Mus musculus
  siRNA target sequence for 1700023A09Rik (NM_175223.2,140-158).
cggctcggccactgaaagt

SEQ ID NO: 786608 - DNA, 19 bp, Mus musculus
  siRNA target sequence for 1700023A09Rik (NM_175223.2,142-160).
gctcggccactgaaagtca

SEQ ID NO: 786609 - DNA, 19 bp, Mus musculus
  siRNA target sequence for 1700023A09Rik (NM_175223.2,425-443).
ctgtgcgcagggaactcta

SEQ ID NO: 786610 - DNA, 19 bp, Mus musculus
  siRNA target sequence for 1700023A09Rik (NM_175223.2,469-487).
cgggaggtcaccatcaact

SEQ ID NO: 786611 - DNA, 19 bp, Mus musculus
  siRNA target sequence for 4930555P18Rik (NM_175226.2,168-186).
gcatcgggcttcagatctt

SEQ ID NO: 786612 - DNA, 19 bp, Mus musculus
  siRNA target sequence for 4930555P18Rik (NM_175226.2,169-187).
catcgggcttcagatcttt

SEQ ID NO: 786613 - DNA, 19 bp, Mus musculus
  siRNA target sequence for 4930555P18Rik (NM_175226.2,190-208).
ccggctccttggtatagtt

SEQ ID NO: 786614 - DNA, 19 bp, Mus musculus
  siRNA target sequence for 4930555P18Rik (NM_175226.2,192-210).
ggctccttggtatagttgt

SEQ ID NO: 786615 - DNA, 19 bp, Mus musculus
  siRNA target sequence for 4930555P18Rik (NM_175226.2,193-211).
gctccttggtatagttgta

SEQ ID NO: 786616 - DNA, 19 bp, Mus musculus
  siRNA target sequence for 4930555P18Rik (NM_175226.2,213-231).
ccagtattgttctgatctt

SEQ ID NO: 786617 - DNA, 19 bp, Mus musculus
  siRNA target sequence for 4930555P18Rik (NM_175226.2,234-252).
cacagcgatcacttttcaa

SEQ ID NO: 786618 - DNA, 19 bp, Mus musculus
  siRNA target sequence for 4930555P18Rik (NM_175226.2,262-280).
gtacagctcagcctttcta

SEQ ID NO: 786619 - DNA, 19 bp, Mus musculus
  siRNA target sequence for 4930555P18Rik (NM_175226.2,268-286).
ctcagcctttctattagct

SEQ ID NO: 786620 - DNA, 19 bp, Mus musculus
  siRNA target sequence for 4930555P18Rik (NM_175226.2,291-309).
cttcagtgttggtgaatta

SEQ ID NO: 786621 - DNA, 19 bp, Mus musculus
  siRNA target sequence for 4930555P18Rik (NM_175226.2,416-434).
ctgcagctaacctttggaa

SEQ ID NO: 786622 - DNA, 19 bp, Mus musculus
  siRNA target sequence for 4930555P18Rik (NM_175226.2,418-436).
gcagctaacctttggaatt

SEQ ID NO: 786623 - DNA, 19 bp, Mus musculus
  siRNA target sequence for 4930555P18Rik (NM_175226.2,422-440).
ctaacctttggaattggat

SEQ ID NO: 786624 - DNA, 19 bp, Mus musculus
  siRNA target sequence for 4930555P18Rik (NM_175226.2,432-450).
gaattggatatgtcacatt

SEQ ID NO: 786625 - DNA, 19 bp, Mus musculus
  siRNA target sequence for 4930555P18Rik (NM_175226.2,457-475).
gattcagtccatctattca

SEQ ID NO: 786626 - DNA, 19 bp, Mus musculus
  siRNA target sequence for 4930555P18Rik (NM_175226.2,469-487).
ctattcacagttaatgatt

SEQ ID NO: 786627 - DNA, 19 bp, Mus musculus
  siRNA target sequence for 4930555P18Rik (NM_175226.2,562-580).
gtcgtccttgattctcata

SEQ ID NO: 786628 - DNA, 19 bp, Mus musculus
  siRNA target sequence for 4930555P18Rik (NM_175226.2,596-614).
gtcttggcagtgaaactta

SEQ ID NO: 786629 - DNA, 19 bp, Mus musculus
  siRNA target sequence for 4930555P18Rik (NM_175226.2,605-623).
gtgaaacttaagtggtttt

SEQ ID NO: 786630 - DNA, 19 bp, Mus musculus
  siRNA target sequence for 4930555P18Rik (NM_175226.2,636-654).
ggtatgtgtacttgttagt

SEQ ID NO: 786631 - DNA, 19 bp, Mus musculus
  siRNA target sequence for 4930555P18Rik (NM_175226.2,657-675).
ggcatatgtaccgaattta

SEQ ID NO: 786632 - DNA, 19 bp, Mus musculus
  siRNA target sequence for 4930555P18Rik (NM_175226.2,658-676).
gcatatgtaccgaatttat

SEQ ID NO: 786633 - DNA, 19 bp, Mus musculus
  siRNA target sequence for 4930555P18Rik (NM_175226.2,664-682).
gtaccgaatttatggatta

SEQ ID NO: 786634 - DNA, 19 bp, Mus musculus
  siRNA target sequence for 4930555P18Rik (NM_175226.2,668-686).
cgaatttatggattacagt

SEQ ID NO: 786635 - DNA, 19 bp, Mus musculus
  siRNA target sequence for 4930555P18Rik (NM_175226.2,669-687).
gaatttatggattacagtt

SEQ ID NO: 786636 - DNA, 19 bp, Mus musculus
  siRNA target sequence for 4930555P18Rik (NM_175226.2,702-720).
catggaagaggattcgttt

SEQ ID NO: 786637 - DNA, 19 bp, Mus musculus
  siRNA target sequence for 4930555P18Rik (NM_175226.2,739-757).
cttctggctaacaagaatt

SEQ ID NO: 786638 - DNA, 19 bp, Mus musculus
  siRNA target sequence for 4930555P18Rik (NM_175226.2,742-760).
ctggctaacaagaattaca

SEQ ID NO: 786639 - DNA, 19 bp, Mus musculus
  siRNA target sequence for 4930555P18Rik (NM_175226.2,792-810).
ggatggcaaatgaaactga

SEQ ID NO: 786640 - DNA, 19 bp, Mus musculus
  siRNA target sequence for 4930555P18Rik (NM_175226.2,838-856).
ctgggacgtcatttgcaat

SEQ ID NO: 786641 - DNA, 19 bp, Mus musculus
  siRNA target sequence for 4930555P18Rik (NM_175226.2,841-859).
ggacgtcatttgcaatcta

SEQ ID NO: 786642 - DNA, 19 bp, Mus musculus
  siRNA target sequence for 4930555P18Rik (NM_175226.2,842-860).
gacgtcatttgcaatctaa

SEQ ID NO: 786643 - DNA, 19 bp, Mus musculus
  siRNA target sequence for 4930555P18Rik (NM_175226.2,869-887).
gggtgtgattctacactaa

SEQ ID NO: 786644 - DNA, 19 bp, Mus musculus
  siRNA target sequence for 4930555P18Rik (NM_175226.2,871-889).
gtgtgattctacactaact

SEQ ID NO: 786645 - DNA, 19 bp, Mus musculus
  siRNA target sequence for 4930555P18Rik (NM_175226.2,873-891).
gtgattctacactaactgt

SEQ ID NO: 786646 - DNA, 19 bp, Mus musculus
  siRNA target sequence for 4930555P18Rik (NM_175226.2,990-1008).
gctttgtagctcctgtttt

SEQ ID NO: 786647 - DNA, 19 bp, Mus musculus
  siRNA target sequence for 4930555P18Rik (NM_175226.2,991-1009).
ctttgtagctcctgtttta

SEQ ID NO: 786648 - DNA, 19 bp, Mus musculus
  siRNA target sequence for 4930555P18Rik (NM_175226.2,1021-1039).
ggctcttcagactggttta

SEQ ID NO: 786649 - DNA, 19 bp, Mus musculus
  siRNA target sequence for 4930555P18Rik (NM_175226.2,1022-1040).
gctcttcagactggtttaa

SEQ ID NO: 786650 - DNA, 19 bp, Mus musculus
  siRNA target sequence for 4930555P18Rik (NM_175226.2,1050-1068).
gacctgaagagagacttat

SEQ ID NO: 786651 - DNA, 19 bp, Mus musculus
  siRNA target sequence for 4930555P18Rik (NM_175226.2,1060-1078).
gagacttattcgcttaagt

SEQ ID NO: 786652 - DNA, 19 bp, Mus musculus
  siRNA target sequence for 4930555P18Rik (NM_175226.2,1064-1082).
cttattcgcttaagtagaa

SEQ ID NO: 786653 - DNA, 19 bp, Mus musculus
  siRNA target sequence for 4930555P18Rik (NM_175226.2,1070-1088).
cgcttaagtagaaacatgt

SEQ ID NO: 786654 - DNA, 19 bp, Mus musculus
  siRNA target sequence for 4930555P18Rik (NM_175226.2,1084-1102).
catgtgccttttattaact

SEQ ID NO: 786655 - DNA, 19 bp, Mus musculus
  siRNA target sequence for 4930555P18Rik (NM_175226.2,1126-1144).
gatgacagaccctgtatta

SEQ ID NO: 786656 - DNA, 19 bp, Mus musculus
  siRNA target sequence for 4930555P18Rik (NM_175226.2,1256-1274).
cactatgcactaaatacat

SEQ ID NO: 786657 - DNA, 19 bp, Mus musculus
  siRNA target sequence for 4930555P18Rik (NM_175226.2,1284-1302).
cagttacagccttttgtgt

SEQ ID NO: 786658 - DNA, 19 bp, Mus musculus
  siRNA target sequence for 4930555P18Rik (NM_175226.2,1335-1353).
ctgtctacacgctgttcat

SEQ ID NO: 786659 - DNA, 19 bp, Mus musculus
  siRNA target sequence for 4930555P18Rik (NM_175226.2,1342-1360).
cacgctgttcatgattgat

SEQ ID NO: 786660 - DNA, 19 bp, Mus musculus
  siRNA target sequence for 4930555P18Rik (NM_175226.2,1380-1398).
gggaaaagcttgatgacta

SEQ ID NO: 786661 - DNA, 19 bp, Mus musculus
  siRNA target sequence for 4930555P18Rik (NM_175226.2,1381-1399).
ggaaaagcttgatgactat

SEQ ID NO: 786662 - DNA, 19 bp, Mus musculus
  siRNA target sequence for 4930555P18Rik (NM_175226.2,1412-1430).
cgctccacgggcaatatta

SEQ ID NO: 786663 - DNA, 19 bp, Mus musculus
  siRNA target sequence for 4930555P18Rik (NM_175226.2,1413-1431).
gctccacgggcaatattat

SEQ ID NO: 786664 - DNA, 19 bp, Mus musculus
  siRNA target sequence for 4930555P18Rik (NM_175226.2,1416-1434).
ccacgggcaatattatcga

SEQ ID NO: 786665 - DNA, 19 bp, Mus musculus
  siRNA target sequence for 4930555P18Rik (NM_175226.2,1417-1435).
cacgggcaatattatcgaa

SEQ ID NO: 786666 - DNA, 19 bp, Mus musculus
  siRNA target sequence for 4930555P18Rik (NM_175226.2,1419-1437).
cgggcaatattatcgaatt

SEQ ID NO: 786667 - DNA, 19 bp, Mus musculus
  siRNA target sequence for 4930555P18Rik (NM_175226.2,1420-1438).
gggcaatattatcgaattt

SEQ ID NO: 786668 - DNA, 19 bp, Mus musculus
  siRNA target sequence for 4930555P18Rik (NM_175226.2,1460-1478).
gggaatggggcctatacca

SEQ ID NO: 786669 - DNA, 19 bp, Mus musculus
  siRNA target sequence for 4930555P18Rik (NM_175226.2,1461-1479).
ggaatggggcctataccat

SEQ ID NO: 786670 - DNA, 19 bp, Mus musculus
  siRNA target sequence for 4930555P18Rik (NM_175226.2,1467-1485).
gggcctataccatgatgtt

SEQ ID NO: 786671 - DNA, 19 bp, Mus musculus
  siRNA target sequence for 4930555P18Rik (NM_175226.2,1468-1486).
ggcctataccatgatgttt

SEQ ID NO: 786672 - DNA, 19 bp, Mus musculus
  siRNA target sequence for 4930555P18Rik (NM_175226.2,1483-1501).
gtttgagtcaggaagtaaa

SEQ ID NO: 786673 - DNA, 19 bp, Mus musculus
  siRNA target sequence for 4930555P18Rik (NM_175226.2,1497-1515).
gtaaaattcgggcttgtat

SEQ ID NO: 786674 - DNA, 19 bp, Mus musculus
  siRNA target sequence for 4930555P18Rik (NM_175226.2,1523-1541).
ctacatgcatattttaaca

SEQ ID NO: 786675 - DNA, 19 bp, Mus musculus
  siRNA target sequence for 4930555P18Rik (NM_175226.2,1540-1558).
catctacttacaagtaaaa

SEQ ID NO: 786676 - DNA, 19 bp, Mus musculus
  siRNA target sequence for 4930555P18Rik (NM_175226.2,1583-1601).
cgtagaactgctgttaaga

SEQ ID NO: 786677 - DNA, 19 bp, Mus musculus
  siRNA target sequence for 4930555P18Rik (NM_175226.2,1584-1602).
gtagaactgctgttaagaa

SEQ ID NO: 786678 - DNA, 19 bp, Mus musculus
  siRNA target sequence for 4930555P18Rik (NM_175226.2,1628-1646).
gggagccacttgcaagaaa

SEQ ID NO: 786679 - DNA, 19 bp, Mus musculus
  siRNA target sequence for 4930555P18Rik (NM_175226.2,1632-1650).
gccacttgcaagaaataga

SEQ ID NO: 786680 - DNA, 19 bp, Mus musculus
  siRNA target sequence for 4930555P18Rik (NM_175226.2,1681-1699).
cacaacatctgctcgtata

SEQ ID NO: 786681 - DNA, 19 bp, Mus musculus
  siRNA target sequence for 4930555P18Rik (NM_175226.2,1701-1719).
caccgtgtaaccattattt

SEQ ID NO: 786682 - DNA, 19 bp, Mus musculus
  siRNA target sequence for 4930555P18Rik (NM_175226.2,1745-1763).
ctgtacattcaagatactt

SEQ ID NO: 786683 - DNA, 19 bp, Mus musculus
  siRNA target sequence for 4930555P18Rik (NM_175226.2,1747-1765).
gtacattcaagatacttgt

SEQ ID NO: 786684 - DNA, 19 bp, Mus musculus
  siRNA target sequence for 4930555P18Rik (NM_175226.2,1767-1785).
caatgtgccatcagaaagt

SEQ ID NO: 786685 - DNA, 19 bp, Mus musculus
  siRNA target sequence for 4930555P18Rik (NM_175226.2,1799-1817).
gagatcaaggataactcaa

SEQ ID NO: 786686 - DNA, 19 bp, Mus musculus
  siRNA target sequence for 4930555P18Rik (NM_175226.2,1801-1819).
gatcaaggataactcaaat

SEQ ID NO: 786687 - DNA, 19 bp, Mus musculus
  siRNA target sequence for 4930555P18Rik (NM_175226.2,1824-1842).
ctaacaacaacggatttat

SEQ ID NO: 786688 - DNA, 19 bp, Mus musculus
  siRNA target sequence for 4930555P18Rik (NM_175226.2,1828-1846).
caacaacggatttattgca

SEQ ID NO: 786689 - DNA, 19 bp, Mus musculus
  siRNA target sequence for 4930555P18Rik (NM_175226.2,1864-1882).
cccagaggaggctttaaga

SEQ ID NO: 786690 - DNA, 19 bp, Mus musculus
  siRNA target sequence for 4930555P18Rik (NM_175226.2,1924-1942).
cagtacagactgtgatgat

SEQ ID NO: 786691 - DNA, 19 bp, Mus musculus
  siRNA target sequence for 4930555P18Rik (NM_175226.2,1991-2009).
gcagcagccgcagaattta

SEQ ID NO: 786692 - DNA, 19 bp, Mus musculus
  siRNA target sequence for 4930555P18Rik (NM_175226.2,1992-2010).
cagcagccgcagaatttaa

SEQ ID NO: 786693 - DNA, 19 bp, Mus musculus
  siRNA target sequence for 4930555P18Rik (NM_175226.2,1995-2013).
cagccgcagaatttaatga

SEQ ID NO: 786694 - DNA, 19 bp, Mus musculus
  siRNA target sequence for 4930579K19Rik (NM_175227.1,266-284).
ccgaccgaggcggaaaaga

SEQ ID NO: 786695 - DNA, 19 bp, Mus musculus
  siRNA target sequence for 4930579K19Rik (NM_175227.1,267-285).
cgaccgaggcggaaaagat

SEQ ID NO: 786696 - DNA, 19 bp, Mus musculus
  siRNA target sequence for 4930579K19Rik (NM_175227.1,314-332).
cgaggagccctgagatctt

SEQ ID NO: 786697 - DNA, 19 bp, Mus musculus
  siRNA target sequence for 4930579K19Rik (NM_175227.1,349-367).
ggaggcagtcgggtgatta

SEQ ID NO: 786698 - DNA, 19 bp, Mus musculus
  siRNA target sequence for 4930579K19Rik (NM_175227.1,358-376).
cgggtgattacccttcaaa

SEQ ID NO: 786699 - DNA, 19 bp, Mus musculus
  siRNA target sequence for 4930579K19Rik (NM_175227.1,360-378).
ggtgattacccttcaaaga

SEQ ID NO: 786700 - DNA, 19 bp, Mus musculus
  siRNA target sequence for 4930578C19Rik (NM_175228.2,175-193).
gacattcctcggtcttgat

SEQ ID NO: 786701 - DNA, 19 bp, Mus musculus
  siRNA target sequence for 4930578C19Rik (NM_175228.2,182-200).
ctcggtcttgataaatgca

SEQ ID NO: 786702 - DNA, 19 bp, Mus musculus
  siRNA target sequence for 4930578C19Rik (NM_175228.2,205-223).
ctgcatcgggacatccatt

SEQ ID NO: 786703 - DNA, 19 bp, Mus musculus
  siRNA target sequence for 4930578C19Rik (NM_175228.2,208-226).
catcgggacatccatttgt

SEQ ID NO: 786704 - DNA, 19 bp, Mus musculus
  siRNA target sequence for 4930578C19Rik (NM_175228.2,212-230).
gggacatccatttgtaaga

SEQ ID NO: 786705 - DNA, 19 bp, Mus musculus
  siRNA target sequence for 4930578C19Rik (NM_175228.2,213-231).
ggacatccatttgtaagaa

SEQ ID NO: 786706 - DNA, 19 bp, Mus musculus
  siRNA target sequence for 4930578C19Rik (NM_175228.2,301-319).
gcattcttatgctgcaaat

SEQ ID NO: 786707 - DNA, 19 bp, Mus musculus
  siRNA target sequence for 4930578C19Rik (NM_175228.2,302-320).
cattcttatgctgcaaatt

SEQ ID NO: 786708 - DNA, 19 bp, Mus musculus
  siRNA target sequence for 4930578C19Rik (NM_175228.2,345-363).
gccctgtggagatttctca

SEQ ID NO: 786709 - DNA, 19 bp, Mus musculus
  siRNA target sequence for 4930578C19Rik (NM_175228.2,346-364).
ccctgtggagatttctcaa

SEQ ID NO: 786710 - DNA, 19 bp, Mus musculus
  siRNA target sequence for 4930578C19Rik (NM_175228.2,365-383).
ctggtcagcaggtaccaaa

SEQ ID NO: 786711 - DNA, 19 bp, Mus musculus
  siRNA target sequence for 4930578C19Rik (NM_175228.2,367-385).
ggtcagcaggtaccaaatt

SEQ ID NO: 786712 - DNA, 19 bp, Mus musculus
  siRNA target sequence for 4930578C19Rik (NM_175228.2,535-553).
cctgcgctgcccttcacaa

SEQ ID NO: 786713 - DNA, 19 bp, Mus musculus
  siRNA target sequence for 4930578C19Rik (NM_175228.2,576-594).
gacgctatgctgaagtagt

SEQ ID NO: 786714 - DNA, 19 bp, Mus musculus
  siRNA target sequence for 4930578C19Rik (NM_175228.2,763-781).
cagtaccagaccattgcaa

SEQ ID NO: 786715 - DNA, 19 bp, Mus musculus
  siRNA target sequence for 4930578C19Rik (NM_175228.2,769-787).
cagaccattgcaagaattt

SEQ ID NO: 786716 - DNA, 19 bp, Mus musculus
  siRNA target sequence for 4930578C19Rik (NM_175228.2,771-789).
gaccattgcaagaatttta

SEQ ID NO: 786717 - DNA, 19 bp, Mus musculus
  siRNA target sequence for 4930578C19Rik (NM_175228.2,855-873).
ggagcaatgacttgaacta

SEQ ID NO: 786718 - DNA, 19 bp, Mus musculus
  siRNA target sequence for 4930578C19Rik (NM_175228.2,856-874).
gagcaatgacttgaactat

SEQ ID NO: 786719 - DNA, 19 bp, Mus musculus
  siRNA target sequence for 4930578C19Rik (NM_175228.2,903-921).
gcatgtttggcatctttga

SEQ ID NO: 786720 - DNA, 19 bp, Mus musculus
  siRNA target sequence for 4930578C19Rik (NM_175228.2,1144-1162).
ctcccctgtgcaaaaggaa

SEQ ID NO: 786721 - DNA, 19 bp, Mus musculus
  siRNA target sequence for 4930578C19Rik (NM_175228.2,1179-1197).
gcctgtgcagcaaggataa

SEQ ID NO: 786722 - DNA, 19 bp, Mus musculus
  siRNA target sequence for 4930578C19Rik (NM_175228.2,1230-1248).
gttggctgaaggacatctt

SEQ ID NO: 786723 - DNA, 19 bp, Mus musculus
  siRNA target sequence for 4930578C19Rik (NM_175228.2,1234-1252).
gctgaaggacatcttaaga

SEQ ID NO: 786724 - DNA, 19 bp, Mus musculus
  siRNA target sequence for 4930578C19Rik (NM_175228.2,1237-1255).
gaaggacatcttaagatct

SEQ ID NO: 786725 - DNA, 19 bp, Mus musculus
  siRNA target sequence for 4930578C19Rik (NM_175228.2,1291-1309).
cccagactgcaagtataat

SEQ ID NO: 786726 - DNA, 19 bp, Mus musculus
  siRNA target sequence for 4930578C19Rik (NM_175228.2,1293-1311).
cagactgcaagtataatga

SEQ ID NO: 786727 - DNA, 19 bp, Mus musculus
  siRNA target sequence for 4930578C19Rik (NM_175228.2,1299-1317).
gcaagtataatgatagatt

SEQ ID NO: 786728 - DNA, 19 bp, Mus musculus
  siRNA target sequence for Srrm2 (NM_175229.2,398-416).
gtgctcgagaagctaaaca

SEQ ID NO: 786729 - DNA, 19 bp, Mus musculus
  siRNA target sequence for Srrm2 (NM_175229.2,424-442).
cctgagcctcccaaaccat

SEQ ID NO: 786730 - DNA, 19 bp, Mus musculus
  siRNA target sequence for Srrm2 (NM_175229.2,666-684).
gaaacggtctcgaagtaca

SEQ ID NO: 786731 - DNA, 19 bp, Mus musculus
  siRNA target sequence for Srrm2 (NM_175229.2,706-724).
cgagctcatcggtcaactt

SEQ ID NO: 786732 - DNA, 19 bp, Mus musculus
  siRNA target sequence for Srrm2 (NM_175229.2,770-788).
gaagtgctgctgctaaaat

SEQ ID NO: 786733 - DNA, 19 bp, Mus musculus
  siRNA target sequence for Srrm2 (NM_175229.2,778-796).
gctgctaaaattcatacaa

SEQ ID NO: 786734 - DNA, 19 bp, Mus musculus
  siRNA target sequence for Srrm2 (NM_175229.2,846-864).
gggagatgcaccttctgtt

SEQ ID NO: 786735 - DNA, 19 bp, Mus musculus
  siRNA target sequence for Srrm2 (NM_175229.2,872-890).
gtgccaccaacatacaaca

SEQ ID NO: 786736 - DNA, 19 bp, Mus musculus
  siRNA target sequence for Srrm2 (NM_175229.2,907-925).
ccctctacaaagcaatcta

SEQ ID NO: 786737 - DNA, 19 bp, Mus musculus
  siRNA target sequence for Srrm2 (NM_175229.2,923-941).
ctagcagtccttatgaaga

SEQ ID NO: 786738 - DNA, 19 bp, Mus musculus
  siRNA target sequence for Srrm2 (NM_175229.2,931-949).
ccttatgaagacaaagata

SEQ ID NO: 786739 - DNA, 19 bp, Mus musculus
  siRNA target sequence for Srrm2 (NM_175229.2,1232-1250).
cttctcctgaaagtcttaa

SEQ ID NO: 786740 - DNA, 19 bp, Mus musculus
  siRNA target sequence for Srrm2 (NM_175229.2,1272-1290).
ccgtcgagagatttcttct

SEQ ID NO: 786741 - DNA, 19 bp, Mus musculus
  siRNA target sequence for Srrm2 (NM_175229.2,1273-1291).
cgtcgagagatttcttctt

SEQ ID NO: 786742 - DNA, 19 bp, Mus musculus
  siRNA target sequence for Srrm2 (NM_175229.2,1320-1338).
cagagcaaagcgggataaa

SEQ ID NO: 786743 - DNA, 19 bp, Mus musculus
  siRNA target sequence for Srrm2 (NM_175229.2,1325-1343).
caaagcgggataaatctca

SEQ ID NO: 786744 - DNA, 19 bp, Mus musculus
  siRNA target sequence for Srrm2 (NM_175229.2,1331-1349).
gggataaatctcattctca

SEQ ID NO: 786745 - DNA, 19 bp, Mus musculus
  siRNA target sequence for Srrm2 (NM_175229.2,1333-1351).
gataaatctcattctcata

SEQ ID NO: 786746 - DNA, 19 bp, Mus musculus
  siRNA target sequence for Srrm2 (NM_175229.2,1378-1396).
cgtagtcctgccactaaga

SEQ ID NO: 786747 - DNA, 19 bp, Mus musculus
  siRNA target sequence for Srrm2 (NM_175229.2,1398-1416).
gggacggtctcgatctaga

SEQ ID NO: 786748 - DNA, 19 bp, Mus musculus
  siRNA target sequence for Srrm2 (NM_175229.2,1399-1417).
ggacggtctcgatctagaa

SEQ ID NO: 786749 - DNA, 19 bp, Mus musculus
  siRNA target sequence for Srrm2 (NM_175229.2,1596-1614).
gcgaggcagatcacattct

SEQ ID NO: 786750 - DNA, 19 bp, Mus musculus
  siRNA target sequence for Srrm2 (NM_175229.2,1597-1615).
cgaggcagatcacattcta

SEQ ID NO: 786751 - DNA, 19 bp, Mus musculus
  siRNA target sequence for Srrm2 (NM_175229.2,1600-1618).
ggcagatcacattctagat

SEQ ID NO: 786752 - DNA, 19 bp, Mus musculus
  siRNA target sequence for Srrm2 (NM_175229.2,1635-1653).
cagatcccgatctagaaca

SEQ ID NO: 786753 - DNA, 19 bp, Mus musculus
  siRNA target sequence for Srrm2 (NM_175229.2,1924-1942).
gggaggtcccggtctagaa

SEQ ID NO: 786754 - DNA, 19 bp, Mus musculus
  siRNA target sequence for Srrm2 (NM_175229.2,1960-1978).
gctcgatctcggtctagaa

SEQ ID NO: 786755 - DNA, 19 bp, Mus musculus
  siRNA target sequence for Srrm2 (NM_175229.2,2023-2041).
cgacgatctcgaagtagaa

SEQ ID NO: 786756 - DNA, 19 bp, Mus musculus
  siRNA target sequence for Srrm2 (NM_175229.2,2118-2136).
gaacaaatctagaacatct

SEQ ID NO: 786757 - DNA, 19 bp, Mus musculus
  siRNA target sequence for Srrm2 (NM_175229.2,2216-2234).
caccacgatccaaagcaaa

SEQ ID NO: 786758 - DNA, 19 bp, Mus musculus
  siRNA target sequence for Srrm2 (NM_175229.2,2218-2236).
ccacgatccaaagcaaaat

SEQ ID NO: 786759 - DNA, 19 bp, Mus musculus
  siRNA target sequence for Srrm2 (NM_175229.2,2221-2239).
cgatccaaagcaaaatctt

SEQ ID NO: 786760 - DNA, 19 bp, Mus musculus
  siRNA target sequence for Srrm2 (NM_175229.2,2261-2279).
cctctccatgtcctaaaca

SEQ ID NO: 786761 - DNA, 19 bp, Mus musculus
  siRNA target sequence for Srrm2 (NM_175229.2,2318-2336).
cttcaccacctaaacaaaa

SEQ ID NO: 786762 - DNA, 19 bp, Mus musculus
  siRNA target sequence for Srrm2 (NM_175229.2,2351-2369).
caagacagagtcgttcaaa

SEQ ID NO: 786763 - DNA, 19 bp, Mus musculus
  siRNA target sequence for Srrm2 (NM_175229.2,2374-2392).
cctcagcctaaagtaaaat

SEQ ID NO: 786764 - DNA, 19 bp, Mus musculus
  siRNA target sequence for Srrm2 (NM_175229.2,2408-2426).
gaccagggtctgtaacaaa

SEQ ID NO: 786765 - DNA, 19 bp, Mus musculus
  siRNA target sequence for Srrm2 (NM_175229.2,2410-2428).
ccagggtctgtaacaaaca

SEQ ID NO: 786766 - DNA, 19 bp, Mus musculus
  siRNA target sequence for Srrm2 (NM_175229.2,2411-2429).
cagggtctgtaacaaacat

SEQ ID NO: 786767 - DNA, 19 bp, Mus musculus
  siRNA target sequence for Srrm2 (NM_175229.2,2460-2478).
gagacagagccattctgaa

SEQ ID NO: 786768 - DNA, 19 bp, Mus musculus
  siRNA target sequence for Srrm2 (NM_175229.2,2464-2482).
cagagccattctgaatcat

SEQ ID NO: 786769 - DNA, 19 bp, Mus musculus
  siRNA target sequence for Srrm2 (NM_175229.2,2488-2506).
gatggtgaggtgaaatcaa

SEQ ID NO: 786770 - DNA, 19 bp, Mus musculus
  siRNA target sequence for Srrm2 (NM_175229.2,2535-2553).
gtcttctcctcgagtgaaa

SEQ ID NO: 786771 - DNA, 19 bp, Mus musculus
  siRNA target sequence for Srrm2 (NM_175229.2,2665-2683).
cctagtagagtgacatcta

SEQ ID NO: 786772 - DNA, 19 bp, Mus musculus
  siRNA target sequence for Srrm2 (NM_175229.2,2722-2740).
cccaaggtagactctagat

SEQ ID NO: 786773 - DNA, 19 bp, Mus musculus
  siRNA target sequence for Srrm2 (NM_175229.2,2731-2749).
gactctagattaagacata

SEQ ID NO: 786774 - DNA, 19 bp, Mus musculus
  siRNA target sequence for Srrm2 (NM_175229.2,2762-2780).
cctcctcaccagattccaa

SEQ ID NO: 786775 - DNA, 19 bp, Mus musculus
  siRNA target sequence for Srrm2 (NM_175229.2,2847-2865).
gactccaccagatcaaaat

SEQ ID NO: 786776 - DNA, 19 bp, Mus musculus
  siRNA target sequence for Srrm2 (NM_175229.2,2849-2867).
ctccaccagatcaaaatct

SEQ ID NO: 786777 - DNA, 19 bp, Mus musculus
  siRNA target sequence for Srrm2 (NM_175229.2,2851-2869).
ccaccagatcaaaatcttt

SEQ ID NO: 786778 - DNA, 19 bp, Mus musculus
  siRNA target sequence for Srrm2 (NM_175229.2,2884-2902).
ccctgtccccagaagtcta

SEQ ID NO: 786779 - DNA, 19 bp, Mus musculus
  siRNA target sequence for Srrm2 (NM_175229.2,2947-2965).
ggtgtaacacctagtagta

SEQ ID NO: 786780 - DNA, 19 bp, Mus musculus
  siRNA target sequence for Srrm2 (NM_175229.2,2948-2966).
gtgtaacacctagtagtat

SEQ ID NO: 786781 - DNA, 19 bp, Mus musculus
  siRNA target sequence for Srrm2 (NM_175229.2,3155-3173).
ccagatcaccagtaaaaca

SEQ ID NO: 786782 - DNA, 19 bp, Mus musculus
  siRNA target sequence for Srrm2 (NM_175229.2,3156-3174).
cagatcaccagtaaaacaa

SEQ ID NO: 786783 - DNA, 19 bp, Mus musculus
  siRNA target sequence for Srrm2 (NM_175229.2,3224-3242).
ctgagcagagtaagactaa

SEQ ID NO: 786784 - DNA, 19 bp, Mus musculus
  siRNA target sequence for Srrm2 (NM_175229.2,3228-3246).
gcagagtaagactaaacct

SEQ ID NO: 786785 - DNA, 19 bp, Mus musculus
  siRNA target sequence for Srrm2 (NM_175229.2,3247-3265).
gactctagcatatatcctt

SEQ ID NO: 786786 - DNA, 19 bp, Mus musculus
  siRNA target sequence for Srrm2 (NM_175229.2,3249-3267).
ctctagcatatatccttta

SEQ ID NO: 786787 - DNA, 19 bp, Mus musculus
  siRNA target sequence for Srrm2 (NM_175229.2,3262-3280).
cctttagtagactctaaat

SEQ ID NO: 786788 - DNA, 19 bp, Mus musculus
  siRNA target sequence for Srrm2 (NM_175229.2,3297-3315).
cagattggagccttctgaa

SEQ ID NO: 786789 - DNA, 19 bp, Mus musculus
  siRNA target sequence for Srrm2 (NM_175229.2,3299-3317).
gattggagccttctgaatt

SEQ ID NO: 786790 - DNA, 19 bp, Mus musculus
  siRNA target sequence for Srrm2 (NM_175229.2,3324-3342).
gagactgggtttaattcaa

SEQ ID NO: 786791 - DNA, 19 bp, Mus musculus
  siRNA target sequence for Srrm2 (NM_175229.2,3343-3361).
gaggatgttgcatcatctt

SEQ ID NO: 786792 - DNA, 19 bp, Mus musculus
  siRNA target sequence for Srrm2 (NM_175229.2,3362-3380).
gtataccaagagacaaatt

SEQ ID NO: 786793 - DNA, 19 bp, Mus musculus
  siRNA target sequence for Srrm2 (NM_175229.2,3420-3438).
gaaagtcacacctagagta

SEQ ID NO: 786794 - DNA, 19 bp, Mus musculus
  siRNA target sequence for Srrm2 (NM_175229.2,3424-3442).
gtcacacctagagtactat

SEQ ID NO: 786795 - DNA, 19 bp, Mus musculus
  siRNA target sequence for Srrm2 (NM_175229.2,3426-3444).
cacacctagagtactatta

SEQ ID NO: 786796 - DNA, 19 bp, Mus musculus
  siRNA target sequence for Srrm2 (NM_175229.2,3503-3521).
ctaattcaagtcaagatga

SEQ ID NO: 786797 - DNA, 19 bp, Mus musculus
  siRNA target sequence for Srrm2 (NM_175229.2,3509-3527).
caagtcaagatgaactaat

SEQ ID NO: 786798 - DNA, 19 bp, Mus musculus
  siRNA target sequence for Srrm2 (NM_175229.2,3558-3576).
ccaagttctacccagttta

SEQ ID NO: 786799 - DNA, 19 bp, Mus musculus
  siRNA target sequence for Srrm2 (NM_175229.2,3668-3686).
gccagtcacagccttcaaa

SEQ ID NO: 786800 - DNA, 19 bp, Mus musculus
  siRNA target sequence for Srrm2 (NM_175229.2,3720-3738).
gagtgggccacaagtttct

SEQ ID NO: 786801 - DNA, 19 bp, Mus musculus
  siRNA target sequence for Srrm2 (NM_175229.2,3766-3784).
cccccaagggagaatagct

SEQ ID NO: 786802 - DNA, 19 bp, Mus musculus
  siRNA target sequence for Srrm2 (NM_175229.2,3768-3786).
cccaagggagaatagcttt

SEQ ID NO: 786803 - DNA, 19 bp, Mus musculus
  siRNA target sequence for Srrm2 (NM_175229.2,3839-3857).
gcttttctcctgaggttaa

SEQ ID NO: 786804 - DNA, 19 bp, Mus musculus
  siRNA target sequence for Srrm2 (NM_175229.2,3875-3893).
cattccttaatcaaacaga

SEQ ID NO: 786805 - DNA, 19 bp, Mus musculus
  siRNA target sequence for Srrm2 (NM_175229.2,3939-3957).
gcgaagcagttctgagtta

SEQ ID NO: 786806 - DNA, 19 bp, Mus musculus
  siRNA target sequence for Srrm2 (NM_175229.2,3940-3958).
cgaagcagttctgagttat

SEQ ID NO: 786807 - DNA, 19 bp, Mus musculus
  siRNA target sequence for Srrm2 (NM_175229.2,3970-3988).
gtggaaaaggtaggattat

SEQ ID NO: 786808 - DNA, 19 bp, Mus musculus
  siRNA target sequence for Srrm2 (NM_175229.2,3978-3996).
ggtaggattattttcaagt

SEQ ID NO: 786809 - DNA, 19 bp, Mus musculus
  siRNA target sequence for Srrm2 (NM_175229.2,4073-4091).
ctgaactgaaagatggttt

SEQ ID NO: 786810 - DNA, 19 bp, Mus musculus
  siRNA target sequence for Srrm2 (NM_175229.2,4125-4143).
gtcttctccaggacttaga

SEQ ID NO: 786811 - DNA, 19 bp, Mus musculus
  siRNA target sequence for Srrm2 (NM_175229.2,4218-4236).
ctccaggggacgaagtgaa

SEQ ID NO: 786812 - DNA, 19 bp, Mus musculus
  siRNA target sequence for Srrm2 (NM_175229.2,4304-4322).
ccccagagcgcaacaacaa

SEQ ID NO: 786813 - DNA, 19 bp, Mus musculus
  siRNA target sequence for Srrm2 (NM_175229.2,4389-4407).
gacctctccgggacaaaga

SEQ ID NO: 786814 - DNA, 19 bp, Mus musculus
  siRNA target sequence for Srrm2 (NM_175229.2,4638-4656).
ggctcagagtggtactgat

SEQ ID NO: 786815 - DNA, 19 bp, Mus musculus
  siRNA target sequence for Srrm2 (NM_175229.2,4642-4660).
cagagtggtactgattctt

SEQ ID NO: 786816 - DNA, 19 bp, Mus musculus
  siRNA target sequence for Srrm2 (NM_175229.2,4644-4662).
gagtggtactgattcttct

SEQ ID NO: 786817 - DNA, 19 bp, Mus musculus
  siRNA target sequence for Srrm2 (NM_175229.2,4695-4713).
gcccaggcatagtagatca

SEQ ID NO: 786818 - DNA, 19 bp, Mus musculus
  siRNA target sequence for Srrm2 (NM_175229.2,4744-4762).
cctgaaggaagcagtagtt

SEQ ID NO: 786819 - DNA, 19 bp, Mus musculus
  siRNA target sequence for Srrm2 (NM_175229.2,4811-4829).
gttccaggtcctcaataga

SEQ ID NO: 786820 - DNA, 19 bp, Mus musculus
  siRNA target sequence for Srrm2 (NM_175229.2,4821-4839).
ctcaatagagccaaagaca

SEQ ID NO: 786821 - DNA, 19 bp, Mus musculus
  siRNA target sequence for Srrm2 (NM_175229.2,4823-4841).
caatagagccaaagacaaa

SEQ ID NO: 786822 - DNA, 19 bp, Mus musculus
  siRNA target sequence for Srrm2 (NM_175229.2,4863-4881).
ccggagctctcgatcatct

SEQ ID NO: 786823 - DNA, 19 bp, Mus musculus
  siRNA target sequence for Srrm2 (NM_175229.2,5026-5044).
cggaggaggcgctcagttt

SEQ ID NO: 786824 - DNA, 19 bp, Mus musculus
  siRNA target sequence for Srrm2 (NM_175229.2,5028-5046).
gaggaggcgctcagtttct

SEQ ID NO: 786825 - DNA, 19 bp, Mus musculus
  siRNA target sequence for Srrm2 (NM_175229.2,5031-5049).
gaggcgctcagtttcttct

SEQ ID NO: 786826 - DNA, 19 bp, Mus musculus
  siRNA target sequence for Srrm2 (NM_175229.2,5050-5068).
ccccgtaccaagacaactt

SEQ ID NO: 786827 - DNA, 19 bp, Mus musculus
  siRNA target sequence for Srrm2 (NM_175229.2,5098-5116).
cctcgtggactccaaagat

SEQ ID NO: 786828 - DNA, 19 bp, Mus musculus
  siRNA target sequence for Srrm2 (NM_175229.2,5124-5142).
ccgctcacggagagagaaa

SEQ ID NO: 786829 - DNA, 19 bp, Mus musculus
  siRNA target sequence for Srrm2 (NM_175229.2,5125-5143).
cgctcacggagagagaaaa

SEQ ID NO: 786830 - DNA, 19 bp, Mus musculus
  siRNA target sequence for Srrm2 (NM_175229.2,5154-5172).
ccgacgcagagatagatct

SEQ ID NO: 786831 - DNA, 19 bp, Mus musculus
  siRNA target sequence for Srrm2 (NM_175229.2,5184-5202).
gtcaacatctcgaagaaga

SEQ ID NO: 786832 - DNA, 19 bp, Mus musculus
  siRNA target sequence for Srrm2 (NM_175229.2,5214-5232).
gtctagatcacgagttact

SEQ ID NO: 786833 - DNA, 19 bp, Mus musculus
  siRNA target sequence for Srrm2 (NM_175229.2,5248-5266).
ggctctggttaccattcaa

SEQ ID NO: 786834 - DNA, 19 bp, Mus musculus
  siRNA target sequence for Srrm2 (NM_175229.2,5250-5268).
ctctggttaccattcaaga

SEQ ID NO: 786835 - DNA, 19 bp, Mus musculus
  siRNA target sequence for Srrm2 (NM_175229.2,5346-5364).
gaagcgatctcgatcaaga

SEQ ID NO: 786836 - DNA, 19 bp, Mus musculus
  siRNA target sequence for Srrm2 (NM_175229.2,5349-5367).
gcgatctcgatcaagaaca

SEQ ID NO: 786837 - DNA, 19 bp, Mus musculus
  siRNA target sequence for Srrm2 (NM_175229.2,5377-5395).
ccttggaagcgctctagat

SEQ ID NO: 786838 - DNA, 19 bp, Mus musculus
  siRNA target sequence for Srrm2 (NM_175229.2,5494-5512).
cggtcaaggtcagtgaata

SEQ ID NO: 786839 - DNA, 19 bp, Mus musculus
  siRNA target sequence for Srrm2 (NM_175229.2,5514-5532).
gcgtagatctcgatcaaga

SEQ ID NO: 786840 - DNA, 19 bp, Mus musculus
  siRNA target sequence for Srrm2 (NM_175229.2,5713-5731).
cctgttactagaagaagat

SEQ ID NO: 786841 - DNA, 19 bp, Mus musculus
  siRNA target sequence for Srrm2 (NM_175229.2,5918-5936).
gccgctcaccacttgctat

SEQ ID NO: 786842 - DNA, 19 bp, Mus musculus
  siRNA target sequence for Srrm2 (NM_175229.2,5974-5992).
cgaggcaagcggtccttaa

SEQ ID NO: 786843 - DNA, 19 bp, Mus musculus
  siRNA target sequence for Srrm2 (NM_175229.2,5979-5997).
caagcggtccttaacaaga

SEQ ID NO: 786844 - DNA, 19 bp, Mus musculus
  siRNA target sequence for Srrm2 (NM_175229.2,6021-6039).
gtctgcatctggaagtagt

SEQ ID NO: 786845 - DNA, 19 bp, Mus musculus
  siRNA target sequence for Srrm2 (NM_175229.2,6067-6085).
ccagcaacaaggaatcatt

SEQ ID NO: 786846 - DNA, 19 bp, Mus musculus
  siRNA target sequence for Srrm2 (NM_175229.2,6109-6127).
gcactcagtagctctagaa

SEQ ID NO: 786847 - DNA, 19 bp, Mus musculus
  siRNA target sequence for Srrm2 (NM_175229.2,6112-6130).
ctcagtagctctagaatga

SEQ ID NO: 786848 - DNA, 19 bp, Mus musculus
  siRNA target sequence for Srrm2 (NM_175229.2,6163-6181).
cctcttgaccgatgtagat

SEQ ID NO: 786849 - DNA, 19 bp, Mus musculus
  siRNA target sequence for Srrm2 (NM_175229.2,6312-6330).
ccatgctcagtctagaatt

SEQ ID NO: 786850 - DNA, 19 bp, Mus musculus
  siRNA target sequence for Srrm2 (NM_175229.2,6869-6887).
gcttggctcccacaaatct

SEQ ID NO: 786851 - DNA, 19 bp, Mus musculus
  siRNA target sequence for Srrm2 (NM_175229.2,7030-7048).
ccaagccagtctagaatga

SEQ ID NO: 786852 - DNA, 19 bp, Mus musculus
  siRNA target sequence for Srrm2 (NM_175229.2,7069-7087).
ccttcccctgcttcaagaa

SEQ ID NO: 786853 - DNA, 19 bp, Mus musculus
  siRNA target sequence for Srrm2 (NM_175229.2,7070-7088).
cttcccctgcttcaagaat

SEQ ID NO: 786854 - DNA, 19 bp, Mus musculus
  siRNA target sequence for Srrm2 (NM_175229.2,7095-7113).
ggcttcttcgcaatctctt

SEQ ID NO: 786855 - DNA, 19 bp, Mus musculus
  siRNA target sequence for Srrm2 (NM_175229.2,7507-7525).
cctgaggtggcactgaaaa

SEQ ID NO: 786856 - DNA, 19 bp, Mus musculus
  siRNA target sequence for Srrm2 (NM_175229.2,7550-7568).
caaaggaggctattagaga

SEQ ID NO: 786857 - DNA, 19 bp, Mus musculus
  siRNA target sequence for Srrm2 (NM_175229.2,7823-7841).
gtcctcggaagccaataga

SEQ ID NO: 786858 - DNA, 19 bp, Mus musculus
  siRNA target sequence for Srrm2 (NM_175229.2,7825-7843).
cctcggaagccaatagact

SEQ ID NO: 786859 - DNA, 19 bp, Mus musculus
  siRNA target sequence for Srrm2 (NM_175229.2,7857-7875).
ccgatccctcagttactca

SEQ ID NO: 786860 - DNA, 19 bp, Mus musculus
  siRNA target sequence for Srrm2 (NM_175229.2,7907-7925).
cttcaccaagggatctaca

SEQ ID NO: 786861 - DNA, 19 bp, Mus musculus
  siRNA target sequence for Srrm2 (NM_175229.2,7997-8015).
cacctagtccccgttctaa

SEQ ID NO: 786862 - DNA, 19 bp, Mus musculus
  siRNA target sequence for 5830403M04Rik (NM_175230.2,92-110).
gaatgggtttactggatta

SEQ ID NO: 786863 - DNA, 19 bp, Mus musculus
  siRNA target sequence for 5830403M04Rik (NM_175230.2,234-252).
cgtgggtgtttttagaaga

SEQ ID NO: 786864 - DNA, 19 bp, Mus musculus
  siRNA target sequence for 5830403M04Rik (NM_175230.2,251-269).
gagcaggtgatattcaaca

SEQ ID NO: 786865 - DNA, 19 bp, Mus musculus
  siRNA target sequence for 5830403M04Rik (NM_175230.2,254-272).
caggtgatattcaacaaga

SEQ ID NO: 786866 - DNA, 19 bp, Mus musculus
  siRNA target sequence for 5830403M04Rik (NM_175230.2,312-330).
gcagggttgtcctgatgta

SEQ ID NO: 786867 - DNA, 19 bp, Mus musculus
  siRNA target sequence for 5830403M04Rik (NM_175230.2,313-331).
cagggttgtcctgatgtat

SEQ ID NO: 786868 - DNA, 19 bp, Mus musculus
  siRNA target sequence for 5830403M04Rik (NM_175230.2,315-333).
gggttgtcctgatgtatgt

SEQ ID NO: 786869 - DNA, 19 bp, Mus musculus
  siRNA target sequence for 5830403M04Rik (NM_175230.2,350-368).
gccgtgctagggtcaatgt

SEQ ID NO: 786870 - DNA, 19 bp, Mus musculus
  siRNA target sequence for 5830403M04Rik (NM_175230.2,351-369).
ccgtgctagggtcaatgtt

SEQ ID NO: 786871 - DNA, 19 bp, Mus musculus
  siRNA target sequence for 5830403M04Rik (NM_175230.2,352-370).
cgtgctagggtcaatgtta

SEQ ID NO: 786872 - DNA, 19 bp, Mus musculus
  siRNA target sequence for 5830403M04Rik (NM_175230.2,363-381).
caatgttaagggagatatt

SEQ ID NO: 786873 - DNA, 19 bp, Mus musculus
  siRNA target sequence for 5830427D03Rik (NM_175232.2,192-210).
cattgcaacaggatagaat

SEQ ID NO: 786874 - DNA, 19 bp, Mus musculus
  siRNA target sequence for 5830427D03Rik (NM_175232.2,197-215).
caacaggatagaatctagt

SEQ ID NO: 786875 - DNA, 19 bp, Mus musculus
  siRNA target sequence for 5830427D03Rik (NM_175232.2,268-286).
gctgccattttgtcttaga

SEQ ID NO: 786876 - DNA, 19 bp, Mus musculus
  siRNA target sequence for 5830427D03Rik (NM_175232.2,285-303).
gacctgtttggggatagta

SEQ ID NO: 786877 - DNA, 19 bp, Mus musculus
  siRNA target sequence for 5830427D03Rik (NM_175232.2,352-370).
gacctgcgcttgagtacat

SEQ ID NO: 786878 - DNA, 19 bp, Mus musculus
  siRNA target sequence for 5830427D03Rik (NM_175232.2,355-373).
ctgcgcttgagtacattgt

SEQ ID NO: 786879 - DNA, 19 bp, Mus musculus
  siRNA target sequence for 5830427D03Rik (NM_175232.2,357-375).
gcgcttgagtacattgtta

SEQ ID NO: 786880 - DNA, 19 bp, Mus musculus
  siRNA target sequence for 5830427D03Rik (NM_175232.2,358-376).
cgcttgagtacattgttaa

SEQ ID NO: 786881 - DNA, 19 bp, Mus musculus
  siRNA target sequence for 5830427D03Rik (NM_175232.2,359-377).
gcttgagtacattgttaaa

SEQ ID NO: 786882 - DNA, 19 bp, Mus musculus
  siRNA target sequence for 5830472H07Rik (NM_175233.2,985-1003).
gcgatggtggaaagagtaa

SEQ ID NO: 786883 - DNA, 19 bp, Mus musculus
  siRNA target sequence for 5830472H07Rik (NM_175233.2,1045-1063).
gccaacgtttggggaaata

SEQ ID NO: 786884 - DNA, 19 bp, Mus musculus
  siRNA target sequence for 5830472H07Rik (NM_175233.2,1322-1340).
cttgttcaagtttttagct

SEQ ID NO: 786885 - DNA, 19 bp, Mus musculus
  siRNA target sequence for 5830472H07Rik (NM_175233.2,1361-1379).
cctacagcgaagagtcaaa

SEQ ID NO: 786886 - DNA, 19 bp, Mus musculus
  siRNA target sequence for 5830472H07Rik (NM_175233.2,1362-1380).
ctacagcgaagagtcaaat

SEQ ID NO: 786887 - DNA, 19 bp, Mus musculus
  siRNA target sequence for 5830472H07Rik (NM_175233.2,1365-1383).
cagcgaagagtcaaatcca

SEQ ID NO: 786888 - DNA, 19 bp, Mus musculus
  siRNA target sequence for 5830472H07Rik (NM_175233.2,1414-1432).
cagctcccgacgtgatgaa

SEQ ID NO: 786889 - DNA, 19 bp, Mus musculus
  siRNA target sequence for 5830472H07Rik (NM_175233.2,1488-1506).
cgtccacacaaggagattt

SEQ ID NO: 786890 - DNA, 19 bp, Mus musculus
  siRNA target sequence for 5830472H07Rik (NM_175233.2,1552-1570).
gaaaccttctgtacgtata

SEQ ID NO: 786891 - DNA, 19 bp, Mus musculus
  siRNA target sequence for 5830472H07Rik (NM_175233.2,1606-1624).
ctgcccggaacatcacaat

SEQ ID NO: 786892 - DNA, 19 bp, Mus musculus
  siRNA target sequence for 5830472H07Rik (NM_175233.2,1698-1716).
gaatttctgcaggaagtat

SEQ ID NO: 786893 - DNA, 19 bp, Mus musculus
  siRNA target sequence for 5830472H07Rik (NM_175233.2,1713-1731).
gtatatacagctattacat

SEQ ID NO: 786894 - DNA, 19 bp, Mus musculus
  siRNA target sequence for 5830472H07Rik (NM_175233.2,1723-1741).
ctattacataccataataa

SEQ ID NO: 786895 - DNA, 19 bp, Mus musculus
  siRNA target sequence for 5830472H07Rik (NM_175233.2,1879-1897).
cgtggctgccgattctgtt

SEQ ID NO: 786896 - DNA, 19 bp, Mus musculus
  siRNA target sequence for 5830472H07Rik (NM_175233.2,1882-1900).
ggctgccgattctgttaaa

SEQ ID NO: 786897 - DNA, 19 bp, Mus musculus
  siRNA target sequence for 5830472H07Rik (NM_175233.2,1886-1904).
gccgattctgttaaacgaa

SEQ ID NO: 786898 - DNA, 19 bp, Mus musculus
  siRNA target sequence for 5830472H07Rik (NM_175233.2,1895-1913).
gttaaacgaacgtcttcaa

SEQ ID NO: 786899 - DNA, 19 bp, Mus musculus
  siRNA target sequence for 5830472H07Rik (NM_175233.2,1958-1976).
caactactccatacattct

SEQ ID NO: 786900 - DNA, 19 bp, Mus musculus
  siRNA target sequence for 5830472H07Rik (NM_175233.2,1967-1985).
catacattctgctgagaaa

SEQ ID NO: 786901 - DNA, 19 bp, Mus musculus
  siRNA target sequence for 5830472H07Rik (NM_175233.2,1978-1996).
ctgagaaagtccctttaca

SEQ ID NO: 786902 - DNA, 19 bp, Mus musculus
  siRNA target sequence for 5830472H07Rik (NM_175233.2,2023-2041).
gccataagggggtatttaa

SEQ ID NO: 786903 - DNA, 19 bp, Mus musculus
  siRNA target sequence for 5830472H07Rik (NM_175233.2,2024-2042).
ccataagggggtatttaat

SEQ ID NO: 786904 - DNA, 19 bp, Mus musculus
  siRNA target sequence for 5830472H07Rik (NM_175233.2,2025-2043).
cataagggggtatttaata

SEQ ID NO: 786905 - DNA, 19 bp, Mus musculus
  siRNA target sequence for 5830472H07Rik (NM_175233.2,2190-2208).
ctgaaactcagcatcatct

SEQ ID NO: 786906 - DNA, 19 bp, Mus musculus
  siRNA target sequence for 5830472H07Rik (NM_175233.2,2504-2522).
cccccgataccacacatat

SEQ ID NO: 786907 - DNA, 19 bp, Mus musculus
  siRNA target sequence for 5830472H07Rik (NM_175233.2,2507-2525).
ccgataccacacatatgga

SEQ ID NO: 786908 - DNA, 19 bp, Mus musculus
  siRNA target sequence for 5830472H07Rik (NM_175233.2,2613-2631).
gcagccgatgaggaagtta

SEQ ID NO: 786909 - DNA, 19 bp, Mus musculus
  siRNA target sequence for 5830472H07Rik (NM_175233.2,2614-2632).
cagccgatgaggaagttaa

SEQ ID NO: 786910 - DNA, 19 bp, Mus musculus
  siRNA target sequence for 5830472H07Rik (NM_175233.2,2616-2634).
gccgatgaggaagttaaga

SEQ ID NO: 786911 - DNA, 19 bp, Mus musculus
  siRNA target sequence for 5830472H07Rik (NM_175233.2,2617-2635).
ccgatgaggaagttaagaa

SEQ ID NO: 786912 - DNA, 19 bp, Mus musculus
  siRNA target sequence for 5830472H07Rik (NM_175233.2,2625-2643).
gaagttaagaacatcatgt

SEQ ID NO: 786913 - DNA, 19 bp, Mus musculus
  siRNA target sequence for 5830472H07Rik (NM_175233.2,2636-2654).
catcatgtcttcaaagatt

SEQ ID NO: 786914 - DNA, 19 bp, Mus musculus
  siRNA target sequence for 5830472H07Rik (NM_175233.2,2668-2686).
gcagccggatgtcttacta

SEQ ID NO: 786915 - DNA, 19 bp, Mus musculus
  siRNA target sequence for 5830472H07Rik (NM_175233.2,2669-2687).
cagccggatgtcttactat

SEQ ID NO: 786916 - DNA, 19 bp, Mus musculus
  siRNA target sequence for 5830472H07Rik (NM_175233.2,2673-2691).
cggatgtcttactattgct

SEQ ID NO: 786917 - DNA, 19 bp, Mus musculus
  siRNA target sequence for 5830472H07Rik (NM_175233.2,2684-2702).
ctattgctctggcaatagt

SEQ ID NO: 786918 - DNA, 19 bp, Mus musculus
  siRNA target sequence for 5830472H07Rik (NM_175233.2,2800-2818).
gagaaacggtcttcaagta

SEQ ID NO: 786919 - DNA, 19 bp, Mus musculus
  siRNA target sequence for 5830472H07Rik (NM_175233.2,2816-2834).
gtacgcctggttcttcttt

SEQ ID NO: 786920 - DNA, 19 bp, Mus musculus
  siRNA target sequence for 5830472H07Rik (NM_175233.2,2835-2853).
gagcttctggtgaaaagca

SEQ ID NO: 786921 - DNA, 19 bp, Mus musculus
  siRNA target sequence for 5830472H07Rik (NM_175233.2,2876-2894).
ggataaacgggacagtttt

SEQ ID NO: 786922 - DNA, 19 bp, Mus musculus
  siRNA target sequence for 5830472H07Rik (NM_175233.2,2896-2914).
ggaggactcgtttttctga

SEQ ID NO: 786923 - DNA, 19 bp, Mus musculus
  siRNA target sequence for 5830472H07Rik (NM_175233.2,2930-2948).
cataactaccattgttaat

SEQ ID NO: 786924 - DNA, 19 bp, Mus musculus
  siRNA target sequence for 6230409E13Rik (NM_175234.2,479-497).
cacgaactcctggtcatta

SEQ ID NO: 786925 - DNA, 19 bp, Mus musculus
  siRNA target sequence for 6230409E13Rik (NM_175234.2,514-532).
cgactccaaagatgctatt

SEQ ID NO: 786926 - DNA, 19 bp, Mus musculus
  siRNA target sequence for 6230409E13Rik (NM_175234.2,544-562).
gtttgcaagacctaacaat

SEQ ID NO: 786927 - DNA, 19 bp, Mus musculus
  siRNA target sequence for 6230409E13Rik (NM_175234.2,623-641).
ctaccctatcagaactatt

SEQ ID NO: 786928 - DNA, 19 bp, Mus musculus
  siRNA target sequence for 6230409E13Rik (NM_175234.2,628-646).
ctatcagaactattttggt

SEQ ID NO: 786929 - DNA, 19 bp, Mus musculus
  siRNA target sequence for 6230409E13Rik (NM_175234.2,703-721).
gtctggcacagaattcata

SEQ ID NO: 786930 - DNA, 19 bp, Mus musculus
  siRNA target sequence for 6230409E13Rik (NM_175234.2,705-723).
ctggcacagaattcataat

SEQ ID NO: 786931 - DNA, 19 bp, Mus musculus
  siRNA target sequence for 6230409E13Rik (NM_175234.2,708-726).
gcacagaattcataatcga

SEQ ID NO: 786932 - DNA, 19 bp, Mus musculus
  siRNA target sequence for 6230409E13Rik (NM_175234.2,743-761).
cttggagtgaacttaaata

SEQ ID NO: 786933 - DNA, 19 bp, Mus musculus
  siRNA target sequence for 6530403D07Rik (NM_175238.2,244-262).
cccaaatggatgtttctgt

SEQ ID NO: 786934 - DNA, 19 bp, Mus musculus
  siRNA target sequence for 6530403D07Rik (NM_175238.2,245-263).
ccaaatggatgtttctgta

SEQ ID NO: 786935 - DNA, 19 bp, Mus musculus
  siRNA target sequence for 6530403D07Rik (NM_175238.2,311-329).
cacaactgaagtgaatgtt

SEQ ID NO: 786936 - DNA, 19 bp, Mus musculus
  siRNA target sequence for 6530403D07Rik (NM_175238.2,350-368).
ctttaattcaggtatggat

SEQ ID NO: 786937 - DNA, 19 bp, Mus musculus
  siRNA target sequence for 6530403D07Rik (NM_175238.2,360-378).
ggtatggatctttctgata

SEQ ID NO: 786938 - DNA, 19 bp, Mus musculus
  siRNA target sequence for 6530403D07Rik (NM_175238.2,416-434).
cgcagctagtggggaaata

SEQ ID NO: 786939 - DNA, 19 bp, Mus musculus
  siRNA target sequence for 6530403D07Rik (NM_175238.2,555-573).
cttgccagtgcctctaaat

SEQ ID NO: 786940 - DNA, 19 bp, Mus musculus
  siRNA target sequence for 6530403D07Rik (NM_175238.2,559-577).
ccagtgcctctaaatctga

SEQ ID NO: 786941 - DNA, 19 bp, Mus musculus
  siRNA target sequence for 6530403D07Rik (NM_175238.2,560-578).
cagtgcctctaaatctgaa

SEQ ID NO: 786942 - DNA, 19 bp, Mus musculus
  siRNA target sequence for 6530403D07Rik (NM_175238.2,608-626).
cacccagagctttgttagt

SEQ ID NO: 786943 - DNA, 19 bp, Mus musculus
  siRNA target sequence for 6530403D07Rik (NM_175238.2,645-663).
ggagaaagaactgttaatt

SEQ ID NO: 786944 - DNA, 19 bp, Mus musculus
  siRNA target sequence for 6530403D07Rik (NM_175238.2,648-666).
gaaagaactgttaattgca

SEQ ID NO: 786945 - DNA, 19 bp, Mus musculus
  siRNA target sequence for 6530403D07Rik (NM_175238.2,665-683).
caaaactgagacatccatt

SEQ ID NO: 786946 - DNA, 19 bp, Mus musculus
  siRNA target sequence for 6530403D07Rik (NM_175238.2,670-688).
ctgagacatccattgaact

SEQ ID NO: 786947 - DNA, 19 bp, Mus musculus
  siRNA target sequence for 6530403D07Rik (NM_175238.2,741-759).
gatactctgcaggaagttt

SEQ ID NO: 786948 - DNA, 19 bp, Mus musculus
  siRNA target sequence for 6530403D07Rik (NM_175238.2,749-767).
gcaggaagtttgctttact

SEQ ID NO: 786949 - DNA, 19 bp, Mus musculus
  siRNA target sequence for 6530403D07Rik (NM_175238.2,822-840).
cttggagcagaaagcaata

SEQ ID NO: 786950 - DNA, 19 bp, Mus musculus
  siRNA target sequence for 6530403D07Rik (NM_175238.2,841-859).
ctacgtctcccgaaaagtt

SEQ ID NO: 786951 - DNA, 19 bp, Mus musculus
  siRNA target sequence for 6530403D07Rik (NM_175238.2,844-862).
cgtctcccgaaaagttaga

SEQ ID NO: 786952 - DNA, 19 bp, Mus musculus
  siRNA target sequence for 6530403D07Rik (NM_175238.2,990-1008).
gagatctcaccagttaaca

SEQ ID NO: 786953 - DNA, 19 bp, Mus musculus
  siRNA target sequence for 6530403D07Rik (NM_175238.2,1024-1042).
cgtttgcagatccaatata

SEQ ID NO: 786954 - DNA, 19 bp, Mus musculus
  siRNA target sequence for 6530403D07Rik (NM_175238.2,1051-1069).
gattggcagatgacattga

SEQ ID NO: 786955 - DNA, 19 bp, Mus musculus
  siRNA target sequence for 6530403D07Rik (NM_175238.2,1074-1092).
cgttgctctgttgttagat

SEQ ID NO: 786956 - DNA, 19 bp, Mus musculus
  siRNA target sequence for 6530403D07Rik (NM_175238.2,1086-1104).
gttagatctcattcttcaa

SEQ ID NO: 786957 - DNA, 19 bp, Mus musculus
  siRNA target sequence for 6530403D07Rik (NM_175238.2,1102-1120).
caaatagctctcccataat

SEQ ID NO: 786958 - DNA, 19 bp, Mus musculus
  siRNA target sequence for 6530403D07Rik (NM_175238.2,1109-1127).
ctctcccataataaaaagt

SEQ ID NO: 786959 - DNA, 19 bp, Mus musculus
  siRNA target sequence for 6530403D07Rik (NM_175238.2,1113-1131).
cccataataaaaagtgtta

SEQ ID NO: 786960 - DNA, 19 bp, Mus musculus
  siRNA target sequence for 6530403D07Rik (NM_175238.2,1138-1156).
cacctacttcacactctaa

SEQ ID NO: 786961 - DNA, 19 bp, Mus musculus
  siRNA target sequence for 6530403D07Rik (NM_175238.2,1149-1167).
cactctaagcataatacca

SEQ ID NO: 786962 - DNA, 19 bp, Mus musculus
  siRNA target sequence for 6530403D07Rik (NM_175238.2,1165-1183).
ccacttcagccaaaggatt

SEQ ID NO: 786963 - DNA, 19 bp, Mus musculus
  siRNA target sequence for 6530403D07Rik (NM_175238.2,1166-1184).
cacttcagccaaaggattt

SEQ ID NO: 786964 - DNA, 19 bp, Mus musculus
  siRNA target sequence for 6530403D07Rik (NM_175238.2,1200-1218).
cagagctctaaatttaaga

SEQ ID NO: 786965 - DNA, 19 bp, Mus musculus
  siRNA target sequence for 6530403D07Rik (NM_175238.2,1259-1277).
catgctgtccccaacagaa

SEQ ID NO: 786966 - DNA, 19 bp, Mus musculus
  siRNA target sequence for 6530403D07Rik (NM_175238.2,1262-1280).
gctgtccccaacagaaagt

SEQ ID NO: 786967 - DNA, 19 bp, Mus musculus
  siRNA target sequence for 6530403D07Rik (NM_175238.2,1303-1321).
gtgcagcatcagttgacat

SEQ ID NO: 786968 - DNA, 19 bp, Mus musculus
  siRNA target sequence for 6530403D07Rik (NM_175238.2,1306-1324).
cagcatcagttgacatcat

SEQ ID NO: 786969 - DNA, 19 bp, Mus musculus
  siRNA target sequence for 6530403D07Rik (NM_175238.2,1308-1326).
gcatcagttgacatcattt

SEQ ID NO: 786970 - DNA, 19 bp, Mus musculus
  siRNA target sequence for 6530403D07Rik (NM_175238.2,1309-1327).
catcagttgacatcatttt

SEQ ID NO: 786971 - DNA, 19 bp, Mus musculus
  siRNA target sequence for 6530403D07Rik (NM_175238.2,1329-1347).
cctcagattacatcaaata

SEQ ID NO: 786972 - DNA, 19 bp, Mus musculus
  siRNA target sequence for 6530403D07Rik (NM_175238.2,1330-1348).
ctcagattacatcaaatat

SEQ ID NO: 786973 - DNA, 19 bp, Mus musculus
  siRNA target sequence for 6530403D07Rik (NM_175238.2,1357-1375).
gaggtcttgggcaactcat

SEQ ID NO: 786974 - DNA, 19 bp, Mus musculus
  siRNA target sequence for 6530403D07Rik (NM_175238.2,1414-1432).
cgcttacggcatctgaaat

SEQ ID NO: 786975 - DNA, 19 bp, Mus musculus
  siRNA target sequence for 6530403D07Rik (NM_175238.2,1415-1433).
gcttacggcatctgaaata

SEQ ID NO: 786976 - DNA, 19 bp, Mus musculus
  siRNA target sequence for 6530403D07Rik (NM_175238.2,1416-1434).
cttacggcatctgaaataa

SEQ ID NO: 786977 - DNA, 19 bp, Mus musculus
  siRNA target sequence for 6530403D07Rik (NM_175238.2,1478-1496).
ggccctcagagtataccat

SEQ ID NO: 786978 - DNA, 19 bp, Mus musculus
  siRNA target sequence for 6530403D07Rik (NM_175238.2,1508-1526).
gaaatctcgtggacttgaa

SEQ ID NO: 786979 - DNA, 19 bp, Mus musculus
  siRNA target sequence for 6530403D07Rik (NM_175238.2,1513-1531).
ctcgtggacttgaagaaat

SEQ ID NO: 786980 - DNA, 19 bp, Mus musculus
  siRNA target sequence for 6530403D07Rik (NM_175238.2,1584-1602).
gtctccacggatgaagaaa

SEQ ID NO: 786981 - DNA, 19 bp, Mus musculus
  siRNA target sequence for 6530403D07Rik (NM_175238.2,1599-1617).
gaaaggttcgcctcagatt

SEQ ID NO: 786982 - DNA, 19 bp, Mus musculus
  siRNA target sequence for 6530403D07Rik (NM_175238.2,1604-1622).
gttcgcctcagatttgatt

SEQ ID NO: 786983 - DNA, 19 bp, Mus musculus
  siRNA target sequence for 6530403D07Rik (NM_175238.2,1634-1652).
cctagataccccattgtct

SEQ ID NO: 786984 - DNA, 19 bp, Mus musculus
  siRNA target sequence for 6530403D07Rik (NM_175238.2,1635-1653).
ctagataccccattgtcta

SEQ ID NO: 786985 - DNA, 19 bp, Mus musculus
  siRNA target sequence for 6530403D07Rik (NM_175238.2,1638-1656).
gataccccattgtctaaaa

SEQ ID NO: 786986 - DNA, 19 bp, Mus musculus
  siRNA target sequence for 6530403D07Rik (NM_175238.2,1642-1660).
ccccattgtctaaaaatct

SEQ ID NO: 786987 - DNA, 19 bp, Mus musculus
  siRNA target sequence for 6530403D07Rik (NM_175238.2,1699-1717).
cagaagatctctacagtta

SEQ ID NO: 786988 - DNA, 19 bp, Mus musculus
  siRNA target sequence for 6530403D07Rik (NM_175238.2,1701-1719).
gaagatctctacagttaca

SEQ ID NO: 786989 - DNA, 19 bp, Mus musculus
  siRNA target sequence for 6530403D07Rik (NM_175238.2,1722-1740).
ggaagccagctatttgaaa

SEQ ID NO: 786990 - DNA, 19 bp, Mus musculus
  siRNA target sequence for 6530403D07Rik (NM_175238.2,1726-1744).
gccagctatttgaaatgca

SEQ ID NO: 786991 - DNA, 19 bp, Mus musculus
  siRNA target sequence for 6530403D07Rik (NM_175238.2,1727-1745).
ccagctatttgaaatgcat

SEQ ID NO: 786992 - DNA, 19 bp, Mus musculus
  siRNA target sequence for 6530403D07Rik (NM_175238.2,1731-1749).
ctatttgaaatgcatgaaa

SEQ ID NO: 786993 - DNA, 19 bp, Mus musculus
  siRNA target sequence for 6530403D07Rik (NM_175238.2,1756-1774).
gtaccatggcaaactctat

SEQ ID NO: 786994 - DNA, 19 bp, Mus musculus
  siRNA target sequence for 2810410L24Rik (NM_175239.2,548-566).
cgaccacacttgctgaata

SEQ ID NO: 786995 - DNA, 19 bp, Mus musculus
  siRNA target sequence for 2810410L24Rik (NM_175239.2,805-823).
ggagtgttcatattcttga

SEQ ID NO: 786996 - DNA, 19 bp, Mus musculus
  siRNA target sequence for 2810410L24Rik (NM_175239.2,808-826).
gtgttcatattcttgacta

SEQ ID NO: 786997 - DNA, 19 bp, Mus musculus
  siRNA target sequence for 1700020B09Rik (NM_175240.2,161-179).
ccccaaagcactttggtat

SEQ ID NO: 786998 - DNA, 19 bp, Mus musculus
  siRNA target sequence for 1700020B09Rik (NM_175240.2,162-180).
cccaaagcactttggtatt

SEQ ID NO: 786999 - DNA, 19 bp, Mus musculus
  siRNA target sequence for 1700020B09Rik (NM_175240.2,293-311).
ctaccgctgcctggataat

SEQ ID NO: 787000 - DNA, 19 bp, Mus musculus
  siRNA target sequence for 1700020B09Rik (NM_175240.2,297-315).
cgctgcctggataatcaca

SEQ ID NO: 787001 - DNA, 19 bp, Mus musculus
  siRNA target sequence for 1700020B09Rik (NM_175240.2,317-335).
ggcccgtttggtagaatat

SEQ ID NO: 787002 - DNA, 19 bp, Mus musculus
  siRNA target sequence for 1700020B09Rik (NM_175240.2,319-337).
cccgtttggtagaatatga

SEQ ID NO: 787003 - DNA, 19 bp, Mus musculus
  siRNA target sequence for 1700020B09Rik (NM_175240.2,322-340).
gtttggtagaatatgagat

SEQ ID NO: 787004 - DNA, 19 bp, Mus musculus
  siRNA target sequence for 1700020B09Rik (NM_175240.2,338-356).
gattgactttcagaacata

SEQ ID NO: 787005 - DNA, 19 bp, Mus musculus
  siRNA target sequence for 1700020B09Rik (NM_175240.2,393-411).
gagcccatgggaaatgaga

SEQ ID NO: 787006 - DNA, 19 bp, Mus musculus
  siRNA target sequence for 1700020B09Rik (NM_175240.2,452-470).
ggatccttggcaagattgt

SEQ ID NO: 787007 - DNA, 19 bp, Mus musculus
  siRNA target sequence for 1700020B09Rik (NM_175240.2,453-471).
gatccttggcaagattgta

SEQ ID NO: 787008 - DNA, 19 bp, Mus musculus
  siRNA target sequence for 1700020B09Rik (NM_175240.2,647-665).
gaccaaccagccgtacttt

SEQ ID NO: 787009 - DNA, 19 bp, Mus musculus
  siRNA target sequence for 1700020B09Rik (NM_175240.2,649-667).
ccaaccagccgtactttgt

SEQ ID NO: 787010 - DNA, 19 bp, Mus musculus
  siRNA target sequence for 1700020B09Rik (NM_175240.2,653-671).
ccagccgtactttgtcttt

SEQ ID NO: 787011 - DNA, 19 bp, Mus musculus
  siRNA target sequence for 1700020B09Rik (NM_175240.2,911-929).
cactgagagacaatccaaa

SEQ ID NO: 787012 - DNA, 19 bp, Mus musculus
  siRNA target sequence for 1700020B09Rik (NM_175240.2,998-1016).
gatggtgctgagtatctct

SEQ ID NO: 787013 - DNA, 19 bp, Mus musculus
  siRNA target sequence for 2410129H14Rik (NM_175245.2,182-200).
gaagccttatcgtctgtta

SEQ ID NO: 787014 - DNA, 19 bp, Mus musculus
  siRNA target sequence for 2410129H14Rik (NM_175245.2,185-203).
gccttatcgtctgttatta

SEQ ID NO: 787015 - DNA, 19 bp, Mus musculus
  siRNA target sequence for 2410129H14Rik (NM_175245.2,186-204).
ccttatcgtctgttattaa

SEQ ID NO: 787016 - DNA, 19 bp, Mus musculus
  siRNA target sequence for 2410133M08Rik (NM_175246.2,129-147).
cgaccgtggtggtgaaaca

SEQ ID NO: 787017 - DNA, 19 bp, Mus musculus
  siRNA target sequence for 2410133M08Rik (NM_175246.2,406-424).
gcaccgggaaccatcagaa

SEQ ID NO: 787018 - DNA, 19 bp, Mus musculus
  siRNA target sequence for 2410133M08Rik (NM_175246.2,990-1008).
gggtgaagccctacattat

SEQ ID NO: 787019 - DNA, 19 bp, Mus musculus
  siRNA target sequence for 2410133M08Rik (NM_175246.2,1022-1040).
ggcaatggaacattcttga

SEQ ID NO: 787020 - DNA, 19 bp, Mus musculus
  siRNA target sequence for 2410133M08Rik (NM_175246.2,1103-1121).
gggttcagtagcagagaat

SEQ ID NO: 787021 - DNA, 19 bp, Mus musculus
  siRNA target sequence for 2410133M08Rik (NM_175246.2,1104-1122).
ggttcagtagcagagaata

SEQ ID NO: 787022 - DNA, 19 bp, Mus musculus
  siRNA target sequence for 2410133M08Rik (NM_175246.2,1110-1128).
gtagcagagaatatgtctt

SEQ ID NO: 787023 - DNA, 19 bp, Mus musculus
  siRNA target sequence for 4432409D24Rik (NM_175251.1,662-680).
ccacaagacactgttatca

SEQ ID NO: 787024 - DNA, 19 bp, Mus musculus
  siRNA target sequence for 4432409D24Rik (NM_175251.1,683-701).
gcacccccacagtacgtaa

SEQ ID NO: 787025 - DNA, 19 bp, Mus musculus
  siRNA target sequence for 4432409D24Rik (NM_175251.1,686-704).
cccccacagtacgtaacaa

SEQ ID NO: 787026 - DNA, 19 bp, Mus musculus
  siRNA target sequence for 4432409D24Rik (NM_175251.1,688-706).
cccacagtacgtaacaact

SEQ ID NO: 787027 - DNA, 19 bp, Mus musculus
  siRNA target sequence for 4432409D24Rik (NM_175251.1,689-707).
ccacagtacgtaacaactt

SEQ ID NO: 787028 - DNA, 19 bp, Mus musculus
  siRNA target sequence for 4432409D24Rik (NM_175251.1,705-723).
cttctgcatccaatatcgt

SEQ ID NO: 787029 - DNA, 19 bp, Mus musculus
  siRNA target sequence for 4432409D24Rik (NM_175251.1,721-739).
cgtctcagcgacttcagta

SEQ ID NO: 787030 - DNA, 19 bp, Mus musculus
  siRNA target sequence for 4432409D24Rik (NM_175251.1,728-746).
gcgacttcagtacagaatt

SEQ ID NO: 787031 - DNA, 19 bp, Mus musculus
  siRNA target sequence for 4432409D24Rik (NM_175251.1,729-747).
cgacttcagtacagaattt

SEQ ID NO: 787032 - DNA, 19 bp, Mus musculus
  siRNA target sequence for 4432409D24Rik (NM_175251.1,759-777).
caggacaggtggttaccat

SEQ ID NO: 787033 - DNA, 19 bp, Mus musculus
  siRNA target sequence for 4432409D24Rik (NM_175251.1,808-826).
ggtaggattccagaacatt

SEQ ID NO: 787034 - DNA, 19 bp, Mus musculus
  siRNA target sequence for 4432409D24Rik (NM_175251.1,1064-1082).
cctgtcccgcctactaata

SEQ ID NO: 787035 - DNA, 19 bp, Mus musculus
  siRNA target sequence for 4432409D24Rik (NM_175251.1,1065-1083).
ctgtcccgcctactaataa

SEQ ID NO: 787036 - DNA, 19 bp, Mus musculus
  siRNA target sequence for 4432409D24Rik (NM_175251.1,1069-1087).
cccgcctactaataaccaa

SEQ ID NO: 787037 - DNA, 19 bp, Mus musculus
  siRNA target sequence for 4432409D24Rik (NM_175251.1,1088-1106).
gtccctactgccatgtcat

SEQ ID NO: 787038 - DNA, 19 bp, Mus musculus
  siRNA target sequence for 4432409D24Rik (NM_175251.1,1387-1405).
gattcctccccctaacaat

SEQ ID NO: 787039 - DNA, 19 bp, Mus musculus
  siRNA target sequence for 4432409D24Rik (NM_175251.1,1391-1409).
cctccccctaacaatgcaa

SEQ ID NO: 787040 - DNA, 19 bp, Mus musculus
  siRNA target sequence for 4432409D24Rik (NM_175251.1,1419-1437).
gccctcaggtggtctatca

SEQ ID NO: 787041 - DNA, 19 bp, Mus musculus
  siRNA target sequence for 4432409D24Rik (NM_175251.1,1482-1500).
ctccggctcagcagctatt

SEQ ID NO: 787042 - DNA, 19 bp, Mus musculus
  siRNA target sequence for 4432409D24Rik (NM_175251.1,1501-1519).
ggttgggcagcaaaatgtt

SEQ ID NO: 787043 - DNA, 19 bp, Mus musculus
  siRNA target sequence for 4432409D24Rik (NM_175251.1,1559-1577).
caaaccgtgcccatttcga

SEQ ID NO: 787044 - DNA, 19 bp, Mus musculus
  siRNA target sequence for 4432409D24Rik (NM_175251.1,1564-1582).
cgtgcccatttcgaactta

SEQ ID NO: 787045 - DNA, 19 bp, Mus musculus
  siRNA target sequence for 4432409D24Rik (NM_175251.1,1567-1585).
gcccatttcgaacttacaa

SEQ ID NO: 787046 - DNA, 19 bp, Mus musculus
  siRNA target sequence for 4432409D24Rik (NM_175251.1,1568-1586).
cccatttcgaacttacaaa

SEQ ID NO: 787047 - DNA, 19 bp, Mus musculus
  siRNA target sequence for 4432409D24Rik (NM_175251.1,1570-1588).
catttcgaacttacaaata

SEQ ID NO: 787048 - DNA, 19 bp, Mus musculus
  siRNA target sequence for 4432409D24Rik (NM_175251.1,1592-1610).
ccgggtccgctgatctcaa

SEQ ID NO: 787049 - DNA, 19 bp, Mus musculus
  siRNA target sequence for 4432409D24Rik (NM_175251.1,1593-1611).
cgggtccgctgatctcaaa

SEQ ID NO: 787050 - DNA, 19 bp, Mus musculus
  siRNA target sequence for 4432409D24Rik (NM_175251.1,1595-1613).
ggtccgctgatctcaaaca

SEQ ID NO: 787051 - DNA, 19 bp, Mus musculus
  siRNA target sequence for 4432409D24Rik (NM_175251.1,1645-1663).
caaccaggtaactataaca

SEQ ID NO: 787052 - DNA, 19 bp, Mus musculus
  siRNA target sequence for 4432409D24Rik (NM_175251.1,1670-1688).
ccaaataccagttttgcaa

SEQ ID NO: 787053 - DNA, 19 bp, Mus musculus
  siRNA target sequence for 4432409D24Rik (NM_175251.1,1728-1746).
cgccagccggtcttagcat

SEQ ID NO: 787054 - DNA, 19 bp, Mus musculus
  siRNA target sequence for 4432409D24Rik (NM_175251.1,1827-1845).
cgttcaaaggcgacaagat

SEQ ID NO: 787055 - DNA, 19 bp, Mus musculus
  siRNA target sequence for 4432409D24Rik (NM_175251.1,1881-1899).
caggtctacatgttcatga

SEQ ID NO: 787056 - DNA, 19 bp, Mus musculus
  siRNA target sequence for 4432409D24Rik (NM_175251.1,1934-1952).
cggcgaggaaccacaaaca

SEQ ID NO: 787057 - DNA, 19 bp, Mus musculus
  siRNA target sequence for 4432409D24Rik (NM_175251.1,1984-2002).
ccaggtgggaagtctttta

SEQ ID NO: 787058 - DNA, 19 bp, Mus musculus
  siRNA target sequence for 4432409D24Rik (NM_175251.1,2067-2085).
cgagccagtgctcactaat

SEQ ID NO: 787059 - DNA, 19 bp, Mus musculus
  siRNA target sequence for 4432409D24Rik (NM_175251.1,2101-2119).
gttggaactaggtgagaat

SEQ ID NO: 787060 - DNA, 19 bp, Mus musculus
  siRNA target sequence for 4432409D24Rik (NM_175251.1,2116-2134).
gaatggagcgcctggaaaa

SEQ ID NO: 787061 - DNA, 19 bp, Mus musculus
  siRNA target sequence for 4432409D24Rik (NM_175251.1,2222-2240).
gatggttctcatttaagca

SEQ ID NO: 787062 - DNA, 19 bp, Mus musculus
  siRNA target sequence for 4432409D24Rik (NM_175251.1,2225-2243).
ggttctcatttaagcaaaa

SEQ ID NO: 787063 - DNA, 19 bp, Mus musculus
  siRNA target sequence for 4432409D24Rik (NM_175251.1,2229-2247).
ctcatttaagcaaaaacat

SEQ ID NO: 787064 - DNA, 19 bp, Mus musculus
  siRNA target sequence for 4432409D24Rik (NM_175251.1,2318-2336).
ggtgccactcagcaagata

SEQ ID NO: 787065 - DNA, 19 bp, Mus musculus
  siRNA target sequence for 4432409D24Rik (NM_175251.1,2340-2358).
ccaaaggtgaccaactaga

SEQ ID NO: 787066 - DNA, 19 bp, Mus musculus
  siRNA target sequence for 4432409D24Rik (NM_175251.1,2346-2364).
gtgaccaactagaaagagt

SEQ ID NO: 787067 - DNA, 19 bp, Mus musculus
  siRNA target sequence for 4432409D24Rik (NM_175251.1,2348-2366).
gaccaactagaaagagttt

SEQ ID NO: 787068 - DNA, 19 bp, Mus musculus
  siRNA target sequence for 4432409D24Rik (NM_175251.1,2351-2369).
caactagaaagagtttcta

SEQ ID NO: 787069 - DNA, 19 bp, Mus musculus
  siRNA target sequence for 4432409D24Rik (NM_175251.1,2401-2419).
gtccacaagcagtatgcaa

SEQ ID NO: 787070 - DNA, 19 bp, Mus musculus
  siRNA target sequence for 4432409D24Rik (NM_175251.1,2472-2490).
gacctctagcttcaagttt

SEQ ID NO: 787071 - DNA, 19 bp, Mus musculus
  siRNA target sequence for 4432409D24Rik (NM_175251.1,2474-2492).
cctctagcttcaagtttga

SEQ ID NO: 787072 - DNA, 19 bp, Mus musculus
  siRNA target sequence for 4432409D24Rik (NM_175251.1,2475-2493).
ctctagcttcaagtttgaa

SEQ ID NO: 787073 - DNA, 19 bp, Mus musculus
  siRNA target sequence for 4432409D24Rik (NM_175251.1,2509-2527).
gcaacgcccaagtgtagtt

SEQ ID NO: 787074 - DNA, 19 bp, Mus musculus
  siRNA target sequence for 4432409D24Rik (NM_175251.1,2602-2620).
gaccccttctgctctatca

SEQ ID NO: 787075 - DNA, 19 bp, Mus musculus
  siRNA target sequence for 4432409D24Rik (NM_175251.1,2622-2640).
ctgatgctcggtctacaaa

SEQ ID NO: 787076 - DNA, 19 bp, Mus musculus
  siRNA target sequence for 4432409D24Rik (NM_175251.1,2644-2662).
cacagccgagtgcaaaact

SEQ ID NO: 787077 - DNA, 19 bp, Mus musculus
  siRNA target sequence for 4432409D24Rik (NM_175251.1,2646-2664).
cagccgagtgcaaaactgt

SEQ ID NO: 787078 - DNA, 19 bp, Mus musculus
  siRNA target sequence for 4432409D24Rik (NM_175251.1,2651-2669).
gagtgcaaaactgtaaaga

SEQ ID NO: 787079 - DNA, 19 bp, Mus musculus
  siRNA target sequence for 4432409D24Rik (NM_175251.1,2703-2721).
cgggaatcccaaataaagt

SEQ ID NO: 787080 - DNA, 19 bp, Mus musculus
  siRNA target sequence for 4432409D24Rik (NM_175251.1,2704-2722).
gggaatcccaaataaagta

SEQ ID NO: 787081 - DNA, 19 bp, Mus musculus
  siRNA target sequence for 4432409D24Rik (NM_175251.1,2723-2741).
ggggttagaattgttacaa

SEQ ID NO: 787082 - DNA, 19 bp, Mus musculus
  siRNA target sequence for 4432409D24Rik (NM_175251.1,2726-2744).
gttagaattgttacaatca

SEQ ID NO: 787083 - DNA, 19 bp, Mus musculus
  siRNA target sequence for 4432409D24Rik (NM_175251.1,2811-2829).
ctgtagcgaaagtagcaat

SEQ ID NO: 787084 - DNA, 19 bp, Mus musculus
  siRNA target sequence for 4432409D24Rik (NM_175251.1,2818-2836).
gaaagtagcaatagaaagt

SEQ ID NO: 787085 - DNA, 19 bp, Mus musculus
  siRNA target sequence for 4432409D24Rik (NM_175251.1,3054-3072).
ctccctcacaagtgttcta

SEQ ID NO: 787086 - DNA, 19 bp, Mus musculus
  siRNA target sequence for 4432409D24Rik (NM_175251.1,3057-3075).
cctcacaagtgttctatca

SEQ ID NO: 787087 - DNA, 19 bp, Mus musculus
  siRNA target sequence for 4432409D24Rik (NM_175251.1,3070-3088).
ctatcatgcagctactgaa

SEQ ID NO: 787088 - DNA, 19 bp, Mus musculus
  siRNA target sequence for 4432409D24Rik (NM_175251.1,3146-3164).
caacggcagaggttctctt

SEQ ID NO: 787089 - DNA, 19 bp, Mus musculus
  siRNA target sequence for 4432409D24Rik (NM_175251.1,3179-3197).
caggataagcactgttcaa

SEQ ID NO: 787090 - DNA, 19 bp, Mus musculus
  siRNA target sequence for 4432409D24Rik (NM_175251.1,3203-3221).
gccctgcttgcaggattaa

SEQ ID NO: 787091 - DNA, 19 bp, Mus musculus
  siRNA target sequence for 4432409D24Rik (NM_175251.1,3204-3222).
ccctgcttgcaggattaaa

SEQ ID NO: 787092 - DNA, 19 bp, Mus musculus
  siRNA target sequence for 4432409D24Rik (NM_175251.1,3236-3254).
ggacaagtggcaaatcaaa

SEQ ID NO: 787093 - DNA, 19 bp, Mus musculus
  siRNA target sequence for 4432409D24Rik (NM_175251.1,3237-3255).
gacaagtggcaaatcaaaa

SEQ ID NO: 787094 - DNA, 19 bp, Mus musculus
  siRNA target sequence for 4432409D24Rik (NM_175251.1,3239-3257).
caagtggcaaatcaaaaat

SEQ ID NO: 787095 - DNA, 19 bp, Mus musculus
  siRNA target sequence for 4432409D24Rik (NM_175251.1,3305-3323).
gcccagaaggccattgcaa

SEQ ID NO: 787096 - DNA, 19 bp, Mus musculus
  siRNA target sequence for 4432409D24Rik (NM_175251.1,3404-3422).
ggaccaataactaaacaca

SEQ ID NO: 787097 - DNA, 19 bp, Mus musculus
  siRNA target sequence for 4432409D24Rik (NM_175251.1,3405-3423).
gaccaataactaaacacat

SEQ ID NO: 787098 - DNA, 19 bp, Mus musculus
  siRNA target sequence for 4432409D24Rik (NM_175251.1,3426-3444).
gactaacagctgccttaat

SEQ ID NO: 787099 - DNA, 19 bp, Mus musculus
  siRNA target sequence for 4432409D24Rik (NM_175251.1,3428-3446).
ctaacagctgccttaatat

SEQ ID NO: 787100 - DNA, 19 bp, Mus musculus
  siRNA target sequence for 4432409D24Rik (NM_175251.1,3432-3450).
cagctgccttaatattaaa

SEQ ID NO: 787101 - DNA, 19 bp, Mus musculus
  siRNA target sequence for 4432409D24Rik (NM_175251.1,3434-3452).
gctgccttaatattaaaaa

SEQ ID NO: 787102 - DNA, 19 bp, Mus musculus
  siRNA target sequence for 4432409D24Rik (NM_175251.1,3435-3453).
ctgccttaatattaaaaaa

SEQ ID NO: 787103 - DNA, 19 bp, Mus musculus
  siRNA target sequence for 4432409D24Rik (NM_175251.1,3470-3488).
gagtgtgggcgcagattgt

SEQ ID NO: 787104 - DNA, 19 bp, Mus musculus
  siRNA target sequence for 4432409D24Rik (NM_175251.1,3474-3492).
gtgggcgcagattgttaaa

SEQ ID NO: 787105 - DNA, 19 bp, Mus musculus
  siRNA target sequence for 4432409D24Rik (NM_175251.1,3476-3494).
gggcgcagattgttaaaga

SEQ ID NO: 787106 - DNA, 19 bp, Mus musculus
  siRNA target sequence for 4432409D24Rik (NM_175251.1,3513-3531).
cagtgctcgccattagtaa

SEQ ID NO: 787107 - DNA, 19 bp, Mus musculus
  siRNA target sequence for 4432409D24Rik (NM_175251.1,3515-3533).
gtgctcgccattagtaaca

SEQ ID NO: 787108 - DNA, 19 bp, Mus musculus
  siRNA target sequence for 4432409D24Rik (NM_175251.1,3555-3573).
ccaaatgcctttatgaact

SEQ ID NO: 787109 - DNA, 19 bp, Mus musculus
  siRNA target sequence for 9330169L03Rik (NM_175253.2,1171-1189).
cacttctaaaaaaatgaca

SEQ ID NO: 787110 - DNA, 19 bp, Mus musculus
  siRNA target sequence for 9330180L21Rik (NM_175254.2,59-77).
gtatgtacttggggaattt

SEQ ID NO: 787111 - DNA, 19 bp, Mus musculus
  siRNA target sequence for 9330180L21Rik (NM_175254.2,71-89).
ggaatttgaatttattcta

SEQ ID NO: 787112 - DNA, 19 bp, Mus musculus
  siRNA target sequence for 9330180L21Rik (NM_175254.2,78-96).
gaatttattctaataagct

SEQ ID NO: 787113 - DNA, 19 bp, Mus musculus
  siRNA target sequence for 9330180L21Rik (NM_175254.2,87-105).
ctaataagctacctattga

SEQ ID NO: 787114 - DNA, 19 bp, Mus musculus
  siRNA target sequence for 9330180L21Rik (NM_175254.2,98-116).
cctattgacctggagtttt

SEQ ID NO: 787115 - DNA, 19 bp, Mus musculus
  siRNA target sequence for 9330180L21Rik (NM_175254.2,107-125).
ctggagttttgttgtaaga

SEQ ID NO: 787116 - DNA, 19 bp, Mus musculus
  siRNA target sequence for 9330180L21Rik (NM_175254.2,134-152).
ctcaaagtccagtccaaat

SEQ ID NO: 787117 - DNA, 19 bp, Mus musculus
  siRNA target sequence for 9330180L21Rik (NM_175254.2,159-177).
ggttccaggtgcactcttt

SEQ ID NO: 787118 - DNA, 19 bp, Mus musculus
  siRNA target sequence for 9330180L21Rik (NM_175254.2,160-178).
gttccaggtgcactctttt

SEQ ID NO: 787119 - DNA, 19 bp, Mus musculus
  siRNA target sequence for 9330180L21Rik (NM_175254.2,206-224).
cagccacatgggtgacttt

SEQ ID NO: 787120 - DNA, 19 bp, Mus musculus
  siRNA target sequence for 9330180L21Rik (NM_175254.2,268-286).
cagcacatgctgattttct

SEQ ID NO: 787121 - DNA, 19 bp, Mus musculus
  siRNA target sequence for 9330180L21Rik (NM_175254.2,296-314).
gtttaagaaatcaaaactt

SEQ ID NO: 787122 - DNA, 19 bp, Mus musculus
  siRNA target sequence for Sec24a (NM_175255.2,855-873).
gcagactaaccattttcct

SEQ ID NO: 787123 - DNA, 19 bp, Mus musculus
  siRNA target sequence for Sec24a (NM_175255.2,890-908).
ctctacctgggaatccaaa

SEQ ID NO: 787124 - DNA, 19 bp, Mus musculus
  siRNA target sequence for Sec24a (NM_175255.2,895-913).
cctgggaatccaaatttaa

SEQ ID NO: 787125 - DNA, 19 bp, Mus musculus
  siRNA target sequence for Sec24a (NM_175255.2,952-970).
cttcaaaccagcttcaaaa

SEQ ID NO: 787126 - DNA, 19 bp, Mus musculus
  siRNA target sequence for Sec24a (NM_175255.2,1108-1126).
gcacccccaccttcattta

SEQ ID NO: 787127 - DNA, 19 bp, Mus musculus
  siRNA target sequence for Sec24a (NM_175255.2,1109-1127).
cacccccaccttcatttaa

SEQ ID NO: 787128 - DNA, 19 bp, Mus musculus
  siRNA target sequence for Sec24a (NM_175255.2,1133-1151).
ctgtcaatcaggaaggtat

SEQ ID NO: 787129 - DNA, 19 bp, Mus musculus
  siRNA target sequence for Sec24a (NM_175255.2,1135-1153).
gtcaatcaggaaggtatta

SEQ ID NO: 787130 - DNA, 19 bp, Mus musculus
  siRNA target sequence for Sec24a (NM_175255.2,1143-1161).
ggaaggtattacgtcaaat

SEQ ID NO: 787131 - DNA, 19 bp, Mus musculus
  siRNA target sequence for Sec24a (NM_175255.2,1155-1173).
gtcaaatgccaataatgga

SEQ ID NO: 787132 - DNA, 19 bp, Mus musculus
  siRNA target sequence for Sec24a (NM_175255.2,1181-1199).
cggctcataatacttatga

SEQ ID NO: 787133 - DNA, 19 bp, Mus musculus
  siRNA target sequence for Sec24a (NM_175255.2,1182-1200).
ggctcataatacttatgat

SEQ ID NO: 787134 - DNA, 19 bp, Mus musculus
  siRNA target sequence for Sec24a (NM_175255.2,1184-1202).
ctcataatacttatgatga

SEQ ID NO: 787135 - DNA, 19 bp, Mus musculus
  siRNA target sequence for Sec24a (NM_175255.2,1225-1243).
gcaacaccacagcttgtta

SEQ ID NO: 787136 - DNA, 19 bp, Mus musculus
  siRNA target sequence for Sec24a (NM_175255.2,1226-1244).
caacaccacagcttgttaa

SEQ ID NO: 787137 - DNA, 19 bp, Mus musculus
  siRNA target sequence for Sec24a (NM_175255.2,1229-1247).
caccacagcttgttaatca

SEQ ID NO: 787138 - DNA, 19 bp, Mus musculus
  siRNA target sequence for Sec24a (NM_175255.2,1231-1249).
ccacagcttgttaatcaga

SEQ ID NO: 787139 - DNA, 19 bp, Mus musculus
  siRNA target sequence for Sec24a (NM_175255.2,1385-1403).
ctcccttaggtgctaatca

SEQ ID NO: 787140 - DNA, 19 bp, Mus musculus
  siRNA target sequence for Sec24a (NM_175255.2,1387-1405).
cccttaggtgctaatcatt

SEQ ID NO: 787141 - DNA, 19 bp, Mus musculus
  siRNA target sequence for Sec24a (NM_175255.2,1443-1461).
gggactaagagttgtcaat

SEQ ID NO: 787142 - DNA, 19 bp, Mus musculus
  siRNA target sequence for Sec24a (NM_175255.2,1445-1463).
gactaagagttgtcaatct

SEQ ID NO: 787143 - DNA, 19 bp, Mus musculus
  siRNA target sequence for Sec24a (NM_175255.2,1451-1469).
gagttgtcaatcttcttca

SEQ ID NO: 787144 - DNA, 19 bp, Mus musculus
  siRNA target sequence for Sec24a (NM_175255.2,1671-1689).
ggtcacctccagcacaatt

SEQ ID NO: 787145 - DNA, 19 bp, Mus musculus
  siRNA target sequence for Sec24a (NM_175255.2,1700-1718).
gttcatgcaggacttacat

SEQ ID NO: 787146 - DNA, 19 bp, Mus musculus
  siRNA target sequence for Sec24a (NM_175255.2,1731-1749).
caacttccttgatcaaaga

SEQ ID NO: 787147 - DNA, 19 bp, Mus musculus
  siRNA target sequence for Sec24a (NM_175255.2,1754-1772).
ggaaatgtaacttatgtta

SEQ ID NO: 787148 - DNA, 19 bp, Mus musculus
  siRNA target sequence for Sec24a (NM_175255.2,1764-1782).
cttatgttatcgagtcaat

SEQ ID NO: 787149 - DNA, 19 bp, Mus musculus
  siRNA target sequence for Sec24a (NM_175255.2,1809-1827).
ccctttaaccagagtttat

SEQ ID NO: 787150 - DNA, 19 bp, Mus musculus
  siRNA target sequence for Sec24a (NM_175255.2,1855-1873).
cagaatgctactattgagt

SEQ ID NO: 787151 - DNA, 19 bp, Mus musculus
  siRNA target sequence for Sec24a (NM_175255.2,1879-1897).
gctccttcagaatacatgt

SEQ ID NO: 787152 - DNA, 19 bp, Mus musculus
  siRNA target sequence for Sec24a (NM_175255.2,1920-1938).
gtacctctttgtatttgat

SEQ ID NO: 787153 - DNA, 19 bp, Mus musculus
  siRNA target sequence for Sec24a (NM_175255.2,1961-1979).
ctggatacttgaattcagt

SEQ ID NO: 787154 - DNA, 19 bp, Mus musculus
  siRNA target sequence for Sec24a (NM_175255.2,1963-1981).
ggatacttgaattcagttt

SEQ ID NO: 787155 - DNA, 19 bp, Mus musculus
  siRNA target sequence for Sec24a (NM_175255.2,1976-1994).
cagtttgccagagtttgtt

SEQ ID NO: 787156 - DNA, 19 bp, Mus musculus
  siRNA target sequence for Sec24a (NM_175255.2,1983-2001).
ccagagtttgttagacaat

SEQ ID NO: 787157 - DNA, 19 bp, Mus musculus
  siRNA target sequence for Sec24a (NM_175255.2,2027-2045).
ggacaaaaatcggtttcat

SEQ ID NO: 787158 - DNA, 19 bp, Mus musculus
  siRNA target sequence for Sec24a (NM_175255.2,2028-2046).
gacaaaaatcggtttcata

SEQ ID NO: 787159 - DNA, 19 bp, Mus musculus
  siRNA target sequence for Sec24a (NM_175255.2,2037-2055).
cggtttcataacatttgat

SEQ ID NO: 787160 - DNA, 19 bp, Mus musculus
  siRNA target sequence for Sec24a (NM_175255.2,2053-2071).
gatagcactatccatttct

SEQ ID NO: 787161 - DNA, 19 bp, Mus musculus
  siRNA target sequence for Sec24a (NM_175255.2,2097-2115).
gcctcagatgctaatagtt

SEQ ID NO: 787162 - DNA, 19 bp, Mus musculus
  siRNA target sequence for Sec24a (NM_175255.2,2098-2116).
cctcagatgctaatagttt

SEQ ID NO: 787163 - DNA, 19 bp, Mus musculus
  siRNA target sequence for Sec24a (NM_175255.2,2139-2157).
ccctatgccagagaactta

SEQ ID NO: 787164 - DNA, 19 bp, Mus musculus
  siRNA target sequence for Sec24a (NM_175255.2,2146-2164).
ccagagaacttactagtaa

SEQ ID NO: 787165 - DNA, 19 bp, Mus musculus
  siRNA target sequence for Sec24a (NM_175255.2,2149-2167).
gagaacttactagtaaact

SEQ ID NO: 787166 - DNA, 19 bp, Mus musculus
  siRNA target sequence for Sec24a (NM_175255.2,2209-2227).
ctgccacaaatgtttacga

SEQ ID NO: 787167 - DNA, 19 bp, Mus musculus
  siRNA target sequence for Sec24a (NM_175255.2,2269-2287).
gctgcattcaagctgatat

SEQ ID NO: 787168 - DNA, 19 bp, Mus musculus
  siRNA target sequence for Sec24a (NM_175255.2,2302-2320).
cgaatgtctgtcttccaaa

SEQ ID NO: 787169 - DNA, 19 bp, Mus musculus
  siRNA target sequence for Sec24a (NM_175255.2,2411-2429).
ccactgacttctataagaa

SEQ ID NO: 787170 - DNA, 19 bp, Mus musculus
  siRNA target sequence for Sec24a (NM_175255.2,2481-2499).
cagtggacagtattctgat

SEQ ID NO: 787171 - DNA, 19 bp, Mus musculus
  siRNA target sequence for Sec24a (NM_175255.2,2529-2547).
ctcagcgggtagtgtgtat

SEQ ID NO: 787172 - DNA, 19 bp, Mus musculus
  siRNA target sequence for Sec24a (NM_175255.2,2531-2549).
cagcgggtagtgtgtatta

SEQ ID NO: 787173 - DNA, 19 bp, Mus musculus
  siRNA target sequence for Sec24a (NM_175255.2,2533-2551).
gcgggtagtgtgtattact

SEQ ID NO: 787174 - DNA, 19 bp, Mus musculus
  siRNA target sequence for Sec24a (NM_175255.2,2534-2552).
cgggtagtgtgtattacta

SEQ ID NO: 787175 - DNA, 19 bp, Mus musculus
  siRNA target sequence for Sec24a (NM_175255.2,2535-2553).
gggtagtgtgtattactat

SEQ ID NO: 787176 - DNA, 19 bp, Mus musculus
  siRNA target sequence for Sec24a (NM_175255.2,2706-2724).
cgtccgttctacagactta

SEQ ID NO: 787177 - DNA, 19 bp, Mus musculus
  siRNA target sequence for Sec24a (NM_175255.2,2814-2832).
ccagtcagcactcttatat

SEQ ID NO: 787178 - DNA, 19 bp, Mus musculus
  siRNA target sequence for Sec24a (NM_175255.2,2817-2835).
gtcagcactcttatataca

SEQ ID NO: 787179 - DNA, 19 bp, Mus musculus
  siRNA target sequence for Sec24a (NM_175255.2,2821-2839).
gcactcttatatacatcaa

SEQ ID NO: 787180 - DNA, 19 bp, Mus musculus
  siRNA target sequence for Sec24a (NM_175255.2,2860-2878).
cgtgtgcatactttgtgtt

SEQ ID NO: 787181 - DNA, 19 bp, Mus musculus
  siRNA target sequence for Sec24a (NM_175255.2,2874-2892).
gtgtttgccggtagtttct

SEQ ID NO: 787182 - DNA, 19 bp, Mus musculus
  siRNA target sequence for Sec24a (NM_175255.2,2915-2933).
gagctgatgtgcaagcaat

SEQ ID NO: 787183 - DNA, 19 bp, Mus musculus
  siRNA target sequence for Sec24a (NM_175255.2,2917-2935).
gctgatgtgcaagcaattt

SEQ ID NO: 787184 - DNA, 19 bp, Mus musculus
  siRNA target sequence for Sec24a (NM_175255.2,2936-2954).
cagggttattagccaatat

SEQ ID NO: 787185 - DNA, 19 bp, Mus musculus
  siRNA target sequence for Sec24a (NM_175255.2,3068-3086).
caggcctcatggttccttt

SEQ ID NO: 787186 - DNA, 19 bp, Mus musculus
  siRNA target sequence for Sec24a (NM_175255.2,3144-3162).
gactgggacaagtatacgt

SEQ ID NO: 787187 - DNA, 19 bp, Mus musculus
  siRNA target sequence for Sec24a (NM_175255.2,3150-3168).
gacaagtatacgtctagat

SEQ ID NO: 787188 - DNA, 19 bp, Mus musculus
  siRNA target sequence for Sec24a (NM_175255.2,3152-3170).
caagtatacgtctagatga

SEQ ID NO: 787189 - DNA, 19 bp, Mus musculus
  siRNA target sequence for Sec24a (NM_175255.2,3160-3178).
cgtctagatgaacgaattt

SEQ ID NO: 787190 - DNA, 19 bp, Mus musculus
  siRNA target sequence for Sec24a (NM_175255.2,3161-3179).
gtctagatgaacgaatttt

SEQ ID NO: 787191 - DNA, 19 bp, Mus musculus
  siRNA target sequence for Sec24a (NM_175255.2,3270-3288).
gggagctctcaacatcaat

SEQ ID NO: 787192 - DNA, 19 bp, Mus musculus
  siRNA target sequence for Sec24a (NM_175255.2,3282-3300).
catcaatgacagaaccata

SEQ ID NO: 787193 - DNA, 19 bp, Mus musculus
  siRNA target sequence for Sec24a (NM_175255.2,3370-3388).
ggctcattactgatgcttt

SEQ ID NO: 787194 - DNA, 19 bp, Mus musculus
  siRNA target sequence for Sec24a (NM_175255.2,3472-3490).
gatcttccagaacttgata

SEQ ID NO: 787195 - DNA, 19 bp, Mus musculus
  siRNA target sequence for Sec24a (NM_175255.2,3545-3563).
catttttcccagtactcta

SEQ ID NO: 787196 - DNA, 19 bp, Mus musculus
  siRNA target sequence for Sec24a (NM_175255.2,3553-3571).
ccagtactctatgtaatca

SEQ ID NO: 787197 - DNA, 19 bp, Mus musculus
  siRNA target sequence for Sec24a (NM_175255.2,3572-3590).
gggaggagagtcttatgaa

SEQ ID NO: 787198 - DNA, 19 bp, Mus musculus
  siRNA target sequence for Sec24a (NM_175255.2,3573-3591).
ggaggagagtcttatgaaa

SEQ ID NO: 787199 - DNA, 19 bp, Mus musculus
  siRNA target sequence for Sec24a (NM_175255.2,3628-3646).
gagtctgcactgtcatatt

SEQ ID NO: 787200 - DNA, 19 bp, Mus musculus
  siRNA target sequence for Sec24a (NM_175255.2,3634-3652).
gcactgtcatattatgaat

SEQ ID NO: 787201 - DNA, 19 bp, Mus musculus
  siRNA target sequence for Sec24a (NM_175255.2,3635-3653).
cactgtcatattatgaatt

SEQ ID NO: 787202 - DNA, 19 bp, Mus musculus
  siRNA target sequence for 9530025L16Rik (NM_175256.2,1280-1298).
ggcgtggcactcattgtta

SEQ ID NO: 787203 - DNA, 19 bp, Mus musculus
  siRNA target sequence for 9530025L16Rik (NM_175256.2,1299-1317).
cctgttgcagaaagagtaa

SEQ ID NO: 787204 - DNA, 19 bp, Mus musculus
  siRNA target sequence for 9530025L16Rik (NM_175256.2,1300-1318).
ctgttgcagaaagagtaaa

SEQ ID NO: 787205 - DNA, 19 bp, Mus musculus
  siRNA target sequence for 9530025L16Rik (NM_175256.2,1372-1390).
caccgatgtccccaagaat

SEQ ID NO: 787206 - DNA, 19 bp, Mus musculus
  siRNA target sequence for 9530025L16Rik (NM_175256.2,1410-1428).
gccgagaagccattgaaat

SEQ ID NO: 787207 - DNA, 19 bp, Mus musculus
  siRNA target sequence for 9530025L16Rik (NM_175256.2,1482-1500).
cgcccacaaacgtaaggaa

SEQ ID NO: 787208 - DNA, 19 bp, Mus musculus
  siRNA target sequence for 9530025L16Rik (NM_175256.2,1492-1510).
cgtaaggaaccctgaactt

SEQ ID NO: 787209 - DNA, 19 bp, Mus musculus
  siRNA target sequence for 9530025L16Rik (NM_175256.2,1567-1585).
catcttcccgggacagtat

SEQ ID NO: 787210 - DNA, 19 bp, Mus musculus
  siRNA target sequence for C030048G07Rik (NM_175257.2,2899-2917).
ggatcacaaagggttatgt

SEQ ID NO: 787211 - DNA, 19 bp, Mus musculus
  siRNA target sequence for C030048G07Rik (NM_175257.2,2900-2918).
gatcacaaagggttatgta

SEQ ID NO: 787212 - DNA, 19 bp, Mus musculus
  siRNA target sequence for C030048G07Rik (NM_175257.2,2959-2977).
cacccgctggtcaccaaaa

SEQ ID NO: 787213 - DNA, 19 bp, Mus musculus
  siRNA target sequence for C030048G07Rik (NM_175257.2,2962-2980).
ccgctggtcaccaaaacaa

SEQ ID NO: 787214 - DNA, 19 bp, Mus musculus
  siRNA target sequence for C030048G07Rik (NM_175257.2,2965-2983).
ctggtcaccaaaacaacat

SEQ ID NO: 787215 - DNA, 19 bp, Mus musculus
  siRNA target sequence for C030048G07Rik (NM_175257.2,2970-2988).
caccaaaacaacattatct

SEQ ID NO: 787216 - DNA, 19 bp, Mus musculus
  siRNA target sequence for C030048G07Rik (NM_175257.2,3118-3136).
gcgtggcaggccttctgaa

SEQ ID NO: 787217 - DNA, 19 bp, Mus musculus
  siRNA target sequence for C030048G07Rik (NM_175257.2,3119-3137).
cgtggcaggccttctgaaa

SEQ ID NO: 787218 - DNA, 19 bp, Mus musculus
  siRNA target sequence for 9330132O05Rik (NM_175259.3,221-239).
cctggcatccgggatttga

SEQ ID NO: 787219 - DNA, 19 bp, Mus musculus
  siRNA target sequence for 9330132O05Rik (NM_175259.3,293-311).
gggacctgaccttactcat

SEQ ID NO: 787220 - DNA, 19 bp, Mus musculus
  siRNA target sequence for 9330132O05Rik (NM_175259.3,365-383).
gcatcgcctctgctgtaat

SEQ ID NO: 787221 - DNA, 19 bp, Mus musculus
  siRNA target sequence for 9330132O05Rik (NM_175259.3,462-480).
gctccagagcacgtttgaa

SEQ ID NO: 787222 - DNA, 19 bp, Mus musculus
  siRNA target sequence for 9330132O05Rik (NM_175259.3,646-664).
gcagctcctccgccttata

SEQ ID NO: 787223 - DNA, 19 bp, Mus musculus
  siRNA target sequence for 9330132O05Rik (NM_175259.3,647-665).
cagctcctccgccttatat

SEQ ID NO: 787224 - DNA, 19 bp, Mus musculus
  siRNA target sequence for 9330132O05Rik (NM_175259.3,666-684).
gccaccacagccctcttat

SEQ ID NO: 787225 - DNA, 19 bp, Mus musculus
  siRNA target sequence for 5730596B20Rik (NM_175261.2,1481-1499).
ggactacagctacagaatt

SEQ ID NO: 787226 - DNA, 19 bp, Mus musculus
  siRNA target sequence for 5730596B20Rik (NM_175261.2,1546-1564).
ggcttagggtgtacagaaa

SEQ ID NO: 787227 - DNA, 19 bp, Mus musculus
  siRNA target sequence for 5730596B20Rik (NM_175261.2,1609-1627).
gacccccttctgcaaatca

SEQ ID NO: 787228 - DNA, 19 bp, Mus musculus
  siRNA target sequence for 5730596B20Rik (NM_175261.2,1806-1824).
gctggaagcatcatcagta

SEQ ID NO: 787229 - DNA, 19 bp, Mus musculus
  siRNA target sequence for 5730596B20Rik (NM_175261.2,1809-1827).
ggaagcatcatcagtaaaa

SEQ ID NO: 787230 - DNA, 19 bp, Mus musculus
  siRNA target sequence for 5730596B20Rik (NM_175261.2,1841-1859).
gcacattctcctcattgat

SEQ ID NO: 787231 - DNA, 19 bp, Mus musculus
  siRNA target sequence for 5730591J02Rik (NM_175262.2,534-552).
ccaccgttcacggttgaaa

SEQ ID NO: 787232 - DNA, 19 bp, Mus musculus
  siRNA target sequence for 5730591J02Rik (NM_175262.2,537-555).
ccgttcacggttgaaacta

SEQ ID NO: 787233 - DNA, 19 bp, Mus musculus
  siRNA target sequence for 5730591J02Rik (NM_175262.2,538-556).
cgttcacggttgaaactat

SEQ ID NO: 787234 - DNA, 19 bp, Mus musculus
  siRNA target sequence for 5730591J02Rik (NM_175262.2,639-657).
ccaaatgagagctagtata

SEQ ID NO: 787235 - DNA, 19 bp, Mus musculus
  siRNA target sequence for 5730591J02Rik (NM_175262.2,667-685).
cttggaaaacttaaaatga

SEQ ID NO: 787236 - DNA, 19 bp, Mus musculus
  siRNA target sequence for 5730591J02Rik (NM_175262.2,796-814).
gctggcggacagtggttat

SEQ ID NO: 787237 - DNA, 19 bp, Mus musculus
  siRNA target sequence for 5730591J02Rik (NM_175262.2,799-817).
ggcggacagtggttatcct

SEQ ID NO: 787238 - DNA, 19 bp, Mus musculus
  siRNA target sequence for 4931406H21Rik (NM_175264.2,530-548).
cagggaaggccggtcatat

SEQ ID NO: 787239 - DNA, 19 bp, Mus musculus
  siRNA target sequence for 4931406H21Rik (NM_175264.2,534-552).
gaaggccggtcatatacca

SEQ ID NO: 787240 - DNA, 19 bp, Mus musculus
  siRNA target sequence for 4931406H21Rik (NM_175264.2,559-577).
cattgctgtggaaacaaga

SEQ ID NO: 787241 - DNA, 19 bp, Mus musculus
  siRNA target sequence for 4931406H21Rik (NM_175264.2,656-674).
gtcgtggctgctatctcta

SEQ ID NO: 787242 - DNA, 19 bp, Mus musculus
  siRNA target sequence for 4931406H21Rik (NM_175264.2,792-810).
cagagctgtctctctaaga

SEQ ID NO: 787243 - DNA, 19 bp, Mus musculus
  siRNA target sequence for 4931406H21Rik (NM_175264.2,820-838).
gtgcagctccccgtgaaaa

SEQ ID NO: 787244 - DNA, 19 bp, Mus musculus
  siRNA target sequence for 6720463M24Rik (NM_175265.2,323-341).
gggagatgtcagcgaatta

SEQ ID NO: 787245 - DNA, 19 bp, Mus musculus
  siRNA target sequence for 6720463M24Rik (NM_175265.2,324-342).
ggagatgtcagcgaattaa

SEQ ID NO: 787246 - DNA, 19 bp, Mus musculus
  siRNA target sequence for 6720463M24Rik (NM_175265.2,325-343).
gagatgtcagcgaattaaa

SEQ ID NO: 787247 - DNA, 19 bp, Mus musculus
  siRNA target sequence for 6720463M24Rik (NM_175265.2,327-345).
gatgtcagcgaattaaaaa

SEQ ID NO: 787248 - DNA, 19 bp, Mus musculus
  siRNA target sequence for 6720463M24Rik (NM_175265.2,334-352).
gcgaattaaaaatgcaaat

SEQ ID NO: 787249 - DNA, 19 bp, Mus musculus
  siRNA target sequence for 6720463M24Rik (NM_175265.2,335-353).
cgaattaaaaatgcaaata

SEQ ID NO: 787250 - DNA, 19 bp, Mus musculus
  siRNA target sequence for 6720463M24Rik (NM_175265.2,347-365).
gcaaataacaccagaaact

SEQ ID NO: 787251 - DNA, 19 bp, Mus musculus
  siRNA target sequence for 6720463M24Rik (NM_175265.2,370-388).
gaaggatccctgttttaaa

SEQ ID NO: 787252 - DNA, 19 bp, Mus musculus
  siRNA target sequence for 6720463M24Rik (NM_175265.2,396-414).
gaaagtcccagtgattatt

SEQ ID NO: 787253 - DNA, 19 bp, Mus musculus
  siRNA target sequence for 6720463M24Rik (NM_175265.2,403-421).
ccagtgattattctaatct

SEQ ID NO: 787254 - DNA, 19 bp, Mus musculus
  siRNA target sequence for 6720463M24Rik (NM_175265.2,433-451).
cccttgctagtccttctat

SEQ ID NO: 787255 - DNA, 19 bp, Mus musculus
  siRNA target sequence for 6720463M24Rik (NM_175265.2,435-453).
cttgctagtccttctatct

SEQ ID NO: 787256 - DNA, 19 bp, Mus musculus
  siRNA target sequence for 6720463M24Rik (NM_175265.2,438-456).
gctagtccttctatcttta

SEQ ID NO: 787257 - DNA, 19 bp, Mus musculus
  siRNA target sequence for 6720463M24Rik (NM_175265.2,501-519).
gatcagctggccataataa

SEQ ID NO: 787258 - DNA, 19 bp, Mus musculus
  siRNA target sequence for 6720463M24Rik (NM_175265.2,552-570).
cggcaggcttcctacctaa

SEQ ID NO: 787259 - DNA, 19 bp, Mus musculus
  siRNA target sequence for 6720463M24Rik (NM_175265.2,566-584).
cctaaggctttctcgaata

SEQ ID NO: 787260 - DNA, 19 bp, Mus musculus
  siRNA target sequence for 6720463M24Rik (NM_175265.2,577-595).
ctcgaatagataaagatgt

SEQ ID NO: 787261 - DNA, 19 bp, Mus musculus
  siRNA target sequence for 6720463M24Rik (NM_175265.2,655-673).
ctccctggactgatcatga

SEQ ID NO: 787262 - DNA, 19 bp, Mus musculus
  siRNA target sequence for 6720463M24Rik (NM_175265.2,661-679).
ggactgatcatgatggaaa

SEQ ID NO: 787263 - DNA, 19 bp, Mus musculus
  siRNA target sequence for 6720463M24Rik (NM_175265.2,690-708).
gagcttcatcccagtaaat

SEQ ID NO: 787264 - DNA, 19 bp, Mus musculus
  siRNA target sequence for 6720463M24Rik (NM_175265.2,823-841).
ccatattaggagactattt

SEQ ID NO: 787265 - DNA, 19 bp, Mus musculus
  siRNA target sequence for 6720463M24Rik (NM_175265.2,986-1004).
gtcgctcgagggacagttt

SEQ ID NO: 787266 - DNA, 19 bp, Mus musculus
  siRNA target sequence for 6720463M24Rik (NM_175265.2,1091-1109).
ctcacctatcgcacttcaa

SEQ ID NO: 787267 - DNA, 19 bp, Mus musculus
  siRNA target sequence for 6720463M24Rik (NM_175265.2,1139-1157).
gaagcttacgtttcattct

SEQ ID NO: 787268 - DNA, 19 bp, Mus musculus
  siRNA target sequence for 6720463M24Rik (NM_175265.2,1179-1197).
gcttctacggggatcgtta

SEQ ID NO: 787269 - DNA, 19 bp, Mus musculus
  siRNA target sequence for 6720463M24Rik (NM_175265.2,1180-1198).
cttctacggggatcgttaa

SEQ ID NO: 787270 - DNA, 19 bp, Mus musculus
  siRNA target sequence for 6720463M24Rik (NM_175265.2,1205-1223).
catcaggagtccgtacata

SEQ ID NO: 787271 - DNA, 19 bp, Mus musculus
  siRNA target sequence for 6720463M24Rik (NM_175265.2,1208-1226).
caggagtccgtacatagat

SEQ ID NO: 787272 - DNA, 19 bp, Mus musculus
  siRNA target sequence for 6720463M24Rik (NM_175265.2,1227-1245).
ggctgctcgccaatcaaaa

SEQ ID NO: 787273 - DNA, 19 bp, Mus musculus
  siRNA target sequence for 6720463M24Rik (NM_175265.2,1228-1246).
gctgctcgccaatcaaaaa

SEQ ID NO: 787274 - DNA, 19 bp, Mus musculus
  siRNA target sequence for 6720463M24Rik (NM_175265.2,1267-1285).
gaggtggccctcagtgttt

SEQ ID NO: 787275 - DNA, 19 bp, Mus musculus
  siRNA target sequence for 6720463M24Rik (NM_175265.2,1292-1310).
cctggtccgcatacctttt

SEQ ID NO: 787276 - DNA, 19 bp, Mus musculus
  siRNA target sequence for 6720463M24Rik (NM_175265.2,1293-1311).
ctggtccgcatacctttta

SEQ ID NO: 787277 - DNA, 19 bp, Mus musculus
  siRNA target sequence for 6720463M24Rik (NM_175265.2,1364-1382).
ggctccactcagcacaaat

SEQ ID NO: 787278 - DNA, 19 bp, Mus musculus
  siRNA target sequence for 6720463M24Rik (NM_175265.2,1368-1386).
ccactcagcacaaatgctt

SEQ ID NO: 787279 - DNA, 19 bp, Mus musculus
  siRNA target sequence for 6720463M24Rik (NM_175265.2,1427-1445).
gagtcactctggtattgct

SEQ ID NO: 787280 - DNA, 19 bp, Mus musculus
  siRNA target sequence for 6720463M24Rik (NM_175265.2,1433-1451).
ctctggtattgctgagaaa

SEQ ID NO: 787281 - DNA, 19 bp, Mus musculus
  siRNA target sequence for 6720463M24Rik (NM_175265.2,1530-1548).
gctgaaagcacgtggataa

SEQ ID NO: 787282 - DNA, 19 bp, Mus musculus
  siRNA target sequence for 6720463M24Rik (NM_175265.2,1609-1627).
gtattgaaaactctcatat

SEQ ID NO: 787283 - DNA, 19 bp, Mus musculus
  siRNA target sequence for 6720463M24Rik (NM_175265.2,1688-1706).
gaatagtgactataacaca

SEQ ID NO: 787284 - DNA, 19 bp, Mus musculus
  siRNA target sequence for 6720463M24Rik (NM_175265.2,1741-1759).
ggacagaaagatattgcaa

SEQ ID NO: 787285 - DNA, 19 bp, Mus musculus
  siRNA target sequence for 6720463M24Rik (NM_175265.2,1791-1809).
ccctttgaagtggaaatga

SEQ ID NO: 787286 - DNA, 19 bp, Mus musculus
  siRNA target sequence for 6720463M24Rik (NM_175265.2,1848-1866).
cagcggtgctggatgaaat

SEQ ID NO: 787287 - DNA, 19 bp, Mus musculus
  siRNA target sequence for 6720463M24Rik (NM_175265.2,1850-1868).
gcggtgctggatgaaatct

SEQ ID NO: 787288 - DNA, 19 bp, Mus musculus
  siRNA target sequence for Epm2aip1 (NM_175266.2,44-62).
cgcccaagaggattaggat

SEQ ID NO: 787289 - DNA, 19 bp, Mus musculus
  siRNA target sequence for Epm2aip1 (NM_175266.2,208-226).
gaggccgagcacgaattct

SEQ ID NO: 787290 - DNA, 19 bp, Mus musculus
  siRNA target sequence for Epm2aip1 (NM_175266.2,277-295).
cggcagggtgacatgtctt

SEQ ID NO: 787291 - DNA, 19 bp, Mus musculus
  siRNA target sequence for Epm2aip1 (NM_175266.2,517-535).
ctccgcagccagctgttta

SEQ ID NO: 787292 - DNA, 19 bp, Mus musculus
  siRNA target sequence for Epm2aip1 (NM_175266.2,652-670).
gaagatcttctgacgatta

SEQ ID NO: 787293 - DNA, 19 bp, Mus musculus
  siRNA target sequence for Epm2aip1 (NM_175266.2,655-673).
gatcttctgacgattatca

SEQ ID NO: 787294 - DNA, 19 bp, Mus musculus
  siRNA target sequence for Epm2aip1 (NM_175266.2,701-719).
ctctcatgtcggcaattct

SEQ ID NO: 787295 - DNA, 19 bp, Mus musculus
  siRNA target sequence for Epm2aip1 (NM_175266.2,744-762).
cagcttacagcgaatggtt

SEQ ID NO: 787296 - DNA, 19 bp, Mus musculus
  siRNA target sequence for Epm2aip1 (NM_175266.2,768-786).
gaccacgacccacacttta

SEQ ID NO: 787297 - DNA, 19 bp, Mus musculus
  siRNA target sequence for Epm2aip1 (NM_175266.2,773-791).
cgacccacactttaaggat

SEQ ID NO: 787298 - DNA, 19 bp, Mus musculus
  siRNA target sequence for Epm2aip1 (NM_175266.2,835-853).
gccgtgagtcccaactgtt

SEQ ID NO: 787299 - DNA, 19 bp, Mus musculus
  siRNA target sequence for Epm2aip1 (NM_175266.2,845-863).
ccaactgttggaacgtaat

SEQ ID NO: 787300 - DNA, 19 bp, Mus musculus
  siRNA target sequence for Epm2aip1 (NM_175266.2,864-882).
ccactattcgggatttctt

SEQ ID NO: 787301 - DNA, 19 bp, Mus musculus
  siRNA target sequence for Epm2aip1 (NM_175266.2,894-912).
gttgagttcttatgatgtt

SEQ ID NO: 787302 - DNA, 19 bp, Mus musculus
  siRNA target sequence for Epm2aip1 (NM_175266.2,941-959).
ctgaatgggtagttatgat

SEQ ID NO: 787303 - DNA, 19 bp, Mus musculus
  siRNA target sequence for Epm2aip1 (NM_175266.2,943-961).
gaatgggtagttatgatta

SEQ ID NO: 787304 - DNA, 19 bp, Mus musculus
  siRNA target sequence for Epm2aip1 (NM_175266.2,985-1003).
gagtttcagcctctactaa

SEQ ID NO: 787305 - DNA, 19 bp, Mus musculus
  siRNA target sequence for Epm2aip1 (NM_175266.2,1014-1032).
gtcagagcatggtgaaaga

SEQ ID NO: 787306 - DNA, 19 bp, Mus musculus
  siRNA target sequence for Epm2aip1 (NM_175266.2,1039-1057).
ggacggtgtttgaacaact

SEQ ID NO: 787307 - DNA, 19 bp, Mus musculus
  siRNA target sequence for Epm2aip1 (NM_175266.2,1060-1078).
ctgagaagaggcaaaacgt

SEQ ID NO: 787308 - DNA, 19 bp, Mus musculus
  siRNA target sequence for Epm2aip1 (NM_175266.2,1062-1080).
gagaagaggcaaaacgtta

SEQ ID NO: 787309 - DNA, 19 bp, Mus musculus
  siRNA target sequence for Epm2aip1 (NM_175266.2,1064-1082).
gaagaggcaaaacgttaaa

SEQ ID NO: 787310 - DNA, 19 bp, Mus musculus
  siRNA target sequence for Epm2aip1 (NM_175266.2,1067-1085).
gaggcaaaacgttaaaact

SEQ ID NO: 787311 - DNA, 19 bp, Mus musculus
  siRNA target sequence for Epm2aip1 (NM_175266.2,1070-1088).
gcaaaacgttaaaactaat

SEQ ID NO: 787312 - DNA, 19 bp, Mus musculus
  siRNA target sequence for Epm2aip1 (NM_175266.2,1131-1149).
gggggcaacaacagttcat

SEQ ID NO: 787313 - DNA, 19 bp, Mus musculus
  siRNA target sequence for Epm2aip1 (NM_175266.2,1132-1150).
ggggcaacaacagttcatt

SEQ ID NO: 787314 - DNA, 19 bp, Mus musculus
  siRNA target sequence for Epm2aip1 (NM_175266.2,1133-1151).
gggcaacaacagttcattt

SEQ ID NO: 787315 - DNA, 19 bp, Mus musculus
  siRNA target sequence for Epm2aip1 (NM_175266.2,1230-1248).
gcagatcagtaaagtcttt

SEQ ID NO: 787316 - DNA, 19 bp, Mus musculus
  siRNA target sequence for Epm2aip1 (NM_175266.2,1284-1302).
gggtaagctgagttcactt

SEQ ID NO: 787317 - DNA, 19 bp, Mus musculus
  siRNA target sequence for Epm2aip1 (NM_175266.2,1340-1358).
ctgccttcagtataatcgt

SEQ ID NO: 787318 - DNA, 19 bp, Mus musculus
  siRNA target sequence for Epm2aip1 (NM_175266.2,1347-1365).
cagtataatcgttgatgaa

SEQ ID NO: 787319 - DNA, 19 bp, Mus musculus
  siRNA target sequence for Epm2aip1 (NM_175266.2,1349-1367).
gtataatcgttgatgaact

SEQ ID NO: 787320 - DNA, 19 bp, Mus musculus
  siRNA target sequence for Epm2aip1 (NM_175266.2,1406-1424).
ctgacaggtatcaaatggt

SEQ ID NO: 787321 - DNA, 19 bp, Mus musculus
  siRNA target sequence for Epm2aip1 (NM_175266.2,1425-1443).
gatctcccgcctacagaaa

SEQ ID NO: 787322 - DNA, 19 bp, Mus musculus
  siRNA target sequence for Epm2aip1 (NM_175266.2,1430-1448).
cccgcctacagaaagattt

SEQ ID NO: 787323 - DNA, 19 bp, Mus musculus
  siRNA target sequence for Epm2aip1 (NM_175266.2,1431-1449).
ccgcctacagaaagatttt

SEQ ID NO: 787324 - DNA, 19 bp, Mus musculus
  siRNA target sequence for Epm2aip1 (NM_175266.2,1522-1540).
ccggaatatgcgcctattt

SEQ ID NO: 787325 - DNA, 19 bp, Mus musculus
  siRNA target sequence for Epm2aip1 (NM_175266.2,1532-1550).
cgcctatttctgtaagagt

SEQ ID NO: 787326 - DNA, 19 bp, Mus musculus
  siRNA target sequence for Epm2aip1 (NM_175266.2,1543-1561).
gtaagagtggagctaacaa

SEQ ID NO: 787327 - DNA, 19 bp, Mus musculus
  siRNA target sequence for Epm2aip1 (NM_175266.2,1547-1565).
gagtggagctaacaaaact

SEQ ID NO: 787328 - DNA, 19 bp, Mus musculus
  siRNA target sequence for Epm2aip1 (NM_175266.2,1602-1620).
caaagacttgggacagttt

SEQ ID NO: 787329 - DNA, 19 bp, Mus musculus
  siRNA target sequence for Epm2aip1 (NM_175266.2,1636-1654).
ggtgaagcttacccaatta

SEQ ID NO: 787330 - DNA, 19 bp, Mus musculus
  siRNA target sequence for Epm2aip1 (NM_175266.2,1637-1655).
gtgaagcttacccaattat

SEQ ID NO: 787331 - DNA, 19 bp, Mus musculus
  siRNA target sequence for Epm2aip1 (NM_175266.2,1639-1657).
gaagcttacccaattatca

SEQ ID NO: 787332 - DNA, 19 bp, Mus musculus
  siRNA target sequence for Epm2aip1 (NM_175266.2,1668-1686).
ctataaggtggcatcctta

SEQ ID NO: 787333 - DNA, 19 bp, Mus musculus
  siRNA target sequence for Epm2aip1 (NM_175266.2,1677-1695).
ggcatccttatttgatagt

SEQ ID NO: 787334 - DNA, 19 bp, Mus musculus
  siRNA target sequence for Epm2aip1 (NM_175266.2,1730-1748).
ctcgaaaccagcacacatt

SEQ ID NO: 787335 - DNA, 19 bp, Mus musculus
  siRNA target sequence for Epm2aip1 (NM_175266.2,1732-1750).
cgaaaccagcacacattga

SEQ ID NO: 787336 - DNA, 19 bp, Mus musculus
  siRNA target sequence for Epm2aip1 (NM_175266.2,1789-1807).
cgagttgccacaactgaaa

SEQ ID NO: 787337 - DNA, 19 bp, Mus musculus
  siRNA target sequence for Epm2aip1 (NM_175266.2,1814-1832).
ctcgttgggatgatcttgt

SEQ ID NO: 787338 - DNA, 19 bp, Mus musculus
  siRNA target sequence for Epm2aip1 (NM_175266.2,1822-1840).
gatgatcttgtgagagaaa

SEQ ID NO: 787339 - DNA, 19 bp, Mus musculus
  siRNA target sequence for E130112H22Rik (NM_175267.2,357-375).
gaggtcacctgcacagata

SEQ ID NO: 787340 - DNA, 19 bp, Mus musculus
  siRNA target sequence for E130112H22Rik (NM_175267.2,360-378).
gtcacctgcacagataaat

SEQ ID NO: 787341 - DNA, 19 bp, Mus musculus
  siRNA target sequence for E130112H22Rik (NM_175267.2,364-382).
cctgcacagataaatctgt

SEQ ID NO: 787342 - DNA, 19 bp, Mus musculus
  siRNA target sequence for E130112H22Rik (NM_175267.2,407-425).
cggatctgcggggagaaat

SEQ ID NO: 787343 - DNA, 19 bp, Mus musculus
  siRNA target sequence for E130112H22Rik (NM_175267.2,416-434).
ggggagaaatgcagcattt

SEQ ID NO: 787344 - DNA, 19 bp, Mus musculus
  siRNA target sequence for E130112H22Rik (NM_175267.2,465-483).
gggcatttatttacaaata

SEQ ID NO: 787345 - DNA, 19 bp, Mus musculus
  siRNA target sequence for E130112H22Rik (NM_175267.2,488-506).
ctgcaacccagccttgata

SEQ ID NO: 787346 - DNA, 19 bp, Mus musculus
  siRNA target sequence for E130112H22Rik (NM_175267.2,498-516).
gccttgataacgtctcata

SEQ ID NO: 787347 - DNA, 19 bp, Mus musculus
  siRNA target sequence for E130112H22Rik (NM_175267.2,691-709).
gggctctaggacattggaa

SEQ ID NO: 787348 - DNA, 19 bp, Mus musculus
  siRNA target sequence for E130112H22Rik (NM_175267.2,748-766).
cccgcaagctgcaaacgaa

SEQ ID NO: 787349 - DNA, 19 bp, Mus musculus
  siRNA target sequence for E130112H22Rik (NM_175267.2,839-857).
cagggactccgattacttt

SEQ ID NO: 787350 - DNA, 19 bp, Mus musculus
  siRNA target sequence for E130112H22Rik (NM_175267.2,843-861).
gactccgattactttcctt

SEQ ID NO: 787351 - DNA, 19 bp, Mus musculus
  siRNA target sequence for A930008G19Rik (NM_175268.3,343-361).
cctcctttcctgtggaatt

SEQ ID NO: 787352 - DNA, 19 bp, Mus musculus
  siRNA target sequence for A930008G19Rik (NM_175268.3,351-369).
cctgtggaattatggaaaa

SEQ ID NO: 787353 - DNA, 19 bp, Mus musculus
  siRNA target sequence for A930008G19Rik (NM_175268.3,378-396).
ggcgagacctggatagaaa

SEQ ID NO: 787354 - DNA, 19 bp, Mus musculus
  siRNA target sequence for A930008G19Rik (NM_175268.3,379-397).
gcgagacctggatagaaaa

SEQ ID NO: 787355 - DNA, 19 bp, Mus musculus
  siRNA target sequence for A930008G19Rik (NM_175268.3,380-398).
cgagacctggatagaaaat

SEQ ID NO: 787356 - DNA, 19 bp, Mus musculus
  siRNA target sequence for A930008G19Rik (NM_175268.3,435-453).
gggaatgtctgcctgaaaa

SEQ ID NO: 787357 - DNA, 19 bp, Mus musculus
  siRNA target sequence for A930008G19Rik (NM_175268.3,437-455).
gaatgtctgcctgaaaagt

SEQ ID NO: 787358 - DNA, 19 bp, Mus musculus
  siRNA target sequence for A930008G19Rik (NM_175268.3,500-518).
gcggtgaccagcctaatca

SEQ ID NO: 787359 - DNA, 19 bp, Mus musculus
  siRNA target sequence for A930008G19Rik (NM_175268.3,501-519).
cggtgaccagcctaatcaa

SEQ ID NO: 787360 - DNA, 19 bp, Mus musculus
  siRNA target sequence for A930008G19Rik (NM_175268.3,502-520).
ggtgaccagcctaatcaaa

SEQ ID NO: 787361 - DNA, 19 bp, Mus musculus
  siRNA target sequence for A930008G19Rik (NM_175268.3,1050-1068).
gtgtccttaatgacaagaa

SEQ ID NO: 787362 - DNA, 19 bp, Mus musculus
  siRNA target sequence for A930008G19Rik (NM_175268.3,1105-1123).
ggagcaaagaccttctcta

SEQ ID NO: 787363 - DNA, 19 bp, Mus musculus
  siRNA target sequence for 5730467H21Rik (NM_175270.2,742-760).
gcacgcgcctggatctgta

SEQ ID NO: 787364 - DNA, 19 bp, Mus musculus
  siRNA target sequence for 5730467H21Rik (NM_175270.2,872-890).
ggctccccgaaccattcaa

SEQ ID NO: 787365 - DNA, 19 bp, Mus musculus
  siRNA target sequence for 5730467H21Rik (NM_175270.2,990-1008).
cggtgttgccagacaactt

SEQ ID NO: 787366 - DNA, 19 bp, Mus musculus
  siRNA target sequence for 5730467H21Rik (NM_175270.2,1106-1124).
ctcgatgagtcctcagaat

SEQ ID NO: 787367 - DNA, 19 bp, Mus musculus
  siRNA target sequence for 5730467H21Rik (NM_175270.2,1142-1160).
ccatctaccgtctttcgaa

SEQ ID NO: 787368 - DNA, 19 bp, Mus musculus
  siRNA target sequence for 5730467H21Rik (NM_175270.2,1181-1199).
ctccaggatctgaatgact

SEQ ID NO: 787369 - DNA, 19 bp, Mus musculus
  siRNA target sequence for 5730467H21Rik (NM_175270.2,1237-1255).
cagtggacccaaagaatct

SEQ ID NO: 787370 - DNA, 19 bp, Mus musculus
  siRNA target sequence for 5730467H21Rik (NM_175270.2,1280-1298).
caacctgtcttgagaactt

SEQ ID NO: 787371 - DNA, 19 bp, Mus musculus
  siRNA target sequence for 5730467H21Rik (NM_175270.2,1415-1433).
gtcccaacagtggctaaaa

SEQ ID NO: 787372 - DNA, 19 bp, Mus musculus
  siRNA target sequence for 5730467H21Rik (NM_175270.2,1502-1520).
cgaacaggaagaaccaaat

SEQ ID NO: 787373 - DNA, 19 bp, Mus musculus
  siRNA target sequence for 5730467H21Rik (NM_175270.2,1553-1571).
gaggacttgtggaaaagga

SEQ ID NO: 787374 - DNA, 19 bp, Mus musculus
  siRNA target sequence for 5730467H21Rik (NM_175270.2,1583-1601).
cctcggtccaggaaacctt

SEQ ID NO: 787375 - DNA, 19 bp, Mus musculus
  siRNA target sequence for 5730467H21Rik (NM_175270.2,1629-1647).
gggtggatgctgttttggt

SEQ ID NO: 787376 - DNA, 19 bp, Mus musculus
  siRNA target sequence for 5730467H21Rik (NM_175270.2,1630-1648).
ggtggatgctgttttggta

SEQ ID NO: 787377 - DNA, 19 bp, Mus musculus
  siRNA target sequence for 5730467H21Rik (NM_175270.2,1651-1669).
gaaattggcagatgctaat

SEQ ID NO: 787378 - DNA, 19 bp, Mus musculus
  siRNA target sequence for 5730467H21Rik (NM_175270.2,1823-1841).
cttcacgtgctgactttgt

SEQ ID NO: 787379 - DNA, 19 bp, Mus musculus
  siRNA target sequence for 5730467H21Rik (NM_175270.2,1966-1984).
gggcattgcactagatgta

SEQ ID NO: 787380 - DNA, 19 bp, Mus musculus
  siRNA target sequence for 5730467H21Rik (NM_175270.2,1967-1985).
ggcattgcactagatgtaa

SEQ ID NO: 787381 - DNA, 19 bp, Mus musculus
  siRNA target sequence for 5730467H21Rik (NM_175270.2,1973-1991).
gcactagatgtaaatgtga

SEQ ID NO: 787382 - DNA, 19 bp, Mus musculus
  siRNA target sequence for 5730467H21Rik (NM_175270.2,2038-2056).
gcaccagggagtcatcaaa

SEQ ID NO: 787383 - DNA, 19 bp, Mus musculus
  siRNA target sequence for 5730467H21Rik (NM_175270.2,2039-2057).
caccagggagtcatcaaat

SEQ ID NO: 787384 - DNA, 19 bp, Mus musculus
  siRNA target sequence for 5730467H21Rik (NM_175270.2,2044-2062).
gggagtcatcaaattgcta

SEQ ID NO: 787385 - DNA, 19 bp, Mus musculus
  siRNA target sequence for 5730467H21Rik (NM_175270.2,2118-2136).
ggcagtatctgaacagtaa

SEQ ID NO: 787386 - DNA, 19 bp, Mus musculus
  siRNA target sequence for 5730467H21Rik (NM_175270.2,2188-2206).
cttccctgtctattcctta

SEQ ID NO: 787387 - DNA, 19 bp, Mus musculus
  siRNA target sequence for 5730467H21Rik (NM_175270.2,2241-2259).
gccgggaagtgtctagaaa

SEQ ID NO: 787388 - DNA, 19 bp, Mus musculus
  siRNA target sequence for 5730467H21Rik (NM_175270.2,2314-2332).
gaaattggccagccaatat

SEQ ID NO: 787389 - DNA, 19 bp, Mus musculus
  siRNA target sequence for 5730467H21Rik (NM_175270.2,2325-2343).
gccaatatgagaaaatcca

SEQ ID NO: 787390 - DNA, 19 bp, Mus musculus
  siRNA target sequence for 5330421F07Rik (NM_175272.2,369-387).
gctcgcttggaactaaact

SEQ ID NO: 787391 - DNA, 19 bp, Mus musculus
  siRNA target sequence for 5330421F07Rik (NM_175272.2,404-422).
gcaggctcagcaaatgaca

SEQ ID NO: 787392 - DNA, 19 bp, Mus musculus
  siRNA target sequence for 5330421F07Rik (NM_175272.2,408-426).
gctcagcaaatgacaagat

SEQ ID NO: 787393 - DNA, 19 bp, Mus musculus
  siRNA target sequence for 5330421F07Rik (NM_175272.2,451-469).
gaacagatcgcaaatgatt

SEQ ID NO: 787394 - DNA, 19 bp, Mus musculus
  siRNA target sequence for 5330421F07Rik (NM_175272.2,454-472).
cagatcgcaaatgattgaa

SEQ ID NO: 787395 - DNA, 19 bp, Mus musculus
  siRNA target sequence for 5330421F07Rik (NM_175272.2,456-474).
gatcgcaaatgattgaaaa

SEQ ID NO: 787396 - DNA, 19 bp, Mus musculus
  siRNA target sequence for 5330421F07Rik (NM_175272.2,893-911).
cgtcggagccagagcttta

SEQ ID NO: 787397 - DNA, 19 bp, Mus musculus
  siRNA target sequence for 5330421F07Rik (NM_175272.2,894-912).
gtcggagccagagctttaa

SEQ ID NO: 787398 - DNA, 19 bp, Mus musculus
  siRNA target sequence for 5330421F07Rik (NM_175272.2,900-918).
gccagagctttaacaacta

SEQ ID NO: 787399 - DNA, 19 bp, Mus musculus
  siRNA target sequence for 5330421F07Rik (NM_175272.2,955-973).
cgcaccaccaagtaaccat

SEQ ID NO: 787400 - DNA, 19 bp, Mus musculus
  siRNA target sequence for 5330421F07Rik (NM_175272.2,960-978).
caccaagtaaccatgagaa

SEQ ID NO: 787401 - DNA, 19 bp, Mus musculus
  siRNA target sequence for 5330421F07Rik (NM_175272.2,1220-1238).
cctgcccctaacaatcaga

SEQ ID NO: 787402 - DNA, 19 bp, Mus musculus
  siRNA target sequence for 5330421F07Rik (NM_175272.2,1221-1239).
ctgcccctaacaatcagaa

SEQ ID NO: 787403 - DNA, 19 bp, Mus musculus
  siRNA target sequence for 5330421F07Rik (NM_175272.2,1223-1241).
gcccctaacaatcagaaat

SEQ ID NO: 787404 - DNA, 19 bp, Mus musculus
  siRNA target sequence for 5330421F07Rik (NM_175272.2,1320-1338).
gctgcgagcgactagagat

SEQ ID NO: 787405 - DNA, 19 bp, Mus musculus
  siRNA target sequence for 5330421F07Rik (NM_175272.2,1461-1479).
gcagggcgcttaccaataa

SEQ ID NO: 787406 - DNA, 19 bp, Mus musculus
  siRNA target sequence for 5330421F07Rik (NM_175272.2,1464-1482).
gggcgcttaccaataagaa

SEQ ID NO: 787407 - DNA, 19 bp, Mus musculus
  siRNA target sequence for 5330421F07Rik (NM_175272.2,1485-1503).
gctccccaaagggtaatga

SEQ ID NO: 787408 - DNA, 19 bp, Mus musculus
  siRNA target sequence for 5330421F07Rik (NM_175272.2,1488-1506).
ccccaaagggtaatgagaa

SEQ ID NO: 787409 - DNA, 19 bp, Mus musculus
  siRNA target sequence for 5330421F07Rik (NM_175272.2,1489-1507).
cccaaagggtaatgagaaa

SEQ ID NO: 787410 - DNA, 19 bp, Mus musculus
  siRNA target sequence for 5330421F07Rik (NM_175272.2,1668-1686).
ccaagatcgccagctttat

SEQ ID NO: 787411 - DNA, 19 bp, Mus musculus
  siRNA target sequence for 5330421F07Rik (NM_175272.2,1737-1755).
cccacagcggcataccaaa

SEQ ID NO: 787412 - DNA, 19 bp, Mus musculus
  siRNA target sequence for 5330421F07Rik (NM_175272.2,1738-1756).
ccacagcggcataccaaaa

SEQ ID NO: 787413 - DNA, 19 bp, Mus musculus
  siRNA target sequence for 5330421F07Rik (NM_175272.2,1926-1944).
ccggagggaccagtctaaa

SEQ ID NO: 787414 - DNA, 19 bp, Mus musculus
  siRNA target sequence for 5330421F07Rik (NM_175272.2,1990-2008).
gcagaccactggaagcaat

SEQ ID NO: 787415 - DNA, 19 bp, Mus musculus
  siRNA target sequence for 5330421F07Rik (NM_175272.2,1991-2009).
cagaccactggaagcaata

SEQ ID NO: 787416 - DNA, 19 bp, Mus musculus
  siRNA target sequence for 5330421F07Rik (NM_175272.2,2067-2085).
cggttgcaccttttctgta

SEQ ID NO: 787417 - DNA, 19 bp, Mus musculus
  siRNA target sequence for 2310046O06Rik (NM_175273.2,277-295).
gacacgcgcaccttccatt

SEQ ID NO: 787418 - DNA, 19 bp, Mus musculus
  siRNA target sequence for 2310046O06Rik (NM_175273.2,370-388).
gaaccgacccgattcttca

SEQ ID NO: 787419 - DNA, 19 bp, Mus musculus
  siRNA target sequence for 2900029G13Rik (NM_175274.2,455-473).
ctgcctggtgcgtcatcat

SEQ ID NO: 787420 - DNA, 19 bp, Mus musculus
  siRNA target sequence for 2900029G13Rik (NM_175274.2,457-475).
gcctggtgcgtcatcatca

SEQ ID NO: 787421 - DNA, 19 bp, Mus musculus
  siRNA target sequence for 2900029G13Rik (NM_175274.2,497-515).
gcattgcagtgggattcta

SEQ ID NO: 787422 - DNA, 19 bp, Mus musculus
  siRNA target sequence for 2900029G13Rik (NM_175274.2,745-763).
gctgccatccccttttgga

SEQ ID NO: 787423 - DNA, 19 bp, Mus musculus
  siRNA target sequence for 2900029G13Rik (NM_175274.2,842-860).
gcctgctcttgcttgatgt

SEQ ID NO: 787424 - DNA, 19 bp, Mus musculus
  siRNA target sequence for 2900029G13Rik (NM_175274.2,844-862).
ctgctcttgcttgatgtta

SEQ ID NO: 787425 - DNA, 19 bp, Mus musculus
  siRNA target sequence for 2900029G13Rik (NM_175274.2,847-865).
ctcttgcttgatgttatca

SEQ ID NO: 787426 - DNA, 19 bp, Mus musculus
  siRNA target sequence for 2900029G13Rik (NM_175274.2,1057-1075).
gtactgagtggggacattt

SEQ ID NO: 787427 - DNA, 19 bp, Mus musculus
  siRNA target sequence for 2900029G13Rik (NM_175274.2,1062-1080).
gagtggggacattttgcaa

SEQ ID NO: 787428 - DNA, 19 bp, Mus musculus
  siRNA target sequence for 2900029G13Rik (NM_175274.2,1066-1084).
ggggacattttgcaatact

SEQ ID NO: 787429 - DNA, 19 bp, Mus musculus
  siRNA target sequence for 2900029G13Rik (NM_175274.2,1067-1085).
gggacattttgcaatacta

SEQ ID NO: 787430 - DNA, 19 bp, Mus musculus
  siRNA target sequence for 2900029G13Rik (NM_175274.2,1236-1254).
ccaggaggtgctaaatgga

SEQ ID NO: 787431 - DNA, 19 bp, Mus musculus
  siRNA target sequence for 2900029G13Rik (NM_175274.2,1625-1643).
gccagaatgccaatttcca

SEQ ID NO: 787432 - DNA, 19 bp, Mus musculus
  siRNA target sequence for 2900029G13Rik (NM_175274.2,1706-1724).
ccagcatgagagccaaata

SEQ ID NO: 787433 - DNA, 19 bp, Mus musculus
  siRNA target sequence for 2900029G13Rik (NM_175274.2,1709-1727).
gcatgagagccaaatacct

SEQ ID NO: 787434 - DNA, 19 bp, Mus musculus
  siRNA target sequence for B430108F07Rik (NM_175275.2,131-149).
gccactaccaaggtgaaat

SEQ ID NO: 787435 - DNA, 19 bp, Mus musculus
  siRNA target sequence for B430108F07Rik (NM_175275.2,135-153).
ctaccaaggtgaaatttaa

SEQ ID NO: 787436 - DNA, 19 bp, Mus musculus
  siRNA target sequence for B430108F07Rik (NM_175275.2,203-221).
cactccatcaaggttatga

SEQ ID NO: 787437 - DNA, 19 bp, Mus musculus
  siRNA target sequence for B430108F07Rik (NM_175275.2,322-340).
ggaaacatcccagaatata

SEQ ID NO: 787438 - DNA, 19 bp, Mus musculus
  siRNA target sequence for B430108F07Rik (NM_175275.2,345-363).
ctatcgaagatggtagaaa

SEQ ID NO: 787439 - DNA, 19 bp, Mus musculus
  siRNA target sequence for B430108F07Rik (NM_175275.2,410-428).
gctatgcagacgtactcat

SEQ ID NO: 787440 - DNA, 19 bp, Mus musculus
  siRNA target sequence for B430108F07Rik (NM_175275.2,449-467).
cagagtatttctcataata

SEQ ID NO: 787441 - DNA, 19 bp, Mus musculus
  siRNA target sequence for B430108F07Rik (NM_175275.2,609-627).
gagaacggatcgtatcctt

SEQ ID NO: 787442 - DNA, 19 bp, Mus musculus
  siRNA target sequence for B430108F07Rik (NM_175275.2,631-649).
gcaacagaacagtttgctt

SEQ ID NO: 787443 - DNA, 19 bp, Mus musculus
  siRNA target sequence for B430108F07Rik (NM_175275.2,674-692).
gcgtctgctaaggagtata

SEQ ID NO: 787444 - DNA, 19 bp, Mus musculus
  siRNA target sequence for B430108F07Rik (NM_175275.2,675-693).
cgtctgctaaggagtataa

SEQ ID NO: 787445 - DNA, 19 bp, Mus musculus
  siRNA target sequence for B430108F07Rik (NM_175275.2,676-694).
gtctgctaaggagtataaa

SEQ ID NO: 787446 - DNA, 19 bp, Mus musculus
  siRNA target sequence for B430108F07Rik (NM_175275.2,678-696).
ctgctaaggagtataaaga

SEQ ID NO: 787447 - DNA, 19 bp, Mus musculus
  siRNA target sequence for B430108F07Rik (NM_175275.2,769-787).
gaagctcactcttgattta

SEQ ID NO: 787448 - DNA, 19 bp, Mus musculus
  siRNA target sequence for B430108F07Rik (NM_175275.2,860-878).
gaggaagtttctaggataa

SEQ ID NO: 787449 - DNA, 19 bp, Mus musculus
  siRNA target sequence for B430108F07Rik (NM_175275.2,918-936).
gaagcatggatttggaaat

SEQ ID NO: 787450 - DNA, 19 bp, Mus musculus
  siRNA target sequence for B430108F07Rik (NM_175275.2,966-984).
caactaatgagctcactaa

SEQ ID NO: 787451 - DNA, 19 bp, Mus musculus
  siRNA target sequence for B430108F07Rik (NM_175275.2,1025-1043).
gcaaaggatgaccacataa

SEQ ID NO: 787452 - DNA, 19 bp, Mus musculus
  siRNA target sequence for B430108F07Rik (NM_175275.2,1026-1044).
caaaggatgaccacataaa

SEQ ID NO: 787453 - DNA, 19 bp, Mus musculus
  siRNA target sequence for B430108F07Rik (NM_175275.2,1067-1085).
cgaatggagagggatataa

SEQ ID NO: 787454 - DNA, 19 bp, Mus musculus
  siRNA target sequence for B430108F07Rik (NM_175275.2,1075-1093).
gagggatataaccatgaaa

SEQ ID NO: 787455 - DNA, 19 bp, Mus musculus
  siRNA target sequence for B430108F07Rik (NM_175275.2,1078-1096).
ggatataaccatgaaaaga

SEQ ID NO: 787456 - DNA, 19 bp, Mus musculus
  siRNA target sequence for B430108F07Rik (NM_175275.2,1105-1123).
cgaggacttgaaatttcga

SEQ ID NO: 787457 - DNA, 19 bp, Mus musculus
  siRNA target sequence for B430108F07Rik (NM_175275.2,1222-1240).
ggtatcagtagattcacta

SEQ ID NO: 787458 - DNA, 19 bp, Mus musculus
  siRNA target sequence for B430108F07Rik (NM_175275.2,1223-1241).
gtatcagtagattcactaa

SEQ ID NO: 787459 - DNA, 19 bp, Mus musculus
  siRNA target sequence for B430108F07Rik (NM_175275.2,1236-1254).
cactaaagcaaagacttaa

SEQ ID NO: 787460 - DNA, 19 bp, Mus musculus
  siRNA target sequence for B430108F07Rik (NM_175275.2,1282-1300).
cgagcagatgtatcagaaa

SEQ ID NO: 787461 - DNA, 19 bp, Mus musculus
  siRNA target sequence for B430108F07Rik (NM_175275.2,1286-1304).
cagatgtatcagaaaacta

SEQ ID NO: 787462 - DNA, 19 bp, Mus musculus
  siRNA target sequence for B430108F07Rik (NM_175275.2,1333-1351).
gatgagtgtcctgatatca

SEQ ID NO: 787463 - DNA, 19 bp, Mus musculus
  siRNA target sequence for B430108F07Rik (NM_175275.2,1338-1356).
gtgtcctgatatcaaaact

SEQ ID NO: 787464 - DNA, 19 bp, Mus musculus
  siRNA target sequence for B430108F07Rik (NM_175275.2,1342-1360).
cctgatatcaaaactaaat

SEQ ID NO: 787465 - DNA, 19 bp, Mus musculus
  siRNA target sequence for B430108F07Rik (NM_175275.2,1369-1387).
gacagccatggctcagatt

SEQ ID NO: 787466 - DNA, 19 bp, Mus musculus
  siRNA target sequence for B430108F07Rik (NM_175275.2,1373-1391).
gccatggctcagattgaga

SEQ ID NO: 787467 - DNA, 19 bp, Mus musculus
  siRNA target sequence for B430108F07Rik (NM_175275.2,1468-1486).
gtccgccaatgagaagatt

SEQ ID NO: 787468 - DNA, 19 bp, Mus musculus
  siRNA target sequence for B430108F07Rik (NM_175275.2,1470-1488).
ccgccaatgagaagattga

SEQ ID NO: 787469 - DNA, 19 bp, Mus musculus
  siRNA target sequence for B430108F07Rik (NM_175275.2,1510-1528).
ggctttggtcaatgagtta

SEQ ID NO: 787470 - DNA, 19 bp, Mus musculus
  siRNA target sequence for B430108F07Rik (NM_175275.2,1512-1530).
ctttggtcaatgagttaca

SEQ ID NO: 787471 - DNA, 19 bp, Mus musculus
  siRNA target sequence for B430108F07Rik (NM_175275.2,1735-1753).
ggagtggatgttgtacatt

SEQ ID NO: 787472 - DNA, 19 bp, Mus musculus
  siRNA target sequence for B430108F07Rik (NM_175275.2,1769-1787).
ggacagcttccgtttgcat

SEQ ID NO: 787473 - DNA, 19 bp, Mus musculus
  siRNA target sequence for B430108F07Rik (NM_175275.2,1774-1792).
gcttccgtttgcatcatat

SEQ ID NO: 787474 - DNA, 19 bp, Mus musculus
  siRNA target sequence for B430108F07Rik (NM_175275.2,1831-1849).
gaaactaactgaaggatat

SEQ ID NO: 787475 - DNA, 19 bp, Mus musculus
  siRNA target sequence for B430108F07Rik (NM_175275.2,1856-1874).
gtgatgaaagacactaaat

SEQ ID NO: 787476 - DNA, 19 bp, Mus musculus
  siRNA target sequence for FHOS2 (NM_175276.3,178-196).
cttgtcgcgtgcagttctt

SEQ ID NO: 787477 - DNA, 19 bp, Mus musculus
  siRNA target sequence for FHOS2 (NM_175276.3,201-219).
gacaccgatcctttcaaca

SEQ ID NO: 787478 - DNA, 19 bp, Mus musculus
  siRNA target sequence for FHOS2 (NM_175276.3,244-262).
ggccaccgctgttcacatt

SEQ ID NO: 787479 - DNA, 19 bp, Mus musculus
  siRNA target sequence for FHOS2 (NM_175276.3,518-536).
cagtggccgagatctaaga

SEQ ID NO: 787480 - DNA, 19 bp, Mus musculus
  siRNA target sequence for FHOS2 (NM_175276.3,531-549).
ctaagaagggcccttttct

SEQ ID NO: 787481 - DNA, 19 bp, Mus musculus
  siRNA target sequence for FHOS2 (NM_175276.3,584-602).
ggtgcatgaatttgtcata

SEQ ID NO: 787482 - DNA, 19 bp, Mus musculus
  siRNA target sequence for FHOS2 (NM_175276.3,610-628).
gtctgacctgtttgatcaa

SEQ ID NO: 787483 - DNA, 19 bp, Mus musculus
  siRNA target sequence for FHOS2 (NM_175276.3,638-656).
cgaggcggatcagaactat

SEQ ID NO: 787484 - DNA, 19 bp, Mus musculus
  siRNA target sequence for FHOS2 (NM_175276.3,643-661).
cggatcagaactatcagaa

SEQ ID NO: 787485 - DNA, 19 bp, Mus musculus
  siRNA target sequence for FHOS2 (NM_175276.3,675-693).
gctctgggtcagattatgt

SEQ ID NO: 787486 - DNA, 19 bp, Mus musculus
  siRNA target sequence for FHOS2 (NM_175276.3,676-694).
ctctgggtcagattatgtt

SEQ ID NO: 787487 - DNA, 19 bp, Mus musculus
  siRNA target sequence for FHOS2 (NM_175276.3,678-696).
ctgggtcagattatgttgt

SEQ ID NO: 787488 - DNA, 19 bp, Mus musculus
  siRNA target sequence for FHOS2 (NM_175276.3,680-698).
gggtcagattatgttgtat

SEQ ID NO: 787489 - DNA, 19 bp, Mus musculus
  siRNA target sequence for FHOS2 (NM_175276.3,682-700).
gtcagattatgttgtatgt

SEQ ID NO: 787490 - DNA, 19 bp, Mus musculus
  siRNA target sequence for FHOS2 (NM_175276.3,938-956).
cacagagctattggtttat

SEQ ID NO: 787491 - DNA, 19 bp, Mus musculus
  siRNA target sequence for FHOS2 (NM_175276.3,1059-1077).
caaaggcacttgaacaaga

SEQ ID NO: 787492 - DNA, 19 bp, Mus musculus
  siRNA target sequence for FHOS2 (NM_175276.3,1094-1112).
cttgctggagcagtttaat

SEQ ID NO: 787493 - DNA, 19 bp, Mus musculus
  siRNA target sequence for FHOS2 (NM_175276.3,1249-1267).
ggagccgtagacactcaat

SEQ ID NO: 787494 - DNA, 19 bp, Mus musculus
  siRNA target sequence for FHOS2 (NM_175276.3,1258-1276).
gacactcaatccagaatat

SEQ ID NO: 787495 - DNA, 19 bp, Mus musculus
  siRNA target sequence for FHOS2 (NM_175276.3,1692-1710).
gtgtctccaaccatagaca

SEQ ID NO: 787496 - DNA, 19 bp, Mus musculus
  siRNA target sequence for FHOS2 (NM_175276.3,1748-1766).
ctcctatgactttgaagat

SEQ ID NO: 787497 - DNA, 19 bp, Mus musculus
  siRNA target sequence for FHOS2 (NM_175276.3,2301-2319).
ctgcagtgcccccaagtaa

SEQ ID NO: 787498 - DNA, 19 bp, Mus musculus
  siRNA target sequence for FHOS2 (NM_175276.3,2303-2321).
gcagtgcccccaagtaagt

SEQ ID NO: 787499 - DNA, 19 bp, Mus musculus
  siRNA target sequence for FHOS2 (NM_175276.3,2646-2664).
gacatccttaccagcaaaa

SEQ ID NO: 787500 - DNA, 19 bp, Mus musculus
  siRNA target sequence for FHOS2 (NM_175276.3,2684-2702).
gtatgcccataacagaaaa

SEQ ID NO: 787501 - DNA, 19 bp, Mus musculus
  siRNA target sequence for FHOS2 (NM_175276.3,2688-2706).
gcccataacagaaaatcca

SEQ ID NO: 787502 - DNA, 19 bp, Mus musculus
  siRNA target sequence for FHOS2 (NM_175276.3,3064-3082).
gggaggaggacgatatcga

SEQ ID NO: 787503 - DNA, 19 bp, Mus musculus
  siRNA target sequence for FHOS2 (NM_175276.3,3065-3083).
ggaggaggacgatatcgat

SEQ ID NO: 787504 - DNA, 19 bp, Mus musculus
  siRNA target sequence for FHOS2 (NM_175276.3,3069-3087).
gaggacgatatcgatgttt

SEQ ID NO: 787505 - DNA, 19 bp, Mus musculus
  siRNA target sequence for FHOS2 (NM_175276.3,3074-3092).
cgatatcgatgttttggat

SEQ ID NO: 787506 - DNA, 19 bp, Mus musculus
  siRNA target sequence for FHOS2 (NM_175276.3,3204-3222).
ccagtccccggtaatttat

SEQ ID NO: 787507 - DNA, 19 bp, Mus musculus
  siRNA target sequence for FHOS2 (NM_175276.3,3205-3223).
cagtccccggtaatttatt

SEQ ID NO: 787508 - DNA, 19 bp, Mus musculus
  siRNA target sequence for FHOS2 (NM_175276.3,3285-3303).
ccagcgttcaccaagaaaa

SEQ ID NO: 787509 - DNA, 19 bp, Mus musculus
  siRNA target sequence for FHOS2 (NM_175276.3,3377-3395).
ggaattcctgtggtcaaaa

SEQ ID NO: 787510 - DNA, 19 bp, Mus musculus
  siRNA target sequence for FHOS2 (NM_175276.3,3391-3409).
caaaactggaacccattaa

SEQ ID NO: 787511 - DNA, 19 bp, Mus musculus
  siRNA target sequence for FHOS2 (NM_175276.3,3424-3442).
gactcgagcacctgtttga

SEQ ID NO: 787512 - DNA, 19 bp, Mus musculus
  siRNA target sequence for FHOS2 (NM_175276.3,3426-3444).
ctcgagcacctgtttgagt

SEQ ID NO: 787513 - DNA, 19 bp, Mus musculus
  siRNA target sequence for FHOS2 (NM_175276.3,3560-3578).
gccccctccaaggacaatt

SEQ ID NO: 787514 - DNA, 19 bp, Mus musculus
  siRNA target sequence for FHOS2 (NM_175276.3,3561-3579).
ccccctccaaggacaatta

SEQ ID NO: 787515 - DNA, 19 bp, Mus musculus
  siRNA target sequence for FHOS2 (NM_175276.3,3624-3642).
gggatcgagaaaattctga

SEQ ID NO: 787516 - DNA, 19 bp, Mus musculus
  siRNA target sequence for FHOS2 (NM_175276.3,3774-3792).
cacctgtgggcattcaaaa

SEQ ID NO: 787517 - DNA, 19 bp, Mus musculus
  siRNA target sequence for FHOS2 (NM_175276.3,3781-3799).
gggcattcaaaatggatta

SEQ ID NO: 787518 - DNA, 19 bp, Mus musculus
  siRNA target sequence for FHOS2 (NM_175276.3,3917-3935).
ctttctaaatggaactaat

SEQ ID NO: 787519 - DNA, 19 bp, Mus musculus
  siRNA target sequence for FHOS2 (NM_175276.3,3936-3954).
gccaaagcatttgagttaa

SEQ ID NO: 787520 - DNA, 19 bp, Mus musculus
  siRNA target sequence for FHOS2 (NM_175276.3,3969-3987).
gttccagaagtcaaagata

SEQ ID NO: 787521 - DNA, 19 bp, Mus musculus
  siRNA target sequence for FHOS2 (NM_175276.3,4045-4063).
cggacagctcggatctgta

SEQ ID NO: 787522 - DNA, 19 bp, Mus musculus
  siRNA target sequence for FHOS2 (NM_175276.3,4068-4086).
gagattggggccatcacta

SEQ ID NO: 787523 - DNA, 19 bp, Mus musculus
  siRNA target sequence for FHOS2 (NM_175276.3,4087-4105).
ggtcagccaaggttgactt

SEQ ID NO: 787524 - DNA, 19 bp, Mus musculus
  siRNA target sequence for FHOS2 (NM_175276.3,4107-4125).
gatcaacttcaggataatt

SEQ ID NO: 787525 - DNA, 19 bp, Mus musculus
  siRNA target sequence for FHOS2 (NM_175276.3,4164-4182).
cacctcaaggcgattgcaa

SEQ ID NO: 787526 - DNA, 19 bp, Mus musculus
  siRNA target sequence for FHOS2 (NM_175276.3,4166-4184).
cctcaaggcgattgcaaaa

SEQ ID NO: 787527 - DNA, 19 bp, Mus musculus
  siRNA target sequence for FHOS2 (NM_175276.3,4233-4251).
gactgtgcagagcgaatta

SEQ ID NO: 787528 - DNA, 19 bp, Mus musculus
  siRNA target sequence for FHOS2 (NM_175276.3,4235-4253).
ctgtgcagagcgaattata

SEQ ID NO: 787529 - DNA, 19 bp, Mus musculus
  siRNA target sequence for FHOS2 (NM_175276.3,4237-4255).
gtgcagagcgaattataat

SEQ ID NO: 787530 - DNA, 19 bp, Mus musculus
  siRNA target sequence for FHOS2 (NM_175276.3,4265-4283).
cgtccatcggaggataatt

SEQ ID NO: 787531 - DNA, 19 bp, Mus musculus
  siRNA target sequence for FHOS2 (NM_175276.3,4272-4290).
cggaggataattaacagat

SEQ ID NO: 787532 - DNA, 19 bp, Mus musculus
  siRNA target sequence for FHOS2 (NM_175276.3,4273-4291).
ggaggataattaacagatt

SEQ ID NO: 787533 - DNA, 19 bp, Mus musculus
  siRNA target sequence for FHOS2 (NM_175276.3,4315-4333).
gccatcccccttatgcaat

SEQ ID NO: 787534 - DNA, 19 bp, Mus musculus
  siRNA target sequence for FHOS2 (NM_175276.3,4330-4348).
caattcgagaggtgaacat

SEQ ID NO: 787535 - DNA, 19 bp, Mus musculus
  siRNA target sequence for FHOS2 (NM_175276.3,4399-4417).
ccagggaaagggttctaca

SEQ ID NO: 787536 - DNA, 19 bp, Mus musculus
  siRNA target sequence for FHOS2 (NM_175276.3,4554-4572).
gccgaacatgagaacatga

SEQ ID NO: 787537 - DNA, 19 bp, Mus musculus
  siRNA target sequence for FHOS2 (NM_175276.3,4555-4573).
ccgaacatgagaacatgaa

SEQ ID NO: 787538 - DNA, 19 bp, Mus musculus
  siRNA target sequence for FHOS2 (NM_175276.3,4653-4671).
cgaggatccactagttcat

SEQ ID NO: 787539 - DNA, 19 bp, Mus musculus
  siRNA target sequence for FHOS2 (NM_175276.3,4730-4748).
ggaccgcattgtcaaatca

SEQ ID NO: 787540 - DNA, 19 bp, Mus musculus
  siRNA target sequence for FHOS2 (NM_175276.3,4799-4817).
cagggccaaccgcaaatct

SEQ ID NO: 787541 - DNA, 19 bp, Mus musculus
  siRNA target sequence for FHOS2 (NM_175276.3,4871-4889).
cctggttggcacatctgaa

SEQ ID NO: 787542 - DNA, 19 bp, Mus musculus
  siRNA target sequence for 4632411J06Rik (NM_175279.2,237-255).
gatccttcggagaagaaga

SEQ ID NO: 787543 - DNA, 19 bp, Mus musculus
  siRNA target sequence for 4632411J06Rik (NM_175279.2,537-555).
cgcatcctgcccaacaaga

SEQ ID NO: 787544 - DNA, 19 bp, Mus musculus
  siRNA target sequence for 4632411J06Rik (NM_175279.2,587-605).
cgacgagcaggagaatgta

SEQ ID NO: 787545 - DNA, 19 bp, Mus musculus
  siRNA target sequence for 4632411J06Rik (NM_175279.2,889-907).
gcgcgtcggtagaacgtat

SEQ ID NO: 787546 - DNA, 19 bp, Mus musculus
  siRNA target sequence for 4632411J06Rik (NM_175279.2,1046-1064).
ctacgtgcaggatacctat

SEQ ID NO: 787547 - DNA, 19 bp, Mus musculus
  siRNA target sequence for 4632411J06Rik (NM_175279.2,1049-1067).
cgtgcaggatacctatcta

SEQ ID NO: 787548 - DNA, 19 bp, Mus musculus
  siRNA target sequence for 4632411J06Rik (NM_175279.2,1082-1100).
cgacctggacggacaaact

SEQ ID NO: 787549 - DNA, 19 bp, Mus musculus
  siRNA target sequence for 4930529M08Rik (NM_175280.2,204-222).
cggtgccagaactgtactt

SEQ ID NO: 787550 - DNA, 19 bp, Mus musculus
  siRNA target sequence for 4930529M08Rik (NM_175280.2,206-224).
gtgccagaactgtacttca

SEQ ID NO: 787551 - DNA, 19 bp, Mus musculus
  siRNA target sequence for 4930529M08Rik (NM_175280.2,209-227).
ccagaactgtacttcatat

SEQ ID NO: 787552 - DNA, 19 bp, Mus musculus
  siRNA target sequence for 4930529M08Rik (NM_175280.2,215-233).
ctgtacttcatattcctta

SEQ ID NO: 787553 - DNA, 19 bp, Mus musculus
  siRNA target sequence for 4930529M08Rik (NM_175280.2,229-247).
ccttatagtgccaacatat

SEQ ID NO: 787554 - DNA, 19 bp, Mus musculus
  siRNA target sequence for 4930529M08Rik (NM_175280.2,230-248).
cttatagtgccaacatatt

SEQ ID NO: 787555 - DNA, 19 bp, Mus musculus
  siRNA target sequence for 4930529M08Rik (NM_175280.2,254-272).
ctaggctcaactctgataa

SEQ ID NO: 787556 - DNA, 19 bp, Mus musculus
  siRNA target sequence for 4930529M08Rik (NM_175280.2,264-282).
ctctgataactgtgtttga

SEQ ID NO: 787557 - DNA, 19 bp, Mus musculus
  siRNA target sequence for 4930529M08Rik (NM_175280.2,300-318).
catgtctgaactataatga

SEQ ID NO: 787558 - DNA, 19 bp, Mus musculus
  siRNA target sequence for 4930529M08Rik (NM_175280.2,303-321).
gtctgaactataatgaaga

SEQ ID NO: 787559 - DNA, 19 bp, Mus musculus
  siRNA target sequence for 4930529M08Rik (NM_175280.2,320-338).
gactttgcagtgcacatat

SEQ ID NO: 787560 - DNA, 19 bp, Mus musculus
  siRNA target sequence for 4930529M08Rik (NM_175280.2,384-402).
gggtagaagaccatgatga

SEQ ID NO: 787561 - DNA, 19 bp, Mus musculus
  siRNA target sequence for 4930529M08Rik (NM_175280.2,422-440).
cactacgacaacactctaa

SEQ ID NO: 787562 - DNA, 19 bp, Mus musculus
  siRNA target sequence for 4930529M08Rik (NM_175280.2,427-445).
cgacaacactctaaaggaa

SEQ ID NO: 787563 - DNA, 19 bp, Mus musculus
  siRNA target sequence for 4930529M08Rik (NM_175280.2,443-461).
gaaatttatggtgaatact

SEQ ID NO: 787564 - DNA, 19 bp, Mus musculus
  siRNA target sequence for 4930529M08Rik (NM_175280.2,473-491).
ctgatcgaggcccaagata

SEQ ID NO: 787565 - DNA, 19 bp, Mus musculus
  siRNA target sequence for 4930533G20Rik (NM_175281.1,382-400).
cagcctcatagacttttgt

SEQ ID NO: 787566 - DNA, 19 bp, Mus musculus
  siRNA target sequence for 4930533G20Rik (NM_175281.1,399-417).
gttccacatcctcctttaa

SEQ ID NO: 787567 - DNA, 19 bp, Mus musculus
  siRNA target sequence for 4930533G20Rik (NM_175281.1,428-446).
catcacgagctgtcagaat

SEQ ID NO: 787568 - DNA, 19 bp, Mus musculus
  siRNA target sequence for 4930533G20Rik (NM_175281.1,431-449).
cacgagctgtcagaatctt

SEQ ID NO: 787569 - DNA, 19 bp, Mus musculus
  siRNA target sequence for 4930533G20Rik (NM_175281.1,447-465).
cttgcagccttaataagaa

SEQ ID NO: 787570 - DNA, 19 bp, Mus musculus
  siRNA target sequence for 4930533G20Rik (NM_175281.1,520-538).
ccccaattctgcagtatct

SEQ ID NO: 787571 - DNA, 19 bp, Mus musculus
  siRNA target sequence for 4930533G20Rik (NM_175281.1,531-549).
cagtatctcccagtcaaat

SEQ ID NO: 787572 - DNA, 19 bp, Mus musculus
  siRNA target sequence for 4930533G20Rik (NM_175281.1,533-551).
gtatctcccagtcaaataa

SEQ ID NO: 787573 - DNA, 19 bp, Mus musculus
  siRNA target sequence for 4930533G20Rik (NM_175281.1,638-656).
cgcaggcggctagactttt

SEQ ID NO: 787574 - DNA, 19 bp, Mus musculus
  siRNA target sequence for 4930533G20Rik (NM_175281.1,640-658).
caggcggctagacttttct

SEQ ID NO: 787575 - DNA, 19 bp, Mus musculus
  siRNA target sequence for 4930533G20Rik (NM_175281.1,642-660).
ggcggctagacttttcttt

SEQ ID NO: 787576 - DNA, 19 bp, Mus musculus
  siRNA target sequence for 4930533G20Rik (NM_175281.1,674-692).
ggggattctgattcacaaa

SEQ ID NO: 787577 - DNA, 19 bp, Mus musculus
  siRNA target sequence for 4930533G20Rik (NM_175281.1,696-714).
gatctctggaaagtaacat

SEQ ID NO: 787578 - DNA, 19 bp, Mus musculus
  siRNA target sequence for 4930533G20Rik (NM_175281.1,719-737).
caaggtgttagcctagaaa

SEQ ID NO: 787579 - DNA, 19 bp, Mus musculus
  siRNA target sequence for 4930533G20Rik (NM_175281.1,723-741).
gtgttagcctagaaaaaca

SEQ ID NO: 787580 - DNA, 19 bp, Mus musculus
  siRNA target sequence for 4930533G20Rik (NM_175281.1,725-743).
gttagcctagaaaaacatt

SEQ ID NO: 787581 - DNA, 19 bp, Mus musculus
  siRNA target sequence for 4930533G20Rik (NM_175281.1,794-812).
gttaccagcacgataaaaa

SEQ ID NO: 787582 - DNA, 19 bp, Mus musculus
  siRNA target sequence for 4930533G20Rik (NM_175281.1,841-859).
ctcaaggttacatttttct

SEQ ID NO: 787583 - DNA, 19 bp, Mus musculus
  siRNA target sequence for 4930533G20Rik (NM_175281.1,843-861).
caaggttacatttttctca

SEQ ID NO: 787584 - DNA, 19 bp, Mus musculus
  siRNA target sequence for 4930533G20Rik (NM_175281.1,868-886).
gacttccaccattgaagat

SEQ ID NO: 787585 - DNA, 19 bp, Mus musculus
  siRNA target sequence for 4930533G20Rik (NM_175281.1,895-913).
caactgtggcttgtttgaa

SEQ ID NO: 787586 - DNA, 19 bp, Mus musculus
  siRNA target sequence for 4930533G20Rik (NM_175281.1,953-971).
gattctatcacacacttta

SEQ ID NO: 787587 - DNA, 19 bp, Mus musculus
  siRNA target sequence for 4930533G20Rik (NM_175281.1,957-975).
ctatcacacactttagtga

SEQ ID NO: 787588 - DNA, 19 bp, Mus musculus
  siRNA target sequence for 4930533G20Rik (NM_175281.1,972-990).
gtgacagcagtttaagtgt

SEQ ID NO: 787589 - DNA, 19 bp, Mus musculus
  siRNA target sequence for 4930533G20Rik (NM_175281.1,976-994).
cagcagtttaagtgttagt

SEQ ID NO: 787590 - DNA, 19 bp, Mus musculus
  siRNA target sequence for 4930533G20Rik (NM_175281.1,978-996).
gcagtttaagtgttagtga

SEQ ID NO: 787591 - DNA, 19 bp, Mus musculus
  siRNA target sequence for 4930533G20Rik (NM_175281.1,1000-1018).
gaatacatgtcctgaactt

SEQ ID NO: 787592 - DNA, 19 bp, Mus musculus
  siRNA target sequence for 4930533G20Rik (NM_175281.1,1088-1106).
ctcatagcaaaaatcaaat

SEQ ID NO: 787593 - DNA, 19 bp, Mus musculus
  siRNA target sequence for 4930533G20Rik (NM_175281.1,1222-1240).
ccaagagggctcttttcaa

SEQ ID NO: 787594 - DNA, 19 bp, Mus musculus
  siRNA target sequence for 4930533G20Rik (NM_175281.1,1258-1276).
cagggtgactcccaaagtt

SEQ ID NO: 787595 - DNA, 19 bp, Mus musculus
  siRNA target sequence for 4930533G20Rik (NM_175281.1,1286-1304).
gtaaaaaagccaaagcatt

SEQ ID NO: 787596 - DNA, 19 bp, Mus musculus
  siRNA target sequence for 4930533G20Rik (NM_175281.1,1366-1384).
gacggtccatcctaactct

SEQ ID NO: 787597 - DNA, 19 bp, Mus musculus
  siRNA target sequence for 4930533G20Rik (NM_175281.1,1370-1388).
gtccatcctaactctgatt

SEQ ID NO: 787598 - DNA, 19 bp, Mus musculus
  siRNA target sequence for 4930533G20Rik (NM_175281.1,1372-1390).
ccatcctaactctgattca

SEQ ID NO: 787599 - DNA, 19 bp, Mus musculus
  siRNA target sequence for 4930533G20Rik (NM_175281.1,1427-1445).
cgtgggaacttggctttaa

SEQ ID NO: 787600 - DNA, 19 bp, Mus musculus
  siRNA target sequence for 4930533G20Rik (NM_175281.1,1431-1449).
ggaacttggctttaagctt

SEQ ID NO: 787601 - DNA, 19 bp, Mus musculus
  siRNA target sequence for 4930533G20Rik (NM_175281.1,1447-1465).
ctttaaggacttatcaaat

SEQ ID NO: 787602 - DNA, 19 bp, Mus musculus
  siRNA target sequence for 4930533G20Rik (NM_175281.1,1484-1502).
gtgcaggagctctttatga

SEQ ID NO: 787603 - DNA, 19 bp, Mus musculus
  siRNA target sequence for 4930533G20Rik (NM_175281.1,1555-1573).
cagggacgaggggaaaatt

SEQ ID NO: 787604 - DNA, 19 bp, Mus musculus
  siRNA target sequence for 4930533G20Rik (NM_175281.1,1599-1617).
gactgattggcaagaagat

SEQ ID NO: 787605 - DNA, 19 bp, Mus musculus
  siRNA target sequence for 4930533G20Rik (NM_175281.1,1620-1638).
gcatagaacagctggatat

SEQ ID NO: 787606 - DNA, 19 bp, Mus musculus
  siRNA target sequence for 4930533G20Rik (NM_175281.1,1639-1657).
cctgaccgaattacagtat

SEQ ID NO: 787607 - DNA, 19 bp, Mus musculus
  siRNA target sequence for 4930533G20Rik (NM_175281.1,1640-1658).
ctgaccgaattacagtata

SEQ ID NO: 787608 - DNA, 19 bp, Mus musculus
  siRNA target sequence for 4930533G20Rik (NM_175281.1,1644-1662).
ccgaattacagtatagaaa

SEQ ID NO: 787609 - DNA, 19 bp, Mus musculus
  siRNA target sequence for 4930533G20Rik (NM_175281.1,1646-1664).
gaattacagtatagaaact

SEQ ID NO: 787610 - DNA, 19 bp, Mus musculus
  siRNA target sequence for 4930533G20Rik (NM_175281.1,1670-1688).
cacatcctagctatggttt

SEQ ID NO: 787611 - DNA, 19 bp, Mus musculus
  siRNA target sequence for 4930533G20Rik (NM_175281.1,1672-1690).
catcctagctatggtttta

SEQ ID NO: 787612 - DNA, 19 bp, Mus musculus
  siRNA target sequence for 4930533G20Rik (NM_175281.1,1685-1703).
gttttagagtccttgactt

SEQ ID NO: 787613 - DNA, 19 bp, Mus musculus
  siRNA target sequence for 4930533G20Rik (NM_175281.1,1696-1714).
cttgacttcggagagttta

SEQ ID NO: 787614 - DNA, 19 bp, Mus musculus
  siRNA target sequence for 4930533G20Rik (NM_175281.1,1734-1752).
gcagaaactggcgtgaaat

SEQ ID NO: 787615 - DNA, 19 bp, Mus musculus
  siRNA target sequence for 4930533G20Rik (NM_175281.1,1735-1753).
cagaaactggcgtgaaatt

SEQ ID NO: 787616 - DNA, 19 bp, Mus musculus
  siRNA target sequence for 4930533G20Rik (NM_175281.1,1737-1755).
gaaactggcgtgaaattgt

SEQ ID NO: 787617 - DNA, 19 bp, Mus musculus
  siRNA target sequence for 4930533G20Rik (NM_175281.1,1987-2005).
cacccacctacggagtaaa

SEQ ID NO: 787618 - DNA, 19 bp, Mus musculus
  siRNA target sequence for 4930533G20Rik (NM_175281.1,1989-2007).
cccacctacggagtaaaca

SEQ ID NO: 787619 - DNA, 19 bp, Mus musculus
  siRNA target sequence for 4930533G20Rik (NM_175281.1,2001-2019).
gtaaacaggaacagtatgt

SEQ ID NO: 787620 - DNA, 19 bp, Mus musculus
  siRNA target sequence for 4930533G20Rik (NM_175281.1,2024-2042).
gttgccaggacactgttta

SEQ ID NO: 787621 - DNA, 19 bp, Mus musculus
  siRNA target sequence for 4930533G20Rik (NM_175281.1,2038-2056).
gtttactgatgaagcttta

SEQ ID NO: 787622 - DNA, 19 bp, Mus musculus
  siRNA target sequence for 4930533G20Rik (NM_175281.1,2073-2091).
gccaatcccctgctaagta

SEQ ID NO: 787623 - DNA, 19 bp, Mus musculus
  siRNA target sequence for 4930533G20Rik (NM_175281.1,2089-2107).
gtaccagccgcacaagaaa

SEQ ID NO: 787624 - DNA, 19 bp, Mus musculus
  siRNA target sequence for 4930533G20Rik (NM_175281.1,2206-2224).
ggcgagaggtagcaaagat

SEQ ID NO: 787625 - DNA, 19 bp, Mus musculus
  siRNA target sequence for 4930533G20Rik (NM_175281.1,2208-2226).
cgagaggtagcaaagatgt

SEQ ID NO: 787626 - DNA, 19 bp, Mus musculus
  siRNA target sequence for 4930533G20Rik (NM_175281.1,2209-2227).
gagaggtagcaaagatgtt

SEQ ID NO: 787627 - DNA, 19 bp, Mus musculus
  siRNA target sequence for 4930533G20Rik (NM_175281.1,2242-2260).
ccaaagcaagcggaactta

SEQ ID NO: 787628 - DNA, 19 bp, Mus musculus
  siRNA target sequence for Srd5a1 (NM_175283.2,350-368).
gcgtcctgctagctatgtt

SEQ ID NO: 787629 - DNA, 19 bp, Mus musculus
  siRNA target sequence for Srd5a1 (NM_175283.2,351-369).
cgtcctgctagctatgttt

SEQ ID NO: 787630 - DNA, 19 bp, Mus musculus
  siRNA target sequence for Srd5a1 (NM_175283.2,574-592).
gtgggcatggtgataaata

SEQ ID NO: 787631 - DNA, 19 bp, Mus musculus
  siRNA target sequence for Srd5a1 (NM_175283.2,604-622).
cacatcctgcggaatctga

SEQ ID NO: 787632 - DNA, 19 bp, Mus musculus
  siRNA target sequence for Srd5a1 (NM_175283.2,612-630).
gcggaatctgagaaaacca

SEQ ID NO: 787633 - DNA, 19 bp, Mus musculus
  siRNA target sequence for Srd5a1 (NM_175283.2,674-692).
gcctcaccgggcagcattt

SEQ ID NO: 787634 - DNA, 19 bp, Mus musculus
  siRNA target sequence for Srd5a1 (NM_175283.2,716-734).
gtgaaccacagttagatct

SEQ ID NO: 787635 - DNA, 19 bp, Mus musculus
  siRNA target sequence for C430004E15Rik (NM_175286.2,1059-1077).
gccaccagcgccaatgatt

SEQ ID NO: 787636 - DNA, 19 bp, Mus musculus
  siRNA target sequence for C430004E15Rik (NM_175286.2,1064-1082).
cagcgccaatgattccttt

SEQ ID NO: 787637 - DNA, 19 bp, Mus musculus
  siRNA target sequence for C430004E15Rik (NM_175286.2,1067-1085).
cgccaatgattcctttgaa

SEQ ID NO: 787638 - DNA, 19 bp, Mus musculus
  siRNA target sequence for C430004E15Rik (NM_175286.2,1174-1192).
gcaactccttcgtgttgat

SEQ ID NO: 787639 - DNA, 19 bp, Mus musculus
  siRNA target sequence for C430004E15Rik (NM_175286.2,1206-1224).
gcccctgggaactatcctt

SEQ ID NO: 787640 - DNA, 19 bp, Mus musculus
  siRNA target sequence for C430004E15Rik (NM_175286.2,1207-1225).
cccctgggaactatccttt

SEQ ID NO: 787641 - DNA, 19 bp, Mus musculus
  siRNA target sequence for C430004E15Rik (NM_175286.2,1318-1336).
gtgcacctgccctagagaa

SEQ ID NO: 787642 - DNA, 19 bp, Mus musculus
  siRNA target sequence for C430004E15Rik (NM_175286.2,1404-1422).
gacacagacaagtgtgtta

SEQ ID NO: 787643 - DNA, 19 bp, Mus musculus
  siRNA target sequence for C430004E15Rik (NM_175286.2,1917-1935).
gctggctcctcgagaaaaa

SEQ ID NO: 787644 - DNA, 19 bp, Mus musculus
  siRNA target sequence for C430004E15Rik (NM_175286.2,1937-1955).
gatgaagatctccttcaat

SEQ ID NO: 787645 - DNA, 19 bp, Mus musculus
  siRNA target sequence for C430004E15Rik (NM_175286.2,1956-1974).
gacaagagcctgcatacaa

SEQ ID NO: 787646 - DNA, 19 bp, Mus musculus
  siRNA target sequence for C430004E15Rik (NM_175286.2,1961-1979).
gagcctgcatacaacattt

SEQ ID NO: 787647 - DNA, 19 bp, Mus musculus
  siRNA target sequence for C430004E15Rik (NM_175286.2,1963-1981).
gcctgcatacaacatttga

SEQ ID NO: 787648 - DNA, 19 bp, Mus musculus
  siRNA target sequence for C430004E15Rik (NM_175286.2,1965-1983).
ctgcatacaacatttgagt

SEQ ID NO: 787649 - DNA, 19 bp, Mus musculus
  siRNA target sequence for C430004E15Rik (NM_175286.2,2082-2100).
gagaaacccttcacagttt

SEQ ID NO: 787650 - DNA, 19 bp, Mus musculus
  siRNA target sequence for C430004E15Rik (NM_175286.2,2299-2317).
gcgagccagccctctattt

SEQ ID NO: 787651 - DNA, 19 bp, Mus musculus
  siRNA target sequence for A430005L14Rik (NM_175287.2,174-192).
ctccacatctgctaaaaca

SEQ ID NO: 787652 - DNA, 19 bp, Mus musculus
  siRNA target sequence for A430005L14Rik (NM_175287.2,177-195).
cacatctgctaaaacaaca

SEQ ID NO: 787653 - DNA, 19 bp, Mus musculus
  siRNA target sequence for A430005L14Rik (NM_175287.2,201-219).
ggcttcctcatcacacaaa

SEQ ID NO: 787654 - DNA, 19 bp, Mus musculus
  siRNA target sequence for A430005L14Rik (NM_175287.2,230-248).
gacgaacttccaaaaagtt

SEQ ID NO: 787655 - DNA, 19 bp, Mus musculus
  siRNA target sequence for A430005L14Rik (NM_175287.2,232-250).
cgaacttccaaaaagttca

SEQ ID NO: 787656 - DNA, 19 bp, Mus musculus
  siRNA target sequence for A430005L14Rik (NM_175287.2,341-359).
ctccttgtgaaaataagtt

SEQ ID NO: 787657 - DNA, 19 bp, Mus musculus
  siRNA target sequence for A430005L14Rik (NM_175287.2,588-606).
cagcatctttctagatgat

SEQ ID NO: 787658 - DNA, 19 bp, Mus musculus
  siRNA target sequence for A430005L14Rik (NM_175287.2,590-608).
gcatctttctagatgatga

SEQ ID NO: 787659 - DNA, 19 bp, Mus musculus
  siRNA target sequence for A430005L14Rik (NM_175287.2,644-662).
ggaatgtcgagcttatgca

SEQ ID NO: 787660 - DNA, 19 bp, Mus musculus
  siRNA target sequence for A430005L14Rik (NM_175287.2,676-694).
gcctcttcatcttatcctt

SEQ ID NO: 787661 - DNA, 19 bp, Mus musculus
  siRNA target sequence for C230066G23Rik (NM_175288.2,452-470).
ctccttcctgccaacgata

SEQ ID NO: 787662 - DNA, 19 bp, Mus musculus
  siRNA target sequence for C230066G23Rik (NM_175288.2,455-473).
cttcctgccaacgataaga

SEQ ID NO: 787663 - DNA, 19 bp, Mus musculus
  siRNA target sequence for C230066G23Rik (NM_175288.2,491-509).
ctaaacacacagaggttaa

SEQ ID NO: 787664 - DNA, 19 bp, Mus musculus
  siRNA target sequence for C230066G23Rik (NM_175288.2,515-533).
ggttgtccagtggatatca

SEQ ID NO: 787665 - DNA, 19 bp, Mus musculus
  siRNA target sequence for C230066G23Rik (NM_175288.2,527-545).
gatatcaaagcccttgttt

SEQ ID NO: 787666 - DNA, 19 bp, Mus musculus
  siRNA target sequence for C230066G23Rik (NM_175288.2,557-575).
gtttggatccagaatcctt

SEQ ID NO: 787667 - DNA, 19 bp, Mus musculus
  siRNA target sequence for C230066G23Rik (NM_175288.2,610-628).
cgttgaagcgataaacaca

SEQ ID NO: 787668 - DNA, 19 bp, Mus musculus
  siRNA target sequence for C230066G23Rik (NM_175288.2,611-629).
gttgaagcgataaacacat

SEQ ID NO: 787669 - DNA, 19 bp, Mus musculus
  siRNA target sequence for C230066G23Rik (NM_175288.2,617-635).
gcgataaacacattttgct

SEQ ID NO: 787670 - DNA, 19 bp, Mus musculus
  siRNA target sequence for C230066G23Rik (NM_175288.2,618-636).
cgataaacacattttgcta

SEQ ID NO: 787671 - DNA, 19 bp, Mus musculus
  siRNA target sequence for C230066G23Rik (NM_175288.2,840-858).
ctaaactagaggggaaaat

SEQ ID NO: 787672 - DNA, 19 bp, Mus musculus
  siRNA target sequence for D930048N14Rik (NM_175289.2,276-294).
cggtttgtggagtctgttt

SEQ ID NO: 787673 - DNA, 19 bp, Mus musculus
  siRNA target sequence for D930048N14Rik (NM_175289.2,344-362).
ggcttgtacagcaaagact

SEQ ID NO: 787674 - DNA, 19 bp, Mus musculus
  siRNA target sequence for D930048N14Rik (NM_175289.2,361-379).
cttcgcccagcgaaccatt

SEQ ID NO: 787675 - DNA, 19 bp, Mus musculus
  siRNA target sequence for D930048N14Rik (NM_175289.2,388-406).
cccatctctaatgttcttt

SEQ ID NO: 787676 - DNA, 19 bp, Mus musculus
  siRNA target sequence for D930048N14Rik (NM_175289.2,518-536).
caggctcgcctcacaacat

SEQ ID NO: 787677 - DNA, 19 bp, Mus musculus
  siRNA target sequence for D930048N14Rik (NM_175289.2,621-639).
gacacgcatacgtgagtat

SEQ ID NO: 787678 - DNA, 19 bp, Mus musculus
  siRNA target sequence for D930048N14Rik (NM_175289.2,623-641).
cacgcatacgtgagtatct

SEQ ID NO: 787679 - DNA, 19 bp, Mus musculus
  siRNA target sequence for D930048N14Rik (NM_175289.2,626-644).
gcatacgtgagtatcttgt

SEQ ID NO: 787680 - DNA, 19 bp, Mus musculus
  siRNA target sequence for D930048N14Rik (NM_175289.2,655-673).
gacagaactatggatttga

SEQ ID NO: 787681 - DNA, 19 bp, Mus musculus
  siRNA target sequence for C330026N02Rik (NM_175290.2,357-375).
gagaccagagttatatgga

SEQ ID NO: 787682 - DNA, 19 bp, Mus musculus
  siRNA target sequence for C330026N02Rik (NM_175290.2,380-398).
ctacttatctgttggaata

SEQ ID NO: 787683 - DNA, 19 bp, Mus musculus
  siRNA target sequence for C330026N02Rik (NM_175290.2,383-401).
cttatctgttggaataata

SEQ ID NO: 787684 - DNA, 19 bp, Mus musculus
  siRNA target sequence for C330026N02Rik (NM_175290.2,469-487).
gccagccattcgagtttta

SEQ ID NO: 787685 - DNA, 19 bp, Mus musculus
  siRNA target sequence for C330026N02Rik (NM_175290.2,471-489).
cagccattcgagttttata

SEQ ID NO: 787686 - DNA, 19 bp, Mus musculus
  siRNA target sequence for C330026N02Rik (NM_175290.2,474-492).
ccattcgagttttatatga

SEQ ID NO: 787687 - DNA, 19 bp, Mus musculus
  siRNA target sequence for C330026N02Rik (NM_175290.2,475-493).
cattcgagttttatatgaa

SEQ ID NO: 787688 - DNA, 19 bp, Mus musculus
  siRNA target sequence for C330026N02Rik (NM_175290.2,532-550).
ggcaaataatgtgtctttt

SEQ ID NO: 787689 - DNA, 19 bp, Mus musculus
  siRNA target sequence for C330026N02Rik (NM_175290.2,930-948).
ctctgagccatctagacat

SEQ ID NO: 787690 - DNA, 19 bp, Mus musculus
  siRNA target sequence for C330026N02Rik (NM_175290.2,1102-1120).
cctgaagtacctacatgtt

SEQ ID NO: 787691 - DNA, 19 bp, Mus musculus
  siRNA target sequence for C330026N02Rik (NM_175290.2,1118-1136).
gtttcatacaataagctaa

SEQ ID NO: 787692 - DNA, 19 bp, Mus musculus
  siRNA target sequence for C330026N02Rik (NM_175290.2,1185-1203).
gccacttaaaggatctaca

SEQ ID NO: 787693 - DNA, 19 bp, Mus musculus
  siRNA target sequence for C330026N02Rik (NM_175290.2,1202-1220).
cagttggaagcctgtgaaa

SEQ ID NO: 787694 - DNA, 19 bp, Mus musculus
  siRNA target sequence for C330026N02Rik (NM_175290.2,1233-1251).
gtaatgaggagctttgtta

SEQ ID NO: 787695 - DNA, 19 bp, Mus musculus
  siRNA target sequence for C330026N02Rik (NM_175290.2,1306-1324).
cgaagtcagtagaatggtt

SEQ ID NO: 787696 - DNA, 19 bp, Mus musculus
  siRNA target sequence for AA408296 (NM_175292.1,827-845).
ccagaagacggaaacattt

SEQ ID NO: 787697 - DNA, 19 bp, Mus musculus
  siRNA target sequence for D630023F18Rik (NM_175293.2,161-179).
cagacttcgggaaaatgaa

SEQ ID NO: 787698 - DNA, 19 bp, Mus musculus
  siRNA target sequence for D630023F18Rik (NM_175293.2,163-181).
gacttcgggaaaatgaatt

SEQ ID NO: 787699 - DNA, 19 bp, Mus musculus
  siRNA target sequence for D630023F18Rik (NM_175293.2,238-256).
cgctggcccactatgactt

SEQ ID NO: 787700 - DNA, 19 bp, Mus musculus
  siRNA target sequence for D630023F18Rik (NM_175293.2,282-300).
ctagattgctcagaaaact

SEQ ID NO: 787701 - DNA, 19 bp, Mus musculus
  siRNA target sequence for D630023F18Rik (NM_175293.2,342-360).
gtcagacctgcgtatccaa

SEQ ID NO: 787702 - DNA, 19 bp, Mus musculus
  siRNA target sequence for D630023F18Rik (NM_175293.2,352-370).
cgtatccaaaccgaaaaga

SEQ ID NO: 787703 - DNA, 19 bp, Mus musculus
  siRNA target sequence for D630023F18Rik (NM_175293.2,371-389).
gcgagaagcaatgatctta

SEQ ID NO: 787704 - DNA, 19 bp, Mus musculus
  siRNA target sequence for D630023F18Rik (NM_175293.2,399-417).
gctggagtcttaatgaaca

SEQ ID NO: 787705 - DNA, 19 bp, Mus musculus
  siRNA target sequence for D630023F18Rik (NM_175293.2,402-420).
ggagtcttaatgaacagta

SEQ ID NO: 787706 - DNA, 19 bp, Mus musculus
  siRNA target sequence for D630023F18Rik (NM_175293.2,403-421).
gagtcttaatgaacagtat

SEQ ID NO: 787707 - DNA, 19 bp, Mus musculus
  siRNA target sequence for D630023F18Rik (NM_175293.2,407-425).
cttaatgaacagtattcca

SEQ ID NO: 787708 - DNA, 19 bp, Mus musculus
  siRNA target sequence for D630023F18Rik (NM_175293.2,413-431).
gaacagtattccaattgaa

SEQ ID NO: 787709 - DNA, 19 bp, Mus musculus
  siRNA target sequence for D630023F18Rik (NM_175293.2,584-602).
gagaagaggcgcaacgaat

SEQ ID NO: 787710 - DNA, 19 bp, Mus musculus
  siRNA target sequence for D630023F18Rik (NM_175293.2,586-604).
gaagaggcgcaacgaataa

SEQ ID NO: 787711 - DNA, 19 bp, Mus musculus
  siRNA target sequence for D630023F18Rik (NM_175293.2,589-607).
gaggcgcaacgaataaaaa

SEQ ID NO: 787712 - DNA, 19 bp, Mus musculus
  siRNA target sequence for D630023F18Rik (NM_175293.2,591-609).
ggcgcaacgaataaaaata

SEQ ID NO: 787713 - DNA, 19 bp, Mus musculus
  siRNA target sequence for D630023F18Rik (NM_175293.2,725-743).
cttccactcctcaactgtt

SEQ ID NO: 787714 - DNA, 19 bp, Mus musculus
  siRNA target sequence for 4933405K18Rik (NM_175296.3,96-114).
cagccgcaatgcctactat

SEQ ID NO: 787715 - DNA, 19 bp, Mus musculus
  siRNA target sequence for 4933405K18Rik (NM_175296.3,98-116).
gccgcaatgcctactattt

SEQ ID NO: 787716 - DNA, 19 bp, Mus musculus
  siRNA target sequence for 4933405K18Rik (NM_175296.3,100-118).
cgcaatgcctactatttct

SEQ ID NO: 787717 - DNA, 19 bp, Mus musculus
  siRNA target sequence for 4933405K18Rik (NM_175296.3,356-374).
gtatttctccccctgatat

SEQ ID NO: 787718 - DNA, 19 bp, Mus musculus
  siRNA target sequence for 4933405K18Rik (NM_175296.3,362-380).
ctccccctgatatgtcaaa

SEQ ID NO: 787719 - DNA, 19 bp, Mus musculus
  siRNA target sequence for 4933405K18Rik (NM_175296.3,364-382).
ccccctgatatgtcaaatt

SEQ ID NO: 787720 - DNA, 19 bp, Mus musculus
  siRNA target sequence for 4933405K18Rik (NM_175296.3,404-422).
ctctccttggaggcatttt

SEQ ID NO: 787721 - DNA, 19 bp, Mus musculus
  siRNA target sequence for 4933405K18Rik (NM_175296.3,524-542).
gtattatggcagatttcca

SEQ ID NO: 787722 - DNA, 19 bp, Mus musculus
  siRNA target sequence for 4933405K18Rik (NM_175296.3,531-549).
ggcagatttccacagtttt

SEQ ID NO: 787723 - DNA, 19 bp, Mus musculus
  siRNA target sequence for 4933405K18Rik (NM_175296.3,552-570).
ccatccaggtgaaattcca

SEQ ID NO: 787724 - DNA, 19 bp, Mus musculus
  siRNA target sequence for 4933405K18Rik (NM_175296.3,571-589).
cgaggatttcgattccatt

SEQ ID NO: 787725 - DNA, 19 bp, Mus musculus
  siRNA target sequence for 4933405K18Rik (NM_175296.3,591-609).
ccaggctgcaagtgattct

SEQ ID NO: 787726 - DNA, 19 bp, Mus musculus
  siRNA target sequence for 4933405K18Rik (NM_175296.3,594-612).
ggctgcaagtgattctagt

SEQ ID NO: 787727 - DNA, 19 bp, Mus musculus
  siRNA target sequence for 4933405K18Rik (NM_175296.3,618-636).
gattcctatttcaaacttt

SEQ ID NO: 787728 - DNA, 19 bp, Mus musculus
  siRNA target sequence for 4933405K18Rik (NM_175296.3,622-640).
cctatttcaaactttgaat

SEQ ID NO: 787729 - DNA, 19 bp, Mus musculus
  siRNA target sequence for 4933405K18Rik (NM_175296.3,651-669).
ccaagcaactgtgttacaa

SEQ ID NO: 787730 - DNA, 19 bp, Mus musculus
  siRNA target sequence for 4933405K18Rik (NM_175296.3,652-670).
caagcaactgtgttacaaa

SEQ ID NO: 787731 - DNA, 19 bp, Mus musculus
  siRNA target sequence for 4933405K18Rik (NM_175296.3,700-718).
gggaactggccacctattt

SEQ ID NO: 787732 - DNA, 19 bp, Mus musculus
  siRNA target sequence for 4933405K18Rik (NM_175296.3,701-719).
ggaactggccacctattta

SEQ ID NO: 787733 - DNA, 19 bp, Mus musculus
  siRNA target sequence for 4933405K18Rik (NM_175296.3,768-786).
ggagcgggcatcagaaata

SEQ ID NO: 787734 - DNA, 19 bp, Mus musculus
  siRNA target sequence for 4933405K18Rik (NM_175296.3,779-797).
cagaaataaggcaagatct

SEQ ID NO: 787735 - DNA, 19 bp, Mus musculus
  siRNA target sequence for 4933405K18Rik (NM_175296.3,788-806).
ggcaagatctagaacttct

SEQ ID NO: 787736 - DNA, 19 bp, Mus musculus
  siRNA target sequence for 4933405K18Rik (NM_175296.3,829-847).
gggatctaccagcaaaaat

SEQ ID NO: 787737 - DNA, 19 bp, Mus musculus
  siRNA target sequence for 4933405K18Rik (NM_175296.3,830-848).
ggatctaccagcaaaaatt

SEQ ID NO: 787738 - DNA, 19 bp, Mus musculus
  siRNA target sequence for 4933405K18Rik (NM_175296.3,892-910).
gtggccatgtgggactatt

SEQ ID NO: 787739 - DNA, 19 bp, Mus musculus
  siRNA target sequence for 4933405K18Rik (NM_175296.3,894-912).
ggccatgtgggactattct

SEQ ID NO: 787740 - DNA, 19 bp, Mus musculus
  siRNA target sequence for 4933405K18Rik (NM_175296.3,895-913).
gccatgtgggactattcta

SEQ ID NO: 787741 - DNA, 19 bp, Mus musculus
  siRNA target sequence for 4933405K18Rik (NM_175296.3,923-941).
ggtgcaaatggcatgaaga

SEQ ID NO: 787742 - DNA, 19 bp, Mus musculus
  siRNA target sequence for 4933405K18Rik (NM_175296.3,932-950).
ggcatgaagaaaatgatat

SEQ ID NO: 787743 - DNA, 19 bp, Mus musculus
  siRNA target sequence for 4933405K18Rik (NM_175296.3,984-1002).
cgcgtactgcatcagtaat

SEQ ID NO: 787744 - DNA, 19 bp, Mus musculus
  siRNA target sequence for 4933405K18Rik (NM_175296.3,985-1003).
gcgtactgcatcagtaatt

SEQ ID NO: 787745 - DNA, 19 bp, Mus musculus
  siRNA target sequence for 4933405K18Rik (NM_175296.3,1085-1103).
ccaaaatggttgtattgga

SEQ ID NO: 787746 - DNA, 19 bp, Mus musculus
  siRNA target sequence for 4933405K18Rik (NM_175296.3,1108-1126).
gggcggtaccagaagctaa

SEQ ID NO: 787747 - DNA, 19 bp, Mus musculus
  siRNA target sequence for 4933405K18Rik (NM_175296.3,1148-1166).
gtcatttcaactcttacaa

SEQ ID NO: 787748 - DNA, 19 bp, Mus musculus
  siRNA target sequence for 4933405K18Rik (NM_175296.3,1240-1258).
gttcgcggaagaggaatta

SEQ ID NO: 787749 - DNA, 19 bp, Mus musculus
  siRNA target sequence for 4933405K18Rik (NM_175296.3,1253-1271).
gaattacccgcttactaga

SEQ ID NO: 787750 - DNA, 19 bp, Mus musculus
  siRNA target sequence for 4933405K18Rik (NM_175296.3,1280-1298).
caaactcctccaacaacat

SEQ ID NO: 787751 - DNA, 19 bp, Mus musculus
  siRNA target sequence for 4933405K18Rik (NM_175296.3,1289-1307).
ccaacaacatccatagatt

SEQ ID NO: 787752 - DNA, 19 bp, Mus musculus
  siRNA target sequence for 4933405K18Rik (NM_175296.3,1344-1362).
ccaaaaagatgggtacaaa

SEQ ID NO: 787753 - DNA, 19 bp, Mus musculus
  siRNA target sequence for 5730427M17Rik (NM_175297.2,1350-1368).
ggtggggtggtgattgtga

SEQ ID NO: 787754 - DNA, 19 bp, Mus musculus
  siRNA target sequence for 5730427M17Rik (NM_175297.2,1389-1407).
caagcaaacacagattcaa

SEQ ID NO: 787755 - DNA, 19 bp, Mus musculus
  siRNA target sequence for 5730427M17Rik (NM_175297.2,1568-1586).
cttgtcctttataaggaat

SEQ ID NO: 787756 - DNA, 19 bp, Mus musculus
  siRNA target sequence for 9230107K09Rik (NM_175300.2,123-141).
cttggttgcctggaatact

SEQ ID NO: 787757 - DNA, 19 bp, Mus musculus
  siRNA target sequence for 9230107K09Rik (NM_175300.2,344-362).
ccatcgctctgcgagaaaa

SEQ ID NO: 787758 - DNA, 19 bp, Mus musculus
  siRNA target sequence for 9230107K09Rik (NM_175300.2,348-366).
cgctctgcgagaaaactct

SEQ ID NO: 787759 - DNA, 19 bp, Mus musculus
  siRNA target sequence for 9230107K09Rik (NM_175300.2,512-530).
gggagaaagttcacactat

SEQ ID NO: 787760 - DNA, 19 bp, Mus musculus
  siRNA target sequence for 9230107K09Rik (NM_175300.2,534-552).
gcggggagtcctgtttttt

SEQ ID NO: 787761 - DNA, 19 bp, Mus musculus
  siRNA target sequence for 9230107K09Rik (NM_175300.2,538-556).
ggagtcctgtttttttcca

SEQ ID NO: 787762 - DNA, 19 bp, Mus musculus
  siRNA target sequence for 9230107K09Rik (NM_175300.2,589-607).
ctctatggtcgtttcttga

SEQ ID NO: 787763 - DNA, 19 bp, Mus musculus
  siRNA target sequence for 9230107K09Rik (NM_175300.2,598-616).
cgtttcttgagagtctata

SEQ ID NO: 787764 - DNA, 19 bp, Mus musculus
  siRNA target sequence for 9230107K09Rik (NM_175300.2,644-662).
gcacagacccggaactaga

SEQ ID NO: 787765 - DNA, 19 bp, Mus musculus
  siRNA target sequence for 9230107K09Rik (NM_175300.2,692-710).
gcaggtactaccgactttt

SEQ ID NO: 787766 - DNA, 19 bp, Mus musculus
  siRNA target sequence for 9230107K09Rik (NM_175300.2,695-713).
ggtactaccgacttttgca

SEQ ID NO: 787767 - DNA, 19 bp, Mus musculus
  siRNA target sequence for 9230107K09Rik (NM_175300.2,888-906).
ccgctgccgaggagagtat

SEQ ID NO: 787768 - DNA, 19 bp, Mus musculus
  siRNA target sequence for 9230107K09Rik (NM_175300.2,901-919).
gagtatgagcgctcttttt

SEQ ID NO: 787769 - DNA, 19 bp, Mus musculus
  siRNA target sequence for 9230107K09Rik (NM_175300.2,912-930).
ctcttttttgcgtgagttt

SEQ ID NO: 787770 - DNA, 19 bp, Mus musculus
  siRNA target sequence for 9230107K09Rik (NM_175300.2,914-932).
cttttttgcgtgagtttca

SEQ ID NO: 787771 - DNA, 19 bp, Mus musculus
  siRNA target sequence for 9230107K09Rik (NM_175300.2,1040-1058).
gccacgtacagagattctt

SEQ ID NO: 787772 - DNA, 19 bp, Mus musculus
  siRNA target sequence for 9230107K09Rik (NM_175300.2,1052-1070).
gattcttctaccgtatcta

SEQ ID NO: 787773 - DNA, 19 bp, Mus musculus
  siRNA target sequence for 9230107K09Rik (NM_175300.2,1098-1116).
cagcatcatccgagacttt

SEQ ID NO: 787774 - DNA, 19 bp, Mus musculus
  siRNA target sequence for 9230107K09Rik (NM_175300.2,1225-1243).
cacccaggtgtcaacacat

SEQ ID NO: 787775 - DNA, 19 bp, Mus musculus
  siRNA target sequence for 9230107K09Rik (NM_175300.2,1639-1657).
cgccttctccaccaattca

SEQ ID NO: 787776 - DNA, 19 bp, Mus musculus
  siRNA target sequence for 9230107K09Rik (NM_175300.2,1682-1700).
gtaatgtggagctgttgaa

SEQ ID NO: 787777 - DNA, 19 bp, Mus musculus
  siRNA target sequence for 9230107K09Rik (NM_175300.2,1834-1852).
gtctatgctgtcatattgt

SEQ ID NO: 787778 - DNA, 19 bp, Mus musculus
  siRNA target sequence for 9230107K09Rik (NM_175300.2,1910-1928).
gggcagccctagacgttta

SEQ ID NO: 787779 - DNA, 19 bp, Mus musculus
  siRNA target sequence for 9230107K09Rik (NM_175300.2,1912-1930).
gcagccctagacgtttact

SEQ ID NO: 787780 - DNA, 19 bp, Mus musculus
  siRNA target sequence for 9230107K09Rik (NM_175300.2,1931-1949).
gcaagaagtatgagaaact

SEQ ID NO: 787781 - DNA, 19 bp, Mus musculus
  siRNA target sequence for 9230107K09Rik (NM_175300.2,1953-1971).
ggctatgcggacacttagt

SEQ ID NO: 787782 - DNA, 19 bp, Mus musculus
  siRNA target sequence for 9230107K09Rik (NM_175300.2,1954-1972).
gctatgcggacacttagtt

SEQ ID NO: 787783 - DNA, 19 bp, Mus musculus
  siRNA target sequence for 9230107K09Rik (NM_175300.2,1982-2000).
ccctgggcctggtgacaat

SEQ ID NO: 787784 - DNA, 19 bp, Mus musculus
  siRNA target sequence for 9230107K09Rik (NM_175300.2,2225-2243).
ctcaggatagggacaacat

SEQ ID NO: 787785 - DNA, 19 bp, Mus musculus
  siRNA target sequence for 9230107K09Rik (NM_175300.2,2394-2412).
ccggatgtttgtaatgact

SEQ ID NO: 787786 - DNA, 19 bp, Mus musculus
  siRNA target sequence for 9230107K09Rik (NM_175300.2,2478-2496).
ccagcagctcatctattct

SEQ ID NO: 787787 - DNA, 19 bp, Mus musculus
  siRNA target sequence for 9230107K09Rik (NM_175300.2,2505-2523).
ctaccgcctgcctaagaat

SEQ ID NO: 787788 - DNA, 19 bp, Mus musculus
  siRNA target sequence for 9130022A01Rik (NM_175305.2,122-140).
gtcacacgcttcatgtttt

SEQ ID NO: 787789 - DNA, 19 bp, Mus musculus
  siRNA target sequence for 9130022A01Rik (NM_175305.2,238-256).
gggtatcagtaccaatgtt

SEQ ID NO: 787790 - DNA, 19 bp, Mus musculus
  siRNA target sequence for 9130022A01Rik (NM_175305.2,239-257).
ggtatcagtaccaatgtta

SEQ ID NO: 787791 - DNA, 19 bp, Mus musculus
  siRNA target sequence for 9130022A01Rik (NM_175305.2,250-268).
caatgttaccattcttgat

SEQ ID NO: 787792 - DNA, 19 bp, Mus musculus
  siRNA target sequence for 9130022A01Rik (NM_175305.2,258-276).
ccattcttgatctcagtta

SEQ ID NO: 787793 - DNA, 19 bp, Mus musculus
  siRNA target sequence for 9130022A01Rik (NM_175305.2,269-287).
ctcagttataaccgaatta

SEQ ID NO: 787794 - DNA, 19 bp, Mus musculus
  siRNA target sequence for 9130022A01Rik (NM_175305.2,271-289).
cagttataaccgaattact

SEQ ID NO: 787795 - DNA, 19 bp, Mus musculus
  siRNA target sequence for 9130022A01Rik (NM_175305.2,273-291).
gttataaccgaattactct

SEQ ID NO: 787796 - DNA, 19 bp, Mus musculus
  siRNA target sequence for 9130022A01Rik (NM_175305.2,311-329).
gtgctgcagatgtactctt

SEQ ID NO: 787797 - DNA, 19 bp, Mus musculus
  siRNA target sequence for 9130022A01Rik (NM_175305.2,313-331).
gctgcagatgtactcttta

SEQ ID NO: 787798 - DNA, 19 bp, Mus musculus
  siRNA target sequence for 9130022A01Rik (NM_175305.2,384-402).
gtttcaggaatcttctcaa

SEQ ID NO: 787799 - DNA, 19 bp, Mus musculus
  siRNA target sequence for 9130022A01Rik (NM_175305.2,421-439).
ctgtggaaattcaatcagt

SEQ ID NO: 787800 - DNA, 19 bp, Mus musculus
  siRNA target sequence for 9130022A01Rik (NM_175305.2,512-530).
caactgaatcccgatacat

SEQ ID NO: 787801 - DNA, 19 bp, Mus musculus
  siRNA target sequence for 9130022A01Rik (NM_175305.2,533-551).
gtgcctctaaataacctaa

SEQ ID NO: 787802 - DNA, 19 bp, Mus musculus
  siRNA target sequence for 9130022A01Rik (NM_175305.2,676-694).
ctggctgaacacgtctaat

SEQ ID NO: 787803 - DNA, 19 bp, Mus musculus
  siRNA target sequence for 9130022A01Rik (NM_175305.2,678-696).
ggctgaacacgtctaatgt

SEQ ID NO: 787804 - DNA, 19 bp, Mus musculus
  siRNA target sequence for 9130022A01Rik (NM_175305.2,680-698).
ctgaacacgtctaatgtga

SEQ ID NO: 787805 - DNA, 19 bp, Mus musculus
  siRNA target sequence for 9130022A01Rik (NM_175305.2,685-703).
cacgtctaatgtgacatta

SEQ ID NO: 787806 - DNA, 19 bp, Mus musculus
  siRNA target sequence for 9130022A01Rik (NM_175305.2,687-705).
cgtctaatgtgacattaga

SEQ ID NO: 787807 - DNA, 19 bp, Mus musculus
  siRNA target sequence for 9130022A01Rik (NM_175305.2,688-706).
gtctaatgtgacattagaa

SEQ ID NO: 787808 - DNA, 19 bp, Mus musculus
  siRNA target sequence for 9130022A01Rik (NM_175305.2,767-785).
gcgcccttcacaactgaat

SEQ ID NO: 787809 - DNA, 19 bp, Mus musculus
  siRNA target sequence for 9130022A01Rik (NM_175305.2,780-798).
ctgaatgccactctacatt

SEQ ID NO: 787810 - DNA, 19 bp, Mus musculus
  siRNA target sequence for 9130022A01Rik (NM_175305.2,782-800).
gaatgccactctacattta

SEQ ID NO: 787811 - DNA, 19 bp, Mus musculus
  siRNA target sequence for 9130022A01Rik (NM_175305.2,820-838).
ctttcagtccactaggaat

SEQ ID NO: 787812 - DNA, 19 bp, Mus musculus
  siRNA target sequence for 9130022A01Rik (NM_175305.2,853-871).
ctcttcacacaacttaaca

SEQ ID NO: 787813 - DNA, 19 bp, Mus musculus
  siRNA target sequence for 9130022A01Rik (NM_175305.2,887-905).
gagcctcttgggaaaagct

SEQ ID NO: 787814 - DNA, 19 bp, Mus musculus
  siRNA target sequence for 9130022A01Rik (NM_175305.2,931-949).
cactgtactgctaacttca

SEQ ID NO: 787815 - DNA, 19 bp, Mus musculus
  siRNA target sequence for 9130022A01Rik (NM_175305.2,975-993).
gcccagtatggtacaatat

SEQ ID NO: 787816 - DNA, 19 bp, Mus musculus
  siRNA target sequence for 9130022A01Rik (NM_175305.2,976-994).
cccagtatggtacaatatt

SEQ ID NO: 787817 - DNA, 19 bp, Mus musculus
  siRNA target sequence for 9130022A01Rik (NM_175305.2,1033-1051).
ggcagaaacctatgaaaat

SEQ ID NO: 787818 - DNA, 19 bp, Mus musculus
  siRNA target sequence for 9130022A01Rik (NM_175305.2,1042-1060).
ctatgaaaatggtcttaca

SEQ ID NO: 787819 - DNA, 19 bp, Mus musculus
  siRNA target sequence for 9130022A01Rik (NM_175305.2,1080-1098).
cacaaataacagatacgaa

SEQ ID NO: 787820 - DNA, 19 bp, Mus musculus
  siRNA target sequence for 9130022A01Rik (NM_175305.2,1137-1155).
catttgtggtagatgatga

SEQ ID NO: 787821 - DNA, 19 bp, Mus musculus
  siRNA target sequence for C330013F19Rik (NM_175306.2,219-237).
cgttaggcaagatcttcaa

SEQ ID NO: 787822 - DNA, 19 bp, Mus musculus
  siRNA target sequence for C330013F19Rik (NM_175306.2,264-282).
gcagtgataagttcaaaga

SEQ ID NO: 787823 - DNA, 19 bp, Mus musculus
  siRNA target sequence for C330013F19Rik (NM_175306.2,290-308).
gaagttttagagcgaaaaa

SEQ ID NO: 787824 - DNA, 19 bp, Mus musculus
  siRNA target sequence for C330013F19Rik (NM_175306.2,293-311).
gttttagagcgaaaaatat

SEQ ID NO: 787825 - DNA, 19 bp, Mus musculus
  siRNA target sequence for C330013F19Rik (NM_175306.2,394-412).
gctgagccatgctgcatta

SEQ ID NO: 787826 - DNA, 19 bp, Mus musculus
  siRNA target sequence for C330013F19Rik (NM_175306.2,395-413).
ctgagccatgctgcattaa

SEQ ID NO: 787827 - DNA, 19 bp, Mus musculus
  siRNA target sequence for C330013F19Rik (NM_175306.2,399-417).
gccatgctgcattaaagaa

SEQ ID NO: 787828 - DNA, 19 bp, Mus musculus
  siRNA target sequence for C330013F19Rik (NM_175306.2,619-637).
cttgtcctcttcttgtgaa

SEQ ID NO: 787829 - DNA, 19 bp, Mus musculus
  siRNA target sequence for C330013F19Rik (NM_175306.2,899-917).
cccatcattgctgaactat

SEQ ID NO: 787830 - DNA, 19 bp, Mus musculus
  siRNA target sequence for C330013F19Rik (NM_175306.2,976-994).
gagaggcattccatcaact

SEQ ID NO: 787831 - DNA, 19 bp, Mus musculus
  siRNA target sequence for C330013F19Rik (NM_175306.2,982-1000).
cattccatcaacttcgata

SEQ ID NO: 787832 - DNA, 19 bp, Mus musculus
  siRNA target sequence for C330013F19Rik (NM_175306.2,1013-1031).
cctgctgcttcgttcacaa

SEQ ID NO: 787833 - DNA, 19 bp, Mus musculus
  siRNA target sequence for C330013F19Rik (NM_175306.2,1016-1034).
gctgcttcgttcacaacta

SEQ ID NO: 787834 - DNA, 19 bp, Mus musculus
  siRNA target sequence for C330013F19Rik (NM_175306.2,1027-1045).
cacaactaagacagcaaat

SEQ ID NO: 787835 - DNA, 19 bp, Mus musculus
  siRNA target sequence for C330013F19Rik (NM_175306.2,1165-1183).
gcctgctaagacttttcaa

SEQ ID NO: 787836 - DNA, 19 bp, Mus musculus
  siRNA target sequence for C330013F19Rik (NM_175306.2,1217-1235).
gatctattccaggacattt

SEQ ID NO: 787837 - DNA, 19 bp, Mus musculus
  siRNA target sequence for C330013F19Rik (NM_175306.2,1288-1306).
ctttggggagtcccatata

SEQ ID NO: 787838 - DNA, 19 bp, Mus musculus
  siRNA target sequence for C330013F19Rik (NM_175306.2,1320-1338).
ccccactcccactgcatat

SEQ ID NO: 787839 - DNA, 19 bp, Mus musculus
  siRNA target sequence for C330013F19Rik (NM_175306.2,1329-1347).
cactgcatatccgaattca

SEQ ID NO: 787840 - DNA, 19 bp, Mus musculus
  siRNA target sequence for C330013F19Rik (NM_175306.2,1395-1413).
ctcacagagcccattcact

SEQ ID NO: 787841 - DNA, 19 bp, Mus musculus
  siRNA target sequence for C330013F19Rik (NM_175306.2,1401-1419).
gagcccattcactgctttt

SEQ ID NO: 787842 - DNA, 19 bp, Mus musculus
  siRNA target sequence for C330013F19Rik (NM_175306.2,1479-1497).
ccatcacgattgagatgtt

SEQ ID NO: 787843 - DNA, 19 bp, Mus musculus
  siRNA target sequence for C330013F19Rik (NM_175306.2,1495-1513).
gttgaaagttccagatgat

SEQ ID NO: 787844 - DNA, 19 bp, Mus musculus
  siRNA target sequence for C330013F19Rik (NM_175306.2,1525-1543).
gcagacctgcccgtttgtt

SEQ ID NO: 787845 - DNA, 19 bp, Mus musculus
  siRNA target sequence for C330013F19Rik (NM_175306.2,1528-1546).
gacctgcccgtttgttgaa

SEQ ID NO: 787846 - DNA, 19 bp, Mus musculus
  siRNA target sequence for C330013F19Rik (NM_175306.2,1530-1548).
cctgcccgtttgttgaaga

SEQ ID NO: 787847 - DNA, 19 bp, Mus musculus
  siRNA target sequence for C330013F19Rik (NM_175306.2,1623-1641).
cagagggtcccattaagta

SEQ ID NO: 787848 - DNA, 19 bp, Mus musculus
  siRNA target sequence for C330013F19Rik (NM_175306.2,1773-1791).
cttggcctcgtaaaagcaa

SEQ ID NO: 787849 - DNA, 19 bp, Mus musculus
  siRNA target sequence for C330013F19Rik (NM_175306.2,2051-2069).
cggcgagcagacaaaccat

SEQ ID NO: 787850 - DNA, 19 bp, Mus musculus
  siRNA target sequence for C330013F19Rik (NM_175306.2,2133-2151).
cggagatggaggttcatgt

SEQ ID NO: 787851 - DNA, 19 bp, Mus musculus
  siRNA target sequence for 4732473B16Rik (NM_175307.2,754-772).
gtaagaacgtggaactcaa

SEQ ID NO: 787852 - DNA, 19 bp, Mus musculus
  siRNA target sequence for 4732473B16Rik (NM_175307.2,786-804).
gtgagacgccagttcgaat

SEQ ID NO: 787853 - DNA, 19 bp, Mus musculus
  siRNA target sequence for 4732473B16Rik (NM_175307.2,813-831).
gactccttccaaatcatct

SEQ ID NO: 787854 - DNA, 19 bp, Mus musculus
  siRNA target sequence for 4732473B16Rik (NM_175307.2,1062-1080).
gccctccagcgatacatgt

SEQ ID NO: 787855 - DNA, 19 bp, Mus musculus
  siRNA target sequence for 4732473B16Rik (NM_175307.2,1356-1374).
gtggtcccagccactgtta

SEQ ID NO: 787856 - DNA, 19 bp, Mus musculus
  siRNA target sequence for 4732473B16Rik (NM_175307.2,1359-1377).
gtcccagccactgttaatt

SEQ ID NO: 787857 - DNA, 19 bp, Mus musculus
  siRNA target sequence for 4732473B16Rik (NM_175307.2,1410-1428).
cgagctcactcctatccta

SEQ ID NO: 787858 - DNA, 19 bp, Mus musculus
  siRNA target sequence for D130076I06Rik (NM_175308.2,279-297).
cgctttgagctatataaga

SEQ ID NO: 787859 - DNA, 19 bp, Mus musculus
  siRNA target sequence for D130076I06Rik (NM_175308.2,407-425).
ccgtatcaacctcatctat

SEQ ID NO: 787860 - DNA, 19 bp, Mus musculus
  siRNA target sequence for D130076I06Rik (NM_175308.2,571-589).
ggatcgagggtctcatcaa

SEQ ID NO: 787861 - DNA, 19 bp, Mus musculus
  siRNA target sequence for D130076I06Rik (NM_175308.2,572-590).
gatcgagggtctcatcaat

SEQ ID NO: 787862 - DNA, 19 bp, Mus musculus
  siRNA target sequence for D130076I06Rik (NM_175308.2,575-593).
cgagggtctcatcaatgat

SEQ ID NO: 787863 - DNA, 19 bp, Mus musculus
  siRNA target sequence for D130076I06Rik (NM_175308.2,668-686).
ccgactcttccgagtcttt

SEQ ID NO: 787864 - DNA, 19 bp, Mus musculus
  siRNA target sequence for D130076I06Rik (NM_175308.2,670-688).
gactcttccgagtctttgt

SEQ ID NO: 787865 - DNA, 19 bp, Mus musculus
  siRNA target sequence for D130076I06Rik (NM_175308.2,754-772).
gctataagcacttttacta

SEQ ID NO: 787866 - DNA, 19 bp, Mus musculus
  siRNA target sequence for Upk3b (NM_175309.3,402-420).
gcctacgtgccgcagataa

SEQ ID NO: 787867 - DNA, 19 bp, Mus musculus
  siRNA target sequence for Upk3b (NM_175309.3,404-422).
ctacgtgccgcagataaca

SEQ ID NO: 787868 - DNA, 19 bp, Mus musculus
  siRNA target sequence for Upk3b (NM_175309.3,446-464).
cacagccactacattctct

SEQ ID NO: 787869 - DNA, 19 bp, Mus musculus
  siRNA target sequence for Upk3b (NM_175309.3,473-491).
gcctcggtgcgtctttgat

SEQ ID NO: 787870 - DNA, 19 bp, Mus musculus
  siRNA target sequence for Upk3b (NM_175309.3,609-627).
gacggccactatatgacat

SEQ ID NO: 787871 - DNA, 19 bp, Mus musculus
  siRNA target sequence for Upk3b (NM_175309.3,611-629).
cggccactatatgacatta

SEQ ID NO: 787872 - DNA, 19 bp, Mus musculus
  siRNA target sequence for Upk3b (NM_175309.3,693-711).
cttcgggtgggcaatgatt

SEQ ID NO: 787873 - DNA, 19 bp, Mus musculus
  siRNA target sequence for Upk3b (NM_175309.3,773-791).
gaagttccttgtaatggat

SEQ ID NO: 787874 - DNA, 19 bp, Mus musculus
  siRNA target sequence for Upk3b (NM_175309.3,821-839).
gtggtccaaccccatttat

SEQ ID NO: 787875 - DNA, 19 bp, Mus musculus
  siRNA target sequence for Upk3b (NM_175309.3,885-903).
cgacggagcggctgtatga

SEQ ID NO: 787876 - DNA, 19 bp, Mus musculus
  siRNA target sequence for Upk3b (NM_175309.3,886-904).
gacggagcggctgtatgat

SEQ ID NO: 787877 - DNA, 19 bp, Mus musculus
  siRNA target sequence for Upk3b (NM_175309.3,894-912).
ggctgtatgatcgtcataa

SEQ ID NO: 787878 - DNA, 19 bp, Mus musculus
  siRNA target sequence for Upk3b (NM_175309.3,896-914).
ctgtatgatcgtcataact

SEQ ID NO: 787879 - DNA, 19 bp, Mus musculus
  siRNA target sequence for Upk3b (NM_175309.3,1028-1046).
ctccttcatgggaaaacgt

SEQ ID NO: 787880 - DNA, 19 bp, Mus musculus
  siRNA target sequence for Upk3b (NM_175309.3,1030-1048).
ccttcatgggaaaacgtta

SEQ ID NO: 787881 - DNA, 19 bp, Mus musculus
  siRNA target sequence for D430028M17Rik (NM_175311.3,479-497).
gtgcggagagtgaagttga

SEQ ID NO: 787882 - DNA, 19 bp, Mus musculus
  siRNA target sequence for D430028M17Rik (NM_175311.3,975-993).
gccccgacgatcagaagat

SEQ ID NO: 787883 - DNA, 19 bp, Mus musculus
  siRNA target sequence for D430028M17Rik (NM_175311.3,1615-1633).
gccacctgcgcctatacca

SEQ ID NO: 787884 - DNA, 19 bp, Mus musculus
  siRNA target sequence for B630005N14Rik (NM_175312.2,281-299).
ccgcgaagtgggagacttt

SEQ ID NO: 787885 - DNA, 19 bp, Mus musculus
  siRNA target sequence for B630005N14Rik (NM_175312.2,283-301).
gcgaagtgggagactttga

SEQ ID NO: 787886 - DNA, 19 bp, Mus musculus
  siRNA target sequence for B630005N14Rik (NM_175312.2,284-302).
cgaagtgggagactttgat

SEQ ID NO: 787887 - DNA, 19 bp, Mus musculus
  siRNA target sequence for B630005N14Rik (NM_175312.2,332-350).
ggaaacactttgcgaatat

SEQ ID NO: 787888 - DNA, 19 bp, Mus musculus
  siRNA target sequence for B630005N14Rik (NM_175312.2,343-361).
gcgaatatgctgttgcaat

SEQ ID NO: 787889 - DNA, 19 bp, Mus musculus
  siRNA target sequence for B630005N14Rik (NM_175312.2,401-419).
gggtgaaggtcgcattgaa

SEQ ID NO: 787890 - DNA, 19 bp, Mus musculus
  siRNA target sequence for B630005N14Rik (NM_175312.2,402-420).
ggtgaaggtcgcattgaat

SEQ ID NO: 787891 - DNA, 19 bp, Mus musculus
  siRNA target sequence for B630005N14Rik (NM_175312.2,411-429).
cgcattgaatggtgttgta

SEQ ID NO: 787892 - DNA, 19 bp, Mus musculus
  siRNA target sequence for B630005N14Rik (NM_175312.2,417-435).
gaatggtgttgtagtgtat

SEQ ID NO: 787893 - DNA, 19 bp, Mus musculus
  siRNA target sequence for B630005N14Rik (NM_175312.2,495-513).
gctgtcctcgccactaaga

SEQ ID NO: 787894 - DNA, 19 bp, Mus musculus
  siRNA target sequence for B630005N14Rik (NM_175312.2,514-532).
ccactccagccttaaacgt

SEQ ID NO: 787895 - DNA, 19 bp, Mus musculus
  siRNA target sequence for B630005N14Rik (NM_175312.2,530-548).
cgtgcacgagtcttctaaa

SEQ ID NO: 787896 - DNA, 19 bp, Mus musculus
  siRNA target sequence for B630005N14Rik (NM_175312.2,536-554).
cgagtcttctaaacttgaa

SEQ ID NO: 787897 - DNA, 19 bp, Mus musculus
  siRNA target sequence for B630005N14Rik (NM_175312.2,549-567).
cttgaaggtcctttaacaa

SEQ ID NO: 787898 - DNA, 19 bp, Mus musculus
  siRNA target sequence for B630005N14Rik (NM_175312.2,583-601).
gccctgactttataactga

SEQ ID NO: 787899 - DNA, 19 bp, Mus musculus
  siRNA target sequence for B630005N14Rik (NM_175312.2,616-634).
caggaaagatcagattact

SEQ ID NO: 787900 - DNA, 19 bp, Mus musculus
  siRNA target sequence for B630005N14Rik (NM_175312.2,623-641).
gatcagattacttgatgtt

SEQ ID NO: 787901 - DNA, 19 bp, Mus musculus
  siRNA target sequence for B630005N14Rik (NM_175312.2,685-703).
ctgttggcatagatattgt

SEQ ID NO: 787902 - DNA, 19 bp, Mus musculus
  siRNA target sequence for B630005N14Rik (NM_175312.2,709-727).
ctgtagagagtgtgtataa

SEQ ID NO: 787903 - DNA, 19 bp, Mus musculus
  siRNA target sequence for B630005N14Rik (NM_175312.2,800-818).
gcagctgagaaatcctatt

SEQ ID NO: 787904 - DNA, 19 bp, Mus musculus
  siRNA target sequence for B630005N14Rik (NM_175312.2,803-821).
gctgagaaatcctattgat

SEQ ID NO: 787905 - DNA, 19 bp, Mus musculus
  siRNA target sequence for B630005N14Rik (NM_175312.2,939-957).
ggcttattgctcatcatca

SEQ ID NO: 787906 - DNA, 19 bp, Mus musculus
  siRNA target sequence for B630005N14Rik (NM_175312.2,961-979).
ccgattcctcccatcagaa

SEQ ID NO: 787907 - DNA, 19 bp, Mus musculus
  siRNA target sequence for B630005N14Rik (NM_175312.2,982-1000).
ggcacgctatgatgatgaa

SEQ ID NO: 787908 - DNA, 19 bp, Mus musculus
  siRNA target sequence for B630005N14Rik (NM_175312.2,1001-1019).
gagctggaagattgctata

SEQ ID NO: 787909 - DNA, 19 bp, Mus musculus
  siRNA target sequence for B630005N14Rik (NM_175312.2,1036-1054).
gcgcttcaagtattcaaaa

SEQ ID NO: 787910 - DNA, 19 bp, Mus musculus
  siRNA target sequence for B630005N14Rik (NM_175312.2,1037-1055).
cgcttcaagtattcaaaat

SEQ ID NO: 787911 - DNA, 19 bp, Mus musculus
  siRNA target sequence for B630005N14Rik (NM_175312.2,1038-1056).
gcttcaagtattcaaaatt

SEQ ID NO: 787912 - DNA, 19 bp, Mus musculus
  siRNA target sequence for B630005N14Rik (NM_175312.2,1045-1063).
gtattcaaaattttctcat

SEQ ID NO: 787913 - DNA, 19 bp, Mus musculus
  siRNA target sequence for B630005N14Rik (NM_175312.2,1066-1084).
gcatctcatggcttttaga

SEQ ID NO: 787914 - DNA, 19 bp, Mus musculus
  siRNA target sequence for B630005N14Rik (NM_175312.2,1070-1088).
ctcatggcttttagaaaaa

SEQ ID NO: 787915 - DNA, 19 bp, Mus musculus
  siRNA target sequence for B630005N14Rik (NM_175312.2,1111-1129).
cttggttagcaggaactat

SEQ ID NO: 787916 - DNA, 19 bp, Mus musculus
  siRNA target sequence for A130022J15Rik (NM_175313.2,529-547).
gagtattgcttcatgaagt

SEQ ID NO: 787917 - DNA, 19 bp, Mus musculus
  siRNA target sequence for A130022J15Rik (NM_175313.2,649-667).
ccttcttcttgcacaataa

SEQ ID NO: 787918 - DNA, 19 bp, Mus musculus
  siRNA target sequence for A130022J15Rik (NM_175313.2,696-714).
gattcccactgtccatata

SEQ ID NO: 787919 - DNA, 19 bp, Mus musculus
  siRNA target sequence for A130022J15Rik (NM_175313.2,758-776).
gtcctgcgcaccagagttt

SEQ ID NO: 787920 - DNA, 19 bp, Mus musculus
  siRNA target sequence for A130022J15Rik (NM_175313.2,851-869).
ctggaggcaagctgacttt

SEQ ID NO: 787921 - DNA, 19 bp, Mus musculus
  siRNA target sequence for A130022J15Rik (NM_175313.2,882-900).
gagcgactgggagagataa

SEQ ID NO: 787922 - DNA, 19 bp, Mus musculus
  siRNA target sequence for A130022J15Rik (NM_175313.2,884-902).
gcgactgggagagataaga

SEQ ID NO: 787923 - DNA, 19 bp, Mus musculus
  siRNA target sequence for A130022J15Rik (NM_175313.2,885-903).
cgactgggagagataagaa

SEQ ID NO: 787924 - DNA, 19 bp, Mus musculus
  siRNA target sequence for A130022J15Rik (NM_175313.2,950-968).
ccgttaccttcagtattgt

SEQ ID NO: 787925 - DNA, 19 bp, Mus musculus
  siRNA target sequence for A130022J15Rik (NM_175313.2,951-969).
cgttaccttcagtattgta

SEQ ID NO: 787926 - DNA, 19 bp, Mus musculus
  siRNA target sequence for A130022J15Rik (NM_175313.2,967-985).
gtagagctactggtctata

SEQ ID NO: 787927 - DNA, 19 bp, Mus musculus
  siRNA target sequence for A130022J15Rik (NM_175313.2,978-996).
ggtctatacctggacttaa

SEQ ID NO: 787928 - DNA, 19 bp, Mus musculus
  siRNA target sequence for A130022J15Rik (NM_175313.2,1009-1027).
gaaaccacgacagattcaa

SEQ ID NO: 787929 - DNA, 19 bp, Mus musculus
  siRNA target sequence for A130022J15Rik (NM_175313.2,1019-1037).
cagattcaaggaagatttt

SEQ ID NO: 787930 - DNA, 19 bp, Mus musculus
  siRNA target sequence for A130022J15Rik (NM_175313.2,1050-1068).
gaaattggtggatactgta

SEQ ID NO: 787931 - DNA, 19 bp, Mus musculus
  siRNA target sequence for A130022J15Rik (NM_175313.2,1143-1161).
ggctacacgcagctcaatt

SEQ ID NO: 787932 - DNA, 19 bp, Mus musculus
  siRNA target sequence for A130022J15Rik (NM_175313.2,1144-1162).
gctacacgcagctcaattt

SEQ ID NO: 787933 - DNA, 19 bp, Mus musculus
  siRNA target sequence for A130022J15Rik (NM_175313.2,1186-1204).
gtgacatcgttgttgaaaa

SEQ ID NO: 787934 - DNA, 19 bp, Mus musculus
  siRNA target sequence for A130022J15Rik (NM_175313.2,1190-1208).
catcgttgttgaaaaacca

SEQ ID NO: 787935 - DNA, 19 bp, Mus musculus
  siRNA target sequence for A130022J15Rik (NM_175313.2,1200-1218).
gaaaaaccaacgtatttca

SEQ ID NO: 787936 - DNA, 19 bp, Mus musculus
  siRNA target sequence for A130022J15Rik (NM_175313.2,1206-1224).
ccaacgtatttcatgaaat

SEQ ID NO: 787937 - DNA, 19 bp, Mus musculus
  siRNA target sequence for A130022J15Rik (NM_175313.2,1207-1225).
caacgtatttcatgaaatt

SEQ ID NO: 787938 - DNA, 19 bp, Mus musculus
  siRNA target sequence for A130022J15Rik (NM_175313.2,1210-1228).
cgtatttcatgaaattaga

SEQ ID NO: 787939 - DNA, 19 bp, Mus musculus
  siRNA target sequence for A130022J15Rik (NM_175313.2,1220-1238).
gaaattagatgcaggtatt

SEQ ID NO: 787940 - DNA, 19 bp, Mus musculus
  siRNA target sequence for A130022J15Rik (NM_175313.2,1227-1245).
gatgcaggtattaatatgt

SEQ ID NO: 787941 - DNA, 19 bp, Mus musculus
  siRNA target sequence for A130022J15Rik (NM_175313.2,1258-1276).
gtgacttcctgaatctcta

SEQ ID NO: 787942 - DNA, 19 bp, Mus musculus
  siRNA target sequence for A130022J15Rik (NM_175313.2,1280-1298).
cactcagcacgttaacaat

SEQ ID NO: 787943 - DNA, 19 bp, Mus musculus
  siRNA target sequence for A130022J15Rik (NM_175313.2,1287-1305).
cacgttaacaattctttca

SEQ ID NO: 787944 - DNA, 19 bp, Mus musculus
  siRNA target sequence for A130022J15Rik (NM_175313.2,1366-1384).
ccgatacctggaaagcatt

SEQ ID NO: 787945 - DNA, 19 bp, Mus musculus
  siRNA target sequence for A130022J15Rik (NM_175313.2,1367-1385).
cgatacctggaaagcattt

SEQ ID NO: 787946 - DNA, 19 bp, Mus musculus
  siRNA target sequence for A130022J15Rik (NM_175313.2,1372-1390).
cctggaaagcatttactga

SEQ ID NO: 787947 - DNA, 19 bp, Mus musculus
  siRNA target sequence for A130022J15Rik (NM_175313.2,1414-1432).
cctatgattccaaaaaggt

SEQ ID NO: 787948 - DNA, 19 bp, Mus musculus
  siRNA target sequence for A130022J15Rik (NM_175313.2,1472-1490).
gcggtacgggctgttctat

SEQ ID NO: 787949 - DNA, 19 bp, Mus musculus
  siRNA target sequence for A130022J15Rik (NM_175313.2,1473-1491).
cggtacgggctgttctata

SEQ ID NO: 787950 - DNA, 19 bp, Mus musculus
  siRNA target sequence for A130022J15Rik (NM_175313.2,1474-1492).
ggtacgggctgttctataa

SEQ ID NO: 787951 - DNA, 19 bp, Mus musculus
  siRNA target sequence for A130022J15Rik (NM_175313.2,1502-1520).
gatctctggctgtcagaat

SEQ ID NO: 787952 - DNA, 19 bp, Mus musculus
  siRNA target sequence for A130022J15Rik (NM_175313.2,1511-1529).
ctgtcagaatacaggatta

SEQ ID NO: 787953 - DNA, 19 bp, Mus musculus
  siRNA target sequence for A130022J15Rik (NM_175313.2,1513-1531).
gtcagaatacaggattatt

SEQ ID NO: 787954 - DNA, 19 bp, Mus musculus
  siRNA target sequence for A130022J15Rik (NM_175313.2,1517-1535).
gaatacaggattattcaga

SEQ ID NO: 787955 - DNA, 19 bp, Mus musculus
  siRNA target sequence for A130022J15Rik (NM_175313.2,1594-1612).
gcaaagttcgagttaccat

SEQ ID NO: 787956 - DNA, 19 bp, Mus musculus
  siRNA target sequence for A130022J15Rik (NM_175313.2,1624-1642).
gcacagaataccggaaaat

SEQ ID NO: 787957 - DNA, 19 bp, Mus musculus
  siRNA target sequence for A130022J15Rik (NM_175313.2,1627-1645).
cagaataccggaaaatcct

SEQ ID NO: 787958 - DNA, 19 bp, Mus musculus
  siRNA target sequence for A130022J15Rik (NM_175313.2,1661-1679).
ggtaaatgcactgaaaaca

SEQ ID NO: 787959 - DNA, 19 bp, Mus musculus
  siRNA target sequence for A130022J15Rik (NM_175313.2,1678-1696).
cagtatccacatttgaagt

SEQ ID NO: 787960 - DNA, 19 bp, Mus musculus
  siRNA target sequence for A130022J15Rik (NM_175313.2,1692-1710).
gaagtccgggtggttgatt

SEQ ID NO: 787961 - DNA, 19 bp, Mus musculus
  siRNA target sequence for A130022J15Rik (NM_175313.2,1698-1716).
cgggtggttgattacaagt

SEQ ID NO: 787962 - DNA, 19 bp, Mus musculus
  siRNA target sequence for A130022J15Rik (NM_175313.2,1699-1717).
gggtggttgattacaagta

SEQ ID NO: 787963 - DNA, 19 bp, Mus musculus
  siRNA target sequence for A130022J15Rik (NM_175313.2,1720-1738).
gagaactcgggtttttaga

SEQ ID NO: 787964 - DNA, 19 bp, Mus musculus
  siRNA target sequence for A130022J15Rik (NM_175313.2,1753-1771).
cgcacaacacggacatatt

SEQ ID NO: 787965 - DNA, 19 bp, Mus musculus
  siRNA target sequence for A130022J15Rik (NM_175313.2,1754-1772).
gcacaacacggacatattt

SEQ ID NO: 787966 - DNA, 19 bp, Mus musculus
  siRNA target sequence for A130022J15Rik (NM_175313.2,1755-1773).
cacaacacggacatattta

SEQ ID NO: 787967 - DNA, 19 bp, Mus musculus
  siRNA target sequence for A130022J15Rik (NM_175313.2,1757-1775).
caacacggacatatttatt

SEQ ID NO: 787968 - DNA, 19 bp, Mus musculus
  siRNA target sequence for A130022J15Rik (NM_175313.2,1791-1809).
ggccttacccacttacttt

SEQ ID NO: 787969 - DNA, 19 bp, Mus musculus
  siRNA target sequence for A130022J15Rik (NM_175313.2,1830-1848).
gtgttcgagctgtacaact

SEQ ID NO: 787970 - DNA, 19 bp, Mus musculus
  siRNA target sequence for A130022J15Rik (NM_175313.2,1838-1856).
gctgtacaactgtgaagat

SEQ ID NO: 787971 - DNA, 19 bp, Mus musculus
  siRNA target sequence for A130022J15Rik (NM_175313.2,1961-1979).
gggagaacacccgaagttt

SEQ ID NO: 787972 - DNA, 19 bp, Mus musculus
  siRNA target sequence for A130022J15Rik (NM_175313.2,1962-1980).
ggagaacacccgaagttta

SEQ ID NO: 787973 - DNA, 19 bp, Mus musculus
  siRNA target sequence for A130022J15Rik (NM_175313.2,1965-1983).
gaacacccgaagtttacca

SEQ ID NO: 787974 - DNA, 19 bp, Mus musculus
  siRNA target sequence for A130022J15Rik (NM_175313.2,1971-1989).
ccgaagtttaccaactact

SEQ ID NO: 787975 - DNA, 19 bp, Mus musculus
  siRNA target sequence for A130022J15Rik (NM_175313.2,1976-1994).
gtttaccaactactctttt

SEQ ID NO: 787976 - DNA, 19 bp, Mus musculus
  siRNA target sequence for A130022J15Rik (NM_175313.2,2059-2077).
ggccatttaagaagaaaca

SEQ ID NO: 787977 - DNA, 19 bp, Mus musculus
  siRNA target sequence for 8430403M15Rik (NM_175314.2,124-142).
gagtgcctgtgctacctta

SEQ ID NO: 787978 - DNA, 19 bp, Mus musculus
  siRNA target sequence for 8430403M15Rik (NM_175314.2,128-146).
gcctgtgctaccttaccta

SEQ ID NO: 787979 - DNA, 19 bp, Mus musculus
  siRNA target sequence for 8430403M15Rik (NM_175314.2,130-148).
ctgtgctaccttacctaaa

SEQ ID NO: 787980 - DNA, 19 bp, Mus musculus
  siRNA target sequence for 8430403M15Rik (NM_175314.2,254-272).
gtagtgtgtgtcaactaca

SEQ ID NO: 787981 - DNA, 19 bp, Mus musculus
  siRNA target sequence for 8430403M15Rik (NM_175314.2,268-286).
ctacagcgaccatgtgatt

SEQ ID NO: 787982 - DNA, 19 bp, Mus musculus
  siRNA target sequence for 8430403M15Rik (NM_175314.2,271-289).
cagcgaccatgtgattgat

SEQ ID NO: 787983 - DNA, 19 bp, Mus musculus
  siRNA target sequence for 8430403M15Rik (NM_175314.2,372-390).
ctcacccatttcaaaacga

SEQ ID NO: 787984 - DNA, 19 bp, Mus musculus
  siRNA target sequence for 8430403M15Rik (NM_175314.2,461-479).
ccctggggagcatgttcta

SEQ ID NO: 787985 - DNA, 19 bp, Mus musculus
  siRNA target sequence for 8430403M15Rik (NM_175314.2,463-481).
ctggggagcatgttctagt

SEQ ID NO: 787986 - DNA, 19 bp, Mus musculus
  siRNA target sequence for 8430403M15Rik (NM_175314.2,548-566).
gactgtgtagagagaatca

SEQ ID NO: 787987 - DNA, 19 bp, Mus musculus
  siRNA target sequence for 8430403M15Rik (NM_175314.2,701-719).
cgattcccagacttgagtt

SEQ ID NO: 787988 - DNA, 19 bp, Mus musculus
  siRNA target sequence for 8430403M15Rik (NM_175314.2,722-740).
gaagtcctggacaaaccta

SEQ ID NO: 787989 - DNA, 19 bp, Mus musculus
  siRNA target sequence for 8430403M15Rik (NM_175314.2,825-843).
gtggtcgagggcataaaca

SEQ ID NO: 787990 - DNA, 19 bp, Mus musculus
  siRNA target sequence for 8430403M15Rik (NM_175314.2,831-849).
gagggcataaacatcgaaa

SEQ ID NO: 787991 - DNA, 19 bp, Mus musculus
  siRNA target sequence for 8430403M15Rik (NM_175314.2,835-853).
gcataaacatcgaaatgtt

SEQ ID NO: 787992 - DNA, 19 bp, Mus musculus
  siRNA target sequence for 8430403M15Rik (NM_175314.2,836-854).
cataaacatcgaaatgttt

SEQ ID NO: 787993 - DNA, 19 bp, Mus musculus
  siRNA target sequence for 8430403M15Rik (NM_175314.2,878-896).
catttagagagtgataact

SEQ ID NO: 787994 - DNA, 19 bp, Mus musculus
  siRNA target sequence for 8430403M15Rik (NM_175314.2,1139-1157).
gagcagtggcaacaatgta

SEQ ID NO: 787995 - DNA, 19 bp, Mus musculus
  siRNA target sequence for 8430403M15Rik (NM_175314.2,1364-1382).
gtctcctgcagtgagattt

SEQ ID NO: 787996 - DNA, 19 bp, Mus musculus
  siRNA target sequence for 8430403M15Rik (NM_175314.2,1386-1404).
ccggcaaggagaattatga

SEQ ID NO: 787997 - DNA, 19 bp, Mus musculus
  siRNA target sequence for 8430403M15Rik (NM_175314.2,1387-1405).
cggcaaggagaattatgaa

SEQ ID NO: 787998 - DNA, 19 bp, Mus musculus
  siRNA target sequence for 8430403M15Rik (NM_175314.2,1454-1472).
gtccatccctgctacttga

SEQ ID NO: 787999 - DNA, 19 bp, Mus musculus
  siRNA target sequence for 8430403M15Rik (NM_175314.2,1557-1575).
ctgtgcagtgtttaactaa

SEQ ID NO: 788000 - DNA, 19 bp, Mus musculus
  siRNA target sequence for 8430403M15Rik (NM_175314.2,1580-1598).
gaccaacccagccacttat

SEQ ID NO: 788001 - DNA, 19 bp, Mus musculus
  siRNA target sequence for 8430403M15Rik (NM_175314.2,1592-1610).
cacttatgccccactgata

SEQ ID NO: 788002 - DNA, 19 bp, Mus musculus
  siRNA target sequence for 8430403M15Rik (NM_175314.2,1631-1649).
gcctgccgcaatgtttata

SEQ ID NO: 788003 - DNA, 19 bp, Mus musculus
  siRNA target sequence for 8430403M15Rik (NM_175314.2,1666-1684).
gaactgcaaggaggtaaaa

SEQ ID NO: 788004 - DNA, 19 bp, Mus musculus
  siRNA target sequence for 8430403M15Rik (NM_175314.2,1669-1687).
ctgcaaggaggtaaaaaaa

SEQ ID NO: 788005 - DNA, 19 bp, Mus musculus
  siRNA target sequence for 8430403M15Rik (NM_175314.2,1701-1719).
gcgttgatggggagtattt

SEQ ID NO: 788006 - DNA, 19 bp, Mus musculus
  siRNA target sequence for 8430403M15Rik (NM_175314.2,1731-1749).
gagggaagccgctaaaggt

SEQ ID NO: 788007 - DNA, 19 bp, Mus musculus
  siRNA target sequence for 8430403M15Rik (NM_175314.2,1733-1751).
gggaagccgctaaaggtat

SEQ ID NO: 788008 - DNA, 19 bp, Mus musculus
  siRNA target sequence for 8430403M15Rik (NM_175314.2,1734-1752).
ggaagccgctaaaggtatt

SEQ ID NO: 788009 - DNA, 19 bp, Mus musculus
  siRNA target sequence for 8430403M15Rik (NM_175314.2,1738-1756).
gccgctaaaggtattctgt

SEQ ID NO: 788010 - DNA, 19 bp, Mus musculus
  siRNA target sequence for 8430403M15Rik (NM_175314.2,1814-1832).
gagaacttctccgaagttt

SEQ ID NO: 788011 - DNA, 19 bp, Mus musculus
  siRNA target sequence for 8430403M15Rik (NM_175314.2,1816-1834).
gaacttctccgaagtttat

SEQ ID NO: 788012 - DNA, 19 bp, Mus musculus
  siRNA target sequence for 8430403M15Rik (NM_175314.2,1819-1837).
cttctccgaagtttatggt

SEQ ID NO: 788013 - DNA, 19 bp, Mus musculus
  siRNA target sequence for 8430403M15Rik (NM_175314.2,1854-1872).
caacagaatgtccctataa

SEQ ID NO: 788014 - DNA, 19 bp, Mus musculus
  siRNA target sequence for 8430403M15Rik (NM_175314.2,1957-1975).
gaccagcatgcagattata

SEQ ID NO: 788015 - DNA, 19 bp, Mus musculus
  siRNA target sequence for 8430403M15Rik (NM_175314.2,1990-2008).
gtttgcaaggacaagtgaa

SEQ ID NO: 788016 - DNA, 19 bp, Mus musculus
  siRNA target sequence for 8430403M15Rik (NM_175314.2,2133-2151).
gcccattgttcctggaatt

SEQ ID NO: 788017 - DNA, 19 bp, Mus musculus
  siRNA target sequence for 8430403M15Rik (NM_175314.2,2134-2152).
cccattgttcctggaatta

SEQ ID NO: 788018 - DNA, 19 bp, Mus musculus
  siRNA target sequence for 8430403M15Rik (NM_175314.2,2158-2176).
gttgatcacgggacagttt

SEQ ID NO: 788019 - DNA, 19 bp, Mus musculus
  siRNA target sequence for 5830435K17Rik (NM_175318.2,133-151).
cctcttgatcgcttccaaa

SEQ ID NO: 788020 - DNA, 19 bp, Mus musculus
  siRNA target sequence for 5830435K17Rik (NM_175318.2,170-188).
gtaccgaaaaggtacagtt

SEQ ID NO: 788021 - DNA, 19 bp, Mus musculus
  siRNA target sequence for 5830435K17Rik (NM_175318.2,193-211).
ggtggggcctccaaagaaa

SEQ ID NO: 788022 - DNA, 19 bp, Mus musculus
  siRNA target sequence for 5830435K17Rik (NM_175318.2,242-260).
gctgtgcaagctttcctta

SEQ ID NO: 788023 - DNA, 19 bp, Mus musculus
  siRNA target sequence for 5830435K17Rik (NM_175318.2,309-327).
ggaaagaggaactagtgaa

SEQ ID NO: 788024 - DNA, 19 bp, Mus musculus
  siRNA target sequence for 5830435K17Rik (NM_175318.2,331-349).
gcgaattgagctcaaacat

SEQ ID NO: 788025 - DNA, 19 bp, Mus musculus
  siRNA target sequence for 5830435K17Rik (NM_175318.2,388-406).
caattttcatggttacgat

SEQ ID NO: 788026 - DNA, 19 bp, Mus musculus
  siRNA target sequence for 5830435K17Rik (NM_175318.2,599-617).
gccccgtcacccatgaact

SEQ ID NO: 788027 - DNA, 19 bp, Mus musculus
  siRNA target sequence for 5830435K17Rik (NM_175318.2,600-618).
ccccgtcacccatgaactt

SEQ ID NO: 788028 - DNA, 19 bp, Mus musculus
  siRNA target sequence for 5830435K17Rik (NM_175318.2,602-620).
ccgtcacccatgaacttca

SEQ ID NO: 788029 - DNA, 19 bp, Mus musculus
  siRNA target sequence for 5830435K17Rik (NM_175318.2,720-738).
gggagcgagagtttcttga

SEQ ID NO: 788030 - DNA, 19 bp, Mus musculus
  siRNA target sequence for 5830435K17Rik (NM_175318.2,721-739).
ggagcgagagtttcttgaa

SEQ ID NO: 788031 - DNA, 19 bp, Mus musculus
  siRNA target sequence for 5830435K17Rik (NM_175318.2,737-755).
gaacgaaagcataggaaaa

SEQ ID NO: 788032 - DNA, 19 bp, Mus musculus
  siRNA target sequence for 5830435K17Rik (NM_175318.2,740-758).
cgaaagcataggaaaaaga

SEQ ID NO: 788033 - DNA, 19 bp, Mus musculus
  siRNA target sequence for 5830435K17Rik (NM_175318.2,782-800).
cctccacccgtgttgaaaa

SEQ ID NO: 788034 - DNA, 19 bp, Mus musculus
  siRNA target sequence for 5830435K17Rik (NM_175318.2,916-934).
cacggccagtgagaaacaa

SEQ ID NO: 788035 - DNA, 19 bp, Mus musculus
  siRNA target sequence for 5830435K17Rik (NM_175318.2,1097-1115).
gctagcgggactcagaaat

SEQ ID NO: 788036 - DNA, 19 bp, Mus musculus
  siRNA target sequence for 5830435K17Rik (NM_175318.2,1152-1170).
ctcatccgagccattccaa

SEQ ID NO: 788037 - DNA, 19 bp, Mus musculus
  siRNA target sequence for 5830435K17Rik (NM_175318.2,1182-1200).
cggttctctcacacaacaa

SEQ ID NO: 788038 - DNA, 19 bp, Mus musculus
  siRNA target sequence for 5830435K17Rik (NM_175318.2,1184-1202).
gttctctcacacaacaaat

SEQ ID NO: 788039 - DNA, 19 bp, Mus musculus
  siRNA target sequence for 5830435K17Rik (NM_175318.2,1274-1292).
gctcgacccacacttagtt

SEQ ID NO: 788040 - DNA, 19 bp, Mus musculus
  siRNA target sequence for 5830435K17Rik (NM_175318.2,1347-1365).
cagccggtgggatcagaaa

SEQ ID NO: 788041 - DNA, 19 bp, Mus musculus
  siRNA target sequence for 5830435K17Rik (NM_175318.2,1538-1556).
cttcgacgaccaatgaaca

SEQ ID NO: 788042 - DNA, 19 bp, Mus musculus
  siRNA target sequence for 5830435K17Rik (NM_175318.2,1544-1562).
cgaccaatgaacagtctta

SEQ ID NO: 788043 - DNA, 19 bp, Mus musculus
  siRNA target sequence for 5830435K17Rik (NM_175318.2,1588-1606).
ccctgggagatccataagt

SEQ ID NO: 788044 - DNA, 19 bp, Mus musculus
  siRNA target sequence for 5830435K17Rik (NM_175318.2,1855-1873).
caaaaggcctcgagagtat

SEQ ID NO: 788045 - DNA, 19 bp, Mus musculus
  siRNA target sequence for 5830435K17Rik (NM_175318.2,1860-1878).
ggcctcgagagtatgaaga

SEQ ID NO: 788046 - DNA, 19 bp, Mus musculus
  siRNA target sequence for 5830435K17Rik (NM_175318.2,1953-1971).
ccaagcacattcgagaaat

SEQ ID NO: 788047 - DNA, 19 bp, Mus musculus
  siRNA target sequence for 5830435K17Rik (NM_175318.2,1957-1975).
gcacattcgagaaatcttt

SEQ ID NO: 788048 - DNA, 19 bp, Mus musculus
  siRNA target sequence for 5830435K17Rik (NM_175318.2,1976-1994).
ggctatgaccgaaaaaaat

SEQ ID NO: 788049 - DNA, 19 bp, Mus musculus
  siRNA target sequence for 5830435K17Rik (NM_175318.2,1977-1995).
gctatgaccgaaaaaaata

SEQ ID NO: 788050 - DNA, 19 bp, Mus musculus
  siRNA target sequence for 5830435K17Rik (NM_175318.2,2007-2025).
gtgactatgccttacgtta

SEQ ID NO: 788051 - DNA, 19 bp, Mus musculus
  siRNA target sequence for 5830435K17Rik (NM_175318.2,2057-2075).
gaggaagccaagagtttaa

SEQ ID NO: 788052 - DNA, 19 bp, Mus musculus
  siRNA target sequence for 5830435K17Rik (NM_175318.2,2090-2108).
gaggacttagaggaaatga

SEQ ID NO: 788053 - DNA, 19 bp, Mus musculus
  siRNA target sequence for 5830435K17Rik (NM_175318.2,2122-2140).
ggaactgaaacgtcgaaaa

SEQ ID NO: 788054 - DNA, 19 bp, Mus musculus
  siRNA target sequence for 4931414L13Rik (NM_175321.2,2606-2624).
cgaacaacaccgctacttt

SEQ ID NO: 788055 - DNA, 19 bp, Mus musculus
  siRNA target sequence for 4931414L13Rik (NM_175321.2,2700-2718).
gaggcatctccaagatgtt

SEQ ID NO: 788056 - DNA, 19 bp, Mus musculus
  siRNA target sequence for 4931414L13Rik (NM_175321.2,2874-2892).
ggccacagagcgtgagtat

SEQ ID NO: 788057 - DNA, 19 bp, Mus musculus
  siRNA target sequence for 4931414L13Rik (NM_175321.2,2902-2920).
cttgactataccatacaga

SEQ ID NO: 788058 - DNA, 19 bp, Mus musculus
  siRNA target sequence for 4931414L13Rik (NM_175321.2,2919-2937).
gaactacttccctgagtta

SEQ ID NO: 788059 - DNA, 19 bp, Mus musculus
  siRNA target sequence for 4931414L13Rik (NM_175321.2,3008-3026).
gggacttccactacaattt

SEQ ID NO: 788060 - DNA, 19 bp, Mus musculus
  siRNA target sequence for 4931414L13Rik (NM_175321.2,3095-3113).
gggtgcagtttggaatgta

SEQ ID NO: 788061 - DNA, 19 bp, Mus musculus
  siRNA target sequence for 4931414L13Rik (NM_175321.2,3096-3114).
ggtgcagtttggaatgtat

SEQ ID NO: 788062 - DNA, 19 bp, Mus musculus
  siRNA target sequence for 4931414L13Rik (NM_175321.2,3145-3163).
gatgctctgatgacaaact

SEQ ID NO: 788063 - DNA, 19 bp, Mus musculus
  siRNA target sequence for 4931414L13Rik (NM_175321.2,3162-3180).
ctatggtcacaccttcttt

SEQ ID NO: 788064 - DNA, 19 bp, Mus musculus
  siRNA target sequence for 4931414L13Rik (NM_175321.2,3167-3185).
gtcacaccttctttaagga

SEQ ID NO: 788065 - DNA, 19 bp, Mus musculus
  siRNA target sequence for 4931414L13Rik (NM_175321.2,3476-3494).
cctgtcgtcgcgttttcct

SEQ ID NO: 788066 - DNA, 19 bp, Mus musculus
  siRNA target sequence for 4931414L13Rik (NM_175321.2,3482-3500).
gtcgcgttttcctgtttga

SEQ ID NO: 788067 - DNA, 19 bp, Mus musculus
  siRNA target sequence for 4931414L13Rik (NM_175321.2,3536-3554).
ctgcaggggttgacatatt

SEQ ID NO: 788068 - DNA, 19 bp, Mus musculus
  siRNA target sequence for 4931414L13Rik (NM_175321.2,3558-3576).
ctacaagcgatccttcaaa

SEQ ID NO: 788069 - DNA, 19 bp, Mus musculus
  siRNA target sequence for 4931414L13Rik (NM_175321.2,3614-3632).
gccaactgcgctttgaaat

SEQ ID NO: 788070 - DNA, 19 bp, Mus musculus
  siRNA target sequence for 4931414L13Rik (NM_175321.2,3700-3718).
gcctggacagccgatatct

SEQ ID NO: 788071 - DNA, 19 bp, Mus musculus
  siRNA target sequence for 4931414L13Rik (NM_175321.2,3731-3749).
ggagacaggctgtccataa

SEQ ID NO: 788072 - DNA, 19 bp, Mus musculus
  siRNA target sequence for 4931414L13Rik (NM_175321.2,3734-3752).
gacaggctgtccataacaa

SEQ ID NO: 788073 - DNA, 19 bp, Mus musculus
  siRNA target sequence for 4931414L13Rik (NM_175321.2,3818-3836).
ccagtgaggaagctatcaa

SEQ ID NO: 788074 - DNA, 19 bp, Mus musculus
  siRNA target sequence for 4931414L13Rik (NM_175321.2,3819-3837).
cagtgaggaagctatcaat

SEQ ID NO: 788075 - DNA, 19 bp, Mus musculus
  siRNA target sequence for 4931414L13Rik (NM_175321.2,3895-3913).
gctgtggccccatttgact

SEQ ID NO: 788076 - DNA, 19 bp, Mus musculus
  siRNA target sequence for 4931414L13Rik (NM_175321.2,3971-3989).
ctgttctgggctctcttaa

SEQ ID NO: 788077 - DNA, 19 bp, Mus musculus
  siRNA target sequence for 4931414L13Rik (NM_175321.2,4057-4075).
gaggaagcatcactagatt

SEQ ID NO: 788078 - DNA, 19 bp, Mus musculus
  siRNA target sequence for 4931414L13Rik (NM_175321.2,4135-4153).
gccagtggctctagtgatt

SEQ ID NO: 788079 - DNA, 19 bp, Mus musculus
  siRNA target sequence for 4931414L13Rik (NM_175321.2,4137-4155).
cagtggctctagtgattct

SEQ ID NO: 788080 - DNA, 19 bp, Mus musculus
  siRNA target sequence for 4931414L13Rik (NM_175321.2,4139-4157).
gtggctctagtgattctga

SEQ ID NO: 788081 - DNA, 19 bp, Mus musculus
  siRNA target sequence for D130072O21Rik (NM_175322.2,1162-1180).
gtcccaattttcttctact

SEQ ID NO: 788082 - DNA, 19 bp, Mus musculus
  siRNA target sequence for D130072O21Rik (NM_175322.2,1257-1275).
cctgtaaatggccttgtaa

SEQ ID NO: 788083 - DNA, 19 bp, Mus musculus
  siRNA target sequence for D130072O21Rik (NM_175322.2,1285-1303).
cgtatttgtaagcatatct

SEQ ID NO: 788084 - DNA, 19 bp, Mus musculus
  siRNA target sequence for D130072O21Rik (NM_175322.2,1388-1406).
cacagagttacagactata

SEQ ID NO: 788085 - DNA, 19 bp, Mus musculus
  siRNA target sequence for E330037G11Rik (NM_175323.2,132-150).
gttggaaggcaagtgtatt

SEQ ID NO: 788086 - DNA, 19 bp, Mus musculus
  siRNA target sequence for E330037G11Rik (NM_175323.2,135-153).
ggaaggcaagtgtattggt

SEQ ID NO: 788087 - DNA, 19 bp, Mus musculus
  siRNA target sequence for E330037G11Rik (NM_175323.2,152-170).
gtgcatgtcagagataact

SEQ ID NO: 788088 - DNA, 19 bp, Mus musculus
  siRNA target sequence for E330037G11Rik (NM_175323.2,154-172).
gcatgtcagagataactca

SEQ ID NO: 788089 - DNA, 19 bp, Mus musculus
  siRNA target sequence for E330037G11Rik (NM_175323.2,228-246).
gaacccatttacatttact

SEQ ID NO: 788090 - DNA, 19 bp, Mus musculus
  siRNA target sequence for E330037G11Rik (NM_175323.2,231-249).
cccatttacatttactgat

SEQ ID NO: 788091 - DNA, 19 bp, Mus musculus
  siRNA target sequence for E330037G11Rik (NM_175323.2,232-250).
ccatttacatttactgata

SEQ ID NO: 788092 - DNA, 19 bp, Mus musculus
  siRNA target sequence for E330037G11Rik (NM_175323.2,245-263).
ctgatactatgcaatctta

SEQ ID NO: 788093 - DNA, 19 bp, Mus musculus
  siRNA target sequence for E330037G11Rik (NM_175323.2,256-274).
caatcttagcagattcctt

SEQ ID NO: 788094 - DNA, 19 bp, Mus musculus
  siRNA target sequence for E330037G11Rik (NM_175323.2,265-283).
cagattccttctatttaat

SEQ ID NO: 788095 - DNA, 19 bp, Mus musculus
  siRNA target sequence for E330037G11Rik (NM_175323.2,341-359).
cttataatgtcttataact

SEQ ID NO: 788096 - DNA, 19 bp, Mus musculus
  siRNA target sequence for E330037G11Rik (NM_175323.2,349-367).
gtcttataacttgaaagta

SEQ ID NO: 788097 - DNA, 19 bp, Mus musculus
  siRNA target sequence for Bbs4 (NM_175325.2,451-469).
ctgggagtgtgctacactt

SEQ ID NO: 788098 - DNA, 19 bp, Mus musculus
  siRNA target sequence for Bbs4 (NM_175325.2,509-527).
gtgccctccagcttaacaa

SEQ ID NO: 788099 - DNA, 19 bp, Mus musculus
  siRNA target sequence for Bbs4 (NM_175325.2,528-546).
gcatgacctgacttacata

SEQ ID NO: 788100 - DNA, 19 bp, Mus musculus
  siRNA target sequence for Bbs4 (NM_175325.2,529-547).
catgacctgacttacataa

SEQ ID NO: 788101 - DNA, 19 bp, Mus musculus
  siRNA target sequence for Bbs4 (NM_175325.2,650-668).
ctttaggattgctctactt

SEQ ID NO: 788102 - DNA, 19 bp, Mus musculus
  siRNA target sequence for Bbs4 (NM_175325.2,787-805).
gatgtcgcccttaccaaat

SEQ ID NO: 788103 - DNA, 19 bp, Mus musculus
  siRNA target sequence for Bbs4 (NM_175325.2,790-808).
gtcgcccttaccaaataca

SEQ ID NO: 788104 - DNA, 19 bp, Mus musculus
  siRNA target sequence for Bbs4 (NM_175325.2,792-810).
cgcccttaccaaatacaga

SEQ ID NO: 788105 - DNA, 19 bp, Mus musculus
  siRNA target sequence for Bbs4 (NM_175325.2,819-837).
ctgtgctattccagaaagt

SEQ ID NO: 788106 - DNA, 19 bp, Mus musculus
  siRNA target sequence for Bbs4 (NM_175325.2,836-854).
gtcctccactttggaataa

SEQ ID NO: 788107 - DNA, 19 bp, Mus musculus
  siRNA target sequence for Bbs4 (NM_175325.2,838-856).
cctccactttggaataaca

SEQ ID NO: 788108 - DNA, 19 bp, Mus musculus
  siRNA target sequence for Bbs4 (NM_175325.2,839-857).
ctccactttggaataacat

SEQ ID NO: 788109 - DNA, 19 bp, Mus musculus
  siRNA target sequence for Bbs4 (NM_175325.2,932-950).
ccttcgactggaagattct

SEQ ID NO: 788110 - DNA, 19 bp, Mus musculus
  siRNA target sequence for Bbs4 (NM_175325.2,960-978).
gggccttgtccatttgact

SEQ ID NO: 788111 - DNA, 19 bp, Mus musculus
  siRNA target sequence for Bbs4 (NM_175325.2,962-980).
gccttgtccatttgactat

SEQ ID NO: 788112 - DNA, 19 bp, Mus musculus
  siRNA target sequence for Bbs4 (NM_175325.2,1120-1138).
gctgttcgcctggataagt

SEQ ID NO: 788113 - DNA, 19 bp, Mus musculus
  siRNA target sequence for Bbs4 (NM_175325.2,1123-1141).
gttcgcctggataagtgta

SEQ ID NO: 788114 - DNA, 19 bp, Mus musculus
  siRNA target sequence for Bbs4 (NM_175325.2,1166-1184).
ctgtgctgctgtataacca

SEQ ID NO: 788115 - DNA, 19 bp, Mus musculus
  siRNA target sequence for Bbs4 (NM_175325.2,1432-1450).
ctaggacaggcgatgtctt

SEQ ID NO: 788116 - DNA, 19 bp, Mus musculus
  siRNA target sequence for D330045A20Rik (NM_175326.2,141-159).
ccaggtggagtgatacgaa

SEQ ID NO: 788117 - DNA, 19 bp, Mus musculus
  siRNA target sequence for D330045A20Rik (NM_175326.2,184-202).
cctggatccaaaaggttat

SEQ ID NO: 788118 - DNA, 19 bp, Mus musculus
  siRNA target sequence for D330045A20Rik (NM_175326.2,185-203).
ctggatccaaaaggttatt

SEQ ID NO: 788119 - DNA, 19 bp, Mus musculus
  siRNA target sequence for D330045A20Rik (NM_175326.2,197-215).
ggttattgagcaaataaca

SEQ ID NO: 788120 - DNA, 19 bp, Mus musculus
  siRNA target sequence for D330045A20Rik (NM_175326.2,270-288).
gctgtccaaagataccttt

SEQ ID NO: 788121 - DNA, 19 bp, Mus musculus
  siRNA target sequence for D330045A20Rik (NM_175326.2,325-343).
ccctttactgctatgatgt

SEQ ID NO: 788122 - DNA, 19 bp, Mus musculus
  siRNA target sequence for D330045A20Rik (NM_175326.2,420-438).
cttaaagttggcatagaga

SEQ ID NO: 788123 - DNA, 19 bp, Mus musculus
  siRNA target sequence for D330045A20Rik (NM_175326.2,426-444).
gttggcatagagatgagaa

SEQ ID NO: 788124 - DNA, 19 bp, Mus musculus
  siRNA target sequence for D330045A20Rik (NM_175326.2,429-447).
ggcatagagatgagaattt

SEQ ID NO: 788125 - DNA, 19 bp, Mus musculus
  siRNA target sequence for D330045A20Rik (NM_175326.2,451-469).
gagtctcgtgcctttacaa

SEQ ID NO: 788126 - DNA, 19 bp, Mus musculus
  siRNA target sequence for D330045A20Rik (NM_175326.2,461-479).
cctttacaacgagaaaaga

SEQ ID NO: 788127 - DNA, 19 bp, Mus musculus
  siRNA target sequence for D330045A20Rik (NM_175326.2,462-480).
ctttacaacgagaaaagat

SEQ ID NO: 788128 - DNA, 19 bp, Mus musculus
  siRNA target sequence for D330045A20Rik (NM_175326.2,488-506).
gggaatcctgtgcatagat

SEQ ID NO: 788129 - DNA, 19 bp, Mus musculus
  siRNA target sequence for D330045A20Rik (NM_175326.2,490-508).
gaatcctgtgcatagataa

SEQ ID NO: 788130 - DNA, 19 bp, Mus musculus
  siRNA target sequence for D330045A20Rik (NM_175326.2,524-542).
gtccctagatgtcatttct

SEQ ID NO: 788131 - DNA, 19 bp, Mus musculus
  siRNA target sequence for D330045A20Rik (NM_175326.2,527-545).
cctagatgtcatttctgta

SEQ ID NO: 788132 - DNA, 19 bp, Mus musculus
  siRNA target sequence for D330045A20Rik (NM_175326.2,546-564).
gaaactccatttagaaaca

SEQ ID NO: 788133 - DNA, 19 bp, Mus musculus
  siRNA target sequence for D330045A20Rik (NM_175326.2,620-638).
ggctctgtggaataacgaa

SEQ ID NO: 788134 - DNA, 19 bp, Mus musculus
  siRNA target sequence for D330045A20Rik (NM_175326.2,639-657).
gatccgtacggagatattt

SEQ ID NO: 788135 - DNA, 19 bp, Mus musculus
  siRNA target sequence for D330045A20Rik (NM_175326.2,642-660).
ccgtacggagatatttgga

SEQ ID NO: 788136 - DNA, 19 bp, Mus musculus
  siRNA target sequence for D330045A20Rik (NM_175326.2,671-689).
gcaacctgaggaattcaat

SEQ ID NO: 788137 - DNA, 19 bp, Mus musculus
  siRNA target sequence for D330045A20Rik (NM_175326.2,672-690).
caacctgaggaattcaatt

SEQ ID NO: 788138 - DNA, 19 bp, Mus musculus
  siRNA target sequence for D330045A20Rik (NM_175326.2,733-751).
cttggaatagcagaaagaa

SEQ ID NO: 788139 - DNA, 19 bp, Mus musculus
  siRNA target sequence for D330045A20Rik (NM_175326.2,768-786).
gtaagagtcctgcataaat

SEQ ID NO: 788140 - DNA, 19 bp, Mus musculus
  siRNA target sequence for D330045A20Rik (NM_175326.2,772-790).
gagtcctgcataaatcaaa

SEQ ID NO: 788141 - DNA, 19 bp, Mus musculus
  siRNA target sequence for D330045A20Rik (NM_175326.2,794-812).
gcgatactatggaaaacct

SEQ ID NO: 788142 - DNA, 19 bp, Mus musculus
  siRNA target sequence for D330045A20Rik (NM_175326.2,795-813).
cgatactatggaaaaccta

SEQ ID NO: 788143 - DNA, 19 bp, Mus musculus
  siRNA target sequence for D330045A20Rik (NM_175326.2,828-846).
gagccatatcagacctatt

SEQ ID NO: 788144 - DNA, 19 bp, Mus musculus
  siRNA target sequence for D330045A20Rik (NM_175326.2,868-886).
gcatggtgtcagtgattct

SEQ ID NO: 788145 - DNA, 19 bp, Mus musculus
  siRNA target sequence for D330045A20Rik (NM_175326.2,897-915).
ctgtgtccagagtggtata

SEQ ID NO: 788146 - DNA, 19 bp, Mus musculus
  siRNA target sequence for D330045A20Rik (NM_175326.2,899-917).
gtgtccagagtggtataaa

SEQ ID NO: 788147 - DNA, 19 bp, Mus musculus
  siRNA target sequence for D330045A20Rik (NM_175326.2,903-921).
ccagagtggtataaaagtt

SEQ ID NO: 788148 - DNA, 19 bp, Mus musculus
  siRNA target sequence for D330045A20Rik (NM_175326.2,904-922).
cagagtggtataaaagttt

SEQ ID NO: 788149 - DNA, 19 bp, Mus musculus
  siRNA target sequence for D330045A20Rik (NM_175326.2,906-924).
gagtggtataaaagtttga

SEQ ID NO: 788150 - DNA, 19 bp, Mus musculus
  siRNA target sequence for D330045A20Rik (NM_175326.2,936-954).
gttcttctgcttcaagatt

SEQ ID NO: 788151 - DNA, 19 bp, Mus musculus
  siRNA target sequence for D330045A20Rik (NM_175326.2,965-983).
gaagagctatccattaaga

SEQ ID NO: 788152 - DNA, 19 bp, Mus musculus
  siRNA target sequence for D330045A20Rik (NM_175326.2,1051-1069).
gagatccaccaactaacat

SEQ ID NO: 788153 - DNA, 19 bp, Mus musculus
  siRNA target sequence for D330045A20Rik (NM_175326.2,1057-1075).
caccaactaacatagttat

SEQ ID NO: 788154 - DNA, 19 bp, Mus musculus
  siRNA target sequence for D330045A20Rik (NM_175326.2,1119-1137).
ctaattaaccgattcatca

SEQ ID NO: 788155 - DNA, 19 bp, Mus musculus
  siRNA target sequence for D330045A20Rik (NM_175326.2,1141-1159).
gatcagaactagacgatat

SEQ ID NO: 788156 - DNA, 19 bp, Mus musculus
  siRNA target sequence for D330045A20Rik (NM_175326.2,1210-1228).
gggtgcaacggtcaaagaa

SEQ ID NO: 788157 - DNA, 19 bp, Mus musculus
  siRNA target sequence for D330045A20Rik (NM_175326.2,1255-1273).
cataccgctggattcacat

SEQ ID NO: 788158 - DNA, 19 bp, Mus musculus
  siRNA target sequence for D330045A20Rik (NM_175326.2,1282-1300).
ggacttcagagcaaccatt

SEQ ID NO: 788159 - DNA, 19 bp, Mus musculus
  siRNA target sequence for D330045A20Rik (NM_175326.2,1285-1303).
cttcagagcaaccattcat

SEQ ID NO: 788160 - DNA, 19 bp, Mus musculus
  siRNA target sequence for D330045A20Rik (NM_175326.2,1288-1306).
cagagcaaccattcatagt

SEQ ID NO: 788161 - DNA, 19 bp, Mus musculus
  siRNA target sequence for D330045A20Rik (NM_175326.2,1328-1346).
gccagaagtctttgaaaat

SEQ ID NO: 788162 - DNA, 19 bp, Mus musculus
  siRNA target sequence for D330045A20Rik (NM_175326.2,1377-1395).
cagttgaaagtcgttagaa

SEQ ID NO: 788163 - DNA, 19 bp, Mus musculus
  siRNA target sequence for D330045A20Rik (NM_175326.2,1379-1397).
gttgaaagtcgttagaaat

SEQ ID NO: 788164 - DNA, 19 bp, Mus musculus
  siRNA target sequence for D330045A20Rik (NM_175326.2,1410-1428).
cctaagctgctttatctta

SEQ ID NO: 788165 - DNA, 19 bp, Mus musculus
  siRNA target sequence for D330045A20Rik (NM_175326.2,1419-1437).
ctttatcttaccactacaa

SEQ ID NO: 788166 - DNA, 19 bp, Mus musculus
  siRNA target sequence for D330045A20Rik (NM_175326.2,1440-1458).
gaaagcagagcacttacta

SEQ ID NO: 788167 - DNA, 19 bp, Mus musculus
  siRNA target sequence for D330045A20Rik (NM_175326.2,1467-1485).
catagaggcctgccatata

SEQ ID NO: 788168 - DNA, 19 bp, Mus musculus
  siRNA target sequence for D330045A20Rik (NM_175326.2,1475-1493).
cctgccatatacatacgat

SEQ ID NO: 788169 - DNA, 19 bp, Mus musculus
  siRNA target sequence for D330045A20Rik (NM_175326.2,1476-1494).
ctgccatatacatacgata

SEQ ID NO: 788170 - DNA, 19 bp, Mus musculus
  siRNA target sequence for D330045A20Rik (NM_175326.2,1480-1498).
catatacatacgataccaa

SEQ ID NO: 788171 - DNA, 19 bp, Mus musculus
  siRNA target sequence for D330045A20Rik (NM_175326.2,1519-1537).
ggattaaaacgaagactaa

SEQ ID NO: 788172 - DNA, 19 bp, Mus musculus
  siRNA target sequence for D330045A20Rik (NM_175326.2,1520-1538).
gattaaaacgaagactaat

SEQ ID NO: 788173 - DNA, 19 bp, Mus musculus
  siRNA target sequence for D330045A20Rik (NM_175326.2,1555-1573).
cggttattggtggatatta

SEQ ID NO: 788174 - DNA, 19 bp, Mus musculus
  siRNA target sequence for D330045A20Rik (NM_175326.2,1607-1625).
gtacagtcgctttattaaa

SEQ ID NO: 788175 - DNA, 19 bp, Mus musculus
  siRNA target sequence for D330045A20Rik (NM_175326.2,1626-1644).
gctgagtcactcttgacaa

SEQ ID NO: 788176 - DNA, 19 bp, Mus musculus
  siRNA target sequence for D330045A20Rik (NM_175326.2,1631-1649).
gtcactcttgacaacaata

SEQ ID NO: 788177 - DNA, 19 bp, Mus musculus
  siRNA target sequence for D330045A20Rik (NM_175326.2,1640-1658).
gacaacaataagtgaagta

SEQ ID NO: 788178 - DNA, 19 bp, Mus musculus
  siRNA target sequence for D330045A20Rik (NM_175326.2,1712-1730).
ggggataattactgctata

SEQ ID NO: 788179 - DNA, 19 bp, Mus musculus
  siRNA target sequence for D330045A20Rik (NM_175326.2,1776-1794).
gaagcattctggaatgcta

SEQ ID NO: 788180 - DNA, 19 bp, Mus musculus
  siRNA target sequence for D330045A20Rik (NM_175326.2,1791-1809).
gctagccgtccctcaacat

SEQ ID NO: 788181 - DNA, 19 bp, Mus musculus
  siRNA target sequence for D330045A20Rik (NM_175326.2,1837-1855).
gtcatgaacgaggtagtaa

SEQ ID NO: 788182 - DNA, 19 bp, Mus musculus
  siRNA target sequence for D330045A20Rik (NM_175326.2,1839-1857).
catgaacgaggtagtaaaa

SEQ ID NO: 788183 - DNA, 19 bp, Mus musculus
  siRNA target sequence for D330045A20Rik (NM_175326.2,1842-1860).
gaacgaggtagtaaaaggt

SEQ ID NO: 788184 - DNA, 19 bp, Mus musculus
  siRNA target sequence for D330045A20Rik (NM_175326.2,1852-1870).
gtaaaaggtcccaagatga

SEQ ID NO: 788185 - DNA, 19 bp, Mus musculus
  siRNA target sequence for D330045A20Rik (NM_175326.2,1876-1894).
caatggggtctcagcattt

SEQ ID NO: 788186 - DNA, 19 bp, Mus musculus
  siRNA target sequence for D330045A20Rik (NM_175326.2,1883-1901).
gtctcagcattttcaatat

SEQ ID NO: 788187 - DNA, 19 bp, Mus musculus
  siRNA target sequence for D330045A20Rik (NM_175326.2,1887-1905).
cagcattttcaatatacct

SEQ ID NO: 788188 - DNA, 19 bp, Mus musculus
  siRNA target sequence for D330045A20Rik (NM_175326.2,1896-1914).
caatatacctccaaggttt

SEQ ID NO: 788189 - DNA, 19 bp, Mus musculus
  siRNA target sequence for D330045A20Rik (NM_175326.2,2031-2049).
gaaagttcaactgcttata

SEQ ID NO: 788190 - DNA, 19 bp, Mus musculus
  siRNA target sequence for D330045A20Rik (NM_175326.2,2094-2112).
cagctgtggcaagataaga

SEQ ID NO: 788191 - DNA, 19 bp, Mus musculus
  siRNA target sequence for D330045A20Rik (NM_175326.2,2145-2163).
cacgtggatcctgaaagta

SEQ ID NO: 788192 - DNA, 19 bp, Mus musculus
  siRNA target sequence for D330045A20Rik (NM_175326.2,2147-2165).
cgtggatcctgaaagtatt

SEQ ID NO: 788193 - DNA, 19 bp, Mus musculus
  siRNA target sequence for D330045A20Rik (NM_175326.2,2161-2179).
gtattccacggaaatttat

SEQ ID NO: 788194 - DNA, 19 bp, Mus musculus
  siRNA target sequence for D330045A20Rik (NM_175326.2,2281-2299).
cccgaagccttggacattt

SEQ ID NO: 788195 - DNA, 19 bp, Mus musculus
  siRNA target sequence for D330045A20Rik (NM_175326.2,2335-2353).
cgatcgatgttgcatttct

SEQ ID NO: 788196 - DNA, 19 bp, Mus musculus
  siRNA target sequence for D330045A20Rik (NM_175326.2,2336-2354).
gatcgatgttgcatttcta

SEQ ID NO: 788197 - DNA, 19 bp, Mus musculus
  siRNA target sequence for D330045A20Rik (NM_175326.2,2346-2364).
gcatttctacctatgtatt

SEQ ID NO: 788198 - DNA, 19 bp, Mus musculus
  siRNA target sequence for D330045A20Rik (NM_175326.2,2386-2404).
cgcaaatagatacattttt

SEQ ID NO: 788199 - DNA, 19 bp, Mus musculus
  siRNA target sequence for D330045A20Rik (NM_175326.2,2546-2564).
ctgtaatttgggtaacaat

SEQ ID NO: 788200 - DNA, 19 bp, Mus musculus
  siRNA target sequence for D330045A20Rik (NM_175326.2,2548-2566).
gtaatttgggtaacaataa

SEQ ID NO: 788201 - DNA, 19 bp, Mus musculus
  siRNA target sequence for B630019K06Rik (NM_175327.2,1282-1300).
ccgatccctgcgaattcct

SEQ ID NO: 788202 - DNA, 19 bp, Mus musculus
  siRNA target sequence for B630019K06Rik (NM_175327.2,1283-1301).
cgatccctgcgaattcctt

SEQ ID NO: 788203 - DNA, 19 bp, Mus musculus
  siRNA target sequence for B630019K06Rik (NM_175327.2,1284-1302).
gatccctgcgaattcctta

SEQ ID NO: 788204 - DNA, 19 bp, Mus musculus
  siRNA target sequence for B630019K06Rik (NM_175327.2,1288-1306).
cctgcgaattccttagaga

SEQ ID NO: 788205 - DNA, 19 bp, Mus musculus
  siRNA target sequence for B630019K06Rik (NM_175327.2,1315-1333).
ctgagcccctagacatcaa

SEQ ID NO: 788206 - DNA, 19 bp, Mus musculus
  siRNA target sequence for 1620401E04Rik (NM_175329.3,595-613).
cttcagtgggggaaattca

SEQ ID NO: 788207 - DNA, 19 bp, Mus musculus
  siRNA target sequence for C630002B14Rik (NM_175331.2,222-240).
cccctctggagggatgaat

SEQ ID NO: 788208 - DNA, 19 bp, Mus musculus
  siRNA target sequence for C630002B14Rik (NM_175331.2,233-251).
ggatgaatccttgattaca

SEQ ID NO: 788209 - DNA, 19 bp, Mus musculus
  siRNA target sequence for C630002B14Rik (NM_175331.2,245-263).
gattacatctgattgtagt

SEQ ID NO: 788210 - DNA, 19 bp, Mus musculus
  siRNA target sequence for C630002B14Rik (NM_175331.2,326-344).
gtttaatggcgttttcgtt

SEQ ID NO: 788211 - DNA, 19 bp, Mus musculus
  siRNA target sequence for C630002B14Rik (NM_175331.2,348-366).
gacgccacgttcattgcaa

SEQ ID NO: 788212 - DNA, 19 bp, Mus musculus
  siRNA target sequence for C630002B14Rik (NM_175331.2,617-635).
cttgcgctctggcatctta

SEQ ID NO: 788213 - DNA, 19 bp, Mus musculus
  siRNA target sequence for E130012A19Rik (NM_175332.2,1183-1201).
ccctggacactccaagttt

SEQ ID NO: 788214 - DNA, 19 bp, Mus musculus
  siRNA target sequence for E130012A19Rik (NM_175332.2,1235-1253).
ccgtggagcagccaagaaa

SEQ ID NO: 788215 - DNA, 19 bp, Mus musculus
  siRNA target sequence for D930008C07Rik (NM_175334.2,268-286).
cggacctcaaccttaatga

SEQ ID NO: 788216 - DNA, 19 bp, Mus musculus
  siRNA target sequence for D930008C07Rik (NM_175334.2,325-343).
cagtgcccgacgaagacat

SEQ ID NO: 788217 - DNA, 19 bp, Mus musculus
  siRNA target sequence for D930008C07Rik (NM_175334.2,416-434).
cctggcccaggacattaat

SEQ ID NO: 788218 - DNA, 19 bp, Mus musculus
  siRNA target sequence for D930008C07Rik (NM_175334.2,419-437).
ggcccaggacattaatatt

SEQ ID NO: 788219 - DNA, 19 bp, Mus musculus
  siRNA target sequence for D930008C07Rik (NM_175334.2,423-441).
caggacattaatattaaga

SEQ ID NO: 788220 - DNA, 19 bp, Mus musculus
  siRNA target sequence for D930008C07Rik (NM_175334.2,425-443).
ggacattaatattaagact

SEQ ID NO: 788221 - DNA, 19 bp, Mus musculus
  siRNA target sequence for D930008C07Rik (NM_175334.2,600-618).
caacctggggtggataatt

SEQ ID NO: 788222 - DNA, 19 bp, Mus musculus
  siRNA target sequence for D930008C07Rik (NM_175334.2,650-668).
ggctcaaagtgcacaaaga

SEQ ID NO: 788223 - DNA, 19 bp, Mus musculus
  siRNA target sequence for D930008C07Rik (NM_175334.2,670-688).
ccctcacgagtgtggtatt

SEQ ID NO: 788224 - DNA, 19 bp, Mus musculus
  siRNA target sequence for D930008C07Rik (NM_175334.2,671-689).
cctcacgagtgtggtatta

SEQ ID NO: 788225 - DNA, 19 bp, Mus musculus
  siRNA target sequence for D930008C07Rik (NM_175334.2,674-692).
cacgagtgtggtattacct

SEQ ID NO: 788226 - DNA, 19 bp, Mus musculus
  siRNA target sequence for D930008C07Rik (NM_175334.2,848-866).
ctcccacagtcccttagat

SEQ ID NO: 788227 - DNA, 19 bp, Mus musculus
  siRNA target sequence for D930008C07Rik (NM_175334.2,1015-1033).
gtcaccagtcaccaagtaa

SEQ ID NO: 788228 - DNA, 19 bp, Mus musculus
  siRNA target sequence for D930008C07Rik (NM_175334.2,1022-1040).
gtcaccaagtaacttgaat

SEQ ID NO: 788229 - DNA, 19 bp, Mus musculus
  siRNA target sequence for D930008C07Rik (NM_175334.2,1043-1061).
gaaccccgtgaataaccaa

SEQ ID NO: 788230 - DNA, 19 bp, Mus musculus
  siRNA target sequence for D930008C07Rik (NM_175334.2,1071-1089).
ctagactatggcaatacaa

SEQ ID NO: 788231 - DNA, 19 bp, Mus musculus
  siRNA target sequence for D930008C07Rik (NM_175334.2,1153-1171).
cagctttgatggcatatct

SEQ ID NO: 788232 - DNA, 19 bp, Mus musculus
  siRNA target sequence for D930008C07Rik (NM_175334.2,1199-1217).
cgagcagaactccttgttt

SEQ ID NO: 788233 - DNA, 19 bp, Mus musculus
  siRNA target sequence for D930008C07Rik (NM_175334.2,1203-1221).
cagaactccttgtttctga

SEQ ID NO: 788234 - DNA, 19 bp, Mus musculus
  siRNA target sequence for D930008C07Rik (NM_175334.2,1553-1571).
gtaccaagacccaacacaa

SEQ ID NO: 788235 - DNA, 19 bp, Mus musculus
  siRNA target sequence for D930008C07Rik (NM_175334.2,2312-2330).
gggcttgcctggcttaagt

SEQ ID NO: 788236 - DNA, 19 bp, Mus musculus
  siRNA target sequence for 5730453H04Rik (NM_175338.2,4-22).
gcgtataagaggggttatt

SEQ ID NO: 788237 - DNA, 19 bp, Mus musculus
  siRNA target sequence for 5730453H04Rik (NM_175338.2,5-23).
cgtataagaggggttattt

SEQ ID NO: 788238 - DNA, 19 bp, Mus musculus
  siRNA target sequence for 5730453H04Rik (NM_175338.2,75-93).
ctttttcgatccaaacaca

SEQ ID NO: 788239 - DNA, 19 bp, Mus musculus
  siRNA target sequence for 5730453H04Rik (NM_175338.2,285-303).
gaaaggtctcattgattat

SEQ ID NO: 788240 - DNA, 19 bp, Mus musculus
  siRNA target sequence for 5730453H04Rik (NM_175338.2,308-326).
ccttcaaggagctatgtga

SEQ ID NO: 788241 - DNA, 19 bp, Mus musculus
  siRNA target sequence for 5730453H04Rik (NM_175338.2,331-349).
gagtgcgaatgggaagaaa

SEQ ID NO: 788242 - DNA, 19 bp, Mus musculus
  siRNA target sequence for 5730453H04Rik (NM_175338.2,333-351).
gtgcgaatgggaagaaata

SEQ ID NO: 788243 - DNA, 19 bp, Mus musculus
  siRNA target sequence for 5730453H04Rik (NM_175338.2,399-417).
gaagaccggcagtcagtat

SEQ ID NO: 788244 - DNA, 19 bp, Mus musculus
  siRNA target sequence for 5730453H04Rik (NM_175338.2,404-422).
ccggcagtcagtatgacat

SEQ ID NO: 788245 - DNA, 19 bp, Mus musculus
  siRNA target sequence for 5730453H04Rik (NM_175338.2,405-423).
cggcagtcagtatgacatt

SEQ ID NO: 788246 - DNA, 19 bp, Mus musculus
  siRNA target sequence for 5730453H04Rik (NM_175338.2,408-426).
cagtcagtatgacattcaa

SEQ ID NO: 788247 - DNA, 19 bp, Mus musculus
  siRNA target sequence for 5730453H04Rik (NM_175338.2,410-428).
gtcagtatgacattcaaga

SEQ ID NO: 788248 - DNA, 19 bp, Mus musculus
  siRNA target sequence for 5730453H04Rik (NM_175338.2,455-473).
ggaagttcttcgatcaata

SEQ ID NO: 788249 - DNA, 19 bp, Mus musculus
  siRNA target sequence for 5730453H04Rik (NM_175338.2,497-515).
cacagtttgctgacatgat

SEQ ID NO: 788250 - DNA, 19 bp, Mus musculus
  siRNA target sequence for 5730453H04Rik (NM_175338.2,557-575).
ggagtgtcaacgatgatgt

SEQ ID NO: 788251 - DNA, 19 bp, Mus musculus
  siRNA target sequence for 5730453H04Rik (NM_175338.2,560-578).
gtgtcaacgatgatgtttt

SEQ ID NO: 788252 - DNA, 19 bp, Mus musculus
  siRNA target sequence for 5730453H04Rik (NM_175338.2,590-608).
gacacgactccgtgagtaa

SEQ ID NO: 788253 - DNA, 19 bp, Mus musculus
  siRNA target sequence for 5730453H04Rik (NM_175338.2,592-610).
cacgactccgtgagtaaga

SEQ ID NO: 788254 - DNA, 19 bp, Mus musculus
  siRNA target sequence for 5730453H04Rik (NM_175338.2,594-612).
cgactccgtgagtaagatt

SEQ ID NO: 788255 - DNA, 19 bp, Mus musculus
  siRNA target sequence for 5730453H04Rik (NM_175338.2,595-613).
gactccgtgagtaagattt

SEQ ID NO: 788256 - DNA, 19 bp, Mus musculus
  siRNA target sequence for 5730453H04Rik (NM_175338.2,626-644).
gtgtcagaaatctaaccat

SEQ ID NO: 788257 - DNA, 19 bp, Mus musculus
  siRNA target sequence for 5730453H04Rik (NM_175338.2,726-744).
ctcgatcgcagaaggtata

SEQ ID NO: 788258 - DNA, 19 bp, Mus musculus
  siRNA target sequence for 5730453H04Rik (NM_175338.2,1267-1285).
ggtttgcctagcccttata

SEQ ID NO: 788259 - DNA, 19 bp, Mus musculus
  siRNA target sequence for 5730453H04Rik (NM_175338.2,1268-1286).
gtttgcctagcccttataa

SEQ ID NO: 788260 - DNA, 19 bp, Mus musculus
  siRNA target sequence for 5730453H04Rik (NM_175338.2,1380-1398).
cgatgctacgggcaattct

SEQ ID NO: 788261 - DNA, 19 bp, Mus musculus
  siRNA target sequence for 5730453H04Rik (NM_175338.2,1384-1402).
gctacgggcaattcttctt

SEQ ID NO: 788262 - DNA, 19 bp, Mus musculus
  siRNA target sequence for 5730453H04Rik (NM_175338.2,1385-1403).
ctacgggcaattcttctta

SEQ ID NO: 788263 - DNA, 19 bp, Mus musculus
  siRNA target sequence for 5730453H04Rik (NM_175338.2,1397-1415).
cttcttactcctattccta

SEQ ID NO: 788264 - DNA, 19 bp, Mus musculus
  siRNA target sequence for 6030448M23Rik (NM_175339.2,536-554).
gggagatacagcaaaacct

SEQ ID NO: 788265 - DNA, 19 bp, Mus musculus
  siRNA target sequence for 6030448M23Rik (NM_175339.2,546-564).
gcaaaaccttactttgtga

SEQ ID NO: 788266 - DNA, 19 bp, Mus musculus
  siRNA target sequence for 6030448M23Rik (NM_175339.2,547-565).
caaaaccttactttgtgaa

SEQ ID NO: 788267 - DNA, 19 bp, Mus musculus
  siRNA target sequence for 6030448M23Rik (NM_175339.2,569-587).
cactaaagaccgtggaatt

SEQ ID NO: 788268 - DNA, 19 bp, Mus musculus
  siRNA target sequence for 6030448M23Rik (NM_175339.2,571-589).
ctaaagaccgtggaattat

SEQ ID NO: 788269 - DNA, 19 bp, Mus musculus
  siRNA target sequence for 6030448M23Rik (NM_175339.2,578-596).
ccgtggaattattgatgat

SEQ ID NO: 788270 - DNA, 19 bp, Mus musculus
  siRNA target sequence for 6030448M23Rik (NM_175339.2,580-598).
gtggaattattgatgatga

SEQ ID NO: 788271 - DNA, 19 bp, Mus musculus
  siRNA target sequence for 6030448M23Rik (NM_175339.2,614-632).
ccatccccaacaagattat

SEQ ID NO: 788272 - DNA, 19 bp, Mus musculus
  siRNA target sequence for 6030448M23Rik (NM_175339.2,698-716).
gatatcacccgggaactat

SEQ ID NO: 788273 - DNA, 19 bp, Mus musculus
  siRNA target sequence for 6030448M23Rik (NM_175339.2,725-743).
ccccaggaaaggactgtat

SEQ ID NO: 788274 - DNA, 19 bp, Mus musculus
  siRNA target sequence for 6030448M23Rik (NM_175339.2,793-811).
ctgcttggatgaatgataa

SEQ ID NO: 788275 - DNA, 19 bp, Mus musculus
  siRNA target sequence for 6030448M23Rik (NM_175339.2,807-825).
gataaccacaaagatcaaa

SEQ ID NO: 788276 - DNA, 19 bp, Mus musculus
  siRNA target sequence for 6030448M23Rik (NM_175339.2,881-899).
caagcccggacctaggatt

SEQ ID NO: 788277 - DNA, 19 bp, Mus musculus
  siRNA target sequence for 6030448M23Rik (NM_175339.2,982-1000).
ctgtgagaaggctgtttca

SEQ ID NO: 788278 - DNA, 19 bp, Mus musculus
  siRNA target sequence for 6030448M23Rik (NM_175339.2,1094-1112).
cttcatccaaataagtgtt

SEQ ID NO: 788279 - DNA, 19 bp, Mus musculus
  siRNA target sequence for 6030448M23Rik (NM_175339.2,1097-1115).
catccaaataagtgttgtt

SEQ ID NO: 788280 - DNA, 19 bp, Mus musculus
  siRNA target sequence for 6030448M23Rik (NM_175339.2,1121-1139).
cagtcatgagccctttaat

SEQ ID NO: 788281 - DNA, 19 bp, Mus musculus
  siRNA target sequence for 6030448M23Rik (NM_175339.2,1123-1141).
gtcatgagccctttaatgt

SEQ ID NO: 788282 - DNA, 19 bp, Mus musculus
  siRNA target sequence for 6030448M23Rik (NM_175339.2,1125-1143).
catgagccctttaatgtga

SEQ ID NO: 788283 - DNA, 19 bp, Mus musculus
  siRNA target sequence for 6030448M23Rik (NM_175339.2,1133-1151).
ctttaatgtgagtgtgtta

SEQ ID NO: 788284 - DNA, 19 bp, Mus musculus
  siRNA target sequence for Nhlrc1 (NM_175340.2,413-431).
ggtgggggaccctagtgaa

SEQ ID NO: 788285 - DNA, 19 bp, Mus musculus
  siRNA target sequence for Nhlrc1 (NM_175340.2,494-512).
gacgggtcaagatctttga

SEQ ID NO: 788286 - DNA, 19 bp, Mus musculus
  siRNA target sequence for Nhlrc1 (NM_175340.2,557-575).
cagcgcacgacgtgaagta

SEQ ID NO: 788287 - DNA, 19 bp, Mus musculus
  siRNA target sequence for Nhlrc1 (NM_175340.2,636-654).
ctccctcaaagtgtttgat

SEQ ID NO: 788288 - DNA, 19 bp, Mus musculus
  siRNA target sequence for Nhlrc1 (NM_175340.2,711-729).
ggagatcacccctcacaat

SEQ ID NO: 788289 - DNA, 19 bp, Mus musculus
  siRNA target sequence for Nhlrc1 (NM_175340.2,905-923).
ggaggactggctgtaacaa

SEQ ID NO: 788290 - DNA, 19 bp, Mus musculus
  siRNA target sequence for Nhlrc1 (NM_175340.2,1111-1129).
gccctgaagcctataatca

SEQ ID NO: 788291 - DNA, 19 bp, Mus musculus
  siRNA target sequence for Nhlrc1 (NM_175340.2,1113-1131).
cctgaagcctataatcact

SEQ ID NO: 788292 - DNA, 19 bp, Mus musculus
  siRNA target sequence for Nhlrc1 (NM_175340.2,1159-1177).
gccttcaccaaggagaatt

SEQ ID NO: 788293 - DNA, 19 bp, Mus musculus
  siRNA target sequence for Nhlrc1 (NM_175340.2,1164-1182).
caccaaggagaattctctt

SEQ ID NO: 788294 - DNA, 19 bp, Mus musculus
  siRNA target sequence for Nhlrc1 (NM_175340.2,1192-1210).
gatactgcatcccattcta

SEQ ID NO: 788295 - DNA, 19 bp, Mus musculus
  siRNA target sequence for Nhlrc1 (NM_175340.2,1196-1214).
ctgcatcccattctataaa

SEQ ID NO: 788296 - DNA, 19 bp, Mus musculus
  siRNA target sequence for F730003B03Rik (NM_175344.3,360-378).
catcctcgtgtatgaagat

SEQ ID NO: 788297 - DNA, 19 bp, Mus musculus
  siRNA target sequence for F730003B03Rik (NM_175344.3,482-500).
caacaagatctgtttctga

SEQ ID NO: 788298 - DNA, 19 bp, Mus musculus
  siRNA target sequence for F730003B03Rik (NM_175344.3,488-506).
gatctgtttctgatgacaa

SEQ ID NO: 788299 - DNA, 19 bp, Mus musculus
  siRNA target sequence for F730003B03Rik (NM_175344.3,502-520).
gacaagcttgtgttcgtaa

SEQ ID NO: 788300 - DNA, 19 bp, Mus musculus
  siRNA target sequence for F730003B03Rik (NM_175344.3,504-522).
caagcttgtgttcgtaaaa

SEQ ID NO: 788301 - DNA, 19 bp, Mus musculus
  siRNA target sequence for F730003B03Rik (NM_175344.3,710-728).
gccggatgaatgatttcta

SEQ ID NO: 788302 - DNA, 19 bp, Mus musculus
  siRNA target sequence for F730003B03Rik (NM_175344.3,713-731).
ggatgaatgatttctacat

SEQ ID NO: 788303 - DNA, 19 bp, Mus musculus
  siRNA target sequence for F730003B03Rik (NM_175344.3,726-744).
ctacatcctcgatagagat

SEQ ID NO: 788304 - DNA, 19 bp, Mus musculus
  siRNA target sequence for F730003B03Rik (NM_175344.3,764-782).
ccagaagccgcattgttta

SEQ ID NO: 788305 - DNA, 19 bp, Mus musculus
  siRNA target sequence for F730003B03Rik (NM_175344.3,767-785).
gaagccgcattgtttattt

SEQ ID NO: 788306 - DNA, 19 bp, Mus musculus
  siRNA target sequence for F730003B03Rik (NM_175344.3,792-810).
ctctcgggtcaaataccaa

SEQ ID NO: 788307 - DNA, 19 bp, Mus musculus
  siRNA target sequence for F730003B03Rik (NM_175344.3,797-815).
gggtcaaataccaagtgat

SEQ ID NO: 788308 - DNA, 19 bp, Mus musculus
  siRNA target sequence for F730003B03Rik (NM_175344.3,813-831).
gatgaacaacgttaacaaa

SEQ ID NO: 788309 - DNA, 19 bp, Mus musculus
  siRNA target sequence for F730003B03Rik (NM_175344.3,852-870).
cagctctggaatctacaaa

SEQ ID NO: 788310 - DNA, 19 bp, Mus musculus
  siRNA target sequence for F730003B03Rik (NM_175344.3,883-901).
ctgcacgactgcagattca

SEQ ID NO: 788311 - DNA, 19 bp, Mus musculus
  siRNA target sequence for F730003B03Rik (NM_175344.3,907-925).
gagtcggaggacatcagtt

SEQ ID NO: 788312 - DNA, 19 bp, Mus musculus
  siRNA target sequence for F730003B03Rik (NM_175344.3,960-978).
ggctcaccctcggagtata

SEQ ID NO: 788313 - DNA, 19 bp, Mus musculus
  siRNA target sequence for F730003B03Rik (NM_175344.3,961-979).
gctcaccctcggagtatat

SEQ ID NO: 788314 - DNA, 19 bp, Mus musculus
  siRNA target sequence for F730003B03Rik (NM_175344.3,962-980).
ctcaccctcggagtatata

SEQ ID NO: 788315 - DNA, 19 bp, Mus musculus
  siRNA target sequence for F730003B03Rik (NM_175344.3,964-982).
caccctcggagtatataca

SEQ ID NO: 788316 - DNA, 19 bp, Mus musculus
  siRNA target sequence for F730003B03Rik (NM_175344.3,967-985).
cctcggagtatatacaaga

SEQ ID NO: 788317 - DNA, 19 bp, Mus musculus
  siRNA target sequence for F730003B03Rik (NM_175344.3,968-986).
ctcggagtatatacaagaa

SEQ ID NO: 788318 - DNA, 19 bp, Mus musculus
  siRNA target sequence for F730003B03Rik (NM_175344.3,996-1014).
ggatcttatcaggaagtat

SEQ ID NO: 788319 - DNA, 19 bp, Mus musculus
  siRNA target sequence for F730003B03Rik (NM_175344.3,1011-1029).
gtattacggcgagaagatt

SEQ ID NO: 788320 - DNA, 19 bp, Mus musculus
  siRNA target sequence for F730003B03Rik (NM_175344.3,1104-1122).
cctctatggatatcttgat

SEQ ID NO: 788321 - DNA, 19 bp, Mus musculus
  siRNA target sequence for F730003B03Rik (NM_175344.3,1112-1130).
gatatcttgatcaggataa

SEQ ID NO: 788322 - DNA, 19 bp, Mus musculus
  siRNA target sequence for F730003B03Rik (NM_175344.3,1235-1253).
gtgaatcttctaagaaatt

SEQ ID NO: 788323 - DNA, 19 bp, Mus musculus
  siRNA target sequence for F730003B03Rik (NM_175344.3,1237-1255).
gaatcttctaagaaattgt

SEQ ID NO: 788324 - DNA, 19 bp, Mus musculus
  siRNA target sequence for F730003B03Rik (NM_175344.3,1268-1286).
gttttggaaccctgatctt

SEQ ID NO: 788325 - DNA, 19 bp, Mus musculus
  siRNA target sequence for F730003B03Rik (NM_175344.3,1277-1295).
ccctgatcttcgctgtatt

SEQ ID NO: 788326 - DNA, 19 bp, Mus musculus
  siRNA target sequence for F730003B03Rik (NM_175344.3,1340-1358).
gccaggcagagctcgaata

SEQ ID NO: 788327 - DNA, 19 bp, Mus musculus
  siRNA target sequence for F730003B03Rik (NM_175344.3,1341-1359).
ccaggcagagctcgaatat

SEQ ID NO: 788328 - DNA, 19 bp, Mus musculus
  siRNA target sequence for F730003B03Rik (NM_175344.3,1421-1439).
gcaatcacgtggtgataaa

SEQ ID NO: 788329 - DNA, 19 bp, Mus musculus
  siRNA target sequence for F730003B03Rik (NM_175344.3,1456-1474).
gaggagcgcatcccattta

SEQ ID NO: 788330 - DNA, 19 bp, Mus musculus
  siRNA target sequence for F730003B03Rik (NM_175344.3,1459-1477).
gagcgcatcccatttacca

SEQ ID NO: 788331 - DNA, 19 bp, Mus musculus
  siRNA target sequence for F730003B03Rik (NM_175344.3,1508-1526).
gtgcgagcgccgtcttctt

SEQ ID NO: 788332 - DNA, 19 bp, Mus musculus
  siRNA target sequence for F730003B03Rik (NM_175344.3,1510-1528).
gcgagcgccgtcttcttct

SEQ ID NO: 788333 - DNA, 19 bp, Mus musculus
  siRNA target sequence for F730003B03Rik (NM_175344.3,1548-1566).
ctctgtgatcgggatcatt

SEQ ID NO: 788334 - DNA, 19 bp, Mus musculus
  siRNA target sequence for F730003B03Rik (NM_175344.3,1552-1570).
gtgatcgggatcattgtct

SEQ ID NO: 788335 - DNA, 19 bp, Mus musculus
  siRNA target sequence for F730003B03Rik (NM_175344.3,1576-1594).
ctgtccgtgttcatcgtat

SEQ ID NO: 788336 - DNA, 19 bp, Mus musculus
  siRNA target sequence for F730003B03Rik (NM_175344.3,1628-1646).
cagacccgatccagaagta

SEQ ID NO: 788337 - DNA, 19 bp, Mus musculus
  siRNA target sequence for F730003B03Rik (NM_175344.3,1766-1784).
ggacccagacggattatga

SEQ ID NO: 788338 - DNA, 19 bp, Mus musculus
  siRNA target sequence for F730003B03Rik (NM_175344.3,1769-1787).
cccagacggattatgagaa

SEQ ID NO: 788339 - DNA, 19 bp, Mus musculus
  siRNA target sequence for F730003B03Rik (NM_175344.3,1841-1859).
gcttctacatcgcattctt

SEQ ID NO: 788340 - DNA, 19 bp, Mus musculus
  siRNA target sequence for F730003B03Rik (NM_175344.3,1899-1917).
cttgctgggcaaatacaga

SEQ ID NO: 788341 - DNA, 19 bp, Mus musculus
  siRNA target sequence for F730003B03Rik (NM_175344.3,1961-1979).
cacagctgacgatcatcat

SEQ ID NO: 788342 - DNA, 19 bp, Mus musculus
  siRNA target sequence for F730003B03Rik (NM_175344.3,1989-2007).
ggcaatctggaacaacata

SEQ ID NO: 788343 - DNA, 19 bp, Mus musculus
  siRNA target sequence for F730003B03Rik (NM_175344.3,2019-2037).
gctcccatgggttatgaat

SEQ ID NO: 788344 - DNA, 19 bp, Mus musculus
  siRNA target sequence for F730003B03Rik (NM_175344.3,2022-2040).
cccatgggttatgaatcta

SEQ ID NO: 788345 - DNA, 19 bp, Mus musculus
  siRNA target sequence for F730003B03Rik (NM_175344.3,2023-2041).
ccatgggttatgaatctaa

SEQ ID NO: 788346 - DNA, 19 bp, Mus musculus
  siRNA target sequence for F730003B03Rik (NM_175344.3,2028-2046).
ggttatgaatctaattgga

SEQ ID NO: 788347 - DNA, 19 bp, Mus musculus
  siRNA target sequence for F730003B03Rik (NM_175344.3,2061-2079).
ctcgggatcagaaaagata

SEQ ID NO: 788348 - DNA, 19 bp, Mus musculus
  siRNA target sequence for F730003B03Rik (NM_175344.3,2127-2145).
gggattgttctatgagtat

SEQ ID NO: 788349 - DNA, 19 bp, Mus musculus
  siRNA target sequence for F730003B03Rik (NM_175344.3,2140-2158).
gagtatcttgaaatgatta

SEQ ID NO: 788350 - DNA, 19 bp, Mus musculus
  siRNA target sequence for F730003B03Rik (NM_175344.3,2163-2181).
gtttgggttcgtcacttta

SEQ ID NO: 788351 - DNA, 19 bp, Mus musculus
  siRNA target sequence for F730003B03Rik (NM_175344.3,2168-2186).
ggttcgtcactttatttgt

SEQ ID NO: 788352 - DNA, 19 bp, Mus musculus
  siRNA target sequence for F730003B03Rik (NM_175344.3,2212-2230).
ctggctctggtgaacaata

SEQ ID NO: 788353 - DNA, 19 bp, Mus musculus
  siRNA target sequence for F730003B03Rik (NM_175344.3,2215-2233).
gctctggtgaacaatattt

SEQ ID NO: 788354 - DNA, 19 bp, Mus musculus
  siRNA target sequence for F730003B03Rik (NM_175344.3,2277-2295).
gcgcatggtgcccgaaaaa

SEQ ID NO: 788355 - DNA, 19 bp, Mus musculus
  siRNA target sequence for F730003B03Rik (NM_175344.3,2319-2337).
gcccatcatgcaaggaata

SEQ ID NO: 788356 - DNA, 19 bp, Mus musculus
  siRNA target sequence for F730003B03Rik (NM_175344.3,2355-2373).
gaccaacgccatgatcatt

SEQ ID NO: 788357 - DNA, 19 bp, Mus musculus
  siRNA target sequence for F730003B03Rik (NM_175344.3,2398-2416).
cgcctggtgtattattggt

SEQ ID NO: 788358 - DNA, 19 bp, Mus musculus
  siRNA target sequence for F730003B03Rik (NM_175344.3,2433-2451).
ctacggggaccacacttat

SEQ ID NO: 788359 - DNA, 19 bp, Mus musculus
  siRNA target sequence for F730003B03Rik (NM_175344.3,2437-2455).
ggggaccacacttattaca

SEQ ID NO: 788360 - DNA, 19 bp, Mus musculus
  siRNA target sequence for F730003B03Rik (NM_175344.3,2535-2553).
cattgggcttggtaactat

SEQ ID NO: 788361 - DNA, 19 bp, Mus musculus
  siRNA target sequence for F730003B03Rik (NM_175344.3,2539-2557).
gggcttggtaactatacct

SEQ ID NO: 788362 - DNA, 19 bp, Mus musculus
  siRNA target sequence for F730003B03Rik (NM_175344.3,2540-2558).
ggcttggtaactatacctt

SEQ ID NO: 788363 - DNA, 19 bp, Mus musculus
  siRNA target sequence for F730003B03Rik (NM_175344.3,2602-2620).
gagtataaacacaacatct

SEQ ID NO: 788364 - DNA, 19 bp, Mus musculus
  siRNA target sequence for F730003B03Rik (NM_175344.3,2662-2680).
gtcatggagcacatcatct

SEQ ID NO: 788365 - DNA, 19 bp, Mus musculus
  siRNA target sequence for F730003B03Rik (NM_175344.3,2719-2737).
gtgtccaaaatcacgaaaa

SEQ ID NO: 788366 - DNA, 19 bp, Mus musculus
  siRNA target sequence for F730003B03Rik (NM_175344.3,2791-2809).
ctcaaagacctgaccaaaa

SEQ ID NO: 788367 - DNA, 19 bp, Mus musculus
  siRNA target sequence for AI115454 (NM_175345.2,881-899).
gcgggagtctcattgctta

SEQ ID NO: 788368 - DNA, 19 bp, Mus musculus
  siRNA target sequence for AI115454 (NM_175345.2,1117-1135).
ggaccctgttttaatctca

SEQ ID NO: 788369 - DNA, 19 bp, Mus musculus
  siRNA target sequence for AI115454 (NM_175345.2,1143-1161).
gtggcatagctcaaatgtt

SEQ ID NO: 788370 - DNA, 19 bp, Mus musculus
  siRNA target sequence for AI115454 (NM_175345.2,1145-1163).
ggcatagctcaaatgttca

SEQ ID NO: 788371 - DNA, 19 bp, Mus musculus
  siRNA target sequence for AI115454 (NM_175345.2,1151-1169).
gctcaaatgttcacaagaa

SEQ ID NO: 788372 - DNA, 19 bp, Mus musculus
  siRNA target sequence for 9830004M20Rik (NM_175347.3,80-98).
cgggtggcacggaagatgt

SEQ ID NO: 788373 - DNA, 19 bp, Mus musculus
  siRNA target sequence for 9830004M20Rik (NM_175347.3,101-119).
gcaatttgttggagaatca

SEQ ID NO: 788374 - DNA, 19 bp, Mus musculus
  siRNA target sequence for 9830004M20Rik (NM_175347.3,102-120).
caatttgttggagaatcat

SEQ ID NO: 788375 - DNA, 19 bp, Mus musculus
  siRNA target sequence for 9830004M20Rik (NM_175347.3,150-168).
gaaggaaagggcgctttat

SEQ ID NO: 788376 - DNA, 19 bp, Mus musculus
  siRNA target sequence for 9830004M20Rik (NM_175347.3,292-310).
gaagctagcctgtccaata

SEQ ID NO: 788377 - DNA, 19 bp, Mus musculus
  siRNA target sequence for 9830004M20Rik (NM_175347.3,295-313).
gctagcctgtccaatacct

SEQ ID NO: 788378 - DNA, 19 bp, Mus musculus
  siRNA target sequence for 9830004M20Rik (NM_175347.3,626-644).
ctcccatagagggtaaaga

SEQ ID NO: 788379 - DNA, 19 bp, Mus musculus
  siRNA target sequence for 9830004M20Rik (NM_175347.3,711-729).
catacctgccggagatgaa

SEQ ID NO: 788380 - DNA, 19 bp, Mus musculus
  siRNA target sequence for 9830004M20Rik (NM_175347.3,954-972).
ggatgctggttcagctata

SEQ ID NO: 788381 - DNA, 19 bp, Mus musculus
  siRNA target sequence for 9830004M20Rik (NM_175347.3,965-983).
cagctatagaggccaataa

SEQ ID NO: 788382 - DNA, 19 bp, Mus musculus
  siRNA target sequence for 9830004M20Rik (NM_175347.3,1113-1131).
gaatggggaagttccattt

SEQ ID NO: 788383 - DNA, 19 bp, Mus musculus
  siRNA target sequence for 9830004M20Rik (NM_175347.3,1344-1362).
gagagggaatcccgtaatt

SEQ ID NO: 788384 - DNA, 19 bp, Mus musculus
  siRNA target sequence for 9830004M20Rik (NM_175347.3,1414-1432).
cgctcccacattgacaaaa

SEQ ID NO: 788385 - DNA, 19 bp, Mus musculus
  siRNA target sequence for 9830004M20Rik (NM_175347.3,1455-1473).
gccagctgacgattactca

SEQ ID NO: 788386 - DNA, 19 bp, Mus musculus
  siRNA target sequence for 9830004M20Rik (NM_175347.3,1483-1501).
cagcgacttcggaagatct

SEQ ID NO: 788387 - DNA, 19 bp, Mus musculus
  siRNA target sequence for 9830004M20Rik (NM_175347.3,1485-1503).
gcgacttcggaagatctat

SEQ ID NO: 788388 - DNA, 19 bp, Mus musculus
  siRNA target sequence for 9830004M20Rik (NM_175347.3,1487-1505).
gacttcggaagatctatca

SEQ ID NO: 788389 - DNA, 19 bp, Mus musculus
  siRNA target sequence for 9830004M20Rik (NM_175347.3,1489-1507).
cttcggaagatctatcata

SEQ ID NO: 788390 - DNA, 19 bp, Mus musculus
  siRNA target sequence for 9830004M20Rik (NM_175347.3,1519-1537).
cccctggagcagtcttaca

SEQ ID NO: 788391 - DNA, 19 bp, Mus musculus
  siRNA target sequence for 9830004M20Rik (NM_175347.3,1520-1538).
ccctggagcagtcttacaa

SEQ ID NO: 788392 - DNA, 19 bp, Mus musculus
  siRNA target sequence for 9830004M20Rik (NM_175347.3,1522-1540).
ctggagcagtcttacaagt

SEQ ID NO: 788393 - DNA, 19 bp, Mus musculus
  siRNA target sequence for 9830004M20Rik (NM_175347.3,1566-1584).
cacagacggggagattact

SEQ ID NO: 788394 - DNA, 19 bp, Mus musculus
  siRNA target sequence for 9830004M20Rik (NM_175347.3,1624-1642).
ggcaaatccaccatgataa

SEQ ID NO: 788395 - DNA, 19 bp, Mus musculus
  siRNA target sequence for 9830004M20Rik (NM_175347.3,1625-1643).
gcaaatccaccatgataaa

SEQ ID NO: 788396 - DNA, 19 bp, Mus musculus
  siRNA target sequence for 9830004M20Rik (NM_175347.3,1647-1665).
cctccttgggttagaagat

SEQ ID NO: 788397 - DNA, 19 bp, Mus musculus
  siRNA target sequence for 9830004M20Rik (NM_175347.3,1648-1666).
ctccttgggttagaagata

SEQ ID NO: 788398 - DNA, 19 bp, Mus musculus
  siRNA target sequence for 9830004M20Rik (NM_175347.3,1663-1681).
gatactcgataccaacttt

SEQ ID NO: 788399 - DNA, 19 bp, Mus musculus
  siRNA target sequence for 9830004M20Rik (NM_175347.3,1710-1728).
gttcactgtccttatgcat

SEQ ID NO: 788400 - DNA, 19 bp, Mus musculus
  siRNA target sequence for 9830004M20Rik (NM_175347.3,1729-1747).
gggcccaagctgaaaacca

SEQ ID NO: 788401 - DNA, 19 bp, Mus musculus
  siRNA target sequence for 9830004M20Rik (NM_175347.3,1731-1749).
gcccaagctgaaaaccatt

SEQ ID NO: 788402 - DNA, 19 bp, Mus musculus
  siRNA target sequence for 9830004M20Rik (NM_175347.3,1758-1776).
cgtcatggctgctgatagt

SEQ ID NO: 788403 - DNA, 19 bp, Mus musculus
  siRNA target sequence for 9830004M20Rik (NM_175347.3,1902-1920).
ccgcaagcaacaagaaaga

SEQ ID NO: 788404 - DNA, 19 bp, Mus musculus
  siRNA target sequence for 9830004M20Rik (NM_175347.3,2044-2062).
ggccgtgagtcccagataa

SEQ ID NO: 788405 - DNA, 19 bp, Mus musculus
  siRNA target sequence for 9830004M20Rik (NM_175347.3,2047-2065).
cgtgagtcccagataagga

SEQ ID NO: 788406 - DNA, 19 bp, Mus musculus
  siRNA target sequence for 9830004M20Rik (NM_175347.3,2048-2066).
gtgagtcccagataaggat

SEQ ID NO: 788407 - DNA, 19 bp, Mus musculus
  siRNA target sequence for 9830004M20Rik (NM_175347.3,2140-2158).
gcccctctcatcaatgtca

SEQ ID NO: 788408 - DNA, 19 bp, Mus musculus
  siRNA target sequence for 9830004M20Rik (NM_175347.3,2223-2241).
ggaactgttcctcaaagaa

SEQ ID NO: 788409 - DNA, 19 bp, Mus musculus
  siRNA target sequence for 9830004M20Rik (NM_175347.3,2290-2308).
gagaacaagatcgctttta

SEQ ID NO: 788410 - DNA, 19 bp, Mus musculus
  siRNA target sequence for 9830004M20Rik (NM_175347.3,2292-2310).
gaacaagatcgcttttatt

SEQ ID NO: 788411 - DNA, 19 bp, Mus musculus
  siRNA target sequence for 9830004M20Rik (NM_175347.3,2295-2313).
caagatcgcttttattcga

SEQ ID NO: 788412 - DNA, 19 bp, Mus musculus
  siRNA target sequence for 9830004M20Rik (NM_175347.3,2321-2339).
ccatccgagtccgaattca

SEQ ID NO: 788413 - DNA, 19 bp, Mus musculus
  siRNA target sequence for 9830004M20Rik (NM_175347.3,2322-2340).
catccgagtccgaattcat

SEQ ID NO: 788414 - DNA, 19 bp, Mus musculus
  siRNA target sequence for 9830004M20Rik (NM_175347.3,2331-2349).
ccgaattcatgccctttta

SEQ ID NO: 788415 - DNA, 19 bp, Mus musculus
  siRNA target sequence for 9830004M20Rik (NM_175347.3,2333-2351).
gaattcatgcccttttagt

SEQ ID NO: 788416 - DNA, 19 bp, Mus musculus
  siRNA target sequence for 9830004M20Rik (NM_175347.3,2377-2395).
gacaaaatgaccttcttca

SEQ ID NO: 788417 - DNA, 19 bp, Mus musculus
  siRNA target sequence for 9830004M20Rik (NM_175347.3,2425-2443).
gtggaagatcctgataaat

SEQ ID NO: 788418 - DNA, 19 bp, Mus musculus
  siRNA target sequence for 9830004M20Rik (NM_175347.3,2428-2446).
gaagatcctgataaattct

SEQ ID NO: 788419 - DNA, 19 bp, Mus musculus
  siRNA target sequence for 9830004M20Rik (NM_175347.3,2497-2515).
cccaaccgtgaggcttata

SEQ ID NO: 788420 - DNA, 19 bp, Mus musculus
  siRNA target sequence for 9830004M20Rik (NM_175347.3,2498-2516).
ccaaccgtgaggcttataa

SEQ ID NO: 788421 - DNA, 19 bp, Mus musculus
  siRNA target sequence for 9830004M20Rik (NM_175347.3,2508-2526).
ggcttataaggacttcttt

SEQ ID NO: 788422 - DNA, 19 bp, Mus musculus
  siRNA target sequence for 9830004M20Rik (NM_175347.3,2646-2664).
cattgggcttgggaagaat

SEQ ID NO: 788423 - DNA, 19 bp, Mus musculus
  siRNA target sequence for 9830004M20Rik (NM_175347.3,2668-2686).
ggtgctcctaactgtgata

SEQ ID NO: 788424 - DNA, 19 bp, Mus musculus
  siRNA target sequence for 4933402B14Rik (NM_175350.2,181-199).
gggaacctatgtaatcaaa

SEQ ID NO: 788425 - DNA, 19 bp, Mus musculus
  siRNA target sequence for 4933402B14Rik (NM_175350.2,358-376).
ggcgcttcaaccatgtaat

SEQ ID NO: 788426 - DNA, 19 bp, Mus musculus
  siRNA target sequence for 4933402B14Rik (NM_175350.2,438-456).
cgtttgatggcaactctaa

SEQ ID NO: 788427 - DNA, 19 bp, Mus musculus
  siRNA target sequence for 4933402B14Rik (NM_175350.2,443-461).
gatggcaactctaagtaca

SEQ ID NO: 788428 - DNA, 19 bp, Mus musculus
  siRNA target sequence for 4933402B14Rik (NM_175350.2,453-471).
ctaagtacaaactggatat

SEQ ID NO: 788429 - DNA, 19 bp, Mus musculus
  siRNA target sequence for 4933402B14Rik (NM_175350.2,491-509).
cactggggcaactcagatt

SEQ ID NO: 788430 - DNA, 19 bp, Mus musculus
  siRNA target sequence for 4933402B14Rik (NM_175350.2,495-513).
ggggcaactcagatttcaa

SEQ ID NO: 788431 - DNA, 19 bp, Mus musculus
  siRNA target sequence for 4933402B14Rik (NM_175350.2,647-665).
gttgtgcaaaacaagatct

SEQ ID NO: 788432 - DNA, 19 bp, Mus musculus
  siRNA target sequence for 4933402B14Rik (NM_175350.2,772-790).
ggatgacctgatagtattt

SEQ ID NO: 788433 - DNA, 19 bp, Mus musculus
  siRNA target sequence for 4933402B14Rik (NM_175350.2,819-837).
gcctagtctactatgacaa

SEQ ID NO: 788434 - DNA, 19 bp, Mus musculus
  siRNA target sequence for 4933402B14Rik (NM_175350.2,853-871).
ggtggaactgtggaagaat

SEQ ID NO: 788435 - DNA, 19 bp, Mus musculus
  siRNA target sequence for 4933402B14Rik (NM_175350.2,923-941).
ggactagtcacctattcat

SEQ ID NO: 788436 - DNA, 19 bp, Mus musculus
  siRNA target sequence for 4933402B14Rik (NM_175350.2,924-942).
gactagtcacctattcata

SEQ ID NO: 788437 - DNA, 19 bp, Mus musculus
  siRNA target sequence for 4933402B14Rik (NM_175350.2,926-944).
ctagtcacctattcatact

SEQ ID NO: 788438 - DNA, 19 bp, Mus musculus
  siRNA target sequence for 4933402B14Rik (NM_175350.2,985-1003).
gaactggagcacctttgaa

SEQ ID NO: 788439 - DNA, 19 bp, Mus musculus
  siRNA target sequence for 4933402B14Rik (NM_175350.2,994-1012).
cacctttgaatcggatatt

SEQ ID NO: 788440 - DNA, 19 bp, Mus musculus
  siRNA target sequence for 4933402B14Rik (NM_175350.2,1092-1110).
ggccgaatgtcgagtatca

SEQ ID NO: 788441 - DNA, 19 bp, Mus musculus
  siRNA target sequence for 4933402B14Rik (NM_175350.2,1118-1136).
ggtggccagacaaacaaca

SEQ ID NO: 788442 - DNA, 19 bp, Mus musculus
  siRNA target sequence for 4933402B14Rik (NM_175350.2,1124-1142).
cagacaaacaacaagatta

SEQ ID NO: 788443 - DNA, 19 bp, Mus musculus
  siRNA target sequence for 4933402B14Rik (NM_175350.2,1155-1173).
gaaatgggatctatacctt

SEQ ID NO: 788444 - DNA, 19 bp, Mus musculus
  siRNA target sequence for 4933402B14Rik (NM_175350.2,1182-1200).
ctgtggtagatccatacta

SEQ ID NO: 788445 - DNA, 19 bp, Mus musculus
  siRNA target sequence for 4933402B14Rik (NM_175350.2,1184-1202).
gtggtagatccatactaca

SEQ ID NO: 788446 - DNA, 19 bp, Mus musculus
  siRNA target sequence for 4933402B14Rik (NM_175350.2,1316-1334).
gcgtggctggcctatgcta

SEQ ID NO: 788447 - DNA, 19 bp, Mus musculus
  siRNA target sequence for 4933402B14Rik (NM_175350.2,1317-1335).
cgtggctggcctatgctat

SEQ ID NO: 788448 - DNA, 19 bp, Mus musculus
  siRNA target sequence for AA407659 (NM_175352.2,307-325).
cgagaactacctgtgtaaa

SEQ ID NO: 788449 - DNA, 19 bp, Mus musculus
  siRNA target sequence for AA407659 (NM_175352.2,338-356).
gtctacagtatcgacttta

SEQ ID NO: 788450 - DNA, 19 bp, Mus musculus
  siRNA target sequence for AA407659 (NM_175352.2,350-368).
gactttacccgcttcaaga

SEQ ID NO: 788451 - DNA, 19 bp, Mus musculus
  siRNA target sequence for AA407659 (NM_175352.2,384-402).
cggggacagttctctttga

SEQ ID NO: 788452 - DNA, 19 bp, Mus musculus
  siRNA target sequence for AA407659 (NM_175352.2,387-405).
ggacagttctctttgagat

SEQ ID NO: 788453 - DNA, 19 bp, Mus musculus
  siRNA target sequence for AA407659 (NM_175352.2,454-472).
cgtcgacgtggatatcagt

SEQ ID NO: 788454 - DNA, 19 bp, Mus musculus
  siRNA target sequence for AA407659 (NM_175352.2,469-487).
cagtgtgggccgtttcgtt

SEQ ID NO: 788455 - DNA, 19 bp, Mus musculus
  siRNA target sequence for AA407659 (NM_175352.2,475-493).
gggccgtttcgttcgatat

SEQ ID NO: 788456 - DNA, 19 bp, Mus musculus
  siRNA target sequence for AA407659 (NM_175352.2,477-495).
gccgtttcgttcgatatca

SEQ ID NO: 788457 - DNA, 19 bp, Mus musculus
  siRNA target sequence for AA407659 (NM_175352.2,479-497).
cgtttcgttcgatatcagt

SEQ ID NO: 788458 - DNA, 19 bp, Mus musculus
  siRNA target sequence for AA407659 (NM_175352.2,480-498).
gtttcgttcgatatcagtt

SEQ ID NO: 788459 - DNA, 19 bp, Mus musculus
  siRNA target sequence for AA407659 (NM_175352.2,753-771).
gcttctactttgttgacaa

SEQ ID NO: 788460 - DNA, 19 bp, Mus musculus
  siRNA target sequence for AA407659 (NM_175352.2,793-811).
ggcggactatgcctataat

SEQ ID NO: 788461 - DNA, 19 bp, Mus musculus
  siRNA target sequence for C030016D13Rik (NM_175354.2,1974-1992).
gtgagccatgcacttatga

SEQ ID NO: 788462 - DNA, 19 bp, Mus musculus
  siRNA target sequence for C030016D13Rik (NM_175354.2,2014-2032).
caaggcagtcgcttacaga

SEQ ID NO: 788463 - DNA, 19 bp, Mus musculus
  siRNA target sequence for C030016D13Rik (NM_175354.2,2048-2066).
gaccctgctttcggaatta

SEQ ID NO: 788464 - DNA, 19 bp, Mus musculus
  siRNA target sequence for C030016D13Rik (NM_175354.2,2086-2104).
cacctccctttttatatct

SEQ ID NO: 788465 - DNA, 19 bp, Mus musculus
  siRNA target sequence for C030016D13Rik (NM_175354.2,2149-2167).
ctccctggacagttgtttt

SEQ ID NO: 788466 - DNA, 19 bp, Mus musculus
  siRNA target sequence for C030016D13Rik (NM_175354.2,2193-2211).
catgcactaggctacatgt

SEQ ID NO: 788467 - DNA, 19 bp, Mus musculus
  siRNA target sequence for C030016D13Rik (NM_175354.2,2197-2215).
cactaggctacatgttact

SEQ ID NO: 788468 - DNA, 19 bp, Mus musculus
  siRNA target sequence for C030016D13Rik (NM_175354.2,2199-2217).
ctaggctacatgttactga

SEQ ID NO: 788469 - DNA, 19 bp, Mus musculus
  siRNA target sequence for E330013P04Rik (NM_175355.2,1282-1300).
caaatgccaccaagttgat

SEQ ID NO: 788470 - DNA, 19 bp, Mus musculus
  siRNA target sequence for E330013P04Rik (NM_175355.2,1316-1334).
ccccgtataccattactgt

SEQ ID NO: 788471 - DNA, 19 bp, Mus musculus
  siRNA target sequence for E330013P04Rik (NM_175355.2,1333-1351).
gtccatctctgcaagactt

SEQ ID NO: 788472 - DNA, 19 bp, Mus musculus
  siRNA target sequence for E330013P04Rik (NM_175355.2,1341-1359).
ctgcaagacttatattcct

SEQ ID NO: 788473 - DNA, 19 bp, Mus musculus
  siRNA target sequence for E330013P04Rik (NM_175355.2,1425-1443).
caaatgaggtccaaagcaa

SEQ ID NO: 788474 - DNA, 19 bp, Mus musculus
  siRNA target sequence for E330013P04Rik (NM_175355.2,1430-1448).
gaggtccaaagcaattcca

SEQ ID NO: 788475 - DNA, 19 bp, Mus musculus
  siRNA target sequence for E330013P04Rik (NM_175355.2,1496-1514).
gggtctgtatcccagaata

SEQ ID NO: 788476 - DNA, 19 bp, Mus musculus
  siRNA target sequence for E330013P04Rik (NM_175355.2,1502-1520).
gtatcccagaatatctctt

SEQ ID NO: 788477 - DNA, 19 bp, Mus musculus
  siRNA target sequence for E330013P04Rik (NM_175355.2,1518-1536).
cttcccgtctcttttgagt

SEQ ID NO: 788478 - DNA, 19 bp, Mus musculus
  siRNA target sequence for E330013P04Rik (NM_175355.2,1522-1540).
ccgtctcttttgagttgaa

SEQ ID NO: 788479 - DNA, 19 bp, Mus musculus
  siRNA target sequence for E330013P04Rik (NM_175355.2,1523-1541).
cgtctcttttgagttgaat

SEQ ID NO: 788480 - DNA, 19 bp, Mus musculus
  siRNA target sequence for 6030457O13Rik (NM_175358.2,70-88).
gggtgccagtgctcgttat

SEQ ID NO: 788481 - DNA, 19 bp, Mus musculus
  siRNA target sequence for 6030457O13Rik (NM_175358.2,71-89).
ggtgccagtgctcgttatt

SEQ ID NO: 788482 - DNA, 19 bp, Mus musculus
  siRNA target sequence for 6030457O13Rik (NM_175358.2,98-116).
cgttctctggtcctactat

SEQ ID NO: 788483 - DNA, 19 bp, Mus musculus
  siRNA target sequence for 6030457O13Rik (NM_175358.2,152-170).
gagtccagcggaaaaagtt

SEQ ID NO: 788484 - DNA, 19 bp, Mus musculus
  siRNA target sequence for 6030457O13Rik (NM_175358.2,154-172).
gtccagcggaaaaagttat

SEQ ID NO: 788485 - DNA, 19 bp, Mus musculus
  siRNA target sequence for 6030457O13Rik (NM_175358.2,156-174).
ccagcggaaaaagttatct

SEQ ID NO: 788486 - DNA, 19 bp, Mus musculus
  siRNA target sequence for 6030457O13Rik (NM_175358.2,157-175).
cagcggaaaaagttatcta

SEQ ID NO: 788487 - DNA, 19 bp, Mus musculus
  siRNA target sequence for 6030457O13Rik (NM_175358.2,214-232).
ggacctactggaagtctat

SEQ ID NO: 788488 - DNA, 19 bp, Mus musculus
  siRNA target sequence for 6030457O13Rik (NM_175358.2,217-235).
cctactggaagtctatctt

SEQ ID NO: 788489 - DNA, 19 bp, Mus musculus
  siRNA target sequence for 6030457O13Rik (NM_175358.2,263-281).
gttccacttgtcctataca

SEQ ID NO: 788490 - DNA, 19 bp, Mus musculus
  siRNA target sequence for 6030457O13Rik (NM_175358.2,287-305).
ggagcgctataaaaatgaa

SEQ ID NO: 788491 - DNA, 19 bp, Mus musculus
  siRNA target sequence for 6030457O13Rik (NM_175358.2,397-415).
gtgaccggtgccatctaat

SEQ ID NO: 788492 - DNA, 19 bp, Mus musculus
  siRNA target sequence for 6030457O13Rik (NM_175358.2,399-417).
gaccggtgccatctaatca

SEQ ID NO: 788493 - DNA, 19 bp, Mus musculus
  siRNA target sequence for 6030457O13Rik (NM_175358.2,619-637).
ccagtgttcgctctaagtt

SEQ ID NO: 788494 - DNA, 19 bp, Mus musculus
  siRNA target sequence for 6030457O13Rik (NM_175358.2,693-711).
ctctttggttaccattgtt

SEQ ID NO: 788495 - DNA, 19 bp, Mus musculus
  siRNA target sequence for 6030457O13Rik (NM_175358.2,818-836).
gcaggtgtttggcgataat

SEQ ID NO: 788496 - DNA, 19 bp, Mus musculus
  siRNA target sequence for 6030457O13Rik (NM_175358.2,822-840).
gtgtttggcgataataaga

SEQ ID NO: 788497 - DNA, 19 bp, Mus musculus
  siRNA target sequence for 6030457O13Rik (NM_175358.2,828-846).
ggcgataataagaagttct

SEQ ID NO: 788498 - DNA, 19 bp, Mus musculus
  siRNA target sequence for 6030457O13Rik (NM_175358.2,890-908).
ccctatgaggtctatgaat

SEQ ID NO: 788499 - DNA, 19 bp, Mus musculus
  siRNA target sequence for 6030457O13Rik (NM_175358.2,892-910).
ctatgaggtctatgaatga

SEQ ID NO: 788500 - DNA, 19 bp, Mus musculus
  siRNA target sequence for 6030457O13Rik (NM_175358.2,959-977).
ggatgatagtcgagattat

SEQ ID NO: 788501 - DNA, 19 bp, Mus musculus
  siRNA target sequence for 0610009H20Rik (NM_175360.2,245-263).
ctcttgatggagtgtgaat

SEQ ID NO: 788502 - DNA, 19 bp, Mus musculus
  siRNA target sequence for 0610009H20Rik (NM_175360.2,301-319).
gggtctggatcctgtgttt

SEQ ID NO: 788503 - DNA, 19 bp, Mus musculus
  siRNA target sequence for 0610009H20Rik (NM_175360.2,316-334).
gtttctagcctttgcaaaa

SEQ ID NO: 788504 - DNA, 19 bp, Mus musculus
  siRNA target sequence for 0610009H20Rik (NM_175360.2,320-338).
ctagcctttgcaaaactct

SEQ ID NO: 788505 - DNA, 19 bp, Mus musculus
  siRNA target sequence for 0610009H20Rik (NM_175360.2,374-392).
caagtgccaggtacatatt

SEQ ID NO: 788506 - DNA, 19 bp, Mus musculus
  siRNA target sequence for 0610009H20Rik (NM_175360.2,377-395).
gtgccaggtacatattttt

SEQ ID NO: 788507 - DNA, 19 bp, Mus musculus
  siRNA target sequence for 0610009H20Rik (NM_175360.2,407-425).
ccaataaggcgggtagata

SEQ ID NO: 788508 - DNA, 19 bp, Mus musculus
  siRNA target sequence for 0610009H20Rik (NM_175360.2,408-426).
caataaggcgggtagatat

SEQ ID NO: 788509 - DNA, 19 bp, Mus musculus
  siRNA target sequence for 0610009H20Rik (NM_175360.2,435-453).
ctgtcatcagcgtgaaaga

SEQ ID NO: 788510 - DNA, 19 bp, Mus musculus
  siRNA target sequence for 0610009H20Rik (NM_175360.2,484-502).
cgatgccactggggttata

SEQ ID NO: 788511 - DNA, 19 bp, Mus musculus
  siRNA target sequence for 0610009H20Rik (NM_175360.2,543-561).
cctcagacccagctattct

SEQ ID NO: 788512 - DNA, 19 bp, Mus musculus
  siRNA target sequence for 0610009H20Rik (NM_175360.2,567-585).
ctgcgagagagcttagcat

SEQ ID NO: 788513 - DNA, 19 bp, Mus musculus
  siRNA target sequence for 0610009H20Rik (NM_175360.2,697-715).
gatctgtgccaacatttat

SEQ ID NO: 788514 - DNA, 19 bp, Mus musculus
  siRNA target sequence for 0610009H20Rik (NM_175360.2,700-718).
ctgtgccaacatttattat

SEQ ID NO: 788515 - DNA, 19 bp, Mus musculus
  siRNA target sequence for 0610009H20Rik (NM_175360.2,827-845).
gaggaggcactaaacaata

SEQ ID NO: 788516 - DNA, 19 bp, Mus musculus
  siRNA target sequence for 0610009H20Rik (NM_175360.2,829-847).
ggaggcactaaacaataaa

SEQ ID NO: 788517 - DNA, 19 bp, Mus musculus
  siRNA target sequence for 0610009H20Rik (NM_175360.2,876-894).
ctttgctgagtgagaaaat

SEQ ID NO: 788518 - DNA, 19 bp, Mus musculus
  siRNA target sequence for 0610009H20Rik (NM_175360.2,1042-1060).
cgtagcgcagagagtgttt

SEQ ID NO: 788519 - DNA, 19 bp, Mus musculus
  siRNA target sequence for 0610009H20Rik (NM_175360.2,1043-1061).
gtagcgcagagagtgttta

SEQ ID NO: 788520 - DNA, 19 bp, Mus musculus
  siRNA target sequence for 0610009H20Rik (NM_175360.2,1046-1064).
gcgcagagagtgtttaaga

SEQ ID NO: 788521 - DNA, 19 bp, Mus musculus
  siRNA target sequence for 0610009H20Rik (NM_175360.2,1121-1139).
gataagctgtactacgtaa

SEQ ID NO: 788522 - DNA, 19 bp, Mus musculus
  siRNA target sequence for 0610009H20Rik (NM_175360.2,1187-1205).
gaagactgtcagaaaccaa

SEQ ID NO: 788523 - DNA, 19 bp, Mus musculus
  siRNA target sequence for 0610009H20Rik (NM_175360.2,1192-1210).
ctgtcagaaaccaaaccat

SEQ ID NO: 788524 - DNA, 19 bp, Mus musculus
  siRNA target sequence for 0610009H20Rik (NM_175360.2,1335-1353).
gcaccgcggaccactacta

SEQ ID NO: 788525 - DNA, 19 bp, Mus musculus
  siRNA target sequence for 2610208E05Rik (NM_175364.2,174-192).
cagggaagaatttaaaaga

SEQ ID NO: 788526 - DNA, 19 bp, Mus musculus
  siRNA target sequence for 2610208E05Rik (NM_175364.2,203-221).
ccacagaagaggatacaat

SEQ ID NO: 788527 - DNA, 19 bp, Mus musculus
  siRNA target sequence for 2610208E05Rik (NM_175364.2,214-232).
gatacaatccgaatgatga

SEQ ID NO: 788528 - DNA, 19 bp, Mus musculus
  siRNA target sequence for 2610208E05Rik (NM_175364.2,243-261).
caatatgcagctaaaggaa

SEQ ID NO: 788529 - DNA, 19 bp, Mus musculus
  siRNA target sequence for 4931439A04Rik (NM_175366.2,356-374).
ctacgctgcctatgctaat

SEQ ID NO: 788530 - DNA, 19 bp, Mus musculus
  siRNA target sequence for 4931439A04Rik (NM_175366.2,569-587).
gtgtgccaaccgcatttgt

SEQ ID NO: 788531 - DNA, 19 bp, Mus musculus
  siRNA target sequence for 4931439A04Rik (NM_175366.2,571-589).
gtgccaaccgcatttgtga

SEQ ID NO: 788532 - DNA, 19 bp, Mus musculus
  siRNA target sequence for 4931439A04Rik (NM_175366.2,631-649).
ctcaggccatccgcatttt

SEQ ID NO: 788533 - DNA, 19 bp, Mus musculus
  siRNA target sequence for 4931439A04Rik (NM_175366.2,633-651).
caggccatccgcatttttt

SEQ ID NO: 788534 - DNA, 19 bp, Mus musculus
  siRNA target sequence for 4933402P03Rik (NM_175368.1,75-93).
ggtgctgcgagcaatacca

SEQ ID NO: 788535 - DNA, 19 bp, Mus musculus
  siRNA target sequence for 4933402P03Rik (NM_175368.1,76-94).
gtgctgcgagcaataccaa

SEQ ID NO: 788536 - DNA, 19 bp, Mus musculus
  siRNA target sequence for 4933402P03Rik (NM_175368.1,107-125).
gatgctgagaacatcttgt

SEQ ID NO: 788537 - DNA, 19 bp, Mus musculus
  siRNA target sequence for 4933402P03Rik (NM_175368.1,372-390).
cttcccactatttttgcaa

SEQ ID NO: 788538 - DNA, 19 bp, Mus musculus
  siRNA target sequence for 4933402P03Rik (NM_175368.1,521-539).
ggctacccaccctttcgta

SEQ ID NO: 788539 - DNA, 19 bp, Mus musculus
  siRNA target sequence for 4933402P03Rik (NM_175368.1,522-540).
gctacccaccctttcgtaa

SEQ ID NO: 788540 - DNA, 19 bp, Mus musculus
  siRNA target sequence for 4933402P03Rik (NM_175368.1,523-541).
ctacccaccctttcgtaaa

SEQ ID NO: 788541 - DNA, 19 bp, Mus musculus
  siRNA target sequence for 4933402P03Rik (NM_175368.1,526-544).
cccaccctttcgtaaacaa

SEQ ID NO: 788542 - DNA, 19 bp, Mus musculus
  siRNA target sequence for 4933402P03Rik (NM_175368.1,545-563).
cctcaaggccacaagatgt

SEQ ID NO: 788543 - DNA, 19 bp, Mus musculus
  siRNA target sequence for 4933402P03Rik (NM_175368.1,653-671).
cggggctggggtagtttgt

SEQ ID NO: 788544 - DNA, 19 bp, Mus musculus
  siRNA target sequence for 4933402P03Rik (NM_175368.1,656-674).
ggctggggtagtttgtgta

SEQ ID NO: 788545 - DNA, 19 bp, Mus musculus
  siRNA target sequence for 4933402P03Rik (NM_175368.1,657-675).
gctggggtagtttgtgtaa

SEQ ID NO: 788546 - DNA, 19 bp, Mus musculus
  siRNA target sequence for 4933402P03Rik (NM_175368.1,787-805).
gcgagtagaggccaaatca

SEQ ID NO: 788547 - DNA, 19 bp, Mus musculus
  siRNA target sequence for 4933402P03Rik (NM_175368.1,821-839).
ggcttcggtcctcattatt

SEQ ID NO: 788548 - DNA, 19 bp, Mus musculus
  siRNA target sequence for 4933402P03Rik (NM_175368.1,1088-1106).
caccggcagaacttctcta

SEQ ID NO: 788549 - DNA, 19 bp, Mus musculus
  siRNA target sequence for 4933402P03Rik (NM_175368.1,1093-1111).
gcagaacttctctagtcat

SEQ ID NO: 788550 - DNA, 19 bp, Mus musculus
  siRNA target sequence for 4933402P03Rik (NM_175368.1,1094-1112).
cagaacttctctagtcata

SEQ ID NO: 788551 - DNA, 19 bp, Mus musculus
  siRNA target sequence for 4933402P03Rik (NM_175368.1,1096-1114).
gaacttctctagtcatact

SEQ ID NO: 788552 - DNA, 19 bp, Mus musculus
  siRNA target sequence for 4933402P03Rik (NM_175368.1,1267-1285).
gggtgaggcttcataccaa

SEQ ID NO: 788553 - DNA, 19 bp, Mus musculus
  siRNA target sequence for 4933402P03Rik (NM_175368.1,1299-1317).
ccagctcgggcctgatgat

SEQ ID NO: 788554 - DNA, 19 bp, Mus musculus
  siRNA target sequence for 4933402P03Rik (NM_175368.1,1533-1551).
gccggacagggaaacttaa

SEQ ID NO: 788555 - DNA, 19 bp, Mus musculus
  siRNA target sequence for 4933402P03Rik (NM_175368.1,1535-1553).
cggacagggaaacttaact

SEQ ID NO: 788556 - DNA, 19 bp, Mus musculus
  siRNA target sequence for 4933415L06Rik (NM_175369.2,443-461).
ctattgctgaagaagctaa

SEQ ID NO: 788557 - DNA, 19 bp, Mus musculus
  siRNA target sequence for 4933415L06Rik (NM_175369.2,524-542).
gacgcttagaagctcaaat

SEQ ID NO: 788558 - DNA, 19 bp, Mus musculus
  siRNA target sequence for 4933415L06Rik (NM_175369.2,527-545).
gcttagaagctcaaattga

SEQ ID NO: 788559 - DNA, 19 bp, Mus musculus
  siRNA target sequence for 4933415L06Rik (NM_175369.2,708-726).
ctatgaaaaacgagatctt

SEQ ID NO: 788560 - DNA, 19 bp, Mus musculus
  siRNA target sequence for 4933415L06Rik (NM_175369.2,719-737).
gagatcttatcaaaaacct

SEQ ID NO: 788561 - DNA, 19 bp, Mus musculus
  siRNA target sequence for 4933415L06Rik (NM_175369.2,721-739).
gatcttatcaaaaacctaa

SEQ ID NO: 788562 - DNA, 19 bp, Mus musculus
  siRNA target sequence for 4933415L06Rik (NM_175369.2,762-780).
ggaaaacctccaagattca

SEQ ID NO: 788563 - DNA, 19 bp, Mus musculus
  siRNA target sequence for 4933415L06Rik (NM_175369.2,784-802).
gggaactgcacaatacaaa

SEQ ID NO: 788564 - DNA, 19 bp, Mus musculus
  siRNA target sequence for 4933415L06Rik (NM_175369.2,860-878).
ctgagaaaacgtcttttgt

SEQ ID NO: 788565 - DNA, 19 bp, Mus musculus
  siRNA target sequence for 4933415L06Rik (NM_175369.2,916-934).
gaaatagaggtacaacata

SEQ ID NO: 788566 - DNA, 19 bp, Mus musculus
  siRNA target sequence for 4933415L06Rik (NM_175369.2,922-940).
gaggtacaacataagagat

SEQ ID NO: 788567 - DNA, 19 bp, Mus musculus
  siRNA target sequence for 4933415L06Rik (NM_175369.2,936-954).
gagatatgatgcaattctt

SEQ ID NO: 788568 - DNA, 19 bp, Mus musculus
  siRNA target sequence for 4933415L06Rik (NM_175369.2,959-977).
gtttgcattgtcagatgaa

SEQ ID NO: 788569 - DNA, 19 bp, Mus musculus
  siRNA target sequence for 4933415L06Rik (NM_175369.2,968-986).
gtcagatgaacaagattca

SEQ ID NO: 788570 - DNA, 19 bp, Mus musculus
  siRNA target sequence for 4933415L06Rik (NM_175369.2,975-993).
gaacaagattcagttaaat

SEQ ID NO: 788571 - DNA, 19 bp, Mus musculus
  siRNA target sequence for 4933415L06Rik (NM_175369.2,1100-1118).
caccgtgggagagaatact

SEQ ID NO: 788572 - DNA, 19 bp, Mus musculus
  siRNA target sequence for 4933415L06Rik (NM_175369.2,1102-1120).
ccgtgggagagaatactgt

SEQ ID NO: 788573 - DNA, 19 bp, Mus musculus
  siRNA target sequence for 4933425F06Rik (NM_175370.2,132-150).
gcaaattgggacaaccaaa

SEQ ID NO: 788574 - DNA, 19 bp, Mus musculus
  siRNA target sequence for 4933425F06Rik (NM_175370.2,182-200).
caccccacggggaagttta

SEQ ID NO: 788575 - DNA, 19 bp, Mus musculus
  siRNA target sequence for 4933425F06Rik (NM_175370.2,196-214).
gtttaagccagttttacct

SEQ ID NO: 788576 - DNA, 19 bp, Mus musculus
  siRNA target sequence for 4933425F06Rik (NM_175370.2,245-263).
ctgtcccaaccaggaaaat

SEQ ID NO: 788577 - DNA, 19 bp, Mus musculus
  siRNA target sequence for 4933425F06Rik (NM_175370.2,247-265).
gtcccaaccaggaaaatct

SEQ ID NO: 788578 - DNA, 19 bp, Mus musculus
  siRNA target sequence for 4933425F06Rik (NM_175370.2,250-268).
ccaaccaggaaaatctact

SEQ ID NO: 788579 - DNA, 19 bp, Mus musculus
  siRNA target sequence for 4933425F06Rik (NM_175370.2,254-272).
ccaggaaaatctactgttt

SEQ ID NO: 788580 - DNA, 19 bp, Mus musculus
  siRNA target sequence for 4933425F06Rik (NM_175370.2,286-304).
ggtccagtcaggaaacaca

SEQ ID NO: 788581 - DNA, 19 bp, Mus musculus
  siRNA target sequence for 4933425F06Rik (NM_175370.2,318-336).
caccttctgaagtgattca

SEQ ID NO: 788582 - DNA, 19 bp, Mus musculus
  siRNA target sequence for 4933425F06Rik (NM_175370.2,362-380).
cgaaatcgagaacagatat

SEQ ID NO: 788583 - DNA, 19 bp, Mus musculus
  siRNA target sequence for 4933425F06Rik (NM_175370.2,721-739).
gagcaaggaatataagtat

SEQ ID NO: 788584 - DNA, 19 bp, Mus musculus
  siRNA target sequence for 4933425F06Rik (NM_175370.2,723-741).
gcaaggaatataagtatct

SEQ ID NO: 788585 - DNA, 19 bp, Mus musculus
  siRNA target sequence for 4933425F06Rik (NM_175370.2,771-789).
gcatttacgaggaaatgga

SEQ ID NO: 788586 - DNA, 19 bp, Mus musculus
  siRNA target sequence for 4933425F06Rik (NM_175370.2,772-790).
catttacgaggaaatggaa

SEQ ID NO: 788587 - DNA, 19 bp, Mus musculus
  siRNA target sequence for 4933425F06Rik (NM_175370.2,890-908).
gagttacagtcggaagaaa

SEQ ID NO: 788588 - DNA, 19 bp, Mus musculus
  siRNA target sequence for 4933425F06Rik (NM_175370.2,892-910).
gttacagtcggaagaaaaa

SEQ ID NO: 788589 - DNA, 19 bp, Mus musculus
  siRNA target sequence for 4933425F06Rik (NM_175370.2,1020-1038).
gaaaatccaaagagatctt

SEQ ID NO: 788590 - DNA, 19 bp, Mus musculus
  siRNA target sequence for 4833412L08Rik (NM_175376.2,138-156).
ctaccctccagccgaaaaa

SEQ ID NO: 788591 - DNA, 19 bp, Mus musculus
  siRNA target sequence for 4833412L08Rik (NM_175376.2,143-161).
ctccagccgaaaaagtaat

SEQ ID NO: 788592 - DNA, 19 bp, Mus musculus
  siRNA target sequence for 4833412L08Rik (NM_175376.2,428-446).
cgccacattcaccttatca

SEQ ID NO: 788593 - DNA, 19 bp, Mus musculus
  siRNA target sequence for 4833412L08Rik (NM_175376.2,430-448).
ccacattcaccttatcact

SEQ ID NO: 788594 - DNA, 19 bp, Mus musculus
  siRNA target sequence for 2700081O15Rik (NM_175381.3,1495-1513).
ggagcgccagaccatttta

SEQ ID NO: 788595 - DNA, 19 bp, Mus musculus
  siRNA target sequence for 2700049P18Rik (NM_175382.2,719-737).
ctaccaacaactgtacttt

SEQ ID NO: 788596 - DNA, 19 bp, Mus musculus
  siRNA target sequence for 2700049P18Rik (NM_175382.2,755-773).
ccatcctgtgttgcaaatt

SEQ ID NO: 788597 - DNA, 19 bp, Mus musculus
  siRNA target sequence for 2700049P18Rik (NM_175382.2,767-785).
gcaaattctgtaaacaagt

SEQ ID NO: 788598 - DNA, 19 bp, Mus musculus
  siRNA target sequence for 2700049P18Rik (NM_175382.2,924-942).
ggacatcgcatgtttgaaa

SEQ ID NO: 788599 - DNA, 19 bp, Mus musculus
  siRNA target sequence for 2700049P18Rik (NM_175382.2,925-943).
gacatcgcatgtttgaaat

SEQ ID NO: 788600 - DNA, 19 bp, Mus musculus
  siRNA target sequence for 2700049P18Rik (NM_175382.2,966-984).
cgtaattgttccatgtagt

SEQ ID NO: 788601 - DNA, 19 bp, Mus musculus
  siRNA target sequence for 2700049P18Rik (NM_175382.2,990-1008).
ccttctttcctgcaacaat

SEQ ID NO: 788602 - DNA, 19 bp, Mus musculus
  siRNA target sequence for 2700049P18Rik (NM_175382.2,1029-1047).
cagtcaggcggtttatggt

SEQ ID NO: 788603 - DNA, 19 bp, Mus musculus
  siRNA target sequence for 2700049P18Rik (NM_175382.2,1031-1049).
gtcaggcggtttatggtat

SEQ ID NO: 788604 - DNA, 19 bp, Mus musculus
  siRNA target sequence for 2700049P18Rik (NM_175382.2,1033-1051).
caggcggtttatggtataa

SEQ ID NO: 788605 - DNA, 19 bp, Mus musculus
  siRNA target sequence for 2700049P18Rik (NM_175382.2,1036-1054).
gcggtttatggtataaaca

SEQ ID NO: 788606 - DNA, 19 bp, Mus musculus
  siRNA target sequence for 2700049P18Rik (NM_175382.2,1038-1056).
ggtttatggtataaacaga

SEQ ID NO: 788607 - DNA, 19 bp, Mus musculus
  siRNA target sequence for 2700049P18Rik (NM_175382.2,1069-1087).
ggtgtaaacctcctacttt

SEQ ID NO: 788608 - DNA, 19 bp, Mus musculus
  siRNA target sequence for 2700049P18Rik (NM_175382.2,1099-1117).
ccagagacagaagaatgta

SEQ ID NO: 788609 - DNA, 19 bp, Mus musculus
  siRNA target sequence for 2700049P18Rik (NM_175382.2,1104-1122).
gacagaagaatgtacagat

SEQ ID NO: 788610 - DNA, 19 bp, Mus musculus
  siRNA target sequence for 2610311M19Rik (NM_175384.3,50-68).
gagagtctaggatatcaga

SEQ ID NO: 788611 - DNA, 19 bp, Mus musculus
  siRNA target sequence for 2610311M19Rik (NM_175384.3,52-70).
gagtctaggatatcagatt

SEQ ID NO: 788612 - DNA, 19 bp, Mus musculus
  siRNA target sequence for 2610311M19Rik (NM_175384.3,156-174).
ggacagccctgacaattat

SEQ ID NO: 788613 - DNA, 19 bp, Mus musculus
  siRNA target sequence for 2610311M19Rik (NM_175384.3,216-234).
gggtgcctccacagatctt

SEQ ID NO: 788614 - DNA, 19 bp, Mus musculus
  siRNA target sequence for 2610311M19Rik (NM_175384.3,574-592).
ggggctcatctgatctcat

SEQ ID NO: 788615 - DNA, 19 bp, Mus musculus
  siRNA target sequence for 2610311M19Rik (NM_175384.3,575-593).
gggctcatctgatctcata

SEQ ID NO: 788616 - DNA, 19 bp, Mus musculus
  siRNA target sequence for 2610311M19Rik (NM_175384.3,588-606).
ctcatatccttcaaactct

SEQ ID NO: 788617 - DNA, 19 bp, Mus musculus
  siRNA target sequence for 2610311M19Rik (NM_175384.3,766-784).
cgcccaaggaccgtaaaaa

SEQ ID NO: 788618 - DNA, 19 bp, Mus musculus
  siRNA target sequence for 2610311M19Rik (NM_175384.3,768-786).
cccaaggaccgtaaaaact

SEQ ID NO: 788619 - DNA, 19 bp, Mus musculus
  siRNA target sequence for 2610311M19Rik (NM_175384.3,806-824).
ccgttcatgagcagtttct

SEQ ID NO: 788620 - DNA, 19 bp, Mus musculus
  siRNA target sequence for 2610311M19Rik (NM_175384.3,819-837).
gtttcttcagccaaacttt

SEQ ID NO: 788621 - DNA, 19 bp, Mus musculus
  siRNA target sequence for 2610311M19Rik (NM_175384.3,875-893).
ctcagggatcatttgcaaa

SEQ ID NO: 788622 - DNA, 19 bp, Mus musculus
  siRNA target sequence for 2610311M19Rik (NM_175384.3,895-913).
ctgagtcttagtaaatcct

SEQ ID NO: 788623 - DNA, 19 bp, Mus musculus
  siRNA target sequence for 2610311M19Rik (NM_175384.3,942-960).
cacttgcagttctttaaat

SEQ ID NO: 788624 - DNA, 19 bp, Mus musculus
  siRNA target sequence for 2610311M19Rik (NM_175384.3,1001-1019).
ggacctctcaaagaagaaa

SEQ ID NO: 788625 - DNA, 19 bp, Mus musculus
  siRNA target sequence for 2610311M19Rik (NM_175384.3,1039-1057).
ggtgtttgcagctcatata

SEQ ID NO: 788626 - DNA, 19 bp, Mus musculus
  siRNA target sequence for 2610311M19Rik (NM_175384.3,1042-1060).
gtttgcagctcatatacta

SEQ ID NO: 788627 - DNA, 19 bp, Mus musculus
  siRNA target sequence for 2610311M19Rik (NM_175384.3,1047-1065).
cagctcatatactacacaa

SEQ ID NO: 788628 - DNA, 19 bp, Mus musculus
  siRNA target sequence for 2610311M19Rik (NM_175384.3,1066-1084).
gctgagccccgtaaagaga

SEQ ID NO: 788629 - DNA, 19 bp, Mus musculus
  siRNA target sequence for 2610311M19Rik (NM_175384.3,1094-1112).
ggaggaaatctcgagaaaa

SEQ ID NO: 788630 - DNA, 19 bp, Mus musculus
  siRNA target sequence for 2610311M19Rik (NM_175384.3,1210-1228).
gggccaagagacattgcat

SEQ ID NO: 788631 - DNA, 19 bp, Mus musculus
  siRNA target sequence for 2610311M19Rik (NM_175384.3,1305-1323).
ggggacgagctcagatgat

SEQ ID NO: 788632 - DNA, 19 bp, Mus musculus
  siRNA target sequence for 2610311M19Rik (NM_175384.3,1306-1324).
gggacgagctcagatgatt

SEQ ID NO: 788633 - DNA, 19 bp, Mus musculus
  siRNA target sequence for 2610311M19Rik (NM_175384.3,1307-1325).
ggacgagctcagatgattt

SEQ ID NO: 788634 - DNA, 19 bp, Mus musculus
  siRNA target sequence for 2610311M19Rik (NM_175384.3,1314-1332).
ctcagatgatttcaacaaa

SEQ ID NO: 788635 - DNA, 19 bp, Mus musculus
  siRNA target sequence for 2610311M19Rik (NM_175384.3,1543-1561).
gcggagagtaagtgtcaaa

SEQ ID NO: 788636 - DNA, 19 bp, Mus musculus
  siRNA target sequence for 2610311M19Rik (NM_175384.3,1619-1637).
ctgtgacccaagatcacat

SEQ ID NO: 788637 - DNA, 19 bp, Mus musculus
  siRNA target sequence for 2610311M19Rik (NM_175384.3,1638-1656).
cgtgtccaagaatccaaaa

SEQ ID NO: 788638 - DNA, 19 bp, Mus musculus
  siRNA target sequence for 2610311M19Rik (NM_175384.3,1692-1710).
ggctggtcaaaatttggaa

SEQ ID NO: 788639 - DNA, 19 bp, Mus musculus
  siRNA target sequence for 2610311M19Rik (NM_175384.3,1852-1870).
gtcctcattcaaaatataa

SEQ ID NO: 788640 - DNA, 19 bp, Mus musculus
  siRNA target sequence for 2610311M19Rik (NM_175384.3,2037-2055).
ctttgtggaaattagttta

SEQ ID NO: 788641 - DNA, 19 bp, Mus musculus
  siRNA target sequence for 2610311M19Rik (NM_175384.3,2245-2263).
gacagcaggggatttgaat

SEQ ID NO: 788642 - DNA, 19 bp, Mus musculus
  siRNA target sequence for 2610311M19Rik (NM_175384.3,2247-2265).
cagcaggggatttgaatgt

SEQ ID NO: 788643 - DNA, 19 bp, Mus musculus
  siRNA target sequence for 2610311M19Rik (NM_175384.3,2340-2358).
ccagggtgttggttcttct

SEQ ID NO: 788644 - DNA, 19 bp, Mus musculus
  siRNA target sequence for 2810489O06Rik (NM_175386.3,659-677).
gtggaggatctgtaccata

SEQ ID NO: 788645 - DNA, 19 bp, Mus musculus
  siRNA target sequence for 2810489O06Rik (NM_175386.3,736-754).
gctgcgtgtcggaactcat

SEQ ID NO: 788646 - DNA, 19 bp, Mus musculus
  siRNA target sequence for 2900057K09Rik (NM_175388.2,331-349).
ggtacacagaggttaccaa

SEQ ID NO: 788647 - DNA, 19 bp, Mus musculus
  siRNA target sequence for 2900057K09Rik (NM_175388.2,335-353).
cacagaggttaccaatttt

SEQ ID NO: 788648 - DNA, 19 bp, Mus musculus
  siRNA target sequence for 2900057K09Rik (NM_175388.2,337-355).
cagaggttaccaattttta

SEQ ID NO: 788649 - DNA, 19 bp, Mus musculus
  siRNA target sequence for 2900057K09Rik (NM_175388.2,339-357).
gaggttaccaatttttagt

SEQ ID NO: 788650 - DNA, 19 bp, Mus musculus
  siRNA target sequence for 2900057K09Rik (NM_175388.2,341-359).
ggttaccaatttttagtca

SEQ ID NO: 788651 - DNA, 19 bp, Mus musculus
  siRNA target sequence for 2900057K09Rik (NM_175388.2,393-411).
gagtagacagctttgtgta

SEQ ID NO: 788652 - DNA, 19 bp, Mus musculus
  siRNA target sequence for 2900057K09Rik (NM_175388.2,395-413).
gtagacagctttgtgtatt

SEQ ID NO: 788653 - DNA, 19 bp, Mus musculus
  siRNA target sequence for 2900057K09Rik (NM_175388.2,407-425).
gtgtattggcaggattttt

SEQ ID NO: 788654 - DNA, 19 bp, Mus musculus
  siRNA target sequence for 3110023L08Rik (NM_175389.2,203-221).
ctaatgtggaggaaaagct

SEQ ID NO: 788655 - DNA, 19 bp, Mus musculus
  siRNA target sequence for 3110023L08Rik (NM_175389.2,268-286).
gcaggggctgagccaatat

SEQ ID NO: 788656 - DNA, 19 bp, Mus musculus
  siRNA target sequence for 3110023L08Rik (NM_175389.2,271-289).
ggggctgagccaatatcta

SEQ ID NO: 788657 - DNA, 19 bp, Mus musculus
  siRNA target sequence for 3110023L08Rik (NM_175389.2,272-290).
gggctgagccaatatctaa

SEQ ID NO: 788658 - DNA, 19 bp, Mus musculus
  siRNA target sequence for 3110023L08Rik (NM_175389.2,273-291).
ggctgagccaatatctaaa

SEQ ID NO: 788659 - DNA, 19 bp, Mus musculus
  siRNA target sequence for 3110023L08Rik (NM_175389.2,287-305).
ctaaacggcaactgaagaa

SEQ ID NO: 788660 - DNA, 19 bp, Mus musculus
  siRNA target sequence for 3110023L08Rik (NM_175389.2,343-361).
cagcgcaaggagaaacgaa

SEQ ID NO: 788661 - DNA, 19 bp, Mus musculus
  siRNA target sequence for 3110023L08Rik (NM_175389.2,471-489).
ggtcatcgactgtagcttt

SEQ ID NO: 788662 - DNA, 19 bp, Mus musculus
  siRNA target sequence for 3110023L08Rik (NM_175389.2,534-552).
gattcaacgatgttatgca

SEQ ID NO: 788663 - DNA, 19 bp, Mus musculus
  siRNA target sequence for 3110023L08Rik (NM_175389.2,604-622).
ggtcaactgaagaagaaca

SEQ ID NO: 788664 - DNA, 19 bp, Mus musculus
  siRNA target sequence for 3110023L08Rik (NM_175389.2,669-687).
caagtcagagcactatagt

SEQ ID NO: 788665 - DNA, 19 bp, Mus musculus
  siRNA target sequence for 3110023L08Rik (NM_175389.2,720-738).
gacgtcagactcacctaat

SEQ ID NO: 788666 - DNA, 19 bp, Mus musculus
  siRNA target sequence for 3110023L08Rik (NM_175389.2,722-740).
cgtcagactcacctaatgt

SEQ ID NO: 788667 - DNA, 19 bp, Mus musculus
  siRNA target sequence for 3110023L08Rik (NM_175389.2,723-741).
gtcagactcacctaatgta

SEQ ID NO: 788668 - DNA, 19 bp, Mus musculus
  siRNA target sequence for 3110023L08Rik (NM_175389.2,807-825).
gggactcacatttaaacaa

SEQ ID NO: 788669 - DNA, 19 bp, Mus musculus
  siRNA target sequence for 3110023L08Rik (NM_175389.2,860-878).
ctcttgcagattttgtgaa

SEQ ID NO: 788670 - DNA, 19 bp, Mus musculus
  siRNA target sequence for 3110023L08Rik (NM_175389.2,900-918).
ggccgttaaccatgtgttt

SEQ ID NO: 788671 - DNA, 19 bp, Mus musculus
  siRNA target sequence for 3110023L08Rik (NM_175389.2,902-920).
ccgttaaccatgtgtttga

SEQ ID NO: 788672 - DNA, 19 bp, Mus musculus
  siRNA target sequence for 3110023L08Rik (NM_175389.2,903-921).
cgttaaccatgtgtttgaa

SEQ ID NO: 788673 - DNA, 19 bp, Mus musculus
  siRNA target sequence for 3110023L08Rik (NM_175389.2,904-922).
gttaaccatgtgtttgaaa

SEQ ID NO: 788674 - DNA, 19 bp, Mus musculus
  siRNA target sequence for 3110023L08Rik (NM_175389.2,954-972).
gcaagaggcattctttaca

SEQ ID NO: 788675 - DNA, 19 bp, Mus musculus
  siRNA target sequence for 3110023L08Rik (NM_175389.2,960-978).
ggcattctttacaatctta

SEQ ID NO: 788676 - DNA, 19 bp, Mus musculus
  siRNA target sequence for 3110023L08Rik (NM_175389.2,1080-1098).
gagttgcagggataatcct

SEQ ID NO: 788677 - DNA, 19 bp, Mus musculus
  siRNA target sequence for 1700049L16Rik (NM_175390.2,167-185).
ccttcaacacgcaaaccaa

SEQ ID NO: 788678 - DNA, 19 bp, Mus musculus
  siRNA target sequence for 5730472N09Rik (NM_175392.3,448-466).
ccagtgttcctgtacacaa

SEQ ID NO: 788679 - DNA, 19 bp, Mus musculus
  siRNA target sequence for 5730472N09Rik (NM_175392.3,451-469).
gtgttcctgtacacaactt

SEQ ID NO: 788680 - DNA, 19 bp, Mus musculus
  siRNA target sequence for 5730472N09Rik (NM_175392.3,453-471).
gttcctgtacacaactttt

SEQ ID NO: 788681 - DNA, 19 bp, Mus musculus
  siRNA target sequence for 5730472N09Rik (NM_175392.3,456-474).
cctgtacacaacttttggt

SEQ ID NO: 788682 - DNA, 19 bp, Mus musculus
  siRNA target sequence for 5730472N09Rik (NM_175392.3,726-744).
gagcaacgacactcttagt

SEQ ID NO: 788683 - DNA, 19 bp, Mus musculus
  siRNA target sequence for 5730472N09Rik (NM_175392.3,801-819).
gatggtagtggtcaattca

SEQ ID NO: 788684 - DNA, 19 bp, Mus musculus
  siRNA target sequence for 5730472N09Rik (NM_175392.3,896-914).
gtgccgagagcctctatgt

SEQ ID NO: 788685 - DNA, 19 bp, Mus musculus
  siRNA target sequence for 5730472N09Rik (NM_175392.3,1026-1044).
cccagacaccgcatcagaa

SEQ ID NO: 788686 - DNA, 19 bp, Mus musculus
  siRNA target sequence for 5730472N09Rik (NM_175392.3,1263-1281).
ctcagccactgagatcttt

SEQ ID NO: 788687 - DNA, 19 bp, Mus musculus
  siRNA target sequence for 5730472N09Rik (NM_175392.3,1953-1971).
caagcaccagattgtacaa

SEQ ID NO: 788688 - DNA, 19 bp, Mus musculus
  siRNA target sequence for 5730472N09Rik (NM_175392.3,1996-2014).
gacaacgtgcgctacacat

SEQ ID NO: 788689 - DNA, 19 bp, Mus musculus
  siRNA target sequence for 5730472N09Rik (NM_175392.3,2120-2138).
ggccactgcctcgagaaaa

SEQ ID NO: 788690 - DNA, 19 bp, Mus musculus
  siRNA target sequence for 1700001A24Rik (NM_175395.2,955-973).
ggtaaccaccattctcttt

SEQ ID NO: 788691 - DNA, 19 bp, Mus musculus
  siRNA target sequence for 1700001A24Rik (NM_175395.2,1104-1122).
cctccagcgcggaatacca

SEQ ID NO: 788692 - DNA, 19 bp, Mus musculus
  siRNA target sequence for 1700001A24Rik (NM_175395.2,1105-1123).
ctccagcgcggaataccat

SEQ ID NO: 788693 - DNA, 19 bp, Mus musculus
  siRNA target sequence for 1700001A24Rik (NM_175395.2,1121-1139).
catgaaggttcatatcata

SEQ ID NO: 788694 - DNA, 19 bp, Mus musculus
  siRNA target sequence for 1700001A24Rik (NM_175395.2,1162-1180).
ggacaaatggtattgtagt

SEQ ID NO: 788695 - DNA, 19 bp, Mus musculus
  siRNA target sequence for 1700001A24Rik (NM_175395.2,1163-1181).
gacaaatggtattgtagta

SEQ ID NO: 788696 - DNA, 19 bp, Mus musculus
  siRNA target sequence for 1700001A24Rik (NM_175395.2,1165-1183).
caaatggtattgtagtata

SEQ ID NO: 788697 - DNA, 19 bp, Mus musculus
  siRNA target sequence for 6530418L21Rik (NM_175398.3,384-402).
ccagccaaccatcttttga

SEQ ID NO: 788698 - DNA, 19 bp, Mus musculus
  siRNA target sequence for 6530418L21Rik (NM_175398.3,547-565).
gatgtcacggggcagaaat

SEQ ID NO: 788699 - DNA, 19 bp, Mus musculus
  siRNA target sequence for 6530418L21Rik (NM_175398.3,580-598).
gttgggggacaatgttttt

SEQ ID NO: 788700 - DNA, 19 bp, Mus musculus
  siRNA target sequence for 6530418L21Rik (NM_175398.3,610-628).
gggtaactggctagattta

SEQ ID NO: 788701 - DNA, 19 bp, Mus musculus
  siRNA target sequence for 6530418L21Rik (NM_175398.3,661-679).
gactgggggatccattgaa

SEQ ID NO: 788702 - DNA, 19 bp, Mus musculus
  siRNA target sequence for 6530418L21Rik (NM_175398.3,705-723).
gagagctgggtcgtaagtt

SEQ ID NO: 788703 - DNA, 19 bp, Mus musculus
  siRNA target sequence for 6530418L21Rik (NM_175398.3,732-750).
ccgcaaacatttttaggaa

SEQ ID NO: 788704 - DNA, 19 bp, Mus musculus
  siRNA target sequence for 6530418L21Rik (NM_175398.3,837-855).
caggacgctcgaagaaagt

SEQ ID NO: 788705 - DNA, 19 bp, Mus musculus
  siRNA target sequence for 6530418L21Rik (NM_175398.3,840-858).
gacgctcgaagaaagtcaa

SEQ ID NO: 788706 - DNA, 19 bp, Mus musculus
  siRNA target sequence for 6530418L21Rik (NM_175398.3,909-927).
gagagcccagacatattga

SEQ ID NO: 788707 - DNA, 19 bp, Mus musculus
  siRNA target sequence for 6530418L21Rik (NM_175398.3,911-929).
gagcccagacatattgaaa

SEQ ID NO: 788708 - DNA, 19 bp, Mus musculus
  siRNA target sequence for 6530418L21Rik (NM_175398.3,943-961).
cagccccaaggccttagaa

SEQ ID NO: 788709 - DNA, 19 bp, Mus musculus
  siRNA target sequence for 6530418L21Rik (NM_175398.3,969-987).
gtaggggctttgacattaa

SEQ ID NO: 788710 - DNA, 19 bp, Mus musculus
  siRNA target sequence for 2410014A08Rik (NM_175403.2,346-364).
ctcggactatggcatgaaa

SEQ ID NO: 788711 - DNA, 19 bp, Mus musculus
  siRNA target sequence for 2410014A08Rik (NM_175403.2,348-366).
cggactatggcatgaaact

SEQ ID NO: 788712 - DNA, 19 bp, Mus musculus
  siRNA target sequence for 2410014A08Rik (NM_175403.2,386-404).
ccggaggaccagatcctat

SEQ ID NO: 788713 - DNA, 19 bp, Mus musculus
  siRNA target sequence for 2410014A08Rik (NM_175403.2,387-405).
cggaggaccagatcctata

SEQ ID NO: 788714 - DNA, 19 bp, Mus musculus
  siRNA target sequence for 2410014A08Rik (NM_175403.2,388-406).
ggaggaccagatcctatat

SEQ ID NO: 788715 - DNA, 19 bp, Mus musculus
  siRNA target sequence for 2410014A08Rik (NM_175403.2,392-410).
gaccagatcctatatcaga

SEQ ID NO: 788716 - DNA, 19 bp, Mus musculus
  siRNA target sequence for 2410014A08Rik (NM_175403.2,526-544).
gtttgatgtccggttgaat

SEQ ID NO: 788717 - DNA, 19 bp, Mus musculus
  siRNA target sequence for 2410014A08Rik (NM_175403.2,597-615).
cggcccatgatgaaatcat

SEQ ID NO: 788718 - DNA, 19 bp, Mus musculus
  siRNA target sequence for 2410014A08Rik (NM_175403.2,680-698).
ctatacatcgagtttgtca

SEQ ID NO: 788719 - DNA, 19 bp, Mus musculus
  siRNA target sequence for 2410014A08Rik (NM_175403.2,830-848).
gaggggtctaatctcaaaa

SEQ ID NO: 788720 - DNA, 19 bp, Mus musculus
  siRNA target sequence for 2410014A08Rik (NM_175403.2,832-850).
ggggtctaatctcaaaaga

SEQ ID NO: 788721 - DNA, 19 bp, Mus musculus
  siRNA target sequence for 2410014A08Rik (NM_175403.2,834-852).
ggtctaatctcaaaagaca

SEQ ID NO: 788722 - DNA, 19 bp, Mus musculus
  siRNA target sequence for 2410014A08Rik (NM_175403.2,940-958).
ggccttcggagtgttcatt

SEQ ID NO: 788723 - DNA, 19 bp, Mus musculus
  siRNA target sequence for 3010003L21Rik (NM_175404.2,554-572).
ggtgaagcacacacaacaa

SEQ ID NO: 788724 - DNA, 19 bp, Mus musculus
  siRNA target sequence for A930024E05Rik (NM_175405.2,255-273).
ccacctttcctcattacct

SEQ ID NO: 788725 - DNA, 19 bp, Mus musculus
  siRNA target sequence for A930024E05Rik (NM_175405.2,256-274).
cacctttcctcattaccta

SEQ ID NO: 788726 - DNA, 19 bp, Mus musculus
  siRNA target sequence for A930024E05Rik (NM_175405.2,272-290).
ctatgctggcgacctaaat

SEQ ID NO: 788727 - DNA, 19 bp, Mus musculus
  siRNA target sequence for A930024E05Rik (NM_175405.2,279-297).
ggcgacctaaattcaaagt

SEQ ID NO: 788728 - DNA, 19 bp, Mus musculus
  siRNA target sequence for A930024E05Rik (NM_175405.2,280-298).
gcgacctaaattcaaagta

SEQ ID NO: 788729 - DNA, 19 bp, Mus musculus
  siRNA target sequence for A930024E05Rik (NM_175405.2,281-299).
cgacctaaattcaaagtat

SEQ ID NO: 788730 - DNA, 19 bp, Mus musculus
  siRNA target sequence for A930024E05Rik (NM_175405.2,284-302).
cctaaattcaaagtatttt

SEQ ID NO: 788731 - DNA, 19 bp, Mus musculus
  siRNA target sequence for A930024E05Rik (NM_175405.2,366-384).
gtccagacccttatccatt

SEQ ID NO: 788732 - DNA, 19 bp, Mus musculus
  siRNA target sequence for A930024E05Rik (NM_175405.2,449-467).
ctgtacagactgcataact

SEQ ID NO: 788733 - DNA, 19 bp, Mus musculus
  siRNA target sequence for 5330439J01Rik (NM_175407.2,711-729).
ggtgtgtgactggtgtaaa

SEQ ID NO: 788734 - DNA, 19 bp, Mus musculus
  siRNA target sequence for 5330439J01Rik (NM_175407.2,927-945).
cacgccagactcttggaat

SEQ ID NO: 788735 - DNA, 19 bp, Mus musculus
  siRNA target sequence for 5330439J01Rik (NM_175407.2,929-947).
cgccagactcttggaatat

SEQ ID NO: 788736 - DNA, 19 bp, Mus musculus
  siRNA target sequence for 5330439J01Rik (NM_175407.2,941-959).
ggaatatcccgctaacaga

SEQ ID NO: 788737 - DNA, 19 bp, Mus musculus
  siRNA target sequence for 5330439J01Rik (NM_175407.2,1055-1073).
ccaactgctctgtcactaa

SEQ ID NO: 788738 - DNA, 19 bp, Mus musculus
  siRNA target sequence for 5330439J01Rik (NM_175407.2,1296-1314).
cgcctccaaccccaatagt

SEQ ID NO: 788739 - DNA, 19 bp, Mus musculus
  siRNA target sequence for 5330439J01Rik (NM_175407.2,1546-1564).
ccggttccccagatgatga

SEQ ID NO: 788740 - DNA, 19 bp, Mus musculus
  siRNA target sequence for 5330439J01Rik (NM_175407.2,1547-1565).
cggttccccagatgatgaa

SEQ ID NO: 788741 - DNA, 19 bp, Mus musculus
  siRNA target sequence for 5330439J01Rik (NM_175407.2,1614-1632).
cgtgccgtacccagtgata

SEQ ID NO: 788742 - DNA, 19 bp, Mus musculus
  siRNA target sequence for 5330439J01Rik (NM_175407.2,2364-2382).
cggggaagcgaccaaaaaa

SEQ ID NO: 788743 - DNA, 19 bp, Mus musculus
  siRNA target sequence for A930027H06Rik (NM_175408.2,1866-1884).
ccccttacagcagtatcat

SEQ ID NO: 788744 - DNA, 19 bp, Mus musculus
  siRNA target sequence for A930027H06Rik (NM_175408.2,1867-1885).
cccttacagcagtatcata

SEQ ID NO: 788745 - DNA, 19 bp, Mus musculus
  siRNA target sequence for A930027H06Rik (NM_175408.2,1868-1886).
ccttacagcagtatcataa

SEQ ID NO: 788746 - DNA, 19 bp, Mus musculus
  siRNA target sequence for A930027H06Rik (NM_175408.2,1869-1887).
cttacagcagtatcataat

SEQ ID NO: 788747 - DNA, 19 bp, Mus musculus
  siRNA target sequence for A930027H06Rik (NM_175408.2,2093-2111).
cctcctgcctatgaaatca

SEQ ID NO: 788748 - DNA, 19 bp, Mus musculus
  siRNA target sequence for A930027H06Rik (NM_175408.2,2096-2114).
cctgcctatgaaatcagtt

SEQ ID NO: 788749 - DNA, 19 bp, Mus musculus
  siRNA target sequence for A930027H06Rik (NM_175408.2,2097-2115).
ctgcctatgaaatcagttt

SEQ ID NO: 788750 - DNA, 19 bp, Mus musculus
  siRNA target sequence for A930002I21Rik (NM_175410.3,223-241).
ctgcagccagtcttggatt

SEQ ID NO: 788751 - DNA, 19 bp, Mus musculus
  siRNA target sequence for A930002I21Rik (NM_175410.3,423-441).
cactctactctcaaagata

SEQ ID NO: 788752 - DNA, 19 bp, Mus musculus
  siRNA target sequence for C030004A17Rik (NM_175411.2,81-99).
gagccaggcctctgataaa

SEQ ID NO: 788753 - DNA, 19 bp, Mus musculus
  siRNA target sequence for C030004A17Rik (NM_175411.2,85-103).
caggcctctgataaaaaca

SEQ ID NO: 788754 - DNA, 19 bp, Mus musculus
  siRNA target sequence for C030004A17Rik (NM_175411.2,177-195).
caaaaagcctcgagaactt

SEQ ID NO: 788755 - DNA, 19 bp, Mus musculus
  siRNA target sequence for C030004A17Rik (NM_175411.2,241-259).
gtcccagccctgaaatcct

SEQ ID NO: 788756 - DNA, 19 bp, Mus musculus
  siRNA target sequence for C030004A17Rik (NM_175411.2,257-275).
cctggaagggcttaatcca

SEQ ID NO: 788757 - DNA, 19 bp, Mus musculus
  siRNA target sequence for C030004A17Rik (NM_175411.2,279-297).
cttactggatgctgctatt

SEQ ID NO: 788758 - DNA, 19 bp, Mus musculus
  siRNA target sequence for C030004A17Rik (NM_175411.2,290-308).
ctgctattgattttgatct

SEQ ID NO: 788759 - DNA, 19 bp, Mus musculus
  siRNA target sequence for C030004A17Rik (NM_175411.2,316-334).
gacgaggaaagcaaaaagt

SEQ ID NO: 788760 - DNA, 19 bp, Mus musculus
  siRNA target sequence for C030004A17Rik (NM_175411.2,318-336).
cgaggaaagcaaaaagttt

SEQ ID NO: 788761 - DNA, 19 bp, Mus musculus
  siRNA target sequence for C030004A17Rik (NM_175411.2,344-362).
gtctccatgaagacaagaa

SEQ ID NO: 788762 - DNA, 19 bp, Mus musculus
  siRNA target sequence for C030004A17Rik (NM_175411.2,492-510).
cccagctggatatcagaat

SEQ ID NO: 788763 - DNA, 19 bp, Mus musculus
  siRNA target sequence for C030004A17Rik (NM_175411.2,550-568).
ctctatgaaaacaagtcat

SEQ ID NO: 788764 - DNA, 19 bp, Mus musculus
  siRNA target sequence for C030004A17Rik (NM_175411.2,625-643).
ctagaggccgtcaagcata

SEQ ID NO: 788765 - DNA, 19 bp, Mus musculus
  siRNA target sequence for C030004A17Rik (NM_175411.2,628-646).
gaggccgtcaagcataaat

SEQ ID NO: 788766 - DNA, 19 bp, Mus musculus
  siRNA target sequence for C030004A17Rik (NM_175411.2,630-648).
ggccgtcaagcataaatct

SEQ ID NO: 788767 - DNA, 19 bp, Mus musculus
  siRNA target sequence for C030004A17Rik (NM_175411.2,632-650).
ccgtcaagcataaatctga

SEQ ID NO: 788768 - DNA, 19 bp, Mus musculus
  siRNA target sequence for C030004A17Rik (NM_175411.2,649-667).
gacctagaacatttcatgt

SEQ ID NO: 788769 - DNA, 19 bp, Mus musculus
  siRNA target sequence for C030004A17Rik (NM_175411.2,669-687).
ggttcggagaggagatgta

SEQ ID NO: 788770 - DNA, 19 bp, Mus musculus
  siRNA target sequence for 9430028I06Rik (NM_175413.1,717-735).
ctcaccttgacctgagtat

SEQ ID NO: 788771 - DNA, 19 bp, Mus musculus
  siRNA target sequence for 9430028I06Rik (NM_175413.1,725-743).
gacctgagtatgaatcagt

SEQ ID NO: 788772 - DNA, 19 bp, Mus musculus
  siRNA target sequence for 9430028I06Rik (NM_175413.1,885-903).
catgcctgccagagacaat

SEQ ID NO: 788773 - DNA, 19 bp, Mus musculus
  siRNA target sequence for 9430028I06Rik (NM_175413.1,929-947).
cttgttctcagcaacaaca

SEQ ID NO: 788774 - DNA, 19 bp, Mus musculus
  siRNA target sequence for 9430028I06Rik (NM_175413.1,984-1002).
cgaatctgaggtttgtcaa

SEQ ID NO: 788775 - DNA, 19 bp, Mus musculus
  siRNA target sequence for 9430028I06Rik (NM_175413.1,1008-1026).
gagacaacccactaagact

SEQ ID NO: 788776 - DNA, 19 bp, Mus musculus
  siRNA target sequence for 9430028I06Rik (NM_175413.1,1093-1111).
gtttatgcacgcatacata

SEQ ID NO: 788777 - DNA, 19 bp, Mus musculus
  siRNA target sequence for 9430028I06Rik (NM_175413.1,1172-1190).
cattctgatggagaaagta

SEQ ID NO: 788778 - DNA, 19 bp, Mus musculus
  siRNA target sequence for 9430079M16Rik (NM_175414.2,169-187).
gtctctgctgcttgaagta

SEQ ID NO: 788779 - DNA, 19 bp, Mus musculus
  siRNA target sequence for 9430079M16Rik (NM_175414.2,171-189).
ctctgctgcttgaagtaca

SEQ ID NO: 788780 - DNA, 19 bp, Mus musculus
  siRNA target sequence for 9430079M16Rik (NM_175414.2,194-212).
gttcctcttcaatttgata

SEQ ID NO: 788781 - DNA, 19 bp, Mus musculus
  siRNA target sequence for 9430079M16Rik (NM_175414.2,715-733).
gaacgggctgctacgaaaa

SEQ ID NO: 788782 - DNA, 19 bp, Mus musculus
  siRNA target sequence for 9430079M16Rik (NM_175414.2,718-736).
cgggctgctacgaaaaagt

SEQ ID NO: 788783 - DNA, 19 bp, Mus musculus
  siRNA target sequence for 9430079M16Rik (NM_175414.2,842-860).
catccaccggacaggtaaa

SEQ ID NO: 788784 - DNA, 19 bp, Mus musculus
  siRNA target sequence for 9430079M16Rik (NM_175414.2,846-864).
caccggacaggtaaaaagt

SEQ ID NO: 788785 - DNA, 19 bp, Mus musculus
  siRNA target sequence for C030007I09Rik (NM_175416.2,779-797).
gcatcgcattcccttcaaa

SEQ ID NO: 788786 - DNA, 19 bp, Mus musculus
  siRNA target sequence for C030007I09Rik (NM_175416.2,783-801).
cgcattcccttcaaagaca

SEQ ID NO: 788787 - DNA, 19 bp, Mus musculus
  siRNA target sequence for C030007I09Rik (NM_175416.2,989-1007).
gccccagggttggaaaagt

SEQ ID NO: 788788 - DNA, 19 bp, Mus musculus
  siRNA target sequence for C030007I09Rik (NM_175416.2,992-1010).
ccagggttggaaaagttat

SEQ ID NO: 788789 - DNA, 19 bp, Mus musculus
  siRNA target sequence for 9530008L14Rik (NM_175417.2,257-275).
ggtgggcgatccaagtact

SEQ ID NO: 788790 - DNA, 19 bp, Mus musculus
  siRNA target sequence for 9530008L14Rik (NM_175417.2,258-276).
gtgggcgatccaagtactt

SEQ ID NO: 788791 - DNA, 19 bp, Mus musculus
  siRNA target sequence for 9530008L14Rik (NM_175417.2,260-278).
gggcgatccaagtacttga

SEQ ID NO: 788792 - DNA, 19 bp, Mus musculus
  siRNA target sequence for 9530008L14Rik (NM_175417.2,271-289).
gtacttgacactccttaat

SEQ ID NO: 788793 - DNA, 19 bp, Mus musculus
  siRNA target sequence for 9530008L14Rik (NM_175417.2,295-313).
cttgcaggccattttcttt

SEQ ID NO: 788794 - DNA, 19 bp, Mus musculus
  siRNA target sequence for 9530008L14Rik (NM_175417.2,403-421).
cacaatggcttttcctata

SEQ ID NO: 788795 - DNA, 19 bp, Mus musculus
  siRNA target sequence for 9530008L14Rik (NM_175417.2,514-532).
ggttaaccacgcaatgcat

SEQ ID NO: 788796 - DNA, 19 bp, Mus musculus
  siRNA target sequence for 9530008L14Rik (NM_175417.2,515-533).
gttaaccacgcaatgcata

SEQ ID NO: 788797 - DNA, 19 bp, Mus musculus
  siRNA target sequence for 9530008L14Rik (NM_175417.2,524-542).
gcaatgcatacctccatat

SEQ ID NO: 788798 - DNA, 19 bp, Mus musculus
  siRNA target sequence for 9530008L14Rik (NM_175417.2,525-543).
caatgcatacctccatatt

SEQ ID NO: 788799 - DNA, 19 bp, Mus musculus
  siRNA target sequence for 9530008L14Rik (NM_175417.2,678-696).
gggtgtaccccgtgtttga

SEQ ID NO: 788800 - DNA, 19 bp, Mus musculus
  siRNA target sequence for 9530008L14Rik (NM_175417.2,701-719).
ctcagcccactgggtatta

SEQ ID NO: 788801 - DNA, 19 bp, Mus musculus
  siRNA target sequence for 9530008L14Rik (NM_175417.2,705-723).
gcccactgggtattatcat

SEQ ID NO: 788802 - DNA, 19 bp, Mus musculus
  siRNA target sequence for 9530008L14Rik (NM_175417.2,707-725).
ccactgggtattatcatct

SEQ ID NO: 788803 - DNA, 19 bp, Mus musculus
  siRNA target sequence for 9530008L14Rik (NM_175417.2,770-788).
ggcgagaagatcaatcact

SEQ ID NO: 788804 - DNA, 19 bp, Mus musculus
  siRNA target sequence for 8030451F13Rik (NM_175418.3,338-356).
ggctgaagatcttcttaga

SEQ ID NO: 788805 - DNA, 19 bp, Mus musculus
  siRNA target sequence for 8030451F13Rik (NM_175418.3,446-464).
gcaaactcgggtatacaca

SEQ ID NO: 788806 - DNA, 19 bp, Mus musculus
  siRNA target sequence for 8030451F13Rik (NM_175418.3,447-465).
caaactcgggtatacacat

SEQ ID NO: 788807 - DNA, 19 bp, Mus musculus
  siRNA target sequence for 8030451F13Rik (NM_175418.3,494-512).
gaactacgcagggaattat

SEQ ID NO: 788808 - DNA, 19 bp, Mus musculus
  siRNA target sequence for 8030451F13Rik (NM_175418.3,519-537).
gaggtcacctacaaggata

SEQ ID NO: 788809 - DNA, 19 bp, Mus musculus
  siRNA target sequence for 8030451F13Rik (NM_175418.3,545-563).
cagctgttcgtttgatctt

SEQ ID NO: 788810 - DNA, 19 bp, Mus musculus
  siRNA target sequence for 8030451F13Rik (NM_175418.3,550-568).
gttcgtttgatcttgaagt

SEQ ID NO: 788811 - DNA, 19 bp, Mus musculus
  siRNA target sequence for 8030451F13Rik (NM_175418.3,580-598).
ctgggactactccaaacat

SEQ ID NO: 788812 - DNA, 19 bp, Mus musculus
  siRNA target sequence for 8030451F13Rik (NM_175418.3,583-601).
ggactactccaaacattga

SEQ ID NO: 788813 - DNA, 19 bp, Mus musculus
  siRNA target sequence for 8030451F13Rik (NM_175418.3,720-738).
gtgtgggagctgctgaaaa

SEQ ID NO: 788814 - DNA, 19 bp, Mus musculus
  siRNA target sequence for 8030451F13Rik (NM_175418.3,748-766).
ccaacgaatacgagaagat

SEQ ID NO: 788815 - DNA, 19 bp, Mus musculus
  siRNA target sequence for 8030451F13Rik (NM_175418.3,789-807).
gacttgcgtggcatgctta

SEQ ID NO: 788816 - DNA, 19 bp, Mus musculus
  siRNA target sequence for 8030451F13Rik (NM_175418.3,820-838).
gcatgcgcagggtggaaaa

SEQ ID NO: 788817 - DNA, 19 bp, Mus musculus
  siRNA target sequence for 8030451F13Rik (NM_175418.3,825-843).
cgcagggtggaaaagaaga

SEQ ID NO: 788818 - DNA, 19 bp, Mus musculus
  siRNA target sequence for 8030451F13Rik (NM_175418.3,842-860).
gagcgcagcttttgcaaaa

SEQ ID NO: 788819 - DNA, 19 bp, Mus musculus
  siRNA target sequence for 8030451F13Rik (NM_175418.3,844-862).
gcgcagcttttgcaaaaat

SEQ ID NO: 788820 - DNA, 19 bp, Mus musculus
  siRNA target sequence for 8030451F13Rik (NM_175418.3,845-863).
cgcagcttttgcaaaaatt

SEQ ID NO: 788821 - DNA, 19 bp, Mus musculus
  siRNA target sequence for 8030451F13Rik (NM_175418.3,871-889).
ctgcatatcaggtggataa

SEQ ID NO: 788822 - DNA, 19 bp, Mus musculus
  siRNA target sequence for 8030451F13Rik (NM_175418.3,933-951).
ctggaggtgaaatggttta

SEQ ID NO: 788823 - DNA, 19 bp, Mus musculus
  siRNA target sequence for 8030451F13Rik (NM_175418.3,936-954).
gaggtgaaatggtttaaaa

SEQ ID NO: 788824 - DNA, 19 bp, Mus musculus
  siRNA target sequence for 8030451F13Rik (NM_175418.3,938-956).
ggtgaaatggtttaaaaat

SEQ ID NO: 788825 - DNA, 19 bp, Mus musculus
  siRNA target sequence for 8030451F13Rik (NM_175418.3,969-987).
cgacccagcacaaaataca

SEQ ID NO: 788826 - DNA, 19 bp, Mus musculus
  siRNA target sequence for 8030451F13Rik (NM_175418.3,970-988).
gacccagcacaaaatacat

SEQ ID NO: 788827 - DNA, 19 bp, Mus musculus
  siRNA target sequence for 8030451F13Rik (NM_175418.3,1002-1020).
ggaaacgagagaatcatgt

SEQ ID NO: 788828 - DNA, 19 bp, Mus musculus
  siRNA target sequence for 8030451F13Rik (NM_175418.3,1003-1021).
gaaacgagagaatcatgtt

SEQ ID NO: 788829 - DNA, 19 bp, Mus musculus
  siRNA target sequence for 8030451F13Rik (NM_175418.3,1007-1025).
cgagagaatcatgtttatt

SEQ ID NO: 788830 - DNA, 19 bp, Mus musculus
  siRNA target sequence for 8030451F13Rik (NM_175418.3,1008-1026).
gagagaatcatgtttatta

SEQ ID NO: 788831 - DNA, 19 bp, Mus musculus
  siRNA target sequence for 8030451F13Rik (NM_175418.3,1047-1065).
gattcggagtactatgtga

SEQ ID NO: 788832 - DNA, 19 bp, Mus musculus
  siRNA target sequence for 8030451F13Rik (NM_175418.3,1191-1209).
gaagatgacgccaatgtaa

SEQ ID NO: 788833 - DNA, 19 bp, Mus musculus
  siRNA target sequence for 8030451F13Rik (NM_175418.3,1197-1215).
gacgccaatgtaaaatggt

SEQ ID NO: 788834 - DNA, 19 bp, Mus musculus
  siRNA target sequence for 8030451F13Rik (NM_175418.3,1199-1217).
cgccaatgtaaaatggttt

SEQ ID NO: 788835 - DNA, 19 bp, Mus musculus
  siRNA target sequence for 8030451F13Rik (NM_175418.3,1235-1253).
cttccctggtccaaagtca

SEQ ID NO: 788836 - DNA, 19 bp, Mus musculus
  siRNA target sequence for 8030451F13Rik (NM_175418.3,1326-1344).
gagtactcagccatgacaa

SEQ ID NO: 788837 - DNA, 19 bp, Mus musculus
  siRNA target sequence for 8030451F13Rik (NM_175418.3,1377-1395).
gacttgagacctctaaaga

SEQ ID NO: 788838 - DNA, 19 bp, Mus musculus
  siRNA target sequence for 8030451F13Rik (NM_175418.3,1412-1430).
ggaccagacagtaaaactt

SEQ ID NO: 788839 - DNA, 19 bp, Mus musculus
  siRNA target sequence for 8030451F13Rik (NM_175418.3,1540-1558).
gaagaatccacaagttagt

SEQ ID NO: 788840 - DNA, 19 bp, Mus musculus
  siRNA target sequence for 8030451F13Rik (NM_175418.3,1543-1561).
gaatccacaagttagtcat

SEQ ID NO: 788841 - DNA, 19 bp, Mus musculus
  siRNA target sequence for 8030451F13Rik (NM_175418.3,1564-1582).
ccaatgctctcattgaaga

SEQ ID NO: 788842 - DNA, 19 bp, Mus musculus
  siRNA target sequence for 8030451F13Rik (NM_175418.3,1565-1583).
caatgctctcattgaagat

SEQ ID NO: 788843 - DNA, 19 bp, Mus musculus
  siRNA target sequence for 8030451F13Rik (NM_175418.3,1773-1791).
cgagcagataaggctatta

SEQ ID NO: 788844 - DNA, 19 bp, Mus musculus
  siRNA target sequence for 8030451F13Rik (NM_175418.3,1774-1792).
gagcagataaggctattat

SEQ ID NO: 788845 - DNA, 19 bp, Mus musculus
  siRNA target sequence for 8030451F13Rik (NM_175418.3,1834-1852).
gcagcacactggtcattga

SEQ ID NO: 788846 - DNA, 19 bp, Mus musculus
  siRNA target sequence for 8030451F13Rik (NM_175418.3,1871-1889).
ctctggtgtgtacaacata

SEQ ID NO: 788847 - DNA, 19 bp, Mus musculus
  siRNA target sequence for 8030451F13Rik (NM_175418.3,1873-1891).
ctggtgtgtacaacataaa

SEQ ID NO: 788848 - DNA, 19 bp, Mus musculus
  siRNA target sequence for 8030451F13Rik (NM_175418.3,1876-1894).
gtgtgtacaacataaatct

SEQ ID NO: 788849 - DNA, 19 bp, Mus musculus
  siRNA target sequence for 8030451F13Rik (NM_175418.3,1878-1896).
gtgtacaacataaatctga

SEQ ID NO: 788850 - DNA, 19 bp, Mus musculus
  siRNA target sequence for 8030451F13Rik (NM_175418.3,1921-1939).
caagcatcaagattaaggt

SEQ ID NO: 788851 - DNA, 19 bp, Mus musculus
  siRNA target sequence for 8030451F13Rik (NM_175418.3,1959-1977).
ccagtggcaccaaatgtga

SEQ ID NO: 788852 - DNA, 19 bp, Mus musculus
  siRNA target sequence for 8030451F13Rik (NM_175418.3,2034-2052).
gggtctccaatcttaggat

SEQ ID NO: 788853 - DNA, 19 bp, Mus musculus
  siRNA target sequence for 8030451F13Rik (NM_175418.3,2084-2102).
caggtggatgagactgaat

SEQ ID NO: 788854 - DNA, 19 bp, Mus musculus
  siRNA target sequence for 8030451F13Rik (NM_175418.3,2090-2108).
gatgagactgaatttcgat

SEQ ID NO: 788855 - DNA, 19 bp, Mus musculus
  siRNA target sequence for 8030451F13Rik (NM_175418.3,2111-2129).
ctgcaaagagacaactttt

SEQ ID NO: 788856 - DNA, 19 bp, Mus musculus
  siRNA target sequence for 8030451F13Rik (NM_175418.3,2125-2143).
cttttgagcccaagaagat

SEQ ID NO: 788857 - DNA, 19 bp, Mus musculus
  siRNA target sequence for 8030451F13Rik (NM_175418.3,2159-2177).
ctacgaggtccgaatcttt

SEQ ID NO: 788858 - DNA, 19 bp, Mus musculus
  siRNA target sequence for 8030451F13Rik (NM_175418.3,2321-2339).
gattggcgcagcaggttta

SEQ ID NO: 788859 - DNA, 19 bp, Mus musculus
  siRNA target sequence for 8030451F13Rik (NM_175418.3,2343-2361).
ggctatgtgctagagtatt

SEQ ID NO: 788860 - DNA, 19 bp, Mus musculus
  siRNA target sequence for 8030451F13Rik (NM_175418.3,2351-2369).
gctagagtattgctttgaa

SEQ ID NO: 788861 - DNA, 19 bp, Mus musculus
  siRNA target sequence for 8030451F13Rik (NM_175418.3,2441-2459).
cacggatgcgaagatcttt

SEQ ID NO: 788862 - DNA, 19 bp, Mus musculus
  siRNA target sequence for 8030451F13Rik (NM_175418.3,2443-2461).
cggatgcgaagatctttgt

SEQ ID NO: 788863 - DNA, 19 bp, Mus musculus
  siRNA target sequence for 8030451F13Rik (NM_175418.3,2444-2462).
ggatgcgaagatctttgta

SEQ ID NO: 788864 - DNA, 19 bp, Mus musculus
  siRNA target sequence for 8030451F13Rik (NM_175418.3,2460-2478).
gtacgtgtgaaggctatta

SEQ ID NO: 788865 - DNA, 19 bp, Mus musculus
  siRNA target sequence for 8030451F13Rik (NM_175418.3,2490-2508).
gctagtgagcccaagtact

SEQ ID NO: 788866 - DNA, 19 bp, Mus musculus
  siRNA target sequence for 8030451F13Rik (NM_175418.3,2491-2509).
ctagtgagcccaagtacta

SEQ ID NO: 788867 - DNA, 19 bp, Mus musculus
  siRNA target sequence for 8030451F13Rik (NM_175418.3,2537-2555).
cattgagccaccaaagatt

SEQ ID NO: 788868 - DNA, 19 bp, Mus musculus
  siRNA target sequence for 8030451F13Rik (NM_175418.3,2568-2586).
catctgaagcaaacttaca

SEQ ID NO: 788869 - DNA, 19 bp, Mus musculus
  siRNA target sequence for 8030451F13Rik (NM_175418.3,2607-2625).
gtcaatctggtgattcctt

SEQ ID NO: 788870 - DNA, 19 bp, Mus musculus
  siRNA target sequence for 8030451F13Rik (NM_175418.3,2622-2640).
ccttttcagggtaaaccaa

SEQ ID NO: 788871 - DNA, 19 bp, Mus musculus
  siRNA target sequence for 8030451F13Rik (NM_175418.3,2681-2699).
caagaatcaaataaacatt

SEQ ID NO: 788872 - DNA, 19 bp, Mus musculus
  siRNA target sequence for 8030451F13Rik (NM_175418.3,2700-2718).
cgcaactcagaaactgata

SEQ ID NO: 788873 - DNA, 19 bp, Mus musculus
  siRNA target sequence for 8030451F13Rik (NM_175418.3,2772-2790).
caggtcaaagtggataaat

SEQ ID NO: 788874 - DNA, 19 bp, Mus musculus
  siRNA target sequence for 8030451F13Rik (NM_175418.3,2874-2892).
gagaatgttgccctaacat

SEQ ID NO: 788875 - DNA, 19 bp, Mus musculus
  siRNA target sequence for 8030451F13Rik (NM_175418.3,2977-2995).
ccgtcattgaacattacca

SEQ ID NO: 788876 - DNA, 19 bp, Mus musculus
  siRNA target sequence for 8030451F13Rik (NM_175418.3,2997-3015).
cgaaccaacgccaccatta

SEQ ID NO: 788877 - DNA, 19 bp, Mus musculus
  siRNA target sequence for 8030451F13Rik (NM_175418.3,3001-3019).
ccaacgccaccattactga

SEQ ID NO: 788878 - DNA, 19 bp, Mus musculus
  siRNA target sequence for 8030451F13Rik (NM_175418.3,3024-3042).
gtcatagggaacgagtatt

SEQ ID NO: 788879 - DNA, 19 bp, Mus musculus
  siRNA target sequence for 8030451F13Rik (NM_175418.3,3117-3135).
gccaaggacggtaagatct

SEQ ID NO: 788880 - DNA, 19 bp, Mus musculus
  siRNA target sequence for 8030451F13Rik (NM_175418.3,3118-3136).
ccaaggacggtaagatcta

SEQ ID NO: 788881 - DNA, 19 bp, Mus musculus
  siRNA target sequence for 8030451F13Rik (NM_175418.3,3119-3137).
caaggacggtaagatctat

SEQ ID NO: 788882 - DNA, 19 bp, Mus musculus
  siRNA target sequence for 8030451F13Rik (NM_175418.3,3145-3163).
cagtgtacgaagacttcaa

SEQ ID NO: 788883 - DNA, 19 bp, Mus musculus
  siRNA target sequence for 8030451F13Rik (NM_175418.3,3147-3165).
gtgtacgaagacttcaatt

SEQ ID NO: 788884 - DNA, 19 bp, Mus musculus
  siRNA target sequence for 8030451F13Rik (NM_175418.3,3253-3271).
gaaatcccaagcccaaaat

SEQ ID NO: 788885 - DNA, 19 bp, Mus musculus
  siRNA target sequence for 8030451F13Rik (NM_175418.3,3302-3320).
ggatgacccaagatacaga

SEQ ID NO: 788886 - DNA, 19 bp, Mus musculus
  siRNA target sequence for 8030451F13Rik (NM_175418.3,3306-3324).
gacccaagatacagaatgt

SEQ ID NO: 788887 - DNA, 19 bp, Mus musculus
  siRNA target sequence for 8030451F13Rik (NM_175418.3,3309-3327).
ccaagatacagaatgttca

SEQ ID NO: 788888 - DNA, 19 bp, Mus musculus
  siRNA target sequence for 8030451F13Rik (NM_175418.3,3356-3374).
ccgcaagcctagtccttat

SEQ ID NO: 788889 - DNA, 19 bp, Mus musculus
  siRNA target sequence for 8030451F13Rik (NM_175418.3,3391-3409).
gctgcaaagcagtcaatga

SEQ ID NO: 788890 - DNA, 19 bp, Mus musculus
  siRNA target sequence for 8030451F13Rik (NM_175418.3,3413-3431).
cgggacggtggagattgaa

SEQ ID NO: 788891 - DNA, 19 bp, Mus musculus
  siRNA target sequence for 8030451F13Rik (NM_175418.3,3418-3436).
cggtggagattgaatgcaa

SEQ ID NO: 788892 - DNA, 19 bp, Mus musculus
  siRNA target sequence for 8030451F13Rik (NM_175418.3,3433-3451).
gcaaactggaggtgaaagt

SEQ ID NO: 788893 - DNA, 19 bp, Mus musculus
  siRNA target sequence for 4631423B10Rik (NM_175422.2,2027-2045).
gaggggccttggttttagt

SEQ ID NO: 788894 - DNA, 19 bp, Mus musculus
  siRNA target sequence for 4631423B10Rik (NM_175422.2,2104-2122).
ctagctcagtccttgtcat

SEQ ID NO: 788895 - DNA, 19 bp, Mus musculus
  siRNA target sequence for 4631423B10Rik (NM_175422.2,2153-2171).
cgttggaggtgtgtatact

SEQ ID NO: 788896 - DNA, 19 bp, Mus musculus
  siRNA target sequence for 4631423B10Rik (NM_175422.2,2247-2265).
gcctctggctcccgaatta

SEQ ID NO: 788897 - DNA, 19 bp, Mus musculus
  siRNA target sequence for 4631423B10Rik (NM_175422.2,2248-2266).
cctctggctcccgaattaa

SEQ ID NO: 788898 - DNA, 19 bp, Mus musculus
  siRNA target sequence for 4631423B10Rik (NM_175422.2,2249-2267).
ctctggctcccgaattaaa

SEQ ID NO: 788899 - DNA, 19 bp, Mus musculus
  siRNA target sequence for D730049H07Rik (NM_175423.2,416-434).
ctggcgcaagctctactta

SEQ ID NO: 788900 - DNA, 19 bp, Mus musculus
  siRNA target sequence for D730049H07Rik (NM_175423.2,543-561).
gggttgctcatcgtcttta

SEQ ID NO: 788901 - DNA, 19 bp, Mus musculus
  siRNA target sequence for D730049H07Rik (NM_175423.2,545-563).
gttgctcatcgtctttagt

SEQ ID NO: 788902 - DNA, 19 bp, Mus musculus
  siRNA target sequence for D730049H07Rik (NM_175423.2,660-678).
ctcaactcggtcaaagagt

SEQ ID NO: 788903 - DNA, 19 bp, Mus musculus
  siRNA target sequence for D730049H07Rik (NM_175423.2,737-755).
cgggacgctgcttttccta

SEQ ID NO: 788904 - DNA, 19 bp, Mus musculus
  siRNA target sequence for D730049H07Rik (NM_175423.2,827-845).
caagcctcccgctgaatca

SEQ ID NO: 788905 - DNA, 19 bp, Mus musculus
  siRNA target sequence for D730049H07Rik (NM_175423.2,1058-1076).
cagaggggaccattctcta

SEQ ID NO: 788906 - DNA, 19 bp, Mus musculus
  siRNA target sequence for A030004J04Rik (NM_175424.2,95-113).
gccacccccatgtcttcaa

SEQ ID NO: 788907 - DNA, 19 bp, Mus musculus
  siRNA target sequence for A030004J04Rik (NM_175424.2,96-114).
ccacccccatgtcttcaaa

SEQ ID NO: 788908 - DNA, 19 bp, Mus musculus
  siRNA target sequence for A030004J04Rik (NM_175424.2,168-186).
caggacccctgccaagata

SEQ ID NO: 788909 - DNA, 19 bp, Mus musculus
  siRNA target sequence for A030004J04Rik (NM_175424.2,170-188).
ggacccctgccaagataaa

SEQ ID NO: 788910 - DNA, 19 bp, Mus musculus
  siRNA target sequence for A030004J04Rik (NM_175424.2,324-342).
caggagctagcacaaacaa

SEQ ID NO: 788911 - DNA, 19 bp, Mus musculus
  siRNA target sequence for A030004J04Rik (NM_175424.2,329-347).
gctagcacaaacaaaatgt

SEQ ID NO: 788912 - DNA, 19 bp, Mus musculus
  siRNA target sequence for A030004J04Rik (NM_175424.2,369-387).
gtacaggagaagtgttcat

SEQ ID NO: 788913 - DNA, 19 bp, Mus musculus
  siRNA target sequence for C1qtnf7 (NM_175425.2,837-855).
ccaataagcacctagcaat

SEQ ID NO: 788914 - DNA, 19 bp, Mus musculus
  siRNA target sequence for C1qtnf7 (NM_175425.2,872-890).
gggcagtaccggataagga

SEQ ID NO: 788915 - DNA, 19 bp, Mus musculus
  siRNA target sequence for C1qtnf7 (NM_175425.2,880-898).
ccggataaggacctttgat

SEQ ID NO: 788916 - DNA, 19 bp, Mus musculus
  siRNA target sequence for C1qtnf7 (NM_175425.2,927-945).
cggggtccacagtcatcta

SEQ ID NO: 788917 - DNA, 19 bp, Mus musculus
  siRNA target sequence for C1qtnf7 (NM_175425.2,1048-1066).
cctctatgtcgatacagat

SEQ ID NO: 788918 - DNA, 19 bp, Mus musculus
  siRNA target sequence for C1qtnf7 (NM_175425.2,1049-1067).
ctctatgtcgatacagatt

SEQ ID NO: 788919 - DNA, 19 bp, Mus musculus
  siRNA target sequence for C1qtnf7 (NM_175425.2,1064-1082).
gattacctggattctatat

SEQ ID NO: 788920 - DNA, 19 bp, Mus musculus
  siRNA target sequence for 9530043G02Rik (NM_175426.2,521-539).
ctcaccacatgcagttatt

SEQ ID NO: 788921 - DNA, 19 bp, Mus musculus
  siRNA target sequence for 9530043G02Rik (NM_175426.2,572-590).
gcccaagtaccatatcgaa

SEQ ID NO: 788922 - DNA, 19 bp, Mus musculus
  siRNA target sequence for 9530043G02Rik (NM_175426.2,573-591).
cccaagtaccatatcgaaa

SEQ ID NO: 788923 - DNA, 19 bp, Mus musculus
  siRNA target sequence for 9530043G02Rik (NM_175426.2,582-600).
catatcgaaaccacctttt

SEQ ID NO: 788924 - DNA, 19 bp, Mus musculus
  siRNA target sequence for 9530043G02Rik (NM_175426.2,588-606).
gaaaccaccttttattaca

SEQ ID NO: 788925 - DNA, 19 bp, Mus musculus
  siRNA target sequence for 9530043G02Rik (NM_175426.2,632-650).
gcgctttcctccacatttt

SEQ ID NO: 788926 - DNA, 19 bp, Mus musculus
  siRNA target sequence for C630035N08Rik (NM_175427.2,700-718).
cgtgtggcctacaaaagca

SEQ ID NO: 788927 - DNA, 19 bp, Mus musculus
  siRNA target sequence for A830093I24Rik (NM_175431.2,372-390).
ggagccaagatgatatggt

SEQ ID NO: 788928 - DNA, 19 bp, Mus musculus
  siRNA target sequence for A830093I24Rik (NM_175431.2,434-452).
gaaccacagtcgctttctt

SEQ ID NO: 788929 - DNA, 19 bp, Mus musculus
  siRNA target sequence for A830093I24Rik (NM_175431.2,460-478).
ggctttagctaaagaagat

SEQ ID NO: 788930 - DNA, 19 bp, Mus musculus
  siRNA target sequence for A830093I24Rik (NM_175431.2,482-500).
gatgcagctgttcaatcaa

SEQ ID NO: 788931 - DNA, 19 bp, Mus musculus
  siRNA target sequence for A830093I24Rik (NM_175431.2,486-504).
cagctgttcaatcaatttt

SEQ ID NO: 788932 - DNA, 19 bp, Mus musculus
  siRNA target sequence for A830093I24Rik (NM_175431.2,488-506).
gctgttcaatcaattttat

SEQ ID NO: 788933 - DNA, 19 bp, Mus musculus
  siRNA target sequence for A830093I24Rik (NM_175431.2,526-544).
gaaggaactagataagtat

SEQ ID NO: 788934 - DNA, 19 bp, Mus musculus
  siRNA target sequence for A830093I24Rik (NM_175431.2,647-665).
gttcattcacataagaaca

SEQ ID NO: 788935 - DNA, 19 bp, Mus musculus
  siRNA target sequence for A830093I24Rik (NM_175431.2,650-668).
cattcacataagaacatta

SEQ ID NO: 788936 - DNA, 19 bp, Mus musculus
  siRNA target sequence for A830093I24Rik (NM_175431.2,673-691).
gaggagacgtcaagaatta

SEQ ID NO: 788937 - DNA, 19 bp, Mus musculus
  siRNA target sequence for A830093I24Rik (NM_175431.2,675-693).
ggagacgtcaagaattaga

SEQ ID NO: 788938 - DNA, 19 bp, Mus musculus
  siRNA target sequence for A830093I24Rik (NM_175431.2,678-696).
gacgtcaagaattagacaa

SEQ ID NO: 788939 - DNA, 19 bp, Mus musculus
  siRNA target sequence for A830093I24Rik (NM_175431.2,680-698).
cgtcaagaattagacaatt

SEQ ID NO: 788940 - DNA, 19 bp, Mus musculus
  siRNA target sequence for A830093I24Rik (NM_175431.2,681-699).
gtcaagaattagacaattt

SEQ ID NO: 788941 - DNA, 19 bp, Mus musculus
  siRNA target sequence for A830093I24Rik (NM_175431.2,686-704).
gaattagacaattttttga

SEQ ID NO: 788942 - DNA, 19 bp, Mus musculus
  siRNA target sequence for A830093I24Rik (NM_175431.2,729-747).
catttatagagcattatga

SEQ ID NO: 788943 - DNA, 19 bp, Mus musculus
  siRNA target sequence for A830093I24Rik (NM_175431.2,788-806).
cccaattttctgaaggtta

SEQ ID NO: 788944 - DNA, 19 bp, Mus musculus
  siRNA target sequence for A830093I24Rik (NM_175431.2,817-835).
gtttcgtgaccccttgaaa

SEQ ID NO: 788945 - DNA, 19 bp, Mus musculus
  siRNA target sequence for A830093I24Rik (NM_175431.2,829-847).
cttgaaaaaagcccaatat

SEQ ID NO: 788946 - DNA, 19 bp, Mus musculus
  siRNA target sequence for 4632425D07Rik (NM_175432.2,252-270).
ctgtgtcggagatcttcat

SEQ ID NO: 788947 - DNA, 19 bp, Mus musculus
  siRNA target sequence for 4632425D07Rik (NM_175432.2,374-392).
gtgtcggtggaagagaata

SEQ ID NO: 788948 - DNA, 19 bp, Mus musculus
  siRNA target sequence for 4632425D07Rik (NM_175432.2,431-449).
gccacagacgagaatgtca

SEQ ID NO: 788949 - DNA, 19 bp, Mus musculus
  siRNA target sequence for 4632425D07Rik (NM_175432.2,435-453).
cagacgagaatgtcatcaa

SEQ ID NO: 788950 - DNA, 19 bp, Mus musculus
  siRNA target sequence for 4632425D07Rik (NM_175432.2,457-475).
ctcggaccactgtgactat

SEQ ID NO: 788951 - DNA, 19 bp, Mus musculus
  siRNA target sequence for 4632425D07Rik (NM_175432.2,459-477).
cggaccactgtgactatgt

SEQ ID NO: 788952 - DNA, 19 bp, Mus musculus
  siRNA target sequence for 4632425D07Rik (NM_175432.2,742-760).
gcgcgtcctcacccaattt

SEQ ID NO: 788953 - DNA, 19 bp, Mus musculus
  siRNA target sequence for 4632425D07Rik (NM_175432.2,745-763).
cgtcctcacccaatttgta

SEQ ID NO: 788954 - DNA, 19 bp, Mus musculus
  siRNA target sequence for 4632425D07Rik (NM_175432.2,833-851).
cacctggtggctgacttta

SEQ ID NO: 788955 - DNA, 19 bp, Mus musculus
  siRNA target sequence for 4632425D07Rik (NM_175432.2,856-874).
gctggagtccccacacata

SEQ ID NO: 788956 - DNA, 19 bp, Mus musculus
  siRNA target sequence for 4632425D07Rik (NM_175432.2,964-982).
ggccgagaagacagtaact

SEQ ID NO: 788957 - DNA, 19 bp, Mus musculus
  siRNA target sequence for 4632425D07Rik (NM_175432.2,966-984).
ccgagaagacagtaactgt

SEQ ID NO: 788958 - DNA, 19 bp, Mus musculus
  siRNA target sequence for 4632425D07Rik (NM_175432.2,983-1001).
gtgctggatgacaaagtat

SEQ ID NO: 788959 - DNA, 19 bp, Mus musculus
  siRNA target sequence for 4632425D07Rik (NM_175432.2,1106-1124).
ctgctacgtgccccaaaaa

SEQ ID NO: 788960 - DNA, 19 bp, Mus musculus
  siRNA target sequence for 4632425D07Rik (NM_175432.2,1118-1136).
ccaaaaaaggaagctataa

SEQ ID NO: 788961 - DNA, 19 bp, Mus musculus
  siRNA target sequence for 4632425D07Rik (NM_175432.2,1167-1185).
cagtgacacccctggatat

SEQ ID NO: 788962 - DNA, 19 bp, Mus musculus
  siRNA target sequence for 4632425D07Rik (NM_175432.2,1305-1323).
cactgctccgggtcgatat

SEQ ID NO: 788963 - DNA, 19 bp, Mus musculus
  siRNA target sequence for 4632425D07Rik (NM_175432.2,1307-1325).
ctgctccgggtcgatatgt

SEQ ID NO: 788964 - DNA, 19 bp, Mus musculus
  siRNA target sequence for 4632425D07Rik (NM_175432.2,1383-1401).
gccacgtgggggtcaagtt

SEQ ID NO: 788965 - DNA, 19 bp, Mus musculus
  siRNA target sequence for 4632425D07Rik (NM_175432.2,1384-1402).
ccacgtgggggtcaagttt

SEQ ID NO: 788966 - DNA, 19 bp, Mus musculus
  siRNA target sequence for 4632425D07Rik (NM_175432.2,1509-1527).
gccaggatgaactatacca

SEQ ID NO: 788967 - DNA, 19 bp, Mus musculus
  siRNA target sequence for 4632425D07Rik (NM_175432.2,1640-1658).
cacagcatacccattgact

SEQ ID NO: 788968 - DNA, 19 bp, Mus musculus
  siRNA target sequence for 4632425D07Rik (NM_175432.2,1649-1667).
cccattgacttcaccaatt

SEQ ID NO: 788969 - DNA, 19 bp, Mus musculus
  siRNA target sequence for 4632425D07Rik (NM_175432.2,1650-1668).
ccattgacttcaccaattt

SEQ ID NO: 788970 - DNA, 19 bp, Mus musculus
  siRNA target sequence for 4632425D07Rik (NM_175432.2,1746-1764).
gcctgagtgacctagagat

SEQ ID NO: 788971 - DNA, 19 bp, Mus musculus
  siRNA target sequence for 4632425D07Rik (NM_175432.2,1923-1941).
cggagctcttggagaacat

SEQ ID NO: 788972 - DNA, 19 bp, Mus musculus
  siRNA target sequence for 4632425D07Rik (NM_175432.2,2008-2026).
ggagaacaaccacttactt

SEQ ID NO: 788973 - DNA, 19 bp, Mus musculus
  siRNA target sequence for 4632425D07Rik (NM_175432.2,2216-2234).
ggggaagatgatatcaagt

SEQ ID NO: 788974 - DNA, 19 bp, Mus musculus
  siRNA target sequence for D030024H03Rik (NM_175436.2,190-208).
gctgagataccaacacaat

SEQ ID NO: 788975 - DNA, 19 bp, Mus musculus
  siRNA target sequence for D030024H03Rik (NM_175436.2,214-232).
ggagcagtggaaatctcaa

SEQ ID NO: 788976 - DNA, 19 bp, Mus musculus
  siRNA target sequence for D030024H03Rik (NM_175436.2,630-648).
ggtagctcatcgcaaaact

SEQ ID NO: 788977 - DNA, 19 bp, Mus musculus
  siRNA target sequence for D030024H03Rik (NM_175436.2,1040-1058).
caggggcacgccacaaaca

SEQ ID NO: 788978 - DNA, 19 bp, Mus musculus
  siRNA target sequence for D030024H03Rik (NM_175436.2,1252-1270).
ggggaagcccgctatctct

SEQ ID NO: 788979 - DNA, 19 bp, Mus musculus
  siRNA target sequence for D030024H03Rik (NM_175436.2,1697-1715).
gcaagaccttcgcttcttt

SEQ ID NO: 788980 - DNA, 19 bp, Mus musculus
  siRNA target sequence for D030024H03Rik (NM_175436.2,1868-1886).
ccatcacgggtctctacaa

SEQ ID NO: 788981 - DNA, 19 bp, Mus musculus
  siRNA target sequence for D030024H03Rik (NM_175436.2,1966-1984).
gcccgagcaaggagtttga

SEQ ID NO: 788982 - DNA, 19 bp, Mus musculus
  siRNA target sequence for D030024H03Rik (NM_175436.2,2032-2050).
gaacctcagcagactatca

SEQ ID NO: 788983 - DNA, 19 bp, Mus musculus
  siRNA target sequence for B930008K04Rik (NM_175446.2,916-934).
cagtatcacctttacatct

SEQ ID NO: 788984 - DNA, 19 bp, Mus musculus
  siRNA target sequence for B930008K04Rik (NM_175446.2,962-980).
ggaactgaacatcaaatta

SEQ ID NO: 788985 - DNA, 19 bp, Mus musculus
  siRNA target sequence for B930008K04Rik (NM_175446.2,963-981).
gaactgaacatcaaattaa

SEQ ID NO: 788986 - DNA, 19 bp, Mus musculus
  siRNA target sequence for B930008K04Rik (NM_175446.2,1085-1103).
gagcccaagggtcatttca

SEQ ID NO: 788987 - DNA, 19 bp, Mus musculus
  siRNA target sequence for B930008K04Rik (NM_175446.2,1104-1122).
gggaaatggaggataatta

SEQ ID NO: 788988 - DNA, 19 bp, Mus musculus
  siRNA target sequence for B930008K04Rik (NM_175446.2,1130-1148).
gcccaagcccatgaataca

SEQ ID NO: 788989 - DNA, 19 bp, Mus musculus
  siRNA target sequence for B930008K04Rik (NM_175446.2,1190-1208).
caaacacttccacttgaaa

SEQ ID NO: 788990 - DNA, 19 bp, Mus musculus
  siRNA target sequence for B930008K04Rik (NM_175446.2,1222-1240).
cccaggaccatacaatgat

SEQ ID NO: 788991 - DNA, 19 bp, Mus musculus
  siRNA target sequence for B930008K04Rik (NM_175446.2,1223-1241).
ccaggaccatacaatgatt

SEQ ID NO: 788992 - DNA, 19 bp, Mus musculus
  siRNA target sequence for B930008K04Rik (NM_175446.2,1226-1244).
ggaccatacaatgattcta

SEQ ID NO: 788993 - DNA, 19 bp, Mus musculus
  siRNA target sequence for B930008K04Rik (NM_175446.2,1258-1276).
gcagttacctcacaattta

SEQ ID NO: 788994 - DNA, 19 bp, Mus musculus
  siRNA target sequence for B930008K04Rik (NM_175446.2,1261-1279).
gttacctcacaatttacca

SEQ ID NO: 788995 - DNA, 19 bp, Mus musculus
  siRNA target sequence for B930008K04Rik (NM_175446.2,1349-1367).
ggacttgatcccaatacta

SEQ ID NO: 788996 - DNA, 19 bp, Mus musculus
  siRNA target sequence for B930008K04Rik (NM_175446.2,1352-1370).
cttgatcccaatactagtt

SEQ ID NO: 788997 - DNA, 19 bp, Mus musculus
  siRNA target sequence for B930008K04Rik (NM_175446.2,1374-1392).
gacggatgtcagaaagcta

SEQ ID NO: 788998 - DNA, 19 bp, Mus musculus
  siRNA target sequence for B930008K04Rik (NM_175446.2,1376-1394).
cggatgtcagaaagctata

SEQ ID NO: 788999 - DNA, 19 bp, Mus musculus
  siRNA target sequence for B930008K04Rik (NM_175446.2,1395-1413).
ggtatagggatcagagata

SEQ ID NO: 789000 - DNA, 19 bp, Mus musculus
  siRNA target sequence for B930008K04Rik (NM_175446.2,1446-1464).
ggccttgtgaggaaagatt

SEQ ID NO: 789001 - DNA, 19 bp, Mus musculus
  siRNA target sequence for B930008K04Rik (NM_175446.2,1447-1465).
gccttgtgaggaaagattt

SEQ ID NO: 789002 - DNA, 19 bp, Mus musculus
  siRNA target sequence for B930008K04Rik (NM_175446.2,1533-1551).
ctggttaccatctcattca

SEQ ID NO: 789003 - DNA, 19 bp, Mus musculus
  siRNA target sequence for LOC215714 (NM_175447.2,184-202).
gggtgctttggccatatca

SEQ ID NO: 789004 - DNA, 19 bp, Mus musculus
  siRNA target sequence for LOC215714 (NM_175447.2,185-203).
ggtgctttggccatatcat

SEQ ID NO: 789005 - DNA, 19 bp, Mus musculus
  siRNA target sequence for LOC215714 (NM_175447.2,206-224).
ctccactcaggctcataca

SEQ ID NO: 789006 - DNA, 19 bp, Mus musculus
  siRNA target sequence for LOC215714 (NM_175447.2,324-342).
ccacgctgccggacttgaa

SEQ ID NO: 789007 - DNA, 19 bp, Mus musculus
  siRNA target sequence for A630077B13Rik (NM_175449.3,143-161).
cggctggtggggagaagat

SEQ ID NO: 789008 - DNA, 19 bp, Mus musculus
  siRNA target sequence for A630077B13Rik (NM_175449.3,239-257).
ctgccctcgcgcttttcct

SEQ ID NO: 789009 - DNA, 19 bp, Mus musculus
  siRNA target sequence for A630077B13Rik (NM_175449.3,418-436).
gagggctctttctaccaat

SEQ ID NO: 789010 - DNA, 19 bp, Mus musculus
  siRNA target sequence for A630077B13Rik (NM_175449.3,583-601).
gtgttcggttggattctga

SEQ ID NO: 789011 - DNA, 19 bp, Mus musculus
  siRNA target sequence for A630077B13Rik (NM_175449.3,605-623).
ctgccgttattatcttact

SEQ ID NO: 789012 - DNA, 19 bp, Mus musculus
  siRNA target sequence for A630077B13Rik (NM_175449.3,608-626).
ccgttattatcttacttct

SEQ ID NO: 789013 - DNA, 19 bp, Mus musculus
  siRNA target sequence for A630077B13Rik (NM_175449.3,609-627).
cgttattatcttacttctt

SEQ ID NO: 789014 - DNA, 19 bp, Mus musculus
  siRNA target sequence for A630077B13Rik (NM_175449.3,650-668).
gcttctctccggttagtta

SEQ ID NO: 789015 - DNA, 19 bp, Mus musculus
  siRNA target sequence for A630077B13Rik (NM_175449.3,651-669).
cttctctccggttagttat

SEQ ID NO: 789016 - DNA, 19 bp, Mus musculus
  siRNA target sequence for A630077B13Rik (NM_175449.3,661-679).
gttagttatctgcagttaa

SEQ ID NO: 789017 - DNA, 19 bp, Mus musculus
  siRNA target sequence for A630077B13Rik (NM_175449.3,665-683).
gttatctgcagttaaaatt

SEQ ID NO: 789018 - DNA, 19 bp, Mus musculus
  siRNA target sequence for A630077B13Rik (NM_175449.3,746-764).
cacagttggccgaagagaa

SEQ ID NO: 789019 - DNA, 19 bp, Mus musculus
  siRNA target sequence for A630077B13Rik (NM_175449.3,788-806).
cgaagccgaaggaatgcaa

SEQ ID NO: 789020 - DNA, 19 bp, Mus musculus
  siRNA target sequence for A630077B13Rik (NM_175449.3,832-850).
gaaatctcagcgttgtaca

SEQ ID NO: 789021 - DNA, 19 bp, Mus musculus
  siRNA target sequence for A630077B13Rik (NM_175449.3,876-894).
cagcatgctgcacaagtat

SEQ ID NO: 789022 - DNA, 19 bp, Mus musculus
  siRNA target sequence for A630077B13Rik (NM_175449.3,879-897).
catgctgcacaagtatgtt

SEQ ID NO: 789023 - DNA, 19 bp, Mus musculus
  siRNA target sequence for A630077B13Rik (NM_175449.3,956-974).
cccttggctttgtagatga

SEQ ID NO: 789024 - DNA, 19 bp, Mus musculus
  siRNA target sequence for A630077B13Rik (NM_175449.3,973-991).
gacatgtccatgactaaca

SEQ ID NO: 789025 - DNA, 19 bp, Mus musculus
  siRNA target sequence for Wdr18 (NM_175450.2,137-155).
gaggcctggcgctactcaa

SEQ ID NO: 789026 - DNA, 19 bp, Mus musculus
  siRNA target sequence for 5330439C02Rik (NM_175453.2,250-268).
ctactctggagatgttcaa

SEQ ID NO: 789027 - DNA, 19 bp, Mus musculus
  siRNA target sequence for 5330439C02Rik (NM_175453.2,281-299).
gcaaactgcagtgagaaat

SEQ ID NO: 789028 - DNA, 19 bp, Mus musculus
  siRNA target sequence for 5330439C02Rik (NM_175453.2,282-300).
caaactgcagtgagaaata

SEQ ID NO: 789029 - DNA, 19 bp, Mus musculus
  siRNA target sequence for 5330439C02Rik (NM_175453.2,369-387).
cccaggctgccaactttct

SEQ ID NO: 789030 - DNA, 19 bp, Mus musculus
  siRNA target sequence for 5330439C02Rik (NM_175453.2,717-735).
gatacgtgggggacataca

SEQ ID NO: 789031 - DNA, 19 bp, Mus musculus
  siRNA target sequence for C630004H02Rik (NM_175454.1,232-250).
cctcggtgcaggatgtctt

SEQ ID NO: 789032 - DNA, 19 bp, Mus musculus
  siRNA target sequence for C630004H02Rik (NM_175454.1,233-251).
ctcggtgcaggatgtcttt

SEQ ID NO: 789033 - DNA, 19 bp, Mus musculus
  siRNA target sequence for C630004H02Rik (NM_175454.1,415-433).
cccgagtgctgccttacat

SEQ ID NO: 789034 - DNA, 19 bp, Mus musculus
  siRNA target sequence for C630004H02Rik (NM_175454.1,417-435).
cgagtgctgccttacatct

SEQ ID NO: 789035 - DNA, 19 bp, Mus musculus
  siRNA target sequence for C630004H02Rik (NM_175454.1,637-655).
ccctggacagctgtgaata

SEQ ID NO: 789036 - DNA, 19 bp, Mus musculus
  siRNA target sequence for C630004H02Rik (NM_175454.1,638-656).
cctggacagctgtgaatat

SEQ ID NO: 789037 - DNA, 19 bp, Mus musculus
  siRNA target sequence for C630004H02Rik (NM_175454.1,959-977).
ggctgctcaggtgcttatt

SEQ ID NO: 789038 - DNA, 19 bp, Mus musculus
  siRNA target sequence for C630004H02Rik (NM_175454.1,963-981).
gctcaggtgcttattgtca

SEQ ID NO: 789039 - DNA, 19 bp, Mus musculus
  siRNA target sequence for C630004H02Rik (NM_175454.1,1091-1109).
ctacctgtcccgaattcat

SEQ ID NO: 789040 - DNA, 19 bp, Mus musculus
  siRNA target sequence for C630004H02Rik (NM_175454.1,1259-1277).
gaaattcctcttctttgta

SEQ ID NO: 789041 - DNA, 19 bp, Mus musculus
  siRNA target sequence for C630004H02Rik (NM_175454.1,1737-1755).
cagtttgatggcaattcca

SEQ ID NO: 789042 - DNA, 19 bp, Mus musculus
  siRNA target sequence for C630004H02Rik (NM_175454.1,1935-1953).
gaaccaggcacccttaaga

SEQ ID NO: 789043 - DNA, 19 bp, Mus musculus
  siRNA target sequence for C630004H02Rik (NM_175454.1,1938-1956).
ccaggcacccttaagacta

SEQ ID NO: 789044 - DNA, 19 bp, Mus musculus
  siRNA target sequence for C630004H02Rik (NM_175454.1,2332-2350).
ccatccttatccgaaagta

SEQ ID NO: 789045 - DNA, 19 bp, Mus musculus
  siRNA target sequence for 6430502M16Rik (NM_175455.2,656-674).
cttgatcaaagcagtacat

SEQ ID NO: 789046 - DNA, 19 bp, Mus musculus
  siRNA target sequence for 6430502M16Rik (NM_175455.2,684-702).
cttcgcctcactagacttt

SEQ ID NO: 789047 - DNA, 19 bp, Mus musculus
  siRNA target sequence for 6430502M16Rik (NM_175455.2,714-732).
ggcgcctacatcaacgaaa

SEQ ID NO: 789048 - DNA, 19 bp, Mus musculus
  siRNA target sequence for 6430502M16Rik (NM_175455.2,745-763).
gggaaacccctttaatgat

SEQ ID NO: 789049 - DNA, 19 bp, Mus musculus
  siRNA target sequence for 6430502M16Rik (NM_175455.2,746-764).
ggaaacccctttaatgatt

SEQ ID NO: 789050 - DNA, 19 bp, Mus musculus
  siRNA target sequence for 6430502M16Rik (NM_175455.2,754-772).
ctttaatgattgcttgtaa

SEQ ID NO: 789051 - DNA, 19 bp, Mus musculus
  siRNA target sequence for 6430502M16Rik (NM_175455.2,775-793).
ccaaacatgtcgatcaaca

SEQ ID NO: 789052 - DNA, 19 bp, Mus musculus
  siRNA target sequence for 6430502M16Rik (NM_175455.2,857-875).
ggacaaatccgggaaaagt

SEQ ID NO: 789053 - DNA, 19 bp, Mus musculus
  siRNA target sequence for 6430502M16Rik (NM_175455.2,970-988).
gctactcagctctggttta

SEQ ID NO: 789054 - DNA, 19 bp, Mus musculus
  siRNA target sequence for 6430502M16Rik (NM_175455.2,971-989).
ctactcagctctggtttat

SEQ ID NO: 789055 - DNA, 19 bp, Mus musculus
  siRNA target sequence for 6430502M16Rik (NM_175455.2,1049-1067).
gggcaaagaggttatcatt

SEQ ID NO: 789056 - DNA, 19 bp, Mus musculus
  siRNA target sequence for 6430502M16Rik (NM_175455.2,1052-1070).
caaagaggttatcattata

SEQ ID NO: 789057 - DNA, 19 bp, Mus musculus
  siRNA target sequence for 6430502M16Rik (NM_175455.2,1157-1175).
ggccacgccttcggaaatt

SEQ ID NO: 789058 - DNA, 19 bp, Mus musculus
  siRNA target sequence for 6430502M16Rik (NM_175455.2,1159-1177).
ccacgccttcggaaattga

SEQ ID NO: 789059 - DNA, 19 bp, Mus musculus
  siRNA target sequence for 6430502M16Rik (NM_175455.2,1193-1211).
gttgccactttcctattct

SEQ ID NO: 789060 - DNA, 19 bp, Mus musculus
  siRNA target sequence for 6430502M16Rik (NM_175455.2,1217-1235).
gacggacctgacactcttt

SEQ ID NO: 789061 - DNA, 19 bp, Mus musculus
  siRNA target sequence for 6430502M16Rik (NM_175455.2,1256-1274).
gtgtgggggcagtgataat

SEQ ID NO: 789062 - DNA, 19 bp, Mus musculus
  siRNA target sequence for 6430502M16Rik (NM_175455.2,1260-1278).
gggggcagtgataatacct

SEQ ID NO: 789063 - DNA, 19 bp, Mus musculus
  siRNA target sequence for 6430502M16Rik (NM_175455.2,1304-1322).
gcctgtgatagccactaat

SEQ ID NO: 789064 - DNA, 19 bp, Mus musculus
  siRNA target sequence for 6430502M16Rik (NM_175455.2,1360-1378).
gtaccccatcattaaagca

SEQ ID NO: 789065 - DNA, 19 bp, Mus musculus
  siRNA target sequence for 6430502M16Rik (NM_175455.2,1406-1424).
ggagctccaagatatcact

SEQ ID NO: 789066 - DNA, 19 bp, Mus musculus
  siRNA target sequence for 6430502M16Rik (NM_175455.2,1488-1506).
caccagagcatcgatgtaa

SEQ ID NO: 789067 - DNA, 19 bp, Mus musculus
  siRNA target sequence for 6430502M16Rik (NM_175455.2,1490-1508).
ccagagcatcgatgtaaaa

SEQ ID NO: 789068 - DNA, 19 bp, Mus musculus
  siRNA target sequence for 6430502M16Rik (NM_175455.2,1538-1556).
ccaggtcaactcaaggaaa

SEQ ID NO: 789069 - DNA, 19 bp, Mus musculus
  siRNA target sequence for 6430502M16Rik (NM_175455.2,1539-1557).
caggtcaactcaaggaaaa

SEQ ID NO: 789070 - DNA, 19 bp, Mus musculus
  siRNA target sequence for 6430502M16Rik (NM_175455.2,1637-1655).
cccagactctaatcagatt

SEQ ID NO: 789071 - DNA, 19 bp, Mus musculus
  siRNA target sequence for 6430502M16Rik (NM_175455.2,1638-1656).
ccagactctaatcagattt

SEQ ID NO: 789072 - DNA, 19 bp, Mus musculus
  siRNA target sequence for 6430502M16Rik (NM_175455.2,1659-1677).
gcctccacgctgaagagta

SEQ ID NO: 789073 - DNA, 19 bp, Mus musculus
  siRNA target sequence for 6430502M16Rik (NM_175455.2,1660-1678).
cctccacgctgaagagtat

SEQ ID NO: 789074 - DNA, 19 bp, Mus musculus
  siRNA target sequence for 6430502M16Rik (NM_175455.2,1663-1681).
ccacgctgaagagtatagt

SEQ ID NO: 789075 - DNA, 19 bp, Mus musculus
  siRNA target sequence for 6430502M16Rik (NM_175455.2,1664-1682).
cacgctgaagagtatagtt

SEQ ID NO: 789076 - DNA, 19 bp, Mus musculus
  siRNA target sequence for 6430502M16Rik (NM_175455.2,1666-1684).
cgctgaagagtatagttca

SEQ ID NO: 789077 - DNA, 19 bp, Mus musculus
  siRNA target sequence for 6430502M16Rik (NM_175455.2,1667-1685).
gctgaagagtatagttcaa

SEQ ID NO: 789078 - DNA, 19 bp, Mus musculus
  siRNA target sequence for 6430502M16Rik (NM_175455.2,1668-1686).
ctgaagagtatagttcaaa

SEQ ID NO: 789079 - DNA, 19 bp, Mus musculus
  siRNA target sequence for 6430502M16Rik (NM_175455.2,1744-1762).
cccctccaaccgtagaaga

SEQ ID NO: 789080 - DNA, 19 bp, Mus musculus
  siRNA target sequence for 6430502M16Rik (NM_175455.2,1745-1763).
ccctccaaccgtagaagat

SEQ ID NO: 789081 - DNA, 19 bp, Mus musculus
  siRNA target sequence for 6430502M16Rik (NM_175455.2,1970-1988).
ccctcccattacagacatt

SEQ ID NO: 789082 - DNA, 19 bp, Mus musculus
  siRNA target sequence for 6430502M16Rik (NM_175455.2,1981-1999).
cagacattggtgtcaacaa

SEQ ID NO: 789083 - DNA, 19 bp, Mus musculus
  siRNA target sequence for 6430502M16Rik (NM_175455.2,1983-2001).
gacattggtgtcaacaaca

SEQ ID NO: 789084 - DNA, 19 bp, Mus musculus
  siRNA target sequence for 6430502M16Rik (NM_175455.2,2015-2033).
gctttcttgtggccaaaaa

SEQ ID NO: 789085 - DNA, 19 bp, Mus musculus
  siRNA target sequence for 6430502M16Rik (NM_175455.2,2061-2079).
ccgaaagaatttaaaacca

SEQ ID NO: 789086 - DNA, 19 bp, Mus musculus
  siRNA target sequence for 6430502M16Rik (NM_175455.2,2104-2122).
ccctgcagacggaacaaat

SEQ ID NO: 789087 - DNA, 19 bp, Mus musculus
  siRNA target sequence for 6430502M16Rik (NM_175455.2,2111-2129).
gacggaacaaattaagcaa

SEQ ID NO: 789088 - DNA, 19 bp, Mus musculus
  siRNA target sequence for C130068O12Rik (NM_175456.2,120-138).
gcaaccctggttatcaatt

SEQ ID NO: 789089 - DNA, 19 bp, Mus musculus
  siRNA target sequence for C130068O12Rik (NM_175456.2,121-139).
caaccctggttatcaattt

SEQ ID NO: 789090 - DNA, 19 bp, Mus musculus
  siRNA target sequence for C130068O12Rik (NM_175456.2,153-171).
cagcagtgggcgaatgaga

SEQ ID NO: 789091 - DNA, 19 bp, Mus musculus
  siRNA target sequence for C130068O12Rik (NM_175456.2,206-224).
gctgccgggagcaactcat

SEQ ID NO: 789092 - DNA, 19 bp, Mus musculus
  siRNA target sequence for C130068O12Rik (NM_175456.2,227-245).
cctacctaacgctcctaaa

SEQ ID NO: 789093 - DNA, 19 bp, Mus musculus
  siRNA target sequence for C130068O12Rik (NM_175456.2,331-349).
ccgaggtctcccacattaa

SEQ ID NO: 789094 - DNA, 19 bp, Mus musculus
  siRNA target sequence for C130068O12Rik (NM_175456.2,332-350).
cgaggtctcccacattaaa

SEQ ID NO: 789095 - DNA, 19 bp, Mus musculus
  siRNA target sequence for C130068O12Rik (NM_175456.2,333-351).
gaggtctcccacattaaaa

SEQ ID NO: 789096 - DNA, 19 bp, Mus musculus
  siRNA target sequence for C130068O12Rik (NM_175456.2,336-354).
gtctcccacattaaaagga

SEQ ID NO: 789097 - DNA, 19 bp, Mus musculus
  siRNA target sequence for C130068O12Rik (NM_175456.2,418-436).
gccacaggtatgagaatga

SEQ ID NO: 789098 - DNA, 19 bp, Mus musculus
  siRNA target sequence for C130068O12Rik (NM_175456.2,419-437).
ccacaggtatgagaatgat

SEQ ID NO: 789099 - DNA, 19 bp, Mus musculus
  siRNA target sequence for C130068O12Rik (NM_175456.2,442-460).
gcgtgtctgaagctattca

SEQ ID NO: 789100 - DNA, 19 bp, Mus musculus
  siRNA target sequence for C130068O12Rik (NM_175456.2,502-520).
cgccaacacggagaagaaa

SEQ ID NO: 789101 - DNA, 19 bp, Mus musculus
  siRNA target sequence for C130068O12Rik (NM_175456.2,619-637).
gctacggaggggatatgga

SEQ ID NO: 789102 - DNA, 19 bp, Mus musculus
  siRNA target sequence for C130068O12Rik (NM_175456.2,668-686).
ggctcctgccaggatcaaa

SEQ ID NO: 789103 - DNA, 19 bp, Mus musculus
  siRNA target sequence for C130068O12Rik (NM_175456.2,733-751).
gtaaggcccatcggaaata

SEQ ID NO: 789104 - DNA, 19 bp, Mus musculus
  siRNA target sequence for C130068O12Rik (NM_175456.2,754-772).
gccaagtggacaacttgaa

SEQ ID NO: 789105 - DNA, 19 bp, Mus musculus
  siRNA target sequence for C130068O12Rik (NM_175456.2,832-850).
gtgacgaatttgactatga

SEQ ID NO: 789106 - DNA, 19 bp, Mus musculus
  siRNA target sequence for C130068O12Rik (NM_175456.2,836-854).
cgaatttgactatgatcta

SEQ ID NO: 789107 - DNA, 19 bp, Mus musculus
  siRNA target sequence for C130068O12Rik (NM_175456.2,947-965).
gcacatctatcgggaaatt

SEQ ID NO: 789108 - DNA, 19 bp, Mus musculus
  siRNA target sequence for C130068O12Rik (NM_175456.2,948-966).
cacatctatcgggaaatta

SEQ ID NO: 789109 - DNA, 19 bp, Mus musculus
  siRNA target sequence for C130068O12Rik (NM_175456.2,1030-1048).
ctttcggagaactctttga

SEQ ID NO: 789110 - DNA, 19 bp, Mus musculus
  siRNA target sequence for C130068O12Rik (NM_175456.2,1047-1065).
gatcgctatgttcgaattt

SEQ ID NO: 789111 - DNA, 19 bp, Mus musculus
  siRNA target sequence for C130068O12Rik (NM_175456.2,1051-1069).
gctatgttcgaatttctga

SEQ ID NO: 789112 - DNA, 19 bp, Mus musculus
  siRNA target sequence for C130068O12Rik (NM_175456.2,1144-1162).
gccgagacgaccatgttgt

SEQ ID NO: 789113 - DNA, 19 bp, Mus musculus
  siRNA target sequence for C130068O12Rik (NM_175456.2,1147-1165).
gagacgaccatgttgtgat

SEQ ID NO: 789114 - DNA, 19 bp, Mus musculus
  siRNA target sequence for C130068O12Rik (NM_175456.2,1149-1167).
gacgaccatgttgtgatta

SEQ ID NO: 789115 - DNA, 19 bp, Mus musculus
  siRNA target sequence for C130068O12Rik (NM_175456.2,1151-1169).
cgaccatgttgtgattact

SEQ ID NO: 789116 - DNA, 19 bp, Mus musculus
  siRNA target sequence for E330013K21Rik (NM_175459.3,101-119).
gcgactgggacccatttca

SEQ ID NO: 789117 - DNA, 19 bp, Mus musculus
  siRNA target sequence for E330013K21Rik (NM_175459.3,152-170).
gcagatcagtcctagctta

SEQ ID NO: 789118 - DNA, 19 bp, Mus musculus
  siRNA target sequence for E330013K21Rik (NM_175459.3,197-215).
gaatagacctccttcagat

SEQ ID NO: 789119 - DNA, 19 bp, Mus musculus
  siRNA target sequence for E330013K21Rik (NM_175459.3,213-231).
gataccaggtccgttattt

SEQ ID NO: 789120 - DNA, 19 bp, Mus musculus
  siRNA target sequence for E330013K21Rik (NM_175459.3,217-235).
ccaggtccgttattttgca

SEQ ID NO: 789121 - DNA, 19 bp, Mus musculus
  siRNA target sequence for E330013K21Rik (NM_175459.3,218-236).
caggtccgttattttgcaa

SEQ ID NO: 789122 - DNA, 19 bp, Mus musculus
  siRNA target sequence for E330013K21Rik (NM_175459.3,243-261).
ctggtgtccacgactttga

SEQ ID NO: 789123 - DNA, 19 bp, Mus musculus
  siRNA target sequence for E330013K21Rik (NM_175459.3,430-448).
cgttgccaccctacctttt

SEQ ID NO: 789124 - DNA, 19 bp, Mus musculus
  siRNA target sequence for E330013K21Rik (NM_175459.3,443-461).
ccttttcggcatggaaaat

SEQ ID NO: 789125 - DNA, 19 bp, Mus musculus
  siRNA target sequence for E330013K21Rik (NM_175459.3,559-577).
gcatcgggatcgacttcaa

SEQ ID NO: 789126 - DNA, 19 bp, Mus musculus
  siRNA target sequence for E330013K21Rik (NM_175459.3,564-582).
gggatcgacttcaacacta

SEQ ID NO: 789127 - DNA, 19 bp, Mus musculus
  siRNA target sequence for E330013K21Rik (NM_175459.3,578-596).
cactatcatccgtacttca

SEQ ID NO: 789128 - DNA, 19 bp, Mus musculus
  siRNA target sequence for E330013K21Rik (NM_175459.3,604-622).
ccttggtcgcctacatcaa

SEQ ID NO: 789129 - DNA, 19 bp, Mus musculus
  siRNA target sequence for E330013K21Rik (NM_175459.3,727-745).
gcgggcagaaaggcatatt

SEQ ID NO: 789130 - DNA, 19 bp, Mus musculus
  siRNA target sequence for E330013K21Rik (NM_175459.3,788-806).
cggtacactggagtatgaa

SEQ ID NO: 789131 - DNA, 19 bp, Mus musculus
  siRNA target sequence for E330013K21Rik (NM_175459.3,837-855).
caacccggacctgtaaaca

SEQ ID NO: 789132 - DNA, 19 bp, Mus musculus
  siRNA target sequence for E330013K21Rik (NM_175459.3,841-859).
ccggacctgtaaacaacat

SEQ ID NO: 789133 - DNA, 19 bp, Mus musculus
  siRNA target sequence for E330013K21Rik (NM_175459.3,1264-1282).
ctttcaacgcacggtataa

SEQ ID NO: 789134 - DNA, 19 bp, Mus musculus
  siRNA target sequence for E330013K21Rik (NM_175459.3,1363-1381).
ggctcgagaacctcaagat

SEQ ID NO: 789135 - DNA, 19 bp, Mus musculus
  siRNA target sequence for E330013K21Rik (NM_175459.3,1480-1498).
ggacacatcttgacactaa

SEQ ID NO: 789136 - DNA, 19 bp, Mus musculus
  siRNA target sequence for E330013K21Rik (NM_175459.3,1481-1499).
gacacatcttgacactaaa

SEQ ID NO: 789137 - DNA, 19 bp, Mus musculus
  siRNA target sequence for E330013K21Rik (NM_175459.3,1485-1503).
catcttgacactaaacctt

SEQ ID NO: 789138 - DNA, 19 bp, Mus musculus
  siRNA target sequence for E330013K21Rik (NM_175459.3,1491-1509).
gacactaaaccttatgctt

SEQ ID NO: 789139 - DNA, 19 bp, Mus musculus
  siRNA target sequence for E330013K21Rik (NM_175459.3,1592-1610).
gcaagcaaggaaaaagcta

SEQ ID NO: 789140 - DNA, 19 bp, Mus musculus
  siRNA target sequence for C030014K22Rik (NM_175461.2,208-226).
gcaaccagatggagttctt

SEQ ID NO: 789141 - DNA, 19 bp, Mus musculus
  siRNA target sequence for C030014K22Rik (NM_175461.2,360-378).
gttggccccaccaacaaga

SEQ ID NO: 789142 - DNA, 19 bp, Mus musculus
  siRNA target sequence for C030014K22Rik (NM_175461.2,526-544).
ccaaggaaaagatcatact

SEQ ID NO: 789143 - DNA, 19 bp, Mus musculus
  siRNA target sequence for C030014K22Rik (NM_175461.2,539-557).
catactgcagaccatcaaa

SEQ ID NO: 789144 - DNA, 19 bp, Mus musculus
  siRNA target sequence for C030014K22Rik (NM_175461.2,676-694).
cccctaacgcactagtgaa

SEQ ID NO: 789145 - DNA, 19 bp, Mus musculus
  siRNA target sequence for C030014K22Rik (NM_175461.2,742-760).
gaccacctctggttgtgat

SEQ ID NO: 789146 - DNA, 19 bp, Mus musculus
  siRNA target sequence for LOC228071 (NM_175465.2,749-767).
ctcgtggtctcctatggat

SEQ ID NO: 789147 - DNA, 19 bp, Mus musculus
  siRNA target sequence for LOC228071 (NM_175465.2,1081-1099).
ctggagacgaggaagatct

SEQ ID NO: 789148 - DNA, 19 bp, Mus musculus
  siRNA target sequence for LOC228071 (NM_175465.2,1127-1145).
gcttagcgacgtttgctat

SEQ ID NO: 789149 - DNA, 19 bp, Mus musculus
  siRNA target sequence for LOC228071 (NM_175465.2,1414-1432).
gcaaggatgtaactattga

SEQ ID NO: 789150 - DNA, 19 bp, Mus musculus
  siRNA target sequence for LOC228071 (NM_175465.2,1418-1436).
ggatgtaactattgaaaat

SEQ ID NO: 789151 - DNA, 19 bp, Mus musculus
  siRNA target sequence for LOC228071 (NM_175465.2,1611-1629).
ctgctgaagacccatatca

SEQ ID NO: 789152 - DNA, 19 bp, Mus musculus
  siRNA target sequence for LOC228071 (NM_175465.2,1638-1656).
gacgatgctcaggaaacaa

SEQ ID NO: 789153 - DNA, 19 bp, Mus musculus
  siRNA target sequence for LOC228071 (NM_175465.2,1877-1895).
ctccaatgccgaaaagatt

SEQ ID NO: 789154 - DNA, 19 bp, Mus musculus
  siRNA target sequence for LOC228071 (NM_175465.2,1916-1934).
gcctgaagcaatgaatgat

SEQ ID NO: 789155 - DNA, 19 bp, Mus musculus
  siRNA target sequence for LOC228071 (NM_175465.2,2006-2024).
ccccgacggaactgaacaa

SEQ ID NO: 789156 - DNA, 19 bp, Mus musculus
  siRNA target sequence for LOC228071 (NM_175465.2,2008-2026).
ccgacggaactgaacaata

SEQ ID NO: 789157 - DNA, 19 bp, Mus musculus
  siRNA target sequence for LOC228071 (NM_175465.2,2009-2027).
cgacggaactgaacaatat

SEQ ID NO: 789158 - DNA, 19 bp, Mus musculus
  siRNA target sequence for LOC228071 (NM_175465.2,2010-2028).
gacggaactgaacaatatt

SEQ ID NO: 789159 - DNA, 19 bp, Mus musculus
  siRNA target sequence for LOC228071 (NM_175465.2,2081-2099).
gaaactggtcagtctcaaa

SEQ ID NO: 789160 - DNA, 19 bp, Mus musculus
  siRNA target sequence for A930029K19Rik (NM_175468.2,250-268).
ctgcacgggctgtgtcata

SEQ ID NO: 789161 - DNA, 19 bp, Mus musculus
  siRNA target sequence for A930029K19Rik (NM_175468.2,403-421).
caacaggtgcaagaaatgt

SEQ ID NO: 789162 - DNA, 19 bp, Mus musculus
  siRNA target sequence for A930029K19Rik (NM_175468.2,474-492).
ggcggtttcacctatacaa

SEQ ID NO: 789163 - DNA, 19 bp, Mus musculus
  siRNA target sequence for A930029K19Rik (NM_175468.2,475-493).
gcggtttcacctatacaaa

SEQ ID NO: 789164 - DNA, 19 bp, Mus musculus
  siRNA target sequence for A230106M15Rik (NM_175474.2,895-913).
gctgcatgcgcgatatgga

SEQ ID NO: 789165 - DNA, 19 bp, Mus musculus
  siRNA target sequence for A230106M15Rik (NM_175474.2,1037-1055).
catagtgggtgtaaggtat

SEQ ID NO: 789166 - DNA, 19 bp, Mus musculus
  siRNA target sequence for A230106M15Rik (NM_175474.2,1041-1059).
gtgggtgtaaggtattaca

SEQ ID NO: 789167 - DNA, 19 bp, Mus musculus
  siRNA target sequence for A230106M15Rik (NM_175474.2,1047-1065).
gtaaggtattacatgtatt

SEQ ID NO: 789168 - DNA, 19 bp, Mus musculus
  siRNA target sequence for A230106M15Rik (NM_175474.2,1061-1079).
gtattccgttccgtagaat

SEQ ID NO: 789169 - DNA, 19 bp, Mus musculus
  siRNA target sequence for A130039I20Rik (NM_175476.2,696-714).
cggtggcatctctactaaa

SEQ ID NO: 789170 - DNA, 19 bp, Mus musculus
  siRNA target sequence for A130039I20Rik (NM_175476.2,843-861).
cccttccccgagacaacta

SEQ ID NO: 789171 - DNA, 19 bp, Mus musculus
  siRNA target sequence for A130039I20Rik (NM_175476.2,845-863).
cttccccgagacaactaca

SEQ ID NO: 789172 - DNA, 19 bp, Mus musculus
  siRNA target sequence for A130039I20Rik (NM_175476.2,986-1004).
gacccagctgtgattatga

SEQ ID NO: 789173 - DNA, 19 bp, Mus musculus
  siRNA target sequence for A130039I20Rik (NM_175476.2,1058-1076).
gtcctcttccccaagtcta

SEQ ID NO: 789174 - DNA, 19 bp, Mus musculus
  siRNA target sequence for A130039I20Rik (NM_175476.2,1063-1081).
cttccccaagtctaaggat

SEQ ID NO: 789175 - DNA, 19 bp, Mus musculus
  siRNA target sequence for A130039I20Rik (NM_175476.2,1096-1114).
ccctgcccagaaaaacgat

SEQ ID NO: 789176 - DNA, 19 bp, Mus musculus
  siRNA target sequence for A130039I20Rik (NM_175476.2,1354-1372).
cctgacgtccgcattccaa

SEQ ID NO: 789177 - DNA, 19 bp, Mus musculus
  siRNA target sequence for A130039I20Rik (NM_175476.2,1374-1392).
gcaccaccagcagtaaact

SEQ ID NO: 789178 - DNA, 19 bp, Mus musculus
  siRNA target sequence for A130039I20Rik (NM_175476.2,1383-1401).
gcagtaaactggaaatctt

SEQ ID NO: 789179 - DNA, 19 bp, Mus musculus
  siRNA target sequence for A130039I20Rik (NM_175476.2,1448-1466).
gggcacaggcgaactatgt

SEQ ID NO: 789180 - DNA, 19 bp, Mus musculus
  siRNA target sequence for A130039I20Rik (NM_175476.2,1458-1476).
gaactatgtcccaagactt

SEQ ID NO: 789181 - DNA, 19 bp, Mus musculus
  siRNA target sequence for A130039I20Rik (NM_175476.2,1499-1517).
cggacttctacctacgata

SEQ ID NO: 789182 - DNA, 19 bp, Mus musculus
  siRNA target sequence for A130039I20Rik (NM_175476.2,1500-1518).
ggacttctacctacgataa

SEQ ID NO: 789183 - DNA, 19 bp, Mus musculus
  siRNA target sequence for A130039I20Rik (NM_175476.2,1501-1519).
gacttctacctacgataat

SEQ ID NO: 789184 - DNA, 19 bp, Mus musculus
  siRNA target sequence for A130039I20Rik (NM_175476.2,1503-1521).
cttctacctacgataatgt

SEQ ID NO: 789185 - DNA, 19 bp, Mus musculus
  siRNA target sequence for A130039I20Rik (NM_175476.2,1681-1699).
gagcctacagaaggaaata

SEQ ID NO: 789186 - DNA, 19 bp, Mus musculus
  siRNA target sequence for A130039I20Rik (NM_175476.2,1774-1792).
ggtgaggctcaatgaagaa

SEQ ID NO: 789187 - DNA, 19 bp, Mus musculus
  siRNA target sequence for A630056B21Rik (NM_175477.2,1026-1044).
cagcctctgatcacagtta

SEQ ID NO: 789188 - DNA, 19 bp, Mus musculus
  siRNA target sequence for A630056B21Rik (NM_175477.2,1142-1160).
gccacccaggaactatttt

SEQ ID NO: 789189 - DNA, 19 bp, Mus musculus
  siRNA target sequence for A630056B21Rik (NM_175477.2,1218-1236).
gtcaccgggagggtgtttt

SEQ ID NO: 789190 - DNA, 19 bp, Mus musculus
  siRNA target sequence for A630056B21Rik (NM_175477.2,1220-1238).
caccgggagggtgttttta

SEQ ID NO: 789191 - DNA, 19 bp, Mus musculus
  siRNA target sequence for A630056B21Rik (NM_175477.2,1261-1279).
cttccctagcccttctagt

SEQ ID NO: 789192 - DNA, 19 bp, Mus musculus
  siRNA target sequence for A630056B21Rik (NM_175477.2,1508-1526).
ccagaggagcctgctatta

SEQ ID NO: 789193 - DNA, 19 bp, Mus musculus
  siRNA target sequence for A630056B21Rik (NM_175477.2,1511-1529).
gaggagcctgctattagct

SEQ ID NO: 789194 - DNA, 19 bp, Mus musculus
  siRNA target sequence for A630056B21Rik (NM_175477.2,1513-1531).
ggagcctgctattagcttt

SEQ ID NO: 789195 - DNA, 19 bp, Mus musculus
  siRNA target sequence for A630056B21Rik (NM_175477.2,1641-1659).
gtagccgggagtttggtaa

SEQ ID NO: 789196 - DNA, 19 bp, Mus musculus
  siRNA target sequence for A630056B21Rik (NM_175477.2,1674-1692).
cccggcaccagcgttttgt

SEQ ID NO: 789197 - DNA, 19 bp, Mus musculus
  siRNA target sequence for A630056B21Rik (NM_175477.2,2216-2234).
gccccacggcgctttgagt

SEQ ID NO: 789198 - DNA, 19 bp, Mus musculus
  siRNA target sequence for A630056B21Rik (NM_175477.2,2822-2840).
ggcctggctgtgatggaaa

SEQ ID NO: 789199 - DNA, 19 bp, Mus musculus
  siRNA target sequence for A530045B06Rik (NM_175478.1,1191-1209).
ctgcacctagatggtaata

SEQ ID NO: 789200 - DNA, 19 bp, Mus musculus
  siRNA target sequence for A530045B06Rik (NM_175478.1,1334-1352).
ggacctcgatctctcttat

SEQ ID NO: 789201 - DNA, 19 bp, Mus musculus
  siRNA target sequence for A530045B06Rik (NM_175478.1,1335-1353).
gacctcgatctctcttata

SEQ ID NO: 789202 - DNA, 19 bp, Mus musculus
  siRNA target sequence for A530045B06Rik (NM_175478.1,1414-1432).
gccttgaccacaatttgtt

SEQ ID NO: 789203 - DNA, 19 bp, Mus musculus
  siRNA target sequence for A530045B06Rik (NM_175478.1,1932-1950).
gaagatggcggcactttca

SEQ ID NO: 789204 - DNA, 19 bp, Mus musculus
  siRNA target sequence for A530045B06Rik (NM_175478.1,1935-1953).
gatggcggcactttcactt

SEQ ID NO: 789205 - DNA, 19 bp, Mus musculus
  siRNA target sequence for A530045B06Rik (NM_175478.1,1940-1958).
cggcactttcacttgcatt

SEQ ID NO: 789206 - DNA, 19 bp, Mus musculus
  siRNA target sequence for A530045B06Rik (NM_175478.1,2168-2186).
ggccacagcggctcttgtt

SEQ ID NO: 789207 - DNA, 19 bp, Mus musculus
  siRNA target sequence for A530045B06Rik (NM_175478.1,2170-2188).
ccacagcggctcttgttca

SEQ ID NO: 789208 - DNA, 19 bp, Mus musculus
  siRNA target sequence for A530045B06Rik (NM_175478.1,2315-2333).
ggcgtcaggccgtacctat

SEQ ID NO: 789209 - DNA, 19 bp, Mus musculus
  siRNA target sequence for A530045B06Rik (NM_175478.1,2318-2336).
gtcaggccgtacctatgat

SEQ ID NO: 789210 - DNA, 19 bp, Mus musculus
  siRNA target sequence for A530045B06Rik (NM_175478.1,2320-2338).
caggccgtacctatgatct

SEQ ID NO: 789211 - DNA, 19 bp, Mus musculus
  siRNA target sequence for A530045B06Rik (NM_175478.1,2322-2340).
ggccgtacctatgatctat

SEQ ID NO: 789212 - DNA, 19 bp, Mus musculus
  siRNA target sequence for A530045B06Rik (NM_175478.1,2324-2342).
ccgtacctatgatctatgt

SEQ ID NO: 789213 - DNA, 19 bp, Mus musculus
  siRNA target sequence for A530045B06Rik (NM_175478.1,2326-2344).
gtacctatgatctatgtgt

SEQ ID NO: 789214 - DNA, 19 bp, Mus musculus
  siRNA target sequence for A330008L17Rik (NM_175479.2,210-228).
ctgcttgtcggtttctctt

SEQ ID NO: 789215 - DNA, 19 bp, Mus musculus
  siRNA target sequence for A330008L17Rik (NM_175479.2,240-258).
ggcaccagtcctgttagat

SEQ ID NO: 789216 - DNA, 19 bp, Mus musculus
  siRNA target sequence for A330008L17Rik (NM_175479.2,245-263).
cagtcctgttagatggata

SEQ ID NO: 789217 - DNA, 19 bp, Mus musculus
  siRNA target sequence for A330008L17Rik (NM_175479.2,249-267).
cctgttagatggatatcga

SEQ ID NO: 789218 - DNA, 19 bp, Mus musculus
  siRNA target sequence for A330008L17Rik (NM_175479.2,305-323).
gccctctagcgagcaatat

SEQ ID NO: 789219 - DNA, 19 bp, Mus musculus
  siRNA target sequence for A330008L17Rik (NM_175479.2,307-325).
cctctagcgagcaatatct

SEQ ID NO: 789220 - DNA, 19 bp, Mus musculus
  siRNA target sequence for A330008L17Rik (NM_175479.2,329-347).
caggttgctatgtaaagga

SEQ ID NO: 789221 - DNA, 19 bp, Mus musculus
  siRNA target sequence for A330008L17Rik (NM_175479.2,340-358).
gtaaaggaggtggaatgaa

SEQ ID NO: 789222 - DNA, 19 bp, Mus musculus
  siRNA target sequence for A330008L17Rik (NM_175479.2,402-420).
gtgctcctctccgttttct

SEQ ID NO: 789223 - DNA, 19 bp, Mus musculus
  siRNA target sequence for A330008L17Rik (NM_175479.2,408-426).
ctctccgttttctttatgt

SEQ ID NO: 789224 - DNA, 19 bp, Mus musculus
  siRNA target sequence for A330008L17Rik (NM_175479.2,487-505).
ggtgtcgttgcttttgcat

SEQ ID NO: 789225 - DNA, 19 bp, Mus musculus
  siRNA target sequence for E130012P22Rik (NM_175484.1,480-498).
ccccatcaccaagaatgta

SEQ ID NO: 789226 - DNA, 19 bp, Mus musculus
  siRNA target sequence for E130012P22Rik (NM_175484.1,529-547).
cgcttcctggccatagtca

SEQ ID NO: 789227 - DNA, 19 bp, Mus musculus
  siRNA target sequence for E130012P22Rik (NM_175484.1,599-617).
gcagaatcgagccaaacta

SEQ ID NO: 789228 - DNA, 19 bp, Mus musculus
  siRNA target sequence for E130012P22Rik (NM_175484.1,662-680).
ggaaccccttcattgacaa

SEQ ID NO: 789229 - DNA, 19 bp, Mus musculus
  siRNA target sequence for E130012P22Rik (NM_175484.1,668-686).
ccttcattgacaacatcat

SEQ ID NO: 789230 - DNA, 19 bp, Mus musculus
  siRNA target sequence for E130012P22Rik (NM_175484.1,882-900).
cataggcgagccagtgaaa

SEQ ID NO: 789231 - DNA, 19 bp, Mus musculus
  siRNA target sequence for E130012P22Rik (NM_175484.1,886-904).
ggcgagccagtgaaaatga

SEQ ID NO: 789232 - DNA, 19 bp, Mus musculus
  siRNA target sequence for E130012P22Rik (NM_175484.1,888-906).
cgagccagtgaaaatgatt

SEQ ID NO: 789233 - DNA, 19 bp, Mus musculus
  siRNA target sequence for E130012P22Rik (NM_175484.1,892-910).
ccagtgaaaatgattgact

SEQ ID NO: 789234 - DNA, 19 bp, Mus musculus
  siRNA target sequence for E130012P22Rik (NM_175484.1,928-946).
ctctgcatgtccttcaata

SEQ ID NO: 789235 - DNA, 19 bp, Mus musculus
  siRNA target sequence for E130012P22Rik (NM_175484.1,930-948).
ctgcatgtccttcaataca

SEQ ID NO: 789236 - DNA, 19 bp, Mus musculus
  siRNA target sequence for E130012P22Rik (NM_175484.1,1510-1528).
gcgctgacccctgatgaat

SEQ ID NO: 789237 - DNA, 19 bp, Mus musculus
  siRNA target sequence for E130012P22Rik (NM_175484.1,1636-1654).
gtcgtcaacggcatagatt

SEQ ID NO: 789238 - DNA, 19 bp, Mus musculus
  siRNA target sequence for E130012P22Rik (NM_175484.1,1638-1656).
cgtcaacggcatagattta

SEQ ID NO: 789239 - DNA, 19 bp, Mus musculus
  siRNA target sequence for E130012P22Rik (NM_175484.1,1711-1729).
cagcaggatgagattcgaa

SEQ ID NO: 789240 - DNA, 19 bp, Mus musculus
  siRNA target sequence for E130012P22Rik (NM_175484.1,1774-1792).
ctccagctcgaactgaaaa

SEQ ID NO: 789241 - DNA, 19 bp, Mus musculus
  siRNA target sequence for A230098A12Rik (NM_175485.2,212-230).
gctgtgttgcagctactat

SEQ ID NO: 789242 - DNA, 19 bp, Mus musculus
  siRNA target sequence for A230098A12Rik (NM_175485.2,223-241).
gctactatagctcataaga

SEQ ID NO: 789243 - DNA, 19 bp, Mus musculus
  siRNA target sequence for A230098A12Rik (NM_175485.2,252-270).
ggaggcttcgctaaccata

SEQ ID NO: 789244 - DNA, 19 bp, Mus musculus
  siRNA target sequence for A230098A12Rik (NM_175485.2,255-273).
ggcttcgctaaccatagtt

SEQ ID NO: 789245 - DNA, 19 bp, Mus musculus
  siRNA target sequence for A230098A12Rik (NM_175485.2,266-284).
ccatagttgcagctaatga

SEQ ID NO: 789246 - DNA, 19 bp, Mus musculus
  siRNA target sequence for A230098A12Rik (NM_175485.2,297-315).
ctacatgccaaccattata

SEQ ID NO: 789247 - DNA, 19 bp, Mus musculus
  siRNA target sequence for A230098A12Rik (NM_175485.2,316-334).
gccagtccacagaatgtaa

SEQ ID NO: 789248 - DNA, 19 bp, Mus musculus
  siRNA target sequence for A230098A12Rik (NM_175485.2,327-345).
gaatgtaaccgcatctcta

SEQ ID NO: 789249 - DNA, 19 bp, Mus musculus
  siRNA target sequence for A230098A12Rik (NM_175485.2,401-419).
cctggagccgtcttgatca

SEQ ID NO: 789250 - DNA, 19 bp, Mus musculus
  siRNA target sequence for A230098A12Rik (NM_175485.2,404-422).
ggagccgtcttgatcacaa

SEQ ID NO: 789251 - DNA, 19 bp, Mus musculus
  siRNA target sequence for A230098A12Rik (NM_175485.2,441-459).
cactcgggtacttggaaat

SEQ ID NO: 789252 - DNA, 19 bp, Mus musculus
  siRNA target sequence for A230098A12Rik (NM_175485.2,461-479).
gcaacctcattatatcaga

SEQ ID NO: 789253 - DNA, 19 bp, Mus musculus
  siRNA target sequence for A230098A12Rik (NM_175485.2,524-542).
ccccaggcacacgtaactt

SEQ ID NO: 789254 - DNA, 19 bp, Mus musculus
  siRNA target sequence for A230098A12Rik (NM_175485.2,526-544).
ccaggcacacgtaacttca

SEQ ID NO: 789255 - DNA, 19 bp, Mus musculus
  siRNA target sequence for A230098A12Rik (NM_175485.2,555-573).
ggcaacgttaactgtatta

SEQ ID NO: 789256 - DNA, 19 bp, Mus musculus
  siRNA target sequence for A230098A12Rik (NM_175485.2,589-607).
gtcgaatggcctgaaagtt

SEQ ID NO: 789257 - DNA, 19 bp, Mus musculus
  siRNA target sequence for A230098A12Rik (NM_175485.2,761-779).
cggaagacgatgctatcta

SEQ ID NO: 789258 - DNA, 19 bp, Mus musculus
  siRNA target sequence for A230098A12Rik (NM_175485.2,854-872).
gacccagcgctccttacaa

SEQ ID NO: 789259 - DNA, 19 bp, Mus musculus
  siRNA target sequence for A230098A12Rik (NM_175485.2,918-936).
ggagagaccactgtacaat

SEQ ID NO: 789260 - DNA, 19 bp, Mus musculus
  siRNA target sequence for A230098A12Rik (NM_175485.2,953-971).
cctactctgtacactacat

SEQ ID NO: 789261 - DNA, 19 bp, Mus musculus
  siRNA target sequence for A230098A12Rik (NM_175485.2,972-990).
gaaggcggaaggtttaaat

SEQ ID NO: 789262 - DNA, 19 bp, Mus musculus
  siRNA target sequence for A230098A12Rik (NM_175485.2,977-995).
cggaaggtttaaataacga

SEQ ID NO: 789263 - DNA, 19 bp, Mus musculus
  siRNA target sequence for A230098A12Rik (NM_175485.2,1021-1039).
gacacgactcattacatca

SEQ ID NO: 789264 - DNA, 19 bp, Mus musculus
  siRNA target sequence for A230098A12Rik (NM_175485.2,1023-1041).
cacgactcattacatcatt

SEQ ID NO: 789265 - DNA, 19 bp, Mus musculus
  siRNA target sequence for A230098A12Rik (NM_175485.2,1025-1043).
cgactcattacatcattga

SEQ ID NO: 789266 - DNA, 19 bp, Mus musculus
  siRNA target sequence for A230098A12Rik (NM_175485.2,1026-1044).
gactcattacatcattgat

SEQ ID NO: 789267 - DNA, 19 bp, Mus musculus
  siRNA target sequence for A230098A12Rik (NM_175485.2,1054-1072).
cccgacagcaactatactt

SEQ ID NO: 789268 - DNA, 19 bp, Mus musculus
  siRNA target sequence for A230098A12Rik (NM_175485.2,1055-1073).
ccgacagcaactatacttt

SEQ ID NO: 789269 - DNA, 19 bp, Mus musculus
  siRNA target sequence for A230098A12Rik (NM_175485.2,1106-1124).
gccagatgtcggatcatgt

SEQ ID NO: 789270 - DNA, 19 bp, Mus musculus
  siRNA target sequence for A230098A12Rik (NM_175485.2,1152-1170).
cctaagacctcccgaaatt

SEQ ID NO: 789271 - DNA, 19 bp, Mus musculus
  siRNA target sequence for A230098A12Rik (NM_175485.2,1153-1171).
ctaagacctcccgaaatta

SEQ ID NO: 789272 - DNA, 19 bp, Mus musculus
  siRNA target sequence for A230098A12Rik (NM_175485.2,1157-1175).
gacctcccgaaattagctt

SEQ ID NO: 789273 - DNA, 19 bp, Mus musculus
  siRNA target sequence for A230098A12Rik (NM_175485.2,1284-1302).
gaacgccatccaagttgta

SEQ ID NO: 789274 - DNA, 19 bp, Mus musculus
  siRNA target sequence for A230098A12Rik (NM_175485.2,1289-1307).
ccatccaagttgtagaact

SEQ ID NO: 789275 - DNA, 19 bp, Mus musculus
  siRNA target sequence for A230098A12Rik (NM_175485.2,1359-1377).
ctatctggttcggattact

SEQ ID NO: 789276 - DNA, 19 bp, Mus musculus
  siRNA target sequence for A230098A12Rik (NM_175485.2,1546-1564).
cggggctacaagctgtttt

SEQ ID NO: 789277 - DNA, 19 bp, Mus musculus
  siRNA target sequence for A230098A12Rik (NM_175485.2,1551-1569).
ctacaagctgttttataaa

SEQ ID NO: 789278 - DNA, 19 bp, Mus musculus
  siRNA target sequence for A230098A12Rik (NM_175485.2,1637-1655).
gcttggaccccagaagaaa

SEQ ID NO: 789279 - DNA, 19 bp, Mus musculus
  siRNA target sequence for A230098A12Rik (NM_175485.2,1669-1687).
ctcctggcttacaacaaca

SEQ ID NO: 789280 - DNA, 19 bp, Mus musculus
  siRNA target sequence for A230098A12Rik (NM_175485.2,1844-1862).
ccaccgcccaagtcattaa

SEQ ID NO: 789281 - DNA, 19 bp, Mus musculus
  siRNA target sequence for A230098A12Rik (NM_175485.2,1847-1865).
ccgcccaagtcattaacta

SEQ ID NO: 789282 - DNA, 19 bp, Mus musculus
  siRNA target sequence for A230098A12Rik (NM_175485.2,1941-1959).
gctggtccaaggactagaa

SEQ ID NO: 789283 - DNA, 19 bp, Mus musculus
  siRNA target sequence for A230098A12Rik (NM_175485.2,2026-2044).
gtggtctaccattctacat

SEQ ID NO: 789284 - DNA, 19 bp, Mus musculus
  siRNA target sequence for A230098A12Rik (NM_175485.2,2098-2116).
gacgacactgcccttgttt

SEQ ID NO: 789285 - DNA, 19 bp, Mus musculus
  siRNA target sequence for A230098A12Rik (NM_175485.2,2153-2171).
cacgctacaccatcttgta

SEQ ID NO: 789286 - DNA, 19 bp, Mus musculus
  siRNA target sequence for A230098A12Rik (NM_175485.2,2198-2216).
gagagtggcaggttcttca

SEQ ID NO: 789287 - DNA, 19 bp, Mus musculus
  siRNA target sequence for A230098A12Rik (NM_175485.2,2269-2287).
gtgtacattgtcaagatat

SEQ ID NO: 789288 - DNA, 19 bp, Mus musculus
  siRNA target sequence for A230098A12Rik (NM_175485.2,2373-2391).
gaggcccaagcgtttggat

SEQ ID NO: 789289 - DNA, 19 bp, Mus musculus
  siRNA target sequence for A230098A12Rik (NM_175485.2,2382-2400).
gcgtttggattcttccaat

SEQ ID NO: 789290 - DNA, 19 bp, Mus musculus
  siRNA target sequence for A230098A12Rik (NM_175485.2,2424-2442).
ccatctggaccaaaagtca

SEQ ID NO: 789291 - DNA, 19 bp, Mus musculus
  siRNA target sequence for A230098A12Rik (NM_175485.2,2425-2443).
catctggaccaaaagtcaa

SEQ ID NO: 789292 - DNA, 19 bp, Mus musculus
  siRNA target sequence for A230098A12Rik (NM_175485.2,2428-2446).
ctggaccaaaagtcaatga

SEQ ID NO: 789293 - DNA, 19 bp, Mus musculus
  siRNA target sequence for A230098A12Rik (NM_175485.2,2505-2523).
cttgatctaccgaagcaaa

SEQ ID NO: 789294 - DNA, 19 bp, Mus musculus
  siRNA target sequence for A230098A12Rik (NM_175485.2,2532-2550).
gtcatccgcctctaagaca

SEQ ID NO: 789295 - DNA, 19 bp, Mus musculus
  siRNA target sequence for A230098A12Rik (NM_175485.2,2693-2711).
gagggactgacctgatcat

SEQ ID NO: 789296 - DNA, 19 bp, Mus musculus
  siRNA target sequence for A230098A12Rik (NM_175485.2,2701-2719).
gacctgatcatcaatagct

SEQ ID NO: 789297 - DNA, 19 bp, Mus musculus
  siRNA target sequence for A230098A12Rik (NM_175485.2,2712-2730).
caatagctacggtcctata

SEQ ID NO: 789298 - DNA, 19 bp, Mus musculus
  siRNA target sequence for A230098A12Rik (NM_175485.2,2717-2735).
gctacggtcctataattaa

SEQ ID NO: 789299 - DNA, 19 bp, Mus musculus
  siRNA target sequence for A230098A12Rik (NM_175485.2,2718-2736).
ctacggtcctataattaaa

SEQ ID NO: 789300 - DNA, 19 bp, Mus musculus
  siRNA target sequence for A230098A12Rik (NM_175485.2,2722-2740).
ggtcctataattaaaaaca

SEQ ID NO: 789301 - DNA, 19 bp, Mus musculus
  siRNA target sequence for A230098A12Rik (NM_175485.2,2796-2814).
gactcaaagaagatttact

SEQ ID NO: 789302 - DNA, 19 bp, Mus musculus
  siRNA target sequence for A230098A12Rik (NM_175485.2,2798-2816).
ctcaaagaagatttactca

SEQ ID NO: 789303 - DNA, 19 bp, Mus musculus
  siRNA target sequence for A230098A12Rik (NM_175485.2,2851-2869).
ctgatcagcgatgaagatt

SEQ ID NO: 789304 - DNA, 19 bp, Mus musculus
  siRNA target sequence for A230098A12Rik (NM_175485.2,3060-3078).
cgctggtggcgattctgat

SEQ ID NO: 789305 - DNA, 19 bp, Mus musculus
  siRNA target sequence for 6430571L13Rik (NM_175486.1,635-653).
gccatggttttatacatca

SEQ ID NO: 789306 - DNA, 19 bp, Mus musculus
  siRNA target sequence for 6430571L13Rik (NM_175486.1,686-704).
cagctcatgcctatgtaca

SEQ ID NO: 789307 - DNA, 19 bp, Mus musculus
  siRNA target sequence for 6430571L13Rik (NM_175486.1,689-707).
ctcatgcctatgtacaact

SEQ ID NO: 789308 - DNA, 19 bp, Mus musculus
  siRNA target sequence for 4933417K05Rik (NM_175488.3,259-277).
ggaaagaccctacaagatt

SEQ ID NO: 789309 - DNA, 19 bp, Mus musculus
  siRNA target sequence for 4933417K05Rik (NM_175488.3,260-278).
gaaagaccctacaagattt

SEQ ID NO: 789310 - DNA, 19 bp, Mus musculus
  siRNA target sequence for 4933417K05Rik (NM_175488.3,266-284).
ccctacaagatttttttca

SEQ ID NO: 789311 - DNA, 19 bp, Mus musculus
  siRNA target sequence for 4933417K05Rik (NM_175488.3,375-393).
cattttcgtcccgaatgaa

SEQ ID NO: 789312 - DNA, 19 bp, Mus musculus
  siRNA target sequence for 4933417K05Rik (NM_175488.3,406-424).
ccttggccagctagctttt

SEQ ID NO: 789313 - DNA, 19 bp, Mus musculus
  siRNA target sequence for 4933417K05Rik (NM_175488.3,462-480).
ggctagatcccactcttat

SEQ ID NO: 789314 - DNA, 19 bp, Mus musculus
  siRNA target sequence for 4933417K05Rik (NM_175488.3,514-532).
gacggtccacgagtttatt

SEQ ID NO: 789315 - DNA, 19 bp, Mus musculus
  siRNA target sequence for 4933417K05Rik (NM_175488.3,516-534).
cggtccacgagtttattaa

SEQ ID NO: 789316 - DNA, 19 bp, Mus musculus
  siRNA target sequence for 4933417K05Rik (NM_175488.3,535-553).
cgaccaaagagacagattt

SEQ ID NO: 789317 - DNA, 19 bp, Mus musculus
  siRNA target sequence for 4933417K05Rik (NM_175488.3,606-624).
gactcatagccattaaaga

SEQ ID NO: 789318 - DNA, 19 bp, Mus musculus
  siRNA target sequence for 4933417K05Rik (NM_175488.3,665-683).
gcattgtcctttgaagaat

SEQ ID NO: 789319 - DNA, 19 bp, Mus musculus
  siRNA target sequence for 4933417K05Rik (NM_175488.3,727-745).
ggcagcacaagaaacaata

SEQ ID NO: 789320 - DNA, 19 bp, Mus musculus
  siRNA target sequence for 4933417K05Rik (NM_175488.3,741-759).
caataaacaagctccaaat

SEQ ID NO: 789321 - DNA, 19 bp, Mus musculus
  siRNA target sequence for 4933417K05Rik (NM_175488.3,779-797).
gcaagcatggaagttcaat

SEQ ID NO: 789322 - DNA, 19 bp, Mus musculus
  siRNA target sequence for 4933417K05Rik (NM_175488.3,830-848).
ctcctcaaggaatacatga

SEQ ID NO: 789323 - DNA, 19 bp, Mus musculus
  siRNA target sequence for 4933417K05Rik (NM_175488.3,855-873).
gattcttcctgctgaagtt

SEQ ID NO: 789324 - DNA, 19 bp, Mus musculus
  siRNA target sequence for 4933417K05Rik (NM_175488.3,914-932).
gcccagtcgtccaaaagca

SEQ ID NO: 789325 - DNA, 19 bp, Mus musculus
  siRNA target sequence for 4933417K05Rik (NM_175488.3,915-933).
cccagtcgtccaaaagcaa

SEQ ID NO: 789326 - DNA, 19 bp, Mus musculus
  siRNA target sequence for 4933417K05Rik (NM_175488.3,993-1011).
gcatcgactcagacaagat

SEQ ID NO: 789327 - DNA, 19 bp, Mus musculus
  siRNA target sequence for 4933417K05Rik (NM_175488.3,1059-1077).
gacacgggaaacatacttt

SEQ ID NO: 789328 - DNA, 19 bp, Mus musculus
  siRNA target sequence for 4933417K05Rik (NM_175488.3,1162-1180).
cgagctcgtggagtttgat

SEQ ID NO: 789329 - DNA, 19 bp, Mus musculus
  siRNA target sequence for 4933417K05Rik (NM_175488.3,1178-1196).
gatctgctgccagagattt

SEQ ID NO: 789330 - DNA, 19 bp, Mus musculus
  siRNA target sequence for 4933417K05Rik (NM_175488.3,1252-1270).
cctcaccttggttcagtat

SEQ ID NO: 789331 - DNA, 19 bp, Mus musculus
  siRNA target sequence for 4933417K05Rik (NM_175488.3,1253-1271).
ctcaccttggttcagtatt

SEQ ID NO: 789332 - DNA, 19 bp, Mus musculus
  siRNA target sequence for 4933417K05Rik (NM_175488.3,1273-1291).
ccaagatgtggatgagaat

SEQ ID NO: 789333 - DNA, 19 bp, Mus musculus
  siRNA target sequence for 4933417K05Rik (NM_175488.3,1370-1388).
catatgctcaggatgaact

SEQ ID NO: 789334 - DNA, 19 bp, Mus musculus
  siRNA target sequence for 4933417K05Rik (NM_175488.3,1428-1446).
ggtccaggctcttcagttt

SEQ ID NO: 789335 - DNA, 19 bp, Mus musculus
  siRNA target sequence for 4933417K05Rik (NM_175488.3,1478-1496).
ctaatagactctcttagta

SEQ ID NO: 789336 - DNA, 19 bp, Mus musculus
  siRNA target sequence for 4933417K05Rik (NM_175488.3,1501-1519).
gatcaatcaagtgtataga

SEQ ID NO: 789337 - DNA, 19 bp, Mus musculus
  siRNA target sequence for 4933417K05Rik (NM_175488.3,1549-1567).
cttgaatgcagttcaaaaa

SEQ ID NO: 789338 - DNA, 19 bp, Mus musculus
  siRNA target sequence for 4933417K05Rik (NM_175488.3,1598-1616).
ctgagcgacctcattgaat

SEQ ID NO: 789339 - DNA, 19 bp, Mus musculus
  siRNA target sequence for 4933417K05Rik (NM_175488.3,1602-1620).
gcgacctcattgaatctat

SEQ ID NO: 789340 - DNA, 19 bp, Mus musculus
  siRNA target sequence for 4933417K05Rik (NM_175488.3,1603-1621).
cgacctcattgaatctatt

SEQ ID NO: 789341 - DNA, 19 bp, Mus musculus
  siRNA target sequence for 4933417K05Rik (NM_175488.3,1631-1649).
cacgtggaagcgatcgaaa

SEQ ID NO: 789342 - DNA, 19 bp, Mus musculus
  siRNA target sequence for 4933417K05Rik (NM_175488.3,1717-1735).
ggaggagcggctaaaagct

SEQ ID NO: 789343 - DNA, 19 bp, Mus musculus
  siRNA target sequence for 4933417K05Rik (NM_175488.3,1792-1810).
ccgttcgaaacctcaatct

SEQ ID NO: 789344 - DNA, 19 bp, Mus musculus
  siRNA target sequence for 4933417K05Rik (NM_175488.3,1826-1844).
ctccttttagtcagtgata

SEQ ID NO: 789345 - DNA, 19 bp, Mus musculus
  siRNA target sequence for 4933417K05Rik (NM_175488.3,1835-1853).
gtcagtgatacaagatcaa

SEQ ID NO: 789346 - DNA, 19 bp, Mus musculus
  siRNA target sequence for 4933417K05Rik (NM_175488.3,1837-1855).
cagtgatacaagatcaaaa

SEQ ID NO: 789347 - DNA, 19 bp, Mus musculus
  siRNA target sequence for 4933417K05Rik (NM_175488.3,1859-1877).
caggacgaagagtactttt

SEQ ID NO: 789348 - DNA, 19 bp, Mus musculus
  siRNA target sequence for 4933417K05Rik (NM_175488.3,1861-1879).
ggacgaagagtactttttt

SEQ ID NO: 789349 - DNA, 19 bp, Mus musculus
  siRNA target sequence for 4933417K05Rik (NM_175488.3,1864-1882).
cgaagagtacttttttagt

SEQ ID NO: 789350 - DNA, 19 bp, Mus musculus
  siRNA target sequence for Osbpl8 (NM_175489.2,500-518).
cgcttcttggtgatagcaa

SEQ ID NO: 789351 - DNA, 19 bp, Mus musculus
  siRNA target sequence for Osbpl8 (NM_175489.2,501-519).
gcttcttggtgatagcaaa

SEQ ID NO: 789352 - DNA, 19 bp, Mus musculus
  siRNA target sequence for Osbpl8 (NM_175489.2,556-574).
gacgaacctcagcatttga

SEQ ID NO: 789353 - DNA, 19 bp, Mus musculus
  siRNA target sequence for Osbpl8 (NM_175489.2,615-633).
cccaaccccaactagagat

SEQ ID NO: 789354 - DNA, 19 bp, Mus musculus
  siRNA target sequence for Osbpl8 (NM_175489.2,797-815).
gtaaactcacgaagaaaga

SEQ ID NO: 789355 - DNA, 19 bp, Mus musculus
  siRNA target sequence for Osbpl8 (NM_175489.2,810-828).
gaaagagtctcttaaggtt

SEQ ID NO: 789356 - DNA, 19 bp, Mus musculus
  siRNA target sequence for Osbpl8 (NM_175489.2,814-832).
gagtctcttaaggttagtt

SEQ ID NO: 789357 - DNA, 19 bp, Mus musculus
  siRNA target sequence for Osbpl8 (NM_175489.2,818-836).
ctcttaaggttagtttcta

SEQ ID NO: 789358 - DNA, 19 bp, Mus musculus
  siRNA target sequence for Osbpl8 (NM_175489.2,820-838).
cttaaggttagtttctata

SEQ ID NO: 789359 - DNA, 19 bp, Mus musculus
  siRNA target sequence for D030073L15Rik (NM_175491.2,535-553).
cgaggaagaaccttacaat

SEQ ID NO: 789360 - DNA, 19 bp, Mus musculus
  siRNA target sequence for D030073L15Rik (NM_175491.2,629-647).
ctgtctggggccaagttct

SEQ ID NO: 789361 - DNA, 19 bp, Mus musculus
  siRNA target sequence for D030073L15Rik (NM_175491.2,689-707).
ggaccccagcccttgctta

SEQ ID NO: 789362 - DNA, 19 bp, Mus musculus
  siRNA target sequence for D030073L15Rik (NM_175491.2,704-722).
cttaccatccccaatgaca

SEQ ID NO: 789363 - DNA, 19 bp, Mus musculus
  siRNA target sequence for D030073L15Rik (NM_175491.2,714-732).
ccaatgacaccaaagtttt

SEQ ID NO: 789364 - DNA, 19 bp, Mus musculus
  siRNA target sequence for D030073L15Rik (NM_175491.2,734-752).
ggcacttttgatcttaatt

SEQ ID NO: 789365 - DNA, 19 bp, Mus musculus
  siRNA target sequence for D030073L15Rik (NM_175491.2,735-753).
gcacttttgatcttaatta

SEQ ID NO: 789366 - DNA, 19 bp, Mus musculus
  siRNA target sequence for D030073L15Rik (NM_175491.2,765-783).
ggattatgtcggtggatta

SEQ ID NO: 789367 - DNA, 19 bp, Mus musculus
  siRNA target sequence for D030073L15Rik (NM_175491.2,816-834).
ctgcctaccccaagttgaa

SEQ ID NO: 789368 - DNA, 19 bp, Mus musculus
  siRNA target sequence for D030073L15Rik (NM_175491.2,818-836).
gcctaccccaagttgaact

SEQ ID NO: 789369 - DNA, 19 bp, Mus musculus
  siRNA target sequence for D030073L15Rik (NM_175491.2,819-837).
cctaccccaagttgaactt

SEQ ID NO: 789370 - DNA, 19 bp, Mus musculus
  siRNA target sequence for D030073L15Rik (NM_175491.2,820-838).
ctaccccaagttgaacttt

SEQ ID NO: 789371 - DNA, 19 bp, Mus musculus
  siRNA target sequence for D030073L15Rik (NM_175491.2,874-892).
ggaaggggcctttgcatat

SEQ ID NO: 789372 - DNA, 19 bp, Mus musculus
  siRNA target sequence for D030073L15Rik (NM_175491.2,961-979).
ctccgcagaccagcataaa

SEQ ID NO: 789373 - DNA, 19 bp, Mus musculus
  siRNA target sequence for D030073L15Rik (NM_175491.2,963-981).
ccgcagaccagcataaaat

SEQ ID NO: 789374 - DNA, 19 bp, Mus musculus
  siRNA target sequence for D030073L15Rik (NM_175491.2,966-984).
cagaccagcataaaatcat

SEQ ID NO: 789375 - DNA, 19 bp, Mus musculus
  siRNA target sequence for D030073L15Rik (NM_175491.2,998-1016).
gagctctcggccgaatttt

SEQ ID NO: 789376 - DNA, 19 bp, Mus musculus
  siRNA target sequence for D030073L15Rik (NM_175491.2,1001-1019).
ctctcggccgaattttcca

SEQ ID NO: 789377 - DNA, 19 bp, Mus musculus
  siRNA target sequence for D030073L15Rik (NM_175491.2,1003-1021).
ctcggccgaattttccaaa

SEQ ID NO: 789378 - DNA, 19 bp, Mus musculus
  siRNA target sequence for D030073L15Rik (NM_175491.2,1056-1074).
cattcgctggggaacttga

SEQ ID NO: 789379 - DNA, 19 bp, Mus musculus
  siRNA target sequence for D030073L15Rik (NM_175491.2,1084-1102).
gaaagacttggattacaca

SEQ ID NO: 789380 - DNA, 19 bp, Mus musculus
  siRNA target sequence for D030073L15Rik (NM_175491.2,1142-1160).
gccaacgacaagggttttt

SEQ ID NO: 789381 - DNA, 19 bp, Mus musculus
  siRNA target sequence for D030073L15Rik (NM_175491.2,1143-1161).
ccaacgacaagggttttta

SEQ ID NO: 789382 - DNA, 19 bp, Mus musculus
  siRNA target sequence for D030073L15Rik (NM_175491.2,1144-1162).
caacgacaagggtttttat

SEQ ID NO: 789383 - DNA, 19 bp, Mus musculus
  siRNA target sequence for D030073L15Rik (NM_175491.2,1164-1182).
cttctcaggcgattgagaa

SEQ ID NO: 789384 - DNA, 19 bp, Mus musculus
  siRNA target sequence for D030073L15Rik (NM_175491.2,1210-1228).
gtccatcatcgaacatcaa

SEQ ID NO: 789385 - DNA, 19 bp, Mus musculus
  siRNA target sequence for D030073L15Rik (NM_175491.2,1212-1230).
ccatcatcgaacatcaaga

SEQ ID NO: 789386 - DNA, 19 bp, Mus musculus
  siRNA target sequence for D030073L15Rik (NM_175491.2,1327-1345).
ggtatccactacctctaat

SEQ ID NO: 789387 - DNA, 19 bp, Mus musculus
  siRNA target sequence for D030073L15Rik (NM_175491.2,1356-1374).
ccgctaatgcagaccttta

SEQ ID NO: 789388 - DNA, 19 bp, Mus musculus
  siRNA target sequence for D030073L15Rik (NM_175491.2,1357-1375).
cgctaatgcagacctttat

SEQ ID NO: 789389 - DNA, 19 bp, Mus musculus
  siRNA target sequence for D030073L15Rik (NM_175491.2,1358-1376).
gctaatgcagacctttata

SEQ ID NO: 789390 - DNA, 19 bp, Mus musculus
  siRNA target sequence for D030073L15Rik (NM_175491.2,1495-1513).
ccagcttagccacattgaa

SEQ ID NO: 789391 - DNA, 19 bp, Mus musculus
  siRNA target sequence for D030073L15Rik (NM_175491.2,1503-1521).
gccacattgaacacatgtt

SEQ ID NO: 789392 - DNA, 19 bp, Mus musculus
  siRNA target sequence for D030073L15Rik (NM_175491.2,1678-1696).
gcctcccaagcctgtagaa

SEQ ID NO: 789393 - DNA, 19 bp, Mus musculus
  siRNA target sequence for D030073L15Rik (NM_175491.2,1680-1698).
ctcccaagcctgtagaaga

SEQ ID NO: 789394 - DNA, 19 bp, Mus musculus
  siRNA target sequence for D030073L15Rik (NM_175491.2,1694-1712).
gaagaatgccccattccta

SEQ ID NO: 789395 - DNA, 19 bp, Mus musculus
  siRNA target sequence for D030073L15Rik (NM_175491.2,1702-1720).
ccccattcctaaagtgtta

SEQ ID NO: 789396 - DNA, 19 bp, Mus musculus
  siRNA target sequence for D030073L15Rik (NM_175491.2,1703-1721).
cccattcctaaagtgttaa

SEQ ID NO: 789397 - DNA, 19 bp, Mus musculus
  siRNA target sequence for D030073L15Rik (NM_175491.2,1704-1722).
ccattcctaaagtgttaat

SEQ ID NO: 789398 - DNA, 19 bp, Mus musculus
  siRNA target sequence for D030073L15Rik (NM_175491.2,1827-1845).
gttttgacccccaagagaa

SEQ ID NO: 789399 - DNA, 19 bp, Mus musculus
  siRNA target sequence for D030073L15Rik (NM_175491.2,1925-1943).
gcctctgtgttgtcgaaat

SEQ ID NO: 789400 - DNA, 19 bp, Mus musculus
  siRNA target sequence for D030073L15Rik (NM_175491.2,1929-1947).
ctgtgttgtcgaaatctga

SEQ ID NO: 789401 - DNA, 19 bp, Mus musculus
  siRNA target sequence for D030073L15Rik (NM_175491.2,1971-1989).
cattgagcccccatgtagt

SEQ ID NO: 789402 - DNA, 19 bp, Mus musculus
  siRNA target sequence for D030073L15Rik (NM_175491.2,1981-1999).
ccatgtagtccgtagcaaa

SEQ ID NO: 789403 - DNA, 19 bp, Mus musculus
  siRNA target sequence for D030073L15Rik (NM_175491.2,2027-2045).
gacagcattgaagtcttaa

SEQ ID NO: 789404 - DNA, 19 bp, Mus musculus
  siRNA target sequence for D030073L15Rik (NM_175491.2,2091-2109).
gttacccaagtgccattaa

SEQ ID NO: 789405 - DNA, 19 bp, Mus musculus
  siRNA target sequence for D030073L15Rik (NM_175491.2,2097-2115).
caagtgccattaatgaaga

SEQ ID NO: 789406 - DNA, 19 bp, Mus musculus
  siRNA target sequence for D030073L15Rik (NM_175491.2,2366-2384).
gacttcggagtggaaaaca

SEQ ID NO: 789407 - DNA, 19 bp, Mus musculus
  siRNA target sequence for D030073L15Rik (NM_175491.2,2453-2471).
ctggctagccgagatgtta

SEQ ID NO: 789408 - DNA, 19 bp, Mus musculus
  siRNA target sequence for D030073L15Rik (NM_175491.2,2455-2473).
ggctagccgagatgttagt

SEQ ID NO: 789409 - DNA, 19 bp, Mus musculus
  siRNA target sequence for D030073L15Rik (NM_175491.2,2456-2474).
gctagccgagatgttagta

SEQ ID NO: 789410 - DNA, 19 bp, Mus musculus
  siRNA target sequence for D030073L15Rik (NM_175491.2,2457-2475).
ctagccgagatgttagtaa

SEQ ID NO: 789411 - DNA, 19 bp, Mus musculus
  siRNA target sequence for D030073L15Rik (NM_175491.2,2460-2478).
gccgagatgttagtaagat

SEQ ID NO: 789412 - DNA, 19 bp, Mus musculus
  siRNA target sequence for D030073L15Rik (NM_175491.2,2462-2480).
cgagatgttagtaagatga

SEQ ID NO: 789413 - DNA, 19 bp, Mus musculus
  siRNA target sequence for D030073L15Rik (NM_175491.2,2472-2490).
gtaagatgagcctggataa

SEQ ID NO: 789414 - DNA, 19 bp, Mus musculus
  siRNA target sequence for D030073L15Rik (NM_175491.2,2689-2707).
gggcgaagatgaaaccatt

SEQ ID NO: 789415 - DNA, 19 bp, Mus musculus
  siRNA target sequence for D030073L15Rik (NM_175491.2,2734-2752).
catctttgttcccaactat

SEQ ID NO: 789416 - DNA, 19 bp, Mus musculus
  siRNA target sequence for D030073L15Rik (NM_175491.2,2768-2786).
ccggtgaagcactggattt

SEQ ID NO: 789417 - DNA, 19 bp, Mus musculus
  siRNA target sequence for D030073L15Rik (NM_175491.2,2790-2808).
cccctttgcatattatgga

SEQ ID NO: 789418 - DNA, 19 bp, Mus musculus
  siRNA target sequence for D030073L15Rik (NM_175491.2,2791-2809).
ccctttgcatattatggat

SEQ ID NO: 789419 - DNA, 19 bp, Mus musculus
  siRNA target sequence for D030073L15Rik (NM_175491.2,2812-2830).
ccagaagtggaagcttatt

SEQ ID NO: 789420 - DNA, 19 bp, Mus musculus
  siRNA target sequence for 8030486J21Rik (NM_175494.2,419-437).
gtgagaacgcgcataacgt

SEQ ID NO: 789421 - DNA, 19 bp, Mus musculus
  siRNA target sequence for 8030486J21Rik (NM_175494.2,634-652).
gacactgttcgggatttaa

SEQ ID NO: 789422 - DNA, 19 bp, Mus musculus
  siRNA target sequence for 8030486J21Rik (NM_175494.2,636-654).
cactgttcgggatttaata

SEQ ID NO: 789423 - DNA, 19 bp, Mus musculus
  siRNA target sequence for 8030486J21Rik (NM_175494.2,638-656).
ctgttcgggatttaataaa

SEQ ID NO: 789424 - DNA, 19 bp, Mus musculus
  siRNA target sequence for 8030486J21Rik (NM_175494.2,693-711).
catctgtaacagggtattt

SEQ ID NO: 789425 - DNA, 19 bp, Mus musculus
  siRNA target sequence for 8030486J21Rik (NM_175494.2,777-795).
ctacccagactgtggaaaa

SEQ ID NO: 789426 - DNA, 19 bp, Mus musculus
  siRNA target sequence for B230382K22Rik (NM_175502.2,555-573).
cccagtggacccatgcaat

SEQ ID NO: 789427 - DNA, 19 bp, Mus musculus
  siRNA target sequence for B230382K22Rik (NM_175502.2,597-615).
gacttctggtgaccatata

SEQ ID NO: 789428 - DNA, 19 bp, Mus musculus
  siRNA target sequence for B230382K22Rik (NM_175502.2,630-648).
cagagatgctttttgctat

SEQ ID NO: 789429 - DNA, 19 bp, Mus musculus
  siRNA target sequence for B230382K22Rik (NM_175502.2,634-652).
gatgctttttgctatcaga

SEQ ID NO: 789430 - DNA, 19 bp, Mus musculus
  siRNA target sequence for B230382K22Rik (NM_175502.2,649-667).
cagaaaaacttggtatcaa

SEQ ID NO: 789431 - DNA, 19 bp, Mus musculus
  siRNA target sequence for B230382K22Rik (NM_175502.2,684-702).
ggtggaagtgtgtagactt

SEQ ID NO: 789432 - DNA, 19 bp, Mus musculus
  siRNA target sequence for B230382K22Rik (NM_175502.2,685-703).
gtggaagtgtgtagactta

SEQ ID NO: 789433 - DNA, 19 bp, Mus musculus
  siRNA target sequence for B230382K22Rik (NM_175502.2,735-753).
ccaagacagtgctattcaa

SEQ ID NO: 789434 - DNA, 19 bp, Mus musculus
  siRNA target sequence for B230382K22Rik (NM_175502.2,785-803).
cagggaacaaccaagtaat

SEQ ID NO: 789435 - DNA, 19 bp, Mus musculus
  siRNA target sequence for B230382K22Rik (NM_175502.2,806-824).
ctgatcgcaaagtctgtaa

SEQ ID NO: 789436 - DNA, 19 bp, Mus musculus
  siRNA target sequence for B230382K22Rik (NM_175502.2,808-826).
gatcgcaaagtctgtaatt

SEQ ID NO: 789437 - DNA, 19 bp, Mus musculus
  siRNA target sequence for B230382K22Rik (NM_175502.2,811-829).
cgcaaagtctgtaattgtt

SEQ ID NO: 789438 - DNA, 19 bp, Mus musculus
  siRNA target sequence for B230382K22Rik (NM_175502.2,827-845).
gttgcagccaggaactaga

SEQ ID NO: 789439 - DNA, 19 bp, Mus musculus
  siRNA target sequence for B230382K22Rik (NM_175502.2,908-926).
cagccaaaggcagtaatca

SEQ ID NO: 789440 - DNA, 19 bp, Mus musculus
  siRNA target sequence for B230382K22Rik (NM_175502.2,918-936).
cagtaatcaccctgtagat

SEQ ID NO: 789441 - DNA, 19 bp, Mus musculus
  siRNA target sequence for B230382K22Rik (NM_175502.2,920-938).
gtaatcaccctgtagatct

SEQ ID NO: 789442 - DNA, 19 bp, Mus musculus
  siRNA target sequence for B230382K22Rik (NM_175502.2,967-985).
catgaaactgccatgtctt

SEQ ID NO: 789443 - DNA, 19 bp, Mus musculus
  siRNA target sequence for B230382K22Rik (NM_175502.2,993-1011).
ggaagacgatgatgataca

SEQ ID NO: 789444 - DNA, 19 bp, Mus musculus
  siRNA target sequence for B230382K22Rik (NM_175502.2,997-1015).
gacgatgatgatacaagtt

SEQ ID NO: 789445 - DNA, 19 bp, Mus musculus
  siRNA target sequence for B230382K22Rik (NM_175502.2,999-1017).
cgatgatgatacaagttca

SEQ ID NO: 789446 - DNA, 19 bp, Mus musculus
  siRNA target sequence for B230382K22Rik (NM_175502.2,1031-1049).
cagggaagtctgtagacta

SEQ ID NO: 789447 - DNA, 19 bp, Mus musculus
  siRNA target sequence for B230382K22Rik (NM_175502.2,1085-1103).
gtatcttgctagtgatcat

SEQ ID NO: 789448 - DNA, 19 bp, Mus musculus
  siRNA target sequence for B230382K22Rik (NM_175502.2,1089-1107).
cttgctagtgatcatttct

SEQ ID NO: 789449 - DNA, 19 bp, Mus musculus
  siRNA target sequence for B230382K22Rik (NM_175502.2,1092-1110).
gctagtgatcatttcttat

SEQ ID NO: 789450 - DNA, 19 bp, Mus musculus
  siRNA target sequence for B230382K22Rik (NM_175502.2,1159-1177).
gaaatggaacgcctagaaa

SEQ ID NO: 789451 - DNA, 19 bp, Mus musculus
  siRNA target sequence for B230382K22Rik (NM_175502.2,1294-1312).
gagctctatcgtcgaaata

SEQ ID NO: 789452 - DNA, 19 bp, Mus musculus
  siRNA target sequence for B230382K22Rik (NM_175502.2,1296-1314).
gctctatcgtcgaaataga

SEQ ID NO: 789453 - DNA, 19 bp, Mus musculus
  siRNA target sequence for B230382K22Rik (NM_175502.2,1297-1315).
ctctatcgtcgaaatagat

SEQ ID NO: 789454 - DNA, 19 bp, Mus musculus
  siRNA target sequence for B230382K22Rik (NM_175502.2,1299-1317).
ctatcgtcgaaatagattt

SEQ ID NO: 789455 - DNA, 19 bp, Mus musculus
  siRNA target sequence for B230382K22Rik (NM_175502.2,1359-1377).
cttcaggatgaaaactagt

SEQ ID NO: 789456 - DNA, 19 bp, Mus musculus
  siRNA target sequence for B230382K22Rik (NM_175502.2,1362-1380).
caggatgaaaactagtact

SEQ ID NO: 789457 - DNA, 19 bp, Mus musculus
  siRNA target sequence for B230382K22Rik (NM_175502.2,1368-1386).
gaaaactagtactaatgaa

SEQ ID NO: 789458 - DNA, 19 bp, Mus musculus
  siRNA target sequence for Aard (NM_175503.2,449-467).
ccagctggcccgaacttta

SEQ ID NO: 789459 - DNA, 19 bp, Mus musculus
  siRNA target sequence for Aard (NM_175503.2,459-477).
cgaactttactggatttaa

SEQ ID NO: 789460 - DNA, 19 bp, Mus musculus
  siRNA target sequence for Aard (NM_175503.2,463-481).
ctttactggatttaaacat

SEQ ID NO: 789461 - DNA, 19 bp, Mus musculus
  siRNA target sequence for Aard (NM_175503.2,532-550).
cccagagcccgcaggataa

SEQ ID NO: 789462 - DNA, 19 bp, Mus musculus
  siRNA target sequence for A930017K11Rik (NM_175505.2,1963-1981).
gacaagctgcttatctaga

SEQ ID NO: 789463 - DNA, 19 bp, Mus musculus
  siRNA target sequence for A930017K11Rik (NM_175505.2,2101-2119).
gtgccaacacacttatcca

SEQ ID NO: 789464 - DNA, 19 bp, Mus musculus
  siRNA target sequence for A930017K11Rik (NM_175505.2,2209-2227).
gtaacccctggctgatgaa

SEQ ID NO: 789465 - DNA, 19 bp, Mus musculus
  siRNA target sequence for D230012E17Rik (NM_175508.2,72-90).
ctggaatctggcgttctat

SEQ ID NO: 789466 - DNA, 19 bp, Mus musculus
  siRNA target sequence for D230012E17Rik (NM_175508.2,74-92).
ggaatctggcgttctatgt

SEQ ID NO: 789467 - DNA, 19 bp, Mus musculus
  siRNA target sequence for D230012E17Rik (NM_175508.2,397-415).
ctccccaatccttatactt

SEQ ID NO: 789468 - DNA, 19 bp, Mus musculus
  siRNA target sequence for D230012E17Rik (NM_175508.2,416-434).
cccggaccctcctttgctt

SEQ ID NO: 789469 - DNA, 19 bp, Mus musculus
  siRNA target sequence for D230012E17Rik (NM_175508.2,465-483).
gatgggcgtgcgtcagatt

SEQ ID NO: 789470 - DNA, 19 bp, Mus musculus
  siRNA target sequence for D230012E17Rik (NM_175508.2,475-493).
cgtcagatttcgcttttct

SEQ ID NO: 789471 - DNA, 19 bp, Mus musculus
  siRNA target sequence for C030018G13Rik (NM_175510.2,118-136).
caaaccagtgcatttttga

SEQ ID NO: 789472 - DNA, 19 bp, Mus musculus
  siRNA target sequence for C030018G13Rik (NM_175510.2,128-146).
catttttgaggcctaaact

SEQ ID NO: 789473 - DNA, 19 bp, Mus musculus
  siRNA target sequence for C030018G13Rik (NM_175510.2,232-250).
gaagcaatccagagcattt

SEQ ID NO: 789474 - DNA, 19 bp, Mus musculus
  siRNA target sequence for C030018G13Rik (NM_175510.2,301-319).
gcaactctgctatcaaaca

SEQ ID NO: 789475 - DNA, 19 bp, Mus musculus
  siRNA target sequence for C030018G13Rik (NM_175510.2,411-429).
ctgcaacaatgatcagttt

SEQ ID NO: 789476 - DNA, 19 bp, Mus musculus
  siRNA target sequence for C030018G13Rik (NM_175510.2,473-491).
ctttcatccaccagattga

SEQ ID NO: 789477 - DNA, 19 bp, Mus musculus
  siRNA target sequence for C030018G13Rik (NM_175510.2,581-599).
ctaccgtggagctctttgt

SEQ ID NO: 789478 - DNA, 19 bp, Mus musculus
  siRNA target sequence for C030018G13Rik (NM_175510.2,614-632).
ctttggtgcacaggataaa

SEQ ID NO: 789479 - DNA, 19 bp, Mus musculus
  siRNA target sequence for C030018G13Rik (NM_175510.2,619-637).
gtgcacaggataaaggaat

SEQ ID NO: 789480 - DNA, 19 bp, Mus musculus
  siRNA target sequence for C030018G13Rik (NM_175510.2,624-642).
caggataaaggaatctgat

SEQ ID NO: 789481 - DNA, 19 bp, Mus musculus
  siRNA target sequence for C030018G13Rik (NM_175510.2,658-676).
gccagtgggttggttatat

SEQ ID NO: 789482 - DNA, 19 bp, Mus musculus
  siRNA target sequence for C030018G13Rik (NM_175510.2,716-734).
gctttactgcgctggtaaa

SEQ ID NO: 789483 - DNA, 19 bp, Mus musculus
  siRNA target sequence for C030018G13Rik (NM_175510.2,736-754).
cccataaggaacatcatta

SEQ ID NO: 789484 - DNA, 19 bp, Mus musculus
  siRNA target sequence for C030018G13Rik (NM_175510.2,738-756).
cataaggaacatcattaca

SEQ ID NO: 789485 - DNA, 19 bp, Mus musculus
  siRNA target sequence for C030018G13Rik (NM_175510.2,747-765).
catcattacagccaaaaga

SEQ ID NO: 789486 - DNA, 19 bp, Mus musculus
  siRNA target sequence for C030018G13Rik (NM_175510.2,795-813).
ctgtgaatcacccaatcaa

SEQ ID NO: 789487 - DNA, 19 bp, Mus musculus
  siRNA target sequence for C030018G13Rik (NM_175510.2,797-815).
gtgaatcacccaatcaaga

SEQ ID NO: 789488 - DNA, 19 bp, Mus musculus
  siRNA target sequence for C030018G13Rik (NM_175510.2,952-970).
gaaagaggcccgtcacatt

SEQ ID NO: 789489 - DNA, 19 bp, Mus musculus
  siRNA target sequence for C030018G13Rik (NM_175510.2,971-989).
ccagggcctcacttgtgat

SEQ ID NO: 789490 - DNA, 19 bp, Mus musculus
  siRNA target sequence for C030018G13Rik (NM_175510.2,972-990).
cagggcctcacttgtgata

SEQ ID NO: 789491 - DNA, 19 bp, Mus musculus
  siRNA target sequence for C030018G13Rik (NM_175510.2,1085-1103).
ggtctctgatgtactatct

SEQ ID NO: 789492 - DNA, 19 bp, Mus musculus
  siRNA target sequence for C030018G13Rik (NM_175510.2,1086-1104).
gtctctgatgtactatcta

SEQ ID NO: 789493 - DNA, 19 bp, Mus musculus
  siRNA target sequence for C030018G13Rik (NM_175510.2,1088-1106).
ctctgatgtactatctaca

SEQ ID NO: 789494 - DNA, 19 bp, Mus musculus
  siRNA target sequence for C030018G13Rik (NM_175510.2,1090-1108).
ctgatgtactatctacaaa

SEQ ID NO: 789495 - DNA, 19 bp, Mus musculus
  siRNA target sequence for C030018G13Rik (NM_175510.2,1143-1161).
gaccccagatccagatatt

SEQ ID NO: 789496 - DNA, 19 bp, Mus musculus
  siRNA target sequence for A130092J06Rik (NM_175511.2,856-874).
gtgccatgggctgtattca

SEQ ID NO: 789497 - DNA, 19 bp, Mus musculus
  siRNA target sequence for A130092J06Rik (NM_175511.2,858-876).
gccatgggctgtattcaga

SEQ ID NO: 789498 - DNA, 19 bp, Mus musculus
  siRNA target sequence for A130092J06Rik (NM_175511.2,910-928).
ggattaccgtgattgatgt

SEQ ID NO: 789499 - DNA, 19 bp, Mus musculus
  siRNA target sequence for A130092J06Rik (NM_175511.2,1055-1073).
ctggatcgttggttggatt

SEQ ID NO: 789500 - DNA, 19 bp, Mus musculus
  siRNA target sequence for A130092J06Rik (NM_175511.2,1084-1102).
gccatatggagttttacaa

SEQ ID NO: 789501 - DNA, 19 bp, Mus musculus
  siRNA target sequence for A130092J06Rik (NM_175511.2,1197-1215).
ccctggtacggcaatacca

SEQ ID NO: 789502 - DNA, 19 bp, Mus musculus
  siRNA target sequence for A130092J06Rik (NM_175511.2,1511-1529).
ggaccagcctaaaatcctt

SEQ ID NO: 789503 - DNA, 19 bp, Mus musculus
  siRNA target sequence for C630007C17Rik (NM_175513.2,394-412).
gtgagcactggttccataa

SEQ ID NO: 789504 - DNA, 19 bp, Mus musculus
  siRNA target sequence for C630007C17Rik (NM_175513.2,396-414).
gagcactggttccataaaa

SEQ ID NO: 789505 - DNA, 19 bp, Mus musculus
  siRNA target sequence for C630007C17Rik (NM_175513.2,401-419).
ctggttccataaaagtaga

SEQ ID NO: 789506 - DNA, 19 bp, Mus musculus
  siRNA target sequence for C630007C17Rik (NM_175513.2,724-742).
caacagttgtaaatgaaca

SEQ ID NO: 789507 - DNA, 19 bp, Mus musculus
  siRNA target sequence for C630007C17Rik (NM_175513.2,749-767).
gccactagtgatacattct

SEQ ID NO: 789508 - DNA, 19 bp, Mus musculus
  siRNA target sequence for C630007C17Rik (NM_175513.2,751-769).
cactagtgatacattctgt

SEQ ID NO: 789509 - DNA, 19 bp, Mus musculus
  siRNA target sequence for C630007C17Rik (NM_175513.2,789-807).
gtcagaacttactgttgtt

SEQ ID NO: 789510 - DNA, 19 bp, Mus musculus
  siRNA target sequence for C630007C17Rik (NM_175513.2,848-866).
cttggcttctcaaagtaat

SEQ ID NO: 789511 - DNA, 19 bp, Mus musculus
  siRNA target sequence for C630007C17Rik (NM_175513.2,869-887).
gaaaggcccaactcagaat

SEQ ID NO: 789512 - DNA, 19 bp, Mus musculus
  siRNA target sequence for C630007C17Rik (NM_175513.2,880-898).
ctcagaatcagcctgttaa

SEQ ID NO: 789513 - DNA, 19 bp, Mus musculus
  siRNA target sequence for C630007C17Rik (NM_175513.2,882-900).
cagaatcagcctgttaaaa

SEQ ID NO: 789514 - DNA, 19 bp, Mus musculus
  siRNA target sequence for C630007C17Rik (NM_175513.2,890-908).
gcctgttaaaagaggttat

SEQ ID NO: 789515 - DNA, 19 bp, Mus musculus
  siRNA target sequence for C630007C17Rik (NM_175513.2,891-909).
cctgttaaaagaggttata

SEQ ID NO: 789516 - DNA, 19 bp, Mus musculus
  siRNA target sequence for C630007C17Rik (NM_175513.2,904-922).
gttatagttctctcacaaa

SEQ ID NO: 789517 - DNA, 19 bp, Mus musculus
  siRNA target sequence for C630007C17Rik (NM_175513.2,948-966).
cgcagacagcattcatgtt

SEQ ID NO: 789518 - DNA, 19 bp, Mus musculus
  siRNA target sequence for C630007C17Rik (NM_175513.2,954-972).
cagcattcatgttcttact

SEQ ID NO: 789519 - DNA, 19 bp, Mus musculus
  siRNA target sequence for C630007C17Rik (NM_175513.2,971-989).
ctcgtcagatgaaagttta

SEQ ID NO: 789520 - DNA, 19 bp, Mus musculus
  siRNA target sequence for C630007C17Rik (NM_175513.2,976-994).
cagatgaaagtttaaatca

SEQ ID NO: 789521 - DNA, 19 bp, Mus musculus
  siRNA target sequence for C630007C17Rik (NM_175513.2,1095-1113).
ggagatggaactacgaaaa

SEQ ID NO: 789522 - DNA, 19 bp, Mus musculus
  siRNA target sequence for C630007C17Rik (NM_175513.2,1096-1114).
gagatggaactacgaaaat

SEQ ID NO: 789523 - DNA, 19 bp, Mus musculus
  siRNA target sequence for C630007C17Rik (NM_175513.2,1134-1152).
cccatgaagtgtagttctt

SEQ ID NO: 789524 - DNA, 19 bp, Mus musculus
  siRNA target sequence for C630007C17Rik (NM_175513.2,1135-1153).
ccatgaagtgtagttcttt

SEQ ID NO: 789525 - DNA, 19 bp, Mus musculus
  siRNA target sequence for C630007C17Rik (NM_175513.2,1139-1157).
gaagtgtagttctttgagt

SEQ ID NO: 789526 - DNA, 19 bp, Mus musculus
  siRNA target sequence for C630007C17Rik (NM_175513.2,1154-1172).
gagtcaaccagatgagtta

SEQ ID NO: 789527 - DNA, 19 bp, Mus musculus
  siRNA target sequence for C630007C17Rik (NM_175513.2,1158-1176).
caaccagatgagttagcaa

SEQ ID NO: 789528 - DNA, 19 bp, Mus musculus
  siRNA target sequence for C630007C17Rik (NM_175513.2,1183-1201).
gcataaaagaggacataaa

SEQ ID NO: 789529 - DNA, 19 bp, Mus musculus
  siRNA target sequence for C630007C17Rik (NM_175513.2,1196-1214).
cataaatccacaagaaaat

SEQ ID NO: 789530 - DNA, 19 bp, Mus musculus
  siRNA target sequence for C630007C17Rik (NM_175513.2,1215-1233).
gtaagtatcgagaagaact

SEQ ID NO: 789531 - DNA, 19 bp, Mus musculus
  siRNA target sequence for C630007C17Rik (NM_175513.2,1263-1281).
gggatgctccatccttata

SEQ ID NO: 789532 - DNA, 19 bp, Mus musculus
  siRNA target sequence for C630007C17Rik (NM_175513.2,1264-1282).
ggatgctccatccttataa

SEQ ID NO: 789533 - DNA, 19 bp, Mus musculus
  siRNA target sequence for C630007C17Rik (NM_175513.2,1268-1286).
gctccatccttataatcca

SEQ ID NO: 789534 - DNA, 19 bp, Mus musculus
  siRNA target sequence for C630007C17Rik (NM_175513.2,1275-1293).
ccttataatccacttcttt

SEQ ID NO: 789535 - DNA, 19 bp, Mus musculus
  siRNA target sequence for C630007C17Rik (NM_175513.2,1346-1364).
ctcatcgcagacttccaat

SEQ ID NO: 789536 - DNA, 19 bp, Mus musculus
  siRNA target sequence for C630007C17Rik (NM_175513.2,1351-1369).
cgcagacttccaatgatct

SEQ ID NO: 789537 - DNA, 19 bp, Mus musculus
  siRNA target sequence for C630007C17Rik (NM_175513.2,1352-1370).
gcagacttccaatgatctt

SEQ ID NO: 789538 - DNA, 19 bp, Mus musculus
  siRNA target sequence for C630007C17Rik (NM_175513.2,1408-1426).
gcaccactgacaatacctt

SEQ ID NO: 789539 - DNA, 19 bp, Mus musculus
  siRNA target sequence for C630007C17Rik (NM_175513.2,1447-1465).
gtcagactacaaacagtaa

SEQ ID NO: 789540 - DNA, 19 bp, Mus musculus
  siRNA target sequence for C630007C17Rik (NM_175513.2,1451-1469).
gactacaaacagtaacgaa

SEQ ID NO: 789541 - DNA, 19 bp, Mus musculus
  siRNA target sequence for C630007C17Rik (NM_175513.2,1453-1471).
ctacaaacagtaacgaaaa

SEQ ID NO: 789542 - DNA, 19 bp, Mus musculus
  siRNA target sequence for C630007C17Rik (NM_175513.2,1456-1474).
caaacagtaacgaaaaaca

SEQ ID NO: 789543 - DNA, 19 bp, Mus musculus
  siRNA target sequence for C630007C17Rik (NM_175513.2,1460-1478).
cagtaacgaaaaacaaact

SEQ ID NO: 789544 - DNA, 19 bp, Mus musculus
  siRNA target sequence for C630007C17Rik (NM_175513.2,1477-1495).
ctcctttcaaggtgactaa

SEQ ID NO: 789545 - DNA, 19 bp, Mus musculus
  siRNA target sequence for C630007C17Rik (NM_175513.2,1498-1516).
ccgaaaggaactttagaca

SEQ ID NO: 789546 - DNA, 19 bp, Mus musculus
  siRNA target sequence for C630007C17Rik (NM_175513.2,1577-1595).
gacgaatgaggcatcaaca

SEQ ID NO: 789547 - DNA, 19 bp, Mus musculus
  siRNA target sequence for C630007C17Rik (NM_175513.2,1594-1612).
cagagtggctatgttataa

SEQ ID NO: 789548 - DNA, 19 bp, Mus musculus
  siRNA target sequence for C630007C17Rik (NM_175513.2,1598-1616).
gtggctatgttataattca

SEQ ID NO: 789549 - DNA, 19 bp, Mus musculus
  siRNA target sequence for C630007C17Rik (NM_175513.2,1661-1679).
cgtcagcggccatgctttt

SEQ ID NO: 789550 - DNA, 19 bp, Mus musculus
  siRNA target sequence for C630007C17Rik (NM_175513.2,1667-1685).
cggccatgcttttgttaca

SEQ ID NO: 789551 - DNA, 19 bp, Mus musculus
  siRNA target sequence for C630007C17Rik (NM_175513.2,1668-1686).
ggccatgcttttgttacaa

SEQ ID NO: 789552 - DNA, 19 bp, Mus musculus
  siRNA target sequence for C630007C17Rik (NM_175513.2,1670-1688).
ccatgcttttgttacaaca

SEQ ID NO: 789553 - DNA, 19 bp, Mus musculus
  siRNA target sequence for C630007C17Rik (NM_175513.2,1716-1734).
ccagagcaagctttattga

SEQ ID NO: 789554 - DNA, 19 bp, Mus musculus
  siRNA target sequence for C630007C17Rik (NM_175513.2,1717-1735).
cagagcaagctttattgat

SEQ ID NO: 789555 - DNA, 19 bp, Mus musculus
  siRNA target sequence for C630007C17Rik (NM_175513.2,1743-1761).
gaaaaccacgacaagttaa

SEQ ID NO: 789556 - DNA, 19 bp, Mus musculus
  siRNA target sequence for C630007C17Rik (NM_175513.2,1748-1766).
ccacgacaagttaaaacat

SEQ ID NO: 789557 - DNA, 19 bp, Mus musculus
  siRNA target sequence for C630007C17Rik (NM_175513.2,1751-1769).
cgacaagttaaaacatcta

SEQ ID NO: 789558 - DNA, 19 bp, Mus musculus
  siRNA target sequence for C630007C17Rik (NM_175513.2,1809-1827).
ctaaccaacaaggtcaaat

SEQ ID NO: 789559 - DNA, 19 bp, Mus musculus
  siRNA target sequence for C630007C17Rik (NM_175513.2,2037-2055).
gctcttgccagaacatcta

SEQ ID NO: 789560 - DNA, 19 bp, Mus musculus
  siRNA target sequence for C630007C17Rik (NM_175513.2,2038-2056).
ctcttgccagaacatctat

SEQ ID NO: 789561 - DNA, 19 bp, Mus musculus
  siRNA target sequence for C630007C17Rik (NM_175513.2,2063-2081).
gatctccgtaggaactgta

SEQ ID NO: 789562 - DNA, 19 bp, Mus musculus
  siRNA target sequence for C630007C17Rik (NM_175513.2,2182-2200).
ctcccttaccccattcatt

SEQ ID NO: 789563 - DNA, 19 bp, Mus musculus
  siRNA target sequence for B230217C06Rik (NM_175516.2,381-399).
ctggctgtggtgttactct

SEQ ID NO: 789564 - DNA, 19 bp, Mus musculus
  siRNA target sequence for B230217C06Rik (NM_175516.2,385-403).
ctgtggtgttactcttaat

SEQ ID NO: 789565 - DNA, 19 bp, Mus musculus
  siRNA target sequence for B230217C06Rik (NM_175516.2,440-458).
ctccgcccagaacaaatct

SEQ ID NO: 789566 - DNA, 19 bp, Mus musculus
  siRNA target sequence for B230217C06Rik (NM_175516.2,442-460).
ccgcccagaacaaatctgt

SEQ ID NO: 789567 - DNA, 19 bp, Mus musculus
  siRNA target sequence for B230217C06Rik (NM_175516.2,443-461).
cgcccagaacaaatctgtt

SEQ ID NO: 789568 - DNA, 19 bp, Mus musculus
  siRNA target sequence for B230217C06Rik (NM_175516.2,550-568).
gcataaaccctgaagagtt

SEQ ID NO: 789569 - DNA, 19 bp, Mus musculus
  siRNA target sequence for B230217C06Rik (NM_175516.2,558-576).
cctgaagagttcatctcat

SEQ ID NO: 789570 - DNA, 19 bp, Mus musculus
  siRNA target sequence for B230217C06Rik (NM_175516.2,559-577).
ctgaagagttcatctcata

SEQ ID NO: 789571 - DNA, 19 bp, Mus musculus
  siRNA target sequence for B230217C06Rik (NM_175516.2,597-615).
gacttgagcgacaacatta

SEQ ID NO: 789572 - DNA, 19 bp, Mus musculus
  siRNA target sequence for B230217C06Rik (NM_175516.2,599-617).
cttgagcgacaacattatt

SEQ ID NO: 789573 - DNA, 19 bp, Mus musculus
  siRNA target sequence for B230217C06Rik (NM_175516.2,633-651).
ggggcatttaacaatctct

SEQ ID NO: 789574 - DNA, 19 bp, Mus musculus
  siRNA target sequence for B230217C06Rik (NM_175516.2,634-652).
gggcatttaacaatctctt

SEQ ID NO: 789575 - DNA, 19 bp, Mus musculus
  siRNA target sequence for B230217C06Rik (NM_175516.2,635-653).
ggcatttaacaatctcttt

SEQ ID NO: 789576 - DNA, 19 bp, Mus musculus
  siRNA target sequence for B230217C06Rik (NM_175516.2,659-677).
gcgttccctccgcctaaaa

SEQ ID NO: 789577 - DNA, 19 bp, Mus musculus
  siRNA target sequence for B230217C06Rik (NM_175516.2,729-747).
ctcaccaagcttgacatta

SEQ ID NO: 789578 - DNA, 19 bp, Mus musculus
  siRNA target sequence for B230217C06Rik (NM_175516.2,819-837).
ggggacaatgatttagtgt

SEQ ID NO: 789579 - DNA, 19 bp, Mus musculus
  siRNA target sequence for B230217C06Rik (NM_175516.2,820-838).
gggacaatgatttagtgta

SEQ ID NO: 789580 - DNA, 19 bp, Mus musculus
  siRNA target sequence for B230217C06Rik (NM_175516.2,851-869).
ggccttcagcggactactt

SEQ ID NO: 789581 - DNA, 19 bp, Mus musculus
  siRNA target sequence for B230217C06Rik (NM_175516.2,888-906).
ctggagaagtgcaacttga

SEQ ID NO: 789582 - DNA, 19 bp, Mus musculus
  siRNA target sequence for B230217C06Rik (NM_175516.2,986-1004).
gcctgtgtatgcctttaaa

SEQ ID NO: 789583 - DNA, 19 bp, Mus musculus
  siRNA target sequence for B230217C06Rik (NM_175516.2,1042-1060).
ggcctttgttggatttgat

SEQ ID NO: 789584 - DNA, 19 bp, Mus musculus
  siRNA target sequence for B230217C06Rik (NM_175516.2,1089-1107).
ctcacgtccctttcaatca

SEQ ID NO: 789585 - DNA, 19 bp, Mus musculus
  siRNA target sequence for B230217C06Rik (NM_175516.2,1132-1150).
ccttcctcgcctttaaaca

SEQ ID NO: 789586 - DNA, 19 bp, Mus musculus
  siRNA target sequence for B230217C06Rik (NM_175516.2,1169-1187).
ccttaacctctcctacaat

SEQ ID NO: 789587 - DNA, 19 bp, Mus musculus
  siRNA target sequence for B230217C06Rik (NM_175516.2,1184-1202).
caatcccatcagcactatt

SEQ ID NO: 789588 - DNA, 19 bp, Mus musculus
  siRNA target sequence for B230217C06Rik (NM_175516.2,1230-1248).
cgcctacaggagcttcata

SEQ ID NO: 789589 - DNA, 19 bp, Mus musculus
  siRNA target sequence for B230217C06Rik (NM_175516.2,1258-1276).
cccagctccgcactattga

SEQ ID NO: 789590 - DNA, 19 bp, Mus musculus
  siRNA target sequence for B230217C06Rik (NM_175516.2,1331-1349).
cctgctggaaacattggaa

SEQ ID NO: 789591 - DNA, 19 bp, Mus musculus
  siRNA target sequence for B230217C06Rik (NM_175516.2,1498-1516).
ccatccgtgagagatcatt

SEQ ID NO: 789592 - DNA, 19 bp, Mus musculus
  siRNA target sequence for B230217C06Rik (NM_175516.2,1499-1517).
catccgtgagagatcattt

SEQ ID NO: 789593 - DNA, 19 bp, Mus musculus
  siRNA target sequence for B230217C06Rik (NM_175516.2,1647-1665).
gacccgcagcccgtgattt

SEQ ID NO: 789594 - DNA, 19 bp, Mus musculus
  siRNA target sequence for B230217C06Rik (NM_175516.2,1650-1668).
ccgcagcccgtgatttcct

SEQ ID NO: 789595 - DNA, 19 bp, Mus musculus
  siRNA target sequence for B230217C06Rik (NM_175516.2,1675-1693).
cacctcgaaggcgttttat

SEQ ID NO: 789596 - DNA, 19 bp, Mus musculus
  siRNA target sequence for B230217C06Rik (NM_175516.2,1677-1695).
cctcgaaggcgttttatca

SEQ ID NO: 789597 - DNA, 19 bp, Mus musculus
  siRNA target sequence for B230217C06Rik (NM_175516.2,1728-1746).
ggtgatggcaccttggaaa

SEQ ID NO: 789598 - DNA, 19 bp, Mus musculus
  siRNA target sequence for B230217C06Rik (NM_175516.2,1767-1785).
gacagtgggatgtatgttt

SEQ ID NO: 789599 - DNA, 19 bp, Mus musculus
  siRNA target sequence for B230217C06Rik (NM_175516.2,1801-1819).
ctgctgggaacgatacctt

SEQ ID NO: 789600 - DNA, 19 bp, Mus musculus
  siRNA target sequence for B230217C06Rik (NM_175516.2,1849-1867).
cgtcagaccgcttccttta

SEQ ID NO: 789601 - DNA, 19 bp, Mus musculus
  siRNA target sequence for B230217C06Rik (NM_175516.2,1870-1888).
caaacaggacccctatgta

SEQ ID NO: 789602 - DNA, 19 bp, Mus musculus
  siRNA target sequence for B230217C06Rik (NM_175516.2,1910-1928).
cgtttccaacggcactaat

SEQ ID NO: 789603 - DNA, 19 bp, Mus musculus
  siRNA target sequence for B230217C06Rik (NM_175516.2,1920-1938).
ggcactaatgccaatactt

SEQ ID NO: 789604 - DNA, 19 bp, Mus musculus
  siRNA target sequence for B230217C06Rik (NM_175516.2,1921-1939).
gcactaatgccaatacttt

SEQ ID NO: 789605 - DNA, 19 bp, Mus musculus
  siRNA target sequence for B230217C06Rik (NM_175516.2,1974-1992).
gccatgggctgtttcacat

SEQ ID NO: 789606 - DNA, 19 bp, Mus musculus
  siRNA target sequence for B230217C06Rik (NM_175516.2,1975-1993).
ccatgggctgtttcacatt

SEQ ID NO: 789607 - DNA, 19 bp, Mus musculus
  siRNA target sequence for B230217C06Rik (NM_175516.2,2065-2083).
gcattgaccttgagtatgt

SEQ ID NO: 789608 - DNA, 19 bp, Mus musculus
  siRNA target sequence for B230217C06Rik (NM_175516.2,2127-2145).
ggccccaggaggttcaaca

SEQ ID NO: 789609 - DNA, 19 bp, Mus musculus
  siRNA target sequence for B230217C06Rik (NM_175516.2,2131-2149).
ccaggaggttcaacatgaa

SEQ ID NO: 789610 - DNA, 19 bp, Mus musculus
  siRNA target sequence for 4930412F15Rik (NM_175517.2,340-358).
ccaacgctgaagacttgta

SEQ ID NO: 789611 - DNA, 19 bp, Mus musculus
  siRNA target sequence for 4930412F15Rik (NM_175517.2,394-412).
ccagctcacagaaacattt

SEQ ID NO: 789612 - DNA, 19 bp, Mus musculus
  siRNA target sequence for 4930412F15Rik (NM_175517.2,474-492).
gagggcctccaggattctt

SEQ ID NO: 789613 - DNA, 19 bp, Mus musculus
  siRNA target sequence for 4930412F15Rik (NM_175517.2,476-494).
gggcctccaggattcttct

SEQ ID NO: 789614 - DNA, 19 bp, Mus musculus
  siRNA target sequence for 4930412F15Rik (NM_175517.2,568-586).
ctgtgacctctctagaaaa

SEQ ID NO: 789615 - DNA, 19 bp, Mus musculus
  siRNA target sequence for 4930412F15Rik (NM_175517.2,588-606).
gccatcgctgagattcctt

SEQ ID NO: 789616 - DNA, 19 bp, Mus musculus
  siRNA target sequence for 4930412F15Rik (NM_175517.2,620-638).
ctatgacagtcctatctct

SEQ ID NO: 789617 - DNA, 19 bp, Mus musculus
  siRNA target sequence for 4930412F15Rik (NM_175517.2,814-832).
ccaatatccccaagtatga

SEQ ID NO: 789618 - DNA, 19 bp, Mus musculus
  siRNA target sequence for 4930412F15Rik (NM_175517.2,932-950).
gacccaggtccctgaatct

SEQ ID NO: 789619 - DNA, 19 bp, Mus musculus
  siRNA target sequence for 4930412F15Rik (NM_175517.2,993-1011).
gccaaggaggacgaatcta

SEQ ID NO: 789620 - DNA, 19 bp, Mus musculus
  siRNA target sequence for 4930412F15Rik (NM_175517.2,1040-1058).
gctggcagtgggtactagt

SEQ ID NO: 789621 - DNA, 19 bp, Mus musculus
  siRNA target sequence for 4930412F15Rik (NM_175517.2,1041-1059).
ctggcagtgggtactagta

SEQ ID NO: 789622 - DNA, 19 bp, Mus musculus
  siRNA target sequence for 4930412F15Rik (NM_175517.2,1081-1099).
ggcttcgtgcaaagaagaa

SEQ ID NO: 789623 - DNA, 19 bp, Mus musculus
  siRNA target sequence for 4930412F15Rik (NM_175517.2,1083-1101).
cttcgtgcaaagaagaaga

SEQ ID NO: 789624 - DNA, 19 bp, Mus musculus
  siRNA target sequence for 4930412F15Rik (NM_175517.2,1153-1171).
gggcagaactggtggaaat

SEQ ID NO: 789625 - DNA, 19 bp, Mus musculus
  siRNA target sequence for 4930412F15Rik (NM_175517.2,1256-1274).
ccagacaggtatctacatt

SEQ ID NO: 789626 - DNA, 19 bp, Mus musculus
  siRNA target sequence for 4930412F15Rik (NM_175517.2,1279-1297).
ggcgctgcccgcattattt

SEQ ID NO: 789627 - DNA, 19 bp, Mus musculus
  siRNA target sequence for 4930412F15Rik (NM_175517.2,1280-1298).
gcgctgcccgcattattta

SEQ ID NO: 789628 - DNA, 19 bp, Mus musculus
  siRNA target sequence for 4930412F15Rik (NM_175517.2,1281-1299).
cgctgcccgcattatttat

SEQ ID NO: 789629 - DNA, 19 bp, Mus musculus
  siRNA target sequence for 4930412F15Rik (NM_175517.2,1453-1471).
gtgagttctggctcaagaa

SEQ ID NO: 789630 - DNA, 19 bp, Mus musculus
  siRNA target sequence for 4930412F15Rik (NM_175517.2,1506-1524).
caatgtcgctgtaaacaca

SEQ ID NO: 789631 - DNA, 19 bp, Mus musculus
  siRNA target sequence for 4930412F15Rik (NM_175517.2,1582-1600).
gcccctcttttgagtctaa

SEQ ID NO: 789632 - DNA, 19 bp, Mus musculus
  siRNA target sequence for 4930412F15Rik (NM_175517.2,1583-1601).
cccctcttttgagtctaat

SEQ ID NO: 789633 - DNA, 19 bp, Mus musculus
  siRNA target sequence for 4930412F15Rik (NM_175517.2,1661-1679).
ggataccaggcgaaaagga

SEQ ID NO: 789634 - DNA, 19 bp, Mus musculus
  siRNA target sequence for 4930412F15Rik (NM_175517.2,1684-1702).
gaccttatggagcaaacaa

SEQ ID NO: 789635 - DNA, 19 bp, Mus musculus
  siRNA target sequence for 4930412F15Rik (NM_175517.2,1686-1704).
ccttatggagcaaacaaca

SEQ ID NO: 789636 - DNA, 19 bp, Mus musculus
  siRNA target sequence for 6430598A04Rik (NM_175521.3,287-305).
cttctctaccgaaaaacca

SEQ ID NO: 789637 - DNA, 19 bp, Mus musculus
  siRNA target sequence for 6430598A04Rik (NM_175521.3,409-427).
ggttcgagtgcgagacatt

SEQ ID NO: 789638 - DNA, 19 bp, Mus musculus
  siRNA target sequence for 6430598A04Rik (NM_175521.3,853-871).
cagtagggcttctcgaata

SEQ ID NO: 789639 - DNA, 19 bp, Mus musculus
  siRNA target sequence for 6430598A04Rik (NM_175521.3,922-940).
gatggtaggggatgtcttt

SEQ ID NO: 789640 - DNA, 19 bp, Mus musculus
  siRNA target sequence for 6430598A04Rik (NM_175521.3,1038-1056).
gtgaggctatctatgaaga

SEQ ID NO: 789641 - DNA, 19 bp, Mus musculus
  siRNA target sequence for 6430598A04Rik (NM_175521.3,1063-1081).
gtaccccttgcctgaagaa

SEQ ID NO: 789642 - DNA, 19 bp, Mus musculus
  siRNA target sequence for 6430598A04Rik (NM_175521.3,1222-1240).
caagaccacaccttgtgaa

SEQ ID NO: 789643 - DNA, 19 bp, Mus musculus
  siRNA target sequence for 6430598A04Rik (NM_175521.3,1446-1464).
ctgccaacctgctattgct

SEQ ID NO: 789644 - DNA, 19 bp, Mus musculus
  siRNA target sequence for 6430598A04Rik (NM_175521.3,1660-1678).
ggtgtattctgcggtaaaa

SEQ ID NO: 789645 - DNA, 19 bp, Mus musculus
  siRNA target sequence for 6430598A04Rik (NM_175521.3,1741-1759).
ggagatttcagtacttcat

SEQ ID NO: 789646 - DNA, 19 bp, Mus musculus
  siRNA target sequence for E330009J07Rik (NM_175528.2,294-312).
gtgcttacctcaagatatt

SEQ ID NO: 789647 - DNA, 19 bp, Mus musculus
  siRNA target sequence for E330009J07Rik (NM_175528.2,296-314).
gcttacctcaagatattga

SEQ ID NO: 789648 - DNA, 19 bp, Mus musculus
  siRNA target sequence for E330009J07Rik (NM_175528.2,342-360).
ggccagcgggtcccataaa

SEQ ID NO: 789649 - DNA, 19 bp, Mus musculus
  siRNA target sequence for E330009J07Rik (NM_175528.2,344-362).
ccagcgggtcccataaagt

SEQ ID NO: 789650 - DNA, 19 bp, Mus musculus
  siRNA target sequence for E330009J07Rik (NM_175528.2,345-363).
cagcgggtcccataaagtt

SEQ ID NO: 789651 - DNA, 19 bp, Mus musculus
  siRNA target sequence for E330009J07Rik (NM_175528.2,347-365).
gcgggtcccataaagttca

SEQ ID NO: 789652 - DNA, 19 bp, Mus musculus
  siRNA target sequence for E330009J07Rik (NM_175528.2,355-373).
cataaagttcagtctgatt

SEQ ID NO: 789653 - DNA, 19 bp, Mus musculus
  siRNA target sequence for E330009J07Rik (NM_175528.2,361-379).
gttcagtctgatttcatct

SEQ ID NO: 789654 - DNA, 19 bp, Mus musculus
  siRNA target sequence for E330009J07Rik (NM_175528.2,448-466).
cgaggcgctcggatgaagt

SEQ ID NO: 789655 - DNA, 19 bp, Mus musculus
  siRNA target sequence for E330009J07Rik (NM_175528.2,549-567).
gatgccaggacattactct

SEQ ID NO: 789656 - DNA, 19 bp, Mus musculus
  siRNA target sequence for E330009J07Rik (NM_175528.2,656-674).
cttctattcaccgctatat

SEQ ID NO: 789657 - DNA, 19 bp, Mus musculus
  siRNA target sequence for E330009J07Rik (NM_175528.2,659-677).
ctattcaccgctatatgta

SEQ ID NO: 789658 - DNA, 19 bp, Mus musculus
  siRNA target sequence for E330009J07Rik (NM_175528.2,737-755).
gagaacagatcctcattct

SEQ ID NO: 789659 - DNA, 19 bp, Mus musculus
  siRNA target sequence for E330009J07Rik (NM_175528.2,808-826).
gtgggtgtcgtgtgctata

SEQ ID NO: 789660 - DNA, 19 bp, Mus musculus
  siRNA target sequence for E330009J07Rik (NM_175528.2,810-828).
gggtgtcgtgtgctataga

SEQ ID NO: 789661 - DNA, 19 bp, Mus musculus
  siRNA target sequence for E330009J07Rik (NM_175528.2,812-830).
gtgtcgtgtgctatagagt

SEQ ID NO: 789662 - DNA, 19 bp, Mus musculus
  siRNA target sequence for E330009J07Rik (NM_175528.2,992-1010).
gtgagctgtacgatgtgta

SEQ ID NO: 789663 - DNA, 19 bp, Mus musculus
  siRNA target sequence for E330009J07Rik (NM_175528.2,1011-1029).
cgtggacaaccagaatgta

SEQ ID NO: 789664 - DNA, 19 bp, Mus musculus
  siRNA target sequence for E330009J07Rik (NM_175528.2,1012-1030).
gtggacaaccagaatgtaa

SEQ ID NO: 789665 - DNA, 19 bp, Mus musculus
  siRNA target sequence for E330009J07Rik (NM_175528.2,1015-1033).
gacaaccagaatgtaaaga

SEQ ID NO: 789666 - DNA, 19 bp, Mus musculus
  siRNA target sequence for F630035L11Rik (NM_175529.2,404-422).
cctggaccctgctgacttt

SEQ ID NO: 789667 - DNA, 19 bp, Mus musculus
  siRNA target sequence for F630035L11Rik (NM_175529.2,405-423).
ctggaccctgctgactttt

SEQ ID NO: 789668 - DNA, 19 bp, Mus musculus
  siRNA target sequence for F630035L11Rik (NM_175529.2,586-604).
cccgtactgacctcatttt

SEQ ID NO: 789669 - DNA, 19 bp, Mus musculus
  siRNA target sequence for F630035L11Rik (NM_175529.2,587-605).
ccgtactgacctcattttt

SEQ ID NO: 789670 - DNA, 19 bp, Mus musculus
  siRNA target sequence for F630035L11Rik (NM_175529.2,676-694).
cagaggtcacggcagaaat

SEQ ID NO: 789671 - DNA, 19 bp, Mus musculus
  siRNA target sequence for F630035L11Rik (NM_175529.2,876-894).
gatgggccaaccaaagaga

SEQ ID NO: 789672 - DNA, 19 bp, Mus musculus
  siRNA target sequence for F630035L11Rik (NM_175529.2,907-925).
ggaccactgagttagaaat

SEQ ID NO: 789673 - DNA, 19 bp, Mus musculus
  siRNA target sequence for F630035L11Rik (NM_175529.2,1333-1351).
caccctcccagctacagtt

SEQ ID NO: 789674 - DNA, 19 bp, Mus musculus
  siRNA target sequence for F630035L11Rik (NM_175529.2,1411-1429).
caggtatggcccaaacact

SEQ ID NO: 789675 - DNA, 19 bp, Mus musculus
  siRNA target sequence for F630035L11Rik (NM_175529.2,1419-1437).
gcccaaacactgaatcaga

SEQ ID NO: 789676 - DNA, 19 bp, Mus musculus
  siRNA target sequence for F630035L11Rik (NM_175529.2,1490-1508).
cctcaccctggctaaggta

SEQ ID NO: 789677 - DNA, 19 bp, Mus musculus
  siRNA target sequence for F630035L11Rik (NM_175529.2,1566-1584).
ggaaggcagcccctaagta

SEQ ID NO: 789678 - DNA, 19 bp, Mus musculus
  siRNA target sequence for F630035L11Rik (NM_175529.2,1567-1585).
gaaggcagcccctaagtaa

SEQ ID NO: 789679 - DNA, 19 bp, Mus musculus
  siRNA target sequence for F630035L11Rik (NM_175529.2,1570-1588).
ggcagcccctaagtaaact

SEQ ID NO: 789680 - DNA, 19 bp, Mus musculus
  siRNA target sequence for F630035L11Rik (NM_175529.2,1572-1590).
cagcccctaagtaaactct

SEQ ID NO: 789681 - DNA, 19 bp, Mus musculus
  siRNA target sequence for 4932704E22Rik (NM_175530.2,402-420).
gctggacacgtggtatgtt

SEQ ID NO: 789682 - DNA, 19 bp, Mus musculus
  siRNA target sequence for 4932704E22Rik (NM_175530.2,403-421).
ctggacacgtggtatgtta

SEQ ID NO: 789683 - DNA, 19 bp, Mus musculus
  siRNA target sequence for 4932704E22Rik (NM_175530.2,406-424).
gacacgtggtatgttatca

SEQ ID NO: 789684 - DNA, 19 bp, Mus musculus
  siRNA target sequence for 4932704E22Rik (NM_175530.2,418-436).
gttatcaagcctggaaata

SEQ ID NO: 789685 - DNA, 19 bp, Mus musculus
  siRNA target sequence for 4932704E22Rik (NM_175530.2,616-634).
gaggtgacccccacatcat

SEQ ID NO: 789686 - DNA, 19 bp, Mus musculus
  siRNA target sequence for 4932704E22Rik (NM_175530.2,736-754).
gctcccgtggtctttgtgt

SEQ ID NO: 789687 - DNA, 19 bp, Mus musculus
  siRNA target sequence for 4932704E22Rik (NM_175530.2,916-934).
ggcgaggtgcgtatagctt

SEQ ID NO: 789688 - DNA, 19 bp, Mus musculus
  siRNA target sequence for 4932704E22Rik (NM_175530.2,917-935).
gcgaggtgcgtatagcttt

SEQ ID NO: 789689 - DNA, 19 bp, Mus musculus
  siRNA target sequence for 4932704E22Rik (NM_175530.2,1037-1055).
ggactcgagccaaagacaa

SEQ ID NO: 789690 - DNA, 19 bp, Mus musculus
  siRNA target sequence for 4932704E22Rik (NM_175530.2,1040-1058).
ctcgagccaaagacaaaat

SEQ ID NO: 789691 - DNA, 19 bp, Mus musculus
  siRNA target sequence for 4932704E22Rik (NM_175530.2,1064-1082).
gcgacttgtaccagcttat

SEQ ID NO: 789692 - DNA, 19 bp, Mus musculus
  siRNA target sequence for 4932704E22Rik (NM_175530.2,1232-1250).
caggattccatgtagatgt

SEQ ID NO: 789693 - DNA, 19 bp, Mus musculus
  siRNA target sequence for 4932704E22Rik (NM_175530.2,1267-1285).
gtggatgcgtgcatcttct

SEQ ID NO: 789694 - DNA, 19 bp, Mus musculus
  siRNA target sequence for 4932704E22Rik (NM_175530.2,1269-1287).
ggatgcgtgcatcttcttt

SEQ ID NO: 789695 - DNA, 19 bp, Mus musculus
  siRNA target sequence for 4932704E22Rik (NM_175530.2,1358-1376).
cacctggccagctcttctt

SEQ ID NO: 789696 - DNA, 19 bp, Mus musculus
  siRNA target sequence for 4932704E22Rik (NM_175530.2,1410-1428).
gccacccccagctgatata

SEQ ID NO: 789697 - DNA, 19 bp, Mus musculus
  siRNA target sequence for 4932704E22Rik (NM_175530.2,1414-1432).
cccccagctgatataccaa

SEQ ID NO: 789698 - DNA, 19 bp, Mus musculus
  siRNA target sequence for 4932704E22Rik (NM_175530.2,1581-1599).
gcacgtgctcgtcaagata

SEQ ID NO: 789699 - DNA, 19 bp, Mus musculus
  siRNA target sequence for 4932704E22Rik (NM_175530.2,1582-1600).
cacgtgctcgtcaagatat

SEQ ID NO: 789700 - DNA, 19 bp, Mus musculus
  siRNA target sequence for 4932704E22Rik (NM_175530.2,1585-1603).
gtgctcgtcaagatattca

SEQ ID NO: 789701 - DNA, 19 bp, Mus musculus
  siRNA target sequence for 4932704E22Rik (NM_175530.2,1882-1900).
ggcttgcatgacaacaact

SEQ ID NO: 789702 - DNA, 19 bp, Mus musculus
  siRNA target sequence for Zfp291 (NM_175536.2,199-217).
ccagcgctccaatagtcat

SEQ ID NO: 789703 - DNA, 19 bp, Mus musculus
  siRNA target sequence for Zfp291 (NM_175536.2,204-222).
gctccaatagtcatgacaa

SEQ ID NO: 789704 - DNA, 19 bp, Mus musculus
  siRNA target sequence for Zfp291 (NM_175536.2,248-266).
ggtcgtaccgcaagaaact

SEQ ID NO: 789705 - DNA, 19 bp, Mus musculus
  siRNA target sequence for Zfp291 (NM_175536.2,249-267).
gtcgtaccgcaagaaactt

SEQ ID NO: 789706 - DNA, 19 bp, Mus musculus
  siRNA target sequence for Zfp291 (NM_175536.2,251-269).
cgtaccgcaagaaacttga

SEQ ID NO: 789707 - DNA, 19 bp, Mus musculus
  siRNA target sequence for Zfp291 (NM_175536.2,252-270).
gtaccgcaagaaacttgat

SEQ ID NO: 789708 - DNA, 19 bp, Mus musculus
  siRNA target sequence for Zfp291 (NM_175536.2,348-366).
caattcaaggcactcataa

SEQ ID NO: 789709 - DNA, 19 bp, Mus musculus
  siRNA target sequence for Zfp291 (NM_175536.2,386-404).
gcagtagaatgtaaaataa

SEQ ID NO: 789710 - DNA, 19 bp, Mus musculus
  siRNA target sequence for Zfp291 (NM_175536.2,450-468).
caaggcacccaagaaaaat

SEQ ID NO: 789711 - DNA, 19 bp, Mus musculus
  siRNA target sequence for Zfp291 (NM_175536.2,453-471).
ggcacccaagaaaaattga

SEQ ID NO: 789712 - DNA, 19 bp, Mus musculus
  siRNA target sequence for Zfp291 (NM_175536.2,480-498).
ctcgctactgggcatttct

SEQ ID NO: 789713 - DNA, 19 bp, Mus musculus
  siRNA target sequence for Zfp291 (NM_175536.2,517-535).
ggcagtagatgaaatctat

SEQ ID NO: 789714 - DNA, 19 bp, Mus musculus
  siRNA target sequence for Zfp291 (NM_175536.2,521-539).
gtagatgaaatctatgtga

SEQ ID NO: 789715 - DNA, 19 bp, Mus musculus
  siRNA target sequence for Zfp291 (NM_175536.2,532-550).
ctatgtgacttgtgaatca

SEQ ID NO: 789716 - DNA, 19 bp, Mus musculus
  siRNA target sequence for Zfp291 (NM_175536.2,570-588).
gtaaggaggtgttaatgat

SEQ ID NO: 789717 - DNA, 19 bp, Mus musculus
  siRNA target sequence for Zfp291 (NM_175536.2,593-611).
gattactatgtgagagatt

SEQ ID NO: 789718 - DNA, 19 bp, Mus musculus
  siRNA target sequence for Zfp291 (NM_175536.2,598-616).
ctatgtgagagatttcaaa

SEQ ID NO: 789719 - DNA, 19 bp, Mus musculus
  siRNA target sequence for Zfp291 (NM_175536.2,602-620).
gtgagagatttcaaagcat

SEQ ID NO: 789720 - DNA, 19 bp, Mus musculus
  siRNA target sequence for Zfp291 (NM_175536.2,622-640).
gattgactggattcaactt

SEQ ID NO: 789721 - DNA, 19 bp, Mus musculus
  siRNA target sequence for Zfp291 (NM_175536.2,686-704).
ctggcgtgggaagtaaaga

SEQ ID NO: 789722 - DNA, 19 bp, Mus musculus
  siRNA target sequence for Zfp291 (NM_175536.2,711-729).
ctccaggacgtcatgtgat

SEQ ID NO: 789723 - DNA, 19 bp, Mus musculus
  siRNA target sequence for Zfp291 (NM_175536.2,714-732).
caggacgtcatgtgattca

SEQ ID NO: 789724 - DNA, 19 bp, Mus musculus
  siRNA target sequence for Zfp291 (NM_175536.2,716-734).
ggacgtcatgtgattcaaa

SEQ ID NO: 789725 - DNA, 19 bp, Mus musculus
  siRNA target sequence for Zfp291 (NM_175536.2,731-749).
caaagcccatcaacagata

SEQ ID NO: 789726 - DNA, 19 bp, Mus musculus
  siRNA target sequence for Zfp291 (NM_175536.2,735-753).
gcccatcaacagatagaat

SEQ ID NO: 789727 - DNA, 19 bp, Mus musculus
  siRNA target sequence for Zfp291 (NM_175536.2,843-861).
gttgggctgacaaggtaaa

SEQ ID NO: 789728 - DNA, 19 bp, Mus musculus
  siRNA target sequence for Zfp291 (NM_175536.2,856-874).
ggtaaaggctcatcatact

SEQ ID NO: 789729 - DNA, 19 bp, Mus musculus
  siRNA target sequence for Zfp291 (NM_175536.2,915-933).
caccaatgacagtgcaaaa

SEQ ID NO: 789730 - DNA, 19 bp, Mus musculus
  siRNA target sequence for Zfp291 (NM_175536.2,917-935).
ccaatgacagtgcaaaaga

SEQ ID NO: 789731 - DNA, 19 bp, Mus musculus
  siRNA target sequence for Zfp291 (NM_175536.2,1005-1023).
cccgatcgacagcagttat

SEQ ID NO: 789732 - DNA, 19 bp, Mus musculus
  siRNA target sequence for Zfp291 (NM_175536.2,1006-1024).
ccgatcgacagcagttata

SEQ ID NO: 789733 - DNA, 19 bp, Mus musculus
  siRNA target sequence for Zfp291 (NM_175536.2,1059-1077).
caaaggatgacagtgataa

SEQ ID NO: 789734 - DNA, 19 bp, Mus musculus
  siRNA target sequence for Zfp291 (NM_175536.2,1063-1081).
ggatgacagtgataaggaa

SEQ ID NO: 789735 - DNA, 19 bp, Mus musculus
  siRNA target sequence for Zfp291 (NM_175536.2,1143-1161).
ctgttgaatcgttatccaa

SEQ ID NO: 789736 - DNA, 19 bp, Mus musculus
  siRNA target sequence for Zfp291 (NM_175536.2,1148-1166).
gaatcgttatccaaagact

SEQ ID NO: 789737 - DNA, 19 bp, Mus musculus
  siRNA target sequence for Zfp291 (NM_175536.2,1339-1357).
gaacatcagggcgaaagaa

SEQ ID NO: 789738 - DNA, 19 bp, Mus musculus
  siRNA target sequence for Zfp291 (NM_175536.2,1342-1360).
catcagggcgaaagaatat

SEQ ID NO: 789739 - DNA, 19 bp, Mus musculus
  siRNA target sequence for Zfp291 (NM_175536.2,1389-1407).
gctccgagtcaccttataa

SEQ ID NO: 789740 - DNA, 19 bp, Mus musculus
  siRNA target sequence for Zfp291 (NM_175536.2,1390-1408).
ctccgagtcaccttataaa

SEQ ID NO: 789741 - DNA, 19 bp, Mus musculus
  siRNA target sequence for Zfp291 (NM_175536.2,1394-1412).
gagtcaccttataaagcaa

SEQ ID NO: 789742 - DNA, 19 bp, Mus musculus
  siRNA target sequence for Zfp291 (NM_175536.2,1414-1432).
gcttcagagattaaccaaa

SEQ ID NO: 789743 - DNA, 19 bp, Mus musculus
  siRNA target sequence for Zfp291 (NM_175536.2,1428-1446).
ccaaagatcttgtaaaaca

SEQ ID NO: 789744 - DNA, 19 bp, Mus musculus
  siRNA target sequence for Zfp291 (NM_175536.2,1466-1484).
ggctcttgggtaaataata

SEQ ID NO: 789745 - DNA, 19 bp, Mus musculus
  siRNA target sequence for Zfp291 (NM_175536.2,1467-1485).
gctcttgggtaaataataa

SEQ ID NO: 789746 - DNA, 19 bp, Mus musculus
  siRNA target sequence for Zfp291 (NM_175536.2,1546-1564).
gccagatcagatttcgttt

SEQ ID NO: 789747 - DNA, 19 bp, Mus musculus
  siRNA target sequence for Zfp291 (NM_175536.2,1577-1595).
ggattaacagcccttgaaa

SEQ ID NO: 789748 - DNA, 19 bp, Mus musculus
  siRNA target sequence for Zfp291 (NM_175536.2,1578-1596).
gattaacagcccttgaaaa

SEQ ID NO: 789749 - DNA, 19 bp, Mus musculus
  siRNA target sequence for Zfp291 (NM_175536.2,1630-1648).
gaacacggtttcacgaatt

SEQ ID NO: 789750 - DNA, 19 bp, Mus musculus
  siRNA target sequence for Zfp291 (NM_175536.2,1633-1651).
cacggtttcacgaattcct

SEQ ID NO: 789751 - DNA, 19 bp, Mus musculus
  siRNA target sequence for Zfp291 (NM_175536.2,1663-1681).
ctgcaatgcaatcaatgtt

SEQ ID NO: 789752 - DNA, 19 bp, Mus musculus
  siRNA target sequence for Zfp291 (NM_175536.2,1665-1683).
gcaatgcaatcaatgttta

SEQ ID NO: 789753 - DNA, 19 bp, Mus musculus
  siRNA target sequence for Zfp291 (NM_175536.2,1695-1713).
gcaataactgctcagaaaa

SEQ ID NO: 789754 - DNA, 19 bp, Mus musculus
  siRNA target sequence for Zfp291 (NM_175536.2,1719-1737).
ctgatgttctgtttagtaa

SEQ ID NO: 789755 - DNA, 19 bp, Mus musculus
  siRNA target sequence for Zfp291 (NM_175536.2,1760-1778).
ctcctgatacaccaattga

SEQ ID NO: 789756 - DNA, 19 bp, Mus musculus
  siRNA target sequence for Zfp291 (NM_175536.2,1771-1789).
ccaattgacggtttatgtt

SEQ ID NO: 789757 - DNA, 19 bp, Mus musculus
  siRNA target sequence for Zfp291 (NM_175536.2,1780-1798).
ggtttatgttccagatgaa

SEQ ID NO: 789758 - DNA, 19 bp, Mus musculus
  siRNA target sequence for Zfp291 (NM_175536.2,1871-1889).
ggtgctgtggtttttagct

SEQ ID NO: 789759 - DNA, 19 bp, Mus musculus
  siRNA target sequence for Zfp291 (NM_175536.2,1899-1917).
ccaaccgaccagatggaaa

SEQ ID NO: 789760 - DNA, 19 bp, Mus musculus
  siRNA target sequence for Zfp291 (NM_175536.2,1921-1939).
ccgtccagctacaccaaaa

SEQ ID NO: 789761 - DNA, 19 bp, Mus musculus
  siRNA target sequence for Zfp291 (NM_175536.2,1922-1940).
cgtccagctacaccaaaaa

SEQ ID NO: 789762 - DNA, 19 bp, Mus musculus
  siRNA target sequence for Zfp291 (NM_175536.2,1969-1987).
ctcacaaggtgatgctttt

SEQ ID NO: 789763 - DNA, 19 bp, Mus musculus
  siRNA target sequence for Zfp291 (NM_175536.2,1971-1989).
cacaaggtgatgcttttaa

SEQ ID NO: 789764 - DNA, 19 bp, Mus musculus
  siRNA target sequence for Zfp291 (NM_175536.2,1992-2010).
gtcgagtgcaagaccttat

SEQ ID NO: 789765 - DNA, 19 bp, Mus musculus
  siRNA target sequence for Zfp291 (NM_175536.2,1994-2012).
cgagtgcaagaccttatca

SEQ ID NO: 789766 - DNA, 19 bp, Mus musculus
  siRNA target sequence for Zfp291 (NM_175536.2,2020-2038).
ggtgaacatgggtctgatt

SEQ ID NO: 789767 - DNA, 19 bp, Mus musculus
  siRNA target sequence for Zfp291 (NM_175536.2,2132-2150).
cgtgggatgtgtatgctat

SEQ ID NO: 789768 - DNA, 19 bp, Mus musculus
  siRNA target sequence for Zfp291 (NM_175536.2,2169-2187).
ggtcctccagcatatttga

SEQ ID NO: 789769 - DNA, 19 bp, Mus musculus
  siRNA target sequence for Zfp291 (NM_175536.2,2172-2190).
cctccagcatatttgacaa

SEQ ID NO: 789770 - DNA, 19 bp, Mus musculus
  siRNA target sequence for Zfp291 (NM_175536.2,2178-2196).
gcatatttgacaataatca

SEQ ID NO: 789771 - DNA, 19 bp, Mus musculus
  siRNA target sequence for Zfp291 (NM_175536.2,2252-2270).
ctacatatgctctactgta

SEQ ID NO: 789772 - DNA, 19 bp, Mus musculus
  siRNA target sequence for Zfp291 (NM_175536.2,2345-2363).
gccattcagagtttacgtt

SEQ ID NO: 789773 - DNA, 19 bp, Mus musculus
  siRNA target sequence for Zfp291 (NM_175536.2,2353-2371).
gagtttacgtttcttcaat

SEQ ID NO: 789774 - DNA, 19 bp, Mus musculus
  siRNA target sequence for Zfp291 (NM_175536.2,2513-2531).
gtctgtgtgggctacttca

SEQ ID NO: 789775 - DNA, 19 bp, Mus musculus
  siRNA target sequence for Zfp291 (NM_175536.2,2544-2562).
cagataaccaggtgattgt

SEQ ID NO: 789776 - DNA, 19 bp, Mus musculus
  siRNA target sequence for Zfp291 (NM_175536.2,2673-2691).
gtcacaacaaccatcagaa

SEQ ID NO: 789777 - DNA, 19 bp, Mus musculus
  siRNA target sequence for Zfp291 (NM_175536.2,2760-2778).
ctccgggtcacgtggataa

SEQ ID NO: 789778 - DNA, 19 bp, Mus musculus
  siRNA target sequence for Zfp291 (NM_175536.2,2763-2781).
cgggtcacgtggataacca

SEQ ID NO: 789779 - DNA, 19 bp, Mus musculus
  siRNA target sequence for Zfp291 (NM_175536.2,2771-2789).
gtggataaccagtcttcaa

SEQ ID NO: 789780 - DNA, 19 bp, Mus musculus
  siRNA target sequence for Zfp291 (NM_175536.2,2773-2791).
ggataaccagtcttcaagt

SEQ ID NO: 789781 - DNA, 19 bp, Mus musculus
  siRNA target sequence for Zfp291 (NM_175536.2,2870-2888).
cggcaatttttcttgaaaa

SEQ ID NO: 789782 - DNA, 19 bp, Mus musculus
  siRNA target sequence for Zfp291 (NM_175536.2,2871-2889).
ggcaatttttcttgaaaaa

SEQ ID NO: 789783 - DNA, 19 bp, Mus musculus
  siRNA target sequence for A130007F10Rik (NM_175539.2,498-516).
gctccttggtgcactactt

SEQ ID NO: 789784 - DNA, 19 bp, Mus musculus
  siRNA target sequence for A130007F10Rik (NM_175539.2,1014-1032).
gggtggattccgacatgtt

SEQ ID NO: 789785 - DNA, 19 bp, Mus musculus
  siRNA target sequence for A130007F10Rik (NM_175539.2,1041-1059).
gcattccctggcacaataa

SEQ ID NO: 789786 - DNA, 19 bp, Mus musculus
  siRNA target sequence for A130007F10Rik (NM_175539.2,1042-1060).
cattccctggcacaataat

SEQ ID NO: 789787 - DNA, 19 bp, Mus musculus
  siRNA target sequence for A130007F10Rik (NM_175539.2,1054-1072).
caataattcaggaattcca

SEQ ID NO: 789788 - DNA, 19 bp, Mus musculus
  siRNA target sequence for A130007F10Rik (NM_175539.2,1108-1126).
cattccaagggcaactact

SEQ ID NO: 789789 - DNA, 19 bp, Mus musculus
  siRNA target sequence for A130007F10Rik (NM_175539.2,1147-1165).
gcgagcccttgcattcagt

SEQ ID NO: 789790 - DNA, 19 bp, Mus musculus
  siRNA target sequence for A130007F10Rik (NM_175539.2,1364-1382).
cagcagaacatcaaacctt

SEQ ID NO: 789791 - DNA, 19 bp, Mus musculus
  siRNA target sequence for A130007F10Rik (NM_175539.2,1409-1427).
gtgcgttctctgagtttct

SEQ ID NO: 789792 - DNA, 19 bp, Mus musculus
  siRNA target sequence for A130007F10Rik (NM_175539.2,1422-1440).
gtttctaccagcacatcat

SEQ ID NO: 789793 - DNA, 19 bp, Mus musculus
  siRNA target sequence for A130007F10Rik (NM_175539.2,1545-1563).
cagggaggaagctcaaact

SEQ ID NO: 789794 - DNA, 19 bp, Mus musculus
  siRNA target sequence for A130007F10Rik (NM_175539.2,1595-1613).
gaactctgggtaaactact

SEQ ID NO: 789795 - DNA, 19 bp, Mus musculus
  siRNA target sequence for 9430086K21Rik (NM_175541.2,71-89).
cagctacagcgtctgaaaa

SEQ ID NO: 789796 - DNA, 19 bp, Mus musculus
  siRNA target sequence for 9430086K21Rik (NM_175541.2,107-125).
ctgattcacctcctcataa

SEQ ID NO: 789797 - DNA, 19 bp, Mus musculus
  siRNA target sequence for 9430086K21Rik (NM_175541.2,109-127).
gattcacctcctcataaaa

SEQ ID NO: 789798 - DNA, 19 bp, Mus musculus
  siRNA target sequence for 9430086K21Rik (NM_175541.2,200-218).
ccatgaccgatgataagtt

SEQ ID NO: 789799 - DNA, 19 bp, Mus musculus
  siRNA target sequence for 9430086K21Rik (NM_175541.2,248-266).
caagtgagatggacacaaa

SEQ ID NO: 789800 - DNA, 19 bp, Mus musculus
  siRNA target sequence for 9430086K21Rik (NM_175541.2,349-367).
gacatctcggcaatcatgt

SEQ ID NO: 789801 - DNA, 19 bp, Mus musculus
  siRNA target sequence for 9430086K21Rik (NM_175541.2,359-377).
caatcatgtctgtgaattt

SEQ ID NO: 789802 - DNA, 19 bp, Mus musculus
  siRNA target sequence for 9430086K21Rik (NM_175541.2,363-381).
catgtctgtgaatttatca

SEQ ID NO: 789803 - DNA, 19 bp, Mus musculus
  siRNA target sequence for 9430086K21Rik (NM_175541.2,420-438).
cgtcccctcatcagaagat

SEQ ID NO: 789804 - DNA, 19 bp, Mus musculus
  siRNA target sequence for 9430086K21Rik (NM_175541.2,539-557).
ctggtgagggcccatcaaa

SEQ ID NO: 789805 - DNA, 19 bp, Mus musculus
  siRNA target sequence for 9430086K21Rik (NM_175541.2,542-560).
gtgagggcccatcaaatca

SEQ ID NO: 789806 - DNA, 19 bp, Mus musculus
  siRNA target sequence for 9430086K21Rik (NM_175541.2,544-562).
gagggcccatcaaatcaga

SEQ ID NO: 789807 - DNA, 19 bp, Mus musculus
  siRNA target sequence for 9430086K21Rik (NM_175541.2,546-564).
gggcccatcaaatcagaat

SEQ ID NO: 789808 - DNA, 19 bp, Mus musculus
  siRNA target sequence for 9430086K21Rik (NM_175541.2,549-567).
cccatcaaatcagaatcta

SEQ ID NO: 789809 - DNA, 19 bp, Mus musculus
  siRNA target sequence for 9430086K21Rik (NM_175541.2,551-569).
catcaaatcagaatctagt

SEQ ID NO: 789810 - DNA, 19 bp, Mus musculus
  siRNA target sequence for 9430086K21Rik (NM_175541.2,568-586).
gtctcctatgccaaccaaa

SEQ ID NO: 789811 - DNA, 19 bp, Mus musculus
  siRNA target sequence for 9430086K21Rik (NM_175541.2,570-588).
ctcctatgccaaccaaaat

SEQ ID NO: 789812 - DNA, 19 bp, Mus musculus
  siRNA target sequence for 9430086K21Rik (NM_175541.2,572-590).
cctatgccaaccaaaatca

SEQ ID NO: 789813 - DNA, 19 bp, Mus musculus
  siRNA target sequence for 9430086K21Rik (NM_175541.2,660-678).
ccttcctacccgtgataca

SEQ ID NO: 789814 - DNA, 19 bp, Mus musculus
  siRNA target sequence for 9430086K21Rik (NM_175541.2,737-755).
gagcttcaggcaagctttt

SEQ ID NO: 789815 - DNA, 19 bp, Mus musculus
  siRNA target sequence for 9430086K21Rik (NM_175541.2,771-789).
cagtgccgctgcgttagaa

SEQ ID NO: 789816 - DNA, 19 bp, Mus musculus
  siRNA target sequence for 9430086K21Rik (NM_175541.2,773-791).
gtgccgctgcgttagaaaa

SEQ ID NO: 789817 - DNA, 19 bp, Mus musculus
  siRNA target sequence for 9430086K21Rik (NM_175541.2,776-794).
ccgctgcgttagaaaatga

SEQ ID NO: 789818 - DNA, 19 bp, Mus musculus
  siRNA target sequence for 9430086K21Rik (NM_175541.2,778-796).
gctgcgttagaaaatgata

SEQ ID NO: 789819 - DNA, 19 bp, Mus musculus
  siRNA target sequence for 9430086K21Rik (NM_175541.2,779-797).
ctgcgttagaaaatgataa

SEQ ID NO: 789820 - DNA, 19 bp, Mus musculus
  siRNA target sequence for 9430086K21Rik (NM_175541.2,841-859).
gagacacgtgcatttgaaa

SEQ ID NO: 789821 - DNA, 19 bp, Mus musculus
  siRNA target sequence for 9430086K21Rik (NM_175541.2,843-861).
gacacgtgcatttgaaact

SEQ ID NO: 789822 - DNA, 19 bp, Mus musculus
  siRNA target sequence for 9430086K21Rik (NM_175541.2,862-880).
ggaatgatagtgtggttta

SEQ ID NO: 789823 - DNA, 19 bp, Mus musculus
  siRNA target sequence for 9430086K21Rik (NM_175541.2,863-881).
gaatgatagtgtggtttaa

SEQ ID NO: 789824 - DNA, 19 bp, Mus musculus
  siRNA target sequence for 9430086K21Rik (NM_175541.2,984-1002).
gaaaggcgttagagtatct

SEQ ID NO: 789825 - DNA, 19 bp, Mus musculus
  siRNA target sequence for 9430086K21Rik (NM_175541.2,988-1006).
ggcgttagagtatctttga

SEQ ID NO: 789826 - DNA, 19 bp, Mus musculus
  siRNA target sequence for 9430086K21Rik (NM_175541.2,1068-1086).
gtaccgggagagtatcgat

SEQ ID NO: 789827 - DNA, 19 bp, Mus musculus
  siRNA target sequence for 9430086K21Rik (NM_175541.2,1091-1109).
gcgtgtcactgatttgtga

SEQ ID NO: 789828 - DNA, 19 bp, Mus musculus
  siRNA target sequence for 9430086K21Rik (NM_175541.2,1106-1124).
gtgactaccgagttagact

SEQ ID NO: 789829 - DNA, 19 bp, Mus musculus
  siRNA target sequence for 9430086K21Rik (NM_175541.2,1142-1160).
ccggctcgttctttgagta

SEQ ID NO: 789830 - DNA, 19 bp, Mus musculus
  siRNA target sequence for 9430086K21Rik (NM_175541.2,1143-1161).
cggctcgttctttgagtat

SEQ ID NO: 789831 - DNA, 19 bp, Mus musculus
  siRNA target sequence for 9430086K21Rik (NM_175541.2,1144-1162).
ggctcgttctttgagtatt

SEQ ID NO: 789832 - DNA, 19 bp, Mus musculus
  siRNA target sequence for 9430086K21Rik (NM_175541.2,1145-1163).
gctcgttctttgagtatta

SEQ ID NO: 789833 - DNA, 19 bp, Mus musculus
  siRNA target sequence for 9430086K21Rik (NM_175541.2,1149-1167).
gttctttgagtattatgct

SEQ ID NO: 789834 - DNA, 19 bp, Mus musculus
  siRNA target sequence for 9430086K21Rik (NM_175541.2,1188-1206).
caggaaaatcatcaaacaa

SEQ ID NO: 789835 - DNA, 19 bp, Mus musculus
  siRNA target sequence for 9430086K21Rik (NM_175541.2,1207-1225).
gataccttcagaaatatat

SEQ ID NO: 789836 - DNA, 19 bp, Mus musculus
  siRNA target sequence for 9430086K21Rik (NM_175541.2,1328-1346).
ctcgggaccgagctaacaa

SEQ ID NO: 789837 - DNA, 19 bp, Mus musculus
  siRNA target sequence for 9430086K21Rik (NM_175541.2,1330-1348).
cgggaccgagctaacaaga

SEQ ID NO: 789838 - DNA, 19 bp, Mus musculus
  siRNA target sequence for 9430086K21Rik (NM_175541.2,1331-1349).
gggaccgagctaacaagaa

SEQ ID NO: 789839 - DNA, 19 bp, Mus musculus
  siRNA target sequence for 9430086K21Rik (NM_175541.2,1344-1362).
caagaacctggtagatttt

SEQ ID NO: 789840 - DNA, 19 bp, Mus musculus
  siRNA target sequence for 9430086K21Rik (NM_175541.2,1357-1375).
gattttattgtcaatgcaa

SEQ ID NO: 789841 - DNA, 19 bp, Mus musculus
  siRNA target sequence for 9430086K21Rik (NM_175541.2,1389-1407).
ccacctcttgggcatttta

SEQ ID NO: 789842 - DNA, 19 bp, Mus musculus
  siRNA target sequence for 9430086K21Rik (NM_175541.2,1431-1449).
gctgaaatcatttctcaat

SEQ ID NO: 789843 - DNA, 19 bp, Mus musculus
  siRNA target sequence for 9430086K21Rik (NM_175541.2,1446-1464).
caatgcaaagagtttcaca

SEQ ID NO: 789844 - DNA, 19 bp, Mus musculus
  siRNA target sequence for 9430086K21Rik (NM_175541.2,1463-1481).
caccctgtattgaaaccta

SEQ ID NO: 789845 - DNA, 19 bp, Mus musculus
  siRNA target sequence for 9430086K21Rik (NM_175541.2,1606-1624).
ctaccagaagcaattattt

SEQ ID NO: 789846 - DNA, 19 bp, Mus musculus
  siRNA target sequence for 9430086K21Rik (NM_175541.2,1615-1633).
gcaattatttgctcaattt

SEQ ID NO: 789847 - DNA, 19 bp, Mus musculus
  siRNA target sequence for 9430086K21Rik (NM_175541.2,1663-1681).
gctgaggcaaagtatctaa

SEQ ID NO: 789848 - DNA, 19 bp, Mus musculus
  siRNA target sequence for 9430086K21Rik (NM_175541.2,1664-1682).
ctgaggcaaagtatctaaa

SEQ ID NO: 789849 - DNA, 19 bp, Mus musculus
  siRNA target sequence for 9430086K21Rik (NM_175541.2,1749-1767).
gaggtcattaccaaacgaa

SEQ ID NO: 789850 - DNA, 19 bp, Mus musculus
  siRNA target sequence for A830039N20Rik (NM_175545.3,974-992).
gacttttccccacttaaca

SEQ ID NO: 789851 - DNA, 19 bp, Mus musculus
  siRNA target sequence for A830039N20Rik (NM_175545.3,1068-1086).
ggtcagcctacaacacatt

SEQ ID NO: 789852 - DNA, 19 bp, Mus musculus
  siRNA target sequence for A830039N20Rik (NM_175545.3,1071-1089).
cagcctacaacacattcat

SEQ ID NO: 789853 - DNA, 19 bp, Mus musculus
  siRNA target sequence for A830039N20Rik (NM_175545.3,1073-1091).
gcctacaacacattcatta

SEQ ID NO: 789854 - DNA, 19 bp, Mus musculus
  siRNA target sequence for A830039N20Rik (NM_175545.3,1074-1092).
cctacaacacattcattaa

SEQ ID NO: 789855 - DNA, 19 bp, Mus musculus
  siRNA target sequence for A830039N20Rik (NM_175545.3,1095-1113).
gaaaagagcgtggtttgtt

SEQ ID NO: 789856 - DNA, 19 bp, Mus musculus
  siRNA target sequence for A830039N20Rik (NM_175545.3,1155-1173).
gctatgatgaattatgtaa

SEQ ID NO: 789857 - DNA, 19 bp, Mus musculus
  siRNA target sequence for A830039N20Rik (NM_175545.3,1239-1257).
ctgtaacaaccagtgataa

SEQ ID NO: 789858 - DNA, 19 bp, Mus musculus
  siRNA target sequence for A830039N20Rik (NM_175545.3,1241-1259).
gtaacaaccagtgataact

SEQ ID NO: 789859 - DNA, 19 bp, Mus musculus
  siRNA target sequence for D230007K08Rik (NM_175547.2,223-241).
gctgagaatcagattggta

SEQ ID NO: 789860 - DNA, 19 bp, Mus musculus
  siRNA target sequence for D230007K08Rik (NM_175547.2,298-316).
ctggacctccggagtaaca

SEQ ID NO: 789861 - DNA, 19 bp, Mus musculus
  siRNA target sequence for D230007K08Rik (NM_175547.2,345-363).
ggccgatgctctgaagata

SEQ ID NO: 789862 - DNA, 19 bp, Mus musculus
  siRNA target sequence for D230007K08Rik (NM_175547.2,346-364).
gccgatgctctgaagataa

SEQ ID NO: 789863 - DNA, 19 bp, Mus musculus
  siRNA target sequence for D230007K08Rik (NM_175547.2,366-384).
ccgaacgctaacttctcta

SEQ ID NO: 789864 - DNA, 19 bp, Mus musculus
  siRNA target sequence for D230007K08Rik (NM_175547.2,367-385).
cgaacgctaacttctctaa

SEQ ID NO: 789865 - DNA, 19 bp, Mus musculus
  siRNA target sequence for D230007K08Rik (NM_175547.2,539-557).
gcctgaaagcactcatgtt

SEQ ID NO: 789866 - DNA, 19 bp, Mus musculus
  siRNA target sequence for D230007K08Rik (NM_175547.2,540-558).
cctgaaagcactcatgttt

SEQ ID NO: 789867 - DNA, 19 bp, Mus musculus
  siRNA target sequence for D230007K08Rik (NM_175547.2,555-573).
gttttccagtaataccatt

SEQ ID NO: 789868 - DNA, 19 bp, Mus musculus
  siRNA target sequence for D230007K08Rik (NM_175547.2,718-736).
ctcaacctgcgagaaaact

SEQ ID NO: 789869 - DNA, 19 bp, Mus musculus
  siRNA target sequence for D230007K08Rik (NM_175547.2,959-977).
ccctgacaaccttagactt

SEQ ID NO: 789870 - DNA, 19 bp, Mus musculus
  siRNA target sequence for D230007K08Rik (NM_175547.2,1122-1140).
cagaaccttggagattctt

SEQ ID NO: 789871 - DNA, 19 bp, Mus musculus
  siRNA target sequence for D230007K08Rik (NM_175547.2,1124-1142).
gaaccttggagattcttga

SEQ ID NO: 789872 - DNA, 19 bp, Mus musculus
  siRNA target sequence for D230007K08Rik (NM_175547.2,1209-1227).
cagtctccgaagactcaat

SEQ ID NO: 789873 - DNA, 19 bp, Mus musculus
  siRNA target sequence for D230007K08Rik (NM_175547.2,1211-1229).
gtctccgaagactcaatct

SEQ ID NO: 789874 - DNA, 19 bp, Mus musculus
  siRNA target sequence for D230007K08Rik (NM_175547.2,1290-1308).
ccacggtctgcaccatatt

SEQ ID NO: 789875 - DNA, 19 bp, Mus musculus
  siRNA target sequence for D230007K08Rik (NM_175547.2,1291-1309).
cacggtctgcaccatatta

SEQ ID NO: 789876 - DNA, 19 bp, Mus musculus
  siRNA target sequence for D230007K08Rik (NM_175547.2,1293-1311).
cggtctgcaccatattaat

SEQ ID NO: 789877 - DNA, 19 bp, Mus musculus
  siRNA target sequence for D230007K08Rik (NM_175547.2,1295-1313).
gtctgcaccatattaatct

SEQ ID NO: 789878 - DNA, 19 bp, Mus musculus
  siRNA target sequence for Lsamp (NM_175548.2,51-69).
cagcccgatcggaaacagt

SEQ ID NO: 789879 - DNA, 19 bp, Mus musculus
  siRNA target sequence for Lsamp (NM_175548.2,118-136).
ccgttcgcagcgtggattt

SEQ ID NO: 789880 - DNA, 19 bp, Mus musculus
  siRNA target sequence for Lsamp (NM_175548.2,119-137).
cgttcgcagcgtggatttt

SEQ ID NO: 789881 - DNA, 19 bp, Mus musculus
  siRNA target sequence for Lsamp (NM_175548.2,120-138).
gttcgcagcgtggatttta

SEQ ID NO: 789882 - DNA, 19 bp, Mus musculus
  siRNA target sequence for Lsamp (NM_175548.2,300-318).
cgccatgctctggaataca

SEQ ID NO: 789883 - DNA, 19 bp, Mus musculus
  siRNA target sequence for Lsamp (NM_175548.2,329-347).
ccagaaggtggatgtctat

SEQ ID NO: 789884 - DNA, 19 bp, Mus musculus
  siRNA target sequence for Lsamp (NM_175548.2,348-366).
gatgaaggatcctacacat

SEQ ID NO: 789885 - DNA, 19 bp, Mus musculus
  siRNA target sequence for Lsamp (NM_175548.2,420-438).
caagttccaccaaagatct

SEQ ID NO: 789886 - DNA, 19 bp, Mus musculus
  siRNA target sequence for Lsamp (NM_175548.2,464-482).
gaatgagggcagcaatgta

SEQ ID NO: 789887 - DNA, 19 bp, Mus musculus
  siRNA target sequence for Lsamp (NM_175548.2,541-559).
caccactaggaagagaatt

SEQ ID NO: 789888 - DNA, 19 bp, Mus musculus
  siRNA target sequence for Lsamp (NM_175548.2,606-624).
cagtcaggcaaatatgagt

SEQ ID NO: 789889 - DNA, 19 bp, Mus musculus
  siRNA target sequence for Lsamp (NM_175548.2,644-662).
ctcctcggcggatgtcaaa

SEQ ID NO: 789890 - DNA, 19 bp, Mus musculus
  siRNA target sequence for Lsamp (NM_175548.2,646-664).
cctcggcggatgtcaaaca

SEQ ID NO: 789891 - DNA, 19 bp, Mus musculus
  siRNA target sequence for Lsamp (NM_175548.2,647-665).
ctcggcggatgtcaaacaa

SEQ ID NO: 789892 - DNA, 19 bp, Mus musculus
  siRNA target sequence for Lsamp (NM_175548.2,649-667).
cggcggatgtcaaacaagt

SEQ ID NO: 789893 - DNA, 19 bp, Mus musculus
  siRNA target sequence for Lsamp (NM_175548.2,652-670).
cggatgtcaaacaagtcaa

SEQ ID NO: 789894 - DNA, 19 bp, Mus musculus
  siRNA target sequence for Lsamp (NM_175548.2,764-782).
ggtgcctgcacctgacttt

SEQ ID NO: 789895 - DNA, 19 bp, Mus musculus
  siRNA target sequence for Lsamp (NM_175548.2,792-810).
cgggatgacaccaggataa

SEQ ID NO: 789896 - DNA, 19 bp, Mus musculus
  siRNA target sequence for Lsamp (NM_175548.2,816-834).
gcaaatggccttgagatta

SEQ ID NO: 789897 - DNA, 19 bp, Mus musculus
  siRNA target sequence for Lsamp (NM_175548.2,817-835).
caaatggccttgagattaa

SEQ ID NO: 789898 - DNA, 19 bp, Mus musculus
  siRNA target sequence for Lsamp (NM_175548.2,882-900).
gaacactatggcaactata

SEQ ID NO: 789899 - DNA, 19 bp, Mus musculus
  siRNA target sequence for Lsamp (NM_175548.2,938-956).
cagcctagtccttttcagt

SEQ ID NO: 789900 - DNA, 19 bp, Mus musculus
  siRNA target sequence for Lsamp (NM_175548.2,982-1000).
ccatgcaagtcatagagtt

SEQ ID NO: 789901 - DNA, 19 bp, Mus musculus
  siRNA target sequence for Lsamp (NM_175548.2,996-1014).
gagttcctgcatattgact

SEQ ID NO: 789902 - DNA, 19 bp, Mus musculus
  siRNA target sequence for Lsamp (NM_175548.2,1001-1019).
cctgcatattgacttgaaa

SEQ ID NO: 789903 - DNA, 19 bp, Mus musculus
  siRNA target sequence for Lsamp (NM_175548.2,1002-1020).
ctgcatattgacttgaaat

SEQ ID NO: 789904 - DNA, 19 bp, Mus musculus
  siRNA target sequence for Lsamp (NM_175548.2,1004-1022).
gcatattgacttgaaatct

SEQ ID NO: 789905 - DNA, 19 bp, Mus musculus
  siRNA target sequence for Lsamp (NM_175548.2,1021-1039).
ctatccgccatcccttaaa

SEQ ID NO: 789906 - DNA, 19 bp, Mus musculus
  siRNA target sequence for Lsamp (NM_175548.2,1025-1043).
ccgccatcccttaaaggta

SEQ ID NO: 789907 - DNA, 19 bp, Mus musculus
  siRNA target sequence for Lsamp (NM_175548.2,1026-1044).
cgccatcccttaaaggtaa

SEQ ID NO: 789908 - DNA, 19 bp, Mus musculus
  siRNA target sequence for Lsamp (NM_175548.2,1027-1045).
gccatcccttaaaggtaaa

SEQ ID NO: 789909 - DNA, 19 bp, Mus musculus
  siRNA target sequence for Lsamp (NM_175548.2,1041-1059).
gtaaaccctatacaaaaat

SEQ ID NO: 789910 - DNA, 19 bp, Mus musculus
  siRNA target sequence for Robo2 (NM_175549.2,548-566).
ctattattgctctttggat

SEQ ID NO: 789911 - DNA, 19 bp, Mus musculus
  siRNA target sequence for Robo2 (NM_175549.2,563-581).
ggatttctctgcattcaga

SEQ ID NO: 789912 - DNA, 19 bp, Mus musculus
  siRNA target sequence for Robo2 (NM_175549.2,702-720).
cccccaccattgaatggta

SEQ ID NO: 789913 - DNA, 19 bp, Mus musculus
  siRNA target sequence for Robo2 (NM_175549.2,782-800).
cccagcggatctttattct

SEQ ID NO: 789914 - DNA, 19 bp, Mus musculus
  siRNA target sequence for Robo2 (NM_175549.2,783-801).
ccagcggatctttattctt

SEQ ID NO: 789915 - DNA, 19 bp, Mus musculus
  siRNA target sequence for Robo2 (NM_175549.2,784-802).
cagcggatctttattcttt

SEQ ID NO: 789916 - DNA, 19 bp, Mus musculus
  siRNA target sequence for Robo2 (NM_175549.2,786-804).
gcggatctttattcttttt

SEQ ID NO: 789917 - DNA, 19 bp, Mus musculus
  siRNA target sequence for Robo2 (NM_175549.2,799-817).
ctttttgcgaattgttcat

SEQ ID NO: 789918 - DNA, 19 bp, Mus musculus
  siRNA target sequence for Robo2 (NM_175549.2,835-853).
ggacgaagggagttacgtt

SEQ ID NO: 789919 - DNA, 19 bp, Mus musculus
  siRNA target sequence for Robo2 (NM_175549.2,836-854).
gacgaagggagttacgttt

SEQ ID NO: 789920 - DNA, 19 bp, Mus musculus
  siRNA target sequence for Robo2 (NM_175549.2,881-899).
gcagtgagtcgaaatgcat

SEQ ID NO: 789921 - DNA, 19 bp, Mus musculus
  siRNA target sequence for Robo2 (NM_175549.2,912-930).
cattattgcgagatgactt

SEQ ID NO: 789922 - DNA, 19 bp, Mus musculus
  siRNA target sequence for Robo2 (NM_175549.2,1033-1051).
ggacaaagtccgaattgat

SEQ ID NO: 789923 - DNA, 19 bp, Mus musculus
  siRNA target sequence for Robo2 (NM_175549.2,1079-1097).
ggtgggaagctgatgatct

SEQ ID NO: 789924 - DNA, 19 bp, Mus musculus
  siRNA target sequence for Robo2 (NM_175549.2,1084-1102).
gaagctgatgatctctaat

SEQ ID NO: 789925 - DNA, 19 bp, Mus musculus
  siRNA target sequence for Robo2 (NM_175549.2,1129-1147).
cacctgtgtgggaaccaat

SEQ ID NO: 789926 - DNA, 19 bp, Mus musculus
  siRNA target sequence for Robo2 (NM_175549.2,1131-1149).
cctgtgtgggaaccaatat

SEQ ID NO: 789927 - DNA, 19 bp, Mus musculus
  siRNA target sequence for Robo2 (NM_175549.2,1134-1152).
gtgtgggaaccaatatggt

SEQ ID NO: 789928 - DNA, 19 bp, Mus musculus
  siRNA target sequence for 6720461J16Rik (NM_175551.2,72-90).
ctgtgtccgatgcattgat

SEQ ID NO: 789929 - DNA, 19 bp, Mus musculus
  siRNA target sequence for 6720461J16Rik (NM_175551.2,74-92).
gtgtccgatgcattgatgt

SEQ ID NO: 789930 - DNA, 19 bp, Mus musculus
  siRNA target sequence for 6720461J16Rik (NM_175551.2,187-205).
caacctagactcaagacaa

SEQ ID NO: 789931 - DNA, 19 bp, Mus musculus
  siRNA target sequence for 6720461J16Rik (NM_175551.2,191-209).
ctagactcaagacaaagta

SEQ ID NO: 789932 - DNA, 19 bp, Mus musculus
  siRNA target sequence for 6720461J16Rik (NM_175551.2,228-246).
ggcggctcgctgcagaaaa

SEQ ID NO: 789933 - DNA, 19 bp, Mus musculus
  siRNA target sequence for 6720461J16Rik (NM_175551.2,232-250).
gctcgctgcagaaaacaca

SEQ ID NO: 789934 - DNA, 19 bp, Mus musculus
  siRNA target sequence for 6720461J16Rik (NM_175551.2,426-444).
ctgaacatgacatccaaaa

SEQ ID NO: 789935 - DNA, 19 bp, Mus musculus
  siRNA target sequence for 6720461J16Rik (NM_175551.2,428-446).
gaacatgacatccaaaaat

SEQ ID NO: 789936 - DNA, 19 bp, Mus musculus
  siRNA target sequence for 6720461J16Rik (NM_175551.2,456-474).
ctggtaaccctgtctcatt

SEQ ID NO: 789937 - DNA, 19 bp, Mus musculus
  siRNA target sequence for 6720461J16Rik (NM_175551.2,582-600).
gcttccctttgcaacctaa

SEQ ID NO: 789938 - DNA, 19 bp, Mus musculus
  siRNA target sequence for 6720461J16Rik (NM_175551.2,592-610).
gcaacctaaggcccaaaat

SEQ ID NO: 789939 - DNA, 19 bp, Mus musculus
  siRNA target sequence for 6720461J16Rik (NM_175551.2,593-611).
caacctaaggcccaaaatt

SEQ ID NO: 789940 - DNA, 19 bp, Mus musculus
  siRNA target sequence for 6720461J16Rik (NM_175551.2,596-614).
cctaaggcccaaaatttta

SEQ ID NO: 789941 - DNA, 19 bp, Mus musculus
  siRNA target sequence for 6720461J16Rik (NM_175551.2,601-619).
ggcccaaaattttagttct

SEQ ID NO: 789942 - DNA, 19 bp, Mus musculus
  siRNA target sequence for 6720461J16Rik (NM_175551.2,776-794).
ggtgagagtactacttcat

SEQ ID NO: 789943 - DNA, 19 bp, Mus musculus
  siRNA target sequence for 6720461J16Rik (NM_175551.2,938-956).
gagaaccttgttcctaata

SEQ ID NO: 789944 - DNA, 19 bp, Mus musculus
  siRNA target sequence for 6720461J16Rik (NM_175551.2,940-958).
gaaccttgttcctaatagt

SEQ ID NO: 789945 - DNA, 19 bp, Mus musculus
  siRNA target sequence for 6720461J16Rik (NM_175551.2,943-961).
ccttgttcctaatagtgat

SEQ ID NO: 789946 - DNA, 19 bp, Mus musculus
  siRNA target sequence for 6720461J16Rik (NM_175551.2,1062-1080).
ggggactctcaccttctta

SEQ ID NO: 789947 - DNA, 19 bp, Mus musculus
  siRNA target sequence for 6720461J16Rik (NM_175551.2,1063-1081).
gggactctcaccttcttat

SEQ ID NO: 789948 - DNA, 19 bp, Mus musculus
  siRNA target sequence for 6720461J16Rik (NM_175551.2,1101-1119).
gagcaccagcccaatttga

SEQ ID NO: 789949 - DNA, 19 bp, Mus musculus
  siRNA target sequence for 6720461J16Rik (NM_175551.2,1263-1281).
gacggccactgctaactca

SEQ ID NO: 789950 - DNA, 19 bp, Mus musculus
  siRNA target sequence for 6720461J16Rik (NM_175551.2,1265-1283).
cggccactgctaactcaaa

SEQ ID NO: 789951 - DNA, 19 bp, Mus musculus
  siRNA target sequence for 6720461J16Rik (NM_175551.2,1266-1284).
ggccactgctaactcaaat

SEQ ID NO: 789952 - DNA, 19 bp, Mus musculus
  siRNA target sequence for 6720461J16Rik (NM_175551.2,1268-1286).
ccactgctaactcaaatga

SEQ ID NO: 789953 - DNA, 19 bp, Mus musculus
  siRNA target sequence for 6720461J16Rik (NM_175551.2,1338-1356).
cacctcctggtcatttcgt

SEQ ID NO: 789954 - DNA, 19 bp, Mus musculus
  siRNA target sequence for 6720461J16Rik (NM_175551.2,1371-1389).
cccatcctagtcagtttga

SEQ ID NO: 789955 - DNA, 19 bp, Mus musculus
  siRNA target sequence for 6720461J16Rik (NM_175551.2,1372-1390).
ccatcctagtcagtttgaa

SEQ ID NO: 789956 - DNA, 19 bp, Mus musculus
  siRNA target sequence for 6720461J16Rik (NM_175551.2,1373-1391).
catcctagtcagtttgaaa

SEQ ID NO: 789957 - DNA, 19 bp, Mus musculus
  siRNA target sequence for 6720461J16Rik (NM_175551.2,1501-1519).
gaactcgccaccaaggttt

SEQ ID NO: 789958 - DNA, 19 bp, Mus musculus
  siRNA target sequence for 6720461J16Rik (NM_175551.2,1615-1633).
ctttcaaggcccatcttca

SEQ ID NO: 789959 - DNA, 19 bp, Mus musculus
  siRNA target sequence for 6720461J16Rik (NM_175551.2,2017-2035).
gcatcgggagtgggataaa

SEQ ID NO: 789960 - DNA, 19 bp, Mus musculus
  siRNA target sequence for Wdr3 (NM_175552.3,81-99).
ggggcttactaaacagtat

SEQ ID NO: 789961 - DNA, 19 bp, Mus musculus
  siRNA target sequence for Wdr3 (NM_175552.3,129-147).
cttgattggcagccaaaaa

SEQ ID NO: 789962 - DNA, 19 bp, Mus musculus
  siRNA target sequence for Wdr3 (NM_175552.3,140-158).
gccaaaaaggtaacattgt

SEQ ID NO: 789963 - DNA, 19 bp, Mus musculus
  siRNA target sequence for Wdr3 (NM_175552.3,141-159).
ccaaaaaggtaacattgtt

SEQ ID NO: 789964 - DNA, 19 bp, Mus musculus
  siRNA target sequence for Wdr3 (NM_175552.3,203-221).
ccgcctgtgaacacgtttt

SEQ ID NO: 789965 - DNA, 19 bp, Mus musculus
  siRNA target sequence for Wdr3 (NM_175552.3,204-222).
cgcctgtgaacacgttttt

SEQ ID NO: 789966 - DNA, 19 bp, Mus musculus
  siRNA target sequence for Wdr3 (NM_175552.3,205-223).
gcctgtgaacacgttttta

SEQ ID NO: 789967 - DNA, 19 bp, Mus musculus
  siRNA target sequence for Wdr3 (NM_175552.3,217-235).
gtttttatctgggacttaa

SEQ ID NO: 789968 - DNA, 19 bp, Mus musculus
  siRNA target sequence for Wdr3 (NM_175552.3,242-260).
gcgagaagatccttatcct

SEQ ID NO: 789969 - DNA, 19 bp, Mus musculus
  siRNA target sequence for Wdr3 (NM_175552.3,243-261).
cgagaagatccttatcctt

SEQ ID NO: 789970 - DNA, 19 bp, Mus musculus
  siRNA target sequence for Wdr3 (NM_175552.3,337-355).
ggagccatccgaatcttca

SEQ ID NO: 789971 - DNA, 19 bp, Mus musculus
  siRNA target sequence for Wdr3 (NM_175552.3,368-386).
gtgaaggaaacataacctt

SEQ ID NO: 789972 - DNA, 19 bp, Mus musculus
  siRNA target sequence for Wdr3 (NM_175552.3,497-515).
gtggcctctaccgtctaaa

SEQ ID NO: 789973 - DNA, 19 bp, Mus musculus
  siRNA target sequence for Wdr3 (NM_175552.3,546-564).
gtttctccgagaaaggaat

SEQ ID NO: 789974 - DNA, 19 bp, Mus musculus
  siRNA target sequence for Wdr3 (NM_175552.3,580-598).
gggaaagacactatggtaa

SEQ ID NO: 789975 - DNA, 19 bp, Mus musculus
  siRNA target sequence for Wdr3 (NM_175552.3,581-599).
ggaaagacactatggtaaa

SEQ ID NO: 789976 - DNA, 19 bp, Mus musculus
  siRNA target sequence for Wdr3 (NM_175552.3,602-620).
ggtgggacctggataacca

SEQ ID NO: 789977 - DNA, 19 bp, Mus musculus
  siRNA target sequence for Wdr3 (NM_175552.3,728-746).
cctgggacatcgactatct

SEQ ID NO: 789978 - DNA, 19 bp, Mus musculus
  siRNA target sequence for Wdr3 (NM_175552.3,738-756).
cgactatctgcaagagatt

SEQ ID NO: 789979 - DNA, 19 bp, Mus musculus
  siRNA target sequence for Wdr3 (NM_175552.3,843-861).
ggcggatgatgaaaaatct

SEQ ID NO: 789980 - DNA, 19 bp, Mus musculus
  siRNA target sequence for Wdr3 (NM_175552.3,868-886).
cgcatactttcgtgtagta

SEQ ID NO: 789981 - DNA, 19 bp, Mus musculus
  siRNA target sequence for Wdr3 (NM_175552.3,884-902).
gtaaagctggctccataat

SEQ ID NO: 789982 - DNA, 19 bp, Mus musculus
  siRNA target sequence for Wdr3 (NM_175552.3,961-979).
gcttgccacggaactgatt

SEQ ID NO: 789983 - DNA, 19 bp, Mus musculus
  siRNA target sequence for Wdr3 (NM_175552.3,965-983).
gccacggaactgattctgt

SEQ ID NO: 789984 - DNA, 19 bp, Mus musculus
  siRNA target sequence for Wdr3 (NM_175552.3,969-987).
cggaactgattctgtgtta

SEQ ID NO: 789985 - DNA, 19 bp, Mus musculus
  siRNA target sequence for Wdr3 (NM_175552.3,976-994).
gattctgtgttagaagtat

SEQ ID NO: 789986 - DNA, 19 bp, Mus musculus
  siRNA target sequence for Wdr3 (NM_175552.3,1160-1178).
ctgccaagatcaaatcttt

SEQ ID NO: 789987 - DNA, 19 bp, Mus musculus
  siRNA target sequence for Wdr3 (NM_175552.3,1163-1181).
ccaagatcaaatcttttga

SEQ ID NO: 789988 - DNA, 19 bp, Mus musculus
  siRNA target sequence for Wdr3 (NM_175552.3,1191-1209).
ctcgcctcaaggagagtta

SEQ ID NO: 789989 - DNA, 19 bp, Mus musculus
  siRNA target sequence for Wdr3 (NM_175552.3,1233-1251).
caatctggtggagttgtat

SEQ ID NO: 789990 - DNA, 19 bp, Mus musculus
  siRNA target sequence for Wdr3 (NM_175552.3,1340-1358).
ccttcagctcggataatat

SEQ ID NO: 789991 - DNA, 19 bp, Mus musculus
  siRNA target sequence for Wdr3 (NM_175552.3,1344-1362).
cagctcggataatatagct

SEQ ID NO: 789992 - DNA, 19 bp, Mus musculus
  siRNA target sequence for Wdr3 (NM_175552.3,1372-1390).
gcagcagccgattccatta

SEQ ID NO: 789993 - DNA, 19 bp, Mus musculus
  siRNA target sequence for Wdr3 (NM_175552.3,1373-1391).
cagcagccgattccattaa

SEQ ID NO: 789994 - DNA, 19 bp, Mus musculus
  siRNA target sequence for Wdr3 (NM_175552.3,1378-1396).
gccgattccattaagatct

SEQ ID NO: 789995 - DNA, 19 bp, Mus musculus
  siRNA target sequence for Wdr3 (NM_175552.3,1403-1421).
ggtctaccctgcagtgtat

SEQ ID NO: 789996 - DNA, 19 bp, Mus musculus
  siRNA target sequence for Wdr3 (NM_175552.3,1423-1441).
cgcaccatgccttgtgaat

SEQ ID NO: 789997 - DNA, 19 bp, Mus musculus
  siRNA target sequence for Wdr3 (NM_175552.3,1428-1446).
catgccttgtgaatatgct

SEQ ID NO: 789998 - DNA, 19 bp, Mus musculus
  siRNA target sequence for Wdr3 (NM_175552.3,1594-1612).
gatcagcgtggctttgtga

SEQ ID NO: 789999 - DNA, 19 bp, Mus musculus
  siRNA target sequence for Wdr3 (NM_175552.3,1611-1629).
gacaggtggcgctgacaaa

SEQ ID NO: 790000 - DNA, 19 bp, Mus musculus
  siRNA target sequence for Wdr3 (NM_175552.3,1742-1760).
gctactctcccaatcaaaa

SEQ ID NO: 790001 - DNA, 19 bp, Mus musculus
  siRNA target sequence for Wdr3 (NM_175552.3,1787-1805).
gcactgtgaaggttttcta

SEQ ID NO: 790002 - DNA, 19 bp, Mus musculus
  siRNA target sequence for Wdr3 (NM_175552.3,1788-1806).
cactgtgaaggttttctat

SEQ ID NO: 790003 - DNA, 19 bp, Mus musculus
  siRNA target sequence for Wdr3 (NM_175552.3,1841-1859).
gacacaaactgcctgtttt

SEQ ID NO: 790004 - DNA, 19 bp, Mus musculus
  siRNA target sequence for Wdr3 (NM_175552.3,1843-1861).
cacaaactgcctgttttat

SEQ ID NO: 790005 - DNA, 19 bp, Mus musculus
  siRNA target sequence for Wdr3 (NM_175552.3,1879-1897).
gatggagcactaatagcaa

SEQ ID NO: 790006 - DNA, 19 bp, Mus musculus
  siRNA target sequence for Wdr3 (NM_175552.3,1898-1916).
ctggttctgctgatagaaa

SEQ ID NO: 790007 - DNA, 19 bp, Mus musculus
  siRNA target sequence for Wdr3 (NM_175552.3,1906-1924).
gctgatagaaatgtgaaaa

SEQ ID NO: 790008 - DNA, 19 bp, Mus musculus
  siRNA target sequence for Wdr3 (NM_175552.3,2091-2109).
gggacaccaccaggaaata

SEQ ID NO: 790009 - DNA, 19 bp, Mus musculus
  siRNA target sequence for Wdr3 (NM_175552.3,2092-2110).
ggacaccaccaggaaatat

SEQ ID NO: 790010 - DNA, 19 bp, Mus musculus
  siRNA target sequence for Wdr3 (NM_175552.3,2142-2160).
cgttgtatcagcatctcat

SEQ ID NO: 790011 - DNA, 19 bp, Mus musculus
  siRNA target sequence for Wdr3 (NM_175552.3,2186-2204).
gaacgagagagcctcttat

SEQ ID NO: 790012 - DNA, 19 bp, Mus musculus
  siRNA target sequence for Wdr3 (NM_175552.3,2289-2307).
gacccaaggtgacaactat

SEQ ID NO: 790013 - DNA, 19 bp, Mus musculus
  siRNA target sequence for Wdr3 (NM_175552.3,2322-2340).
gacaattgaaacagtcaaa

SEQ ID NO: 790014 - DNA, 19 bp, Mus musculus
  siRNA target sequence for Wdr3 (NM_175552.3,2463-2481).
gatggctcatggcaatatt

SEQ ID NO: 790015 - DNA, 19 bp, Mus musculus
  siRNA target sequence for Wdr3 (NM_175552.3,2483-2501).
ctccttcagcgtatgtgtt

SEQ ID NO: 790016 - DNA, 19 bp, Mus musculus
  siRNA target sequence for Wdr3 (NM_175552.3,2486-2504).
cttcagcgtatgtgttaga

SEQ ID NO: 790017 - DNA, 19 bp, Mus musculus
  siRNA target sequence for Wdr3 (NM_175552.3,2492-2510).
cgtatgtgttagagacttt

SEQ ID NO: 790018 - DNA, 19 bp, Mus musculus
  siRNA target sequence for Wdr3 (NM_175552.3,2577-2595).
cgttcttacactgttcaat

SEQ ID NO: 790019 - DNA, 19 bp, Mus musculus
  siRNA target sequence for Wdr3 (NM_175552.3,2581-2599).
cttacactgttcaatgaat

SEQ ID NO: 790020 - DNA, 19 bp, Mus musculus
  siRNA target sequence for Wdr3 (NM_175552.3,2633-2651).
gccggtgcctcttttttct

SEQ ID NO: 790021 - DNA, 19 bp, Mus musculus
  siRNA target sequence for Wdr3 (NM_175552.3,2697-2715).
gcccgtgatagagaaacta

SEQ ID NO: 790022 - DNA, 19 bp, Mus musculus
  siRNA target sequence for Wdr3 (NM_175552.3,2698-2716).
cccgtgatagagaaactaa

SEQ ID NO: 790023 - DNA, 19 bp, Mus musculus
  siRNA target sequence for Wdr3 (NM_175552.3,2774-2792).
ctggtctcgattatctcaa

SEQ ID NO: 790024 - DNA, 19 bp, Mus musculus
  siRNA target sequence for E030026I10Rik (NM_175553.2,2877-2895).
gagactggactcgagttaa

SEQ ID NO: 790025 - DNA, 19 bp, Mus musculus
  siRNA target sequence for E030026I10Rik (NM_175553.2,2879-2897).
gactggactcgagttaaaa

SEQ ID NO: 790026 - DNA, 19 bp, Mus musculus
  siRNA target sequence for E030026I10Rik (NM_175553.2,2881-2899).
ctggactcgagttaaaact

SEQ ID NO: 790027 - DNA, 19 bp, Mus musculus
  siRNA target sequence for E030026I10Rik (NM_175553.2,2905-2923).
ggctcttaagttatgtatt

SEQ ID NO: 790028 - DNA, 19 bp, Mus musculus
  siRNA target sequence for E030026I10Rik (NM_175553.2,2981-2999).
gcataggacgctaatcctt

SEQ ID NO: 790029 - DNA, 19 bp, Mus musculus
  siRNA target sequence for E030026I10Rik (NM_175553.2,2982-3000).
cataggacgctaatcctta

SEQ ID NO: 790030 - DNA, 19 bp, Mus musculus
  siRNA target sequence for E030026I10Rik (NM_175553.2,2986-3004).
ggacgctaatccttaaaaa

SEQ ID NO: 790031 - DNA, 19 bp, Mus musculus
  siRNA target sequence for E030026I10Rik (NM_175553.2,2987-3005).
gacgctaatccttaaaaaa

SEQ ID NO: 790032 - DNA, 19 bp, Mus musculus
  siRNA target sequence for E030026I10Rik (NM_175553.2,3008-3026).
gtgtaaatggagaaaagtt

SEQ ID NO: 790033 - DNA, 19 bp, Mus musculus
  siRNA target sequence for E030026I10Rik (NM_175553.2,3058-3076).
gtattggaagagttggttt

SEQ ID NO: 790034 - DNA, 19 bp, Mus musculus
  siRNA target sequence for E030026I10Rik (NM_175553.2,3073-3091).
gttttcagagcatttcaga

SEQ ID NO: 790035 - DNA, 19 bp, Mus musculus
  siRNA target sequence for E130314M08Rik (NM_175554.3,120-138).
ctggaagtcaacgatctaa

SEQ ID NO: 790036 - DNA, 19 bp, Mus musculus
  siRNA target sequence for E130314M08Rik (NM_175554.3,122-140).
ggaagtcaacgatctaaaa

SEQ ID NO: 790037 - DNA, 19 bp, Mus musculus
  siRNA target sequence for E130314M08Rik (NM_175554.3,128-146).
caacgatctaaaacttctt

SEQ ID NO: 790038 - DNA, 19 bp, Mus musculus
  siRNA target sequence for E130314M08Rik (NM_175554.3,209-227).
cttgagtgaaagagattct

SEQ ID NO: 790039 - DNA, 19 bp, Mus musculus
  siRNA target sequence for E130314M08Rik (NM_175554.3,529-547).
gaaagctctccaaaacact

SEQ ID NO: 790040 - DNA, 19 bp, Mus musculus
  siRNA target sequence for E130314M08Rik (NM_175554.3,692-710).
ctgtctccttgaagatagt

SEQ ID NO: 790041 - DNA, 19 bp, Mus musculus
  siRNA target sequence for E130314M08Rik (NM_175554.3,759-777).
gatgaagagtcgttagagt

SEQ ID NO: 790042 - DNA, 19 bp, Mus musculus
  siRNA target sequence for E130314M08Rik (NM_175554.3,765-783).
gagtcgttagagtcaataa

SEQ ID NO: 790043 - DNA, 19 bp, Mus musculus
  siRNA target sequence for E130314M08Rik (NM_175554.3,834-852).
ctggagagtgaggcttttt

SEQ ID NO: 790044 - DNA, 19 bp, Mus musculus
  siRNA target sequence for E130314M08Rik (NM_175554.3,863-881).
cggaaatgagttatccaaa

SEQ ID NO: 790045 - DNA, 19 bp, Mus musculus
  siRNA target sequence for E130314M08Rik (NM_175554.3,956-974).
gcgtctggtccgagaatct

SEQ ID NO: 790046 - DNA, 19 bp, Mus musculus
  siRNA target sequence for E130314M08Rik (NM_175554.3,965-983).
ccgagaatctgcacttaat

SEQ ID NO: 790047 - DNA, 19 bp, Mus musculus
  siRNA target sequence for E130314M08Rik (NM_175554.3,978-996).
cttaatcttccatatcata

SEQ ID NO: 790048 - DNA, 19 bp, Mus musculus
  siRNA target sequence for E130314M08Rik (NM_175554.3,1017-1035).
cacgatttcttcaaacgta

SEQ ID NO: 790049 - DNA, 19 bp, Mus musculus
  siRNA target sequence for E130314M08Rik (NM_175554.3,1068-1086).
gccctgctgaagtcatgta

SEQ ID NO: 790050 - DNA, 19 bp, Mus musculus
  siRNA target sequence for E130314M08Rik (NM_175554.3,1071-1089).
ctgctgaagtcatgtaagt

SEQ ID NO: 790051 - DNA, 19 bp, Mus musculus
  siRNA target sequence for E130314M08Rik (NM_175554.3,1188-1206).
ggaattgcagcggaaacta

SEQ ID NO: 790052 - DNA, 19 bp, Mus musculus
  siRNA target sequence for E130314M08Rik (NM_175554.3,1189-1207).
gaattgcagcggaaactaa

SEQ ID NO: 790053 - DNA, 19 bp, Mus musculus
  siRNA target sequence for E130314M08Rik (NM_175554.3,1195-1213).
cagcggaaactaatgttct

SEQ ID NO: 790054 - DNA, 19 bp, Mus musculus
  siRNA target sequence for E130314M08Rik (NM_175554.3,1238-1256).
gatcactgctggatcagat

SEQ ID NO: 790055 - DNA, 19 bp, Mus musculus
  siRNA target sequence for E130314M08Rik (NM_175554.3,1282-1300).
gacgaggagagctggaaat

SEQ ID NO: 790056 - DNA, 19 bp, Mus musculus
  siRNA target sequence for E130314M08Rik (NM_175554.3,1379-1397).
ccccaggatcgaagacaat

SEQ ID NO: 790057 - DNA, 19 bp, Mus musculus
  siRNA target sequence for E130314M08Rik (NM_175554.3,1414-1432).
gagacctcaccgaatctga

SEQ ID NO: 790058 - DNA, 19 bp, Mus musculus
  siRNA target sequence for E130314M08Rik (NM_175554.3,1585-1603).
ccgtggaccgacttagaca

SEQ ID NO: 790059 - DNA, 19 bp, Mus musculus
  siRNA target sequence for E130314M08Rik (NM_175554.3,1639-1657).
gcgctgatgaagattcctt

SEQ ID NO: 790060 - DNA, 19 bp, Mus musculus
  siRNA target sequence for E130314M08Rik (NM_175554.3,1640-1658).
cgctgatgaagattccttt

SEQ ID NO: 790061 - DNA, 19 bp, Mus musculus
  siRNA target sequence for E130314M08Rik (NM_175554.3,1661-1679).
gatacttgatgaacctaaa

SEQ ID NO: 790062 - DNA, 19 bp, Mus musculus
  siRNA target sequence for E130314M08Rik (NM_175554.3,1674-1692).
cctaaaaccaacagagaat

SEQ ID NO: 790063 - DNA, 19 bp, Mus musculus
  siRNA target sequence for E130314M08Rik (NM_175554.3,1675-1693).
ctaaaaccaacagagaatt

SEQ ID NO: 790064 - DNA, 19 bp, Mus musculus
  siRNA target sequence for E130314M08Rik (NM_175554.3,1871-1889).
cgcaaagccaggtgaaaaa

SEQ ID NO: 790065 - DNA, 19 bp, Mus musculus
  siRNA target sequence for E130314M08Rik (NM_175554.3,1949-1967).
gcagaagcgccaagcatta

SEQ ID NO: 790066 - DNA, 19 bp, Mus musculus
  siRNA target sequence for E130314M08Rik (NM_175554.3,1952-1970).
gaagcgccaagcattattt

SEQ ID NO: 790067 - DNA, 19 bp, Mus musculus
  siRNA target sequence for E130314M08Rik (NM_175554.3,1955-1973).
gcgccaagcattatttaaa

SEQ ID NO: 790068 - DNA, 19 bp, Mus musculus
  siRNA target sequence for E130314M08Rik (NM_175554.3,1956-1974).
cgccaagcattatttaaat

SEQ ID NO: 790069 - DNA, 19 bp, Mus musculus
  siRNA target sequence for E130314M08Rik (NM_175554.3,2191-2209).
ccaccttacttctgtttaa

SEQ ID NO: 790070 - DNA, 19 bp, Mus musculus
  siRNA target sequence for E130314M08Rik (NM_175554.3,2218-2236).
cttctaagatgggttactt

SEQ ID NO: 790071 - DNA, 19 bp, Mus musculus
  siRNA target sequence for E130314M08Rik (NM_175554.3,2354-2372).
gctgattggttccacaatt

SEQ ID NO: 790072 - DNA, 19 bp, Mus musculus
  siRNA target sequence for E130314M08Rik (NM_175554.3,2357-2375).
gattggttccacaattcca

SEQ ID NO: 790073 - DNA, 19 bp, Mus musculus
  siRNA target sequence for E130314M08Rik (NM_175554.3,2404-2422).
gccgtggggcaagttttct

SEQ ID NO: 790074 - DNA, 19 bp, Mus musculus
  siRNA target sequence for E130314M08Rik (NM_175554.3,2424-2442).
cctacagcaggattcagat

SEQ ID NO: 790075 - DNA, 19 bp, Mus musculus
  siRNA target sequence for E130314M08Rik (NM_175554.3,2477-2495).
cagctcggcttctaagagt

SEQ ID NO: 790076 - DNA, 19 bp, Mus musculus
  siRNA target sequence for E130314M08Rik (NM_175554.3,2488-2506).
ctaagagttcaggaaaact

SEQ ID NO: 790077 - DNA, 19 bp, Mus musculus
  siRNA target sequence for E130314M08Rik (NM_175554.3,2564-2582).
gcctaagacacttttccta

SEQ ID NO: 790078 - DNA, 19 bp, Mus musculus
  siRNA target sequence for E130314M08Rik (NM_175554.3,2662-2680).
gaaatcaccgccatcgata

SEQ ID NO: 790079 - DNA, 19 bp, Mus musculus
  siRNA target sequence for E130314M08Rik (NM_175554.3,2762-2780).
gtgcactggacagtttaca

SEQ ID NO: 790080 - DNA, 19 bp, Mus musculus
  siRNA target sequence for E130314M08Rik (NM_175554.3,2852-2870).
ctgctcgggcaaatttcct

SEQ ID NO: 790081 - DNA, 19 bp, Mus musculus
  siRNA target sequence for E130314M08Rik (NM_175554.3,3233-3251).
cgatggggaggagattgat

SEQ ID NO: 790082 - DNA, 19 bp, Mus musculus
  siRNA target sequence for E130314M08Rik (NM_175554.3,3242-3260).
ggagattgatgaatacgaa

SEQ ID NO: 790083 - DNA, 19 bp, Mus musculus
  siRNA target sequence for E130314M08Rik (NM_175554.3,3353-3371).
gcggcgactacggttatat

SEQ ID NO: 790084 - DNA, 19 bp, Mus musculus
  siRNA target sequence for E130314M08Rik (NM_175554.3,3355-3373).
ggcgactacggttatatca

SEQ ID NO: 790085 - DNA, 19 bp, Mus musculus
  siRNA target sequence for E130314M08Rik (NM_175554.3,3356-3374).
gcgactacggttatatcaa

SEQ ID NO: 790086 - DNA, 19 bp, Mus musculus
  siRNA target sequence for E130314M08Rik (NM_175554.3,3411-3429).
gggcctggacgaacaagaa

SEQ ID NO: 790087 - DNA, 19 bp, Mus musculus
  siRNA target sequence for E130314M08Rik (NM_175554.3,3412-3430).
ggcctggacgaacaagaaa

SEQ ID NO: 790088 - DNA, 19 bp, Mus musculus
  siRNA target sequence for E130314M08Rik (NM_175554.3,3413-3431).
gcctggacgaacaagaaaa

SEQ ID NO: 790089 - DNA, 19 bp, Mus musculus
  siRNA target sequence for E130314M08Rik (NM_175554.3,3415-3433).
ctggacgaacaagaaaatt

SEQ ID NO: 790090 - DNA, 19 bp, Mus musculus
  siRNA target sequence for E130314M08Rik (NM_175554.3,3434-3452).
ccgatggaaacacatagat

SEQ ID NO: 790091 - DNA, 19 bp, Mus musculus
  siRNA target sequence for E130314M08Rik (NM_175554.3,3457-3475).
cctcccagatggatctatt

SEQ ID NO: 790092 - DNA, 19 bp, Mus musculus
  siRNA target sequence for E130314M08Rik (NM_175554.3,3460-3478).
cccagatggatctatttca

SEQ ID NO: 790093 - DNA, 19 bp, Mus musculus
  siRNA target sequence for E130314M08Rik (NM_175554.3,3462-3480).
cagatggatctatttcaca

SEQ ID NO: 790094 - DNA, 19 bp, Mus musculus
  siRNA target sequence for E130314M08Rik (NM_175554.3,3618-3636).
ggggacgacagtcagttta

SEQ ID NO: 790095 - DNA, 19 bp, Mus musculus
  siRNA target sequence for E130314M08Rik (NM_175554.3,3619-3637).
gggacgacagtcagtttat

SEQ ID NO: 790096 - DNA, 19 bp, Mus musculus
  siRNA target sequence for E130314M08Rik (NM_175554.3,3621-3639).
gacgacagtcagtttatga

SEQ ID NO: 790097 - DNA, 19 bp, Mus musculus
  siRNA target sequence for E130314M08Rik (NM_175554.3,3685-3703).
gtcatactgtggttgttca

SEQ ID NO: 790098 - DNA, 19 bp, Mus musculus
  siRNA target sequence for E130314M08Rik (NM_175554.3,3693-3711).
gtggttgttcaggaatcaa

SEQ ID NO: 790099 - DNA, 19 bp, Mus musculus
  siRNA target sequence for E130314M08Rik (NM_175554.3,3696-3714).
gttgttcaggaatcaaagt

SEQ ID NO: 790100 - DNA, 19 bp, Mus musculus
  siRNA target sequence for E130314M08Rik (NM_175554.3,3719-3737).
gctcagaaacccttttgaa

SEQ ID NO: 790101 - DNA, 19 bp, Mus musculus
  siRNA target sequence for E130314M08Rik (NM_175554.3,3720-3738).
ctcagaaacccttttgaaa

SEQ ID NO: 790102 - DNA, 19 bp, Mus musculus
  siRNA target sequence for E130314M08Rik (NM_175554.3,3772-3790).
caggctccctgctaaacca

SEQ ID NO: 790103 - DNA, 19 bp, Mus musculus
  siRNA target sequence for E130314M08Rik (NM_175554.3,3839-3857).
cagcgctccccgaaactca

SEQ ID NO: 790104 - DNA, 19 bp, Mus musculus
  siRNA target sequence for E130314M08Rik (NM_175554.3,3901-3919).
cagcaaaggactcatctaa

SEQ ID NO: 790105 - DNA, 19 bp, Mus musculus
  siRNA target sequence for E130314M08Rik (NM_175554.3,3939-3957).
ggactgtcgtcaatgatgt

SEQ ID NO: 790106 - DNA, 19 bp, Mus musculus
  siRNA target sequence for E130314M08Rik (NM_175554.3,3966-3984).
cctaagcggctaaagacaa

SEQ ID NO: 790107 - DNA, 19 bp, Mus musculus
  siRNA target sequence for E130314M08Rik (NM_175554.3,3967-3985).
ctaagcggctaaagacaaa

SEQ ID NO: 790108 - DNA, 19 bp, Mus musculus
  siRNA target sequence for C130073D16Rik (NM_175557.2,252-270).
cgtacttctggccttctat

SEQ ID NO: 790109 - DNA, 19 bp, Mus musculus
  siRNA target sequence for C130073D16Rik (NM_175557.2,278-296).
gtctcagggcagattgaaa

SEQ ID NO: 790110 - DNA, 19 bp, Mus musculus
  siRNA target sequence for C130073D16Rik (NM_175557.2,285-303).
ggcagattgaaaacactat

SEQ ID NO: 790111 - DNA, 19 bp, Mus musculus
  siRNA target sequence for C130073D16Rik (NM_175557.2,293-311).
gaaaacactatgttcatca

SEQ ID NO: 790112 - DNA, 19 bp, Mus musculus
  siRNA target sequence for C130073D16Rik (NM_175557.2,458-476).
cacagtcaggcatctgtta

SEQ ID NO: 790113 - DNA, 19 bp, Mus musculus
  siRNA target sequence for C130073D16Rik (NM_175557.2,468-486).
catctgttacccagaatat

SEQ ID NO: 790114 - DNA, 19 bp, Mus musculus
  siRNA target sequence for C130073D16Rik (NM_175557.2,575-593).
ggtcctggtttggtaatca

SEQ ID NO: 790115 - DNA, 19 bp, Mus musculus
  siRNA target sequence for C130073D16Rik (NM_175557.2,578-596).
cctggtttggtaatcacat

SEQ ID NO: 790116 - DNA, 19 bp, Mus musculus
  siRNA target sequence for C130073D16Rik (NM_175557.2,775-793).
cactgtggctcctcctaaa

SEQ ID NO: 790117 - DNA, 19 bp, Mus musculus
  siRNA target sequence for C130073D16Rik (NM_175557.2,1159-1177).
ggggccaagccctatagtt

SEQ ID NO: 790118 - DNA, 19 bp, Mus musculus
  siRNA target sequence for C130073D16Rik (NM_175557.2,1161-1179).
ggccaagccctatagttgt

SEQ ID NO: 790119 - DNA, 19 bp, Mus musculus
  siRNA target sequence for C130073D16Rik (NM_175557.2,1162-1180).
gccaagccctatagttgta

SEQ ID NO: 790120 - DNA, 19 bp, Mus musculus
  siRNA target sequence for C130073D16Rik (NM_175557.2,1163-1181).
ccaagccctatagttgtaa

SEQ ID NO: 790121 - DNA, 19 bp, Mus musculus
  siRNA target sequence for C130073D16Rik (NM_175557.2,1168-1186).
ccctatagttgtaacttct

SEQ ID NO: 790122 - DNA, 19 bp, Mus musculus
  siRNA target sequence for C130073D16Rik (NM_175557.2,1271-1289).
ccatggtgtgcattcaact

SEQ ID NO: 790123 - DNA, 19 bp, Mus musculus
  siRNA target sequence for C130073D16Rik (NM_175557.2,1272-1290).
catggtgtgcattcaactt

SEQ ID NO: 790124 - DNA, 19 bp, Mus musculus
  siRNA target sequence for C130073D16Rik (NM_175557.2,1310-1328).
cggtattggcctatgttca

SEQ ID NO: 790125 - DNA, 19 bp, Mus musculus
  siRNA target sequence for C130073D16Rik (NM_175557.2,1311-1329).
ggtattggcctatgttcaa

SEQ ID NO: 790126 - DNA, 19 bp, Mus musculus
  siRNA target sequence for C130073D16Rik (NM_175557.2,1317-1335).
ggcctatgttcaaattgct

SEQ ID NO: 790127 - DNA, 19 bp, Mus musculus
  siRNA target sequence for C130073D16Rik (NM_175557.2,1320-1338).
ctatgttcaaattgctatt

SEQ ID NO: 790128 - DNA, 19 bp, Mus musculus
  siRNA target sequence for C130073D16Rik (NM_175557.2,1666-1684).
gctggaggaggctataact

SEQ ID NO: 790129 - DNA, 19 bp, Mus musculus
  siRNA target sequence for C130073D16Rik (NM_175557.2,1706-1724).
ggatgccaagagagtcttt

SEQ ID NO: 790130 - DNA, 19 bp, Mus musculus
  siRNA target sequence for C130073D16Rik (NM_175557.2,1727-1745).
ggagcacacagtgtattga

SEQ ID NO: 790131 - DNA, 19 bp, Mus musculus
  siRNA target sequence for E330039K12Rik (NM_175561.2,607-625).
gagatattgctcacttaat

SEQ ID NO: 790132 - DNA, 19 bp, Mus musculus
  siRNA target sequence for E330039K12Rik (NM_175561.2,609-627).
gatattgctcacttaatgt

SEQ ID NO: 790133 - DNA, 19 bp, Mus musculus
  siRNA target sequence for E330039K12Rik (NM_175561.2,651-669).
cttcagtgtttcgaaaagt

SEQ ID NO: 790134 - DNA, 19 bp, Mus musculus
  siRNA target sequence for E330039K12Rik (NM_175561.2,695-713).
gaacgccctcactcttgat

SEQ ID NO: 790135 - DNA, 19 bp, Mus musculus
  siRNA target sequence for E330039K12Rik (NM_175561.2,700-718).
ccctcactcttgatgcttt

SEQ ID NO: 790136 - DNA, 19 bp, Mus musculus
  siRNA target sequence for E330039K12Rik (NM_175561.2,789-807).
ctgctgaggacgtcattct

SEQ ID NO: 790137 - DNA, 19 bp, Mus musculus
  siRNA target sequence for E330039K12Rik (NM_175561.2,791-809).
gctgaggacgtcattctgt

SEQ ID NO: 790138 - DNA, 19 bp, Mus musculus
  siRNA target sequence for E330039K12Rik (NM_175561.2,836-854).
gggtttcacggtcatcttt

SEQ ID NO: 790139 - DNA, 19 bp, Mus musculus
  siRNA target sequence for E330039K12Rik (NM_175561.2,837-855).
ggtttcacggtcatctttt

SEQ ID NO: 790140 - DNA, 19 bp, Mus musculus
  siRNA target sequence for E330039K12Rik (NM_175561.2,838-856).
gtttcacggtcatcttttt

SEQ ID NO: 790141 - DNA, 19 bp, Mus musculus
  siRNA target sequence for E330039K12Rik (NM_175561.2,1063-1081).
cattcgccacctcaatctt

SEQ ID NO: 790142 - DNA, 19 bp, Mus musculus
  siRNA target sequence for E330039K12Rik (NM_175561.2,1104-1122).
cttgggagcgtcatattca

SEQ ID NO: 790143 - DNA, 19 bp, Mus musculus
  siRNA target sequence for E330039K12Rik (NM_175561.2,1134-1152).
gtcaggccggtgaagttct

SEQ ID NO: 790144 - DNA, 19 bp, Mus musculus
  siRNA target sequence for E330039K12Rik (NM_175561.2,1154-1172).
ggagagaagctataataca

SEQ ID NO: 790145 - DNA, 19 bp, Mus musculus
  siRNA target sequence for E330039K12Rik (NM_175561.2,1174-1192).
ggcgcatggataattccaa

SEQ ID NO: 790146 - DNA, 19 bp, Mus musculus
  siRNA target sequence for E330039K12Rik (NM_175561.2,1195-1213).
caaggctggctgtgcaaat

SEQ ID NO: 790147 - DNA, 19 bp, Mus musculus
  siRNA target sequence for E330039K12Rik (NM_175561.2,1225-1243).
cagggagtgatgacaacaa

SEQ ID NO: 790148 - DNA, 19 bp, Mus musculus
  siRNA target sequence for E330039K12Rik (NM_175561.2,1375-1393).
ccttcgtccacctgattga

SEQ ID NO: 790149 - DNA, 19 bp, Mus musculus
  siRNA target sequence for E330039K12Rik (NM_175561.2,1433-1451).
ggagttccgaggaacctat

SEQ ID NO: 790150 - DNA, 19 bp, Mus musculus
  siRNA target sequence for E330039K12Rik (NM_175561.2,1434-1452).
gagttccgaggaacctatt

SEQ ID NO: 790151 - DNA, 19 bp, Mus musculus
  siRNA target sequence for B930067F20Rik (NM_175563.3,128-146).
caaagccaaacgaatgtct

SEQ ID NO: 790152 - DNA, 19 bp, Mus musculus
  siRNA target sequence for B930067F20Rik (NM_175563.3,168-186).
gtctctcctaagttattga

SEQ ID NO: 790153 - DNA, 19 bp, Mus musculus
  siRNA target sequence for B930067F20Rik (NM_175563.3,279-297).
ctgagatttcctaacatca

SEQ ID NO: 790154 - DNA, 19 bp, Mus musculus
  siRNA target sequence for B930067F20Rik (NM_175563.3,296-314).
caaagatgcaataaacctt

SEQ ID NO: 790155 - DNA, 19 bp, Mus musculus
  siRNA target sequence for B930067F20Rik (NM_175563.3,327-345).
gcatggtgcatctacagtt

SEQ ID NO: 790156 - DNA, 19 bp, Mus musculus
  siRNA target sequence for B930067F20Rik (NM_175563.3,364-382).
cccagagtttagaagtatt

SEQ ID NO: 790157 - DNA, 19 bp, Mus musculus
  siRNA target sequence for B930067F20Rik (NM_175563.3,501-519).
gaaaactcctcctgttcaa

SEQ ID NO: 790158 - DNA, 19 bp, Mus musculus
  siRNA target sequence for B930067F20Rik (NM_175563.3,533-551).
gtgttgcccgagtgataaa

SEQ ID NO: 790159 - DNA, 19 bp, Mus musculus
  siRNA target sequence for B930067F20Rik (NM_175563.3,535-553).
gttgcccgagtgataaact

SEQ ID NO: 790160 - DNA, 19 bp, Mus musculus
  siRNA target sequence for B930067F20Rik (NM_175563.3,540-558).
ccgagtgataaacttacaa

SEQ ID NO: 790161 - DNA, 19 bp, Mus musculus
  siRNA target sequence for B930067F20Rik (NM_175563.3,750-768).
cttcaggttgaaccattaa

SEQ ID NO: 790162 - DNA, 19 bp, Mus musculus
  siRNA target sequence for B930067F20Rik (NM_175563.3,778-796).
gacccatgcatataacagt

SEQ ID NO: 790163 - DNA, 19 bp, Mus musculus
  siRNA target sequence for B930067F20Rik (NM_175563.3,785-803).
gcatataacagttaaagat

SEQ ID NO: 790164 - DNA, 19 bp, Mus musculus
  siRNA target sequence for B930067F20Rik (NM_175563.3,793-811).
cagttaaagatctactcaa

SEQ ID NO: 790165 - DNA, 19 bp, Mus musculus
  siRNA target sequence for B930067F20Rik (NM_175563.3,801-819).
gatctactcaatgtgaaat

SEQ ID NO: 790166 - DNA, 19 bp, Mus musculus
  siRNA target sequence for B930067F20Rik (NM_175563.3,835-853).
gtgttgacgaaagaaagaa

SEQ ID NO: 790167 - DNA, 19 bp, Mus musculus
  siRNA target sequence for B930067F20Rik (NM_175563.3,876-894).
gaacgcactccactagtta

SEQ ID NO: 790168 - DNA, 19 bp, Mus musculus
  siRNA target sequence for B930067F20Rik (NM_175563.3,880-898).
gcactccactagttactgt

SEQ ID NO: 790169 - DNA, 19 bp, Mus musculus
  siRNA target sequence for B930067F20Rik (NM_175563.3,899-917).
ctctgatctgcaacatgtt

SEQ ID NO: 790170 - DNA, 19 bp, Mus musculus
  siRNA target sequence for B930067F20Rik (NM_175563.3,938-956).
ggtgtcagcaactcgaatt

SEQ ID NO: 790171 - DNA, 19 bp, Mus musculus
  siRNA target sequence for B930067F20Rik (NM_175563.3,939-957).
gtgtcagcaactcgaatta

SEQ ID NO: 790172 - DNA, 19 bp, Mus musculus
  siRNA target sequence for B930067F20Rik (NM_175563.3,941-959).
gtcagcaactcgaattaaa

SEQ ID NO: 790173 - DNA, 19 bp, Mus musculus
  siRNA target sequence for B930067F20Rik (NM_175563.3,943-961).
cagcaactcgaattaaaaa

SEQ ID NO: 790174 - DNA, 19 bp, Mus musculus
  siRNA target sequence for B930067F20Rik (NM_175563.3,946-964).
caactcgaattaaaaatgt

SEQ ID NO: 790175 - DNA, 19 bp, Mus musculus
  siRNA target sequence for B930067F20Rik (NM_175563.3,1039-1057).
gtgggacccctctgaacaa

SEQ ID NO: 790176 - DNA, 19 bp, Mus musculus
  siRNA target sequence for B930067F20Rik (NM_175563.3,1041-1059).
gggacccctctgaacaata

SEQ ID NO: 790177 - DNA, 19 bp, Mus musculus
  siRNA target sequence for B930067F20Rik (NM_175563.3,1043-1061).
gacccctctgaacaataaa

SEQ ID NO: 790178 - DNA, 19 bp, Mus musculus
  siRNA target sequence for B930067F20Rik (NM_175563.3,1046-1064).
ccctctgaacaataaagaa

SEQ ID NO: 790179 - DNA, 19 bp, Mus musculus
  siRNA target sequence for B930067F20Rik (NM_175563.3,1104-1122).
cgggccttaaggagaaagt

SEQ ID NO: 790180 - DNA, 19 bp, Mus musculus
  siRNA target sequence for A830020B06Rik (NM_175564.2,244-262).
cggcaccggtggaaagtca

SEQ ID NO: 790181 - DNA, 19 bp, Mus musculus
  siRNA target sequence for A830020B06Rik (NM_175564.2,379-397).
cggaatccatcatcatcta

SEQ ID NO: 790182 - DNA, 19 bp, Mus musculus
  siRNA target sequence for A830020B06Rik (NM_175564.2,392-410).
catctaccggtcagataat

SEQ ID NO: 790183 - DNA, 19 bp, Mus musculus
  siRNA target sequence for A830020B06Rik (NM_175564.2,522-540).
ctggacagccgctatgtca

SEQ ID NO: 790184 - DNA, 19 bp, Mus musculus
  siRNA target sequence for A830020B06Rik (NM_175564.2,757-775).
ctttcgttgtgtctttcta

SEQ ID NO: 790185 - DNA, 19 bp, Mus musculus
  siRNA target sequence for A830020B06Rik (NM_175564.2,850-868).
gctgtccgtgcctcattct

SEQ ID NO: 790186 - DNA, 19 bp, Mus musculus
  siRNA target sequence for A830020B06Rik (NM_175564.2,853-871).
gtccgtgcctcattctctt

SEQ ID NO: 790187 - DNA, 19 bp, Mus musculus
  siRNA target sequence for A830020B06Rik (NM_175564.2,856-874).
cgtgcctcattctcttcta

SEQ ID NO: 790188 - DNA, 19 bp, Mus musculus
  siRNA target sequence for A830020B06Rik (NM_175564.2,1053-1071).
ctggagtctgataatatct

SEQ ID NO: 790189 - DNA, 19 bp, Mus musculus
  siRNA target sequence for 2300002F06Rik (NM_175606.2,430-448).
cgcagaaatggtttaagca

SEQ ID NO: 790190 - DNA, 19 bp, Mus musculus
  siRNA target sequence for Cbln4 (NM_175631.1,1209-1227).
ccgttctgctgattctagt

SEQ ID NO: 790191 - DNA, 19 bp, Mus musculus
  siRNA target sequence for Cbln4 (NM_175631.1,1315-1333).
ctccaagggatcatcatct

SEQ ID NO: 790192 - DNA, 19 bp, Mus musculus
  siRNA target sequence for Cbln4 (NM_175631.1,1431-1449).
ctcgcatcatttactttga

SEQ ID NO: 790193 - DNA, 19 bp, Mus musculus
  siRNA target sequence for Cbln4 (NM_175631.1,1457-1475).
ctggttaacgtgggtaatt

SEQ ID NO: 790194 - DNA, 19 bp, Mus musculus
  siRNA target sequence for Cbln4 (NM_175631.1,1459-1477).
ggttaacgtgggtaatttt

SEQ ID NO: 790195 - DNA, 19 bp, Mus musculus
  siRNA target sequence for Cbln4 (NM_175631.1,1460-1478).
gttaacgtgggtaattttt

SEQ ID NO: 790196 - DNA, 19 bp, Mus musculus
  siRNA target sequence for Cbln4 (NM_175631.1,1465-1483).
cgtgggtaattttttcaca

SEQ ID NO: 790197 - DNA, 19 bp, Mus musculus
  siRNA target sequence for Cbln4 (NM_175631.1,1499-1517).
gtggcaccgaggaaaggaa

SEQ ID NO: 790198 - DNA, 19 bp, Mus musculus
  siRNA target sequence for Cbln4 (NM_175631.1,1559-1577).
caaaccatccaggttaact

SEQ ID NO: 790199 - DNA, 19 bp, Mus musculus
  siRNA target sequence for Cbln4 (NM_175631.1,1563-1581).
ccatccaggttaacttgat

SEQ ID NO: 790200 - DNA, 19 bp, Mus musculus
  siRNA target sequence for Cbln4 (NM_175631.1,1567-1585).
ccaggttaacttgatgtta

SEQ ID NO: 790201 - DNA, 19 bp, Mus musculus
  siRNA target sequence for Cbln4 (NM_175631.1,1568-1586).
caggttaacttgatgttaa

SEQ ID NO: 790202 - DNA, 19 bp, Mus musculus
  siRNA target sequence for Cbln4 (NM_175631.1,1633-1651).
ccgtgaagccgccactaat

SEQ ID NO: 790203 - DNA, 19 bp, Mus musculus
  siRNA target sequence for Oscar (NM_175632.2,250-268).
ggcggtttgcactcttcaa

SEQ ID NO: 790204 - DNA, 19 bp, Mus musculus
  siRNA target sequence for Oscar (NM_175632.2,251-269).
gcggtttgcactcttcaaa

SEQ ID NO: 790205 - DNA, 19 bp, Mus musculus
  siRNA target sequence for Oscar (NM_175632.2,252-270).
cggtttgcactcttcaaaa

SEQ ID NO: 790206 - DNA, 19 bp, Mus musculus
  siRNA target sequence for Oscar (NM_175632.2,349-367).
cccaagggggcagttatca

SEQ ID NO: 790207 - DNA, 19 bp, Mus musculus
  siRNA target sequence for Oscar (NM_175632.2,351-369).
caagggggcagttatcact

SEQ ID NO: 790208 - DNA, 19 bp, Mus musculus
  siRNA target sequence for Oscar (NM_175632.2,404-422).
ctggtctcagcccagtaat

SEQ ID NO: 790209 - DNA, 19 bp, Mus musculus
  siRNA target sequence for Oscar (NM_175632.2,406-424).
ggtctcagcccagtaatgt

SEQ ID NO: 790210 - DNA, 19 bp, Mus musculus
  siRNA target sequence for Oscar (NM_175632.2,407-425).
gtctcagcccagtaatgtt

SEQ ID NO: 790211 - DNA, 19 bp, Mus musculus
  siRNA target sequence for Oscar (NM_175632.2,528-546).
cgcataccgggcatgagtt

SEQ ID NO: 790212 - DNA, 19 bp, Mus musculus
  siRNA target sequence for Oscar (NM_175632.2,570-588).
gcaacccctctgcagtata

SEQ ID NO: 790213 - DNA, 19 bp, Mus musculus
  siRNA target sequence for Oscar (NM_175632.2,574-592).
cccctctgcagtatattga

SEQ ID NO: 790214 - DNA, 19 bp, Mus musculus
  siRNA target sequence for Oscar (NM_175632.2,607-625).
gggctgacttccttttgat

SEQ ID NO: 790215 - DNA, 19 bp, Mus musculus
  siRNA target sequence for Oscar (NM_175632.2,642-660).
ggcacctactgttgctatt

SEQ ID NO: 790216 - DNA, 19 bp, Mus musculus
  siRNA target sequence for Oscar (NM_175632.2,643-661).
gcacctactgttgctatta

SEQ ID NO: 790217 - DNA, 19 bp, Mus musculus
  siRNA target sequence for Oscar (NM_175632.2,646-664).
cctactgttgctattacca

SEQ ID NO: 790218 - DNA, 19 bp, Mus musculus
  siRNA target sequence for Oscar (NM_175632.2,791-809).
catctgcttgggcatcata

SEQ ID NO: 790219 - DNA, 19 bp, Mus musculus
  siRNA target sequence for Oscar (NM_175632.2,794-812).
ctgcttgggcatcatagtt

SEQ ID NO: 790220 - DNA, 19 bp, Mus musculus
  siRNA target sequence for Oscar (NM_175632.2,797-815).
cttgggcatcatagttact

SEQ ID NO: 790221 - DNA, 19 bp, Mus musculus
  siRNA target sequence for Oscar (NM_175632.2,800-818).
gggcatcatagttacttgt

SEQ ID NO: 790222 - DNA, 19 bp, Mus musculus
  siRNA target sequence for Oscar (NM_175632.2,803-821).
catcatagttacttgtgat

SEQ ID NO: 790223 - DNA, 19 bp, Mus musculus
  siRNA target sequence for A530023O14Rik (NM_175648.2,524-542).
gcagcatgcaaattcctat

SEQ ID NO: 790224 - DNA, 19 bp, Mus musculus
  siRNA target sequence for A530023O14Rik (NM_175648.2,554-572).
gcaaatttctgagatctat

SEQ ID NO: 790225 - DNA, 19 bp, Mus musculus
  siRNA target sequence for A530023O14Rik (NM_175648.2,684-702).
gcaccccaactttgttcta

SEQ ID NO: 790226 - DNA, 19 bp, Mus musculus
  siRNA target sequence for A530023O14Rik (NM_175648.2,687-705).
ccccaactttgttctatga

SEQ ID NO: 790227 - DNA, 19 bp, Mus musculus
  siRNA target sequence for A530023O14Rik (NM_175648.2,716-734).
ccctaatgtcaaatttcat

SEQ ID NO: 790228 - DNA, 19 bp, Mus musculus
  siRNA target sequence for A530023O14Rik (NM_175648.2,753-771).
gaaacttatcagtctaaat

SEQ ID NO: 790229 - DNA, 19 bp, Mus musculus
  siRNA target sequence for A530023O14Rik (NM_175648.2,936-954).
ctacctatgaagctttcat

SEQ ID NO: 790230 - DNA, 19 bp, Mus musculus
  siRNA target sequence for A530023O14Rik (NM_175648.2,939-957).
cctatgaagctttcatcta

SEQ ID NO: 790231 - DNA, 19 bp, Mus musculus
  siRNA target sequence for A530023O14Rik (NM_175648.2,979-997).
ccctgatacggtcaatatt

SEQ ID NO: 790232 - DNA, 19 bp, Mus musculus
  siRNA target sequence for A530023O14Rik (NM_175648.2,980-998).
cctgatacggtcaatattt

SEQ ID NO: 790233 - DNA, 19 bp, Mus musculus
  siRNA target sequence for A530023O14Rik (NM_175648.2,981-999).
ctgatacggtcaatatttt

SEQ ID NO: 790234 - DNA, 19 bp, Mus musculus
  siRNA target sequence for 9630008K15Rik (NM_175651.2,262-280).
gtatttcaggagatatgct

SEQ ID NO: 790235 - DNA, 19 bp, Mus musculus
  siRNA target sequence for 9630008K15Rik (NM_175651.2,285-303).
ggaagggagacaaaatata

SEQ ID NO: 790236 - DNA, 19 bp, Mus musculus
  siRNA target sequence for 9630008K15Rik (NM_175651.2,358-376).
cgcgtgcgaagccatcatt

SEQ ID NO: 790237 - DNA, 19 bp, Mus musculus
  siRNA target sequence for 9630008K15Rik (NM_175651.2,360-378).
cgtgcgaagccatcattga

SEQ ID NO: 790238 - DNA, 19 bp, Mus musculus
  siRNA target sequence for 9630008K15Rik (NM_175651.2,361-379).
gtgcgaagccatcattgaa

SEQ ID NO: 790239 - DNA, 19 bp, Mus musculus
  siRNA target sequence for 9630008K15Rik (NM_175651.2,363-381).
gcgaagccatcattgaaaa

SEQ ID NO: 790240 - DNA, 19 bp, Mus musculus
  siRNA target sequence for 9630008K15Rik (NM_175651.2,458-476).
ggtactgtgtctgatgtaa

SEQ ID NO: 790241 - DNA, 19 bp, Mus musculus
  siRNA target sequence for 9630008K15Rik (NM_175651.2,536-554).
gtagcctggctgtcttact

SEQ ID NO: 790242 - DNA, 19 bp, Mus musculus
  siRNA target sequence for Hist4h4 (NM_175652.1,166-184).
cgcggtgtcctcaaggttt

SEQ ID NO: 790243 - DNA, 19 bp, Mus musculus
  siRNA target sequence for Hist4h4 (NM_175652.1,167-185).
gcggtgtcctcaaggtttt

SEQ ID NO: 790244 - DNA, 19 bp, Mus musculus
  siRNA target sequence for Hist1h2aa (NM_175658.1,113-131).
ggaactacgcacaacgaat

SEQ ID NO: 790245 - DNA, 19 bp, Mus musculus
  siRNA target sequence for Hist1h2aa (NM_175658.1,114-132).
gaactacgcacaacgaatt

SEQ ID NO: 790246 - DNA, 19 bp, Mus musculus
  siRNA target sequence for Hist1h2aa (NM_175658.1,158-176).
cggcagtgctagaatactt

SEQ ID NO: 790247 - DNA, 19 bp, Mus musculus
  siRNA target sequence for Hist1h2ba (NM_175663.1,14-32).
cggtaaagggtgctactat

SEQ ID NO: 790248 - DNA, 19 bp, Mus musculus
  siRNA target sequence for Hist1h2ba (NM_175663.1,15-33).
ggtaaagggtgctactatt

SEQ ID NO: 790249 - DNA, 19 bp, Mus musculus
  siRNA target sequence for Hist1h2ba (NM_175663.1,16-34).
gtaaagggtgctactattt

SEQ ID NO: 790250 - DNA, 19 bp, Mus musculus
  siRNA target sequence for Hist1h2ba (NM_175663.1,113-131).
gctactccatttacatcta

SEQ ID NO: 790251 - DNA, 19 bp, Mus musculus
  siRNA target sequence for Hist1h2ba (NM_175663.1,129-147).
ctataaggtgctgaaacaa

SEQ ID NO: 790252 - DNA, 19 bp, Mus musculus
  siRNA target sequence for 4933425M15Rik (NM_175674.2,881-899).
gtgtttttgtgggttgaat

SEQ ID NO: 790253 - DNA, 19 bp, Mus musculus
  siRNA target sequence for 4933425M15Rik (NM_175674.2,889-907).
gtgggttgaattatacact

SEQ ID NO: 790254 - DNA, 19 bp, Mus musculus
  siRNA target sequence for 4933425M15Rik (NM_175674.2,939-957).
gcaggttgttgcgcaaatt

SEQ ID NO: 790255 - DNA, 19 bp, Mus musculus
  siRNA target sequence for 4933425M15Rik (NM_175674.2,940-958).
caggttgttgcgcaaattt

SEQ ID NO: 790256 - DNA, 19 bp, Mus musculus
  siRNA target sequence for 4933425M15Rik (NM_175674.2,1010-1028).
ctatttcctgttcattata

SEQ ID NO: 790257 - DNA, 19 bp, Mus musculus
  siRNA target sequence for 4933425M15Rik (NM_175674.2,1335-1353).
ctgctgtttcaagaattgt

SEQ ID NO: 790258 - DNA, 19 bp, Mus musculus
  siRNA target sequence for 4933425M15Rik (NM_175674.2,1392-1410).
cctcctcaatttttagtaa

SEQ ID NO: 790259 - DNA, 19 bp, Mus musculus
  siRNA target sequence for 4933425M15Rik (NM_175674.2,1649-1667).
gttgatgcagtaaagagtt

SEQ ID NO: 790260 - DNA, 19 bp, Mus musculus
  siRNA target sequence for 4933425M15Rik (NM_175674.2,1687-1705).
gctttatgcaactgacatt

SEQ ID NO: 790261 - DNA, 19 bp, Mus musculus
  siRNA target sequence for 4933425M15Rik (NM_175674.2,2246-2264).
gtatgttatttgaccatat

SEQ ID NO: 790262 - DNA, 19 bp, Mus musculus
  siRNA target sequence for 4930471M23Rik (NM_175675.1,134-152).
caaagtgggccgacaactt

SEQ ID NO: 790263 - DNA, 19 bp, Mus musculus
  siRNA target sequence for 4930471M23Rik (NM_175675.1,138-156).
gtgggccgacaactttgta

SEQ ID NO: 790264 - DNA, 19 bp, Mus musculus
  siRNA target sequence for 4930471M23Rik (NM_175675.1,421-439).
cggggtgcagtgatcatct

SEQ ID NO: 790265 - DNA, 19 bp, Mus musculus
  siRNA target sequence for 4930471M23Rik (NM_175675.1,422-440).
ggggtgcagtgatcatctt

SEQ ID NO: 790266 - DNA, 19 bp, Mus musculus
  siRNA target sequence for 4930471M23Rik (NM_175675.1,424-442).
ggtgcagtgatcatcttca

SEQ ID NO: 790267 - DNA, 19 bp, Mus musculus
  siRNA target sequence for 4930471M23Rik (NM_175675.1,593-611).
caggtgacttgttgatcat

SEQ ID NO: 790268 - DNA, 19 bp, Mus musculus
  siRNA target sequence for 4930471M23Rik (NM_175675.1,612-630).
catggcccagatcatcatt

SEQ ID NO: 790269 - DNA, 19 bp, Mus musculus
  siRNA target sequence for 4930471M23Rik (NM_175675.1,995-1013).
gggagatcttctatccatt

SEQ ID NO: 790270 - DNA, 19 bp, Mus musculus
  siRNA target sequence for 4930471M23Rik (NM_175675.1,1044-1062).
gggcaccgccctctacaat

SEQ ID NO: 790271 - DNA, 19 bp, Mus musculus
  siRNA target sequence for 4930471M23Rik (NM_175675.1,1149-1167).
cagtcggactcccatcaat

SEQ ID NO: 790272 - DNA, 19 bp, Mus musculus
  siRNA target sequence for 4930471M23Rik (NM_175675.1,1151-1169).
gtcggactcccatcaatga

SEQ ID NO: 790273 - DNA, 19 bp, Mus musculus
  siRNA target sequence for 9430097D07Rik (NM_175679.2,926-944).
gcatgagcagagattgtct

SEQ ID NO: 790274 - DNA, 19 bp, Mus musculus
  siRNA target sequence for 9430097D07Rik (NM_175679.2,946-964).
gctcatggattggtttatt

SEQ ID NO: 790275 - DNA, 19 bp, Mus musculus
  siRNA target sequence for 9430097D07Rik (NM_175679.2,1026-1044).
cagtgcccagcacaaactt

SEQ ID NO: 790276 - DNA, 19 bp, Mus musculus
  siRNA target sequence for 9430097D07Rik (NM_175679.2,1052-1070).
gtgtggattggaatgatgt

SEQ ID NO: 790277 - DNA, 19 bp, Mus musculus
  siRNA target sequence for 9430097D07Rik (NM_175679.2,1098-1116).
gaccacagtggctgtagta

SEQ ID NO: 790278 - DNA, 19 bp, Mus musculus
  siRNA target sequence for 9430097D07Rik (NM_175679.2,1156-1174).
ggaataacccagagaacta

SEQ ID NO: 790279 - DNA, 19 bp, Mus musculus
  siRNA target sequence for 9430097D07Rik (NM_175679.2,1205-1223).
gcttaagaaggtctattca

SEQ ID NO: 790280 - DNA, 19 bp, Mus musculus
  siRNA target sequence for 9430097D07Rik (NM_175679.2,1206-1224).
cttaagaaggtctattcat

SEQ ID NO: 790281 - DNA, 19 bp, Mus musculus
  siRNA target sequence for 9430097D07Rik (NM_175679.2,1215-1233).
gtctattcatctttacaat

SEQ ID NO: 790282 - DNA, 19 bp, Mus musculus
  siRNA target sequence for 9430097D07Rik (NM_175679.2,1244-1262).
cacgtctgggcacatatgt

SEQ ID NO: 790283 - DNA, 19 bp, Mus musculus
  siRNA target sequence for 9430097D07Rik (NM_175679.2,1309-1327).
gtgggtggtggtcacttaa

SEQ ID NO: 790284 - DNA, 19 bp, Mus musculus
  siRNA target sequence for 9430097D07Rik (NM_175679.2,1311-1329).
gggtggtggtcacttaatt

SEQ ID NO: 790285 - DNA, 19 bp, Mus musculus
  siRNA target sequence for 9430097D07Rik (NM_175679.2,1347-1365).
ctggccctctgaaatagct

SEQ ID NO: 790286 - DNA, 19 bp, Mus musculus
  siRNA target sequence for 9530080O11Rik (NM_175680.2,409-427).
cgagcaccagtcacaaaga

SEQ ID NO: 790287 - DNA, 19 bp, Mus musculus
  siRNA target sequence for Dclre1c (NM_175683.2,391-409).
cccaggatcagttatgttt

SEQ ID NO: 790288 - DNA, 19 bp, Mus musculus
  siRNA target sequence for Dclre1c (NM_175683.2,392-410).
ccaggatcagttatgtttt

SEQ ID NO: 790289 - DNA, 19 bp, Mus musculus
  siRNA target sequence for Dclre1c (NM_175683.2,395-413).
ggatcagttatgtttttat

SEQ ID NO: 790290 - DNA, 19 bp, Mus musculus
  siRNA target sequence for Dclre1c (NM_175683.2,396-414).
gatcagttatgtttttatt

SEQ ID NO: 790291 - DNA, 19 bp, Mus musculus
  siRNA target sequence for Dclre1c (NM_175683.2,421-439).
cagtaatggaactgtctta

SEQ ID NO: 790292 - DNA, 19 bp, Mus musculus
  siRNA target sequence for Dclre1c (NM_175683.2,644-662).
gtcgtgtggctgaactgta

SEQ ID NO: 790293 - DNA, 19 bp, Mus musculus
  siRNA target sequence for Dclre1c (NM_175683.2,1725-1743).
gttcactcccaacattcaa

SEQ ID NO: 790294 - DNA, 19 bp, Mus musculus
  siRNA target sequence for A030002D08Rik (NM_175684.3,525-543).
gaccatgggatcttccatt

SEQ ID NO: 790295 - DNA, 19 bp, Mus musculus
  siRNA target sequence for A030002D08Rik (NM_175684.3,582-600).
gcccagtcagcccagtatt

SEQ ID NO: 790296 - DNA, 19 bp, Mus musculus
  siRNA target sequence for A030002D08Rik (NM_175684.3,613-631).
gagcagcccgcaatgagta

SEQ ID NO: 790297 - DNA, 19 bp, Mus musculus
  siRNA target sequence for A030002D08Rik (NM_175684.3,622-640).
gcaatgagtacctgctaaa

SEQ ID NO: 790298 - DNA, 19 bp, Mus musculus
  siRNA target sequence for A030002D08Rik (NM_175684.3,658-676).
ctcaccttgcccactacta

SEQ ID NO: 790299 - DNA, 19 bp, Mus musculus
  siRNA target sequence for A030002D08Rik (NM_175684.3,734-752).
gagggaccccctgacttta

SEQ ID NO: 790300 - DNA, 19 bp, Mus musculus
  siRNA target sequence for A030002D08Rik (NM_175684.3,816-834).
gcaacgtctcaggtaaact

SEQ ID NO: 790301 - DNA, 19 bp, Mus musculus
  siRNA target sequence for A030002D08Rik (NM_175684.3,1259-1277).
ggagcggcgacttagtgaa

SEQ ID NO: 790302 - DNA, 19 bp, Mus musculus
  siRNA target sequence for A030002D08Rik (NM_175684.3,1326-1344).
ctttctgacttcgatgaat

SEQ ID NO: 790303 - DNA, 19 bp, Mus musculus
  siRNA target sequence for A030002D08Rik (NM_175684.3,1330-1348).
ctgacttcgatgaatgtga

SEQ ID NO: 790304 - DNA, 19 bp, Mus musculus
  siRNA target sequence for A030002D08Rik (NM_175684.3,1408-1426).
cctgccctgcacatgtagt

SEQ ID NO: 790305 - DNA, 19 bp, Mus musculus
  siRNA target sequence for A030002D08Rik (NM_175684.3,1411-1429).
gccctgcacatgtagtgtt

SEQ ID NO: 790306 - DNA, 19 bp, Mus musculus
  siRNA target sequence for A030002D08Rik (NM_175684.3,1554-1572).
gtccctgagcgatatctca

SEQ ID NO: 790307 - DNA, 19 bp, Mus musculus
  siRNA target sequence for A030002D08Rik (NM_175684.3,1558-1576).
ctgagcgatatctcaactt

SEQ ID NO: 790308 - DNA, 19 bp, Mus musculus
  siRNA target sequence for A230050P20Rik (NM_175687.1,258-276).
ggcgcctccgggagaagtt

SEQ ID NO: 790309 - DNA, 19 bp, Mus musculus
  siRNA target sequence for A230050P20Rik (NM_175687.1,483-501).
cgcaagccaatcttcgaat

SEQ ID NO: 790310 - DNA, 19 bp, Mus musculus
  siRNA target sequence for A230050P20Rik (NM_175687.1,622-640).
gtgtaggaagcgttacgaa

SEQ ID NO: 790311 - DNA, 19 bp, Mus musculus
  siRNA target sequence for A230050P20Rik (NM_175687.1,644-662).
gtgccacttgacaagatgt

SEQ ID NO: 790312 - DNA, 19 bp, Mus musculus
  siRNA target sequence for A630026H08Rik (NM_175689.2,12-30).
ctgctctaagcctagattt

SEQ ID NO: 790313 - DNA, 19 bp, Mus musculus
  siRNA target sequence for A630026H08Rik (NM_175689.2,14-32).
gctctaagcctagattttt

SEQ ID NO: 790314 - DNA, 19 bp, Mus musculus
  siRNA target sequence for A630026H08Rik (NM_175689.2,136-154).
cgttgggcttcttgcttta

SEQ ID NO: 790315 - DNA, 19 bp, Mus musculus
  siRNA target sequence for A630026H08Rik (NM_175689.2,137-155).
gttgggcttcttgctttaa

SEQ ID NO: 790316 - DNA, 19 bp, Mus musculus
  siRNA target sequence for A630026H08Rik (NM_175689.2,158-176).
ctcacccttatttatctga

SEQ ID NO: 790317 - DNA, 19 bp, Mus musculus
  siRNA target sequence for A630026H08Rik (NM_175689.2,216-234).
cttagctctgtggcattat

SEQ ID NO: 790318 - DNA, 19 bp, Mus musculus
  siRNA target sequence for A630026H08Rik (NM_175689.2,221-239).
ctctgtggcattattatct

SEQ ID NO: 790319 - DNA, 19 bp, Mus musculus
  siRNA target sequence for A630026H08Rik (NM_175689.2,276-294).
ctcgtgcccactcacttta

SEQ ID NO: 790320 - DNA, 19 bp, Mus musculus
  siRNA target sequence for A930034L06Rik (NM_175692.2,362-380).
ggatgacgacgcaaaacct

SEQ ID NO: 790321 - DNA, 19 bp, Mus musculus
  siRNA target sequence for A930034L06Rik (NM_175692.2,445-463).
caagtatcccgaattgaca

SEQ ID NO: 790322 - DNA, 19 bp, Mus musculus
  siRNA target sequence for B230220N19Rik (NM_175693.2,346-364).
gtatacctggacttgtaga

SEQ ID NO: 790323 - DNA, 19 bp, Mus musculus
  siRNA target sequence for B230220N19Rik (NM_175693.2,351-369).
cctggacttgtagatacaa

SEQ ID NO: 790324 - DNA, 19 bp, Mus musculus
  siRNA target sequence for C530028O21Rik (NM_175696.2,328-346).
gttgctgtccgtattacca

SEQ ID NO: 790325 - DNA, 19 bp, Mus musculus
  siRNA target sequence for C530028O21Rik (NM_175696.2,578-596).
gtgtggggtcccacagtat

SEQ ID NO: 790326 - DNA, 19 bp, Mus musculus
  siRNA target sequence for C530028O21Rik (NM_175696.2,580-598).
gtggggtcccacagtatct

SEQ ID NO: 790327 - DNA, 19 bp, Mus musculus
  siRNA target sequence for C530028O21Rik (NM_175696.2,622-640).
ctcggtcaatcctggattt

SEQ ID NO: 790328 - DNA, 19 bp, Mus musculus
  siRNA target sequence for C530028O21Rik (NM_175696.2,643-661).
gcctctggactatggtttt

SEQ ID NO: 790329 - DNA, 19 bp, Mus musculus
  siRNA target sequence for C530028O21Rik (NM_175696.2,809-827).
gtcacgatcaccatatcca

SEQ ID NO: 790330 - DNA, 19 bp, Mus musculus
  siRNA target sequence for C530028O21Rik (NM_175696.2,825-843).
ccatcatcatcgttcttgt

SEQ ID NO: 790331 - DNA, 19 bp, Mus musculus
  siRNA target sequence for C530028O21Rik (NM_175696.2,842-860).
gtggctaccggcatcatct

SEQ ID NO: 790332 - DNA, 19 bp, Mus musculus
  siRNA target sequence for C530028O21Rik (NM_175696.2,1092-1110).
ggattcccctggtgaatct

SEQ ID NO: 790333 - DNA, 19 bp, Mus musculus
  siRNA target sequence for Asah3 (NM_175731.2,30-48).
cgggcaccagagcaaagat

SEQ ID NO: 790334 - DNA, 19 bp, Mus musculus
  siRNA target sequence for Asah3 (NM_175731.2,82-100).
ggattggtgtgagagtaat

SEQ ID NO: 790335 - DNA, 19 bp, Mus musculus
  siRNA target sequence for Asah3 (NM_175731.2,87-105).
ggtgtgagagtaatttcca

SEQ ID NO: 790336 - DNA, 19 bp, Mus musculus
  siRNA target sequence for Asah3 (NM_175731.2,119-137).
gtggccgagttctacaata

SEQ ID NO: 790337 - DNA, 19 bp, Mus musculus
  siRNA target sequence for Asah3 (NM_175731.2,208-226).
gcgtacccggtgtttctat

SEQ ID NO: 790338 - DNA, 19 bp, Mus musculus
  siRNA target sequence for Asah3 (NM_175731.2,228-246).
gagtgtcagtcctcttcat

SEQ ID NO: 790339 - DNA, 19 bp, Mus musculus
  siRNA target sequence for Asah3 (NM_175731.2,354-372).
ggctgccccgttgctattt

SEQ ID NO: 790340 - DNA, 19 bp, Mus musculus
  siRNA target sequence for Asah3 (NM_175731.2,355-373).
gctgccccgttgctatttt

SEQ ID NO: 790341 - DNA, 19 bp, Mus musculus
  siRNA target sequence for Asah3 (NM_175731.2,406-424).
cagctgcctggtaactata

SEQ ID NO: 790342 - DNA, 19 bp, Mus musculus
  siRNA target sequence for Asah3 (NM_175731.2,415-433).
ggtaactataaccactatt

SEQ ID NO: 790343 - DNA, 19 bp, Mus musculus
  siRNA target sequence for Asah3 (NM_175731.2,416-434).
gtaactataaccactatta

SEQ ID NO: 790344 - DNA, 19 bp, Mus musculus
  siRNA target sequence for Asah3 (NM_175731.2,460-478).
gcccacagtcaatgcatat

SEQ ID NO: 790345 - DNA, 19 bp, Mus musculus
  siRNA target sequence for Asah3 (NM_175731.2,515-533).
gtgcgcacagagtacaaga

SEQ ID NO: 790346 - DNA, 19 bp, Mus musculus
  siRNA target sequence for Asah3 (NM_175731.2,518-536).
cgcacagagtacaagaaga

SEQ ID NO: 790347 - DNA, 19 bp, Mus musculus
  siRNA target sequence for Asah3 (NM_175731.2,519-537).
gcacagagtacaagaagat

SEQ ID NO: 790348 - DNA, 19 bp, Mus musculus
  siRNA target sequence for Asah3 (NM_175731.2,535-553).
gattagggatgatgatctt

SEQ ID NO: 790349 - DNA, 19 bp, Mus musculus
  siRNA target sequence for Asah3 (NM_175731.2,566-584).
gcggtttctgtggtcttat

SEQ ID NO: 790350 - DNA, 19 bp, Mus musculus
  siRNA target sequence for Asah3 (NM_175731.2,607-625).
gatcagtgaccgtgtactt

SEQ ID NO: 790351 - DNA, 19 bp, Mus musculus
  siRNA target sequence for Asah3 (NM_175731.2,636-654).
ggcagcggattcacttcta

SEQ ID NO: 790352 - DNA, 19 bp, Mus musculus
  siRNA target sequence for Asah3 (NM_175731.2,638-656).
cagcggattcacttctact

SEQ ID NO: 790353 - DNA, 19 bp, Mus musculus
  siRNA target sequence for Asah3 (NM_175731.2,672-690).
ggcacgtcctcataagcat

SEQ ID NO: 790354 - DNA, 19 bp, Mus musculus
  siRNA target sequence for Asah3 (NM_175731.2,677-695).
gtcctcataagcatcacat

SEQ ID NO: 790355 - DNA, 19 bp, Mus musculus
  siRNA target sequence for Asah3 (NM_175731.2,720-738).
ccctggtggatgcaaagta

SEQ ID NO: 790356 - DNA, 19 bp, Mus musculus
  siRNA target sequence for Asah3 (NM_175731.2,725-743).
gtggatgcaaagtatgaga

SEQ ID NO: 790357 - DNA, 19 bp, Mus musculus
  siRNA target sequence for Asah3 (NM_175731.2,736-754).
gtatgagatgccagataaa

SEQ ID NO: 790358 - DNA, 19 bp, Mus musculus
  siRNA target sequence for Asah3 (NM_175731.2,747-765).
cagataaaaccctcaaagt

SEQ ID NO: 790359 - DNA, 19 bp, Mus musculus
  siRNA target sequence for 4932417D18Rik (NM_175751.2,60-78).
gccgaggccgataaggttt

SEQ ID NO: 790360 - DNA, 19 bp, Mus musculus
  siRNA target sequence for 4932417D18Rik (NM_175751.2,61-79).
ccgaggccgataaggttta

SEQ ID NO: 790361 - DNA, 19 bp, Mus musculus
  siRNA target sequence for 4932417D18Rik (NM_175751.2,66-84).
gccgataaggtttacacat

SEQ ID NO: 790362 - DNA, 19 bp, Mus musculus
  siRNA target sequence for 4932417D18Rik (NM_175751.2,168-186).
gcaccactgcatgtattga

SEQ ID NO: 790363 - DNA, 19 bp, Mus musculus
  siRNA target sequence for 4932417D18Rik (NM_175751.2,232-250).
cctattcggacatatcaga

SEQ ID NO: 790364 - DNA, 19 bp, Mus musculus
  siRNA target sequence for 4932417D18Rik (NM_175751.2,233-251).
ctattcggacatatcagat

SEQ ID NO: 790365 - DNA, 19 bp, Mus musculus
  siRNA target sequence for 4932417D18Rik (NM_175751.2,347-365).
gaaagggcatccttcaact

SEQ ID NO: 790366 - DNA, 19 bp, Mus musculus
  siRNA target sequence for 4932417D18Rik (NM_175751.2,394-412).
cccattctccctattacca

SEQ ID NO: 790367 - DNA, 19 bp, Mus musculus
  siRNA target sequence for 4932417D18Rik (NM_175751.2,395-413).
ccattctccctattaccat

SEQ ID NO: 790368 - DNA, 19 bp, Mus musculus
  siRNA target sequence for 4932417D18Rik (NM_175751.2,490-508).
gcacacagggcatgaagat

SEQ ID NO: 790369 - DNA, 19 bp, Mus musculus
  siRNA target sequence for 4932417D18Rik (NM_175751.2,493-511).
cacagggcatgaagatcaa

SEQ ID NO: 790370 - DNA, 19 bp, Mus musculus
  siRNA target sequence for 4932417D18Rik (NM_175751.2,557-575).
gttggagtccaagaaagta

SEQ ID NO: 790371 - DNA, 19 bp, Mus musculus
  siRNA target sequence for 4932417D18Rik (NM_175751.2,678-696).
ctctatatggaccagaaat

SEQ ID NO: 790372 - DNA, 19 bp, Mus musculus
  siRNA target sequence for 4932417D18Rik (NM_175751.2,718-736).
cctacagacagcagtatga

SEQ ID NO: 790373 - DNA, 19 bp, Mus musculus
  siRNA target sequence for 4932417D18Rik (NM_175751.2,757-775).
gactggcagagcagaaaat

SEQ ID NO: 790374 - DNA, 19 bp, Mus musculus
  siRNA target sequence for 4932417D18Rik (NM_175751.2,811-829).
ctgaactccccttgaaaga

SEQ ID NO: 790375 - DNA, 19 bp, Mus musculus
  siRNA target sequence for 4932417D18Rik (NM_175751.2,835-853).
gcaaggaagacaataagca

SEQ ID NO: 790376 - DNA, 19 bp, Mus musculus
  siRNA target sequence for 4932417D18Rik (NM_175751.2,864-882).
ccatcagccactatctcaa

SEQ ID NO: 790377 - DNA, 19 bp, Mus musculus
  siRNA target sequence for 4932417D18Rik (NM_175751.2,895-913).
ccccggagcctaacaaaaa

SEQ ID NO: 790378 - DNA, 19 bp, Mus musculus
  siRNA target sequence for 4932417D18Rik (NM_175751.2,898-916).
cggagcctaacaaaaacca

SEQ ID NO: 790379 - DNA, 19 bp, Mus musculus
  siRNA target sequence for 4932417D18Rik (NM_175751.2,899-917).
ggagcctaacaaaaaccat

SEQ ID NO: 790380 - DNA, 19 bp, Mus musculus
  siRNA target sequence for 4932417D18Rik (NM_175751.2,927-945).
gggccatcagtgcctaata

SEQ ID NO: 790381 - DNA, 19 bp, Mus musculus
  siRNA target sequence for 4932417D18Rik (NM_175751.2,928-946).
ggccatcagtgcctaataa

SEQ ID NO: 790382 - DNA, 19 bp, Mus musculus
  siRNA target sequence for 4932417D18Rik (NM_175751.2,929-947).
gccatcagtgcctaataaa

SEQ ID NO: 790383 - DNA, 19 bp, Mus musculus
  siRNA target sequence for 4932417D18Rik (NM_175751.2,930-948).
ccatcagtgcctaataaaa

SEQ ID NO: 790384 - DNA, 19 bp, Mus musculus
  siRNA target sequence for 4932417D18Rik (NM_175751.2,934-952).
cagtgcctaataaaactga

SEQ ID NO: 790385 - DNA, 19 bp, Mus musculus
  siRNA target sequence for 4932417D18Rik (NM_175751.2,1069-1087).
ctgtcatggactctatgaa

SEQ ID NO: 790386 - DNA, 19 bp, Mus musculus
  siRNA target sequence for 4932417D18Rik (NM_175751.2,1105-1123).
caacctcgagatttaaaca

SEQ ID NO: 790387 - DNA, 19 bp, Mus musculus
  siRNA target sequence for 4932417D18Rik (NM_175751.2,1108-1126).
cctcgagatttaaacaaga

SEQ ID NO: 790388 - DNA, 19 bp, Mus musculus
  siRNA target sequence for 4932417D18Rik (NM_175751.2,1109-1127).
ctcgagatttaaacaagat

SEQ ID NO: 790389 - DNA, 19 bp, Mus musculus
  siRNA target sequence for 4932417D18Rik (NM_175751.2,1135-1153).
caaggacatggcaccatta

SEQ ID NO: 790390 - DNA, 19 bp, Mus musculus
  siRNA target sequence for 4932417D18Rik (NM_175751.2,1138-1156).
ggacatggcaccattatgt

SEQ ID NO: 790391 - DNA, 19 bp, Mus musculus
  siRNA target sequence for 4932417D18Rik (NM_175751.2,1141-1159).
catggcaccattatgtata

SEQ ID NO: 790392 - DNA, 19 bp, Mus musculus
  siRNA target sequence for 4932417D18Rik (NM_175751.2,1144-1162).
ggcaccattatgtatacca

SEQ ID NO: 790393 - DNA, 19 bp, Mus musculus
  siRNA target sequence for 4932417D18Rik (NM_175751.2,1231-1249).
caaggaagactcctaacaa

SEQ ID NO: 790394 - DNA, 19 bp, Mus musculus
  siRNA target sequence for 4932417D18Rik (NM_175751.2,1269-1287).
ctccccgtgtcattaacaa

SEQ ID NO: 790395 - DNA, 19 bp, Mus musculus
  siRNA target sequence for 4932417D18Rik (NM_175751.2,1272-1290).
cccgtgtcattaacaaaca

SEQ ID NO: 790396 - DNA, 19 bp, Mus musculus
  siRNA target sequence for 4932417D18Rik (NM_175751.2,1273-1291).
ccgtgtcattaacaaacat

SEQ ID NO: 790397 - DNA, 19 bp, Mus musculus
  siRNA target sequence for 4932417D18Rik (NM_175751.2,1275-1293).
gtgtcattaacaaacatca

SEQ ID NO: 790398 - DNA, 19 bp, Mus musculus
  siRNA target sequence for 4932417D18Rik (NM_175751.2,1433-1451).
gcaccagtcctacatacaa

SEQ ID NO: 790399 - DNA, 19 bp, Mus musculus
  siRNA target sequence for 4932417D18Rik (NM_175751.2,1434-1452).
caccagtcctacatacaat

SEQ ID NO: 790400 - DNA, 19 bp, Mus musculus
  siRNA target sequence for 4932417D18Rik (NM_175751.2,1468-1486).
cttacccacagatgtatga

SEQ ID NO: 790401 - DNA, 19 bp, Mus musculus
  siRNA target sequence for 4932417D18Rik (NM_175751.2,1508-1526).
ggctgtctctcctgtctta

SEQ ID NO: 790402 - DNA, 19 bp, Mus musculus
  siRNA target sequence for 4932417D18Rik (NM_175751.2,1519-1537).
ctgtcttaatgcacagtta

SEQ ID NO: 790403 - DNA, 19 bp, Mus musculus
  siRNA target sequence for 4932417D18Rik (NM_175751.2,1547-1565).
ctatctctctccaggattt

SEQ ID NO: 790404 - DNA, 19 bp, Mus musculus
  siRNA target sequence for 4932417D18Rik (NM_175751.2,1572-1590).
cctgtttatggaaagatgt

SEQ ID NO: 790405 - DNA, 19 bp, Mus musculus
  siRNA target sequence for 4932417D18Rik (NM_175751.2,1605-1623).
gcagagaaagtcaatacta

SEQ ID NO: 790406 - DNA, 19 bp, Mus musculus
  siRNA target sequence for 4932417D18Rik (NM_175751.2,1849-1867).
gtcaatacgacccttttca

SEQ ID NO: 790407 - DNA, 19 bp, Mus musculus
  siRNA target sequence for Spnb2 (NM_175836.1,375-393).
cacggtagccacagactat

SEQ ID NO: 790408 - DNA, 19 bp, Mus musculus
  siRNA target sequence for Spnb2 (NM_175836.1,377-395).
cggtagccacagactatga

SEQ ID NO: 790409 - DNA, 19 bp, Mus musculus
  siRNA target sequence for Spnb2 (NM_175836.1,1452-1470).
ggaggtgctccttttcaca

SEQ ID NO: 790410 - DNA, 19 bp, Mus musculus
  siRNA target sequence for Spnb2 (NM_175836.1,1453-1471).
gaggtgctccttttcacaa

SEQ ID NO: 790411 - DNA, 19 bp, Mus musculus
  siRNA target sequence for Spnb2 (NM_175836.1,1455-1473).
ggtgctccttttcacaatt

SEQ ID NO: 790412 - DNA, 19 bp, Mus musculus
  siRNA target sequence for Spnb2 (NM_175836.1,2748-2766).
caactacaggcccactatt

SEQ ID NO: 790413 - DNA, 19 bp, Mus musculus
  siRNA target sequence for Spnb2 (NM_175836.1,6988-7006).
gagtgggaggcccacaata

SEQ ID NO: 790414 - DNA, 19 bp, Mus musculus
  siRNA target sequence for Spnb2 (NM_175836.1,7020-7038).
caggtcctggcacaatgta

SEQ ID NO: 790415 - DNA, 19 bp, Mus musculus
  siRNA target sequence for Spnb2 (NM_175836.1,7022-7040).
ggtcctggcacaatgtata

SEQ ID NO: 790416 - DNA, 19 bp, Mus musculus
  siRNA target sequence for Spnb2 (NM_175836.1,7028-7046).
ggcacaatgtatattgtgt

SEQ ID NO: 790417 - DNA, 19 bp, Mus musculus
  siRNA target sequence for Spnb2 (NM_175836.1,7032-7050).
caatgtatattgtgtcata

SEQ ID NO: 790418 - DNA, 19 bp, Mus musculus
  siRNA target sequence for Spnb2 (NM_175836.1,7057-7075).
caagaaatgggcttctata

SEQ ID NO: 790419 - DNA, 19 bp, Mus musculus
  siRNA target sequence for Spnb2 (NM_175836.1,7148-7166).
gcgaagtggcccttgatta

SEQ ID NO: 790420 - DNA, 19 bp, Mus musculus
  siRNA target sequence for Spnb2 (NM_175836.1,7153-7171).
gtggcccttgattacaaaa

SEQ ID NO: 790421 - DNA, 19 bp, Mus musculus
  siRNA target sequence for Spnb2 (NM_175836.1,7183-7201).
gtgttcaagctaagactaa

SEQ ID NO: 790422 - DNA, 19 bp, Mus musculus
  siRNA target sequence for Spnb2 (NM_175836.1,7185-7203).
gttcaagctaagactaagt

SEQ ID NO: 790423 - DNA, 19 bp, Mus musculus
  siRNA target sequence for Spnb2 (NM_175836.1,7188-7206).
caagctaagactaagtgat

SEQ ID NO: 790424 - DNA, 19 bp, Mus musculus
  siRNA target sequence for D17Ertd808e (NM_175934.2,552-570).
ccatagaccccaaagaact

SEQ ID NO: 790425 - DNA, 19 bp, Mus musculus
  siRNA target sequence for D17Ertd808e (NM_175934.2,578-596).
ggcctggatagcttcctta

SEQ ID NO: 790426 - DNA, 19 bp, Mus musculus
  siRNA target sequence for D17Ertd808e (NM_175934.2,597-615).
cccgggacggagaagtgaa

SEQ ID NO: 790427 - DNA, 19 bp, Mus musculus
  siRNA target sequence for D17Ertd808e (NM_175934.2,675-693).
gtcggtgcacgtacttgaa

SEQ ID NO: 790428 - DNA, 19 bp, Mus musculus
  siRNA target sequence for D17Ertd808e (NM_175934.2,677-695).
cggtgcacgtacttgaaca

SEQ ID NO: 790429 - DNA, 19 bp, Mus musculus
  siRNA target sequence for D17Ertd808e (NM_175934.2,681-699).
gcacgtacttgaacataat

SEQ ID NO: 790430 - DNA, 19 bp, Mus musculus
  siRNA target sequence for D17Ertd808e (NM_175934.2,719-737).
gaagtgctcgtcaagttta

SEQ ID NO: 790431 - DNA, 19 bp, Mus musculus
  siRNA target sequence for D17Ertd808e (NM_175934.2,724-742).
gctcgtcaagtttattgat

SEQ ID NO: 790432 - DNA, 19 bp, Mus musculus
  siRNA target sequence for D17Ertd808e (NM_175934.2,747-765).
gtggctacaagcttctgaa

SEQ ID NO: 790433 - DNA, 19 bp, Mus musculus
  siRNA target sequence for D17Ertd808e (NM_175934.2,766-784).
caactggctaacatattca

SEQ ID NO: 790434 - DNA, 19 bp, Mus musculus
  siRNA target sequence for D17Ertd808e (NM_175934.2,1035-1053).
gtcgaaccacgcttcatga

SEQ ID NO: 790435 - DNA, 19 bp, Mus musculus
  siRNA target sequence for D17Ertd808e (NM_175934.2,1229-1247).
gttgtgtcagacaagtaca

SEQ ID NO: 790436 - DNA, 19 bp, Mus musculus
  siRNA target sequence for D17Ertd808e (NM_175934.2,1432-1450).
ccctgtcccaggcatcaaa

SEQ ID NO: 790437 - DNA, 19 bp, Mus musculus
  siRNA target sequence for D17Ertd808e (NM_175934.2,1602-1620).
ctgttccccctgttgaagt

SEQ ID NO: 790438 - DNA, 19 bp, Mus musculus
  siRNA target sequence for D17Ertd808e (NM_175934.2,2058-2076).
ctgatcctgagccatatga

SEQ ID NO: 790439 - DNA, 19 bp, Mus musculus
  siRNA target sequence for D17Ertd808e (NM_175934.2,2119-2137).
catggatgagactccatat

SEQ ID NO: 790440 - DNA, 19 bp, Mus musculus
  siRNA target sequence for D17Ertd808e (NM_175934.2,2205-2223).
cagttctggccaatcttat

SEQ ID NO: 790441 - DNA, 19 bp, Mus musculus
  siRNA target sequence for D17Ertd808e (NM_175934.2,2284-2302).
ggagatcctcacttccata

SEQ ID NO: 790442 - DNA, 19 bp, Mus musculus
  siRNA target sequence for D17Ertd808e (NM_175934.2,2556-2574).
ctcggggaggtgatccatt

SEQ ID NO: 790443 - DNA, 19 bp, Mus musculus
  siRNA target sequence for D17Ertd808e (NM_175934.2,2725-2743).
cggaggaggaccaccaaat

SEQ ID NO: 790444 - DNA, 19 bp, Mus musculus
  siRNA target sequence for D17Ertd808e (NM_175934.2,3069-3087).
ctgtctgccgacacttcat

SEQ ID NO: 790445 - DNA, 19 bp, Mus musculus
  siRNA target sequence for D17Ertd808e (NM_175934.2,3071-3089).
gtctgccgacacttcatga

SEQ ID NO: 790446 - DNA, 19 bp, Mus musculus
  siRNA target sequence for D17Ertd808e (NM_175934.2,3095-3113).
ggcaactgccgctatgaga

SEQ ID NO: 790447 - DNA, 19 bp, Mus musculus
  siRNA target sequence for 0710001K01Rik (NM_175935.2,162-180).
cctttctgggcgatcctaa

SEQ ID NO: 790448 - DNA, 19 bp, Mus musculus
  siRNA target sequence for 0710001K01Rik (NM_175935.2,169-187).
gggcgatcctaagaatctt

SEQ ID NO: 790449 - DNA, 19 bp, Mus musculus
  siRNA target sequence for 0710001K01Rik (NM_175935.2,171-189).
gcgatcctaagaatctttt

SEQ ID NO: 790450 - DNA, 19 bp, Mus musculus
  siRNA target sequence for 0710001K01Rik (NM_175935.2,172-190).
cgatcctaagaatcttttt

SEQ ID NO: 790451 - DNA, 19 bp, Mus musculus
  siRNA target sequence for 0710001K01Rik (NM_175935.2,365-383).
caccagttcccttcttctt

SEQ ID NO: 790452 - DNA, 19 bp, Mus musculus
  siRNA target sequence for 0710001K01Rik (NM_175935.2,446-464).
gtaatgacggccatttctt

SEQ ID NO: 790453 - DNA, 19 bp, Mus musculus
  siRNA target sequence for 0710001K01Rik (NM_175935.2,509-527).
cctggcctggcttattgta

SEQ ID NO: 790454 - DNA, 19 bp, Mus musculus
  siRNA target sequence for 0710001K01Rik (NM_175935.2,614-632).
gcccttggctggctaatga

SEQ ID NO: 790455 - DNA, 19 bp, Mus musculus
  siRNA target sequence for 0710001K01Rik (NM_175935.2,649-667).
ggagcgggagcttagcttt

SEQ ID NO: 790456 - DNA, 19 bp, Mus musculus
  siRNA target sequence for 0710001K01Rik (NM_175935.2,650-668).
gagcgggagcttagctttt

SEQ ID NO: 790457 - DNA, 19 bp, Mus musculus
  siRNA target sequence for 0710001K01Rik (NM_175935.2,652-670).
gcgggagcttagcttttat

SEQ ID NO: 790458 - DNA, 19 bp, Mus musculus
  siRNA target sequence for 0710001K01Rik (NM_175935.2,697-715).
gggtgccagcctcatgtat

SEQ ID NO: 790459 - DNA, 19 bp, Mus musculus
  siRNA target sequence for 0710001K01Rik (NM_175935.2,698-716).
ggtgccagcctcatgtatt

SEQ ID NO: 790460 - DNA, 19 bp, Mus musculus
  siRNA target sequence for 0710001K01Rik (NM_175935.2,984-1002).
ctcagatcagcctcttcta

SEQ ID NO: 790461 - DNA, 19 bp, Mus musculus
  siRNA target sequence for EC1-V2R (NM_175936.1,34-52).
ctcttggcttcttatcgtt

SEQ ID NO: 790462 - DNA, 19 bp, Mus musculus
  siRNA target sequence for EC1-V2R (NM_175936.1,41-59).
cttcttatcgtttggtttt

SEQ ID NO: 790463 - DNA, 19 bp, Mus musculus
  siRNA target sequence for EC1-V2R (NM_175936.1,132-150).
ctgatggaactgttgtcat

SEQ ID NO: 790464 - DNA, 19 bp, Mus musculus
  siRNA target sequence for EC1-V2R (NM_175936.1,185-203).
gtacgtacaacaacagatt

SEQ ID NO: 790465 - DNA, 19 bp, Mus musculus
  siRNA target sequence for EC1-V2R (NM_175936.1,189-207).
gtacaacaacagattggaa

SEQ ID NO: 790466 - DNA, 19 bp, Mus musculus
  siRNA target sequence for EC1-V2R (NM_175936.1,215-233).
cctatggattcagataatt

SEQ ID NO: 790467 - DNA, 19 bp, Mus musculus
  siRNA target sequence for EC1-V2R (NM_175936.1,220-238).
ggattcagataattatttt

SEQ ID NO: 790468 - DNA, 19 bp, Mus musculus
  siRNA target sequence for EC1-V2R (NM_175936.1,787-805).
cctacttcgtttgatatca

SEQ ID NO: 790469 - DNA, 19 bp, Mus musculus
  siRNA target sequence for EC1-V2R (NM_175936.1,806-824).
caagatcatatccacatta

SEQ ID NO: 790470 - DNA, 19 bp, Mus musculus
  siRNA target sequence for EC1-V2R (NM_175936.1,897-915).
catatagaacgtacaacaa

SEQ ID NO: 790471 - DNA, 19 bp, Mus musculus
  siRNA target sequence for EC1-V2R (NM_175936.1,929-947).
gttatgagtacaaaatggt

SEQ ID NO: 790472 - DNA, 19 bp, Mus musculus
  siRNA target sequence for Btn2 (NM_175938.2,282-300).
cgatagcctcccttctctt

SEQ ID NO: 790473 - DNA, 19 bp, Mus musculus
  siRNA target sequence for Btn2 (NM_175938.2,450-468).
ggttccggtggcgtttctt

SEQ ID NO: 790474 - DNA, 19 bp, Mus musculus
  siRNA target sequence for Btn2 (NM_175938.2,569-587).
ggaagagttgcgctcatta

SEQ ID NO: 790475 - DNA, 19 bp, Mus musculus
  siRNA target sequence for Btn2 (NM_175938.2,570-588).
gaagagttgcgctcattat

SEQ ID NO: 790476 - DNA, 19 bp, Mus musculus
  siRNA target sequence for Btn2 (NM_175938.2,573-591).
gagttgcgctcattatcca

SEQ ID NO: 790477 - DNA, 19 bp, Mus musculus
  siRNA target sequence for Btn2 (NM_175938.2,579-597).
cgctcattatccacaatgt

SEQ ID NO: 790478 - DNA, 19 bp, Mus musculus
  siRNA target sequence for Btn2 (NM_175938.2,656-674).
caggcaaccatgaagctta

SEQ ID NO: 790479 - DNA, 19 bp, Mus musculus
  siRNA target sequence for Btn2 (NM_175938.2,784-802).
gtggagagacccctatgat

SEQ ID NO: 790480 - DNA, 19 bp, Mus musculus
  siRNA target sequence for Btn2 (NM_175938.2,793-811).
cccctatgatgaagttgta

SEQ ID NO: 790481 - DNA, 19 bp, Mus musculus
  siRNA target sequence for Btn2 (NM_175938.2,858-876).
cagtcaccatgactataat

SEQ ID NO: 790482 - DNA, 19 bp, Mus musculus
  siRNA target sequence for Btn2 (NM_175938.2,907-925).
ctgctctgtcaataacact

SEQ ID NO: 790483 - DNA, 19 bp, Mus musculus
  siRNA target sequence for Btn2 (NM_175938.2,1010-1028).
gtcactctgcctgtagtaa

SEQ ID NO: 790484 - DNA, 19 bp, Mus musculus
  siRNA target sequence for Btn2 (NM_175938.2,1020-1038).
ctgtagtaatgctgattct

SEQ ID NO: 790485 - DNA, 19 bp, Mus musculus
  siRNA target sequence for Btn2 (NM_175938.2,1073-1091).
caccgcaggaagaaatcta

SEQ ID NO: 790486 - DNA, 19 bp, Mus musculus
  siRNA target sequence for Btn2 (NM_175938.2,1075-1093).
ccgcaggaagaaatctatt

SEQ ID NO: 790487 - DNA, 19 bp, Mus musculus
  siRNA target sequence for Btn2 (NM_175938.2,1089-1107).
ctattctgtcagctgaaaa

SEQ ID NO: 790488 - DNA, 19 bp, Mus musculus
  siRNA target sequence for Btn2 (NM_175938.2,1134-1152).
ctgcacggcaacttcaaga

SEQ ID NO: 790489 - DNA, 19 bp, Mus musculus
  siRNA target sequence for Btn2 (NM_175938.2,1164-1182).
ggagacgaaccctcttaca

SEQ ID NO: 790490 - DNA, 19 bp, Mus musculus
  siRNA target sequence for Btn2 (NM_175938.2,1165-1183).
gagacgaaccctcttacat

SEQ ID NO: 790491 - DNA, 19 bp, Mus musculus
  siRNA target sequence for Btn2 (NM_175938.2,1445-1463).
gcgtcttcaccgtatagct

SEQ ID NO: 790492 - DNA, 19 bp, Mus musculus
  siRNA target sequence for Btn2 (NM_175938.2,1585-1603).
ggcacagggagttacaata

SEQ ID NO: 790493 - DNA, 19 bp, Mus musculus
  siRNA target sequence for Btn2 (NM_175938.2,1607-1625).
gagggtggcttattcctat

SEQ ID NO: 790494 - DNA, 19 bp, Mus musculus
  siRNA target sequence for 1110036O03Rik (NM_176830.2,215-233).
gcccagtacgagaaataca

SEQ ID NO: 790495 - DNA, 19 bp, Mus musculus
  siRNA target sequence for 1110036O03Rik (NM_176830.2,706-724).
cgagctgaccgccaagtat

SEQ ID NO: 790496 - DNA, 19 bp, Mus musculus
  siRNA target sequence for 1110036O03Rik (NM_176830.2,710-728).
ctgaccgccaagtatctca

SEQ ID NO: 790497 - DNA, 19 bp, Mus musculus
  siRNA target sequence for 1110036O03Rik (NM_176830.2,716-734).
gccaagtatctcaactact

SEQ ID NO: 790498 - DNA, 19 bp, Mus musculus
  siRNA target sequence for 1110036O03Rik (NM_176830.2,717-735).
ccaagtatctcaactacta

SEQ ID NO: 790499 - DNA, 19 bp, Mus musculus
  siRNA target sequence for 1110036O03Rik (NM_176830.2,736-754).
cagggggatgctggatatt

SEQ ID NO: 790500 - DNA, 19 bp, Mus musculus
  siRNA target sequence for 1110036O03Rik (NM_176830.2,809-827).
cgggctgtgaaactttaca

SEQ ID NO: 790501 - DNA, 19 bp, Mus musculus
  siRNA target sequence for 1110036O03Rik (NM_176830.2,1001-1019).
gactgtgagaccaatctca

SEQ ID NO: 790502 - DNA, 19 bp, Mus musculus
  siRNA target sequence for 1110036O03Rik (NM_176830.2,1086-1104).
cctactacaaactgaatga

SEQ ID NO: 790503 - DNA, 19 bp, Mus musculus
  siRNA target sequence for 1110036O03Rik (NM_176830.2,1087-1105).
ctactacaaactgaatgat

SEQ ID NO: 790504 - DNA, 19 bp, Mus musculus
  siRNA target sequence for 1110036O03Rik (NM_176830.2,1152-1170).
ccaaggacagcgttatgca

SEQ ID NO: 790505 - DNA, 19 bp, Mus musculus
  siRNA target sequence for 1110036O03Rik (NM_176830.2,1169-1187).
cagcagaacctggtatatt

SEQ ID NO: 790506 - DNA, 19 bp, Mus musculus
  siRNA target sequence for 6030430B19Rik (NM_176832.1,173-191).
ggagaaccttaagaagatt

SEQ ID NO: 790507 - DNA, 19 bp, Mus musculus
  siRNA target sequence for 6030430B19Rik (NM_176832.1,179-197).
ccttaagaagattcaagaa

SEQ ID NO: 790508 - DNA, 19 bp, Mus musculus
  siRNA target sequence for 6030430B19Rik (NM_176832.1,288-306).
cgaaatggggtaaaactta

SEQ ID NO: 790509 - DNA, 19 bp, Mus musculus
  siRNA target sequence for 6030430B19Rik (NM_176832.1,289-307).
gaaatggggtaaaacttaa

SEQ ID NO: 790510 - DNA, 19 bp, Mus musculus
  siRNA target sequence for 6030430B19Rik (NM_176832.1,295-313).
gggtaaaacttaagaaagt

SEQ ID NO: 790511 - DNA, 19 bp, Mus musculus
  siRNA target sequence for 6030430B19Rik (NM_176832.1,351-369).
caactgaccccttatgaga

SEQ ID NO: 790512 - DNA, 19 bp, Mus musculus
  siRNA target sequence for 6030430B19Rik (NM_176832.1,378-396).
gacgacattcggtgcaaaa

SEQ ID NO: 790513 - DNA, 19 bp, Mus musculus
  siRNA target sequence for 6030430B19Rik (NM_176832.1,380-398).
cgacattcggtgcaaaaga

SEQ ID NO: 790514 - DNA, 19 bp, Mus musculus
  siRNA target sequence for 6030430B19Rik (NM_176832.1,404-422).
cttgagaaaagtaatggta

SEQ ID NO: 790515 - DNA, 19 bp, Mus musculus
  siRNA target sequence for 6030430B19Rik (NM_176832.1,407-425).
gagaaaagtaatggtaaat

SEQ ID NO: 790516 - DNA, 19 bp, Mus musculus
  siRNA target sequence for 6030430B19Rik (NM_176832.1,431-449).
cgtcccccctcggttgaaa

SEQ ID NO: 790517 - DNA, 19 bp, Mus musculus
  siRNA target sequence for 6030430B19Rik (NM_176832.1,432-450).
gtcccccctcggttgaaaa

SEQ ID NO: 790518 - DNA, 19 bp, Mus musculus
  siRNA target sequence for 6030430B19Rik (NM_176832.1,435-453).
ccccctcggttgaaaaaga

SEQ ID NO: 790519 - DNA, 19 bp, Mus musculus
  siRNA target sequence for 6030430B19Rik (NM_176832.1,467-485).
catccttgactttatcaga

SEQ ID NO: 790520 - DNA, 19 bp, Mus musculus
  siRNA target sequence for 6030430B19Rik (NM_176832.1,471-489).
cttgactttatcagatcaa

SEQ ID NO: 790521 - DNA, 19 bp, Mus musculus
  siRNA target sequence for 6030430B19Rik (NM_176832.1,546-564).
cggagcctccatgaaagaa

SEQ ID NO: 790522 - DNA, 19 bp, Mus musculus
  siRNA target sequence for 6030430B19Rik (NM_176832.1,622-640).
gacggagcagactagatgt

SEQ ID NO: 790523 - DNA, 19 bp, Mus musculus
  siRNA target sequence for 6030430B19Rik (NM_176832.1,649-667).
cagaatctccaaagaatgt

SEQ ID NO: 790524 - DNA, 19 bp, Mus musculus
  siRNA target sequence for 6030430B19Rik (NM_176832.1,684-702).
gtgaatggaggcttaacat

SEQ ID NO: 790525 - DNA, 19 bp, Mus musculus
  siRNA target sequence for 6030430B19Rik (NM_176832.1,690-708).
ggaggcttaacatctcaaa

SEQ ID NO: 790526 - DNA, 19 bp, Mus musculus
  siRNA target sequence for 6030430B19Rik (NM_176832.1,898-916).
ggaagaagcctccaaaatt

SEQ ID NO: 790527 - DNA, 19 bp, Mus musculus
  siRNA target sequence for 6030430B19Rik (NM_176832.1,997-1015).
cgaacgtgaggcagtttct

SEQ ID NO: 790528 - DNA, 19 bp, Mus musculus
  siRNA target sequence for 6030430B19Rik (NM_176832.1,1036-1054).
cacggtctcttgaggaatt

SEQ ID NO: 790529 - DNA, 19 bp, Mus musculus
  siRNA target sequence for 6030430B19Rik (NM_176832.1,1133-1151).
ggaaaagtaccaacagtat

SEQ ID NO: 790530 - DNA, 19 bp, Mus musculus
  siRNA target sequence for 6030430B19Rik (NM_176832.1,1200-1218).
cgaacccggaggttttcct

SEQ ID NO: 790531 - DNA, 19 bp, Mus musculus
  siRNA target sequence for 6030430B19Rik (NM_176832.1,1201-1219).
gaacccggaggttttcctt

SEQ ID NO: 790532 - DNA, 19 bp, Mus musculus
  siRNA target sequence for 6030430B19Rik (NM_176832.1,1293-1311).
ccttccaagccatactcta

SEQ ID NO: 790533 - DNA, 19 bp, Mus musculus
  siRNA target sequence for 6030430B19Rik (NM_176832.1,1303-1321).
catactctactctacctat

SEQ ID NO: 790534 - DNA, 19 bp, Mus musculus
  siRNA target sequence for 6030430B19Rik (NM_176832.1,1361-1379).
ctgttcgaggtcagaaaaa

SEQ ID NO: 790535 - DNA, 19 bp, Mus musculus
  siRNA target sequence for 6030430B19Rik (NM_176832.1,1513-1531).
gtgtggactgcaaaaagtt

SEQ ID NO: 790536 - DNA, 19 bp, Mus musculus
  siRNA target sequence for 6030430B19Rik (NM_176832.1,1515-1533).
gtggactgcaaaaagttca

SEQ ID NO: 790537 - DNA, 19 bp, Mus musculus
  siRNA target sequence for 6030430B19Rik (NM_176832.1,1564-1582).
gcctggtgctggctaacaa

SEQ ID NO: 790538 - DNA, 19 bp, Mus musculus
  siRNA target sequence for 6030430B19Rik (NM_176832.1,1565-1583).
cctggtgctggctaacaaa

SEQ ID NO: 790539 - DNA, 19 bp, Mus musculus
  siRNA target sequence for 6030430B19Rik (NM_176832.1,1585-1603).
gagccaggttgaaaaggaa

SEQ ID NO: 790540 - DNA, 19 bp, Mus musculus
  siRNA target sequence for 1110061N23Rik (NM_176834.1,688-706).
gtgcctgcagattctttat

SEQ ID NO: 790541 - DNA, 19 bp, Mus musculus
  siRNA target sequence for 1110061N23Rik (NM_176834.1,692-710).
ctgcagattctttatgagt

SEQ ID NO: 790542 - DNA, 19 bp, Mus musculus
  siRNA target sequence for 1110061N23Rik (NM_176834.1,714-732).
gccctaagtacaagttcat

SEQ ID NO: 790543 - DNA, 19 bp, Mus musculus
  siRNA target sequence for 1110061N23Rik (NM_176834.1,716-734).
cctaagtacaagttcatct

SEQ ID NO: 790544 - DNA, 19 bp, Mus musculus
  siRNA target sequence for 1110061N23Rik (NM_176834.1,788-806).
gcactggctgtcaacacat

SEQ ID NO: 790545 - DNA, 19 bp, Mus musculus
  siRNA target sequence for 2810451A06Rik (NM_176835.2,470-488).
ctttgcttcccagatagta

SEQ ID NO: 790546 - DNA, 19 bp, Mus musculus
  siRNA target sequence for 2810451A06Rik (NM_176835.2,482-500).
gatagtagtgggtgtctat

SEQ ID NO: 790547 - DNA, 19 bp, Mus musculus
  siRNA target sequence for 2810451A06Rik (NM_176835.2,513-531).
gctctagtcagcctttctt

SEQ ID NO: 790548 - DNA, 19 bp, Mus musculus
  siRNA target sequence for 2810451A06Rik (NM_176835.2,650-668).
cacgtcccctgtgttctat

SEQ ID NO: 790549 - DNA, 19 bp, Mus musculus
  siRNA target sequence for 2810451A06Rik (NM_176835.2,681-699).
gccatcctgcctatcagtt

SEQ ID NO: 790550 - DNA, 19 bp, Mus musculus
  siRNA target sequence for 2810451A06Rik (NM_176835.2,722-740).
gaagcatcgacgatacaaa

SEQ ID NO: 790551 - DNA, 19 bp, Mus musculus
  siRNA target sequence for 2810451A06Rik (NM_176835.2,747-765).
gcggggtcagagacactta

SEQ ID NO: 790552 - DNA, 19 bp, Mus musculus
  siRNA target sequence for 2810451A06Rik (NM_176835.2,819-837).
gcctacagtacgatgtaca

SEQ ID NO: 790553 - DNA, 19 bp, Mus musculus
  siRNA target sequence for 2810451A06Rik (NM_176835.2,820-838).
cctacagtacgatgtacaa

SEQ ID NO: 790554 - DNA, 19 bp, Mus musculus
  siRNA target sequence for 2810451A06Rik (NM_176835.2,841-859).
cagctgccaccattaacta

SEQ ID NO: 790555 - DNA, 19 bp, Mus musculus
  siRNA target sequence for 2810451A06Rik (NM_176835.2,1196-1214).
gatccaggctgcgtatgaa

SEQ ID NO: 790556 - DNA, 19 bp, Mus musculus
  siRNA target sequence for 2810485I05Rik (NM_176836.2,340-358).
gtcggattgcacatcctat

SEQ ID NO: 790557 - DNA, 19 bp, Mus musculus
  siRNA target sequence for 2810485I05Rik (NM_176836.2,429-447).
gctcaaaatgtcaagcaat

SEQ ID NO: 790558 - DNA, 19 bp, Mus musculus
  siRNA target sequence for 2810485I05Rik (NM_176836.2,430-448).
ctcaaaatgtcaagcaatt

SEQ ID NO: 790559 - DNA, 19 bp, Mus musculus
  siRNA target sequence for 2810485I05Rik (NM_176836.2,470-488).
gtactgtaacataattgca

SEQ ID NO: 790560 - DNA, 19 bp, Mus musculus
  siRNA target sequence for 2810485I05Rik (NM_176836.2,636-654).
ctctgcaccttgtcataca

SEQ ID NO: 790561 - DNA, 19 bp, Mus musculus
  siRNA target sequence for 2810485I05Rik (NM_176836.2,647-665).
gtcatacaagagagtttta

SEQ ID NO: 790562 - DNA, 19 bp, Mus musculus
  siRNA target sequence for 2810485I05Rik (NM_176836.2,649-667).
catacaagagagttttaca

SEQ ID NO: 790563 - DNA, 19 bp, Mus musculus
  siRNA target sequence for 2810485I05Rik (NM_176836.2,807-825).
cacaaagtcagcagtctaa

SEQ ID NO: 790564 - DNA, 19 bp, Mus musculus
  siRNA target sequence for 2810485I05Rik (NM_176836.2,914-932).
ggaatctaagccatctaat

SEQ ID NO: 790565 - DNA, 19 bp, Mus musculus
  siRNA target sequence for 2810485I05Rik (NM_176836.2,923-941).
gccatctaatggagatagt

SEQ ID NO: 790566 - DNA, 19 bp, Mus musculus
  siRNA target sequence for 2810485I05Rik (NM_176836.2,924-942).
ccatctaatggagatagta

SEQ ID NO: 790567 - DNA, 19 bp, Mus musculus
  siRNA target sequence for 2810485I05Rik (NM_176836.2,933-951).
ggagatagtagctctataa

SEQ ID NO: 790568 - DNA, 19 bp, Mus musculus
  siRNA target sequence for 2810485I05Rik (NM_176836.2,978-996).
gacaattttgtccttatca

SEQ ID NO: 790569 - DNA, 19 bp, Mus musculus
  siRNA target sequence for 2810485I05Rik (NM_176836.2,980-998).
caattttgtccttatcagt

SEQ ID NO: 790570 - DNA, 19 bp, Mus musculus
  siRNA target sequence for 2810485I05Rik (NM_176836.2,989-1007).
ccttatcagtcaactgaaa

SEQ ID NO: 790571 - DNA, 19 bp, Mus musculus
  siRNA target sequence for 2810485I05Rik (NM_176836.2,1019-1037).
gtcacttaaacgtctctta

SEQ ID NO: 790572 - DNA, 19 bp, Mus musculus
  siRNA target sequence for 2810485I05Rik (NM_176836.2,1030-1048).
gtctcttacagcaaagaga

SEQ ID NO: 790573 - DNA, 19 bp, Mus musculus
  siRNA target sequence for 2810485I05Rik (NM_176836.2,1040-1058).
gcaaagagaccagactatt

SEQ ID NO: 790574 - DNA, 19 bp, Mus musculus
  siRNA target sequence for 2810485I05Rik (NM_176836.2,1101-1119).
caataccaagagtcaaatt

SEQ ID NO: 790575 - DNA, 19 bp, Mus musculus
  siRNA target sequence for 2810485I05Rik (NM_176836.2,1178-1196).
ggccaaaaacagagaacta

SEQ ID NO: 790576 - DNA, 19 bp, Mus musculus
  siRNA target sequence for Arhgap18 (NM_176837.1,187-205).
cgcagatatggccaataca

SEQ ID NO: 790577 - DNA, 19 bp, Mus musculus
  siRNA target sequence for Arhgap18 (NM_176837.1,198-216).
ccaatacaccataaaccaa

SEQ ID NO: 790578 - DNA, 19 bp, Mus musculus
  siRNA target sequence for Arhgap18 (NM_176837.1,236-254).
ccgagaggcctccatttga

SEQ ID NO: 790579 - DNA, 19 bp, Mus musculus
  siRNA target sequence for Arhgap18 (NM_176837.1,237-255).
cgagaggcctccatttgat

SEQ ID NO: 790580 - DNA, 19 bp, Mus musculus
  siRNA target sequence for Arhgap18 (NM_176837.1,276-294).
cttggatgaatcaatggaa

SEQ ID NO: 790581 - DNA, 19 bp, Mus musculus
  siRNA target sequence for Arhgap18 (NM_176837.1,321-339).
caagaggtcgaatgaaaat

SEQ ID NO: 790582 - DNA, 19 bp, Mus musculus
  siRNA target sequence for Arhgap18 (NM_176837.1,350-368).
gtcaagaggccatagttgt

SEQ ID NO: 790583 - DNA, 19 bp, Mus musculus
  siRNA target sequence for Arhgap18 (NM_176837.1,357-375).
ggccatagttgtcaaagaa

SEQ ID NO: 790584 - DNA, 19 bp, Mus musculus
  siRNA target sequence for Arhgap18 (NM_176837.1,415-433).
gcaggtctatccaatcttt

SEQ ID NO: 790585 - DNA, 19 bp, Mus musculus
  siRNA target sequence for Arhgap18 (NM_176837.1,416-434).
caggtctatccaatctttt

SEQ ID NO: 790586 - DNA, 19 bp, Mus musculus
  siRNA target sequence for Arhgap18 (NM_176837.1,454-472).
ccgcaggaaagcattctgt

SEQ ID NO: 790587 - DNA, 19 bp, Mus musculus
  siRNA target sequence for Arhgap18 (NM_176837.1,572-590).
gtgacgtcagagacatatt

SEQ ID NO: 790588 - DNA, 19 bp, Mus musculus
  siRNA target sequence for Arhgap18 (NM_176837.1,646-664).
gtcagaacaaacgaaaaca

SEQ ID NO: 790589 - DNA, 19 bp, Mus musculus
  siRNA target sequence for Arhgap18 (NM_176837.1,695-713).
gtggggctgtcgatagcaa

SEQ ID NO: 790590 - DNA, 19 bp, Mus musculus
  siRNA target sequence for Arhgap18 (NM_176837.1,752-770).
ctgaaacagacatcaatct

SEQ ID NO: 790591 - DNA, 19 bp, Mus musculus
  siRNA target sequence for Arhgap18 (NM_176837.1,793-811).
gctgtcaatcagaaagagt

SEQ ID NO: 790592 - DNA, 19 bp, Mus musculus
  siRNA target sequence for Arhgap18 (NM_176837.1,794-812).
ctgtcaatcagaaagagtt

SEQ ID NO: 790593 - DNA, 19 bp, Mus musculus
  siRNA target sequence for Arhgap18 (NM_176837.1,849-867).
ctctttgcccagtttcaga

SEQ ID NO: 790594 - DNA, 19 bp, Mus musculus
  siRNA target sequence for Arhgap18 (NM_176837.1,970-988).
gatgtgttgggcttggaat

SEQ ID NO: 790595 - DNA, 19 bp, Mus musculus
  siRNA target sequence for Arhgap18 (NM_176837.1,1024-1042).
gactctggtctttttggta

SEQ ID NO: 790596 - DNA, 19 bp, Mus musculus
  siRNA target sequence for Arhgap18 (NM_176837.1,1040-1058).
gtattcctttaacgatatt

SEQ ID NO: 790597 - DNA, 19 bp, Mus musculus
  siRNA target sequence for Arhgap18 (NM_176837.1,1053-1071).
gatattgttagaacaagat

SEQ ID NO: 790598 - DNA, 19 bp, Mus musculus
  siRNA target sequence for Arhgap18 (NM_176837.1,1119-1137).
gatttctcgaattgaagaa

SEQ ID NO: 790599 - DNA, 19 bp, Mus musculus
  siRNA target sequence for Arhgap18 (NM_176837.1,1175-1193).
gagcagccatgagaatcaa

SEQ ID NO: 790600 - DNA, 19 bp, Mus musculus
  siRNA target sequence for Arhgap18 (NM_176837.1,1194-1212).
gaatctttgccaagaacta

SEQ ID NO: 790601 - DNA, 19 bp, Mus musculus
  siRNA target sequence for Arhgap18 (NM_176837.1,1207-1225).
gaactagaagcgaaatttt

SEQ ID NO: 790602 - DNA, 19 bp, Mus musculus
  siRNA target sequence for Arhgap18 (NM_176837.1,1385-1403).
ctttgaacctccttgtcat

SEQ ID NO: 790603 - DNA, 19 bp, Mus musculus
  siRNA target sequence for Arhgap18 (NM_176837.1,1453-1471).
ctccaaagagtcatagata

SEQ ID NO: 790604 - DNA, 19 bp, Mus musculus
  siRNA target sequence for Arhgap18 (NM_176837.1,1456-1474).
caaagagtcatagataaca

SEQ ID NO: 790605 - DNA, 19 bp, Mus musculus
  siRNA target sequence for Arhgap18 (NM_176837.1,1488-1506).
gatgacagctgggaatgta

SEQ ID NO: 790606 - DNA, 19 bp, Mus musculus
  siRNA target sequence for Arhgap18 (NM_176837.1,1513-1531).
gtcatggccccaaatctct

SEQ ID NO: 790607 - DNA, 19 bp, Mus musculus
  siRNA target sequence for Arhgap18 (NM_176837.1,1562-1580).
gtgaacagcgagaatttga

SEQ ID NO: 790608 - DNA, 19 bp, Mus musculus
  siRNA target sequence for Arhgap18 (NM_176837.1,1597-1615).
gcaaatgtcatgcacttat

SEQ ID NO: 790609 - DNA, 19 bp, Mus musculus
  siRNA target sequence for Arhgap18 (NM_176837.1,1598-1616).
caaatgtcatgcacttatt

SEQ ID NO: 790610 - DNA, 19 bp, Mus musculus
  siRNA target sequence for Arhgap18 (NM_176837.1,1636-1654).
ctatggacaatccctaaat

SEQ ID NO: 790611 - DNA, 19 bp, Mus musculus
  siRNA target sequence for Arhgap18 (NM_176837.1,1643-1661).
caatccctaaatttattgt

SEQ ID NO: 790612 - DNA, 19 bp, Mus musculus
  siRNA target sequence for Arhgap18 (NM_176837.1,1739-1757).
cttatgaccgggaaaaaca

SEQ ID NO: 790613 - DNA, 19 bp, Mus musculus
  siRNA target sequence for Arhgap18 (NM_176837.1,1816-1834).
caagctccccatctttcaa

SEQ ID NO: 790614 - DNA, 19 bp, Mus musculus
  siRNA target sequence for Arhgap18 (NM_176837.1,1845-1863).
ggcaatacagctaactgaa

SEQ ID NO: 790615 - DNA, 19 bp, Mus musculus
  siRNA target sequence for Arhgap18 (NM_176837.1,2032-2050).
gccgagtgggtcataaaat

SEQ ID NO: 790616 - DNA, 19 bp, Mus musculus
  siRNA target sequence for Arhgap18 (NM_176837.1,2035-2053).
gagtgggtcataaaatcca

SEQ ID NO: 790617 - DNA, 19 bp, Mus musculus
  siRNA target sequence for A430106J12Rik (NM_176841.2,189-207).
cttgaaatctctgtatgat

SEQ ID NO: 790618 - DNA, 19 bp, Mus musculus
  siRNA target sequence for A430106J12Rik (NM_176841.2,251-269).
ggcaagcttcagagtatga

SEQ ID NO: 790619 - DNA, 19 bp, Mus musculus
  siRNA target sequence for A430106J12Rik (NM_176841.2,253-271).
caagcttcagagtatgagt

SEQ ID NO: 790620 - DNA, 19 bp, Mus musculus
  siRNA target sequence for A430106J12Rik (NM_176841.2,297-315).
gaagtctgctcacaaaaat

SEQ ID NO: 790621 - DNA, 19 bp, Mus musculus
  siRNA target sequence for A430106J12Rik (NM_176841.2,336-354).
ccttgaagaccgttacaat

SEQ ID NO: 790622 - DNA, 19 bp, Mus musculus
  siRNA target sequence for A430106J12Rik (NM_176841.2,340-358).
gaagaccgttacaatcagt

SEQ ID NO: 790623 - DNA, 19 bp, Mus musculus
  siRNA target sequence for A430106J12Rik (NM_176841.2,343-361).
gaccgttacaatcagttat

SEQ ID NO: 790624 - DNA, 19 bp, Mus musculus
  siRNA target sequence for A430106J12Rik (NM_176841.2,346-364).
cgttacaatcagttattaa

SEQ ID NO: 790625 - DNA, 19 bp, Mus musculus
  siRNA target sequence for A430106J12Rik (NM_176841.2,471-489).
gctttgtggtgaaaatgat

SEQ ID NO: 790626 - DNA, 19 bp, Mus musculus
  siRNA target sequence for A430106J12Rik (NM_176841.2,479-497).
gtgaaaatgataggttaaa

SEQ ID NO: 790627 - DNA, 19 bp, Mus musculus
  siRNA target sequence for A430106J12Rik (NM_176841.2,487-505).
gataggttaaattatacat

SEQ ID NO: 790628 - DNA, 19 bp, Mus musculus
  siRNA target sequence for A430106J12Rik (NM_176841.2,503-521).
catatagtcagcttttaaa

SEQ ID NO: 790629 - DNA, 19 bp, Mus musculus
  siRNA target sequence for A430106J12Rik (NM_176841.2,563-581).
gtgttctaaataattctaa

SEQ ID NO: 790630 - DNA, 19 bp, Mus musculus
  siRNA target sequence for A430106J12Rik (NM_176841.2,627-645).
gcagtatcagcaactagat

SEQ ID NO: 790631 - DNA, 19 bp, Mus musculus
  siRNA target sequence for A430106J12Rik (NM_176841.2,628-646).
cagtatcagcaactagata

SEQ ID NO: 790632 - DNA, 19 bp, Mus musculus
  siRNA target sequence for A430106J12Rik (NM_176841.2,637-655).
caactagatatcacatcta

SEQ ID NO: 790633 - DNA, 19 bp, Mus musculus
  siRNA target sequence for A430106J12Rik (NM_176841.2,653-671).
ctaccaagctaaataacca

SEQ ID NO: 790634 - DNA, 19 bp, Mus musculus
  siRNA target sequence for A430106J12Rik (NM_176841.2,676-694).
gagttgctcagccaactta

SEQ ID NO: 790635 - DNA, 19 bp, Mus musculus
  siRNA target sequence for A430106J12Rik (NM_176841.2,719-737).
gacatctacttgatcagat

SEQ ID NO: 790636 - DNA, 19 bp, Mus musculus
  siRNA target sequence for A430106J12Rik (NM_176841.2,735-753).
gatccagacactaatgcta

SEQ ID NO: 790637 - DNA, 19 bp, Mus musculus
  siRNA target sequence for A430106J12Rik (NM_176841.2,920-938).
gaggcaactggattactct

SEQ ID NO: 790638 - DNA, 19 bp, Mus musculus
  siRNA target sequence for A430106J12Rik (NM_176841.2,922-940).
ggcaactggattactctaa

SEQ ID NO: 790639 - DNA, 19 bp, Mus musculus
  siRNA target sequence for A430106J12Rik (NM_176841.2,923-941).
gcaactggattactctaaa

SEQ ID NO: 790640 - DNA, 19 bp, Mus musculus
  siRNA target sequence for A430106J12Rik (NM_176841.2,924-942).
caactggattactctaaaa

SEQ ID NO: 790641 - DNA, 19 bp, Mus musculus
  siRNA target sequence for A430106J12Rik (NM_176841.2,982-1000).
gaacgtcagaaatctctaa

SEQ ID NO: 790642 - DNA, 19 bp, Mus musculus
  siRNA target sequence for A430106J12Rik (NM_176841.2,988-1006).
cagaaatctctaacactaa

SEQ ID NO: 790643 - DNA, 19 bp, Mus musculus
  siRNA target sequence for A430106J12Rik (NM_176841.2,990-1008).
gaaatctctaacactaaca

SEQ ID NO: 790644 - DNA, 19 bp, Mus musculus
  siRNA target sequence for A430106J12Rik (NM_176841.2,1070-1088).
gctcttcagtaggatcaaa

SEQ ID NO: 790645 - DNA, 19 bp, Mus musculus
  siRNA target sequence for A430106J12Rik (NM_176841.2,1082-1100).
gatcaaactctttagaaga

SEQ ID NO: 790646 - DNA, 19 bp, Mus musculus
  siRNA target sequence for A430106J12Rik (NM_176841.2,1200-1218).
ggaggtccctgatgatatt

SEQ ID NO: 790647 - DNA, 19 bp, Mus musculus
  siRNA target sequence for A430106J12Rik (NM_176841.2,1203-1221).
ggtccctgatgatatttca

SEQ ID NO: 790648 - DNA, 19 bp, Mus musculus
  siRNA target sequence for A430106J12Rik (NM_176841.2,1204-1222).
gtccctgatgatatttcaa

SEQ ID NO: 790649 - DNA, 19 bp, Mus musculus
  siRNA target sequence for A430106J12Rik (NM_176841.2,1213-1231).
gatatttcaacgggtaaaa

SEQ ID NO: 790650 - DNA, 19 bp, Mus musculus
  siRNA target sequence for A430106J12Rik (NM_176841.2,1309-1327).
cgatccaagcagttggtta

SEQ ID NO: 790651 - DNA, 19 bp, Mus musculus
  siRNA target sequence for A430106J12Rik (NM_176841.2,1313-1331).
ccaagcagttggttaataa

SEQ ID NO: 790652 - DNA, 19 bp, Mus musculus
  siRNA target sequence for A430106J12Rik (NM_176841.2,1314-1332).
caagcagttggttaataat

SEQ ID NO: 790653 - DNA, 19 bp, Mus musculus
  siRNA target sequence for A430106J12Rik (NM_176841.2,1317-1335).
gcagttggttaataataaa

SEQ ID NO: 790654 - DNA, 19 bp, Mus musculus
  siRNA target sequence for A430106J12Rik (NM_176841.2,1361-1379).
gtccacaaggtattagtga

SEQ ID NO: 790655 - DNA, 19 bp, Mus musculus
  siRNA target sequence for A430106J12Rik (NM_176841.2,1366-1384).
caaggtattagtgatgatt

SEQ ID NO: 790656 - DNA, 19 bp, Mus musculus
  siRNA target sequence for A430106J12Rik (NM_176841.2,1437-1455).
cagaacatccactagcaat

SEQ ID NO: 790657 - DNA, 19 bp, Mus musculus
  siRNA target sequence for A430106J12Rik (NM_176841.2,1442-1460).
catccactagcaatagcaa

SEQ ID NO: 790658 - DNA, 19 bp, Mus musculus
  siRNA target sequence for A430106J12Rik (NM_176841.2,1485-1503).
caaagcaggtgcagttaat

SEQ ID NO: 790659 - DNA, 19 bp, Mus musculus
  siRNA target sequence for A430106J12Rik (NM_176841.2,1579-1597).
ggtagcagtccaattcagt

SEQ ID NO: 790660 - DNA, 19 bp, Mus musculus
  siRNA target sequence for A430106J12Rik (NM_176841.2,1625-1643).
ctatgctccagcacaaaat

SEQ ID NO: 790661 - DNA, 19 bp, Mus musculus
  siRNA target sequence for A430106J12Rik (NM_176841.2,1629-1647).
gctccagcacaaaatatct

SEQ ID NO: 790662 - DNA, 19 bp, Mus musculus
  siRNA target sequence for A430106J12Rik (NM_176841.2,1661-1679).
gtcgagcccatcacaagat

SEQ ID NO: 790663 - DNA, 19 bp, Mus musculus
  siRNA target sequence for A430106J12Rik (NM_176841.2,1764-1782).
gtcctcgagtcaagagaat

SEQ ID NO: 790664 - DNA, 19 bp, Mus musculus
  siRNA target sequence for A430106J12Rik (NM_176841.2,1766-1784).
cctcgagtcaagagaatct

SEQ ID NO: 790665 - DNA, 19 bp, Mus musculus
  siRNA target sequence for A430106J12Rik (NM_176841.2,1767-1785).
ctcgagtcaagagaatctt

SEQ ID NO: 790666 - DNA, 19 bp, Mus musculus
  siRNA target sequence for A430106J12Rik (NM_176841.2,1772-1790).
gtcaagagaatcttttaga

SEQ ID NO: 790667 - DNA, 19 bp, Mus musculus
  siRNA target sequence for A430106J12Rik (NM_176841.2,1857-1875).
cctggccaggtcagtaagt

SEQ ID NO: 790668 - DNA, 19 bp, Mus musculus
  siRNA target sequence for A430106J12Rik (NM_176841.2,1866-1884).
gtcagtaagtggaaagact

SEQ ID NO: 790669 - DNA, 19 bp, Mus musculus
  siRNA target sequence for A430106J12Rik (NM_176841.2,1883-1901).
ctccaggggacttctatga

SEQ ID NO: 790670 - DNA, 19 bp, Mus musculus
  siRNA target sequence for A430106J12Rik (NM_176841.2,1885-1903).
ccaggggacttctatgata

SEQ ID NO: 790671 - DNA, 19 bp, Mus musculus
  siRNA target sequence for A430106J12Rik (NM_176841.2,1907-1925).
ggacaactaagcctgaatt

SEQ ID NO: 790672 - DNA, 19 bp, Mus musculus
  siRNA target sequence for A430106J12Rik (NM_176841.2,2028-2046).
ctctgtgtcaagacaatca

SEQ ID NO: 790673 - DNA, 19 bp, Mus musculus
  siRNA target sequence for A430106J12Rik (NM_176841.2,2055-2073).
caatccttatgccacttta

SEQ ID NO: 790674 - DNA, 19 bp, Mus musculus
  siRNA target sequence for A430106J12Rik (NM_176841.2,2080-2098).
gcaagcagtgtgatctcta

SEQ ID NO: 790675 - DNA, 19 bp, Mus musculus
  siRNA target sequence for A430106J12Rik (NM_176841.2,2121-2139).
gacgagcatccatgatttt

SEQ ID NO: 790676 - DNA, 19 bp, Mus musculus
  siRNA target sequence for A430106J12Rik (NM_176841.2,2161-2179).
cccgtgtcagtcgattcat

SEQ ID NO: 790677 - DNA, 19 bp, Mus musculus
  siRNA target sequence for A430106J12Rik (NM_176841.2,2163-2181).
cgtgtcagtcgattcatca

SEQ ID NO: 790678 - DNA, 19 bp, Mus musculus
  siRNA target sequence for 1810034M08Rik (NM_176842.2,156-174).
cacagcagctggacttgtt

SEQ ID NO: 790679 - DNA, 19 bp, Mus musculus
  siRNA target sequence for 1810034M08Rik (NM_176842.2,184-202).
cagggtgacccttctgtta

SEQ ID NO: 790680 - DNA, 19 bp, Mus musculus
  siRNA target sequence for 1810034M08Rik (NM_176842.2,186-204).
gggtgacccttctgttatt

SEQ ID NO: 790681 - DNA, 19 bp, Mus musculus
  siRNA target sequence for 1810034M08Rik (NM_176842.2,188-206).
gtgacccttctgttattta

SEQ ID NO: 790682 - DNA, 19 bp, Mus musculus
  siRNA target sequence for 1810034M08Rik (NM_176842.2,241-259).
ggccatggaaggatctatt

SEQ ID NO: 790683 - DNA, 19 bp, Mus musculus
  siRNA target sequence for 1810034M08Rik (NM_176842.2,255-273).
ctattgatggttcattgat

SEQ ID NO: 790684 - DNA, 19 bp, Mus musculus
  siRNA target sequence for 1810034M08Rik (NM_176842.2,292-310).
cgatccatttcagatactt

SEQ ID NO: 790685 - DNA, 19 bp, Mus musculus
  siRNA target sequence for 1810034M08Rik (NM_176842.2,318-336).
caaacaaagccgttcatct

SEQ ID NO: 790686 - DNA, 19 bp, Mus musculus
  siRNA target sequence for 1810034M08Rik (NM_176842.2,363-381).
gaactctgtctactgaaat

SEQ ID NO: 790687 - DNA, 19 bp, Mus musculus
  siRNA target sequence for 1810034M08Rik (NM_176842.2,388-406).
caacctctccccaaataat

SEQ ID NO: 790688 - DNA, 19 bp, Mus musculus
  siRNA target sequence for 1810034M08Rik (NM_176842.2,434-452).
ggcatttcagaaactaaca

SEQ ID NO: 790689 - DNA, 19 bp, Mus musculus
  siRNA target sequence for 1810034M08Rik (NM_176842.2,436-454).
catttcagaaactaacact

SEQ ID NO: 790690 - DNA, 19 bp, Mus musculus
  siRNA target sequence for 1810034M08Rik (NM_176842.2,447-465).
ctaacacttcagttctgat

SEQ ID NO: 790691 - DNA, 19 bp, Mus musculus
  siRNA target sequence for 1810034M08Rik (NM_176842.2,451-469).
cacttcagttctgattgtt

SEQ ID NO: 790692 - DNA, 19 bp, Mus musculus
  siRNA target sequence for 1810034M08Rik (NM_176842.2,502-520).
ggaacacctagtatctcaa

SEQ ID NO: 790693 - DNA, 19 bp, Mus musculus
  siRNA target sequence for 1810034M08Rik (NM_176842.2,544-562).
ggaaagtcttccagaaata

SEQ ID NO: 790694 - DNA, 19 bp, Mus musculus
  siRNA target sequence for 1810034M08Rik (NM_176842.2,564-582).
caaggctctcggaagtcaa

SEQ ID NO: 790695 - DNA, 19 bp, Mus musculus
  siRNA target sequence for 1810034M08Rik (NM_176842.2,573-591).
cggaagtcaagaagatata

SEQ ID NO: 790696 - DNA, 19 bp, Mus musculus
  siRNA target sequence for 1810034M08Rik (NM_176842.2,611-629).
gagaggattgggacgttat

SEQ ID NO: 790697 - DNA, 19 bp, Mus musculus
  siRNA target sequence for 1810034M08Rik (NM_176842.2,615-633).
ggattgggacgttattgga

SEQ ID NO: 790698 - DNA, 19 bp, Mus musculus
  siRNA target sequence for 1810034M08Rik (NM_176842.2,621-639).
ggacgttattggatgctat

SEQ ID NO: 790699 - DNA, 19 bp, Mus musculus
  siRNA target sequence for 1810034M08Rik (NM_176842.2,624-642).
cgttattggatgctatcat

SEQ ID NO: 790700 - DNA, 19 bp, Mus musculus
  siRNA target sequence for 1810034M08Rik (NM_176842.2,625-643).
gttattggatgctatcatt

SEQ ID NO: 790701 - DNA, 19 bp, Mus musculus
  siRNA target sequence for 1110055N21Rik (NM_176843.2,1109-1127).
gctttgctcggcacagtat

SEQ ID NO: 790702 - DNA, 19 bp, Mus musculus
  siRNA target sequence for 1110055N21Rik (NM_176843.2,1775-1793).
gcccggtttcttcgaaatt

SEQ ID NO: 790703 - DNA, 19 bp, Mus musculus
  siRNA target sequence for 1110055N21Rik (NM_176843.2,1776-1794).
cccggtttcttcgaaattt

SEQ ID NO: 790704 - DNA, 19 bp, Mus musculus
  siRNA target sequence for B130009M24Rik (NM_176846.2,76-94).
cctcaggggtttgatttca

SEQ ID NO: 790705 - DNA, 19 bp, Mus musculus
  siRNA target sequence for B130009M24Rik (NM_176846.2,171-189).
ggacaggatcagcaaactt

SEQ ID NO: 790706 - DNA, 19 bp, Mus musculus
  siRNA target sequence for B130009M24Rik (NM_176846.2,269-287).
gcaatgaaacagatgttaa

SEQ ID NO: 790707 - DNA, 19 bp, Mus musculus
  siRNA target sequence for B130009M24Rik (NM_176846.2,280-298).
gatgttaaccagatgttaa

SEQ ID NO: 790708 - DNA, 19 bp, Mus musculus
  siRNA target sequence for B130009M24Rik (NM_176846.2,307-325).
cttacatataggctacaaa

SEQ ID NO: 790709 - DNA, 19 bp, Mus musculus
  siRNA target sequence for B130009M24Rik (NM_176846.2,343-361).
gatccgatggaattacaaa

SEQ ID NO: 790710 - DNA, 19 bp, Mus musculus
  siRNA target sequence for B130009M24Rik (NM_176846.2,368-386).
gatctaaaagcctaataaa

SEQ ID NO: 790711 - DNA, 19 bp, Mus musculus
  siRNA target sequence for B130009M24Rik (NM_176846.2,371-389).
ctaaaagcctaataaacca

SEQ ID NO: 790712 - DNA, 19 bp, Mus musculus
  siRNA target sequence for B130009M24Rik (NM_176846.2,414-432).
gagctttcggtcatccttt

SEQ ID NO: 790713 - DNA, 19 bp, Mus musculus
  siRNA target sequence for B130009M24Rik (NM_176846.2,457-475).
cctgcgaaggagactctaa

SEQ ID NO: 790714 - DNA, 19 bp, Mus musculus
  siRNA target sequence for B130009M24Rik (NM_176846.2,458-476).
ctgcgaaggagactctaaa

SEQ ID NO: 790715 - DNA, 19 bp, Mus musculus
  siRNA target sequence for B130009M24Rik (NM_176846.2,501-519).
gtgcgatgagcgtgtaaga

SEQ ID NO: 790716 - DNA, 19 bp, Mus musculus
  siRNA target sequence for B130009M24Rik (NM_176846.2,538-556).
gggacagcttcggcaaaaa

SEQ ID NO: 790717 - DNA, 19 bp, Mus musculus
  siRNA target sequence for B130009M24Rik (NM_176846.2,539-557).
ggacagcttcggcaaaaat

SEQ ID NO: 790718 - DNA, 19 bp, Mus musculus
  siRNA target sequence for B130009M24Rik (NM_176846.2,544-562).
gcttcggcaaaaatataca

SEQ ID NO: 790719 - DNA, 19 bp, Mus musculus
  siRNA target sequence for B130009M24Rik (NM_176846.2,549-567).
ggcaaaaatatacaattca

SEQ ID NO: 790720 - DNA, 19 bp, Mus musculus
  siRNA target sequence for B130009M24Rik (NM_176846.2,604-622).
cctaagccagccatcatga

SEQ ID NO: 790721 - DNA, 19 bp, Mus musculus
  siRNA target sequence for B130009M24Rik (NM_176846.2,671-689).
gtgagtttttccaagtttt

SEQ ID NO: 790722 - DNA, 19 bp, Mus musculus
  siRNA target sequence for B130009M24Rik (NM_176846.2,743-761).
ccagagtgccattcaacta

SEQ ID NO: 790723 - DNA, 19 bp, Mus musculus
  siRNA target sequence for B130009M24Rik (NM_176846.2,828-846).
gaactaccacagtgaaact

SEQ ID NO: 790724 - DNA, 19 bp, Mus musculus
  siRNA target sequence for B130009M24Rik (NM_176846.2,841-859).
gaaacttccaacatgtcta

SEQ ID NO: 790725 - DNA, 19 bp, Mus musculus
  siRNA target sequence for B130009M24Rik (NM_176846.2,845-863).
cttccaacatgtctatcta

SEQ ID NO: 790726 - DNA, 19 bp, Mus musculus
  siRNA target sequence for B130009M24Rik (NM_176846.2,884-902).
cccctagagaaggctttaa

SEQ ID NO: 790727 - DNA, 19 bp, Mus musculus
  siRNA target sequence for B130009M24Rik (NM_176846.2,917-935).
ggacaaagacaatttatga

SEQ ID NO: 790728 - DNA, 19 bp, Mus musculus
  siRNA target sequence for B130009M24Rik (NM_176846.2,970-988).
gaagacttcatgcaaaaga

SEQ ID NO: 790729 - DNA, 19 bp, Mus musculus
  siRNA target sequence for B130009M24Rik (NM_176846.2,1017-1035).
cgacagccggcaaagatca

SEQ ID NO: 790730 - DNA, 19 bp, Mus musculus
  siRNA target sequence for B130009M24Rik (NM_176846.2,1042-1060).
cctgccacagggagtttca

SEQ ID NO: 790731 - DNA, 19 bp, Mus musculus
  siRNA target sequence for B130009M24Rik (NM_176846.2,1077-1095).
ctttccagccgatactcaa

SEQ ID NO: 790732 - DNA, 19 bp, Mus musculus
  siRNA target sequence for B130009M24Rik (NM_176846.2,1081-1099).
ccagccgatactcaaaaca

SEQ ID NO: 790733 - DNA, 19 bp, Mus musculus
  siRNA target sequence for B130009M24Rik (NM_176846.2,1082-1100).
cagccgatactcaaaacaa

SEQ ID NO: 790734 - DNA, 19 bp, Mus musculus
  siRNA target sequence for B130009M24Rik (NM_176846.2,1084-1102).
gccgatactcaaaacaaga

SEQ ID NO: 790735 - DNA, 19 bp, Mus musculus
  siRNA target sequence for B130009M24Rik (NM_176846.2,1087-1105).
gatactcaaaacaagagta

SEQ ID NO: 790736 - DNA, 19 bp, Mus musculus
  siRNA target sequence for B130009M24Rik (NM_176846.2,1137-1155).
caaaaggactcctttatct

SEQ ID NO: 790737 - DNA, 19 bp, Mus musculus
  siRNA target sequence for B130009M24Rik (NM_176846.2,1173-1191).
gtcagatgcttctagacat

SEQ ID NO: 790738 - DNA, 19 bp, Mus musculus
  siRNA target sequence for B130009M24Rik (NM_176846.2,1243-1261).
cccgaggagcaatatgtgt

SEQ ID NO: 790739 - DNA, 19 bp, Mus musculus
  siRNA target sequence for B130009M24Rik (NM_176846.2,1262-1280).
ctcctaggtgttttcaaga

SEQ ID NO: 790740 - DNA, 19 bp, Mus musculus
  siRNA target sequence for B130009M24Rik (NM_176846.2,1338-1356).
cgtccctgtggctaatgca

SEQ ID NO: 790741 - DNA, 19 bp, Mus musculus
  siRNA target sequence for B130009M24Rik (NM_176846.2,1339-1357).
gtccctgtggctaatgcaa

SEQ ID NO: 790742 - DNA, 19 bp, Mus musculus
  siRNA target sequence for B130009M24Rik (NM_176846.2,1394-1412).
cattctaccgtcagagtaa

SEQ ID NO: 790743 - DNA, 19 bp, Mus musculus
  siRNA target sequence for B130009M24Rik (NM_176846.2,1464-1482).
gagatttggacagaattct

SEQ ID NO: 790744 - DNA, 19 bp, Mus musculus
  siRNA target sequence for B130009M24Rik (NM_176846.2,1487-1505).
ggagccgacaggaagagta

SEQ ID NO: 790745 - DNA, 19 bp, Mus musculus
  siRNA target sequence for B130009M24Rik (NM_176846.2,1488-1506).
gagccgacaggaagagtat

SEQ ID NO: 790746 - DNA, 19 bp, Mus musculus
  siRNA target sequence for B130009M24Rik (NM_176846.2,1492-1510).
cgacaggaagagtattcgt

SEQ ID NO: 790747 - DNA, 19 bp, Mus musculus
  siRNA target sequence for B130009M24Rik (NM_176846.2,1627-1645).
cagcactggaggtcacatt

SEQ ID NO: 790748 - DNA, 19 bp, Mus musculus
  siRNA target sequence for B130009M24Rik (NM_176846.2,1629-1647).
gcactggaggtcacattct

SEQ ID NO: 790749 - DNA, 19 bp, Mus musculus
  siRNA target sequence for B130009M24Rik (NM_176846.2,1646-1664).
cttccggccatggaacata

SEQ ID NO: 790750 - DNA, 19 bp, Mus musculus
  siRNA target sequence for B130009M24Rik (NM_176846.2,1649-1667).
ccggccatggaacatatgt

SEQ ID NO: 790751 - DNA, 19 bp, Mus musculus
  siRNA target sequence for B130009M24Rik (NM_176846.2,1650-1668).
cggccatggaacatatgtt

SEQ ID NO: 790752 - DNA, 19 bp, Mus musculus
  siRNA target sequence for B130009M24Rik (NM_176846.2,1690-1708).
cattgctggcgatctgatt

SEQ ID NO: 790753 - DNA, 19 bp, Mus musculus
  siRNA target sequence for B130009M24Rik (NM_176846.2,1694-1712).
gctggcgatctgattttca

SEQ ID NO: 790754 - DNA, 19 bp, Mus musculus
  siRNA target sequence for B130009M24Rik (NM_176846.2,1695-1713).
ctggcgatctgattttcaa

SEQ ID NO: 790755 - DNA, 19 bp, Mus musculus
  siRNA target sequence for B130009M24Rik (NM_176846.2,1698-1716).
gcgatctgattttcaaaca

SEQ ID NO: 790756 - DNA, 19 bp, Mus musculus
  siRNA target sequence for B130009M24Rik (NM_176846.2,1699-1717).
cgatctgattttcaaacat

SEQ ID NO: 790757 - DNA, 19 bp, Mus musculus
  siRNA target sequence for B130009M24Rik (NM_176846.2,1848-1866).
gggctacttccctgtagaa

SEQ ID NO: 790758 - DNA, 19 bp, Mus musculus
  siRNA target sequence for B130009M24Rik (NM_176846.2,1985-2003).
cggattccacagctacttt

SEQ ID NO: 790759 - DNA, 19 bp, Mus musculus
  siRNA target sequence for B130009M24Rik (NM_176846.2,1996-2014).
gctactttgcagaaaataa

SEQ ID NO: 790760 - DNA, 19 bp, Mus musculus
  siRNA target sequence for B130009M24Rik (NM_176846.2,1997-2015).
ctactttgcagaaaataat

SEQ ID NO: 790761 - DNA, 19 bp, Mus musculus
  siRNA target sequence for B130009M24Rik (NM_176846.2,2016-2034).
ccccaataagccagacttt

SEQ ID NO: 790762 - DNA, 19 bp, Mus musculus
  siRNA target sequence for B130009M24Rik (NM_176846.2,2067-2085).
ggcctgtagccattctact

SEQ ID NO: 790763 - DNA, 19 bp, Mus musculus
  siRNA target sequence for B130009M24Rik (NM_176846.2,2133-2151).
gacgaacagtgagaaagat

SEQ ID NO: 790764 - DNA, 19 bp, Mus musculus
  siRNA target sequence for B130009M24Rik (NM_176846.2,2215-2233).
gggttaccccaatatgttt

SEQ ID NO: 790765 - DNA, 19 bp, Mus musculus
  siRNA target sequence for B130009M24Rik (NM_176846.2,2216-2234).
ggttaccccaatatgtttt

SEQ ID NO: 790766 - DNA, 19 bp, Mus musculus
  siRNA target sequence for B130009M24Rik (NM_176846.2,2221-2239).
ccccaatatgttttacata

SEQ ID NO: 790767 - DNA, 19 bp, Mus musculus
  siRNA target sequence for B130009M24Rik (NM_176846.2,2223-2241).
ccaatatgttttacataca

SEQ ID NO: 790768 - DNA, 19 bp, Mus musculus
  siRNA target sequence for B130009M24Rik (NM_176846.2,2287-2305).
gactcagcccaaaatgaca

SEQ ID NO: 790769 - DNA, 19 bp, Mus musculus
  siRNA target sequence for B130009M24Rik (NM_176846.2,2296-2314).
caaaatgacaggtatggtt

SEQ ID NO: 790770 - DNA, 19 bp, Mus musculus
  siRNA target sequence for B130009M24Rik (NM_176846.2,2370-2388).
gggtacttcccaaattcat

SEQ ID NO: 790771 - DNA, 19 bp, Mus musculus
  siRNA target sequence for B130009M24Rik (NM_176846.2,2371-2389).
ggtacttcccaaattcata

SEQ ID NO: 790772 - DNA, 19 bp, Mus musculus
  siRNA target sequence for B130009M24Rik (NM_176846.2,2379-2397).
ccaaattcatacaacacaa

SEQ ID NO: 790773 - DNA, 19 bp, Mus musculus
  siRNA target sequence for B130009M24Rik (NM_176846.2,2554-2572).
gagagttcaaacaccatta

SEQ ID NO: 790774 - DNA, 19 bp, Mus musculus
  siRNA target sequence for B130009M24Rik (NM_176846.2,2593-2611).
gagtccactgctaaccaaa

SEQ ID NO: 790775 - DNA, 19 bp, Mus musculus
  siRNA target sequence for B130009M24Rik (NM_176846.2,2595-2613).
gtccactgctaaccaaaaa

SEQ ID NO: 790776 - DNA, 19 bp, Mus musculus
  siRNA target sequence for B130009M24Rik (NM_176846.2,2627-2645).
gggagcctgctcttttaga

SEQ ID NO: 790777 - DNA, 19 bp, Mus musculus
  siRNA target sequence for B130009M24Rik (NM_176846.2,2653-2671).
caaagtctttccactcatt

SEQ ID NO: 790778 - DNA, 19 bp, Mus musculus
  siRNA target sequence for B130009M24Rik (NM_176846.2,2711-2729).
cacgagctcctttacatgt

SEQ ID NO: 790779 - DNA, 19 bp, Mus musculus
  siRNA target sequence for B130009M24Rik (NM_176846.2,2874-2892).
gctggctgtaaattctaca

SEQ ID NO: 790780 - DNA, 19 bp, Mus musculus
  siRNA target sequence for B130009M24Rik (NM_176846.2,2950-2968).
ccatactctcccttcaaga

SEQ ID NO: 790781 - DNA, 19 bp, Mus musculus
  siRNA target sequence for B130009M24Rik (NM_176846.2,3103-3121).
ctcagcacagtctattgca

SEQ ID NO: 790782 - DNA, 19 bp, Mus musculus
  siRNA target sequence for B130009M24Rik (NM_176846.2,3183-3201).
ggttgcttccgttaggaat

SEQ ID NO: 790783 - DNA, 19 bp, Mus musculus
  siRNA target sequence for B130009M24Rik (NM_176846.2,3204-3222).
gccacttcccttccaaata

SEQ ID NO: 790784 - DNA, 19 bp, Mus musculus
  siRNA target sequence for B130009M24Rik (NM_176846.2,3205-3223).
ccacttcccttccaaataa

SEQ ID NO: 790785 - DNA, 19 bp, Mus musculus
  siRNA target sequence for B130009M24Rik (NM_176846.2,3273-3291).
ctctcctgaatcagtaagt

SEQ ID NO: 790786 - DNA, 19 bp, Mus musculus
  siRNA target sequence for B130009M24Rik (NM_176846.2,3359-3377).
gatctgcttcggttaggaa

SEQ ID NO: 790787 - DNA, 19 bp, Mus musculus
  siRNA target sequence for B130009M24Rik (NM_176846.2,3507-3525).
gcctggagggagaatcttt

SEQ ID NO: 790788 - DNA, 19 bp, Mus musculus
  siRNA target sequence for B130009M24Rik (NM_176846.2,3509-3527).
ctggagggagaatctttaa

SEQ ID NO: 790789 - DNA, 19 bp, Mus musculus
  siRNA target sequence for B130009M24Rik (NM_176846.2,3539-3557).
gtgaaccatcgtttagaga

SEQ ID NO: 790790 - DNA, 19 bp, Mus musculus
  siRNA target sequence for B130009M24Rik (NM_176846.2,3621-3639).
ccccagaatgggcttattt

SEQ ID NO: 790791 - DNA, 19 bp, Mus musculus
  siRNA target sequence for B130009M24Rik (NM_176846.2,3622-3640).
cccagaatgggcttattta

SEQ ID NO: 790792 - DNA, 19 bp, Mus musculus
  siRNA target sequence for B130009M24Rik (NM_176846.2,3623-3641).
ccagaatgggcttatttaa

SEQ ID NO: 790793 - DNA, 19 bp, Mus musculus
  siRNA target sequence for B130009M24Rik (NM_176846.2,3693-3711).
gagtgggagagcattacat

SEQ ID NO: 790794 - DNA, 19 bp, Mus musculus
  siRNA target sequence for B130009M24Rik (NM_176846.2,3697-3715).
gggagagcattacataagt

SEQ ID NO: 790795 - DNA, 19 bp, Mus musculus
  siRNA target sequence for B130009M24Rik (NM_176846.2,3698-3716).
ggagagcattacataagtt

SEQ ID NO: 790796 - DNA, 19 bp, Mus musculus
  siRNA target sequence for B130009M24Rik (NM_176846.2,3699-3717).
gagagcattacataagttt

SEQ ID NO: 790797 - DNA, 19 bp, Mus musculus
  siRNA target sequence for B130009M24Rik (NM_176846.2,3737-3755).
ctgtttctggcgatgaaga

SEQ ID NO: 790798 - DNA, 19 bp, Mus musculus
  siRNA target sequence for B130009M24Rik (NM_176846.2,3767-3785).
gtcttgaggtggtttcaat

SEQ ID NO: 790799 - DNA, 19 bp, Mus musculus
  siRNA target sequence for B130009M24Rik (NM_176846.2,3769-3787).
cttgaggtggtttcaatct

SEQ ID NO: 790800 - DNA, 19 bp, Mus musculus
  siRNA target sequence for B130009M24Rik (NM_176846.2,3772-3790).
gaggtggtttcaatctatt

SEQ ID NO: 790801 - DNA, 19 bp, Mus musculus
  siRNA target sequence for B130009M24Rik (NM_176846.2,3775-3793).
gtggtttcaatctattaca

SEQ ID NO: 790802 - DNA, 19 bp, Mus musculus
  siRNA target sequence for B130009M24Rik (NM_176846.2,3777-3795).
ggtttcaatctattacact

SEQ ID NO: 790803 - DNA, 19 bp, Mus musculus
  siRNA target sequence for B130009M24Rik (NM_176846.2,3845-3863).
cacaaggtaccgattcact

SEQ ID NO: 790804 - DNA, 19 bp, Mus musculus
  siRNA target sequence for B130009M24Rik (NM_176846.2,3847-3865).
caaggtaccgattcactta

SEQ ID NO: 790805 - DNA, 19 bp, Mus musculus
  siRNA target sequence for B130009M24Rik (NM_176846.2,3885-3903).
gactgaagcacttcctaat

SEQ ID NO: 790806 - DNA, 19 bp, Mus musculus
  siRNA target sequence for B130009M24Rik (NM_176846.2,4034-4052).
cccaattgccagatagaga

SEQ ID NO: 790807 - DNA, 19 bp, Mus musculus
  siRNA target sequence for B130009M24Rik (NM_176846.2,4045-4063).
gatagagagacttccaaat

SEQ ID NO: 790808 - DNA, 19 bp, Mus musculus
  siRNA target sequence for B130009M24Rik (NM_176846.2,4053-4071).
gacttccaaatctacatta

SEQ ID NO: 790809 - DNA, 19 bp, Mus musculus
  siRNA target sequence for B130009M24Rik (NM_176846.2,4055-4073).
cttccaaatctacattaga

SEQ ID NO: 790810 - DNA, 19 bp, Mus musculus
  siRNA target sequence for B130009M24Rik (NM_176846.2,4089-4107).
gggaccagatgtttctctt

SEQ ID NO: 790811 - DNA, 19 bp, Mus musculus
  siRNA target sequence for B130009M24Rik (NM_176846.2,4117-4135).
gaacctacgaccaaagaga

SEQ ID NO: 790812 - DNA, 19 bp, Mus musculus
  siRNA target sequence for B130009M24Rik (NM_176846.2,4120-4138).
cctacgaccaaagagattt

SEQ ID NO: 790813 - DNA, 19 bp, Mus musculus
  siRNA target sequence for B130009M24Rik (NM_176846.2,4141-4159).
ccaagtaatgtatctaaaa

SEQ ID NO: 790814 - DNA, 19 bp, Mus musculus
  siRNA target sequence for B130009M24Rik (NM_176846.2,4160-4178).
cagctatagatgattcact

SEQ ID NO: 790815 - DNA, 19 bp, Mus musculus
  siRNA target sequence for B130009M24Rik (NM_176846.2,4162-4180).
gctatagatgattcactaa

SEQ ID NO: 790816 - DNA, 19 bp, Mus musculus
  siRNA target sequence for B130009M24Rik (NM_176846.2,4171-4189).
gattcactaagcagagaaa

SEQ ID NO: 790817 - DNA, 19 bp, Mus musculus
  siRNA target sequence for B130009M24Rik (NM_176846.2,4321-4339).
ccatcccgctcagaagata

SEQ ID NO: 790818 - DNA, 19 bp, Mus musculus
  siRNA target sequence for B130009M24Rik (NM_176846.2,4322-4340).
catcccgctcagaagataa

SEQ ID NO: 790819 - DNA, 19 bp, Mus musculus
  siRNA target sequence for B130009M24Rik (NM_176846.2,4502-4520).
gccaaaacccgactgataa

SEQ ID NO: 790820 - DNA, 19 bp, Mus musculus
  siRNA target sequence for B130009M24Rik (NM_176846.2,4504-4522).
caaaacccgactgataaaa

SEQ ID NO: 790821 - DNA, 19 bp, Mus musculus
  siRNA target sequence for B130009M24Rik (NM_176846.2,4695-4713).
gttgacacgggatcaaact

SEQ ID NO: 790822 - DNA, 19 bp, Mus musculus
  siRNA target sequence for B130009M24Rik (NM_176846.2,4698-4716).
gacacgggatcaaacttta

SEQ ID NO: 790823 - DNA, 19 bp, Mus musculus
  siRNA target sequence for B130009M24Rik (NM_176846.2,4700-4718).
cacgggatcaaactttact

SEQ ID NO: 790824 - DNA, 19 bp, Mus musculus
  siRNA target sequence for B130009M24Rik (NM_176846.2,4785-4803).
cagattggcagccatatct

SEQ ID NO: 790825 - DNA, 19 bp, Mus musculus
  siRNA target sequence for B130009M24Rik (NM_176846.2,4787-4805).
gattggcagccatatctaa

SEQ ID NO: 790826 - DNA, 19 bp, Mus musculus
  siRNA target sequence for B130009M24Rik (NM_176846.2,4821-4839).
cccagctaaggatttaagt

SEQ ID NO: 790827 - DNA, 19 bp, Mus musculus
  siRNA target sequence for B130009M24Rik (NM_176846.2,4844-4862).
gaaaacacgtagctactat

SEQ ID NO: 790828 - DNA, 19 bp, Mus musculus
  siRNA target sequence for B130009M24Rik (NM_176846.2,4849-4867).
cacgtagctactatcttct

SEQ ID NO: 790829 - DNA, 19 bp, Mus musculus
  siRNA target sequence for B130009M24Rik (NM_176846.2,4935-4953).
ccctgaacctactgtaaaa

SEQ ID NO: 790830 - DNA, 19 bp, Mus musculus
  siRNA target sequence for B130009M24Rik (NM_176846.2,5052-5070).
gccttgccatcaaaagtct

SEQ ID NO: 790831 - DNA, 19 bp, Mus musculus
  siRNA target sequence for B130009M24Rik (NM_176846.2,5062-5080).
caaaagtctgctagcattt

SEQ ID NO: 790832 - DNA, 19 bp, Mus musculus
  siRNA target sequence for B130009M24Rik (NM_176846.2,5126-5144).
caaagagcgagggttctaa

SEQ ID NO: 790833 - DNA, 19 bp, Mus musculus
  siRNA target sequence for B130009M24Rik (NM_176846.2,5130-5148).
gagcgagggttctaaaact

SEQ ID NO: 790834 - DNA, 19 bp, Mus musculus
  siRNA target sequence for B130009M24Rik (NM_176846.2,5132-5150).
gcgagggttctaaaactca

SEQ ID NO: 790835 - DNA, 19 bp, Mus musculus
  siRNA target sequence for B130009M24Rik (NM_176846.2,5188-5206).
ctaaccagccccttagaaa

SEQ ID NO: 790836 - DNA, 19 bp, Mus musculus
  siRNA target sequence for B130009M24Rik (NM_176846.2,5217-5235).
ccatcagcagaggttaagt

SEQ ID NO: 790837 - DNA, 19 bp, Mus musculus
  siRNA target sequence for B130009M24Rik (NM_176846.2,5258-5276).
ctcagaaatctacgataaa

SEQ ID NO: 790838 - DNA, 19 bp, Mus musculus
  siRNA target sequence for B130009M24Rik (NM_176846.2,5260-5278).
cagaaatctacgataaact

SEQ ID NO: 790839 - DNA, 19 bp, Mus musculus
  siRNA target sequence for B130009M24Rik (NM_176846.2,5329-5347).
gagccacatctctataggt

SEQ ID NO: 790840 - DNA, 19 bp, Mus musculus
  siRNA target sequence for B130009M24Rik (NM_176846.2,5335-5353).
catctctataggtcaaaga

SEQ ID NO: 790841 - DNA, 19 bp, Mus musculus
  siRNA target sequence for B130009M24Rik (NM_176846.2,5495-5513).
gtgggtacaatcgaagatt

SEQ ID NO: 790842 - DNA, 19 bp, Mus musculus
  siRNA target sequence for B130009M24Rik (NM_176846.2,5497-5515).
gggtacaatcgaagattca

SEQ ID NO: 790843 - DNA, 19 bp, Mus musculus
  siRNA target sequence for B130009M24Rik (NM_176846.2,5498-5516).
ggtacaatcgaagattcaa

SEQ ID NO: 790844 - DNA, 19 bp, Mus musculus
  siRNA target sequence for B130009M24Rik (NM_176846.2,5499-5517).
gtacaatcgaagattcaaa

SEQ ID NO: 790845 - DNA, 19 bp, Mus musculus
  siRNA target sequence for B130009M24Rik (NM_176846.2,5530-5548).
cttcctgcatcttacgaaa

SEQ ID NO: 790846 - DNA, 19 bp, Mus musculus
  siRNA target sequence for B130009M24Rik (NM_176846.2,5534-5552).
ctgcatcttacgaaagtga

SEQ ID NO: 790847 - DNA, 19 bp, Mus musculus
  siRNA target sequence for B130009M24Rik (NM_176846.2,5536-5554).
gcatcttacgaaagtgaaa

SEQ ID NO: 790848 - DNA, 19 bp, Mus musculus
  siRNA target sequence for B130009M24Rik (NM_176846.2,5555-5573).
gctggacttcgtatagcaa

SEQ ID NO: 790849 - DNA, 19 bp, Mus musculus
  siRNA target sequence for B130009M24Rik (NM_176846.2,5589-5607).
caagtccacctcatccatt

SEQ ID NO: 790850 - DNA, 19 bp, Mus musculus
  siRNA target sequence for B130009M24Rik (NM_176846.2,5603-5621).
ccatttccaggcctattga

SEQ ID NO: 790851 - DNA, 19 bp, Mus musculus
  siRNA target sequence for B130009M24Rik (NM_176846.2,5613-5631).
gcctattgactatggaatt

SEQ ID NO: 790852 - DNA, 19 bp, Mus musculus
  siRNA target sequence for B130009M24Rik (NM_176846.2,5614-5632).
cctattgactatggaattt

SEQ ID NO: 790853 - DNA, 19 bp, Mus musculus
  siRNA target sequence for B130009M24Rik (NM_176846.2,5733-5751).
caaggatgatgttcttaat

SEQ ID NO: 790854 - DNA, 19 bp, Mus musculus
  siRNA target sequence for B130009M24Rik (NM_176846.2,5769-5787).
gtcagagctggtaaattct

SEQ ID NO: 790855 - DNA, 19 bp, Mus musculus
  siRNA target sequence for B130009M24Rik (NM_176846.2,5801-5819).
cgccagaagatggtgtatt

SEQ ID NO: 790856 - DNA, 19 bp, Mus musculus
  siRNA target sequence for B130009M24Rik (NM_176846.2,5821-5839).
ccaagtgagccgcttaaca

SEQ ID NO: 790857 - DNA, 19 bp, Mus musculus
  siRNA target sequence for B130009M24Rik (NM_176846.2,5822-5840).
caagtgagccgcttaacat

SEQ ID NO: 790858 - DNA, 19 bp, Mus musculus
  siRNA target sequence for B130009M24Rik (NM_176846.2,5825-5843).
gtgagccgcttaacatcta

SEQ ID NO: 790859 - DNA, 19 bp, Mus musculus
  siRNA target sequence for B130009M24Rik (NM_176846.2,5827-5845).
gagccgcttaacatctaca

SEQ ID NO: 790860 - DNA, 19 bp, Mus musculus
  siRNA target sequence for B130009M24Rik (NM_176846.2,5894-5912).
ccacagacgacgagtacta

SEQ ID NO: 790861 - DNA, 19 bp, Mus musculus
  siRNA target sequence for B130009M24Rik (NM_176846.2,5905-5923).
gagtactacctggatgaaa

SEQ ID NO: 790862 - DNA, 19 bp, Mus musculus
  siRNA target sequence for B130009M24Rik (NM_176846.2,5925-5943).
ggataaagagtcagaacta

SEQ ID NO: 790863 - DNA, 19 bp, Mus musculus
  siRNA target sequence for Sans (NM_176847.2,227-245).
gggtgacccggataagtgt

SEQ ID NO: 790864 - DNA, 19 bp, Mus musculus
  siRNA target sequence for Sans (NM_176847.2,337-355).
ggtgcctggacaatgacta

SEQ ID NO: 790865 - DNA, 19 bp, Mus musculus
  siRNA target sequence for Sans (NM_176847.2,800-818).
cctgcagttgggtagtgat

SEQ ID NO: 790866 - DNA, 19 bp, Mus musculus
  siRNA target sequence for Sans (NM_176847.2,809-827).
gggtagtgatgtgatgttt

SEQ ID NO: 790867 - DNA, 19 bp, Mus musculus
  siRNA target sequence for Sans (NM_176847.2,871-889).
ccccactcagggacatgtt

SEQ ID NO: 790868 - DNA, 19 bp, Mus musculus
  siRNA target sequence for Sans (NM_176847.2,964-982).
caggccacgactctttgtt

SEQ ID NO: 790869 - DNA, 19 bp, Mus musculus
  siRNA target sequence for Sans (NM_176847.2,966-984).
ggccacgactctttgttta

SEQ ID NO: 790870 - DNA, 19 bp, Mus musculus
  siRNA target sequence for Sans (NM_176847.2,999-1017).
ggtaccatggtgtttcgaa

SEQ ID NO: 790871 - DNA, 19 bp, Mus musculus
  siRNA target sequence for Sans (NM_176847.2,1007-1025).
ggtgtttcgaaggaactat

SEQ ID NO: 790872 - DNA, 19 bp, Mus musculus
  siRNA target sequence for Sans (NM_176847.2,1283-1301).
cctgcggcacgagaagatt

SEQ ID NO: 790873 - DNA, 19 bp, Mus musculus
  siRNA target sequence for Fbxo2 (NM_176848.1,354-372).
gggaccactggcaacagtt

SEQ ID NO: 790874 - DNA, 19 bp, Mus musculus
  siRNA target sequence for Fbxo2 (NM_176848.1,494-512).
gacaatggggtggaattta

SEQ ID NO: 790875 - DNA, 19 bp, Mus musculus
  siRNA target sequence for Fbxo2 (NM_176848.1,515-533).
caagatgacagcgttaaga

SEQ ID NO: 790876 - DNA, 19 bp, Mus musculus
  siRNA target sequence for Fbxo2 (NM_176848.1,518-536).
gatgacagcgttaagaaat

SEQ ID NO: 790877 - DNA, 19 bp, Mus musculus
  siRNA target sequence for Fbxo2 (NM_176848.1,521-539).
gacagcgttaagaaatact

SEQ ID NO: 790878 - DNA, 19 bp, Mus musculus
  siRNA target sequence for Fbxo2 (NM_176848.1,564-582).
gcaaagcgcaggtcattga

SEQ ID NO: 790879 - DNA, 19 bp, Mus musculus
  siRNA target sequence for Fbxo2 (NM_176848.1,565-583).
caaagcgcaggtcattgat

SEQ ID NO: 790880 - DNA, 19 bp, Mus musculus
  siRNA target sequence for 9430010O03Rik (NM_176849.2,380-398).
ccgaccgcatcgacatctt

SEQ ID NO: 790881 - DNA, 19 bp, Mus musculus
  siRNA target sequence for 9430010O03Rik (NM_176849.2,474-492).
cgagcgacagcgaaaaatt

SEQ ID NO: 790882 - DNA, 19 bp, Mus musculus
  siRNA target sequence for 9430010O03Rik (NM_176849.2,535-553).
gcacgaagagtggaagaat

SEQ ID NO: 790883 - DNA, 19 bp, Mus musculus
  siRNA target sequence for 9430010O03Rik (NM_176849.2,536-554).
cacgaagagtggaagaatt

SEQ ID NO: 790884 - DNA, 19 bp, Mus musculus
  siRNA target sequence for 9430010O03Rik (NM_176849.2,634-652).
gccaaacgcatcatggaaa

SEQ ID NO: 790885 - DNA, 19 bp, Mus musculus
  siRNA target sequence for 9430010O03Rik (NM_176849.2,724-742).
ctcggtcgtttggaaagta

SEQ ID NO: 790886 - DNA, 19 bp, Mus musculus
  siRNA target sequence for 9430010O03Rik (NM_176849.2,726-744).
cggtcgtttggaaagtaga

SEQ ID NO: 790887 - DNA, 19 bp, Mus musculus
  siRNA target sequence for 9430010O03Rik (NM_176849.2,745-763).
gacagtccatggcaaaact

SEQ ID NO: 790888 - DNA, 19 bp, Mus musculus
  siRNA target sequence for 9430010O03Rik (NM_176849.2,747-765).
cagtccatggcaaaacttt

SEQ ID NO: 790889 - DNA, 19 bp, Mus musculus
  siRNA target sequence for 9430010O03Rik (NM_176849.2,749-767).
gtccatggcaaaactttca

SEQ ID NO: 790890 - DNA, 19 bp, Mus musculus
  siRNA target sequence for 9430010O03Rik (NM_176849.2,751-769).
ccatggcaaaactttcagt

SEQ ID NO: 790891 - DNA, 19 bp, Mus musculus
  siRNA target sequence for 9430010O03Rik (NM_176849.2,791-809).
gtccagaacgagatggaat

SEQ ID NO: 790892 - DNA, 19 bp, Mus musculus
  siRNA target sequence for 9430010O03Rik (NM_176849.2,802-820).
gatggaatgcgactatctt

SEQ ID NO: 790893 - DNA, 19 bp, Mus musculus
  siRNA target sequence for C530043A13Rik (NM_176897.2,2621-2639).
gttggaaggggcttgagtt

SEQ ID NO: 790894 - DNA, 19 bp, Mus musculus
  siRNA target sequence for C530043A13Rik (NM_176897.2,2628-2646).
ggggcttgagttctttctt

SEQ ID NO: 790895 - DNA, 19 bp, Mus musculus
  siRNA target sequence for C530043A13Rik (NM_176897.2,2799-2817).
cccttattttttcatctat

SEQ ID NO: 790896 - DNA, 19 bp, Mus musculus
  siRNA target sequence for C530043A13Rik (NM_176897.2,2811-2829).
catctatagccttaatcca

SEQ ID NO: 790897 - DNA, 19 bp, Mus musculus
  siRNA target sequence for C530043A13Rik (NM_176897.2,2827-2845).
ccagggagctgcacaatat

SEQ ID NO: 790898 - DNA, 19 bp, Mus musculus
  siRNA target sequence for C530047H08Rik (NM_176898.2,970-988).
cccacaggccaaactttct

SEQ ID NO: 790899 - DNA, 19 bp, Mus musculus
  siRNA target sequence for C530047H08Rik (NM_176898.2,971-989).
ccacaggccaaactttctt

SEQ ID NO: 790900 - DNA, 19 bp, Mus musculus
  siRNA target sequence for C530047H08Rik (NM_176898.2,1163-1181).
cacaaggcctttcaattgt

SEQ ID NO: 790901 - DNA, 19 bp, Mus musculus
  siRNA target sequence for C530047H08Rik (NM_176898.2,1170-1188).
cctttcaattgtaacactt

SEQ ID NO: 790902 - DNA, 19 bp, Mus musculus
  siRNA target sequence for C530047H08Rik (NM_176898.2,1175-1193).
caattgtaacacttctcaa

SEQ ID NO: 790903 - DNA, 19 bp, Mus musculus
  siRNA target sequence for C530047H08Rik (NM_176898.2,1202-1220).
gtaaatattgtctcattct

SEQ ID NO: 790904 - DNA, 19 bp, Mus musculus
  siRNA target sequence for C530047H08Rik (NM_176898.2,1211-1229).
gtctcattctgctcataca

SEQ ID NO: 790905 - DNA, 19 bp, Mus musculus
  siRNA target sequence for C530047H08Rik (NM_176898.2,1219-1237).
ctgctcatacatttaaagt

SEQ ID NO: 790906 - DNA, 19 bp, Mus musculus
  siRNA target sequence for C530047H08Rik (NM_176898.2,1236-1254).
gtttaaatgcaagcataaa

SEQ ID NO: 790907 - DNA, 19 bp, Mus musculus
  siRNA target sequence for C530047H08Rik (NM_176898.2,1321-1339).
gtaaggagtcctctgttaa

SEQ ID NO: 790908 - DNA, 19 bp, Mus musculus
  siRNA target sequence for C530047H08Rik (NM_176898.2,1389-1407).
cagttgtatagagctaata

SEQ ID NO: 790909 - DNA, 19 bp, Mus musculus
  siRNA target sequence for C530047H08Rik (NM_176898.2,1394-1412).
gtatagagctaataccttt

SEQ ID NO: 790910 - DNA, 19 bp, Mus musculus
  siRNA target sequence for C630028L02Rik (NM_176899.2,379-397).
ggccattttcagaatccat

SEQ ID NO: 790911 - DNA, 19 bp, Mus musculus
  siRNA target sequence for C630028L02Rik (NM_176899.2,554-572).
gtcagcagatgcaccatta

SEQ ID NO: 790912 - DNA, 19 bp, Mus musculus
  siRNA target sequence for C630028L02Rik (NM_176899.2,812-830).
cgagggactggaaaagttt

SEQ ID NO: 790913 - DNA, 19 bp, Mus musculus
  siRNA target sequence for C630028L02Rik (NM_176899.2,839-857).
catcgaaacagtactaaga

SEQ ID NO: 790914 - DNA, 19 bp, Mus musculus
  siRNA target sequence for C630028L02Rik (NM_176899.2,842-860).
cgaaacagtactaagaaga

SEQ ID NO: 790915 - DNA, 19 bp, Mus musculus
  siRNA target sequence for C630028L02Rik (NM_176899.2,863-881).
gaaagtcacttttatagat

SEQ ID NO: 790916 - DNA, 19 bp, Mus musculus
  siRNA target sequence for C630028L02Rik (NM_176899.2,980-998).
cgagtcctcaggagtcaat

SEQ ID NO: 790917 - DNA, 19 bp, Mus musculus
  siRNA target sequence for C630028L02Rik (NM_176899.2,1009-1027).
ccacagcttttgctcataa

SEQ ID NO: 790918 - DNA, 19 bp, Mus musculus
  siRNA target sequence for C630028L02Rik (NM_176899.2,1015-1033).
cttttgctcataaattgct

SEQ ID NO: 790919 - DNA, 19 bp, Mus musculus
  siRNA target sequence for C630028L02Rik (NM_176899.2,1141-1159).
gctggaaccccaaaattgt

SEQ ID NO: 790920 - DNA, 19 bp, Mus musculus
  siRNA target sequence for C630028L02Rik (NM_176899.2,1144-1162).
ggaaccccaaaattgttta

SEQ ID NO: 790921 - DNA, 19 bp, Mus musculus
  siRNA target sequence for C630028L02Rik (NM_176899.2,1145-1163).
gaaccccaaaattgtttat

SEQ ID NO: 790922 - DNA, 19 bp, Mus musculus
  siRNA target sequence for C630028L02Rik (NM_176899.2,1164-1182).
gagccacacccacaactaa

SEQ ID NO: 790923 - DNA, 19 bp, Mus musculus
  siRNA target sequence for C630028L02Rik (NM_176899.2,1170-1188).
cacccacaactaactagaa

SEQ ID NO: 790924 - DNA, 19 bp, Mus musculus
  siRNA target sequence for C630028L02Rik (NM_176899.2,1248-1266).
gagttgagtctcactttaa

SEQ ID NO: 790925 - DNA, 19 bp, Mus musculus
  siRNA target sequence for C630028L02Rik (NM_176899.2,1298-1316).
ggatgtcgatggacagata

SEQ ID NO: 790926 - DNA, 19 bp, Mus musculus
  siRNA target sequence for C630028L02Rik (NM_176899.2,1313-1331).
gatagactcctttcatcta

SEQ ID NO: 790927 - DNA, 19 bp, Mus musculus
  siRNA target sequence for C630028L02Rik (NM_176899.2,1364-1382).
ggatatgttagcagctatt

SEQ ID NO: 790928 - DNA, 19 bp, Mus musculus
  siRNA target sequence for C630028L02Rik (NM_176899.2,1449-1467).
caggaagatgagtacagaa

SEQ ID NO: 790929 - DNA, 19 bp, Mus musculus
  siRNA target sequence for C630028L02Rik (NM_176899.2,1475-1493).
ggaattaaaccggtattat

SEQ ID NO: 790930 - DNA, 19 bp, Mus musculus
  siRNA target sequence for C630028L02Rik (NM_176899.2,1498-1516).
ggaaagattccctctctat

SEQ ID NO: 790931 - DNA, 19 bp, Mus musculus
  siRNA target sequence for C630028L02Rik (NM_176899.2,1570-1588).
ctagccgtgaggaagaagt

SEQ ID NO: 790932 - DNA, 19 bp, Mus musculus
  siRNA target sequence for C630028L02Rik (NM_176899.2,1573-1591).
gccgtgaggaagaagtttt

SEQ ID NO: 790933 - DNA, 19 bp, Mus musculus
  siRNA target sequence for C630028L02Rik (NM_176899.2,1575-1593).
cgtgaggaagaagttttct

SEQ ID NO: 790934 - DNA, 19 bp, Mus musculus
  siRNA target sequence for C630028L02Rik (NM_176899.2,1674-1692).
ctgtcgctgacgagtacat

SEQ ID NO: 790935 - DNA, 19 bp, Mus musculus
  siRNA target sequence for C630028L02Rik (NM_176899.2,1754-1772).
gtttgccgaccacaaagaa

SEQ ID NO: 790936 - DNA, 19 bp, Mus musculus
  siRNA target sequence for C630028L02Rik (NM_176899.2,1808-1826).
ggtgcacccggcatcttta

SEQ ID NO: 790937 - DNA, 19 bp, Mus musculus
  siRNA target sequence for C630028L02Rik (NM_176899.2,1811-1829).
gcacccggcatctttacaa

SEQ ID NO: 790938 - DNA, 19 bp, Mus musculus
  siRNA target sequence for C630028L02Rik (NM_176899.2,1814-1832).
cccggcatctttacaaaaa

SEQ ID NO: 790939 - DNA, 19 bp, Mus musculus
  siRNA target sequence for C630028L02Rik (NM_176899.2,1961-1979).
gaacgtcaacccattgaca

SEQ ID NO: 790940 - DNA, 19 bp, Mus musculus
  siRNA target sequence for C630028L02Rik (NM_176899.2,1980-1998).
cgcatggccaccgatttct

SEQ ID NO: 790941 - DNA, 19 bp, Mus musculus
  siRNA target sequence for C630028L02Rik (NM_176899.2,2019-2037).
gacccagcaatattttcga

SEQ ID NO: 790942 - DNA, 19 bp, Mus musculus
  siRNA target sequence for C630028L02Rik (NM_176899.2,2036-2054).
gacgggagactttaagtct

SEQ ID NO: 790943 - DNA, 19 bp, Mus musculus
  siRNA target sequence for C730034F03Rik (NM_176900.3,83-101).
gtgggctccgttaggttta

SEQ ID NO: 790944 - DNA, 19 bp, Mus musculus
  siRNA target sequence for C730034F03Rik (NM_176900.3,209-227).
gactgccttcggctttctt

SEQ ID NO: 790945 - DNA, 19 bp, Mus musculus
  siRNA target sequence for C730034F03Rik (NM_176900.3,238-256).
gtcctgggaccgtttccaa

SEQ ID NO: 790946 - DNA, 19 bp, Mus musculus
  siRNA target sequence for C730034F03Rik (NM_176900.3,339-357).
gcccgatccgcctatcagt

SEQ ID NO: 790947 - DNA, 19 bp, Mus musculus
  siRNA target sequence for C730034F03Rik (NM_176900.3,349-367).
cctatcagtctctgcaaaa

SEQ ID NO: 790948 - DNA, 19 bp, Mus musculus
  siRNA target sequence for C820004B04Rik (NM_176901.2,493-511).
gtggtcctcccctaaggta

SEQ ID NO: 790949 - DNA, 19 bp, Mus musculus
  siRNA target sequence for C820004B04Rik (NM_176901.2,629-647).
ctgaagaagagcctcttta

SEQ ID NO: 790950 - DNA, 19 bp, Mus musculus
  siRNA target sequence for C820004B04Rik (NM_176901.2,634-652).
gaagagcctctttagattt

SEQ ID NO: 790951 - DNA, 19 bp, Mus musculus
  siRNA target sequence for D130012P04Rik (NM_176903.2,172-190).
cacgcgcatgcgaaaagga

SEQ ID NO: 790952 - DNA, 19 bp, Mus musculus
  siRNA target sequence for D130012P04Rik (NM_176903.2,174-192).
cgcgcatgcgaaaaggaaa

SEQ ID NO: 790953 - DNA, 19 bp, Mus musculus
  siRNA target sequence for D130012P04Rik (NM_176903.2,175-193).
gcgcatgcgaaaaggaaat

SEQ ID NO: 790954 - DNA, 19 bp, Mus musculus
  siRNA target sequence for D130012P04Rik (NM_176903.2,194-212).
cttaaaccccatcattata

SEQ ID NO: 790955 - DNA, 19 bp, Mus musculus
  siRNA target sequence for D130012P04Rik (NM_176903.2,236-254).
ggatcaagtgagaaaagta

SEQ ID NO: 790956 - DNA, 19 bp, Mus musculus
  siRNA target sequence for D130012P04Rik (NM_176903.2,391-409).
gtctcccaatgccaagatt

SEQ ID NO: 790957 - DNA, 19 bp, Mus musculus
  siRNA target sequence for D130012P04Rik (NM_176903.2,414-432).
gcgtgtgtaatcatagaca

SEQ ID NO: 790958 - DNA, 19 bp, Mus musculus
  siRNA target sequence for D130012P04Rik (NM_176903.2,415-433).
cgtgtgtaatcatagacaa

SEQ ID NO: 790959 - DNA, 19 bp, Mus musculus
  siRNA target sequence for D230002A01Rik (NM_176904.2,928-946).
gaggcgctacgggaaactt

SEQ ID NO: 790960 - DNA, 19 bp, Mus musculus
  siRNA target sequence for D230002A01Rik (NM_176904.2,931-949).
gcgctacgggaaactttga

SEQ ID NO: 790961 - DNA, 19 bp, Mus musculus
  siRNA target sequence for D230002A01Rik (NM_176904.2,952-970).
caaactttgcaaacttctt

SEQ ID NO: 790962 - DNA, 19 bp, Mus musculus
  siRNA target sequence for D230002A01Rik (NM_176904.2,968-986).
ctttctcggagttaagaga

SEQ ID NO: 790963 - DNA, 19 bp, Mus musculus
  siRNA target sequence for D230002A01Rik (NM_176904.2,1027-1045).
cccaggccggatttgtaca

SEQ ID NO: 790964 - DNA, 19 bp, Mus musculus
  siRNA target sequence for D330005C11Rik (NM_176905.2,405-423).
cggtacctgcatacataca

SEQ ID NO: 790965 - DNA, 19 bp, Mus musculus
  siRNA target sequence for D330005C11Rik (NM_176905.2,468-486).
gccttaaacgtgtgtcatt

SEQ ID NO: 790966 - DNA, 19 bp, Mus musculus
  siRNA target sequence for D330005C11Rik (NM_176905.2,530-548).
catggaggatcccacttta

SEQ ID NO: 790967 - DNA, 19 bp, Mus musculus
  siRNA target sequence for D330005C11Rik (NM_176905.2,536-554).
ggatcccactttaaaatta

SEQ ID NO: 790968 - DNA, 19 bp, Mus musculus
  siRNA target sequence for D330005C11Rik (NM_176905.2,568-586).
ggactgttgcagagaatat

SEQ ID NO: 790969 - DNA, 19 bp, Mus musculus
  siRNA target sequence for D330005C11Rik (NM_176905.2,569-587).
gactgttgcagagaatatt

SEQ ID NO: 790970 - DNA, 19 bp, Mus musculus
  siRNA target sequence for D330005C11Rik (NM_176905.2,577-595).
cagagaatatttaattgca

SEQ ID NO: 790971 - DNA, 19 bp, Mus musculus
  siRNA target sequence for D830013H23Rik (NM_176906.2,62-80).
ctccgcacgtcgattggta

SEQ ID NO: 790972 - DNA, 19 bp, Mus musculus
  siRNA target sequence for D830016O14Rik (NM_176907.2,53-71).
gtgggtgccttgcatagaa

SEQ ID NO: 790973 - DNA, 19 bp, Mus musculus
  siRNA target sequence for D830016O14Rik (NM_176907.2,55-73).
gggtgccttgcatagaact

SEQ ID NO: 790974 - DNA, 19 bp, Mus musculus
  siRNA target sequence for D830016O14Rik (NM_176907.2,69-87).
gaacttgcatcctctatct

SEQ ID NO: 790975 - DNA, 19 bp, Mus musculus
  siRNA target sequence for D830016O14Rik (NM_176907.2,223-241).
cgcacacacagcaatgcta

SEQ ID NO: 790976 - DNA, 19 bp, Mus musculus
  siRNA target sequence for D830016O14Rik (NM_176907.2,233-251).
gcaatgctatgtattcaaa

SEQ ID NO: 790977 - DNA, 19 bp, Mus musculus
  siRNA target sequence for D830016O14Rik (NM_176907.2,248-266).
caaagggtgaggtactttt

SEQ ID NO: 790978 - DNA, 19 bp, Mus musculus
  siRNA target sequence for D830016O14Rik (NM_176907.2,317-335).
gacctctggggcttgcaat

SEQ ID NO: 790979 - DNA, 19 bp, Mus musculus
  siRNA target sequence for D830016O14Rik (NM_176907.2,319-337).
cctctggggcttgcaatat

SEQ ID NO: 790980 - DNA, 19 bp, Mus musculus
  siRNA target sequence for D830016O14Rik (NM_176907.2,320-338).
ctctggggcttgcaatata

SEQ ID NO: 790981 - DNA, 19 bp, Mus musculus
  siRNA target sequence for D930030K17Rik (NM_176909.2,1870-1888).
gtctatgctcactatgcat

SEQ ID NO: 790982 - DNA, 19 bp, Mus musculus
  siRNA target sequence for D930030K17Rik (NM_176909.2,1979-1997).
ggaagtctttcataataga

SEQ ID NO: 790983 - DNA, 19 bp, Mus musculus
  siRNA target sequence for D930030K17Rik (NM_176909.2,2056-2074).
ctccgtggagaccatagtt

SEQ ID NO: 790984 - DNA, 19 bp, Mus musculus
  siRNA target sequence for D930030K17Rik (NM_176909.2,2058-2076).
ccgtggagaccatagttca

SEQ ID NO: 790985 - DNA, 19 bp, Mus musculus
  siRNA target sequence for D930030K17Rik (NM_176909.2,2059-2077).
cgtggagaccatagttcat

SEQ ID NO: 790986 - DNA, 19 bp, Mus musculus
  siRNA target sequence for D930031A20Rik (NM_176910.2,470-488).
cccggagtttccctatgta

SEQ ID NO: 790987 - DNA, 19 bp, Mus musculus
  siRNA target sequence for D930031A20Rik (NM_176910.2,471-489).
ccggagtttccctatgtat

SEQ ID NO: 790988 - DNA, 19 bp, Mus musculus
  siRNA target sequence for D930031A20Rik (NM_176910.2,474-492).
gagtttccctatgtattta

SEQ ID NO: 790989 - DNA, 19 bp, Mus musculus
  siRNA target sequence for D930031A20Rik (NM_176910.2,486-504).
gtatttactccttactata

SEQ ID NO: 790990 - DNA, 19 bp, Mus musculus
  siRNA target sequence for D930031A20Rik (NM_176910.2,514-532).
ccagaagaagcagcttaat

SEQ ID NO: 790991 - DNA, 19 bp, Mus musculus
  siRNA target sequence for D930031A20Rik (NM_176910.2,567-585).
gagggctgtctttatggaa

SEQ ID NO: 790992 - DNA, 19 bp, Mus musculus
  siRNA target sequence for D930031A20Rik (NM_176910.2,614-632).
ctgctggttacgttgtact

SEQ ID NO: 790993 - DNA, 19 bp, Mus musculus
  siRNA target sequence for D930031A20Rik (NM_176910.2,647-665).
caggaagaaccgcatctta

SEQ ID NO: 790994 - DNA, 19 bp, Mus musculus
  siRNA target sequence for D930031A20Rik (NM_176910.2,767-785).
gggagtggtatactcaaat

SEQ ID NO: 790995 - DNA, 19 bp, Mus musculus
  siRNA target sequence for D930031A20Rik (NM_176910.2,771-789).
gtggtatactcaaatcaga

SEQ ID NO: 790996 - DNA, 19 bp, Mus musculus
  siRNA target sequence for 6330581N18Rik (NM_176915.2,592-610).
gatatatgggagtgcttat

SEQ ID NO: 790997 - DNA, 19 bp, Mus musculus
  siRNA target sequence for 6330581N18Rik (NM_176915.2,603-621).
gtgcttatggtgtcagtaa

SEQ ID NO: 790998 - DNA, 19 bp, Mus musculus
  siRNA target sequence for 6330581N18Rik (NM_176915.2,629-647).
ctctgtgccaaggttttga

SEQ ID NO: 790999 - DNA, 19 bp, Mus musculus
  siRNA target sequence for 6330581N18Rik (NM_176915.2,646-664).
gacttcactggttgataat

SEQ ID NO: 791000 - DNA, 19 bp, Mus musculus
  siRNA target sequence for 6330581N18Rik (NM_176915.2,695-713).
ggtgctaactgcacacatt

SEQ ID NO: 791001 - DNA, 19 bp, Mus musculus
  siRNA target sequence for 6330581N18Rik (NM_176915.2,696-714).
gtgctaactgcacacattt

SEQ ID NO: 791002 - DNA, 19 bp, Mus musculus
  siRNA target sequence for 6330581N18Rik (NM_176915.2,800-818).
gcagggcagatcaggtttt

SEQ ID NO: 791003 - DNA, 19 bp, Mus musculus
  siRNA target sequence for 6330581N18Rik (NM_176915.2,801-819).
cagggcagatcaggttttt

SEQ ID NO: 791004 - DNA, 19 bp, Mus musculus
  siRNA target sequence for 6330581N18Rik (NM_176915.2,804-822).
ggcagatcaggtttttgga

SEQ ID NO: 791005 - DNA, 19 bp, Mus musculus
  siRNA target sequence for B230365F16Rik (NM_176916.2,384-402).
cctgaaggccttaactact

SEQ ID NO: 791006 - DNA, 19 bp, Mus musculus
  siRNA target sequence for B230365F16Rik (NM_176916.2,405-423).
gaagatgccccgtttcact

SEQ ID NO: 791007 - DNA, 19 bp, Mus musculus
  siRNA target sequence for B230365F16Rik (NM_176916.2,442-460).
ggatgaacttgctcaacat

SEQ ID NO: 791008 - DNA, 19 bp, Mus musculus
  siRNA target sequence for B230365F16Rik (NM_176916.2,558-576).
cagctgacgtcgcaaaaca

SEQ ID NO: 791009 - DNA, 19 bp, Mus musculus
  siRNA target sequence for B230365F16Rik (NM_176916.2,568-586).
cgcaaaacatcgaagtcaa

SEQ ID NO: 791010 - DNA, 19 bp, Mus musculus
  siRNA target sequence for B230365F16Rik (NM_176916.2,596-614).
cgacgtgaccgcagattca

SEQ ID NO: 791011 - DNA, 19 bp, Mus musculus
  siRNA target sequence for B230365F16Rik (NM_176916.2,597-615).
gacgtgaccgcagattcaa

SEQ ID NO: 791012 - DNA, 19 bp, Mus musculus
  siRNA target sequence for A730091E08Rik (NM_176917.2,943-961).
ggtggttactggatcatct

SEQ ID NO: 791013 - DNA, 19 bp, Mus musculus
  siRNA target sequence for A730091E08Rik (NM_176917.2,944-962).
gtggttactggatcatctt

SEQ ID NO: 791014 - DNA, 19 bp, Mus musculus
  siRNA target sequence for A730091E08Rik (NM_176917.2,994-1012).
gccagcatcaagagtcttt

SEQ ID NO: 791015 - DNA, 19 bp, Mus musculus
  siRNA target sequence for A730091E08Rik (NM_176917.2,1136-1154).
cgatgaaggaagttgtgaa

SEQ ID NO: 791016 - DNA, 19 bp, Mus musculus
  siRNA target sequence for A730091E08Rik (NM_176917.2,1152-1170).
gaagtgatcaccgaaaaat

SEQ ID NO: 791017 - DNA, 19 bp, Mus musculus
  siRNA target sequence for A730091E08Rik (NM_176917.2,1302-1320).
gggaaggtaggaagtttta

SEQ ID NO: 791018 - DNA, 19 bp, Mus musculus
  siRNA target sequence for A930016D02Rik (NM_176920.2,341-359).
gcctgggccatgaaaggta

SEQ ID NO: 791019 - DNA, 19 bp, Mus musculus
  siRNA target sequence for A930016D02Rik (NM_176920.2,404-422).
ggcagctgccccatgaaat

SEQ ID NO: 791020 - DNA, 19 bp, Mus musculus
  siRNA target sequence for A930016D02Rik (NM_176920.2,406-424).
cagctgccccatgaaatgt

SEQ ID NO: 791021 - DNA, 19 bp, Mus musculus
  siRNA target sequence for A930016D02Rik (NM_176920.2,408-426).
gctgccccatgaaatgttt

SEQ ID NO: 791022 - DNA, 19 bp, Mus musculus
  siRNA target sequence for A930016D02Rik (NM_176920.2,459-477).
gtggtcaggggctgtcaaa

SEQ ID NO: 791023 - DNA, 19 bp, Mus musculus
  siRNA target sequence for A930016D02Rik (NM_176920.2,474-492).
caaaggtcccccgtgattt

SEQ ID NO: 791024 - DNA, 19 bp, Mus musculus
  siRNA target sequence for A930016D02Rik (NM_176920.2,495-513).
ccccatggacagttacact

SEQ ID NO: 791025 - DNA, 19 bp, Mus musculus
  siRNA target sequence for A930016D02Rik (NM_176920.2,549-567).
ctcttgcatttcaatctgt

SEQ ID NO: 791026 - DNA, 19 bp, Mus musculus
  siRNA target sequence for A930016D02Rik (NM_176920.2,555-573).
catttcaatctgtatcact

SEQ ID NO: 791027 - DNA, 19 bp, Mus musculus
  siRNA target sequence for A930016D02Rik (NM_176920.2,717-735).
ggctcagggagctagatct

SEQ ID NO: 791028 - DNA, 19 bp, Mus musculus
  siRNA target sequence for A930016D02Rik (NM_176920.2,718-736).
gctcagggagctagatctt

SEQ ID NO: 791029 - DNA, 19 bp, Mus musculus
  siRNA target sequence for A930016D02Rik (NM_176920.2,862-880).
ggtgaggctggtacttctt

SEQ ID NO: 791030 - DNA, 19 bp, Mus musculus
  siRNA target sequence for A930016D02Rik (NM_176920.2,867-885).
ggctggtacttcttaagga

SEQ ID NO: 791031 - DNA, 19 bp, Mus musculus
  siRNA target sequence for A930016D02Rik (NM_176920.2,883-901).
ggacaacccttggatttgt

SEQ ID NO: 791032 - DNA, 19 bp, Mus musculus
  siRNA target sequence for A930016D02Rik (NM_176920.2,907-925).
ccacttactgggtctgaaa

SEQ ID NO: 791033 - DNA, 19 bp, Mus musculus
  siRNA target sequence for A930016D02Rik (NM_176920.2,1214-1232).
gtcatcactggggtagtat

SEQ ID NO: 791034 - DNA, 19 bp, Mus musculus
  siRNA target sequence for A930016D02Rik (NM_176920.2,1216-1234).
catcactggggtagtatgt

SEQ ID NO: 791035 - DNA, 19 bp, Mus musculus
  siRNA target sequence for A930016D02Rik (NM_176920.2,1226-1244).
gtagtatgtgggatcgtat

SEQ ID NO: 791036 - DNA, 19 bp, Mus musculus
  siRNA target sequence for A930016D02Rik (NM_176920.2,1236-1254).
ggatcgtatgtctcatgat

SEQ ID NO: 791037 - DNA, 19 bp, Mus musculus
  siRNA target sequence for A930016D02Rik (NM_176920.2,1255-1273).
gttggcggctgctatctat

SEQ ID NO: 791038 - DNA, 19 bp, Mus musculus
  siRNA target sequence for A930016D02Rik (NM_176920.2,1259-1277).
gcggctgctatctatggat

SEQ ID NO: 791039 - DNA, 19 bp, Mus musculus
  siRNA target sequence for A930016D02Rik (NM_176920.2,1350-1368).
gaagtaaggaacttatgga

SEQ ID NO: 791040 - DNA, 19 bp, Mus musculus
  siRNA target sequence for A930016D02Rik (NM_176920.2,1358-1376).
gaacttatggacagttcat

SEQ ID NO: 791041 - DNA, 19 bp, Mus musculus
  siRNA target sequence for 6030419C18Rik (NM_176921.2,1759-1777).
ggtacggttcagtgacaaa

SEQ ID NO: 791042 - DNA, 19 bp, Mus musculus
  siRNA target sequence for 6030419C18Rik (NM_176921.2,2004-2022).
gcactcagacagtatcaga

SEQ ID NO: 791043 - DNA, 19 bp, Mus musculus
  siRNA target sequence for 6030419C18Rik (NM_176921.2,2055-2073).
ccaccaaacagaaagctaa

SEQ ID NO: 791044 - DNA, 19 bp, Mus musculus
  siRNA target sequence for 9530053A07Rik (NM_176924.2,809-827).
gccctcaggcccatttgct

SEQ ID NO: 791045 - DNA, 19 bp, Mus musculus
  siRNA target sequence for 9530053A07Rik (NM_176924.2,854-872).
gcctttcctggaagaatgt

SEQ ID NO: 791046 - DNA, 19 bp, Mus musculus
  siRNA target sequence for 9530053A07Rik (NM_176924.2,1212-1230).
gtgtacgcggacgaaaaat

SEQ ID NO: 791047 - DNA, 19 bp, Mus musculus
  siRNA target sequence for 9530053A07Rik (NM_176924.2,1335-1353).
ggttgcttcccggaatact

SEQ ID NO: 791048 - DNA, 19 bp, Mus musculus
  siRNA target sequence for 9530053A07Rik (NM_176924.2,1336-1354).
gttgcttcccggaatactt

SEQ ID NO: 791049 - DNA, 19 bp, Mus musculus
  siRNA target sequence for 9530053A07Rik (NM_176924.2,1374-1392).
ggagacccacactacatga

SEQ ID NO: 791050 - DNA, 19 bp, Mus musculus
  siRNA target sequence for 9530053A07Rik (NM_176924.2,1398-1416).
gatgagcggatcttcaatt

SEQ ID NO: 791051 - DNA, 19 bp, Mus musculus
  siRNA target sequence for 9530053A07Rik (NM_176924.2,1427-1445).
ctgcacatacttgtttact

SEQ ID NO: 791052 - DNA, 19 bp, Mus musculus
  siRNA target sequence for 9530053A07Rik (NM_176924.2,1468-1486).
ctctccccgacttcaaagt

SEQ ID NO: 791053 - DNA, 19 bp, Mus musculus
  siRNA target sequence for 9530053A07Rik (NM_176924.2,1470-1488).
ctccccgacttcaaagtgt

SEQ ID NO: 791054 - DNA, 19 bp, Mus musculus
  siRNA target sequence for 9530053A07Rik (NM_176924.2,1473-1491).
cccgacttcaaagtgttta

SEQ ID NO: 791055 - DNA, 19 bp, Mus musculus
  siRNA target sequence for 9530053A07Rik (NM_176924.2,1478-1496).
cttcaaagtgtttatagaa

SEQ ID NO: 791056 - DNA, 19 bp, Mus musculus
  siRNA target sequence for 9530053A07Rik (NM_176924.2,1500-1518).
gaacgccgtggaagtcaaa

SEQ ID NO: 791057 - DNA, 19 bp, Mus musculus
  siRNA target sequence for 9530053A07Rik (NM_176924.2,1510-1528).
gaagtcaaagcgtaagctt

SEQ ID NO: 791058 - DNA, 19 bp, Mus musculus
  siRNA target sequence for 9530053A07Rik (NM_176924.2,1548-1566).
gaggccttaggaatcaagt

SEQ ID NO: 791059 - DNA, 19 bp, Mus musculus
  siRNA target sequence for 9530053A07Rik (NM_176924.2,1795-1813).
gggacccacgtgatgactt

SEQ ID NO: 791060 - DNA, 19 bp, Mus musculus
  siRNA target sequence for 9530053A07Rik (NM_176924.2,1804-1822).
gtgatgacttgggtaaaca

SEQ ID NO: 791061 - DNA, 19 bp, Mus musculus
  siRNA target sequence for 9530053A07Rik (NM_176924.2,1806-1824).
gatgacttgggtaaacaga

SEQ ID NO: 791062 - DNA, 19 bp, Mus musculus
  siRNA target sequence for 9530053A07Rik (NM_176924.2,1809-1827).
gacttgggtaaacagatta

SEQ ID NO: 791063 - DNA, 19 bp, Mus musculus
  siRNA target sequence for 9530053A07Rik (NM_176924.2,1838-1856).
cattgaccctcgagacttt

SEQ ID NO: 791064 - DNA, 19 bp, Mus musculus
  siRNA target sequence for 9530053A07Rik (NM_176924.2,1913-1931).
gtgtcctgacttcaacaaa

SEQ ID NO: 791065 - DNA, 19 bp, Mus musculus
  siRNA target sequence for 9530053A07Rik (NM_176924.2,1918-1936).
ctgacttcaacaaaggatt

SEQ ID NO: 791066 - DNA, 19 bp, Mus musculus
  siRNA target sequence for 9530053A07Rik (NM_176924.2,1932-1950).
ggattagtgtcaaatataa

SEQ ID NO: 791067 - DNA, 19 bp, Mus musculus
  siRNA target sequence for 9530053A07Rik (NM_176924.2,2015-2033).
ctacaacagtgcctacata

SEQ ID NO: 791068 - DNA, 19 bp, Mus musculus
  siRNA target sequence for 9530053A07Rik (NM_176924.2,2030-2048).
catagagtgcgcctatgat

SEQ ID NO: 791069 - DNA, 19 bp, Mus musculus
  siRNA target sequence for 9530053A07Rik (NM_176924.2,2055-2073).
cgtatgccaggccaaacta

SEQ ID NO: 791070 - DNA, 19 bp, Mus musculus
  siRNA target sequence for 9530053A07Rik (NM_176924.2,2056-2074).
gtatgccaggccaaactaa

SEQ ID NO: 791071 - DNA, 19 bp, Mus musculus
  siRNA target sequence for 9530053A07Rik (NM_176924.2,2105-2123).
cgccatatgccaatcttct

SEQ ID NO: 791072 - DNA, 19 bp, Mus musculus
  siRNA target sequence for 9530053A07Rik (NM_176924.2,2162-2180).
ccgtgagtaccaagagtat

SEQ ID NO: 791073 - DNA, 19 bp, Mus musculus
  siRNA target sequence for 9530053A07Rik (NM_176924.2,2164-2182).
gtgagtaccaagagtatca

SEQ ID NO: 791074 - DNA, 19 bp, Mus musculus
  siRNA target sequence for 9530053A07Rik (NM_176924.2,2187-2205).
gggattgagtctaatgctt

SEQ ID NO: 791075 - DNA, 19 bp, Mus musculus
  siRNA target sequence for 9530053A07Rik (NM_176924.2,2195-2213).
gtctaatgcttgttcgtta

SEQ ID NO: 791076 - DNA, 19 bp, Mus musculus
  siRNA target sequence for 9530053A07Rik (NM_176924.2,2202-2220).
gcttgttcgttagcttata

SEQ ID NO: 791077 - DNA, 19 bp, Mus musculus
  siRNA target sequence for 9530053A07Rik (NM_176924.2,2203-2221).
cttgttcgttagcttataa

SEQ ID NO: 791078 - DNA, 19 bp, Mus musculus
  siRNA target sequence for A430057M04Rik (NM_176925.2,561-579).
gacacatggccgtattgca

SEQ ID NO: 791079 - DNA, 19 bp, Mus musculus
  siRNA target sequence for A430057M04Rik (NM_176925.2,622-640).
gaactgcgtcgggtgaaat

SEQ ID NO: 791080 - DNA, 19 bp, Mus musculus
  siRNA target sequence for A430057M04Rik (NM_176925.2,625-643).
ctgcgtcgggtgaaatcct

SEQ ID NO: 791081 - DNA, 19 bp, Mus musculus
  siRNA target sequence for A430057M04Rik (NM_176925.2,627-645).
gcgtcgggtgaaatccttt

SEQ ID NO: 791082 - DNA, 19 bp, Mus musculus
  siRNA target sequence for A430057M04Rik (NM_176925.2,788-806).
gctgcggggaggcttcaat

SEQ ID NO: 791083 - DNA, 19 bp, Mus musculus
  siRNA target sequence for A430057M04Rik (NM_176925.2,792-810).
cggggaggcttcaatgcta

SEQ ID NO: 791084 - DNA, 19 bp, Mus musculus
  siRNA target sequence for D830007G01Rik (NM_176926.2,244-262).
gtttacgcagccgttacaa

SEQ ID NO: 791085 - DNA, 19 bp, Mus musculus
  siRNA target sequence for D830007G01Rik (NM_176926.2,280-298).
gggtagtaccgcaaccttt

SEQ ID NO: 791086 - DNA, 19 bp, Mus musculus
  siRNA target sequence for D830007G01Rik (NM_176926.2,344-362).
cgggatggccaggtgattt

SEQ ID NO: 791087 - DNA, 19 bp, Mus musculus
  siRNA target sequence for D830007G01Rik (NM_176926.2,350-368).
ggccaggtgatttcaactt

SEQ ID NO: 791088 - DNA, 19 bp, Mus musculus
  siRNA target sequence for D830007G01Rik (NM_176926.2,380-398).
ggcgtgcagatctccttta

SEQ ID NO: 791089 - DNA, 19 bp, Mus musculus
  siRNA target sequence for D830007G01Rik (NM_176926.2,660-678).
gctcccttgatttccaaat

SEQ ID NO: 791090 - DNA, 19 bp, Mus musculus
  siRNA target sequence for D830007G01Rik (NM_176926.2,664-682).
ccttgatttccaaatttct

SEQ ID NO: 791091 - DNA, 19 bp, Mus musculus
  siRNA target sequence for D830007G01Rik (NM_176926.2,728-746).
gaagactccgggacctatt

SEQ ID NO: 791092 - DNA, 19 bp, Mus musculus
  siRNA target sequence for D830007G01Rik (NM_176926.2,735-753).
ccgggacctattctgtaaa

SEQ ID NO: 791093 - DNA, 19 bp, Mus musculus
  siRNA target sequence for D830007G01Rik (NM_176926.2,844-862).
cgtgtcgactgctcagatt

SEQ ID NO: 791094 - DNA, 19 bp, Mus musculus
  siRNA target sequence for D830007G01Rik (NM_176926.2,845-863).
gtgtcgactgctcagattt

SEQ ID NO: 791095 - DNA, 19 bp, Mus musculus
  siRNA target sequence for D830007G01Rik (NM_176926.2,847-865).
gtcgactgctcagatttca

SEQ ID NO: 791096 - DNA, 19 bp, Mus musculus
  siRNA target sequence for D830007G01Rik (NM_176926.2,849-867).
cgactgctcagatttcaga

SEQ ID NO: 791097 - DNA, 19 bp, Mus musculus
  siRNA target sequence for D830007G01Rik (NM_176926.2,850-868).
gactgctcagatttcagaa

SEQ ID NO: 791098 - DNA, 19 bp, Mus musculus
  siRNA target sequence for D830007G01Rik (NM_176926.2,875-893).
caaacccggattgaaaaaa

SEQ ID NO: 791099 - DNA, 19 bp, Mus musculus
  siRNA target sequence for D830007G01Rik (NM_176926.2,879-897).
cccggattgaaaaaaagat

SEQ ID NO: 791100 - DNA, 19 bp, Mus musculus
  siRNA target sequence for D830007G01Rik (NM_176926.2,916-934).
cagatcaatcgcaacagtt

SEQ ID NO: 791101 - DNA, 19 bp, Mus musculus
  siRNA target sequence for D830007G01Rik (NM_176926.2,921-939).
caatcgcaacagttgagat

SEQ ID NO: 791102 - DNA, 19 bp, Mus musculus
  siRNA target sequence for D830007G01Rik (NM_176926.2,1061-1079).
cagtccccatcaccaataa

SEQ ID NO: 791103 - DNA, 19 bp, Mus musculus
  siRNA target sequence for D830007G01Rik (NM_176926.2,1063-1081).
gtccccatcaccaataaga

SEQ ID NO: 791104 - DNA, 19 bp, Mus musculus
  siRNA target sequence for D830007G01Rik (NM_176926.2,1065-1083).
ccccatcaccaataagaca

SEQ ID NO: 791105 - DNA, 19 bp, Mus musculus
  siRNA target sequence for D830007G01Rik (NM_176926.2,1458-1476).
ctaaggaggtgaaacaaga

SEQ ID NO: 791106 - DNA, 19 bp, Mus musculus
  siRNA target sequence for D830007G01Rik (NM_176926.2,1581-1599).
ccacgactgctgtgcatat

SEQ ID NO: 791107 - DNA, 19 bp, Mus musculus
  siRNA target sequence for D830007G01Rik (NM_176926.2,1584-1602).
cgactgctgtgcatataca

SEQ ID NO: 791108 - DNA, 19 bp, Mus musculus
  siRNA target sequence for D830007G01Rik (NM_176926.2,1585-1603).
gactgctgtgcatatacaa

SEQ ID NO: 791109 - DNA, 19 bp, Mus musculus
  siRNA target sequence for D830007G01Rik (NM_176926.2,1698-1716).
cacgaaccagagaagtgat

SEQ ID NO: 791110 - DNA, 19 bp, Mus musculus
  siRNA target sequence for D830007G01Rik (NM_176926.2,1727-1745).
caagagcagactcacatat

SEQ ID NO: 791111 - DNA, 19 bp, Mus musculus
  siRNA target sequence for D830007G01Rik (NM_176926.2,1732-1750).
gcagactcacatatctcat

SEQ ID NO: 791112 - DNA, 19 bp, Mus musculus
  siRNA target sequence for D830007G01Rik (NM_176926.2,1830-1848).
ctagaatcacgggagaaat

SEQ ID NO: 791113 - DNA, 19 bp, Mus musculus
  siRNA target sequence for D830007G01Rik (NM_176926.2,1839-1857).
cgggagaaattactacaaa

SEQ ID NO: 791114 - DNA, 19 bp, Mus musculus
  siRNA target sequence for D830007G01Rik (NM_176926.2,1840-1858).
gggagaaattactacaaaa

SEQ ID NO: 791115 - DNA, 19 bp, Mus musculus
  siRNA target sequence for D830007G01Rik (NM_176926.2,1864-1882).
gcaaaagcgaataactcaa

SEQ ID NO: 791116 - DNA, 19 bp, Mus musculus
  siRNA target sequence for D830007G01Rik (NM_176926.2,1870-1888).
gcgaataactcaagaaaca

SEQ ID NO: 791117 - DNA, 19 bp, Mus musculus
  siRNA target sequence for D830007G01Rik (NM_176926.2,1936-1954).
caccgccaagtccacaaaa

SEQ ID NO: 791118 - DNA, 19 bp, Mus musculus
  siRNA target sequence for D830007G01Rik (NM_176926.2,1938-1956).
ccgccaagtccacaaaact

SEQ ID NO: 791119 - DNA, 19 bp, Mus musculus
  siRNA target sequence for D830007G01Rik (NM_176926.2,1939-1957).
cgccaagtccacaaaacta

SEQ ID NO: 791120 - DNA, 19 bp, Mus musculus
  siRNA target sequence for D830007G01Rik (NM_176926.2,1988-2006).
gccatacaacaggatcaaa

SEQ ID NO: 791121 - DNA, 19 bp, Mus musculus
  siRNA target sequence for D830007G01Rik (NM_176926.2,1989-2007).
ccatacaacaggatcaaat

SEQ ID NO: 791122 - DNA, 19 bp, Mus musculus
  siRNA target sequence for D830007G01Rik (NM_176926.2,2037-2055).
cctgctggtgtgaaagtca

SEQ ID NO: 791123 - DNA, 19 bp, Mus musculus
  siRNA target sequence for D830007G01Rik (NM_176926.2,2095-2113).
catcacggctcttaagcat

SEQ ID NO: 791124 - DNA, 19 bp, Mus musculus
  siRNA target sequence for D830007G01Rik (NM_176926.2,2100-2118).
cggctcttaagcatctctt

SEQ ID NO: 791125 - DNA, 19 bp, Mus musculus
  siRNA target sequence for D830007G01Rik (NM_176926.2,2155-2173).
gctttcactctcattccta

SEQ ID NO: 791126 - DNA, 19 bp, Mus musculus
  siRNA target sequence for D830007G01Rik (NM_176926.2,2156-2174).
ctttcactctcattcctaa

SEQ ID NO: 791127 - DNA, 19 bp, Mus musculus
  siRNA target sequence for D830007G01Rik (NM_176926.2,2181-2199).
gcttttctttggattgcta

SEQ ID NO: 791128 - DNA, 19 bp, Mus musculus
  siRNA target sequence for 9930038B18Rik (NM_176929.3,632-650).
ggccacctacccactcata

SEQ ID NO: 791129 - DNA, 19 bp, Mus musculus
  siRNA target sequence for 9930038B18Rik (NM_176929.3,634-652).
ccacctacccactcatagt

SEQ ID NO: 791130 - DNA, 19 bp, Mus musculus
  siRNA target sequence for 9930038B18Rik (NM_176929.3,812-830).
cttgccacggccagaagaa

SEQ ID NO: 791131 - DNA, 19 bp, Mus musculus
  siRNA target sequence for 9930038B18Rik (NM_176929.3,982-1000).
gggccagtgcaaagcaaat

SEQ ID NO: 791132 - DNA, 19 bp, Mus musculus
  siRNA target sequence for C130076O07Rik (NM_176930.2,465-483).
gaagaagaagcacttatct

SEQ ID NO: 791133 - DNA, 19 bp, Mus musculus
  siRNA target sequence for C130076O07Rik (NM_176930.2,490-508).
ggagtgcccctgattctct

SEQ ID NO: 791134 - DNA, 19 bp, Mus musculus
  siRNA target sequence for C130076O07Rik (NM_176930.2,491-509).
gagtgcccctgattctctt

SEQ ID NO: 791135 - DNA, 19 bp, Mus musculus
  siRNA target sequence for C130076O07Rik (NM_176930.2,604-622).
cctcgggagaatattgtaa

SEQ ID NO: 791136 - DNA, 19 bp, Mus musculus
  siRNA target sequence for C130076O07Rik (NM_176930.2,605-623).
ctcgggagaatattgtaat

SEQ ID NO: 791137 - DNA, 19 bp, Mus musculus
  siRNA target sequence for C130076O07Rik (NM_176930.2,642-660).
gaaacctcccccaagcttt

SEQ ID NO: 791138 - DNA, 19 bp, Mus musculus
  siRNA target sequence for C130076O07Rik (NM_176930.2,680-698).
ctcactttgacatagacaa

SEQ ID NO: 791139 - DNA, 19 bp, Mus musculus
  siRNA target sequence for C130076O07Rik (NM_176930.2,725-743).
gctcaggaacccttgtcat

SEQ ID NO: 791140 - DNA, 19 bp, Mus musculus
  siRNA target sequence for C130076O07Rik (NM_176930.2,817-835).
gctgccgtctccaataaca

SEQ ID NO: 791141 - DNA, 19 bp, Mus musculus
  siRNA target sequence for C130076O07Rik (NM_176930.2,821-839).
ccgtctccaataacattgt

SEQ ID NO: 791142 - DNA, 19 bp, Mus musculus
  siRNA target sequence for C130076O07Rik (NM_176930.2,822-840).
cgtctccaataacattgtt

SEQ ID NO: 791143 - DNA, 19 bp, Mus musculus
  siRNA target sequence for C130076O07Rik (NM_176930.2,878-896).
gacttgaacctatagtact

SEQ ID NO: 791144 - DNA, 19 bp, Mus musculus
  siRNA target sequence for C130076O07Rik (NM_176930.2,897-915).
ccagaatgggcagtcatta

SEQ ID NO: 791145 - DNA, 19 bp, Mus musculus
  siRNA target sequence for C130076O07Rik (NM_176930.2,926-944).
gtaggcctccgattggatt

SEQ ID NO: 791146 - DNA, 19 bp, Mus musculus
  siRNA target sequence for C130076O07Rik (NM_176930.2,930-948).
gcctccgattggattacct

SEQ ID NO: 791147 - DNA, 19 bp, Mus musculus
  siRNA target sequence for C130076O07Rik (NM_176930.2,941-959).
gattacctccggccataat

SEQ ID NO: 791148 - DNA, 19 bp, Mus musculus
  siRNA target sequence for C130076O07Rik (NM_176930.2,946-964).
cctccggccataatatttt

SEQ ID NO: 791149 - DNA, 19 bp, Mus musculus
  siRNA target sequence for C130076O07Rik (NM_176930.2,949-967).
ccggccataatattttgga

SEQ ID NO: 791150 - DNA, 19 bp, Mus musculus
  siRNA target sequence for C130076O07Rik (NM_176930.2,950-968).
cggccataatattttggat

SEQ ID NO: 791151 - DNA, 19 bp, Mus musculus
  siRNA target sequence for C130076O07Rik (NM_176930.2,1005-1023).
ggtttcccaaggcctaaat

SEQ ID NO: 791152 - DNA, 19 bp, Mus musculus
  siRNA target sequence for C130076O07Rik (NM_176930.2,1016-1034).
gcctaaatggagaccttta

SEQ ID NO: 791153 - DNA, 19 bp, Mus musculus
  siRNA target sequence for C130076O07Rik (NM_176930.2,1018-1036).
ctaaatggagacctttact

SEQ ID NO: 791154 - DNA, 19 bp, Mus musculus
  siRNA target sequence for C130076O07Rik (NM_176930.2,1079-1097).
gctatgccagatttaatca

SEQ ID NO: 791155 - DNA, 19 bp, Mus musculus
  siRNA target sequence for C130076O07Rik (NM_176930.2,1162-1180).
gacactatagctgctaatt

SEQ ID NO: 791156 - DNA, 19 bp, Mus musculus
  siRNA target sequence for C130076O07Rik (NM_176930.2,1182-1200).
gagtgacactgagttttat

SEQ ID NO: 791157 - DNA, 19 bp, Mus musculus
  siRNA target sequence for C130076O07Rik (NM_176930.2,1202-1220).
gtgctaaatctagtaaaga

SEQ ID NO: 791158 - DNA, 19 bp, Mus musculus
  siRNA target sequence for C130076O07Rik (NM_176930.2,1204-1222).
gctaaatctagtaaagaga

SEQ ID NO: 791159 - DNA, 19 bp, Mus musculus
  siRNA target sequence for C130076O07Rik (NM_176930.2,1312-1330).
ggcctacctactccaatta

SEQ ID NO: 791160 - DNA, 19 bp, Mus musculus
  siRNA target sequence for C130076O07Rik (NM_176930.2,1313-1331).
gcctacctactccaattat

SEQ ID NO: 791161 - DNA, 19 bp, Mus musculus
  siRNA target sequence for C130076O07Rik (NM_176930.2,1314-1332).
cctacctactccaattatt

SEQ ID NO: 791162 - DNA, 19 bp, Mus musculus
  siRNA target sequence for C130076O07Rik (NM_176930.2,1315-1333).
ctacctactccaattattt

SEQ ID NO: 791163 - DNA, 19 bp, Mus musculus
  siRNA target sequence for C130076O07Rik (NM_176930.2,1360-1378).
cccgccaaccggacatttt

SEQ ID NO: 791164 - DNA, 19 bp, Mus musculus
  siRNA target sequence for C130076O07Rik (NM_176930.2,1361-1379).
ccgccaaccggacatttta

SEQ ID NO: 791165 - DNA, 19 bp, Mus musculus
  siRNA target sequence for C130076O07Rik (NM_176930.2,1362-1380).
cgccaaccggacattttat

SEQ ID NO: 791166 - DNA, 19 bp, Mus musculus
  siRNA target sequence for C130076O07Rik (NM_176930.2,1371-1389).
gacattttatcggaacttt

SEQ ID NO: 791167 - DNA, 19 bp, Mus musculus
  siRNA target sequence for C130076O07Rik (NM_176930.2,1373-1391).
cattttatcggaactttaa

SEQ ID NO: 791168 - DNA, 19 bp, Mus musculus
  siRNA target sequence for C130076O07Rik (NM_176930.2,1398-1416).
cctgcagatcactcatgtt

SEQ ID NO: 791169 - DNA, 19 bp, Mus musculus
  siRNA target sequence for C130076O07Rik (NM_176930.2,1419-1437).
cgaagccgactctggaaat

SEQ ID NO: 791170 - DNA, 19 bp, Mus musculus
  siRNA target sequence for C130076O07Rik (NM_176930.2,1420-1438).
gaagccgactctggaaatt

SEQ ID NO: 791171 - DNA, 19 bp, Mus musculus
  siRNA target sequence for C130076O07Rik (NM_176930.2,1468-1486).
gccgtccatcacaccattt

SEQ ID NO: 791172 - DNA, 19 bp, Mus musculus
  siRNA target sequence for C130076O07Rik (NM_176930.2,1470-1488).
cgtccatcacaccatttct

SEQ ID NO: 791173 - DNA, 19 bp, Mus musculus
  siRNA target sequence for C130076O07Rik (NM_176930.2,1514-1532).
ggatcgtggcacctcaaaa

SEQ ID NO: 791174 - DNA, 19 bp, Mus musculus
  siRNA target sequence for C130076O07Rik (NM_176930.2,1584-1602).
caacccgaaacccagaatt

SEQ ID NO: 791175 - DNA, 19 bp, Mus musculus
  siRNA target sequence for C130076O07Rik (NM_176930.2,1588-1606).
ccgaaacccagaattagct

SEQ ID NO: 791176 - DNA, 19 bp, Mus musculus
  siRNA target sequence for C130076O07Rik (NM_176930.2,1594-1612).
cccagaattagctggttaa

SEQ ID NO: 791177 - DNA, 19 bp, Mus musculus
  siRNA target sequence for C130076O07Rik (NM_176930.2,1598-1616).
gaattagctggttaacaaa

SEQ ID NO: 791178 - DNA, 19 bp, Mus musculus
  siRNA target sequence for C130076O07Rik (NM_176930.2,1613-1631).
caaatggagtcccaataga

SEQ ID NO: 791179 - DNA, 19 bp, Mus musculus
  siRNA target sequence for C130076O07Rik (NM_176930.2,1641-1659).
cgatgaccccagcagaaaa

SEQ ID NO: 791180 - DNA, 19 bp, Mus musculus
  siRNA target sequence for C130076O07Rik (NM_176930.2,1647-1665).
ccccagcagaaaaatagat

SEQ ID NO: 791181 - DNA, 19 bp, Mus musculus
  siRNA target sequence for C130076O07Rik (NM_176930.2,1663-1681).
gatggcgataccattatat

SEQ ID NO: 791182 - DNA, 19 bp, Mus musculus
  siRNA target sequence for C130076O07Rik (NM_176930.2,1666-1684).
ggcgataccattatatttt

SEQ ID NO: 791183 - DNA, 19 bp, Mus musculus
  siRNA target sequence for C130076O07Rik (NM_176930.2,1668-1686).
cgataccattatattttca

SEQ ID NO: 791184 - DNA, 19 bp, Mus musculus
  siRNA target sequence for C130076O07Rik (NM_176930.2,1669-1687).
gataccattatattttcaa

SEQ ID NO: 791185 - DNA, 19 bp, Mus musculus
  siRNA target sequence for C130076O07Rik (NM_176930.2,1700-1718).
gctcaagtgcggtttatca

SEQ ID NO: 791186 - DNA, 19 bp, Mus musculus
  siRNA target sequence for C130076O07Rik (NM_176930.2,1722-1740).
caatgcctctaacaaatat

SEQ ID NO: 791187 - DNA, 19 bp, Mus musculus
  siRNA target sequence for C130076O07Rik (NM_176930.2,1750-1768).
ctagcaaatgcatttgtaa

SEQ ID NO: 791188 - DNA, 19 bp, Mus musculus
  siRNA target sequence for C130076O07Rik (NM_176930.2,1754-1772).
caaatgcatttgtaaatgt

SEQ ID NO: 791189 - DNA, 19 bp, Mus musculus
  siRNA target sequence for C130076O07Rik (NM_176930.2,1780-1798).
gaaccacctcggattctca

SEQ ID NO: 791190 - DNA, 19 bp, Mus musculus
  siRNA target sequence for C130076O07Rik (NM_176930.2,1836-1854).
gcctgctttgctagattgt

SEQ ID NO: 791191 - DNA, 19 bp, Mus musculus
  siRNA target sequence for C130076O07Rik (NM_176930.2,1870-1888).
cctatgcctaccattgagt

SEQ ID NO: 791192 - DNA, 19 bp, Mus musculus
  siRNA target sequence for C130076O07Rik (NM_176930.2,1876-1894).
cctaccattgagtggttta

SEQ ID NO: 791193 - DNA, 19 bp, Mus musculus
  siRNA target sequence for C130076O07Rik (NM_176930.2,1887-1905).
gtggtttaaaggcactaaa

SEQ ID NO: 791194 - DNA, 19 bp, Mus musculus
  siRNA target sequence for C130076O07Rik (NM_176930.2,1910-1928).
gcgctcttcatgaagacat

SEQ ID NO: 791195 - DNA, 19 bp, Mus musculus
  siRNA target sequence for C130076O07Rik (NM_176930.2,1911-1929).
cgctcttcatgaagacatt

SEQ ID NO: 791196 - DNA, 19 bp, Mus musculus
  siRNA target sequence for C130076O07Rik (NM_176930.2,1913-1931).
ctcttcatgaagacattta

SEQ ID NO: 791197 - DNA, 19 bp, Mus musculus
  siRNA target sequence for C130076O07Rik (NM_176930.2,1933-1951).
gttttgcatgataatggaa

SEQ ID NO: 791198 - DNA, 19 bp, Mus musculus
  siRNA target sequence for C130076O07Rik (NM_176930.2,1938-1956).
gcatgataatggaacatta

SEQ ID NO: 791199 - DNA, 19 bp, Mus musculus
  siRNA target sequence for C130076O07Rik (NM_176930.2,1966-1984).
gtggcccaaaaggatagta

SEQ ID NO: 791200 - DNA, 19 bp, Mus musculus
  siRNA target sequence for C130076O07Rik (NM_176930.2,1978-1996).
gatagtacagggacgtata

SEQ ID NO: 791201 - DNA, 19 bp, Mus musculus
  siRNA target sequence for C130076O07Rik (NM_176930.2,1997-2015).
cttgtgtcgcacggaataa

SEQ ID NO: 791202 - DNA, 19 bp, Mus musculus
  siRNA target sequence for C130076O07Rik (NM_176930.2,2000-2018).
gtgtcgcacggaataaact

SEQ ID NO: 791203 - DNA, 19 bp, Mus musculus
  siRNA target sequence for C130076O07Rik (NM_176930.2,2056-2074).
gatccaaccaggatcatta

SEQ ID NO: 791204 - DNA, 19 bp, Mus musculus
  siRNA target sequence for C130076O07Rik (NM_176930.2,2060-2078).
caaccaggatcattaaaca

SEQ ID NO: 791205 - DNA, 19 bp, Mus musculus
  siRNA target sequence for C130076O07Rik (NM_176930.2,2070-2088).
cattaaacaacctgagtat

SEQ ID NO: 791206 - DNA, 19 bp, Mus musculus
  siRNA target sequence for C130076O07Rik (NM_176930.2,2232-2250).
ggtatctgatgtaaaggat

SEQ ID NO: 791207 - DNA, 19 bp, Mus musculus
  siRNA target sequence for C130076O07Rik (NM_176930.2,2342-2360).
ctccagcccccatttacga

SEQ ID NO: 791208 - DNA, 19 bp, Mus musculus
  siRNA target sequence for C130076O07Rik (NM_176930.2,2364-2382).
cccgaatcctccctttgat

SEQ ID NO: 791209 - DNA, 19 bp, Mus musculus
  siRNA target sequence for C130076O07Rik (NM_176930.2,2365-2383).
ccgaatcctccctttgatt

SEQ ID NO: 791210 - DNA, 19 bp, Mus musculus
  siRNA target sequence for C130076O07Rik (NM_176930.2,2366-2384).
cgaatcctccctttgattt

SEQ ID NO: 791211 - DNA, 19 bp, Mus musculus
  siRNA target sequence for C130076O07Rik (NM_176930.2,2367-2385).
gaatcctccctttgattta

SEQ ID NO: 791212 - DNA, 19 bp, Mus musculus
  siRNA target sequence for C130076O07Rik (NM_176930.2,2394-2412).
caatcaacttgacaaaagt

SEQ ID NO: 791213 - DNA, 19 bp, Mus musculus
  siRNA target sequence for C130076O07Rik (NM_176930.2,2429-2447).
ccccaggcgacgacaacaa

SEQ ID NO: 791214 - DNA, 19 bp, Mus musculus
  siRNA target sequence for C130076O07Rik (NM_176930.2,2430-2448).
cccaggcgacgacaacaat

SEQ ID NO: 791215 - DNA, 19 bp, Mus musculus
  siRNA target sequence for C130076O07Rik (NM_176930.2,2431-2449).
ccaggcgacgacaacaata

SEQ ID NO: 791216 - DNA, 19 bp, Mus musculus
  siRNA target sequence for C130076O07Rik (NM_176930.2,2445-2463).
caatagccccattacaaaa

SEQ ID NO: 791217 - DNA, 19 bp, Mus musculus
  siRNA target sequence for C130076O07Rik (NM_176930.2,2450-2468).
gccccattacaaaattcat

SEQ ID NO: 791218 - DNA, 19 bp, Mus musculus
  siRNA target sequence for C130076O07Rik (NM_176930.2,2633-2651).
ccgagcagtatcttacaaa

SEQ ID NO: 791219 - DNA, 19 bp, Mus musculus
  siRNA target sequence for C130076O07Rik (NM_176930.2,2654-2672).
ccgcagaaccagatcagaa

SEQ ID NO: 791220 - DNA, 19 bp, Mus musculus
  siRNA target sequence for C130076O07Rik (NM_176930.2,2704-2722).
ccggacaacttggtgatta

SEQ ID NO: 791221 - DNA, 19 bp, Mus musculus
  siRNA target sequence for C130076O07Rik (NM_176930.2,2706-2724).
ggacaacttggtgattaca

SEQ ID NO: 791222 - DNA, 19 bp, Mus musculus
  siRNA target sequence for C130076O07Rik (NM_176930.2,2707-2725).
gacaacttggtgattacat

SEQ ID NO: 791223 - DNA, 19 bp, Mus musculus
  siRNA target sequence for C130076O07Rik (NM_176930.2,2731-2749).
cccctgaatggttttcaat

SEQ ID NO: 791224 - DNA, 19 bp, Mus musculus
  siRNA target sequence for C130076O07Rik (NM_176930.2,2757-2775).
gcctggcctccagtacaaa

SEQ ID NO: 791225 - DNA, 19 bp, Mus musculus
  siRNA target sequence for C130076O07Rik (NM_176930.2,2761-2779).
ggcctccagtacaaagtga

SEQ ID NO: 791226 - DNA, 19 bp, Mus musculus
  siRNA target sequence for C130076O07Rik (NM_176930.2,2778-2796).
gagctggcgccagaaagat

SEQ ID NO: 791227 - DNA, 19 bp, Mus musculus
  siRNA target sequence for C130076O07Rik (NM_176930.2,2824-2842).
gtggccaatgtatccaaat

SEQ ID NO: 791228 - DNA, 19 bp, Mus musculus
  siRNA target sequence for C130076O07Rik (NM_176930.2,2873-2891).
catacctgataaaagttca

SEQ ID NO: 791229 - DNA, 19 bp, Mus musculus
  siRNA target sequence for C130076O07Rik (NM_176930.2,2986-3004).
gtcagcgtggtgaacagta

SEQ ID NO: 791230 - DNA, 19 bp, Mus musculus
  siRNA target sequence for C130076O07Rik (NM_176930.2,3064-3082).
ggctaccggatttactact

SEQ ID NO: 791231 - DNA, 19 bp, Mus musculus
  siRNA target sequence for C130076O07Rik (NM_176930.2,3087-3105).
gacccagagctcctctaaa

SEQ ID NO: 791232 - DNA, 19 bp, Mus musculus
  siRNA target sequence for C130076O07Rik (NM_176930.2,3107-3125).
gaaacaggcgccacattga

SEQ ID NO: 791233 - DNA, 19 bp, Mus musculus
  siRNA target sequence for C130076O07Rik (NM_176930.2,3291-3309).
ctcatctttgaaaattgtt

SEQ ID NO: 791234 - DNA, 19 bp, Mus musculus
  siRNA target sequence for C130076O07Rik (NM_176930.2,3322-3340).
gactccctcactttggaat

SEQ ID NO: 791235 - DNA, 19 bp, Mus musculus
  siRNA target sequence for C130076O07Rik (NM_176930.2,3369-3387).
cctgactgagtacatctta

SEQ ID NO: 791236 - DNA, 19 bp, Mus musculus
  siRNA target sequence for C130076O07Rik (NM_176930.2,3421-3439).
ggccctctggtagatttaa

SEQ ID NO: 791237 - DNA, 19 bp, Mus musculus
  siRNA target sequence for C130076O07Rik (NM_176930.2,3429-3447).
ggtagatttaaaaattcct

SEQ ID NO: 791238 - DNA, 19 bp, Mus musculus
  siRNA target sequence for C130076O07Rik (NM_176930.2,3460-3478).
cgctggactttgaaaaatt

SEQ ID NO: 791239 - DNA, 19 bp, Mus musculus
  siRNA target sequence for C130076O07Rik (NM_176930.2,3491-3509).
ctcggtacaagttctattt

SEQ ID NO: 791240 - DNA, 19 bp, Mus musculus
  siRNA target sequence for C130076O07Rik (NM_176930.2,3493-3511).
cggtacaagttctatttct

SEQ ID NO: 791241 - DNA, 19 bp, Mus musculus
  siRNA target sequence for C130076O07Rik (NM_176930.2,3570-3588).
ggacgaagctggtattcct

SEQ ID NO: 791242 - DNA, 19 bp, Mus musculus
  siRNA target sequence for C130076O07Rik (NM_176930.2,3653-3671).
gaagcttctttgggttaaa

SEQ ID NO: 791243 - DNA, 19 bp, Mus musculus
  siRNA target sequence for C130076O07Rik (NM_176930.2,3737-3755).
gttcagaggatgtgtttga

SEQ ID NO: 791244 - DNA, 19 bp, Mus musculus
  siRNA target sequence for C130076O07Rik (NM_176930.2,3773-3791).
caagccggcaagtggatat

SEQ ID NO: 791245 - DNA, 19 bp, Mus musculus
  siRNA target sequence for C130076O07Rik (NM_176930.2,3795-3813).
gacccaaggctggttcata

SEQ ID NO: 791246 - DNA, 19 bp, Mus musculus
  siRNA target sequence for C130076O07Rik (NM_176930.2,3803-3821).
gctggttcataggtctaat

SEQ ID NO: 791247 - DNA, 19 bp, Mus musculus
  siRNA target sequence for C130076O07Rik (NM_176930.2,3829-3847).
gttgctctcctcatcttaa

SEQ ID NO: 791248 - DNA, 19 bp, Mus musculus
  siRNA target sequence for C130076O07Rik (NM_176930.2,3832-3850).
gctctcctcatcttaattt

SEQ ID NO: 791249 - DNA, 19 bp, Mus musculus
  siRNA target sequence for C130076O07Rik (NM_176930.2,3859-3877).
gtttgcttcatcagaagaa

SEQ ID NO: 791250 - DNA, 19 bp, Mus musculus
  siRNA target sequence for C130076O07Rik (NM_176930.2,3884-3902).
gtggtaaatacccagttaa

SEQ ID NO: 791251 - DNA, 19 bp, Mus musculus
  siRNA target sequence for C130076O07Rik (NM_176930.2,3958-3976).
gggacgtttggagaataca

SEQ ID NO: 791252 - DNA, 19 bp, Mus musculus
  siRNA target sequence for C130076O07Rik (NM_176930.2,3960-3978).
gacgtttggagaatacagt

SEQ ID NO: 791253 - DNA, 19 bp, Mus musculus
  siRNA target sequence for C130076O07Rik (NM_176930.2,4081-4099).
ggggtgaacggccaattca

SEQ ID NO: 791254 - DNA, 19 bp, Mus musculus
  siRNA target sequence for C130076O07Rik (NM_176930.2,4082-4100).
gggtgaacggccaattcaa

SEQ ID NO: 791255 - DNA, 19 bp, Mus musculus
  siRNA target sequence for C130076O07Rik (NM_176930.2,4149-4167).
gccagcagagggaaatgaa

SEQ ID NO: 791256 - DNA, 19 bp, Mus musculus
  siRNA target sequence for C130076O07Rik (NM_176930.2,4184-4202).
ctcctgtcaacgcaatgaa

SEQ ID NO: 791257 - DNA, 19 bp, Mus musculus
  siRNA target sequence for C130076O07Rik (NM_176930.2,4186-4204).
cctgtcaacgcaatgaact

SEQ ID NO: 791258 - DNA, 19 bp, Mus musculus
  siRNA target sequence for C130076O07Rik (NM_176930.2,4194-4212).
cgcaatgaactcctttgtt

SEQ ID NO: 791259 - DNA, 19 bp, Mus musculus
  siRNA target sequence for 6430510M02Rik (NM_176932.2,1828-1846).
gctggggcattcgatttct

SEQ ID NO: 791260 - DNA, 19 bp, Mus musculus
  siRNA target sequence for 6430510M02Rik (NM_176932.2,1829-1847).
ctggggcattcgatttctt

SEQ ID NO: 791261 - DNA, 19 bp, Mus musculus
  siRNA target sequence for 6430510M02Rik (NM_176932.2,1831-1849).
ggggcattcgatttcttgt

SEQ ID NO: 791262 - DNA, 19 bp, Mus musculus
  siRNA target sequence for 6430510M02Rik (NM_176932.2,1832-1850).
gggcattcgatttcttgta

SEQ ID NO: 791263 - DNA, 19 bp, Mus musculus
  siRNA target sequence for 6430510M02Rik (NM_176932.2,1867-1885).
gacattcggtggaacacat

SEQ ID NO: 791264 - DNA, 19 bp, Mus musculus
  siRNA target sequence for 6430510M02Rik (NM_176932.2,1907-1925).
gccttccttctatctgata

SEQ ID NO: 791265 - DNA, 19 bp, Mus musculus
  siRNA target sequence for 6430510M02Rik (NM_176932.2,1913-1931).
cttctatctgatactctta

SEQ ID NO: 791266 - DNA, 19 bp, Mus musculus
  siRNA target sequence for 6430510M02Rik (NM_176932.2,1926-1944).
ctcttagggcattactatt

SEQ ID NO: 791267 - DNA, 19 bp, Mus musculus
  siRNA target sequence for 6430510M02Rik (NM_176932.2,1928-1946).
cttagggcattactattct

SEQ ID NO: 791268 - DNA, 19 bp, Mus musculus
  siRNA target sequence for 6430510M02Rik (NM_176932.2,1932-1950).
gggcattactattctattt

SEQ ID NO: 791269 - DNA, 19 bp, Mus musculus
  siRNA target sequence for 6430510M02Rik (NM_176932.2,1963-1981).
gtttatctacctatttgga

SEQ ID NO: 791270 - DNA, 19 bp, Mus musculus
  siRNA target sequence for 6430510M02Rik (NM_176932.2,1969-1987).
ctacctatttggatacaat

SEQ ID NO: 791271 - DNA, 19 bp, Mus musculus
  siRNA target sequence for 6430510M02Rik (NM_176932.2,1984-2002).
caattgggaagtttctttt

SEQ ID NO: 791272 - DNA, 19 bp, Mus musculus
  siRNA target sequence for 6430510M02Rik (NM_176932.2,2048-2066).
ctgagtaaagggcttgtat

SEQ ID NO: 791273 - DNA, 19 bp, Mus musculus
  siRNA target sequence for 6430510M02Rik (NM_176932.2,2050-2068).
gagtaaagggcttgtatct

SEQ ID NO: 791274 - DNA, 19 bp, Mus musculus
  siRNA target sequence for D930046H04Rik (NM_176934.2,749-767).
caggagcttcccttacact

SEQ ID NO: 791275 - DNA, 19 bp, Mus musculus
  siRNA target sequence for D930046H04Rik (NM_176934.2,758-776).
cccttacactgatatgctt

SEQ ID NO: 791276 - DNA, 19 bp, Mus musculus
  siRNA target sequence for D930046H04Rik (NM_176934.2,759-777).
ccttacactgatatgcttt

SEQ ID NO: 791277 - DNA, 19 bp, Mus musculus
  siRNA target sequence for D930046H04Rik (NM_176934.2,796-814).
ctatttcaagctctaatat

SEQ ID NO: 791278 - DNA, 19 bp, Mus musculus
  siRNA target sequence for D930046H04Rik (NM_176934.2,815-833).
ctatggatagtgtgtttca

SEQ ID NO: 791279 - DNA, 19 bp, Mus musculus
  siRNA target sequence for D930046H04Rik (NM_176934.2,846-864).
gtggtgtgagaatttttca

SEQ ID NO: 791280 - DNA, 19 bp, Mus musculus
  siRNA target sequence for D930046H04Rik (NM_176934.2,848-866).
ggtgtgagaatttttcagt

SEQ ID NO: 791281 - DNA, 19 bp, Mus musculus
  siRNA target sequence for D930046H04Rik (NM_176934.2,849-867).
gtgtgagaatttttcagta

SEQ ID NO: 791282 - DNA, 19 bp, Mus musculus
  siRNA target sequence for D930046H04Rik (NM_176934.2,1011-1029).
gtgcatactttggaaaaaa

SEQ ID NO: 791283 - DNA, 19 bp, Mus musculus
  siRNA target sequence for D930046H04Rik (NM_176934.2,1013-1031).
gcatactttggaaaaaatt

SEQ ID NO: 791284 - DNA, 19 bp, Mus musculus
  siRNA target sequence for F730015K02Rik (NM_176935.2,458-476).
ctcgtgttgctgactactt

SEQ ID NO: 791285 - DNA, 19 bp, Mus musculus
  siRNA target sequence for F730015K02Rik (NM_176935.2,498-516).
catttcaaagcctcttgaa

SEQ ID NO: 791286 - DNA, 19 bp, Mus musculus
  siRNA target sequence for F730015K02Rik (NM_176935.2,580-598).
gtttctgttatcatcaaat

SEQ ID NO: 791287 - DNA, 19 bp, Mus musculus
  siRNA target sequence for F730015K02Rik (NM_176935.2,609-627).
ggaggtgccacgggattat

SEQ ID NO: 791288 - DNA, 19 bp, Mus musculus
  siRNA target sequence for F730015K02Rik (NM_176935.2,613-631).
gtgccacgggattatgtgt

SEQ ID NO: 791289 - DNA, 19 bp, Mus musculus
  siRNA target sequence for F730015K02Rik (NM_176935.2,617-635).
cacgggattatgtgtgtat

SEQ ID NO: 791290 - DNA, 19 bp, Mus musculus
  siRNA target sequence for F730015K02Rik (NM_176935.2,640-658).
gttaccccaactggattat

SEQ ID NO: 791291 - DNA, 19 bp, Mus musculus
  siRNA target sequence for F730015K02Rik (NM_176935.2,661-679).
gcagaccttaataatggaa

SEQ ID NO: 791292 - DNA, 19 bp, Mus musculus
  siRNA target sequence for F730015K02Rik (NM_176935.2,666-684).
ccttaataatggaagtctt

SEQ ID NO: 791293 - DNA, 19 bp, Mus musculus
  siRNA target sequence for F730015K02Rik (NM_176935.2,687-705).
gggaccccagatttacctt

SEQ ID NO: 791294 - DNA, 19 bp, Mus musculus
  siRNA target sequence for F730015K02Rik (NM_176935.2,688-706).
ggaccccagatttaccttt

SEQ ID NO: 791295 - DNA, 19 bp, Mus musculus
  siRNA target sequence for F730015K02Rik (NM_176935.2,694-712).
cagatttacctttgctata

SEQ ID NO: 791296 - DNA, 19 bp, Mus musculus
  siRNA target sequence for F730015K02Rik (NM_176935.2,708-726).
ctataaaagaggaagagat

SEQ ID NO: 791297 - DNA, 19 bp, Mus musculus
  siRNA target sequence for F730015K02Rik (NM_176935.2,754-772).
ctatatgactggaaagaga

SEQ ID NO: 791298 - DNA, 19 bp, Mus musculus
  siRNA target sequence for F730015K02Rik (NM_176935.2,816-834).
ggacgacctgccaatatta

SEQ ID NO: 791299 - DNA, 19 bp, Mus musculus
  siRNA target sequence for F730015K02Rik (NM_176935.2,836-854).
cggcagtacctcatcacaa

SEQ ID NO: 791300 - DNA, 19 bp, Mus musculus
  siRNA target sequence for F730015K02Rik (NM_176935.2,837-855).
ggcagtacctcatcacaaa

SEQ ID NO: 791301 - DNA, 19 bp, Mus musculus
  siRNA target sequence for F730015K02Rik (NM_176935.2,844-862).
cctcatcacaaagaatcta

SEQ ID NO: 791302 - DNA, 19 bp, Mus musculus
  siRNA target sequence for F730015K02Rik (NM_176935.2,885-903).
gaaaacacgactcagaata

SEQ ID NO: 791303 - DNA, 19 bp, Mus musculus
  siRNA target sequence for F730015K02Rik (NM_176935.2,909-927).
gctgttacagacatatgca

SEQ ID NO: 791304 - DNA, 19 bp, Mus musculus
  siRNA target sequence for F730015K02Rik (NM_176935.2,910-928).
ctgttacagacatatgcat

SEQ ID NO: 791305 - DNA, 19 bp, Mus musculus
  siRNA target sequence for F730015K02Rik (NM_176935.2,912-930).
gttacagacatatgcatta

SEQ ID NO: 791306 - DNA, 19 bp, Mus musculus
  siRNA target sequence for F730015K02Rik (NM_176935.2,916-934).
cagacatatgcattattat

SEQ ID NO: 791307 - DNA, 19 bp, Mus musculus
  siRNA target sequence for F730015K02Rik (NM_176935.2,968-986).
ctgcaaggtcgacaagaat

SEQ ID NO: 791308 - DNA, 19 bp, Mus musculus
  siRNA target sequence for F730015K02Rik (NM_176935.2,970-988).
gcaaggtcgacaagaatct

SEQ ID NO: 791309 - DNA, 19 bp, Mus musculus
  siRNA target sequence for B230325K18Rik (NM_176936.2,2245-2263).
gcacatacatgccatttta

SEQ ID NO: 791310 - DNA, 19 bp, Mus musculus
  siRNA target sequence for B230325K18Rik (NM_176936.2,2423-2441).
gcacatctgcaattggtta

SEQ ID NO: 791311 - DNA, 19 bp, Mus musculus
  siRNA target sequence for B230325K18Rik (NM_176936.2,2424-2442).
cacatctgcaattggttat

SEQ ID NO: 791312 - DNA, 19 bp, Mus musculus
  siRNA target sequence for B230325K18Rik (NM_176936.2,2438-2456).
gttatgtgtggaaatgaga

SEQ ID NO: 791313 - DNA, 19 bp, Mus musculus
  siRNA target sequence for B230325K18Rik (NM_176936.2,2501-2519).
gaaatggcatcatgtttga

SEQ ID NO: 791314 - DNA, 19 bp, Mus musculus
  siRNA target sequence for B230325K18Rik (NM_176936.2,2507-2525).
gcatcatgtttgatagcaa

SEQ ID NO: 791315 - DNA, 19 bp, Mus musculus
  siRNA target sequence for B230325K18Rik (NM_176936.2,2514-2532).
gtttgatagcaaaaatcct

SEQ ID NO: 791316 - DNA, 19 bp, Mus musculus
  siRNA target sequence for B230325K18Rik (NM_176936.2,2531-2549).
cttagctttcttttgataa

SEQ ID NO: 791317 - DNA, 19 bp, Mus musculus
  siRNA target sequence for B430217B02Rik (NM_176938.2,197-215).
cactgatggtagtgtatgt

SEQ ID NO: 791318 - DNA, 19 bp, Mus musculus
  siRNA target sequence for B430217B02Rik (NM_176938.2,321-339).
cagcgtgcttccatggaat

SEQ ID NO: 791319 - DNA, 19 bp, Mus musculus
  siRNA target sequence for B430217B02Rik (NM_176938.2,360-378).
gaacagtgtacatagaaga

SEQ ID NO: 791320 - DNA, 19 bp, Mus musculus
  siRNA target sequence for B430217B02Rik (NM_176938.2,499-517).
cactctgcatcttttagga

SEQ ID NO: 791321 - DNA, 19 bp, Mus musculus
  siRNA target sequence for B430217B02Rik (NM_176938.2,521-539).
gcagtagggggcttaggtt

SEQ ID NO: 791322 - DNA, 19 bp, Mus musculus
  siRNA target sequence for A230063L24Rik (NM_176940.2,771-789).
ggctcacgctcgttaccta

SEQ ID NO: 791323 - DNA, 19 bp, Mus musculus
  siRNA target sequence for A230063L24Rik (NM_176940.2,773-791).
ctcacgctcgttacctaaa

SEQ ID NO: 791324 - DNA, 19 bp, Mus musculus
  siRNA target sequence for A230063L24Rik (NM_176940.2,878-896).
gttggctctaccaagagat

SEQ ID NO: 791325 - DNA, 19 bp, Mus musculus
  siRNA target sequence for A230063L24Rik (NM_176940.2,988-1006).
gatgagagccggacacata

SEQ ID NO: 791326 - DNA, 19 bp, Mus musculus
  siRNA target sequence for A230063L24Rik (NM_176940.2,1115-1133).
ggctgctagggacatcaaa

SEQ ID NO: 791327 - DNA, 19 bp, Mus musculus
  siRNA target sequence for A230063L24Rik (NM_176940.2,1244-1262).
gccatttcttccatactct

SEQ ID NO: 791328 - DNA, 19 bp, Mus musculus
  siRNA target sequence for A230063L24Rik (NM_176940.2,1272-1290).
cgtgtcacagaggaacttt

SEQ ID NO: 791329 - DNA, 19 bp, Mus musculus
  siRNA target sequence for A230063L24Rik (NM_176940.2,1412-1430).
caggccagcaggttttaca

SEQ ID NO: 791330 - DNA, 19 bp, Mus musculus
  siRNA target sequence for A230063L24Rik (NM_176940.2,1493-1511).
gtcaaggccaggagttcat

SEQ ID NO: 791331 - DNA, 19 bp, Mus musculus
  siRNA target sequence for A230063L24Rik (NM_176940.2,1744-1762).
gtactgggctatattgtgt

SEQ ID NO: 791332 - DNA, 19 bp, Mus musculus
  siRNA target sequence for A230063L24Rik (NM_176940.2,1845-1863).
ctggacgccacctagcaaa

SEQ ID NO: 791333 - DNA, 19 bp, Mus musculus
  siRNA target sequence for A230063L24Rik (NM_176940.2,1986-2004).
ggtaatccaagttcgatat

SEQ ID NO: 791334 - DNA, 19 bp, Mus musculus
  siRNA target sequence for A230063L24Rik (NM_176940.2,2036-2054).
gcgtgctagctgaattctt

SEQ ID NO: 791335 - DNA, 19 bp, Mus musculus
  siRNA target sequence for A230063L24Rik (NM_176940.2,2074-2092).
gggatcaagaaacttatca

SEQ ID NO: 791336 - DNA, 19 bp, Mus musculus
  siRNA target sequence for A230063L24Rik (NM_176940.2,2219-2237).
gccgcttggaggagttgaa

SEQ ID NO: 791337 - DNA, 19 bp, Mus musculus
  siRNA target sequence for A230063L24Rik (NM_176940.2,2245-2263).
gttctggggaacatgagtt

SEQ ID NO: 791338 - DNA, 19 bp, Mus musculus
  siRNA target sequence for A230063L24Rik (NM_176940.2,2410-2428).
gagaagagcgtcctataca

SEQ ID NO: 791339 - DNA, 19 bp, Mus musculus
  siRNA target sequence for A230063L24Rik (NM_176940.2,2575-2593).
cctcttcgagccactctta

SEQ ID NO: 791340 - DNA, 19 bp, Mus musculus
  siRNA target sequence for A230063L24Rik (NM_176940.2,2701-2719).
caggtggtacacgttctaa

SEQ ID NO: 791341 - DNA, 19 bp, Mus musculus
  siRNA target sequence for A230063L24Rik (NM_176940.2,2827-2845).
caggagaaagtcaccattt

SEQ ID NO: 791342 - DNA, 19 bp, Mus musculus
  siRNA target sequence for A230063L24Rik (NM_176940.2,2930-2948).
ctggtgcaaggatcaacat

SEQ ID NO: 791343 - DNA, 19 bp, Mus musculus
  siRNA target sequence for A230063L24Rik (NM_176940.2,2966-2984).
cgaagctggttttctgtat

SEQ ID NO: 791344 - DNA, 19 bp, Mus musculus
  siRNA target sequence for A230063L24Rik (NM_176940.2,2970-2988).
gctggttttctgtatcaca

SEQ ID NO: 791345 - DNA, 19 bp, Mus musculus
  siRNA target sequence for A230063L24Rik (NM_176940.2,3295-3313).
cttgtggcaggctttggaa

SEQ ID NO: 791346 - DNA, 19 bp, Mus musculus
  siRNA target sequence for A230063L24Rik (NM_176940.2,3300-3318).
ggcaggctttggaagattt

SEQ ID NO: 791347 - DNA, 19 bp, Mus musculus
  siRNA target sequence for A230063L24Rik (NM_176940.2,3302-3320).
caggctttggaagatttgt

SEQ ID NO: 791348 - DNA, 19 bp, Mus musculus
  siRNA target sequence for A230063L24Rik (NM_176940.2,3311-3329).
gaagatttgtgcggatttt

SEQ ID NO: 791349 - DNA, 19 bp, Mus musculus
  siRNA target sequence for A230063L24Rik (NM_176940.2,3314-3332).
gatttgtgcggattttctt

SEQ ID NO: 791350 - DNA, 19 bp, Mus musculus
  siRNA target sequence for A230063L24Rik (NM_176940.2,3409-3427).
ggtcctgagaacaatctga

SEQ ID NO: 791351 - DNA, 19 bp, Mus musculus
  siRNA target sequence for A230063L24Rik (NM_176940.2,3410-3428).
gtcctgagaacaatctgat

SEQ ID NO: 791352 - DNA, 19 bp, Mus musculus
  siRNA target sequence for A230063L24Rik (NM_176940.2,3437-3455).
ggtcccgggatgcacttat

SEQ ID NO: 791353 - DNA, 19 bp, Mus musculus
  siRNA target sequence for A230063L24Rik (NM_176940.2,3440-3458).
cccgggatgcacttatcca

SEQ ID NO: 791354 - DNA, 19 bp, Mus musculus
  siRNA target sequence for A230063L24Rik (NM_176940.2,3592-3610).
gatctcaagtccactaaga

SEQ ID NO: 791355 - DNA, 19 bp, Mus musculus
  siRNA target sequence for A230063L24Rik (NM_176940.2,3615-3633).
gcagtctccgactccattt

SEQ ID NO: 791356 - DNA, 19 bp, Mus musculus
  siRNA target sequence for A230063L24Rik (NM_176940.2,3827-3845).
ctgggatcgtgcttgtgtt

SEQ ID NO: 791357 - DNA, 19 bp, Mus musculus
  siRNA target sequence for A230063L24Rik (NM_176940.2,3841-3859).
gtgttccccctgaattcca

SEQ ID NO: 791358 - DNA, 19 bp, Mus musculus
  siRNA target sequence for A230063L24Rik (NM_176940.2,3945-3963).
cattgcctatgacaacatt

SEQ ID NO: 791359 - DNA, 19 bp, Mus musculus
  siRNA target sequence for A230063L24Rik (NM_176940.2,3993-4011).
cccatgtccggccattgaa

SEQ ID NO: 791360 - DNA, 19 bp, Mus musculus
  siRNA target sequence for A230063L24Rik (NM_176940.2,4012-4030).
ggccccacctacacctttt

SEQ ID NO: 791361 - DNA, 19 bp, Mus musculus
  siRNA target sequence for A330041J22Rik (NM_176941.2,280-298).
gccttcatgatcatggtat

SEQ ID NO: 791362 - DNA, 19 bp, Mus musculus
  siRNA target sequence for A330041J22Rik (NM_176941.2,342-360).
ggaatgagaaagtatgtct

SEQ ID NO: 791363 - DNA, 19 bp, Mus musculus
  siRNA target sequence for A330041J22Rik (NM_176941.2,353-371).
gtatgtctctcttcagtat

SEQ ID NO: 791364 - DNA, 19 bp, Mus musculus
  siRNA target sequence for 9630028B13Rik (NM_176943.2,433-451).
ggggactaatgtacctttt

SEQ ID NO: 791365 - DNA, 19 bp, Mus musculus
  siRNA target sequence for 9630028B13Rik (NM_176943.2,435-453).
ggactaatgtaccttttga

SEQ ID NO: 791366 - DNA, 19 bp, Mus musculus
  siRNA target sequence for 9630028B13Rik (NM_176943.2,436-454).
gactaatgtaccttttgat

SEQ ID NO: 791367 - DNA, 19 bp, Mus musculus
  siRNA target sequence for 9630028B13Rik (NM_176943.2,570-588).
ctggccctgacgccaaata

SEQ ID NO: 791368 - DNA, 19 bp, Mus musculus
  siRNA target sequence for 9630028B13Rik (NM_176943.2,572-590).
ggccctgacgccaaatagt

SEQ ID NO: 791369 - DNA, 19 bp, Mus musculus
  siRNA target sequence for 9630028B13Rik (NM_176943.2,582-600).
ccaaatagtccgatgatca

SEQ ID NO: 791370 - DNA, 19 bp, Mus musculus
  siRNA target sequence for 9630028B13Rik (NM_176943.2,592-610).
cgatgatcatggacaacaa

SEQ ID NO: 791371 - DNA, 19 bp, Mus musculus
  siRNA target sequence for 9630028B13Rik (NM_176943.2,647-665).
gagggagttccctatgtgt

SEQ ID NO: 791372 - DNA, 19 bp, Mus musculus
  siRNA target sequence for 9630028B13Rik (NM_176943.2,757-775).
cggaggctcctctttctca

SEQ ID NO: 791373 - DNA, 19 bp, Mus musculus
  siRNA target sequence for 9630028B13Rik (NM_176943.2,785-803).
ggactcgaagactagagat

SEQ ID NO: 791374 - DNA, 19 bp, Mus musculus
  siRNA target sequence for 9630028B13Rik (NM_176943.2,786-804).
gactcgaagactagagatt

SEQ ID NO: 791375 - DNA, 19 bp, Mus musculus
  siRNA target sequence for 9630028B13Rik (NM_176943.2,790-808).
cgaagactagagattacaa

SEQ ID NO: 791376 - DNA, 19 bp, Mus musculus
  siRNA target sequence for 9630028B13Rik (NM_176943.2,801-819).
gattacaactcctggataa

SEQ ID NO: 791377 - DNA, 19 bp, Mus musculus
  siRNA target sequence for 9630028B13Rik (NM_176943.2,833-851).
cttttcagcgcctgtcata

SEQ ID NO: 791378 - DNA, 19 bp, Mus musculus
  siRNA target sequence for 9630028B13Rik (NM_176943.2,840-858).
gcgcctgtcatatttgaaa

SEQ ID NO: 791379 - DNA, 19 bp, Mus musculus
  siRNA target sequence for C230012O17Rik (NM_176944.2,507-525).
cgctgcctcccggaacttt

SEQ ID NO: 791380 - DNA, 19 bp, Mus musculus
  siRNA target sequence for 6820443O06Rik (NM_176945.2,219-237).
gtttcttgggcattgatga

SEQ ID NO: 791381 - DNA, 19 bp, Mus musculus
  siRNA target sequence for 6820443O06Rik (NM_176945.2,409-427).
gcagttgcctcgggataaa

SEQ ID NO: 791382 - DNA, 19 bp, Mus musculus
  siRNA target sequence for 6820443O06Rik (NM_176945.2,412-430).
gttgcctcgggataaagga

SEQ ID NO: 791383 - DNA, 19 bp, Mus musculus
  siRNA target sequence for 6820443O06Rik (NM_176945.2,417-435).
ctcgggataaaggatctaa

SEQ ID NO: 791384 - DNA, 19 bp, Mus musculus
  siRNA target sequence for 6820443O06Rik (NM_176945.2,438-456).
cattccagtgcagaatcaa

SEQ ID NO: 791385 - DNA, 19 bp, Mus musculus
  siRNA target sequence for 6820443O06Rik (NM_176945.2,445-463).
gtgcagaatcaacatagaa

SEQ ID NO: 791386 - DNA, 19 bp, Mus musculus
  siRNA target sequence for 6820443O06Rik (NM_176945.2,447-465).
gcagaatcaacatagaaca

SEQ ID NO: 791387 - DNA, 19 bp, Mus musculus
  siRNA target sequence for 6820443O06Rik (NM_176945.2,448-466).
cagaatcaacatagaacat

SEQ ID NO: 791388 - DNA, 19 bp, Mus musculus
  siRNA target sequence for 6820443O06Rik (NM_176945.2,492-510).
ctatcaagctaataaatat

SEQ ID NO: 791389 - DNA, 19 bp, Mus musculus
  siRNA target sequence for 6820443O06Rik (NM_176945.2,496-514).
caagctaataaatatccat

SEQ ID NO: 791390 - DNA, 19 bp, Mus musculus
  siRNA target sequence for 6820443O06Rik (NM_176945.2,530-548).
gaaggaaacccgtccatta

SEQ ID NO: 791391 - DNA, 19 bp, Mus musculus
  siRNA target sequence for 6820443O06Rik (NM_176945.2,606-624).
ctctgtcttgcgattacaa

SEQ ID NO: 791392 - DNA, 19 bp, Mus musculus
  siRNA target sequence for 6820443O06Rik (NM_176945.2,610-628).
gtcttgcgattacaatcaa

SEQ ID NO: 791393 - DNA, 19 bp, Mus musculus
  siRNA target sequence for 6820443O06Rik (NM_176945.2,672-690).
caagtcctcccactaagaa

SEQ ID NO: 791394 - DNA, 19 bp, Mus musculus
  siRNA target sequence for 6820443O06Rik (NM_176945.2,772-790).
caggtctgagtctgtcaat

SEQ ID NO: 791395 - DNA, 19 bp, Mus musculus
  siRNA target sequence for 6820443O06Rik (NM_176945.2,816-834).
gaaatgggatggctttttt

SEQ ID NO: 791396 - DNA, 19 bp, Mus musculus
  siRNA target sequence for 6820443O06Rik (NM_176945.2,854-872).
cgaccagacctgattgaca

SEQ ID NO: 791397 - DNA, 19 bp, Mus musculus
  siRNA target sequence for 6820443O06Rik (NM_176945.2,889-907).
cagatccaacaaagacaat

SEQ ID NO: 791398 - DNA, 19 bp, Mus musculus
  siRNA target sequence for 6820443O06Rik (NM_176945.2,891-909).
gatccaacaaagacaatct

SEQ ID NO: 791399 - DNA, 19 bp, Mus musculus
  siRNA target sequence for 6820443O06Rik (NM_176945.2,919-937).
cttcaggatcgcagaacat

SEQ ID NO: 791400 - DNA, 19 bp, Mus musculus
  siRNA target sequence for 6820443O06Rik (NM_176945.2,1018-1036).
ggcgcagttcctgaagtat

SEQ ID NO: 791401 - DNA, 19 bp, Mus musculus
  siRNA target sequence for 6820443O06Rik (NM_176945.2,1019-1037).
gcgcagttcctgaagtatt

SEQ ID NO: 791402 - DNA, 19 bp, Mus musculus
  siRNA target sequence for 6820443O06Rik (NM_176945.2,1022-1040).
cagttcctgaagtattcga

SEQ ID NO: 791403 - DNA, 19 bp, Mus musculus
  siRNA target sequence for 6820443O06Rik (NM_176945.2,1145-1163).
gcaagtgagacctactgta

SEQ ID NO: 791404 - DNA, 19 bp, Mus musculus
  siRNA target sequence for 6820443O06Rik (NM_176945.2,1149-1167).
gtgagacctactgtaacaa

SEQ ID NO: 791405 - DNA, 19 bp, Mus musculus
  siRNA target sequence for 6820443O06Rik (NM_176945.2,1153-1171).
gacctactgtaacaagtat

SEQ ID NO: 791406 - DNA, 19 bp, Mus musculus
  siRNA target sequence for 6820443O06Rik (NM_176945.2,1155-1173).
cctactgtaacaagtatca

SEQ ID NO: 791407 - DNA, 19 bp, Mus musculus
  siRNA target sequence for 6820443O06Rik (NM_176945.2,1156-1174).
ctactgtaacaagtatcat

SEQ ID NO: 791408 - DNA, 19 bp, Mus musculus
  siRNA target sequence for 6820443O06Rik (NM_176945.2,1159-1177).
ctgtaacaagtatcatagt

SEQ ID NO: 791409 - DNA, 19 bp, Mus musculus
  siRNA target sequence for 6820443O06Rik (NM_176945.2,1172-1190).
catagtctgctgtcattta

SEQ ID NO: 791410 - DNA, 19 bp, Mus musculus
  siRNA target sequence for 6820443O06Rik (NM_176945.2,1248-1266).
ggatgggagagctgaatga

SEQ ID NO: 791411 - DNA, 19 bp, Mus musculus
  siRNA target sequence for 6820443O06Rik (NM_176945.2,1349-1367).
ccttcaccgctcaaagaga

SEQ ID NO: 791412 - DNA, 19 bp, Mus musculus
  siRNA target sequence for 6820443O06Rik (NM_176945.2,1415-1433).
ccgacctcccagagttact

SEQ ID NO: 791413 - DNA, 19 bp, Mus musculus
  siRNA target sequence for 6820443O06Rik (NM_176945.2,1448-1466).
ctgatccaagggaaactat

SEQ ID NO: 791414 - DNA, 19 bp, Mus musculus
  siRNA target sequence for 6820443O06Rik (NM_176945.2,1450-1468).
gatccaagggaaactatct

SEQ ID NO: 791415 - DNA, 19 bp, Mus musculus
  siRNA target sequence for 6820443O06Rik (NM_176945.2,1454-1472).
caagggaaactatcttcat

SEQ ID NO: 791416 - DNA, 19 bp, Mus musculus
  siRNA target sequence for 6820443O06Rik (NM_176945.2,1458-1476).
ggaaactatcttcattcaa

SEQ ID NO: 791417 - DNA, 19 bp, Mus musculus
  siRNA target sequence for 6820443O06Rik (NM_176945.2,1483-1501).
gatgggcagctttgactat

SEQ ID NO: 791418 - DNA, 19 bp, Mus musculus
  siRNA target sequence for 6820443O06Rik (NM_176945.2,1486-1504).
gggcagctttgactatcat

SEQ ID NO: 791419 - DNA, 19 bp, Mus musculus
  siRNA target sequence for 6820443O06Rik (NM_176945.2,1487-1505).
ggcagctttgactatcatt

SEQ ID NO: 791420 - DNA, 19 bp, Mus musculus
  siRNA target sequence for 6820443O06Rik (NM_176945.2,1582-1600).
gacaagacggtttgtgata

SEQ ID NO: 791421 - DNA, 19 bp, Mus musculus
  siRNA target sequence for 6820443O06Rik (NM_176945.2,1584-1602).
caagacggtttgtgatagt

SEQ ID NO: 791422 - DNA, 19 bp, Mus musculus
  siRNA target sequence for 9330133O14Rik (NM_176948.2,214-232).
gaatcttctacattcacaa

SEQ ID NO: 791423 - DNA, 19 bp, Mus musculus
  siRNA target sequence for 9330133O14Rik (NM_176948.2,360-378).
gctccacacaagcaagaat

SEQ ID NO: 791424 - DNA, 19 bp, Mus musculus
  siRNA target sequence for 9330133O14Rik (NM_176948.2,363-381).
ccacacaagcaagaatttt

SEQ ID NO: 791425 - DNA, 19 bp, Mus musculus
  siRNA target sequence for 9330133O14Rik (NM_176948.2,420-438).
ggcacatttctgtgtcatt

SEQ ID NO: 791426 - DNA, 19 bp, Mus musculus
  siRNA target sequence for 9330133O14Rik (NM_176948.2,435-453).
cattcttacggtacagttt

SEQ ID NO: 791427 - DNA, 19 bp, Mus musculus
  siRNA target sequence for 9330133O14Rik (NM_176948.2,450-468).
gtttagtgacctttagtat

SEQ ID NO: 791428 - DNA, 19 bp, Mus musculus
  siRNA target sequence for 9330133O14Rik (NM_176948.2,455-473).
gtgacctttagtatattta

SEQ ID NO: 791429 - DNA, 19 bp, Mus musculus
  siRNA target sequence for 9230107O10Rik (NM_176950.2,119-137).
cagcccaaaagatgtttta

SEQ ID NO: 791430 - DNA, 19 bp, Mus musculus
  siRNA target sequence for 9230107O10Rik (NM_176950.2,169-187).
cagattagtggagatatct

SEQ ID NO: 791431 - DNA, 19 bp, Mus musculus
  siRNA target sequence for 9230107O10Rik (NM_176950.2,171-189).
gattagtggagatatctga

SEQ ID NO: 791432 - DNA, 19 bp, Mus musculus
  siRNA target sequence for 9230107O10Rik (NM_176950.2,195-213).
gatgcctgcatgggaaata

SEQ ID NO: 791433 - DNA, 19 bp, Mus musculus
  siRNA target sequence for 9230107O10Rik (NM_176950.2,199-217).
cctgcatgggaaatactgt

SEQ ID NO: 791434 - DNA, 19 bp, Mus musculus
  siRNA target sequence for 9230107O10Rik (NM_176950.2,207-225).
ggaaatactgttgtgttaa

SEQ ID NO: 791435 - DNA, 19 bp, Mus musculus
  siRNA target sequence for 9230107O10Rik (NM_176950.2,208-226).
gaaatactgttgtgttaat

SEQ ID NO: 791436 - DNA, 19 bp, Mus musculus
  siRNA target sequence for 9230107O10Rik (NM_176950.2,262-280).
cgttgaggagacagtcaaa

SEQ ID NO: 791437 - DNA, 19 bp, Mus musculus
  siRNA target sequence for 9230107O10Rik (NM_176950.2,283-301).
ccaagacaagtcaaaagta

SEQ ID NO: 791438 - DNA, 19 bp, Mus musculus
  siRNA target sequence for 9230107O10Rik (NM_176950.2,292-310).
gtcaaaagtacaagactat

SEQ ID NO: 791439 - DNA, 19 bp, Mus musculus
  siRNA target sequence for 9230107O10Rik (NM_176950.2,294-312).
caaaagtacaagactatat

SEQ ID NO: 791440 - DNA, 19 bp, Mus musculus
  siRNA target sequence for 5430438H03Rik (NM_176951.2,875-893).
ggccaccataccatgctat

SEQ ID NO: 791441 - DNA, 19 bp, Mus musculus
  siRNA target sequence for 5430438H03Rik (NM_176951.2,1005-1023).
gtgctcactggctagtgat

SEQ ID NO: 791442 - DNA, 19 bp, Mus musculus
  siRNA target sequence for 5430438H03Rik (NM_176951.2,1041-1059).
cccagcagagcgacattgt

SEQ ID NO: 791443 - DNA, 19 bp, Mus musculus
  siRNA target sequence for 5430438H03Rik (NM_176951.2,1042-1060).
ccagcagagcgacattgta

SEQ ID NO: 791444 - DNA, 19 bp, Mus musculus
  siRNA target sequence for 5430438H03Rik (NM_176951.2,1071-1089).
gccactggaggctgttcaa

SEQ ID NO: 791445 - DNA, 19 bp, Mus musculus
  siRNA target sequence for 5430438H03Rik (NM_176951.2,1155-1173).
gggtggccagcttctactt

SEQ ID NO: 791446 - DNA, 19 bp, Mus musculus
  siRNA target sequence for 5430438H03Rik (NM_176951.2,1267-1285).
cttgtctggatttctgatt

SEQ ID NO: 791447 - DNA, 19 bp, Mus musculus
  siRNA target sequence for 5430438H03Rik (NM_176951.2,1287-1305).
ggtgtgcatcgctggttat

SEQ ID NO: 791448 - DNA, 19 bp, Mus musculus
  siRNA target sequence for 5430438H03Rik (NM_176951.2,1288-1306).
gtgtgcatcgctggttatt

SEQ ID NO: 791449 - DNA, 19 bp, Mus musculus
  siRNA target sequence for 5430438H03Rik (NM_176951.2,1290-1308).
gtgcatcgctggttattta

SEQ ID NO: 791450 - DNA, 19 bp, Mus musculus
  siRNA target sequence for 5430438H03Rik (NM_176951.2,1292-1310).
gcatcgctggttatttatt

SEQ ID NO: 791451 - DNA, 19 bp, Mus musculus
  siRNA target sequence for 5430438H03Rik (NM_176951.2,1293-1311).
catcgctggttatttatta

SEQ ID NO: 791452 - DNA, 19 bp, Mus musculus
  siRNA target sequence for 5430438H03Rik (NM_176951.2,1368-1386).
gtggccccatcgaggataa

SEQ ID NO: 791453 - DNA, 19 bp, Mus musculus
  siRNA target sequence for 5430438H03Rik (NM_176951.2,1370-1388).
ggccccatcgaggataaca

SEQ ID NO: 791454 - DNA, 19 bp, Mus musculus
  siRNA target sequence for 5430438H03Rik (NM_176951.2,1371-1389).
gccccatcgaggataacaa

SEQ ID NO: 791455 - DNA, 19 bp, Mus musculus
  siRNA target sequence for 5430438H03Rik (NM_176951.2,1372-1390).
ccccatcgaggataacaaa

SEQ ID NO: 791456 - DNA, 19 bp, Mus musculus
  siRNA target sequence for 5430438H03Rik (NM_176951.2,1456-1474).
gtgccaagaggaaagctat

SEQ ID NO: 791457 - DNA, 19 bp, Mus musculus
  siRNA target sequence for 5430438H03Rik (NM_176951.2,1466-1484).
gaaagctatgagctaacaa

SEQ ID NO: 791458 - DNA, 19 bp, Mus musculus
  siRNA target sequence for 5430438H03Rik (NM_176951.2,1475-1493).
gagctaacaagtctagata

SEQ ID NO: 791459 - DNA, 19 bp, Mus musculus
  siRNA target sequence for 5430438H03Rik (NM_176951.2,1847-1865).
gagcttgaggacaatgcaa

SEQ ID NO: 791460 - DNA, 19 bp, Mus musculus
  siRNA target sequence for 5430438H03Rik (NM_176951.2,2136-2154).
ctgttaccgtggccaatat

SEQ ID NO: 791461 - DNA, 19 bp, Mus musculus
  siRNA target sequence for 5430438H03Rik (NM_176951.2,2138-2156).
gttaccgtggccaatatta

SEQ ID NO: 791462 - DNA, 19 bp, Mus musculus
  siRNA target sequence for 5430438H03Rik (NM_176951.2,2201-2219).
ggaagagccccagatagtt

SEQ ID NO: 791463 - DNA, 19 bp, Mus musculus
  siRNA target sequence for 5430438H03Rik (NM_176951.2,2375-2393).
caggagatgagctttttca

SEQ ID NO: 791464 - DNA, 19 bp, Mus musculus
  siRNA target sequence for A730018C14Rik (NM_176956.2,546-564).
gttcaagtgacttgtgtaa

SEQ ID NO: 791465 - DNA, 19 bp, Mus musculus
  siRNA target sequence for A730018C14Rik (NM_176956.2,621-639).
gggagaggagactcattca

SEQ ID NO: 791466 - DNA, 19 bp, Mus musculus
  siRNA target sequence for A730018C14Rik (NM_176956.2,623-641).
gagaggagactcattcact

SEQ ID NO: 791467 - DNA, 19 bp, Mus musculus
  siRNA target sequence for A730018C14Rik (NM_176956.2,662-680).
ctggtttcattcggtaata

SEQ ID NO: 791468 - DNA, 19 bp, Mus musculus
  siRNA target sequence for A730018C14Rik (NM_176956.2,665-683).
gtttcattcggtaatagga

SEQ ID NO: 791469 - DNA, 19 bp, Mus musculus
  siRNA target sequence for A730018C14Rik (NM_176956.2,749-767).
cgagccacggctcattagt

SEQ ID NO: 791470 - DNA, 19 bp, Mus musculus
  siRNA target sequence for A730018C14Rik (NM_176956.2,830-848).
cacctgtctcctatggttt

SEQ ID NO: 791471 - DNA, 19 bp, Mus musculus
  siRNA target sequence for A730018C14Rik (NM_176956.2,886-904).
gcccagtccaccaacttga

SEQ ID NO: 791472 - DNA, 19 bp, Mus musculus
  siRNA target sequence for A730018C14Rik (NM_176956.2,896-914).
ccaacttgagcatcatctt

SEQ ID NO: 791473 - DNA, 19 bp, Mus musculus
  siRNA target sequence for A730018C14Rik (NM_176956.2,915-933).
ctgctcctattctttctat

SEQ ID NO: 791474 - DNA, 19 bp, Mus musculus
  siRNA target sequence for A730018C14Rik (NM_176956.2,940-958).
gaacgaagtctgaaacaca

SEQ ID NO: 791475 - DNA, 19 bp, Mus musculus
  siRNA target sequence for A730018C14Rik (NM_176956.2,1031-1049).
cgagcacctctggttgtta

SEQ ID NO: 791476 - DNA, 19 bp, Mus musculus
  siRNA target sequence for A730018C14Rik (NM_176956.2,1035-1053).
cacctctggttgttactgt

SEQ ID NO: 791477 - DNA, 19 bp, Mus musculus
  siRNA target sequence for A730018C14Rik (NM_176956.2,1037-1055).
cctctggttgttactgttt

SEQ ID NO: 791478 - DNA, 19 bp, Mus musculus
  siRNA target sequence for D130011D22Rik (NM_176957.2,541-559).
gggggtgtggttaaatata

SEQ ID NO: 791479 - DNA, 19 bp, Mus musculus
  siRNA target sequence for D130011D22Rik (NM_176957.2,544-562).
ggtgtggttaaatatagct

SEQ ID NO: 791480 - DNA, 19 bp, Mus musculus
  siRNA target sequence for D130011D22Rik (NM_176957.2,607-625).
ggagcgccgtgcttccaaa

SEQ ID NO: 791481 - DNA, 19 bp, Mus musculus
  siRNA target sequence for D130011D22Rik (NM_176957.2,608-626).
gagcgccgtgcttccaaaa

SEQ ID NO: 791482 - DNA, 19 bp, Mus musculus
  siRNA target sequence for D130011D22Rik (NM_176957.2,610-628).
gcgccgtgcttccaaaact

SEQ ID NO: 791483 - DNA, 19 bp, Mus musculus
  siRNA target sequence for D130011D22Rik (NM_176957.2,679-697).
ggacaggtttctgaatatt

SEQ ID NO: 791484 - DNA, 19 bp, Mus musculus
  siRNA target sequence for D130011D22Rik (NM_176957.2,702-720).
ggccagaaatcagttcaat

SEQ ID NO: 791485 - DNA, 19 bp, Mus musculus
  siRNA target sequence for D130011D22Rik (NM_176957.2,703-721).
gccagaaatcagttcaata

SEQ ID NO: 791486 - DNA, 19 bp, Mus musculus
  siRNA target sequence for D130011D22Rik (NM_176957.2,704-722).
ccagaaatcagttcaatat

SEQ ID NO: 791487 - DNA, 19 bp, Mus musculus
  siRNA target sequence for D130011D22Rik (NM_176957.2,723-741).
gaagcggatgatgattttt

SEQ ID NO: 791488 - DNA, 19 bp, Mus musculus
  siRNA target sequence for D130011D22Rik (NM_176957.2,776-794).
gctttgttctgaatacact

SEQ ID NO: 791489 - DNA, 19 bp, Mus musculus
  siRNA target sequence for D230018M15Rik (NM_176959.2,351-369).
ccaggttttctcaggtata

SEQ ID NO: 791490 - DNA, 19 bp, Mus musculus
  siRNA target sequence for D230018M15Rik (NM_176959.2,372-390).
gggtgctaaggcaacttgt

SEQ ID NO: 791491 - DNA, 19 bp, Mus musculus
  siRNA target sequence for D230018M15Rik (NM_176959.2,453-471).
cccattgctttcttacgtt

SEQ ID NO: 791492 - DNA, 19 bp, Mus musculus
  siRNA target sequence for D230018M15Rik (NM_176959.2,582-600).
cccttctcggggctcatta

SEQ ID NO: 791493 - DNA, 19 bp, Mus musculus
  siRNA target sequence for D230018M15Rik (NM_176959.2,583-601).
ccttctcggggctcattat

SEQ ID NO: 791494 - DNA, 19 bp, Mus musculus
  siRNA target sequence for D230018M15Rik (NM_176959.2,584-602).
cttctcggggctcattatt

SEQ ID NO: 791495 - DNA, 19 bp, Mus musculus
  siRNA target sequence for 9330132A10Rik (NM_176961.2,1073-1091).
cataccccaaaaagctttt

SEQ ID NO: 791496 - DNA, 19 bp, Mus musculus
  siRNA target sequence for 9330132A10Rik (NM_176961.2,1108-1126).
ccgttgatggctataaaca

SEQ ID NO: 791497 - DNA, 19 bp, Mus musculus
  siRNA target sequence for 9330132A10Rik (NM_176961.2,1143-1161).
gtcaaacagtgctttatta

SEQ ID NO: 791498 - DNA, 19 bp, Mus musculus
  siRNA target sequence for 9330132A10Rik (NM_176961.2,1151-1169).
gtgctttattacctcaaat

SEQ ID NO: 791499 - DNA, 19 bp, Mus musculus
  siRNA target sequence for 9330132A10Rik (NM_176961.2,1165-1183).
caaataataagcaacctaa

SEQ ID NO: 791500 - DNA, 19 bp, Mus musculus
  siRNA target sequence for 9330132A10Rik (NM_176961.2,1241-1259).
gcccactaacaacttatat

SEQ ID NO: 791501 - DNA, 19 bp, Mus musculus
  siRNA target sequence for 9330132A10Rik (NM_176961.2,1243-1261).
ccactaacaacttatatga

SEQ ID NO: 791502 - DNA, 19 bp, Mus musculus
  siRNA target sequence for 9330132A10Rik (NM_176961.2,1244-1262).
cactaacaacttatatgat

SEQ ID NO: 791503 - DNA, 19 bp, Mus musculus
  siRNA target sequence for 9330132A10Rik (NM_176961.2,1246-1264).
ctaacaacttatatgataa

SEQ ID NO: 791504 - DNA, 19 bp, Mus musculus
  siRNA target sequence for 9330132A10Rik (NM_176961.2,1314-1332).
ggcaccattgtcaataact

SEQ ID NO: 791505 - DNA, 19 bp, Mus musculus
  siRNA target sequence for 9330132A10Rik (NM_176961.2,1318-1336).
ccattgtcaataactttta

SEQ ID NO: 791506 - DNA, 19 bp, Mus musculus
  siRNA target sequence for A530057M15Rik (NM_176963.2,444-462).
ccagaagcagccctacttt

SEQ ID NO: 791507 - DNA, 19 bp, Mus musculus
  siRNA target sequence for A530057M15Rik (NM_176963.2,491-509).
gaattgccaaaggaagatt

SEQ ID NO: 791508 - DNA, 19 bp, Mus musculus
  siRNA target sequence for A530057M15Rik (NM_176963.2,531-549).
ccacctgccagttaacaga

SEQ ID NO: 791509 - DNA, 19 bp, Mus musculus
  siRNA target sequence for A530057M15Rik (NM_176963.2,570-588).
cggattcacggggtttgat

SEQ ID NO: 791510 - DNA, 19 bp, Mus musculus
  siRNA target sequence for A530057M15Rik (NM_176963.2,706-724).
ggtggggagcttgtaatca

SEQ ID NO: 791511 - DNA, 19 bp, Mus musculus
  siRNA target sequence for A530057M15Rik (NM_176963.2,710-728).
gggagcttgtaatcaacta

SEQ ID NO: 791512 - DNA, 19 bp, Mus musculus
  siRNA target sequence for A530057M15Rik (NM_176963.2,743-761).
gccagaccactccagttaa

SEQ ID NO: 791513 - DNA, 19 bp, Mus musculus
  siRNA target sequence for A530057M15Rik (NM_176963.2,757-775).
gttaatctgaccaaccatt

SEQ ID NO: 791514 - DNA, 19 bp, Mus musculus
  siRNA target sequence for A530057M15Rik (NM_176963.2,795-813).
ccagggctccccaaatata

SEQ ID NO: 791515 - DNA, 19 bp, Mus musculus
  siRNA target sequence for A530057M15Rik (NM_176963.2,796-814).
cagggctccccaaatatat

SEQ ID NO: 791516 - DNA, 19 bp, Mus musculus
  siRNA target sequence for A530057M15Rik (NM_176963.2,798-816).
gggctccccaaatatatat

SEQ ID NO: 791517 - DNA, 19 bp, Mus musculus
  siRNA target sequence for A530057M15Rik (NM_176963.2,800-818).
gctccccaaatatatatga

SEQ ID NO: 791518 - DNA, 19 bp, Mus musculus
  siRNA target sequence for A530057M15Rik (NM_176963.2,831-849).
cattgcagcagatgcatat

SEQ ID NO: 791519 - DNA, 19 bp, Mus musculus
  siRNA target sequence for A530057M15Rik (NM_176963.2,855-873).
cgtggatgaaactctgatt

SEQ ID NO: 791520 - DNA, 19 bp, Mus musculus
  siRNA target sequence for A530057M15Rik (NM_176963.2,905-923).
ctgccttcgacctgagaaa

SEQ ID NO: 791521 - DNA, 19 bp, Mus musculus
  siRNA target sequence for A530057M15Rik (NM_176963.2,963-981).
ccatggtttcgaccataat

SEQ ID NO: 791522 - DNA, 19 bp, Mus musculus
  siRNA target sequence for A530057M15Rik (NM_176963.2,967-985).
ggtttcgaccataatttct

SEQ ID NO: 791523 - DNA, 19 bp, Mus musculus
  siRNA target sequence for A530057M15Rik (NM_176963.2,1072-1090).
ccaggcgtccagttttaca

SEQ ID NO: 791524 - DNA, 19 bp, Mus musculus
  siRNA target sequence for A130014H13Rik (NM_176964.2,572-590).
gttatctgcctatcttgtt

SEQ ID NO: 791525 - DNA, 19 bp, Mus musculus
  siRNA target sequence for A130014H13Rik (NM_176964.2,577-595).
ctgcctatcttgtttacga

SEQ ID NO: 791526 - DNA, 19 bp, Mus musculus
  siRNA target sequence for A130014H13Rik (NM_176964.2,645-663).
cggctcccatttccatatt

SEQ ID NO: 791527 - DNA, 19 bp, Mus musculus
  siRNA target sequence for A130014H13Rik (NM_176964.2,667-685).
gcgtgcttgttctttgtta

SEQ ID NO: 791528 - DNA, 19 bp, Mus musculus
  siRNA target sequence for A130014H13Rik (NM_176964.2,693-711).
ggcaagcgcttatttgaat

SEQ ID NO: 791529 - DNA, 19 bp, Mus musculus
  siRNA target sequence for A130014H13Rik (NM_176964.2,698-716).
gcgcttatttgaatattaa

SEQ ID NO: 791530 - DNA, 19 bp, Mus musculus
  siRNA target sequence for A130014H13Rik (NM_176964.2,699-717).
cgcttatttgaatattaaa

SEQ ID NO: 791531 - DNA, 19 bp, Mus musculus
  siRNA target sequence for A130014H13Rik (NM_176964.2,741-759).
ggagcacagtctcatgaat

SEQ ID NO: 791532 - DNA, 19 bp, Mus musculus
  siRNA target sequence for A130014H13Rik (NM_176964.2,742-760).
gagcacagtctcatgaata

SEQ ID NO: 791533 - DNA, 19 bp, Mus musculus
  siRNA target sequence for A130014H13Rik (NM_176964.2,845-863).
ctggctctggcgttttgat

SEQ ID NO: 791534 - DNA, 19 bp, Mus musculus
  siRNA target sequence for A430072C10Rik (NM_176967.2,1860-1878).
cggcggattctcattggtt

SEQ ID NO: 791535 - DNA, 19 bp, Mus musculus
  siRNA target sequence for A430072C10Rik (NM_176967.2,1861-1879).
ggcggattctcattggttt

SEQ ID NO: 791536 - DNA, 19 bp, Mus musculus
  siRNA target sequence for A430072C10Rik (NM_176967.2,1862-1880).
gcggattctcattggtttt

SEQ ID NO: 791537 - DNA, 19 bp, Mus musculus
  siRNA target sequence for A430072C10Rik (NM_176967.2,1863-1881).
cggattctcattggtttta

SEQ ID NO: 791538 - DNA, 19 bp, Mus musculus
  siRNA target sequence for A430072C10Rik (NM_176967.2,1902-1920).
cttcgtgtttacatctttt

SEQ ID NO: 791539 - DNA, 19 bp, Mus musculus
  siRNA target sequence for A430072C10Rik (NM_176967.2,1961-1979).
gtggcggtagtggttttct

SEQ ID NO: 791540 - DNA, 19 bp, Mus musculus
  siRNA target sequence for A430072C10Rik (NM_176967.2,1963-1981).
ggcggtagtggttttctat

SEQ ID NO: 791541 - DNA, 19 bp, Mus musculus
  siRNA target sequence for A430072C10Rik (NM_176967.2,1965-1983).
cggtagtggttttctattt

SEQ ID NO: 791542 - DNA, 19 bp, Mus musculus
  siRNA target sequence for A430072C10Rik (NM_176967.2,2004-2022).
ggctgagacgtttgaagaa

SEQ ID NO: 791543 - DNA, 19 bp, Mus musculus
  siRNA target sequence for A430072C10Rik (NM_176967.2,2005-2023).
gctgagacgtttgaagaat

SEQ ID NO: 791544 - DNA, 19 bp, Mus musculus
  siRNA target sequence for A430072C10Rik (NM_176967.2,2006-2024).
ctgagacgtttgaagaatt

SEQ ID NO: 791545 - DNA, 19 bp, Mus musculus
  siRNA target sequence for A430072C10Rik (NM_176967.2,2008-2026).
gagacgtttgaagaattca

SEQ ID NO: 791546 - DNA, 19 bp, Mus musculus
  siRNA target sequence for A430072C10Rik (NM_176967.2,2068-2086).
cagttgttgtttaacaaga

SEQ ID NO: 791547 - DNA, 19 bp, Mus musculus
  siRNA target sequence for 6030401B09Rik (NM_176968.2,245-263).
gaggactgggatttctgtt

SEQ ID NO: 791548 - DNA, 19 bp, Mus musculus
  siRNA target sequence for 6030401B09Rik (NM_176968.2,286-304).
ggaagatgggaccttcatt

SEQ ID NO: 791549 - DNA, 19 bp, Mus musculus
  siRNA target sequence for 6030401B09Rik (NM_176968.2,341-359).
cacggcaccaagatgatga

SEQ ID NO: 791550 - DNA, 19 bp, Mus musculus
  siRNA target sequence for 6030401B09Rik (NM_176968.2,403-421).
gcactgtgtgtcagacaaa

SEQ ID NO: 791551 - DNA, 19 bp, Mus musculus
  siRNA target sequence for 6030401B09Rik (NM_176968.2,525-543).
ccagagtggtggactcttt

SEQ ID NO: 791552 - DNA, 19 bp, Mus musculus
  siRNA target sequence for 6030401B09Rik (NM_176968.2,526-544).
cagagtggtggactcttta

SEQ ID NO: 791553 - DNA, 19 bp, Mus musculus
  siRNA target sequence for 6030401B09Rik (NM_176968.2,586-604).
ggatgtagttgctggtata

SEQ ID NO: 791554 - DNA, 19 bp, Mus musculus
  siRNA target sequence for 6030401B09Rik (NM_176968.2,596-614).
gctggtatacaacacaatt

SEQ ID NO: 791555 - DNA, 19 bp, Mus musculus
  siRNA target sequence for 6030401B09Rik (NM_176968.2,599-617).
ggtatacaacacaatttta

SEQ ID NO: 791556 - DNA, 19 bp, Mus musculus
  siRNA target sequence for 6030401B09Rik (NM_176968.2,733-751).
ggacgctgggaaaattact

SEQ ID NO: 791557 - DNA, 19 bp, Mus musculus
  siRNA target sequence for 6030401B09Rik (NM_176968.2,734-752).
gacgctgggaaaattacta

SEQ ID NO: 791558 - DNA, 19 bp, Mus musculus
  siRNA target sequence for 6030401B09Rik (NM_176968.2,740-758).
gggaaaattactatgttga

SEQ ID NO: 791559 - DNA, 19 bp, Mus musculus
  siRNA target sequence for 6030401B09Rik (NM_176968.2,741-759).
ggaaaattactatgttgat

SEQ ID NO: 791560 - DNA, 19 bp, Mus musculus
  siRNA target sequence for 6030401B09Rik (NM_176968.2,774-792).
gtgattactgtaaacttct

SEQ ID NO: 791561 - DNA, 19 bp, Mus musculus
  siRNA target sequence for 6030401B09Rik (NM_176968.2,852-870).
cattaaagcctggattctt

SEQ ID NO: 791562 - DNA, 19 bp, Mus musculus
  siRNA target sequence for 6030401B09Rik (NM_176968.2,931-949).
gctgccgtctctggataaa

SEQ ID NO: 791563 - DNA, 19 bp, Mus musculus
  siRNA target sequence for 6030401B09Rik (NM_176968.2,969-987).
ggaacgctgcccaccttta

SEQ ID NO: 791564 - DNA, 19 bp, Mus musculus
  siRNA target sequence for 6030401B09Rik (NM_176968.2,970-988).
gaacgctgcccacctttat

SEQ ID NO: 791565 - DNA, 19 bp, Mus musculus
  siRNA target sequence for 6030401B09Rik (NM_176968.2,1017-1035).
ctgaacccaaggtcgttta

SEQ ID NO: 791566 - DNA, 19 bp, Mus musculus
  siRNA target sequence for 6030401B09Rik (NM_176968.2,1019-1037).
gaacccaaggtcgtttact

SEQ ID NO: 791567 - DNA, 19 bp, Mus musculus
  siRNA target sequence for 6030401B09Rik (NM_176968.2,1089-1107).
gggagactgtccttattct

SEQ ID NO: 791568 - DNA, 19 bp, Mus musculus
  siRNA target sequence for 6030401B09Rik (NM_176968.2,1197-1215).
ctctaaacaccttgtctaa

SEQ ID NO: 791569 - DNA, 19 bp, Mus musculus
  siRNA target sequence for 6030401B09Rik (NM_176968.2,1199-1217).
ctaaacaccttgtctaata

SEQ ID NO: 791570 - DNA, 19 bp, Mus musculus
  siRNA target sequence for 6030401B09Rik (NM_176968.2,1219-1237).
gtggggctcatactttatt

SEQ ID NO: 791571 - DNA, 19 bp, Mus musculus
  siRNA target sequence for 6030401B09Rik (NM_176968.2,1223-1241).
ggctcatactttattgact

SEQ ID NO: 791572 - DNA, 19 bp, Mus musculus
  siRNA target sequence for 6030401B09Rik (NM_176968.2,1308-1326).
cctacagtacgattgcaat

SEQ ID NO: 791573 - DNA, 19 bp, Mus musculus
  siRNA target sequence for 6030401B09Rik (NM_176968.2,1312-1330).
cagtacgattgcaattcca

SEQ ID NO: 791574 - DNA, 19 bp, Mus musculus
  siRNA target sequence for 6030401B09Rik (NM_176968.2,1314-1332).
gtacgattgcaattccaaa

SEQ ID NO: 791575 - DNA, 19 bp, Mus musculus
  siRNA target sequence for 6030401B09Rik (NM_176968.2,1317-1335).
cgattgcaattccaaacat

SEQ ID NO: 791576 - DNA, 19 bp, Mus musculus
  siRNA target sequence for 6030401B09Rik (NM_176968.2,1322-1340).
gcaattccaaacattgaat

SEQ ID NO: 791577 - DNA, 19 bp, Mus musculus
  siRNA target sequence for 6030401B09Rik (NM_176968.2,1355-1373).
cccctggactacaaattta

SEQ ID NO: 791578 - DNA, 19 bp, Mus musculus
  siRNA target sequence for 6030401B09Rik (NM_176968.2,1357-1375).
cctggactacaaatttaca

SEQ ID NO: 791579 - DNA, 19 bp, Mus musculus
  siRNA target sequence for 6030401B09Rik (NM_176968.2,1395-1413).
caaaaatggctggttacta

SEQ ID NO: 791580 - DNA, 19 bp, Mus musculus
  siRNA target sequence for 6030401B09Rik (NM_176968.2,1416-1434).
ccttggtccatcatacctt

SEQ ID NO: 791581 - DNA, 19 bp, Mus musculus
  siRNA target sequence for 6030401B09Rik (NM_176968.2,1451-1469).
gacagcaaaataatatcta

SEQ ID NO: 791582 - DNA, 19 bp, Mus musculus
  siRNA target sequence for C230008H04Rik (NM_176970.1,222-240).
ctcacgttcttttccattt

SEQ ID NO: 791583 - DNA, 19 bp, Mus musculus
  siRNA target sequence for C230008H04Rik (NM_176970.1,263-281).
gtggaaaagagcatgaatt

SEQ ID NO: 791584 - DNA, 19 bp, Mus musculus
  siRNA target sequence for C230008H04Rik (NM_176970.1,315-333).
ggaaccaagtcaacgtatt

SEQ ID NO: 791585 - DNA, 19 bp, Mus musculus
  siRNA target sequence for C230008H04Rik (NM_176970.1,320-338).
caagtcaacgtattgtaat

SEQ ID NO: 791586 - DNA, 19 bp, Mus musculus
  siRNA target sequence for C230008H04Rik (NM_176970.1,325-343).
caacgtattgtaatttgta

SEQ ID NO: 791587 - DNA, 19 bp, Mus musculus
  siRNA target sequence for C230008H04Rik (NM_176970.1,417-435).
cggactctcctgtcaacaa

SEQ ID NO: 791588 - DNA, 19 bp, Mus musculus
  siRNA target sequence for C230008H04Rik (NM_176970.1,428-446).
gtcaacaatgccctttgtt

SEQ ID NO: 791589 - DNA, 19 bp, Mus musculus
  siRNA target sequence for 4932415L06Rik (NM_176972.2,379-397).
gtctcccctgaagatctat

SEQ ID NO: 791590 - DNA, 19 bp, Mus musculus
  siRNA target sequence for 4932415L06Rik (NM_176972.2,391-409).
gatctatggtcctatcaga

SEQ ID NO: 791591 - DNA, 19 bp, Mus musculus
  siRNA target sequence for 4932415L06Rik (NM_176972.2,398-416).
ggtcctatcagaattcgaa

SEQ ID NO: 791592 - DNA, 19 bp, Mus musculus
  siRNA target sequence for 4932415L06Rik (NM_176972.2,418-436).
catgcagactgggattaca

SEQ ID NO: 791593 - DNA, 19 bp, Mus musculus
  siRNA target sequence for 4932415L06Rik (NM_176972.2,486-504).
gcctgctcgttcactacaa

SEQ ID NO: 791594 - DNA, 19 bp, Mus musculus
  siRNA target sequence for 4932415L06Rik (NM_176972.2,499-517).
ctacaacactggaggaatt

SEQ ID NO: 791595 - DNA, 19 bp, Mus musculus
  siRNA target sequence for 4932415L06Rik (NM_176972.2,530-548).
cagctaagtcataacatta

SEQ ID NO: 791596 - DNA, 19 bp, Mus musculus
  siRNA target sequence for 4932415L06Rik (NM_176972.2,560-578).
ctacgacccagtggaataa

SEQ ID NO: 791597 - DNA, 19 bp, Mus musculus
  siRNA target sequence for 4932415L06Rik (NM_176972.2,581-599).
caaagccgcctaatgttga

SEQ ID NO: 791598 - DNA, 19 bp, Mus musculus
  siRNA target sequence for 4932415L06Rik (NM_176972.2,586-604).
ccgcctaatgttgacttta

SEQ ID NO: 791599 - DNA, 19 bp, Mus musculus
  siRNA target sequence for 4932415L06Rik (NM_176972.2,588-606).
gcctaatgttgactttaca

SEQ ID NO: 791600 - DNA, 19 bp, Mus musculus
  siRNA target sequence for 4932415L06Rik (NM_176972.2,605-623).
caagataacagcttcttgt

SEQ ID NO: 791601 - DNA, 19 bp, Mus musculus
  siRNA target sequence for 4932415L06Rik (NM_176972.2,608-626).
gataacagcttcttgtcta

SEQ ID NO: 791602 - DNA, 19 bp, Mus musculus
  siRNA target sequence for 4932415L06Rik (NM_176972.2,615-633).
gcttcttgtctattgacaa

SEQ ID NO: 791603 - DNA, 19 bp, Mus musculus
  siRNA target sequence for 4932415L06Rik (NM_176972.2,616-634).
cttcttgtctattgacaaa

SEQ ID NO: 791604 - DNA, 19 bp, Mus musculus
  siRNA target sequence for 4932415L06Rik (NM_176972.2,671-689).
ctagatgccgtccatcaaa

SEQ ID NO: 791605 - DNA, 19 bp, Mus musculus
  siRNA target sequence for 4932415L06Rik (NM_176972.2,693-711).
gacttcatgcagctatgaa

SEQ ID NO: 791606 - DNA, 19 bp, Mus musculus
  siRNA target sequence for 4932415L06Rik (NM_176972.2,726-744).
ctggtagttttggaactat

SEQ ID NO: 791607 - DNA, 19 bp, Mus musculus
  siRNA target sequence for 4932415L06Rik (NM_176972.2,729-747).
gtagttttggaactattct

SEQ ID NO: 791608 - DNA, 19 bp, Mus musculus
  siRNA target sequence for 4932415L06Rik (NM_176972.2,759-777).
cctctcagaaggaaactaa

SEQ ID NO: 791609 - DNA, 19 bp, Mus musculus
  siRNA target sequence for 4932415L06Rik (NM_176972.2,778-796).
cagacagctttcttactca

SEQ ID NO: 791610 - DNA, 19 bp, Mus musculus
  siRNA target sequence for 4932415L06Rik (NM_176972.2,797-815).
gacaatcaggcctcttcaa

SEQ ID NO: 791611 - DNA, 19 bp, Mus musculus
  siRNA target sequence for 4932415L06Rik (NM_176972.2,839-857).
gatgaaattccatttcgaa

SEQ ID NO: 791612 - DNA, 19 bp, Mus musculus
  siRNA target sequence for 4932415L06Rik (NM_176972.2,913-931).
ggctgttacccggactatt

SEQ ID NO: 791613 - DNA, 19 bp, Mus musculus
  siRNA target sequence for 4932415L06Rik (NM_176972.2,917-935).
gttacccggactattcctt

SEQ ID NO: 791614 - DNA, 19 bp, Mus musculus
  siRNA target sequence for 4932415L06Rik (NM_176972.2,921-939).
cccggactattccttcttt

SEQ ID NO: 791615 - DNA, 19 bp, Mus musculus
  siRNA target sequence for 4932415L06Rik (NM_176972.2,923-941).
cggactattccttctttga

SEQ ID NO: 791616 - DNA, 19 bp, Mus musculus
  siRNA target sequence for 4932415L06Rik (NM_176972.2,956-974).
cctcttagatcaggattat

SEQ ID NO: 791617 - DNA, 19 bp, Mus musculus
  siRNA target sequence for 4932415L06Rik (NM_176972.2,977-995).
gaaaaccgcactgaaaaga

SEQ ID NO: 791618 - DNA, 19 bp, Mus musculus
  siRNA target sequence for 4932415L06Rik (NM_176972.2,1049-1067).
gactcatcatcgaacaaca

SEQ ID NO: 791619 - DNA, 19 bp, Mus musculus
  siRNA target sequence for 4932415L06Rik (NM_176972.2,1051-1069).
ctcatcatcgaacaacaaa

SEQ ID NO: 791620 - DNA, 19 bp, Mus musculus
  siRNA target sequence for 4932415L06Rik (NM_176972.2,1056-1074).
catcgaacaacaaagctat

SEQ ID NO: 791621 - DNA, 19 bp, Mus musculus
  siRNA target sequence for 4932415L06Rik (NM_176972.2,1171-1189).
gcagtcatcctcattctat

SEQ ID NO: 791622 - DNA, 19 bp, Mus musculus
  siRNA target sequence for 4932415L06Rik (NM_176972.2,1234-1252).
cctggacaggtgtaatgtt

SEQ ID NO: 791623 - DNA, 19 bp, Mus musculus
  siRNA target sequence for 4932415L06Rik (NM_176972.2,1237-1255).
ggacaggtgtaatgtttca

SEQ ID NO: 791624 - DNA, 19 bp, Mus musculus
  siRNA target sequence for 4932415L06Rik (NM_176972.2,1238-1256).
gacaggtgtaatgtttcaa

SEQ ID NO: 791625 - DNA, 19 bp, Mus musculus
  siRNA target sequence for 4932415L06Rik (NM_176972.2,1301-1319).
ccaactcctctgtctgtta

SEQ ID NO: 791626 - DNA, 19 bp, Mus musculus
  siRNA target sequence for 4932415L06Rik (NM_176972.2,1302-1320).
caactcctctgtctgttaa

SEQ ID NO: 791627 - DNA, 19 bp, Mus musculus
  siRNA target sequence for 4932415L06Rik (NM_176972.2,1411-1429).
cttgggaaatacatgctat

SEQ ID NO: 791628 - DNA, 19 bp, Mus musculus
  siRNA target sequence for 4932415L06Rik (NM_176972.2,1432-1450).
gaatgctatcttacaatct

SEQ ID NO: 791629 - DNA, 19 bp, Mus musculus
  siRNA target sequence for 4932415L06Rik (NM_176972.2,1453-1471).
gttttcactccagtcattt

SEQ ID NO: 791630 - DNA, 19 bp, Mus musculus
  siRNA target sequence for 4932415L06Rik (NM_176972.2,1462-1480).
ccagtcatttgcaaatgat

SEQ ID NO: 791631 - DNA, 19 bp, Mus musculus
  siRNA target sequence for 4932415L06Rik (NM_176972.2,1494-1512).
gtatcccatggaagaaaat

SEQ ID NO: 791632 - DNA, 19 bp, Mus musculus
  siRNA target sequence for 4932415L06Rik (NM_176972.2,1498-1516).
cccatggaagaaaattcca

SEQ ID NO: 791633 - DNA, 19 bp, Mus musculus
  siRNA target sequence for 4932415L06Rik (NM_176972.2,1499-1517).
ccatggaagaaaattccat

SEQ ID NO: 791634 - DNA, 19 bp, Mus musculus
  siRNA target sequence for 4932415L06Rik (NM_176972.2,1526-1544).
cttatcagacgctttgcaa

SEQ ID NO: 791635 - DNA, 19 bp, Mus musculus
  siRNA target sequence for 4932415L06Rik (NM_176972.2,1536-1554).
gctttgcaaacctgcttat

SEQ ID NO: 791636 - DNA, 19 bp, Mus musculus
  siRNA target sequence for 4932415L06Rik (NM_176972.2,1537-1555).
ctttgcaaacctgcttatt

SEQ ID NO: 791637 - DNA, 19 bp, Mus musculus
  siRNA target sequence for 4932415L06Rik (NM_176972.2,1589-1607).
gaactacttaagaaggtta

SEQ ID NO: 791638 - DNA, 19 bp, Mus musculus
  siRNA target sequence for 4932415L06Rik (NM_176972.2,1600-1618).
gaaggttaaaaatgctatt

SEQ ID NO: 791639 - DNA, 19 bp, Mus musculus
  siRNA target sequence for 4932415L06Rik (NM_176972.2,1683-1701).
gcttagatcagctaaagga

SEQ ID NO: 791640 - DNA, 19 bp, Mus musculus
  siRNA target sequence for 4932415L06Rik (NM_176972.2,1770-1788).
catcagctaccaaagtgtt

SEQ ID NO: 791641 - DNA, 19 bp, Mus musculus
  siRNA target sequence for 4932415L06Rik (NM_176972.2,1786-1804).
gttcacgtgccctgttatt

SEQ ID NO: 791642 - DNA, 19 bp, Mus musculus
  siRNA target sequence for 4932415L06Rik (NM_176972.2,1789-1807).
cacgtgccctgttattaca

SEQ ID NO: 791643 - DNA, 19 bp, Mus musculus
  siRNA target sequence for 4932415L06Rik (NM_176972.2,1791-1809).
cgtgccctgttattacaaa

SEQ ID NO: 791644 - DNA, 19 bp, Mus musculus
  siRNA target sequence for 4932415L06Rik (NM_176972.2,1823-1841).
gttcagcactccattatct

SEQ ID NO: 791645 - DNA, 19 bp, Mus musculus
  siRNA target sequence for 4932415L06Rik (NM_176972.2,1898-1916).
gaccttcctcggaggaaaa

SEQ ID NO: 791646 - DNA, 19 bp, Mus musculus
  siRNA target sequence for 4932415L06Rik (NM_176972.2,1920-1938).
cactccctcctcgttcaat

SEQ ID NO: 791647 - DNA, 19 bp, Mus musculus
  siRNA target sequence for 4932415L06Rik (NM_176972.2,1924-1942).
ccctcctcgttcaatccaa

SEQ ID NO: 791648 - DNA, 19 bp, Mus musculus
  siRNA target sequence for 4932415L06Rik (NM_176972.2,1928-1946).
cctcgttcaatccaagatt

SEQ ID NO: 791649 - DNA, 19 bp, Mus musculus
  siRNA target sequence for 4932415L06Rik (NM_176972.2,1940-1958).
caagattctctcgatcttt

SEQ ID NO: 791650 - DNA, 19 bp, Mus musculus
  siRNA target sequence for 4932415L06Rik (NM_176972.2,1970-1988).
gaagaacttgaatactcat

SEQ ID NO: 791651 - DNA, 19 bp, Mus musculus
  siRNA target sequence for 4932415L06Rik (NM_176972.2,2012-2030).
gctcttgtcaggcacaaat

SEQ ID NO: 791652 - DNA, 19 bp, Mus musculus
  siRNA target sequence for 4932415L06Rik (NM_176972.2,2013-2031).
ctcttgtcaggcacaaatt

SEQ ID NO: 791653 - DNA, 19 bp, Mus musculus
  siRNA target sequence for 4932415L06Rik (NM_176972.2,2015-2033).
cttgtcaggcacaaattta

SEQ ID NO: 791654 - DNA, 19 bp, Mus musculus
  siRNA target sequence for 4932415L06Rik (NM_176972.2,2018-2036).
gtcaggcacaaatttaaca

SEQ ID NO: 791655 - DNA, 19 bp, Mus musculus
  siRNA target sequence for 4932415L06Rik (NM_176972.2,2084-2102).
gtggctctctcacttaaca

SEQ ID NO: 791656 - DNA, 19 bp, Mus musculus
  siRNA target sequence for 4932415L06Rik (NM_176972.2,2197-2215).
cgcacccgtggcaatttct

SEQ ID NO: 791657 - DNA, 19 bp, Mus musculus
  siRNA target sequence for 4932415L06Rik (NM_176972.2,2198-2216).
gcacccgtggcaatttcta

SEQ ID NO: 791658 - DNA, 19 bp, Mus musculus
  siRNA target sequence for 4932415L06Rik (NM_176972.2,2220-2238).
cattgagagcctgtcaaat

SEQ ID NO: 791659 - DNA, 19 bp, Mus musculus
  siRNA target sequence for 4932415L06Rik (NM_176972.2,2259-2277).
gcccttctgcaccttcaaa

SEQ ID NO: 791660 - DNA, 19 bp, Mus musculus
  siRNA target sequence for 4932415L06Rik (NM_176972.2,2308-2326).
gacatcatgccttgattca

SEQ ID NO: 791661 - DNA, 19 bp, Mus musculus
  siRNA target sequence for 4932415L06Rik (NM_176972.2,2310-2328).
catcatgccttgattcaga

SEQ ID NO: 791662 - DNA, 19 bp, Mus musculus
  siRNA target sequence for 4932415L06Rik (NM_176972.2,2503-2521).
ggcagctgtgttagagata

SEQ ID NO: 791663 - DNA, 19 bp, Mus musculus
  siRNA target sequence for 4932415L06Rik (NM_176972.2,2531-2549).
gaagcttcgccggtactta

SEQ ID NO: 791664 - DNA, 19 bp, Mus musculus
  siRNA target sequence for 4932415L06Rik (NM_176972.2,2542-2560).
ggtacttagccctgaagat

SEQ ID NO: 791665 - DNA, 19 bp, Mus musculus
  siRNA target sequence for 4932415L06Rik (NM_176972.2,2648-2666).
gagaagtccaaaacaatca

SEQ ID NO: 791666 - DNA, 19 bp, Mus musculus
  siRNA target sequence for 4932415L06Rik (NM_176972.2,2650-2668).
gaagtccaaaacaatcact

SEQ ID NO: 791667 - DNA, 19 bp, Mus musculus
  siRNA target sequence for 4932415L06Rik (NM_176972.2,2671-2689).
gccaggtcctgctagtttt

SEQ ID NO: 791668 - DNA, 19 bp, Mus musculus
  siRNA target sequence for 4932415L06Rik (NM_176972.2,2672-2690).
ccaggtcctgctagtttta

SEQ ID NO: 791669 - DNA, 19 bp, Mus musculus
  siRNA target sequence for 4932415L06Rik (NM_176972.2,2676-2694).
gtcctgctagttttactga

SEQ ID NO: 791670 - DNA, 19 bp, Mus musculus
  siRNA target sequence for 4932415L06Rik (NM_176972.2,2779-2797).
cgtagaccgggaaagagaa

SEQ ID NO: 791671 - DNA, 19 bp, Mus musculus
  siRNA target sequence for 4932415L06Rik (NM_176972.2,2872-2890).
cctcaaaagggctacagaa

SEQ ID NO: 791672 - DNA, 19 bp, Mus musculus
  siRNA target sequence for 4932415L06Rik (NM_176972.2,2875-2893).
caaaagggctacagaatta

SEQ ID NO: 791673 - DNA, 19 bp, Mus musculus
  siRNA target sequence for 4932415L06Rik (NM_176972.2,3087-3105).
caggtcattacattagtga

SEQ ID NO: 791674 - DNA, 19 bp, Mus musculus
  siRNA target sequence for 4932415L06Rik (NM_176972.2,3192-3210).
gagatcgcagcggctatat

SEQ ID NO: 791675 - DNA, 19 bp, Mus musculus
  siRNA target sequence for 4932415L06Rik (NM_176972.2,3197-3215).
cgcagcggctatatcttct

SEQ ID NO: 791676 - DNA, 19 bp, Mus musculus
  siRNA target sequence for 4932415L06Rik (NM_176972.2,3198-3216).
gcagcggctatatcttctt

SEQ ID NO: 791677 - DNA, 19 bp, Mus musculus
  siRNA target sequence for 4932415L06Rik (NM_176972.2,3201-3219).
gcggctatatcttcttcta

SEQ ID NO: 791678 - DNA, 19 bp, Mus musculus
  siRNA target sequence for 4932415L06Rik (NM_176972.2,3204-3222).
gctatatcttcttctatat

SEQ ID NO: 791679 - DNA, 19 bp, Mus musculus
  siRNA target sequence for 4932415L06Rik (NM_176972.2,3223-3241).
gcacaaggagatctttgat

SEQ ID NO: 791680 - DNA, 19 bp, Mus musculus
  siRNA target sequence for D130074J02Rik (NM_176973.3,244-262).
cagccgccacagtacttct

SEQ ID NO: 791681 - DNA, 19 bp, Mus musculus
  siRNA target sequence for D130074J02Rik (NM_176973.3,1173-1191).
catagactgtgaagtattt

SEQ ID NO: 791682 - DNA, 19 bp, Mus musculus
  siRNA target sequence for D130074J02Rik (NM_176973.3,1341-1359).
cgtggtacccactcaagat

SEQ ID NO: 791683 - DNA, 19 bp, Mus musculus
  siRNA target sequence for D130074J02Rik (NM_176973.3,1467-1485).
ctacgggacgctctttgta

SEQ ID NO: 791684 - DNA, 19 bp, Mus musculus
  siRNA target sequence for D130074J02Rik (NM_176973.3,1528-1546).
cttggcctactctacaatt

SEQ ID NO: 791685 - DNA, 19 bp, Mus musculus
  siRNA target sequence for D130074J02Rik (NM_176973.3,1531-1549).
ggcctactctacaattgtt

SEQ ID NO: 791686 - DNA, 19 bp, Mus musculus
  siRNA target sequence for D130074J02Rik (NM_176973.3,1559-1577).
ggatgcccaagctcaaaca

SEQ ID NO: 791687 - DNA, 19 bp, Mus musculus
  siRNA target sequence for A430010J10Rik (NM_176975.2,296-314).
ccagggcagcacaacgaaa

SEQ ID NO: 791688 - DNA, 19 bp, Mus musculus
  siRNA target sequence for A430010J10Rik (NM_176975.2,502-520).
ggagcggtctgtgtaaaca

SEQ ID NO: 791689 - DNA, 19 bp, Mus musculus
  siRNA target sequence for A430010J10Rik (NM_176975.2,505-523).
gcggtctgtgtaaacattt

SEQ ID NO: 791690 - DNA, 19 bp, Mus musculus
  siRNA target sequence for A430010J10Rik (NM_176975.2,648-666).
ggcggtctggtggagttat

SEQ ID NO: 791691 - DNA, 19 bp, Mus musculus
  siRNA target sequence for A430010J10Rik (NM_176975.2,649-667).
gcggtctggtggagttata

SEQ ID NO: 791692 - DNA, 19 bp, Mus musculus
  siRNA target sequence for A430010J10Rik (NM_176975.2,651-669).
ggtctggtggagttataaa

SEQ ID NO: 791693 - DNA, 19 bp, Mus musculus
  siRNA target sequence for A430010J10Rik (NM_176975.2,656-674).
ggtggagttataaatcatt

SEQ ID NO: 791694 - DNA, 19 bp, Mus musculus
  siRNA target sequence for 5830418K08Rik (NM_176976.2,650-668).
caggacattgggtttatca

SEQ ID NO: 791695 - DNA, 19 bp, Mus musculus
  siRNA target sequence for 5830418K08Rik (NM_176976.2,652-670).
ggacattgggtttatcaca

SEQ ID NO: 791696 - DNA, 19 bp, Mus musculus
  siRNA target sequence for 5830418K08Rik (NM_176976.2,681-699).
cctcagcagaataatctga

SEQ ID NO: 791697 - DNA, 19 bp, Mus musculus
  siRNA target sequence for 5830418K08Rik (NM_176976.2,779-797).
cagaccatgtcaatttgaa

SEQ ID NO: 791698 - DNA, 19 bp, Mus musculus
  siRNA target sequence for 5830418K08Rik (NM_176976.2,781-799).
gaccatgtcaatttgaaga

SEQ ID NO: 791699 - DNA, 19 bp, Mus musculus
  siRNA target sequence for 5830418K08Rik (NM_176976.2,784-802).
catgtcaatttgaagagat

SEQ ID NO: 791700 - DNA, 19 bp, Mus musculus
  siRNA target sequence for 5830418K08Rik (NM_176976.2,800-818).
gatgtctgctgagcatttt

SEQ ID NO: 791701 - DNA, 19 bp, Mus musculus
  siRNA target sequence for 5830418K08Rik (NM_176976.2,847-865).
cacttcaacagcagttaga

SEQ ID NO: 791702 - DNA, 19 bp, Mus musculus
  siRNA target sequence for 5830418K08Rik (NM_176976.2,849-867).
cttcaacagcagttagata

SEQ ID NO: 791703 - DNA, 19 bp, Mus musculus
  siRNA target sequence for 5830418K08Rik (NM_176976.2,869-887).
gcaaagggaagccattaga

SEQ ID NO: 791704 - DNA, 19 bp, Mus musculus
  siRNA target sequence for 5830418K08Rik (NM_176976.2,960-978).
caaattagctcctctctat

SEQ ID NO: 791705 - DNA, 19 bp, Mus musculus
  siRNA target sequence for 5830418K08Rik (NM_176976.2,1028-1046).
gtctttcccaactaaaagt

SEQ ID NO: 791706 - DNA, 19 bp, Mus musculus
  siRNA target sequence for 5830418K08Rik (NM_176976.2,1066-1084).
ggtcccaagatgagtatct

SEQ ID NO: 791707 - DNA, 19 bp, Mus musculus
  siRNA target sequence for 5830418K08Rik (NM_176976.2,1136-1154).
ggacttagaaaaggtattt

SEQ ID NO: 791708 - DNA, 19 bp, Mus musculus
  siRNA target sequence for 5830418K08Rik (NM_176976.2,1139-1157).
cttagaaaaggtatttcat

SEQ ID NO: 791709 - DNA, 19 bp, Mus musculus
  siRNA target sequence for 5830418K08Rik (NM_176976.2,1187-1205).
ccaaaacaaaagtgaatct

SEQ ID NO: 791710 - DNA, 19 bp, Mus musculus
  siRNA target sequence for 5830418K08Rik (NM_176976.2,1250-1268).
gcatccattcatttcacta

SEQ ID NO: 791711 - DNA, 19 bp, Mus musculus
  siRNA target sequence for 5830418K08Rik (NM_176976.2,1259-1277).
catttcactaccttttgca

SEQ ID NO: 791712 - DNA, 19 bp, Mus musculus
  siRNA target sequence for 5830418K08Rik (NM_176976.2,1269-1287).
ccttttgcagaaagtaaat

SEQ ID NO: 791713 - DNA, 19 bp, Mus musculus
  siRNA target sequence for 5830418K08Rik (NM_176976.2,1325-1343).
gcatgcagctcctaatgat

SEQ ID NO: 791714 - DNA, 19 bp, Mus musculus
  siRNA target sequence for 5830418K08Rik (NM_176976.2,1501-1519).
catccttacagcagcaaat

SEQ ID NO: 791715 - DNA, 19 bp, Mus musculus
  siRNA target sequence for 5830418K08Rik (NM_176976.2,1764-1782).
ccacctgtctccaaagtta

SEQ ID NO: 791716 - DNA, 19 bp, Mus musculus
  siRNA target sequence for 5830418K08Rik (NM_176976.2,1765-1783).
cacctgtctccaaagttaa

SEQ ID NO: 791717 - DNA, 19 bp, Mus musculus
  siRNA target sequence for 5830418K08Rik (NM_176976.2,1767-1785).
cctgtctccaaagttaaat

SEQ ID NO: 791718 - DNA, 19 bp, Mus musculus
  siRNA target sequence for 5830418K08Rik (NM_176976.2,1786-1804).
gtgtcttggacttaaacca

SEQ ID NO: 791719 - DNA, 19 bp, Mus musculus
  siRNA target sequence for 5830418K08Rik (NM_176976.2,1805-1823).
gcatgagcttagtactata

SEQ ID NO: 791720 - DNA, 19 bp, Mus musculus
  siRNA target sequence for 5830418K08Rik (NM_176976.2,1816-1834).
gtactatacaggaagtaga

SEQ ID NO: 791721 - DNA, 19 bp, Mus musculus
  siRNA target sequence for 5830418K08Rik (NM_176976.2,1864-1882).
caggaaaagcagagtttta

SEQ ID NO: 791722 - DNA, 19 bp, Mus musculus
  siRNA target sequence for 5830418K08Rik (NM_176976.2,1947-1965).
gcacatgatccatttggtt

SEQ ID NO: 791723 - DNA, 19 bp, Mus musculus
  siRNA target sequence for 5830418K08Rik (NM_176976.2,2182-2200).
ctggaagcttcttaagtta

SEQ ID NO: 791724 - DNA, 19 bp, Mus musculus
  siRNA target sequence for 5830418K08Rik (NM_176976.2,2188-2206).
gcttcttaagttatgaaat

SEQ ID NO: 791725 - DNA, 19 bp, Mus musculus
  siRNA target sequence for 5830418K08Rik (NM_176976.2,2289-2307).
gagactgatcctcttagta

SEQ ID NO: 791726 - DNA, 19 bp, Mus musculus
  siRNA target sequence for 5830418K08Rik (NM_176976.2,2310-2328).
gcagtcccttcagttattt

SEQ ID NO: 791727 - DNA, 19 bp, Mus musculus
  siRNA target sequence for 5830418K08Rik (NM_176976.2,2382-2400).
gaaagtacatctgatcata

SEQ ID NO: 791728 - DNA, 19 bp, Mus musculus
  siRNA target sequence for 5830418K08Rik (NM_176976.2,2401-2419).
cacatgttcagcagatcat

SEQ ID NO: 791729 - DNA, 19 bp, Mus musculus
  siRNA target sequence for 5830418K08Rik (NM_176976.2,2476-2494).
cagctgtggaccttgactt

SEQ ID NO: 791730 - DNA, 19 bp, Mus musculus
  siRNA target sequence for 5830418K08Rik (NM_176976.2,2496-2514).
cgagaattggaacacatat

SEQ ID NO: 791731 - DNA, 19 bp, Mus musculus
  siRNA target sequence for 5830418K08Rik (NM_176976.2,2534-2552).
gctctttaaacccttagaa

SEQ ID NO: 791732 - DNA, 19 bp, Mus musculus
  siRNA target sequence for 5830418K08Rik (NM_176976.2,2545-2563).
ccttagaaccacatctaga

SEQ ID NO: 791733 - DNA, 19 bp, Mus musculus
  siRNA target sequence for 5830418K08Rik (NM_176976.2,2546-2564).
cttagaaccacatctagat

SEQ ID NO: 791734 - DNA, 19 bp, Mus musculus
  siRNA target sequence for 5830418K08Rik (NM_176976.2,2553-2571).
ccacatctagattttgact

SEQ ID NO: 791735 - DNA, 19 bp, Mus musculus
  siRNA target sequence for 5830418K08Rik (NM_176976.2,2559-2577).
ctagattttgacttatcat

SEQ ID NO: 791736 - DNA, 19 bp, Mus musculus
  siRNA target sequence for 5830418K08Rik (NM_176976.2,2640-2658).
catgttaaggcattatcca

SEQ ID NO: 791737 - DNA, 19 bp, Mus musculus
  siRNA target sequence for 5830418K08Rik (NM_176976.2,2682-2700).
ctgacagccaagtcacatt

SEQ ID NO: 791738 - DNA, 19 bp, Mus musculus
  siRNA target sequence for 5830418K08Rik (NM_176976.2,2710-2728).
caaggctgaaccaacttga

SEQ ID NO: 791739 - DNA, 19 bp, Mus musculus
  siRNA target sequence for 5830418K08Rik (NM_176976.2,2713-2731).
ggctgaaccaacttgatat

SEQ ID NO: 791740 - DNA, 19 bp, Mus musculus
  siRNA target sequence for 5830418K08Rik (NM_176976.2,2715-2733).
ctgaaccaacttgatatta

SEQ ID NO: 791741 - DNA, 19 bp, Mus musculus
  siRNA target sequence for 5830418K08Rik (NM_176976.2,2735-2753).
cctggctcatgcaacaact

SEQ ID NO: 791742 - DNA, 19 bp, Mus musculus
  siRNA target sequence for 5830418K08Rik (NM_176976.2,2756-2774).
gggatctgaacagtctttt

SEQ ID NO: 791743 - DNA, 19 bp, Mus musculus
  siRNA target sequence for 5830418K08Rik (NM_176976.2,2758-2776).
gatctgaacagtcttttca

SEQ ID NO: 791744 - DNA, 19 bp, Mus musculus
  siRNA target sequence for 5830418K08Rik (NM_176976.2,2778-2796).
cagcttcgaccagaattct

SEQ ID NO: 791745 - DNA, 19 bp, Mus musculus
  siRNA target sequence for 5830418K08Rik (NM_176976.2,2856-2874).
ccttcccaacgcatggaaa

SEQ ID NO: 791746 - DNA, 19 bp, Mus musculus
  siRNA target sequence for 5830418K08Rik (NM_176976.2,2857-2875).
cttcccaacgcatggaaaa

SEQ ID NO: 791747 - DNA, 19 bp, Mus musculus
  siRNA target sequence for 5830418K08Rik (NM_176976.2,2860-2878).
cccaacgcatggaaaacca

SEQ ID NO: 791748 - DNA, 19 bp, Mus musculus
  siRNA target sequence for 5830418K08Rik (NM_176976.2,2866-2884).
gcatggaaaaccagaacta

SEQ ID NO: 791749 - DNA, 19 bp, Mus musculus
  siRNA target sequence for 5830418K08Rik (NM_176976.2,2870-2888).
ggaaaaccagaactattct

SEQ ID NO: 791750 - DNA, 19 bp, Mus musculus
  siRNA target sequence for 5830418K08Rik (NM_176976.2,2952-2970).
gcttgcagttcatctgata

SEQ ID NO: 791751 - DNA, 19 bp, Mus musculus
  siRNA target sequence for 5830418K08Rik (NM_176976.2,3028-3046).
gtgagtgctcagtaaaact

SEQ ID NO: 791752 - DNA, 19 bp, Mus musculus
  siRNA target sequence for 5830418K08Rik (NM_176976.2,3034-3052).
gctcagtaaaactgttaga

SEQ ID NO: 791753 - DNA, 19 bp, Mus musculus
  siRNA target sequence for 5830418K08Rik (NM_176976.2,3088-3106).
caagaagggcagttacaat

SEQ ID NO: 791754 - DNA, 19 bp, Mus musculus
  siRNA target sequence for 5830418K08Rik (NM_176976.2,3186-3204).
gttcaggggtctaatccat

SEQ ID NO: 791755 - DNA, 19 bp, Mus musculus
  siRNA target sequence for 5830418K08Rik (NM_176976.2,3191-3209).
ggggtctaatccattgagt

SEQ ID NO: 791756 - DNA, 19 bp, Mus musculus
  siRNA target sequence for 5830418K08Rik (NM_176976.2,3192-3210).
gggtctaatccattgagta

SEQ ID NO: 791757 - DNA, 19 bp, Mus musculus
  siRNA target sequence for 5830418K08Rik (NM_176976.2,3193-3211).
ggtctaatccattgagtat

SEQ ID NO: 791758 - DNA, 19 bp, Mus musculus
  siRNA target sequence for 5830418K08Rik (NM_176976.2,3194-3212).
gtctaatccattgagtatt

SEQ ID NO: 791759 - DNA, 19 bp, Mus musculus
  siRNA target sequence for 5830418K08Rik (NM_176976.2,3196-3214).
ctaatccattgagtattca

SEQ ID NO: 791760 - DNA, 19 bp, Mus musculus
  siRNA target sequence for 5830418K08Rik (NM_176976.2,3224-3242).
gccaattcagaacttcatt

SEQ ID NO: 791761 - DNA, 19 bp, Mus musculus
  siRNA target sequence for 5830418K08Rik (NM_176976.2,3346-3364).
cggatactggctatggtat

SEQ ID NO: 791762 - DNA, 19 bp, Mus musculus
  siRNA target sequence for 5830418K08Rik (NM_176976.2,3348-3366).
gatactggctatggtataa

SEQ ID NO: 791763 - DNA, 19 bp, Mus musculus
  siRNA target sequence for 5830418K08Rik (NM_176976.2,3352-3370).
ctggctatggtataatgga

SEQ ID NO: 791764 - DNA, 19 bp, Mus musculus
  siRNA target sequence for 5830418K08Rik (NM_176976.2,3385-3403).
ctctagtgagtaatagtga

SEQ ID NO: 791765 - DNA, 19 bp, Mus musculus
  siRNA target sequence for 5830418K08Rik (NM_176976.2,3494-3512).
gcctacatcttcaatggaa

SEQ ID NO: 791766 - DNA, 19 bp, Mus musculus
  siRNA target sequence for 5830418K08Rik (NM_176976.2,3579-3597).
ccccttatcagcttgagaa

SEQ ID NO: 791767 - DNA, 19 bp, Mus musculus
  siRNA target sequence for 5830418K08Rik (NM_176976.2,3590-3608).
cttgagaacattatcaact

SEQ ID NO: 791768 - DNA, 19 bp, Mus musculus
  siRNA target sequence for 5830418K08Rik (NM_176976.2,3593-3611).
gagaacattatcaactcat

SEQ ID NO: 791769 - DNA, 19 bp, Mus musculus
  siRNA target sequence for 5830418K08Rik (NM_176976.2,3625-3643).
ccacgcataatttttctca

SEQ ID NO: 791770 - DNA, 19 bp, Mus musculus
  siRNA target sequence for 5830418K08Rik (NM_176976.2,3626-3644).
cacgcataatttttctcaa

SEQ ID NO: 791771 - DNA, 19 bp, Mus musculus
  siRNA target sequence for 5830418K08Rik (NM_176976.2,3628-3646).
cgcataatttttctcaaat

SEQ ID NO: 791772 - DNA, 19 bp, Mus musculus
  siRNA target sequence for 5930422O12Rik (NM_176978.2,453-471).
gcaaccatcaatctatttt

SEQ ID NO: 791773 - DNA, 19 bp, Mus musculus
  siRNA target sequence for 5930422O12Rik (NM_176978.2,491-509).
cttaacaagtgcacatttt

SEQ ID NO: 791774 - DNA, 19 bp, Mus musculus
  siRNA target sequence for 5930422O12Rik (NM_176978.2,527-545).
cagattcacgtaatgtata

SEQ ID NO: 791775 - DNA, 19 bp, Mus musculus
  siRNA target sequence for 5930422O12Rik (NM_176978.2,560-578).
cttttactcactgtgatta

SEQ ID NO: 791776 - DNA, 19 bp, Mus musculus
  siRNA target sequence for 5930422O12Rik (NM_176978.2,585-603).
gattcagccatatcatcat

SEQ ID NO: 791777 - DNA, 19 bp, Mus musculus
  siRNA target sequence for 5930422O12Rik (NM_176978.2,604-622).
gtgcaaaaatgagacaata

SEQ ID NO: 791778 - DNA, 19 bp, Mus musculus
  siRNA target sequence for 5930422O12Rik (NM_176978.2,698-716).
gtacctagggttgtttcta

SEQ ID NO: 791779 - DNA, 19 bp, Mus musculus
  siRNA target sequence for A630050E13Rik (NM_176982.2,1218-1236).
caataatttcaaaattcct

SEQ ID NO: 791780 - DNA, 19 bp, Mus musculus
  siRNA target sequence for A630050E13Rik (NM_176982.2,1281-1299).
gagtcaacgtaactttgtt

SEQ ID NO: 791781 - DNA, 19 bp, Mus musculus
  siRNA target sequence for A630050E13Rik (NM_176982.2,1283-1301).
gtcaacgtaactttgttga

SEQ ID NO: 791782 - DNA, 19 bp, Mus musculus
  siRNA target sequence for A630050E13Rik (NM_176982.2,1310-1328).
ccttggaagtcacttataa

SEQ ID NO: 791783 - DNA, 19 bp, Mus musculus
  siRNA target sequence for A630050E13Rik (NM_176982.2,1314-1332).
ggaagtcacttataaaatt

SEQ ID NO: 791784 - DNA, 19 bp, Mus musculus
  siRNA target sequence for A630050E13Rik (NM_176982.2,1341-1359).
gctagacattcagagttta

SEQ ID NO: 791785 - DNA, 19 bp, Mus musculus
  siRNA target sequence for A630050E13Rik (NM_176982.2,1374-1392).
gacatgcacaggttggaat

SEQ ID NO: 791786 - DNA, 19 bp, Mus musculus
  siRNA target sequence for A630050E13Rik (NM_176982.2,1384-1402).
ggttggaattgtgcaataa

SEQ ID NO: 791787 - DNA, 19 bp, Mus musculus
  siRNA target sequence for A630050E13Rik (NM_176982.2,1428-1446).
ccactgcttgaccataaga

SEQ ID NO: 791788 - DNA, 19 bp, Mus musculus
  siRNA target sequence for A630050E13Rik (NM_176982.2,1462-1480).
gaaatagacgatgatataa

SEQ ID NO: 791789 - DNA, 19 bp, Mus musculus
  siRNA target sequence for A630050E13Rik (NM_176982.2,1500-1518).
ggtaatactcctaagaaat

SEQ ID NO: 791790 - DNA, 19 bp, Mus musculus
  siRNA target sequence for A630050E13Rik (NM_176982.2,1625-1643).
cgtggggggaaattctaga

SEQ ID NO: 791791 - DNA, 19 bp, Mus musculus
  siRNA target sequence for D11Moh45 (NM_176983.2,1413-1431).
ccctcaaatgggtgactat

SEQ ID NO: 791792 - DNA, 19 bp, Mus musculus
  siRNA target sequence for D11Moh45 (NM_176983.2,1428-1446).
ctatggactgacaaaagaa

SEQ ID NO: 791793 - DNA, 19 bp, Mus musculus
  siRNA target sequence for D11Moh45 (NM_176983.2,1483-1501).
gagcgtgtgtttttcataa

SEQ ID NO: 791794 - DNA, 19 bp, Mus musculus
  siRNA target sequence for D11Moh45 (NM_176983.2,1510-1528).
gatgaatactacgagtata

SEQ ID NO: 791795 - DNA, 19 bp, Mus musculus
  siRNA target sequence for D11Moh45 (NM_176983.2,1543-1561).
ctcagtcctcacagtaaga

SEQ ID NO: 791796 - DNA, 19 bp, Mus musculus
  siRNA target sequence for D11Moh45 (NM_176983.2,1545-1563).
cagtcctcacagtaagatt

SEQ ID NO: 791797 - DNA, 19 bp, Mus musculus
  siRNA target sequence for D11Moh45 (NM_176983.2,1623-1641).
cttatgccacactaggttt

SEQ ID NO: 791798 - DNA, 19 bp, Mus musculus
  siRNA target sequence for D11Moh45 (NM_176983.2,1628-1646).
gccacactaggtttgtcat

SEQ ID NO: 791799 - DNA, 19 bp, Mus musculus
  siRNA target sequence for C230013L11Rik (NM_176985.2,470-488).
ctggggaacgtgagtgttt

SEQ ID NO: 791800 - DNA, 19 bp, Mus musculus
  siRNA target sequence for C230013L11Rik (NM_176985.2,472-490).
ggggaacgtgagtgtttat

SEQ ID NO: 791801 - DNA, 19 bp, Mus musculus
  siRNA target sequence for 4732471D19Rik (NM_176987.2,311-329).
caatctcgacagtctgaat

SEQ ID NO: 791802 - DNA, 19 bp, Mus musculus
  siRNA target sequence for 4732471D19Rik (NM_176987.2,322-340).
gtctgaatttaaattagat

SEQ ID NO: 791803 - DNA, 19 bp, Mus musculus
  siRNA target sequence for 4732471D19Rik (NM_176987.2,440-458).
ccacaagttggggtataca

SEQ ID NO: 791804 - DNA, 19 bp, Mus musculus
  siRNA target sequence for 4732471D19Rik (NM_176987.2,443-461).
caagttggggtatacaata

SEQ ID NO: 791805 - DNA, 19 bp, Mus musculus
  siRNA target sequence for 4732471D19Rik (NM_176987.2,473-491).
catagactgaaatacttct

SEQ ID NO: 791806 - DNA, 19 bp, Mus musculus
  siRNA target sequence for 4732471D19Rik (NM_176987.2,490-508).
cttacggcctccagtacat

SEQ ID NO: 791807 - DNA, 19 bp, Mus musculus
  siRNA target sequence for 4732471D19Rik (NM_176987.2,523-541).
gacattaataccagataaa

SEQ ID NO: 791808 - DNA, 19 bp, Mus musculus
  siRNA target sequence for 4732471D19Rik (NM_176987.2,525-543).
cattaataccagataaaga

SEQ ID NO: 791809 - DNA, 19 bp, Mus musculus
  siRNA target sequence for 4732471D19Rik (NM_176987.2,556-574).
caagggtcagaaattagaa

SEQ ID NO: 791810 - DNA, 19 bp, Mus musculus
  siRNA target sequence for 4732471D19Rik (NM_176987.2,581-599).
cctcatcgaagactaagaa

SEQ ID NO: 791811 - DNA, 19 bp, Mus musculus
  siRNA target sequence for 4732471D19Rik (NM_176987.2,582-600).
ctcatcgaagactaagaat

SEQ ID NO: 791812 - DNA, 19 bp, Mus musculus
  siRNA target sequence for 4732471D19Rik (NM_176987.2,601-619).
ggtgacaaacactattgaa

SEQ ID NO: 791813 - DNA, 19 bp, Mus musculus
  siRNA target sequence for 4732471D19Rik (NM_176987.2,634-652).
ggggactgtgcagttttta

SEQ ID NO: 791814 - DNA, 19 bp, Mus musculus
  siRNA target sequence for 4732471D19Rik (NM_176987.2,635-653).
gggactgtgcagtttttaa

SEQ ID NO: 791815 - DNA, 19 bp, Mus musculus
  siRNA target sequence for 4732471D19Rik (NM_176987.2,699-717).
ctcacatcgtccagaaaat

SEQ ID NO: 791816 - DNA, 19 bp, Mus musculus
  siRNA target sequence for 4732471D19Rik (NM_176987.2,759-777).
cctacatgcttctcatgaa

SEQ ID NO: 791817 - DNA, 19 bp, Mus musculus
  siRNA target sequence for 4732471D19Rik (NM_176987.2,772-790).
catgaaaatccaacagtat

SEQ ID NO: 791818 - DNA, 19 bp, Mus musculus
  siRNA target sequence for 4732471D19Rik (NM_176987.2,883-901).
gcctggacgagttctcttt

SEQ ID NO: 791819 - DNA, 19 bp, Mus musculus
  siRNA target sequence for 4732471D19Rik (NM_176987.2,885-903).
ctggacgagttctctttct

SEQ ID NO: 791820 - DNA, 19 bp, Mus musculus
  siRNA target sequence for 4732471D19Rik (NM_176987.2,964-982).
gcacctacagcaatccatt

SEQ ID NO: 791821 - DNA, 19 bp, Mus musculus
  siRNA target sequence for 4732471D19Rik (NM_176987.2,968-986).
ctacagcaatccattgcaa

SEQ ID NO: 791822 - DNA, 19 bp, Mus musculus
  siRNA target sequence for 4732471D19Rik (NM_176987.2,1016-1034).
cacaatgtcagagatgtta

SEQ ID NO: 791823 - DNA, 19 bp, Mus musculus
  siRNA target sequence for 4732471D19Rik (NM_176987.2,1046-1064).
gtcaaagcagtgactgaaa

SEQ ID NO: 791824 - DNA, 19 bp, Mus musculus
  siRNA target sequence for 4732471D19Rik (NM_176987.2,1057-1075).
gactgaaaatgaattaact

SEQ ID NO: 791825 - DNA, 19 bp, Mus musculus
  siRNA target sequence for 4732471D19Rik (NM_176987.2,1165-1183).
gaacaccaatcaactgatt

SEQ ID NO: 791826 - DNA, 19 bp, Mus musculus
  siRNA target sequence for 4732471D19Rik (NM_176987.2,1236-1254).
caacctgcagctccaataa

SEQ ID NO: 791827 - DNA, 19 bp, Mus musculus
  siRNA target sequence for 4732471D19Rik (NM_176987.2,1239-1257).
cctgcagctccaataaaat

SEQ ID NO: 791828 - DNA, 19 bp, Mus musculus
  siRNA target sequence for 4732471D19Rik (NM_176987.2,1240-1258).
ctgcagctccaataaaata

SEQ ID NO: 791829 - DNA, 19 bp, Mus musculus
  siRNA target sequence for 4732471D19Rik (NM_176987.2,1336-1354).
ccaccttctgcgatgcaaa

SEQ ID NO: 791830 - DNA, 19 bp, Mus musculus
  siRNA target sequence for 4732471D19Rik (NM_176987.2,1450-1468).
cctgctcaagtgtcaatca

SEQ ID NO: 791831 - DNA, 19 bp, Mus musculus
  siRNA target sequence for 4732471D19Rik (NM_176987.2,1570-1588).
gattgatcggaaagactta

SEQ ID NO: 791832 - DNA, 19 bp, Mus musculus
  siRNA target sequence for 4732471D19Rik (NM_176987.2,1574-1592).
gatcggaaagacttaatca

SEQ ID NO: 791833 - DNA, 19 bp, Mus musculus
  siRNA target sequence for 4732471D19Rik (NM_176987.2,1577-1595).
cggaaagacttaatcatca

SEQ ID NO: 791834 - DNA, 19 bp, Mus musculus
  siRNA target sequence for 4732471D19Rik (NM_176987.2,1578-1596).
ggaaagacttaatcatcaa

SEQ ID NO: 791835 - DNA, 19 bp, Mus musculus
  siRNA target sequence for 4732471D19Rik (NM_176987.2,1585-1603).
cttaatcatcaaaagaatt

SEQ ID NO: 791836 - DNA, 19 bp, Mus musculus
  siRNA target sequence for 4732471D19Rik (NM_176987.2,1687-1705).
catattgggagaaccttta

SEQ ID NO: 791837 - DNA, 19 bp, Mus musculus
  siRNA target sequence for 4732471D19Rik (NM_176987.2,1721-1739).
gacaaagtgcatttgttga

SEQ ID NO: 791838 - DNA, 19 bp, Mus musculus
  siRNA target sequence for D130005J21Rik (NM_176989.2,597-615).
cccttctggagcagttcat

SEQ ID NO: 791839 - DNA, 19 bp, Mus musculus
  siRNA target sequence for D130005J21Rik (NM_176989.2,629-647).
gtcacttgggttaaaacgt

SEQ ID NO: 791840 - DNA, 19 bp, Mus musculus
  siRNA target sequence for D130005J21Rik (NM_176989.2,631-649).
cacttgggttaaaacgttt

SEQ ID NO: 791841 - DNA, 19 bp, Mus musculus
  siRNA target sequence for D130005J21Rik (NM_176989.2,672-690).
ggactaacctggatgagta

SEQ ID NO: 791842 - DNA, 19 bp, Mus musculus
  siRNA target sequence for D130005J21Rik (NM_176989.2,673-691).
gactaacctggatgagtat

SEQ ID NO: 791843 - DNA, 19 bp, Mus musculus
  siRNA target sequence for D130005J21Rik (NM_176989.2,675-693).
ctaacctggatgagtatgt

SEQ ID NO: 791844 - DNA, 19 bp, Mus musculus
  siRNA target sequence for D130005J21Rik (NM_176989.2,701-719).
gtggatggggtattcttga

SEQ ID NO: 791845 - DNA, 19 bp, Mus musculus
  siRNA target sequence for D130005J21Rik (NM_176989.2,722-740).
caggtcatgctccaaatta

SEQ ID NO: 791846 - DNA, 19 bp, Mus musculus
  siRNA target sequence for D130005J21Rik (NM_176989.2,724-742).
ggtcatgctccaaattaat

SEQ ID NO: 791847 - DNA, 19 bp, Mus musculus
  siRNA target sequence for D130005J21Rik (NM_176989.2,750-768).
cggagagtcaacgagtaaa

SEQ ID NO: 791848 - DNA, 19 bp, Mus musculus
  siRNA target sequence for D130005J21Rik (NM_176989.2,794-812).
cttagaattcacaatctgt

SEQ ID NO: 791849 - DNA, 19 bp, Mus musculus
  siRNA target sequence for D130005J21Rik (NM_176989.2,820-838).
ggtgaaacagataaaattt

SEQ ID NO: 791850 - DNA, 19 bp, Mus musculus
  siRNA target sequence for D130005J21Rik (NM_176989.2,821-839).
gtgaaacagataaaatttt

SEQ ID NO: 791851 - DNA, 19 bp, Mus musculus
  siRNA target sequence for D130005J21Rik (NM_176989.2,850-868).
gactttgcagcagttgatt

SEQ ID NO: 791852 - DNA, 19 bp, Mus musculus
  siRNA target sequence for D130005J21Rik (NM_176989.2,874-892).
gccattgccagatatctta

SEQ ID NO: 791853 - DNA, 19 bp, Mus musculus
  siRNA target sequence for D130005J21Rik (NM_176989.2,875-893).
ccattgccagatatcttaa

SEQ ID NO: 791854 - DNA, 19 bp, Mus musculus
  siRNA target sequence for D130005J21Rik (NM_176989.2,889-907).
cttaatcattggcaaaaat

SEQ ID NO: 791855 - DNA, 19 bp, Mus musculus
  siRNA target sequence for A330035P11Rik (NM_176990.2,997-1015).
gggatgatttacaaatagt

SEQ ID NO: 791856 - DNA, 19 bp, Mus musculus
  siRNA target sequence for A330035P11Rik (NM_176990.2,1042-1060).
gagagcttagactaaggaa

SEQ ID NO: 791857 - DNA, 19 bp, Mus musculus
  siRNA target sequence for A730020M07Rik (NM_176992.2,114-132).
ccacgtgcgagttaagaca

SEQ ID NO: 791858 - DNA, 19 bp, Mus musculus
  siRNA target sequence for A730020M07Rik (NM_176992.2,138-156).
catccccataggagaagat

SEQ ID NO: 791859 - DNA, 19 bp, Mus musculus
  siRNA target sequence for A730020M07Rik (NM_176992.2,168-186).
cgatgtgctgtttatgtct

SEQ ID NO: 791860 - DNA, 19 bp, Mus musculus
  siRNA target sequence for A730020M07Rik (NM_176992.2,197-215).
gacactctgctccacaaaa

SEQ ID NO: 791861 - DNA, 19 bp, Mus musculus
  siRNA target sequence for A730020M07Rik (NM_176992.2,255-273).
caaggcgaggactattcga

SEQ ID NO: 791862 - DNA, 19 bp, Mus musculus
  siRNA target sequence for A730020M07Rik (NM_176992.2,266-284).
ctattcgacctggcttttt

SEQ ID NO: 791863 - DNA, 19 bp, Mus musculus
  siRNA target sequence for A530065I17Rik (NM_176993.2,146-164).
cctctccttggagataagt

SEQ ID NO: 791864 - DNA, 19 bp, Mus musculus
  siRNA target sequence for C230078M08Rik (NM_176995.2,1437-1455).
ggagcaccccagccatttt

SEQ ID NO: 791865 - DNA, 19 bp, Mus musculus
  siRNA target sequence for C230078M08Rik (NM_176995.2,1441-1459).
caccccagccattttccaa

SEQ ID NO: 791866 - DNA, 19 bp, Mus musculus
  siRNA target sequence for C230078M08Rik (NM_176995.2,1446-1464).
cagccattttccaagctta

SEQ ID NO: 791867 - DNA, 19 bp, Mus musculus
  siRNA target sequence for C230078M08Rik (NM_176995.2,1475-1493).
gtgccctgtgaacttcaaa

SEQ ID NO: 791868 - DNA, 19 bp, Mus musculus
  siRNA target sequence for C230078M08Rik (NM_176995.2,1490-1508).
caaaagccaagattaggat

SEQ ID NO: 791869 - DNA, 19 bp, Mus musculus
  siRNA target sequence for C230078M08Rik (NM_176995.2,1519-1537).
gggcctccccctatacata

SEQ ID NO: 791870 - DNA, 19 bp, Mus musculus
  siRNA target sequence for C230078M08Rik (NM_176995.2,1641-1659).
gcaggctgcgacacacatt

SEQ ID NO: 791871 - DNA, 19 bp, Mus musculus
  siRNA target sequence for C230078M08Rik (NM_176995.2,1642-1660).
caggctgcgacacacattt

SEQ ID NO: 791872 - DNA, 19 bp, Mus musculus
  siRNA target sequence for C230078M08Rik (NM_176995.2,1645-1663).
gctgcgacacacattttca

SEQ ID NO: 791873 - DNA, 19 bp, Mus musculus
  siRNA target sequence for D130020L05Rik (NM_176997.2,820-838).
gctcctcccgcttaaagca

SEQ ID NO: 791874 - DNA, 19 bp, Mus musculus
  siRNA target sequence for A830027B17Rik (NM_176998.3,461-479).
gcctcatggtcgcttattt

SEQ ID NO: 791875 - DNA, 19 bp, Mus musculus
  siRNA target sequence for A830027B17Rik (NM_176998.3,465-483).
catggtcgcttatttggaa

SEQ ID NO: 791876 - DNA, 19 bp, Mus musculus
  siRNA target sequence for A830027B17Rik (NM_176998.3,469-487).
gtcgcttatttggaaatgt

SEQ ID NO: 791877 - DNA, 19 bp, Mus musculus
  siRNA target sequence for A830027B17Rik (NM_176998.3,471-489).
cgcttatttggaaatgtga

SEQ ID NO: 791878 - DNA, 19 bp, Mus musculus
  siRNA target sequence for A830027B17Rik (NM_176998.3,472-490).
gcttatttggaaatgtgat

SEQ ID NO: 791879 - DNA, 19 bp, Mus musculus
  siRNA target sequence for 9030605H24Rik (NM_176999.2,102-120).
gacttgctctcttgacttt

SEQ ID NO: 791880 - DNA, 19 bp, Mus musculus
  siRNA target sequence for 9030605H24Rik (NM_176999.2,159-177).
ctcccaatctccatcagaa

SEQ ID NO: 791881 - DNA, 19 bp, Mus musculus
  siRNA target sequence for 9030605H24Rik (NM_176999.2,227-245).
cagagcagcgggtcgtata

SEQ ID NO: 791882 - DNA, 19 bp, Mus musculus
  siRNA target sequence for 9030605H24Rik (NM_176999.2,301-319).
ggcaacagcatctgtacaa

SEQ ID NO: 791883 - DNA, 19 bp, Mus musculus
  siRNA target sequence for 9030605H24Rik (NM_176999.2,466-484).
gccactgtcctgttgatca

SEQ ID NO: 791884 - DNA, 19 bp, Mus musculus
  siRNA target sequence for 9030605H24Rik (NM_176999.2,508-526).
gacttcaagagatattgct

SEQ ID NO: 791885 - DNA, 19 bp, Mus musculus
  siRNA target sequence for 9030605H24Rik (NM_176999.2,540-558).
gaatagtgccagcattcaa

SEQ ID NO: 791886 - DNA, 19 bp, Mus musculus
  siRNA target sequence for 9030605H24Rik (NM_176999.2,580-598).
gattctccggctcttatat

SEQ ID NO: 791887 - DNA, 19 bp, Mus musculus
  siRNA target sequence for 9030605H24Rik (NM_176999.2,586-604).
ccggctcttatatttccat

SEQ ID NO: 791888 - DNA, 19 bp, Mus musculus
  siRNA target sequence for C130050O18Rik (NM_177000.2,228-246).
gcacagagcatcatttcta

SEQ ID NO: 791889 - DNA, 19 bp, Mus musculus
  siRNA target sequence for C130050O18Rik (NM_177000.2,247-265).
ggtgcacgcaggtgtacat

SEQ ID NO: 791890 - DNA, 19 bp, Mus musculus
  siRNA target sequence for C130050O18Rik (NM_177000.2,366-384).
ggcctcacagccactagta

SEQ ID NO: 791891 - DNA, 19 bp, Mus musculus
  siRNA target sequence for C130050O18Rik (NM_177000.2,367-385).
gcctcacagccactagtat

SEQ ID NO: 791892 - DNA, 19 bp, Mus musculus
  siRNA target sequence for C130050O18Rik (NM_177000.2,415-433).
ctgtccgacccgactacat

SEQ ID NO: 791893 - DNA, 19 bp, Mus musculus
  siRNA target sequence for C130050O18Rik (NM_177000.2,417-435).
gtccgacccgactacatgt

SEQ ID NO: 791894 - DNA, 19 bp, Mus musculus
  siRNA target sequence for C130050O18Rik (NM_177000.2,451-469).
gctgtggcgcactctcatt

SEQ ID NO: 791895 - DNA, 19 bp, Mus musculus
  siRNA target sequence for C130050O18Rik (NM_177000.2,456-474).
ggcgcactctcattcttct

SEQ ID NO: 791896 - DNA, 19 bp, Mus musculus
  siRNA target sequence for C130050O18Rik (NM_177000.2,689-707).
gactgcatggcccgaatat

SEQ ID NO: 791897 - DNA, 19 bp, Mus musculus
  siRNA target sequence for C130050O18Rik (NM_177000.2,693-711).
gcatggcccgaatatgaga

SEQ ID NO: 791898 - DNA, 19 bp, Mus musculus
  siRNA target sequence for C130050O18Rik (NM_177000.2,694-712).
catggcccgaatatgagat

SEQ ID NO: 791899 - DNA, 19 bp, Mus musculus
  siRNA target sequence for C130050O18Rik (NM_177000.2,794-812).
gcgagcagctccttctcaa

SEQ ID NO: 791900 - DNA, 19 bp, Mus musculus
  siRNA target sequence for C130050O18Rik (NM_177000.2,871-889).
gtagactcttcttcaatgt

SEQ ID NO: 791901 - DNA, 19 bp, Mus musculus
  siRNA target sequence for C130050O18Rik (NM_177000.2,934-952).
gctccccctgggatgaact

SEQ ID NO: 791902 - DNA, 19 bp, Mus musculus
  siRNA target sequence for 9130023H24Rik (NM_177001.2,672-690).
ggagaaccggacgtcaaaa

SEQ ID NO: 791903 - DNA, 19 bp, Mus musculus
  siRNA target sequence for 9130023H24Rik (NM_177001.2,673-691).
gagaaccggacgtcaaaat

SEQ ID NO: 791904 - DNA, 19 bp, Mus musculus
  siRNA target sequence for 9130023H24Rik (NM_177001.2,722-740).
gcgagaccgcgctacatga

SEQ ID NO: 791905 - DNA, 19 bp, Mus musculus
  siRNA target sequence for 9130023H24Rik (NM_177001.2,789-807).
gctggaccagcagtactta

SEQ ID NO: 791906 - DNA, 19 bp, Mus musculus
  siRNA target sequence for 9130023H24Rik (NM_177001.2,790-808).
ctggaccagcagtacttat

SEQ ID NO: 791907 - DNA, 19 bp, Mus musculus
  siRNA target sequence for 9130023H24Rik (NM_177001.2,793-811).
gaccagcagtacttatgta

SEQ ID NO: 791908 - DNA, 19 bp, Mus musculus
  siRNA target sequence for 9130023H24Rik (NM_177001.2,863-881).
cagtccccaaagctttcaa

SEQ ID NO: 791909 - DNA, 19 bp, Mus musculus
  siRNA target sequence for 9130023H24Rik (NM_177001.2,865-883).
gtccccaaagctttcaagt

SEQ ID NO: 791910 - DNA, 19 bp, Mus musculus
  siRNA target sequence for 9130023H24Rik (NM_177001.2,868-886).
cccaaagctttcaagtgta

SEQ ID NO: 791911 - DNA, 19 bp, Mus musculus
  siRNA target sequence for 9130023H24Rik (NM_177001.2,1001-1019).
cagatctggttaagcatta

SEQ ID NO: 791912 - DNA, 19 bp, Mus musculus
  siRNA target sequence for 9130023H24Rik (NM_177001.2,1071-1089).
cttcagcctcagctctaat

SEQ ID NO: 791913 - DNA, 19 bp, Mus musculus
  siRNA target sequence for 9130023H24Rik (NM_177001.2,1082-1100).
gctctaatctcactaaaca

SEQ ID NO: 791914 - DNA, 19 bp, Mus musculus
  siRNA target sequence for 9130023H24Rik (NM_177001.2,1163-1181).
gcagtgcagacctagcaaa

SEQ ID NO: 791915 - DNA, 19 bp, Mus musculus
  siRNA target sequence for 9130023H24Rik (NM_177001.2,1164-1182).
cagtgcagacctagcaaaa

SEQ ID NO: 791916 - DNA, 19 bp, Mus musculus
  siRNA target sequence for 9130023H24Rik (NM_177001.2,1166-1184).
gtgcagacctagcaaaaca

SEQ ID NO: 791917 - DNA, 19 bp, Mus musculus
  siRNA target sequence for 9130023H24Rik (NM_177001.2,1328-1346).
gcctgagctctaacctttt

SEQ ID NO: 791918 - DNA, 19 bp, Mus musculus
  siRNA target sequence for 9130023H24Rik (NM_177001.2,1609-1627).
cgcatccacttgagcaaat

SEQ ID NO: 791919 - DNA, 19 bp, Mus musculus
  siRNA target sequence for A430090L17Rik (NM_177004.2,474-492).
ccagcctaacaccgtttta

SEQ ID NO: 791920 - DNA, 19 bp, Mus musculus
  siRNA target sequence for A430090L17Rik (NM_177004.2,477-495).
gcctaacaccgttttacaa

SEQ ID NO: 791921 - DNA, 19 bp, Mus musculus
  siRNA target sequence for A430090L17Rik (NM_177004.2,479-497).
ctaacaccgttttacaaca

SEQ ID NO: 791922 - DNA, 19 bp, Mus musculus
  siRNA target sequence for A430090L17Rik (NM_177004.2,496-514).
catgtctggagtcctatta

SEQ ID NO: 791923 - DNA, 19 bp, Mus musculus
  siRNA target sequence for A430090L17Rik (NM_177004.2,499-517).
gtctggagtcctattatct

SEQ ID NO: 791924 - DNA, 19 bp, Mus musculus
  siRNA target sequence for A430090L17Rik (NM_177004.2,635-653).
gtgggatggggaatttgct

SEQ ID NO: 791925 - DNA, 19 bp, Mus musculus
  siRNA target sequence for A430090L17Rik (NM_177004.2,666-684).
gccaaggctccagttatga

SEQ ID NO: 791926 - DNA, 19 bp, Mus musculus
  siRNA target sequence for A430090L17Rik (NM_177004.2,769-787).
ccttcttatggctgaatca

SEQ ID NO: 791927 - DNA, 19 bp, Mus musculus
  siRNA target sequence for A430090L17Rik (NM_177004.2,807-825).
caggagccctaagtttaca

SEQ ID NO: 791928 - DNA, 19 bp, Mus musculus
  siRNA target sequence for A430090L17Rik (NM_177004.2,895-913).
gacagtcaactgttctctt

SEQ ID NO: 791929 - DNA, 19 bp, Mus musculus
  siRNA target sequence for A430090L17Rik (NM_177004.2,914-932).
ctagcacctgaagaacttt

SEQ ID NO: 791930 - DNA, 19 bp, Mus musculus
  siRNA target sequence for A430090L17Rik (NM_177004.2,926-944).
gaactttgtgtgttaaaga

SEQ ID NO: 791931 - DNA, 19 bp, Mus musculus
  siRNA target sequence for A430090L17Rik (NM_177004.2,995-1013).
gccagtgggttcagagatt

SEQ ID NO: 791932 - DNA, 19 bp, Mus musculus
  siRNA target sequence for A430090L17Rik (NM_177004.2,999-1017).
gtgggttcagagattcaca

SEQ ID NO: 791933 - DNA, 19 bp, Mus musculus
  siRNA target sequence for 5730455A04Rik (NM_177005.2,170-188).
cctgatcatggatgaaaat

SEQ ID NO: 791934 - DNA, 19 bp, Mus musculus
  siRNA target sequence for 5730455A04Rik (NM_177005.2,266-284).
ctttggtggaactgactta

SEQ ID NO: 791935 - DNA, 19 bp, Mus musculus
  siRNA target sequence for 5730455A04Rik (NM_177005.2,271-289).
gtggaactgacttaaatga

SEQ ID NO: 791936 - DNA, 19 bp, Mus musculus
  siRNA target sequence for 5730455A04Rik (NM_177005.2,314-332).
ggaagtcatggggaaagtt

SEQ ID NO: 791937 - DNA, 19 bp, Mus musculus
  siRNA target sequence for 5730455A04Rik (NM_177005.2,358-376).
ctttcaccgaggcaatgaa

SEQ ID NO: 791938 - DNA, 19 bp, Mus musculus
  siRNA target sequence for 5730455A04Rik (NM_177005.2,402-420).
catgcaactgggaagatct

SEQ ID NO: 791939 - DNA, 19 bp, Mus musculus
  siRNA target sequence for D430033A06Rik (NM_177007.2,1118-1136).
cttcccaattcagcttttt

SEQ ID NO: 791940 - DNA, 19 bp, Mus musculus
  siRNA target sequence for D430033A06Rik (NM_177007.2,1180-1198).
cctccttgtaattttgaga

SEQ ID NO: 791941 - DNA, 19 bp, Mus musculus
  siRNA target sequence for D430033A06Rik (NM_177007.2,1236-1254).
ctcaaagatttctaaagaa

SEQ ID NO: 791942 - DNA, 19 bp, Mus musculus
  siRNA target sequence for D430033A06Rik (NM_177007.2,1306-1324).
gatagtcaccactcaaatt

SEQ ID NO: 791943 - DNA, 19 bp, Mus musculus
  siRNA target sequence for D430033A06Rik (NM_177007.2,1310-1328).
gtcaccactcaaattagct

SEQ ID NO: 791944 - DNA, 19 bp, Mus musculus
  siRNA target sequence for D430033A06Rik (NM_177007.2,1367-1385).
gggtacaatatccttaagt

SEQ ID NO: 791945 - DNA, 19 bp, Mus musculus
  siRNA target sequence for D430033A06Rik (NM_177007.2,1368-1386).
ggtacaatatccttaagta

SEQ ID NO: 791946 - DNA, 19 bp, Mus musculus
  siRNA target sequence for 4932435O22Rik (NM_177008.2,1955-1973).
gtggttccatcacaatcaa

SEQ ID NO: 791947 - DNA, 19 bp, Mus musculus
  siRNA target sequence for 4932435O22Rik (NM_177008.2,1958-1976).
gttccatcacaatcaaaga

SEQ ID NO: 791948 - DNA, 19 bp, Mus musculus
  siRNA target sequence for 4932435O22Rik (NM_177008.2,1979-1997).
caaaggtccaaaaaataga

SEQ ID NO: 791949 - DNA, 19 bp, Mus musculus
  siRNA target sequence for 4932435O22Rik (NM_177008.2,2093-2111).
gtgtctgccacccagaatt

SEQ ID NO: 791950 - DNA, 19 bp, Mus musculus
  siRNA target sequence for 4932435O22Rik (NM_177008.2,2107-2125).
gaattctatacccagttaa

SEQ ID NO: 791951 - DNA, 19 bp, Mus musculus
  siRNA target sequence for 4932435O22Rik (NM_177008.2,2189-2207).
gttcttgcagagtgcattt

SEQ ID NO: 791952 - DNA, 19 bp, Mus musculus
  siRNA target sequence for 9330154K18Rik (NM_177011.2,459-477).
gccgaagtcacagttttca

SEQ ID NO: 791953 - DNA, 19 bp, Mus musculus
  siRNA target sequence for 9330154K18Rik (NM_177011.2,524-542).
catctttagagtttgaagt

SEQ ID NO: 791954 - DNA, 19 bp, Mus musculus
  siRNA target sequence for 9330154K18Rik (NM_177011.2,691-709).
ggtgcgaacgcccttagaa

SEQ ID NO: 791955 - DNA, 19 bp, Mus musculus
  siRNA target sequence for 9330154K18Rik (NM_177011.2,692-710).
gtgcgaacgcccttagaaa

SEQ ID NO: 791956 - DNA, 19 bp, Mus musculus
  siRNA target sequence for 9330154K18Rik (NM_177011.2,694-712).
gcgaacgcccttagaaagt

SEQ ID NO: 791957 - DNA, 19 bp, Mus musculus
  siRNA target sequence for 9330154K18Rik (NM_177011.2,695-713).
cgaacgcccttagaaagtt

SEQ ID NO: 791958 - DNA, 19 bp, Mus musculus
  siRNA target sequence for 5031434C07Rik (NM_177012.1,841-859).
gaagggagtggcctttttt

SEQ ID NO: 791959 - DNA, 19 bp, Mus musculus
  siRNA target sequence for 5031434C07Rik (NM_177012.1,883-901).
catccacccccatgttcta

SEQ ID NO: 791960 - DNA, 19 bp, Mus musculus
  siRNA target sequence for 5031434C07Rik (NM_177012.1,890-908).
ccccatgttctattttcct

SEQ ID NO: 791961 - DNA, 19 bp, Mus musculus
  siRNA target sequence for 5031434C07Rik (NM_177012.1,980-998).
cgtccgcagctttctctta

SEQ ID NO: 791962 - DNA, 19 bp, Mus musculus
  siRNA target sequence for 5031434C07Rik (NM_177012.1,983-1001).
ccgcagctttctcttactt

SEQ ID NO: 791963 - DNA, 19 bp, Mus musculus
  siRNA target sequence for 6332401O19Rik (NM_177013.2,500-518).
ggatgcgcctctacttcta

SEQ ID NO: 791964 - DNA, 19 bp, Mus musculus
  siRNA target sequence for 6332401O19Rik (NM_177013.2,685-703).
cagcgccttcctcttcaat

SEQ ID NO: 791965 - DNA, 19 bp, Mus musculus
  siRNA target sequence for 6332401O19Rik (NM_177013.2,867-885).
ctgaagcgcttcttgtgtt

SEQ ID NO: 791966 - DNA, 19 bp, Mus musculus
  siRNA target sequence for 6332401O19Rik (NM_177013.2,940-958).
cgggacgcccagatccttt

SEQ ID NO: 791967 - DNA, 19 bp, Mus musculus
  siRNA target sequence for 6332401O19Rik (NM_177013.2,1047-1065).
ccttttcttcggaatgcat

SEQ ID NO: 791968 - DNA, 19 bp, Mus musculus
  siRNA target sequence for 6332401O19Rik (NM_177013.2,1236-1254).
gaagcgggtgcccatctat

SEQ ID NO: 791969 - DNA, 19 bp, Mus musculus
  siRNA target sequence for A530020G20Rik (NM_177014.2,1362-1380).
gcagtgtttgcgtgacaat

SEQ ID NO: 791970 - DNA, 19 bp, Mus musculus
  siRNA target sequence for A530020G20Rik (NM_177014.2,1367-1385).
gtttgcgtgacaatcacat

SEQ ID NO: 791971 - DNA, 19 bp, Mus musculus
  siRNA target sequence for A530020G20Rik (NM_177014.2,1472-1490).
ctgcaccagtctcttatat

SEQ ID NO: 791972 - DNA, 19 bp, Mus musculus
  siRNA target sequence for A530020G20Rik (NM_177014.2,1474-1492).
gcaccagtctcttatatgt

SEQ ID NO: 791973 - DNA, 19 bp, Mus musculus
  siRNA target sequence for A530020G20Rik (NM_177014.2,1491-1509).
gtctcttactcaagtcttt

SEQ ID NO: 791974 - DNA, 19 bp, Mus musculus
  siRNA target sequence for E130010M05Rik (NM_177015.2,926-944).
ctacaaaccacaaattgaa

SEQ ID NO: 791975 - DNA, 19 bp, Mus musculus
  siRNA target sequence for E130010M05Rik (NM_177015.2,1010-1028).
ccattttaatggaaaggaa

SEQ ID NO: 791976 - DNA, 19 bp, Mus musculus
  siRNA target sequence for E130010M05Rik (NM_177015.2,1057-1075).
catgtcagagctcactttt

SEQ ID NO: 791977 - DNA, 19 bp, Mus musculus
  siRNA target sequence for E130010M05Rik (NM_177015.2,1152-1170).
cgggctaacagcatttact

SEQ ID NO: 791978 - DNA, 19 bp, Mus musculus
  siRNA target sequence for 9130214H05Rik (NM_177016.2,127-145).
ggagcagacctgaaagcaa

SEQ ID NO: 791979 - DNA, 19 bp, Mus musculus
  siRNA target sequence for 9130214H05Rik (NM_177016.2,343-361).
gaaagacctcccactaact

SEQ ID NO: 791980 - DNA, 19 bp, Mus musculus
  siRNA target sequence for 9130214H05Rik (NM_177016.2,379-397).
gaaacactgcaggaatcta

SEQ ID NO: 791981 - DNA, 19 bp, Mus musculus
  siRNA target sequence for 9130214H05Rik (NM_177016.2,493-511).
gctatgtggctggagtatt

SEQ ID NO: 791982 - DNA, 19 bp, Mus musculus
  siRNA target sequence for E030011O05Rik (NM_177020.2,270-288).
ggacgaatgcggttggtaa

SEQ ID NO: 791983 - DNA, 19 bp, Mus musculus
  siRNA target sequence for E030011O05Rik (NM_177020.2,335-353).
gcacctccgagtaagtgaa

SEQ ID NO: 791984 - DNA, 19 bp, Mus musculus
  siRNA target sequence for E030011O05Rik (NM_177020.2,456-474).
gcctttgggactctttcta

SEQ ID NO: 791985 - DNA, 19 bp, Mus musculus
  siRNA target sequence for E030011O05Rik (NM_177020.2,457-475).
cctttgggactctttctaa

SEQ ID NO: 791986 - DNA, 19 bp, Mus musculus
  siRNA target sequence for Cobll1 (NM_177025.3,371-389).
caagacaatatgatagata

SEQ ID NO: 791987 - DNA, 19 bp, Mus musculus
  siRNA target sequence for Cobll1 (NM_177025.3,419-437).
ggagatatcctcaagtcta

SEQ ID NO: 791988 - DNA, 19 bp, Mus musculus
  siRNA target sequence for Cobll1 (NM_177025.3,422-440).
gatatcctcaagtctacta

SEQ ID NO: 791989 - DNA, 19 bp, Mus musculus
  siRNA target sequence for Cobll1 (NM_177025.3,427-445).
cctcaagtctactactgtt

SEQ ID NO: 791990 - DNA, 19 bp, Mus musculus
  siRNA target sequence for Cobll1 (NM_177025.3,484-502).
ctgtgctcagtatcactta

SEQ ID NO: 791991 - DNA, 19 bp, Mus musculus
  siRNA target sequence for Cobll1 (NM_177025.3,486-504).
gtgctcagtatcacttaaa

SEQ ID NO: 791992 - DNA, 19 bp, Mus musculus
  siRNA target sequence for Cobll1 (NM_177025.3,507-525).
cgtcaagtcacacaattga

SEQ ID NO: 791993 - DNA, 19 bp, Mus musculus
  siRNA target sequence for Cobll1 (NM_177025.3,508-526).
gtcaagtcacacaattgat

SEQ ID NO: 791994 - DNA, 19 bp, Mus musculus
  siRNA target sequence for Cobll1 (NM_177025.3,513-531).
gtcacacaattgatttgct

SEQ ID NO: 791995 - DNA, 19 bp, Mus musculus
  siRNA target sequence for Cobll1 (NM_177025.3,564-582).
caaacacaccaataggaat

SEQ ID NO: 791996 - DNA, 19 bp, Mus musculus
  siRNA target sequence for Cobll1 (NM_177025.3,590-608).
gtagagaaggtaattttaa

SEQ ID NO: 791997 - DNA, 19 bp, Mus musculus
  siRNA target sequence for Cobll1 (NM_177025.3,662-680).
gtgagagtagtgatcaact

SEQ ID NO: 791998 - DNA, 19 bp, Mus musculus
  siRNA target sequence for Cobll1 (NM_177025.3,666-684).
gagtagtgatcaactttaa

SEQ ID NO: 791999 - DNA, 19 bp, Mus musculus
  siRNA target sequence for Cobll1 (NM_177025.3,673-691).
gatcaactttaagaaaaca

SEQ ID NO: 792000 - DNA, 19 bp, Mus musculus
  siRNA target sequence for Cobll1 (NM_177025.3,697-715).
gaccatagtgagagttagt

SEQ ID NO: 792001 - DNA, 19 bp, Mus musculus
  siRNA target sequence for Cobll1 (NM_177025.3,718-736).
ccacgcaccccttcaagat

SEQ ID NO: 792002 - DNA, 19 bp, Mus musculus
  siRNA target sequence for Cobll1 (NM_177025.3,745-763).
catcatatgcagtaaatgt

SEQ ID NO: 792003 - DNA, 19 bp, Mus musculus
  siRNA target sequence for Cobll1 (NM_177025.3,753-771).
gcagtaaatgtgagtttga

SEQ ID NO: 792004 - DNA, 19 bp, Mus musculus
  siRNA target sequence for Cobll1 (NM_177025.3,783-801).
ccgtgctgttgaaggatta

SEQ ID NO: 792005 - DNA, 19 bp, Mus musculus
  siRNA target sequence for Cobll1 (NM_177025.3,812-830).
gagcccctcgacttgacaa

SEQ ID NO: 792006 - DNA, 19 bp, Mus musculus
  siRNA target sequence for Cobll1 (NM_177025.3,815-833).
cccctcgacttgacaaaat

SEQ ID NO: 792007 - DNA, 19 bp, Mus musculus
  siRNA target sequence for Cobll1 (NM_177025.3,844-862).
cttgggactaagagagtta

SEQ ID NO: 792008 - DNA, 19 bp, Mus musculus
  siRNA target sequence for Cobll1 (NM_177025.3,900-918).
cacacaacccggacattgt

SEQ ID NO: 792009 - DNA, 19 bp, Mus musculus
  siRNA target sequence for Cobll1 (NM_177025.3,902-920).
cacaacccggacattgtga

SEQ ID NO: 792010 - DNA, 19 bp, Mus musculus
  siRNA target sequence for Cobll1 (NM_177025.3,1014-1032).
gcaagcatcgtccatcttt

SEQ ID NO: 792011 - DNA, 19 bp, Mus musculus
  siRNA target sequence for Cobll1 (NM_177025.3,1048-1066).
catttccaaaccgtacatt

SEQ ID NO: 792012 - DNA, 19 bp, Mus musculus
  siRNA target sequence for Cobll1 (NM_177025.3,1053-1071).
ccaaaccgtacatttccaa

SEQ ID NO: 792013 - DNA, 19 bp, Mus musculus
  siRNA target sequence for Cobll1 (NM_177025.3,1054-1072).
caaaccgtacatttccaat

SEQ ID NO: 792014 - DNA, 19 bp, Mus musculus
  siRNA target sequence for Cobll1 (NM_177025.3,1188-1206).
gtgtggacgacacagataa

SEQ ID NO: 792015 - DNA, 19 bp, Mus musculus
  siRNA target sequence for Cobll1 (NM_177025.3,1190-1208).
gtggacgacacagataaga

SEQ ID NO: 792016 - DNA, 19 bp, Mus musculus
  siRNA target sequence for Cobll1 (NM_177025.3,1192-1210).
ggacgacacagataagagt

SEQ ID NO: 792017 - DNA, 19 bp, Mus musculus
  siRNA target sequence for Cobll1 (NM_177025.3,1258-1276).
cacgtcgataggaacttca

SEQ ID NO: 792018 - DNA, 19 bp, Mus musculus
  siRNA target sequence for Cobll1 (NM_177025.3,1261-1279).
gtcgataggaacttcatct

SEQ ID NO: 792019 - DNA, 19 bp, Mus musculus
  siRNA target sequence for Cobll1 (NM_177025.3,1304-1322).
cctgccccaccttcgaaaa

SEQ ID NO: 792020 - DNA, 19 bp, Mus musculus
  siRNA target sequence for Cobll1 (NM_177025.3,1328-1346).
ctggctcagactgatgaaa

SEQ ID NO: 792021 - DNA, 19 bp, Mus musculus
  siRNA target sequence for Cobll1 (NM_177025.3,1557-1575).
ctggtgtaagctctgatta

SEQ ID NO: 792022 - DNA, 19 bp, Mus musculus
  siRNA target sequence for Cobll1 (NM_177025.3,1578-1596).
gtcttgaggagatagatga

SEQ ID NO: 792023 - DNA, 19 bp, Mus musculus
  siRNA target sequence for Cobll1 (NM_177025.3,1625-1643).
gatccggctggaagtattt

SEQ ID NO: 792024 - DNA, 19 bp, Mus musculus
  siRNA target sequence for Cobll1 (NM_177025.3,1664-1682).
gcttcagcatcgactgata

SEQ ID NO: 792025 - DNA, 19 bp, Mus musculus
  siRNA target sequence for Cobll1 (NM_177025.3,1665-1683).
cttcagcatcgactgatat

SEQ ID NO: 792026 - DNA, 19 bp, Mus musculus
  siRNA target sequence for Cobll1 (NM_177025.3,1670-1688).
gcatcgactgatatgagaa

SEQ ID NO: 792027 - DNA, 19 bp, Mus musculus
  siRNA target sequence for Cobll1 (NM_177025.3,1671-1689).
catcgactgatatgagaat

SEQ ID NO: 792028 - DNA, 19 bp, Mus musculus
  siRNA target sequence for Cobll1 (NM_177025.3,1675-1693).
gactgatatgagaattaca

SEQ ID NO: 792029 - DNA, 19 bp, Mus musculus
  siRNA target sequence for Cobll1 (NM_177025.3,1749-1767).
gctccaagggaaaaactca

SEQ ID NO: 792030 - DNA, 19 bp, Mus musculus
  siRNA target sequence for Cobll1 (NM_177025.3,1786-1804).
ggggcaagggccgtatcat

SEQ ID NO: 792031 - DNA, 19 bp, Mus musculus
  siRNA target sequence for Cobll1 (NM_177025.3,1823-1841).
ggcaatgaggacagagtat

SEQ ID NO: 792032 - DNA, 19 bp, Mus musculus
  siRNA target sequence for Cobll1 (NM_177025.3,1836-1854).
gagtatctgacagtataaa

SEQ ID NO: 792033 - DNA, 19 bp, Mus musculus
  siRNA target sequence for Cobll1 (NM_177025.3,1842-1860).
ctgacagtataaaagacat

SEQ ID NO: 792034 - DNA, 19 bp, Mus musculus
  siRNA target sequence for Cobll1 (NM_177025.3,1879-1897).
ccaggagagtgttcaaaat

SEQ ID NO: 792035 - DNA, 19 bp, Mus musculus
  siRNA target sequence for Cobll1 (NM_177025.3,1911-1929).
gtgccacaagcacagatta

SEQ ID NO: 792036 - DNA, 19 bp, Mus musculus
  siRNA target sequence for Cobll1 (NM_177025.3,1914-1932).
ccacaagcacagattatgt

SEQ ID NO: 792037 - DNA, 19 bp, Mus musculus
  siRNA target sequence for Cobll1 (NM_177025.3,1917-1935).
caagcacagattatgtgaa

SEQ ID NO: 792038 - DNA, 19 bp, Mus musculus
  siRNA target sequence for Cobll1 (NM_177025.3,2024-2042).
ggctctcctgcatgtagaa

SEQ ID NO: 792039 - DNA, 19 bp, Mus musculus
  siRNA target sequence for Cobll1 (NM_177025.3,2025-2043).
gctctcctgcatgtagaat

SEQ ID NO: 792040 - DNA, 19 bp, Mus musculus
  siRNA target sequence for Cobll1 (NM_177025.3,2034-2052).
catgtagaatggacaatgt

SEQ ID NO: 792041 - DNA, 19 bp, Mus musculus
  siRNA target sequence for Cobll1 (NM_177025.3,2037-2055).
gtagaatggacaatgttaa

SEQ ID NO: 792042 - DNA, 19 bp, Mus musculus
  siRNA target sequence for Cobll1 (NM_177025.3,2058-2076).
gttcgagggaaaatcatct

SEQ ID NO: 792043 - DNA, 19 bp, Mus musculus
  siRNA target sequence for Cobll1 (NM_177025.3,2090-2108).
ggaccagatcaaaaattga

SEQ ID NO: 792044 - DNA, 19 bp, Mus musculus
  siRNA target sequence for Cobll1 (NM_177025.3,2184-2202).
ggaatcacgaagtcagtaa

SEQ ID NO: 792045 - DNA, 19 bp, Mus musculus
  siRNA target sequence for Cobll1 (NM_177025.3,2185-2203).
gaatcacgaagtcagtaat

SEQ ID NO: 792046 - DNA, 19 bp, Mus musculus
  siRNA target sequence for Cobll1 (NM_177025.3,2189-2207).
cacgaagtcagtaattcat

SEQ ID NO: 792047 - DNA, 19 bp, Mus musculus
  siRNA target sequence for Cobll1 (NM_177025.3,2191-2209).
cgaagtcagtaattcatct

SEQ ID NO: 792048 - DNA, 19 bp, Mus musculus
  siRNA target sequence for Cobll1 (NM_177025.3,2277-2295).
gtctccaggattctgtaaa

SEQ ID NO: 792049 - DNA, 19 bp, Mus musculus
  siRNA target sequence for Cobll1 (NM_177025.3,2291-2309).
gtaaatgcctcaagagaat

SEQ ID NO: 792050 - DNA, 19 bp, Mus musculus
  siRNA target sequence for Cobll1 (NM_177025.3,2316-2334).
gtcagggcacctcaactta

SEQ ID NO: 792051 - DNA, 19 bp, Mus musculus
  siRNA target sequence for Cobll1 (NM_177025.3,2322-2340).
gcacctcaacttatgtaca

SEQ ID NO: 792052 - DNA, 19 bp, Mus musculus
  siRNA target sequence for Cobll1 (NM_177025.3,2331-2349).
cttatgtacaagatagact

SEQ ID NO: 792053 - DNA, 19 bp, Mus musculus
  siRNA target sequence for Cobll1 (NM_177025.3,2370-2388).
gtacatatgggaacaatgt

SEQ ID NO: 792054 - DNA, 19 bp, Mus musculus
  siRNA target sequence for Cobll1 (NM_177025.3,2397-2415).
cacctgtagatggaagtaa

SEQ ID NO: 792055 - DNA, 19 bp, Mus musculus
  siRNA target sequence for Cobll1 (NM_177025.3,2424-2442).
cagctgcttcttacctaaa

SEQ ID NO: 792056 - DNA, 19 bp, Mus musculus
  siRNA target sequence for Cobll1 (NM_177025.3,2429-2447).
gcttcttacctaaagaact

SEQ ID NO: 792057 - DNA, 19 bp, Mus musculus
  siRNA target sequence for Cobll1 (NM_177025.3,2430-2448).
cttcttacctaaagaactt

SEQ ID NO: 792058 - DNA, 19 bp, Mus musculus
  siRNA target sequence for Cobll1 (NM_177025.3,2479-2497).
gccaaaaccgtcaaatgaa

SEQ ID NO: 792059 - DNA, 19 bp, Mus musculus
  siRNA target sequence for Cobll1 (NM_177025.3,2502-2520).
cgagagagtatatacctaa

SEQ ID NO: 792060 - DNA, 19 bp, Mus musculus
  siRNA target sequence for Cobll1 (NM_177025.3,2503-2521).
gagagagtatatacctaaa

SEQ ID NO: 792061 - DNA, 19 bp, Mus musculus
  siRNA target sequence for Cobll1 (NM_177025.3,2530-2548).
gactacttataaaatagta

SEQ ID NO: 792062 - DNA, 19 bp, Mus musculus
  siRNA target sequence for Cobll1 (NM_177025.3,2550-2568).
ctccgaaatccctggaaat

SEQ ID NO: 792063 - DNA, 19 bp, Mus musculus
  siRNA target sequence for Cobll1 (NM_177025.3,2635-2653).
gaggcatacgattgagaat

SEQ ID NO: 792064 - DNA, 19 bp, Mus musculus
  siRNA target sequence for Cobll1 (NM_177025.3,2637-2655).
ggcatacgattgagaatat

SEQ ID NO: 792065 - DNA, 19 bp, Mus musculus
  siRNA target sequence for Cobll1 (NM_177025.3,2678-2696).
gaagtccctgctacttcta

SEQ ID NO: 792066 - DNA, 19 bp, Mus musculus
  siRNA target sequence for Cobll1 (NM_177025.3,2684-2702).
cctgctacttctaaaagct

SEQ ID NO: 792067 - DNA, 19 bp, Mus musculus
  siRNA target sequence for Cobll1 (NM_177025.3,2745-2763).
gaacagagcgtcatttgca

SEQ ID NO: 792068 - DNA, 19 bp, Mus musculus
  siRNA target sequence for Cobll1 (NM_177025.3,2844-2862).
cttttgcgccaaatttgga

SEQ ID NO: 792069 - DNA, 19 bp, Mus musculus
  siRNA target sequence for Cobll1 (NM_177025.3,2851-2869).
gccaaatttggaagatata

SEQ ID NO: 792070 - DNA, 19 bp, Mus musculus
  siRNA target sequence for Cobll1 (NM_177025.3,2852-2870).
ccaaatttggaagatataa

SEQ ID NO: 792071 - DNA, 19 bp, Mus musculus
  siRNA target sequence for Cobll1 (NM_177025.3,2853-2871).
caaatttggaagatataaa

SEQ ID NO: 792072 - DNA, 19 bp, Mus musculus
  siRNA target sequence for Cobll1 (NM_177025.3,2915-2933).
caggccaaaccaagttcat

SEQ ID NO: 792073 - DNA, 19 bp, Mus musculus
  siRNA target sequence for Cobll1 (NM_177025.3,2918-2936).
gccaaaccaagttcattct

SEQ ID NO: 792074 - DNA, 19 bp, Mus musculus
  siRNA target sequence for Cobll1 (NM_177025.3,2925-2943).
caagttcattctttttgca

SEQ ID NO: 792075 - DNA, 19 bp, Mus musculus
  siRNA target sequence for Cobll1 (NM_177025.3,2957-2975).
gcatcaggccactatgtga

SEQ ID NO: 792076 - DNA, 19 bp, Mus musculus
  siRNA target sequence for Cobll1 (NM_177025.3,3009-3027).
ctgggcctgcccctaaaga

SEQ ID NO: 792077 - DNA, 19 bp, Mus musculus
  siRNA target sequence for Cobll1 (NM_177025.3,3020-3038).
cctaaagagccaacaatca

SEQ ID NO: 792078 - DNA, 19 bp, Mus musculus
  siRNA target sequence for Cobll1 (NM_177025.3,3108-3126).
ctgctccgctgcccaatat

SEQ ID NO: 792079 - DNA, 19 bp, Mus musculus
  siRNA target sequence for Cobll1 (NM_177025.3,3110-3128).
gctccgctgcccaatattt

SEQ ID NO: 792080 - DNA, 19 bp, Mus musculus
  siRNA target sequence for Cobll1 (NM_177025.3,3115-3133).
gctgcccaatatttcaaaa

SEQ ID NO: 792081 - DNA, 19 bp, Mus musculus
  siRNA target sequence for Cobll1 (NM_177025.3,3129-3147).
caaaagctgatgatgatat

SEQ ID NO: 792082 - DNA, 19 bp, Mus musculus
  siRNA target sequence for Cobll1 (NM_177025.3,3491-3509).
cttgctgtggtgaaaaggt

SEQ ID NO: 792083 - DNA, 19 bp, Mus musculus
  siRNA target sequence for Cobll1 (NM_177025.3,3577-3595).
cacacaggatgaaaagaca

SEQ ID NO: 792084 - DNA, 19 bp, Mus musculus
  siRNA target sequence for Cobll1 (NM_177025.3,3635-3653).
gatggtgataagcaaaata

SEQ ID NO: 792085 - DNA, 19 bp, Mus musculus
  siRNA target sequence for Cobll1 (NM_177025.3,3824-3842).
gttactgttccatcgaata

SEQ ID NO: 792086 - DNA, 19 bp, Mus musculus
  siRNA target sequence for Cobll1 (NM_177025.3,3834-3852).
catcgaatacaatatctgt

SEQ ID NO: 792087 - DNA, 19 bp, Mus musculus
  siRNA target sequence for 9330120H11Rik (NM_177029.3,1759-1777).
caactgtagaaaatcaaaa

SEQ ID NO: 792088 - DNA, 19 bp, Mus musculus
  siRNA target sequence for 9330120H11Rik (NM_177029.3,1805-1823).
caagatactcaacaattat

SEQ ID NO: 792089 - DNA, 19 bp, Mus musculus
  siRNA target sequence for 9330120H11Rik (NM_177029.3,1808-1826).
gatactcaacaattatgta

SEQ ID NO: 792090 - DNA, 19 bp, Mus musculus
  siRNA target sequence for 9330120H11Rik (NM_177029.3,1885-1903).
cacagtgttttatcgtttt

SEQ ID NO: 792091 - DNA, 19 bp, Mus musculus
  siRNA target sequence for 9330120H11Rik (NM_177029.3,1889-1907).
gtgttttatcgttttgaca

SEQ ID NO: 792092 - DNA, 19 bp, Mus musculus
  siRNA target sequence for 9330120H11Rik (NM_177029.3,1919-1937).
cccctatgccatacacatt

SEQ ID NO: 792093 - DNA, 19 bp, Mus musculus
  siRNA target sequence for 9330120H11Rik (NM_177029.3,1966-1984).
ggaagcatcgatcaatcta

SEQ ID NO: 792094 - DNA, 19 bp, Mus musculus
  siRNA target sequence for 9330120H11Rik (NM_177029.3,1974-1992).
cgatcaatctacctcattt

SEQ ID NO: 792095 - DNA, 19 bp, Mus musculus
  siRNA target sequence for 9330120H11Rik (NM_177029.3,2017-2035).
gcacacaagtccatttcat

SEQ ID NO: 792096 - DNA, 19 bp, Mus musculus
  siRNA target sequence for 9330120H11Rik (NM_177029.3,2020-2038).
cacaagtccatttcattgt

SEQ ID NO: 792097 - DNA, 19 bp, Mus musculus
  siRNA target sequence for 9330120H11Rik (NM_177029.3,2044-2062).
gccagtcactgattctttt

SEQ ID NO: 792098 - DNA, 19 bp, Mus musculus
  siRNA target sequence for 9330120H11Rik (NM_177029.3,2072-2090).
ccttttggtctgaatttca

SEQ ID NO: 792099 - DNA, 19 bp, Mus musculus
  siRNA target sequence for 9330120H11Rik (NM_177029.3,2099-2117).
cctagtaggcgatatcctt

SEQ ID NO: 792100 - DNA, 19 bp, Mus musculus
  siRNA target sequence for C330023D02Rik (NM_177030.2,51-69).
gccttcgctcacaagatca

SEQ ID NO: 792101 - DNA, 19 bp, Mus musculus
  siRNA target sequence for C330023D02Rik (NM_177030.2,238-256).
gtcccctcagggacttgat

SEQ ID NO: 792102 - DNA, 19 bp, Mus musculus
  siRNA target sequence for C330023D02Rik (NM_177030.2,245-263).
cagggacttgatagagttt

SEQ ID NO: 792103 - DNA, 19 bp, Mus musculus
  siRNA target sequence for C330023D02Rik (NM_177030.2,254-272).
gatagagtttccagttgat

SEQ ID NO: 792104 - DNA, 19 bp, Mus musculus
  siRNA target sequence for C330023D02Rik (NM_177030.2,426-444).
gcatacagccccatcacta

SEQ ID NO: 792105 - DNA, 19 bp, Mus musculus
  siRNA target sequence for D830024N08Rik (NM_177031.2,2265-2283).
ctgtcccgtgtgatgtttt

SEQ ID NO: 792106 - DNA, 19 bp, Mus musculus
  siRNA target sequence for D830024N08Rik (NM_177031.2,2296-2314).
cacctcatgtagacctatt

SEQ ID NO: 792107 - DNA, 19 bp, Mus musculus
  siRNA target sequence for D830024N08Rik (NM_177031.2,2347-2365).
ctttacgctgggggttaaa

SEQ ID NO: 792108 - DNA, 19 bp, Mus musculus
  siRNA target sequence for D830024N08Rik (NM_177031.2,2353-2371).
gctgggggttaaaactaga

SEQ ID NO: 792109 - DNA, 19 bp, Mus musculus
  siRNA target sequence for D830024N08Rik (NM_177031.2,2359-2377).
ggttaaaactagaccttat

SEQ ID NO: 792110 - DNA, 19 bp, Mus musculus
  siRNA target sequence for D830024N08Rik (NM_177031.2,2360-2378).
gttaaaactagaccttata

SEQ ID NO: 792111 - DNA, 19 bp, Mus musculus
  siRNA target sequence for D830024N08Rik (NM_177031.2,2387-2405).
gcgagttcctggcaaagat

SEQ ID NO: 792112 - DNA, 19 bp, Mus musculus
  siRNA target sequence for D830024N08Rik (NM_177031.2,2445-2463).
ctggaatgtgcgttggttt

SEQ ID NO: 792113 - DNA, 19 bp, Mus musculus
  siRNA target sequence for D830024N08Rik (NM_177031.2,2660-2678).
gagagaggcccgaattaga

SEQ ID NO: 792114 - DNA, 19 bp, Mus musculus
  siRNA target sequence for A630012P03Rik (NM_177032.2,286-304).
gtacatcatgacatactta

SEQ ID NO: 792115 - DNA, 19 bp, Mus musculus
  siRNA target sequence for A630012P03Rik (NM_177032.2,369-387).
cctcatgctttcacagtta

SEQ ID NO: 792116 - DNA, 19 bp, Mus musculus
  siRNA target sequence for A630012P03Rik (NM_177032.2,428-446).
cacctgaactgcattgtct

SEQ ID NO: 792117 - DNA, 19 bp, Mus musculus
  siRNA target sequence for A630012P03Rik (NM_177032.2,553-571).
ctggctttctcgttctata

SEQ ID NO: 792118 - DNA, 19 bp, Mus musculus
  siRNA target sequence for A930041G11Rik (NM_177033.2,1028-1046).
gtcactgcacttatgaaga

SEQ ID NO: 792119 - DNA, 19 bp, Mus musculus
  siRNA target sequence for A930041G11Rik (NM_177033.2,1047-1065).
gggcacgtggagaattgaa

SEQ ID NO: 792120 - DNA, 19 bp, Mus musculus
  siRNA target sequence for A930041G11Rik (NM_177033.2,1087-1105).
catgagtgcagacaaatgt

SEQ ID NO: 792121 - DNA, 19 bp, Mus musculus
  siRNA target sequence for C130022P09Rik (NM_177036.2,328-346).
ccagcactgctcaggattt

SEQ ID NO: 792122 - DNA, 19 bp, Mus musculus
  siRNA target sequence for C130022P09Rik (NM_177036.2,382-400).
caaggctgttctcttatat

SEQ ID NO: 792123 - DNA, 19 bp, Mus musculus
  siRNA target sequence for C130022P09Rik (NM_177036.2,437-455).
catgggacagcgagacatt

SEQ ID NO: 792124 - DNA, 19 bp, Mus musculus
  siRNA target sequence for C130022P09Rik (NM_177036.2,472-490).
gttccatgctgcttcgaaa

SEQ ID NO: 792125 - DNA, 19 bp, Mus musculus
  siRNA target sequence for C130022P09Rik (NM_177036.2,655-673).
ctatcgggtcactacttgt

SEQ ID NO: 792126 - DNA, 19 bp, Mus musculus
  siRNA target sequence for C130022P09Rik (NM_177036.2,659-677).
cgggtcactacttgtatgt

SEQ ID NO: 792127 - DNA, 19 bp, Mus musculus
  siRNA target sequence for C130022P09Rik (NM_177036.2,915-933).
cactatcaggacctactaa

SEQ ID NO: 792128 - DNA, 19 bp, Mus musculus
  siRNA target sequence for A230059G12Rik (NM_177037.2,680-698).
cttacttataggcattcat

SEQ ID NO: 792129 - DNA, 19 bp, Mus musculus
  siRNA target sequence for A230059G12Rik (NM_177037.2,691-709).
gcattcatctccattatgt

SEQ ID NO: 792130 - DNA, 19 bp, Mus musculus
  siRNA target sequence for A230059G12Rik (NM_177037.2,905-923).
ccagaaacacagagtaatt

SEQ ID NO: 792131 - DNA, 19 bp, Mus musculus
  siRNA target sequence for A230059G12Rik (NM_177037.2,967-985).
gagaacttattctaagaga

SEQ ID NO: 792132 - DNA, 19 bp, Mus musculus
  siRNA target sequence for A230059G12Rik (NM_177037.2,1054-1072).
ctccatcgtttatgaaaat

SEQ ID NO: 792133 - DNA, 19 bp, Mus musculus
  siRNA target sequence for D030074E01Rik (NM_177038.2,154-172).
gcctcacttccgaagttca

SEQ ID NO: 792134 - DNA, 19 bp, Mus musculus
  siRNA target sequence for D030074E01Rik (NM_177038.2,171-189).
cacatgagagatcctaata

SEQ ID NO: 792135 - DNA, 19 bp, Mus musculus
  siRNA target sequence for D030074E01Rik (NM_177038.2,173-191).
catgagagatcctaataat

SEQ ID NO: 792136 - DNA, 19 bp, Mus musculus
  siRNA target sequence for D030074E01Rik (NM_177038.2,176-194).
gagagatcctaataatcaa

SEQ ID NO: 792137 - DNA, 19 bp, Mus musculus
  siRNA target sequence for D030074E01Rik (NM_177038.2,178-196).
gagatcctaataatcaact

SEQ ID NO: 792138 - DNA, 19 bp, Mus musculus
  siRNA target sequence for D030074E01Rik (NM_177038.2,184-202).
ctaataatcaactgcatat

SEQ ID NO: 792139 - DNA, 19 bp, Mus musculus
  siRNA target sequence for D030074E01Rik (NM_177038.2,218-236).
gatagcagtaagcaacatt

SEQ ID NO: 792140 - DNA, 19 bp, Mus musculus
  siRNA target sequence for D030074E01Rik (NM_177038.2,258-276).
ggagccattgggaagcttt

SEQ ID NO: 792141 - DNA, 19 bp, Mus musculus
  siRNA target sequence for D030074E01Rik (NM_177038.2,298-316).
gccagcctgcagaaggatt

SEQ ID NO: 792142 - DNA, 19 bp, Mus musculus
  siRNA target sequence for D030074E01Rik (NM_177038.2,312-330).
ggattagtcgctaatgtga

SEQ ID NO: 792143 - DNA, 19 bp, Mus musculus
  siRNA target sequence for D030074E01Rik (NM_177038.2,313-331).
gattagtcgctaatgtgat

SEQ ID NO: 792144 - DNA, 19 bp, Mus musculus
  siRNA target sequence for D030074E01Rik (NM_177038.2,329-347).
gattacagcaggagattat

SEQ ID NO: 792145 - DNA, 19 bp, Mus musculus
  siRNA target sequence for D030074E01Rik (NM_177038.2,337-355).
caggagattatgaccttaa

SEQ ID NO: 792146 - DNA, 19 bp, Mus musculus
  siRNA target sequence for D030074E01Rik (NM_177038.2,339-357).
ggagattatgaccttaaca

SEQ ID NO: 792147 - DNA, 19 bp, Mus musculus
  siRNA target sequence for D030074E01Rik (NM_177038.2,340-358).
gagattatgaccttaacat

SEQ ID NO: 792148 - DNA, 19 bp, Mus musculus
  siRNA target sequence for D030074E01Rik (NM_177038.2,410-428).
catgccagcatcagatcat

SEQ ID NO: 792149 - DNA, 19 bp, Mus musculus
  siRNA target sequence for D030074E01Rik (NM_177038.2,415-433).
cagcatcagatcatgagtt

SEQ ID NO: 792150 - DNA, 19 bp, Mus musculus
  siRNA target sequence for D030074E01Rik (NM_177038.2,426-444).
catgagtttctgaatcact

SEQ ID NO: 792151 - DNA, 19 bp, Mus musculus
  siRNA target sequence for D030074E01Rik (NM_177038.2,429-447).
gagtttctgaatcactatt

SEQ ID NO: 792152 - DNA, 19 bp, Mus musculus
  siRNA target sequence for D030074E01Rik (NM_177038.2,431-449).
gtttctgaatcactattta

SEQ ID NO: 792153 - DNA, 19 bp, Mus musculus
  siRNA target sequence for D030074E01Rik (NM_177038.2,435-453).
ctgaatcactatttagcat

SEQ ID NO: 792154 - DNA, 19 bp, Mus musculus
  siRNA target sequence for D030074E01Rik (NM_177038.2,485-503).
gcctatggaacagttttca

SEQ ID NO: 792155 - DNA, 19 bp, Mus musculus
  siRNA target sequence for D030074E01Rik (NM_177038.2,511-529).
cacaggaacagcatcgaat

SEQ ID NO: 792156 - DNA, 19 bp, Mus musculus
  siRNA target sequence for D030074E01Rik (NM_177038.2,526-544).
gaattcagcacaacaatga

SEQ ID NO: 792157 - DNA, 19 bp, Mus musculus
  siRNA target sequence for D030074E01Rik (NM_177038.2,534-552).
cacaacaatgattattcct

SEQ ID NO: 792158 - DNA, 19 bp, Mus musculus
  siRNA target sequence for D030074E01Rik (NM_177038.2,550-568).
cctatcctaagtggtttat

SEQ ID NO: 792159 - DNA, 19 bp, Mus musculus
  siRNA target sequence for D030074E01Rik (NM_177038.2,562-580).
ggtttatcccaaatacact

SEQ ID NO: 792160 - DNA, 19 bp, Mus musculus
  siRNA target sequence for D030074E01Rik (NM_177038.2,563-581).
gtttatcccaaatacactt

SEQ ID NO: 792161 - DNA, 19 bp, Mus musculus
  siRNA target sequence for D030074E01Rik (NM_177038.2,621-639).
gaacaaagggctgaatcaa

SEQ ID NO: 792162 - DNA, 19 bp, Mus musculus
  siRNA target sequence for D030074E01Rik (NM_177038.2,628-646).
gggctgaatcaatttatga

SEQ ID NO: 792163 - DNA, 19 bp, Mus musculus
  siRNA target sequence for D030074E01Rik (NM_177038.2,629-647).
ggctgaatcaatttatgaa

SEQ ID NO: 792164 - DNA, 19 bp, Mus musculus
  siRNA target sequence for D030074E01Rik (NM_177038.2,666-684).
ggaactcagggttgctatt

SEQ ID NO: 792165 - DNA, 19 bp, Mus musculus
  siRNA target sequence for D030074E01Rik (NM_177038.2,670-688).
ctcagggttgctatttact

SEQ ID NO: 792166 - DNA, 19 bp, Mus musculus
  siRNA target sequence for D030074E01Rik (NM_177038.2,674-692).
gggttgctatttacttaaa

SEQ ID NO: 792167 - DNA, 19 bp, Mus musculus
  siRNA target sequence for D030074E01Rik (NM_177038.2,695-713).
caattctcgagcaccaaat

SEQ ID NO: 792168 - DNA, 19 bp, Mus musculus
  siRNA target sequence for D030074E01Rik (NM_177038.2,715-733).
gagcatcagatgaacagat

SEQ ID NO: 792169 - DNA, 19 bp, Mus musculus
  siRNA target sequence for D030074E01Rik (NM_177038.2,752-770).
gtatctccagaaaaatagt

SEQ ID NO: 792170 - DNA, 19 bp, Mus musculus
  siRNA target sequence for D030074E01Rik (NM_177038.2,758-776).
ccagaaaaatagtattcaa

SEQ ID NO: 792171 - DNA, 19 bp, Mus musculus
  siRNA target sequence for D030074E01Rik (NM_177038.2,779-797).
ccaggaatcatatgaagat

SEQ ID NO: 792172 - DNA, 19 bp, Mus musculus
  siRNA target sequence for D030074E01Rik (NM_177038.2,792-810).
gaagatggcccttgtacta

SEQ ID NO: 792173 - DNA, 19 bp, Mus musculus
  siRNA target sequence for D030074E01Rik (NM_177038.2,818-836).
cagtaagaattctgatagt

SEQ ID NO: 792174 - DNA, 19 bp, Mus musculus
  siRNA target sequence for D030074E01Rik (NM_177038.2,820-838).
gtaagaattctgatagtaa

SEQ ID NO: 792175 - DNA, 19 bp, Mus musculus
  siRNA target sequence for D030074E01Rik (NM_177038.2,847-865).
cattggatggactagataa

SEQ ID NO: 792176 - DNA, 19 bp, Mus musculus
  siRNA target sequence for D030074E01Rik (NM_177038.2,851-869).
ggatggactagataacgaa

SEQ ID NO: 792177 - DNA, 19 bp, Mus musculus
  siRNA target sequence for D030074E01Rik (NM_177038.2,856-874).
gactagataacgaagtcaa

SEQ ID NO: 792178 - DNA, 19 bp, Mus musculus
  siRNA target sequence for D030074E01Rik (NM_177038.2,876-894).
gtagatggcctaccaaata

SEQ ID NO: 792179 - DNA, 19 bp, Mus musculus
  siRNA target sequence for D030074E01Rik (NM_177038.2,879-897).
gatggcctaccaaataact

SEQ ID NO: 792180 - DNA, 19 bp, Mus musculus
  siRNA target sequence for D030074E01Rik (NM_177038.2,882-900).
ggcctaccaaataacttca

SEQ ID NO: 792181 - DNA, 19 bp, Mus musculus
  siRNA target sequence for D030074E01Rik (NM_177038.2,928-946).
gcggtgaccctcctaacaa

SEQ ID NO: 792182 - DNA, 19 bp, Mus musculus
  siRNA target sequence for D030074E01Rik (NM_177038.2,930-948).
ggtgaccctcctaacaata

SEQ ID NO: 792183 - DNA, 19 bp, Mus musculus
  siRNA target sequence for D030074E01Rik (NM_177038.2,953-971).
cggctcagagtcaaagtct

SEQ ID NO: 792184 - DNA, 19 bp, Mus musculus
  siRNA target sequence for D030074E01Rik (NM_177038.2,1013-1031).
gattcgtggtgcttgctta

SEQ ID NO: 792185 - DNA, 19 bp, Mus musculus
  siRNA target sequence for D030074E01Rik (NM_177038.2,1035-1053).
ctcactgaccatgatagaa

SEQ ID NO: 792186 - DNA, 19 bp, Mus musculus
  siRNA target sequence for D030074E01Rik (NM_177038.2,1047-1065).
gatagaatccgacagttta

SEQ ID NO: 792187 - DNA, 19 bp, Mus musculus
  siRNA target sequence for D030074E01Rik (NM_177038.2,1051-1069).
gaatccgacagtttataca

SEQ ID NO: 792188 - DNA, 19 bp, Mus musculus
  siRNA target sequence for D030074E01Rik (NM_177038.2,1061-1079).
gtttatacaagagtttaca

SEQ ID NO: 792189 - DNA, 19 bp, Mus musculus
  siRNA target sequence for D030074E01Rik (NM_177038.2,1087-1105).
gccttttgccacacataga

SEQ ID NO: 792190 - DNA, 19 bp, Mus musculus
  siRNA target sequence for D030074E01Rik (NM_177038.2,1100-1118).
catagagaaaacaattcgt

SEQ ID NO: 792191 - DNA, 19 bp, Mus musculus
  siRNA target sequence for D030074E01Rik (NM_177038.2,1121-1139).
gttaaatgatcagctaata

SEQ ID NO: 792192 - DNA, 19 bp, Mus musculus
  siRNA target sequence for D030074E01Rik (NM_177038.2,1154-1172).
gagtcgatctctgttttct

SEQ ID NO: 792193 - DNA, 19 bp, Mus musculus
  siRNA target sequence for D030074E01Rik (NM_177038.2,1164-1182).
ctgttttctgccactaaga

SEQ ID NO: 792194 - DNA, 19 bp, Mus musculus
  siRNA target sequence for D030074E01Rik (NM_177038.2,1173-1191).
gccactaagaaatggttta

SEQ ID NO: 792195 - DNA, 19 bp, Mus musculus
  siRNA target sequence for D030074E01Rik (NM_177038.2,1186-1204).
ggtttagtggtagtaaagt

SEQ ID NO: 792196 - DNA, 19 bp, Mus musculus
  siRNA target sequence for D030074E01Rik (NM_177038.2,1304-1322).
cttggtgcaacattatgat

SEQ ID NO: 792197 - DNA, 19 bp, Mus musculus
  siRNA target sequence for D030074E01Rik (NM_177038.2,1446-1464).
ccataccctgctcattaca

SEQ ID NO: 792198 - DNA, 19 bp, Mus musculus
  siRNA target sequence for D030074E01Rik (NM_177038.2,1489-1507).
gggatatctgcaagaatat

SEQ ID NO: 792199 - DNA, 19 bp, Mus musculus
  siRNA target sequence for D030074E01Rik (NM_177038.2,1578-1596).
gcagctcttctgatacgat

SEQ ID NO: 792200 - DNA, 19 bp, Mus musculus
  siRNA target sequence for D030074E01Rik (NM_177038.2,1617-1635).
ctccgaagtgcccttcttt

SEQ ID NO: 792201 - DNA, 19 bp, Mus musculus
  siRNA target sequence for D030074E01Rik (NM_177038.2,1670-1688).
gagtcccatggttagaaaa

SEQ ID NO: 792202 - DNA, 19 bp, Mus musculus
  siRNA target sequence for D030074E01Rik (NM_177038.2,1684-1702).
gaaaatacgcatttcatat

SEQ ID NO: 792203 - DNA, 19 bp, Mus musculus
  siRNA target sequence for D030074E01Rik (NM_177038.2,1707-1725).
ctggcaggccaccgtttta

SEQ ID NO: 792204 - DNA, 19 bp, Mus musculus
  siRNA target sequence for D030074E01Rik (NM_177038.2,1709-1727).
ggcaggccaccgttttagt

SEQ ID NO: 792205 - DNA, 19 bp, Mus musculus
  siRNA target sequence for D030074E01Rik (NM_177038.2,1710-1728).
gcaggccaccgttttagta

SEQ ID NO: 792206 - DNA, 19 bp, Mus musculus
  siRNA target sequence for D030074E01Rik (NM_177038.2,1711-1729).
caggccaccgttttagtaa

SEQ ID NO: 792207 - DNA, 19 bp, Mus musculus
  siRNA target sequence for D030074E01Rik (NM_177038.2,1715-1733).
ccaccgttttagtaaagca

SEQ ID NO: 792208 - DNA, 19 bp, Mus musculus
  siRNA target sequence for D030074E01Rik (NM_177038.2,1746-1764).
catgctttgcgctgctatt

SEQ ID NO: 792209 - DNA, 19 bp, Mus musculus
  siRNA target sequence for D030074E01Rik (NM_177038.2,1765-1783).
gtcaagccatgcaagttta

SEQ ID NO: 792210 - DNA, 19 bp, Mus musculus
  siRNA target sequence for D030074E01Rik (NM_177038.2,1767-1785).
caagccatgcaagtttaca

SEQ ID NO: 792211 - DNA, 19 bp, Mus musculus
  siRNA target sequence for D030074E01Rik (NM_177038.2,1933-1951).
ccttcctcagagaatatct

SEQ ID NO: 792212 - DNA, 19 bp, Mus musculus
  siRNA target sequence for D030074E01Rik (NM_177038.2,1998-2016).
ccacagcttcccttaccat

SEQ ID NO: 792213 - DNA, 19 bp, Mus musculus
  siRNA target sequence for D030074E01Rik (NM_177038.2,1999-2017).
cacagcttcccttaccata

SEQ ID NO: 792214 - DNA, 19 bp, Mus musculus
  siRNA target sequence for D030074E01Rik (NM_177038.2,2004-2022).
cttcccttaccatacatta

SEQ ID NO: 792215 - DNA, 19 bp, Mus musculus
  siRNA target sequence for D030074E01Rik (NM_177038.2,2007-2025).
cccttaccatacattaaca

SEQ ID NO: 792216 - DNA, 19 bp, Mus musculus
  siRNA target sequence for D030074E01Rik (NM_177038.2,2081-2099).
gcaagcggctactcatata

SEQ ID NO: 792217 - DNA, 19 bp, Mus musculus
  siRNA target sequence for D030074E01Rik (NM_177038.2,2082-2100).
caagcggctactcatataa

SEQ ID NO: 792218 - DNA, 19 bp, Mus musculus
  siRNA target sequence for D030074E01Rik (NM_177038.2,2086-2104).
cggctactcatataagtct

SEQ ID NO: 792219 - DNA, 19 bp, Mus musculus
  siRNA target sequence for D030074E01Rik (NM_177038.2,2087-2105).
ggctactcatataagtctt

SEQ ID NO: 792220 - DNA, 19 bp, Mus musculus
  siRNA target sequence for D030074E01Rik (NM_177038.2,2165-2183).
ggctgtggctaataaagga

SEQ ID NO: 792221 - DNA, 19 bp, Mus musculus
  siRNA target sequence for D030074E01Rik (NM_177038.2,2171-2189).
ggctaataaaggagtaatt

SEQ ID NO: 792222 - DNA, 19 bp, Mus musculus
  siRNA target sequence for D030074E01Rik (NM_177038.2,2190-2208).
ccatccagtttctatccta

SEQ ID NO: 792223 - DNA, 19 bp, Mus musculus
  siRNA target sequence for D030074E01Rik (NM_177038.2,2246-2264).
gtttccacttgcagttgta

SEQ ID NO: 792224 - DNA, 19 bp, Mus musculus
  siRNA target sequence for D030074E01Rik (NM_177038.2,2313-2331).
ccgcttttgctgtctgatt

SEQ ID NO: 792225 - DNA, 19 bp, Mus musculus
  siRNA target sequence for D030074E01Rik (NM_177038.2,2314-2332).
cgcttttgctgtctgattt

SEQ ID NO: 792226 - DNA, 19 bp, Mus musculus
  siRNA target sequence for D030074E01Rik (NM_177038.2,2333-2351).
gtcattactctggaagttt

SEQ ID NO: 792227 - DNA, 19 bp, Mus musculus
  siRNA target sequence for D030074E01Rik (NM_177038.2,2344-2362).
ggaagtttcagcctaaaga

SEQ ID NO: 792228 - DNA, 19 bp, Mus musculus
  siRNA target sequence for D030074E01Rik (NM_177038.2,2388-2406).
gtgaaagaacgagtaagtt

SEQ ID NO: 792229 - DNA, 19 bp, Mus musculus
  siRNA target sequence for D030074E01Rik (NM_177038.2,2394-2412).
gaacgagtaagttattgca

SEQ ID NO: 792230 - DNA, 19 bp, Mus musculus
  siRNA target sequence for A530016L24Rik (NM_177039.2,698-716).
cagctcctcgccctaatct

SEQ ID NO: 792231 - DNA, 19 bp, Mus musculus
  siRNA target sequence for C130058G22Rik (NM_177043.2,47-65).
gaaggtcagttttctaagt

SEQ ID NO: 792232 - DNA, 19 bp, Mus musculus
  siRNA target sequence for C130058G22Rik (NM_177043.2,51-69).
gtcagttttctaagtacaa

SEQ ID NO: 792233 - DNA, 19 bp, Mus musculus
  siRNA target sequence for C130058G22Rik (NM_177043.2,116-134).
cgtccacagcccaagcaaa

SEQ ID NO: 792234 - DNA, 19 bp, Mus musculus
  siRNA target sequence for C130058G22Rik (NM_177043.2,251-269).
gaccggagcagcgatgatt

SEQ ID NO: 792235 - DNA, 19 bp, Mus musculus
  siRNA target sequence for C130058G22Rik (NM_177043.2,253-271).
ccggagcagcgatgattat

SEQ ID NO: 792236 - DNA, 19 bp, Mus musculus
  siRNA target sequence for C130058G22Rik (NM_177043.2,255-273).
ggagcagcgatgattatgt

SEQ ID NO: 792237 - DNA, 19 bp, Mus musculus
  siRNA target sequence for C130058G22Rik (NM_177043.2,263-281).
gatgattatgtgttggaaa

SEQ ID NO: 792238 - DNA, 19 bp, Mus musculus
  siRNA target sequence for C130058G22Rik (NM_177043.2,342-360).
ggtccagtccagattatgt

SEQ ID NO: 792239 - DNA, 19 bp, Mus musculus
  siRNA target sequence for C130058G22Rik (NM_177043.2,388-406).
ggctcaggacgccttgaaa

SEQ ID NO: 792240 - DNA, 19 bp, Mus musculus
  siRNA target sequence for C130058G22Rik (NM_177043.2,488-506).
gcaccaacaggagtaaaga

SEQ ID NO: 792241 - DNA, 19 bp, Mus musculus
  siRNA target sequence for C130058G22Rik (NM_177043.2,489-507).
caccaacaggagtaaagaa

SEQ ID NO: 792242 - DNA, 19 bp, Mus musculus
  siRNA target sequence for C130058G22Rik (NM_177043.2,491-509).
ccaacaggagtaaagaata

SEQ ID NO: 792243 - DNA, 19 bp, Mus musculus
  siRNA target sequence for C130058G22Rik (NM_177043.2,495-513).
caggagtaaagaataggtt

SEQ ID NO: 792244 - DNA, 19 bp, Mus musculus
  siRNA target sequence for C130058G22Rik (NM_177043.2,545-563).
cagcatccttcatcactaa

SEQ ID NO: 792245 - DNA, 19 bp, Mus musculus
  siRNA target sequence for C130058G22Rik (NM_177043.2,690-708).
gagcaagaaaccacatgat

SEQ ID NO: 792246 - DNA, 19 bp, Mus musculus
  siRNA target sequence for C130058G22Rik (NM_177043.2,797-815).
gtggacatgaggaacttca

SEQ ID NO: 792247 - DNA, 19 bp, Mus musculus
  siRNA target sequence for C130058G22Rik (NM_177043.2,910-928).
ccgagaactgctgagaaat

SEQ ID NO: 792248 - DNA, 19 bp, Mus musculus
  siRNA target sequence for 9330119M13Rik (NM_177044.2,199-217).
ctttcagctctgttgaatt

SEQ ID NO: 792249 - DNA, 19 bp, Mus musculus
  siRNA target sequence for 9330119M13Rik (NM_177044.2,404-422).
cagcagccttccttagctt

SEQ ID NO: 792250 - DNA, 19 bp, Mus musculus
  siRNA target sequence for 9330119M13Rik (NM_177044.2,473-491).
gccacttgtggcagaaact

SEQ ID NO: 792251 - DNA, 19 bp, Mus musculus
  siRNA target sequence for A830039B04Rik (NM_177045.2,196-214).
caagcagctggggcttttt

SEQ ID NO: 792252 - DNA, 19 bp, Mus musculus
  siRNA target sequence for A830039B04Rik (NM_177045.2,847-865).
catcaagaaccctgagata

SEQ ID NO: 792253 - DNA, 19 bp, Mus musculus
  siRNA target sequence for A830039B04Rik (NM_177045.2,1018-1036).
caagcgggctggagatcta

SEQ ID NO: 792254 - DNA, 19 bp, Mus musculus
  siRNA target sequence for A830039B04Rik (NM_177045.2,1060-1078).
gatcgggaagagatttggt

SEQ ID NO: 792255 - DNA, 19 bp, Mus musculus
  siRNA target sequence for A830039B04Rik (NM_177045.2,1203-1221).
cagcagtagagcaaatgca

SEQ ID NO: 792256 - DNA, 19 bp, Mus musculus
  siRNA target sequence for A830039B04Rik (NM_177045.2,1261-1279).
ccctgcggagccaacaaca

SEQ ID NO: 792257 - DNA, 19 bp, Mus musculus
  siRNA target sequence for A830039B04Rik (NM_177045.2,1373-1391).
gatcgcattgccaagcaat

SEQ ID NO: 792258 - DNA, 19 bp, Mus musculus
  siRNA target sequence for A830039B04Rik (NM_177045.2,1377-1395).
gcattgccaagcaatatca

SEQ ID NO: 792259 - DNA, 19 bp, Mus musculus
  siRNA target sequence for A830039B04Rik (NM_177045.2,1481-1499).
ctggagcccaggaaaggta

SEQ ID NO: 792260 - DNA, 19 bp, Mus musculus
  siRNA target sequence for A830039B04Rik (NM_177045.2,1665-1683).
ccaaggcttcaagttctaa

SEQ ID NO: 792261 - DNA, 19 bp, Mus musculus
  siRNA target sequence for A830039B04Rik (NM_177045.2,1800-1818).
cccacttacgagtagctaa

SEQ ID NO: 792262 - DNA, 19 bp, Mus musculus
  siRNA target sequence for A830039B04Rik (NM_177045.2,1801-1819).
ccacttacgagtagctaaa

SEQ ID NO: 792263 - DNA, 19 bp, Mus musculus
  siRNA target sequence for A830039B04Rik (NM_177045.2,1802-1820).
cacttacgagtagctaaaa

SEQ ID NO: 792264 - DNA, 19 bp, Mus musculus
  siRNA target sequence for A830039B04Rik (NM_177045.2,1804-1822).
cttacgagtagctaaaagt

SEQ ID NO: 792265 - DNA, 19 bp, Mus musculus
  siRNA target sequence for A830039B04Rik (NM_177045.2,1821-1839).
gtcttgaggctcagatcat

SEQ ID NO: 792266 - DNA, 19 bp, Mus musculus
  siRNA target sequence for A830039B04Rik (NM_177045.2,1851-1869).
ctggtcaacccattgatct

SEQ ID NO: 792267 - DNA, 19 bp, Mus musculus
  siRNA target sequence for A830039B04Rik (NM_177045.2,2000-2018).
gcgaagtgcctgctattct

SEQ ID NO: 792268 - DNA, 19 bp, Mus musculus
  siRNA target sequence for A830039B04Rik (NM_177045.2,2051-2069).
gagaccactcggtttgaga

SEQ ID NO: 792269 - DNA, 19 bp, Mus musculus
  siRNA target sequence for A830039B04Rik (NM_177045.2,2128-2146).
ccttgaccctcctagtcat

SEQ ID NO: 792270 - DNA, 19 bp, Mus musculus
  siRNA target sequence for A830039B04Rik (NM_177045.2,2136-2154).
ctcctagtcatcactttga

SEQ ID NO: 792271 - DNA, 19 bp, Mus musculus
  siRNA target sequence for A830039B04Rik (NM_177045.2,2253-2271).
gagtgactccggatgactt

SEQ ID NO: 792272 - DNA, 19 bp, Mus musculus
  siRNA target sequence for A830039B04Rik (NM_177045.2,2262-2280).
cggatgacttggatgcttt

SEQ ID NO: 792273 - DNA, 19 bp, Mus musculus
  siRNA target sequence for A830039B04Rik (NM_177045.2,2276-2294).
gcttttgtacggtttgagt

SEQ ID NO: 792274 - DNA, 19 bp, Mus musculus
  siRNA target sequence for A830039B04Rik (NM_177045.2,2282-2300).
gtacggtttgagtttcact

SEQ ID NO: 792275 - DNA, 19 bp, Mus musculus
  siRNA target sequence for A830039B04Rik (NM_177045.2,2339-2357).
gtggtaaaaaataccaatt

SEQ ID NO: 792276 - DNA, 19 bp, Mus musculus
  siRNA target sequence for A830039B04Rik (NM_177045.2,2436-2454).
gaatcaaatttgagatctt

SEQ ID NO: 792277 - DNA, 19 bp, Mus musculus
  siRNA target sequence for A830039B04Rik (NM_177045.2,2452-2470).
cttccacaaaggatccttt

SEQ ID NO: 792278 - DNA, 19 bp, Mus musculus
  siRNA target sequence for A830039B04Rik (NM_177045.2,2541-2559).
gagagatcatggaggtttt

SEQ ID NO: 792279 - DNA, 19 bp, Mus musculus
  siRNA target sequence for A530079E22Rik (NM_177048.2,1219-1237).
ccacagtgctggtattttt

SEQ ID NO: 792280 - DNA, 19 bp, Mus musculus
  siRNA target sequence for 9330157P13Rik (NM_177049.4,882-900).
cggggtgcgccaaagtgta

SEQ ID NO: 792281 - DNA, 19 bp, Mus musculus
  siRNA target sequence for 9330157P13Rik (NM_177049.4,1439-1457).
gtgaggagggcaagtacaa

SEQ ID NO: 792282 - DNA, 19 bp, Mus musculus
  siRNA target sequence for 9330157P13Rik (NM_177049.4,1510-1528).
cttagacggggcaaagtca

SEQ ID NO: 792283 - DNA, 19 bp, Mus musculus
  siRNA target sequence for 9330157P13Rik (NM_177049.4,1613-1631).
cagcagacgccctcctaaa

SEQ ID NO: 792284 - DNA, 19 bp, Mus musculus
  siRNA target sequence for 9330157P13Rik (NM_177049.4,1701-1719).
ggatctacaacccatgtta

SEQ ID NO: 792285 - DNA, 19 bp, Mus musculus
  siRNA target sequence for 9330157P13Rik (NM_177049.4,2156-2174).
ctgtcaccacgccagtttt

SEQ ID NO: 792286 - DNA, 19 bp, Mus musculus
  siRNA target sequence for 9330157P13Rik (NM_177049.4,2158-2176).
gtcaccacgccagttttga

SEQ ID NO: 792287 - DNA, 19 bp, Mus musculus
  siRNA target sequence for C730014E05Rik (NM_177051.2,2285-2303).
ggacaatgaggtgctatat

SEQ ID NO: 792288 - DNA, 19 bp, Mus musculus
  siRNA target sequence for C730014E05Rik (NM_177051.2,2368-2386).
cttggattctgttgtctaa

SEQ ID NO: 792289 - DNA, 19 bp, Mus musculus
  siRNA target sequence for C730014E05Rik (NM_177051.2,2376-2394).
ctgttgtctaaacgtaaat

SEQ ID NO: 792290 - DNA, 19 bp, Mus musculus
  siRNA target sequence for C730014E05Rik (NM_177051.2,2378-2396).
gttgtctaaacgtaaatga

SEQ ID NO: 792291 - DNA, 19 bp, Mus musculus
  siRNA target sequence for C730014E05Rik (NM_177051.2,2381-2399).
gtctaaacgtaaatgataa

SEQ ID NO: 792292 - DNA, 19 bp, Mus musculus
  siRNA target sequence for C730014E05Rik (NM_177051.2,2469-2487).
gcatgggacacagacttta

SEQ ID NO: 792293 - DNA, 19 bp, Mus musculus
  siRNA target sequence for C730014E05Rik (NM_177051.2,2499-2517).
gcctgggccaagttggaat

SEQ ID NO: 792294 - DNA, 19 bp, Mus musculus
  siRNA target sequence for C730014E05Rik (NM_177051.2,2529-2547).
gtttggctgcacacagttt

SEQ ID NO: 792295 - DNA, 19 bp, Mus musculus
  siRNA target sequence for C730014E05Rik (NM_177051.2,2592-2610).
catacatccacccatcata

SEQ ID NO: 792296 - DNA, 19 bp, Mus musculus
  siRNA target sequence for C730014E05Rik (NM_177051.2,2602-2620).
cccatcatatgcgtcatat

SEQ ID NO: 792297 - DNA, 19 bp, Mus musculus
  siRNA target sequence for C730014E05Rik (NM_177051.2,2604-2622).
catcatatgcgtcatatca

SEQ ID NO: 792298 - DNA, 19 bp, Mus musculus
  siRNA target sequence for C730014E05Rik (NM_177051.2,2635-2653).
cacatgctcaatgaagata

SEQ ID NO: 792299 - DNA, 19 bp, Mus musculus
  siRNA target sequence for D130060C09Rik (NM_177054.3,151-169).
gtcgtccttgccttcaact

SEQ ID NO: 792300 - DNA, 19 bp, Mus musculus
  siRNA target sequence for D130060C09Rik (NM_177054.3,389-407).
gcgaggatgacaaggttaa

SEQ ID NO: 792301 - DNA, 19 bp, Mus musculus
  siRNA target sequence for D130060C09Rik (NM_177054.3,393-411).
ggatgacaaggttaagcta

SEQ ID NO: 792302 - DNA, 19 bp, Mus musculus
  siRNA target sequence for D130060C09Rik (NM_177054.3,397-415).
gacaaggttaagctacaaa

SEQ ID NO: 792303 - DNA, 19 bp, Mus musculus
  siRNA target sequence for D130060C09Rik (NM_177054.3,403-421).
gttaagctacaaaacaaca

SEQ ID NO: 792304 - DNA, 19 bp, Mus musculus
  siRNA target sequence for D130060C09Rik (NM_177054.3,408-426).
gctacaaaacaacatatca

SEQ ID NO: 792305 - DNA, 19 bp, Mus musculus
  siRNA target sequence for D130060C09Rik (NM_177054.3,436-454).
gcagacatacatcatttaa

SEQ ID NO: 792306 - DNA, 19 bp, Mus musculus
  siRNA target sequence for D130060C09Rik (NM_177054.3,471-489).
gcttcgtcaggagtttctt

SEQ ID NO: 792307 - DNA, 19 bp, Mus musculus
  siRNA target sequence for D130060C09Rik (NM_177054.3,535-553).
cttgtcaagcggctagaat

SEQ ID NO: 792308 - DNA, 19 bp, Mus musculus
  siRNA target sequence for D130060C09Rik (NM_177054.3,545-563).
ggctagaatacgagagttt

SEQ ID NO: 792309 - DNA, 19 bp, Mus musculus
  siRNA target sequence for D130060C09Rik (NM_177054.3,550-568).
gaatacgagagttttcagt

SEQ ID NO: 792310 - DNA, 19 bp, Mus musculus
  siRNA target sequence for D130060C09Rik (NM_177054.3,576-594).
gcagatcaaggagttaaga

SEQ ID NO: 792311 - DNA, 19 bp, Mus musculus
  siRNA target sequence for D130060C09Rik (NM_177054.3,585-603).
ggagttaagagcacaacat

SEQ ID NO: 792312 - DNA, 19 bp, Mus musculus
  siRNA target sequence for D130060C09Rik (NM_177054.3,651-669).
ggagactcataagattcaa

SEQ ID NO: 792313 - DNA, 19 bp, Mus musculus
  siRNA target sequence for D130060C09Rik (NM_177054.3,652-670).
gagactcataagattcaat

SEQ ID NO: 792314 - DNA, 19 bp, Mus musculus
  siRNA target sequence for D130060C09Rik (NM_177054.3,654-672).
gactcataagattcaatca

SEQ ID NO: 792315 - DNA, 19 bp, Mus musculus
  siRNA target sequence for D130060C09Rik (NM_177054.3,656-674).
ctcataagattcaatcaaa

SEQ ID NO: 792316 - DNA, 19 bp, Mus musculus
  siRNA target sequence for D130060C09Rik (NM_177054.3,709-727).
gcacctaaaaatattccaa

SEQ ID NO: 792317 - DNA, 19 bp, Mus musculus
  siRNA target sequence for D130060C09Rik (NM_177054.3,725-743).
caaatgtgcctgaaaatga

SEQ ID NO: 792318 - DNA, 19 bp, Mus musculus
  siRNA target sequence for D130060C09Rik (NM_177054.3,762-780).
cccctcaagcaatcatctt

SEQ ID NO: 792319 - DNA, 19 bp, Mus musculus
  siRNA target sequence for D130060C09Rik (NM_177054.3,840-858).
gaatgacctagcaaaagta

SEQ ID NO: 792320 - DNA, 19 bp, Mus musculus
  siRNA target sequence for D130060C09Rik (NM_177054.3,864-882).
gcttcctgctggttcacat

SEQ ID NO: 792321 - DNA, 19 bp, Mus musculus
  siRNA target sequence for D130060C09Rik (NM_177054.3,868-886).
cctgctggttcacatctaa

SEQ ID NO: 792322 - DNA, 19 bp, Mus musculus
  siRNA target sequence for D130060C09Rik (NM_177054.3,872-890).
ctggttcacatctaaacca

SEQ ID NO: 792323 - DNA, 19 bp, Mus musculus
  siRNA target sequence for D130060C09Rik (NM_177054.3,878-896).
cacatctaaaccagaatga

SEQ ID NO: 792324 - DNA, 19 bp, Mus musculus
  siRNA target sequence for D130060C09Rik (NM_177054.3,895-913).
gaaaatcccagtacttcaa

SEQ ID NO: 792325 - DNA, 19 bp, Mus musculus
  siRNA target sequence for D130060C09Rik (NM_177054.3,963-981).
ggatcgggaacccagaatt

SEQ ID NO: 792326 - DNA, 19 bp, Mus musculus
  siRNA target sequence for D130060C09Rik (NM_177054.3,969-987).
ggaacccagaattcaaaca

SEQ ID NO: 792327 - DNA, 19 bp, Mus musculus
  siRNA target sequence for D130060C09Rik (NM_177054.3,1008-1026).
cagggacagagccaatgat

SEQ ID NO: 792328 - DNA, 19 bp, Mus musculus
  siRNA target sequence for D130060C09Rik (NM_177054.3,1010-1028).
gggacagagccaatgattt

SEQ ID NO: 792329 - DNA, 19 bp, Mus musculus
  siRNA target sequence for D130060C09Rik (NM_177054.3,1019-1037).
ccaatgatttccacaagtt

SEQ ID NO: 792330 - DNA, 19 bp, Mus musculus
  siRNA target sequence for D130060C09Rik (NM_177054.3,1046-1064).
gccggttctttgatgagaa

SEQ ID NO: 792331 - DNA, 19 bp, Mus musculus
  siRNA target sequence for D130060C09Rik (NM_177054.3,1082-1100).
cgcagcatggctctaaact

SEQ ID NO: 792332 - DNA, 19 bp, Mus musculus
  siRNA target sequence for D130060C09Rik (NM_177054.3,1092-1110).
ctctaaactggcggattat

SEQ ID NO: 792333 - DNA, 19 bp, Mus musculus
  siRNA target sequence for D130060C09Rik (NM_177054.3,1094-1112).
ctaaactggcggattataa

SEQ ID NO: 792334 - DNA, 19 bp, Mus musculus
  siRNA target sequence for D130060C09Rik (NM_177054.3,1124-1142).
gtaacgtaggtgagtatga

SEQ ID NO: 792335 - DNA, 19 bp, Mus musculus
  siRNA target sequence for D130060C09Rik (NM_177054.3,1157-1175).
ctgagctggcttacaatga

SEQ ID NO: 792336 - DNA, 19 bp, Mus musculus
  siRNA target sequence for A230078I05Rik (NM_177056.2,658-676).
cgggtactatggaaactct

SEQ ID NO: 792337 - DNA, 19 bp, Mus musculus
  siRNA target sequence for A230078I05Rik (NM_177056.2,716-734).
ctggggtgcaccttgtgaa

SEQ ID NO: 792338 - DNA, 19 bp, Mus musculus
  siRNA target sequence for A230078I05Rik (NM_177056.2,829-847).
gcttcaaggcagtactctt

SEQ ID NO: 792339 - DNA, 19 bp, Mus musculus
  siRNA target sequence for A230078I05Rik (NM_177056.2,1206-1224).
gccactgccgcagactatt

SEQ ID NO: 792340 - DNA, 19 bp, Mus musculus
  siRNA target sequence for A230078I05Rik (NM_177056.2,1207-1225).
ccactgccgcagactattt

SEQ ID NO: 792341 - DNA, 19 bp, Mus musculus
  siRNA target sequence for A230078I05Rik (NM_177056.2,1532-1550).
ccctgaccctgcttataga

SEQ ID NO: 792342 - DNA, 19 bp, Mus musculus
  siRNA target sequence for A230078I05Rik (NM_177056.2,1587-1605).
gtcctctccccgagttaca

SEQ ID NO: 792343 - DNA, 19 bp, Mus musculus
  siRNA target sequence for A230078I05Rik (NM_177056.2,1666-1684).
cagacacggactatgagta

SEQ ID NO: 792344 - DNA, 19 bp, Mus musculus
  siRNA target sequence for E230015B07Rik (NM_177057.2,1414-1432).
ggcgagcctggcattctgt

SEQ ID NO: 792345 - DNA, 19 bp, Mus musculus
  siRNA target sequence for E230015B07Rik (NM_177057.2,1579-1597).
cctgtcaggcaagttatca

SEQ ID NO: 792346 - DNA, 19 bp, Mus musculus
  siRNA target sequence for E230015B07Rik (NM_177057.2,1604-1622).
ccggtttcgtggaactatt

SEQ ID NO: 792347 - DNA, 19 bp, Mus musculus
  siRNA target sequence for E230015B07Rik (NM_177057.2,1607-1625).
gtttcgtggaactattcca

SEQ ID NO: 792348 - DNA, 19 bp, Mus musculus
  siRNA target sequence for E230015B07Rik (NM_177057.2,1662-1680).
cctcttgtttattgaatct

SEQ ID NO: 792349 - DNA, 19 bp, Mus musculus
  siRNA target sequence for B230374F23Rik (NM_177059.2,1337-1355).
cccctgcccagaatcattt

SEQ ID NO: 792350 - DNA, 19 bp, Mus musculus
  siRNA target sequence for B230374F23Rik (NM_177059.2,1413-1431).
ccaatggaagcgaacttca

SEQ ID NO: 792351 - DNA, 19 bp, Mus musculus
  siRNA target sequence for B230374F23Rik (NM_177059.2,1435-1453).
cggcagtgtccgctatgaa

SEQ ID NO: 792352 - DNA, 19 bp, Mus musculus
  siRNA target sequence for B230374F23Rik (NM_177059.2,1582-1600).
cgtgggaaacatgttctat

SEQ ID NO: 792353 - DNA, 19 bp, Mus musculus
  siRNA target sequence for B230374F23Rik (NM_177059.2,1652-1670).
cagagacgcttgaaaccta

SEQ ID NO: 792354 - DNA, 19 bp, Mus musculus
  siRNA target sequence for B230374F23Rik (NM_177059.2,1678-1696).
gatcttcatgagttatgaa

SEQ ID NO: 792355 - DNA, 19 bp, Mus musculus
  siRNA target sequence for B230374F23Rik (NM_177059.2,1760-1778).
gtcagaaaccggtacatct

SEQ ID NO: 792356 - DNA, 19 bp, Mus musculus
  siRNA target sequence for B230374F23Rik (NM_177059.2,2006-2024).
gcaggagtggacaatttct

SEQ ID NO: 792357 - DNA, 19 bp, Mus musculus
  siRNA target sequence for B230374F23Rik (NM_177059.2,2007-2025).
caggagtggacaatttctt

SEQ ID NO: 792358 - DNA, 19 bp, Mus musculus
  siRNA target sequence for B230374F23Rik (NM_177059.2,2009-2027).
ggagtggacaatttcttta

SEQ ID NO: 792359 - DNA, 19 bp, Mus musculus
  siRNA target sequence for B230374F23Rik (NM_177059.2,2023-2041).
ctttataccgccaacaaat

SEQ ID NO: 792360 - DNA, 19 bp, Mus musculus
  siRNA target sequence for B230374F23Rik (NM_177059.2,2033-2051).
ccaacaaatctcatcatca

SEQ ID NO: 792361 - DNA, 19 bp, Mus musculus
  siRNA target sequence for B230374F23Rik (NM_177059.2,2034-2052).
caacaaatctcatcatcaa

SEQ ID NO: 792362 - DNA, 19 bp, Mus musculus
  siRNA target sequence for B230374F23Rik (NM_177059.2,2279-2297).
ctaggccccaacagtgata

SEQ ID NO: 792363 - DNA, 19 bp, Mus musculus
  siRNA target sequence for B230374F23Rik (NM_177059.2,2404-2422).
gacgctatacgacctaaaa

SEQ ID NO: 792364 - DNA, 19 bp, Mus musculus
  siRNA target sequence for B230374F23Rik (NM_177059.2,2406-2424).
cgctatacgacctaaaaat

SEQ ID NO: 792365 - DNA, 19 bp, Mus musculus
  siRNA target sequence for B230374F23Rik (NM_177059.2,2407-2425).
gctatacgacctaaaaata

SEQ ID NO: 792366 - DNA, 19 bp, Mus musculus
  siRNA target sequence for B230374F23Rik (NM_177059.2,2408-2426).
ctatacgacctaaaaataa

SEQ ID NO: 792367 - DNA, 19 bp, Mus musculus
  siRNA target sequence for B230374F23Rik (NM_177059.2,2548-2566).
gggcaggctgaagaactta

SEQ ID NO: 792368 - DNA, 19 bp, Mus musculus
  siRNA target sequence for B230374F23Rik (NM_177059.2,2549-2567).
ggcaggctgaagaacttaa

SEQ ID NO: 792369 - DNA, 19 bp, Mus musculus
  siRNA target sequence for B230374F23Rik (NM_177059.2,2709-2727).
gtgaggtttcaggcataaa

SEQ ID NO: 792370 - DNA, 19 bp, Mus musculus
  siRNA target sequence for 9930039A11Rik (NM_177060.2,610-628).
cacaaaccccctggttatt

SEQ ID NO: 792371 - DNA, 19 bp, Mus musculus
  siRNA target sequence for 9930039A11Rik (NM_177060.2,637-655).
ggtctggagacaatcatca

SEQ ID NO: 792372 - DNA, 19 bp, Mus musculus
  siRNA target sequence for 9930039A11Rik (NM_177060.2,638-656).
gtctggagacaatcatcaa

SEQ ID NO: 792373 - DNA, 19 bp, Mus musculus
  siRNA target sequence for 9930039A11Rik (NM_177060.2,691-709).
cagcctgcctcgagaatca

SEQ ID NO: 792374 - DNA, 19 bp, Mus musculus
  siRNA target sequence for 9930039A11Rik (NM_177060.2,697-715).
gcctcgagaatcacagatt

SEQ ID NO: 792375 - DNA, 19 bp, Mus musculus
  siRNA target sequence for 4930415J05Rik (NM_177061.2,3295-3313).
ccatcctcctggtaccttt

SEQ ID NO: 792376 - DNA, 19 bp, Mus musculus
  siRNA target sequence for 4930415J05Rik (NM_177061.2,3487-3505).
ctgctagacaccataaact

SEQ ID NO: 792377 - DNA, 19 bp, Mus musculus
  siRNA target sequence for 4833444G19Rik (NM_177062.2,343-361).
caaccatgtgaaatcacta

SEQ ID NO: 792378 - DNA, 19 bp, Mus musculus
  siRNA target sequence for 4833444G19Rik (NM_177062.2,632-650).
ccctggaagtcaagcaaaa

SEQ ID NO: 792379 - DNA, 19 bp, Mus musculus
  siRNA target sequence for B230354K17Rik (NM_177065.2,1049-1067).
ccatggtatgaactgtatt

SEQ ID NO: 792380 - DNA, 19 bp, Mus musculus
  siRNA target sequence for B230354K17Rik (NM_177065.2,1100-1118).
cctggctcaccaattgtga

SEQ ID NO: 792381 - DNA, 19 bp, Mus musculus
  siRNA target sequence for B230354K17Rik (NM_177065.2,1117-1135).
gagcgacaatggattaggt

SEQ ID NO: 792382 - DNA, 19 bp, Mus musculus
  siRNA target sequence for B230354K17Rik (NM_177065.2,1136-1154).
gaccctgtatatgaaactt

SEQ ID NO: 792383 - DNA, 19 bp, Mus musculus
  siRNA target sequence for B230354K17Rik (NM_177065.2,1193-1211).
ggttggttgcttttagcat

SEQ ID NO: 792384 - DNA, 19 bp, Mus musculus
  siRNA target sequence for B230354K17Rik (NM_177065.2,1217-1235).
gataaactgataaaggata

SEQ ID NO: 792385 - DNA, 19 bp, Mus musculus
  siRNA target sequence for B230354K17Rik (NM_177065.2,1237-1255).
gaatgagctccgggataaa

SEQ ID NO: 792386 - DNA, 19 bp, Mus musculus
  siRNA target sequence for B230354K17Rik (NM_177065.2,1241-1259).
gagctccgggataaaatta

SEQ ID NO: 792387 - DNA, 19 bp, Mus musculus
  siRNA target sequence for B230354K17Rik (NM_177065.2,1246-1264).
ccgggataaaattaaccaa

SEQ ID NO: 792388 - DNA, 19 bp, Mus musculus
  siRNA target sequence for B230354K17Rik (NM_177065.2,1279-1297).
gaaggacaacaaagaactt

SEQ ID NO: 792389 - DNA, 19 bp, Mus musculus
  siRNA target sequence for B230354K17Rik (NM_177065.2,1288-1306).
caaagaacttaatgataaa

SEQ ID NO: 792390 - DNA, 19 bp, Mus musculus
  siRNA target sequence for B230354K17Rik (NM_177065.2,1316-1334).
cttcagatgctcataaaca

SEQ ID NO: 792391 - DNA, 19 bp, Mus musculus
  siRNA target sequence for B230354K17Rik (NM_177065.2,1383-1401).
gccacaaagctcagtttat

SEQ ID NO: 792392 - DNA, 19 bp, Mus musculus
  siRNA target sequence for B230354K17Rik (NM_177065.2,1387-1405).
caaagctcagtttatggaa

SEQ ID NO: 792393 - DNA, 19 bp, Mus musculus
  siRNA target sequence for B230354K17Rik (NM_177065.2,1437-1455).
ccgagttacagggaaaatt

SEQ ID NO: 792394 - DNA, 19 bp, Mus musculus
  siRNA target sequence for B230354K17Rik (NM_177065.2,1439-1457).
gagttacagggaaaattca

SEQ ID NO: 792395 - DNA, 19 bp, Mus musculus
  siRNA target sequence for B230354K17Rik (NM_177065.2,1479-1497).
cagcagaacctgttcgtaa

SEQ ID NO: 792396 - DNA, 19 bp, Mus musculus
  siRNA target sequence for B230354K17Rik (NM_177065.2,1550-1568).
cagttttacctcaaggata

SEQ ID NO: 792397 - DNA, 19 bp, Mus musculus
  siRNA target sequence for B230354K17Rik (NM_177065.2,1552-1570).
gttttacctcaaggatata

SEQ ID NO: 792398 - DNA, 19 bp, Mus musculus
  siRNA target sequence for D830019J24Rik (NM_177066.2,71-89).
gacacagacttgttctgat

SEQ ID NO: 792399 - DNA, 19 bp, Mus musculus
  siRNA target sequence for D830019J24Rik (NM_177066.2,75-93).
cagacttgttctgatgaat

SEQ ID NO: 792400 - DNA, 19 bp, Mus musculus
  siRNA target sequence for D830019J24Rik (NM_177066.2,79-97).
cttgttctgatgaatggaa

SEQ ID NO: 792401 - DNA, 19 bp, Mus musculus
  siRNA target sequence for D830019J24Rik (NM_177066.2,98-116).
gaagaaagttagtgaatct

SEQ ID NO: 792402 - DNA, 19 bp, Mus musculus
  siRNA target sequence for D830019J24Rik (NM_177066.2,101-119).
gaaagttagtgaatcttat

SEQ ID NO: 792403 - DNA, 19 bp, Mus musculus
  siRNA target sequence for D830019J24Rik (NM_177066.2,105-123).
gttagtgaatcttatgcta

SEQ ID NO: 792404 - DNA, 19 bp, Mus musculus
  siRNA target sequence for D830019J24Rik (NM_177066.2,111-129).
gaatcttatgctattataa

SEQ ID NO: 792405 - DNA, 19 bp, Mus musculus
  siRNA target sequence for D830019J24Rik (NM_177066.2,209-227).
cttcagtgaagtcagttta

SEQ ID NO: 792406 - DNA, 19 bp, Mus musculus
  siRNA target sequence for D830019J24Rik (NM_177066.2,212-230).
cagtgaagtcagtttaaat

SEQ ID NO: 792407 - DNA, 19 bp, Mus musculus
  siRNA target sequence for D830019J24Rik (NM_177066.2,273-291).
gcctgcggtggcaacaagt

SEQ ID NO: 792408 - DNA, 19 bp, Mus musculus
  siRNA target sequence for D830019J24Rik (NM_177066.2,410-428).
gcatagcggagcagatgtt

SEQ ID NO: 792409 - DNA, 19 bp, Mus musculus
  siRNA target sequence for D830019J24Rik (NM_177066.2,458-476).
cctccacatcgctgcaata

SEQ ID NO: 792410 - DNA, 19 bp, Mus musculus
  siRNA target sequence for D830019J24Rik (NM_177066.2,461-479).
ccacatcgctgcaatagct

SEQ ID NO: 792411 - DNA, 19 bp, Mus musculus
  siRNA target sequence for 4832415H08Rik (NM_177068.3,106-124).
ctatcccctgccattggtt

SEQ ID NO: 792412 - DNA, 19 bp, Mus musculus
  siRNA target sequence for 4832415H08Rik (NM_177068.3,214-232).
gcccacggaagatgacatt

SEQ ID NO: 792413 - DNA, 19 bp, Mus musculus
  siRNA target sequence for 4832415H08Rik (NM_177068.3,216-234).
ccacggaagatgacattct

SEQ ID NO: 792414 - DNA, 19 bp, Mus musculus
  siRNA target sequence for 4832415H08Rik (NM_177068.3,250-268).
caaccaggagaacgtttta

SEQ ID NO: 792415 - DNA, 19 bp, Mus musculus
  siRNA target sequence for 4832415H08Rik (NM_177068.3,430-448).
gggctcatcctgtaaatgt

SEQ ID NO: 792416 - DNA, 19 bp, Mus musculus
  siRNA target sequence for 4832415H08Rik (NM_177068.3,598-616).
gcattcggttaccactaaa

SEQ ID NO: 792417 - DNA, 19 bp, Mus musculus
  siRNA target sequence for 4832415H08Rik (NM_177068.3,988-1006).
caggggaatcacctactat

SEQ ID NO: 792418 - DNA, 19 bp, Mus musculus
  siRNA target sequence for 4832415H08Rik (NM_177068.3,990-1008).
ggggaatcacctactataa

SEQ ID NO: 792419 - DNA, 19 bp, Mus musculus
  siRNA target sequence for 4832415H08Rik (NM_177068.3,991-1009).
gggaatcacctactataaa

SEQ ID NO: 792420 - DNA, 19 bp, Mus musculus
  siRNA target sequence for 4832415H08Rik (NM_177068.3,1046-1064).
cagcacgatgagcttttca

SEQ ID NO: 792421 - DNA, 19 bp, Mus musculus
  siRNA target sequence for 4832415H08Rik (NM_177068.3,1048-1066).
gcacgatgagcttttcagt

SEQ ID NO: 792422 - DNA, 19 bp, Mus musculus
  siRNA target sequence for 4832415H08Rik (NM_177068.3,1263-1281).
ctcaggcctccgatagaga

SEQ ID NO: 792423 - DNA, 19 bp, Mus musculus
  siRNA target sequence for 4832415H08Rik (NM_177068.3,1384-1402).
gccacttccagcaatggtt

SEQ ID NO: 792424 - DNA, 19 bp, Mus musculus
  siRNA target sequence for 4832415H08Rik (NM_177068.3,1399-1417).
ggttcctggggacatattt

SEQ ID NO: 792425 - DNA, 19 bp, Mus musculus
  siRNA target sequence for 4832415H08Rik (NM_177068.3,1576-1594).
caccctctctacaatcaca

SEQ ID NO: 792426 - DNA, 19 bp, Mus musculus
  siRNA target sequence for 4832415H08Rik (NM_177068.3,1598-1616).
ccgaccacccagaacacat

SEQ ID NO: 792427 - DNA, 19 bp, Mus musculus
  siRNA target sequence for 4832415H08Rik (NM_177068.3,1599-1617).
cgaccacccagaacacata

SEQ ID NO: 792428 - DNA, 19 bp, Mus musculus
  siRNA target sequence for 4832415H08Rik (NM_177068.3,1612-1630).
cacatatggacggaatgaa

SEQ ID NO: 792429 - DNA, 19 bp, Mus musculus
  siRNA target sequence for 4832415H08Rik (NM_177068.3,1656-1674).
ccaaggacgaccgcattta

SEQ ID NO: 792430 - DNA, 19 bp, Mus musculus
  siRNA target sequence for 4832415H08Rik (NM_177068.3,1660-1678).
ggacgaccgcatttacgta

SEQ ID NO: 792431 - DNA, 19 bp, Mus musculus
  siRNA target sequence for 4832415H08Rik (NM_177068.3,1661-1679).
gacgaccgcatttacgtaa

SEQ ID NO: 792432 - DNA, 19 bp, Mus musculus
  siRNA target sequence for 4832415H08Rik (NM_177068.3,1669-1687).
catttacgtaaccaactat

SEQ ID NO: 792433 - DNA, 19 bp, Mus musculus
  siRNA target sequence for 4832415H08Rik (NM_177068.3,1675-1693).
cgtaaccaactattactat

SEQ ID NO: 792434 - DNA, 19 bp, Mus musculus
  siRNA target sequence for 4832415H08Rik (NM_177068.3,1739-1757).
ggtcgctggagcaattcct

SEQ ID NO: 792435 - DNA, 19 bp, Mus musculus
  siRNA target sequence for 4832415H08Rik (NM_177068.3,1740-1758).
gtcgctggagcaattccta

SEQ ID NO: 792436 - DNA, 19 bp, Mus musculus
  siRNA target sequence for 4832415H08Rik (NM_177068.3,1826-1844).
gccttcacccgaaacatca

SEQ ID NO: 792437 - DNA, 19 bp, Mus musculus
  siRNA target sequence for 4832415H08Rik (NM_177068.3,1834-1852).
ccgaaacatcatcaagtat

SEQ ID NO: 792438 - DNA, 19 bp, Mus musculus
  siRNA target sequence for 4832415H08Rik (NM_177068.3,1836-1854).
gaaacatcatcaagtatga

SEQ ID NO: 792439 - DNA, 19 bp, Mus musculus
  siRNA target sequence for 4832415H08Rik (NM_177068.3,2089-2107).
gctccggaggaatttctat

SEQ ID NO: 792440 - DNA, 19 bp, Mus musculus
  siRNA target sequence for 4832415H08Rik (NM_177068.3,2120-2138).
gtcatctgtggggtactat

SEQ ID NO: 792441 - DNA, 19 bp, Mus musculus
  siRNA target sequence for 4832415H08Rik (NM_177068.3,2122-2140).
catctgtggggtactatat

SEQ ID NO: 792442 - DNA, 19 bp, Mus musculus
  siRNA target sequence for E330009P21Rik (NM_177069.2,691-709).
gattcccgacttataccat

SEQ ID NO: 792443 - DNA, 19 bp, Mus musculus
  siRNA target sequence for E330009P21Rik (NM_177069.2,695-713).
cccgacttataccatatta

SEQ ID NO: 792444 - DNA, 19 bp, Mus musculus
  siRNA target sequence for E330009P21Rik (NM_177069.2,698-716).
gacttataccatattacca

SEQ ID NO: 792445 - DNA, 19 bp, Mus musculus
  siRNA target sequence for E330009P21Rik (NM_177069.2,706-724).
ccatattaccagactcaaa

SEQ ID NO: 792446 - DNA, 19 bp, Mus musculus
  siRNA target sequence for E330009P21Rik (NM_177069.2,942-960).
ccatacatggccccaaaaa

SEQ ID NO: 792447 - DNA, 19 bp, Mus musculus
  siRNA target sequence for E330009P21Rik (NM_177069.2,1042-1060).
cttctcattgcagaactat

SEQ ID NO: 792448 - DNA, 19 bp, Mus musculus
  siRNA target sequence for E330009P21Rik (NM_177069.2,1273-1291).
ccaacagctcaataagtgt

SEQ ID NO: 792449 - DNA, 19 bp, Mus musculus
  siRNA target sequence for E330009P21Rik (NM_177069.2,1296-1314).
ggctgcaatacagtaaaca

SEQ ID NO: 792450 - DNA, 19 bp, Mus musculus
  siRNA target sequence for E330009P21Rik (NM_177069.2,1297-1315).
gctgcaatacagtaaacat

SEQ ID NO: 792451 - DNA, 19 bp, Mus musculus
  siRNA target sequence for E330009P21Rik (NM_177069.2,1370-1388).
caagtgataacaattcgaa

SEQ ID NO: 792452 - DNA, 19 bp, Mus musculus
  siRNA target sequence for B630019A10Rik (NM_177072.2,68-86).
ggcaggacccggttacaaa

SEQ ID NO: 792453 - DNA, 19 bp, Mus musculus
  siRNA target sequence for B630019A10Rik (NM_177072.2,72-90).
ggacccggttacaaaggta

SEQ ID NO: 792454 - DNA, 19 bp, Mus musculus
  siRNA target sequence for B630019A10Rik (NM_177072.2,73-91).
gacccggttacaaaggtaa

SEQ ID NO: 792455 - DNA, 19 bp, Mus musculus
  siRNA target sequence for B630019A10Rik (NM_177072.2,76-94).
ccggttacaaaggtaaaga

SEQ ID NO: 792456 - DNA, 19 bp, Mus musculus
  siRNA target sequence for B630019A10Rik (NM_177072.2,215-233).
ccgaaagactgaaaacttt

SEQ ID NO: 792457 - DNA, 19 bp, Mus musculus
  siRNA target sequence for B630019A10Rik (NM_177072.2,289-307).
ctagagaagagatttgact

SEQ ID NO: 792458 - DNA, 19 bp, Mus musculus
  siRNA target sequence for B630019A10Rik (NM_177072.2,346-364).
gagctgggagaggaatcaa

SEQ ID NO: 792459 - DNA, 19 bp, Mus musculus
  siRNA target sequence for B630019A10Rik (NM_177072.2,452-470).
cagagcgttctcttcaagt

SEQ ID NO: 792460 - DNA, 19 bp, Mus musculus
  siRNA target sequence for C030019I05Rik (NM_177075.2,113-131).
cctgcttggaggactatta

SEQ ID NO: 792461 - DNA, 19 bp, Mus musculus
  siRNA target sequence for C030019I05Rik (NM_177075.2,116-134).
gcttggaggactattacca

SEQ ID NO: 792462 - DNA, 19 bp, Mus musculus
  siRNA target sequence for C030019I05Rik (NM_177075.2,117-135).
cttggaggactattaccat

SEQ ID NO: 792463 - DNA, 19 bp, Mus musculus
  siRNA target sequence for C030019I05Rik (NM_177075.2,121-139).
gaggactattaccatatta

SEQ ID NO: 792464 - DNA, 19 bp, Mus musculus
  siRNA target sequence for C030019I05Rik (NM_177075.2,170-188).
ccggatacctgcgctataa

SEQ ID NO: 792465 - DNA, 19 bp, Mus musculus
  siRNA target sequence for C030019I05Rik (NM_177075.2,172-190).
ggatacctgcgctataact

SEQ ID NO: 792466 - DNA, 19 bp, Mus musculus
  siRNA target sequence for C030019I05Rik (NM_177075.2,290-308).
ctgccttcccgtatagtca

SEQ ID NO: 792467 - DNA, 19 bp, Mus musculus
  siRNA target sequence for C030019I05Rik (NM_177075.2,364-382).
ctggtggacccccagattt

SEQ ID NO: 792468 - DNA, 19 bp, Mus musculus
  siRNA target sequence for C030019I05Rik (NM_177075.2,472-490).
gaacctcggtggtcttaca

SEQ ID NO: 792469 - DNA, 19 bp, Mus musculus
  siRNA target sequence for C030019I05Rik (NM_177075.2,511-529).
gccaatgggttggtaagat

SEQ ID NO: 792470 - DNA, 19 bp, Mus musculus
  siRNA target sequence for C030019I05Rik (NM_177075.2,592-610).
gaactgccacgaaagaact

SEQ ID NO: 792471 - DNA, 19 bp, Mus musculus
  siRNA target sequence for C030019I05Rik (NM_177075.2,664-682).
gaggtggtggccttagcta

SEQ ID NO: 792472 - DNA, 19 bp, Mus musculus
  siRNA target sequence for C030019I05Rik (NM_177075.2,672-690).
ggccttagctagagagatt

SEQ ID NO: 792473 - DNA, 19 bp, Mus musculus
  siRNA target sequence for C030019I05Rik (NM_177075.2,703-721).
gccatactgcctcactata

SEQ ID NO: 792474 - DNA, 19 bp, Mus musculus
  siRNA target sequence for 4921539K22Rik (NM_177076.2,285-303).
gttcgaagactgtctgaaa

SEQ ID NO: 792475 - DNA, 19 bp, Mus musculus
  siRNA target sequence for 4921539K22Rik (NM_177076.2,427-445).
caatacctcgtgcaaatca

SEQ ID NO: 792476 - DNA, 19 bp, Mus musculus
  siRNA target sequence for 4921539K22Rik (NM_177076.2,476-494).
ggcaatagcacatgacaat

SEQ ID NO: 792477 - DNA, 19 bp, Mus musculus
  siRNA target sequence for 4921539K22Rik (NM_177076.2,477-495).
gcaatagcacatgacaatt

SEQ ID NO: 792478 - DNA, 19 bp, Mus musculus
  siRNA target sequence for 4921539K22Rik (NM_177076.2,491-509).
caattttagatgccaaaaa

SEQ ID NO: 792479 - DNA, 19 bp, Mus musculus
  siRNA target sequence for 4921539K22Rik (NM_177076.2,536-554).
cacggttatgagtagagaa

SEQ ID NO: 792480 - DNA, 19 bp, Mus musculus
  siRNA target sequence for 4921539K22Rik (NM_177076.2,573-591).
cttcggttgcgacatttgt

SEQ ID NO: 792481 - DNA, 19 bp, Mus musculus
  siRNA target sequence for 4921539K22Rik (NM_177076.2,576-594).
cggttgcgacatttgttct

SEQ ID NO: 792482 - DNA, 19 bp, Mus musculus
  siRNA target sequence for 4921539K22Rik (NM_177076.2,590-608).
gttctatatgcaaagacaa

SEQ ID NO: 792483 - DNA, 19 bp, Mus musculus
  siRNA target sequence for 4921539K22Rik (NM_177076.2,639-657).
gccagacacaagagtaaaa

SEQ ID NO: 792484 - DNA, 19 bp, Mus musculus
  siRNA target sequence for 4921539K22Rik (NM_177076.2,658-676).
caagagaagacgacttgat

SEQ ID NO: 792485 - DNA, 19 bp, Mus musculus
  siRNA target sequence for 4921539K22Rik (NM_177076.2,668-686).
cgacttgatttcaaaacat

SEQ ID NO: 792486 - DNA, 19 bp, Mus musculus
  siRNA target sequence for 4921539K22Rik (NM_177076.2,690-708).
cttcagttgaaaaaatgga

SEQ ID NO: 792487 - DNA, 19 bp, Mus musculus
  siRNA target sequence for 4921539K22Rik (NM_177076.2,765-783).
gagaacaggcgcatagcat

SEQ ID NO: 792488 - DNA, 19 bp, Mus musculus
  siRNA target sequence for 4921539K22Rik (NM_177076.2,772-790).
ggcgcatagcatttgacat

SEQ ID NO: 792489 - DNA, 19 bp, Mus musculus
  siRNA target sequence for 4921539K22Rik (NM_177076.2,774-792).
cgcatagcatttgacattt

SEQ ID NO: 792490 - DNA, 19 bp, Mus musculus
  siRNA target sequence for 4921539K22Rik (NM_177076.2,797-815).
gctaccggagcaagcaata

SEQ ID NO: 792491 - DNA, 19 bp, Mus musculus
  siRNA target sequence for 4921539K22Rik (NM_177076.2,901-919).
gctccttgtggaactctat

SEQ ID NO: 792492 - DNA, 19 bp, Mus musculus
  siRNA target sequence for 4921539K22Rik (NM_177076.2,904-922).
ccttgtggaactctattga

SEQ ID NO: 792493 - DNA, 19 bp, Mus musculus
  siRNA target sequence for 4921539K22Rik (NM_177076.2,955-973).
gtgtggtgaccactttaca

SEQ ID NO: 792494 - DNA, 19 bp, Mus musculus
  siRNA target sequence for 4921539K22Rik (NM_177076.2,984-1002).
ctaaacgtgctgcgtttaa

SEQ ID NO: 792495 - DNA, 19 bp, Mus musculus
  siRNA target sequence for 4921539K22Rik (NM_177076.2,1012-1030).
gctgcgacttccgaacaaa

SEQ ID NO: 792496 - DNA, 19 bp, Mus musculus
  siRNA target sequence for 4921539K22Rik (NM_177076.2,1013-1031).
ctgcgacttccgaacaaaa

SEQ ID NO: 792497 - DNA, 19 bp, Mus musculus
  siRNA target sequence for 4921539K22Rik (NM_177076.2,1017-1035).
gacttccgaacaaaaacct

SEQ ID NO: 792498 - DNA, 19 bp, Mus musculus
  siRNA target sequence for 4921539K22Rik (NM_177076.2,1093-1111).
ctttcacagatgaatccat

SEQ ID NO: 792499 - DNA, 19 bp, Mus musculus
  siRNA target sequence for 4921539K22Rik (NM_177076.2,1104-1122).
gaatccatgaggcacattt

SEQ ID NO: 792500 - DNA, 19 bp, Mus musculus
  siRNA target sequence for 4921539K22Rik (NM_177076.2,1138-1156).
gggtcctgtatctcaatct

SEQ ID NO: 792501 - DNA, 19 bp, Mus musculus
  siRNA target sequence for 4921539K22Rik (NM_177076.2,1252-1270).
ccgacaaaggcttacagta

SEQ ID NO: 792502 - DNA, 19 bp, Mus musculus
  siRNA target sequence for 4921539K22Rik (NM_177076.2,1288-1306).
gatgccacaagctcatcta

SEQ ID NO: 792503 - DNA, 19 bp, Mus musculus
  siRNA target sequence for 4921539K22Rik (NM_177076.2,1341-1359).
gagaagtgtccccgtattt

SEQ ID NO: 792504 - DNA, 19 bp, Mus musculus
  siRNA target sequence for 4921539K22Rik (NM_177076.2,1354-1372).
gtatttcgtcggtggtttt

SEQ ID NO: 792505 - DNA, 19 bp, Mus musculus
  siRNA target sequence for 4921539K22Rik (NM_177076.2,1361-1379).
gtcggtggttttaattggt

SEQ ID NO: 792506 - DNA, 19 bp, Mus musculus
  siRNA target sequence for 4921539K22Rik (NM_177076.2,1420-1438).
cctgcgacctcaaaaagat

SEQ ID NO: 792507 - DNA, 19 bp, Mus musculus
  siRNA target sequence for 4921539K22Rik (NM_177076.2,1430-1448).
caaaaagattcgatttgaa

SEQ ID NO: 792508 - DNA, 19 bp, Mus musculus
  siRNA target sequence for 4921539K22Rik (NM_177076.2,1481-1499).
gtcgatagacaggaattat

SEQ ID NO: 792509 - DNA, 19 bp, Mus musculus
  siRNA target sequence for 4921539K22Rik (NM_177076.2,1484-1502).
gatagacaggaattatcca

SEQ ID NO: 792510 - DNA, 19 bp, Mus musculus
  siRNA target sequence for 4921539K22Rik (NM_177076.2,1592-1610).
gaacttgacaaattgcata

SEQ ID NO: 792511 - DNA, 19 bp, Mus musculus
  siRNA target sequence for 4921539K22Rik (NM_177076.2,1606-1624).
gcataaggattggtgatat

SEQ ID NO: 792512 - DNA, 19 bp, Mus musculus
  siRNA target sequence for 4921539K22Rik (NM_177076.2,1625-1643).
cggcctgaagcattttttt

SEQ ID NO: 792513 - DNA, 19 bp, Mus musculus
  siRNA target sequence for 4921539K22Rik (NM_177076.2,1644-1662).
gatggtcctgcgagtatca

SEQ ID NO: 792514 - DNA, 19 bp, Mus musculus
  siRNA target sequence for 4921539K22Rik (NM_177076.2,1663-1681).
ggctaagagagctcaattt

SEQ ID NO: 792515 - DNA, 19 bp, Mus musculus
  siRNA target sequence for 4921539K22Rik (NM_177076.2,1665-1683).
ctaagagagctcaatttga

SEQ ID NO: 792516 - DNA, 19 bp, Mus musculus
  siRNA target sequence for 4921539K22Rik (NM_177076.2,1669-1687).
gagagctcaatttgactaa

SEQ ID NO: 792517 - DNA, 19 bp, Mus musculus
  siRNA target sequence for 4921539K22Rik (NM_177076.2,1671-1689).
gagctcaatttgactaact

SEQ ID NO: 792518 - DNA, 19 bp, Mus musculus
  siRNA target sequence for 4921539K22Rik (NM_177076.2,1731-1749).
cgttgccctaatttacact

SEQ ID NO: 792519 - DNA, 19 bp, Mus musculus
  siRNA target sequence for 4921539K22Rik (NM_177076.2,1732-1750).
gttgccctaatttacacta

SEQ ID NO: 792520 - DNA, 19 bp, Mus musculus
  siRNA target sequence for 4921539K22Rik (NM_177076.2,1735-1753).
gccctaatttacactactt

SEQ ID NO: 792521 - DNA, 19 bp, Mus musculus
  siRNA target sequence for 4921539K22Rik (NM_177076.2,1737-1755).
cctaatttacactacttga

SEQ ID NO: 792522 - DNA, 19 bp, Mus musculus
  siRNA target sequence for 4921539K22Rik (NM_177076.2,1746-1764).
cactacttgaatttacgaa

SEQ ID NO: 792523 - DNA, 19 bp, Mus musculus
  siRNA target sequence for 4921539K22Rik (NM_177076.2,1748-1766).
ctacttgaatttacgaaat

SEQ ID NO: 792524 - DNA, 19 bp, Mus musculus
  siRNA target sequence for 4921539K22Rik (NM_177076.2,1751-1769).
cttgaatttacgaaattgt

SEQ ID NO: 792525 - DNA, 19 bp, Mus musculus
  siRNA target sequence for 4921539K22Rik (NM_177076.2,1778-1796).
gactgacttggcaattgaa

SEQ ID NO: 792526 - DNA, 19 bp, Mus musculus
  siRNA target sequence for 4921539K22Rik (NM_177076.2,1782-1800).
gacttggcaattgaatata

SEQ ID NO: 792527 - DNA, 19 bp, Mus musculus
  siRNA target sequence for 4921539K22Rik (NM_177076.2,1816-1834).
ccttgatatcagtagatct

SEQ ID NO: 792528 - DNA, 19 bp, Mus musculus
  siRNA target sequence for 4921539K22Rik (NM_177076.2,1817-1835).
cttgatatcagtagatctt

SEQ ID NO: 792529 - DNA, 19 bp, Mus musculus
  siRNA target sequence for 4921539K22Rik (NM_177076.2,1820-1838).
gatatcagtagatctttct

SEQ ID NO: 792530 - DNA, 19 bp, Mus musculus
  siRNA target sequence for 4921539K22Rik (NM_177076.2,1837-1855).
ctggaacactcatctcaaa

SEQ ID NO: 792531 - DNA, 19 bp, Mus musculus
  siRNA target sequence for 4921539K22Rik (NM_177076.2,1941-1959).
cgggcatactgcaaaacct

SEQ ID NO: 792532 - DNA, 19 bp, Mus musculus
  siRNA target sequence for 4921539K22Rik (NM_177076.2,1951-1969).
gcaaaacctcgctgttgtt

SEQ ID NO: 792533 - DNA, 19 bp, Mus musculus
  siRNA target sequence for 4921539K22Rik (NM_177076.2,1960-1978).
cgctgttgttggaacactt

SEQ ID NO: 792534 - DNA, 19 bp, Mus musculus
  siRNA target sequence for 4921539K22Rik (NM_177076.2,2007-2025).
gatgacatcataaagacta

SEQ ID NO: 792535 - DNA, 19 bp, Mus musculus
  siRNA target sequence for 4921539K22Rik (NM_177076.2,2030-2048).
cattttctgtactcgaatt

SEQ ID NO: 792536 - DNA, 19 bp, Mus musculus
  siRNA target sequence for 4921539K22Rik (NM_177076.2,2036-2054).
ctgtactcgaattacatct

SEQ ID NO: 792537 - DNA, 19 bp, Mus musculus
  siRNA target sequence for 4921539K22Rik (NM_177076.2,2041-2059).
ctcgaattacatctcttaa

SEQ ID NO: 792538 - DNA, 19 bp, Mus musculus
  siRNA target sequence for 4921539K22Rik (NM_177076.2,2043-2061).
cgaattacatctcttaaca

SEQ ID NO: 792539 - DNA, 19 bp, Mus musculus
  siRNA target sequence for 4921539K22Rik (NM_177076.2,2063-2081).
cgctggatgcccaaagatt

SEQ ID NO: 792540 - DNA, 19 bp, Mus musculus
  siRNA target sequence for 4921539K22Rik (NM_177076.2,2064-2082).
gctggatgcccaaagatta

SEQ ID NO: 792541 - DNA, 19 bp, Mus musculus
  siRNA target sequence for 4921539K22Rik (NM_177076.2,2085-2103).
gatgcagggatggagatat

SEQ ID NO: 792542 - DNA, 19 bp, Mus musculus
  siRNA target sequence for 4921539K22Rik (NM_177076.2,2107-2125).
ctgcaaggtgccattatct

SEQ ID NO: 792543 - DNA, 19 bp, Mus musculus
  siRNA target sequence for 4921539K22Rik (NM_177076.2,2146-2164).
gctgtatccaacttacaga

SEQ ID NO: 792544 - DNA, 19 bp, Mus musculus
  siRNA target sequence for 4921539K22Rik (NM_177076.2,2171-2189).
cattcaggaccttcaaata

SEQ ID NO: 792545 - DNA, 19 bp, Mus musculus
  siRNA target sequence for 4921539K22Rik (NM_177076.2,2205-2223).
cggatcctcaagatgcaat

SEQ ID NO: 792546 - DNA, 19 bp, Mus musculus
  siRNA target sequence for 4921539K22Rik (NM_177076.2,2206-2224).
ggatcctcaagatgcaatt

SEQ ID NO: 792547 - DNA, 19 bp, Mus musculus
  siRNA target sequence for 4921539K22Rik (NM_177076.2,2333-2351).
caaccctcttgacaagatt

SEQ ID NO: 792548 - DNA, 19 bp, Mus musculus
  siRNA target sequence for 4921539K22Rik (NM_177076.2,2336-2354).
ccctcttgacaagattcat

SEQ ID NO: 792549 - DNA, 19 bp, Mus musculus
  siRNA target sequence for 4921539K22Rik (NM_177076.2,2352-2370).
catagtcgagtacaactta

SEQ ID NO: 792550 - DNA, 19 bp, Mus musculus
  siRNA target sequence for 4921539K22Rik (NM_177076.2,2361-2379).
gtacaacttagaacttact

SEQ ID NO: 792551 - DNA, 19 bp, Mus musculus
  siRNA target sequence for 4921539K22Rik (NM_177076.2,2371-2389).
gaacttactcaaaactgat

SEQ ID NO: 792552 - DNA, 19 bp, Mus musculus
  siRNA target sequence for 4921539K22Rik (NM_177076.2,2374-2392).
cttactcaaaactgatagt

SEQ ID NO: 792553 - DNA, 19 bp, Mus musculus
  siRNA target sequence for 4833444A01Rik (NM_177078.2,102-120).
gagagaaacgaaataacct

SEQ ID NO: 792554 - DNA, 19 bp, Mus musculus
  siRNA target sequence for 4833444A01Rik (NM_177078.2,104-122).
gagaaacgaaataaccttt

SEQ ID NO: 792555 - DNA, 19 bp, Mus musculus
  siRNA target sequence for 4833444A01Rik (NM_177078.2,123-141).
gacaagattttcaatcaga

SEQ ID NO: 792556 - DNA, 19 bp, Mus musculus
  siRNA target sequence for 4833444A01Rik (NM_177078.2,146-164).
cggcttcctactatttaaa

SEQ ID NO: 792557 - DNA, 19 bp, Mus musculus
  siRNA target sequence for 4833444A01Rik (NM_177078.2,148-166).
gcttcctactatttaaaga

SEQ ID NO: 792558 - DNA, 19 bp, Mus musculus
  siRNA target sequence for 4833444A01Rik (NM_177078.2,195-213).
gtgcctcaggtgaaatttt

SEQ ID NO: 792559 - DNA, 19 bp, Mus musculus
  siRNA target sequence for 4833444A01Rik (NM_177078.2,265-283).
gccggagccggcagatgta

SEQ ID NO: 792560 - DNA, 19 bp, Mus musculus
  siRNA target sequence for 4833444A01Rik (NM_177078.2,331-349).
caaagcaagctgtagaaca

SEQ ID NO: 792561 - DNA, 19 bp, Mus musculus
  siRNA target sequence for 4833444A01Rik (NM_177078.2,429-447).
cgtggggatattttccaaa

SEQ ID NO: 792562 - DNA, 19 bp, Mus musculus
  siRNA target sequence for 4833444A01Rik (NM_177078.2,430-448).
gtggggatattttccaaaa

SEQ ID NO: 792563 - DNA, 19 bp, Mus musculus
  siRNA target sequence for 4833444A01Rik (NM_177078.2,432-450).
ggggatattttccaaaagt

SEQ ID NO: 792564 - DNA, 19 bp, Mus musculus
  siRNA target sequence for 4833444A01Rik (NM_177078.2,456-474).
gaaagcgataaattcacta

SEQ ID NO: 792565 - DNA, 19 bp, Mus musculus
  siRNA target sequence for 4833444A01Rik (NM_177078.2,460-478).
gcgataaattcactagatt

SEQ ID NO: 792566 - DNA, 19 bp, Mus musculus
  siRNA target sequence for 4833444A01Rik (NM_177078.2,491-509).
gaacgtggagttgaatatt

SEQ ID NO: 792567 - DNA, 19 bp, Mus musculus
  siRNA target sequence for 4833444A01Rik (NM_177078.2,589-607).
cagacaccggtaaaatgta

SEQ ID NO: 792568 - DNA, 19 bp, Mus musculus
  siRNA target sequence for 4833444A01Rik (NM_177078.2,703-721).
gggattgtccctttattgt

SEQ ID NO: 792569 - DNA, 19 bp, Mus musculus
  siRNA target sequence for 4833444A01Rik (NM_177078.2,705-723).
gattgtccctttattgtct

SEQ ID NO: 792570 - DNA, 19 bp, Mus musculus
  siRNA target sequence for 4833444A01Rik (NM_177078.2,741-759).
cacacgccggacaaactct

SEQ ID NO: 792571 - DNA, 19 bp, Mus musculus
  siRNA target sequence for 4833444A01Rik (NM_177078.2,1124-1142).
ccccttcaggcagcataaa

SEQ ID NO: 792572 - DNA, 19 bp, Mus musculus
  siRNA target sequence for 4833444A01Rik (NM_177078.2,1282-1300).
gaggggcacgagagttgaa

SEQ ID NO: 792573 - DNA, 19 bp, Mus musculus
  siRNA target sequence for 4833444A01Rik (NM_177078.2,1393-1411).
ctgcagatgccttcgatat

SEQ ID NO: 792574 - DNA, 19 bp, Mus musculus
  siRNA target sequence for 4833444A01Rik (NM_177078.2,1459-1477).
gtgaccaggacctctataa

SEQ ID NO: 792575 - DNA, 19 bp, Mus musculus
  siRNA target sequence for 4833444A01Rik (NM_177078.2,1461-1479).
gaccaggacctctataaga

SEQ ID NO: 792576 - DNA, 19 bp, Mus musculus
  siRNA target sequence for 4833444A01Rik (NM_177078.2,1538-1556).
cgccgtcaatgctgatact

SEQ ID NO: 792577 - DNA, 19 bp, Mus musculus
  siRNA target sequence for 4833444A01Rik (NM_177078.2,1540-1558).
ccgtcaatgctgatactga

SEQ ID NO: 792578 - DNA, 19 bp, Mus musculus
  siRNA target sequence for 4833444A01Rik (NM_177078.2,1541-1559).
cgtcaatgctgatactgat

SEQ ID NO: 792579 - DNA, 19 bp, Mus musculus
  siRNA target sequence for 4833444A01Rik (NM_177078.2,1542-1560).
gtcaatgctgatactgata

SEQ ID NO: 792580 - DNA, 19 bp, Mus musculus
  siRNA target sequence for 4833444A01Rik (NM_177078.2,1544-1562).
caatgctgatactgataaa

SEQ ID NO: 792581 - DNA, 19 bp, Mus musculus
  siRNA target sequence for 4833444A01Rik (NM_177078.2,1549-1567).
ctgatactgataaaatcga

SEQ ID NO: 792582 - DNA, 19 bp, Mus musculus
  siRNA target sequence for 4833444A01Rik (NM_177078.2,1569-1587).
gccaggaggaaggctaaaa

SEQ ID NO: 792583 - DNA, 19 bp, Mus musculus
  siRNA target sequence for 4833444A01Rik (NM_177078.2,1571-1589).
caggaggaaggctaaaaat

SEQ ID NO: 792584 - DNA, 19 bp, Mus musculus
  siRNA target sequence for 4833444A01Rik (NM_177078.2,1682-1700).
gtggcaaagacgctatttt

SEQ ID NO: 792585 - DNA, 19 bp, Mus musculus
  siRNA target sequence for 4833444A01Rik (NM_177078.2,1684-1702).
ggcaaagacgctattttta

SEQ ID NO: 792586 - DNA, 19 bp, Mus musculus
  siRNA target sequence for 6030445D17Rik (NM_177079.2,129-147).
gaggaccccgagttcacaa

SEQ ID NO: 792587 - DNA, 19 bp, Mus musculus
  siRNA target sequence for A130050O07Rik (NM_177080.2,455-473).
cccccaggatatcattact

SEQ ID NO: 792588 - DNA, 19 bp, Mus musculus
  siRNA target sequence for A130050O07Rik (NM_177080.2,477-495).
gaggcagcgagtactttat

SEQ ID NO: 792589 - DNA, 19 bp, Mus musculus
  siRNA target sequence for A130050O07Rik (NM_177080.2,479-497).
ggcagcgagtactttatta

SEQ ID NO: 792590 - DNA, 19 bp, Mus musculus
  siRNA target sequence for A130050O07Rik (NM_177080.2,481-499).
cagcgagtactttattaca

SEQ ID NO: 792591 - DNA, 19 bp, Mus musculus
  siRNA target sequence for A130050O07Rik (NM_177080.2,604-622).
gtcatgccaggcaatgtgt

SEQ ID NO: 792592 - DNA, 19 bp, Mus musculus
  siRNA target sequence for A130050O07Rik (NM_177080.2,710-728).
cccactactcagatgagtt

SEQ ID NO: 792593 - DNA, 19 bp, Mus musculus
  siRNA target sequence for B430306N03Rik (NM_177083.2,680-698).
cccacagccccgtcactaa

SEQ ID NO: 792594 - DNA, 19 bp, Mus musculus
  siRNA target sequence for B430306N03Rik (NM_177083.2,682-700).
cacagccccgtcactaaca

SEQ ID NO: 792595 - DNA, 19 bp, Mus musculus
  siRNA target sequence for B430306N03Rik (NM_177083.2,684-702).
cagccccgtcactaacaga

SEQ ID NO: 792596 - DNA, 19 bp, Mus musculus
  siRNA target sequence for B430306N03Rik (NM_177083.2,690-708).
cgtcactaacagaagcttt

SEQ ID NO: 792597 - DNA, 19 bp, Mus musculus
  siRNA target sequence for B430306N03Rik (NM_177083.2,773-791).
cattcgtcatccttgtgat

SEQ ID NO: 792598 - DNA, 19 bp, Mus musculus
  siRNA target sequence for B430306N03Rik (NM_177083.2,823-841).
ctgaacgttcagaaccaat

SEQ ID NO: 792599 - DNA, 19 bp, Mus musculus
  siRNA target sequence for B430306N03Rik (NM_177083.2,837-855).
ccaatgtcaccctatctat

SEQ ID NO: 792600 - DNA, 19 bp, Mus musculus
  siRNA target sequence for B430306N03Rik (NM_177083.2,842-860).
gtcaccctatctatgaaga

SEQ ID NO: 792601 - DNA, 19 bp, Mus musculus
  siRNA target sequence for B430306N03Rik (NM_177083.2,879-897).
ggagaccactagcttcaat

SEQ ID NO: 792602 - DNA, 19 bp, Mus musculus
  siRNA target sequence for B430306N03Rik (NM_177083.2,1025-1043).
cacttctgactgtggaata

SEQ ID NO: 792603 - DNA, 19 bp, Mus musculus
  siRNA target sequence for B430306N03Rik (NM_177083.2,1039-1057).
gaatatgccagcatctcta

SEQ ID NO: 792604 - DNA, 19 bp, Mus musculus
  siRNA target sequence for 4632412N22Rik (NM_177087.2,2427-2445).
caaggcttcacgattccaa

SEQ ID NO: 792605 - DNA, 19 bp, Mus musculus
  siRNA target sequence for 4632412N22Rik (NM_177087.2,2438-2456).
gattccaacaagaaagtga

SEQ ID NO: 792606 - DNA, 19 bp, Mus musculus
  siRNA target sequence for 4632412N22Rik (NM_177087.2,2748-2766).
ctgtggaacggcatatcct

SEQ ID NO: 792607 - DNA, 19 bp, Mus musculus
  siRNA target sequence for 4632412N22Rik (NM_177087.2,2778-2796).
ggtacttcctgaacaaaat

SEQ ID NO: 792608 - DNA, 19 bp, Mus musculus
  siRNA target sequence for 4732496G21Rik (NM_177088.1,154-172).
gaggatacacgaacttcaa

SEQ ID NO: 792609 - DNA, 19 bp, Mus musculus
  siRNA target sequence for 4732496G21Rik (NM_177088.1,226-244).
ggtaccagacctcatagtt

SEQ ID NO: 792610 - DNA, 19 bp, Mus musculus
  siRNA target sequence for 4732496G21Rik (NM_177088.1,274-292).
caatgtccaagcggtaatt

SEQ ID NO: 792611 - DNA, 19 bp, Mus musculus
  siRNA target sequence for 4732496G21Rik (NM_177088.1,278-296).
gtccaagcggtaattgatt

SEQ ID NO: 792612 - DNA, 19 bp, Mus musculus
  siRNA target sequence for 4732496G21Rik (NM_177088.1,280-298).
ccaagcggtaattgattca

SEQ ID NO: 792613 - DNA, 19 bp, Mus musculus
  siRNA target sequence for 4732496G21Rik (NM_177088.1,293-311).
gattcactcgctttggatt

SEQ ID NO: 792614 - DNA, 19 bp, Mus musculus
  siRNA target sequence for 4732496G21Rik (NM_177088.1,297-315).
cactcgctttggattacct

SEQ ID NO: 792615 - DNA, 19 bp, Mus musculus
  siRNA target sequence for 4732496G21Rik (NM_177088.1,339-357).
caggagaaaacatagtgaa

SEQ ID NO: 792616 - DNA, 19 bp, Mus musculus
  siRNA target sequence for 4732496G21Rik (NM_177088.1,434-452).
gaatcgtctcccaacaaaa

SEQ ID NO: 792617 - DNA, 19 bp, Mus musculus
  siRNA target sequence for 4732496G21Rik (NM_177088.1,455-473).
gaaactgagcagtattcta

SEQ ID NO: 792618 - DNA, 19 bp, Mus musculus
  siRNA target sequence for 4732496G21Rik (NM_177088.1,531-549).
ggagaaacgcttcttttat

SEQ ID NO: 792619 - DNA, 19 bp, Mus musculus
  siRNA target sequence for 4732496G21Rik (NM_177088.1,607-625).
gtccacaggtgaaataatt

SEQ ID NO: 792620 - DNA, 19 bp, Mus musculus
  siRNA target sequence for 4732496G21Rik (NM_177088.1,635-653).
gacactgcacatacctttt

SEQ ID NO: 792621 - DNA, 19 bp, Mus musculus
  siRNA target sequence for 4732496G21Rik (NM_177088.1,685-703).
ggacttacggtctagaaaa

SEQ ID NO: 792622 - DNA, 19 bp, Mus musculus
  siRNA target sequence for 4732496G21Rik (NM_177088.1,912-930).
gtcccataggcaaagaata

SEQ ID NO: 792623 - DNA, 19 bp, Mus musculus
  siRNA target sequence for 4732496G21Rik (NM_177088.1,1020-1038).
ccttatttaaagatgatga

SEQ ID NO: 792624 - DNA, 19 bp, Mus musculus
  siRNA target sequence for 4732496G21Rik (NM_177088.1,1042-1060).
ggaaacatatctacctaaa

SEQ ID NO: 792625 - DNA, 19 bp, Mus musculus
  siRNA target sequence for 4732496G21Rik (NM_177088.1,1074-1092).
ggacaaggaagccttctaa

SEQ ID NO: 792626 - DNA, 19 bp, Mus musculus
  siRNA target sequence for 4732496G21Rik (NM_177088.1,1164-1182).
cgttaacagaacaagaact

SEQ ID NO: 792627 - DNA, 19 bp, Mus musculus
  siRNA target sequence for 4732496G21Rik (NM_177088.1,1220-1238).
gaactagactggatgttaa

SEQ ID NO: 792628 - DNA, 19 bp, Mus musculus
  siRNA target sequence for 4732496G21Rik (NM_177088.1,1257-1275).
gaggaacgggcgaaactga

SEQ ID NO: 792629 - DNA, 19 bp, Mus musculus
  siRNA target sequence for 4732496G21Rik (NM_177088.1,1263-1281).
cgggcgaaactgatggtaa

SEQ ID NO: 792630 - DNA, 19 bp, Mus musculus
  siRNA target sequence for 4732496G21Rik (NM_177088.1,1264-1282).
gggcgaaactgatggtaat

SEQ ID NO: 792631 - DNA, 19 bp, Mus musculus
  siRNA target sequence for 4732496G21Rik (NM_177088.1,1266-1284).
gcgaaactgatggtaatga

SEQ ID NO: 792632 - DNA, 19 bp, Mus musculus
  siRNA target sequence for 4732496G21Rik (NM_177088.1,1376-1394).
ccgaggccaggattttcta

SEQ ID NO: 792633 - DNA, 19 bp, Mus musculus
  siRNA target sequence for 4732496G21Rik (NM_177088.1,1500-1518).
cagactcatgccatttcca

SEQ ID NO: 792634 - DNA, 19 bp, Mus musculus
  siRNA target sequence for 4732496G21Rik (NM_177088.1,1549-1567).
ggaactaagaaaacataaa

SEQ ID NO: 792635 - DNA, 19 bp, Mus musculus
  siRNA target sequence for 4732496G21Rik (NM_177088.1,1643-1661).
gaagtcgttcctaaaggaa

SEQ ID NO: 792636 - DNA, 19 bp, Mus musculus
  siRNA target sequence for 4732496G21Rik (NM_177088.1,1674-1692).
gtcaggtccagaagactta

SEQ ID NO: 792637 - DNA, 19 bp, Mus musculus
  siRNA target sequence for 4732496G21Rik (NM_177088.1,1676-1694).
caggtccagaagacttact

SEQ ID NO: 792638 - DNA, 19 bp, Mus musculus
  siRNA target sequence for 4732496G21Rik (NM_177088.1,1687-1705).
gacttactccagaaaaact

SEQ ID NO: 792639 - DNA, 19 bp, Mus musculus
  siRNA target sequence for 4732496G21Rik (NM_177088.1,1727-1745).
gatggtcgcctgaagtcaa

SEQ ID NO: 792640 - DNA, 19 bp, Mus musculus
  siRNA target sequence for 4732496G21Rik (NM_177088.1,1747-1765).
caaggcgtctccgatgaaa

SEQ ID NO: 792641 - DNA, 19 bp, Mus musculus
  siRNA target sequence for 4732496G21Rik (NM_177088.1,1750-1768).
ggcgtctccgatgaaagta

SEQ ID NO: 792642 - DNA, 19 bp, Mus musculus
  siRNA target sequence for 4732496G21Rik (NM_177088.1,1751-1769).
gcgtctccgatgaaagtaa

SEQ ID NO: 792643 - DNA, 19 bp, Mus musculus
  siRNA target sequence for 4732496G21Rik (NM_177088.1,1753-1771).
gtctccgatgaaagtaagt

SEQ ID NO: 792644 - DNA, 19 bp, Mus musculus
  siRNA target sequence for 4732496G21Rik (NM_177088.1,1755-1773).
ctccgatgaaagtaagtga

SEQ ID NO: 792645 - DNA, 19 bp, Mus musculus
  siRNA target sequence for 4732496G21Rik (NM_177088.1,1804-1822).
gtttccatttctctatgtt

SEQ ID NO: 792646 - DNA, 19 bp, Mus musculus
  siRNA target sequence for 4732496G21Rik (NM_177088.1,1865-1883).
caggttgaacaactcaaaa

SEQ ID NO: 792647 - DNA, 19 bp, Mus musculus
  siRNA target sequence for 4732496G21Rik (NM_177088.1,1965-1983).
ctgctcttgtcaagaaaga

SEQ ID NO: 792648 - DNA, 19 bp, Mus musculus
  siRNA target sequence for 4732496G21Rik (NM_177088.1,1982-2000).
gaatatgaccataacaaga

SEQ ID NO: 792649 - DNA, 19 bp, Mus musculus
  siRNA target sequence for 4732496G21Rik (NM_177088.1,2018-2036).
gaccgaattcagagacaaa

SEQ ID NO: 792650 - DNA, 19 bp, Mus musculus
  siRNA target sequence for 4732496G21Rik (NM_177088.1,2037-2055).
ggttgacccaatcaaagat

SEQ ID NO: 792651 - DNA, 19 bp, Mus musculus
  siRNA target sequence for 4732496G21Rik (NM_177088.1,2043-2061).
cccaatcaaagataaaaga

SEQ ID NO: 792652 - DNA, 19 bp, Mus musculus
  siRNA target sequence for 4732496G21Rik (NM_177088.1,2076-2094).
gtgttcgtgcccggaaata

SEQ ID NO: 792653 - DNA, 19 bp, Mus musculus
  siRNA target sequence for 4732496G21Rik (NM_177088.1,2078-2096).
gttcgtgcccggaaatatt

SEQ ID NO: 792654 - DNA, 19 bp, Mus musculus
  siRNA target sequence for 4732496G21Rik (NM_177088.1,2085-2103).
cccggaaatattatgatga

SEQ ID NO: 792655 - DNA, 19 bp, Mus musculus
  siRNA target sequence for 4732496G21Rik (NM_177088.1,2087-2105).
cggaaatattatgatgatt

SEQ ID NO: 792656 - DNA, 19 bp, Mus musculus
  siRNA target sequence for 4732496G21Rik (NM_177088.1,2111-2129).
gttcagttacgtgcaaaaa

SEQ ID NO: 792657 - DNA, 19 bp, Mus musculus
  siRNA target sequence for 4732496G21Rik (NM_177088.1,2114-2132).
cagttacgtgcaaaaatga

SEQ ID NO: 792658 - DNA, 19 bp, Mus musculus
  siRNA target sequence for 4732496G21Rik (NM_177088.1,2145-2163).
cccgggaagaaatgatctt

SEQ ID NO: 792659 - DNA, 19 bp, Mus musculus
  siRNA target sequence for 4732496G21Rik (NM_177088.1,2205-2223).
gactacgagacctaagaaa

SEQ ID NO: 792660 - DNA, 19 bp, Mus musculus
  siRNA target sequence for 4732496G21Rik (NM_177088.1,2280-2298).
cgatggagaaccactataa

SEQ ID NO: 792661 - DNA, 19 bp, Mus musculus
  siRNA target sequence for 4732496G21Rik (NM_177088.1,2299-2317).
ggaccagttttcattgcta

SEQ ID NO: 792662 - DNA, 19 bp, Mus musculus
  siRNA target sequence for 4732496G21Rik (NM_177088.1,2339-2357).
cgtcaagaactcaaagtga

SEQ ID NO: 792663 - DNA, 19 bp, Mus musculus
  siRNA target sequence for 4732496G21Rik (NM_177088.1,2373-2391).
ctcagacattacataaggt

SEQ ID NO: 792664 - DNA, 19 bp, Mus musculus
  siRNA target sequence for 4732496G21Rik (NM_177088.1,2527-2545).
ccagtacagtaaaaatcct

SEQ ID NO: 792665 - DNA, 19 bp, Mus musculus
  siRNA target sequence for 4732496G21Rik (NM_177088.1,2528-2546).
cagtacagtaaaaatcctt

SEQ ID NO: 792666 - DNA, 19 bp, Mus musculus
  siRNA target sequence for B230378H13Rik (NM_177089.3,329-347).
gctcggattctgaaggtaa

SEQ ID NO: 792667 - DNA, 19 bp, Mus musculus
  siRNA target sequence for B230378H13Rik (NM_177089.3,330-348).
ctcggattctgaaggtaat

SEQ ID NO: 792668 - DNA, 19 bp, Mus musculus
  siRNA target sequence for B230378H13Rik (NM_177089.3,332-350).
cggattctgaaggtaattt

SEQ ID NO: 792669 - DNA, 19 bp, Mus musculus
  siRNA target sequence for B230378H13Rik (NM_177089.3,449-467).
ctcgagaagccgatgaaca

SEQ ID NO: 792670 - DNA, 19 bp, Mus musculus
  siRNA target sequence for B230378H13Rik (NM_177089.3,452-470).
gagaagccgatgaacagtt

SEQ ID NO: 792671 - DNA, 19 bp, Mus musculus
  siRNA target sequence for B230378H13Rik (NM_177089.3,775-793).
gttacattggaggctttta

SEQ ID NO: 792672 - DNA, 19 bp, Mus musculus
  siRNA target sequence for B230378H13Rik (NM_177089.3,892-910).
gcccctgaaccggaaatgt

SEQ ID NO: 792673 - DNA, 19 bp, Mus musculus
  siRNA target sequence for B230378H13Rik (NM_177089.3,893-911).
cccctgaaccggaaatgtt

SEQ ID NO: 792674 - DNA, 19 bp, Mus musculus
  siRNA target sequence for B230378H13Rik (NM_177089.3,895-913).
cctgaaccggaaatgttga

SEQ ID NO: 792675 - DNA, 19 bp, Mus musculus
  siRNA target sequence for B230378H13Rik (NM_177089.3,1037-1055).
cagctggtgttctcagtaa

SEQ ID NO: 792676 - DNA, 19 bp, Mus musculus
  siRNA target sequence for B230378H13Rik (NM_177089.3,1195-1213).
ctggcacccagtatacgaa

SEQ ID NO: 792677 - DNA, 19 bp, Mus musculus
  siRNA target sequence for B230378H13Rik (NM_177089.3,1197-1215).
ggcacccagtatacgaaaa

SEQ ID NO: 792678 - DNA, 19 bp, Mus musculus
  siRNA target sequence for B230378H13Rik (NM_177089.3,1199-1217).
cacccagtatacgaaaaga

SEQ ID NO: 792679 - DNA, 19 bp, Mus musculus
  siRNA target sequence for B230378H13Rik (NM_177089.3,1284-1302).
ccagatgtctcctaagcta

SEQ ID NO: 792680 - DNA, 19 bp, Mus musculus
  siRNA target sequence for B230378H13Rik (NM_177089.3,1398-1416).
ctttgacccaaataacatt

SEQ ID NO: 792681 - DNA, 19 bp, Mus musculus
  siRNA target sequence for B230378H13Rik (NM_177089.3,1402-1420).
gacccaaataacattaaca

SEQ ID NO: 792682 - DNA, 19 bp, Mus musculus
  siRNA target sequence for B230378H13Rik (NM_177089.3,1404-1422).
cccaaataacattaacact

SEQ ID NO: 792683 - DNA, 19 bp, Mus musculus
  siRNA target sequence for B230378H13Rik (NM_177089.3,1446-1464).
gccaaccccagctttgaca

SEQ ID NO: 792684 - DNA, 19 bp, Mus musculus
  siRNA target sequence for B230378H13Rik (NM_177089.3,1461-1479).
gacaagcagcggcttttgt

SEQ ID NO: 792685 - DNA, 19 bp, Mus musculus
  siRNA target sequence for B230378H13Rik (NM_177089.3,1478-1496).
gtcccgccactggtaatca

SEQ ID NO: 792686 - DNA, 19 bp, Mus musculus
  siRNA target sequence for B230378H13Rik (NM_177089.3,1481-1499).
ccgccactggtaatcatgt

SEQ ID NO: 792687 - DNA, 19 bp, Mus musculus
  siRNA target sequence for B230378H13Rik (NM_177089.3,1482-1500).
cgccactggtaatcatgtt

SEQ ID NO: 792688 - DNA, 19 bp, Mus musculus
  siRNA target sequence for B230378H13Rik (NM_177089.3,1483-1501).
gccactggtaatcatgtta

SEQ ID NO: 792689 - DNA, 19 bp, Mus musculus
  siRNA target sequence for B230378H13Rik (NM_177089.3,1484-1502).
ccactggtaatcatgttaa

SEQ ID NO: 792690 - DNA, 19 bp, Mus musculus
  siRNA target sequence for B230378H13Rik (NM_177089.3,1485-1503).
cactggtaatcatgttaat

SEQ ID NO: 792691 - DNA, 19 bp, Mus musculus
  siRNA target sequence for B230378H13Rik (NM_177089.3,1487-1505).
ctggtaatcatgttaatga

SEQ ID NO: 792692 - DNA, 19 bp, Mus musculus
  siRNA target sequence for B230378H13Rik (NM_177089.3,1489-1507).
ggtaatcatgttaatgaaa

SEQ ID NO: 792693 - DNA, 19 bp, Mus musculus
  siRNA target sequence for B230378H13Rik (NM_177089.3,1490-1508).
gtaatcatgttaatgaaat

SEQ ID NO: 792694 - DNA, 19 bp, Mus musculus
  siRNA target sequence for B230378H13Rik (NM_177089.3,1524-1542).
gaaggcaaagtcacgttta

SEQ ID NO: 792695 - DNA, 19 bp, Mus musculus
  siRNA target sequence for B230378H13Rik (NM_177089.3,1527-1545).
ggcaaagtcacgtttaata

SEQ ID NO: 792696 - DNA, 19 bp, Mus musculus
  siRNA target sequence for B230378H13Rik (NM_177089.3,1551-1569).
cggctgcaaagtgaagaaa

SEQ ID NO: 792697 - DNA, 19 bp, Mus musculus
  siRNA target sequence for B230378H13Rik (NM_177089.3,1552-1570).
ggctgcaaagtgaagaaat

SEQ ID NO: 792698 - DNA, 19 bp, Mus musculus
  siRNA target sequence for B230378H13Rik (NM_177089.3,1577-1595).
ctcagcctctcgatttgga

SEQ ID NO: 792699 - DNA, 19 bp, Mus musculus
  siRNA target sequence for B230378H13Rik (NM_177089.3,1618-1636).
gccgtgatctcgaagatct

SEQ ID NO: 792700 - DNA, 19 bp, Mus musculus
  siRNA target sequence for B230378H13Rik (NM_177089.3,1626-1644).
ctcgaagatctcagagatt

SEQ ID NO: 792701 - DNA, 19 bp, Mus musculus
  siRNA target sequence for B230378H13Rik (NM_177089.3,1885-1903).
gccgtgctcacgttgatca

SEQ ID NO: 792702 - DNA, 19 bp, Mus musculus
  siRNA target sequence for B230378H13Rik (NM_177089.3,1895-1913).
cgttgatcagagaagagat

SEQ ID NO: 792703 - DNA, 19 bp, Mus musculus
  siRNA target sequence for B230378H13Rik (NM_177089.3,1896-1914).
gttgatcagagaagagata

SEQ ID NO: 792704 - DNA, 19 bp, Mus musculus
  siRNA target sequence for B230378H13Rik (NM_177089.3,2013-2031).
gaccattgcccaaatgatt

SEQ ID NO: 792705 - DNA, 19 bp, Mus musculus
  siRNA target sequence for D330022A01Rik (NM_177090.2,430-448).
cccaccctggagttactca

SEQ ID NO: 792706 - DNA, 19 bp, Mus musculus
  siRNA target sequence for D330022A01Rik (NM_177090.2,460-478).
cctaccagcttcttcaata

SEQ ID NO: 792707 - DNA, 19 bp, Mus musculus
  siRNA target sequence for D330022A01Rik (NM_177090.2,461-479).
ctaccagcttcttcaataa

SEQ ID NO: 792708 - DNA, 19 bp, Mus musculus
  siRNA target sequence for D330022A01Rik (NM_177090.2,585-603).
gtacagatgtggtaacttt

SEQ ID NO: 792709 - DNA, 19 bp, Mus musculus
  siRNA target sequence for D330022A01Rik (NM_177090.2,604-622).
gtggtagacggatcaatct

SEQ ID NO: 792710 - DNA, 19 bp, Mus musculus
  siRNA target sequence for D330022A01Rik (NM_177090.2,614-632).
gatcaatcttcgttcatgt

SEQ ID NO: 792711 - DNA, 19 bp, Mus musculus
  siRNA target sequence for D330022A01Rik (NM_177090.2,654-672).
ccgctgcactggtgctttt

SEQ ID NO: 792712 - DNA, 19 bp, Mus musculus
  siRNA target sequence for E230011A21Rik (NM_177091.2,251-269).
ctgaaataccaactattga

SEQ ID NO: 792713 - DNA, 19 bp, Mus musculus
  siRNA target sequence for E230011A21Rik (NM_177091.2,281-299).
caaaaatcagcaatagtat

SEQ ID NO: 792714 - DNA, 19 bp, Mus musculus
  siRNA target sequence for E230011A21Rik (NM_177091.2,358-376).
gggaacacaatcattgaga

SEQ ID NO: 792715 - DNA, 19 bp, Mus musculus
  siRNA target sequence for E230011A21Rik (NM_177091.2,418-436).
gctgcaaccttgtaccaaa

SEQ ID NO: 792716 - DNA, 19 bp, Mus musculus
  siRNA target sequence for E230011A21Rik (NM_177091.2,419-437).
ctgcaaccttgtaccaaat

SEQ ID NO: 792717 - DNA, 19 bp, Mus musculus
  siRNA target sequence for E230011A21Rik (NM_177091.2,421-439).
gcaaccttgtaccaaatca

SEQ ID NO: 792718 - DNA, 19 bp, Mus musculus
  siRNA target sequence for E230011A21Rik (NM_177091.2,533-551).
ctccaagtccagactcaat

SEQ ID NO: 792719 - DNA, 19 bp, Mus musculus
  siRNA target sequence for E230011A21Rik (NM_177091.2,560-578).
gctgggacgccgtatacat

SEQ ID NO: 792720 - DNA, 19 bp, Mus musculus
  siRNA target sequence for E230011A21Rik (NM_177091.2,586-604).
ggattctccgtgtctgtta

SEQ ID NO: 792721 - DNA, 19 bp, Mus musculus
  siRNA target sequence for E230011A21Rik (NM_177091.2,587-605).
gattctccgtgtctgttat

SEQ ID NO: 792722 - DNA, 19 bp, Mus musculus
  siRNA target sequence for E230011A21Rik (NM_177091.2,611-629).
ccaacggcttgggtagaat

SEQ ID NO: 792723 - DNA, 19 bp, Mus musculus
  siRNA target sequence for E230011A21Rik (NM_177091.2,612-630).
caacggcttgggtagaatt

SEQ ID NO: 792724 - DNA, 19 bp, Mus musculus
  siRNA target sequence for E230011A21Rik (NM_177091.2,679-697).
gccggaactctctacacta

SEQ ID NO: 792725 - DNA, 19 bp, Mus musculus
  siRNA target sequence for E230011A21Rik (NM_177091.2,680-698).
ccggaactctctacactat

SEQ ID NO: 792726 - DNA, 19 bp, Mus musculus
  siRNA target sequence for E230011A21Rik (NM_177091.2,681-699).
cggaactctctacactata

SEQ ID NO: 792727 - DNA, 19 bp, Mus musculus
  siRNA target sequence for E230011A21Rik (NM_177091.2,682-700).
ggaactctctacactataa

SEQ ID NO: 792728 - DNA, 19 bp, Mus musculus
  siRNA target sequence for E230011A21Rik (NM_177091.2,683-701).
gaactctctacactataaa

SEQ ID NO: 792729 - DNA, 19 bp, Mus musculus
  siRNA target sequence for E230011A21Rik (NM_177091.2,709-727).
gcgtggaatgccaatggaa

SEQ ID NO: 792730 - DNA, 19 bp, Mus musculus
  siRNA target sequence for E230011A21Rik (NM_177091.2,710-728).
cgtggaatgccaatggaat

SEQ ID NO: 792731 - DNA, 19 bp, Mus musculus
  siRNA target sequence for E230011A21Rik (NM_177091.2,739-757).
gactccacccgcaatcaga

SEQ ID NO: 792732 - DNA, 19 bp, Mus musculus
  siRNA target sequence for E230011A21Rik (NM_177091.2,770-788).
gtgcccctgccaacattca

SEQ ID NO: 792733 - DNA, 19 bp, Mus musculus
  siRNA target sequence for E230011A21Rik (NM_177091.2,773-791).
cccctgccaacattcaagt

SEQ ID NO: 792734 - DNA, 19 bp, Mus musculus
  siRNA target sequence for E230011A21Rik (NM_177091.2,776-794).
ctgccaacattcaagtctt

SEQ ID NO: 792735 - DNA, 19 bp, Mus musculus
  siRNA target sequence for E230011A21Rik (NM_177091.2,779-797).
ccaacattcaagtcttctt

SEQ ID NO: 792736 - DNA, 19 bp, Mus musculus
  siRNA target sequence for E230011A21Rik (NM_177091.2,808-826).
gccctaaaggcgtctgttt

SEQ ID NO: 792737 - DNA, 19 bp, Mus musculus
  siRNA target sequence for E230011A21Rik (NM_177091.2,839-857).
cagaaggagcgttcaacta

SEQ ID NO: 792738 - DNA, 19 bp, Mus musculus
  siRNA target sequence for E230011A21Rik (NM_177091.2,841-859).
gaaggagcgttcaactaca

SEQ ID NO: 792739 - DNA, 19 bp, Mus musculus
  siRNA target sequence for E230011A21Rik (NM_177091.2,862-880).
gtggtggcatcgagtgatt

SEQ ID NO: 792740 - DNA, 19 bp, Mus musculus
  siRNA target sequence for E230011A21Rik (NM_177091.2,864-882).
ggtggcatcgagtgattct

SEQ ID NO: 792741 - DNA, 19 bp, Mus musculus
  siRNA target sequence for E230011A21Rik (NM_177091.2,865-883).
gtggcatcgagtgattctt

SEQ ID NO: 792742 - DNA, 19 bp, Mus musculus
  siRNA target sequence for E230011A21Rik (NM_177091.2,1031-1049).
cacctggaagggtgatgat

SEQ ID NO: 792743 - DNA, 19 bp, Mus musculus
  siRNA target sequence for E230011A21Rik (NM_177091.2,1244-1262).
gtcctctgggcgatgtatt

SEQ ID NO: 792744 - DNA, 19 bp, Mus musculus
  siRNA target sequence for E230011A21Rik (NM_177091.2,1246-1264).
cctctgggcgatgtattca

SEQ ID NO: 792745 - DNA, 19 bp, Mus musculus
  siRNA target sequence for E230011A21Rik (NM_177091.2,1247-1265).
ctctgggcgatgtattcaa

SEQ ID NO: 792746 - DNA, 19 bp, Mus musculus
  siRNA target sequence for E230011A21Rik (NM_177091.2,1249-1267).
ctgggcgatgtattcaatt

SEQ ID NO: 792747 - DNA, 19 bp, Mus musculus
  siRNA target sequence for E230011A21Rik (NM_177091.2,1252-1270).
ggcgatgtattcaattaca

SEQ ID NO: 792748 - DNA, 19 bp, Mus musculus
  siRNA target sequence for E230011A21Rik (NM_177091.2,1254-1272).
cgatgtattcaattacact

SEQ ID NO: 792749 - DNA, 19 bp, Mus musculus
  siRNA target sequence for E230011A21Rik (NM_177091.2,1255-1273).
gatgtattcaattacacta

SEQ ID NO: 792750 - DNA, 19 bp, Mus musculus
  siRNA target sequence for E230011A21Rik (NM_177091.2,1317-1335).
cagtgacagggtggaaatt

SEQ ID NO: 792751 - DNA, 19 bp, Mus musculus
  siRNA target sequence for E230011A21Rik (NM_177091.2,1354-1372).
ggtgctgaactctatgaaa

SEQ ID NO: 792752 - DNA, 19 bp, Mus musculus
  siRNA target sequence for E230011A21Rik (NM_177091.2,1378-1396).
gccatagctgggtatagca

SEQ ID NO: 792753 - DNA, 19 bp, Mus musculus
  siRNA target sequence for E230011A21Rik (NM_177091.2,1380-1398).
catagctgggtatagcatt

SEQ ID NO: 792754 - DNA, 19 bp, Mus musculus
  siRNA target sequence for E230011A21Rik (NM_177091.2,1444-1462).
gattgtgacaccaagtaca

SEQ ID NO: 792755 - DNA, 19 bp, Mus musculus
  siRNA target sequence for E230011A21Rik (NM_177091.2,1535-1553).
ctccttgcagtcctgaaat

SEQ ID NO: 792756 - DNA, 19 bp, Mus musculus
  siRNA target sequence for E230011A21Rik (NM_177091.2,1593-1611).
gcactggcggtcgactaat

SEQ ID NO: 792757 - DNA, 19 bp, Mus musculus
  siRNA target sequence for E230011A21Rik (NM_177091.2,1596-1614).
ctggcggtcgactaatgaa

SEQ ID NO: 792758 - DNA, 19 bp, Mus musculus
  siRNA target sequence for E230011A21Rik (NM_177091.2,1885-1903).
gcagtgctggagtcataca

SEQ ID NO: 792759 - DNA, 19 bp, Mus musculus
  siRNA target sequence for E230011A21Rik (NM_177091.2,1886-1904).
cagtgctggagtcatacat

SEQ ID NO: 792760 - DNA, 19 bp, Mus musculus
  siRNA target sequence for E230011A21Rik (NM_177091.2,1898-1916).
catacatcggacagtctaa

SEQ ID NO: 792761 - DNA, 19 bp, Mus musculus
  siRNA target sequence for E230011A21Rik (NM_177091.2,1902-1920).
catcggacagtctaagtgt

SEQ ID NO: 792762 - DNA, 19 bp, Mus musculus
  siRNA target sequence for E230011A21Rik (NM_177091.2,1980-1998).
ggcgttaaaagccattagt

SEQ ID NO: 792763 - DNA, 19 bp, Mus musculus
  siRNA target sequence for E230011A21Rik (NM_177091.2,1981-1999).
gcgttaaaagccattagtt

SEQ ID NO: 792764 - DNA, 19 bp, Mus musculus
  siRNA target sequence for E230011A21Rik (NM_177091.2,2014-2032).
gcagattgtgcctatcaaa

SEQ ID NO: 792765 - DNA, 19 bp, Mus musculus
  siRNA target sequence for E230011A21Rik (NM_177091.2,2017-2035).
gattgtgcctatcaaagtt

SEQ ID NO: 792766 - DNA, 19 bp, Mus musculus
  siRNA target sequence for E230011A21Rik (NM_177091.2,2023-2041).
gcctatcaaagttactctt

SEQ ID NO: 792767 - DNA, 19 bp, Mus musculus
  siRNA target sequence for E230011A21Rik (NM_177091.2,2055-2073).
cccactgggggtcaaatta

SEQ ID NO: 792768 - DNA, 19 bp, Mus musculus
  siRNA target sequence for E230011A21Rik (NM_177091.2,2056-2074).
ccactgggggtcaaattat

SEQ ID NO: 792769 - DNA, 19 bp, Mus musculus
  siRNA target sequence for E230011A21Rik (NM_177091.2,2057-2075).
cactgggggtcaaattata

SEQ ID NO: 792770 - DNA, 19 bp, Mus musculus
  siRNA target sequence for E230011A21Rik (NM_177091.2,2059-2077).
ctgggggtcaaattatata

SEQ ID NO: 792771 - DNA, 19 bp, Mus musculus
  siRNA target sequence for E230011A21Rik (NM_177091.2,2152-2170).
ggttccaaaggcatcttta

SEQ ID NO: 792772 - DNA, 19 bp, Mus musculus
  siRNA target sequence for E230011A21Rik (NM_177091.2,2178-2196).
cccacatgccggtctaagt

SEQ ID NO: 792773 - DNA, 19 bp, Mus musculus
  siRNA target sequence for E230011A21Rik (NM_177091.2,2179-2197).
ccacatgccggtctaagtt

SEQ ID NO: 792774 - DNA, 19 bp, Mus musculus
  siRNA target sequence for E230011A21Rik (NM_177091.2,2180-2198).
cacatgccggtctaagttt

SEQ ID NO: 792775 - DNA, 19 bp, Mus musculus
  siRNA target sequence for E230011A21Rik (NM_177091.2,2182-2200).
catgccggtctaagtttct

SEQ ID NO: 792776 - DNA, 19 bp, Mus musculus
  siRNA target sequence for E230011A21Rik (NM_177091.2,2260-2278).
gaaacaggactgaagctta

SEQ ID NO: 792777 - DNA, 19 bp, Mus musculus
  siRNA target sequence for E230011A21Rik (NM_177091.2,2275-2293).
cttactttctgcccaaaaa

SEQ ID NO: 792778 - DNA, 19 bp, Mus musculus
  siRNA target sequence for E230011A21Rik (NM_177091.2,2286-2304).
cccaaaaaaaatatactca

SEQ ID NO: 792779 - DNA, 19 bp, Mus musculus
  siRNA target sequence for E230011A21Rik (NM_177091.2,2315-2333).
ctggcagtactcttggaat

SEQ ID NO: 792780 - DNA, 19 bp, Mus musculus
  siRNA target sequence for D430026P16Rik (NM_177092.2,223-241).
gggtcatgtagggataaaa

SEQ ID NO: 792781 - DNA, 19 bp, Mus musculus
  siRNA target sequence for D430026P16Rik (NM_177092.2,227-245).
catgtagggataaaaagaa

SEQ ID NO: 792782 - DNA, 19 bp, Mus musculus
  siRNA target sequence for D430026P16Rik (NM_177092.2,233-251).
gggataaaaagaactgtaa

SEQ ID NO: 792783 - DNA, 19 bp, Mus musculus
  siRNA target sequence for D430026P16Rik (NM_177092.2,348-366).
gtacacacatcacaaagat

SEQ ID NO: 792784 - DNA, 19 bp, Mus musculus
  siRNA target sequence for D430026P16Rik (NM_177092.2,392-410).
gtggaactccgttgttcaa

SEQ ID NO: 792785 - DNA, 19 bp, Mus musculus
  siRNA target sequence for D430026P16Rik (NM_177092.2,394-412).
ggaactccgttgttcaagt

SEQ ID NO: 792786 - DNA, 19 bp, Mus musculus
  siRNA target sequence for D430026P16Rik (NM_177092.2,400-418).
ccgttgttcaagtcagaaa

SEQ ID NO: 792787 - DNA, 19 bp, Mus musculus
  siRNA target sequence for D430026P16Rik (NM_177092.2,446-464).
ctgccttccatgatgtgat

SEQ ID NO: 792788 - DNA, 19 bp, Mus musculus
  siRNA target sequence for D430026P16Rik (NM_177092.2,544-562).
gctcatctcgggcacattt

SEQ ID NO: 792789 - DNA, 19 bp, Mus musculus
  siRNA target sequence for D430026P16Rik (NM_177092.2,577-595).
cgtccgaccggcaaaagat

SEQ ID NO: 792790 - DNA, 19 bp, Mus musculus
  siRNA target sequence for D430026P16Rik (NM_177092.2,578-596).
gtccgaccggcaaaagata

SEQ ID NO: 792791 - DNA, 19 bp, Mus musculus
  siRNA target sequence for D430026P16Rik (NM_177092.2,580-598).
ccgaccggcaaaagatact

SEQ ID NO: 792792 - DNA, 19 bp, Mus musculus
  siRNA target sequence for E230001N04Rik (NM_177094.2,645-663).
ggagggagctagctatcta

SEQ ID NO: 792793 - DNA, 19 bp, Mus musculus
  siRNA target sequence for E230001N04Rik (NM_177094.2,664-682).
ggcaatgctctttacttga

SEQ ID NO: 792794 - DNA, 19 bp, Mus musculus
  siRNA target sequence for E230001N04Rik (NM_177094.2,665-683).
gcaatgctctttacttgat

SEQ ID NO: 792795 - DNA, 19 bp, Mus musculus
  siRNA target sequence for E230001N04Rik (NM_177094.2,698-716).
gcctcaccagcagatacaa

SEQ ID NO: 792796 - DNA, 19 bp, Mus musculus
  siRNA target sequence for E230001N04Rik (NM_177094.2,710-728).
gatacaatggcgctattaa

SEQ ID NO: 792797 - DNA, 19 bp, Mus musculus
  siRNA target sequence for E230001N04Rik (NM_177094.2,721-739).
gctattaatgtcagctttt

SEQ ID NO: 792798 - DNA, 19 bp, Mus musculus
  siRNA target sequence for E230001N04Rik (NM_177094.2,758-776).
ccaaactgctatgtaatga

SEQ ID NO: 792799 - DNA, 19 bp, Mus musculus
  siRNA target sequence for E230001N04Rik (NM_177094.2,759-777).
caaactgctatgtaatgat

SEQ ID NO: 792800 - DNA, 19 bp, Mus musculus
  siRNA target sequence for E230001N04Rik (NM_177094.2,899-917).
ccctaaggacgctgaaaca

SEQ ID NO: 792801 - DNA, 19 bp, Mus musculus
  siRNA target sequence for B430203M17Rik (NM_177096.2,749-767).
ggaattgagctcttaacca

SEQ ID NO: 792802 - DNA, 19 bp, Mus musculus
  siRNA target sequence for B430203M17Rik (NM_177096.2,805-823).
gaaacaaatacttttgcta

SEQ ID NO: 792803 - DNA, 19 bp, Mus musculus
  siRNA target sequence for B430203M17Rik (NM_177096.2,826-844).
gagtggaatcctcttacaa

SEQ ID NO: 792804 - DNA, 19 bp, Mus musculus
  siRNA target sequence for B430203M17Rik (NM_177096.2,831-849).
gaatcctcttacaaattca

SEQ ID NO: 792805 - DNA, 19 bp, Mus musculus
  siRNA target sequence for B430203M17Rik (NM_177096.2,838-856).
cttacaaattcatatatct

SEQ ID NO: 792806 - DNA, 19 bp, Mus musculus
  siRNA target sequence for B430203M17Rik (NM_177096.2,974-992).
gattctgtaagttaccata

SEQ ID NO: 792807 - DNA, 19 bp, Mus musculus
  siRNA target sequence for B430203M17Rik (NM_177096.2,988-1006).
ccatagaactcgaagcatt

SEQ ID NO: 792808 - DNA, 19 bp, Mus musculus
  siRNA target sequence for B430203M17Rik (NM_177096.2,989-1007).
catagaactcgaagcatta

SEQ ID NO: 792809 - DNA, 19 bp, Mus musculus
  siRNA target sequence for B430203M17Rik (NM_177096.2,993-1011).
gaactcgaagcattatgta

SEQ ID NO: 792810 - DNA, 19 bp, Mus musculus
  siRNA target sequence for B430203M17Rik (NM_177096.2,998-1016).
cgaagcattatgtattcca

SEQ ID NO: 792811 - DNA, 19 bp, Mus musculus
  siRNA target sequence for D830046C22Rik (NM_177097.2,1117-1135).
cccctagcccccatcaaaa

SEQ ID NO: 792812 - DNA, 19 bp, Mus musculus
  siRNA target sequence for D830046C22Rik (NM_177097.2,1118-1136).
ccctagcccccatcaaaaa

SEQ ID NO: 792813 - DNA, 19 bp, Mus musculus
  siRNA target sequence for D830046C22Rik (NM_177097.2,1120-1138).
ctagcccccatcaaaaact

SEQ ID NO: 792814 - DNA, 19 bp, Mus musculus
  siRNA target sequence for D830046C22Rik (NM_177097.2,1137-1155).
ctaataattaacttaaaca

SEQ ID NO: 792815 - DNA, 19 bp, Mus musculus
  siRNA target sequence for D830046C22Rik (NM_177097.2,1274-1292).
cccaagcccacgaaagaca

SEQ ID NO: 792816 - DNA, 19 bp, Mus musculus
  siRNA target sequence for D830046C22Rik (NM_177097.2,1280-1298).
cccacgaaagacaaatgca

SEQ ID NO: 792817 - DNA, 19 bp, Mus musculus
  siRNA target sequence for D830046C22Rik (NM_177097.2,1357-1375).
gtggaatgcagctgatctt

SEQ ID NO: 792818 - DNA, 19 bp, Mus musculus
  siRNA target sequence for D830046C22Rik (NM_177097.2,1364-1382).
gcagctgatcttatcaact

SEQ ID NO: 792819 - DNA, 19 bp, Mus musculus
  siRNA target sequence for 4930412M03Rik (NM_177098.2,743-761).
cttagacgtcacaactcat

SEQ ID NO: 792820 - DNA, 19 bp, Mus musculus
  siRNA target sequence for 4930412M03Rik (NM_177098.2,752-770).
cacaactcatcatgcaatt

SEQ ID NO: 792821 - DNA, 19 bp, Mus musculus
  siRNA target sequence for 4930412M03Rik (NM_177098.2,754-772).
caactcatcatgcaattgt

SEQ ID NO: 792822 - DNA, 19 bp, Mus musculus
  siRNA target sequence for 4930412M03Rik (NM_177098.2,759-777).
catcatgcaattgtgatta

SEQ ID NO: 792823 - DNA, 19 bp, Mus musculus
  siRNA target sequence for 4930412M03Rik (NM_177098.2,766-784).
caattgtgattattacagt

SEQ ID NO: 792824 - DNA, 19 bp, Mus musculus
  siRNA target sequence for 4930412M03Rik (NM_177098.2,880-898).
gagcccttacagtactata

SEQ ID NO: 792825 - DNA, 19 bp, Mus musculus
  siRNA target sequence for 4930412M03Rik (NM_177098.2,952-970).
gctgagacaaccgagaatt

SEQ ID NO: 792826 - DNA, 19 bp, Mus musculus
  siRNA target sequence for 4930412M03Rik (NM_177098.2,955-973).
gagacaaccgagaattcct

SEQ ID NO: 792827 - DNA, 19 bp, Mus musculus
  siRNA target sequence for 4930412M03Rik (NM_177098.2,971-989).
cctccagacatgactcaaa

SEQ ID NO: 792828 - DNA, 19 bp, Mus musculus
  siRNA target sequence for 4930412M03Rik (NM_177098.2,974-992).
ccagacatgactcaaacat

SEQ ID NO: 792829 - DNA, 19 bp, Mus musculus
  siRNA target sequence for 4930412M03Rik (NM_177098.2,995-1013).
ccaagtgacaaaattacct

SEQ ID NO: 792830 - DNA, 19 bp, Mus musculus
  siRNA target sequence for Ebaf (NM_177099.2,462-480).
gctctccggaggtttgaga

SEQ ID NO: 792831 - DNA, 19 bp, Mus musculus
  siRNA target sequence for C130071C03Rik (NM_177100.2,1060-1078).
ctccatcgcttaagaaagt

SEQ ID NO: 792832 - DNA, 19 bp, Mus musculus
  siRNA target sequence for C130071C03Rik (NM_177100.2,1062-1080).
ccatcgcttaagaaagtaa

SEQ ID NO: 792833 - DNA, 19 bp, Mus musculus
  siRNA target sequence for C130071C03Rik (NM_177100.2,1187-1205).
ggccatgattaaatttgga

SEQ ID NO: 792834 - DNA, 19 bp, Mus musculus
  siRNA target sequence for C130071C03Rik (NM_177100.2,1188-1206).
gccatgattaaatttggat

SEQ ID NO: 792835 - DNA, 19 bp, Mus musculus
  siRNA target sequence for 4833442J19Rik (NM_177101.2,319-337).
gtttggatcctaagatgaa

SEQ ID NO: 792836 - DNA, 19 bp, Mus musculus
  siRNA target sequence for 4833442J19Rik (NM_177101.2,414-432).
cccaggtgcaagttttggt

SEQ ID NO: 792837 - DNA, 19 bp, Mus musculus
  siRNA target sequence for 4833442J19Rik (NM_177101.2,465-483).
ccctactgggctatttact

SEQ ID NO: 792838 - DNA, 19 bp, Mus musculus
  siRNA target sequence for 4833442J19Rik (NM_177101.2,494-512).
ccaggctctgtctaggtat

SEQ ID NO: 792839 - DNA, 19 bp, Mus musculus
  siRNA target sequence for 4833442J19Rik (NM_177101.2,497-515).
ggctctgtctaggtatgtt

SEQ ID NO: 792840 - DNA, 19 bp, Mus musculus
  siRNA target sequence for 4833442J19Rik (NM_177101.2,501-519).
ctgtctaggtatgtttcat

SEQ ID NO: 792841 - DNA, 19 bp, Mus musculus
  siRNA target sequence for 4833442J19Rik (NM_177101.2,505-523).
ctaggtatgtttcattgaa

SEQ ID NO: 792842 - DNA, 19 bp, Mus musculus
  siRNA target sequence for 4833442J19Rik (NM_177101.2,620-638).
catgcaagtcccaactttt

SEQ ID NO: 792843 - DNA, 19 bp, Mus musculus
  siRNA target sequence for 4833442J19Rik (NM_177101.2,623-641).
gcaagtcccaacttttata

SEQ ID NO: 792844 - DNA, 19 bp, Mus musculus
  siRNA target sequence for 4833442J19Rik (NM_177101.2,624-642).
caagtcccaacttttatat

SEQ ID NO: 792845 - DNA, 19 bp, Mus musculus
  siRNA target sequence for A830041P22Rik (NM_177102.2,444-462).
ctcggcctggcggtattct

SEQ ID NO: 792846 - DNA, 19 bp, Mus musculus
  siRNA target sequence for A830041P22Rik (NM_177102.2,446-464).
cggcctggcggtattctct

SEQ ID NO: 792847 - DNA, 19 bp, Mus musculus
  siRNA target sequence for 4932425I24Rik (NM_177104.1,59-77).
ggaacccaggcccaatgat

SEQ ID NO: 792848 - DNA, 19 bp, Mus musculus
  siRNA target sequence for 4932425I24Rik (NM_177104.1,78-96).
cagaggattccgtatcaat

SEQ ID NO: 792849 - DNA, 19 bp, Mus musculus
  siRNA target sequence for 4932425I24Rik (NM_177104.1,120-138).
ggcggattcgccaatcgaa

SEQ ID NO: 792850 - DNA, 19 bp, Mus musculus
  siRNA target sequence for 4932425I24Rik (NM_177104.1,149-167).
cctgtacgacccgttattt

SEQ ID NO: 792851 - DNA, 19 bp, Mus musculus
  siRNA target sequence for 4932425I24Rik (NM_177104.1,150-168).
ctgtacgacccgttattta

SEQ ID NO: 792852 - DNA, 19 bp, Mus musculus
  siRNA target sequence for 4932425I24Rik (NM_177104.1,152-170).
gtacgacccgttatttatt

SEQ ID NO: 792853 - DNA, 19 bp, Mus musculus
  siRNA target sequence for 4932425I24Rik (NM_177104.1,156-174).
gacccgttatttattgtgt

SEQ ID NO: 792854 - DNA, 19 bp, Mus musculus
  siRNA target sequence for 4932425I24Rik (NM_177104.1,207-225).
caagccaccctgattcgaa

SEQ ID NO: 792855 - DNA, 19 bp, Mus musculus
  siRNA target sequence for 4932425I24Rik (NM_177104.1,276-294).
catcacccaagatactcta

SEQ ID NO: 792856 - DNA, 19 bp, Mus musculus
  siRNA target sequence for 4932425I24Rik (NM_177104.1,279-297).
cacccaagatactctatgt

SEQ ID NO: 792857 - DNA, 19 bp, Mus musculus
  siRNA target sequence for 4932425I24Rik (NM_177104.1,282-300).
ccaagatactctatgtact

SEQ ID NO: 792858 - DNA, 19 bp, Mus musculus
  siRNA target sequence for 4932425I24Rik (NM_177104.1,387-405).
gctgcgatggacacttctt

SEQ ID NO: 792859 - DNA, 19 bp, Mus musculus
  siRNA target sequence for 4932425I24Rik (NM_177104.1,388-406).
ctgcgatggacacttcttt

SEQ ID NO: 792860 - DNA, 19 bp, Mus musculus
  siRNA target sequence for 4932425I24Rik (NM_177104.1,448-466).
gaaagaaccgctataagtt

SEQ ID NO: 792861 - DNA, 19 bp, Mus musculus
  siRNA target sequence for 4932425I24Rik (NM_177104.1,452-470).
gaaccgctataagttcttt

SEQ ID NO: 792862 - DNA, 19 bp, Mus musculus
  siRNA target sequence for 4932425I24Rik (NM_177104.1,562-580).
cttccaagtacgcaatcat

SEQ ID NO: 792863 - DNA, 19 bp, Mus musculus
  siRNA target sequence for 4932425I24Rik (NM_177104.1,618-636).
cgggatgcagacgttcaaa

SEQ ID NO: 792864 - DNA, 19 bp, Mus musculus
  siRNA target sequence for 4932425I24Rik (NM_177104.1,905-923).
gcgcctggaggttttgaaa

SEQ ID NO: 792865 - DNA, 19 bp, Mus musculus
  siRNA target sequence for 4932425I24Rik (NM_177104.1,975-993).
ctgaacgatcagtggtata

SEQ ID NO: 792866 - DNA, 19 bp, Mus musculus
  siRNA target sequence for F830004M19Rik (NM_177106.2,2257-2275).
caagtttcaccctttggtt

SEQ ID NO: 792867 - DNA, 19 bp, Mus musculus
  siRNA target sequence for F830004M19Rik (NM_177106.2,2304-2322).
gccttgatcctgtatctta

SEQ ID NO: 792868 - DNA, 19 bp, Mus musculus
  siRNA target sequence for F830004M19Rik (NM_177106.2,2315-2333).
gtatcttaaatgtttacga

SEQ ID NO: 792869 - DNA, 19 bp, Mus musculus
  siRNA target sequence for F830004M19Rik (NM_177106.2,2403-2421).
ccccacaacccacgtataa

SEQ ID NO: 792870 - DNA, 19 bp, Mus musculus
  siRNA target sequence for A330015D16Rik (NM_177108.2,291-309).
cttaacagggctaatgaga

SEQ ID NO: 792871 - DNA, 19 bp, Mus musculus
  siRNA target sequence for A330015D16Rik (NM_177108.2,488-506).
gaggagggcacagaaattt

SEQ ID NO: 792872 - DNA, 19 bp, Mus musculus
  siRNA target sequence for A330015D16Rik (NM_177108.2,491-509).
gagggcacagaaatttcaa

SEQ ID NO: 792873 - DNA, 19 bp, Mus musculus
  siRNA target sequence for A330015D16Rik (NM_177108.2,564-582).
caactggttcgtgagaatt

SEQ ID NO: 792874 - DNA, 19 bp, Mus musculus
  siRNA target sequence for A330015D16Rik (NM_177108.2,574-592).
gtgagaattcgcacttcaa

SEQ ID NO: 792875 - DNA, 19 bp, Mus musculus
  siRNA target sequence for A330015D16Rik (NM_177108.2,585-603).
cacttcaaaaccacattgt

SEQ ID NO: 792876 - DNA, 19 bp, Mus musculus
  siRNA target sequence for A330015D16Rik (NM_177108.2,855-873).
cggaaaggcgtgattgcaa

SEQ ID NO: 792877 - DNA, 19 bp, Mus musculus
  siRNA target sequence for A330015D16Rik (NM_177108.2,883-901).
caaacagactcaagctttt

SEQ ID NO: 792878 - DNA, 19 bp, Mus musculus
  siRNA target sequence for A330015D16Rik (NM_177108.2,929-947).
ctggatggagagttgtaaa

SEQ ID NO: 792879 - DNA, 19 bp, Mus musculus
  siRNA target sequence for A330015D16Rik (NM_177108.2,973-991).
ccggggagcccaaagacaa

SEQ ID NO: 792880 - DNA, 19 bp, Mus musculus
  siRNA target sequence for A330015D16Rik (NM_177108.2,992-1010).
gcgccaattcccaaaacat

SEQ ID NO: 792881 - DNA, 19 bp, Mus musculus
  siRNA target sequence for A330015D16Rik (NM_177108.2,994-1012).
gccaattcccaaaacatca

SEQ ID NO: 792882 - DNA, 19 bp, Mus musculus
  siRNA target sequence for A330015D16Rik (NM_177108.2,1065-1083).
cttctaggtacggttatca

SEQ ID NO: 792883 - DNA, 19 bp, Mus musculus
  siRNA target sequence for A330015D16Rik (NM_177108.2,1068-1086).
ctaggtacggttatcagtt

SEQ ID NO: 792884 - DNA, 19 bp, Mus musculus
  siRNA target sequence for A330015D16Rik (NM_177108.2,1071-1089).
ggtacggttatcagttcta

SEQ ID NO: 792885 - DNA, 19 bp, Mus musculus
  siRNA target sequence for A330015D16Rik (NM_177108.2,1072-1090).
gtacggttatcagttctat

SEQ ID NO: 792886 - DNA, 19 bp, Mus musculus
  siRNA target sequence for A330015D16Rik (NM_177108.2,1122-1140).
gatccaaattccaggattt

SEQ ID NO: 792887 - DNA, 19 bp, Mus musculus
  siRNA target sequence for A330015D16Rik (NM_177108.2,1133-1151).
caggatttgtggacattta

SEQ ID NO: 792888 - DNA, 19 bp, Mus musculus
  siRNA target sequence for A330015D16Rik (NM_177108.2,1231-1249).
gcagccggagcataacgta

SEQ ID NO: 792889 - DNA, 19 bp, Mus musculus
  siRNA target sequence for A330015D16Rik (NM_177108.2,1232-1250).
cagccggagcataacgtat

SEQ ID NO: 792890 - DNA, 19 bp, Mus musculus
  siRNA target sequence for A330015D16Rik (NM_177108.2,1235-1253).
ccggagcataacgtatgta

SEQ ID NO: 792891 - DNA, 19 bp, Mus musculus
  siRNA target sequence for A330015D16Rik (NM_177108.2,1237-1255).
ggagcataacgtatgtaga

SEQ ID NO: 792892 - DNA, 19 bp, Mus musculus
  siRNA target sequence for A330015D16Rik (NM_177108.2,1310-1328).
ggccctgaagtatggttta

SEQ ID NO: 792893 - DNA, 19 bp, Mus musculus
  siRNA target sequence for A330015D16Rik (NM_177108.2,1333-1351).
gccatattcccatcatgaa

SEQ ID NO: 792894 - DNA, 19 bp, Mus musculus
  siRNA target sequence for A330015D16Rik (NM_177108.2,1334-1352).
ccatattcccatcatgaaa

SEQ ID NO: 792895 - DNA, 19 bp, Mus musculus
  siRNA target sequence for A330015D16Rik (NM_177108.2,1354-1372).
gcactgcagcgttacaaaa

SEQ ID NO: 792896 - DNA, 19 bp, Mus musculus
  siRNA target sequence for A330015D16Rik (NM_177108.2,1362-1380).
gcgttacaaaagcaaatat

SEQ ID NO: 792897 - DNA, 19 bp, Mus musculus
  siRNA target sequence for A330015D16Rik (NM_177108.2,1431-1449).
cgcctcgaggtgacagaat

SEQ ID NO: 792898 - DNA, 19 bp, Mus musculus
  siRNA target sequence for A330015D16Rik (NM_177108.2,1432-1450).
gcctcgaggtgacagaata

SEQ ID NO: 792899 - DNA, 19 bp, Mus musculus
  siRNA target sequence for A330015D16Rik (NM_177108.2,1434-1452).
ctcgaggtgacagaataca

SEQ ID NO: 792900 - DNA, 19 bp, Mus musculus
  siRNA target sequence for A330015D16Rik (NM_177108.2,1436-1454).
cgaggtgacagaatacaaa

SEQ ID NO: 792901 - DNA, 19 bp, Mus musculus
  siRNA target sequence for A330015D16Rik (NM_177108.2,1459-1477).
ccgtgcacgagatgaaaaa

SEQ ID NO: 792902 - DNA, 19 bp, Mus musculus
  siRNA target sequence for A330015D16Rik (NM_177108.2,1507-1525).
cacaattaaatgaattcaa

SEQ ID NO: 792903 - DNA, 19 bp, Mus musculus
  siRNA target sequence for A330015D16Rik (NM_177108.2,1518-1536).
gaattcaagcactctgtaa

SEQ ID NO: 792904 - DNA, 19 bp, Mus musculus
  siRNA target sequence for A330015D16Rik (NM_177108.2,1539-1557).
caacgatggccgtgtgata

SEQ ID NO: 792905 - DNA, 19 bp, Mus musculus
  siRNA target sequence for C130023O10Rik (NM_177110.2,153-171).
caagagtcccagagttgat

SEQ ID NO: 792906 - DNA, 19 bp, Mus musculus
  siRNA target sequence for C130023O10Rik (NM_177110.2,162-180).
cagagttgatctttttcca

SEQ ID NO: 792907 - DNA, 19 bp, Mus musculus
  siRNA target sequence for C130023O10Rik (NM_177110.2,164-182).
gagttgatctttttccatt

SEQ ID NO: 792908 - DNA, 19 bp, Mus musculus
  siRNA target sequence for C130023O10Rik (NM_177110.2,195-213).
gaggaccaagccttacact

SEQ ID NO: 792909 - DNA, 19 bp, Mus musculus
  siRNA target sequence for C130023O10Rik (NM_177110.2,236-254).
cacaagaagagaatagtct

SEQ ID NO: 792910 - DNA, 19 bp, Mus musculus
  siRNA target sequence for C130023O10Rik (NM_177110.2,264-282).
gagaaaggcagcattcaaa

SEQ ID NO: 792911 - DNA, 19 bp, Mus musculus
  siRNA target sequence for C130023O10Rik (NM_177110.2,290-308).
caacagcacctgaacttaa

SEQ ID NO: 792912 - DNA, 19 bp, Mus musculus
  siRNA target sequence for C130023O10Rik (NM_177110.2,293-311).
cagcacctgaacttaaaca

SEQ ID NO: 792913 - DNA, 19 bp, Mus musculus
  siRNA target sequence for C130023O10Rik (NM_177110.2,296-314).
cacctgaacttaaacatga

SEQ ID NO: 792914 - DNA, 19 bp, Mus musculus
  siRNA target sequence for C130023O10Rik (NM_177110.2,319-337).
ctccaagaggagcgtaaat

SEQ ID NO: 792915 - DNA, 19 bp, Mus musculus
  siRNA target sequence for C130023O10Rik (NM_177110.2,381-399).
gtgtgccgttgtaagagtt

SEQ ID NO: 792916 - DNA, 19 bp, Mus musculus
  siRNA target sequence for C130023O10Rik (NM_177110.2,386-404).
ccgttgtaagagttgtgtt

SEQ ID NO: 792917 - DNA, 19 bp, Mus musculus
  siRNA target sequence for E230015L20Rik (NM_177111.1,41-59).
cacacggtccgaaaacaaa

SEQ ID NO: 792918 - DNA, 19 bp, Mus musculus
  siRNA target sequence for E230015L20Rik (NM_177111.1,45-63).
cggtccgaaaacaaacttt

SEQ ID NO: 792919 - DNA, 19 bp, Mus musculus
  siRNA target sequence for E230015L20Rik (NM_177111.1,47-65).
gtccgaaaacaaactttct

SEQ ID NO: 792920 - DNA, 19 bp, Mus musculus
  siRNA target sequence for E230015L20Rik (NM_177111.1,56-74).
caaactttctccgttctat

SEQ ID NO: 792921 - DNA, 19 bp, Mus musculus
  siRNA target sequence for E230015L20Rik (NM_177111.1,60-78).
ctttctccgttctatgact

SEQ ID NO: 792922 - DNA, 19 bp, Mus musculus
  siRNA target sequence for E230015L20Rik (NM_177111.1,110-128).
gggaacgacgccgacaaaa

SEQ ID NO: 792923 - DNA, 19 bp, Mus musculus
  siRNA target sequence for E230015L20Rik (NM_177111.1,111-129).
ggaacgacgccgacaaaaa

SEQ ID NO: 792924 - DNA, 19 bp, Mus musculus
  siRNA target sequence for E230015L20Rik (NM_177111.1,116-134).
gacgccgacaaaaacaatt

SEQ ID NO: 792925 - DNA, 19 bp, Mus musculus
  siRNA target sequence for E230015L20Rik (NM_177111.1,120-138).
ccgacaaaaacaattagaa

SEQ ID NO: 792926 - DNA, 19 bp, Mus musculus
  siRNA target sequence for E230015L20Rik (NM_177111.1,406-424).
gctcagaagggacatgata

SEQ ID NO: 792927 - DNA, 19 bp, Mus musculus
  siRNA target sequence for E230015L20Rik (NM_177111.1,409-427).
cagaagggacatgatacat

SEQ ID NO: 792928 - DNA, 19 bp, Mus musculus
  siRNA target sequence for E230015L20Rik (NM_177111.1,460-478).
gattataaggcattcacta

SEQ ID NO: 792929 - DNA, 19 bp, Mus musculus
  siRNA target sequence for E230015L20Rik (NM_177111.1,556-574).
cagacagatgacgtaaact

SEQ ID NO: 792930 - DNA, 19 bp, Mus musculus
  siRNA target sequence for E230015L20Rik (NM_177111.1,558-576).
gacagatgacgtaaactta

SEQ ID NO: 792931 - DNA, 19 bp, Mus musculus
  siRNA target sequence for E230015L20Rik (NM_177111.1,562-580).
gatgacgtaaacttaggaa

SEQ ID NO: 792932 - DNA, 19 bp, Mus musculus
  siRNA target sequence for E230015L20Rik (NM_177111.1,565-583).
gacgtaaacttaggaattt

SEQ ID NO: 792933 - DNA, 19 bp, Mus musculus
  siRNA target sequence for E230015L20Rik (NM_177111.1,602-620).
cctgtggatcggtaacaga

SEQ ID NO: 792934 - DNA, 19 bp, Mus musculus
  siRNA target sequence for E230015L20Rik (NM_177111.1,613-631).
gtaacagagaagggtatta

SEQ ID NO: 792935 - DNA, 19 bp, Mus musculus
  siRNA target sequence for E230015L20Rik (NM_177111.1,624-642).
gggtattagaaacatttct

SEQ ID NO: 792936 - DNA, 19 bp, Mus musculus
  siRNA target sequence for E230015L20Rik (NM_177111.1,666-684).
cagtggacagactgacatt

SEQ ID NO: 792937 - DNA, 19 bp, Mus musculus
  siRNA target sequence for E230015L20Rik (NM_177111.1,691-709).
gagaaccaagaactaagta

SEQ ID NO: 792938 - DNA, 19 bp, Mus musculus
  siRNA target sequence for E230015L20Rik (NM_177111.1,711-729).
gaataaaggcactaattta

SEQ ID NO: 792939 - DNA, 19 bp, Mus musculus
  siRNA target sequence for E230015L20Rik (NM_177111.1,747-765).
gcataatggccagtgtaat

SEQ ID NO: 792940 - DNA, 19 bp, Mus musculus
  siRNA target sequence for E230015L20Rik (NM_177111.1,820-838).
cctgcttggaatataaaca

SEQ ID NO: 792941 - DNA, 19 bp, Mus musculus
  siRNA target sequence for E230015L20Rik (NM_177111.1,950-968).
gaaacaatcccgagaatct

SEQ ID NO: 792942 - DNA, 19 bp, Mus musculus
  siRNA target sequence for E230015L20Rik (NM_177111.1,1028-1046).
gcaggttgcaccttatcaa

SEQ ID NO: 792943 - DNA, 19 bp, Mus musculus
  siRNA target sequence for E230015L20Rik (NM_177111.1,1029-1047).
caggttgcaccttatcaaa

SEQ ID NO: 792944 - DNA, 19 bp, Mus musculus
  siRNA target sequence for E230015L20Rik (NM_177111.1,1035-1053).
gcaccttatcaaaaaggta

SEQ ID NO: 792945 - DNA, 19 bp, Mus musculus
  siRNA target sequence for E230015L20Rik (NM_177111.1,1070-1088).
ctccttcagttagtaaaga

SEQ ID NO: 792946 - DNA, 19 bp, Mus musculus
  siRNA target sequence for E230015L20Rik (NM_177111.1,1133-1151).
ctcaaagtaatgtattaca

SEQ ID NO: 792947 - DNA, 19 bp, Mus musculus
  siRNA target sequence for E230015L20Rik (NM_177111.1,1150-1168).
cacttaccactaaaaaaca

SEQ ID NO: 792948 - DNA, 19 bp, Mus musculus
  siRNA target sequence for E230015L20Rik (NM_177111.1,1152-1170).
cttaccactaaaaaacaat

SEQ ID NO: 792949 - DNA, 19 bp, Mus musculus
  siRNA target sequence for E230015L20Rik (NM_177111.1,1156-1174).
ccactaaaaaacaatgact

SEQ ID NO: 792950 - DNA, 19 bp, Mus musculus
  siRNA target sequence for E230015L20Rik (NM_177111.1,1199-1217).
gagatggtcatactaaatt

SEQ ID NO: 792951 - DNA, 19 bp, Mus musculus
  siRNA target sequence for E230015L20Rik (NM_177111.1,1205-1223).
gtcatactaaattatcaga

SEQ ID NO: 792952 - DNA, 19 bp, Mus musculus
  siRNA target sequence for E230015L20Rik (NM_177111.1,1211-1229).
ctaaattatcagatgagat

SEQ ID NO: 792953 - DNA, 19 bp, Mus musculus
  siRNA target sequence for E230015L20Rik (NM_177111.1,1253-1271).
cctacgttcgaacaaatga

SEQ ID NO: 792954 - DNA, 19 bp, Mus musculus
  siRNA target sequence for E230015L20Rik (NM_177111.1,1261-1279).
cgaacaaatgagatctatt

SEQ ID NO: 792955 - DNA, 19 bp, Mus musculus
  siRNA target sequence for E230015L20Rik (NM_177111.1,1288-1306).
ccagacgcacccttgtcta

SEQ ID NO: 792956 - DNA, 19 bp, Mus musculus
  siRNA target sequence for E230015L20Rik (NM_177111.1,1313-1331).
caacccaggacaaccaata

SEQ ID NO: 792957 - DNA, 19 bp, Mus musculus
  siRNA target sequence for E230015L20Rik (NM_177111.1,1326-1344).
ccaataccaaaaatctcat

SEQ ID NO: 792958 - DNA, 19 bp, Mus musculus
  siRNA target sequence for E230015L20Rik (NM_177111.1,1352-1370).
cccgagaacaagagctatt

SEQ ID NO: 792959 - DNA, 19 bp, Mus musculus
  siRNA target sequence for E230015L20Rik (NM_177111.1,1353-1371).
ccgagaacaagagctattt

SEQ ID NO: 792960 - DNA, 19 bp, Mus musculus
  siRNA target sequence for E230015L20Rik (NM_177111.1,1386-1404).
cagggatccacttcttaat

SEQ ID NO: 792961 - DNA, 19 bp, Mus musculus
  siRNA target sequence for E230015L20Rik (NM_177111.1,1393-1411).
ccacttcttaatcctaaat

SEQ ID NO: 792962 - DNA, 19 bp, Mus musculus
  siRNA target sequence for E230015L20Rik (NM_177111.1,1394-1412).
cacttcttaatcctaaatt

SEQ ID NO: 792963 - DNA, 19 bp, Mus musculus
  siRNA target sequence for E230015L20Rik (NM_177111.1,1399-1417).
cttaatcctaaattagtga

SEQ ID NO: 792964 - DNA, 19 bp, Mus musculus
  siRNA target sequence for E230015L20Rik (NM_177111.1,1424-1442).
gggaccgacagcaagctat

SEQ ID NO: 792965 - DNA, 19 bp, Mus musculus
  siRNA target sequence for E230015L20Rik (NM_177111.1,1428-1446).
ccgacagcaagctatcctt

SEQ ID NO: 792966 - DNA, 19 bp, Mus musculus
  siRNA target sequence for E230015L20Rik (NM_177111.1,1429-1447).
cgacagcaagctatcctta

SEQ ID NO: 792967 - DNA, 19 bp, Mus musculus
  siRNA target sequence for E230015L20Rik (NM_177111.1,1503-1521).
gaatctcatacccttaact

SEQ ID NO: 792968 - DNA, 19 bp, Mus musculus
  siRNA target sequence for A730037L19Rik (NM_177112.2,2049-2067).
ggggacttgcacacttagt

SEQ ID NO: 792969 - DNA, 19 bp, Mus musculus
  siRNA target sequence for A730037L19Rik (NM_177112.2,2082-2100).
caagtatctgccttggtat

SEQ ID NO: 792970 - DNA, 19 bp, Mus musculus
  siRNA target sequence for A830037N07Rik (NM_177113.3,1196-1214).
caggatttcatctgagtat

SEQ ID NO: 792971 - DNA, 19 bp, Mus musculus
  siRNA target sequence for A830037N07Rik (NM_177113.3,1225-1243).
ccatgggagtcactaaact

SEQ ID NO: 792972 - DNA, 19 bp, Mus musculus
  siRNA target sequence for A830037N07Rik (NM_177113.3,1323-1341).
ctactacttaaccgttttt

SEQ ID NO: 792973 - DNA, 19 bp, Mus musculus
  siRNA target sequence for A830037N07Rik (NM_177113.3,1395-1413).
ctctctcacccaacactat

SEQ ID NO: 792974 - DNA, 19 bp, Mus musculus
  siRNA target sequence for A830037N07Rik (NM_177113.3,1399-1417).
ctcacccaacactatctta

SEQ ID NO: 792975 - DNA, 19 bp, Mus musculus
  siRNA target sequence for A830037N07Rik (NM_177113.3,1435-1453).
ccaggccaatgcagctaat

SEQ ID NO: 792976 - DNA, 19 bp, Mus musculus
  siRNA target sequence for A830037N07Rik (NM_177113.3,1440-1458).
ccaatgcagctaattttga

SEQ ID NO: 792977 - DNA, 19 bp, Mus musculus
  siRNA target sequence for A830037N07Rik (NM_177113.3,1469-1487).
catttatcaccagcatatt

SEQ ID NO: 792978 - DNA, 19 bp, Mus musculus
  siRNA target sequence for C230029D21Rik (NM_177116.2,1853-1871).
gggagcgatgtccagaaat

SEQ ID NO: 792979 - DNA, 19 bp, Mus musculus
  siRNA target sequence for C230029D21Rik (NM_177116.2,1857-1875).
gcgatgtccagaaatattt

SEQ ID NO: 792980 - DNA, 19 bp, Mus musculus
  siRNA target sequence for C230029D21Rik (NM_177116.2,1879-1897).
caggttaatgtgtaattgt

SEQ ID NO: 792981 - DNA, 19 bp, Mus musculus
  siRNA target sequence for D630005C06Rik (NM_177117.2,75-93).
gcttcctcggccgttatgt

SEQ ID NO: 792982 - DNA, 19 bp, Mus musculus
  siRNA target sequence for D630005C06Rik (NM_177117.2,174-192).
cattcctcgaccgtcttaa

SEQ ID NO: 792983 - DNA, 19 bp, Mus musculus
  siRNA target sequence for D630005C06Rik (NM_177117.2,178-196).
cctcgaccgtcttaatgga

SEQ ID NO: 792984 - DNA, 19 bp, Mus musculus
  siRNA target sequence for D630005C06Rik (NM_177117.2,179-197).
ctcgaccgtcttaatggat

SEQ ID NO: 792985 - DNA, 19 bp, Mus musculus
  siRNA target sequence for D630005C06Rik (NM_177117.2,295-313).
cgttgcgcacgcaggaaat

SEQ ID NO: 792986 - DNA, 19 bp, Mus musculus
  siRNA target sequence for D630005C06Rik (NM_177117.2,299-317).
gcgcacgcaggaaatctca

SEQ ID NO: 792987 - DNA, 19 bp, Mus musculus
  siRNA target sequence for D630005C06Rik (NM_177117.2,333-351).
gtcttccgaaacttgtaca

SEQ ID NO: 792988 - DNA, 19 bp, Mus musculus
  siRNA target sequence for D630005C06Rik (NM_177117.2,447-465).
caggcgcgagccatctata

SEQ ID NO: 792989 - DNA, 19 bp, Mus musculus
  siRNA target sequence for D630005C06Rik (NM_177117.2,451-469).
cgcgagccatctataaaca

SEQ ID NO: 792990 - DNA, 19 bp, Mus musculus
  siRNA target sequence for D630005C06Rik (NM_177117.2,486-504).
gccatgttggagagacata

SEQ ID NO: 792991 - DNA, 19 bp, Mus musculus
  siRNA target sequence for D630005C06Rik (NM_177117.2,487-505).
ccatgttggagagacatat

SEQ ID NO: 792992 - DNA, 19 bp, Mus musculus
  siRNA target sequence for D630005C06Rik (NM_177117.2,512-530).
ggcccgtgcacgggatatt

SEQ ID NO: 792993 - DNA, 19 bp, Mus musculus
  siRNA target sequence for D630005C06Rik (NM_177117.2,515-533).
ccgtgcacgggatattgca

SEQ ID NO: 792994 - DNA, 19 bp, Mus musculus
  siRNA target sequence for D630005C06Rik (NM_177117.2,622-640).
gtctagacagcaagttaat

SEQ ID NO: 792995 - DNA, 19 bp, Mus musculus
  siRNA target sequence for D630005C06Rik (NM_177117.2,631-649).
gcaagttaatgcgaaaaca

SEQ ID NO: 792996 - DNA, 19 bp, Mus musculus
  siRNA target sequence for D630005C06Rik (NM_177117.2,632-650).
caagttaatgcgaaaacat

SEQ ID NO: 792997 - DNA, 19 bp, Mus musculus
  siRNA target sequence for D630005C06Rik (NM_177117.2,642-660).
cgaaaacatcacttaatct

SEQ ID NO: 792998 - DNA, 19 bp, Mus musculus
  siRNA target sequence for D630005C06Rik (NM_177117.2,718-736).
ccacccttggatgttcaaa

SEQ ID NO: 792999 - DNA, 19 bp, Mus musculus
  siRNA target sequence for D630005C06Rik (NM_177117.2,1019-1037).
gtttttcccgcctaacaca

SEQ ID NO: 793000 - DNA, 19 bp, Mus musculus
  siRNA target sequence for D630005C06Rik (NM_177117.2,1139-1157).
cctggcgaagccatcagtt

SEQ ID NO: 793001 - DNA, 19 bp, Mus musculus
  siRNA target sequence for D630005C06Rik (NM_177117.2,1159-1177).
gatttttcacagattacga

SEQ ID NO: 793002 - DNA, 19 bp, Mus musculus
  siRNA target sequence for D630005C06Rik (NM_177117.2,1166-1184).
cacagattacgaaattgga

SEQ ID NO: 793003 - DNA, 19 bp, Mus musculus
  siRNA target sequence for D630005C06Rik (NM_177117.2,1358-1376).
ctgtcttggcgattttgat

SEQ ID NO: 793004 - DNA, 19 bp, Mus musculus
  siRNA target sequence for D630005C06Rik (NM_177117.2,1360-1378).
gtcttggcgattttgatga

SEQ ID NO: 793005 - DNA, 19 bp, Mus musculus
  siRNA target sequence for D630005C06Rik (NM_177117.2,1365-1383).
ggcgattttgatgatttca

SEQ ID NO: 793006 - DNA, 19 bp, Mus musculus
  siRNA target sequence for D630005C06Rik (NM_177117.2,1367-1385).
cgattttgatgatttcatt

SEQ ID NO: 793007 - DNA, 19 bp, Mus musculus
  siRNA target sequence for D630005C06Rik (NM_177117.2,1495-1513).
gaggggtgaagataaccaa

SEQ ID NO: 793008 - DNA, 19 bp, Mus musculus
  siRNA target sequence for D630005C06Rik (NM_177117.2,1534-1552).
gcttcagcgtcggcaaatt

SEQ ID NO: 793009 - DNA, 19 bp, Mus musculus
  siRNA target sequence for D630005C06Rik (NM_177117.2,1538-1556).
cagcgtcggcaaattctgt

SEQ ID NO: 793010 - DNA, 19 bp, Mus musculus
  siRNA target sequence for D630005C06Rik (NM_177117.2,1540-1558).
gcgtcggcaaattctgtat

SEQ ID NO: 793011 - DNA, 19 bp, Mus musculus
  siRNA target sequence for D630005C06Rik (NM_177117.2,1542-1560).
gtcggcaaattctgtatca

SEQ ID NO: 793012 - DNA, 19 bp, Mus musculus
  siRNA target sequence for D630005C06Rik (NM_177117.2,1592-1610).
ccgggctgttgcaactact

SEQ ID NO: 793013 - DNA, 19 bp, Mus musculus
  siRNA target sequence for D630005C06Rik (NM_177117.2,1665-1683).
ccagggtacgccatactgt

SEQ ID NO: 793014 - DNA, 19 bp, Mus musculus
  siRNA target sequence for D630005C06Rik (NM_177117.2,1666-1684).
cagggtacgccatactgtt

SEQ ID NO: 793015 - DNA, 19 bp, Mus musculus
  siRNA target sequence for D630005C06Rik (NM_177117.2,1797-1815).
gctttggatctgattcata

SEQ ID NO: 793016 - DNA, 19 bp, Mus musculus
  siRNA target sequence for A830073O21Rik (NM_177118.2,878-896).
gaactgttcacgcgattta

SEQ ID NO: 793017 - DNA, 19 bp, Mus musculus
  siRNA target sequence for A830073O21Rik (NM_177118.2,881-899).
ctgttcacgcgatttattt

SEQ ID NO: 793018 - DNA, 19 bp, Mus musculus
  siRNA target sequence for A830073O21Rik (NM_177118.2,883-901).
gttcacgcgatttatttct

SEQ ID NO: 793019 - DNA, 19 bp, Mus musculus
  siRNA target sequence for 6030470M02Rik (NM_177119.2,1105-1123).
ggtgatatacgcattctgt

SEQ ID NO: 793020 - DNA, 19 bp, Mus musculus
  siRNA target sequence for 6030470M02Rik (NM_177119.2,1106-1124).
gtgatatacgcattctgtt

SEQ ID NO: 793021 - DNA, 19 bp, Mus musculus
  siRNA target sequence for 6030470M02Rik (NM_177119.2,1114-1132).
cgcattctgttgcatttta

SEQ ID NO: 793022 - DNA, 19 bp, Mus musculus
  siRNA target sequence for 6030470M02Rik (NM_177119.2,1136-1154).
gtctgcttaagctatcact

SEQ ID NO: 793023 - DNA, 19 bp, Mus musculus
  siRNA target sequence for 6030470M02Rik (NM_177119.2,1173-1191).
cagttgttcagcaactcat

SEQ ID NO: 793024 - DNA, 19 bp, Mus musculus
  siRNA target sequence for 6030470M02Rik (NM_177119.2,1239-1257).
ggcgagcatttgtgtattt

SEQ ID NO: 793025 - DNA, 19 bp, Mus musculus
  siRNA target sequence for 6030470M02Rik (NM_177119.2,1240-1258).
gcgagcatttgtgtattta

SEQ ID NO: 793026 - DNA, 19 bp, Mus musculus
  siRNA target sequence for 6030470M02Rik (NM_177119.2,1300-1318).
cgtctgtagactgaatact

SEQ ID NO: 793027 - DNA, 19 bp, Mus musculus
  siRNA target sequence for 6030470M02Rik (NM_177119.2,1301-1319).
gtctgtagactgaatactt

SEQ ID NO: 793028 - DNA, 19 bp, Mus musculus
  siRNA target sequence for D130060J02Rik (NM_177120.2,393-411).
cattgaattcctccttaat

SEQ ID NO: 793029 - DNA, 19 bp, Mus musculus
  siRNA target sequence for D130060J02Rik (NM_177120.2,397-415).
gaattcctccttaatttct

SEQ ID NO: 793030 - DNA, 19 bp, Mus musculus
  siRNA target sequence for D130060J02Rik (NM_177120.2,596-614).
catatggccttgatttttt

SEQ ID NO: 793031 - DNA, 19 bp, Mus musculus
  siRNA target sequence for B930095G15Rik (NM_177121.2,590-608).
cacctgtccttcttcctaa

SEQ ID NO: 793032 - DNA, 19 bp, Mus musculus
  siRNA target sequence for B930095G15Rik (NM_177121.2,666-684).
gaaaacctgcccctatagt

SEQ ID NO: 793033 - DNA, 19 bp, Mus musculus
  siRNA target sequence for B930095G15Rik (NM_177121.2,686-704).
gttgggatagagttcgaaa

SEQ ID NO: 793034 - DNA, 19 bp, Mus musculus
  siRNA target sequence for B930095G15Rik (NM_177121.2,710-728).
cgtcagcaaagcaaaggtt

SEQ ID NO: 793035 - DNA, 19 bp, Mus musculus
  siRNA target sequence for B930095G15Rik (NM_177121.2,772-790).
ccctgggctggttcagaat

SEQ ID NO: 793036 - DNA, 19 bp, Mus musculus
  siRNA target sequence for B930095G15Rik (NM_177121.2,972-990).
gcctgcaatgctacagaaa

SEQ ID NO: 793037 - DNA, 19 bp, Mus musculus
  siRNA target sequence for B930095G15Rik (NM_177121.2,1048-1066).
gggcttgaagggtcatcaa

SEQ ID NO: 793038 - DNA, 19 bp, Mus musculus
  siRNA target sequence for B930095G15Rik (NM_177121.2,1110-1128).
cctcactaaccgaatctca

SEQ ID NO: 793039 - DNA, 19 bp, Mus musculus
  siRNA target sequence for B930095G15Rik (NM_177121.2,1130-1148).
cagcccagcccatgttttt

SEQ ID NO: 793040 - DNA, 19 bp, Mus musculus
  siRNA target sequence for D030063F01Rik (NM_177122.2,1075-1093).
cttgtgttctcccacattt

SEQ ID NO: 793041 - DNA, 19 bp, Mus musculus
  siRNA target sequence for D030063F01Rik (NM_177122.2,1132-1150).
ctgtaactgaagttttgta

SEQ ID NO: 793042 - DNA, 19 bp, Mus musculus
  siRNA target sequence for D030063F01Rik (NM_177122.2,1180-1198).
gccttgatactgctttgat

SEQ ID NO: 793043 - DNA, 19 bp, Mus musculus
  siRNA target sequence for D030063F01Rik (NM_177122.2,1181-1199).
ccttgatactgctttgatt

SEQ ID NO: 793044 - DNA, 19 bp, Mus musculus
  siRNA target sequence for D030063F01Rik (NM_177122.2,1185-1203).
gatactgctttgattgcta

SEQ ID NO: 793045 - DNA, 19 bp, Mus musculus
  siRNA target sequence for D030063F01Rik (NM_177122.2,1287-1305).
gacttgggtggattcaact

SEQ ID NO: 793046 - DNA, 19 bp, Mus musculus
  siRNA target sequence for C230086A09Rik (NM_177123.2,62-80).
ccgtgagtcccaagtcatt

SEQ ID NO: 793047 - DNA, 19 bp, Mus musculus
  siRNA target sequence for C230086A09Rik (NM_177123.2,63-81).
cgtgagtcccaagtcattt

SEQ ID NO: 793048 - DNA, 19 bp, Mus musculus
  siRNA target sequence for C230086A09Rik (NM_177123.2,68-86).
gtcccaagtcatttgcaaa

SEQ ID NO: 793049 - DNA, 19 bp, Mus musculus
  siRNA target sequence for C230086A09Rik (NM_177123.2,102-120).
ctatctaattggagaagtt

SEQ ID NO: 793050 - DNA, 19 bp, Mus musculus
  siRNA target sequence for C230086A09Rik (NM_177123.2,181-199).
gccaagcttaacaatttct

SEQ ID NO: 793051 - DNA, 19 bp, Mus musculus
  siRNA target sequence for C230086A09Rik (NM_177123.2,201-219).
ccgcttgcaaccaacactt

SEQ ID NO: 793052 - DNA, 19 bp, Mus musculus
  siRNA target sequence for C230086A09Rik (NM_177123.2,287-305).
caaccaaacttctgtatca

SEQ ID NO: 793053 - DNA, 19 bp, Mus musculus
  siRNA target sequence for C230086A09Rik (NM_177123.2,295-313).
cttctgtatcagttgtaca

SEQ ID NO: 793054 - DNA, 19 bp, Mus musculus
  siRNA target sequence for C230086A09Rik (NM_177123.2,345-363).
gactggactagagatacaa

SEQ ID NO: 793055 - DNA, 19 bp, Mus musculus
  siRNA target sequence for C230086A09Rik (NM_177123.2,418-436).
cgagagcaacgcttaaaca

SEQ ID NO: 793056 - DNA, 19 bp, Mus musculus
  siRNA target sequence for C230086A09Rik (NM_177123.2,440-458).
gacgacaaaatgagataat

SEQ ID NO: 793057 - DNA, 19 bp, Mus musculus
  siRNA target sequence for C230086A09Rik (NM_177123.2,497-515).
ctgaatccaaccgtacttt

SEQ ID NO: 793058 - DNA, 19 bp, Mus musculus
  siRNA target sequence for C230086A09Rik (NM_177123.2,499-517).
gaatccaaccgtactttga

SEQ ID NO: 793059 - DNA, 19 bp, Mus musculus
  siRNA target sequence for C230086A09Rik (NM_177123.2,507-525).
ccgtactttgaaagctatt

SEQ ID NO: 793060 - DNA, 19 bp, Mus musculus
  siRNA target sequence for C230086A09Rik (NM_177123.2,509-527).
gtactttgaaagctattga

SEQ ID NO: 793061 - DNA, 19 bp, Mus musculus
  siRNA target sequence for C230086A09Rik (NM_177123.2,521-539).
ctattgaggctcaaaaact

SEQ ID NO: 793062 - DNA, 19 bp, Mus musculus
  siRNA target sequence for C230086A09Rik (NM_177123.2,629-647).
gtgtatccaagacttcttt

SEQ ID NO: 793063 - DNA, 19 bp, Mus musculus
  siRNA target sequence for C230086A09Rik (NM_177123.2,671-689).
cagaactgctcaacactta

SEQ ID NO: 793064 - DNA, 19 bp, Mus musculus
  siRNA target sequence for C230086A09Rik (NM_177123.2,678-696).
gctcaacacttattcagat

SEQ ID NO: 793065 - DNA, 19 bp, Mus musculus
  siRNA target sequence for C230086A09Rik (NM_177123.2,681-699).
caacacttattcagatgat

SEQ ID NO: 793066 - DNA, 19 bp, Mus musculus
  siRNA target sequence for C230086A09Rik (NM_177123.2,686-704).
cttattcagatgatgacta

SEQ ID NO: 793067 - DNA, 19 bp, Mus musculus
  siRNA target sequence for C230086A09Rik (NM_177123.2,694-712).
gatgatgactacattaaaa

SEQ ID NO: 793068 - DNA, 19 bp, Mus musculus
  siRNA target sequence for C230086A09Rik (NM_177123.2,767-785).
gacgacgcagattgttgat

SEQ ID NO: 793069 - DNA, 19 bp, Mus musculus
  siRNA target sequence for C230086A09Rik (NM_177123.2,904-922).
cgccacgagaaggaagttt

SEQ ID NO: 793070 - DNA, 19 bp, Mus musculus
  siRNA target sequence for C230086A09Rik (NM_177123.2,905-923).
gccacgagaaggaagtttt

SEQ ID NO: 793071 - DNA, 19 bp, Mus musculus
  siRNA target sequence for C230086A09Rik (NM_177123.2,919-937).
gttttgtggcaaaatagaa

SEQ ID NO: 793072 - DNA, 19 bp, Mus musculus
  siRNA target sequence for C230086A09Rik (NM_177123.2,961-979).
gaaagacgacttaaggatt

SEQ ID NO: 793073 - DNA, 19 bp, Mus musculus
  siRNA target sequence for C230086A09Rik (NM_177123.2,965-983).
gacgacttaaggatttcca

SEQ ID NO: 793074 - DNA, 19 bp, Mus musculus
  siRNA target sequence for C230086A09Rik (NM_177123.2,1026-1044).
gattgattttgcagaacaa

SEQ ID NO: 793075 - DNA, 19 bp, Mus musculus
  siRNA target sequence for C230086A09Rik (NM_177123.2,1088-1106).
gagcccaacagcgttataa

SEQ ID NO: 793076 - DNA, 19 bp, Mus musculus
  siRNA target sequence for C230086A09Rik (NM_177123.2,1090-1108).
gcccaacagcgttataaga

SEQ ID NO: 793077 - DNA, 19 bp, Mus musculus
  siRNA target sequence for C230086A09Rik (NM_177123.2,1091-1109).
cccaacagcgttataagaa

SEQ ID NO: 793078 - DNA, 19 bp, Mus musculus
  siRNA target sequence for C230086A09Rik (NM_177123.2,1098-1116).
gcgttataagaagcattat

SEQ ID NO: 793079 - DNA, 19 bp, Mus musculus
  siRNA target sequence for C230086A09Rik (NM_177123.2,1107-1125).
gaagcattatgggatatgt

SEQ ID NO: 793080 - DNA, 19 bp, Mus musculus
  siRNA target sequence for C230086A09Rik (NM_177123.2,1131-1149).
gattttggatcaaatgcta

SEQ ID NO: 793081 - DNA, 19 bp, Mus musculus
  siRNA target sequence for C230086A09Rik (NM_177123.2,1138-1156).
gatcaaatgctagatttgt

SEQ ID NO: 793082 - DNA, 19 bp, Mus musculus
  siRNA target sequence for C230086A09Rik (NM_177123.2,1158-1176).
cacgaaggtggcagactat

SEQ ID NO: 793083 - DNA, 19 bp, Mus musculus
  siRNA target sequence for C230086A09Rik (NM_177123.2,1173-1191).
ctataggttgctgacaaat

SEQ ID NO: 793084 - DNA, 19 bp, Mus musculus
  siRNA target sequence for C230086A09Rik (NM_177123.2,1178-1196).
ggttgctgacaaataatct

SEQ ID NO: 793085 - DNA, 19 bp, Mus musculus
  siRNA target sequence for C230086A09Rik (NM_177123.2,1179-1197).
gttgctgacaaataatctt

SEQ ID NO: 793086 - DNA, 19 bp, Mus musculus
  siRNA target sequence for C230086A09Rik (NM_177123.2,1182-1200).
gctgacaaataatcttatt

SEQ ID NO: 793087 - DNA, 19 bp, Mus musculus
  siRNA target sequence for C230086A09Rik (NM_177123.2,1185-1203).
gacaaataatcttattcca

SEQ ID NO: 793088 - DNA, 19 bp, Mus musculus
  siRNA target sequence for C230086A09Rik (NM_177123.2,1212-1230).
gatgcacgattggaaagaa

SEQ ID NO: 793089 - DNA, 19 bp, Mus musculus
  siRNA target sequence for C230086A09Rik (NM_177123.2,1329-1347).
cttactcgatagcaaagat

SEQ ID NO: 793090 - DNA, 19 bp, Mus musculus
  siRNA target sequence for C230086A09Rik (NM_177123.2,1335-1353).
cgatagcaaagattatgaa

SEQ ID NO: 793091 - DNA, 19 bp, Mus musculus
  siRNA target sequence for C230086A09Rik (NM_177123.2,1354-1372).
gattataaggtacatacta

SEQ ID NO: 793092 - DNA, 19 bp, Mus musculus
  siRNA target sequence for D230019K20Rik (NM_177124.2,182-200).
gggaagaacagttaatgga

SEQ ID NO: 793093 - DNA, 19 bp, Mus musculus
  siRNA target sequence for D230019K20Rik (NM_177124.2,253-271).
gtcacggaacaaaaaacca

SEQ ID NO: 793094 - DNA, 19 bp, Mus musculus
  siRNA target sequence for D230019K20Rik (NM_177124.2,277-295).
cccgaagtgacgaaaccaa

SEQ ID NO: 793095 - DNA, 19 bp, Mus musculus
  siRNA target sequence for D230019K20Rik (NM_177124.2,283-301).
gtgacgaaaccaagtttaa

SEQ ID NO: 793096 - DNA, 19 bp, Mus musculus
  siRNA target sequence for D230019K20Rik (NM_177124.2,453-471).
gcaggaccataaagtgtta

SEQ ID NO: 793097 - DNA, 19 bp, Mus musculus
  siRNA target sequence for D230019K20Rik (NM_177124.2,457-475).
gaccataaagtgttactaa

SEQ ID NO: 793098 - DNA, 19 bp, Mus musculus
  siRNA target sequence for D230019K20Rik (NM_177124.2,643-661).
gcttcaaattatgcaaatt

SEQ ID NO: 793099 - DNA, 19 bp, Mus musculus
  siRNA target sequence for D230019K20Rik (NM_177124.2,720-738).
ctgggacaaggtgattgta

SEQ ID NO: 793100 - DNA, 19 bp, Mus musculus
  siRNA target sequence for D230019K20Rik (NM_177124.2,722-740).
gggacaaggtgattgtaga

SEQ ID NO: 793101 - DNA, 19 bp, Mus musculus
  siRNA target sequence for D230019K20Rik (NM_177124.2,753-771).
ggaagagtggccttgtatt

SEQ ID NO: 793102 - DNA, 19 bp, Mus musculus
  siRNA target sequence for D230019K20Rik (NM_177124.2,799-817).
gaaaacaccaccgataaca

SEQ ID NO: 793103 - DNA, 19 bp, Mus musculus
  siRNA target sequence for D230019K20Rik (NM_177124.2,856-874).
ccaggaagcaccactagta

SEQ ID NO: 793104 - DNA, 19 bp, Mus musculus
  siRNA target sequence for D230019K20Rik (NM_177124.2,857-875).
caggaagcaccactagtaa

SEQ ID NO: 793105 - DNA, 19 bp, Mus musculus
  siRNA target sequence for D230019K20Rik (NM_177124.2,859-877).
ggaagcaccactagtaaca

SEQ ID NO: 793106 - DNA, 19 bp, Mus musculus
  siRNA target sequence for D230019K20Rik (NM_177124.2,904-922).
gcaagttctgggaacgaat

SEQ ID NO: 793107 - DNA, 19 bp, Mus musculus
  siRNA target sequence for D230019K20Rik (NM_177124.2,908-926).
gttctgggaacgaatgtaa

SEQ ID NO: 793108 - DNA, 19 bp, Mus musculus
  siRNA target sequence for D230019K20Rik (NM_177124.2,911-929).
ctgggaacgaatgtaatct

SEQ ID NO: 793109 - DNA, 19 bp, Mus musculus
  siRNA target sequence for D230019K20Rik (NM_177124.2,967-985).
caacctcccaactctactt

SEQ ID NO: 793110 - DNA, 19 bp, Mus musculus
  siRNA target sequence for D230019K20Rik (NM_177124.2,1022-1040).
cgagtggtcaggatagaat

SEQ ID NO: 793111 - DNA, 19 bp, Mus musculus
  siRNA target sequence for D230019K20Rik (NM_177124.2,1023-1041).
gagtggtcaggatagaatt

SEQ ID NO: 793112 - DNA, 19 bp, Mus musculus
  siRNA target sequence for D230019K20Rik (NM_177124.2,1220-1238).
cgggtgttaattttgttgt

SEQ ID NO: 793113 - DNA, 19 bp, Mus musculus
  siRNA target sequence for D230019K20Rik (NM_177124.2,1247-1265).
gagaacaggctcaaattca

SEQ ID NO: 793114 - DNA, 19 bp, Mus musculus
  siRNA target sequence for D230019K20Rik (NM_177124.2,1279-1297).
ccaaaaaatggaaacacta

SEQ ID NO: 793115 - DNA, 19 bp, Mus musculus
  siRNA target sequence for D230019K20Rik (NM_177124.2,1293-1311).
cactaactccttgaactta

SEQ ID NO: 793116 - DNA, 19 bp, Mus musculus
  siRNA target sequence for D230019K20Rik (NM_177124.2,1299-1317).
ctccttgaacttaagttca

SEQ ID NO: 793117 - DNA, 19 bp, Mus musculus
  siRNA target sequence for D230019K20Rik (NM_177124.2,1318-1336).
ccaaaccccatggaaaata

SEQ ID NO: 793118 - DNA, 19 bp, Mus musculus
  siRNA target sequence for D230019K20Rik (NM_177124.2,1319-1337).
caaaccccatggaaaataa

SEQ ID NO: 793119 - DNA, 19 bp, Mus musculus
  siRNA target sequence for D230019K20Rik (NM_177124.2,1622-1640).
gccctcaggacaataatga

SEQ ID NO: 793120 - DNA, 19 bp, Mus musculus
  siRNA target sequence for D230019K20Rik (NM_177124.2,1703-1721).
cgactgggtctgatgagtt

SEQ ID NO: 793121 - DNA, 19 bp, Mus musculus
  siRNA target sequence for D230019K20Rik (NM_177124.2,1708-1726).
gggtctgatgagttgaaaa

SEQ ID NO: 793122 - DNA, 19 bp, Mus musculus
  siRNA target sequence for D230019K20Rik (NM_177124.2,1741-1759).
ggtccaaaccaaccaaatt

SEQ ID NO: 793123 - DNA, 19 bp, Mus musculus
  siRNA target sequence for D230019K20Rik (NM_177124.2,1828-1846).
ccctgttggggaagatctt

SEQ ID NO: 793124 - DNA, 19 bp, Mus musculus
  siRNA target sequence for D230019K20Rik (NM_177124.2,1903-1921).
ggaagtagtgacagtcata

SEQ ID NO: 793125 - DNA, 19 bp, Mus musculus
  siRNA target sequence for D230019K20Rik (NM_177124.2,1904-1922).
gaagtagtgacagtcataa

SEQ ID NO: 793126 - DNA, 19 bp, Mus musculus
  siRNA target sequence for D230019K20Rik (NM_177124.2,1981-1999).
cttttgagccggactgatt

SEQ ID NO: 793127 - DNA, 19 bp, Mus musculus
  siRNA target sequence for D230019K20Rik (NM_177124.2,2027-2045).
gctggggccaaactcaaat

SEQ ID NO: 793128 - DNA, 19 bp, Mus musculus
  siRNA target sequence for D230019K20Rik (NM_177124.2,2170-2188).
cccagccaaagcaatcaaa

SEQ ID NO: 793129 - DNA, 19 bp, Mus musculus
  siRNA target sequence for D230019K20Rik (NM_177124.2,2174-2192).
gccaaagcaatcaaatgaa

SEQ ID NO: 793130 - DNA, 19 bp, Mus musculus
  siRNA target sequence for D230019K20Rik (NM_177124.2,2246-2264).
caggaggctggaatgacta

SEQ ID NO: 793131 - DNA, 19 bp, Mus musculus
  siRNA target sequence for D230019K20Rik (NM_177124.2,2249-2267).
gaggctggaatgactataa

SEQ ID NO: 793132 - DNA, 19 bp, Mus musculus
  siRNA target sequence for D230019K20Rik (NM_177124.2,2251-2269).
ggctggaatgactataaga

SEQ ID NO: 793133 - DNA, 19 bp, Mus musculus
  siRNA target sequence for D230019K20Rik (NM_177124.2,2252-2270).
gctggaatgactataagaa

SEQ ID NO: 793134 - DNA, 19 bp, Mus musculus
  siRNA target sequence for D230019K20Rik (NM_177124.2,2260-2278).
gactataagaacaacaact

SEQ ID NO: 793135 - DNA, 19 bp, Mus musculus
  siRNA target sequence for D230019K20Rik (NM_177124.2,2411-2429).
gcgaggaggtggatcaagt

SEQ ID NO: 793136 - DNA, 19 bp, Mus musculus
  siRNA target sequence for D230019K20Rik (NM_177124.2,2419-2437).
gtggatcaagtgaaaaata

SEQ ID NO: 793137 - DNA, 19 bp, Mus musculus
  siRNA target sequence for D230019K20Rik (NM_177124.2,2512-2530).
ggtaatggtgggaatacaa

SEQ ID NO: 793138 - DNA, 19 bp, Mus musculus
  siRNA target sequence for D230019K20Rik (NM_177124.2,2513-2531).
gtaatggtgggaatacaaa

SEQ ID NO: 793139 - DNA, 19 bp, Mus musculus
  siRNA target sequence for D230019K20Rik (NM_177124.2,2596-2614).
cagcccaattcctggaata

SEQ ID NO: 793140 - DNA, 19 bp, Mus musculus
  siRNA target sequence for D230019K20Rik (NM_177124.2,2598-2616).
gcccaattcctggaataaa

SEQ ID NO: 793141 - DNA, 19 bp, Mus musculus
  siRNA target sequence for D230019K20Rik (NM_177124.2,2688-2706).
gccacctcaaggcaatgtt

SEQ ID NO: 793142 - DNA, 19 bp, Mus musculus
  siRNA target sequence for D230019K20Rik (NM_177124.2,2699-2717).
gcaatgttcgaccttctaa

SEQ ID NO: 793143 - DNA, 19 bp, Mus musculus
  siRNA target sequence for D230019K20Rik (NM_177124.2,2742-2760).
gcctacaacccctaaggat

SEQ ID NO: 793144 - DNA, 19 bp, Mus musculus
  siRNA target sequence for D230019K20Rik (NM_177124.2,2785-2803).
ccatccccacagtcaatta

SEQ ID NO: 793145 - DNA, 19 bp, Mus musculus
  siRNA target sequence for D230019K20Rik (NM_177124.2,2798-2816).
caattagtcggaaaatgga

SEQ ID NO: 793146 - DNA, 19 bp, Mus musculus
  siRNA target sequence for D230019K20Rik (NM_177124.2,2804-2822).
gtcggaaaatggacattga

SEQ ID NO: 793147 - DNA, 19 bp, Mus musculus
  siRNA target sequence for D230019K20Rik (NM_177124.2,2841-2859).
gggagaccctaacagttat

SEQ ID NO: 793148 - DNA, 19 bp, Mus musculus
  siRNA target sequence for D230019K20Rik (NM_177124.2,2842-2860).
ggagaccctaacagttata

SEQ ID NO: 793149 - DNA, 19 bp, Mus musculus
  siRNA target sequence for D230019K20Rik (NM_177124.2,2848-2866).
cctaacagttataactaca

SEQ ID NO: 793150 - DNA, 19 bp, Mus musculus
  siRNA target sequence for D230019K20Rik (NM_177124.2,2853-2871).
cagttataactacaagaat

SEQ ID NO: 793151 - DNA, 19 bp, Mus musculus
  siRNA target sequence for D230019K20Rik (NM_177124.2,2855-2873).
gttataactacaagaatgt

SEQ ID NO: 793152 - DNA, 19 bp, Mus musculus
  siRNA target sequence for D230019K20Rik (NM_177124.2,2906-2924).
cagcacctcgagaaccaaa

SEQ ID NO: 793153 - DNA, 19 bp, Mus musculus
  siRNA target sequence for D230019K20Rik (NM_177124.2,2934-2952).
cccaatgaccgggaaatca

SEQ ID NO: 793154 - DNA, 19 bp, Mus musculus
  siRNA target sequence for D230019K20Rik (NM_177124.2,2957-2975).
caggtaggtaccaactctt

SEQ ID NO: 793155 - DNA, 19 bp, Mus musculus
  siRNA target sequence for D230019K20Rik (NM_177124.2,2959-2977).
ggtaggtaccaactctttt

SEQ ID NO: 793156 - DNA, 19 bp, Mus musculus
  siRNA target sequence for 2610511N21Rik (NM_177126.2,370-388).
gctgtcttgctgaaggatt

SEQ ID NO: 793157 - DNA, 19 bp, Mus musculus
  siRNA target sequence for 2610511N21Rik (NM_177126.2,526-544).
ggctgtgcctggtatgttt

SEQ ID NO: 793158 - DNA, 19 bp, Mus musculus
  siRNA target sequence for 2610511N21Rik (NM_177126.2,528-546).
ctgtgcctggtatgtttgt

SEQ ID NO: 793159 - DNA, 19 bp, Mus musculus
  siRNA target sequence for 2610511N21Rik (NM_177126.2,562-580).
cctgcaggagcggtgaatt

SEQ ID NO: 793160 - DNA, 19 bp, Mus musculus
  siRNA target sequence for 2610511N21Rik (NM_177126.2,565-583).
gcaggagcggtgaattcct

SEQ ID NO: 793161 - DNA, 19 bp, Mus musculus
  siRNA target sequence for 2610511N21Rik (NM_177126.2,566-584).
caggagcggtgaattcctt

SEQ ID NO: 793162 - DNA, 19 bp, Mus musculus
  siRNA target sequence for B830004H01Rik (NM_177127.2,290-308).
gattccagcactagtgtat

SEQ ID NO: 793163 - DNA, 19 bp, Mus musculus
  siRNA target sequence for 6820449I09Rik (NM_177128.2,362-380).
gtcctcagtcaagattctt

SEQ ID NO: 793164 - DNA, 19 bp, Mus musculus
  siRNA target sequence for 6820449I09Rik (NM_177128.2,391-409).
gggtggttggtctacaatt

SEQ ID NO: 793165 - DNA, 19 bp, Mus musculus
  siRNA target sequence for 6820449I09Rik (NM_177128.2,392-410).
ggtggttggtctacaattt

SEQ ID NO: 793166 - DNA, 19 bp, Mus musculus
  siRNA target sequence for 6820449I09Rik (NM_177128.2,411-429).
cccagcttacacagatact

SEQ ID NO: 793167 - DNA, 19 bp, Mus musculus
  siRNA target sequence for 6820449I09Rik (NM_177128.2,523-541).
ggggagaaggttacaaaca

SEQ ID NO: 793168 - DNA, 19 bp, Mus musculus
  siRNA target sequence for 6820449I09Rik (NM_177128.2,524-542).
gggagaaggttacaaacat

SEQ ID NO: 793169 - DNA, 19 bp, Mus musculus
  siRNA target sequence for 6820449I09Rik (NM_177128.2,531-549).
ggttacaaacatgtttcat

SEQ ID NO: 793170 - DNA, 19 bp, Mus musculus
  siRNA target sequence for 6820449I09Rik (NM_177128.2,543-561).
gtttcatcaatgcaactaa

SEQ ID NO: 793171 - DNA, 19 bp, Mus musculus
  siRNA target sequence for 6820449I09Rik (NM_177128.2,572-590).
caagataaattactacatt

SEQ ID NO: 793172 - DNA, 19 bp, Mus musculus
  siRNA target sequence for 6820449I09Rik (NM_177128.2,622-640).
gttattgggaggtcatgtt

SEQ ID NO: 793173 - DNA, 19 bp, Mus musculus
  siRNA target sequence for 6820449I09Rik (NM_177128.2,661-679).
gcagagtgatcatttctta

SEQ ID NO: 793174 - DNA, 19 bp, Mus musculus
  siRNA target sequence for 6820449I09Rik (NM_177128.2,682-700).
cttgctgcaaactgacaat

SEQ ID NO: 793175 - DNA, 19 bp, Mus musculus
  siRNA target sequence for 6820449I09Rik (NM_177128.2,685-703).
gctgcaaactgacaatgtt

SEQ ID NO: 793176 - DNA, 19 bp, Mus musculus
  siRNA target sequence for 6820449I09Rik (NM_177128.2,724-742).
gactctgctacagaatata

SEQ ID NO: 793177 - DNA, 19 bp, Mus musculus
  siRNA target sequence for 6820449I09Rik (NM_177128.2,748-766).
gatcaacagtggtaattta

SEQ ID NO: 793178 - DNA, 19 bp, Mus musculus
  siRNA target sequence for 6820449I09Rik (NM_177128.2,786-804).
ccctgcattctattttaga

SEQ ID NO: 793179 - DNA, 19 bp, Mus musculus
  siRNA target sequence for 6820449I09Rik (NM_177128.2,806-824).
gaaattcttttcaagcttt

SEQ ID NO: 793180 - DNA, 19 bp, Mus musculus
  siRNA target sequence for 6820449I09Rik (NM_177128.2,861-879).
caaagctcctgctagtact

SEQ ID NO: 793181 - DNA, 19 bp, Mus musculus
  siRNA target sequence for 6820449I09Rik (NM_177128.2,888-906).
cccatcaggaaattttgat

SEQ ID NO: 793182 - DNA, 19 bp, Mus musculus
  siRNA target sequence for 6820449I09Rik (NM_177128.2,889-907).
ccatcaggaaattttgatt

SEQ ID NO: 793183 - DNA, 19 bp, Mus musculus
  siRNA target sequence for 6820449I09Rik (NM_177128.2,904-922).
gattttactgagactaagt

SEQ ID NO: 793184 - DNA, 19 bp, Mus musculus
  siRNA target sequence for 6820449I09Rik (NM_177128.2,915-933).
gactaagtgcctgctataa

SEQ ID NO: 793185 - DNA, 19 bp, Mus musculus
  siRNA target sequence for 6820449I09Rik (NM_177128.2,925-943).
ctgctataaaggacttaga

SEQ ID NO: 793186 - DNA, 19 bp, Mus musculus
  siRNA target sequence for 6820449I09Rik (NM_177128.2,974-992).
gaatttagtcgagaactta

SEQ ID NO: 793187 - DNA, 19 bp, Mus musculus
  siRNA target sequence for 6820449I09Rik (NM_177128.2,1069-1087).
gattcaagcctattggaaa

SEQ ID NO: 793188 - DNA, 19 bp, Mus musculus
  siRNA target sequence for 6820449I09Rik (NM_177128.2,1093-1111).
ccagaccagaaagagatta

SEQ ID NO: 793189 - DNA, 19 bp, Mus musculus
  siRNA target sequence for 6820449I09Rik (NM_177128.2,1117-1135).
gcttccgtctgctgtgatt

SEQ ID NO: 793190 - DNA, 19 bp, Mus musculus
  siRNA target sequence for 6820449I09Rik (NM_177128.2,1147-1165).
gagtttcagatctaaacga

SEQ ID NO: 793191 - DNA, 19 bp, Mus musculus
  siRNA target sequence for 6820449I09Rik (NM_177128.2,1171-1189).
gatgatgttggagctaaat

SEQ ID NO: 793192 - DNA, 19 bp, Mus musculus
  siRNA target sequence for 6820449I09Rik (NM_177128.2,1259-1277).
cgagagtcacgcttgaaca

SEQ ID NO: 793193 - DNA, 19 bp, Mus musculus
  siRNA target sequence for 6820449I09Rik (NM_177128.2,1260-1278).
gagagtcacgcttgaacat

SEQ ID NO: 793194 - DNA, 19 bp, Mus musculus
  siRNA target sequence for 6820449I09Rik (NM_177128.2,1268-1286).
cgcttgaacatgcttgaaa

SEQ ID NO: 793195 - DNA, 19 bp, Mus musculus
  siRNA target sequence for 6820449I09Rik (NM_177128.2,1296-1314).
caggtcaagtggagaagta

SEQ ID NO: 793196 - DNA, 19 bp, Mus musculus
  siRNA target sequence for 6820449I09Rik (NM_177128.2,1403-1421).
ccatctctcacagagtata

SEQ ID NO: 793197 - DNA, 19 bp, Mus musculus
  siRNA target sequence for 6820449I09Rik (NM_177128.2,1404-1422).
catctctcacagagtataa

SEQ ID NO: 793198 - DNA, 19 bp, Mus musculus
  siRNA target sequence for 6820449I09Rik (NM_177128.2,1443-1461).
gagcagttcttaaattcct

SEQ ID NO: 793199 - DNA, 19 bp, Mus musculus
  siRNA target sequence for 6820449I09Rik (NM_177128.2,1463-1481).
gcaaagtgccgtaagaaaa

SEQ ID NO: 793200 - DNA, 19 bp, Mus musculus
  siRNA target sequence for 6820449I09Rik (NM_177128.2,1464-1482).
caaagtgccgtaagaaaaa

SEQ ID NO: 793201 - DNA, 19 bp, Mus musculus
  siRNA target sequence for 6820449I09Rik (NM_177128.2,1470-1488).
gccgtaagaaaaagaaact

SEQ ID NO: 793202 - DNA, 19 bp, Mus musculus
  siRNA target sequence for 6820449I09Rik (NM_177128.2,1546-1564).
gcaacaagtggacgattat

SEQ ID NO: 793203 - DNA, 19 bp, Mus musculus
  siRNA target sequence for 6820449I09Rik (NM_177128.2,1550-1568).
caagtggacgattatgtca

SEQ ID NO: 793204 - DNA, 19 bp, Mus musculus
  siRNA target sequence for 6820449I09Rik (NM_177128.2,1555-1573).
ggacgattatgtcaaaaga

SEQ ID NO: 793205 - DNA, 19 bp, Mus musculus
  siRNA target sequence for 6820449I09Rik (NM_177128.2,1631-1649).
gaacgacttcagcactatt

SEQ ID NO: 793206 - DNA, 19 bp, Mus musculus
  siRNA target sequence for 6820449I09Rik (NM_177128.2,1772-1790).
cccgagcaattcctaagta

SEQ ID NO: 793207 - DNA, 19 bp, Mus musculus
  siRNA target sequence for 6820449I09Rik (NM_177128.2,1774-1792).
cgagcaattcctaagtaga

SEQ ID NO: 793208 - DNA, 19 bp, Mus musculus
  siRNA target sequence for 6820449I09Rik (NM_177128.2,1775-1793).
gagcaattcctaagtagat

SEQ ID NO: 793209 - DNA, 19 bp, Mus musculus
  siRNA target sequence for 6820449I09Rik (NM_177128.2,1777-1795).
gcaattcctaagtagatct

SEQ ID NO: 793210 - DNA, 19 bp, Mus musculus
  siRNA target sequence for 6820449I09Rik (NM_177128.2,1778-1796).
caattcctaagtagatcta

SEQ ID NO: 793211 - DNA, 19 bp, Mus musculus
  siRNA target sequence for 6820449I09Rik (NM_177128.2,1814-1832).
gccaagcaggcccatctta

SEQ ID NO: 793212 - DNA, 19 bp, Mus musculus
  siRNA target sequence for 6820449I09Rik (NM_177128.2,1833-1851).
ccaccctgaagcacataca

SEQ ID NO: 793213 - DNA, 19 bp, Mus musculus
  siRNA target sequence for 6820449I09Rik (NM_177128.2,1894-1912).
ggttgatgttccaaaggat

SEQ ID NO: 793214 - DNA, 19 bp, Mus musculus
  siRNA target sequence for 6820449I09Rik (NM_177128.2,1910-1928).
gatgagcttagtatagatt

SEQ ID NO: 793215 - DNA, 19 bp, Mus musculus
  siRNA target sequence for 6820449I09Rik (NM_177128.2,1915-1933).
gcttagtatagatttagga

SEQ ID NO: 793216 - DNA, 19 bp, Mus musculus
  siRNA target sequence for 6820449I09Rik (NM_177128.2,1916-1934).
cttagtatagatttaggaa

SEQ ID NO: 793217 - DNA, 19 bp, Mus musculus
  siRNA target sequence for 4732486J07Rik (NM_177130.1,359-377).
cccacgatagcgttcagat

SEQ ID NO: 793218 - DNA, 19 bp, Mus musculus
  siRNA target sequence for 9530009G21Rik (NM_177131.2,216-234).
ctgcagttcatatttagat

SEQ ID NO: 793219 - DNA, 19 bp, Mus musculus
  siRNA target sequence for 9530009G21Rik (NM_177131.2,326-344).
ccctatttagaggcaaatt

SEQ ID NO: 793220 - DNA, 19 bp, Mus musculus
  siRNA target sequence for 9530009G21Rik (NM_177131.2,327-345).
cctatttagaggcaaatta

SEQ ID NO: 793221 - DNA, 19 bp, Mus musculus
  siRNA target sequence for 9530009G21Rik (NM_177131.2,328-346).
ctatttagaggcaaattaa

SEQ ID NO: 793222 - DNA, 19 bp, Mus musculus
  siRNA target sequence for 9530009G21Rik (NM_177131.2,499-517).
gctctattaaatttactct

SEQ ID NO: 793223 - DNA, 19 bp, Mus musculus
  siRNA target sequence for 1520401A03Rik (NM_177132.2,1553-1571).
ccttggaggaggactaaga

SEQ ID NO: 793224 - DNA, 19 bp, Mus musculus
  siRNA target sequence for 1520401A03Rik (NM_177132.2,1619-1637).
cggaaacgggaatggattt

SEQ ID NO: 793225 - DNA, 19 bp, Mus musculus
  siRNA target sequence for 1520401A03Rik (NM_177132.2,1677-1695).
ggtggagtacacatgtcta

SEQ ID NO: 793226 - DNA, 19 bp, Mus musculus
  siRNA target sequence for 1520401A03Rik (NM_177132.2,1678-1696).
gtggagtacacatgtctat

SEQ ID NO: 793227 - DNA, 19 bp, Mus musculus
  siRNA target sequence for 1520401A03Rik (NM_177132.2,1680-1698).
ggagtacacatgtctataa

SEQ ID NO: 793228 - DNA, 19 bp, Mus musculus
  siRNA target sequence for 1520401A03Rik (NM_177132.2,1762-1780).
cctcaggttacctagattt

SEQ ID NO: 793229 - DNA, 19 bp, Mus musculus
  siRNA target sequence for E330018D03Rik (NM_177133.1,474-492).
ccttgccagggagttgtta

SEQ ID NO: 793230 - DNA, 19 bp, Mus musculus
  siRNA target sequence for E330018D03Rik (NM_177133.1,475-493).
cttgccagggagttgttaa

SEQ ID NO: 793231 - DNA, 19 bp, Mus musculus
  siRNA target sequence for E330018D03Rik (NM_177133.1,727-745).
ctgtacagtctcagaacat

SEQ ID NO: 793232 - DNA, 19 bp, Mus musculus
  siRNA target sequence for E330018D03Rik (NM_177133.1,732-750).
cagtctcagaacatgtagt

SEQ ID NO: 793233 - DNA, 19 bp, Mus musculus
  siRNA target sequence for 9030227G01Rik (NM_177136.2,442-460).
gctgttatccagatctctt

SEQ ID NO: 793234 - DNA, 19 bp, Mus musculus
  siRNA target sequence for 9030227G01Rik (NM_177136.2,1103-1121).
cacgcacttgctggtttat

SEQ ID NO: 793235 - DNA, 19 bp, Mus musculus
  siRNA target sequence for 9030227G01Rik (NM_177136.2,1141-1159).
cgtagccgctgctgttaaa

SEQ ID NO: 793236 - DNA, 19 bp, Mus musculus
  siRNA target sequence for 9030227G01Rik (NM_177136.2,1763-1781).
cttcgtgtgaagaagattt

SEQ ID NO: 793237 - DNA, 19 bp, Mus musculus
  siRNA target sequence for 9030227G01Rik (NM_177136.2,1831-1849).
cgtttactatcctcaagta

SEQ ID NO: 793238 - DNA, 19 bp, Mus musculus
  siRNA target sequence for 9030227G01Rik (NM_177136.2,1866-1884).
gcattctccgacatttgga

SEQ ID NO: 793239 - DNA, 19 bp, Mus musculus
  siRNA target sequence for 9030227G01Rik (NM_177136.2,1951-1969).
gattacgggggaaagaaaa

SEQ ID NO: 793240 - DNA, 19 bp, Mus musculus
  siRNA target sequence for 9030227G01Rik (NM_177136.2,1970-1988).
cccaaaatcgatttgttta

SEQ ID NO: 793241 - DNA, 19 bp, Mus musculus
  siRNA target sequence for 9030227G01Rik (NM_177136.2,1972-1990).
caaaatcgatttgtttaga

SEQ ID NO: 793242 - DNA, 19 bp, Mus musculus
  siRNA target sequence for 9030227G01Rik (NM_177136.2,2013-2031).
ggttgattcccgatggtat

SEQ ID NO: 793243 - DNA, 19 bp, Mus musculus
  siRNA target sequence for 9030227G01Rik (NM_177136.2,2166-2184).
gctttgtatatcttatcgt

SEQ ID NO: 793244 - DNA, 19 bp, Mus musculus
  siRNA target sequence for 9030227G01Rik (NM_177136.2,2167-2185).
ctttgtatatcttatcgtt

SEQ ID NO: 793245 - DNA, 19 bp, Mus musculus
  siRNA target sequence for 9030227G01Rik (NM_177136.2,2216-2234).
cttgataacgctgtaaaga

SEQ ID NO: 793246 - DNA, 19 bp, Mus musculus
  siRNA target sequence for 9030227G01Rik (NM_177136.2,2219-2237).
gataacgctgtaaagatgt

SEQ ID NO: 793247 - DNA, 19 bp, Mus musculus
  siRNA target sequence for 9030227G01Rik (NM_177136.2,2239-2257).
ggtacaattaataaatcaa

SEQ ID NO: 793248 - DNA, 19 bp, Mus musculus
  siRNA target sequence for 9030227G01Rik (NM_177136.2,2240-2258).
gtacaattaataaatcaat

SEQ ID NO: 793249 - DNA, 19 bp, Mus musculus
  siRNA target sequence for 9030227G01Rik (NM_177136.2,2575-2593).
ggtaactggggaatttcct

SEQ ID NO: 793250 - DNA, 19 bp, Mus musculus
  siRNA target sequence for 9030227G01Rik (NM_177136.2,2612-2630).
cttaaggcaggcgaataca

SEQ ID NO: 793251 - DNA, 19 bp, Mus musculus
  siRNA target sequence for 9030227G01Rik (NM_177136.2,2653-2671).
gaaatgtgtctccttaaca

SEQ ID NO: 793252 - DNA, 19 bp, Mus musculus
  siRNA target sequence for 9030227G01Rik (NM_177136.2,2670-2688).
caaacgcaacgagtcataa

SEQ ID NO: 793253 - DNA, 19 bp, Mus musculus
  siRNA target sequence for 9030227G01Rik (NM_177136.2,2674-2692).
cgcaacgagtcataaagta

SEQ ID NO: 793254 - DNA, 19 bp, Mus musculus
  siRNA target sequence for 9030227G01Rik (NM_177136.2,2675-2693).
gcaacgagtcataaagtat

SEQ ID NO: 793255 - DNA, 19 bp, Mus musculus
  siRNA target sequence for 9030227G01Rik (NM_177136.2,2676-2694).
caacgagtcataaagtatt

SEQ ID NO: 793256 - DNA, 19 bp, Mus musculus
  siRNA target sequence for 9030227G01Rik (NM_177136.2,2698-2716).
gaagcatccgaagagtttt

SEQ ID NO: 793257 - DNA, 19 bp, Mus musculus
  siRNA target sequence for 9030227G01Rik (NM_177136.2,2701-2719).
gcatccgaagagttttaaa

SEQ ID NO: 793258 - DNA, 19 bp, Mus musculus
  siRNA target sequence for 9030227G01Rik (NM_177136.2,2731-2749).
gacgccatggctagttctt

SEQ ID NO: 793259 - DNA, 19 bp, Mus musculus
  siRNA target sequence for 6720469N11Rik (NM_177138.2,1157-1175).
gtctgggtcagaacgaaaa

SEQ ID NO: 793260 - DNA, 19 bp, Mus musculus
  siRNA target sequence for 6720469N11Rik (NM_177138.2,1161-1179).
gggtcagaacgaaaaacat

SEQ ID NO: 793261 - DNA, 19 bp, Mus musculus
  siRNA target sequence for 6720469N11Rik (NM_177138.2,1180-1198).
gagctcaactaatgtgatt

SEQ ID NO: 793262 - DNA, 19 bp, Mus musculus
  siRNA target sequence for 6720469N11Rik (NM_177138.2,1260-1278).
ctcctgggatccttaagat

SEQ ID NO: 793263 - DNA, 19 bp, Mus musculus
  siRNA target sequence for 6720469N11Rik (NM_177138.2,1266-1284).
ggatccttaagatagaagt

SEQ ID NO: 793264 - DNA, 19 bp, Mus musculus
  siRNA target sequence for 6720469N11Rik (NM_177138.2,1285-1303).
gggtgacccgtgtacactt

SEQ ID NO: 793265 - DNA, 19 bp, Mus musculus
  siRNA target sequence for 6720469N11Rik (NM_177138.2,1307-1325).
cccctgcatagcaatgtta

SEQ ID NO: 793266 - DNA, 19 bp, Mus musculus
  siRNA target sequence for 6720469N11Rik (NM_177138.2,1327-1345).
gcaattgggatttatagaa

SEQ ID NO: 793267 - DNA, 19 bp, Mus musculus
  siRNA target sequence for E130115E03Rik (NM_177139.2,488-506).
cctggtgggtttaagtgtt

SEQ ID NO: 793268 - DNA, 19 bp, Mus musculus
  siRNA target sequence for E130115E03Rik (NM_177139.2,521-539).
gcagcagacaattatgaat

SEQ ID NO: 793269 - DNA, 19 bp, Mus musculus
  siRNA target sequence for E130115E03Rik (NM_177139.2,569-587).
cctcgagacaccagatact

SEQ ID NO: 793270 - DNA, 19 bp, Mus musculus
  siRNA target sequence for E130115E03Rik (NM_177139.2,650-668).
ccgctggaggagtgcttat

SEQ ID NO: 793271 - DNA, 19 bp, Mus musculus
  siRNA target sequence for E130115E03Rik (NM_177139.2,692-710).
cacgaaggctacaagatct

SEQ ID NO: 793272 - DNA, 19 bp, Mus musculus
  siRNA target sequence for E130115E03Rik (NM_177139.2,715-733).
ctcctgctgtgaaggaaat

SEQ ID NO: 793273 - DNA, 19 bp, Mus musculus
  siRNA target sequence for E130115E03Rik (NM_177139.2,779-797).
gctaccacatcacctataa

SEQ ID NO: 793274 - DNA, 19 bp, Mus musculus
  siRNA target sequence for E130115E03Rik (NM_177139.2,780-798).
ctaccacatcacctataaa

SEQ ID NO: 793275 - DNA, 19 bp, Mus musculus
  siRNA target sequence for E130115E03Rik (NM_177139.2,783-801).
ccacatcacctataaacca

SEQ ID NO: 793276 - DNA, 19 bp, Mus musculus
  siRNA target sequence for D230037D09Rik (NM_177140.2,481-499).
caagtgcagcagcgtttta

SEQ ID NO: 793277 - DNA, 19 bp, Mus musculus
  siRNA target sequence for D230037D09Rik (NM_177140.2,484-502).
gtgcagcagcgttttatta

SEQ ID NO: 793278 - DNA, 19 bp, Mus musculus
  siRNA target sequence for D230037D09Rik (NM_177140.2,489-507).
gcagcgttttattatgttt

SEQ ID NO: 793279 - DNA, 19 bp, Mus musculus
  siRNA target sequence for D230037D09Rik (NM_177140.2,527-545).
caacaggttggctttggaa

SEQ ID NO: 793280 - DNA, 19 bp, Mus musculus
  siRNA target sequence for D230037D09Rik (NM_177140.2,599-617).
cttgaaagctcggttactt

SEQ ID NO: 793281 - DNA, 19 bp, Mus musculus
  siRNA target sequence for D230037D09Rik (NM_177140.2,626-644).
cttttggttgtggacaatt

SEQ ID NO: 793282 - DNA, 19 bp, Mus musculus
  siRNA target sequence for D230037D09Rik (NM_177140.2,657-675).
ccgtacttacagatgtttt

SEQ ID NO: 793283 - DNA, 19 bp, Mus musculus
  siRNA target sequence for D230037D09Rik (NM_177140.2,695-713).
gagagcggatcccaaaaca

SEQ ID NO: 793284 - DNA, 19 bp, Mus musculus
  siRNA target sequence for D230037D09Rik (NM_177140.2,712-730).
cagtgggctactgtattat

SEQ ID NO: 793285 - DNA, 19 bp, Mus musculus
  siRNA target sequence for D230037D09Rik (NM_177140.2,724-742).
gtattatccccatatgctt

SEQ ID NO: 793286 - DNA, 19 bp, Mus musculus
  siRNA target sequence for D230037D09Rik (NM_177140.2,733-751).
ccatatgcttggcagttat

SEQ ID NO: 793287 - DNA, 19 bp, Mus musculus
  siRNA target sequence for D230037D09Rik (NM_177140.2,759-777).
cgtcatcaggcatttgtca

SEQ ID NO: 793288 - DNA, 19 bp, Mus musculus
  siRNA target sequence for D230037D09Rik (NM_177140.2,774-792).
gtcaaggcttctaatcaga

SEQ ID NO: 793289 - DNA, 19 bp, Mus musculus
  siRNA target sequence for E230002P03Rik (NM_177141.2,552-570).
cctttgggggatcaaatga

SEQ ID NO: 793290 - DNA, 19 bp, Mus musculus
  siRNA target sequence for D930038D03Rik (NM_177142.2,622-640).
gaaatggctcaatttcatt

SEQ ID NO: 793291 - DNA, 19 bp, Mus musculus
  siRNA target sequence for D930038D03Rik (NM_177142.2,668-686).
ggaatactcaacactctat

SEQ ID NO: 793292 - DNA, 19 bp, Mus musculus
  siRNA target sequence for D930038D03Rik (NM_177142.2,692-710).
gagcaagccatttgataat

SEQ ID NO: 793293 - DNA, 19 bp, Mus musculus
  siRNA target sequence for D930038D03Rik (NM_177142.2,698-716).
gccatttgataatcttcaa

SEQ ID NO: 793294 - DNA, 19 bp, Mus musculus
  siRNA target sequence for D930038D03Rik (NM_177142.2,700-718).
catttgataatcttcaaga

SEQ ID NO: 793295 - DNA, 19 bp, Mus musculus
  siRNA target sequence for D930038D03Rik (NM_177142.2,757-775).
gcatttcgcgcatttgctt

SEQ ID NO: 793296 - DNA, 19 bp, Mus musculus
  siRNA target sequence for D930038D03Rik (NM_177142.2,763-781).
cgcgcatttgcttgacata

SEQ ID NO: 793297 - DNA, 19 bp, Mus musculus
  siRNA target sequence for D930038D03Rik (NM_177142.2,767-785).
catttgcttgacatacttt

SEQ ID NO: 793298 - DNA, 19 bp, Mus musculus
  siRNA target sequence for D930038D03Rik (NM_177142.2,805-823).
gtgccgcgtgccagtacaa

SEQ ID NO: 793299 - DNA, 19 bp, Mus musculus
  siRNA target sequence for D930038D03Rik (NM_177142.2,807-825).
gccgcgtgccagtacaaaa

SEQ ID NO: 793300 - DNA, 19 bp, Mus musculus
  siRNA target sequence for D930038D03Rik (NM_177142.2,808-826).
ccgcgtgccagtacaaaat

SEQ ID NO: 793301 - DNA, 19 bp, Mus musculus
  siRNA target sequence for D930038D03Rik (NM_177142.2,809-827).
cgcgtgccagtacaaaata

SEQ ID NO: 793302 - DNA, 19 bp, Mus musculus
  siRNA target sequence for D930038D03Rik (NM_177142.2,811-829).
cgtgccagtacaaaataca

SEQ ID NO: 793303 - DNA, 19 bp, Mus musculus
  siRNA target sequence for D930038D03Rik (NM_177142.2,839-857).
gttaaaatcactcacatat

SEQ ID NO: 793304 - DNA, 19 bp, Mus musculus
  siRNA target sequence for D930038D03Rik (NM_177142.2,861-879).
gaaagaccaccaatttgta

SEQ ID NO: 793305 - DNA, 19 bp, Mus musculus
  siRNA target sequence for D930038D03Rik (NM_177142.2,865-883).
gaccaccaatttgtaagta

SEQ ID NO: 793306 - DNA, 19 bp, Mus musculus
  siRNA target sequence for D930038D03Rik (NM_177142.2,867-885).
ccaccaatttgtaagtata

SEQ ID NO: 793307 - DNA, 19 bp, Mus musculus
  siRNA target sequence for D930038D03Rik (NM_177142.2,870-888).
ccaatttgtaagtataatt

SEQ ID NO: 793308 - DNA, 19 bp, Mus musculus
  siRNA target sequence for D930038D03Rik (NM_177142.2,904-922).
gaacaagggtagatcttca

SEQ ID NO: 793309 - DNA, 19 bp, Mus musculus
  siRNA target sequence for D130016K21Rik (NM_177145.2,323-341).
gagatggtacccagaacaa

SEQ ID NO: 793310 - DNA, 19 bp, Mus musculus
  siRNA target sequence for D130016K21Rik (NM_177145.2,342-360).
gcagtgcagcagcttttct

SEQ ID NO: 793311 - DNA, 19 bp, Mus musculus
  siRNA target sequence for D130016K21Rik (NM_177145.2,444-462).
ccttgagagcgtttgagaa

SEQ ID NO: 793312 - DNA, 19 bp, Mus musculus
  siRNA target sequence for D130016K21Rik (NM_177145.2,539-557).
ctcaagctgcgcatctact

SEQ ID NO: 793313 - DNA, 19 bp, Mus musculus
  siRNA target sequence for D130016K21Rik (NM_177145.2,568-586).
gcgcatgcaacagaagtat

SEQ ID NO: 793314 - DNA, 19 bp, Mus musculus
  siRNA target sequence for D130016K21Rik (NM_177145.2,570-588).
gcatgcaacagaagtatga

SEQ ID NO: 793315 - DNA, 19 bp, Mus musculus
  siRNA target sequence for 9330175E14Rik (NM_177146.2,2256-2274).
caagagggtatctgctatt

SEQ ID NO: 793316 - DNA, 19 bp, Mus musculus
  siRNA target sequence for 9330175E14Rik (NM_177146.2,2280-2298).
ggtaagcagcaacaataca

SEQ ID NO: 793317 - DNA, 19 bp, Mus musculus
  siRNA target sequence for 9330175E14Rik (NM_177146.2,2361-2379).
gtgtgtccacaggagattt

SEQ ID NO: 793318 - DNA, 19 bp, Mus musculus
  siRNA target sequence for 9330175E14Rik (NM_177146.2,2375-2393).
gatttccaaggcatggatt

SEQ ID NO: 793319 - DNA, 19 bp, Mus musculus
  siRNA target sequence for 9330175E14Rik (NM_177146.2,2470-2488).
gggattggcgggttttgat

SEQ ID NO: 793320 - DNA, 19 bp, Mus musculus
  siRNA target sequence for 9330175E14Rik (NM_177146.2,2471-2489).
ggattggcgggttttgata

SEQ ID NO: 793321 - DNA, 19 bp, Mus musculus
  siRNA target sequence for 9330175E14Rik (NM_177146.2,2476-2494).
ggcgggttttgataggttt

SEQ ID NO: 793322 - DNA, 19 bp, Mus musculus
  siRNA target sequence for 9330175E14Rik (NM_177146.2,2480-2498).
ggttttgataggttttcaa

SEQ ID NO: 793323 - DNA, 19 bp, Mus musculus
  siRNA target sequence for 9330175E14Rik (NM_177146.2,2519-2537).
ctttaaccttacacttaca

SEQ ID NO: 793324 - DNA, 19 bp, Mus musculus
  siRNA target sequence for D630028G08Rik (NM_177147.2,879-897).
gtagatgccccctaaacca

SEQ ID NO: 793325 - DNA, 19 bp, Mus musculus
  siRNA target sequence for D630028G08Rik (NM_177147.2,902-920).
gcttgtcagagcctgaaat

SEQ ID NO: 793326 - DNA, 19 bp, Mus musculus
  siRNA target sequence for D630028G08Rik (NM_177147.2,939-957).
gcactagcttgccactaat

SEQ ID NO: 793327 - DNA, 19 bp, Mus musculus
  siRNA target sequence for D630028G08Rik (NM_177147.2,953-971).
ctaatgaagctgtcagata

SEQ ID NO: 793328 - DNA, 19 bp, Mus musculus
  siRNA target sequence for D630028G08Rik (NM_177147.2,1011-1029).
gaaatgcccagctgactaa

SEQ ID NO: 793329 - DNA, 19 bp, Mus musculus
  siRNA target sequence for D630028G08Rik (NM_177147.2,1016-1034).
gcccagctgactaatagaa

SEQ ID NO: 793330 - DNA, 19 bp, Mus musculus
  siRNA target sequence for D630028G08Rik (NM_177147.2,1032-1050).
gaatcgcaaggaaatattt

SEQ ID NO: 793331 - DNA, 19 bp, Mus musculus
  siRNA target sequence for D630028G08Rik (NM_177147.2,1074-1092).
cagccaaactcatactgaa

SEQ ID NO: 793332 - DNA, 19 bp, Mus musculus
  siRNA target sequence for D630028G08Rik (NM_177147.2,1150-1168).
ccccaagggactagatcat

SEQ ID NO: 793333 - DNA, 19 bp, Mus musculus
  siRNA target sequence for D630028G08Rik (NM_177147.2,1151-1169).
cccaagggactagatcatt

SEQ ID NO: 793334 - DNA, 19 bp, Mus musculus
  siRNA target sequence for D630028G08Rik (NM_177147.2,1152-1170).
ccaagggactagatcattt

SEQ ID NO: 793335 - DNA, 19 bp, Mus musculus
  siRNA target sequence for D630028G08Rik (NM_177147.2,1174-1192).
gtggataagagaaggaatt

SEQ ID NO: 793336 - DNA, 19 bp, Mus musculus
  siRNA target sequence for B230317F23Rik (NM_177148.3,185-203).
cagagccgcgtctaatgct

SEQ ID NO: 793337 - DNA, 19 bp, Mus musculus
  siRNA target sequence for B230317F23Rik (NM_177148.3,202-220).
ctacagggcctgtaatggt

SEQ ID NO: 793338 - DNA, 19 bp, Mus musculus
  siRNA target sequence for B230317F23Rik (NM_177148.3,226-244).
gagtgtactacggtatcat

SEQ ID NO: 793339 - DNA, 19 bp, Mus musculus
  siRNA target sequence for B230317F23Rik (NM_177148.3,266-284).
ggttatgcgctttaacaaa

SEQ ID NO: 793340 - DNA, 19 bp, Mus musculus
  siRNA target sequence for B230317F23Rik (NM_177148.3,267-285).
gttatgcgctttaacaaaa

SEQ ID NO: 793341 - DNA, 19 bp, Mus musculus
  siRNA target sequence for B230317F23Rik (NM_177148.3,352-370).
ccacgtggtcttacatact

SEQ ID NO: 793342 - DNA, 19 bp, Mus musculus
  siRNA target sequence for B230317F23Rik (NM_177148.3,376-394).
cctgtcgtgtgtcacaata

SEQ ID NO: 793343 - DNA, 19 bp, Mus musculus
  siRNA target sequence for B230317F23Rik (NM_177148.3,377-395).
ctgtcgtgtgtcacaatat

SEQ ID NO: 793344 - DNA, 19 bp, Mus musculus
  siRNA target sequence for B230317F23Rik (NM_177148.3,379-397).
gtcgtgtgtcacaatatat

SEQ ID NO: 793345 - DNA, 19 bp, Mus musculus
  siRNA target sequence for B230317F23Rik (NM_177148.3,416-434).
gctcaaggagctgtattgt

SEQ ID NO: 793346 - DNA, 19 bp, Mus musculus
  siRNA target sequence for B230317F23Rik (NM_177148.3,441-459).
gcagggaggtgcataaata

SEQ ID NO: 793347 - DNA, 19 bp, Mus musculus
  siRNA target sequence for B230317F23Rik (NM_177148.3,442-460).
cagggaggtgcataaataa

SEQ ID NO: 793348 - DNA, 19 bp, Mus musculus
  siRNA target sequence for B230317F23Rik (NM_177148.3,448-466).
ggtgcataaataaattcct

SEQ ID NO: 793349 - DNA, 19 bp, Mus musculus
  siRNA target sequence for D930030O05Rik (NM_177149.2,1663-1681).
cctctcctgccgtcagtaa

SEQ ID NO: 793350 - DNA, 19 bp, Mus musculus
  siRNA target sequence for D930030O05Rik (NM_177149.2,1666-1684).
ctcctgccgtcagtaactt

SEQ ID NO: 793351 - DNA, 19 bp, Mus musculus
  siRNA target sequence for D930030O05Rik (NM_177149.2,1668-1686).
cctgccgtcagtaacttct

SEQ ID NO: 793352 - DNA, 19 bp, Mus musculus
  siRNA target sequence for D930030O05Rik (NM_177149.2,1671-1689).
gccgtcagtaacttctgta

SEQ ID NO: 793353 - DNA, 19 bp, Mus musculus
  siRNA target sequence for D930030O05Rik (NM_177149.2,1836-1854).
gcttgccttaccaggtata

SEQ ID NO: 793354 - DNA, 19 bp, Mus musculus
  siRNA target sequence for D930030O05Rik (NM_177149.2,1885-1903).
ctgaacttgacctggtttt

SEQ ID NO: 793355 - DNA, 19 bp, Mus musculus
  siRNA target sequence for D930030O05Rik (NM_177149.2,1913-1931).
gtgtctccacaagatgtat

SEQ ID NO: 793356 - DNA, 19 bp, Mus musculus
  siRNA target sequence for D930030O05Rik (NM_177149.2,1917-1935).
ctccacaagatgtatggtt

SEQ ID NO: 793357 - DNA, 19 bp, Mus musculus
  siRNA target sequence for D930030O05Rik (NM_177149.2,1919-1937).
ccacaagatgtatggtttt

SEQ ID NO: 793358 - DNA, 19 bp, Mus musculus
  siRNA target sequence for D930030O05Rik (NM_177149.2,1940-1958).
gaaatggccctgtcatctt

SEQ ID NO: 793359 - DNA, 19 bp, Mus musculus
  siRNA target sequence for D930030O05Rik (NM_177149.2,1945-1963).
ggccctgtcatcttatact

SEQ ID NO: 793360 - DNA, 19 bp, Mus musculus
  siRNA target sequence for G630055P03Rik (NM_177150.1,31-49).
cggacctcagcttttctga

SEQ ID NO: 793361 - DNA, 19 bp, Mus musculus
  siRNA target sequence for G630055P03Rik (NM_177150.1,122-140).
ccggagcactcggatcaat

SEQ ID NO: 793362 - DNA, 19 bp, Mus musculus
  siRNA target sequence for G630055P03Rik (NM_177150.1,155-173).
gtctcaaacgccatactct

SEQ ID NO: 793363 - DNA, 19 bp, Mus musculus
  siRNA target sequence for G630055P03Rik (NM_177150.1,157-175).
ctcaaacgccatactctaa

SEQ ID NO: 793364 - DNA, 19 bp, Mus musculus
  siRNA target sequence for G630055P03Rik (NM_177150.1,159-177).
caaacgccatactctaaca

SEQ ID NO: 793365 - DNA, 19 bp, Mus musculus
  siRNA target sequence for G630055P03Rik (NM_177150.1,178-196).
ggcagggtagccaaacaaa

SEQ ID NO: 793366 - DNA, 19 bp, Mus musculus
  siRNA target sequence for G630055P03Rik (NM_177150.1,182-200).
gggtagccaaacaaagaca

SEQ ID NO: 793367 - DNA, 19 bp, Mus musculus
  siRNA target sequence for G630055P03Rik (NM_177150.1,239-257).
cagatcgactcgtgttcaa

SEQ ID NO: 793368 - DNA, 19 bp, Mus musculus
  siRNA target sequence for G630055P03Rik (NM_177150.1,288-306).
cggactctgctaaggaata

SEQ ID NO: 793369 - DNA, 19 bp, Mus musculus
  siRNA target sequence for G630055P03Rik (NM_177150.1,289-307).
ggactctgctaaggaatat

SEQ ID NO: 793370 - DNA, 19 bp, Mus musculus
  siRNA target sequence for G630055P03Rik (NM_177150.1,292-310).
ctctgctaaggaatatctt

SEQ ID NO: 793371 - DNA, 19 bp, Mus musculus
  siRNA target sequence for G630055P03Rik (NM_177150.1,296-314).
gctaaggaatatcttacta

SEQ ID NO: 793372 - DNA, 19 bp, Mus musculus
  siRNA target sequence for G630055P03Rik (NM_177150.1,297-315).
ctaaggaatatcttactaa

SEQ ID NO: 793373 - DNA, 19 bp, Mus musculus
  siRNA target sequence for G630055P03Rik (NM_177150.1,455-473).
cctggctccgggtctaaca

SEQ ID NO: 793374 - DNA, 19 bp, Mus musculus
  siRNA target sequence for G630055P03Rik (NM_177150.1,488-506).
gaagcagaaactgagatta

SEQ ID NO: 793375 - DNA, 19 bp, Mus musculus
  siRNA target sequence for G630055P03Rik (NM_177150.1,591-609).
gctagctccttcaatctta

SEQ ID NO: 793376 - DNA, 19 bp, Mus musculus
  siRNA target sequence for G630055P03Rik (NM_177150.1,602-620).
caatcttacctttgttcta

SEQ ID NO: 793377 - DNA, 19 bp, Mus musculus
  siRNA target sequence for G630055P03Rik (NM_177150.1,836-854).
ccttagtgggaaacattct

SEQ ID NO: 793378 - DNA, 19 bp, Mus musculus
  siRNA target sequence for G630055P03Rik (NM_177150.1,868-886).
ctcgccctggggttgaaga

SEQ ID NO: 793379 - DNA, 19 bp, Mus musculus
  siRNA target sequence for G630055P03Rik (NM_177150.1,1087-1105).
ggccagcaagtggagaatt

SEQ ID NO: 793380 - DNA, 19 bp, Mus musculus
  siRNA target sequence for G630055P03Rik (NM_177150.1,1158-1176).
ggagttgcagtcctatctt

SEQ ID NO: 793381 - DNA, 19 bp, Mus musculus
  siRNA target sequence for G630055P03Rik (NM_177150.1,1264-1282).
gactgagcccctatgtgaa

SEQ ID NO: 793382 - DNA, 19 bp, Mus musculus
  siRNA target sequence for G630055P03Rik (NM_177150.1,1316-1334).
gaagacggctcttgagata

SEQ ID NO: 793383 - DNA, 19 bp, Mus musculus
  siRNA target sequence for G630055P03Rik (NM_177150.1,1321-1339).
cggctcttgagatagtaga

SEQ ID NO: 793384 - DNA, 19 bp, Mus musculus
  siRNA target sequence for G630055P03Rik (NM_177150.1,1324-1342).
ctcttgagatagtagagaa

SEQ ID NO: 793385 - DNA, 19 bp, Mus musculus
  siRNA target sequence for G630055P03Rik (NM_177150.1,1377-1395).
gacctggaggtatttgctt

SEQ ID NO: 793386 - DNA, 19 bp, Mus musculus
  siRNA target sequence for G630055P03Rik (NM_177150.1,1396-1414).
ctcatgctggccgtaagat

SEQ ID NO: 793387 - DNA, 19 bp, Mus musculus
  siRNA target sequence for G630055P03Rik (NM_177150.1,1401-1419).
gctggccgtaagattgtga

SEQ ID NO: 793388 - DNA, 19 bp, Mus musculus
  siRNA target sequence for G630055P03Rik (NM_177150.1,1402-1420).
ctggccgtaagattgtgaa

SEQ ID NO: 793389 - DNA, 19 bp, Mus musculus
  siRNA target sequence for C330002D13Rik (NM_177151.2,269-287).
gtcgtacgtaactccaatt

SEQ ID NO: 793390 - DNA, 19 bp, Mus musculus
  siRNA target sequence for C330002D13Rik (NM_177151.2,271-289).
cgtacgtaactccaatttt

SEQ ID NO: 793391 - DNA, 19 bp, Mus musculus
  siRNA target sequence for C330002D13Rik (NM_177151.2,280-298).
ctccaattttaatgagtta

SEQ ID NO: 793392 - DNA, 19 bp, Mus musculus
  siRNA target sequence for C330002D13Rik (NM_177151.2,283-301).
caattttaatgagttatgt

SEQ ID NO: 793393 - DNA, 19 bp, Mus musculus
  siRNA target sequence for C330002D13Rik (NM_177151.2,295-313).
gttatgtgaatcgctatat

SEQ ID NO: 793394 - DNA, 19 bp, Mus musculus
  siRNA target sequence for C330002D13Rik (NM_177151.2,306-324).
cgctatatcaagaacttaa

SEQ ID NO: 793395 - DNA, 19 bp, Mus musculus
  siRNA target sequence for C330002D13Rik (NM_177151.2,307-325).
gctatatcaagaacttaaa

SEQ ID NO: 793396 - DNA, 19 bp, Mus musculus
  siRNA target sequence for C330002D13Rik (NM_177151.2,436-454).
gtggccatatccatgaact

SEQ ID NO: 793397 - DNA, 19 bp, Mus musculus
  siRNA target sequence for C330002D13Rik (NM_177151.2,484-502).
gctccgaacctgtggtaat

SEQ ID NO: 793398 - DNA, 19 bp, Mus musculus
  siRNA target sequence for C330002D13Rik (NM_177151.2,485-503).
ctccgaacctgtggtaatt

SEQ ID NO: 793399 - DNA, 19 bp, Mus musculus
  siRNA target sequence for C330002D13Rik (NM_177151.2,497-515).
ggtaattaccatcaataca

SEQ ID NO: 793400 - DNA, 19 bp, Mus musculus
  siRNA target sequence for C330002D13Rik (NM_177151.2,518-536).
ggaatgcatcttgaaactt

SEQ ID NO: 793401 - DNA, 19 bp, Mus musculus
  siRNA target sequence for C330002D13Rik (NM_177151.2,519-537).
gaatgcatcttgaaactta

SEQ ID NO: 793402 - DNA, 19 bp, Mus musculus
  siRNA target sequence for C330002D13Rik (NM_177151.2,593-611).
cactgctgagaacacaaaa

SEQ ID NO: 793403 - DNA, 19 bp, Mus musculus
  siRNA target sequence for 9430095K15Rik (NM_177152.3,463-481).
cctgagtcacaacagatta

SEQ ID NO: 793404 - DNA, 19 bp, Mus musculus
  siRNA target sequence for 9430095K15Rik (NM_177152.3,468-486).
gtcacaacagattatcttt

SEQ ID NO: 793405 - DNA, 19 bp, Mus musculus
  siRNA target sequence for 9430095K15Rik (NM_177152.3,470-488).
cacaacagattatctttta

SEQ ID NO: 793406 - DNA, 19 bp, Mus musculus
  siRNA target sequence for 9430095K15Rik (NM_177152.3,548-566).
gaattagagaccattccaa

SEQ ID NO: 793407 - DNA, 19 bp, Mus musculus
  siRNA target sequence for 9430095K15Rik (NM_177152.3,571-589).
gggatccatctctgcaaat

SEQ ID NO: 793408 - DNA, 19 bp, Mus musculus
  siRNA target sequence for 9430095K15Rik (NM_177152.3,572-590).
ggatccatctctgcaaata

SEQ ID NO: 793409 - DNA, 19 bp, Mus musculus
  siRNA target sequence for 9430095K15Rik (NM_177152.3,573-591).
gatccatctctgcaaatat

SEQ ID NO: 793410 - DNA, 19 bp, Mus musculus
  siRNA target sequence for 9430095K15Rik (NM_177152.3,612-630).
ggaacgccatcgacaaaat

SEQ ID NO: 793411 - DNA, 19 bp, Mus musculus
  siRNA target sequence for 9430095K15Rik (NM_177152.3,673-691).
ggacctcagcaacaataat

SEQ ID NO: 793412 - DNA, 19 bp, Mus musculus
  siRNA target sequence for 9430095K15Rik (NM_177152.3,717-735).
cacccttacaactcaagta

SEQ ID NO: 793413 - DNA, 19 bp, Mus musculus
  siRNA target sequence for 9430095K15Rik (NM_177152.3,720-738).
ccttacaactcaagtatct

SEQ ID NO: 793414 - DNA, 19 bp, Mus musculus
  siRNA target sequence for 9430095K15Rik (NM_177152.3,728-746).
ctcaagtatctgtatatca

SEQ ID NO: 793415 - DNA, 19 bp, Mus musculus
  siRNA target sequence for 9430095K15Rik (NM_177152.3,730-748).
caagtatctgtatatcaat

SEQ ID NO: 793416 - DNA, 19 bp, Mus musculus
  siRNA target sequence for 9430095K15Rik (NM_177152.3,765-783).
ccatggaaccagggtattt

SEQ ID NO: 793417 - DNA, 19 bp, Mus musculus
  siRNA target sequence for 9430095K15Rik (NM_177152.3,774-792).
cagggtattttgacaattt

SEQ ID NO: 793418 - DNA, 19 bp, Mus musculus
  siRNA target sequence for 9430095K15Rik (NM_177152.3,844-862).
ccctcccaagatgtttaaa

SEQ ID NO: 793419 - DNA, 19 bp, Mus musculus
  siRNA target sequence for 9430095K15Rik (NM_177152.3,881-899).
cttgagctgaacagaaaca

SEQ ID NO: 793420 - DNA, 19 bp, Mus musculus
  siRNA target sequence for 9430095K15Rik (NM_177152.3,886-904).
gctgaacagaaacaagatt

SEQ ID NO: 793421 - DNA, 19 bp, Mus musculus
  siRNA target sequence for 9430095K15Rik (NM_177152.3,1045-1063).
cctaaccgagattaccaaa

SEQ ID NO: 793422 - DNA, 19 bp, Mus musculus
  siRNA target sequence for 9430095K15Rik (NM_177152.3,1068-1086).
ggctctatggcttgttgat

SEQ ID NO: 793423 - DNA, 19 bp, Mus musculus
  siRNA target sequence for 9430095K15Rik (NM_177152.3,1164-1182).
gtgagctagacctgacttt

SEQ ID NO: 793424 - DNA, 19 bp, Mus musculus
  siRNA target sequence for 9430095K15Rik (NM_177152.3,1166-1184).
gagctagacctgactttca

SEQ ID NO: 793425 - DNA, 19 bp, Mus musculus
  siRNA target sequence for 9430095K15Rik (NM_177152.3,1175-1193).
ctgactttcaaccacttat

SEQ ID NO: 793426 - DNA, 19 bp, Mus musculus
  siRNA target sequence for 9430095K15Rik (NM_177152.3,1177-1195).
gactttcaaccacttatca

SEQ ID NO: 793427 - DNA, 19 bp, Mus musculus
  siRNA target sequence for 9430095K15Rik (NM_177152.3,1217-1235).
ctgggcctaagcctactaa

SEQ ID NO: 793428 - DNA, 19 bp, Mus musculus
  siRNA target sequence for 9430095K15Rik (NM_177152.3,1219-1237).
gggcctaagcctactaaat

SEQ ID NO: 793429 - DNA, 19 bp, Mus musculus
  siRNA target sequence for 9430095K15Rik (NM_177152.3,1239-1257).
ccctccacattgggaataa

SEQ ID NO: 793430 - DNA, 19 bp, Mus musculus
  siRNA target sequence for 9430095K15Rik (NM_177152.3,1241-1259).
ctccacattgggaataaca

SEQ ID NO: 793431 - DNA, 19 bp, Mus musculus
  siRNA target sequence for 9430095K15Rik (NM_177152.3,1292-1310).
gggcttaccagtttaaaga

SEQ ID NO: 793432 - DNA, 19 bp, Mus musculus
  siRNA target sequence for 9430095K15Rik (NM_177152.3,1338-1356).
catggaccatcgaagacat

SEQ ID NO: 793433 - DNA, 19 bp, Mus musculus
  siRNA target sequence for 9430095K15Rik (NM_177152.3,1379-1397).
gacagattgaggcaactaa

SEQ ID NO: 793434 - DNA, 19 bp, Mus musculus
  siRNA target sequence for 9430095K15Rik (NM_177152.3,1381-1399).
cagattgaggcaactaatt

SEQ ID NO: 793435 - DNA, 19 bp, Mus musculus
  siRNA target sequence for 9430095K15Rik (NM_177152.3,1403-1421).
cagggaaaccggattcgat

SEQ ID NO: 793436 - DNA, 19 bp, Mus musculus
  siRNA target sequence for 9430095K15Rik (NM_177152.3,1407-1425).
gaaaccggattcgatctat

SEQ ID NO: 793437 - DNA, 19 bp, Mus musculus
  siRNA target sequence for 9430095K15Rik (NM_177152.3,1412-1430).
cggattcgatctattacca

SEQ ID NO: 793438 - DNA, 19 bp, Mus musculus
  siRNA target sequence for 9430095K15Rik (NM_177152.3,1413-1431).
ggattcgatctattaccaa

SEQ ID NO: 793439 - DNA, 19 bp, Mus musculus
  siRNA target sequence for 9430095K15Rik (NM_177152.3,1414-1432).
gattcgatctattaccaaa

SEQ ID NO: 793440 - DNA, 19 bp, Mus musculus
  siRNA target sequence for 9430095K15Rik (NM_177152.3,1508-1526).
gcgttttcccaaatgaaga

SEQ ID NO: 793441 - DNA, 19 bp, Mus musculus
  siRNA target sequence for 9430095K15Rik (NM_177152.3,1509-1527).
cgttttcccaaatgaagaa

SEQ ID NO: 793442 - DNA, 19 bp, Mus musculus
  siRNA target sequence for 9430095K15Rik (NM_177152.3,1535-1553).
cagctgcatttaaatacgt

SEQ ID NO: 793443 - DNA, 19 bp, Mus musculus
  siRNA target sequence for 9430095K15Rik (NM_177152.3,1596-1614).
gggtggcggagaacaactt

SEQ ID NO: 793444 - DNA, 19 bp, Mus musculus
  siRNA target sequence for 9430095K15Rik (NM_177152.3,1601-1619).
gcggagaacaactttcaga

SEQ ID NO: 793445 - DNA, 19 bp, Mus musculus
  siRNA target sequence for 9430095K15Rik (NM_177152.3,1612-1630).
ctttcagagcttcgtaaat

SEQ ID NO: 793446 - DNA, 19 bp, Mus musculus
  siRNA target sequence for 9430095K15Rik (NM_177152.3,1655-1673).
ctgaaagggaggagcattt

SEQ ID NO: 793447 - DNA, 19 bp, Mus musculus
  siRNA target sequence for 9430095K15Rik (NM_177152.3,1759-1777).
gggctccgacgtgagtttt

SEQ ID NO: 793448 - DNA, 19 bp, Mus musculus
  siRNA target sequence for 9430095K15Rik (NM_177152.3,1813-1831).
gacgttcgcttggaagaaa

SEQ ID NO: 793449 - DNA, 19 bp, Mus musculus
  siRNA target sequence for 9430095K15Rik (NM_177152.3,1815-1833).
cgttcgcttggaagaaaga

SEQ ID NO: 793450 - DNA, 19 bp, Mus musculus
  siRNA target sequence for 9430095K15Rik (NM_177152.3,1923-1941).
ggctgcgcaatgtggaatt

SEQ ID NO: 793451 - DNA, 19 bp, Mus musculus
  siRNA target sequence for 9430095K15Rik (NM_177152.3,1925-1943).
ctgcgcaatgtggaattca

SEQ ID NO: 793452 - DNA, 19 bp, Mus musculus
  siRNA target sequence for 9430095K15Rik (NM_177152.3,1979-1997).
cacttcggttcgtcatact

SEQ ID NO: 793453 - DNA, 19 bp, Mus musculus
  siRNA target sequence for 9430095K15Rik (NM_177152.3,2020-2038).
caacatgttgccttccttt

SEQ ID NO: 793454 - DNA, 19 bp, Mus musculus
  siRNA target sequence for 9430095K15Rik (NM_177152.3,2302-2320).
gctagagacgccgtcattt

SEQ ID NO: 793455 - DNA, 19 bp, Mus musculus
  siRNA target sequence for 9430095K15Rik (NM_177152.3,2303-2321).
ctagagacgccgtcatttt

SEQ ID NO: 793456 - DNA, 19 bp, Mus musculus
  siRNA target sequence for 9430095K15Rik (NM_177152.3,2644-2662).
cgtgggcgtggtgatcata

SEQ ID NO: 793457 - DNA, 19 bp, Mus musculus
  siRNA target sequence for 9430095K15Rik (NM_177152.3,2695-2713).
cgtgtgggtggtcatcata

SEQ ID NO: 793458 - DNA, 19 bp, Mus musculus
  siRNA target sequence for 9430095K15Rik (NM_177152.3,2696-2714).
gtgtgggtggtcatcatat

SEQ ID NO: 793459 - DNA, 19 bp, Mus musculus
  siRNA target sequence for 9430095K15Rik (NM_177152.3,2700-2718).
gggtggtcatcatatacca

SEQ ID NO: 793460 - DNA, 19 bp, Mus musculus
  siRNA target sequence for 9430095K15Rik (NM_177152.3,2775-2793).
cggctgacatccctagtta

SEQ ID NO: 793461 - DNA, 19 bp, Mus musculus
  siRNA target sequence for 9430095K15Rik (NM_177152.3,2776-2794).
ggctgacatccctagttat

SEQ ID NO: 793462 - DNA, 19 bp, Mus musculus
  siRNA target sequence for 9430095K15Rik (NM_177152.3,2782-2800).
catccctagttatctatca

SEQ ID NO: 793463 - DNA, 19 bp, Mus musculus
  siRNA target sequence for 9430095K15Rik (NM_177152.3,2831-2849).
gggtacatctcctcagaaa

SEQ ID NO: 793464 - DNA, 19 bp, Mus musculus
  siRNA target sequence for 9430095K15Rik (NM_177152.3,2861-2879).
caccagttcgtgacttctt

SEQ ID NO: 793465 - DNA, 19 bp, Mus musculus
  siRNA target sequence for 9430095K15Rik (NM_177152.3,2877-2895).
cttcgggaggcggattttt

SEQ ID NO: 793466 - DNA, 19 bp, Mus musculus
  siRNA target sequence for 9430095K15Rik (NM_177152.3,3028-3046).
gtacagcccagatccattt

SEQ ID NO: 793467 - DNA, 19 bp, Mus musculus
  siRNA target sequence for 9430095K15Rik (NM_177152.3,3033-3051).
gcccagatccatttgaagt

SEQ ID NO: 793468 - DNA, 19 bp, Mus musculus
  siRNA target sequence for 9430095K15Rik (NM_177152.3,3035-3053).
ccagatccatttgaagttt

SEQ ID NO: 793469 - DNA, 19 bp, Mus musculus
  siRNA target sequence for 9430095K15Rik (NM_177152.3,3036-3054).
cagatccatttgaagttta

SEQ ID NO: 793470 - DNA, 19 bp, Mus musculus
  siRNA target sequence for 9430095K15Rik (NM_177152.3,3074-3092).
gacccgaggaccgctttaa

SEQ ID NO: 793471 - DNA, 19 bp, Mus musculus
  siRNA target sequence for 9430095K15Rik (NM_177152.3,3078-3096).
cgaggaccgctttaatgga

SEQ ID NO: 793472 - DNA, 19 bp, Mus musculus
  siRNA target sequence for 9430095K15Rik (NM_177152.3,3079-3097).
gaggaccgctttaatggat

SEQ ID NO: 793473 - DNA, 19 bp, Mus musculus
  siRNA target sequence for 9430095K15Rik (NM_177152.3,3205-3223).
gctcaccgactccacatat

SEQ ID NO: 793474 - DNA, 19 bp, Mus musculus
  siRNA target sequence for 9430095K15Rik (NM_177152.3,3208-3226).
caccgactccacatatcct

SEQ ID NO: 793475 - DNA, 19 bp, Mus musculus
  siRNA target sequence for 9430095K15Rik (NM_177152.3,3245-3263).
gttcagactctgtgtctaa

SEQ ID NO: 793476 - DNA, 19 bp, Mus musculus
  siRNA target sequence for 9430095K15Rik (NM_177152.3,3268-3286).
gtcctccgtggatttcagt

SEQ ID NO: 793477 - DNA, 19 bp, Mus musculus
  siRNA target sequence for 9430095K15Rik (NM_177152.3,3299-3317).
ccaggatcggctacttcaa

SEQ ID NO: 793478 - DNA, 19 bp, Mus musculus
  siRNA target sequence for 9430095K15Rik (NM_177152.3,3302-3320).
ggatcggctacttcaagta

SEQ ID NO: 793479 - DNA, 19 bp, Mus musculus
  siRNA target sequence for 9430095K15Rik (NM_177152.3,3307-3325).
ggctacttcaagtaactca

SEQ ID NO: 793480 - DNA, 19 bp, Mus musculus
  siRNA target sequence for 9430095K15Rik (NM_177152.3,3308-3326).
gctacttcaagtaactcat

SEQ ID NO: 793481 - DNA, 19 bp, Mus musculus
  siRNA target sequence for 9430095K15Rik (NM_177152.3,3312-3330).
cttcaagtaactcattcat

SEQ ID NO: 793482 - DNA, 19 bp, Mus musculus
  siRNA target sequence for 9430095K15Rik (NM_177152.3,3497-3515).
gagaatcacaggtgtactt

SEQ ID NO: 793483 - DNA, 19 bp, Mus musculus
  siRNA target sequence for 9430095K15Rik (NM_177152.3,3499-3517).
gaatcacaggtgtacttat

SEQ ID NO: 793484 - DNA, 19 bp, Mus musculus
  siRNA target sequence for 9430095K15Rik (NM_177152.3,3507-3525).
ggtgtacttatcaacagat

SEQ ID NO: 793485 - DNA, 19 bp, Mus musculus
  siRNA target sequence for 9430095K15Rik (NM_177152.3,3508-3526).
gtgtacttatcaacagata

SEQ ID NO: 793486 - DNA, 19 bp, Mus musculus
  siRNA target sequence for 9430095K15Rik (NM_177152.3,3510-3528).
gtacttatcaacagatatt

SEQ ID NO: 793487 - DNA, 19 bp, Mus musculus
  siRNA target sequence for 9430095K15Rik (NM_177152.3,3521-3539).
cagatattccacacttaca

SEQ ID NO: 793488 - DNA, 19 bp, Mus musculus
  siRNA target sequence for C230009H10Rik (NM_177153.2,206-224).
cctttagcctgggatgttt

SEQ ID NO: 793489 - DNA, 19 bp, Mus musculus
  siRNA target sequence for C230009H10Rik (NM_177153.2,207-225).
ctttagcctgggatgtttt

SEQ ID NO: 793490 - DNA, 19 bp, Mus musculus
  siRNA target sequence for C230009H10Rik (NM_177153.2,325-343).
gctgctggtgtgaacagta

SEQ ID NO: 793491 - DNA, 19 bp, Mus musculus
  siRNA target sequence for A730089K16Rik (NM_177156.2,811-829).
gcaggaatggccagatcta

SEQ ID NO: 793492 - DNA, 19 bp, Mus musculus
  siRNA target sequence for A730089K16Rik (NM_177156.2,812-830).
caggaatggccagatctaa

SEQ ID NO: 793493 - DNA, 19 bp, Mus musculus
  siRNA target sequence for A730089K16Rik (NM_177156.2,892-910).
caccttctctggaagtagt

SEQ ID NO: 793494 - DNA, 19 bp, Mus musculus
  siRNA target sequence for A730089K16Rik (NM_177156.2,915-933).
gtcccgggtaccagcataa

SEQ ID NO: 793495 - DNA, 19 bp, Mus musculus
  siRNA target sequence for A730089K16Rik (NM_177156.2,917-935).
cccgggtaccagcataaaa

SEQ ID NO: 793496 - DNA, 19 bp, Mus musculus
  siRNA target sequence for A730089K16Rik (NM_177156.2,919-937).
cgggtaccagcataaaaca

SEQ ID NO: 793497 - DNA, 19 bp, Mus musculus
  siRNA target sequence for A730089K16Rik (NM_177156.2,921-939).
ggtaccagcataaaacagt

SEQ ID NO: 793498 - DNA, 19 bp, Mus musculus
  siRNA target sequence for A730089K16Rik (NM_177156.2,944-962).
cgagtgacctggaccataa

SEQ ID NO: 793499 - DNA, 19 bp, Mus musculus
  siRNA target sequence for A730089K16Rik (NM_177156.2,945-963).
gagtgacctggaccataaa

SEQ ID NO: 793500 - DNA, 19 bp, Mus musculus
  siRNA target sequence for A730089K16Rik (NM_177156.2,947-965).
gtgacctggaccataaaga

SEQ ID NO: 793501 - DNA, 19 bp, Mus musculus
  siRNA target sequence for 2010323F13Rik (NM_177157.2,171-189).
gggaaacaacttttacgaa

SEQ ID NO: 793502 - DNA, 19 bp, Mus musculus
  siRNA target sequence for 2010323F13Rik (NM_177157.2,172-190).
ggaaacaacttttacgaat

SEQ ID NO: 793503 - DNA, 19 bp, Mus musculus
  siRNA target sequence for 2010323F13Rik (NM_177157.2,173-191).
gaaacaacttttacgaata

SEQ ID NO: 793504 - DNA, 19 bp, Mus musculus
  siRNA target sequence for 5830482F20Rik (NM_177158.2,225-243).
cgagctggatgctcagtat

SEQ ID NO: 793505 - DNA, 19 bp, Mus musculus
  siRNA target sequence for 5830482F20Rik (NM_177158.2,304-322).
ggccaggtcctgatgttga

SEQ ID NO: 793506 - DNA, 19 bp, Mus musculus
  siRNA target sequence for 5830482F20Rik (NM_177158.2,332-350).
cttcttcaggagatatcaa

SEQ ID NO: 793507 - DNA, 19 bp, Mus musculus
  siRNA target sequence for 5830482F20Rik (NM_177158.2,343-361).
gatatcaacacctatcaaa

SEQ ID NO: 793508 - DNA, 19 bp, Mus musculus
  siRNA target sequence for 5830482F20Rik (NM_177158.2,699-717).
ggtggaagaccctttgaga

SEQ ID NO: 793509 - DNA, 19 bp, Mus musculus
  siRNA target sequence for 5830482F20Rik (NM_177158.2,778-796).
gggtcggaagtgcactttt

SEQ ID NO: 793510 - DNA, 19 bp, Mus musculus
  siRNA target sequence for 5830482F20Rik (NM_177158.2,831-849).
cgactgctacaaagatgaa

SEQ ID NO: 793511 - DNA, 19 bp, Mus musculus
  siRNA target sequence for 5830482F20Rik (NM_177158.2,946-964).
gcacgcctcatctcagatt

SEQ ID NO: 793512 - DNA, 19 bp, Mus musculus
  siRNA target sequence for 5830482F20Rik (NM_177158.2,1062-1080).
cgacgtcagagctgtcttt

SEQ ID NO: 793513 - DNA, 19 bp, Mus musculus
  siRNA target sequence for 5830482F20Rik (NM_177158.2,1393-1411).
ctaggcggtggcgagaata

SEQ ID NO: 793514 - DNA, 19 bp, Mus musculus
  siRNA target sequence for 5830482F20Rik (NM_177158.2,1422-1440).
gggggctgacgccttttta

SEQ ID NO: 793515 - DNA, 19 bp, Mus musculus
  siRNA target sequence for 5830482F20Rik (NM_177158.2,1425-1443).
ggctgacgcctttttacct

SEQ ID NO: 793516 - DNA, 19 bp, Mus musculus
  siRNA target sequence for 5830482F20Rik (NM_177158.2,1541-1559).
gagaagctgggtattatct

SEQ ID NO: 793517 - DNA, 19 bp, Mus musculus
  siRNA target sequence for 9530091C08Rik (NM_177159.2,744-762).
catcgtgcttcctctcata

SEQ ID NO: 793518 - DNA, 19 bp, Mus musculus
  siRNA target sequence for 9530091C08Rik (NM_177159.2,748-766).
gtgcttcctctcatacttt

SEQ ID NO: 793519 - DNA, 19 bp, Mus musculus
  siRNA target sequence for 9530091C08Rik (NM_177159.2,810-828).
ggcacccctttcatttgta

SEQ ID NO: 793520 - DNA, 19 bp, Mus musculus
  siRNA target sequence for 9530091C08Rik (NM_177159.2,890-908).
ctccacagagctatagctt

SEQ ID NO: 793521 - DNA, 19 bp, Mus musculus
  siRNA target sequence for 9530091C08Rik (NM_177159.2,930-948).
cactgtatctttatatcct

SEQ ID NO: 793522 - DNA, 19 bp, Mus musculus
  siRNA target sequence for B330016D10Rik (NM_177163.2,738-756).
cccgtgcgagggatgacat

SEQ ID NO: 793523 - DNA, 19 bp, Mus musculus
  siRNA target sequence for A830006F12Rik (NM_177164.2,787-805).
gaagcttgcatacttctat

SEQ ID NO: 793524 - DNA, 19 bp, Mus musculus
  siRNA target sequence for A830006F12Rik (NM_177164.2,791-809).
cttgcatacttctattggt

SEQ ID NO: 793525 - DNA, 19 bp, Mus musculus
  siRNA target sequence for A830006F12Rik (NM_177164.2,836-854).
ccatcagtcacgaagacta

SEQ ID NO: 793526 - DNA, 19 bp, Mus musculus
  siRNA target sequence for A830006F12Rik (NM_177164.2,837-855).
catcagtcacgaagactat

SEQ ID NO: 793527 - DNA, 19 bp, Mus musculus
  siRNA target sequence for A830006F12Rik (NM_177164.2,875-893).
caggcttccagtaatgaca

SEQ ID NO: 793528 - DNA, 19 bp, Mus musculus
  siRNA target sequence for A830006F12Rik (NM_177164.2,885-903).
gtaatgacaatctgatctt

SEQ ID NO: 793529 - DNA, 19 bp, Mus musculus
  siRNA target sequence for A830006F12Rik (NM_177164.2,939-957).
gcggctttgtatacaagtt

SEQ ID NO: 793530 - DNA, 19 bp, Mus musculus
  siRNA target sequence for A830006F12Rik (NM_177164.2,1059-1077).
gtacaaaggtggaacacaa

SEQ ID NO: 793531 - DNA, 19 bp, Mus musculus
  siRNA target sequence for A830006F12Rik (NM_177164.2,1079-1097).
ggatgctgtcccgaatgta

SEQ ID NO: 793532 - DNA, 19 bp, Mus musculus
  siRNA target sequence for A830006F12Rik (NM_177164.2,1080-1098).
gatgctgtcccgaatgtaa

SEQ ID NO: 793533 - DNA, 19 bp, Mus musculus
  siRNA target sequence for A830006F12Rik (NM_177164.2,1083-1101).
gctgtcccgaatgtaaaga

SEQ ID NO: 793534 - DNA, 19 bp, Mus musculus
  siRNA target sequence for A830006F12Rik (NM_177164.2,1086-1104).
gtcccgaatgtaaagaagt

SEQ ID NO: 793535 - DNA, 19 bp, Mus musculus
  siRNA target sequence for A830006F12Rik (NM_177164.2,1118-1136).
gaatatcatgggaaaaatt

SEQ ID NO: 793536 - DNA, 19 bp, Mus musculus
  siRNA target sequence for F630111L10Rik (NM_177165.2,682-700).
gcttgaactagtttcaatt

SEQ ID NO: 793537 - DNA, 19 bp, Mus musculus
  siRNA target sequence for F630111L10Rik (NM_177165.2,750-768).
catgcaagccacctagatt

SEQ ID NO: 793538 - DNA, 19 bp, Mus musculus
  siRNA target sequence for F630111L10Rik (NM_177165.2,879-897).
ctatggaggaaataagagt

SEQ ID NO: 793539 - DNA, 19 bp, Mus musculus
  siRNA target sequence for F630111L10Rik (NM_177165.2,907-925).
caacttacacgtttatctt

SEQ ID NO: 793540 - DNA, 19 bp, Mus musculus
  siRNA target sequence for F630111L10Rik (NM_177165.2,957-975).
caagactaaatcatctaaa

SEQ ID NO: 793541 - DNA, 19 bp, Mus musculus
  siRNA target sequence for F630111L10Rik (NM_177165.2,962-980).
ctaaatcatctaaatccta

SEQ ID NO: 793542 - DNA, 19 bp, Mus musculus
  siRNA target sequence for F630111L10Rik (NM_177165.2,968-986).
catctaaatcctaacttga

SEQ ID NO: 793543 - DNA, 19 bp, Mus musculus
  siRNA target sequence for 9930014A18Rik (NM_177166.2,1121-1139).
gccctgtgatcatattgtt

SEQ ID NO: 793544 - DNA, 19 bp, Mus musculus
  siRNA target sequence for 9930014A18Rik (NM_177166.2,1124-1142).
ctgtgatcatattgttgat

SEQ ID NO: 793545 - DNA, 19 bp, Mus musculus
  siRNA target sequence for 9930014A18Rik (NM_177166.2,1239-1257).
ggagagactggcttaaatt

SEQ ID NO: 793546 - DNA, 19 bp, Mus musculus
  siRNA target sequence for 9930014A18Rik (NM_177166.2,1259-1277).
cagctctaggaatccaaat

SEQ ID NO: 793547 - DNA, 19 bp, Mus musculus
  siRNA target sequence for 9930014A18Rik (NM_177166.2,1262-1280).
ctctaggaatccaaatatt

SEQ ID NO: 793548 - DNA, 19 bp, Mus musculus
  siRNA target sequence for 9930014A18Rik (NM_177166.2,1281-1299).
ggcatatctgcaaatccaa

SEQ ID NO: 793549 - DNA, 19 bp, Mus musculus
  siRNA target sequence for 9930014A18Rik (NM_177166.2,1282-1300).
gcatatctgcaaatccaaa

SEQ ID NO: 793550 - DNA, 19 bp, Mus musculus
  siRNA target sequence for 9930014A18Rik (NM_177166.2,1283-1301).
catatctgcaaatccaaat

SEQ ID NO: 793551 - DNA, 19 bp, Mus musculus
  siRNA target sequence for 9930014A18Rik (NM_177166.2,1343-1361).
gcactttttgtgtgcaaaa

SEQ ID NO: 793552 - DNA, 19 bp, Mus musculus
  siRNA target sequence for 9930014A18Rik (NM_177166.2,1362-1380).
ggggtgatgggattcagaa

SEQ ID NO: 793553 - DNA, 19 bp, Mus musculus
  siRNA target sequence for E030037J05Rik (NM_177169.2,2530-2548).
ctgtacaccgagagtttct

SEQ ID NO: 793554 - DNA, 19 bp, Mus musculus
  siRNA target sequence for B230215L15Rik (NM_177170.2,974-992).
ccctaattttattatttca

SEQ ID NO: 793555 - DNA, 19 bp, Mus musculus
  siRNA target sequence for B230215L15Rik (NM_177170.2,1016-1034).
cactcaaggggaaaaacta

SEQ ID NO: 793556 - DNA, 19 bp, Mus musculus
  siRNA target sequence for B230215L15Rik (NM_177170.2,1032-1050).
ctaccctgagcctgttttt

SEQ ID NO: 793557 - DNA, 19 bp, Mus musculus
  siRNA target sequence for B230215L15Rik (NM_177170.2,1041-1059).
gcctgtttttgaagtaaaa

SEQ ID NO: 793558 - DNA, 19 bp, Mus musculus
  siRNA target sequence for B230215L15Rik (NM_177170.2,1072-1090).
cgatttcctccgataggta

SEQ ID NO: 793559 - DNA, 19 bp, Mus musculus
  siRNA target sequence for B230215L15Rik (NM_177170.2,1079-1097).
ctccgataggtagagttta

SEQ ID NO: 793560 - DNA, 19 bp, Mus musculus
  siRNA target sequence for B230215L15Rik (NM_177170.2,1081-1099).
ccgataggtagagtttatt

SEQ ID NO: 793561 - DNA, 19 bp, Mus musculus
  siRNA target sequence for B230215L15Rik (NM_177170.2,1083-1101).
gataggtagagtttattct

SEQ ID NO: 793562 - DNA, 19 bp, Mus musculus
  siRNA target sequence for B230215L15Rik (NM_177170.2,1120-1138).
gattattctgagaagagaa

SEQ ID NO: 793563 - DNA, 19 bp, Mus musculus
  siRNA target sequence for B230215L15Rik (NM_177170.2,1129-1147).
gagaagagaagggcaatat

SEQ ID NO: 793564 - DNA, 19 bp, Mus musculus
  siRNA target sequence for B230215L15Rik (NM_177170.2,1131-1149).
gaagagaagggcaatatta

SEQ ID NO: 793565 - DNA, 19 bp, Mus musculus
  siRNA target sequence for B230215L15Rik (NM_177170.2,1134-1152).
gagaagggcaatattacaa

SEQ ID NO: 793566 - DNA, 19 bp, Mus musculus
  siRNA target sequence for B230215L15Rik (NM_177170.2,1139-1157).
gggcaatattacaaagaca

SEQ ID NO: 793567 - DNA, 19 bp, Mus musculus
  siRNA target sequence for B230215L15Rik (NM_177170.2,1154-1172).
gacaatcacattgtgtaaa

SEQ ID NO: 793568 - DNA, 19 bp, Mus musculus
  siRNA target sequence for B230215L15Rik (NM_177170.2,1160-1178).
cacattgtgtaaaaagatt

SEQ ID NO: 793569 - DNA, 19 bp, Mus musculus
  siRNA target sequence for B230215L15Rik (NM_177170.2,1207-1225).
caatatgacctaaaaaata

SEQ ID NO: 793570 - DNA, 19 bp, Mus musculus
  siRNA target sequence for A830054O04Rik (NM_177172.2,384-402).
gaaacacatgatagactat

SEQ ID NO: 793571 - DNA, 19 bp, Mus musculus
  siRNA target sequence for A830054O04Rik (NM_177172.2,411-429).
gcttcaaaggtcaataggt

SEQ ID NO: 793572 - DNA, 19 bp, Mus musculus
  siRNA target sequence for A830054O04Rik (NM_177172.2,471-489).
ctcattcaaaatagtacat

SEQ ID NO: 793573 - DNA, 19 bp, Mus musculus
  siRNA target sequence for A830054O04Rik (NM_177172.2,473-491).
cattcaaaatagtacattt

SEQ ID NO: 793574 - DNA, 19 bp, Mus musculus
  siRNA target sequence for A830054O04Rik (NM_177172.2,517-535).
gggaagcattcacaaacaa

SEQ ID NO: 793575 - DNA, 19 bp, Mus musculus
  siRNA target sequence for A830054O04Rik (NM_177172.2,558-576).
ggatgatgtcatatatatt

SEQ ID NO: 793576 - DNA, 19 bp, Mus musculus
  siRNA target sequence for A830054O04Rik (NM_177172.2,580-598).
gattttaacagtaaagcat

SEQ ID NO: 793577 - DNA, 19 bp, Mus musculus
  siRNA target sequence for A830054O04Rik (NM_177172.2,608-626).
gagtaggtatattttacaa

SEQ ID NO: 793578 - DNA, 19 bp, Mus musculus
  siRNA target sequence for A830054O04Rik (NM_177172.2,624-642).
caaatatggcagtttgatt

SEQ ID NO: 793579 - DNA, 19 bp, Mus musculus
  siRNA target sequence for A830054O04Rik (NM_177172.2,665-683).
gtgggagccaaaaatcaat

SEQ ID NO: 793580 - DNA, 19 bp, Mus musculus
  siRNA target sequence for A830054O04Rik (NM_177172.2,667-685).
gggagccaaaaatcaattt

SEQ ID NO: 793581 - DNA, 19 bp, Mus musculus
  siRNA target sequence for A830054O04Rik (NM_177172.2,668-686).
ggagccaaaaatcaatttt

SEQ ID NO: 793582 - DNA, 19 bp, Mus musculus
  siRNA target sequence for A830054O04Rik (NM_177172.2,669-687).
gagccaaaaatcaattttt

SEQ ID NO: 793583 - DNA, 19 bp, Mus musculus
  siRNA target sequence for A830054O04Rik (NM_177172.2,693-711).
caacatcagtgccttaaca

SEQ ID NO: 793584 - DNA, 19 bp, Mus musculus
  siRNA target sequence for A830054O04Rik (NM_177172.2,696-714).
catcagtgccttaacactt

SEQ ID NO: 793585 - DNA, 19 bp, Mus musculus
  siRNA target sequence for A830054O04Rik (NM_177172.2,703-721).
gccttaacacttttcttca

SEQ ID NO: 793586 - DNA, 19 bp, Mus musculus
  siRNA target sequence for A830054O04Rik (NM_177172.2,724-742).
gcccaagtagcggattctt

SEQ ID NO: 793587 - DNA, 19 bp, Mus musculus
  siRNA target sequence for A830054O04Rik (NM_177172.2,726-744).
ccaagtagcggattctttt

SEQ ID NO: 793588 - DNA, 19 bp, Mus musculus
  siRNA target sequence for A830054O04Rik (NM_177172.2,734-752).
cggattcttttctctactt

SEQ ID NO: 793589 - DNA, 19 bp, Mus musculus
  siRNA target sequence for A830054O04Rik (NM_177172.2,747-765).
ctacttctcctccatgtta

SEQ ID NO: 793590 - DNA, 19 bp, Mus musculus
  siRNA target sequence for A830018L16Rik (NM_177173.3,508-526).
caagatcggtcctctgttt

SEQ ID NO: 793591 - DNA, 19 bp, Mus musculus
  siRNA target sequence for A830018L16Rik (NM_177173.3,529-547).
ggaattaatgaccaagtta

SEQ ID NO: 793592 - DNA, 19 bp, Mus musculus
  siRNA target sequence for A830018L16Rik (NM_177173.3,560-578).
cctgaccagccaattccat

SEQ ID NO: 793593 - DNA, 19 bp, Mus musculus
  siRNA target sequence for A830018L16Rik (NM_177173.3,561-579).
ctgaccagccaattccatt

SEQ ID NO: 793594 - DNA, 19 bp, Mus musculus
  siRNA target sequence for A830018L16Rik (NM_177173.3,583-601).
cattgaccatcttcaatct

SEQ ID NO: 793595 - DNA, 19 bp, Mus musculus
  siRNA target sequence for A830018L16Rik (NM_177173.3,589-607).
ccatcttcaatctaaacaa

SEQ ID NO: 793596 - DNA, 19 bp, Mus musculus
  siRNA target sequence for A830018L16Rik (NM_177173.3,655-673).
ctgggcagaaagtgaatca

SEQ ID NO: 793597 - DNA, 19 bp, Mus musculus
  siRNA target sequence for A830018L16Rik (NM_177173.3,698-716).
gattttagaagctatgata

SEQ ID NO: 793598 - DNA, 19 bp, Mus musculus
  siRNA target sequence for A830018L16Rik (NM_177173.3,719-737).
ccttggcagatgaatgcaa

SEQ ID NO: 793599 - DNA, 19 bp, Mus musculus
  siRNA target sequence for A830018L16Rik (NM_177173.3,720-738).
cttggcagatgaatgcaaa

SEQ ID NO: 793600 - DNA, 19 bp, Mus musculus
  siRNA target sequence for A830018L16Rik (NM_177173.3,759-777).
gtgatctggctgtatctaa

SEQ ID NO: 793601 - DNA, 19 bp, Mus musculus
  siRNA target sequence for A830018L16Rik (NM_177173.3,816-834).
ggtcagtagaccatcttaa

SEQ ID NO: 793602 - DNA, 19 bp, Mus musculus
  siRNA target sequence for A830018L16Rik (NM_177173.3,835-853).
gtggaactggcggactaaa

SEQ ID NO: 793603 - DNA, 19 bp, Mus musculus
  siRNA target sequence for A830018L16Rik (NM_177173.3,838-856).
gaactggcggactaaacca

SEQ ID NO: 793604 - DNA, 19 bp, Mus musculus
  siRNA target sequence for A830018L16Rik (NM_177173.3,936-954).
gaagtatcgcgatttcaga

SEQ ID NO: 793605 - DNA, 19 bp, Mus musculus
  siRNA target sequence for A830018L16Rik (NM_177173.3,943-961).
cgcgatttcagatgaactt

SEQ ID NO: 793606 - DNA, 19 bp, Mus musculus
  siRNA target sequence for A830018L16Rik (NM_177173.3,967-985).
ggaaacattggctttcaat

SEQ ID NO: 793607 - DNA, 19 bp, Mus musculus
  siRNA target sequence for A830018L16Rik (NM_177173.3,1020-1038).
ggatcggcagggcagaaaa

SEQ ID NO: 793608 - DNA, 19 bp, Mus musculus
  siRNA target sequence for A830018L16Rik (NM_177173.3,1021-1039).
gatcggcagggcagaaaat

SEQ ID NO: 793609 - DNA, 19 bp, Mus musculus
  siRNA target sequence for A830018L16Rik (NM_177173.3,1076-1094).
ccggttccgcggagtaaga

SEQ ID NO: 793610 - DNA, 19 bp, Mus musculus
  siRNA target sequence for A830018L16Rik (NM_177173.3,1077-1095).
cggttccgcggagtaagaa

SEQ ID NO: 793611 - DNA, 19 bp, Mus musculus
  siRNA target sequence for A830018L16Rik (NM_177173.3,1078-1096).
ggttccgcggagtaagaat

SEQ ID NO: 793612 - DNA, 19 bp, Mus musculus
  siRNA target sequence for A830018L16Rik (NM_177173.3,1082-1100).
ccgcggagtaagaatgact

SEQ ID NO: 793613 - DNA, 19 bp, Mus musculus
  siRNA target sequence for A830018L16Rik (NM_177173.3,1153-1171).
gcccaagacgaaaggatta

SEQ ID NO: 793614 - DNA, 19 bp, Mus musculus
  siRNA target sequence for A830018L16Rik (NM_177173.3,1154-1172).
cccaagacgaaaggattaa

SEQ ID NO: 793615 - DNA, 19 bp, Mus musculus
  siRNA target sequence for A830018L16Rik (NM_177173.3,1155-1173).
ccaagacgaaaggattaaa

SEQ ID NO: 793616 - DNA, 19 bp, Mus musculus
  siRNA target sequence for A830018L16Rik (NM_177173.3,1249-1267).
cacaccatctgtaatagaa

SEQ ID NO: 793617 - DNA, 19 bp, Mus musculus
  siRNA target sequence for A830018L16Rik (NM_177173.3,1307-1325).
gaaaatctggatgacttaa

SEQ ID NO: 793618 - DNA, 19 bp, Mus musculus
  siRNA target sequence for A830018L16Rik (NM_177173.3,1337-1355).
gtaaccactctggtacttt

SEQ ID NO: 793619 - DNA, 19 bp, Mus musculus
  siRNA target sequence for A830018L16Rik (NM_177173.3,1349-1367).
gtactttcggggagcaaat

SEQ ID NO: 793620 - DNA, 19 bp, Mus musculus
  siRNA target sequence for A830018L16Rik (NM_177173.3,1532-1550).
gggacagaagaaactctta

SEQ ID NO: 793621 - DNA, 19 bp, Mus musculus
  siRNA target sequence for A830018L16Rik (NM_177173.3,1533-1551).
ggacagaagaaactcttat

SEQ ID NO: 793622 - DNA, 19 bp, Mus musculus
  siRNA target sequence for A830018L16Rik (NM_177173.3,1565-1583).
gattttgagaaaacatcaa

SEQ ID NO: 793623 - DNA, 19 bp, Mus musculus
  siRNA target sequence for A830018L16Rik (NM_177173.3,1608-1626).
ctagtggagcacactcttt

SEQ ID NO: 793624 - DNA, 19 bp, Mus musculus
  siRNA target sequence for A830018L16Rik (NM_177173.3,1613-1631).
ggagcacactctttgaaat

SEQ ID NO: 793625 - DNA, 19 bp, Mus musculus
  siRNA target sequence for A830018L16Rik (NM_177173.3,1773-1791).
cctgtcctaccctgatcta

SEQ ID NO: 793626 - DNA, 19 bp, Mus musculus
  siRNA target sequence for A830018L16Rik (NM_177173.3,1774-1792).
ctgtcctaccctgatctat

SEQ ID NO: 793627 - DNA, 19 bp, Mus musculus
  siRNA target sequence for C330049O21Rik (NM_177174.2,751-769).
ggacaaatcagatgataga

SEQ ID NO: 793628 - DNA, 19 bp, Mus musculus
  siRNA target sequence for C330049O21Rik (NM_177174.2,841-859).
ggttggacctaactttaga

SEQ ID NO: 793629 - DNA, 19 bp, Mus musculus
  siRNA target sequence for C330049O21Rik (NM_177174.2,883-901).
caattttggagaattacga

SEQ ID NO: 793630 - DNA, 19 bp, Mus musculus
  siRNA target sequence for C330049O21Rik (NM_177174.2,890-908).
ggagaattacgattaggta

SEQ ID NO: 793631 - DNA, 19 bp, Mus musculus
  siRNA target sequence for C330049O21Rik (NM_177174.2,891-909).
gagaattacgattaggtaa

SEQ ID NO: 793632 - DNA, 19 bp, Mus musculus
  siRNA target sequence for C330049O21Rik (NM_177174.2,900-918).
gattaggtaagattgtttt

SEQ ID NO: 793633 - DNA, 19 bp, Mus musculus
  siRNA target sequence for C330049O21Rik (NM_177174.2,960-978).
cttgtaaaagggtattctt

SEQ ID NO: 793634 - DNA, 19 bp, Mus musculus
  siRNA target sequence for A930001M12Rik (NM_177175.2,1494-1512).
gcggcctgatgacataaat

SEQ ID NO: 793635 - DNA, 19 bp, Mus musculus
  siRNA target sequence for A930001M12Rik (NM_177175.2,1531-1549).
gtggccctggtcagtgttt

SEQ ID NO: 793636 - DNA, 19 bp, Mus musculus
  siRNA target sequence for A930001M12Rik (NM_177175.2,1583-1601).
gcatgaagggggaaactct

SEQ ID NO: 793637 - DNA, 19 bp, Mus musculus
  siRNA target sequence for A930001M12Rik (NM_177175.2,1814-1832).
cggatgaactggctaagaa

SEQ ID NO: 793638 - DNA, 19 bp, Mus musculus
  siRNA target sequence for A930001M12Rik (NM_177175.2,2092-2110).
caggacagtatcatcgttt

SEQ ID NO: 793639 - DNA, 19 bp, Mus musculus
  siRNA target sequence for A930001M12Rik (NM_177175.2,2107-2125).
gtttgctcctacaagcaaa

SEQ ID NO: 793640 - DNA, 19 bp, Mus musculus
  siRNA target sequence for A930001M12Rik (NM_177175.2,2122-2140).
caaaacagcccctatgaca

SEQ ID NO: 793641 - DNA, 19 bp, Mus musculus
  siRNA target sequence for A930001M12Rik (NM_177175.2,2130-2148).
cccctatgacagatactgt

SEQ ID NO: 793642 - DNA, 19 bp, Mus musculus
  siRNA target sequence for A930001M12Rik (NM_177175.2,2177-2195).
gggaccacgagacaatagt

SEQ ID NO: 793643 - DNA, 19 bp, Mus musculus
  siRNA target sequence for A930001M12Rik (NM_177175.2,2179-2197).
gaccacgagacaatagtct

SEQ ID NO: 793644 - DNA, 19 bp, Mus musculus
  siRNA target sequence for 9430022M17Rik (NM_177176.2,1573-1591).
ctgttgggactgaaacact

SEQ ID NO: 793645 - DNA, 19 bp, Mus musculus
  siRNA target sequence for 9430022M17Rik (NM_177176.2,1579-1597).
ggactgaaacactaacttt

SEQ ID NO: 793646 - DNA, 19 bp, Mus musculus
  siRNA target sequence for 9430022M17Rik (NM_177176.2,1708-1726).
gtctctcccgtggttttaa

SEQ ID NO: 793647 - DNA, 19 bp, Mus musculus
  siRNA target sequence for 9430022M17Rik (NM_177176.2,1765-1783).
cgttcaacgctcagctttt

SEQ ID NO: 793648 - DNA, 19 bp, Mus musculus
  siRNA target sequence for 9430022M17Rik (NM_177176.2,1776-1794).
cagcttttccgaaaaccta

SEQ ID NO: 793649 - DNA, 19 bp, Mus musculus
  siRNA target sequence for 9430022M17Rik (NM_177176.2,1812-1830).
gctttgactgcaaattgta

SEQ ID NO: 793650 - DNA, 19 bp, Mus musculus
  siRNA target sequence for 9430022M17Rik (NM_177176.2,1856-1874).
cttggtcatggtctgtaaa

SEQ ID NO: 793651 - DNA, 19 bp, Mus musculus
  siRNA target sequence for 9430022M17Rik (NM_177176.2,1904-1922).
cctgttattgtccactaaa

SEQ ID NO: 793652 - DNA, 19 bp, Mus musculus
  siRNA target sequence for 9430022M17Rik (NM_177176.2,1907-1925).
gttattgtccactaaaggt

SEQ ID NO: 793653 - DNA, 19 bp, Mus musculus
  siRNA target sequence for 9430022M17Rik (NM_177176.2,1916-1934).
cactaaaggtcttagatgt

SEQ ID NO: 793654 - DNA, 19 bp, Mus musculus
  siRNA target sequence for 5930403N24Rik (NM_177177.2,1269-1287).
gttcgctttcggatttttt

SEQ ID NO: 793655 - DNA, 19 bp, Mus musculus
  siRNA target sequence for 5930403N24Rik (NM_177177.2,1359-1377).
ctttctccaatgcctattt

SEQ ID NO: 793656 - DNA, 19 bp, Mus musculus
  siRNA target sequence for 9930036E21Rik (NM_177178.3,230-248).
gagtggtgcggctttagga

SEQ ID NO: 793657 - DNA, 19 bp, Mus musculus
  siRNA target sequence for 9930036E21Rik (NM_177178.3,241-259).
ctttaggacttgagattgt

SEQ ID NO: 793658 - DNA, 19 bp, Mus musculus
  siRNA target sequence for 9930036E21Rik (NM_177178.3,294-312).
cgctatggagactttaaga

SEQ ID NO: 793659 - DNA, 19 bp, Mus musculus
  siRNA target sequence for 9930036E21Rik (NM_177178.3,353-371).
gtatctctgctttctcatt

SEQ ID NO: 793660 - DNA, 19 bp, Mus musculus
  siRNA target sequence for 9930036E21Rik (NM_177178.3,389-407).
ggatgtcagtacgacaata

SEQ ID NO: 793661 - DNA, 19 bp, Mus musculus
  siRNA target sequence for 9930036E21Rik (NM_177178.3,390-408).
gatgtcagtacgacaatat

SEQ ID NO: 793662 - DNA, 19 bp, Mus musculus
  siRNA target sequence for 9930036E21Rik (NM_177178.3,442-460).
gccctcctgaaaataccaa

SEQ ID NO: 793663 - DNA, 19 bp, Mus musculus
  siRNA target sequence for 9930036E21Rik (NM_177178.3,447-465).
cctgaaaataccaacgtta

SEQ ID NO: 793664 - DNA, 19 bp, Mus musculus
  siRNA target sequence for 9930036E21Rik (NM_177178.3,515-533).
caagccgtggagttacatt

SEQ ID NO: 793665 - DNA, 19 bp, Mus musculus
  siRNA target sequence for 9930036E21Rik (NM_177178.3,592-610).
cgtggatcctgttaccttt

SEQ ID NO: 793666 - DNA, 19 bp, Mus musculus
  siRNA target sequence for 9930036E21Rik (NM_177178.3,614-632).
gcagtcatatgcaagatct

SEQ ID NO: 793667 - DNA, 19 bp, Mus musculus
  siRNA target sequence for 9930036E21Rik (NM_177178.3,643-661).
ccatcaccggcaagatcaa

SEQ ID NO: 793668 - DNA, 19 bp, Mus musculus
  siRNA target sequence for 9930036E21Rik (NM_177178.3,671-689).
gattgagaatgccatctat

SEQ ID NO: 793669 - DNA, 19 bp, Mus musculus
  siRNA target sequence for 9930036E21Rik (NM_177178.3,693-711).
ggcacttacttgctgatat

SEQ ID NO: 793670 - DNA, 19 bp, Mus musculus
  siRNA target sequence for 9930036E21Rik (NM_177178.3,738-756).
gtaaacccacgtttgcatt

SEQ ID NO: 793671 - DNA, 19 bp, Mus musculus
  siRNA target sequence for 9930036E21Rik (NM_177178.3,743-761).
cccacgtttgcatttagaa

SEQ ID NO: 793672 - DNA, 19 bp, Mus musculus
  siRNA target sequence for 9930036E21Rik (NM_177178.3,744-762).
ccacgtttgcatttagaat

SEQ ID NO: 793673 - DNA, 19 bp, Mus musculus
  siRNA target sequence for 9930036E21Rik (NM_177178.3,797-815).
caacacatggggtctgttt

SEQ ID NO: 793674 - DNA, 19 bp, Mus musculus
  siRNA target sequence for 9930036E21Rik (NM_177178.3,835-853).
ggtatggattggtggaaat

SEQ ID NO: 793675 - DNA, 19 bp, Mus musculus
  siRNA target sequence for 9930036E21Rik (NM_177178.3,836-854).
gtatggattggtggaaatt

SEQ ID NO: 793676 - DNA, 19 bp, Mus musculus
  siRNA target sequence for 9930036E21Rik (NM_177178.3,849-867).
gaaattcctcggtcatact

SEQ ID NO: 793677 - DNA, 19 bp, Mus musculus
  siRNA target sequence for 9930036E21Rik (NM_177178.3,891-909).
cttcttatgaagacttact

SEQ ID NO: 793678 - DNA, 19 bp, Mus musculus
  siRNA target sequence for 9930036E21Rik (NM_177178.3,894-912).
cttatgaagacttacttta

SEQ ID NO: 793679 - DNA, 19 bp, Mus musculus
  siRNA target sequence for 9930036E21Rik (NM_177178.3,940-958).
cagatgcagaagagaattt

SEQ ID NO: 793680 - DNA, 19 bp, Mus musculus
  siRNA target sequence for 9930036E21Rik (NM_177178.3,951-969).
gagaatttggaggatgtaa

SEQ ID NO: 793681 - DNA, 19 bp, Mus musculus
  siRNA target sequence for 9930036E21Rik (NM_177178.3,978-996).
gttcgtaaagtaaatgaga

SEQ ID NO: 793682 - DNA, 19 bp, Mus musculus
  siRNA target sequence for 9930036E21Rik (NM_177178.3,987-1005).
gtaaatgagagcatcaagt

SEQ ID NO: 793683 - DNA, 19 bp, Mus musculus
  siRNA target sequence for 9930036E21Rik (NM_177178.3,1021-1039).
ggaagtgtgtagacacaat

SEQ ID NO: 793684 - DNA, 19 bp, Mus musculus
  siRNA target sequence for 9930036E21Rik (NM_177178.3,1032-1050).
gacacaatacttaaaaagt

SEQ ID NO: 793685 - DNA, 19 bp, Mus musculus
  siRNA target sequence for 9930036E21Rik (NM_177178.3,1057-1075).
cagattatcaggaaaagat

SEQ ID NO: 793686 - DNA, 19 bp, Mus musculus
  siRNA target sequence for 9930036E21Rik (NM_177178.3,1067-1085).
ggaaaagatgggtaggaat

SEQ ID NO: 793687 - DNA, 19 bp, Mus musculus
  siRNA target sequence for 9930036E21Rik (NM_177178.3,1073-1091).
gatgggtaggaatatggat

SEQ ID NO: 793688 - DNA, 19 bp, Mus musculus
  siRNA target sequence for 9930036E21Rik (NM_177178.3,1081-1099).
ggaatatggatgactatga

SEQ ID NO: 793689 - DNA, 19 bp, Mus musculus
  siRNA target sequence for 9930036E21Rik (NM_177178.3,1118-1136).
caatacctacccaagtgaa

SEQ ID NO: 793690 - DNA, 19 bp, Mus musculus
  siRNA target sequence for 9930036E21Rik (NM_177178.3,1124-1142).
ctacccaagtgaaaaaagt

SEQ ID NO: 793691 - DNA, 19 bp, Mus musculus
  siRNA target sequence for 9930036E21Rik (NM_177178.3,1141-1159).
gtttggtaaaattgcataa

SEQ ID NO: 793692 - DNA, 19 bp, Mus musculus
  siRNA target sequence for 9930036E21Rik (NM_177178.3,1200-1218).
gtgcaatggcagattcttt

SEQ ID NO: 793693 - DNA, 19 bp, Mus musculus
  siRNA target sequence for 9930036E21Rik (NM_177178.3,1220-1238).
ggaacaggcattctatcta

SEQ ID NO: 793694 - DNA, 19 bp, Mus musculus
  siRNA target sequence for 9930036E21Rik (NM_177178.3,1226-1244).
ggcattctatctagaagat

SEQ ID NO: 793695 - DNA, 19 bp, Mus musculus
  siRNA target sequence for 9930036E21Rik (NM_177178.3,1265-1283).
cgcaactcaccagtttgtt

SEQ ID NO: 793696 - DNA, 19 bp, Mus musculus
  siRNA target sequence for 9930036E21Rik (NM_177178.3,1267-1285).
caactcaccagtttgttca

SEQ ID NO: 793697 - DNA, 19 bp, Mus musculus
  siRNA target sequence for 9930036E21Rik (NM_177178.3,1299-1317).
cctgagccagaaaatcgat

SEQ ID NO: 793698 - DNA, 19 bp, Mus musculus
  siRNA target sequence for 9930036E21Rik (NM_177178.3,1306-1324).
cagaaaatcgatttatcca

SEQ ID NO: 793699 - DNA, 19 bp, Mus musculus
  siRNA target sequence for 9930036E21Rik (NM_177178.3,1308-1326).
gaaaatcgatttatccaat

SEQ ID NO: 793700 - DNA, 19 bp, Mus musculus
  siRNA target sequence for 9930036E21Rik (NM_177178.3,1314-1332).
cgatttatccaatattttt

SEQ ID NO: 793701 - DNA, 19 bp, Mus musculus
  siRNA target sequence for 9930036E21Rik (NM_177178.3,1364-1382).
ccttttgcgtccatggttt

SEQ ID NO: 793702 - DNA, 19 bp, Mus musculus
  siRNA target sequence for 9930036E21Rik (NM_177178.3,1398-1416).
gtggttttgtctatcttct

SEQ ID NO: 793703 - DNA, 19 bp, Mus musculus
  siRNA target sequence for 9930036E21Rik (NM_177178.3,1433-1451).
gtcagagtgtaccttcttt

SEQ ID NO: 793704 - DNA, 19 bp, Mus musculus
  siRNA target sequence for 9930036E21Rik (NM_177178.3,1437-1455).
gagtgtaccttctttagca

SEQ ID NO: 793705 - DNA, 19 bp, Mus musculus
  siRNA target sequence for 9930036E21Rik (NM_177178.3,1471-1489).
ccctttttgcagtattcat

SEQ ID NO: 793706 - DNA, 19 bp, Mus musculus
  siRNA target sequence for 9930036E21Rik (NM_177178.3,1496-1514).
ggcagaaagaacatacaat

SEQ ID NO: 793707 - DNA, 19 bp, Mus musculus
  siRNA target sequence for 9930036E21Rik (NM_177178.3,1504-1522).
gaacatacaattacattta

SEQ ID NO: 793708 - DNA, 19 bp, Mus musculus
  siRNA target sequence for 9930036E21Rik (NM_177178.3,1588-1606).
ggatccgcgtgtttaacta

SEQ ID NO: 793709 - DNA, 19 bp, Mus musculus
  siRNA target sequence for 9930036E21Rik (NM_177178.3,1593-1611).
cgcgtgtttaactactact

SEQ ID NO: 793710 - DNA, 19 bp, Mus musculus
  siRNA target sequence for 9930036E21Rik (NM_177178.3,1625-1643).
ccatcagaccgatgcttat

SEQ ID NO: 793711 - DNA, 19 bp, Mus musculus
  siRNA target sequence for 9930036E21Rik (NM_177178.3,1626-1644).
catcagaccgatgcttata

SEQ ID NO: 793712 - DNA, 19 bp, Mus musculus
  siRNA target sequence for 9930036E21Rik (NM_177178.3,1664-1682).
gttattttgccgtttgact

SEQ ID NO: 793713 - DNA, 19 bp, Mus musculus
  siRNA target sequence for 9930036E21Rik (NM_177178.3,1673-1691).
ccgtttgactcctccttta

SEQ ID NO: 793714 - DNA, 19 bp, Mus musculus
  siRNA target sequence for 9930036E21Rik (NM_177178.3,1749-1767).
cagccaactgcatatacat

SEQ ID NO: 793715 - DNA, 19 bp, Mus musculus
  siRNA target sequence for 9930036E21Rik (NM_177178.3,1752-1770).
ccaactgcatatacatcta

SEQ ID NO: 793716 - DNA, 19 bp, Mus musculus
  siRNA target sequence for 9930036E21Rik (NM_177178.3,1756-1774).
ctgcatatacatctatcat

SEQ ID NO: 793717 - DNA, 19 bp, Mus musculus
  siRNA target sequence for 9930036E21Rik (NM_177178.3,1776-1794).
ggttccatgaaagttttat

SEQ ID NO: 793718 - DNA, 19 bp, Mus musculus
  siRNA target sequence for 9930036E21Rik (NM_177178.3,1795-1813).
cctttattgcagatggatt

SEQ ID NO: 793719 - DNA, 19 bp, Mus musculus
  siRNA target sequence for 9930036E21Rik (NM_177178.3,1828-1846).
ctatgttggtagtaattct

SEQ ID NO: 793720 - DNA, 19 bp, Mus musculus
  siRNA target sequence for 9930036E21Rik (NM_177178.3,1845-1863).
ctctgcatcgctacgtatt

SEQ ID NO: 793721 - DNA, 19 bp, Mus musculus
  siRNA target sequence for 9930036E21Rik (NM_177178.3,1847-1865).
ctgcatcgctacgtatttt

SEQ ID NO: 793722 - DNA, 19 bp, Mus musculus
  siRNA target sequence for 9930036E21Rik (NM_177178.3,1850-1868).
catcgctacgtattttagt

SEQ ID NO: 793723 - DNA, 19 bp, Mus musculus
  siRNA target sequence for 9930036E21Rik (NM_177178.3,1871-1889).
gggcacccgttgtttgaat

SEQ ID NO: 793724 - DNA, 19 bp, Mus musculus
  siRNA target sequence for 9930036E21Rik (NM_177178.3,1873-1891).
gcacccgttgtttgaatct

SEQ ID NO: 793725 - DNA, 19 bp, Mus musculus
  siRNA target sequence for 9930036E21Rik (NM_177178.3,1930-1948).
catcagatctagttgatga

SEQ ID NO: 793726 - DNA, 19 bp, Mus musculus
  siRNA target sequence for 9930036E21Rik (NM_177178.3,1947-1965).
gaaggaaaagaattaatca

SEQ ID NO: 793727 - DNA, 19 bp, Mus musculus
  siRNA target sequence for 9930036E21Rik (NM_177178.3,2017-2035).
gagagtggaaagaacgtta

SEQ ID NO: 793728 - DNA, 19 bp, Mus musculus
  siRNA target sequence for 9930036E21Rik (NM_177178.3,2021-2039).
gtggaaagaacgttatgga

SEQ ID NO: 793729 - DNA, 19 bp, Mus musculus
  siRNA target sequence for 9930036E21Rik (NM_177178.3,2116-2134).
ccaactggtcatccaaata

SEQ ID NO: 793730 - DNA, 19 bp, Mus musculus
  siRNA target sequence for 9930036E21Rik (NM_177178.3,2211-2229).
gaaacgtttacggatgaat

SEQ ID NO: 793731 - DNA, 19 bp, Mus musculus
  siRNA target sequence for 9930036E21Rik (NM_177178.3,2215-2233).
cgtttacggatgaatctct

SEQ ID NO: 793732 - DNA, 19 bp, Mus musculus
  siRNA target sequence for 9930036E21Rik (NM_177178.3,2259-2277).
cctggtgggcgatatctct

SEQ ID NO: 793733 - DNA, 19 bp, Mus musculus
  siRNA target sequence for 9930036E21Rik (NM_177178.3,2268-2286).
cgatatctctccatgtctt

SEQ ID NO: 793734 - DNA, 19 bp, Mus musculus
  siRNA target sequence for 9930036E21Rik (NM_177178.3,2284-2302).
cttccagtataatatttga

SEQ ID NO: 793735 - DNA, 19 bp, Mus musculus
  siRNA target sequence for 9930022D16Rik (NM_177179.2,118-136).
gatgactgagggtgaagta

SEQ ID NO: 793736 - DNA, 19 bp, Mus musculus
  siRNA target sequence for 9930022D16Rik (NM_177179.2,131-149).
gaagtattctccatcctta

SEQ ID NO: 793737 - DNA, 19 bp, Mus musculus
  siRNA target sequence for 9930022D16Rik (NM_177179.2,253-271).
caccaggaggaccattgta

SEQ ID NO: 793738 - DNA, 19 bp, Mus musculus
  siRNA target sequence for 9930022D16Rik (NM_177179.2,265-283).
cattgtaagtagctcattt

SEQ ID NO: 793739 - DNA, 19 bp, Mus musculus
  siRNA target sequence for 9930022D16Rik (NM_177179.2,269-287).
gtaagtagctcatttgaga

SEQ ID NO: 793740 - DNA, 19 bp, Mus musculus
  siRNA target sequence for 9930022D16Rik (NM_177179.2,414-432).
gagtccccactcaaccaaa

SEQ ID NO: 793741 - DNA, 19 bp, Mus musculus
  siRNA target sequence for A830053O21Rik (NM_177182.3,405-423).
gcatcactgctctatcctt

SEQ ID NO: 793742 - DNA, 19 bp, Mus musculus
  siRNA target sequence for C230055H22Rik (NM_177184.2,149-167).
gaaaatgctctgagtgaat

SEQ ID NO: 793743 - DNA, 19 bp, Mus musculus
  siRNA target sequence for C230055H22Rik (NM_177184.2,162-180).
gtgaattggacgttccttt

SEQ ID NO: 793744 - DNA, 19 bp, Mus musculus
  siRNA target sequence for C230055H22Rik (NM_177184.2,170-188).
gacgttcctttcaaagtca

SEQ ID NO: 793745 - DNA, 19 bp, Mus musculus
  siRNA target sequence for C230055H22Rik (NM_177184.2,187-205).
caaggctggccagattgat

SEQ ID NO: 793746 - DNA, 19 bp, Mus musculus
  siRNA target sequence for C230055H22Rik (NM_177184.2,190-208).
ggctggccagattgataaa

SEQ ID NO: 793747 - DNA, 19 bp, Mus musculus
  siRNA target sequence for C230055H22Rik (NM_177184.2,196-214).
ccagattgataaattaact

SEQ ID NO: 793748 - DNA, 19 bp, Mus musculus
  siRNA target sequence for C230055H22Rik (NM_177184.2,257-275).
gccacgctagaaggattat

SEQ ID NO: 793749 - DNA, 19 bp, Mus musculus
  siRNA target sequence for C230055H22Rik (NM_177184.2,258-276).
ccacgctagaaggattata

SEQ ID NO: 793750 - DNA, 19 bp, Mus musculus
  siRNA target sequence for C230055H22Rik (NM_177184.2,261-279).
cgctagaaggattatacct

SEQ ID NO: 793751 - DNA, 19 bp, Mus musculus
  siRNA target sequence for C230055H22Rik (NM_177184.2,287-305).
gtccctggagcaagtatta

SEQ ID NO: 793752 - DNA, 19 bp, Mus musculus
  siRNA target sequence for C230055H22Rik (NM_177184.2,294-312).
gagcaagtattaagtatga

SEQ ID NO: 793753 - DNA, 19 bp, Mus musculus
  siRNA target sequence for C230055H22Rik (NM_177184.2,405-423).
cacactcaggggagttcat

SEQ ID NO: 793754 - DNA, 19 bp, Mus musculus
  siRNA target sequence for C230055H22Rik (NM_177184.2,407-425).
cactcaggggagttcatgt

SEQ ID NO: 793755 - DNA, 19 bp, Mus musculus
  siRNA target sequence for C230055H22Rik (NM_177184.2,429-447).
gcttggaaaacttgcttta

SEQ ID NO: 793756 - DNA, 19 bp, Mus musculus
  siRNA target sequence for C230055H22Rik (NM_177184.2,461-479).
cctggacgtaagcgtaaaa

SEQ ID NO: 793757 - DNA, 19 bp, Mus musculus
  siRNA target sequence for C230055H22Rik (NM_177184.2,462-480).
ctggacgtaagcgtaaaaa

SEQ ID NO: 793758 - DNA, 19 bp, Mus musculus
  siRNA target sequence for C230055H22Rik (NM_177184.2,465-483).
gacgtaagcgtaaaaagca

SEQ ID NO: 793759 - DNA, 19 bp, Mus musculus
  siRNA target sequence for C230055H22Rik (NM_177184.2,515-533).
cttgatcgctccaaagata

SEQ ID NO: 793760 - DNA, 19 bp, Mus musculus
  siRNA target sequence for C230055H22Rik (NM_177184.2,650-668).
ccagaaaggccgctttcat

SEQ ID NO: 793761 - DNA, 19 bp, Mus musculus
  siRNA target sequence for C230055H22Rik (NM_177184.2,676-694).
caccctgagagaatttagt

SEQ ID NO: 793762 - DNA, 19 bp, Mus musculus
  siRNA target sequence for C230055H22Rik (NM_177184.2,678-696).
ccctgagagaatttagtct

SEQ ID NO: 793763 - DNA, 19 bp, Mus musculus
  siRNA target sequence for C230055H22Rik (NM_177184.2,777-795).
gtctcagcgcctattggaa

SEQ ID NO: 793764 - DNA, 19 bp, Mus musculus
  siRNA target sequence for C230055H22Rik (NM_177184.2,848-866).
ctgaaacgtgaaattctta

SEQ ID NO: 793765 - DNA, 19 bp, Mus musculus
  siRNA target sequence for C230055H22Rik (NM_177184.2,854-872).
cgtgaaattcttacaagta

SEQ ID NO: 793766 - DNA, 19 bp, Mus musculus
  siRNA target sequence for C230055H22Rik (NM_177184.2,857-875).
gaaattcttacaagtacaa

SEQ ID NO: 793767 - DNA, 19 bp, Mus musculus
  siRNA target sequence for C230055H22Rik (NM_177184.2,883-901).
cccagaccatcagtacatt

SEQ ID NO: 793768 - DNA, 19 bp, Mus musculus
  siRNA target sequence for C230055H22Rik (NM_177184.2,898-916).
cattttccagccaatatca

SEQ ID NO: 793769 - DNA, 19 bp, Mus musculus
  siRNA target sequence for C230055H22Rik (NM_177184.2,1013-1031).
ctgacgaagcctcagtatt

SEQ ID NO: 793770 - DNA, 19 bp, Mus musculus
  siRNA target sequence for C230055H22Rik (NM_177184.2,1015-1033).
gacgaagcctcagtattta

SEQ ID NO: 793771 - DNA, 19 bp, Mus musculus
  siRNA target sequence for C230055H22Rik (NM_177184.2,1054-1072).
gtcactggattatatggtt

SEQ ID NO: 793772 - DNA, 19 bp, Mus musculus
  siRNA target sequence for C230055H22Rik (NM_177184.2,1058-1076).
ctggattatatggttagaa

SEQ ID NO: 793773 - DNA, 19 bp, Mus musculus
  siRNA target sequence for C230055H22Rik (NM_177184.2,1079-1097).
gcaccatacaggaagtaca

SEQ ID NO: 793774 - DNA, 19 bp, Mus musculus
  siRNA target sequence for C230055H22Rik (NM_177184.2,1125-1143).
gtcggcaatggtggaaata

SEQ ID NO: 793775 - DNA, 19 bp, Mus musculus
  siRNA target sequence for C230055H22Rik (NM_177184.2,1134-1152).
ggtggaaatatgctattga

SEQ ID NO: 793776 - DNA, 19 bp, Mus musculus
  siRNA target sequence for C230055H22Rik (NM_177184.2,1135-1153).
gtggaaatatgctattgat

SEQ ID NO: 793777 - DNA, 19 bp, Mus musculus
  siRNA target sequence for C230055H22Rik (NM_177184.2,1138-1156).
gaaatatgctattgattct

SEQ ID NO: 793778 - DNA, 19 bp, Mus musculus
  siRNA target sequence for C230055H22Rik (NM_177184.2,1155-1173).
ctgttcttgaagttcatat

SEQ ID NO: 793779 - DNA, 19 bp, Mus musculus
  siRNA target sequence for C230055H22Rik (NM_177184.2,1190-1208).
ccatggtcatggagtaaca

SEQ ID NO: 793780 - DNA, 19 bp, Mus musculus
  siRNA target sequence for C230055H22Rik (NM_177184.2,1191-1209).
catggtcatggagtaacat

SEQ ID NO: 793781 - DNA, 19 bp, Mus musculus
  siRNA target sequence for C230055H22Rik (NM_177184.2,1200-1218).
ggagtaacataaaaaacca

SEQ ID NO: 793782 - DNA, 19 bp, Mus musculus
  siRNA target sequence for C230055H22Rik (NM_177184.2,1201-1219).
gagtaacataaaaaaccat

SEQ ID NO: 793783 - DNA, 19 bp, Mus musculus
  siRNA target sequence for C230055H22Rik (NM_177184.2,1246-1264).
ggcctacaaaaccaagtta

SEQ ID NO: 793784 - DNA, 19 bp, Mus musculus
  siRNA target sequence for C230055H22Rik (NM_177184.2,1247-1265).
gcctacaaaaccaagttaa

SEQ ID NO: 793785 - DNA, 19 bp, Mus musculus
  siRNA target sequence for C230055H22Rik (NM_177184.2,1359-1377).
cacaagttgaggtcattca

SEQ ID NO: 793786 - DNA, 19 bp, Mus musculus
  siRNA target sequence for C230055H22Rik (NM_177184.2,1361-1379).
caagttgaggtcattcatt

SEQ ID NO: 793787 - DNA, 19 bp, Mus musculus
  siRNA target sequence for C230055H22Rik (NM_177184.2,1387-1405).
gaagttaaggaaaaagtct

SEQ ID NO: 793788 - DNA, 19 bp, Mus musculus
  siRNA target sequence for C230055H22Rik (NM_177184.2,1418-1436).
gagaaacgtggctggttta

SEQ ID NO: 793789 - DNA, 19 bp, Mus musculus
  siRNA target sequence for C230055H22Rik (NM_177184.2,1498-1516).
catcgatgaccttatgact

SEQ ID NO: 793790 - DNA, 19 bp, Mus musculus
  siRNA target sequence for C230055H22Rik (NM_177184.2,1618-1636).
gttggtcagcacctctatt

SEQ ID NO: 793791 - DNA, 19 bp, Mus musculus
  siRNA target sequence for C230055H22Rik (NM_177184.2,1621-1639).
ggtcagcacctctattata

SEQ ID NO: 793792 - DNA, 19 bp, Mus musculus
  siRNA target sequence for C230055H22Rik (NM_177184.2,1624-1642).
cagcacctctattataata

SEQ ID NO: 793793 - DNA, 19 bp, Mus musculus
  siRNA target sequence for C230055H22Rik (NM_177184.2,1627-1645).
cacctctattataataaga

SEQ ID NO: 793794 - DNA, 19 bp, Mus musculus
  siRNA target sequence for C230055H22Rik (NM_177184.2,1629-1647).
cctctattataataagaga

SEQ ID NO: 793795 - DNA, 19 bp, Mus musculus
  siRNA target sequence for C230055H22Rik (NM_177184.2,1669-1687).
cttgagagtccagataatt

SEQ ID NO: 793796 - DNA, 19 bp, Mus musculus
  siRNA target sequence for C230055H22Rik (NM_177184.2,1722-1740).
cacaagcattgaagataga

SEQ ID NO: 793797 - DNA, 19 bp, Mus musculus
  siRNA target sequence for C230055H22Rik (NM_177184.2,1732-1750).
gaagatagaagcaaaatta

SEQ ID NO: 793798 - DNA, 19 bp, Mus musculus
  siRNA target sequence for C230055H22Rik (NM_177184.2,1767-1785).
caggtttgcgacaacaaga

SEQ ID NO: 793799 - DNA, 19 bp, Mus musculus
  siRNA target sequence for C230055H22Rik (NM_177184.2,1830-1848).
ccttgctcaaaattgagtt

SEQ ID NO: 793800 - DNA, 19 bp, Mus musculus
  siRNA target sequence for C230055H22Rik (NM_177184.2,1831-1849).
cttgctcaaaattgagttt

SEQ ID NO: 793801 - DNA, 19 bp, Mus musculus
  siRNA target sequence for C230055H22Rik (NM_177184.2,1834-1852).
gctcaaaattgagtttgaa

SEQ ID NO: 793802 - DNA, 19 bp, Mus musculus
  siRNA target sequence for C230055H22Rik (NM_177184.2,1913-1931).
gtcatctatgacgctaaaa

SEQ ID NO: 793803 - DNA, 19 bp, Mus musculus
  siRNA target sequence for C230055H22Rik (NM_177184.2,1932-1950).
ctatcaatgctgttgttga

SEQ ID NO: 793804 - DNA, 19 bp, Mus musculus
  siRNA target sequence for C230055H22Rik (NM_177184.2,1949-1967).
gaattctttcagtcaaata

SEQ ID NO: 793805 - DNA, 19 bp, Mus musculus
  siRNA target sequence for C230055H22Rik (NM_177184.2,1972-1990).
gttggatcttgagcaaatt

SEQ ID NO: 793806 - DNA, 19 bp, Mus musculus
  siRNA target sequence for C230055H22Rik (NM_177184.2,1995-2013).
cagctaccttgatgaaact

SEQ ID NO: 793807 - DNA, 19 bp, Mus musculus
  siRNA target sequence for C230055H22Rik (NM_177184.2,2040-2058).
caggacttacgcatatcat

SEQ ID NO: 793808 - DNA, 19 bp, Mus musculus
  siRNA target sequence for C230055H22Rik (NM_177184.2,2043-2061).
gacttacgcatatcattga

SEQ ID NO: 793809 - DNA, 19 bp, Mus musculus
  siRNA target sequence for C230055H22Rik (NM_177184.2,2064-2082).
ctcggaaagttctcgattt

SEQ ID NO: 793810 - DNA, 19 bp, Mus musculus
  siRNA target sequence for C230055H22Rik (NM_177184.2,2126-2144).
ggttttcaccatgaaaagt

SEQ ID NO: 793811 - DNA, 19 bp, Mus musculus
  siRNA target sequence for C230055H22Rik (NM_177184.2,2172-2190).
cttttcagctcaacagtaa

SEQ ID NO: 793812 - DNA, 19 bp, Mus musculus
  siRNA target sequence for C230055H22Rik (NM_177184.2,2200-2218).
cgcacagaagactgctaat

SEQ ID NO: 793813 - DNA, 19 bp, Mus musculus
  siRNA target sequence for C230055H22Rik (NM_177184.2,2204-2222).
cagaagactgctaatgcat

SEQ ID NO: 793814 - DNA, 19 bp, Mus musculus
  siRNA target sequence for C230055H22Rik (NM_177184.2,2214-2232).
ctaatgcatcccttgaaga

SEQ ID NO: 793815 - DNA, 19 bp, Mus musculus
  siRNA target sequence for C230055H22Rik (NM_177184.2,2242-2260).
caaggcgtatgacaagttt

SEQ ID NO: 793816 - DNA, 19 bp, Mus musculus
  siRNA target sequence for C230055H22Rik (NM_177184.2,2279-2297).
gtgcagttgctctttgcaa

SEQ ID NO: 793817 - DNA, 19 bp, Mus musculus
  siRNA target sequence for A530082C11Rik (NM_177186.3,542-560).
gcccaagggaaaaacactt

SEQ ID NO: 793818 - DNA, 19 bp, Mus musculus
  siRNA target sequence for A530082C11Rik (NM_177186.3,561-579).
ctcacttgggggtctctat

SEQ ID NO: 793819 - DNA, 19 bp, Mus musculus
  siRNA target sequence for A530082C11Rik (NM_177186.3,563-581).
cacttgggggtctctattt

SEQ ID NO: 793820 - DNA, 19 bp, Mus musculus
  siRNA target sequence for A530082C11Rik (NM_177186.3,588-606).
cgaagtgagaagattgtct

SEQ ID NO: 793821 - DNA, 19 bp, Mus musculus
  siRNA target sequence for A530082C11Rik (NM_177186.3,594-612).
gagaagattgtctttacca

SEQ ID NO: 793822 - DNA, 19 bp, Mus musculus
  siRNA target sequence for A530082C11Rik (NM_177186.3,660-678).
gagaccactgtcattgagt

SEQ ID NO: 793823 - DNA, 19 bp, Mus musculus
  siRNA target sequence for A530082C11Rik (NM_177186.3,697-715).
gttcaagggctctcatcta

SEQ ID NO: 793824 - DNA, 19 bp, Mus musculus
  siRNA target sequence for A530082C11Rik (NM_177186.3,748-766).
cactgttcctcaacaaata

SEQ ID NO: 793825 - DNA, 19 bp, Mus musculus
  siRNA target sequence for A530082C11Rik (NM_177186.3,818-836).
gctgtcaacaacgttaatt

SEQ ID NO: 793826 - DNA, 19 bp, Mus musculus
  siRNA target sequence for A530082C11Rik (NM_177186.3,821-839).
gtcaacaacgttaattgga

SEQ ID NO: 793827 - DNA, 19 bp, Mus musculus
  siRNA target sequence for A530082C11Rik (NM_177186.3,829-847).
cgttaattggatgtgttaa

SEQ ID NO: 793828 - DNA, 19 bp, Mus musculus
  siRNA target sequence for A530082C11Rik (NM_177186.3,859-877).
cttgctgtttatatcaaca

SEQ ID NO: 793829 - DNA, 19 bp, Mus musculus
  siRNA target sequence for A530082C11Rik (NM_177186.3,900-918).
cccaatttcatcatgacta

SEQ ID NO: 793830 - DNA, 19 bp, Mus musculus
  siRNA target sequence for A530082C11Rik (NM_177186.3,961-979).
ggctggtcagcctcaagaa

SEQ ID NO: 793831 - DNA, 19 bp, Mus musculus
  siRNA target sequence for A530082C11Rik (NM_177186.3,1021-1039).
ccattttcacggtgatcat

SEQ ID NO: 793832 - DNA, 19 bp, Mus musculus
  siRNA target sequence for A530082C11Rik (NM_177186.3,1034-1052).
gatcatgtctcggatgatt

SEQ ID NO: 793833 - DNA, 19 bp, Mus musculus
  siRNA target sequence for A530082C11Rik (NM_177186.3,1123-1141).
ctgccacggaaataagctt

SEQ ID NO: 793834 - DNA, 19 bp, Mus musculus
  siRNA target sequence for A530082C11Rik (NM_177186.3,1129-1147).
cggaaataagcttcaacat

SEQ ID NO: 793835 - DNA, 19 bp, Mus musculus
  siRNA target sequence for A530082C11Rik (NM_177186.3,1164-1182).
gcgttatccaccaacatta

SEQ ID NO: 793836 - DNA, 19 bp, Mus musculus
  siRNA target sequence for A530082C11Rik (NM_177186.3,1248-1266).
ccggaactgcagttctaca

SEQ ID NO: 793837 - DNA, 19 bp, Mus musculus
  siRNA target sequence for A530082C11Rik (NM_177186.3,1297-1315).
cagcatggaccttcttcat

SEQ ID NO: 793838 - DNA, 19 bp, Mus musculus
  siRNA target sequence for A530082C11Rik (NM_177186.3,1313-1331).
catggatatccctgtgatt

SEQ ID NO: 793839 - DNA, 19 bp, Mus musculus
  siRNA target sequence for A530082C11Rik (NM_177186.3,1387-1405).
cagatggcgccttgtttca

SEQ ID NO: 793840 - DNA, 19 bp, Mus musculus
  siRNA target sequence for A530082C11Rik (NM_177186.3,1428-1446).
gccctgatgggaaagatct

SEQ ID NO: 793841 - DNA, 19 bp, Mus musculus
  siRNA target sequence for A530082C11Rik (NM_177186.3,1476-1494).
gtgaagcacgccttgtcta

SEQ ID NO: 793842 - DNA, 19 bp, Mus musculus
  siRNA target sequence for A530082C11Rik (NM_177186.3,1502-1520).
cagcatcatcgtttttgga

SEQ ID NO: 793843 - DNA, 19 bp, Mus musculus
  siRNA target sequence for A530082C11Rik (NM_177186.3,1549-1567).
gcaccatccttgtcacatt

SEQ ID NO: 793844 - DNA, 19 bp, Mus musculus
  siRNA target sequence for D5Ertd577e (NM_177187.2,862-880).
cctattatgaatttgacaa

SEQ ID NO: 793845 - DNA, 19 bp, Mus musculus
  siRNA target sequence for B430209F14Rik (NM_177188.2,1074-1092).
cctgtggagtccattcatt

SEQ ID NO: 793846 - DNA, 19 bp, Mus musculus
  siRNA target sequence for B430209F14Rik (NM_177188.2,1159-1177).
gcaggttgtgagctaacaa

SEQ ID NO: 793847 - DNA, 19 bp, Mus musculus
  siRNA target sequence for B430209F14Rik (NM_177188.2,1224-1242).
cttgtttaaatttatcgta

SEQ ID NO: 793848 - DNA, 19 bp, Mus musculus
  siRNA target sequence for C130096D04Rik (NM_177190.2,305-323).
gatgaaaccttacagaaaa

SEQ ID NO: 793849 - DNA, 19 bp, Mus musculus
  siRNA target sequence for C130096D04Rik (NM_177190.2,393-411).
ctgtagaggaacttctaga

SEQ ID NO: 793850 - DNA, 19 bp, Mus musculus
  siRNA target sequence for C130096D04Rik (NM_177190.2,436-454).
ggctctggcccatgaaatt

SEQ ID NO: 793851 - DNA, 19 bp, Mus musculus
  siRNA target sequence for C130096D04Rik (NM_177190.2,438-456).
ctctggcccatgaaattgt

SEQ ID NO: 793852 - DNA, 19 bp, Mus musculus
  siRNA target sequence for C130096D04Rik (NM_177190.2,442-460).
ggcccatgaaattgtagta

SEQ ID NO: 793853 - DNA, 19 bp, Mus musculus
  siRNA target sequence for C130096D04Rik (NM_177190.2,443-461).
gcccatgaaattgtagtaa

SEQ ID NO: 793854 - DNA, 19 bp, Mus musculus
  siRNA target sequence for C130096D04Rik (NM_177190.2,445-463).
ccatgaaattgtagtaact

SEQ ID NO: 793855 - DNA, 19 bp, Mus musculus
  siRNA target sequence for C130096D04Rik (NM_177190.2,472-490).
ccggattaacgctgttgaa

SEQ ID NO: 793856 - DNA, 19 bp, Mus musculus
  siRNA target sequence for C130096D04Rik (NM_177190.2,473-491).
cggattaacgctgttgaat

SEQ ID NO: 793857 - DNA, 19 bp, Mus musculus
  siRNA target sequence for C130096D04Rik (NM_177190.2,474-492).
ggattaacgctgttgaatt

SEQ ID NO: 793858 - DNA, 19 bp, Mus musculus
  siRNA target sequence for C130096D04Rik (NM_177190.2,475-493).
gattaacgctgttgaatta

SEQ ID NO: 793859 - DNA, 19 bp, Mus musculus
  siRNA target sequence for C130096D04Rik (NM_177190.2,524-542).
gagattgtacataaagcat

SEQ ID NO: 793860 - DNA, 19 bp, Mus musculus
  siRNA target sequence for C130096D04Rik (NM_177190.2,570-588).
gtgaagagcccccaacata

SEQ ID NO: 793861 - DNA, 19 bp, Mus musculus
  siRNA target sequence for C130096D04Rik (NM_177190.2,619-637).
caaagagactctgttatct

SEQ ID NO: 793862 - DNA, 19 bp, Mus musculus
  siRNA target sequence for C130096D04Rik (NM_177190.2,646-664).
gcctggtcacactagacta

SEQ ID NO: 793863 - DNA, 19 bp, Mus musculus
  siRNA target sequence for C130096D04Rik (NM_177190.2,647-665).
cctggtcacactagactaa

SEQ ID NO: 793864 - DNA, 19 bp, Mus musculus
  siRNA target sequence for C130096D04Rik (NM_177190.2,650-668).
ggtcacactagactaagaa

SEQ ID NO: 793865 - DNA, 19 bp, Mus musculus
  siRNA target sequence for C130096D04Rik (NM_177190.2,688-706).
ggatctggagctgataaaa

SEQ ID NO: 793866 - DNA, 19 bp, Mus musculus
  siRNA target sequence for C130096D04Rik (NM_177190.2,788-806).
gctcgagatgaggaagtta

SEQ ID NO: 793867 - DNA, 19 bp, Mus musculus
  siRNA target sequence for C130096D04Rik (NM_177190.2,789-807).
ctcgagatgaggaagttaa

SEQ ID NO: 793868 - DNA, 19 bp, Mus musculus
  siRNA target sequence for C130096D04Rik (NM_177190.2,837-855).
ctctcttcagggcaatatt

SEQ ID NO: 793869 - DNA, 19 bp, Mus musculus
  siRNA target sequence for C130096D04Rik (NM_177190.2,839-857).
ctcttcagggcaatatttt

SEQ ID NO: 793870 - DNA, 19 bp, Mus musculus
  siRNA target sequence for C130096D04Rik (NM_177190.2,887-905).
gccaacttcgccatcagta

SEQ ID NO: 793871 - DNA, 19 bp, Mus musculus
  siRNA target sequence for C130096D04Rik (NM_177190.2,929-947).
cagtcagtcgagtatgaga

SEQ ID NO: 793872 - DNA, 19 bp, Mus musculus
  siRNA target sequence for C130096D04Rik (NM_177190.2,1192-1210).
ggaccagtctcgtttccaa

SEQ ID NO: 793873 - DNA, 19 bp, Mus musculus
  siRNA target sequence for C130096D04Rik (NM_177190.2,1256-1274).
ctgctggtcacgttcagta

SEQ ID NO: 793874 - DNA, 19 bp, Mus musculus
  siRNA target sequence for C130096D04Rik (NM_177190.2,1378-1396).
ggacgccctggcttccatt

SEQ ID NO: 793875 - DNA, 19 bp, Mus musculus
  siRNA target sequence for C130096D04Rik (NM_177190.2,1449-1467).
ccccattctccgttgctaa

SEQ ID NO: 793876 - DNA, 19 bp, Mus musculus
  siRNA target sequence for C130096D04Rik (NM_177190.2,1610-1628).
ggattgggtcccattcaga

SEQ ID NO: 793877 - DNA, 19 bp, Mus musculus
  siRNA target sequence for C130096D04Rik (NM_177190.2,1611-1629).
gattgggtcccattcagaa

SEQ ID NO: 793878 - DNA, 19 bp, Mus musculus
  siRNA target sequence for C130096D04Rik (NM_177190.2,1658-1676).
gtgcgcctggtcaactata

SEQ ID NO: 793879 - DNA, 19 bp, Mus musculus
  siRNA target sequence for C130096D04Rik (NM_177190.2,1661-1679).
cgcctggtcaactataaca

SEQ ID NO: 793880 - DNA, 19 bp, Mus musculus
  siRNA target sequence for C130096D04Rik (NM_177190.2,1662-1680).
gcctggtcaactataacaa

SEQ ID NO: 793881 - DNA, 19 bp, Mus musculus
  siRNA target sequence for C130096D04Rik (NM_177190.2,1664-1682).
ctggtcaactataacaaga

SEQ ID NO: 793882 - DNA, 19 bp, Mus musculus
  siRNA target sequence for C130096D04Rik (NM_177190.2,1692-1710).
gtccctactacgatgcaat

SEQ ID NO: 793883 - DNA, 19 bp, Mus musculus
  siRNA target sequence for C130096D04Rik (NM_177190.2,1696-1714).
ctactacgatgcaatcctt

SEQ ID NO: 793884 - DNA, 19 bp, Mus musculus
  siRNA target sequence for 4930518F03Rik (NM_177191.2,132-150).
gaacatgacccttttctca

SEQ ID NO: 793885 - DNA, 19 bp, Mus musculus
  siRNA target sequence for 4930518F03Rik (NM_177191.2,135-153).
catgacccttttctcaaaa

SEQ ID NO: 793886 - DNA, 19 bp, Mus musculus
  siRNA target sequence for 4930518F03Rik (NM_177191.2,175-193).
gttatgagaagaaaactct

SEQ ID NO: 793887 - DNA, 19 bp, Mus musculus
  siRNA target sequence for 4930518F03Rik (NM_177191.2,242-260).
cattagctggctaaaagaa

SEQ ID NO: 793888 - DNA, 19 bp, Mus musculus
  siRNA target sequence for 4930518F03Rik (NM_177191.2,268-286).
caaaaagactaatggatta

SEQ ID NO: 793889 - DNA, 19 bp, Mus musculus
  siRNA target sequence for 4930518F03Rik (NM_177191.2,276-294).
ctaatggattatagtagaa

SEQ ID NO: 793890 - DNA, 19 bp, Mus musculus
  siRNA target sequence for 4930518F03Rik (NM_177191.2,328-346).
caagatcatccatggaaaa

SEQ ID NO: 793891 - DNA, 19 bp, Mus musculus
  siRNA target sequence for 4930518F03Rik (NM_177191.2,389-407).
gaaaaatgattatgaagta

SEQ ID NO: 793892 - DNA, 19 bp, Mus musculus
  siRNA target sequence for 4930518F03Rik (NM_177191.2,478-496).
cttcagaatcagaatcaga

SEQ ID NO: 793893 - DNA, 19 bp, Mus musculus
  siRNA target sequence for 4930518F03Rik (NM_177191.2,538-556).
caacaaaggaggagactat

SEQ ID NO: 793894 - DNA, 19 bp, Mus musculus
  siRNA target sequence for 4930518F03Rik (NM_177191.2,729-747).
gtggaagtgatgagatgta

SEQ ID NO: 793895 - DNA, 19 bp, Mus musculus
  siRNA target sequence for 4930518F03Rik (NM_177191.2,766-784).
gggattttactcaggatta

SEQ ID NO: 793896 - DNA, 19 bp, Mus musculus
  siRNA target sequence for 4930518F03Rik (NM_177191.2,767-785).
ggattttactcaggattat

SEQ ID NO: 793897 - DNA, 19 bp, Mus musculus
  siRNA target sequence for 4930518F03Rik (NM_177191.2,777-795).
caggattatgactatatca

SEQ ID NO: 793898 - DNA, 19 bp, Mus musculus
  siRNA target sequence for 4930518F03Rik (NM_177191.2,779-797).
ggattatgactatatcaca

SEQ ID NO: 793899 - DNA, 19 bp, Mus musculus
  siRNA target sequence for 4930518F03Rik (NM_177191.2,825-843).
ccatcacctgaattcttaa

SEQ ID NO: 793900 - DNA, 19 bp, Mus musculus
  siRNA target sequence for 4930518F03Rik (NM_177191.2,957-975).
cacactccgaccaagaata

SEQ ID NO: 793901 - DNA, 19 bp, Mus musculus
  siRNA target sequence for 4930518F03Rik (NM_177191.2,959-977).
cactccgaccaagaataat

SEQ ID NO: 793902 - DNA, 19 bp, Mus musculus
  siRNA target sequence for 4930518F03Rik (NM_177191.2,964-982).
cgaccaagaataattctgt

SEQ ID NO: 793903 - DNA, 19 bp, Mus musculus
  siRNA target sequence for 4930518F03Rik (NM_177191.2,965-983).
gaccaagaataattctgtt

SEQ ID NO: 793904 - DNA, 19 bp, Mus musculus
  siRNA target sequence for 4930518F03Rik (NM_177191.2,999-1017).
gcaaattcagtgataaata

SEQ ID NO: 793905 - DNA, 19 bp, Mus musculus
  siRNA target sequence for 4930518F03Rik (NM_177191.2,1029-1047).
caacattgtaacagctatt

SEQ ID NO: 793906 - DNA, 19 bp, Mus musculus
  siRNA target sequence for 4930518F03Rik (NM_177191.2,1060-1078).
gtaatagctcagagaaact

SEQ ID NO: 793907 - DNA, 19 bp, Mus musculus
  siRNA target sequence for 4930518F03Rik (NM_177191.2,1105-1123).
gctgtgacaaccatatgca

SEQ ID NO: 793908 - DNA, 19 bp, Mus musculus
  siRNA target sequence for 4930518F03Rik (NM_177191.2,1106-1124).
ctgtgacaaccatatgcaa

SEQ ID NO: 793909 - DNA, 19 bp, Mus musculus
  siRNA target sequence for 4930518F03Rik (NM_177191.2,1232-1250).
cagtcaacgtggtagcaaa

SEQ ID NO: 793910 - DNA, 19 bp, Mus musculus
  siRNA target sequence for 4930518F03Rik (NM_177191.2,1348-1366).
gtcaatgggaaaattctga

SEQ ID NO: 793911 - DNA, 19 bp, Mus musculus
  siRNA target sequence for 4930518F03Rik (NM_177191.2,1387-1405).
cattatcgacaccagattt

SEQ ID NO: 793912 - DNA, 19 bp, Mus musculus
  siRNA target sequence for 4930518F03Rik (NM_177191.2,1393-1411).
cgacaccagatttttctgt

SEQ ID NO: 793913 - DNA, 19 bp, Mus musculus
  siRNA target sequence for 4930518F03Rik (NM_177191.2,1463-1481).
catcagctcagactataaa

SEQ ID NO: 793914 - DNA, 19 bp, Mus musculus
  siRNA target sequence for 4930518F03Rik (NM_177191.2,1500-1518).
cataaaatcatggatgatt

SEQ ID NO: 793915 - DNA, 19 bp, Mus musculus
  siRNA target sequence for 4930518F03Rik (NM_177191.2,1535-1553).
gaaattgactcaacaacat

SEQ ID NO: 793916 - DNA, 19 bp, Mus musculus
  siRNA target sequence for 4930518F03Rik (NM_177191.2,1578-1596).
cagggacgcagggatgaaa

SEQ ID NO: 793917 - DNA, 19 bp, Mus musculus
  siRNA target sequence for 4930518F03Rik (NM_177191.2,1580-1598).
gggacgcagggatgaaaat

SEQ ID NO: 793918 - DNA, 19 bp, Mus musculus
  siRNA target sequence for 4930518F03Rik (NM_177191.2,1741-1759).
gagagaggtttcgtgtttt

SEQ ID NO: 793919 - DNA, 19 bp, Mus musculus
  siRNA target sequence for 4930518F03Rik (NM_177191.2,1745-1763).
gaggtttcgtgttttgaaa

SEQ ID NO: 793920 - DNA, 19 bp, Mus musculus
  siRNA target sequence for 4930518F03Rik (NM_177191.2,1800-1818).
gtttatgaagagtctgttt

SEQ ID NO: 793921 - DNA, 19 bp, Mus musculus
  siRNA target sequence for 4930518F03Rik (NM_177191.2,1806-1824).
gaagagtctgtttttacat

SEQ ID NO: 793922 - DNA, 19 bp, Mus musculus
  siRNA target sequence for 4930518F03Rik (NM_177191.2,1917-1935).
ggactacagtcattattca

SEQ ID NO: 793923 - DNA, 19 bp, Mus musculus
  siRNA target sequence for 4930518F03Rik (NM_177191.2,1918-1936).
gactacagtcattattcaa

SEQ ID NO: 793924 - DNA, 19 bp, Mus musculus
  siRNA target sequence for D030011O10Rik (NM_177192.2,285-303).
gtcgcttcgcgcactactt

SEQ ID NO: 793925 - DNA, 19 bp, Mus musculus
  siRNA target sequence for D030011O10Rik (NM_177192.2,346-364).
cgagctggcgggtgaaaat

SEQ ID NO: 793926 - DNA, 19 bp, Mus musculus
  siRNA target sequence for D030011O10Rik (NM_177192.2,347-365).
gagctggcgggtgaaaatt

SEQ ID NO: 793927 - DNA, 19 bp, Mus musculus
  siRNA target sequence for D030011O10Rik (NM_177192.2,349-367).
gctggcgggtgaaaatttt

SEQ ID NO: 793928 - DNA, 19 bp, Mus musculus
  siRNA target sequence for D030011O10Rik (NM_177192.2,352-370).
ggcgggtgaaaattttgat

SEQ ID NO: 793929 - DNA, 19 bp, Mus musculus
  siRNA target sequence for D030011O10Rik (NM_177192.2,354-372).
cgggtgaaaattttgatca

SEQ ID NO: 793930 - DNA, 19 bp, Mus musculus
  siRNA target sequence for D030011O10Rik (NM_177192.2,411-429).
cccactatcctcaaaacat

SEQ ID NO: 793931 - DNA, 19 bp, Mus musculus
  siRNA target sequence for D030011O10Rik (NM_177192.2,412-430).
ccactatcctcaaaacata

SEQ ID NO: 793932 - DNA, 19 bp, Mus musculus
  siRNA target sequence for D030011O10Rik (NM_177192.2,435-453).
ggaacccttttgatcaaga

SEQ ID NO: 793933 - DNA, 19 bp, Mus musculus
  siRNA target sequence for D030011O10Rik (NM_177192.2,436-454).
gaacccttttgatcaagat

SEQ ID NO: 793934 - DNA, 19 bp, Mus musculus
  siRNA target sequence for D030011O10Rik (NM_177192.2,517-535).
gcctcagttccactcattt

SEQ ID NO: 793935 - DNA, 19 bp, Mus musculus
  siRNA target sequence for D030011O10Rik (NM_177192.2,521-539).
cagttccactcatttataa

SEQ ID NO: 793936 - DNA, 19 bp, Mus musculus
  siRNA target sequence for D030011O10Rik (NM_177192.2,554-572).
ggttctcgcacctatggtt

SEQ ID NO: 793937 - DNA, 19 bp, Mus musculus
  siRNA target sequence for D030011O10Rik (NM_177192.2,555-573).
gttctcgcacctatggttt

SEQ ID NO: 793938 - DNA, 19 bp, Mus musculus
  siRNA target sequence for D030011O10Rik (NM_177192.2,558-576).
ctcgcacctatggttttgt

SEQ ID NO: 793939 - DNA, 19 bp, Mus musculus
  siRNA target sequence for D030011O10Rik (NM_177192.2,596-614).
gttacaagtaagcaaatct

SEQ ID NO: 793940 - DNA, 19 bp, Mus musculus
  siRNA target sequence for D030011O10Rik (NM_177192.2,634-652).
gtaccagatgcataatgct

SEQ ID NO: 793941 - DNA, 19 bp, Mus musculus
  siRNA target sequence for D030011O10Rik (NM_177192.2,694-712).
ggactcactggcaagtagt

SEQ ID NO: 793942 - DNA, 19 bp, Mus musculus
  siRNA target sequence for D030011O10Rik (NM_177192.2,695-713).
gactcactggcaagtagta

SEQ ID NO: 793943 - DNA, 19 bp, Mus musculus
  siRNA target sequence for D030011O10Rik (NM_177192.2,697-715).
ctcactggcaagtagtatt

SEQ ID NO: 793944 - DNA, 19 bp, Mus musculus
  siRNA target sequence for D030011O10Rik (NM_177192.2,746-764).
ctccagcgatacaactctt

SEQ ID NO: 793945 - DNA, 19 bp, Mus musculus
  siRNA target sequence for D030011O10Rik (NM_177192.2,748-766).
ccagcgatacaactcttat

SEQ ID NO: 793946 - DNA, 19 bp, Mus musculus
  siRNA target sequence for D030011O10Rik (NM_177192.2,752-770).
cgatacaactcttatgaca

SEQ ID NO: 793947 - DNA, 19 bp, Mus musculus
  siRNA target sequence for D030011O10Rik (NM_177192.2,753-771).
gatacaactcttatgacat

SEQ ID NO: 793948 - DNA, 19 bp, Mus musculus
  siRNA target sequence for D030011O10Rik (NM_177192.2,905-923).
gagagctatatccacaata

SEQ ID NO: 793949 - DNA, 19 bp, Mus musculus
  siRNA target sequence for D030011O10Rik (NM_177192.2,954-972).
ggaggtcactgaaatttta

SEQ ID NO: 793950 - DNA, 19 bp, Mus musculus
  siRNA target sequence for D030011O10Rik (NM_177192.2,1248-1266).
cccctgtcccttatctgat

SEQ ID NO: 793951 - DNA, 19 bp, Mus musculus
  siRNA target sequence for D030011O10Rik (NM_177192.2,1264-1282).
gatgggtcttcagtcaaaa

SEQ ID NO: 793952 - DNA, 19 bp, Mus musculus
  siRNA target sequence for D030011O10Rik (NM_177192.2,1286-1304).
ggaactgaccggtctaaat

SEQ ID NO: 793953 - DNA, 19 bp, Mus musculus
  siRNA target sequence for D030011O10Rik (NM_177192.2,1287-1305).
gaactgaccggtctaaatt

SEQ ID NO: 793954 - DNA, 19 bp, Mus musculus
  siRNA target sequence for D030011O10Rik (NM_177192.2,1290-1308).
ctgaccggtctaaattaga

SEQ ID NO: 793955 - DNA, 19 bp, Mus musculus
  siRNA target sequence for D030011O10Rik (NM_177192.2,1294-1312).
ccggtctaaattagaactt

SEQ ID NO: 793956 - DNA, 19 bp, Mus musculus
  siRNA target sequence for D030011O10Rik (NM_177192.2,1313-1331).
cctcaagaggctaatttgt

SEQ ID NO: 793957 - DNA, 19 bp, Mus musculus
  siRNA target sequence for D030011O10Rik (NM_177192.2,1363-1381).
gttgcctgaagaatttcca

SEQ ID NO: 793958 - DNA, 19 bp, Mus musculus
  siRNA target sequence for D030011O10Rik (NM_177192.2,1387-1405).
ccccaataaagtggatttt

SEQ ID NO: 793959 - DNA, 19 bp, Mus musculus
  siRNA target sequence for D030011O10Rik (NM_177192.2,1388-1406).
cccaataaagtggatttta

SEQ ID NO: 793960 - DNA, 19 bp, Mus musculus
  siRNA target sequence for D030011O10Rik (NM_177192.2,1389-1407).
ccaataaagtggattttat

SEQ ID NO: 793961 - DNA, 19 bp, Mus musculus
  siRNA target sequence for D030011O10Rik (NM_177192.2,1408-1426).
ccaagagttgtctgaagtt

SEQ ID NO: 793962 - DNA, 19 bp, Mus musculus
  siRNA target sequence for D030011O10Rik (NM_177192.2,1472-1490).
gagagtgccaccaaactga

SEQ ID NO: 793963 - DNA, 19 bp, Mus musculus
  siRNA target sequence for D030011O10Rik (NM_177192.2,1476-1494).
gtgccaccaaactgaagaa

SEQ ID NO: 793964 - DNA, 19 bp, Mus musculus
  siRNA target sequence for D030011O10Rik (NM_177192.2,1773-1791).
ccgattacgaagcatttgt

SEQ ID NO: 793965 - DNA, 19 bp, Mus musculus
  siRNA target sequence for D030011O10Rik (NM_177192.2,1781-1799).
gaagcatttgtgattcaga

SEQ ID NO: 793966 - DNA, 19 bp, Mus musculus
  siRNA target sequence for D030011O10Rik (NM_177192.2,1849-1867).
ctttgacaaagcttctttt

SEQ ID NO: 793967 - DNA, 19 bp, Mus musculus
  siRNA target sequence for D030011O10Rik (NM_177192.2,1905-1923).
cacgcttcattgaaacaca

SEQ ID NO: 793968 - DNA, 19 bp, Mus musculus
  siRNA target sequence for D030011O10Rik (NM_177192.2,1980-1998).
ctctgcttcgggtctttga

SEQ ID NO: 793969 - DNA, 19 bp, Mus musculus
  siRNA target sequence for D030011O10Rik (NM_177192.2,2009-2027).
gagaagatcagattgtata

SEQ ID NO: 793970 - DNA, 19 bp, Mus musculus
  siRNA target sequence for D030011O10Rik (NM_177192.2,2039-2057).
cccaccctgcggacatcta

SEQ ID NO: 793971 - DNA, 19 bp, Mus musculus
  siRNA target sequence for D030011O10Rik (NM_177192.2,2040-2058).
ccaccctgcggacatctat

SEQ ID NO: 793972 - DNA, 19 bp, Mus musculus
  siRNA target sequence for D030011O10Rik (NM_177192.2,2041-2059).
caccctgcggacatctata

SEQ ID NO: 793973 - DNA, 19 bp, Mus musculus
  siRNA target sequence for D030011O10Rik (NM_177192.2,2043-2061).
ccctgcggacatctatata

SEQ ID NO: 793974 - DNA, 19 bp, Mus musculus
  siRNA target sequence for D030011O10Rik (NM_177192.2,2044-2062).
cctgcggacatctatatat

SEQ ID NO: 793975 - DNA, 19 bp, Mus musculus
  siRNA target sequence for D030011O10Rik (NM_177192.2,2048-2066).
cggacatctatatatcaga

SEQ ID NO: 793976 - DNA, 19 bp, Mus musculus
  siRNA target sequence for D030011O10Rik (NM_177192.2,2050-2068).
gacatctatatatcagaaa

SEQ ID NO: 793977 - DNA, 19 bp, Mus musculus
  siRNA target sequence for D030011O10Rik (NM_177192.2,2180-2198).
gagcaagggttctttccaa

SEQ ID NO: 793978 - DNA, 19 bp, Mus musculus
  siRNA target sequence for D030011O10Rik (NM_177192.2,2322-2340).
gtgacttacgggagaaata

SEQ ID NO: 793979 - DNA, 19 bp, Mus musculus
  siRNA target sequence for D030011O10Rik (NM_177192.2,2324-2342).
gacttacgggagaaatata

SEQ ID NO: 793980 - DNA, 19 bp, Mus musculus
  siRNA target sequence for D030011O10Rik (NM_177192.2,2344-2362).
gcaagaggcacgaagttta

SEQ ID NO: 793981 - DNA, 19 bp, Mus musculus
  siRNA target sequence for D030011O10Rik (NM_177192.2,2496-2514).
gacatgaagcagtagaact

SEQ ID NO: 793982 - DNA, 19 bp, Mus musculus
  siRNA target sequence for D030011O10Rik (NM_177192.2,2519-2537).
catggagaagcaaacatta

SEQ ID NO: 793983 - DNA, 19 bp, Mus musculus
  siRNA target sequence for D030011O10Rik (NM_177192.2,2727-2745).
ctgactcaggagttatgtt

SEQ ID NO: 793984 - DNA, 19 bp, Mus musculus
  siRNA target sequence for D030011O10Rik (NM_177192.2,2915-2933).
ctttataagcgctatgctt

SEQ ID NO: 793985 - DNA, 19 bp, Mus musculus
  siRNA target sequence for D030011O10Rik (NM_177192.2,3017-3035).
gtgttcaccactatcagta

SEQ ID NO: 793986 - DNA, 19 bp, Mus musculus
  siRNA target sequence for D030011O10Rik (NM_177192.2,3022-3040).
caccactatcagtaagtct

SEQ ID NO: 793987 - DNA, 19 bp, Mus musculus
  siRNA target sequence for B930052A04Rik (NM_177193.2,371-389).
cgctctctgcgcatcaaca

SEQ ID NO: 793988 - DNA, 19 bp, Mus musculus
  siRNA target sequence for B930052A04Rik (NM_177193.2,372-390).
gctctctgcgcatcaacaa

SEQ ID NO: 793989 - DNA, 19 bp, Mus musculus
  siRNA target sequence for B930052A04Rik (NM_177193.2,446-464).
cacctgcaactctatcaca

SEQ ID NO: 793990 - DNA, 19 bp, Mus musculus
  siRNA target sequence for A130023I24Rik (NM_177194.2,554-572).
ccccagataagcatgttca

SEQ ID NO: 793991 - DNA, 19 bp, Mus musculus
  siRNA target sequence for A130023I24Rik (NM_177194.2,624-642).
ggaagctaaaatacctttt

SEQ ID NO: 793992 - DNA, 19 bp, Mus musculus
  siRNA target sequence for A130023I24Rik (NM_177194.2,773-791).
gtggaactaggctacaact

SEQ ID NO: 793993 - DNA, 19 bp, Mus musculus
  siRNA target sequence for A130023I24Rik (NM_177194.2,776-794).
gaactaggctacaactcta

SEQ ID NO: 793994 - DNA, 19 bp, Mus musculus
  siRNA target sequence for A930025A13Rik (NM_177196.2,551-569).
gggtcttgtcctcattaaa

SEQ ID NO: 793995 - DNA, 19 bp, Mus musculus
  siRNA target sequence for A930025A13Rik (NM_177196.2,709-727).
gcctttggacatcactaaa

SEQ ID NO: 793996 - DNA, 19 bp, Mus musculus
  siRNA target sequence for A930025A13Rik (NM_177196.2,747-765).
ctcagcaaccgtgctattt

SEQ ID NO: 793997 - DNA, 19 bp, Mus musculus
  siRNA target sequence for A930025A13Rik (NM_177196.2,755-773).
ccgtgctattttaatcaat

SEQ ID NO: 793998 - DNA, 19 bp, Mus musculus
  siRNA target sequence for 4833432P19Rik (NM_177198.2,438-456).
gggctcattgttctttata

SEQ ID NO: 793999 - DNA, 19 bp, Mus musculus
  siRNA target sequence for 4833432P19Rik (NM_177198.2,439-457).
ggctcattgttctttatat

SEQ ID NO: 794000 - DNA, 19 bp, Mus musculus
  siRNA target sequence for 4833432P19Rik (NM_177198.2,458-476).
gcacatttacaattttata

SEQ ID NO: 794001 - DNA, 19 bp, Mus musculus
  siRNA target sequence for 4833432P19Rik (NM_177198.2,534-552).
cctgaaagtgtacattaat

SEQ ID NO: 794002 - DNA, 19 bp, Mus musculus
  siRNA target sequence for 4833432P19Rik (NM_177198.2,543-561).
gtacattaatgagctatta

SEQ ID NO: 794003 - DNA, 19 bp, Mus musculus
  siRNA target sequence for 4833432P19Rik (NM_177198.2,546-564).
cattaatgagctattaaga

SEQ ID NO: 794004 - DNA, 19 bp, Mus musculus
  siRNA target sequence for 4833432P19Rik (NM_177198.2,592-610).
ctcgttggactcagtaact

SEQ ID NO: 794005 - DNA, 19 bp, Mus musculus
  siRNA target sequence for 5730405G21Rik (NM_177199.2,167-185).
ctacggcgagcgggttaat

SEQ ID NO: 794006 - DNA, 19 bp, Mus musculus
  siRNA target sequence for 5730405G21Rik (NM_177199.2,170-188).
cggcgagcgggttaatgtt

SEQ ID NO: 794007 - DNA, 19 bp, Mus musculus
  siRNA target sequence for 5730405G21Rik (NM_177199.2,172-190).
gcgagcgggttaatgttga

SEQ ID NO: 794008 - DNA, 19 bp, Mus musculus
  siRNA target sequence for 5730405G21Rik (NM_177199.2,173-191).
cgagcgggttaatgttgaa

SEQ ID NO: 794009 - DNA, 19 bp, Mus musculus
  siRNA target sequence for 5730405G21Rik (NM_177199.2,203-221).
cggaagtcgtcatttgaca

SEQ ID NO: 794010 - DNA, 19 bp, Mus musculus
  siRNA target sequence for 5730405G21Rik (NM_177199.2,204-222).
ggaagtcgtcatttgacaa

SEQ ID NO: 794011 - DNA, 19 bp, Mus musculus
  siRNA target sequence for 5730405G21Rik (NM_177199.2,208-226).
gtcgtcatttgacaagttt

SEQ ID NO: 794012 - DNA, 19 bp, Mus musculus
  siRNA target sequence for 5730405G21Rik (NM_177199.2,210-228).
cgtcatttgacaagtttta

SEQ ID NO: 794013 - DNA, 19 bp, Mus musculus
  siRNA target sequence for A930104D05Rik (NM_177202.2,226-244).
gtcaggtgtcacgtacaaa

SEQ ID NO: 794014 - DNA, 19 bp, Mus musculus
  siRNA target sequence for A930104D05Rik (NM_177202.2,251-269).
gtggcctatctacagaaaa

SEQ ID NO: 794015 - DNA, 19 bp, Mus musculus
  siRNA target sequence for A930104D05Rik (NM_177202.2,286-304).
cacccgtagcactacattt

SEQ ID NO: 794016 - DNA, 19 bp, Mus musculus
  siRNA target sequence for A930104D05Rik (NM_177202.2,288-306).
cccgtagcactacatttct

SEQ ID NO: 794017 - DNA, 19 bp, Mus musculus
  siRNA target sequence for A930104D05Rik (NM_177202.2,297-315).
ctacatttctgctgacatt

SEQ ID NO: 794018 - DNA, 19 bp, Mus musculus
  siRNA target sequence for A930104D05Rik (NM_177202.2,354-372).
ccctcgttgccctaactct

SEQ ID NO: 794019 - DNA, 19 bp, Mus musculus
  siRNA target sequence for A930104D05Rik (NM_177202.2,375-393).
gccctgactctgtgatgtt

SEQ ID NO: 794020 - DNA, 19 bp, Mus musculus
  siRNA target sequence for A930104D05Rik (NM_177202.2,517-535).
cgctgctgattcatgtaaa

SEQ ID NO: 794021 - DNA, 19 bp, Mus musculus
  siRNA target sequence for A730037C10Rik (NM_177203.1,957-975).
gtcttccattcgtgtctat

SEQ ID NO: 794022 - DNA, 19 bp, Mus musculus
  siRNA target sequence for A730037C10Rik (NM_177203.1,962-980).
ccattcgtgtctatgagaa

SEQ ID NO: 794023 - DNA, 19 bp, Mus musculus
  siRNA target sequence for A730037C10Rik (NM_177203.1,988-1006).
gtggaatctttaaacgtat

SEQ ID NO: 794024 - DNA, 19 bp, Mus musculus
  siRNA target sequence for A730037C10Rik (NM_177203.1,990-1008).
ggaatctttaaacgtatta

SEQ ID NO: 794025 - DNA, 19 bp, Mus musculus
  siRNA target sequence for A730037C10Rik (NM_177203.1,1053-1071).
gaaagaatatgcgtttaga

SEQ ID NO: 794026 - DNA, 19 bp, Mus musculus
  siRNA target sequence for A730037C10Rik (NM_177203.1,1122-1140).
ctacatcgcggaaatgact

SEQ ID NO: 794027 - DNA, 19 bp, Mus musculus
  siRNA target sequence for A730037C10Rik (NM_177203.1,1203-1221).
ggaaagtccggtgaaaact

SEQ ID NO: 794028 - DNA, 19 bp, Mus musculus
  siRNA target sequence for A730037C10Rik (NM_177203.1,1259-1277).
ccaagaaaggaccagttaa

SEQ ID NO: 794029 - DNA, 19 bp, Mus musculus
  siRNA target sequence for A730037C10Rik (NM_177203.1,1260-1278).
caagaaaggaccagttaaa

SEQ ID NO: 794030 - DNA, 19 bp, Mus musculus
  siRNA target sequence for D330017J20Rik (NM_177204.2,233-251).
gccctactctggagtttga

SEQ ID NO: 794031 - DNA, 19 bp, Mus musculus
  siRNA target sequence for D330017J20Rik (NM_177204.2,235-253).
cctactctggagtttgaat

SEQ ID NO: 794032 - DNA, 19 bp, Mus musculus
  siRNA target sequence for D330017J20Rik (NM_177204.2,236-254).
ctactctggagtttgaata

SEQ ID NO: 794033 - DNA, 19 bp, Mus musculus
  siRNA target sequence for D330017J20Rik (NM_177204.2,307-325).
gagaacctggaatttacca

SEQ ID NO: 794034 - DNA, 19 bp, Mus musculus
  siRNA target sequence for D330017J20Rik (NM_177204.2,313-331).
ctggaatttaccactaaca

SEQ ID NO: 794035 - DNA, 19 bp, Mus musculus
  siRNA target sequence for D330017J20Rik (NM_177204.2,359-377).
ctcaagtgcaagacactaa

SEQ ID NO: 794036 - DNA, 19 bp, Mus musculus
  siRNA target sequence for D330017J20Rik (NM_177204.2,364-382).
gtgcaagacactaaggaat

SEQ ID NO: 794037 - DNA, 19 bp, Mus musculus
  siRNA target sequence for D330017J20Rik (NM_177204.2,545-563).
ggtccagatacaattgctt

SEQ ID NO: 794038 - DNA, 19 bp, Mus musculus
  siRNA target sequence for D330017J20Rik (NM_177204.2,732-750).
ccgcctggagcgagaaata

SEQ ID NO: 794039 - DNA, 19 bp, Mus musculus
  siRNA target sequence for D330017J20Rik (NM_177204.2,798-816).
gagtttctccacacataat

SEQ ID NO: 794040 - DNA, 19 bp, Mus musculus
  siRNA target sequence for D330017J20Rik (NM_177204.2,800-818).
gtttctccacacataatga

SEQ ID NO: 794041 - DNA, 19 bp, Mus musculus
  siRNA target sequence for D330017J20Rik (NM_177204.2,877-895).
ccccactttccaataaaga

SEQ ID NO: 794042 - DNA, 19 bp, Mus musculus
  siRNA target sequence for D330017J20Rik (NM_177204.2,878-896).
cccactttccaataaagaa

SEQ ID NO: 794043 - DNA, 19 bp, Mus musculus
  siRNA target sequence for D330017J20Rik (NM_177204.2,927-945).
gtttacccttggtggattt

SEQ ID NO: 794044 - DNA, 19 bp, Mus musculus
  siRNA target sequence for D330017J20Rik (NM_177204.2,1009-1027).
gacagtatccaggttgtaa

SEQ ID NO: 794045 - DNA, 19 bp, Mus musculus
  siRNA target sequence for 9230101K24Rik (NM_177206.2,378-396).
gttactcttttttgtaact

SEQ ID NO: 794046 - DNA, 19 bp, Mus musculus
  siRNA target sequence for 9230101K24Rik (NM_177206.2,398-416).
gatactacatggaaggaaa

SEQ ID NO: 794047 - DNA, 19 bp, Mus musculus
  siRNA target sequence for 9230101K24Rik (NM_177206.2,402-420).
ctacatggaaggaaacttt

SEQ ID NO: 794048 - DNA, 19 bp, Mus musculus
  siRNA target sequence for 9230101K24Rik (NM_177206.2,412-430).
ggaaactttctcagttctt

SEQ ID NO: 794049 - DNA, 19 bp, Mus musculus
  siRNA target sequence for 9230101K24Rik (NM_177206.2,413-431).
gaaactttctcagttcttt

SEQ ID NO: 794050 - DNA, 19 bp, Mus musculus
  siRNA target sequence for 9230101K24Rik (NM_177206.2,442-460).
cttacttagctgaagatct

SEQ ID NO: 794051 - DNA, 19 bp, Mus musculus
  siRNA target sequence for 9230101K24Rik (NM_177206.2,537-555).
gtagttctcttaacaatta

SEQ ID NO: 794052 - DNA, 19 bp, Mus musculus
  siRNA target sequence for 9230101K24Rik (NM_177206.2,582-600).
gaaaatttcctctcaacaa

SEQ ID NO: 794053 - DNA, 19 bp, Mus musculus
  siRNA target sequence for 9230101K24Rik (NM_177206.2,591-609).
ctctcaacaacccatagaa

SEQ ID NO: 794054 - DNA, 19 bp, Mus musculus
  siRNA target sequence for 9230101K24Rik (NM_177206.2,601-619).
cccatagaatgccaattgt

SEQ ID NO: 794055 - DNA, 19 bp, Mus musculus
  siRNA target sequence for 9230101K24Rik (NM_177206.2,603-621).
catagaatgccaattgtga

SEQ ID NO: 794056 - DNA, 19 bp, Mus musculus
  siRNA target sequence for 9230101K24Rik (NM_177206.2,613-631).
caattgtgagggtagagtt

SEQ ID NO: 794057 - DNA, 19 bp, Mus musculus
  siRNA target sequence for 9230101K24Rik (NM_177206.2,649-667).
ccctaggacaggcagatat

SEQ ID NO: 794058 - DNA, 19 bp, Mus musculus
  siRNA target sequence for 9230101K24Rik (NM_177206.2,663-681).
gatataccttggacaatca

SEQ ID NO: 794059 - DNA, 19 bp, Mus musculus
  siRNA target sequence for B930086A06Rik (NM_177207.2,708-726).
ctggaggctcaccaaattt

SEQ ID NO: 794060 - DNA, 19 bp, Mus musculus
  siRNA target sequence for B930086A06Rik (NM_177207.2,954-972).
gctctcaccatcacaacta

SEQ ID NO: 794061 - DNA, 19 bp, Mus musculus
  siRNA target sequence for B930086A06Rik (NM_177207.2,967-985).
caactagcacaagtatctt

SEQ ID NO: 794062 - DNA, 19 bp, Mus musculus
  siRNA target sequence for B930086A06Rik (NM_177207.2,1011-1029).
ggatacacagttttgctaa

SEQ ID NO: 794063 - DNA, 19 bp, Mus musculus
  siRNA target sequence for B130006D01Rik (NM_177209.2,2472-2490).
ccttcccacatattctgaa

SEQ ID NO: 794064 - DNA, 19 bp, Mus musculus
  siRNA target sequence for B130006D01Rik (NM_177209.2,2500-2518).
ctcacatggacctatttct

SEQ ID NO: 794065 - DNA, 19 bp, Mus musculus
  siRNA target sequence for B130006D01Rik (NM_177209.2,2504-2522).
catggacctatttctgttt

SEQ ID NO: 794066 - DNA, 19 bp, Mus musculus
  siRNA target sequence for B130006D01Rik (NM_177209.2,2510-2528).
cctatttctgtttcagtta

SEQ ID NO: 794067 - DNA, 19 bp, Mus musculus
  siRNA target sequence for B130006D01Rik (NM_177209.2,2511-2529).
ctatttctgtttcagttaa

SEQ ID NO: 794068 - DNA, 19 bp, Mus musculus
  siRNA target sequence for B130006D01Rik (NM_177209.2,2543-2561).
cataaatgcaggtggtttt

SEQ ID NO: 794069 - DNA, 19 bp, Mus musculus
  siRNA target sequence for B130006D01Rik (NM_177209.2,2551-2569).
caggtggttttgtaatggt

SEQ ID NO: 794070 - DNA, 19 bp, Mus musculus
  siRNA target sequence for B130006D01Rik (NM_177209.2,2567-2585).
ggttctcattctatacata

SEQ ID NO: 794071 - DNA, 19 bp, Mus musculus
  siRNA target sequence for B130006D01Rik (NM_177209.2,2571-2589).
ctcattctatacataccat

SEQ ID NO: 794072 - DNA, 19 bp, Mus musculus
  siRNA target sequence for B130006D01Rik (NM_177209.2,2577-2595).
ctatacataccattttgtt

SEQ ID NO: 794073 - DNA, 19 bp, Mus musculus
  siRNA target sequence for B130006D01Rik (NM_177209.2,2678-2696).
ctgctcggctccaaaagca

SEQ ID NO: 794074 - DNA, 19 bp, Mus musculus
  siRNA target sequence for B130006D01Rik (NM_177209.2,2694-2712).
gcaggtactcctcagattt

SEQ ID NO: 794075 - DNA, 19 bp, Mus musculus
  siRNA target sequence for B130006D01Rik (NM_177209.2,2695-2713).
caggtactcctcagattta

SEQ ID NO: 794076 - DNA, 19 bp, Mus musculus
  siRNA target sequence for B130006D01Rik (NM_177209.2,2698-2716).
gtactcctcagatttagga

SEQ ID NO: 794077 - DNA, 19 bp, Mus musculus
  siRNA target sequence for B130006D01Rik (NM_177209.2,2781-2799).
gccagttaatgccaaaagt

SEQ ID NO: 794078 - DNA, 19 bp, Mus musculus
  siRNA target sequence for B130006D01Rik (NM_177209.2,2793-2811).
caaaagtcagtcaggttat

SEQ ID NO: 794079 - DNA, 19 bp, Mus musculus
  siRNA target sequence for B130006D01Rik (NM_177209.2,2822-2840).
gtcacttggggatttaata

SEQ ID NO: 794080 - DNA, 19 bp, Mus musculus
  siRNA target sequence for B130006D01Rik (NM_177209.2,2826-2844).
cttggggatttaataccat

SEQ ID NO: 794081 - DNA, 19 bp, Mus musculus
  siRNA target sequence for B130006D01Rik (NM_177209.2,2893-2911).
gcccatttgttcattgata

SEQ ID NO: 794082 - DNA, 19 bp, Mus musculus
  siRNA target sequence for B130006D01Rik (NM_177209.2,2904-2922).
cattgatagtctttaccaa

SEQ ID NO: 794083 - DNA, 19 bp, Mus musculus
  siRNA target sequence for D830044D21Rik (NM_177210.2,1394-1412).
gtgttgtctttcgacttat

SEQ ID NO: 794084 - DNA, 19 bp, Mus musculus
  siRNA target sequence for D830044D21Rik (NM_177210.2,1396-1414).
gttgtctttcgacttattt

SEQ ID NO: 794085 - DNA, 19 bp, Mus musculus
  siRNA target sequence for D830044D21Rik (NM_177210.2,1497-1515).
ctcctgcttggcacacaaa

SEQ ID NO: 794086 - DNA, 19 bp, Mus musculus
  siRNA target sequence for D830044D21Rik (NM_177210.2,1506-1524).
ggcacacaaatgctcaata

SEQ ID NO: 794087 - DNA, 19 bp, Mus musculus
  siRNA target sequence for D830044D21Rik (NM_177210.2,1512-1530).
caaatgctcaatatctatt

SEQ ID NO: 794088 - DNA, 19 bp, Mus musculus
  siRNA target sequence for D830044D21Rik (NM_177210.2,1518-1536).
ctcaatatctattaatgaa

SEQ ID NO: 794089 - DNA, 19 bp, Mus musculus
  siRNA target sequence for D830044D21Rik (NM_177210.2,1544-1562).
gggcccttgacctaccatt

SEQ ID NO: 794090 - DNA, 19 bp, Mus musculus
  siRNA target sequence for D830044D21Rik (NM_177210.2,1548-1566).
ccttgacctaccattcctt

SEQ ID NO: 794091 - DNA, 19 bp, Mus musculus
  siRNA target sequence for E330005K07Rik (NM_177211.1,189-207).
gcttcctttggtaatatca

SEQ ID NO: 794092 - DNA, 19 bp, Mus musculus
  siRNA target sequence for E330005K07Rik (NM_177211.1,190-208).
cttcctttggtaatatcaa

SEQ ID NO: 794093 - DNA, 19 bp, Mus musculus
  siRNA target sequence for E330005K07Rik (NM_177211.1,216-234).
gcgtattaagctggaaatt

SEQ ID NO: 794094 - DNA, 19 bp, Mus musculus
  siRNA target sequence for E330005K07Rik (NM_177211.1,217-235).
cgtattaagctggaaatta

SEQ ID NO: 794095 - DNA, 19 bp, Mus musculus
  siRNA target sequence for E330005K07Rik (NM_177211.1,252-270).
gttctctctgagtacagtt

SEQ ID NO: 794096 - DNA, 19 bp, Mus musculus
  siRNA target sequence for E330005K07Rik (NM_177211.1,354-372).
ccttctagagcccatgata

SEQ ID NO: 794097 - DNA, 19 bp, Mus musculus
  siRNA target sequence for E330005K07Rik (NM_177211.1,386-404).
gtgcggaaatcgactttct

SEQ ID NO: 794098 - DNA, 19 bp, Mus musculus
  siRNA target sequence for E330005K07Rik (NM_177211.1,487-505).
ctgggacgcccgttgtcta

SEQ ID NO: 794099 - DNA, 19 bp, Mus musculus
  siRNA target sequence for E330005K07Rik (NM_177211.1,560-578).
gaggaaaggtactcagtta

SEQ ID NO: 794100 - DNA, 19 bp, Mus musculus
  siRNA target sequence for E330005K07Rik (NM_177211.1,562-580).
ggaaaggtactcagttata

SEQ ID NO: 794101 - DNA, 19 bp, Mus musculus
  siRNA target sequence for E330005K07Rik (NM_177211.1,563-581).
gaaaggtactcagttataa

SEQ ID NO: 794102 - DNA, 19 bp, Mus musculus
  siRNA target sequence for E330005K07Rik (NM_177211.1,603-621).
ctcgctagctagtagcatt

SEQ ID NO: 794103 - DNA, 19 bp, Mus musculus
  siRNA target sequence for E330005K07Rik (NM_177211.1,673-691).
ggtgtgtacctgttaggta

SEQ ID NO: 794104 - DNA, 19 bp, Mus musculus
  siRNA target sequence for E330005K07Rik (NM_177211.1,674-692).
gtgtgtacctgttaggtat

SEQ ID NO: 794105 - DNA, 19 bp, Mus musculus
  siRNA target sequence for E330005K07Rik (NM_177211.1,676-694).
gtgtacctgttaggtatta

SEQ ID NO: 794106 - DNA, 19 bp, Mus musculus
  siRNA target sequence for E330005K07Rik (NM_177211.1,696-714).
ggaagtggtcatgaattca

SEQ ID NO: 794107 - DNA, 19 bp, Mus musculus
  siRNA target sequence for 4930500I12Rik (NM_177213.2,199-217).
ctgtggaagaactttactt

SEQ ID NO: 794108 - DNA, 19 bp, Mus musculus
  siRNA target sequence for 4930500I12Rik (NM_177213.2,225-243).
gcggaagtttgggacttta

SEQ ID NO: 794109 - DNA, 19 bp, Mus musculus
  siRNA target sequence for 4930500I12Rik (NM_177213.2,227-245).
ggaagtttgggactttagt

SEQ ID NO: 794110 - DNA, 19 bp, Mus musculus
  siRNA target sequence for 4930500I12Rik (NM_177213.2,228-246).
gaagtttgggactttagtt

SEQ ID NO: 794111 - DNA, 19 bp, Mus musculus
  siRNA target sequence for 4930500I12Rik (NM_177213.2,293-311).
cacgccaccttcttagtat

SEQ ID NO: 794112 - DNA, 19 bp, Mus musculus
  siRNA target sequence for 4930500I12Rik (NM_177213.2,295-313).
cgccaccttcttagtataa

SEQ ID NO: 794113 - DNA, 19 bp, Mus musculus
  siRNA target sequence for 4930500I12Rik (NM_177213.2,296-314).
gccaccttcttagtataaa

SEQ ID NO: 794114 - DNA, 19 bp, Mus musculus
  siRNA target sequence for 4930500I12Rik (NM_177213.2,298-316).
caccttcttagtataaaga

SEQ ID NO: 794115 - DNA, 19 bp, Mus musculus
  siRNA target sequence for 4930500I12Rik (NM_177213.2,301-319).
cttcttagtataaagaaga

SEQ ID NO: 794116 - DNA, 19 bp, Mus musculus
  siRNA target sequence for 4930500I12Rik (NM_177213.2,315-333).
gaagattgaagctctgtat

SEQ ID NO: 794117 - DNA, 19 bp, Mus musculus
  siRNA target sequence for 4930500I12Rik (NM_177213.2,494-512).
ggtttccttcagaaagtga

SEQ ID NO: 794118 - DNA, 19 bp, Mus musculus
  siRNA target sequence for 4930500I12Rik (NM_177213.2,511-529).
gattttgaagattatgcta

SEQ ID NO: 794119 - DNA, 19 bp, Mus musculus
  siRNA target sequence for 4930500I12Rik (NM_177213.2,536-554).
ctgtcaactctagaaatat

SEQ ID NO: 794120 - DNA, 19 bp, Mus musculus
  siRNA target sequence for 4930500I12Rik (NM_177213.2,596-614).
gtgatcctctgccaaagaa

SEQ ID NO: 794121 - DNA, 19 bp, Mus musculus
  siRNA target sequence for 4930500I12Rik (NM_177213.2,607-625).
ccaaagaaggtaaaatact

SEQ ID NO: 794122 - DNA, 19 bp, Mus musculus
  siRNA target sequence for 4930500I12Rik (NM_177213.2,632-650).
gatttagtgatattaagaa

SEQ ID NO: 794123 - DNA, 19 bp, Mus musculus
  siRNA target sequence for 4930500I12Rik (NM_177213.2,684-702).
cacctggcttacaaaattt

SEQ ID NO: 794124 - DNA, 19 bp, Mus musculus
  siRNA target sequence for 4930500I12Rik (NM_177213.2,894-912).
ccctgcatattatcatgat

SEQ ID NO: 794125 - DNA, 19 bp, Mus musculus
  siRNA target sequence for 4930500I12Rik (NM_177213.2,899-917).
catattatcatgattactt

SEQ ID NO: 794126 - DNA, 19 bp, Mus musculus
  siRNA target sequence for 4930500I12Rik (NM_177213.2,985-1003).
ctagtttggtccattgtgt

SEQ ID NO: 794127 - DNA, 19 bp, Mus musculus
  siRNA target sequence for 4930500I12Rik (NM_177213.2,1011-1029).
ggaaaaccgattaaaggaa

SEQ ID NO: 794128 - DNA, 19 bp, Mus musculus
  siRNA target sequence for 4930500I12Rik (NM_177213.2,1012-1030).
gaaaaccgattaaaggaat

SEQ ID NO: 794129 - DNA, 19 bp, Mus musculus
  siRNA target sequence for 4930500I12Rik (NM_177213.2,1150-1168).
cctgcgccaatcttccaat

SEQ ID NO: 794130 - DNA, 19 bp, Mus musculus
  siRNA target sequence for 4930500I12Rik (NM_177213.2,1151-1169).
ctgcgccaatcttccaata

SEQ ID NO: 794131 - DNA, 19 bp, Mus musculus
  siRNA target sequence for 4930500I12Rik (NM_177213.2,1153-1171).
gcgccaatcttccaataca

SEQ ID NO: 794132 - DNA, 19 bp, Mus musculus
  siRNA target sequence for 4930500I12Rik (NM_177213.2,1154-1172).
cgccaatcttccaatacaa

SEQ ID NO: 794133 - DNA, 19 bp, Mus musculus
  siRNA target sequence for 4930500I12Rik (NM_177213.2,1155-1173).
gccaatcttccaatacaat

SEQ ID NO: 794134 - DNA, 19 bp, Mus musculus
  siRNA target sequence for 4930500I12Rik (NM_177213.2,1157-1175).
caatcttccaatacaatga

SEQ ID NO: 794135 - DNA, 19 bp, Mus musculus
  siRNA target sequence for 4930500I12Rik (NM_177213.2,1210-1228).
gccatctcctcgatattct

SEQ ID NO: 794136 - DNA, 19 bp, Mus musculus
  siRNA target sequence for 4930500I12Rik (NM_177213.2,1211-1229).
ccatctcctcgatattctt

SEQ ID NO: 794137 - DNA, 19 bp, Mus musculus
  siRNA target sequence for 4930500I12Rik (NM_177213.2,1217-1235).
cctcgatattcttcagttt

SEQ ID NO: 794138 - DNA, 19 bp, Mus musculus
  siRNA target sequence for 4930500I12Rik (NM_177213.2,1239-1257).
ggttagcacattgtttaat

SEQ ID NO: 794139 - DNA, 19 bp, Mus musculus
  siRNA target sequence for 4930500I12Rik (NM_177213.2,1240-1258).
gttagcacattgtttaata

SEQ ID NO: 794140 - DNA, 19 bp, Mus musculus
  siRNA target sequence for 4930500I12Rik (NM_177213.2,1271-1289).
ccatgagcttgggaagttt

SEQ ID NO: 794141 - DNA, 19 bp, Mus musculus
  siRNA target sequence for 4930500I12Rik (NM_177213.2,1275-1293).
gagcttgggaagtttctta

SEQ ID NO: 794142 - DNA, 19 bp, Mus musculus
  siRNA target sequence for 4930500I12Rik (NM_177213.2,1387-1405).
gttgggatggcgtttggat

SEQ ID NO: 794143 - DNA, 19 bp, Mus musculus
  siRNA target sequence for 4930500I12Rik (NM_177213.2,1390-1408).
gggatggcgtttggattta

SEQ ID NO: 794144 - DNA, 19 bp, Mus musculus
  siRNA target sequence for 4930500I12Rik (NM_177213.2,1392-1410).
gatggcgtttggatttaga

SEQ ID NO: 794145 - DNA, 19 bp, Mus musculus
  siRNA target sequence for 4930500I12Rik (NM_177213.2,1409-1427).
gattcctagtcaatacaga

SEQ ID NO: 794146 - DNA, 19 bp, Mus musculus
  siRNA target sequence for 4930500I12Rik (NM_177213.2,1419-1437).
caatacagacgcaaagaaa

SEQ ID NO: 794147 - DNA, 19 bp, Mus musculus
  siRNA target sequence for 4930500I12Rik (NM_177213.2,1473-1491).
ggattcagacagcttttta

SEQ ID NO: 794148 - DNA, 19 bp, Mus musculus
  siRNA target sequence for 4930500I12Rik (NM_177213.2,1500-1518).
cgtgctagggatgctttta

SEQ ID NO: 794149 - DNA, 19 bp, Mus musculus
  siRNA target sequence for 4930500I12Rik (NM_177213.2,1503-1521).
gctagggatgcttttagct

SEQ ID NO: 794150 - DNA, 19 bp, Mus musculus
  siRNA target sequence for 4930500I12Rik (NM_177213.2,1595-1613).
ccgtggaattttttcttga

SEQ ID NO: 794151 - DNA, 19 bp, Mus musculus
  siRNA target sequence for B230210E21Rik (NM_177217.2,275-293).
gcctcctggcggaaactga

SEQ ID NO: 794152 - DNA, 19 bp, Mus musculus
  siRNA target sequence for B230210E21Rik (NM_177217.2,344-362).
caggccaaggttttacagt

SEQ ID NO: 794153 - DNA, 19 bp, Mus musculus
  siRNA target sequence for B230210E21Rik (NM_177217.2,424-442).
gcgctgggagagtgtagaa

SEQ ID NO: 794154 - DNA, 19 bp, Mus musculus
  siRNA target sequence for B230210E21Rik (NM_177217.2,661-679).
cttcaagggctatttgaga

SEQ ID NO: 794155 - DNA, 19 bp, Mus musculus
  siRNA target sequence for B230210E21Rik (NM_177217.2,688-706).
cggtcgtcttctcaatcta

SEQ ID NO: 794156 - DNA, 19 bp, Mus musculus
  siRNA target sequence for B230210E21Rik (NM_177217.2,689-707).
ggtcgtcttctcaatctat

SEQ ID NO: 794157 - DNA, 19 bp, Mus musculus
  siRNA target sequence for B230210E21Rik (NM_177217.2,728-746).
cgacgtcacttcctgaaaa

SEQ ID NO: 794158 - DNA, 19 bp, Mus musculus
  siRNA target sequence for B230210E21Rik (NM_177217.2,729-747).
gacgtcacttcctgaaaat

SEQ ID NO: 794159 - DNA, 19 bp, Mus musculus
  siRNA target sequence for B230210E21Rik (NM_177217.2,731-749).
cgtcacttcctgaaaatga

SEQ ID NO: 794160 - DNA, 19 bp, Mus musculus
  siRNA target sequence for B230210E21Rik (NM_177217.2,1067-1085).
gattatgagaagatggtaa

SEQ ID NO: 794161 - DNA, 19 bp, Mus musculus
  siRNA target sequence for B230210E21Rik (NM_177217.2,1078-1096).
gatggtaaaggctctaaga

SEQ ID NO: 794162 - DNA, 19 bp, Mus musculus
  siRNA target sequence for 9530056K15Rik (NM_177218.2,1662-1680).
ggtgtctctacccaacatt

SEQ ID NO: 794163 - DNA, 19 bp, Mus musculus
  siRNA target sequence for 9530056K15Rik (NM_177218.2,1665-1683).
gtctctacccaacattgta

SEQ ID NO: 794164 - DNA, 19 bp, Mus musculus
  siRNA target sequence for 9530056K15Rik (NM_177218.2,1687-1705).
ggcacctgtcaaaagtatt

SEQ ID NO: 794165 - DNA, 19 bp, Mus musculus
  siRNA target sequence for 9530056K15Rik (NM_177218.2,1800-1818).
ggaacgtggtgcctttgaa

SEQ ID NO: 794166 - DNA, 19 bp, Mus musculus
  siRNA target sequence for 9530056K15Rik (NM_177218.2,1801-1819).
gaacgtggtgcctttgaat

SEQ ID NO: 794167 - DNA, 19 bp, Mus musculus
  siRNA target sequence for 9530056K15Rik (NM_177218.2,1857-1875).
ccagggacaaagagataca

SEQ ID NO: 794168 - DNA, 19 bp, Mus musculus
  siRNA target sequence for 9530056K15Rik (NM_177218.2,1967-1985).
ggaaacttcccctagcaaa

SEQ ID NO: 794169 - DNA, 19 bp, Mus musculus
  siRNA target sequence for A730055L17Rik (NM_177219.2,102-120).
cagtggctcagacttgtta

SEQ ID NO: 794170 - DNA, 19 bp, Mus musculus
  siRNA target sequence for A730055L17Rik (NM_177219.2,112-130).
gacttgttacctcatactt

SEQ ID NO: 794171 - DNA, 19 bp, Mus musculus
  siRNA target sequence for A730055L17Rik (NM_177219.2,248-266).
gaagttggggtggatttta

SEQ ID NO: 794172 - DNA, 19 bp, Mus musculus
  siRNA target sequence for A630031M04Rik (NM_177220.2,2608-2626).
ggagggacttgttaaaaat

SEQ ID NO: 794173 - DNA, 19 bp, Mus musculus
  siRNA target sequence for A630031M04Rik (NM_177220.2,2611-2629).
gggacttgttaaaaataga

SEQ ID NO: 794174 - DNA, 19 bp, Mus musculus
  siRNA target sequence for A630031M04Rik (NM_177220.2,2612-2630).
ggacttgttaaaaatagat

SEQ ID NO: 794175 - DNA, 19 bp, Mus musculus
  siRNA target sequence for A630031M04Rik (NM_177220.2,2613-2631).
gacttgttaaaaatagatt

SEQ ID NO: 794176 - DNA, 19 bp, Mus musculus
  siRNA target sequence for A630031M04Rik (NM_177220.2,2639-2657).
ctttatcaggagctatgaa

SEQ ID NO: 794177 - DNA, 19 bp, Mus musculus
  siRNA target sequence for A630031M04Rik (NM_177220.2,2682-2700).
ggggatctgaacttagtgt

SEQ ID NO: 794178 - DNA, 19 bp, Mus musculus
  siRNA target sequence for A630031M04Rik (NM_177220.2,2699-2717).
gtgttcatgcatctatgta

SEQ ID NO: 794179 - DNA, 19 bp, Mus musculus
  siRNA target sequence for Las1 (NM_177222.2,794-812).
ccagcttgggcccaaaaca

SEQ ID NO: 794180 - DNA, 19 bp, Mus musculus
  siRNA target sequence for Las1 (NM_177222.2,797-815).
gcttgggcccaaaacaaca

SEQ ID NO: 794181 - DNA, 19 bp, Mus musculus
  siRNA target sequence for Las1 (NM_177222.2,844-862).
gtcccctcccaaaagtgta

SEQ ID NO: 794182 - DNA, 19 bp, Mus musculus
  siRNA target sequence for Las1 (NM_177222.2,846-864).
cccctcccaaaagtgtaat

SEQ ID NO: 794183 - DNA, 19 bp, Mus musculus
  siRNA target sequence for Las1 (NM_177222.2,847-865).
ccctcccaaaagtgtaata

SEQ ID NO: 794184 - DNA, 19 bp, Mus musculus
  siRNA target sequence for Las1 (NM_177222.2,848-866).
cctcccaaaagtgtaataa

SEQ ID NO: 794185 - DNA, 19 bp, Mus musculus
  siRNA target sequence for Las1 (NM_177222.2,852-870).
ccaaaagtgtaataacaca

SEQ ID NO: 794186 - DNA, 19 bp, Mus musculus
  siRNA target sequence for Las1 (NM_177222.2,853-871).
caaaagtgtaataacacaa

SEQ ID NO: 794187 - DNA, 19 bp, Mus musculus
  siRNA target sequence for Las1 (NM_177222.2,867-885).
cacaattaagcaattacca

SEQ ID NO: 794188 - DNA, 19 bp, Mus musculus
  siRNA target sequence for Las1 (NM_177222.2,903-921).
ctggtcatgacatatggaa

SEQ ID NO: 794189 - DNA, 19 bp, Mus musculus
  siRNA target sequence for Las1 (NM_177222.2,905-923).
ggtcatgacatatggaaaa

SEQ ID NO: 794190 - DNA, 19 bp, Mus musculus
  siRNA target sequence for Las1 (NM_177222.2,908-926).
catgacatatggaaaacga

SEQ ID NO: 794191 - DNA, 19 bp, Mus musculus
  siRNA target sequence for D130079A08Rik (NM_177223.2,565-583).
gttggtaaaatattcctaa

SEQ ID NO: 794192 - DNA, 19 bp, Mus musculus
  siRNA target sequence for D130079A08Rik (NM_177223.2,579-597).
cctaagtataaaaattagt

SEQ ID NO: 794193 - DNA, 19 bp, Mus musculus
  siRNA target sequence for D130079A08Rik (NM_177223.2,722-740).
ccgcctcttatctcacaat

SEQ ID NO: 794194 - DNA, 19 bp, Mus musculus
  siRNA target sequence for D130079A08Rik (NM_177223.2,741-759).
gtcaaatgtatctacagta

SEQ ID NO: 794195 - DNA, 19 bp, Mus musculus
  siRNA target sequence for D130079A08Rik (NM_177223.2,848-866).
ggactaacacaacattata

SEQ ID NO: 794196 - DNA, 19 bp, Mus musculus
  siRNA target sequence for D130079A08Rik (NM_177223.2,849-867).
gactaacacaacattatat

SEQ ID NO: 794197 - DNA, 19 bp, Mus musculus
  siRNA target sequence for D130079A08Rik (NM_177223.2,884-902).
catcatacatactcaagtt

SEQ ID NO: 794198 - DNA, 19 bp, Mus musculus
  siRNA target sequence for 9330199A09Rik (NM_177226.3,211-229).
ccagaatgaggctcataga

SEQ ID NO: 794199 - DNA, 19 bp, Mus musculus
  siRNA target sequence for 9330199A09Rik (NM_177226.3,273-291).
gttctggggaggagatcat

SEQ ID NO: 794200 - DNA, 19 bp, Mus musculus
  siRNA target sequence for 9330199A09Rik (NM_177226.3,397-415).
gggttcttcccccttagat

SEQ ID NO: 794201 - DNA, 19 bp, Mus musculus
  siRNA target sequence for 9330199A09Rik (NM_177226.3,801-819).
gctggagctccaatctagt

SEQ ID NO: 794202 - DNA, 19 bp, Mus musculus
  siRNA target sequence for 9330199A09Rik (NM_177226.3,1045-1063).
gcgctttggccagaatcat

SEQ ID NO: 794203 - DNA, 19 bp, Mus musculus
  siRNA target sequence for 9330199A09Rik (NM_177226.3,1046-1064).
cgctttggccagaatcata

SEQ ID NO: 794204 - DNA, 19 bp, Mus musculus
  siRNA target sequence for 9330199A09Rik (NM_177226.3,1047-1065).
gctttggccagaatcataa

SEQ ID NO: 794205 - DNA, 19 bp, Mus musculus
  siRNA target sequence for 9330199A09Rik (NM_177226.3,1262-1280).
cgcgaggatcccttcaagt

SEQ ID NO: 794206 - DNA, 19 bp, Mus musculus
  siRNA target sequence for 9330199A09Rik (NM_177226.3,2013-2031).
cctttggaggcaattcaca

SEQ ID NO: 794207 - DNA, 19 bp, Mus musculus
  siRNA target sequence for 9330199A09Rik (NM_177226.3,2125-2143).
ctctcctaagtgctatgtt

SEQ ID NO: 794208 - DNA, 19 bp, Mus musculus
  siRNA target sequence for 9330199A09Rik (NM_177226.3,2129-2147).
cctaagtgctatgtttgtt

SEQ ID NO: 794209 - DNA, 19 bp, Mus musculus
  siRNA target sequence for 9330199A09Rik (NM_177226.3,2197-2215).
gctcactcacgggaatgaa

SEQ ID NO: 794210 - DNA, 19 bp, Mus musculus
  siRNA target sequence for 9330199A09Rik (NM_177226.3,2485-2503).
cgatcgactagctcttaca

SEQ ID NO: 794211 - DNA, 19 bp, Mus musculus
  siRNA target sequence for A130004G07Rik (NM_177228.2,190-208).
ggctgttggaattccatat

SEQ ID NO: 794212 - DNA, 19 bp, Mus musculus
  siRNA target sequence for A130004G07Rik (NM_177228.2,374-392).
gcgctcgccacttacaaat

SEQ ID NO: 794213 - DNA, 19 bp, Mus musculus
  siRNA target sequence for A130004G07Rik (NM_177228.2,376-394).
gctcgccacttacaaatct

SEQ ID NO: 794214 - DNA, 19 bp, Mus musculus
  siRNA target sequence for A130004G07Rik (NM_177228.2,379-397).
cgccacttacaaatctgta

SEQ ID NO: 794215 - DNA, 19 bp, Mus musculus
  siRNA target sequence for A130004G07Rik (NM_177228.2,384-402).
cttacaaatctgtagttaa

SEQ ID NO: 794216 - DNA, 19 bp, Mus musculus
  siRNA target sequence for A130004G07Rik (NM_177228.2,412-430).
gacgtgccaaagaacaaga

SEQ ID NO: 794217 - DNA, 19 bp, Mus musculus
  siRNA target sequence for A130004G07Rik (NM_177228.2,431-449).
caaagaaccgtgtctaact

SEQ ID NO: 794218 - DNA, 19 bp, Mus musculus
  siRNA target sequence for 5730405M06Rik (NM_177229.2,546-564).
cctcaccggtggatcatga

SEQ ID NO: 794219 - DNA, 19 bp, Mus musculus
  siRNA target sequence for 5730405M06Rik (NM_177229.2,547-565).
ctcaccggtggatcatgat

SEQ ID NO: 794220 - DNA, 19 bp, Mus musculus
  siRNA target sequence for 5730405M06Rik (NM_177229.2,630-648).
ctgcggttttacctttagt

SEQ ID NO: 794221 - DNA, 19 bp, Mus musculus
  siRNA target sequence for 5730405M06Rik (NM_177229.2,633-651).
cggttttacctttagttca

SEQ ID NO: 794222 - DNA, 19 bp, Mus musculus
  siRNA target sequence for 5730405M06Rik (NM_177229.2,817-835).
ccgggtagaccgagagatt

SEQ ID NO: 794223 - DNA, 19 bp, Mus musculus
  siRNA target sequence for 5730405M06Rik (NM_177229.2,821-839).
gtagaccgagagattgcaa

SEQ ID NO: 794224 - DNA, 19 bp, Mus musculus
  siRNA target sequence for 5730405M06Rik (NM_177229.2,956-974).
cgtagtattgtccaaatta

SEQ ID NO: 794225 - DNA, 19 bp, Mus musculus
  siRNA target sequence for 5730405M06Rik (NM_177229.2,957-975).
gtagtattgtccaaattat

SEQ ID NO: 794226 - DNA, 19 bp, Mus musculus
  siRNA target sequence for 5730405M06Rik (NM_177229.2,1110-1128).
ctgcaaggcgcatgatgaa

SEQ ID NO: 794227 - DNA, 19 bp, Mus musculus
  siRNA target sequence for 5730405M06Rik (NM_177229.2,1112-1130).
gcaaggcgcatgatgaagt

SEQ ID NO: 794228 - DNA, 19 bp, Mus musculus
  siRNA target sequence for 4932413O14Rik (NM_177230.2,188-206).
gaatcaaaagcttgtgaat

SEQ ID NO: 794229 - DNA, 19 bp, Mus musculus
  siRNA target sequence for 4932413O14Rik (NM_177230.2,198-216).
cttgtgaatcaaaaaacga

SEQ ID NO: 794230 - DNA, 19 bp, Mus musculus
  siRNA target sequence for 4932413O14Rik (NM_177230.2,207-225).
caaaaaacgaagatctttt

SEQ ID NO: 794231 - DNA, 19 bp, Mus musculus
  siRNA target sequence for 4932413O14Rik (NM_177230.2,252-270).
gttcttcaagcccgttttt

SEQ ID NO: 794232 - DNA, 19 bp, Mus musculus
  siRNA target sequence for 4932413O14Rik (NM_177230.2,276-294).
cgtctactcatggtacaat

SEQ ID NO: 794233 - DNA, 19 bp, Mus musculus
  siRNA target sequence for 4932413O14Rik (NM_177230.2,277-295).
gtctactcatggtacaata

SEQ ID NO: 794234 - DNA, 19 bp, Mus musculus
  siRNA target sequence for 4932413O14Rik (NM_177230.2,279-297).
ctactcatggtacaataat

SEQ ID NO: 794235 - DNA, 19 bp, Mus musculus
  siRNA target sequence for 4932413O14Rik (NM_177230.2,329-347).
caaatgcccttttttccta

SEQ ID NO: 794236 - DNA, 19 bp, Mus musculus
  siRNA target sequence for 4932413O14Rik (NM_177230.2,334-352).
gcccttttttcctaaatat

SEQ ID NO: 794237 - DNA, 19 bp, Mus musculus
  siRNA target sequence for 4932413O14Rik (NM_177230.2,362-380).
cttgattctccgagaaagt

SEQ ID NO: 794238 - DNA, 19 bp, Mus musculus
  siRNA target sequence for 4932413O14Rik (NM_177230.2,410-428).
gaacgtgttttggaagaat

SEQ ID NO: 794239 - DNA, 19 bp, Mus musculus
  siRNA target sequence for 4932413O14Rik (NM_177230.2,463-481).
caacgaaagcaatgaatta

SEQ ID NO: 794240 - DNA, 19 bp, Mus musculus
  siRNA target sequence for 4932413O14Rik (NM_177230.2,466-484).
cgaaagcaatgaattacat

SEQ ID NO: 794241 - DNA, 19 bp, Mus musculus
  siRNA target sequence for 4932413O14Rik (NM_177230.2,560-578).
gatgccatggctgatatca

SEQ ID NO: 794242 - DNA, 19 bp, Mus musculus
  siRNA target sequence for 4932413O14Rik (NM_177230.2,598-616).
ccaggaggagtcacgaaat

SEQ ID NO: 794243 - DNA, 19 bp, Mus musculus
  siRNA target sequence for 4932413O14Rik (NM_177230.2,625-643).
gaatacagttcgtgaactt

SEQ ID NO: 794244 - DNA, 19 bp, Mus musculus
  siRNA target sequence for 4932413O14Rik (NM_177230.2,704-722).
ctacgaaaaatgatgctta

SEQ ID NO: 794245 - DNA, 19 bp, Mus musculus
  siRNA target sequence for 4932413O14Rik (NM_177230.2,773-791).
gaagcctcaggcaagaaaa

SEQ ID NO: 794246 - DNA, 19 bp, Mus musculus
  siRNA target sequence for 4932413O14Rik (NM_177230.2,776-794).
gcctcaggcaagaaaatat

SEQ ID NO: 794247 - DNA, 19 bp, Mus musculus
  siRNA target sequence for 4932413O14Rik (NM_177230.2,778-796).
ctcaggcaagaaaatatgt

SEQ ID NO: 794248 - DNA, 19 bp, Mus musculus
  siRNA target sequence for 4932413O14Rik (NM_177230.2,797-815).
gaacacgacagcatgtcta

SEQ ID NO: 794249 - DNA, 19 bp, Mus musculus
  siRNA target sequence for 4932413O14Rik (NM_177230.2,835-853).
gggctcagctattagtaaa

SEQ ID NO: 794250 - DNA, 19 bp, Mus musculus
  siRNA target sequence for 4932413O14Rik (NM_177230.2,836-854).
ggctcagctattagtaaaa

SEQ ID NO: 794251 - DNA, 19 bp, Mus musculus
  siRNA target sequence for 4932413O14Rik (NM_177230.2,837-855).
gctcagctattagtaaaat

SEQ ID NO: 794252 - DNA, 19 bp, Mus musculus
  siRNA target sequence for 4932413O14Rik (NM_177230.2,840-858).
cagctattagtaaaatcct

SEQ ID NO: 794253 - DNA, 19 bp, Mus musculus
  siRNA target sequence for 4932413O14Rik (NM_177230.2,842-860).
gctattagtaaaatcctaa

SEQ ID NO: 794254 - DNA, 19 bp, Mus musculus
  siRNA target sequence for 4932413O14Rik (NM_177230.2,863-881).
gaattagacacagaaatct

SEQ ID NO: 794255 - DNA, 19 bp, Mus musculus
  siRNA target sequence for 4932413O14Rik (NM_177230.2,908-926).
gtagaggatcagcttgaaa

SEQ ID NO: 794256 - DNA, 19 bp, Mus musculus
  siRNA target sequence for 4932413O14Rik (NM_177230.2,1077-1095).
gtcagctggaaatcattca

SEQ ID NO: 794257 - DNA, 19 bp, Mus musculus
  siRNA target sequence for 4932413O14Rik (NM_177230.2,1081-1099).
gctggaaatcattcaagaa

SEQ ID NO: 794258 - DNA, 19 bp, Mus musculus
  siRNA target sequence for 4932413O14Rik (NM_177230.2,1129-1147).
gcgccagctcagtgactta

SEQ ID NO: 794259 - DNA, 19 bp, Mus musculus
  siRNA target sequence for 4932413O14Rik (NM_177230.2,1142-1160).
gacttagagtctactgttt

SEQ ID NO: 794260 - DNA, 19 bp, Mus musculus
  siRNA target sequence for 4932413O14Rik (NM_177230.2,1144-1162).
cttagagtctactgtttct

SEQ ID NO: 794261 - DNA, 19 bp, Mus musculus
  siRNA target sequence for 4932413O14Rik (NM_177230.2,1175-1193).
gaactgagggagtccaaaa

SEQ ID NO: 794262 - DNA, 19 bp, Mus musculus
  siRNA target sequence for 4932413O14Rik (NM_177230.2,1198-1216).
gtatgaagataagatagaa

SEQ ID NO: 794263 - DNA, 19 bp, Mus musculus
  siRNA target sequence for 4932413O14Rik (NM_177230.2,1285-1303).
cagtcaggagtcaggaaat

SEQ ID NO: 794264 - DNA, 19 bp, Mus musculus
  siRNA target sequence for 4932413O14Rik (NM_177230.2,1439-1457).
gagctggatgacagaaaca

SEQ ID NO: 794265 - DNA, 19 bp, Mus musculus
  siRNA target sequence for 4932413O14Rik (NM_177230.2,1752-1770).
cccgggtggacttgaagtt

SEQ ID NO: 794266 - DNA, 19 bp, Mus musculus
  siRNA target sequence for 4932413O14Rik (NM_177230.2,2170-2188).
gactagtaggactgaacta

SEQ ID NO: 794267 - DNA, 19 bp, Mus musculus
  siRNA target sequence for 4932413O14Rik (NM_177230.2,2175-2193).
gtaggactgaactaaacca

SEQ ID NO: 794268 - DNA, 19 bp, Mus musculus
  siRNA target sequence for 4932413O14Rik (NM_177230.2,2201-2219).
gaggactatgaagtcttaa

SEQ ID NO: 794269 - DNA, 19 bp, Mus musculus
  siRNA target sequence for 4932413O14Rik (NM_177230.2,2224-2242).
gaacttccggaacaaaagt

SEQ ID NO: 794270 - DNA, 19 bp, Mus musculus
  siRNA target sequence for 4932413O14Rik (NM_177230.2,2343-2361).
ccgatggccacgctatgaa

SEQ ID NO: 794271 - DNA, 19 bp, Mus musculus
  siRNA target sequence for 4932413O14Rik (NM_177230.2,2425-2443).
caaggtgcagtttttagaa

SEQ ID NO: 794272 - DNA, 19 bp, Mus musculus
  siRNA target sequence for 4932413O14Rik (NM_177230.2,2448-2466).
ccgtgacaagtgccaataa

SEQ ID NO: 794273 - DNA, 19 bp, Mus musculus
  siRNA target sequence for 4932413O14Rik (NM_177230.2,2472-2490).
gacactttttgaaagaaga

SEQ ID NO: 794274 - DNA, 19 bp, Mus musculus
  siRNA target sequence for 4932413O14Rik (NM_177230.2,2515-2533).
gagtaccgtagcaacagaa

SEQ ID NO: 794275 - DNA, 19 bp, Mus musculus
  siRNA target sequence for 4932413O14Rik (NM_177230.2,2517-2535).
gtaccgtagcaacagaaaa

SEQ ID NO: 794276 - DNA, 19 bp, Mus musculus
  siRNA target sequence for 4932413O14Rik (NM_177230.2,2520-2538).
ccgtagcaacagaaaaaaa

SEQ ID NO: 794277 - DNA, 19 bp, Mus musculus
  siRNA target sequence for 4932413O14Rik (NM_177230.2,2626-2644).
gtttgcagagtgtcaagat

SEQ ID NO: 794278 - DNA, 19 bp, Mus musculus
  siRNA target sequence for 4932413O14Rik (NM_177230.2,2670-2688).
cggtgcgtctaaaacttca

SEQ ID NO: 794279 - DNA, 19 bp, Mus musculus
  siRNA target sequence for 4932413O14Rik (NM_177230.2,2827-2845).
gtctcatcactctataaaa

SEQ ID NO: 794280 - DNA, 19 bp, Mus musculus
  siRNA target sequence for 4932413O14Rik (NM_177230.2,2970-2988).
ctcttggagcactagaaga

SEQ ID NO: 794281 - DNA, 19 bp, Mus musculus
  siRNA target sequence for 4932413O14Rik (NM_177230.2,2978-2996).
gcactagaagacagagtaa

SEQ ID NO: 794282 - DNA, 19 bp, Mus musculus
  siRNA target sequence for 4932413O14Rik (NM_177230.2,3151-3169).
cttcacgttcacatctaca

SEQ ID NO: 794283 - DNA, 19 bp, Mus musculus
  siRNA target sequence for 4932413O14Rik (NM_177230.2,3194-3212).
gcttctcgttccttcagtt

SEQ ID NO: 794284 - DNA, 19 bp, Mus musculus
  siRNA target sequence for 4932413O14Rik (NM_177230.2,3291-3309).
gctctaccaagcctattca

SEQ ID NO: 794285 - DNA, 19 bp, Mus musculus
  siRNA target sequence for 4932413O14Rik (NM_177230.2,3385-3403).
cagactggaaagtttgcaa

SEQ ID NO: 794286 - DNA, 19 bp, Mus musculus
  siRNA target sequence for 4932413O14Rik (NM_177230.2,3434-3452).
caagcaatgtcttcaatga

SEQ ID NO: 794287 - DNA, 19 bp, Mus musculus
  siRNA target sequence for 4932413O14Rik (NM_177230.2,3437-3455).
gcaatgtcttcaatgatca

SEQ ID NO: 794288 - DNA, 19 bp, Mus musculus
  siRNA target sequence for A930033H14Rik (NM_177232.2,336-354).
ggctcaggaaaagaaatct

SEQ ID NO: 794289 - DNA, 19 bp, Mus musculus
  siRNA target sequence for C130034I18Rik (NM_177233.4,535-553).
caggtcaccacctgatcaa

SEQ ID NO: 794290 - DNA, 19 bp, Mus musculus
  siRNA target sequence for C130034I18Rik (NM_177233.4,579-597).
gtgcaccgctgctgcaata

SEQ ID NO: 794291 - DNA, 19 bp, Mus musculus
  siRNA target sequence for C130034I18Rik (NM_177233.4,687-705).
gttgaagctgccattgtga

SEQ ID NO: 794292 - DNA, 19 bp, Mus musculus
  siRNA target sequence for C130034I18Rik (NM_177233.4,787-805).
gtagcagtggcaataaagt

SEQ ID NO: 794293 - DNA, 19 bp, Mus musculus
  siRNA target sequence for C130034I18Rik (NM_177233.4,790-808).
gcagtggcaataaagtcaa

SEQ ID NO: 794294 - DNA, 19 bp, Mus musculus
  siRNA target sequence for C130034I18Rik (NM_177233.4,791-809).
cagtggcaataaagtcaaa

SEQ ID NO: 794295 - DNA, 19 bp, Mus musculus
  siRNA target sequence for C130034I18Rik (NM_177233.4,795-813).
ggcaataaagtcaaaacca

SEQ ID NO: 794296 - DNA, 19 bp, Mus musculus
  siRNA target sequence for B230209C24Rik (NM_177235.3,177-195).
cgacaaccaagttcttaga

SEQ ID NO: 794297 - DNA, 19 bp, Mus musculus
  siRNA target sequence for B230209C24Rik (NM_177235.3,178-196).
gacaaccaagttcttagaa

SEQ ID NO: 794298 - DNA, 19 bp, Mus musculus
  siRNA target sequence for B230209C24Rik (NM_177235.3,180-198).
caaccaagttcttagaaaa

SEQ ID NO: 794299 - DNA, 19 bp, Mus musculus
  siRNA target sequence for B230209C24Rik (NM_177235.3,217-235).
gagacagcaaactcagaaa

SEQ ID NO: 794300 - DNA, 19 bp, Mus musculus
  siRNA target sequence for B230209C24Rik (NM_177235.3,219-237).
gacagcaaactcagaaaat

SEQ ID NO: 794301 - DNA, 19 bp, Mus musculus
  siRNA target sequence for B230209C24Rik (NM_177235.3,259-277).
gcacagagagacccatatt

SEQ ID NO: 794302 - DNA, 19 bp, Mus musculus
  siRNA target sequence for B230209C24Rik (NM_177235.3,341-359).
ccaaggaggaactttgtaa

SEQ ID NO: 794303 - DNA, 19 bp, Mus musculus
  siRNA target sequence for B230209C24Rik (NM_177235.3,346-364).
gaggaactttgtaacaaaa

SEQ ID NO: 794304 - DNA, 19 bp, Mus musculus
  siRNA target sequence for B230209C24Rik (NM_177235.3,410-428).
gccggcttcgacagtcttt

SEQ ID NO: 794305 - DNA, 19 bp, Mus musculus
  siRNA target sequence for B230209C24Rik (NM_177235.3,429-447).
ggtcatgctgcaagtgtta

SEQ ID NO: 794306 - DNA, 19 bp, Mus musculus
  siRNA target sequence for B230209C24Rik (NM_177235.3,455-473).
cagtcacacagtttgaaga

SEQ ID NO: 794307 - DNA, 19 bp, Mus musculus
  siRNA target sequence for B230209C24Rik (NM_177235.3,487-505).
gcagagaccctccttaaga

SEQ ID NO: 794308 - DNA, 19 bp, Mus musculus
  siRNA target sequence for B230209C24Rik (NM_177235.3,680-698).
ggcagattgcccgttgtaa

SEQ ID NO: 794309 - DNA, 19 bp, Mus musculus
  siRNA target sequence for B230209C24Rik (NM_177235.3,682-700).
cagattgcccgttgtaata

SEQ ID NO: 794310 - DNA, 19 bp, Mus musculus
  siRNA target sequence for B230209C24Rik (NM_177235.3,739-757).
gtactttacacgaatgagt

SEQ ID NO: 794311 - DNA, 19 bp, Mus musculus
  siRNA target sequence for B230209C24Rik (NM_177235.3,784-802).
gcaaaatcctccacttcaa

SEQ ID NO: 794312 - DNA, 19 bp, Mus musculus
  siRNA target sequence for B230209C24Rik (NM_177235.3,881-899).
gtgcggatgacgtctcaat

SEQ ID NO: 794313 - DNA, 19 bp, Mus musculus
  siRNA target sequence for B230209C24Rik (NM_177235.3,894-912).
ctcaatcagacggatgata

SEQ ID NO: 794314 - DNA, 19 bp, Mus musculus
  siRNA target sequence for B230209C24Rik (NM_177235.3,962-980).
cgaactctcaggatggtat

SEQ ID NO: 794315 - DNA, 19 bp, Mus musculus
  siRNA target sequence for B230209C24Rik (NM_177235.3,966-984).
ctctcaggatggtatctta

SEQ ID NO: 794316 - DNA, 19 bp, Mus musculus
  siRNA target sequence for B230209C24Rik (NM_177235.3,970-988).
caggatggtatcttaaaat

SEQ ID NO: 794317 - DNA, 19 bp, Mus musculus
  siRNA target sequence for 9830147P19Rik (NM_177238.2,2065-2083).
ctggtaaggtaggatgtaa

SEQ ID NO: 794318 - DNA, 19 bp, Mus musculus
  siRNA target sequence for 9830147P19Rik (NM_177238.2,2129-2147).
gcccctgggtaaattgcaa

SEQ ID NO: 794319 - DNA, 19 bp, Mus musculus
  siRNA target sequence for 9830147P19Rik (NM_177238.2,2130-2148).
cccctgggtaaattgcaat

SEQ ID NO: 794320 - DNA, 19 bp, Mus musculus
  siRNA target sequence for 9830147P19Rik (NM_177238.2,2135-2153).
gggtaaattgcaatcactt

SEQ ID NO: 794321 - DNA, 19 bp, Mus musculus
  siRNA target sequence for 9830147P19Rik (NM_177238.2,2136-2154).
ggtaaattgcaatcactta

SEQ ID NO: 794322 - DNA, 19 bp, Mus musculus
  siRNA target sequence for 9830147P19Rik (NM_177238.2,2137-2155).
gtaaattgcaatcacttat

SEQ ID NO: 794323 - DNA, 19 bp, Mus musculus
  siRNA target sequence for 9830147P19Rik (NM_177238.2,2218-2236).
gcactgaggttgataggat

SEQ ID NO: 794324 - DNA, 19 bp, Mus musculus
  siRNA target sequence for 9830147P19Rik (NM_177238.2,2219-2237).
cactgaggttgataggata

SEQ ID NO: 794325 - DNA, 19 bp, Mus musculus
  siRNA target sequence for 9830147P19Rik (NM_177238.2,2284-2302).
ctgccattaaggacaaaaa

SEQ ID NO: 794326 - DNA, 19 bp, Mus musculus
  siRNA target sequence for 9830147P19Rik (NM_177238.2,2304-2322).
gcaagaagatgcaatacgt

SEQ ID NO: 794327 - DNA, 19 bp, Mus musculus
  siRNA target sequence for 9830147P19Rik (NM_177238.2,2305-2323).
caagaagatgcaatacgtt

SEQ ID NO: 794328 - DNA, 19 bp, Mus musculus
  siRNA target sequence for D030016E14Rik (NM_177240.2,559-577).
cttagttcccggcaaaaca

SEQ ID NO: 794329 - DNA, 19 bp, Mus musculus
  siRNA target sequence for D030016E14Rik (NM_177240.2,566-584).
cccggcaaaacaaggaaat

SEQ ID NO: 794330 - DNA, 19 bp, Mus musculus
  siRNA target sequence for D030016E14Rik (NM_177240.2,569-587).
ggcaaaacaaggaaattgt

SEQ ID NO: 794331 - DNA, 19 bp, Mus musculus
  siRNA target sequence for D030016E14Rik (NM_177240.2,671-689).
ggccggtgtgtggttttga

SEQ ID NO: 794332 - DNA, 19 bp, Mus musculus
  siRNA target sequence for D030016E14Rik (NM_177240.2,737-755).
caggctgcaaggtctttca

SEQ ID NO: 794333 - DNA, 19 bp, Mus musculus
  siRNA target sequence for D030016E14Rik (NM_177240.2,739-757).
ggctgcaaggtctttcaaa

SEQ ID NO: 794334 - DNA, 19 bp, Mus musculus
  siRNA target sequence for D030016E14Rik (NM_177240.2,870-888).
cccctgctctaatgaatga

SEQ ID NO: 794335 - DNA, 19 bp, Mus musculus
  siRNA target sequence for D030016E14Rik (NM_177240.2,872-890).
cctgctctaatgaatgaga

SEQ ID NO: 794336 - DNA, 19 bp, Mus musculus
  siRNA target sequence for D030016E14Rik (NM_177240.2,873-891).
ctgctctaatgaatgagat

SEQ ID NO: 794337 - DNA, 19 bp, Mus musculus
  siRNA target sequence for D030016E14Rik (NM_177240.2,876-894).
ctctaatgaatgagatgta

SEQ ID NO: 794338 - DNA, 19 bp, Mus musculus
  siRNA target sequence for D030016E14Rik (NM_177240.2,974-992).
gagcatccactttataagt

SEQ ID NO: 794339 - DNA, 19 bp, Mus musculus
  siRNA target sequence for D030016E14Rik (NM_177240.2,1011-1029).
ggaccaggagccatgtact

SEQ ID NO: 794340 - DNA, 19 bp, Mus musculus
  siRNA target sequence for D030016E14Rik (NM_177240.2,1012-1030).
gaccaggagccatgtacta

SEQ ID NO: 794341 - DNA, 19 bp, Mus musculus
  siRNA target sequence for C530043K16Rik (NM_177241.2,1566-1584).
cagtcatccagcattacct

SEQ ID NO: 794342 - DNA, 19 bp, Mus musculus
  siRNA target sequence for C530043K16Rik (NM_177241.2,1691-1709).
gattgcggtgctactagtt

SEQ ID NO: 794343 - DNA, 19 bp, Mus musculus
  siRNA target sequence for C530043K16Rik (NM_177241.2,1696-1714).
cggtgctactagttcatgt

SEQ ID NO: 794344 - DNA, 19 bp, Mus musculus
  siRNA target sequence for C530043K16Rik (NM_177241.2,1697-1715).
ggtgctactagttcatgtt

SEQ ID NO: 794345 - DNA, 19 bp, Mus musculus
  siRNA target sequence for C530043K16Rik (NM_177241.2,1755-1773).
ctgggtcacatcaccttaa

SEQ ID NO: 794346 - DNA, 19 bp, Mus musculus
  siRNA target sequence for 5330408N05Rik (NM_177244.2,1063-1081).
cggctacgaagcatctctt

SEQ ID NO: 794347 - DNA, 19 bp, Mus musculus
  siRNA target sequence for 5330408N05Rik (NM_177244.2,1065-1083).
gctacgaagcatctcttta

SEQ ID NO: 794348 - DNA, 19 bp, Mus musculus
  siRNA target sequence for 5330408N05Rik (NM_177244.2,1143-1161).
gcagaagtgtacaaacgaa

SEQ ID NO: 794349 - DNA, 19 bp, Mus musculus
  siRNA target sequence for 5330408N05Rik (NM_177244.2,1149-1167).
gtgtacaaacgaagaacaa

SEQ ID NO: 794350 - DNA, 19 bp, Mus musculus
  siRNA target sequence for 5330408N05Rik (NM_177244.2,1151-1169).
gtacaaacgaagaacaagt

SEQ ID NO: 794351 - DNA, 19 bp, Mus musculus
  siRNA target sequence for 5330408N05Rik (NM_177244.2,1154-1172).
caaacgaagaacaagtgtt

SEQ ID NO: 794352 - DNA, 19 bp, Mus musculus
  siRNA target sequence for 5330408N05Rik (NM_177244.2,1174-1192).
gaccttattgagacgaata

SEQ ID NO: 794353 - DNA, 19 bp, Mus musculus
  siRNA target sequence for 5330408N05Rik (NM_177244.2,1220-1238).
gctgtgcgtttaatgtact

SEQ ID NO: 794354 - DNA, 19 bp, Mus musculus
  siRNA target sequence for 5330408N05Rik (NM_177244.2,1255-1273).
cagaagaccgtcttggaaa

SEQ ID NO: 794355 - DNA, 19 bp, Mus musculus
  siRNA target sequence for 5330408N05Rik (NM_177244.2,1262-1280).
ccgtcttggaaaaaaacgt

SEQ ID NO: 794356 - DNA, 19 bp, Mus musculus
  siRNA target sequence for 5330408N05Rik (NM_177244.2,1431-1449).
ggttacagaagcatggaaa

SEQ ID NO: 794357 - DNA, 19 bp, Mus musculus
  siRNA target sequence for 5330408N05Rik (NM_177244.2,1495-1513).
ctattctgtgggagattat

SEQ ID NO: 794358 - DNA, 19 bp, Mus musculus
  siRNA target sequence for 5330408N05Rik (NM_177244.2,1500-1518).
ctgtgggagattatcaaga

SEQ ID NO: 794359 - DNA, 19 bp, Mus musculus
  siRNA target sequence for B230220B15Rik (NM_177246.2,266-284).
gcgaacctccggaaacagt

SEQ ID NO: 794360 - DNA, 19 bp, Mus musculus
  siRNA target sequence for B230220B15Rik (NM_177246.2,287-305).
ggttcctcgaggaatacct

SEQ ID NO: 794361 - DNA, 19 bp, Mus musculus
  siRNA target sequence for B230220B15Rik (NM_177246.2,295-313).
gaggaatacctgatgtgtt

SEQ ID NO: 794362 - DNA, 19 bp, Mus musculus
  siRNA target sequence for B230220B15Rik (NM_177246.2,331-349).
gagccacgaggatatcttt

SEQ ID NO: 794363 - DNA, 19 bp, Mus musculus
  siRNA target sequence for B230220B15Rik (NM_177246.2,333-351).
gccacgaggatatctttgt

SEQ ID NO: 794364 - DNA, 19 bp, Mus musculus
  siRNA target sequence for A630005I04Rik (NM_177248.2,1106-1124).
ggtccttgcatttcatcaa

SEQ ID NO: 794365 - DNA, 19 bp, Mus musculus
  siRNA target sequence for A630005I04Rik (NM_177248.2,1163-1181).
cttccttagggaggaaata

SEQ ID NO: 794366 - DNA, 19 bp, Mus musculus
  siRNA target sequence for A630020C16Rik (NM_177249.2,532-550).
gaactttctgcatttgaca

SEQ ID NO: 794367 - DNA, 19 bp, Mus musculus
  siRNA target sequence for A630020C16Rik (NM_177249.2,561-579).
gtgaaccgcctcagatgtt

SEQ ID NO: 794368 - DNA, 19 bp, Mus musculus
  siRNA target sequence for A630020C16Rik (NM_177249.2,563-581).
gaaccgcctcagatgttgt

SEQ ID NO: 794369 - DNA, 19 bp, Mus musculus
  siRNA target sequence for A630020C16Rik (NM_177249.2,653-671).
gtggcctctaccaatgatt

SEQ ID NO: 794370 - DNA, 19 bp, Mus musculus
  siRNA target sequence for A630020C16Rik (NM_177249.2,680-698).
cagaactactcctattcat

SEQ ID NO: 794371 - DNA, 19 bp, Mus musculus
  siRNA target sequence for A630020C16Rik (NM_177249.2,682-700).
gaactactcctattcatca

SEQ ID NO: 794372 - DNA, 19 bp, Mus musculus
  siRNA target sequence for A630020C16Rik (NM_177249.2,709-727).
caagtcagaaactggttat

SEQ ID NO: 794373 - DNA, 19 bp, Mus musculus
  siRNA target sequence for A630020C16Rik (NM_177249.2,720-738).
ctggttatgtgggattagt

SEQ ID NO: 794374 - DNA, 19 bp, Mus musculus
  siRNA target sequence for A630020C16Rik (NM_177249.2,722-740).
ggttatgtgggattagtaa

SEQ ID NO: 794375 - DNA, 19 bp, Mus musculus
  siRNA target sequence for A630020C16Rik (NM_177249.2,723-741).
gttatgtgggattagtaaa

SEQ ID NO: 794376 - DNA, 19 bp, Mus musculus
  siRNA target sequence for A630020C16Rik (NM_177249.2,746-764).
gcgatgacgtgctatttga

SEQ ID NO: 794377 - DNA, 19 bp, Mus musculus
  siRNA target sequence for A630020C16Rik (NM_177249.2,747-765).
cgatgacgtgctatttgaa

SEQ ID NO: 794378 - DNA, 19 bp, Mus musculus
  siRNA target sequence for A630020C16Rik (NM_177249.2,748-766).
gatgacgtgctatttgaat

SEQ ID NO: 794379 - DNA, 19 bp, Mus musculus
  siRNA target sequence for A630020C16Rik (NM_177249.2,797-815).
gaatttaggaatgcattat

SEQ ID NO: 794380 - DNA, 19 bp, Mus musculus
  siRNA target sequence for A630020C16Rik (NM_177249.2,901-919).
cagcaaaaagagagcaatt

SEQ ID NO: 794381 - DNA, 19 bp, Mus musculus
  siRNA target sequence for A630020C16Rik (NM_177249.2,969-987).
ggcaacagcatgatgtaca

SEQ ID NO: 794382 - DNA, 19 bp, Mus musculus
  siRNA target sequence for A630020C16Rik (NM_177249.2,994-1012).
gtgccgtgttatgtttgat

SEQ ID NO: 794383 - DNA, 19 bp, Mus musculus
  siRNA target sequence for A630020C16Rik (NM_177249.2,1098-1116).
gtctggaatgcggttatga

SEQ ID NO: 794384 - DNA, 19 bp, Mus musculus
  siRNA target sequence for A630020C16Rik (NM_177249.2,1123-1141).
gagaattgacacgtatctt

SEQ ID NO: 794385 - DNA, 19 bp, Mus musculus
  siRNA target sequence for A630020C16Rik (NM_177249.2,1125-1143).
gaattgacacgtatcttga

SEQ ID NO: 794386 - DNA, 19 bp, Mus musculus
  siRNA target sequence for A630020C16Rik (NM_177249.2,1132-1150).
cacgtatcttgatattcca

SEQ ID NO: 794387 - DNA, 19 bp, Mus musculus
  siRNA target sequence for A630020C16Rik (NM_177249.2,1203-1221).
cgttgcatgcatttattca

SEQ ID NO: 794388 - DNA, 19 bp, Mus musculus
  siRNA target sequence for A630020C16Rik (NM_177249.2,1204-1222).
gttgcatgcatttattcaa

SEQ ID NO: 794389 - DNA, 19 bp, Mus musculus
  siRNA target sequence for A630020C16Rik (NM_177249.2,1231-1249).
cttggatggcccaaatcaa

SEQ ID NO: 794390 - DNA, 19 bp, Mus musculus
  siRNA target sequence for A630020C16Rik (NM_177249.2,1235-1253).
gatggcccaaatcaatatt

SEQ ID NO: 794391 - DNA, 19 bp, Mus musculus
  siRNA target sequence for A630020C16Rik (NM_177249.2,1259-1277).
gaacgttgtaagaagaagt

SEQ ID NO: 794392 - DNA, 19 bp, Mus musculus
  siRNA target sequence for A530050P17Rik (NM_177250.2,224-242).
gatgcagcgcccaacttga

SEQ ID NO: 794393 - DNA, 19 bp, Mus musculus
  siRNA target sequence for A530050P17Rik (NM_177250.2,311-329).
catggtccccactcctttt

SEQ ID NO: 794394 - DNA, 19 bp, Mus musculus
  siRNA target sequence for A530050P17Rik (NM_177250.2,585-603).
ccatggcctacaaagtcta

SEQ ID NO: 794395 - DNA, 19 bp, Mus musculus
  siRNA target sequence for A530050P17Rik (NM_177250.2,621-639).
gggcaatcgactgagaatt

SEQ ID NO: 794396 - DNA, 19 bp, Mus musculus
  siRNA target sequence for A530050P17Rik (NM_177250.2,623-641).
gcaatcgactgagaattgt

SEQ ID NO: 794397 - DNA, 19 bp, Mus musculus
  siRNA target sequence for A530050P17Rik (NM_177250.2,642-660).
gggtcctgggatattctca

SEQ ID NO: 794398 - DNA, 19 bp, Mus musculus
  siRNA target sequence for A530050P17Rik (NM_177250.2,685-703).
gacctccgcctcaatcaga

SEQ ID NO: 794399 - DNA, 19 bp, Mus musculus
  siRNA target sequence for A530050P17Rik (NM_177250.2,687-705).
cctccgcctcaatcagatt

SEQ ID NO: 794400 - DNA, 19 bp, Mus musculus
  siRNA target sequence for A530050P17Rik (NM_177250.2,702-720).
gattgtcctctttctagat

SEQ ID NO: 794401 - DNA, 19 bp, Mus musculus
  siRNA target sequence for A530050P17Rik (NM_177250.2,805-823).
gggctggccaagttaagta

SEQ ID NO: 794402 - DNA, 19 bp, Mus musculus
  siRNA target sequence for A530050P17Rik (NM_177250.2,876-894).
ccagctcccagcactagta

SEQ ID NO: 794403 - DNA, 19 bp, Mus musculus
  siRNA target sequence for A530050P17Rik (NM_177250.2,903-921).
gcttcgagaactggatatt

SEQ ID NO: 794404 - DNA, 19 bp, Mus musculus
  siRNA target sequence for A530050P17Rik (NM_177250.2,947-965).
gagggctagggcagctaaa

SEQ ID NO: 794405 - DNA, 19 bp, Mus musculus
  siRNA target sequence for A530050P17Rik (NM_177250.2,950-968).
ggctagggcagctaaagga

SEQ ID NO: 794406 - DNA, 19 bp, Mus musculus
  siRNA target sequence for A530050P17Rik (NM_177250.2,1105-1123).
ctccggatcttggatctat

SEQ ID NO: 794407 - DNA, 19 bp, Mus musculus
  siRNA target sequence for A530050P17Rik (NM_177250.2,1107-1125).
ccggatcttggatctatct

SEQ ID NO: 794408 - DNA, 19 bp, Mus musculus
  siRNA target sequence for A530050P17Rik (NM_177250.2,1117-1135).
gatctatctcagaatccta

SEQ ID NO: 794409 - DNA, 19 bp, Mus musculus
  siRNA target sequence for A530050P17Rik (NM_177250.2,1257-1275).
gctggatgtagcagacaat

SEQ ID NO: 794410 - DNA, 19 bp, Mus musculus
  siRNA target sequence for A530050P17Rik (NM_177250.2,1457-1475).
gcctaagggagttttcaga

SEQ ID NO: 794411 - DNA, 19 bp, Mus musculus
  siRNA target sequence for A530050P17Rik (NM_177250.2,1963-1981).
gtcaagcaccacatgactt

SEQ ID NO: 794412 - DNA, 19 bp, Mus musculus
  siRNA target sequence for A530050P17Rik (NM_177250.2,2032-2050).
cgggtcactgccaagttat

SEQ ID NO: 794413 - DNA, 19 bp, Mus musculus
  siRNA target sequence for A530050P17Rik (NM_177250.2,2033-2051).
gggtcactgccaagttatt

SEQ ID NO: 794414 - DNA, 19 bp, Mus musculus
  siRNA target sequence for D830014E11Rik (NM_177251.2,377-395).
cctatcaggttcagtttct

SEQ ID NO: 794415 - DNA, 19 bp, Mus musculus
  siRNA target sequence for D830014E11Rik (NM_177251.2,429-447).
ctccgcacacccacatgtt

SEQ ID NO: 794416 - DNA, 19 bp, Mus musculus
  siRNA target sequence for D830014E11Rik (NM_177251.2,449-467).
gcactgacgtccatagctt

SEQ ID NO: 794417 - DNA, 19 bp, Mus musculus
  siRNA target sequence for D830014E11Rik (NM_177251.2,473-491).
gttagcgtgttctcatgta

SEQ ID NO: 794418 - DNA, 19 bp, Mus musculus
  siRNA target sequence for D830014E11Rik (NM_177251.2,497-515).
cctggggttcggatgactt

SEQ ID NO: 794419 - DNA, 19 bp, Mus musculus
  siRNA target sequence for D830014E11Rik (NM_177251.2,500-518).
ggggttcggatgacttttt

SEQ ID NO: 794420 - DNA, 19 bp, Mus musculus
  siRNA target sequence for D830014E11Rik (NM_177251.2,501-519).
gggttcggatgactttttt

SEQ ID NO: 794421 - DNA, 19 bp, Mus musculus
  siRNA target sequence for D830014E11Rik (NM_177251.2,534-552).
caacacatgttcatagtta

SEQ ID NO: 794422 - DNA, 19 bp, Mus musculus
  siRNA target sequence for D830014E11Rik (NM_177251.2,570-588).
gcagaagtgcacgtcattt

SEQ ID NO: 794423 - DNA, 19 bp, Mus musculus
  siRNA target sequence for D830014E11Rik (NM_177251.2,573-591).
gaagtgcacgtcatttgaa

SEQ ID NO: 794424 - DNA, 19 bp, Mus musculus
  siRNA target sequence for D830014E11Rik (NM_177251.2,578-596).
gcacgtcatttgaaaacat

SEQ ID NO: 794425 - DNA, 19 bp, Mus musculus
  siRNA target sequence for A630052C17Rik (NM_177255.2,87-105).
cctaccccaccgttccaat

SEQ ID NO: 794426 - DNA, 19 bp, Mus musculus
  siRNA target sequence for A630052C17Rik (NM_177255.2,88-106).
ctaccccaccgttccaata

SEQ ID NO: 794427 - DNA, 19 bp, Mus musculus
  siRNA target sequence for A630052C17Rik (NM_177255.2,206-224).
cccaacgcacagtaccttt

SEQ ID NO: 794428 - DNA, 19 bp, Mus musculus
  siRNA target sequence for A630052C17Rik (NM_177255.2,207-225).
ccaacgcacagtaccttta

SEQ ID NO: 794429 - DNA, 19 bp, Mus musculus
  siRNA target sequence for 4930414C22Rik (NM_177256.2,579-597).
gattgcactttcagtagat

SEQ ID NO: 794430 - DNA, 19 bp, Mus musculus
  siRNA target sequence for 4930414C22Rik (NM_177256.2,584-602).
cactttcagtagatagtgt

SEQ ID NO: 794431 - DNA, 19 bp, Mus musculus
  siRNA target sequence for 4930414C22Rik (NM_177256.2,646-664).
ggtgcaacacccaaagaaa

SEQ ID NO: 794432 - DNA, 19 bp, Mus musculus
  siRNA target sequence for C630028C02Rik (NM_177259.2,149-167).
gggaatctgcagtacaaca

SEQ ID NO: 794433 - DNA, 19 bp, Mus musculus
  siRNA target sequence for C630028C02Rik (NM_177259.2,178-196).
ggctctcacctcacttcat

SEQ ID NO: 794434 - DNA, 19 bp, Mus musculus
  siRNA target sequence for C630028C02Rik (NM_177259.2,319-337).
caacccacaaaagtactta

SEQ ID NO: 794435 - DNA, 19 bp, Mus musculus
  siRNA target sequence for C630028C02Rik (NM_177259.2,323-341).
ccacaaaagtacttaaaaa

SEQ ID NO: 794436 - DNA, 19 bp, Mus musculus
  siRNA target sequence for C630028C02Rik (NM_177259.2,324-342).
cacaaaagtacttaaaaaa

SEQ ID NO: 794437 - DNA, 19 bp, Mus musculus
  siRNA target sequence for C630028C02Rik (NM_177259.2,383-401).
caagccaacgcttaaccaa

SEQ ID NO: 794438 - DNA, 19 bp, Mus musculus
  siRNA target sequence for C630028C02Rik (NM_177259.2,388-406).
caacgcttaaccaacaaat

SEQ ID NO: 794439 - DNA, 19 bp, Mus musculus
  siRNA target sequence for C630028C02Rik (NM_177259.2,392-410).
gcttaaccaacaaatacct

SEQ ID NO: 794440 - DNA, 19 bp, Mus musculus
  siRNA target sequence for 9930117H01Rik (NM_177260.2,528-546).
gaggtgaaaccctgaaagt

SEQ ID NO: 794441 - DNA, 19 bp, Mus musculus
  siRNA target sequence for 9930117H01Rik (NM_177260.2,541-559).
gaaagtccctatttttgaa

SEQ ID NO: 794442 - DNA, 19 bp, Mus musculus
  siRNA target sequence for 9930117H01Rik (NM_177260.2,573-591).
ctgttatggaaatagagat

SEQ ID NO: 794443 - DNA, 19 bp, Mus musculus
  siRNA target sequence for 9930117H01Rik (NM_177260.2,631-649).
cgccgactatgagtgttta

SEQ ID NO: 794444 - DNA, 19 bp, Mus musculus
  siRNA target sequence for 9930117H01Rik (NM_177260.2,634-652).
cgactatgagtgtttacct

SEQ ID NO: 794445 - DNA, 19 bp, Mus musculus
  siRNA target sequence for 9930117H01Rik (NM_177260.2,635-653).
gactatgagtgtttaccta

SEQ ID NO: 794446 - DNA, 19 bp, Mus musculus
  siRNA target sequence for 9930117H01Rik (NM_177260.2,679-697).
ccccagcccaagtgacaat

SEQ ID NO: 794447 - DNA, 19 bp, Mus musculus
  siRNA target sequence for Tix1 (NM_177263.3,657-675).
gcaccggagcactttggat

SEQ ID NO: 794448 - DNA, 19 bp, Mus musculus
  siRNA target sequence for Tix1 (NM_177263.3,717-735).
ggatgtgacccactttata

SEQ ID NO: 794449 - DNA, 19 bp, Mus musculus
  siRNA target sequence for Tix1 (NM_177263.3,725-743).
cccactttataggacatat

SEQ ID NO: 794450 - DNA, 19 bp, Mus musculus
  siRNA target sequence for Tix1 (NM_177263.3,772-790).
gacccaacttttgtatgta

SEQ ID NO: 794451 - DNA, 19 bp, Mus musculus
  siRNA target sequence for Tix1 (NM_177263.3,774-792).
cccaacttttgtatgtaca

SEQ ID NO: 794452 - DNA, 19 bp, Mus musculus
  siRNA target sequence for Tix1 (NM_177263.3,946-964).
ctagcaggtgagtctacta

SEQ ID NO: 794453 - DNA, 19 bp, Mus musculus
  siRNA target sequence for Tix1 (NM_177263.3,962-980).
ctacggaagggactgaaat

SEQ ID NO: 794454 - DNA, 19 bp, Mus musculus
  siRNA target sequence for Tix1 (NM_177263.3,965-983).
cggaagggactgaaatcat

SEQ ID NO: 794455 - DNA, 19 bp, Mus musculus
  siRNA target sequence for Tix1 (NM_177263.3,989-1007).
ccaagactccaatcatgaa

SEQ ID NO: 794456 - DNA, 19 bp, Mus musculus
  siRNA target sequence for Tix1 (NM_177263.3,993-1011).
gactccaatcatgaagata

SEQ ID NO: 794457 - DNA, 19 bp, Mus musculus
  siRNA target sequence for Tix1 (NM_177263.3,995-1013).
ctccaatcatgaagataat

SEQ ID NO: 794458 - DNA, 19 bp, Mus musculus
  siRNA target sequence for Tix1 (NM_177263.3,1123-1141).
gagggggaccacactttca

SEQ ID NO: 794459 - DNA, 19 bp, Mus musculus
  siRNA target sequence for Tix1 (NM_177263.3,1126-1144).
ggggaccacactttcatca

SEQ ID NO: 794460 - DNA, 19 bp, Mus musculus
  siRNA target sequence for Tix1 (NM_177263.3,1128-1146).
ggaccacactttcatcaat

SEQ ID NO: 794461 - DNA, 19 bp, Mus musculus
  siRNA target sequence for Tix1 (NM_177263.3,1355-1373).
gcagcatcccaacatataa

SEQ ID NO: 794462 - DNA, 19 bp, Mus musculus
  siRNA target sequence for Tix1 (NM_177263.3,1359-1377).
catcccaacatataatgca

SEQ ID NO: 794463 - DNA, 19 bp, Mus musculus
  siRNA target sequence for Tix1 (NM_177263.3,1438-1456).
gctgagctctgctatttga

SEQ ID NO: 794464 - DNA, 19 bp, Mus musculus
  siRNA target sequence for Tix1 (NM_177263.3,1455-1473).
gactgtggtgaccaagtat

SEQ ID NO: 794465 - DNA, 19 bp, Mus musculus
  siRNA target sequence for Tix1 (NM_177263.3,1599-1617).
gcccacaatcacagttcta

SEQ ID NO: 794466 - DNA, 19 bp, Mus musculus
  siRNA target sequence for Tix1 (NM_177263.3,1600-1618).
cccacaatcacagttctaa

SEQ ID NO: 794467 - DNA, 19 bp, Mus musculus
  siRNA target sequence for Tix1 (NM_177263.3,1737-1755).
gatggccaatgggttacaa

SEQ ID NO: 794468 - DNA, 19 bp, Mus musculus
  siRNA target sequence for Tix1 (NM_177263.3,1885-1903).
gcatgccccagcataactt

SEQ ID NO: 794469 - DNA, 19 bp, Mus musculus
  siRNA target sequence for Tix1 (NM_177263.3,1895-1913).
gcataacttcccaagcttt

SEQ ID NO: 794470 - DNA, 19 bp, Mus musculus
  siRNA target sequence for Tix1 (NM_177263.3,2127-2145).
gcatggctctgttctcatt

SEQ ID NO: 794471 - DNA, 19 bp, Mus musculus
  siRNA target sequence for Tix1 (NM_177263.3,2236-2254).
gccaccaaacgacaatctt

SEQ ID NO: 794472 - DNA, 19 bp, Mus musculus
  siRNA target sequence for Tix1 (NM_177263.3,2269-2287).
gacttcacaccaaccaaat

SEQ ID NO: 794473 - DNA, 19 bp, Mus musculus
  siRNA target sequence for Tix1 (NM_177263.3,2274-2292).
cacaccaaccaaatacaaa

SEQ ID NO: 794474 - DNA, 19 bp, Mus musculus
  siRNA target sequence for Tix1 (NM_177263.3,2367-2385).
ggaccgcctaagaagtgaa

SEQ ID NO: 794475 - DNA, 19 bp, Mus musculus
  siRNA target sequence for Tix1 (NM_177263.3,2368-2386).
gaccgcctaagaagtgaaa

SEQ ID NO: 794476 - DNA, 19 bp, Mus musculus
  siRNA target sequence for Tix1 (NM_177263.3,2372-2390).
gcctaagaagtgaaacgaa

SEQ ID NO: 794477 - DNA, 19 bp, Mus musculus
  siRNA target sequence for Tix1 (NM_177263.3,2394-2412).
gactcgaagggaaattgat

SEQ ID NO: 794478 - DNA, 19 bp, Mus musculus
  siRNA target sequence for Tix1 (NM_177263.3,2430-2448).
gcggaaaaaggtgaatact

SEQ ID NO: 794479 - DNA, 19 bp, Mus musculus
  siRNA target sequence for Tix1 (NM_177263.3,2652-2670).
cagtggcaagagtgagttt

SEQ ID NO: 794480 - DNA, 19 bp, Mus musculus
  siRNA target sequence for Tix1 (NM_177263.3,2729-2747).
caccaagcaaagtaagcta

SEQ ID NO: 794481 - DNA, 19 bp, Mus musculus
  siRNA target sequence for Tix1 (NM_177263.3,2735-2753).
gcaaagtaagctacaaaaa

SEQ ID NO: 794482 - DNA, 19 bp, Mus musculus
  siRNA target sequence for Tix1 (NM_177263.3,2756-2774).
ccgcacagcagcgtcattt

SEQ ID NO: 794483 - DNA, 19 bp, Mus musculus
  siRNA target sequence for Tix1 (NM_177263.3,2885-2903).
gcaggtatgcccttaagaa

SEQ ID NO: 794484 - DNA, 19 bp, Mus musculus
  siRNA target sequence for Tix1 (NM_177263.3,2886-2904).
caggtatgcccttaagaat

SEQ ID NO: 794485 - DNA, 19 bp, Mus musculus
  siRNA target sequence for Tix1 (NM_177263.3,2913-2931).
caagtggtacgaagactat

SEQ ID NO: 794486 - DNA, 19 bp, Mus musculus
  siRNA target sequence for Tix1 (NM_177263.3,2983-3001).
gagctgctgcaagattatt

SEQ ID NO: 794487 - DNA, 19 bp, Mus musculus
  siRNA target sequence for Tix1 (NM_177263.3,2989-3007).
ctgcaagattattacatga

SEQ ID NO: 794488 - DNA, 19 bp, Mus musculus
  siRNA target sequence for Tix1 (NM_177263.3,3034-3052).
ctgcagaccctctgtgata

SEQ ID NO: 794489 - DNA, 19 bp, Mus musculus
  siRNA target sequence for Tix1 (NM_177263.3,3037-3055).
cagaccctctgtgataaga

SEQ ID NO: 794490 - DNA, 19 bp, Mus musculus
  siRNA target sequence for Tix1 (NM_177263.3,3118-3136).
gctgtggcagatataagca

SEQ ID NO: 794491 - DNA, 19 bp, Mus musculus
  siRNA target sequence for Tix1 (NM_177263.3,3141-3159).
ggatcagggccctagaaat

SEQ ID NO: 794492 - DNA, 19 bp, Mus musculus
  siRNA target sequence for 9230112E08Rik (NM_177264.2,110-128).
ctcagagattacaacttta

SEQ ID NO: 794493 - DNA, 19 bp, Mus musculus
  siRNA target sequence for 9230112E08Rik (NM_177264.2,132-150).
gactgtgggaggatctata

SEQ ID NO: 794494 - DNA, 19 bp, Mus musculus
  siRNA target sequence for 9230112E08Rik (NM_177264.2,179-197).
ggtttggaggccatgtgta

SEQ ID NO: 794495 - DNA, 19 bp, Mus musculus
  siRNA target sequence for 9230112E08Rik (NM_177264.2,187-205).
ggccatgtgtaattgaaga

SEQ ID NO: 794496 - DNA, 19 bp, Mus musculus
  siRNA target sequence for 9230112E08Rik (NM_177264.2,313-331).
caccttgccgagagttaca

SEQ ID NO: 794497 - DNA, 19 bp, Mus musculus
  siRNA target sequence for 9230112E08Rik (NM_177264.2,443-461).
gggcctgctcctagttcta

SEQ ID NO: 794498 - DNA, 19 bp, Mus musculus
  siRNA target sequence for 9230112E08Rik (NM_177264.2,445-463).
gcctgctcctagttctagt

SEQ ID NO: 794499 - DNA, 19 bp, Mus musculus
  siRNA target sequence for 6330512M04Rik (NM_177265.2,324-342).
gtttcctatggagtctaaa

SEQ ID NO: 794500 - DNA, 19 bp, Mus musculus
  siRNA target sequence for 6330512M04Rik (NM_177265.2,458-476).
cggaggtgaacgactacta

SEQ ID NO: 794501 - DNA, 19 bp, Mus musculus
  siRNA target sequence for 6330512M04Rik (NM_177265.2,499-517).
gtctacctcaacttctgtt

SEQ ID NO: 794502 - DNA, 19 bp, Mus musculus
  siRNA target sequence for 6330512M04Rik (NM_177265.2,663-681).
catctgctatgtaagagat

SEQ ID NO: 794503 - DNA, 19 bp, Mus musculus
  siRNA target sequence for 6330512M04Rik (NM_177265.2,696-714).
ggtggggcacacatacaat

SEQ ID NO: 794504 - DNA, 19 bp, Mus musculus
  siRNA target sequence for Wdr22 (NM_177267.3,260-278).
gctgcagaaacctctacaa

SEQ ID NO: 794505 - DNA, 19 bp, Mus musculus
  siRNA target sequence for Wdr22 (NM_177267.3,294-312).
ccacttcggctgtgtcaat

SEQ ID NO: 794506 - DNA, 19 bp, Mus musculus
  siRNA target sequence for Wdr22 (NM_177267.3,303-321).
ctgtgtcaatgccattgaa

SEQ ID NO: 794507 - DNA, 19 bp, Mus musculus
  siRNA target sequence for Wdr22 (NM_177267.3,387-405).
catggaacaagctatccat

SEQ ID NO: 794508 - DNA, 19 bp, Mus musculus
  siRNA target sequence for Wdr22 (NM_177267.3,471-489).
cagtgggaacaccaaagta

SEQ ID NO: 794509 - DNA, 19 bp, Mus musculus
  siRNA target sequence for Wdr22 (NM_177267.3,475-493).
gggaacaccaaagtattct

SEQ ID NO: 794510 - DNA, 19 bp, Mus musculus
  siRNA target sequence for Wdr22 (NM_177267.3,499-517).
ggaaatgatgagcaagtta

SEQ ID NO: 794511 - DNA, 19 bp, Mus musculus
  siRNA target sequence for Wdr22 (NM_177267.3,587-605).
cagtgagccccgtgaatga

SEQ ID NO: 794512 - DNA, 19 bp, Mus musculus
  siRNA target sequence for Wdr22 (NM_177267.3,594-612).
ccccgtgaatgacaacatt

SEQ ID NO: 794513 - DNA, 19 bp, Mus musculus
  siRNA target sequence for Wdr22 (NM_177267.3,708-726).
ctttcacagcgtcatgttt

SEQ ID NO: 794514 - DNA, 19 bp, Mus musculus
  siRNA target sequence for Wdr22 (NM_177267.3,778-796).
ggactctgggacattagaa

SEQ ID NO: 794515 - DNA, 19 bp, Mus musculus
  siRNA target sequence for Wdr22 (NM_177267.3,779-797).
gactctgggacattagaaa

SEQ ID NO: 794516 - DNA, 19 bp, Mus musculus
  siRNA target sequence for Wdr22 (NM_177267.3,848-866).
ccatgagtgtgcgattcaa

SEQ ID NO: 794517 - DNA, 19 bp, Mus musculus
  siRNA target sequence for Wdr22 (NM_177267.3,1007-1025).
gggatcgtgaccagtacat

SEQ ID NO: 794518 - DNA, 19 bp, Mus musculus
  siRNA target sequence for Wdr22 (NM_177267.3,1012-1030).
cgtgaccagtacatccttt

SEQ ID NO: 794519 - DNA, 19 bp, Mus musculus
  siRNA target sequence for Wdr22 (NM_177267.3,1034-1052).
gctccgatgacttcaactt

SEQ ID NO: 794520 - DNA, 19 bp, Mus musculus
  siRNA target sequence for Wdr22 (NM_177267.3,1037-1055).
ccgatgacttcaacttgta

SEQ ID NO: 794521 - DNA, 19 bp, Mus musculus
  siRNA target sequence for Wdr22 (NM_177267.3,1039-1057).
gatgacttcaacttgtaca

SEQ ID NO: 794522 - DNA, 19 bp, Mus musculus
  siRNA target sequence for Wdr22 (NM_177267.3,1042-1060).
gacttcaacttgtacatgt

SEQ ID NO: 794523 - DNA, 19 bp, Mus musculus
  siRNA target sequence for Wdr22 (NM_177267.3,1193-1211).
ctggcgtagaaaagattat

SEQ ID NO: 794524 - DNA, 19 bp, Mus musculus
  siRNA target sequence for Wdr22 (NM_177267.3,1254-1272).
cctggatggtcggattgaa

SEQ ID NO: 794525 - DNA, 19 bp, Mus musculus
  siRNA target sequence for Wdr22 (NM_177267.3,1403-1421).
ccttggtgcgtcgtgaaat

SEQ ID NO: 794526 - DNA, 19 bp, Mus musculus
  siRNA target sequence for Wdr22 (NM_177267.3,1404-1422).
cttggtgcgtcgtgaaatt

SEQ ID NO: 794527 - DNA, 19 bp, Mus musculus
  siRNA target sequence for Wdr22 (NM_177267.3,1509-1527).
cactgactcggaatcttca

SEQ ID NO: 794528 - DNA, 19 bp, Mus musculus
  siRNA target sequence for Wdr22 (NM_177267.3,1599-1617).
gcgcgtcactaccacaaat

SEQ ID NO: 794529 - DNA, 19 bp, Mus musculus
  siRNA target sequence for Wdr22 (NM_177267.3,1602-1620).
cgtcactaccacaaatgca

SEQ ID NO: 794530 - DNA, 19 bp, Mus musculus
  siRNA target sequence for Wdr22 (NM_177267.3,1724-1742).
ccaatgagtccgattctga

SEQ ID NO: 794531 - DNA, 19 bp, Mus musculus
  siRNA target sequence for Wdr22 (NM_177267.3,1731-1749).
gtccgattctgaagagaat

SEQ ID NO: 794532 - DNA, 19 bp, Mus musculus
  siRNA target sequence for Wdr22 (NM_177267.3,1734-1752).
cgattctgaagagaatgtt

SEQ ID NO: 794533 - DNA, 19 bp, Mus musculus
  siRNA target sequence for Wdr22 (NM_177267.3,2090-2108).
ccgccaacatggaatcagt

SEQ ID NO: 794534 - DNA, 19 bp, Mus musculus
  siRNA target sequence for Wdr22 (NM_177267.3,2107-2125).
gttgagcgtaagatttaca

SEQ ID NO: 794535 - DNA, 19 bp, Mus musculus
  siRNA target sequence for Wdr22 (NM_177267.3,2113-2131).
cgtaagatttacaaagctt

SEQ ID NO: 794536 - DNA, 19 bp, Mus musculus
  siRNA target sequence for Wdr22 (NM_177267.3,2114-2132).
gtaagatttacaaagctta

SEQ ID NO: 794537 - DNA, 19 bp, Mus musculus
  siRNA target sequence for Wdr22 (NM_177267.3,2138-2156).
ggctccgctgctcctatat

SEQ ID NO: 794538 - DNA, 19 bp, Mus musculus
  siRNA target sequence for Wdr22 (NM_177267.3,2142-2160).
ccgctgctcctatatctct

SEQ ID NO: 794539 - DNA, 19 bp, Mus musculus
  siRNA target sequence for Wdr22 (NM_177267.3,2157-2175).
ctcttactcgaataacaaa

SEQ ID NO: 794540 - DNA, 19 bp, Mus musculus
  siRNA target sequence for Wdr22 (NM_177267.3,2224-2242).
ggaaccagccacaaagaca

SEQ ID NO: 794541 - DNA, 19 bp, Mus musculus
  siRNA target sequence for Wdr22 (NM_177267.3,2423-2441).
cctctcaggacactaacaa

SEQ ID NO: 794542 - DNA, 19 bp, Mus musculus
  siRNA target sequence for Wdr22 (NM_177267.3,2447-2465).
gcccactagaacactcttt

SEQ ID NO: 794543 - DNA, 19 bp, Mus musculus
  siRNA target sequence for Wdr22 (NM_177267.3,2448-2466).
cccactagaacactctttt

SEQ ID NO: 794544 - DNA, 19 bp, Mus musculus
  siRNA target sequence for Wdr22 (NM_177267.3,2781-2799).
gacatttctacacaaagat

SEQ ID NO: 794545 - DNA, 19 bp, Mus musculus
  siRNA target sequence for Wdr22 (NM_177267.3,2877-2895).
cagcagcaaggttgttcat

SEQ ID NO: 794546 - DNA, 19 bp, Mus musculus
  siRNA target sequence for Wdr22 (NM_177267.3,2896-2914).
ggccaaagcggcctcaaaa

SEQ ID NO: 794547 - DNA, 19 bp, Mus musculus
  siRNA target sequence for Wdr22 (NM_177267.3,2910-2928).
caaaaggcaccgaattgaa

SEQ ID NO: 794548 - DNA, 19 bp, Mus musculus
  siRNA target sequence for Wdr22 (NM_177267.3,2915-2933).
ggcaccgaattgaattgga

SEQ ID NO: 794549 - DNA, 19 bp, Mus musculus
  siRNA target sequence for Wdr22 (NM_177267.3,2916-2934).
gcaccgaattgaattggaa

SEQ ID NO: 794550 - DNA, 19 bp, Mus musculus
  siRNA target sequence for D530031C13Rik (NM_177269.2,964-982).
ggacagatacagaatttga

SEQ ID NO: 794551 - DNA, 19 bp, Mus musculus
  siRNA target sequence for D530031C13Rik (NM_177269.2,1146-1164).
gatagaccatataacttga

SEQ ID NO: 794552 - DNA, 19 bp, Mus musculus
  siRNA target sequence for D530031C13Rik (NM_177269.2,1190-1208).
ccaagcaccgcctatagta

SEQ ID NO: 794553 - DNA, 19 bp, Mus musculus
  siRNA target sequence for D530031C13Rik (NM_177269.2,1206-1224).
gtaccggctcatcaaaaaa

SEQ ID NO: 794554 - DNA, 19 bp, Mus musculus
  siRNA target sequence for D530031C13Rik (NM_177269.2,1209-1227).
ccggctcatcaaaaaaaga

SEQ ID NO: 794555 - DNA, 19 bp, Mus musculus
  siRNA target sequence for D530031C13Rik (NM_177269.2,1326-1344).
gatgaggaacgctttgaaa

SEQ ID NO: 794556 - DNA, 19 bp, Mus musculus
  siRNA target sequence for D530031C13Rik (NM_177269.2,1335-1353).
cgctttgaaagaaggaaat

SEQ ID NO: 794557 - DNA, 19 bp, Mus musculus
  siRNA target sequence for D530031C13Rik (NM_177269.2,1381-1399).
gatgtttgccgatgaactt

SEQ ID NO: 794558 - DNA, 19 bp, Mus musculus
  siRNA target sequence for D530031C13Rik (NM_177269.2,1400-1418).
cagagcagaagatttagct

SEQ ID NO: 794559 - DNA, 19 bp, Mus musculus
  siRNA target sequence for D530031C13Rik (NM_177269.2,1470-1488).
gatcccatgaacattgata

SEQ ID NO: 794560 - DNA, 19 bp, Mus musculus
  siRNA target sequence for D530031C13Rik (NM_177269.2,1478-1496).
gaacattgataaatcagta

SEQ ID NO: 794561 - DNA, 19 bp, Mus musculus
  siRNA target sequence for D530031C13Rik (NM_177269.2,1481-1499).
cattgataaatcagtaagt

SEQ ID NO: 794562 - DNA, 19 bp, Mus musculus
  siRNA target sequence for D530031C13Rik (NM_177269.2,1485-1503).
gataaatcagtaagttcta

SEQ ID NO: 794563 - DNA, 19 bp, Mus musculus
  siRNA target sequence for E130306M17Rik (NM_177271.2,682-700).
gagcaaacccccatactca

SEQ ID NO: 794564 - DNA, 19 bp, Mus musculus
  siRNA target sequence for Negr1 (NM_177274.2,385-403).
gcggtgctcaggtgttact

SEQ ID NO: 794565 - DNA, 19 bp, Mus musculus
  siRNA target sequence for Negr1 (NM_177274.2,386-404).
cggtgctcaggtgttactt

SEQ ID NO: 794566 - DNA, 19 bp, Mus musculus
  siRNA target sequence for Negr1 (NM_177274.2,433-451).
ctcaacaggtcaagtatca

SEQ ID NO: 794567 - DNA, 19 bp, Mus musculus
  siRNA target sequence for Negr1 (NM_177274.2,435-453).
caacaggtcaagtatcatt

SEQ ID NO: 794568 - DNA, 19 bp, Mus musculus
  siRNA target sequence for Negr1 (NM_177274.2,438-456).
caggtcaagtatcattttt

SEQ ID NO: 794569 - DNA, 19 bp, Mus musculus
  siRNA target sequence for Negr1 (NM_177274.2,524-542).
gcctccagatacagaatgt

SEQ ID NO: 794570 - DNA, 19 bp, Mus musculus
  siRNA target sequence for Negr1 (NM_177274.2,525-543).
cctccagatacagaatgtt

SEQ ID NO: 794571 - DNA, 19 bp, Mus musculus
  siRNA target sequence for Negr1 (NM_177274.2,528-546).
ccagatacagaatgttgat

SEQ ID NO: 794572 - DNA, 19 bp, Mus musculus
  siRNA target sequence for Negr1 (NM_177274.2,624-642).
gcaagtcccaccgaaaata

SEQ ID NO: 794573 - DNA, 19 bp, Mus musculus
  siRNA target sequence for Negr1 (NM_177274.2,625-643).
caagtcccaccgaaaatat

SEQ ID NO: 794574 - DNA, 19 bp, Mus musculus
  siRNA target sequence for Negr1 (NM_177274.2,746-764).
ccccatcagcaaaaccatt

SEQ ID NO: 794575 - DNA, 19 bp, Mus musculus
  siRNA target sequence for Negr1 (NM_177274.2,808-826).
caggctggggagtatgaat

SEQ ID NO: 794576 - DNA, 19 bp, Mus musculus
  siRNA target sequence for Negr1 (NM_177274.2,848-866).
cgttcccagacgtgaagaa

SEQ ID NO: 794577 - DNA, 19 bp, Mus musculus
  siRNA target sequence for Negr1 (NM_177274.2,870-888).
gagagtgatcgtgaacttt

SEQ ID NO: 794578 - DNA, 19 bp, Mus musculus
  siRNA target sequence for Negr1 (NM_177274.2,882-900).
gaactttgcgcctacaatt

SEQ ID NO: 794579 - DNA, 19 bp, Mus musculus
  siRNA target sequence for Negr1 (NM_177274.2,890-908).
cgcctacaattcaggaaat

SEQ ID NO: 794580 - DNA, 19 bp, Mus musculus
  siRNA target sequence for Negr1 (NM_177274.2,892-910).
cctacaattcaggaaatta

SEQ ID NO: 794581 - DNA, 19 bp, Mus musculus
  siRNA target sequence for Negr1 (NM_177274.2,893-911).
ctacaattcaggaaattaa

SEQ ID NO: 794582 - DNA, 19 bp, Mus musculus
  siRNA target sequence for Negr1 (NM_177274.2,934-952).
cgcagtggactgatacgat

SEQ ID NO: 794583 - DNA, 19 bp, Mus musculus
  siRNA target sequence for Negr1 (NM_177274.2,1018-1036).
ggccaacaaggaattatca

SEQ ID NO: 794584 - DNA, 19 bp, Mus musculus
  siRNA target sequence for Negr1 (NM_177274.2,1089-1107).
gcacttcggcaactatact

SEQ ID NO: 794585 - DNA, 19 bp, Mus musculus
  siRNA target sequence for Negr1 (NM_177274.2,1090-1108).
cacttcggcaactatactt

SEQ ID NO: 794586 - DNA, 19 bp, Mus musculus
  siRNA target sequence for Negr1 (NM_177274.2,1152-1170).
cctcaaccagagttccatt

SEQ ID NO: 794587 - DNA, 19 bp, Mus musculus
  siRNA target sequence for Negr1 (NM_177274.2,1177-1195).
caagttttcttcatgttga

SEQ ID NO: 794588 - DNA, 19 bp, Mus musculus
  siRNA target sequence for Negr1 (NM_177274.2,1207-1225).
cttctggtctgcatcttat

SEQ ID NO: 794589 - DNA, 19 bp, Mus musculus
  siRNA target sequence for E430002N15Rik (NM_177275.2,231-249).
gctagtgctatcaggtata

SEQ ID NO: 794590 - DNA, 19 bp, Mus musculus
  siRNA target sequence for E430002N15Rik (NM_177275.2,237-255).
gctatcaggtatactacta

SEQ ID NO: 794591 - DNA, 19 bp, Mus musculus
  siRNA target sequence for E430002N15Rik (NM_177275.2,238-256).
ctatcaggtatactactat

SEQ ID NO: 794592 - DNA, 19 bp, Mus musculus
  siRNA target sequence for E430002N15Rik (NM_177275.2,488-506).
ccttgcacctaggctataa

SEQ ID NO: 794593 - DNA, 19 bp, Mus musculus
  siRNA target sequence for E430002N15Rik (NM_177275.2,489-507).
cttgcacctaggctataat

SEQ ID NO: 794594 - DNA, 19 bp, Mus musculus
  siRNA target sequence for E430002N15Rik (NM_177275.2,565-583).
gacctgtcctctaatatgt

SEQ ID NO: 794595 - DNA, 19 bp, Mus musculus
  siRNA target sequence for E430002N15Rik (NM_177275.2,567-585).
cctgtcctctaatatgtta

SEQ ID NO: 794596 - DNA, 19 bp, Mus musculus
  siRNA target sequence for E430002N15Rik (NM_177275.2,572-590).
cctctaatatgttaaggat

SEQ ID NO: 794597 - DNA, 19 bp, Mus musculus
  siRNA target sequence for E430002N15Rik (NM_177275.2,682-700).
cagggcctgcgcatgctta

SEQ ID NO: 794598 - DNA, 19 bp, Mus musculus
  siRNA target sequence for E430002N15Rik (NM_177275.2,723-741).
cgagctctcctctttctct

SEQ ID NO: 794599 - DNA, 19 bp, Mus musculus
  siRNA target sequence for E430002N15Rik (NM_177275.2,794-812).
cctccaactggctgaaaca

SEQ ID NO: 794600 - DNA, 19 bp, Mus musculus
  siRNA target sequence for E430002N15Rik (NM_177275.2,797-815).
ccaactggctgaaacatat

SEQ ID NO: 794601 - DNA, 19 bp, Mus musculus
  siRNA target sequence for E430002N15Rik (NM_177275.2,831-849).
ggctgcactgccaacttat

SEQ ID NO: 794602 - DNA, 19 bp, Mus musculus
  siRNA target sequence for E430002N15Rik (NM_177275.2,833-851).
ctgcactgccaacttatct

SEQ ID NO: 794603 - DNA, 19 bp, Mus musculus
  siRNA target sequence for E430002N15Rik (NM_177275.2,835-853).
gcactgccaacttatctca

SEQ ID NO: 794604 - DNA, 19 bp, Mus musculus
  siRNA target sequence for E430002N15Rik (NM_177275.2,836-854).
cactgccaacttatctcaa

SEQ ID NO: 794605 - DNA, 19 bp, Mus musculus
  siRNA target sequence for E430002N15Rik (NM_177275.2,841-859).
ccaacttatctcaagaaca

SEQ ID NO: 794606 - DNA, 19 bp, Mus musculus
  siRNA target sequence for E430002N15Rik (NM_177275.2,971-989).
catgcttggtctttaaggt

SEQ ID NO: 794607 - DNA, 19 bp, Mus musculus
  siRNA target sequence for E430002N15Rik (NM_177275.2,996-1014).
gtcccgagtgcgctttttt

SEQ ID NO: 794608 - DNA, 19 bp, Mus musculus
  siRNA target sequence for E430002N15Rik (NM_177275.2,998-1016).
cccgagtgcgcttttttga

SEQ ID NO: 794609 - DNA, 19 bp, Mus musculus
  siRNA target sequence for E430002N15Rik (NM_177275.2,1152-1170).
ctgggtctccccgaagaat

SEQ ID NO: 794610 - DNA, 19 bp, Mus musculus
  siRNA target sequence for E430002N15Rik (NM_177275.2,1154-1172).
gggtctccccgaagaatga

SEQ ID NO: 794611 - DNA, 19 bp, Mus musculus
  siRNA target sequence for E430002N15Rik (NM_177275.2,1258-1276).
cacgcaggcgtctttgtgt

SEQ ID NO: 794612 - DNA, 19 bp, Mus musculus
  siRNA target sequence for E430002N15Rik (NM_177275.2,1308-1326).
ccagacacttgagtacaat

SEQ ID NO: 794613 - DNA, 19 bp, Mus musculus
  siRNA target sequence for E430002N15Rik (NM_177275.2,1348-1366).
cccgagccagagactttca

SEQ ID NO: 794614 - DNA, 19 bp, Mus musculus
  siRNA target sequence for 9330109E03Rik (NM_177276.2,842-860).
gatgtacacagcaagagtt

SEQ ID NO: 794615 - DNA, 19 bp, Mus musculus
  siRNA target sequence for 9330109E03Rik (NM_177276.2,853-871).
caagagttggtgtcaactt

SEQ ID NO: 794616 - DNA, 19 bp, Mus musculus
  siRNA target sequence for 9330109E03Rik (NM_177276.2,906-924).
gcttagattcattatcctt

SEQ ID NO: 794617 - DNA, 19 bp, Mus musculus
  siRNA target sequence for 9330109E03Rik (NM_177276.2,911-929).
gattcattatccttcatgt

SEQ ID NO: 794618 - DNA, 19 bp, Mus musculus
  siRNA target sequence for 9030203C11Rik (NM_177277.2,1223-1241).
cactcctcttaccataatt

SEQ ID NO: 794619 - DNA, 19 bp, Mus musculus
  siRNA target sequence for 9030203C11Rik (NM_177277.2,1234-1252).
ccataattggcatctttta

SEQ ID NO: 794620 - DNA, 19 bp, Mus musculus
  siRNA target sequence for 9030203C11Rik (NM_177277.2,1254-1272).
caatgcctttttataagaa

SEQ ID NO: 794621 - DNA, 19 bp, Mus musculus
  siRNA target sequence for 9030203C11Rik (NM_177277.2,1258-1276).
gcctttttataagaattca

SEQ ID NO: 794622 - DNA, 19 bp, Mus musculus
  siRNA target sequence for 9030203C11Rik (NM_177277.2,1305-1323).
ctgccttgagtggtacatt

SEQ ID NO: 794623 - DNA, 19 bp, Mus musculus
  siRNA target sequence for 9030203C11Rik (NM_177277.2,1307-1325).
gccttgagtggtacattca

SEQ ID NO: 794624 - DNA, 19 bp, Mus musculus
  siRNA target sequence for 9030203C11Rik (NM_177277.2,1308-1326).
ccttgagtggtacattcaa

SEQ ID NO: 794625 - DNA, 19 bp, Mus musculus
  siRNA target sequence for 9030203C11Rik (NM_177277.2,1309-1327).
cttgagtggtacattcaaa

SEQ ID NO: 794626 - DNA, 19 bp, Mus musculus
  siRNA target sequence for 9030203C11Rik (NM_177277.2,1314-1332).
gtggtacattcaaatcagt

SEQ ID NO: 794627 - DNA, 19 bp, Mus musculus
  siRNA target sequence for 9030203C11Rik (NM_177277.2,1316-1334).
ggtacattcaaatcagtaa

SEQ ID NO: 794628 - DNA, 19 bp, Mus musculus
  siRNA target sequence for 9030203C11Rik (NM_177277.2,1317-1335).
gtacattcaaatcagtaat

SEQ ID NO: 794629 - DNA, 19 bp, Mus musculus
  siRNA target sequence for 9030203C11Rik (NM_177277.2,1339-1357).
gtatatgctactgagatta

SEQ ID NO: 794630 - DNA, 19 bp, Mus musculus
  siRNA target sequence for 9030203C11Rik (NM_177277.2,1362-1380).
gagcccttgacatactaat

SEQ ID NO: 794631 - DNA, 19 bp, Mus musculus
  siRNA target sequence for 9030203C11Rik (NM_177277.2,1364-1382).
gcccttgacatactaattt

SEQ ID NO: 794632 - DNA, 19 bp, Mus musculus
  siRNA target sequence for 9030203C11Rik (NM_177277.2,1376-1394).
ctaatttgtaaaactatct

SEQ ID NO: 794633 - DNA, 19 bp, Mus musculus
  siRNA target sequence for 9030203C11Rik (NM_177277.2,1469-1487).
gagaagcattcttataata

SEQ ID NO: 794634 - DNA, 19 bp, Mus musculus
  siRNA target sequence for D930040M24Rik (NM_177278.2,615-633).
gatgcacggggcaaactga

SEQ ID NO: 794635 - DNA, 19 bp, Mus musculus
  siRNA target sequence for D930040M24Rik (NM_177278.2,744-762).
ctgcaccagtagaactgtt

SEQ ID NO: 794636 - DNA, 19 bp, Mus musculus
  siRNA target sequence for D930040M24Rik (NM_177278.2,749-767).
ccagtagaactgttttcca

SEQ ID NO: 794637 - DNA, 19 bp, Mus musculus
  siRNA target sequence for D930040M24Rik (NM_177278.2,777-795).
cctttccggagcatgaaaa

SEQ ID NO: 794638 - DNA, 19 bp, Mus musculus
  siRNA target sequence for D930040M24Rik (NM_177278.2,778-796).
ctttccggagcatgaaaat

SEQ ID NO: 794639 - DNA, 19 bp, Mus musculus
  siRNA target sequence for D930040M24Rik (NM_177278.2,963-981).
cagtgggatggtgtcaaaa

SEQ ID NO: 794640 - DNA, 19 bp, Mus musculus
  siRNA target sequence for D930040M24Rik (NM_177278.2,1011-1029).
gtaagccagggcacattta

SEQ ID NO: 794641 - DNA, 19 bp, Mus musculus
  siRNA target sequence for B230206H07Rik (NM_177280.2,399-417).
ggacctgactcgaaggtaa

SEQ ID NO: 794642 - DNA, 19 bp, Mus musculus
  siRNA target sequence for B230206H07Rik (NM_177280.2,460-478).
gctgcggctgtgtcttgat

SEQ ID NO: 794643 - DNA, 19 bp, Mus musculus
  siRNA target sequence for B230206H07Rik (NM_177280.2,473-491).
cttgatgtggctgatcttt

SEQ ID NO: 794644 - DNA, 19 bp, Mus musculus
  siRNA target sequence for B230206H07Rik (NM_177280.2,641-659).
cccaaagtggatctactta

SEQ ID NO: 794645 - DNA, 19 bp, Mus musculus
  siRNA target sequence for B230206H07Rik (NM_177280.2,664-682).
ctttgttccctgcgaaaat

SEQ ID NO: 794646 - DNA, 19 bp, Mus musculus
  siRNA target sequence for B230206H07Rik (NM_177280.2,705-723).
ctggctggaccccagtatt

SEQ ID NO: 794647 - DNA, 19 bp, Mus musculus
  siRNA target sequence for D930030D11Rik (NM_177281.2,421-439).
ggcaagtaagcacaacatt

SEQ ID NO: 794648 - DNA, 19 bp, Mus musculus
  siRNA target sequence for D930030D11Rik (NM_177281.2,464-482).
gaatggccgtactgatgtt

SEQ ID NO: 794649 - DNA, 19 bp, Mus musculus
  siRNA target sequence for D930030D11Rik (NM_177281.2,470-488).
ccgtactgatgttttacct

SEQ ID NO: 794650 - DNA, 19 bp, Mus musculus
  siRNA target sequence for D930030D11Rik (NM_177281.2,471-489).
cgtactgatgttttaccta

SEQ ID NO: 794651 - DNA, 19 bp, Mus musculus
  siRNA target sequence for D930030D11Rik (NM_177281.2,475-493).
ctgatgttttacctactaa

SEQ ID NO: 794652 - DNA, 19 bp, Mus musculus
  siRNA target sequence for D930030D11Rik (NM_177281.2,524-542).
caggatctgtgagtttgta

SEQ ID NO: 794653 - DNA, 19 bp, Mus musculus
  siRNA target sequence for D930030D11Rik (NM_177281.2,548-566).
gctgtaccaggaaaacatt

SEQ ID NO: 794654 - DNA, 19 bp, Mus musculus
  siRNA target sequence for D930030D11Rik (NM_177281.2,639-657).
cttctcatacaatatatca

SEQ ID NO: 794655 - DNA, 19 bp, Mus musculus
  siRNA target sequence for D930030D11Rik (NM_177281.2,710-728).
ctatctggatccactcttt

SEQ ID NO: 794656 - DNA, 19 bp, Mus musculus
  siRNA target sequence for D930030D11Rik (NM_177281.2,714-732).
ctggatccactctttctct

SEQ ID NO: 794657 - DNA, 19 bp, Mus musculus
  siRNA target sequence for D930030D11Rik (NM_177281.2,758-776).
gctttgtagcgataacaat

SEQ ID NO: 794658 - DNA, 19 bp, Mus musculus
  siRNA target sequence for D930030D11Rik (NM_177281.2,759-777).
ctttgtagcgataacaata

SEQ ID NO: 794659 - DNA, 19 bp, Mus musculus
  siRNA target sequence for D930030D11Rik (NM_177281.2,766-784).
gcgataacaataatacata

SEQ ID NO: 794660 - DNA, 19 bp, Mus musculus
  siRNA target sequence for E130016E03Rik (NM_177285.1,109-127).
ctgaaaagcttgatttgct

SEQ ID NO: 794661 - DNA, 19 bp, Mus musculus
  siRNA target sequence for E130016E03Rik (NM_177285.1,164-182).
gcacactaataaaaattca

SEQ ID NO: 794662 - DNA, 19 bp, Mus musculus
  siRNA target sequence for E130016E03Rik (NM_177285.1,270-288).
ggcctacgcagcctttaca

SEQ ID NO: 794663 - DNA, 19 bp, Mus musculus
  siRNA target sequence for E130016E03Rik (NM_177285.1,271-289).
gcctacgcagcctttacaa

SEQ ID NO: 794664 - DNA, 19 bp, Mus musculus
  siRNA target sequence for E130016E03Rik (NM_177285.1,272-290).
cctacgcagcctttacaaa

SEQ ID NO: 794665 - DNA, 19 bp, Mus musculus
  siRNA target sequence for E130016E03Rik (NM_177285.1,273-291).
ctacgcagcctttacaaaa

SEQ ID NO: 794666 - DNA, 19 bp, Mus musculus
  siRNA target sequence for E130016E03Rik (NM_177285.1,481-499).
gttcgctgcaggtaatggt

SEQ ID NO: 794667 - DNA, 19 bp, Mus musculus
  siRNA target sequence for E130016E03Rik (NM_177285.1,579-597).
cctcaactcagtgatactt

SEQ ID NO: 794668 - DNA, 19 bp, Mus musculus
  siRNA target sequence for E130016E03Rik (NM_177285.1,666-684).
gttgatatgagaatgacat

SEQ ID NO: 794669 - DNA, 19 bp, Mus musculus
  siRNA target sequence for E130016E03Rik (NM_177285.1,792-810).
gaggaacaccagataattt

SEQ ID NO: 794670 - DNA, 19 bp, Mus musculus
  siRNA target sequence for E130016E03Rik (NM_177285.1,794-812).
ggaacaccagataatttta

SEQ ID NO: 794671 - DNA, 19 bp, Mus musculus
  siRNA target sequence for E130016E03Rik (NM_177285.1,940-958).
ggcgtgatctgcctgaata

SEQ ID NO: 794672 - DNA, 19 bp, Mus musculus
  siRNA target sequence for E130016E03Rik (NM_177285.1,942-960).
cgtgatctgcctgaataca

SEQ ID NO: 794673 - DNA, 19 bp, Mus musculus
  siRNA target sequence for C130070B15Rik (NM_177286.2,1709-1727).
ctagcttgggacaaatgga

SEQ ID NO: 794674 - DNA, 19 bp, Mus musculus
  siRNA target sequence for C130070B15Rik (NM_177286.2,1716-1734).
gggacaaatggagacatta

SEQ ID NO: 794675 - DNA, 19 bp, Mus musculus
  siRNA target sequence for C130070B15Rik (NM_177286.2,1834-1852).
gtagatggaacaatggtat

SEQ ID NO: 794676 - DNA, 19 bp, Mus musculus
  siRNA target sequence for C130070B15Rik (NM_177286.2,1853-1871).
ggttgtctgctcatacaaa

SEQ ID NO: 794677 - DNA, 19 bp, Mus musculus
  siRNA target sequence for C130070B15Rik (NM_177286.2,1854-1872).
gttgtctgctcatacaaaa

SEQ ID NO: 794678 - DNA, 19 bp, Mus musculus
  siRNA target sequence for C130070B15Rik (NM_177286.2,1905-1923).
gtgttccctgaggagttta

SEQ ID NO: 794679 - DNA, 19 bp, Mus musculus
  siRNA target sequence for C130070B15Rik (NM_177286.2,1943-1961).
gtctctgggggattgtgat

SEQ ID NO: 794680 - DNA, 19 bp, Mus musculus
  siRNA target sequence for C130070B15Rik (NM_177286.2,1947-1965).
ctgggggattgtgatgtat

SEQ ID NO: 794681 - DNA, 19 bp, Mus musculus
  siRNA target sequence for C130070B15Rik (NM_177286.2,1951-1969).
gggattgtgatgtatgtca

SEQ ID NO: 794682 - DNA, 19 bp, Mus musculus
  siRNA target sequence for C130070B15Rik (NM_177286.2,2038-2056).
ggttgtgagaggattgaat

SEQ ID NO: 794683 - DNA, 19 bp, Mus musculus
  siRNA target sequence for C030025P15Rik (NM_177287.2,792-810).
ggcttggagcaagtctatt

SEQ ID NO: 794684 - DNA, 19 bp, Mus musculus
  siRNA target sequence for C030025P15Rik (NM_177287.2,939-957).
cgactgaccctccatacat

SEQ ID NO: 794685 - DNA, 19 bp, Mus musculus
  siRNA target sequence for C030025P15Rik (NM_177287.2,940-958).
gactgaccctccatacatt

SEQ ID NO: 794686 - DNA, 19 bp, Mus musculus
  siRNA target sequence for 4832412O06Rik (NM_177290.2,1059-1077).
cagcctgggtattttcact

SEQ ID NO: 794687 - DNA, 19 bp, Mus musculus
  siRNA target sequence for 4832412O06Rik (NM_177290.2,1094-1112).
caaagtgaacacaatagat

SEQ ID NO: 794688 - DNA, 19 bp, Mus musculus
  siRNA target sequence for 4832412O06Rik (NM_177290.2,1167-1185).
gcggatggtgtgttcaaga

SEQ ID NO: 794689 - DNA, 19 bp, Mus musculus
  siRNA target sequence for 4832412O06Rik (NM_177290.2,1208-1226).
ggaagtgaacgttgtgata

SEQ ID NO: 794690 - DNA, 19 bp, Mus musculus
  siRNA target sequence for 4832412O06Rik (NM_177290.2,1214-1232).
gaacgttgtgatactgttt

SEQ ID NO: 794691 - DNA, 19 bp, Mus musculus
  siRNA target sequence for 4832412O06Rik (NM_177290.2,1229-1247).
gtttccagtttgataagca

SEQ ID NO: 794692 - DNA, 19 bp, Mus musculus
  siRNA target sequence for 4832412O06Rik (NM_177290.2,1246-1264).
caaaggctgtccagttgat

SEQ ID NO: 794693 - DNA, 19 bp, Mus musculus
  siRNA target sequence for 4832412O06Rik (NM_177290.2,1251-1269).
gctgtccagttgattcaat

SEQ ID NO: 794694 - DNA, 19 bp, Mus musculus
  siRNA target sequence for 4832412O06Rik (NM_177290.2,1252-1270).
ctgtccagttgattcaata

SEQ ID NO: 794695 - DNA, 19 bp, Mus musculus
  siRNA target sequence for 4832412O06Rik (NM_177290.2,1254-1272).
gtccagttgattcaataga

SEQ ID NO: 794696 - DNA, 19 bp, Mus musculus
  siRNA target sequence for 4832412O06Rik (NM_177290.2,1296-1314).
cgtcaagtgagaatgaaat

SEQ ID NO: 794697 - DNA, 19 bp, Mus musculus
  siRNA target sequence for A630098A13Rik (NM_177291.2,171-189).
ctggactgcacctatgaca

SEQ ID NO: 794698 - DNA, 19 bp, Mus musculus
  siRNA target sequence for A630098A13Rik (NM_177291.2,179-197).
cacctatgacacaagtgat

SEQ ID NO: 794699 - DNA, 19 bp, Mus musculus
  siRNA target sequence for A630098A13Rik (NM_177291.2,182-200).
ctatgacacaagtgatact

SEQ ID NO: 794700 - DNA, 19 bp, Mus musculus
  siRNA target sequence for A630098A13Rik (NM_177291.2,186-204).
gacacaagtgatactaatt

SEQ ID NO: 794701 - DNA, 19 bp, Mus musculus
  siRNA target sequence for A630098A13Rik (NM_177291.2,272-290).
gcagtataatgcaacgtta

SEQ ID NO: 794702 - DNA, 19 bp, Mus musculus
  siRNA target sequence for A630098A13Rik (NM_177291.2,273-291).
cagtataatgcaacgttaa

SEQ ID NO: 794703 - DNA, 19 bp, Mus musculus
  siRNA target sequence for A630098A13Rik (NM_177291.2,360-378).
ggggatgctgcgacgtatt

SEQ ID NO: 794704 - DNA, 19 bp, Mus musculus
  siRNA target sequence for A630098A13Rik (NM_177291.2,361-379).
gggatgctgcgacgtattt

SEQ ID NO: 794705 - DNA, 19 bp, Mus musculus
  siRNA target sequence for C530024P05Rik (NM_177292.2,753-771).
gaagccggtgcgcttcttt

SEQ ID NO: 794706 - DNA, 19 bp, Mus musculus
  siRNA target sequence for C530024P05Rik (NM_177292.2,1198-1216).
gggacattggacttgtcat

SEQ ID NO: 794707 - DNA, 19 bp, Mus musculus
  siRNA target sequence for C530024P05Rik (NM_177292.2,1207-1225).
gacttgtcatccataatca

SEQ ID NO: 794708 - DNA, 19 bp, Mus musculus
  siRNA target sequence for C530024P05Rik (NM_177292.2,1232-1250).
cacacagctactccttaat

SEQ ID NO: 794709 - DNA, 19 bp, Mus musculus
  siRNA target sequence for 4933424A10Rik (NM_177293.2,38-56).
gcgacataaacgtggtatt

SEQ ID NO: 794710 - DNA, 19 bp, Mus musculus
  siRNA target sequence for 4933424A10Rik (NM_177293.2,39-57).
cgacataaacgtggtatta

SEQ ID NO: 794711 - DNA, 19 bp, Mus musculus
  siRNA target sequence for 4933424A10Rik (NM_177293.2,40-58).
gacataaacgtggtattaa

SEQ ID NO: 794712 - DNA, 19 bp, Mus musculus
  siRNA target sequence for 4933424A10Rik (NM_177293.2,42-60).
cataaacgtggtattaatt

SEQ ID NO: 794713 - DNA, 19 bp, Mus musculus
  siRNA target sequence for 4933424A10Rik (NM_177293.2,77-95).
caagagatcgtcaagtaca

SEQ ID NO: 794714 - DNA, 19 bp, Mus musculus
  siRNA target sequence for 4933424A10Rik (NM_177293.2,171-189).
caagaagccaacaaggaaa

SEQ ID NO: 794715 - DNA, 19 bp, Mus musculus
  siRNA target sequence for 4933424A10Rik (NM_177293.2,227-245).
gtatgaaaagcaattggaa

SEQ ID NO: 794716 - DNA, 19 bp, Mus musculus
  siRNA target sequence for 4933424A10Rik (NM_177293.2,246-264).
gaaaaacaccgtaaactga

SEQ ID NO: 794717 - DNA, 19 bp, Mus musculus
  siRNA target sequence for 4933424A10Rik (NM_177293.2,355-373).
ctgttgtgtctcgtacatt

SEQ ID NO: 794718 - DNA, 19 bp, Mus musculus
  siRNA target sequence for 4933424A10Rik (NM_177293.2,374-392).
ggagcgatgcaatcgtatt

SEQ ID NO: 794719 - DNA, 19 bp, Mus musculus
  siRNA target sequence for 4933424A10Rik (NM_177293.2,377-395).
gcgatgcaatcgtattgat

SEQ ID NO: 794720 - DNA, 19 bp, Mus musculus
  siRNA target sequence for 4933424A10Rik (NM_177293.2,379-397).
gatgcaatcgtattgatca

SEQ ID NO: 794721 - DNA, 19 bp, Mus musculus
  siRNA target sequence for 4933424A10Rik (NM_177293.2,393-411).
gatcaacgacagaaaaggt

SEQ ID NO: 794722 - DNA, 19 bp, Mus musculus
  siRNA target sequence for 4933424A10Rik (NM_177293.2,538-556).
cacctggcatgaccaaata

SEQ ID NO: 794723 - DNA, 19 bp, Mus musculus
  siRNA target sequence for 4933424A10Rik (NM_177293.2,543-561).
ggcatgaccaaatatgttt

SEQ ID NO: 794724 - DNA, 19 bp, Mus musculus
  siRNA target sequence for 4933424A10Rik (NM_177293.2,544-562).
gcatgaccaaatatgtttt

SEQ ID NO: 794725 - DNA, 19 bp, Mus musculus
  siRNA target sequence for 4933424A10Rik (NM_177293.2,570-588).
gttactgcaccagtgtttt

SEQ ID NO: 794726 - DNA, 19 bp, Mus musculus
  siRNA target sequence for 4933424A10Rik (NM_177293.2,612-630).
gctatgttctgtaaaccat

SEQ ID NO: 794727 - DNA, 19 bp, Mus musculus
  siRNA target sequence for 4933424A10Rik (NM_177293.2,705-723).
gtggaaggactctcaatga

SEQ ID NO: 794728 - DNA, 19 bp, Mus musculus
  siRNA target sequence for 4933424A10Rik (NM_177293.2,711-729).
ggactctcaatgatgaata

SEQ ID NO: 794729 - DNA, 19 bp, Mus musculus
  siRNA target sequence for 4933424A10Rik (NM_177293.2,732-750).
gaaatcccacccaaaataa

SEQ ID NO: 794730 - DNA, 19 bp, Mus musculus
  siRNA target sequence for 4933424A10Rik (NM_177293.2,739-757).
cacccaaaataacaattga

SEQ ID NO: 794731 - DNA, 19 bp, Mus musculus
  siRNA target sequence for 4933424A10Rik (NM_177293.2,821-839).
catggacgacatctctaaa

SEQ ID NO: 794732 - DNA, 19 bp, Mus musculus
  siRNA target sequence for 4933424A10Rik (NM_177293.2,824-842).
ggacgacatctctaaagtt

SEQ ID NO: 794733 - DNA, 19 bp, Mus musculus
  siRNA target sequence for 4933424A10Rik (NM_177293.2,825-843).
gacgacatctctaaagtta

SEQ ID NO: 794734 - DNA, 19 bp, Mus musculus
  siRNA target sequence for 4933424A10Rik (NM_177293.2,827-845).
cgacatctctaaagttaaa

SEQ ID NO: 794735 - DNA, 19 bp, Mus musculus
  siRNA target sequence for 4933424A10Rik (NM_177293.2,860-878).
gaaggtggatatcaaagta

SEQ ID NO: 794736 - DNA, 19 bp, Mus musculus
  siRNA target sequence for 4933424A10Rik (NM_177293.2,944-962).
ggatacctcttcaagtgtt

SEQ ID NO: 794737 - DNA, 19 bp, Mus musculus
  siRNA target sequence for 4933424A10Rik (NM_177293.2,963-981).
gaactatcctccatagtga

SEQ ID NO: 794738 - DNA, 19 bp, Mus musculus
  siRNA target sequence for 4933424A10Rik (NM_177293.2,1000-1018).
cgctgagtacaggatcatt

SEQ ID NO: 794739 - DNA, 19 bp, Mus musculus
  siRNA target sequence for 4933424A10Rik (NM_177293.2,1002-1020).
ctgagtacaggatcattct

SEQ ID NO: 794740 - DNA, 19 bp, Mus musculus
  siRNA target sequence for 4933424A10Rik (NM_177293.2,1064-1082).
ctcacttgaaacaaacata

SEQ ID NO: 794741 - DNA, 19 bp, Mus musculus
  siRNA target sequence for 4933424A10Rik (NM_177293.2,1066-1084).
cacttgaaacaaacataga

SEQ ID NO: 794742 - DNA, 19 bp, Mus musculus
  siRNA target sequence for 4933424A10Rik (NM_177293.2,1083-1101).
gatacctcacctgaattaa

SEQ ID NO: 794743 - DNA, 19 bp, Mus musculus
  siRNA target sequence for 4933424A10Rik (NM_177293.2,1120-1138).
cgaaagtggcctcagaaat

SEQ ID NO: 794744 - DNA, 19 bp, Mus musculus
  siRNA target sequence for 4933424A10Rik (NM_177293.2,1198-1216).
gacaacctgaggcaaatgt

SEQ ID NO: 794745 - DNA, 19 bp, Mus musculus
  siRNA target sequence for 4933424A10Rik (NM_177293.2,1289-1307).
ccacataccatgttacaga

SEQ ID NO: 794746 - DNA, 19 bp, Mus musculus
  siRNA target sequence for 4933424A10Rik (NM_177293.2,1357-1375).
ctctgcagactcgaaagat

SEQ ID NO: 794747 - DNA, 19 bp, Mus musculus
  siRNA target sequence for 4933424A10Rik (NM_177293.2,1389-1407).
cctataccagtctcatcaa

SEQ ID NO: 794748 - DNA, 19 bp, Mus musculus
  siRNA target sequence for 4933424A10Rik (NM_177293.2,1390-1408).
ctataccagtctcatcaaa

SEQ ID NO: 794749 - DNA, 19 bp, Mus musculus
  siRNA target sequence for 4933424A10Rik (NM_177293.2,1447-1465).
cagttcagaatgtcctata

SEQ ID NO: 794750 - DNA, 19 bp, Mus musculus
  siRNA target sequence for 4933424A10Rik (NM_177293.2,1458-1476).
gtcctatatgtgccaaatt

SEQ ID NO: 794751 - DNA, 19 bp, Mus musculus
  siRNA target sequence for 4933424A10Rik (NM_177293.2,1461-1479).
ctatatgtgccaaattcat

SEQ ID NO: 794752 - DNA, 19 bp, Mus musculus
  siRNA target sequence for 4933424A10Rik (NM_177293.2,1471-1489).
caaattcattaggtgtaat

SEQ ID NO: 794753 - DNA, 19 bp, Mus musculus
  siRNA target sequence for 4933424A10Rik (NM_177293.2,1482-1500).
ggtgtaatagcaaccaaaa

SEQ ID NO: 794754 - DNA, 19 bp, Mus musculus
  siRNA target sequence for 4933424A10Rik (NM_177293.2,1483-1501).
gtgtaatagcaaccaaaaa

SEQ ID NO: 794755 - DNA, 19 bp, Mus musculus
  siRNA target sequence for 4933424A10Rik (NM_177293.2,1502-1520).
ggaaaccatccaaaagtat

SEQ ID NO: 794756 - DNA, 19 bp, Mus musculus
  siRNA target sequence for 4933424A10Rik (NM_177293.2,1533-1551).
gaatttggtaatagaagta

SEQ ID NO: 794757 - DNA, 19 bp, Mus musculus
  siRNA target sequence for 4933424A10Rik (NM_177293.2,1589-1607).
gatacgccatgctgcttat

SEQ ID NO: 794758 - DNA, 19 bp, Mus musculus
  siRNA target sequence for 4933424A10Rik (NM_177293.2,1600-1618).
ctgcttatgagcaaagcaa

SEQ ID NO: 794759 - DNA, 19 bp, Mus musculus
  siRNA target sequence for 4933424A10Rik (NM_177293.2,1649-1667).
gacaaagcaaagaattgct

SEQ ID NO: 794760 - DNA, 19 bp, Mus musculus
  siRNA target sequence for 4933424A10Rik (NM_177293.2,1665-1683).
gctcggaaaccagaaatta

SEQ ID NO: 794761 - DNA, 19 bp, Mus musculus
  siRNA target sequence for 4933424A10Rik (NM_177293.2,1666-1684).
ctcggaaaccagaaattat

SEQ ID NO: 794762 - DNA, 19 bp, Mus musculus
  siRNA target sequence for 4933424A10Rik (NM_177293.2,1924-1942).
ctttttcatccgaagatga

SEQ ID NO: 794763 - DNA, 19 bp, Mus musculus
  siRNA target sequence for 4933424A10Rik (NM_177293.2,1970-1988).
ctctcttgagatatttcca

SEQ ID NO: 794764 - DNA, 19 bp, Mus musculus
  siRNA target sequence for 4933424A10Rik (NM_177293.2,2016-2034).
ctcaaaaagtttcacaaat

SEQ ID NO: 794765 - DNA, 19 bp, Mus musculus
  siRNA target sequence for 4933424A10Rik (NM_177293.2,2076-2094).
ggaactgatgaggttgata

SEQ ID NO: 794766 - DNA, 19 bp, Mus musculus
  siRNA target sequence for 4933424A10Rik (NM_177293.2,2080-2098).
ctgatgaggttgataccaa

SEQ ID NO: 794767 - DNA, 19 bp, Mus musculus
  siRNA target sequence for 4933424A10Rik (NM_177293.2,2087-2105).
ggttgataccaacaaaaat

SEQ ID NO: 794768 - DNA, 19 bp, Mus musculus
  siRNA target sequence for 4933424A10Rik (NM_177293.2,2183-2201).
gttatcagctaaaaaacca

SEQ ID NO: 794769 - DNA, 19 bp, Mus musculus
  siRNA target sequence for 4933424A10Rik (NM_177293.2,2247-2265).
gccatccgtcctactcaaa

SEQ ID NO: 794770 - DNA, 19 bp, Mus musculus
  siRNA target sequence for 4933424A10Rik (NM_177293.2,2249-2267).
catccgtcctactcaaagt

SEQ ID NO: 794771 - DNA, 19 bp, Mus musculus
  siRNA target sequence for 4933424A10Rik (NM_177293.2,2299-2317).
gtgacaaggttatagactt

SEQ ID NO: 794772 - DNA, 19 bp, Mus musculus
  siRNA target sequence for 4933424A10Rik (NM_177293.2,2307-2325).
gttatagactttaatcaga

SEQ ID NO: 794773 - DNA, 19 bp, Mus musculus
  siRNA target sequence for 4933424A10Rik (NM_177293.2,2322-2340).
cagacaccttttctaaaga

SEQ ID NO: 794774 - DNA, 19 bp, Mus musculus
  siRNA target sequence for 4933424A10Rik (NM_177293.2,2334-2352).
ctaaagaccactctaacaa

SEQ ID NO: 794775 - DNA, 19 bp, Mus musculus
  siRNA target sequence for 4933424A10Rik (NM_177293.2,2364-2382).
gaaagtccagcggattcta

SEQ ID NO: 794776 - DNA, 19 bp, Mus musculus
  siRNA target sequence for 4933424A10Rik (NM_177293.2,2373-2391).
gcggattctaaaatagctt

SEQ ID NO: 794777 - DNA, 19 bp, Mus musculus
  siRNA target sequence for 4933424A10Rik (NM_177293.2,2465-2483).
gtcccacctccacataact

SEQ ID NO: 794778 - DNA, 19 bp, Mus musculus
  siRNA target sequence for 4933424A10Rik (NM_177293.2,2485-2503).
gaagagcatctaatcttga

SEQ ID NO: 794779 - DNA, 19 bp, Mus musculus
  siRNA target sequence for 4933424A10Rik (NM_177293.2,2488-2506).
gagcatctaatcttgaaca

SEQ ID NO: 794780 - DNA, 19 bp, Mus musculus
  siRNA target sequence for 4933424A10Rik (NM_177293.2,2499-2517).
cttgaacatccctttgctt

SEQ ID NO: 794781 - DNA, 19 bp, Mus musculus
  siRNA target sequence for 1190005L06Rik (NM_177294.3,504-522).
ggctgaacaggcatgatca

SEQ ID NO: 794782 - DNA, 19 bp, Mus musculus
  siRNA target sequence for 1190005L06Rik (NM_177294.3,531-549).
ctgctgtcttgtctaagat

SEQ ID NO: 794783 - DNA, 19 bp, Mus musculus
  siRNA target sequence for 1190005L06Rik (NM_177294.3,534-552).
ctgtcttgtctaagattgt

SEQ ID NO: 794784 - DNA, 19 bp, Mus musculus
  siRNA target sequence for 1190005L06Rik (NM_177294.3,547-565).
gattgttgaacgagataca

SEQ ID NO: 794785 - DNA, 19 bp, Mus musculus
  siRNA target sequence for 1190005L06Rik (NM_177294.3,551-569).
gttgaacgagatacaagtt

SEQ ID NO: 794786 - DNA, 19 bp, Mus musculus
  siRNA target sequence for 1190005L06Rik (NM_177294.3,672-690).
gcatctttgcccaagagat

SEQ ID NO: 794787 - DNA, 19 bp, Mus musculus
  siRNA target sequence for 1190005L06Rik (NM_177294.3,900-918).
caatccatgaagagaatgt

SEQ ID NO: 794788 - DNA, 19 bp, Mus musculus
  siRNA target sequence for 1190005L06Rik (NM_177294.3,913-931).
gaatgtagcaagactacaa

SEQ ID NO: 794789 - DNA, 19 bp, Mus musculus
  siRNA target sequence for 1190005L06Rik (NM_177294.3,1001-1019).
gccttcttgagatctcata

SEQ ID NO: 794790 - DNA, 19 bp, Mus musculus
  siRNA target sequence for 1190005L06Rik (NM_177294.3,1077-1095).
cctcagttcttgtcactaa

SEQ ID NO: 794791 - DNA, 19 bp, Mus musculus
  siRNA target sequence for 1190005L06Rik (NM_177294.3,1426-1444).
cgagcgagcagggtattct

SEQ ID NO: 794792 - DNA, 19 bp, Mus musculus
  siRNA target sequence for 1190005L06Rik (NM_177294.3,1429-1447).
gcgagcagggtattctcta

SEQ ID NO: 794793 - DNA, 19 bp, Mus musculus
  siRNA target sequence for 1190005L06Rik (NM_177294.3,1711-1729).
ccgcaccttctcttggtat

SEQ ID NO: 794794 - DNA, 19 bp, Mus musculus
  siRNA target sequence for 1190005L06Rik (NM_177294.3,1714-1732).
caccttctcttggtatcat

SEQ ID NO: 794795 - DNA, 19 bp, Mus musculus
  siRNA target sequence for 1190005L06Rik (NM_177294.3,1756-1774).
gcccagccaggacgataaa

SEQ ID NO: 794796 - DNA, 19 bp, Mus musculus
  siRNA target sequence for 1190005L06Rik (NM_177294.3,2094-2112).
ggcctactcccagtctata

SEQ ID NO: 794797 - DNA, 19 bp, Mus musculus
  siRNA target sequence for 1190005L06Rik (NM_177294.3,2095-2113).
gcctactcccagtctatat

SEQ ID NO: 794798 - DNA, 19 bp, Mus musculus
  siRNA target sequence for 1190005L06Rik (NM_177294.3,2097-2115).
ctactcccagtctatataa

SEQ ID NO: 794799 - DNA, 19 bp, Mus musculus
  siRNA target sequence for 1190005L06Rik (NM_177294.3,2100-2118).
ctcccagtctatataaagt

SEQ ID NO: 794800 - DNA, 19 bp, Mus musculus
  siRNA target sequence for 1190005L06Rik (NM_177294.3,2124-2142).
gtgcttctgccatgaaact

SEQ ID NO: 794801 - DNA, 19 bp, Mus musculus
  siRNA target sequence for 1190005L06Rik (NM_177294.3,2133-2151).
ccatgaaactgcttagagt

SEQ ID NO: 794802 - DNA, 19 bp, Mus musculus
  siRNA target sequence for 1190005L06Rik (NM_177294.3,2211-2229).
gccgcctgtgccgattcat

SEQ ID NO: 794803 - DNA, 19 bp, Mus musculus
  siRNA target sequence for 1190005L06Rik (NM_177294.3,3108-3126).
gggccctgcaccatgagta

SEQ ID NO: 794804 - DNA, 19 bp, Mus musculus
  siRNA target sequence for 1190005L06Rik (NM_177294.3,3244-3262).
gcctggaagcgaatacctt

SEQ ID NO: 794805 - DNA, 19 bp, Mus musculus
  siRNA target sequence for 1190005L06Rik (NM_177294.3,3574-3592).
gcccttccagccgttgata

SEQ ID NO: 794806 - DNA, 19 bp, Mus musculus
  siRNA target sequence for 1190005L06Rik (NM_177294.3,3576-3594).
ccttccagccgttgataca

SEQ ID NO: 794807 - DNA, 19 bp, Mus musculus
  siRNA target sequence for 1190005L06Rik (NM_177294.3,3577-3595).
cttccagccgttgatacat

SEQ ID NO: 794808 - DNA, 19 bp, Mus musculus
  siRNA target sequence for 1190005L06Rik (NM_177294.3,3656-3674).
gccatgcgggtcctacaat

SEQ ID NO: 794809 - DNA, 19 bp, Mus musculus
  siRNA target sequence for 1190005L06Rik (NM_177294.3,3980-3998).
cagcgtaggttcagtgtta

SEQ ID NO: 794810 - DNA, 19 bp, Mus musculus
  siRNA target sequence for 1190005L06Rik (NM_177294.3,4240-4258).
ctcagatgaggtaaagact

SEQ ID NO: 794811 - DNA, 19 bp, Mus musculus
  siRNA target sequence for D830039M14Rik (NM_177297.2,732-750).
gcctctggccaccgttatt

SEQ ID NO: 794812 - DNA, 19 bp, Mus musculus
  siRNA target sequence for 9030221M09Rik (NM_177298.2,77-95).
gcagcccctgtcactatga

SEQ ID NO: 794813 - DNA, 19 bp, Mus musculus
  siRNA target sequence for 9030221M09Rik (NM_177298.2,78-96).
cagcccctgtcactatgaa

SEQ ID NO: 794814 - DNA, 19 bp, Mus musculus
  siRNA target sequence for 9030221M09Rik (NM_177298.2,149-167).
caggtgtcagaaatttcca

SEQ ID NO: 794815 - DNA, 19 bp, Mus musculus
  siRNA target sequence for 9030221M09Rik (NM_177298.2,239-257).
ccgggtaccggcagtatga

SEQ ID NO: 794816 - DNA, 19 bp, Mus musculus
  siRNA target sequence for 9030221M09Rik (NM_177298.2,325-343).
gaggtgtccctgtataaat

SEQ ID NO: 794817 - DNA, 19 bp, Mus musculus
  siRNA target sequence for 9030221M09Rik (NM_177298.2,1009-1027).
cgagacctgcacacaaaca

SEQ ID NO: 794818 - DNA, 19 bp, Mus musculus
  siRNA target sequence for A730013G03Rik (NM_177299.2,1554-1572).
cacagggaggagagtgatt

SEQ ID NO: 794819 - DNA, 19 bp, Mus musculus
  siRNA target sequence for A730013G03Rik (NM_177299.2,1578-1596).
cagccgtccggctatgtca

SEQ ID NO: 794820 - DNA, 19 bp, Mus musculus
  siRNA target sequence for A730013G03Rik (NM_177299.2,1645-1663).
cccatgccttcgaacactt

SEQ ID NO: 794821 - DNA, 19 bp, Mus musculus
  siRNA target sequence for A730013G03Rik (NM_177299.2,1646-1664).
ccatgccttcgaacacttt

SEQ ID NO: 794822 - DNA, 19 bp, Mus musculus
  siRNA target sequence for A730013G03Rik (NM_177299.2,1698-1716).
ggaccacgttccctcttta

SEQ ID NO: 794823 - DNA, 19 bp, Mus musculus
  siRNA target sequence for A730013G03Rik (NM_177299.2,1758-1776).
gttcactacagttcaagta

SEQ ID NO: 794824 - DNA, 19 bp, Mus musculus
  siRNA target sequence for A730013G03Rik (NM_177299.2,1818-1836).
cttctgcggacctgtttta

SEQ ID NO: 794825 - DNA, 19 bp, Mus musculus
  siRNA target sequence for B130040O20Rik (NM_177300.2,220-238).
cttgctttccacttccata

SEQ ID NO: 794826 - DNA, 19 bp, Mus musculus
  siRNA target sequence for B130040O20Rik (NM_177300.2,434-452).
cccacatcagtctttaaga

SEQ ID NO: 794827 - DNA, 19 bp, Mus musculus
  siRNA target sequence for B130040O20Rik (NM_177300.2,470-488).
gctggcagaccaatcttct

SEQ ID NO: 794828 - DNA, 19 bp, Mus musculus
  siRNA target sequence for Hnrpl (NM_177301.3,921-939).
gagatcatcccgcagaata

SEQ ID NO: 794829 - DNA, 19 bp, Mus musculus
  siRNA target sequence for Hnrpl (NM_177301.3,1378-1396).
gtcatacgggctagaagat

SEQ ID NO: 794830 - DNA, 19 bp, Mus musculus
  siRNA target sequence for Hnrpl (NM_177301.3,1394-1412).
gatggatcctgcagctata

SEQ ID NO: 794831 - DNA, 19 bp, Mus musculus
  siRNA target sequence for Hnrpl (NM_177301.3,1420-1438).
cagcgagtcaaggaacaat

SEQ ID NO: 794832 - DNA, 19 bp, Mus musculus
  siRNA target sequence for Hnrpl (NM_177301.3,1525-1543).
gactgaggagaacttcttt

SEQ ID NO: 794833 - DNA, 19 bp, Mus musculus
  siRNA target sequence for Hnrpl (NM_177301.3,1570-1588).
gcggccaacctctgtcaaa

SEQ ID NO: 794834 - DNA, 19 bp, Mus musculus
  siRNA target sequence for Hnrpl (NM_177301.3,1579-1597).
ctctgtcaaagtattttca

SEQ ID NO: 794835 - DNA, 19 bp, Mus musculus
  siRNA target sequence for B530045E10Rik (NM_177302.2,2094-2112).
gaaccctatgcagtagata

SEQ ID NO: 794836 - DNA, 19 bp, Mus musculus
  siRNA target sequence for B530045E10Rik (NM_177302.2,2097-2115).
ccctatgcagtagatataa

SEQ ID NO: 794837 - DNA, 19 bp, Mus musculus
  siRNA target sequence for B530045E10Rik (NM_177302.2,2098-2116).
cctatgcagtagatataaa

SEQ ID NO: 794838 - DNA, 19 bp, Mus musculus
  siRNA target sequence for B530045E10Rik (NM_177302.2,2099-2117).
ctatgcagtagatataaat

SEQ ID NO: 794839 - DNA, 19 bp, Mus musculus
  siRNA target sequence for B530045E10Rik (NM_177302.2,2167-2185).
cagtattcaaactcatcta

SEQ ID NO: 794840 - DNA, 19 bp, Mus musculus
  siRNA target sequence for B530045E10Rik (NM_177302.2,2243-2261).
cacatttagggttgtaatt

SEQ ID NO: 794841 - DNA, 19 bp, Mus musculus
  siRNA target sequence for B530045E10Rik (NM_177302.2,2366-2384).
gtacggtgccttctgtttt

SEQ ID NO: 794842 - DNA, 19 bp, Mus musculus
  siRNA target sequence for 9530019H20Rik (NM_177308.2,1081-1099).
ctccaggctctgtgaatta

SEQ ID NO: 794843 - DNA, 19 bp, Mus musculus
  siRNA target sequence for 9530019H20Rik (NM_177308.2,1342-1360).
ctttctatggatctctata

SEQ ID NO: 794844 - DNA, 19 bp, Mus musculus
  siRNA target sequence for 9530019H20Rik (NM_177308.2,1404-1422).
gtaggtaaaatattaactt

SEQ ID NO: 794845 - DNA, 19 bp, Mus musculus
  siRNA target sequence for 4933421E11Rik (NM_177309.2,379-397).
ccagagcgtcattctgaaa

SEQ ID NO: 794846 - DNA, 19 bp, Mus musculus
  siRNA target sequence for 4933421E11Rik (NM_177309.2,412-430).
gtcaggctcgcgctgtatt

SEQ ID NO: 794847 - DNA, 19 bp, Mus musculus
  siRNA target sequence for 4933421E11Rik (NM_177309.2,435-453).
ggtgcatgtaccaagtagt

SEQ ID NO: 794848 - DNA, 19 bp, Mus musculus
  siRNA target sequence for 4933421E11Rik (NM_177309.2,436-454).
gtgcatgtaccaagtagtt

SEQ ID NO: 794849 - DNA, 19 bp, Mus musculus
  siRNA target sequence for 4933421E11Rik (NM_177309.2,445-463).
ccaagtagttcctacgatt

SEQ ID NO: 794850 - DNA, 19 bp, Mus musculus
  siRNA target sequence for 4933421E11Rik (NM_177309.2,459-477).
cgattggcagcgatggaaa

SEQ ID NO: 794851 - DNA, 19 bp, Mus musculus
  siRNA target sequence for 4933421E11Rik (NM_177309.2,460-478).
gattggcagcgatggaaaa

SEQ ID NO: 794852 - DNA, 19 bp, Mus musculus
  siRNA target sequence for 4933421E11Rik (NM_177309.2,543-561).
cagtcatgtctcatggttt

SEQ ID NO: 794853 - DNA, 19 bp, Mus musculus
  siRNA target sequence for 4933421E11Rik (NM_177309.2,562-580).
gaaagcgaatactgaaaaa

SEQ ID NO: 794854 - DNA, 19 bp, Mus musculus
  siRNA target sequence for 4933421E11Rik (NM_177309.2,575-593).
gaaaaaccagttcaagtta

SEQ ID NO: 794855 - DNA, 19 bp, Mus musculus
  siRNA target sequence for 4933421E11Rik (NM_177309.2,624-642).
caagtgcatctgttcaatt

SEQ ID NO: 794856 - DNA, 19 bp, Mus musculus
  siRNA target sequence for 4933421E11Rik (NM_177309.2,699-717).
caacaggaaaagatagagt

SEQ ID NO: 794857 - DNA, 19 bp, Mus musculus
  siRNA target sequence for 4933421E11Rik (NM_177309.2,723-741).
ctgtgaggactggaaattt

SEQ ID NO: 794858 - DNA, 19 bp, Mus musculus
  siRNA target sequence for 4933421E11Rik (NM_177309.2,747-765).
caccagtttctaacattca

SEQ ID NO: 794859 - DNA, 19 bp, Mus musculus
  siRNA target sequence for 4933421E11Rik (NM_177309.2,749-767).
ccagtttctaacattcaga

SEQ ID NO: 794860 - DNA, 19 bp, Mus musculus
  siRNA target sequence for 4933421E11Rik (NM_177309.2,764-782).
cagaatcatggtgtgaaaa

SEQ ID NO: 794861 - DNA, 19 bp, Mus musculus
  siRNA target sequence for 4933421E11Rik (NM_177309.2,791-809).
ctcaccaggcaaacattta

SEQ ID NO: 794862 - DNA, 19 bp, Mus musculus
  siRNA target sequence for 4933421E11Rik (NM_177309.2,793-811).
caccaggcaaacatttact

SEQ ID NO: 794863 - DNA, 19 bp, Mus musculus
  siRNA target sequence for 4933421E11Rik (NM_177309.2,795-813).
ccaggcaaacatttactat

SEQ ID NO: 794864 - DNA, 19 bp, Mus musculus
  siRNA target sequence for 4933421E11Rik (NM_177309.2,799-817).
gcaaacatttactattcct

SEQ ID NO: 794865 - DNA, 19 bp, Mus musculus
  siRNA target sequence for 4933421E11Rik (NM_177309.2,827-845).
caaaatgattcatctcatt

SEQ ID NO: 794866 - DNA, 19 bp, Mus musculus
  siRNA target sequence for 4933421E11Rik (NM_177309.2,859-877).
cccaagtctcctaccaaat

SEQ ID NO: 794867 - DNA, 19 bp, Mus musculus
  siRNA target sequence for 4933421E11Rik (NM_177309.2,861-879).
caagtctcctaccaaatgt

SEQ ID NO: 794868 - DNA, 19 bp, Mus musculus
  siRNA target sequence for 4933421E11Rik (NM_177309.2,900-918).
ctgggaatcatttaaagat

SEQ ID NO: 794869 - DNA, 19 bp, Mus musculus
  siRNA target sequence for 4933421E11Rik (NM_177309.2,921-939).
cagcccatgctgaagtgaa

SEQ ID NO: 794870 - DNA, 19 bp, Mus musculus
  siRNA target sequence for 4933421E11Rik (NM_177309.2,1022-1040).
gaggcctcccaaataccaa

SEQ ID NO: 794871 - DNA, 19 bp, Mus musculus
  siRNA target sequence for 4933421E11Rik (NM_177309.2,1030-1048).
ccaaataccaacagttgtt

SEQ ID NO: 794872 - DNA, 19 bp, Mus musculus
  siRNA target sequence for 4933421E11Rik (NM_177309.2,1087-1105).
caagaaaactcagactatt

SEQ ID NO: 794873 - DNA, 19 bp, Mus musculus
  siRNA target sequence for 4933421E11Rik (NM_177309.2,1111-1129).
caaaccagtgacattcaat

SEQ ID NO: 794874 - DNA, 19 bp, Mus musculus
  siRNA target sequence for 4933421E11Rik (NM_177309.2,1115-1133).
ccagtgacattcaatacct

SEQ ID NO: 794875 - DNA, 19 bp, Mus musculus
  siRNA target sequence for 4933421E11Rik (NM_177309.2,1122-1140).
cattcaataccttgcaaat

SEQ ID NO: 794876 - DNA, 19 bp, Mus musculus
  siRNA target sequence for 4933421E11Rik (NM_177309.2,1126-1144).
caataccttgcaaattcca

SEQ ID NO: 794877 - DNA, 19 bp, Mus musculus
  siRNA target sequence for 4933421E11Rik (NM_177309.2,1151-1169).
gttgctacagaaacacaat

SEQ ID NO: 794878 - DNA, 19 bp, Mus musculus
  siRNA target sequence for 4933421E11Rik (NM_177309.2,1196-1214).
gctccagtgaactcgattt

SEQ ID NO: 794879 - DNA, 19 bp, Mus musculus
  siRNA target sequence for 4933421E11Rik (NM_177309.2,1197-1215).
ctccagtgaactcgatttt

SEQ ID NO: 794880 - DNA, 19 bp, Mus musculus
  siRNA target sequence for 4933421E11Rik (NM_177309.2,1200-1218).
cagtgaactcgatttttca

SEQ ID NO: 794881 - DNA, 19 bp, Mus musculus
  siRNA target sequence for 4933421E11Rik (NM_177309.2,1210-1228).
gatttttcaggagtatcta

SEQ ID NO: 794882 - DNA, 19 bp, Mus musculus
  siRNA target sequence for 4933421E11Rik (NM_177309.2,1231-1249).
gcctggaatcccatgtatt

SEQ ID NO: 794883 - DNA, 19 bp, Mus musculus
  siRNA target sequence for 4933421E11Rik (NM_177309.2,1233-1251).
ctggaatcccatgtattat

SEQ ID NO: 794884 - DNA, 19 bp, Mus musculus
  siRNA target sequence for 4933421E11Rik (NM_177309.2,1242-1260).
catgtattattcctgttaa

SEQ ID NO: 794885 - DNA, 19 bp, Mus musculus
  siRNA target sequence for 4933421E11Rik (NM_177309.2,1266-1284).
caaataatgtggctacaaa

SEQ ID NO: 794886 - DNA, 19 bp, Mus musculus
  siRNA target sequence for 4933421E11Rik (NM_177309.2,1343-1361).
ctgttgaataccaacagtt

SEQ ID NO: 794887 - DNA, 19 bp, Mus musculus
  siRNA target sequence for 4933421E11Rik (NM_177309.2,1375-1393).
ctccgtaagtgaacctatt

SEQ ID NO: 794888 - DNA, 19 bp, Mus musculus
  siRNA target sequence for 4933421E11Rik (NM_177309.2,1378-1396).
cgtaagtgaacctattaaa

SEQ ID NO: 794889 - DNA, 19 bp, Mus musculus
  siRNA target sequence for 4933421E11Rik (NM_177309.2,1388-1406).
cctattaaagataatgctt

SEQ ID NO: 794890 - DNA, 19 bp, Mus musculus
  siRNA target sequence for 4933421E11Rik (NM_177309.2,1449-1467).
catgcggtctgccatcaaa

SEQ ID NO: 794891 - DNA, 19 bp, Mus musculus
  siRNA target sequence for 4933421E11Rik (NM_177309.2,1452-1470).
gcggtctgccatcaaaaat

SEQ ID NO: 794892 - DNA, 19 bp, Mus musculus
  siRNA target sequence for 4933421E11Rik (NM_177309.2,1453-1471).
cggtctgccatcaaaaatt

SEQ ID NO: 794893 - DNA, 19 bp, Mus musculus
  siRNA target sequence for 4933421E11Rik (NM_177309.2,1496-1514).
gatattccactaaaagatt

SEQ ID NO: 794894 - DNA, 19 bp, Mus musculus
  siRNA target sequence for 4933421E11Rik (NM_177309.2,1511-1529).
gattcatcacagctagtaa

SEQ ID NO: 794895 - DNA, 19 bp, Mus musculus
  siRNA target sequence for 4933421E11Rik (NM_177309.2,1522-1540).
gctagtaagttcaagtata

SEQ ID NO: 794896 - DNA, 19 bp, Mus musculus
  siRNA target sequence for 4933421E11Rik (NM_177309.2,1557-1575).
gagagattttaaatagtgt

SEQ ID NO: 794897 - DNA, 19 bp, Mus musculus
  siRNA target sequence for 4933421E11Rik (NM_177309.2,1673-1691).
gtggagagaccatcttttt

SEQ ID NO: 794898 - DNA, 19 bp, Mus musculus
  siRNA target sequence for 4933421E11Rik (NM_177309.2,1698-1716).
caaatccacatactatgaa

SEQ ID NO: 794899 - DNA, 19 bp, Mus musculus
  siRNA target sequence for 4933421E11Rik (NM_177309.2,1720-1738).
gtccactcactgccttaaa

SEQ ID NO: 794900 - DNA, 19 bp, Mus musculus
  siRNA target sequence for 4933421E11Rik (NM_177309.2,1741-1759).
gagtaagactgtatttata

SEQ ID NO: 794901 - DNA, 19 bp, Mus musculus
  siRNA target sequence for 4933421E11Rik (NM_177309.2,1817-1835).
ctcgtccagaacatagaga

SEQ ID NO: 794902 - DNA, 19 bp, Mus musculus
  siRNA target sequence for 4933421E11Rik (NM_177309.2,1819-1837).
cgtccagaacatagagaaa

SEQ ID NO: 794903 - DNA, 19 bp, Mus musculus
  siRNA target sequence for 4933421E11Rik (NM_177309.2,1904-1922).
cagctcgccaaatccataa

SEQ ID NO: 794904 - DNA, 19 bp, Mus musculus
  siRNA target sequence for 4933421E11Rik (NM_177309.2,1906-1924).
gctcgccaaatccataaga

SEQ ID NO: 794905 - DNA, 19 bp, Mus musculus
  siRNA target sequence for 4933421E11Rik (NM_177309.2,1964-1982).
gtgataggtcttcaaagat

SEQ ID NO: 794906 - DNA, 19 bp, Mus musculus
  siRNA target sequence for 6330408A02Rik (NM_177312.2,516-534).
cgcttcccacgcatcctat

SEQ ID NO: 794907 - DNA, 19 bp, Mus musculus
  siRNA target sequence for 6330408A02Rik (NM_177312.2,646-664).
cgcctagcctactgagatt

SEQ ID NO: 794908 - DNA, 19 bp, Mus musculus
  siRNA target sequence for 6330408A02Rik (NM_177312.2,649-667).
ctagcctactgagattcat

SEQ ID NO: 794909 - DNA, 19 bp, Mus musculus
  siRNA target sequence for 6330408A02Rik (NM_177312.2,810-828).
ctagagacgctcttcagta

SEQ ID NO: 794910 - DNA, 19 bp, Mus musculus
  siRNA target sequence for 6330408A02Rik (NM_177312.2,884-902).
ctgccgcctagcagattca

SEQ ID NO: 794911 - DNA, 19 bp, Mus musculus
  siRNA target sequence for 6330408A02Rik (NM_177312.2,886-904).
gccgcctagcagattcaaa

SEQ ID NO: 794912 - DNA, 19 bp, Mus musculus
  siRNA target sequence for 6330408A02Rik (NM_177312.2,894-912).
gcagattcaaaatcctata

SEQ ID NO: 794913 - DNA, 19 bp, Mus musculus
  siRNA target sequence for 6330408A02Rik (NM_177312.2,951-969).
gctccaactgctttcatca

SEQ ID NO: 794914 - DNA, 19 bp, Mus musculus
  siRNA target sequence for 6330408A02Rik (NM_177312.2,954-972).
ccaactgctttcatcagat

SEQ ID NO: 794915 - DNA, 19 bp, Mus musculus
  siRNA target sequence for 6330408A02Rik (NM_177312.2,1070-1088).
ccatcgcaggcgactctta

SEQ ID NO: 794916 - DNA, 19 bp, Mus musculus
  siRNA target sequence for 6330408A02Rik (NM_177312.2,1071-1089).
catcgcaggcgactcttaa

SEQ ID NO: 794917 - DNA, 19 bp, Mus musculus
  siRNA target sequence for 6330408A02Rik (NM_177312.2,1092-1110).
cgcctcagcccctcacata

SEQ ID NO: 794918 - DNA, 19 bp, Mus musculus
  siRNA target sequence for 6330408A02Rik (NM_177312.2,1094-1112).
cctcagcccctcacatagt

SEQ ID NO: 794919 - DNA, 19 bp, Mus musculus
  siRNA target sequence for 6330408A02Rik (NM_177312.2,1336-1354).
gagtctggttggagaatca

SEQ ID NO: 794920 - DNA, 19 bp, Mus musculus
  siRNA target sequence for 6330408A02Rik (NM_177312.2,1338-1356).
gtctggttggagaatcaga

SEQ ID NO: 794921 - DNA, 19 bp, Mus musculus
  siRNA target sequence for 6330408A02Rik (NM_177312.2,1432-1450).
ggggaacccagatagagaa

SEQ ID NO: 794922 - DNA, 19 bp, Mus musculus
  siRNA target sequence for 6330408A02Rik (NM_177312.2,1433-1451).
gggaacccagatagagaat

SEQ ID NO: 794923 - DNA, 19 bp, Mus musculus
  siRNA target sequence for 6330408A02Rik (NM_177312.2,1562-1580).
ggcacgtgcaccaaaacct

SEQ ID NO: 794924 - DNA, 19 bp, Mus musculus
  siRNA target sequence for 6330408A02Rik (NM_177312.2,1617-1635).
gggatcgacgttagaaagt

SEQ ID NO: 794925 - DNA, 19 bp, Mus musculus
  siRNA target sequence for 6330408A02Rik (NM_177312.2,1733-1751).
gagaagtgggaggtttcta

SEQ ID NO: 794926 - DNA, 19 bp, Mus musculus
  siRNA target sequence for 6330408A02Rik (NM_177312.2,1735-1753).
gaagtgggaggtttctagt

SEQ ID NO: 794927 - DNA, 19 bp, Mus musculus
  siRNA target sequence for 6330408A02Rik (NM_177312.2,1738-1756).
gtgggaggtttctagtcaa

SEQ ID NO: 794928 - DNA, 19 bp, Mus musculus
  siRNA target sequence for 6330408A02Rik (NM_177312.2,1807-1825).
gagcaacaggcatagtaaa

SEQ ID NO: 794929 - DNA, 19 bp, Mus musculus
  siRNA target sequence for 6330408A02Rik (NM_177312.2,1843-1861).
cccaacctgtgagtttcaa

SEQ ID NO: 794930 - DNA, 19 bp, Mus musculus
  siRNA target sequence for 1700006J14Rik (NM_177313.2,390-408).
ggctccctactaaggaaat

SEQ ID NO: 794931 - DNA, 19 bp, Mus musculus
  siRNA target sequence for 1700006J14Rik (NM_177313.2,391-409).
gctccctactaaggaaatt

SEQ ID NO: 794932 - DNA, 19 bp, Mus musculus
  siRNA target sequence for 1700006J14Rik (NM_177313.2,394-412).
ccctactaaggaaattcat

SEQ ID NO: 794933 - DNA, 19 bp, Mus musculus
  siRNA target sequence for 1700006J14Rik (NM_177313.2,395-413).
cctactaaggaaattcata

SEQ ID NO: 794934 - DNA, 19 bp, Mus musculus
  siRNA target sequence for 1700006J14Rik (NM_177313.2,399-417).
ctaaggaaattcatacatt

SEQ ID NO: 794935 - DNA, 19 bp, Mus musculus
  siRNA target sequence for 1700006J14Rik (NM_177313.2,482-500).
gaccacccacgatactcaa

SEQ ID NO: 794936 - DNA, 19 bp, Mus musculus
  siRNA target sequence for 1700006J14Rik (NM_177313.2,484-502).
ccacccacgatactcaatt

SEQ ID NO: 794937 - DNA, 19 bp, Mus musculus
  siRNA target sequence for 1700006J14Rik (NM_177313.2,485-503).
cacccacgatactcaattt

SEQ ID NO: 794938 - DNA, 19 bp, Mus musculus
  siRNA target sequence for 1700006J14Rik (NM_177313.2,505-523).
cacccatggtacattgctt

SEQ ID NO: 794939 - DNA, 19 bp, Mus musculus
  siRNA target sequence for 1700006J14Rik (NM_177313.2,524-542).
cgctacacggaagaagtta

SEQ ID NO: 794940 - DNA, 19 bp, Mus musculus
  siRNA target sequence for 1700006J14Rik (NM_177313.2,531-549).
cggaagaagttatttagaa

SEQ ID NO: 794941 - DNA, 19 bp, Mus musculus
  siRNA target sequence for 1700006J14Rik (NM_177313.2,555-573).
catttcgagcctgcttata

SEQ ID NO: 794942 - DNA, 19 bp, Mus musculus
  siRNA target sequence for 1700006J14Rik (NM_177313.2,561-579).
gagcctgcttatacataca

SEQ ID NO: 794943 - DNA, 19 bp, Mus musculus
  siRNA target sequence for 1700006J14Rik (NM_177313.2,563-581).
gcctgcttatacatacaat

SEQ ID NO: 794944 - DNA, 19 bp, Mus musculus
  siRNA target sequence for 1700006J14Rik (NM_177313.2,565-583).
ctgcttatacatacaatgt

SEQ ID NO: 794945 - DNA, 19 bp, Mus musculus
  siRNA target sequence for 5330439B14Rik (NM_177314.2,366-384).
ctccagtgtcttaaagtga

SEQ ID NO: 794946 - DNA, 19 bp, Mus musculus
  siRNA target sequence for 5330439B14Rik (NM_177314.2,406-424).
caagatcatccaactacat

SEQ ID NO: 794947 - DNA, 19 bp, Mus musculus
  siRNA target sequence for 5330439B14Rik (NM_177314.2,412-430).
catccaactacatagtcat

SEQ ID NO: 794948 - DNA, 19 bp, Mus musculus
  siRNA target sequence for 5330439B14Rik (NM_177314.2,419-437).
ctacatagtcatggataat

SEQ ID NO: 794949 - DNA, 19 bp, Mus musculus
  siRNA target sequence for 5330439B14Rik (NM_177314.2,447-465).
cgtctgtcaccttctacta

SEQ ID NO: 794950 - DNA, 19 bp, Mus musculus
  siRNA target sequence for 5330439B14Rik (NM_177314.2,463-481).
ctatttcataccctttgtt

SEQ ID NO: 794951 - DNA, 19 bp, Mus musculus
  siRNA target sequence for 5330439B14Rik (NM_177314.2,520-538).
ggatatactgcctctcaat

SEQ ID NO: 794952 - DNA, 19 bp, Mus musculus
  siRNA target sequence for 5330439B14Rik (NM_177314.2,563-581).
gtttcctgccaatgttaga

SEQ ID NO: 794953 - DNA, 19 bp, Mus musculus
  siRNA target sequence for 5330439B14Rik (NM_177314.2,567-585).
cctgccaatgttagattca

SEQ ID NO: 794954 - DNA, 19 bp, Mus musculus
  siRNA target sequence for 5330439B14Rik (NM_177314.2,620-638).
ctgtgggctcacaactcaa

SEQ ID NO: 794955 - DNA, 19 bp, Mus musculus
  siRNA target sequence for 5330439B14Rik (NM_177314.2,622-640).
gtgggctcacaactcaaat

SEQ ID NO: 794956 - DNA, 19 bp, Mus musculus
  siRNA target sequence for 5330439B14Rik (NM_177314.2,624-642).
gggctcacaactcaaatga

SEQ ID NO: 794957 - DNA, 19 bp, Mus musculus
  siRNA target sequence for 5330439B14Rik (NM_177314.2,626-644).
gctcacaactcaaatgaca

SEQ ID NO: 794958 - DNA, 19 bp, Mus musculus
  siRNA target sequence for Fpr-rs6 (NM_177316.1,423-441).
ggcaacgaaagtgatcttt

SEQ ID NO: 794959 - DNA, 19 bp, Mus musculus
  siRNA target sequence for Fpr-rs6 (NM_177316.1,514-532).
gggaaagtacattgcatat

SEQ ID NO: 794960 - DNA, 19 bp, Mus musculus
  siRNA target sequence for Fpr-rs6 (NM_177316.1,562-580).
gaggagcaagtaaaagtat

SEQ ID NO: 794961 - DNA, 19 bp, Mus musculus
  siRNA target sequence for Fpr-rs7 (NM_177317.1,512-530).
gtggtaaagtacactgtat

SEQ ID NO: 794962 - DNA, 19 bp, Mus musculus
  siRNA target sequence for Fpr-rs7 (NM_177317.1,568-586).
caggtaaacatgtctatga

SEQ ID NO: 794963 - DNA, 19 bp, Mus musculus
  siRNA target sequence for E430039K05Rik (NM_177318.2,153-171).
ctcgagtcccggaagaagt

SEQ ID NO: 794964 - DNA, 19 bp, Mus musculus
  siRNA target sequence for E430039K05Rik (NM_177318.2,239-257).
ctggagcgacgccaaactt

SEQ ID NO: 794965 - DNA, 19 bp, Mus musculus
  siRNA target sequence for E430039K05Rik (NM_177318.2,255-273).
cttgccgcctacctcattt

SEQ ID NO: 794966 - DNA, 19 bp, Mus musculus
  siRNA target sequence for E430039K05Rik (NM_177318.2,394-412).
ggtatgaggaccacaaaca

SEQ ID NO: 794967 - DNA, 19 bp, Mus musculus
  siRNA target sequence for E430039K05Rik (NM_177318.2,704-722).
cagcagtgggcttatcact

SEQ ID NO: 794968 - DNA, 19 bp, Mus musculus
  siRNA target sequence for E430039K05Rik (NM_177318.2,1139-1157).
catggataccacctctata

SEQ ID NO: 794969 - DNA, 19 bp, Mus musculus
  siRNA target sequence for E430039K05Rik (NM_177318.2,1432-1450).
gctgcagccaggtgtatgt

SEQ ID NO: 794970 - DNA, 19 bp, Mus musculus
  siRNA target sequence for E430039K05Rik (NM_177318.2,1530-1548).
ggcaagaagttttatttat

SEQ ID NO: 794971 - DNA, 19 bp, Mus musculus
  siRNA target sequence for E430039K05Rik (NM_177318.2,1563-1581).
cgccacatgatcatccatt

SEQ ID NO: 794972 - DNA, 19 bp, Mus musculus
  siRNA target sequence for E430039K05Rik (NM_177318.2,1713-1731).
cagcgtgcttcgctcaatt

SEQ ID NO: 794973 - DNA, 19 bp, Mus musculus
  siRNA target sequence for E430039K05Rik (NM_177318.2,1839-1857).
cacccggaccacaaaccta

SEQ ID NO: 794974 - DNA, 19 bp, Mus musculus
  siRNA target sequence for Mia2 (NM_177321.2,3-21).
ggcggaagtcagtgttcaa

SEQ ID NO: 794975 - DNA, 19 bp, Mus musculus
  siRNA target sequence for Mia2 (NM_177321.2,4-22).
gcggaagtcagtgttcaaa

SEQ ID NO: 794976 - DNA, 19 bp, Mus musculus
  siRNA target sequence for Mia2 (NM_177321.2,16-34).
gttcaaagaatccttcttt

SEQ ID NO: 794977 - DNA, 19 bp, Mus musculus
  siRNA target sequence for Mia2 (NM_177321.2,166-184).
cggtacctgaacttcacta

SEQ ID NO: 794978 - DNA, 19 bp, Mus musculus
  siRNA target sequence for Mia2 (NM_177321.2,180-198).
cactacgggagaagagata

SEQ ID NO: 794979 - DNA, 19 bp, Mus musculus
  siRNA target sequence for Mia2 (NM_177321.2,185-203).
cgggagaagagatatctgt

SEQ ID NO: 794980 - DNA, 19 bp, Mus musculus
  siRNA target sequence for Mia2 (NM_177321.2,193-211).
gagatatctgtttatgtta

SEQ ID NO: 794981 - DNA, 19 bp, Mus musculus
  siRNA target sequence for Mia2 (NM_177321.2,195-213).
gatatctgtttatgttaaa

SEQ ID NO: 794982 - DNA, 19 bp, Mus musculus
  siRNA target sequence for Mia2 (NM_177321.2,218-236).
gaggagacagagaagattt

SEQ ID NO: 794983 - DNA, 19 bp, Mus musculus
  siRNA target sequence for Mia2 (NM_177321.2,327-345).
gccaactaaatctgacttt

SEQ ID NO: 794984 - DNA, 19 bp, Mus musculus
  siRNA target sequence for Mia2 (NM_177321.2,361-379).
gaaggctacatatttggaa

SEQ ID NO: 794985 - DNA, 19 bp, Mus musculus
  siRNA target sequence for Mia2 (NM_177321.2,380-398).
gtgaacagagtgaattaaa

SEQ ID NO: 794986 - DNA, 19 bp, Mus musculus
  siRNA target sequence for Mia2 (NM_177321.2,439-457).
gatgaagaccaaaactata

SEQ ID NO: 794987 - DNA, 19 bp, Mus musculus
  siRNA target sequence for Mia2 (NM_177321.2,714-732).
gaaggttttcgaatcagat

SEQ ID NO: 794988 - DNA, 19 bp, Mus musculus
  siRNA target sequence for Mia2 (NM_177321.2,717-735).
ggttttcgaatcagatact

SEQ ID NO: 794989 - DNA, 19 bp, Mus musculus
  siRNA target sequence for Mia2 (NM_177321.2,822-840).
gccaaaatcagagacatta

SEQ ID NO: 794990 - DNA, 19 bp, Mus musculus
  siRNA target sequence for Mia2 (NM_177321.2,851-869).
cagtgccggacgaagagta

SEQ ID NO: 794991 - DNA, 19 bp, Mus musculus
  siRNA target sequence for Mia2 (NM_177321.2,926-944).
gtgagggccttacaagtta

SEQ ID NO: 794992 - DNA, 19 bp, Mus musculus
  siRNA target sequence for Mia2 (NM_177321.2,930-948).
gggccttacaagttattta

SEQ ID NO: 794993 - DNA, 19 bp, Mus musculus
  siRNA target sequence for Mia2 (NM_177321.2,967-985).
gcaggacttgagttattgt

SEQ ID NO: 794994 - DNA, 19 bp, Mus musculus
  siRNA target sequence for Mia2 (NM_177321.2,1048-1066).
ccggctccatgcagagaaa

SEQ ID NO: 794995 - DNA, 19 bp, Mus musculus
  siRNA target sequence for Mia2 (NM_177321.2,1049-1067).
cggctccatgcagagaaat

SEQ ID NO: 794996 - DNA, 19 bp, Mus musculus
  siRNA target sequence for Mia2 (NM_177321.2,1121-1139).
gctggttttactatggatt

SEQ ID NO: 794997 - DNA, 19 bp, Mus musculus
  siRNA target sequence for Mia2 (NM_177321.2,1122-1140).
ctggttttactatggattt

SEQ ID NO: 794998 - DNA, 19 bp, Mus musculus
  siRNA target sequence for Mia2 (NM_177321.2,1125-1143).
gttttactatggatttggt

SEQ ID NO: 794999 - DNA, 19 bp, Mus musculus
  siRNA target sequence for Mia2 (NM_177321.2,1142-1160).
gtatgctaggctttacaaa

SEQ ID NO: 795000 - DNA, 19 bp, Mus musculus
  siRNA target sequence for Mia2 (NM_177321.2,1164-1182).
cgacgaagacaacattgtt

SEQ ID NO: 795001 - DNA, 19 bp, Mus musculus
  siRNA target sequence for Mia2 (NM_177321.2,1167-1185).
cgaagacaacattgtttca

SEQ ID NO: 795002 - DNA, 19 bp, Mus musculus
  siRNA target sequence for Mia2 (NM_177321.2,1173-1191).
caacattgtttcagacaaa

SEQ ID NO: 795003 - DNA, 19 bp, Mus musculus
  siRNA target sequence for Mia2 (NM_177321.2,1340-1358).
ctggttccatgcagtatct

SEQ ID NO: 795004 - DNA, 19 bp, Mus musculus
  siRNA target sequence for Mia2 (NM_177321.2,1342-1360).
ggttccatgcagtatctga

SEQ ID NO: 795005 - DNA, 19 bp, Mus musculus
  siRNA target sequence for Mia2 (NM_177321.2,1343-1361).
gttccatgcagtatctgaa

SEQ ID NO: 795006 - DNA, 19 bp, Mus musculus
  siRNA target sequence for Mia2 (NM_177321.2,1362-1380).
gaagttctttgataatcct

SEQ ID NO: 795007 - DNA, 19 bp, Mus musculus
  siRNA target sequence for Mia2 (NM_177321.2,1402-1420).
gaggacacagaattaccat

SEQ ID NO: 795008 - DNA, 19 bp, Mus musculus
  siRNA target sequence for Mia2 (NM_177321.2,1437-1455).
ggatcaagatgatatagta

SEQ ID NO: 795009 - DNA, 19 bp, Mus musculus
  siRNA target sequence for Mia2 (NM_177321.2,1524-1542).
gctggcgagcagatacgtt

SEQ ID NO: 795010 - DNA, 19 bp, Mus musculus
  siRNA target sequence for 2810450M21Rik (NM_177323.2,275-293).
cgacgcgctcctttcctat

SEQ ID NO: 795011 - DNA, 19 bp, Mus musculus
  siRNA target sequence for 2810450M21Rik (NM_177323.2,279-297).
gcgctcctttcctatgtgt

SEQ ID NO: 795012 - DNA, 19 bp, Mus musculus
  siRNA target sequence for 2810450M21Rik (NM_177323.2,321-339).
ggaagtgaccttaagtctt

SEQ ID NO: 795013 - DNA, 19 bp, Mus musculus
  siRNA target sequence for 2810450M21Rik (NM_177323.2,327-345).
gaccttaagtctttgaaga

SEQ ID NO: 795014 - DNA, 19 bp, Mus musculus
  siRNA target sequence for 2810450M21Rik (NM_177323.2,337-355).
ctttgaagacacttggtaa

SEQ ID NO: 795015 - DNA, 19 bp, Mus musculus
  siRNA target sequence for 2810450M21Rik (NM_177323.2,351-369).
ggtaaactcatagaacaaa

SEQ ID NO: 795016 - DNA, 19 bp, Mus musculus
  siRNA target sequence for 2810450M21Rik (NM_177323.2,396-414).
gaacaggtacttacaattt

SEQ ID NO: 795017 - DNA, 19 bp, Mus musculus
  siRNA target sequence for 2810450M21Rik (NM_177323.2,461-479).
ggaatccaaacaacttctt

SEQ ID NO: 795018 - DNA, 19 bp, Mus musculus
  siRNA target sequence for 2810450M21Rik (NM_177323.2,507-525).
ctcttcagctccattagca

SEQ ID NO: 795019 - DNA, 19 bp, Mus musculus
  siRNA target sequence for 2810450M21Rik (NM_177323.2,596-614).
gcggcatctcgcatacctt

SEQ ID NO: 795020 - DNA, 19 bp, Mus musculus
  siRNA target sequence for 2810450M21Rik (NM_177323.2,600-618).
catctcgcataccttaagt

SEQ ID NO: 795021 - DNA, 19 bp, Mus musculus
  siRNA target sequence for 2810450M21Rik (NM_177323.2,769-787).
gtcagctgttgaaactaca

SEQ ID NO: 795022 - DNA, 19 bp, Mus musculus
  siRNA target sequence for 2810450M21Rik (NM_177323.2,786-804).
caggcctcagatgagttat

SEQ ID NO: 795023 - DNA, 19 bp, Mus musculus
  siRNA target sequence for 2810450M21Rik (NM_177323.2,789-807).
gcctcagatgagttattaa

SEQ ID NO: 795024 - DNA, 19 bp, Mus musculus
  siRNA target sequence for 2810450M21Rik (NM_177323.2,791-809).
ctcagatgagttattaact

SEQ ID NO: 795025 - DNA, 19 bp, Mus musculus
  siRNA target sequence for 2810450M21Rik (NM_177323.2,793-811).
cagatgagttattaactga

SEQ ID NO: 795026 - DNA, 19 bp, Mus musculus
  siRNA target sequence for 2810450M21Rik (NM_177323.2,885-903).
gctcccctgcagaagagat

SEQ ID NO: 795027 - DNA, 19 bp, Mus musculus
  siRNA target sequence for 2810450M21Rik (NM_177323.2,972-990).
gtacttatgtggattggaa

SEQ ID NO: 795028 - DNA, 19 bp, Mus musculus
  siRNA target sequence for 2810450M21Rik (NM_177323.2,982-1000).
ggattggaaaccatacaca

SEQ ID NO: 795029 - DNA, 19 bp, Mus musculus
  siRNA target sequence for 2810450M21Rik (NM_177323.2,997-1015).
cacagtttctggatgagaa

SEQ ID NO: 795030 - DNA, 19 bp, Mus musculus
  siRNA target sequence for 2810450M21Rik (NM_177323.2,1333-1351).
gggtatcccagtataaaga

SEQ ID NO: 795031 - DNA, 19 bp, Mus musculus
  siRNA target sequence for 2810450M21Rik (NM_177323.2,1335-1353).
gtatcccagtataaagaca

SEQ ID NO: 795032 - DNA, 19 bp, Mus musculus
  siRNA target sequence for 2810450M21Rik (NM_177323.2,1403-1421).
gaccctgcttttggttata

SEQ ID NO: 795033 - DNA, 19 bp, Mus musculus
  siRNA target sequence for 2810450M21Rik (NM_177323.2,1423-1441).
ctgacaggtataaaaatct

SEQ ID NO: 795034 - DNA, 19 bp, Mus musculus
  siRNA target sequence for 2810450M21Rik (NM_177323.2,1510-1528).
ggttaacgcaggtgatgaa

SEQ ID NO: 795035 - DNA, 19 bp, Mus musculus
  siRNA target sequence for 2810450M21Rik (NM_177323.2,1557-1575).
cggtactgtgcgattctca

SEQ ID NO: 795036 - DNA, 19 bp, Mus musculus
  siRNA target sequence for 2810450M21Rik (NM_177323.2,1558-1576).
ggtactgtgcgattctcaa

SEQ ID NO: 795037 - DNA, 19 bp, Mus musculus
  siRNA target sequence for 2810450M21Rik (NM_177323.2,1559-1577).
gtactgtgcgattctcaat

SEQ ID NO: 795038 - DNA, 19 bp, Mus musculus
  siRNA target sequence for 2810450M21Rik (NM_177323.2,1572-1590).
ctcaatgccgtgaactata

SEQ ID NO: 795039 - DNA, 19 bp, Mus musculus
  siRNA target sequence for 2810450M21Rik (NM_177323.2,1606-1624).
cagactgggctgacaatgt

SEQ ID NO: 795040 - DNA, 19 bp, Mus musculus
  siRNA target sequence for 2810450M21Rik (NM_177323.2,1612-1630).
gggctgacaatgttttctt

SEQ ID NO: 795041 - DNA, 19 bp, Mus musculus
  siRNA target sequence for 2810450M21Rik (NM_177323.2,1670-1688).
gaataacgtcctcagtaaa

SEQ ID NO: 795042 - DNA, 19 bp, Mus musculus
  siRNA target sequence for 2810450M21Rik (NM_177323.2,1720-1738).
gctcggtcttcgatgacat

SEQ ID NO: 795043 - DNA, 19 bp, Mus musculus
  siRNA target sequence for 2810450M21Rik (NM_177323.2,1723-1741).
cggtcttcgatgacatgat

SEQ ID NO: 795044 - DNA, 19 bp, Mus musculus
  siRNA target sequence for 2810450M21Rik (NM_177323.2,1725-1743).
gtcttcgatgacatgatca

SEQ ID NO: 795045 - DNA, 19 bp, Mus musculus
  siRNA target sequence for 2810450M21Rik (NM_177323.2,1779-1797).
cgccaagtagaccatgttt

SEQ ID NO: 795046 - DNA, 19 bp, Mus musculus
  siRNA target sequence for 2810450M21Rik (NM_177323.2,1950-1968).
ctgtgtttctcgctattca

SEQ ID NO: 795047 - DNA, 19 bp, Mus musculus
  siRNA target sequence for 2810450M21Rik (NM_177323.2,1952-1970).
gtgtttctcgctattcaga

SEQ ID NO: 795048 - DNA, 19 bp, Mus musculus
  siRNA target sequence for 2810450M21Rik (NM_177323.2,2012-2030).
ctaccaggaaataatcctt

SEQ ID NO: 795049 - DNA, 19 bp, Mus musculus
  siRNA target sequence for 2810450M21Rik (NM_177323.2,2113-2131).
gcaagagaccagaaaacta

SEQ ID NO: 795050 - DNA, 19 bp, Mus musculus
  siRNA target sequence for 2810450M21Rik (NM_177323.2,2171-2189).
gaacatcggttctgcatta

SEQ ID NO: 795051 - DNA, 19 bp, Mus musculus
  siRNA target sequence for 2810450M21Rik (NM_177323.2,2236-2254).
cagcagccttaaatgaagt

SEQ ID NO: 795052 - DNA, 19 bp, Mus musculus
  siRNA target sequence for AW550801 (NM_177325.2,461-479).
ctaaagtcgctgataccat

SEQ ID NO: 795053 - DNA, 19 bp, Mus musculus
  siRNA target sequence for AW550801 (NM_177325.2,510-528).
ggacagtacgggggattat

SEQ ID NO: 795054 - DNA, 19 bp, Mus musculus
  siRNA target sequence for AW550801 (NM_177325.2,511-529).
gacagtacgggggattatt

SEQ ID NO: 795055 - DNA, 19 bp, Mus musculus
  siRNA target sequence for AW550801 (NM_177325.2,550-568).
cagggccttcccacctata

SEQ ID NO: 795056 - DNA, 19 bp, Mus musculus
  siRNA target sequence for AW550801 (NM_177325.2,552-570).
gggccttcccacctataca

SEQ ID NO: 795057 - DNA, 19 bp, Mus musculus
  siRNA target sequence for AW550801 (NM_177325.2,554-572).
gccttcccacctatacact

SEQ ID NO: 795058 - DNA, 19 bp, Mus musculus
  siRNA target sequence for AW550801 (NM_177325.2,694-712).
gaatcaggaatgctactta

SEQ ID NO: 795059 - DNA, 19 bp, Mus musculus
  siRNA target sequence for AW550801 (NM_177325.2,732-750).
gcaacggcatcttgctttt

SEQ ID NO: 795060 - DNA, 19 bp, Mus musculus
  siRNA target sequence for AW550801 (NM_177325.2,752-770).
gggatcggcgagcttactt

SEQ ID NO: 795061 - DNA, 19 bp, Mus musculus
  siRNA target sequence for AW550801 (NM_177325.2,754-772).
gatcggcgagcttacttgt

SEQ ID NO: 795062 - DNA, 19 bp, Mus musculus
  siRNA target sequence for AW550801 (NM_177325.2,813-831).
cttagtgggcaccttgaaa

SEQ ID NO: 795063 - DNA, 19 bp, Mus musculus
  siRNA target sequence for AW550801 (NM_177325.2,819-837).
gggcaccttgaaaatctca

SEQ ID NO: 795064 - DNA, 19 bp, Mus musculus
  siRNA target sequence for AW550801 (NM_177325.2,903-921).
ccaaatgaatcaaatagat

SEQ ID NO: 795065 - DNA, 19 bp, Mus musculus
  siRNA target sequence for AW550801 (NM_177325.2,928-946).
gtggatccgttccctttaa

SEQ ID NO: 795066 - DNA, 19 bp, Mus musculus
  siRNA target sequence for AW550801 (NM_177325.2,934-952).
ccgttccctttaaatccta

SEQ ID NO: 795067 - DNA, 19 bp, Mus musculus
  siRNA target sequence for AW550801 (NM_177325.2,985-1003).
gcaatggaggtttgtgtta

SEQ ID NO: 795068 - DNA, 19 bp, Mus musculus
  siRNA target sequence for AW550801 (NM_177325.2,1063-1081).
caccaggagtctttacaaa

SEQ ID NO: 795069 - DNA, 19 bp, Mus musculus
  siRNA target sequence for AW550801 (NM_177325.2,1168-1186).
cggtccagagtggtaaaga

SEQ ID NO: 795070 - DNA, 19 bp, Mus musculus
  siRNA target sequence for AW550801 (NM_177325.2,1169-1187).
ggtccagagtggtaaagaa

SEQ ID NO: 795071 - DNA, 19 bp, Mus musculus
  siRNA target sequence for AW550801 (NM_177325.2,1262-1280).
gtgaatatgatgatataca

SEQ ID NO: 795072 - DNA, 19 bp, Mus musculus
  siRNA target sequence for AW550801 (NM_177325.2,1367-1385).
ctgtgcgtgacgatctata

SEQ ID NO: 795073 - DNA, 19 bp, Mus musculus
  siRNA target sequence for AW550801 (NM_177325.2,1371-1389).
gcgtgacgatctatacgat

SEQ ID NO: 795074 - DNA, 19 bp, Mus musculus
  siRNA target sequence for AW550801 (NM_177325.2,1377-1395).
cgatctatacgatgagaaa

SEQ ID NO: 795075 - DNA, 19 bp, Mus musculus
  siRNA target sequence for AW550801 (NM_177325.2,1458-1476).
gtttccagatgaaatggat

SEQ ID NO: 795076 - DNA, 19 bp, Mus musculus
  siRNA target sequence for AW550801 (NM_177325.2,1489-1507).
gtagctgctagaattcgat

SEQ ID NO: 795077 - DNA, 19 bp, Mus musculus
  siRNA target sequence for AW550801 (NM_177325.2,1493-1511).
ctgctagaattcgatttca

SEQ ID NO: 795078 - DNA, 19 bp, Mus musculus
  siRNA target sequence for AW550801 (NM_177325.2,1495-1513).
gctagaattcgatttcaga

SEQ ID NO: 795079 - DNA, 19 bp, Mus musculus
  siRNA target sequence for AW550801 (NM_177325.2,1541-1559).
catctccttgggatcctaa

SEQ ID NO: 795080 - DNA, 19 bp, Mus musculus
  siRNA target sequence for AW550801 (NM_177325.2,1561-1579).
gaaaaccttcctagagatt

SEQ ID NO: 795081 - DNA, 19 bp, Mus musculus
  siRNA target sequence for AW550801 (NM_177325.2,1574-1592).
gagattatgctcggatatt

SEQ ID NO: 795082 - DNA, 19 bp, Mus musculus
  siRNA target sequence for AW550801 (NM_177325.2,1602-1620).
gaattttgttaatactaga

SEQ ID NO: 795083 - DNA, 19 bp, Mus musculus
  siRNA target sequence for AW550801 (NM_177325.2,1609-1627).
gttaatactagaaaaagaa

SEQ ID NO: 795084 - DNA, 19 bp, Mus musculus
  siRNA target sequence for AW550801 (NM_177325.2,1731-1749).
gcaaggagcgcccttgatt

SEQ ID NO: 795085 - DNA, 19 bp, Mus musculus
  siRNA target sequence for AW550801 (NM_177325.2,1735-1753).
ggagcgcccttgattgcat

SEQ ID NO: 795086 - DNA, 19 bp, Mus musculus
  siRNA target sequence for AW550801 (NM_177325.2,1736-1754).
gagcgcccttgattgcatt

SEQ ID NO: 795087 - DNA, 19 bp, Mus musculus
  siRNA target sequence for AW550801 (NM_177325.2,1740-1758).
gcccttgattgcattttct

SEQ ID NO: 795088 - DNA, 19 bp, Mus musculus
  siRNA target sequence for AW550801 (NM_177325.2,1746-1764).
gattgcattttctttgcta

SEQ ID NO: 795089 - DNA, 19 bp, Mus musculus
  siRNA target sequence for AW550801 (NM_177325.2,1751-1769).
cattttctttgctacctta

SEQ ID NO: 795090 - DNA, 19 bp, Mus musculus
  siRNA target sequence for AW550801 (NM_177325.2,1837-1855).
gcgaaagaagaattgatct

SEQ ID NO: 795091 - DNA, 19 bp, Mus musculus
  siRNA target sequence for AW550801 (NM_177325.2,2046-2064).
cgctacaggccatctgttt

SEQ ID NO: 795092 - DNA, 19 bp, Mus musculus
  siRNA target sequence for AW550801 (NM_177325.2,2074-2092).
ccagacaggatggtcataa

SEQ ID NO: 795093 - DNA, 19 bp, Mus musculus
  siRNA target sequence for AW550801 (NM_177325.2,2104-2122).
ctaagtggtcatcctttta

SEQ ID NO: 795094 - DNA, 19 bp, Mus musculus
  siRNA target sequence for AW550801 (NM_177325.2,2140-2158).
gcagtagtgcggtacatgt

SEQ ID NO: 795095 - DNA, 19 bp, Mus musculus
  siRNA target sequence for AW550801 (NM_177325.2,2141-2159).
cagtagtgcggtacatgtt

SEQ ID NO: 795096 - DNA, 19 bp, Mus musculus
  siRNA target sequence for AW550801 (NM_177325.2,2143-2161).
gtagtgcggtacatgttct

SEQ ID NO: 795097 - DNA, 19 bp, Mus musculus
  siRNA target sequence for AW550801 (NM_177325.2,2160-2178).
cttcaacagaggatgtgat

SEQ ID NO: 795098 - DNA, 19 bp, Mus musculus
  siRNA target sequence for D330050P16Rik (NM_177332.2,307-325).
ctgcctccagacagcttaa

SEQ ID NO: 795099 - DNA, 19 bp, Mus musculus
  siRNA target sequence for D330050P16Rik (NM_177332.2,385-403).
gactacgcgcttttgactt

SEQ ID NO: 795100 - DNA, 19 bp, Mus musculus
  siRNA target sequence for D330050P16Rik (NM_177332.2,387-405).
ctacgcgcttttgacttta

SEQ ID NO: 795101 - DNA, 19 bp, Mus musculus
  siRNA target sequence for D330050P16Rik (NM_177332.2,517-535).
gcagtggcactctggttaa

SEQ ID NO: 795102 - DNA, 19 bp, Mus musculus
  siRNA target sequence for D330050P16Rik (NM_177332.2,518-536).
cagtggcactctggttaaa

SEQ ID NO: 795103 - DNA, 19 bp, Mus musculus
  siRNA target sequence for D330050P16Rik (NM_177332.2,605-623).
cagctgtcagtttaaacca

SEQ ID NO: 795104 - DNA, 19 bp, Mus musculus
  siRNA target sequence for D330050P16Rik (NM_177332.2,654-672).
cttgccagaagttaacaaa

SEQ ID NO: 795105 - DNA, 19 bp, Mus musculus
  siRNA target sequence for D330050P16Rik (NM_177332.2,687-705).
gatcctaggtgtgagtata

SEQ ID NO: 795106 - DNA, 19 bp, Mus musculus
  siRNA target sequence for D330050P16Rik (NM_177332.2,691-709).
ctaggtgtgagtatacagt

SEQ ID NO: 795107 - DNA, 19 bp, Mus musculus
  siRNA target sequence for D330050P16Rik (NM_177332.2,735-753).
gcccattgaacatgttaca

SEQ ID NO: 795108 - DNA, 19 bp, Mus musculus
  siRNA target sequence for D330050P16Rik (NM_177332.2,777-795).
cttactgggatctccttat

SEQ ID NO: 795109 - DNA, 19 bp, Mus musculus
  siRNA target sequence for D330050P16Rik (NM_177332.2,801-819).
gatccacatcgcagaagat

SEQ ID NO: 795110 - DNA, 19 bp, Mus musculus
  siRNA target sequence for D330050P16Rik (NM_177332.2,927-945).
ggctgctcaggactatcta

SEQ ID NO: 795111 - DNA, 19 bp, Mus musculus
  siRNA target sequence for D330050P16Rik (NM_177332.2,962-980).
ctctaaatgaagaggatat

SEQ ID NO: 795112 - DNA, 19 bp, Mus musculus
  siRNA target sequence for D330050P16Rik (NM_177332.2,990-1008).
gtcctgtcctacattagga

SEQ ID NO: 795113 - DNA, 19 bp, Mus musculus
  siRNA target sequence for D330050P16Rik (NM_177332.2,1102-1120).
cacctgagtaccaagatgt

SEQ ID NO: 795114 - DNA, 19 bp, Mus musculus
  siRNA target sequence for D330050P16Rik (NM_177332.2,1223-1241).
gttcaccggctggatgtat

SEQ ID NO: 795115 - DNA, 19 bp, Mus musculus
  siRNA target sequence for D330050P16Rik (NM_177332.2,1228-1246).
ccggctggatgtatgacaa

SEQ ID NO: 795116 - DNA, 19 bp, Mus musculus
  siRNA target sequence for D330050P16Rik (NM_177332.2,1229-1247).
cggctggatgtatgacaat

SEQ ID NO: 795117 - DNA, 19 bp, Mus musculus
  siRNA target sequence for D330050P16Rik (NM_177332.2,1520-1538).
ggtctgccagcagtgaaat

SEQ ID NO: 795118 - DNA, 19 bp, Mus musculus
  siRNA target sequence for D330050P16Rik (NM_177332.2,1527-1545).
cagcagtgaaataatagga

SEQ ID NO: 795119 - DNA, 19 bp, Mus musculus
  siRNA target sequence for D330050P16Rik (NM_177332.2,1544-1562).
gagtgcagtccctacagaa

SEQ ID NO: 795120 - DNA, 19 bp, Mus musculus
  siRNA target sequence for D330050P16Rik (NM_177332.2,1558-1576).
cagaacggctgcatgaaca

SEQ ID NO: 795121 - DNA, 19 bp, Mus musculus
  siRNA target sequence for D330050P16Rik (NM_177332.2,1563-1581).
cggctgcatgaacagattt

SEQ ID NO: 795122 - DNA, 19 bp, Mus musculus
  siRNA target sequence for D330050P16Rik (NM_177332.2,1744-1762).
gccagtagcacggaacttt

SEQ ID NO: 795123 - DNA, 19 bp, Mus musculus
  siRNA target sequence for D330050P16Rik (NM_177332.2,1843-1861).
cttctagtgcccactttga

SEQ ID NO: 795124 - DNA, 19 bp, Mus musculus
  siRNA target sequence for D330050P16Rik (NM_177332.2,1931-1949).
cactgcagaacttaatgca

SEQ ID NO: 795125 - DNA, 19 bp, Mus musculus
  siRNA target sequence for D330050P16Rik (NM_177332.2,1938-1956).
gaacttaatgcatattgga

SEQ ID NO: 795126 - DNA, 19 bp, Mus musculus
  siRNA target sequence for E430013E20Rik (NM_177333.2,290-308).
ctgaatgacgtcaaggata

SEQ ID NO: 795127 - DNA, 19 bp, Mus musculus
  siRNA target sequence for E430013E20Rik (NM_177333.2,365-383).
gagagtctcaaagatgtaa

SEQ ID NO: 795128 - DNA, 19 bp, Mus musculus
  siRNA target sequence for E430013E20Rik (NM_177333.2,465-483).
gggagacccaagatctcat

SEQ ID NO: 795129 - DNA, 19 bp, Mus musculus
  siRNA target sequence for E430013E20Rik (NM_177333.2,503-521).
caagcccaccggaagctaa

SEQ ID NO: 795130 - DNA, 19 bp, Mus musculus
  siRNA target sequence for E430013E20Rik (NM_177333.2,508-526).
ccaccggaagctaatggat

SEQ ID NO: 795131 - DNA, 19 bp, Mus musculus
  siRNA target sequence for E430013E20Rik (NM_177333.2,588-606).
gggacatgaccctcattca

SEQ ID NO: 795132 - DNA, 19 bp, Mus musculus
  siRNA target sequence for E430013E20Rik (NM_177333.2,589-607).
ggacatgaccctcattcat

SEQ ID NO: 795133 - DNA, 19 bp, Mus musculus
  siRNA target sequence for E430013E20Rik (NM_177333.2,713-731).
gtctccgtggtcagaatca

SEQ ID NO: 795134 - DNA, 19 bp, Mus musculus
  siRNA target sequence for E430013E20Rik (NM_177333.2,715-733).
ctccgtggtcagaatcatt

SEQ ID NO: 795135 - DNA, 19 bp, Mus musculus
  siRNA target sequence for E430013E20Rik (NM_177333.2,717-735).
ccgtggtcagaatcattga

SEQ ID NO: 795136 - DNA, 19 bp, Mus musculus
  siRNA target sequence for E430013E20Rik (NM_177333.2,718-736).
cgtggtcagaatcattgaa

SEQ ID NO: 795137 - DNA, 19 bp, Mus musculus
  siRNA target sequence for E430013E20Rik (NM_177333.2,758-776).
cggatacttgatcgaaaaa

SEQ ID NO: 795138 - DNA, 19 bp, Mus musculus
  siRNA target sequence for E430013E20Rik (NM_177333.2,842-860).
gacagaactgtgacaacta

SEQ ID NO: 795139 - DNA, 19 bp, Mus musculus
  siRNA target sequence for E430013E20Rik (NM_177333.2,844-862).
cagaactgtgacaactaga

SEQ ID NO: 795140 - DNA, 19 bp, Mus musculus
  siRNA target sequence for E430013E20Rik (NM_177333.2,846-864).
gaactgtgacaactagaat

SEQ ID NO: 795141 - DNA, 19 bp, Mus musculus
  siRNA target sequence for E430013E20Rik (NM_177333.2,875-893).
caggcagacaccagagaat

SEQ ID NO: 795142 - DNA, 19 bp, Mus musculus
  siRNA target sequence for E430013E20Rik (NM_177333.2,990-1008).
ctcctcactatgagatctt

SEQ ID NO: 795143 - DNA, 19 bp, Mus musculus
  siRNA target sequence for E430013E20Rik (NM_177333.2,992-1010).
cctcactatgagatcttta

SEQ ID NO: 795144 - DNA, 19 bp, Mus musculus
  siRNA target sequence for E430013E20Rik (NM_177333.2,993-1011).
ctcactatgagatctttaa

SEQ ID NO: 795145 - DNA, 19 bp, Mus musculus
  siRNA target sequence for E430013E20Rik (NM_177333.2,995-1013).
cactatgagatctttaaga

SEQ ID NO: 795146 - DNA, 19 bp, Mus musculus
  siRNA target sequence for E430013E20Rik (NM_177333.2,1079-1097).
gaggccaacgagattgtga

SEQ ID NO: 795147 - DNA, 19 bp, Mus musculus
  siRNA target sequence for E430013E20Rik (NM_177333.2,1102-1120).
cttgacatgggtcctaaat

SEQ ID NO: 795148 - DNA, 19 bp, Mus musculus
  siRNA target sequence for E430013E20Rik (NM_177333.2,1107-1125).
catgggtcctaaataccta

SEQ ID NO: 795149 - DNA, 19 bp, Mus musculus
  siRNA target sequence for E430013E20Rik (NM_177333.2,1215-1233).
ccgagctgcttgacacata

SEQ ID NO: 795150 - DNA, 19 bp, Mus musculus
  siRNA target sequence for E430013E20Rik (NM_177333.2,1242-1260).
cactcacgtccaacatcat

SEQ ID NO: 795151 - DNA, 19 bp, Mus musculus
  siRNA target sequence for E430013E20Rik (NM_177333.2,1326-1344).
cagaccaggatggttacta

SEQ ID NO: 795152 - DNA, 19 bp, Mus musculus
  siRNA target sequence for E430013E20Rik (NM_177333.2,1331-1349).
caggatggttactatcaga

SEQ ID NO: 795153 - DNA, 19 bp, Mus musculus
  siRNA target sequence for E430013E20Rik (NM_177333.2,1372-1390).
ccagatgttcgaacagaat

SEQ ID NO: 795154 - DNA, 19 bp, Mus musculus
  siRNA target sequence for E430013E20Rik (NM_177333.2,1375-1393).
gatgttcgaacagaatctt

SEQ ID NO: 795155 - DNA, 19 bp, Mus musculus
  siRNA target sequence for E430013E20Rik (NM_177333.2,1378-1396).
gttcgaacagaatcttcaa

SEQ ID NO: 795156 - DNA, 19 bp, Mus musculus
  siRNA target sequence for E430013E20Rik (NM_177333.2,1394-1412).
caagttgctgctcaaataa

SEQ ID NO: 795157 - DNA, 19 bp, Mus musculus
  siRNA target sequence for E430013E20Rik (NM_177333.2,1403-1421).
gctcaaataagtgaagatt

SEQ ID NO: 795158 - DNA, 19 bp, Mus musculus
  siRNA target sequence for E430013E20Rik (NM_177333.2,1552-1570).
catgattgccatcatcaat

SEQ ID NO: 795159 - DNA, 19 bp, Mus musculus
  siRNA target sequence for E430013E20Rik (NM_177333.2,1611-1629).
ggaagtacctaaaaactga

SEQ ID NO: 795160 - DNA, 19 bp, Mus musculus
  siRNA target sequence for E430013E20Rik (NM_177333.2,1662-1680).
gcatggatgggattctaga

SEQ ID NO: 795161 - DNA, 19 bp, Mus musculus
  siRNA target sequence for E430013E20Rik (NM_177333.2,1751-1769).
gagctgatgacaaagaagt

SEQ ID NO: 795162 - DNA, 19 bp, Mus musculus
  siRNA target sequence for E430013E20Rik (NM_177333.2,1829-1847).
gactttgccaaaattaaaa

SEQ ID NO: 795163 - DNA, 19 bp, Mus musculus
  siRNA target sequence for E430013E20Rik (NM_177333.2,1884-1902).
gacgtgtggtggtggaata

SEQ ID NO: 795164 - DNA, 19 bp, Mus musculus
  siRNA target sequence for E430013E20Rik (NM_177333.2,1913-1931).
gtcatgcagaagcgtattt

SEQ ID NO: 795165 - DNA, 19 bp, Mus musculus
  siRNA target sequence for E430013E20Rik (NM_177333.2,2042-2060).
gatggacactgtgatacaa

SEQ ID NO: 795166 - DNA, 19 bp, Mus musculus
  siRNA target sequence for E430013E20Rik (NM_177333.2,2066-2084).
gcagtggcagaggtcatta

SEQ ID NO: 795167 - DNA, 19 bp, Mus musculus
  siRNA target sequence for E430013E20Rik (NM_177333.2,2095-2113).
cccttctctgctctatcta

SEQ ID NO: 795168 - DNA, 19 bp, Mus musculus
  siRNA target sequence for A230074B11Rik (NM_177334.2,271-289).
cagttgcatgggctaaaga

SEQ ID NO: 795169 - DNA, 19 bp, Mus musculus
  siRNA target sequence for A230074B11Rik (NM_177334.2,468-486).
ccagtttgtggattactta

SEQ ID NO: 795170 - DNA, 19 bp, Mus musculus
  siRNA target sequence for A230074B11Rik (NM_177334.2,471-489).
gtttgtggattacttaaca

SEQ ID NO: 795171 - DNA, 19 bp, Mus musculus
  siRNA target sequence for A230074B11Rik (NM_177334.2,542-560).
ggcagatttttggtgttat

SEQ ID NO: 795172 - DNA, 19 bp, Mus musculus
  siRNA target sequence for A230074B11Rik (NM_177334.2,672-690).
caccaggttcaacatgata

SEQ ID NO: 795173 - DNA, 19 bp, Mus musculus
  siRNA target sequence for A230074B11Rik (NM_177334.2,1046-1064).
gaacagagtgtgaggaatt

SEQ ID NO: 795174 - DNA, 19 bp, Mus musculus
  siRNA target sequence for D930020B18Rik (NM_177335.2,598-616).
ccgtacctctccagaatga

SEQ ID NO: 795175 - DNA, 19 bp, Mus musculus
  siRNA target sequence for D930020B18Rik (NM_177335.2,599-617).
cgtacctctccagaatgaa

SEQ ID NO: 795176 - DNA, 19 bp, Mus musculus
  siRNA target sequence for D930020B18Rik (NM_177335.2,645-663).
ctgagcaagcgcagaatct

SEQ ID NO: 795177 - DNA, 19 bp, Mus musculus
  siRNA target sequence for D930020B18Rik (NM_177335.2,725-743).
gaacacccgcagcaagatt

SEQ ID NO: 795178 - DNA, 19 bp, Mus musculus
  siRNA target sequence for D930020B18Rik (NM_177335.2,736-754).
gcaagattgtcgtagaagt

SEQ ID NO: 795179 - DNA, 19 bp, Mus musculus
  siRNA target sequence for D930020B18Rik (NM_177335.2,737-755).
caagattgtcgtagaagta

SEQ ID NO: 795180 - DNA, 19 bp, Mus musculus
  siRNA target sequence for D930020B18Rik (NM_177335.2,746-764).
cgtagaagtacaaagtaca

SEQ ID NO: 795181 - DNA, 19 bp, Mus musculus
  siRNA target sequence for 9230109A22Rik (NM_177339.2,372-390).
gcaagtgccatatcaaaaa

SEQ ID NO: 795182 - DNA, 19 bp, Mus musculus
  siRNA target sequence for 9230109A22Rik (NM_177339.2,391-409).
gacccttggcaaatctact

SEQ ID NO: 795183 - DNA, 19 bp, Mus musculus
  siRNA target sequence for 9230109A22Rik (NM_177339.2,443-461).
catgtgacttctttaaagt

SEQ ID NO: 795184 - DNA, 19 bp, Mus musculus
  siRNA target sequence for 9230109A22Rik (NM_177339.2,537-555).
gtgtttcctgggatacatt

SEQ ID NO: 795185 - DNA, 19 bp, Mus musculus
  siRNA target sequence for 9230109A22Rik (NM_177339.2,599-617).
gaccctctggattcataca

SEQ ID NO: 795186 - DNA, 19 bp, Mus musculus
  siRNA target sequence for 6330528C20Rik (NM_177342.2,572-590).
gggaaaggttgcaagtgta

SEQ ID NO: 795187 - DNA, 19 bp, Mus musculus
  siRNA target sequence for 6330528C20Rik (NM_177342.2,646-664).
gagaccctacaatgtatga

SEQ ID NO: 795188 - DNA, 19 bp, Mus musculus
  siRNA target sequence for 6330528C20Rik (NM_177342.2,650-668).
ccctacaatgtatgaagaa

SEQ ID NO: 795189 - DNA, 19 bp, Mus musculus
  siRNA target sequence for 6330528C20Rik (NM_177342.2,651-669).
cctacaatgtatgaagaat

SEQ ID NO: 795190 - DNA, 19 bp, Mus musculus
  siRNA target sequence for 6330528C20Rik (NM_177342.2,652-670).
ctacaatgtatgaagaata

SEQ ID NO: 795191 - DNA, 19 bp, Mus musculus
  siRNA target sequence for 6330528C20Rik (NM_177342.2,681-699).
ctgaaacacttcattgaat

SEQ ID NO: 795192 - DNA, 19 bp, Mus musculus
  siRNA target sequence for 6330528C20Rik (NM_177342.2,710-728).
ctgccatcgagcagagtta

SEQ ID NO: 795193 - DNA, 19 bp, Mus musculus
  siRNA target sequence for 6330528C20Rik (NM_177342.2,761-779).
gtacttggagctagtttat

SEQ ID NO: 795194 - DNA, 19 bp, Mus musculus
  siRNA target sequence for 6330528C20Rik (NM_177342.2,764-782).
cttggagctagtttataat

SEQ ID NO: 795195 - DNA, 19 bp, Mus musculus
  siRNA target sequence for 6330528C20Rik (NM_177342.2,770-788).
gctagtttataatcaacat

SEQ ID NO: 795196 - DNA, 19 bp, Mus musculus
  siRNA target sequence for 6330528C20Rik (NM_177342.2,774-792).
gtttataatcaacatgaaa

SEQ ID NO: 795197 - DNA, 19 bp, Mus musculus
  siRNA target sequence for 6330528C20Rik (NM_177342.2,798-816).
gcaaaatcattctttgaga

SEQ ID NO: 795198 - DNA, 19 bp, Mus musculus
  siRNA target sequence for 6330528C20Rik (NM_177342.2,825-843).
ggagatcaggaatgttact

SEQ ID NO: 795199 - DNA, 19 bp, Mus musculus
  siRNA target sequence for 6330528C20Rik (NM_177342.2,826-844).
gagatcaggaatgttacta

SEQ ID NO: 795200 - DNA, 19 bp, Mus musculus
  siRNA target sequence for 6330528C20Rik (NM_177342.2,848-866).
ggatgacctacgagtgtta

SEQ ID NO: 795201 - DNA, 19 bp, Mus musculus
  siRNA target sequence for 6330528C20Rik (NM_177342.2,849-867).
gatgacctacgagtgttat

SEQ ID NO: 795202 - DNA, 19 bp, Mus musculus
  siRNA target sequence for 6330528C20Rik (NM_177342.2,854-872).
cctacgagtgttatctagt

SEQ ID NO: 795203 - DNA, 19 bp, Mus musculus
  siRNA target sequence for 6330528C20Rik (NM_177342.2,858-876).
cgagtgttatctagtctta

SEQ ID NO: 795204 - DNA, 19 bp, Mus musculus
  siRNA target sequence for 6330528C20Rik (NM_177342.2,863-881).
gttatctagtcttaccaaa

SEQ ID NO: 795205 - DNA, 19 bp, Mus musculus
  siRNA target sequence for 6330528C20Rik (NM_177342.2,868-886).
ctagtcttaccaaaaagga

SEQ ID NO: 795206 - DNA, 19 bp, Mus musculus
  siRNA target sequence for 6330528C20Rik (NM_177342.2,914-932).
ggactttcggacgagtaaa

SEQ ID NO: 795207 - DNA, 19 bp, Mus musculus
  siRNA target sequence for 6330528C20Rik (NM_177342.2,915-933).
gactttcggacgagtaaat

SEQ ID NO: 795208 - DNA, 19 bp, Mus musculus
  siRNA target sequence for 6330528C20Rik (NM_177342.2,1113-1131).
cgagaggcgaacaaatcga

SEQ ID NO: 795209 - DNA, 19 bp, Mus musculus
  siRNA target sequence for 6330528C20Rik (NM_177342.2,1114-1132).
gagaggcgaacaaatcgaa

SEQ ID NO: 795210 - DNA, 19 bp, Mus musculus
  siRNA target sequence for 6330528C20Rik (NM_177342.2,1119-1137).
gcgaacaaatcgaaggtat

SEQ ID NO: 795211 - DNA, 19 bp, Mus musculus
  siRNA target sequence for 6330528C20Rik (NM_177342.2,1120-1138).
cgaacaaatcgaaggtatt

SEQ ID NO: 795212 - DNA, 19 bp, Mus musculus
  siRNA target sequence for 6330528C20Rik (NM_177342.2,1121-1139).
gaacaaatcgaaggtattt

SEQ ID NO: 795213 - DNA, 19 bp, Mus musculus
  siRNA target sequence for 6330528C20Rik (NM_177342.2,1134-1152).
gtattttttggtttactaa

SEQ ID NO: 795214 - DNA, 19 bp, Mus musculus
  siRNA target sequence for 6330528C20Rik (NM_177342.2,1241-1259).
ggatagtattggctctaaa

SEQ ID NO: 795215 - DNA, 19 bp, Mus musculus
  siRNA target sequence for 6330528C20Rik (NM_177342.2,1242-1260).
gatagtattggctctaaaa

SEQ ID NO: 795216 - DNA, 19 bp, Mus musculus
  siRNA target sequence for 6330528C20Rik (NM_177342.2,1303-1321).
ctcttcctgagttaaaaga

SEQ ID NO: 795217 - DNA, 19 bp, Mus musculus
  siRNA target sequence for 6330528C20Rik (NM_177342.2,1332-1350).
ctggacaaaataatgaata

SEQ ID NO: 795218 - DNA, 19 bp, Mus musculus
  siRNA target sequence for 6330528C20Rik (NM_177342.2,1375-1393).
gcctcgggccagactgttt

SEQ ID NO: 795219 - DNA, 19 bp, Mus musculus
  siRNA target sequence for 6330528C20Rik (NM_177342.2,1376-1394).
cctcgggccagactgttta

SEQ ID NO: 795220 - DNA, 19 bp, Mus musculus
  siRNA target sequence for 6330528C20Rik (NM_177342.2,1388-1406).
ctgtttaccctccatttgt

SEQ ID NO: 795221 - DNA, 19 bp, Mus musculus
  siRNA target sequence for 6330528C20Rik (NM_177342.2,1390-1408).
gtttaccctccatttgttt

SEQ ID NO: 795222 - DNA, 19 bp, Mus musculus
  siRNA target sequence for 6330528C20Rik (NM_177342.2,1409-1427).
ctatacattccttaatgct

SEQ ID NO: 795223 - DNA, 19 bp, Mus musculus
  siRNA target sequence for 6330528C20Rik (NM_177342.2,1479-1497).
ggaggttttgctgattcaa

SEQ ID NO: 795224 - DNA, 19 bp, Mus musculus
  siRNA target sequence for 6330528C20Rik (NM_177342.2,1510-1528).
ggtctgtgacccctaaaaa

SEQ ID NO: 795225 - DNA, 19 bp, Mus musculus
  siRNA target sequence for 6330528C20Rik (NM_177342.2,1541-1559).
caaacaagcatcagatctt

SEQ ID NO: 795226 - DNA, 19 bp, Mus musculus
  siRNA target sequence for 6330528C20Rik (NM_177342.2,1554-1572).
gatcttagtcttatagaca

SEQ ID NO: 795227 - DNA, 19 bp, Mus musculus
  siRNA target sequence for 6330528C20Rik (NM_177342.2,1584-1602).
gatgtcttagagagaatca

SEQ ID NO: 795228 - DNA, 19 bp, Mus musculus
  siRNA target sequence for 6330528C20Rik (NM_177342.2,1617-1635).
gcaagtgagttgaagattt

SEQ ID NO: 795229 - DNA, 19 bp, Mus musculus
  siRNA target sequence for 6330528C20Rik (NM_177342.2,1618-1636).
caagtgagttgaagatttt

SEQ ID NO: 795230 - DNA, 19 bp, Mus musculus
  siRNA target sequence for 6330528C20Rik (NM_177342.2,1669-1687).
gcttcagtccggataggaa

SEQ ID NO: 795231 - DNA, 19 bp, Mus musculus
  siRNA target sequence for 6330528C20Rik (NM_177342.2,1747-1765).
cttgcttggttgggtataa

SEQ ID NO: 795232 - DNA, 19 bp, Mus musculus
  siRNA target sequence for 6330528C20Rik (NM_177342.2,1759-1777).
ggtataaaggacacaacta

SEQ ID NO: 795233 - DNA, 19 bp, Mus musculus
  siRNA target sequence for 6330528C20Rik (NM_177342.2,1782-1800).
gtatgggacacacagtttt

SEQ ID NO: 795234 - DNA, 19 bp, Mus musculus
  siRNA target sequence for 6330528C20Rik (NM_177342.2,1801-1819).
ctccatacggatattattt

SEQ ID NO: 795235 - DNA, 19 bp, Mus musculus
  siRNA target sequence for 6330528C20Rik (NM_177342.2,1804-1822).
catacggatattatttcgt

SEQ ID NO: 795236 - DNA, 19 bp, Mus musculus
  siRNA target sequence for 6330528C20Rik (NM_177342.2,1855-1873).
gggctaccgatcactatca

SEQ ID NO: 795237 - DNA, 19 bp, Mus musculus
  siRNA target sequence for 6330528C20Rik (NM_177342.2,1895-1913).
ccatcttgctgatgtgaat

SEQ ID NO: 795238 - DNA, 19 bp, Mus musculus
  siRNA target sequence for 6330528C20Rik (NM_177342.2,1905-1923).
gatgtgaattgcactagat

SEQ ID NO: 795239 - DNA, 19 bp, Mus musculus
  siRNA target sequence for 6330528C20Rik (NM_177342.2,1910-1928).
gaattgcactagatttcat

SEQ ID NO: 795240 - DNA, 19 bp, Mus musculus
  siRNA target sequence for 6330528C20Rik (NM_177342.2,1921-1939).
gatttcatccaaattcgaa

SEQ ID NO: 795241 - DNA, 19 bp, Mus musculus
  siRNA target sequence for 6330528C20Rik (NM_177342.2,1981-1999).
gggatgtcctcaatggtaa

SEQ ID NO: 795242 - DNA, 19 bp, Mus musculus
  siRNA target sequence for 6330528C20Rik (NM_177342.2,1991-2009).
caatggtaactgtgtaaga

SEQ ID NO: 795243 - DNA, 19 bp, Mus musculus
  siRNA target sequence for 6330528C20Rik (NM_177342.2,1995-2013).
ggtaactgtgtaagaatct

SEQ ID NO: 795244 - DNA, 19 bp, Mus musculus
  siRNA target sequence for 6330528C20Rik (NM_177342.2,1996-2014).
gtaactgtgtaagaatctt

SEQ ID NO: 795245 - DNA, 19 bp, Mus musculus
  siRNA target sequence for 6330528C20Rik (NM_177342.2,2020-2038).
ggcacaagggaccaattca

SEQ ID NO: 795246 - DNA, 19 bp, Mus musculus
  siRNA target sequence for 6330528C20Rik (NM_177342.2,2021-2039).
gcacaagggaccaattcat

SEQ ID NO: 795247 - DNA, 19 bp, Mus musculus
  siRNA target sequence for 6330528C20Rik (NM_177342.2,2088-2106).
gatggcagagtacttcttt

SEQ ID NO: 795248 - DNA, 19 bp, Mus musculus
  siRNA target sequence for 6330528C20Rik (NM_177342.2,2154-2172).
gatacagtgtgttcactta

SEQ ID NO: 795249 - DNA, 19 bp, Mus musculus
  siRNA target sequence for 6330528C20Rik (NM_177342.2,2199-2217).
gcatcaggttcaatggata

SEQ ID NO: 795250 - DNA, 19 bp, Mus musculus
  siRNA target sequence for 6330528C20Rik (NM_177342.2,2237-2255).
cgccgtcaaagcgtttgaa

SEQ ID NO: 795251 - DNA, 19 bp, Mus musculus
  siRNA target sequence for 6330528C20Rik (NM_177342.2,2243-2261).
caaagcgtttgaagactta

SEQ ID NO: 795252 - DNA, 19 bp, Mus musculus
  siRNA target sequence for 6330528C20Rik (NM_177342.2,2262-2280).
gagactgatgactttacta

SEQ ID NO: 795253 - DNA, 19 bp, Mus musculus
  siRNA target sequence for 6330528C20Rik (NM_177342.2,2264-2282).
gactgatgactttactaca

SEQ ID NO: 795254 - DNA, 19 bp, Mus musculus
  siRNA target sequence for 6330528C20Rik (NM_177342.2,2281-2299).
cagccaccgggcatataaa

SEQ ID NO: 795255 - DNA, 19 bp, Mus musculus
  siRNA target sequence for 6330528C20Rik (NM_177342.2,2284-2302).
ccaccgggcatataaacct

SEQ ID NO: 795256 - DNA, 19 bp, Mus musculus
  siRNA target sequence for 6330528C20Rik (NM_177342.2,2285-2303).
caccgggcatataaaccta

SEQ ID NO: 795257 - DNA, 19 bp, Mus musculus
  siRNA target sequence for 6330528C20Rik (NM_177342.2,2331-2349).
ggtacatatatgaccaaat

SEQ ID NO: 795258 - DNA, 19 bp, Mus musculus
  siRNA target sequence for 6330528C20Rik (NM_177342.2,2345-2363).
caaatcaacaccagttgta

SEQ ID NO: 795259 - DNA, 19 bp, Mus musculus
  siRNA target sequence for 6330528C20Rik (NM_177342.2,2356-2374).
cagttgtacacctacattt

SEQ ID NO: 795260 - DNA, 19 bp, Mus musculus
  siRNA target sequence for 6330528C20Rik (NM_177342.2,2358-2376).
gttgtacacctacatttta

SEQ ID NO: 795261 - DNA, 19 bp, Mus musculus
  siRNA target sequence for 6330528C20Rik (NM_177342.2,2361-2379).
gtacacctacattttacaa

SEQ ID NO: 795262 - DNA, 19 bp, Mus musculus
  siRNA target sequence for C730025P13Rik (NM_177344.2,254-272).
gcttcgccacctttgagat

SEQ ID NO: 795263 - DNA, 19 bp, Mus musculus
  siRNA target sequence for C730025P13Rik (NM_177344.2,255-273).
cttcgccacctttgagata

SEQ ID NO: 795264 - DNA, 19 bp, Mus musculus
  siRNA target sequence for C730025P13Rik (NM_177344.2,350-368).
cctggtggaacgtctttgt

SEQ ID NO: 795265 - DNA, 19 bp, Mus musculus
  siRNA target sequence for C730025P13Rik (NM_177344.2,570-588).
cgtctccggtcttcattct

SEQ ID NO: 795266 - DNA, 19 bp, Mus musculus
  siRNA target sequence for C730025P13Rik (NM_177344.2,609-627).
gggcttgtcgcgtcaacta

SEQ ID NO: 795267 - DNA, 19 bp, Mus musculus
  siRNA target sequence for Mapkap1 (NM_177345.2,145-163).
gccttcttggacaatccaa

SEQ ID NO: 795268 - DNA, 19 bp, Mus musculus
  siRNA target sequence for Mapkap1 (NM_177345.2,153-171).
ggacaatccaactatcatt

SEQ ID NO: 795269 - DNA, 19 bp, Mus musculus
  siRNA target sequence for Mapkap1 (NM_177345.2,156-174).
caatccaactatcattcta

SEQ ID NO: 795270 - DNA, 19 bp, Mus musculus
  siRNA target sequence for Mapkap1 (NM_177345.2,164-182).
ctatcattctagctcatat

SEQ ID NO: 795271 - DNA, 19 bp, Mus musculus
  siRNA target sequence for Mapkap1 (NM_177345.2,168-186).
cattctagctcatattcga

SEQ ID NO: 795272 - DNA, 19 bp, Mus musculus
  siRNA target sequence for Mapkap1 (NM_177345.2,219-237).
gtgtgagatggttctcatt

SEQ ID NO: 795273 - DNA, 19 bp, Mus musculus
  siRNA target sequence for Mapkap1 (NM_177345.2,319-337).
gagacgcagggctacatat

SEQ ID NO: 795274 - DNA, 19 bp, Mus musculus
  siRNA target sequence for Mapkap1 (NM_177345.2,339-357).
cgcccagtctgttgatatt

SEQ ID NO: 795275 - DNA, 19 bp, Mus musculus
  siRNA target sequence for Mapkap1 (NM_177345.2,340-358).
gcccagtctgttgatatta

SEQ ID NO: 795276 - DNA, 19 bp, Mus musculus
  siRNA target sequence for Mapkap1 (NM_177345.2,342-360).
ccagtctgttgatattaca

SEQ ID NO: 795277 - DNA, 19 bp, Mus musculus
  siRNA target sequence for Mapkap1 (NM_177345.2,343-361).
cagtctgttgatattacat

SEQ ID NO: 795278 - DNA, 19 bp, Mus musculus
  siRNA target sequence for Mapkap1 (NM_177345.2,362-380).
cgagctgggactttggtat

SEQ ID NO: 795279 - DNA, 19 bp, Mus musculus
  siRNA target sequence for Mapkap1 (NM_177345.2,366-384).
ctgggactttggtattaga

SEQ ID NO: 795280 - DNA, 19 bp, Mus musculus
  siRNA target sequence for Mapkap1 (NM_177345.2,390-408).
ctcaaacacagctcaaaga

SEQ ID NO: 795281 - DNA, 19 bp, Mus musculus
  siRNA target sequence for Mapkap1 (NM_177345.2,392-410).
caaacacagctcaaagatt

SEQ ID NO: 795282 - DNA, 19 bp, Mus musculus
  siRNA target sequence for Mapkap1 (NM_177345.2,412-430).
gaacgactccgcaaagaga

SEQ ID NO: 795283 - DNA, 19 bp, Mus musculus
  siRNA target sequence for Mapkap1 (NM_177345.2,418-436).
ctccgcaaagagagacaaa

SEQ ID NO: 795284 - DNA, 19 bp, Mus musculus
  siRNA target sequence for Mapkap1 (NM_177345.2,495-513).
ggagttaaagtcactgttt

SEQ ID NO: 795285 - DNA, 19 bp, Mus musculus
  siRNA target sequence for Mapkap1 (NM_177345.2,550-568).
ggcaagcagtccatattgt

SEQ ID NO: 795286 - DNA, 19 bp, Mus musculus
  siRNA target sequence for Mapkap1 (NM_177345.2,552-570).
caagcagtccatattgtct

SEQ ID NO: 795287 - DNA, 19 bp, Mus musculus
  siRNA target sequence for Mapkap1 (NM_177345.2,639-657).
gggtcatgtgggtacaact

SEQ ID NO: 795288 - DNA, 19 bp, Mus musculus
  siRNA target sequence for Mapkap1 (NM_177345.2,649-667).
ggtacaactgcaactaaga

SEQ ID NO: 795289 - DNA, 19 bp, Mus musculus
  siRNA target sequence for Mapkap1 (NM_177345.2,650-668).
gtacaactgcaactaagaa

SEQ ID NO: 795290 - DNA, 19 bp, Mus musculus
  siRNA target sequence for Mapkap1 (NM_177345.2,653-671).
caactgcaactaagaagat

SEQ ID NO: 795291 - DNA, 19 bp, Mus musculus
  siRNA target sequence for Mapkap1 (NM_177345.2,824-842).
gtgcctactgcctgcatat

SEQ ID NO: 795292 - DNA, 19 bp, Mus musculus
  siRNA target sequence for Mapkap1 (NM_177345.2,858-876).
ggaggtcgacacggatttt

SEQ ID NO: 795293 - DNA, 19 bp, Mus musculus
  siRNA target sequence for Mapkap1 (NM_177345.2,928-946).
gccctggttgaaaaatact

SEQ ID NO: 795294 - DNA, 19 bp, Mus musculus
  siRNA target sequence for Mapkap1 (NM_177345.2,955-973).
ggtctgacctccaaagagt

SEQ ID NO: 795295 - DNA, 19 bp, Mus musculus
  siRNA target sequence for Mapkap1 (NM_177345.2,965-983).
ccaaagagtcgctctttgt

SEQ ID NO: 795296 - DNA, 19 bp, Mus musculus
  siRNA target sequence for Mapkap1 (NM_177345.2,966-984).
caaagagtcgctctttgtt

SEQ ID NO: 795297 - DNA, 19 bp, Mus musculus
  siRNA target sequence for Mapkap1 (NM_177345.2,972-990).
gtcgctctttgttcgaata

SEQ ID NO: 795298 - DNA, 19 bp, Mus musculus
  siRNA target sequence for Mapkap1 (NM_177345.2,974-992).
cgctctttgttcgaataaa

SEQ ID NO: 795299 - DNA, 19 bp, Mus musculus
  siRNA target sequence for Mapkap1 (NM_177345.2,1056-1074).
gctcaaggcagtgaaaaga

SEQ ID NO: 795300 - DNA, 19 bp, Mus musculus
  siRNA target sequence for Mapkap1 (NM_177345.2,1192-1210).
ctggttcgcgagaacagtt

SEQ ID NO: 795301 - DNA, 19 bp, Mus musculus
  siRNA target sequence for Mapkap1 (NM_177345.2,1195-1213).
gttcgcgagaacagttcaa

SEQ ID NO: 795302 - DNA, 19 bp, Mus musculus
  siRNA target sequence for Mapkap1 (NM_177345.2,1211-1229).
caagggcagacggagtttt

SEQ ID NO: 795303 - DNA, 19 bp, Mus musculus
  siRNA target sequence for Mapkap1 (NM_177345.2,1214-1232).
gggcagacggagttttcga

SEQ ID NO: 795304 - DNA, 19 bp, Mus musculus
  siRNA target sequence for Mapkap1 (NM_177345.2,1230-1248).
cgaggaggattcacaaatt

SEQ ID NO: 795305 - DNA, 19 bp, Mus musculus
  siRNA target sequence for Mapkap1 (NM_177345.2,1256-1274).
ctacagtacaggatatgct

SEQ ID NO: 795306 - DNA, 19 bp, Mus musculus
  siRNA target sequence for Mapkap1 (NM_177345.2,1273-1291).
cttagcagccaccattaca

SEQ ID NO: 795307 - DNA, 19 bp, Mus musculus
  siRNA target sequence for Mapkap1 (NM_177345.2,1282-1300).
caccattacaagtcattca

SEQ ID NO: 795308 - DNA, 19 bp, Mus musculus
  siRNA target sequence for Mapkap1 (NM_177345.2,1284-1302).
ccattacaagtcattcaaa

SEQ ID NO: 795309 - DNA, 19 bp, Mus musculus
  siRNA target sequence for Mapkap1 (NM_177345.2,1334-1352).
cggatgtgcagttaggtat

SEQ ID NO: 795310 - DNA, 19 bp, Mus musculus
  siRNA target sequence for Mapkap1 (NM_177345.2,1371-1389).
gatagaccctgttacgaat

SEQ ID NO: 795311 - DNA, 19 bp, Mus musculus
  siRNA target sequence for Mapkap1 (NM_177345.2,1377-1395).
ccctgttacgaatcagaaa

SEQ ID NO: 795312 - DNA, 19 bp, Mus musculus
  siRNA target sequence for Mapkap1 (NM_177345.2,1392-1410).
gaaagccagcactaagttt

SEQ ID NO: 795313 - DNA, 19 bp, Mus musculus
  siRNA target sequence for Mapkap1 (NM_177345.2,1400-1418).
gcactaagttttggattaa

SEQ ID NO: 795314 - DNA, 19 bp, Mus musculus
  siRNA target sequence for Mapkap1 (NM_177345.2,1403-1421).
ctaagttttggattaagca

SEQ ID NO: 795315 - DNA, 19 bp, Mus musculus
  siRNA target sequence for Mapkap1 (NM_177345.2,1427-1445).
ccatctcaatcgattgtga

SEQ ID NO: 795316 - DNA, 19 bp, Mus musculus
  siRNA target sequence for Mapkap1 (NM_177345.2,1483-1501).
cccagtcacgcggtgttta

SEQ ID NO: 795317 - DNA, 19 bp, Mus musculus
  siRNA target sequence for Mapkap1 (NM_177345.2,1484-1502).
ccagtcacgcggtgtttaa

SEQ ID NO: 795318 - DNA, 19 bp, Mus musculus
  siRNA target sequence for Mapkap1 (NM_177345.2,1487-1505).
gtcacgcggtgtttaagct

SEQ ID NO: 795319 - DNA, 19 bp, Mus musculus
  siRNA target sequence for Mapkap1 (NM_177345.2,1570-1588).
gagatcgtgctcaaggtta

SEQ ID NO: 795320 - DNA, 19 bp, Mus musculus
  siRNA target sequence for Mapkap1 (NM_177345.2,1576-1594).
gtgctcaaggttaactaca

SEQ ID NO: 795321 - DNA, 19 bp, Mus musculus
  siRNA target sequence for Mapkap1 (NM_177345.2,1614-1632).
cactgcccgagctgattat

SEQ ID NO: 795322 - DNA, 19 bp, Mus musculus
  siRNA target sequence for 9630018L10Rik (NM_177346.1,290-308).
cacgtggtggggtttcaga

SEQ ID NO: 795323 - DNA, 19 bp, Mus musculus
  siRNA target sequence for 9630018L10Rik (NM_177346.1,309-327).
gccttccggtcgatatgct

SEQ ID NO: 795324 - DNA, 19 bp, Mus musculus
  siRNA target sequence for 9630018L10Rik (NM_177346.1,491-509).
ctatcattccaacaaagtt

SEQ ID NO: 795325 - DNA, 19 bp, Mus musculus
  siRNA target sequence for 9630018L10Rik (NM_177346.1,551-569).
gatgaaaattccatatcct

SEQ ID NO: 795326 - DNA, 19 bp, Mus musculus
  siRNA target sequence for 9630018L10Rik (NM_177346.1,626-644).
cgcagtgtcttcaatacca

SEQ ID NO: 795327 - DNA, 19 bp, Mus musculus
  siRNA target sequence for 9630018L10Rik (NM_177346.1,777-795).
cagaaagcgatattaacta

SEQ ID NO: 795328 - DNA, 19 bp, Mus musculus
  siRNA target sequence for 9630018L10Rik (NM_177346.1,837-855).
cccatgaggagaatcagaa

SEQ ID NO: 795329 - DNA, 19 bp, Mus musculus
  siRNA target sequence for 9630018L10Rik (NM_177346.1,990-1008).
cgctctctctttctactta

SEQ ID NO: 795330 - DNA, 19 bp, Mus musculus
  siRNA target sequence for 9630018L10Rik (NM_177346.1,1018-1036).
cgcagaagggcaaaagata

SEQ ID NO: 795331 - DNA, 19 bp, Mus musculus
  siRNA target sequence for 9630018L10Rik (NM_177346.1,1041-1059).
cagcctctaagaaaataga

SEQ ID NO: 795332 - DNA, 19 bp, Mus musculus
  siRNA target sequence for 9630018L10Rik (NM_177346.1,1058-1076).
gaagtctatcgatctaaaa

SEQ ID NO: 795333 - DNA, 19 bp, Mus musculus
  siRNA target sequence for 9630018L10Rik (NM_177346.1,1063-1081).
ctatcgatctaaaagtgtt

SEQ ID NO: 795334 - DNA, 19 bp, Mus musculus
  siRNA target sequence for 9630018L10Rik (NM_177346.1,1121-1139).
gcggacaccagtgtaaaaa

SEQ ID NO: 795335 - DNA, 19 bp, Mus musculus
  siRNA target sequence for 9630018L10Rik (NM_177346.1,1142-1160).
cacttggaagttcttgaaa

SEQ ID NO: 795336 - DNA, 19 bp, Mus musculus
  siRNA target sequence for 9630018L10Rik (NM_177346.1,1181-1199).
ctagacactgtgtcaatta

SEQ ID NO: 795337 - DNA, 19 bp, Mus musculus
  siRNA target sequence for 9630018L10Rik (NM_177346.1,1184-1202).
gacactgtgtcaattatca

SEQ ID NO: 795338 - DNA, 19 bp, Mus musculus
  siRNA target sequence for 9630018L10Rik (NM_177346.1,1247-1265).
cgctactcacggaaggaaa

SEQ ID NO: 795339 - DNA, 19 bp, Mus musculus
  siRNA target sequence for 9630018L10Rik (NM_177346.1,1289-1307).
ggagaaactgcctcatact

SEQ ID NO: 795340 - DNA, 19 bp, Mus musculus
  siRNA target sequence for 9630018L10Rik (NM_177346.1,1427-1445).
gagatccagttgttaaaca

SEQ ID NO: 795341 - DNA, 19 bp, Mus musculus
  siRNA target sequence for 9630018L10Rik (NM_177346.1,1429-1447).
gatccagttgttaaacaaa

SEQ ID NO: 795342 - DNA, 19 bp, Mus musculus
  siRNA target sequence for A630091E08Rik (NM_177349.2,159-177).
gtcccgacctcccagtaaa

SEQ ID NO: 795343 - DNA, 19 bp, Mus musculus
  siRNA target sequence for A630091E08Rik (NM_177349.2,162-180).
ccgacctcccagtaaaaga

SEQ ID NO: 795344 - DNA, 19 bp, Mus musculus
  siRNA target sequence for A630091E08Rik (NM_177349.2,163-181).
cgacctcccagtaaaagaa

SEQ ID NO: 795345 - DNA, 19 bp, Mus musculus
  siRNA target sequence for A630091E08Rik (NM_177349.2,169-187).
cccagtaaaagaagactta

SEQ ID NO: 795346 - DNA, 19 bp, Mus musculus
  siRNA target sequence for A630091E08Rik (NM_177349.2,256-274).
gggaagttcccatcgttat

SEQ ID NO: 795347 - DNA, 19 bp, Mus musculus
  siRNA target sequence for A630091E08Rik (NM_177349.2,305-323).
ccttatggaggataattca

SEQ ID NO: 795348 - DNA, 19 bp, Mus musculus
  siRNA target sequence for A630091E08Rik (NM_177349.2,306-324).
cttatggaggataattcaa

SEQ ID NO: 795349 - DNA, 19 bp, Mus musculus
  siRNA target sequence for A630091E08Rik (NM_177349.2,311-329).
ggaggataattcaaagact

SEQ ID NO: 795350 - DNA, 19 bp, Mus musculus
  siRNA target sequence for A630091E08Rik (NM_177349.2,330-348).
ggaggaaaggccatacctt

SEQ ID NO: 795351 - DNA, 19 bp, Mus musculus
  siRNA target sequence for A630091E08Rik (NM_177349.2,408-426).
cctagtctccccactgtat

SEQ ID NO: 795352 - DNA, 19 bp, Mus musculus
  siRNA target sequence for A630091E08Rik (NM_177349.2,471-489).
cccctcttgttcccataaa

SEQ ID NO: 795353 - DNA, 19 bp, Mus musculus
  siRNA target sequence for A630091E08Rik (NM_177349.2,482-500).
cccataaacctccactaaa

SEQ ID NO: 795354 - DNA, 19 bp, Mus musculus
  siRNA target sequence for A630091E08Rik (NM_177349.2,483-501).
ccataaacctccactaaat

SEQ ID NO: 795355 - DNA, 19 bp, Mus musculus
  siRNA target sequence for Clom (NM_177350.2,240-258).
ctttctggccgaattgagt

SEQ ID NO: 795356 - DNA, 19 bp, Mus musculus
  siRNA target sequence for Clom (NM_177350.2,399-417).
gccgattcgagtgatgata

SEQ ID NO: 795357 - DNA, 19 bp, Mus musculus
  siRNA target sequence for Clom (NM_177350.2,401-419).
cgattcgagtgatgataga

SEQ ID NO: 795358 - DNA, 19 bp, Mus musculus
  siRNA target sequence for Clom (NM_177350.2,815-833).
ggccaccaaacgtgttcaa

SEQ ID NO: 795359 - DNA, 19 bp, Mus musculus
  siRNA target sequence for Clom (NM_177350.2,817-835).
ccaccaaacgtgttcaaca

SEQ ID NO: 795360 - DNA, 19 bp, Mus musculus
  siRNA target sequence for Clom (NM_177350.2,857-875).
gtgtcatacccaatgatga

SEQ ID NO: 795361 - DNA, 19 bp, Mus musculus
  siRNA target sequence for Clom (NM_177350.2,859-877).
gtcatacccaatgatgata

SEQ ID NO: 795362 - DNA, 19 bp, Mus musculus
  siRNA target sequence for Clom (NM_177350.2,914-932).
gccattcaccacaaacaga

SEQ ID NO: 795363 - DNA, 19 bp, Mus musculus
  siRNA target sequence for Clom (NM_177350.2,920-938).
caccacaaacagaatctat

SEQ ID NO: 795364 - DNA, 19 bp, Mus musculus
  siRNA target sequence for Clom (NM_177350.2,922-940).
ccacaaacagaatctatga

SEQ ID NO: 795365 - DNA, 19 bp, Mus musculus
  siRNA target sequence for Clom (NM_177350.2,1032-1050).
catttgggtgactgaacat

SEQ ID NO: 795366 - DNA, 19 bp, Mus musculus
  siRNA target sequence for Clom (NM_177350.2,1145-1163).
gtgggcacgctgtttacaa

SEQ ID NO: 795367 - DNA, 19 bp, Mus musculus
  siRNA target sequence for Clom (NM_177350.2,1148-1166).
ggcacgctgtttacaacaa

SEQ ID NO: 795368 - DNA, 19 bp, Mus musculus
  siRNA target sequence for Clom (NM_177350.2,1245-1263).
gctggaaaatgctttgtat

SEQ ID NO: 795369 - DNA, 19 bp, Mus musculus
  siRNA target sequence for Clom (NM_177350.2,1270-1288).
cgaaaatacctctttgcaa

SEQ ID NO: 795370 - DNA, 19 bp, Mus musculus
  siRNA target sequence for Clom (NM_177350.2,1321-1339).
gagaagggcatctggatta

SEQ ID NO: 795371 - DNA, 19 bp, Mus musculus
  siRNA target sequence for Clom (NM_177350.2,1335-1353).
gattatctacgcttcaagt

SEQ ID NO: 795372 - DNA, 19 bp, Mus musculus
  siRNA target sequence for Clom (NM_177350.2,1463-1481).
cccgagggatcctctatgt

SEQ ID NO: 795373 - DNA, 19 bp, Mus musculus
  siRNA target sequence for C630028N24Rik (NM_177351.2,621-639).
ccaagcccgtttttactga

SEQ ID NO: 795374 - DNA, 19 bp, Mus musculus
  siRNA target sequence for C630028N24Rik (NM_177351.2,666-684).
cggtatttgggttcaaagt

SEQ ID NO: 795375 - DNA, 19 bp, Mus musculus
  siRNA target sequence for C630028N24Rik (NM_177351.2,667-685).
ggtatttgggttcaaagtt

SEQ ID NO: 795376 - DNA, 19 bp, Mus musculus
  siRNA target sequence for C630028N24Rik (NM_177351.2,694-712).
ccagccactccctagctat

SEQ ID NO: 795377 - DNA, 19 bp, Mus musculus
  siRNA target sequence for C630028N24Rik (NM_177351.2,759-777).
cagatgacccagttgaata

SEQ ID NO: 795378 - DNA, 19 bp, Mus musculus
  siRNA target sequence for C630028N24Rik (NM_177351.2,770-788).
gttgaatatgtcctcaaaa

SEQ ID NO: 795379 - DNA, 19 bp, Mus musculus
  siRNA target sequence for C630028N24Rik (NM_177351.2,779-797).
gtcctcaaaataagcaata

SEQ ID NO: 795380 - DNA, 19 bp, Mus musculus
  siRNA target sequence for C630028N24Rik (NM_177351.2,879-897).
cctccgtatgccgaactaa

SEQ ID NO: 795381 - DNA, 19 bp, Mus musculus
  siRNA target sequence for C630028N24Rik (NM_177351.2,880-898).
ctccgtatgccgaactaaa

SEQ ID NO: 795382 - DNA, 19 bp, Mus musculus
  siRNA target sequence for C630028N24Rik (NM_177351.2,936-954).
gatctggagtcaaaagcta

SEQ ID NO: 795383 - DNA, 19 bp, Mus musculus
  siRNA target sequence for C630028N24Rik (NM_177351.2,944-962).
gtcaaaagctacttggtaa

SEQ ID NO: 795384 - DNA, 19 bp, Mus musculus
  siRNA target sequence for C630028N24Rik (NM_177351.2,1006-1024).
catcagccaccagcaatta

SEQ ID NO: 795385 - DNA, 19 bp, Mus musculus
  siRNA target sequence for C630028N24Rik (NM_177351.2,1011-1029).
gccaccagcaattatatga

SEQ ID NO: 795386 - DNA, 19 bp, Mus musculus
  siRNA target sequence for C630028N24Rik (NM_177351.2,1012-1030).
ccaccagcaattatatgaa

SEQ ID NO: 795387 - DNA, 19 bp, Mus musculus
  siRNA target sequence for C630028N24Rik (NM_177351.2,1018-1036).
gcaattatatgaaatagga

SEQ ID NO: 795388 - DNA, 19 bp, Mus musculus
  siRNA target sequence for C630028N24Rik (NM_177351.2,1038-1056).
ggctggctgcccaattgga

SEQ ID NO: 795389 - DNA, 19 bp, Mus musculus
  siRNA target sequence for C630028N24Rik (NM_177351.2,1075-1093).
ccatcatccaaagttaagt

SEQ ID NO: 795390 - DNA, 19 bp, Mus musculus
  siRNA target sequence for C630028N24Rik (NM_177351.2,1079-1097).
catccaaagttaagtcttt

SEQ ID NO: 795391 - DNA, 19 bp, Mus musculus
  siRNA target sequence for C630028N24Rik (NM_177351.2,1083-1101).
caaagttaagtctttttca

SEQ ID NO: 795392 - DNA, 19 bp, Mus musculus
  siRNA target sequence for C630028N24Rik (NM_177351.2,1100-1118).
catcgggagaacttcatct

SEQ ID NO: 795393 - DNA, 19 bp, Mus musculus
  siRNA target sequence for C630028N24Rik (NM_177351.2,1173-1191).
gtcgaaaccgggagattgt

SEQ ID NO: 795394 - DNA, 19 bp, Mus musculus
  siRNA target sequence for C630028N24Rik (NM_177351.2,1176-1194).
gaaaccgggagattgttga

SEQ ID NO: 795395 - DNA, 19 bp, Mus musculus
  siRNA target sequence for C630028N24Rik (NM_177351.2,1196-1214).
caggtcattcggatgttca

SEQ ID NO: 795396 - DNA, 19 bp, Mus musculus
  siRNA target sequence for C630028N24Rik (NM_177351.2,1317-1335).
gagaaggtgtgcatcaagt

SEQ ID NO: 795397 - DNA, 19 bp, Mus musculus
  siRNA target sequence for C630028N24Rik (NM_177351.2,1422-1440).
gcacaaaccctatacaagt

SEQ ID NO: 795398 - DNA, 19 bp, Mus musculus
  siRNA target sequence for C630028N24Rik (NM_177351.2,1453-1471).
cctcgcagggtttgaaagt

SEQ ID NO: 795399 - DNA, 19 bp, Mus musculus
  siRNA target sequence for C630028N24Rik (NM_177351.2,1514-1532).
cttgtatgcagtcgtttta

SEQ ID NO: 795400 - DNA, 19 bp, Mus musculus
  siRNA target sequence for C630028N24Rik (NM_177351.2,1611-1629).
ccggatggaagcatttaca

SEQ ID NO: 795401 - DNA, 19 bp, Mus musculus
  siRNA target sequence for G630009D10Rik (NM_177354.2,1694-1712).
gccgtgcagcgctacatca

SEQ ID NO: 795402 - DNA, 19 bp, Mus musculus
  siRNA target sequence for G630009D10Rik (NM_177354.2,1713-1731).
gggagctgcagtacaatca

SEQ ID NO: 795403 - DNA, 19 bp, Mus musculus
  siRNA target sequence for G630009D10Rik (NM_177354.2,1715-1733).
gagctgcagtacaatcaca

SEQ ID NO: 795404 - DNA, 19 bp, Mus musculus
  siRNA target sequence for G630009D10Rik (NM_177354.2,1900-1918).
cttcaagacctatttctca

SEQ ID NO: 795405 - DNA, 19 bp, Mus musculus
  siRNA target sequence for G630009D10Rik (NM_177354.2,1989-2007).
gaagggaggacctgatgta

SEQ ID NO: 795406 - DNA, 19 bp, Mus musculus
  siRNA target sequence for G630009D10Rik (NM_177354.2,1992-2010).
gggaggacctgatgtacaa

SEQ ID NO: 795407 - DNA, 19 bp, Mus musculus
  siRNA target sequence for G630009D10Rik (NM_177354.2,1993-2011).
ggaggacctgatgtacaaa

SEQ ID NO: 795408 - DNA, 19 bp, Mus musculus
  siRNA target sequence for G630009D10Rik (NM_177354.2,2073-2091).
gctggcacgtgctgaagaa

SEQ ID NO: 795409 - DNA, 19 bp, Mus musculus
  siRNA target sequence for G630009D10Rik (NM_177354.2,2124-2142).
cgcacagtgtggaacagat

SEQ ID NO: 795410 - DNA, 19 bp, Mus musculus
  siRNA target sequence for A630033E08Rik (NM_177358.2,619-637).
ccagactggctctcttaga

SEQ ID NO: 795411 - DNA, 19 bp, Mus musculus
  siRNA target sequence for A630033E08Rik (NM_177358.2,697-715).
ctttactagcagctcatat

SEQ ID NO: 795412 - DNA, 19 bp, Mus musculus
  siRNA target sequence for A630033E08Rik (NM_177358.2,706-724).
cagctcatatgtcagaata

SEQ ID NO: 795413 - DNA, 19 bp, Mus musculus
  siRNA target sequence for A630033E08Rik (NM_177358.2,708-726).
gctcatatgtcagaataca

SEQ ID NO: 795414 - DNA, 19 bp, Mus musculus
  siRNA target sequence for A630033E08Rik (NM_177358.2,709-727).
ctcatatgtcagaatacat

SEQ ID NO: 795415 - DNA, 19 bp, Mus musculus
  siRNA target sequence for A630033E08Rik (NM_177358.2,932-950).
ggtaattgcgacagatctt

SEQ ID NO: 795416 - DNA, 19 bp, Mus musculus
  siRNA target sequence for A630033E08Rik (NM_177358.2,933-951).
gtaattgcgacagatcttt

SEQ ID NO: 795417 - DNA, 19 bp, Mus musculus
  siRNA target sequence for A630033E08Rik (NM_177358.2,940-958).
cgacagatcttttacaagt

SEQ ID NO: 795418 - DNA, 19 bp, Mus musculus
  siRNA target sequence for G630024C07Rik (NM_177362.2,318-336).
ctccacactagccaaacat

SEQ ID NO: 795419 - DNA, 19 bp, Mus musculus
  siRNA target sequence for 9930022N03Rik (NM_177363.2,214-232).
gagccacgtgacaatgcaa

SEQ ID NO: 795420 - DNA, 19 bp, Mus musculus
  siRNA target sequence for 9930022N03Rik (NM_177363.2,238-256).
gagccccaccccgagtaaa

SEQ ID NO: 795421 - DNA, 19 bp, Mus musculus
  siRNA target sequence for 9930022N03Rik (NM_177363.2,242-260).
cccaccccgagtaaatact

SEQ ID NO: 795422 - DNA, 19 bp, Mus musculus
  siRNA target sequence for 9930022N03Rik (NM_177363.2,243-261).
ccaccccgagtaaatactt

SEQ ID NO: 795423 - DNA, 19 bp, Mus musculus
  siRNA target sequence for 9930022N03Rik (NM_177363.2,246-264).
ccccgagtaaatacttcat

SEQ ID NO: 795424 - DNA, 19 bp, Mus musculus
  siRNA target sequence for 9930022N03Rik (NM_177363.2,274-292).
ggaaggtttcgctttgaat

SEQ ID NO: 795425 - DNA, 19 bp, Mus musculus
  siRNA target sequence for 9930022N03Rik (NM_177363.2,275-293).
gaaggtttcgctttgaatt

SEQ ID NO: 795426 - DNA, 19 bp, Mus musculus
  siRNA target sequence for 9930022N03Rik (NM_177363.2,296-314).
gtgaagccatataatttga

SEQ ID NO: 795427 - DNA, 19 bp, Mus musculus
  siRNA target sequence for 9930022N03Rik (NM_177363.2,298-316).
gaagccatataatttgaca

SEQ ID NO: 795428 - DNA, 19 bp, Mus musculus
  siRNA target sequence for 9930022N03Rik (NM_177363.2,340-358).
caccgacctacgacagaat

SEQ ID NO: 795429 - DNA, 19 bp, Mus musculus
  siRNA target sequence for 9930022N03Rik (NM_177363.2,342-360).
ccgacctacgacagaatga

SEQ ID NO: 795430 - DNA, 19 bp, Mus musculus
  siRNA target sequence for 9930022N03Rik (NM_177363.2,343-361).
cgacctacgacagaatgat

SEQ ID NO: 795431 - DNA, 19 bp, Mus musculus
  siRNA target sequence for 9930022N03Rik (NM_177363.2,368-386).
cactacacctgtgaatact

SEQ ID NO: 795432 - DNA, 19 bp, Mus musculus
  siRNA target sequence for 9930022N03Rik (NM_177363.2,370-388).
ctacacctgtgaatactat

SEQ ID NO: 795433 - DNA, 19 bp, Mus musculus
  siRNA target sequence for 9930022N03Rik (NM_177363.2,375-393).
cctgtgaatactatagcaa

SEQ ID NO: 795434 - DNA, 19 bp, Mus musculus
  siRNA target sequence for 9930022N03Rik (NM_177363.2,376-394).
ctgtgaatactatagcaaa

SEQ ID NO: 795435 - DNA, 19 bp, Mus musculus
  siRNA target sequence for 9930022N03Rik (NM_177363.2,420-438).
ccagcaatgcccttttctt

SEQ ID NO: 795436 - DNA, 19 bp, Mus musculus
  siRNA target sequence for 9930022N03Rik (NM_177363.2,423-441).
gcaatgcccttttcttgtt

SEQ ID NO: 795437 - DNA, 19 bp, Mus musculus
  siRNA target sequence for 9930022N03Rik (NM_177363.2,439-457).
gttggtcacagggtactta

SEQ ID NO: 795438 - DNA, 19 bp, Mus musculus
  siRNA target sequence for 9930022N03Rik (NM_177363.2,542-560).
gtcctcggacccgtaaagt

SEQ ID NO: 795439 - DNA, 19 bp, Mus musculus
  siRNA target sequence for 9930022N03Rik (NM_177363.2,544-562).
cctcggacccgtaaagttt

SEQ ID NO: 795440 - DNA, 19 bp, Mus musculus
  siRNA target sequence for 9930022N03Rik (NM_177363.2,554-572).
gtaaagtttgcgttactga

SEQ ID NO: 795441 - DNA, 19 bp, Mus musculus
  siRNA target sequence for 9930022N03Rik (NM_177363.2,665-683).
gaatacagctgtgtttact

SEQ ID NO: 795442 - DNA, 19 bp, Mus musculus
  siRNA target sequence for 9930022N03Rik (NM_177363.2,727-745).
ccttgagatctctgtgata

SEQ ID NO: 795443 - DNA, 19 bp, Mus musculus
  siRNA target sequence for 9930022N03Rik (NM_177363.2,731-749).
gagatctctgtgatagaca

SEQ ID NO: 795444 - DNA, 19 bp, Mus musculus
  siRNA target sequence for 9930022N03Rik (NM_177363.2,876-894).
ctgcaatcctgctaatagt

SEQ ID NO: 795445 - DNA, 19 bp, Mus musculus
  siRNA target sequence for A930037J23Rik (NM_177365.2,733-751).
gtcctaaagcgctatgcat

SEQ ID NO: 795446 - DNA, 19 bp, Mus musculus
  siRNA target sequence for A930037J23Rik (NM_177365.2,755-773).
gcactgggtcaagtgaatt

SEQ ID NO: 795447 - DNA, 19 bp, Mus musculus
  siRNA target sequence for A930037J23Rik (NM_177365.2,848-866).
cgttcttgcacgaggtttt

SEQ ID NO: 795448 - DNA, 19 bp, Mus musculus
  siRNA target sequence for A930037J23Rik (NM_177365.2,862-880).
gttttatgggagctagaaa

SEQ ID NO: 795449 - DNA, 19 bp, Mus musculus
  siRNA target sequence for A930037J23Rik (NM_177365.2,881-899).
ccttacgcctcgtaagtca

SEQ ID NO: 795450 - DNA, 19 bp, Mus musculus
  siRNA target sequence for A930037J23Rik (NM_177365.2,887-905).
gcctcgtaagtcactttga

SEQ ID NO: 795451 - DNA, 19 bp, Mus musculus
  siRNA target sequence for A930037J23Rik (NM_177365.2,889-907).
ctcgtaagtcactttgaga

SEQ ID NO: 795452 - DNA, 19 bp, Mus musculus
  siRNA target sequence for A930037J23Rik (NM_177365.2,936-954).
cgatgatttatatatagta

SEQ ID NO: 795453 - DNA, 19 bp, Mus musculus
  siRNA target sequence for A930037J23Rik (NM_177365.2,982-1000).
gactgtagtggccaagatt

SEQ ID NO: 795454 - DNA, 19 bp, Mus musculus
  siRNA target sequence for A930037J23Rik (NM_177365.2,986-1004).
gtagtggccaagattttga

SEQ ID NO: 795455 - DNA, 19 bp, Mus musculus
  siRNA target sequence for A930037J23Rik (NM_177365.2,1011-1029).
gcttcgagttcctcttttt

SEQ ID NO: 795456 - DNA, 19 bp, Mus musculus
  siRNA target sequence for A930037J23Rik (NM_177365.2,1021-1039).
cctctttttgaaatactga

SEQ ID NO: 795457 - DNA, 19 bp, Mus musculus
  siRNA target sequence for A930037J23Rik (NM_177365.2,1022-1040).
ctctttttgaaatactgaa

SEQ ID NO: 795458 - DNA, 19 bp, Mus musculus
  siRNA target sequence for A930037J23Rik (NM_177365.2,1093-1111).
ctttgccgaatggaacaaa

SEQ ID NO: 795459 - DNA, 19 bp, Mus musculus
  siRNA target sequence for A930037J23Rik (NM_177365.2,1148-1166).
gcatctatttgtttttggt

SEQ ID NO: 795460 - DNA, 19 bp, Mus musculus
  siRNA target sequence for A930037J23Rik (NM_177365.2,1227-1245).
ggacagagatgactattat

SEQ ID NO: 795461 - DNA, 19 bp, Mus musculus
  siRNA target sequence for A930037J23Rik (NM_177365.2,1372-1390).
gatactaccaactacaaaa

SEQ ID NO: 795462 - DNA, 19 bp, Mus musculus
  siRNA target sequence for A930037J23Rik (NM_177365.2,1376-1394).
ctaccaactacaaaaacta

SEQ ID NO: 795463 - DNA, 19 bp, Mus musculus
  siRNA target sequence for A930037J23Rik (NM_177365.2,1456-1474).
ctgggctcagacaagcaaa

SEQ ID NO: 795464 - DNA, 19 bp, Mus musculus
  siRNA target sequence for A930037J23Rik (NM_177365.2,1458-1476).
gggctcagacaagcaaaat

SEQ ID NO: 795465 - DNA, 19 bp, Mus musculus
  siRNA target sequence for A930037J23Rik (NM_177365.2,1498-1516).
cacaccatggagaagcaat

SEQ ID NO: 795466 - DNA, 19 bp, Mus musculus
  siRNA target sequence for A930037J23Rik (NM_177365.2,1509-1527).
gaagcaatcggatgatgat

SEQ ID NO: 795467 - DNA, 19 bp, Mus musculus
  siRNA target sequence for A930037J23Rik (NM_177365.2,1525-1543).
gatagcatggatccttttt

SEQ ID NO: 795468 - DNA, 19 bp, Mus musculus
  siRNA target sequence for A930037J23Rik (NM_177365.2,1538-1556).
ctttttggccagcattaca

SEQ ID NO: 795469 - DNA, 19 bp, Mus musculus
  siRNA target sequence for A930037J23Rik (NM_177365.2,1544-1562).
ggccagcattacactgttt

SEQ ID NO: 795470 - DNA, 19 bp, Mus musculus
  siRNA target sequence for A930037J23Rik (NM_177365.2,1546-1564).
ccagcattacactgtttca

SEQ ID NO: 795471 - DNA, 19 bp, Mus musculus
  siRNA target sequence for A930037J23Rik (NM_177365.2,1547-1565).
cagcattacactgtttcat

SEQ ID NO: 795472 - DNA, 19 bp, Mus musculus
  siRNA target sequence for A930037J23Rik (NM_177365.2,1579-1597).
cgccttggatctaaggtat

SEQ ID NO: 795473 - DNA, 19 bp, Mus musculus
  siRNA target sequence for A930037J23Rik (NM_177365.2,1593-1611).
ggtatggggtcaacttatt

SEQ ID NO: 795474 - DNA, 19 bp, Mus musculus
  siRNA target sequence for A930037J23Rik (NM_177365.2,1678-1696).
cggaacagctccataagga

SEQ ID NO: 795475 - DNA, 19 bp, Mus musculus
  siRNA target sequence for A930037J23Rik (NM_177365.2,1739-1757).
gcagccagattgtttataa

SEQ ID NO: 795476 - DNA, 19 bp, Mus musculus
  siRNA target sequence for A930037J23Rik (NM_177365.2,1742-1760).
gccagattgtttataactt

SEQ ID NO: 795477 - DNA, 19 bp, Mus musculus
  siRNA target sequence for A930037J23Rik (NM_177365.2,1743-1761).
ccagattgtttataacttt

SEQ ID NO: 795478 - DNA, 19 bp, Mus musculus
  siRNA target sequence for A930037J23Rik (NM_177365.2,1791-1809).
gtggagatcagccatttgt

SEQ ID NO: 795479 - DNA, 19 bp, Mus musculus
  siRNA target sequence for A930037J23Rik (NM_177365.2,1847-1865).
cattagccaatgtacttca

SEQ ID NO: 795480 - DNA, 19 bp, Mus musculus
  siRNA target sequence for A930037J23Rik (NM_177365.2,1866-1884).
gtcagatattggtcaagat

SEQ ID NO: 795481 - DNA, 19 bp, Mus musculus
  siRNA target sequence for A930037J23Rik (NM_177365.2,1868-1886).
cagatattggtcaagatat

SEQ ID NO: 795482 - DNA, 19 bp, Mus musculus
  siRNA target sequence for A930037J23Rik (NM_177365.2,1879-1897).
caagatatgcgtgttcata

SEQ ID NO: 795483 - DNA, 19 bp, Mus musculus
  siRNA target sequence for A930037J23Rik (NM_177365.2,1882-1900).
gatatgcgtgttcataaca

SEQ ID NO: 795484 - DNA, 19 bp, Mus musculus
  siRNA target sequence for A930037J23Rik (NM_177365.2,1902-1920).
cacctttctgtggttcata

SEQ ID NO: 795485 - DNA, 19 bp, Mus musculus
  siRNA target sequence for A930037J23Rik (NM_177365.2,1934-1952).
cactcatggatcttaagga

SEQ ID NO: 795486 - DNA, 19 bp, Mus musculus
  siRNA target sequence for A930037J23Rik (NM_177365.2,1958-1976).
gtgtggcttacatagtaga

SEQ ID NO: 795487 - DNA, 19 bp, Mus musculus
  siRNA target sequence for A930037J23Rik (NM_177365.2,1962-1980).
ggcttacatagtagaagtt

SEQ ID NO: 795488 - DNA, 19 bp, Mus musculus
  siRNA target sequence for A930037J23Rik (NM_177365.2,1968-1986).
catagtagaagttattcat

SEQ ID NO: 795489 - DNA, 19 bp, Mus musculus
  siRNA target sequence for A930037J23Rik (NM_177365.2,1978-1996).
gttattcatcatctatact

SEQ ID NO: 795490 - DNA, 19 bp, Mus musculus
  siRNA target sequence for A930037J23Rik (NM_177365.2,2254-2272).
cattcggtgcagtctaact

SEQ ID NO: 795491 - DNA, 19 bp, Mus musculus
  siRNA target sequence for A930037J23Rik (NM_177365.2,2352-2370).
gcggttctgggataagctt

SEQ ID NO: 795492 - DNA, 19 bp, Mus musculus
  siRNA target sequence for A930037J23Rik (NM_177365.2,2353-2371).
cggttctgggataagctta

SEQ ID NO: 795493 - DNA, 19 bp, Mus musculus
  siRNA target sequence for A930037J23Rik (NM_177365.2,2354-2372).
ggttctgggataagcttaa

SEQ ID NO: 795494 - DNA, 19 bp, Mus musculus
  siRNA target sequence for A930037J23Rik (NM_177365.2,2358-2376).
ctgggataagcttaactta

SEQ ID NO: 795495 - DNA, 19 bp, Mus musculus
  siRNA target sequence for A930037J23Rik (NM_177365.2,2360-2378).
gggataagcttaacttatt

SEQ ID NO: 795496 - DNA, 19 bp, Mus musculus
  siRNA target sequence for A930037J23Rik (NM_177365.2,2406-2424).
gcaattgactggtcaagaa

SEQ ID NO: 795497 - DNA, 19 bp, Mus musculus
  siRNA target sequence for A930037J23Rik (NM_177365.2,2417-2435).
gtcaagaaacccatgagtt

SEQ ID NO: 795498 - DNA, 19 bp, Mus musculus
  siRNA target sequence for A930037J23Rik (NM_177365.2,2422-2440).
gaaacccatgagttacaaa

SEQ ID NO: 795499 - DNA, 19 bp, Mus musculus
  siRNA target sequence for A930037J23Rik (NM_177365.2,2493-2511).
cacttttggggattcaact

SEQ ID NO: 795500 - DNA, 19 bp, Mus musculus
  siRNA target sequence for A930037J23Rik (NM_177365.2,2633-2651).
ctgacacccatcgagtatt

SEQ ID NO: 795501 - DNA, 19 bp, Mus musculus
  siRNA target sequence for A930037J23Rik (NM_177365.2,2635-2653).
gacacccatcgagtattga

SEQ ID NO: 795502 - DNA, 19 bp, Mus musculus
  siRNA target sequence for A930037J23Rik (NM_177365.2,2640-2658).
ccatcgagtattgatgaaa

SEQ ID NO: 795503 - DNA, 19 bp, Mus musculus
  siRNA target sequence for A930037J23Rik (NM_177365.2,2644-2662).
cgagtattgatgaaagtaa

SEQ ID NO: 795504 - DNA, 19 bp, Mus musculus
  siRNA target sequence for A930037J23Rik (NM_177365.2,2682-2700).
cttcaagcagcattacatt

SEQ ID NO: 795505 - DNA, 19 bp, Mus musculus
  siRNA target sequence for A930037J23Rik (NM_177365.2,2689-2707).
cagcattacattgatttga

SEQ ID NO: 795506 - DNA, 19 bp, Mus musculus
  siRNA target sequence for Gemin4 (NM_177367.2,28-46).
ggacctaggacccttgaat

SEQ ID NO: 795507 - DNA, 19 bp, Mus musculus
  siRNA target sequence for Gemin4 (NM_177367.2,29-47).
gacctaggacccttgaata

SEQ ID NO: 795508 - DNA, 19 bp, Mus musculus
  siRNA target sequence for Gemin4 (NM_177367.2,49-67).
ctgtgaggagatgactatt

SEQ ID NO: 795509 - DNA, 19 bp, Mus musculus
  siRNA target sequence for Gemin4 (NM_177367.2,296-314).
cggtggcaggaagatgtat

SEQ ID NO: 795510 - DNA, 19 bp, Mus musculus
  siRNA target sequence for Gemin4 (NM_177367.2,490-508).
ggatgtggccttcttctta

SEQ ID NO: 795511 - DNA, 19 bp, Mus musculus
  siRNA target sequence for Gemin4 (NM_177367.2,571-589).
caggacgatggcccataaa

SEQ ID NO: 795512 - DNA, 19 bp, Mus musculus
  siRNA target sequence for Gemin4 (NM_177367.2,573-591).
ggacgatggcccataaata

SEQ ID NO: 795513 - DNA, 19 bp, Mus musculus
  siRNA target sequence for Gemin4 (NM_177367.2,576-594).
cgatggcccataaatactt

SEQ ID NO: 795514 - DNA, 19 bp, Mus musculus
  siRNA target sequence for Gemin4 (NM_177367.2,595-613).
gccatcctcagatgagttt

SEQ ID NO: 795515 - DNA, 19 bp, Mus musculus
  siRNA target sequence for Gemin4 (NM_177367.2,596-614).
ccatcctcagatgagtttt

SEQ ID NO: 795516 - DNA, 19 bp, Mus musculus
  siRNA target sequence for Gemin4 (NM_177367.2,668-686).
cttttggccatgttgctta

SEQ ID NO: 795517 - DNA, 19 bp, Mus musculus
  siRNA target sequence for Gemin4 (NM_177367.2,735-753).
gctgtgccttagctaactt

SEQ ID NO: 795518 - DNA, 19 bp, Mus musculus
  siRNA target sequence for Gemin4 (NM_177367.2,971-989).
gggtttgagcttatgtaca

SEQ ID NO: 795519 - DNA, 19 bp, Mus musculus
  siRNA target sequence for Gemin4 (NM_177367.2,972-990).
ggtttgagcttatgtacaa

SEQ ID NO: 795520 - DNA, 19 bp, Mus musculus
  siRNA target sequence for Gemin4 (NM_177367.2,1335-1353).
gggttgcctgcctggttaa

SEQ ID NO: 795521 - DNA, 19 bp, Mus musculus
  siRNA target sequence for Gemin4 (NM_177367.2,1337-1355).
gttgcctgcctggttaaca

SEQ ID NO: 795522 - DNA, 19 bp, Mus musculus
  siRNA target sequence for Gemin4 (NM_177367.2,1446-1464).
ctcagatcaagcaggtaat

SEQ ID NO: 795523 - DNA, 19 bp, Mus musculus
  siRNA target sequence for Gemin4 (NM_177367.2,1448-1466).
cagatcaagcaggtaatct

SEQ ID NO: 795524 - DNA, 19 bp, Mus musculus
  siRNA target sequence for Gemin4 (NM_177367.2,1562-1580).
gacaggttgtctgattact

SEQ ID NO: 795525 - DNA, 19 bp, Mus musculus
  siRNA target sequence for Gemin4 (NM_177367.2,1598-1616).
gacctcaacacgacgttta

SEQ ID NO: 795526 - DNA, 19 bp, Mus musculus
  siRNA target sequence for Gemin4 (NM_177367.2,1723-1741).
cctagctgtgaccaatctt

SEQ ID NO: 795527 - DNA, 19 bp, Mus musculus
  siRNA target sequence for Gemin4 (NM_177367.2,1789-1807).
gaagttcacggaagaacaa

SEQ ID NO: 795528 - DNA, 19 bp, Mus musculus
  siRNA target sequence for Gemin4 (NM_177367.2,1802-1820).
gaacaaggggcaaatccat

SEQ ID NO: 795529 - DNA, 19 bp, Mus musculus
  siRNA target sequence for Gemin4 (NM_177367.2,1837-1855).
gtcttgcctcaaagaaact

SEQ ID NO: 795530 - DNA, 19 bp, Mus musculus
  siRNA target sequence for Gemin4 (NM_177367.2,1839-1857).
cttgcctcaaagaaactgt

SEQ ID NO: 795531 - DNA, 19 bp, Mus musculus
  siRNA target sequence for D330034A10Rik (NM_177368.2,734-752).
gggctcgccttgtatctca

SEQ ID NO: 795532 - DNA, 19 bp, Mus musculus
  siRNA target sequence for D330034A10Rik (NM_177368.2,735-753).
ggctcgccttgtatctcaa

SEQ ID NO: 795533 - DNA, 19 bp, Mus musculus
  siRNA target sequence for D330034A10Rik (NM_177368.2,786-804).
gccgtgctatcaagactaa

SEQ ID NO: 795534 - DNA, 19 bp, Mus musculus
  siRNA target sequence for D330034A10Rik (NM_177368.2,789-807).
gtgctatcaagactaatca

SEQ ID NO: 795535 - DNA, 19 bp, Mus musculus
  siRNA target sequence for D330034A10Rik (NM_177368.2,827-845).
ccctggacacacattttct

SEQ ID NO: 795536 - DNA, 19 bp, Mus musculus
  siRNA target sequence for D330034A10Rik (NM_177368.2,828-846).
cctggacacacattttcta

SEQ ID NO: 795537 - DNA, 19 bp, Mus musculus
  siRNA target sequence for D330034A10Rik (NM_177368.2,907-925).
ctgcactctctcttttcga

SEQ ID NO: 795538 - DNA, 19 bp, Mus musculus
  siRNA target sequence for D330034A10Rik (NM_177368.2,916-934).
ctcttttcgactgaatcat

SEQ ID NO: 795539 - DNA, 19 bp, Mus musculus
  siRNA target sequence for D330034A10Rik (NM_177368.2,960-978).
gctatcaccttgtcaatgt

SEQ ID NO: 795540 - DNA, 19 bp, Mus musculus
  siRNA target sequence for D330034A10Rik (NM_177368.2,1129-1147).
gggcgctagtctctttttt

SEQ ID NO: 795541 - DNA, 19 bp, Mus musculus
  siRNA target sequence for D330034A10Rik (NM_177368.2,1131-1149).
gcgctagtctcttttttct

SEQ ID NO: 795542 - DNA, 19 bp, Mus musculus
  siRNA target sequence for D330034A10Rik (NM_177368.2,1155-1173).
ccctgctctgctacattaa

SEQ ID NO: 795543 - DNA, 19 bp, Mus musculus
  siRNA target sequence for D330034A10Rik (NM_177368.2,1168-1186).
cattaagcactgttctaca

SEQ ID NO: 795544 - DNA, 19 bp, Mus musculus
  siRNA target sequence for D330034A10Rik (NM_177368.2,1190-1208).
ggctactctgccagaactt

SEQ ID NO: 795545 - DNA, 19 bp, Mus musculus
  siRNA target sequence for D330034A10Rik (NM_177368.2,1273-1291).
gactgtcctggcagtttca

SEQ ID NO: 795546 - DNA, 19 bp, Mus musculus
  siRNA target sequence for D330034A10Rik (NM_177368.2,1282-1300).
ggcagtttcagccgtttat

SEQ ID NO: 795547 - DNA, 19 bp, Mus musculus
  siRNA target sequence for D330034A10Rik (NM_177368.2,1334-1352).
cagatcctgcctaccattt

SEQ ID NO: 795548 - DNA, 19 bp, Mus musculus
  siRNA target sequence for D330034A10Rik (NM_177368.2,1379-1397).
ctcagcattagcttgttaa

SEQ ID NO: 795549 - DNA, 19 bp, Mus musculus
  siRNA target sequence for D330034A10Rik (NM_177368.2,1509-1527).
gcacgctcaccttcttgta

SEQ ID NO: 795550 - DNA, 19 bp, Mus musculus
  siRNA target sequence for D330034A10Rik (NM_177368.2,1595-1613).
gccgtgcctcttctcaaaa

SEQ ID NO: 795551 - DNA, 19 bp, Mus musculus
  siRNA target sequence for D330034A10Rik (NM_177368.2,1597-1615).
cgtgcctcttctcaaaaca

SEQ ID NO: 795552 - DNA, 19 bp, Mus musculus
  siRNA target sequence for D330034A10Rik (NM_177368.2,1683-1701).
gtttgaagaacccaagttt

SEQ ID NO: 795553 - DNA, 19 bp, Mus musculus
  siRNA target sequence for D330034A10Rik (NM_177368.2,1778-1796).
gagtaccggaactcagaaa

SEQ ID NO: 795554 - DNA, 19 bp, Mus musculus
  siRNA target sequence for D330034A10Rik (NM_177368.2,1804-1822).
cagctttgcatccaaagta

SEQ ID NO: 795555 - DNA, 19 bp, Mus musculus
  siRNA target sequence for D330034A10Rik (NM_177368.2,1806-1824).
gctttgcatccaaagtaga

SEQ ID NO: 795556 - DNA, 19 bp, Mus musculus
  siRNA target sequence for D330034A10Rik (NM_177368.2,1866-1884).
cgtccacggagaacattgt

SEQ ID NO: 795557 - DNA, 19 bp, Mus musculus
  siRNA target sequence for D330034A10Rik (NM_177368.2,1906-1924).
gataataccttttattcct

SEQ ID NO: 795558 - DNA, 19 bp, Mus musculus
  siRNA target sequence for D330034A10Rik (NM_177368.2,1922-1940).
cctgccacgaacctgtttt

SEQ ID NO: 795559 - DNA, 19 bp, Mus musculus
  siRNA target sequence for D330034A10Rik (NM_177368.2,1923-1941).
ctgccacgaacctgttttt

SEQ ID NO: 795560 - DNA, 19 bp, Mus musculus
  siRNA target sequence for D330034A10Rik (NM_177368.2,1926-1944).
ccacgaacctgtttttcta

SEQ ID NO: 795561 - DNA, 19 bp, Mus musculus
  siRNA target sequence for D330034A10Rik (NM_177368.2,1927-1945).
cacgaacctgtttttctat

SEQ ID NO: 795562 - DNA, 19 bp, Mus musculus
  siRNA target sequence for D330034A10Rik (NM_177368.2,1929-1947).
cgaacctgtttttctatgt

SEQ ID NO: 795563 - DNA, 19 bp, Mus musculus
  siRNA target sequence for D330034A10Rik (NM_177368.2,1960-1978).
cgcagagcgagtcttatat

SEQ ID NO: 795564 - DNA, 19 bp, Mus musculus
  siRNA target sequence for D330034A10Rik (NM_177368.2,1961-1979).
gcagagcgagtcttatata

SEQ ID NO: 795565 - DNA, 19 bp, Mus musculus
  siRNA target sequence for D330034A10Rik (NM_177368.2,2022-2040).
gagccctgtatgtcaaagt

SEQ ID NO: 795566 - DNA, 19 bp, Mus musculus
  siRNA target sequence for D330034A10Rik (NM_177368.2,2025-2043).
ccctgtatgtcaaagtaca

SEQ ID NO: 795567 - DNA, 19 bp, Mus musculus
  siRNA target sequence for D330034A10Rik (NM_177368.2,2039-2057).
gtacaaaagaggtttctca

SEQ ID NO: 795568 - DNA, 19 bp, Mus musculus
  siRNA target sequence for D330034A10Rik (NM_177368.2,2059-2077).
gagcttggttttttatgct

SEQ ID NO: 795569 - DNA, 19 bp, Mus musculus
  siRNA target sequence for D330034A10Rik (NM_177368.2,2157-2175).
gatcagggatcaaagtgaa

SEQ ID NO: 795570 - DNA, 19 bp, Mus musculus
  siRNA target sequence for D330034A10Rik (NM_177368.2,2171-2189).
gtgaacccagccaaagcat

SEQ ID NO: 795571 - DNA, 19 bp, Mus musculus
  siRNA target sequence for D330034A10Rik (NM_177368.2,2187-2205).
catggggtaaccttggaaa

SEQ ID NO: 795572 - DNA, 19 bp, Mus musculus
  siRNA target sequence for D330034A10Rik (NM_177368.2,2281-2299).
ggctgacatgctgtataat

SEQ ID NO: 795573 - DNA, 19 bp, Mus musculus
  siRNA target sequence for D330034A10Rik (NM_177368.2,2333-2351).
gcagaagctcttcactatt

SEQ ID NO: 795574 - DNA, 19 bp, Mus musculus
  siRNA target sequence for D330034A10Rik (NM_177368.2,2384-2402).
gcttctgcctatttaaaca

SEQ ID NO: 795575 - DNA, 19 bp, Mus musculus
  siRNA target sequence for D330034A10Rik (NM_177368.2,2403-2421).
ccggcattattctcatgaa

SEQ ID NO: 795576 - DNA, 19 bp, Mus musculus
  siRNA target sequence for D330034A10Rik (NM_177368.2,2501-2519).
gcacataagagttctgtta

SEQ ID NO: 795577 - DNA, 19 bp, Mus musculus
  siRNA target sequence for D330034A10Rik (NM_177368.2,2625-2643).
cccctcagagcctgtacaa

SEQ ID NO: 795578 - DNA, 19 bp, Mus musculus
  siRNA target sequence for D330034A10Rik (NM_177368.2,2630-2648).
cagagcctgtacaacatga

SEQ ID NO: 795579 - DNA, 19 bp, Mus musculus
  siRNA target sequence for D330034A10Rik (NM_177368.2,2690-2708).
gagcattggtacatggaat

SEQ ID NO: 795580 - DNA, 19 bp, Mus musculus
  siRNA target sequence for D330034A10Rik (NM_177368.2,2715-2733).
gatccaagaccgatcacat

SEQ ID NO: 795581 - DNA, 19 bp, Mus musculus
  siRNA target sequence for D330034A10Rik (NM_177368.2,2755-2773).
gaagctgctcgccttaaca

SEQ ID NO: 795582 - DNA, 19 bp, Mus musculus
  siRNA target sequence for D330034A10Rik (NM_177368.2,2767-2785).
cttaacaggtcgtaagagt

SEQ ID NO: 795583 - DNA, 19 bp, Mus musculus
  siRNA target sequence for D330034A10Rik (NM_177368.2,2786-2804).
gaggctgaaaagttcttct

SEQ ID NO: 795584 - DNA, 19 bp, Mus musculus
  siRNA target sequence for D330034A10Rik (NM_177368.2,2826-2844).
ctaccaaaggaaactgtta

SEQ ID NO: 795585 - DNA, 19 bp, Mus musculus
  siRNA target sequence for 5730411O18Rik (NM_177370.2,1379-1397).
gctgggtctagctttgctt

SEQ ID NO: 795586 - DNA, 19 bp, Mus musculus
  siRNA target sequence for E130120L08Rik (NM_177373.3,330-348).
cgactcggactcccatttt

SEQ ID NO: 795587 - DNA, 19 bp, Mus musculus
  siRNA target sequence for E130120L08Rik (NM_177373.3,349-367).
gagcaactcatggtcaata

SEQ ID NO: 795588 - DNA, 19 bp, Mus musculus
  siRNA target sequence for E130120L08Rik (NM_177373.3,440-458).
ggctccaggatgtcatcta

SEQ ID NO: 795589 - DNA, 19 bp, Mus musculus
  siRNA target sequence for E130120L08Rik (NM_177373.3,453-471).
catctatgacagagattca

SEQ ID NO: 795590 - DNA, 19 bp, Mus musculus
  siRNA target sequence for E130120L08Rik (NM_177373.3,496-514).
ctacctcaggacatcgaat

SEQ ID NO: 795591 - DNA, 19 bp, Mus musculus
  siRNA target sequence for E130120L08Rik (NM_177373.3,565-583).
gctgcactgactaaagagt

SEQ ID NO: 795592 - DNA, 19 bp, Mus musculus
  siRNA target sequence for E130120L08Rik (NM_177373.3,566-584).
ctgcactgactaaagagtt

SEQ ID NO: 795593 - DNA, 19 bp, Mus musculus
  siRNA target sequence for E130120L08Rik (NM_177373.3,585-603).
gaatgcttgccgtgaacaa

SEQ ID NO: 795594 - DNA, 19 bp, Mus musculus
  siRNA target sequence for E130120L08Rik (NM_177373.3,590-608).
cttgccgtgaacaacttct

SEQ ID NO: 795595 - DNA, 19 bp, Mus musculus
  siRNA target sequence for E130120L08Rik (NM_177373.3,593-611).
gccgtgaacaacttctaga

SEQ ID NO: 795596 - DNA, 19 bp, Mus musculus
  siRNA target sequence for E130120L08Rik (NM_177373.3,594-612).
ccgtgaacaacttctagaa

SEQ ID NO: 795597 - DNA, 19 bp, Mus musculus
  siRNA target sequence for E130120L08Rik (NM_177373.3,697-715).
catgaacggtcactaagaa

SEQ ID NO: 795598 - DNA, 19 bp, Mus musculus
  siRNA target sequence for E130120L08Rik (NM_177373.3,700-718).
gaacggtcactaagaatga

SEQ ID NO: 795599 - DNA, 19 bp, Mus musculus
  siRNA target sequence for E130120L08Rik (NM_177373.3,775-793).
ctcaaggcactgaaatctt

SEQ ID NO: 795600 - DNA, 19 bp, Mus musculus
  siRNA target sequence for E130120L08Rik (NM_177373.3,782-800).
cactgaaatctttgtttga

SEQ ID NO: 795601 - DNA, 19 bp, Mus musculus
  siRNA target sequence for E130120L08Rik (NM_177373.3,836-854).
gactgagggtttctttaga

SEQ ID NO: 795602 - DNA, 19 bp, Mus musculus
  siRNA target sequence for E130120L08Rik (NM_177373.3,876-894).
ggaactagctgcagctaat

SEQ ID NO: 795603 - DNA, 19 bp, Mus musculus
  siRNA target sequence for E130120L08Rik (NM_177373.3,887-905).
cagctaatcaggagattgt

SEQ ID NO: 795604 - DNA, 19 bp, Mus musculus
  siRNA target sequence for E130120L08Rik (NM_177373.3,908-926).
ccttgcgtgagcaaaatgt

SEQ ID NO: 795605 - DNA, 19 bp, Mus musculus
  siRNA target sequence for E130120L08Rik (NM_177373.3,909-927).
cttgcgtgagcaaaatgtt

SEQ ID NO: 795606 - DNA, 19 bp, Mus musculus
  siRNA target sequence for E130120L08Rik (NM_177373.3,912-930).
gcgtgagcaaaatgttcat

SEQ ID NO: 795607 - DNA, 19 bp, Mus musculus
  siRNA target sequence for E130120L08Rik (NM_177373.3,913-931).
cgtgagcaaaatgttcata

SEQ ID NO: 795608 - DNA, 19 bp, Mus musculus
  siRNA target sequence for E130120L08Rik (NM_177373.3,934-952).
caaaggaaaatggtatcaa

SEQ ID NO: 795609 - DNA, 19 bp, Mus musculus
  siRNA target sequence for E130120L08Rik (NM_177373.3,965-983).
cggagtcagagcatcttga

SEQ ID NO: 795610 - DNA, 19 bp, Mus musculus
  siRNA target sequence for E130120L08Rik (NM_177373.3,995-1013).
caggccagaaagttcatga

SEQ ID NO: 795611 - DNA, 19 bp, Mus musculus
  siRNA target sequence for E130120L08Rik (NM_177373.3,1083-1101).
gcttgagaagcaaaactat

SEQ ID NO: 795612 - DNA, 19 bp, Mus musculus
  siRNA target sequence for E130120L08Rik (NM_177373.3,1177-1195).
gcaagaaaggacctcatta

SEQ ID NO: 795613 - DNA, 19 bp, Mus musculus
  siRNA target sequence for E130120L08Rik (NM_177373.3,1178-1196).
caagaaaggacctcattaa

SEQ ID NO: 795614 - DNA, 19 bp, Mus musculus
  siRNA target sequence for E130120L08Rik (NM_177373.3,1319-1337).
cctccattcatgatatgaa

SEQ ID NO: 795615 - DNA, 19 bp, Mus musculus
  siRNA target sequence for E130120L08Rik (NM_177373.3,1322-1340).
ccattcatgatatgaatga

SEQ ID NO: 795616 - DNA, 19 bp, Mus musculus
  siRNA target sequence for E130120L08Rik (NM_177373.3,1323-1341).
cattcatgatatgaatgat

SEQ ID NO: 795617 - DNA, 19 bp, Mus musculus
  siRNA target sequence for E130120L08Rik (NM_177373.3,1339-1357).
gataaactagaaaatgaat

SEQ ID NO: 795618 - DNA, 19 bp, Mus musculus
  siRNA target sequence for E130120L08Rik (NM_177373.3,1487-1505).
ctgaacttgctcagagaat

SEQ ID NO: 795619 - DNA, 19 bp, Mus musculus
  siRNA target sequence for E130120L08Rik (NM_177373.3,1502-1520).
gaattgcagccctaacaaa

SEQ ID NO: 795620 - DNA, 19 bp, Mus musculus
  siRNA target sequence for E130120L08Rik (NM_177373.3,1525-1543).
gaagagaggcatggaaata

SEQ ID NO: 795621 - DNA, 19 bp, Mus musculus
  siRNA target sequence for E130120L08Rik (NM_177373.3,1538-1556).
gaaatattgaagaacgtat

SEQ ID NO: 795622 - DNA, 19 bp, Mus musculus
  siRNA target sequence for E130120L08Rik (NM_177373.3,1563-1581).
cctcgagggccaacttgaa

SEQ ID NO: 795623 - DNA, 19 bp, Mus musculus
  siRNA target sequence for E130120L08Rik (NM_177373.3,1633-1651).
gagcataataagagattat

SEQ ID NO: 795624 - DNA, 19 bp, Mus musculus
  siRNA target sequence for E130120L08Rik (NM_177373.3,1780-1798).
gaagagtccttacatgata

SEQ ID NO: 795625 - DNA, 19 bp, Mus musculus
  siRNA target sequence for E130120L08Rik (NM_177373.3,1805-1823).
gattagcagaagaaatcga

SEQ ID NO: 795626 - DNA, 19 bp, Mus musculus
  siRNA target sequence for E130120L08Rik (NM_177373.3,1830-1848).
gaggtctgaacttgatcaa

SEQ ID NO: 795627 - DNA, 19 bp, Mus musculus
  siRNA target sequence for E130120L08Rik (NM_177373.3,1859-1877).
gaacaggttctctaattga

SEQ ID NO: 795628 - DNA, 19 bp, Mus musculus
  siRNA target sequence for E130120L08Rik (NM_177373.3,1870-1888).
ctaattgaacccactatat

SEQ ID NO: 795629 - DNA, 19 bp, Mus musculus
  siRNA target sequence for E130120L08Rik (NM_177373.3,1876-1894).
gaacccactatatcaagaa

SEQ ID NO: 795630 - DNA, 19 bp, Mus musculus
  siRNA target sequence for E130120L08Rik (NM_177373.3,1911-1929).
cactgagttgcggtattca

SEQ ID NO: 795631 - DNA, 19 bp, Mus musculus
  siRNA target sequence for E130120L08Rik (NM_177373.3,1942-1960).
gtagacagccagtctgatt

SEQ ID NO: 795632 - DNA, 19 bp, Mus musculus
  siRNA target sequence for E130120L08Rik (NM_177373.3,1945-1963).
gacagccagtctgattaca

SEQ ID NO: 795633 - DNA, 19 bp, Mus musculus
  siRNA target sequence for E130120L08Rik (NM_177373.3,2044-2062).
gatcatgagtggaacagaa

SEQ ID NO: 795634 - DNA, 19 bp, Mus musculus
  siRNA target sequence for E130120L08Rik (NM_177373.3,2087-2105).
gccaccctttcgaaagtga

SEQ ID NO: 795635 - DNA, 19 bp, Mus musculus
  siRNA target sequence for E130120L08Rik (NM_177373.3,2104-2122).
gacactgaaatgtctgata

SEQ ID NO: 795636 - DNA, 19 bp, Mus musculus
  siRNA target sequence for E130120L08Rik (NM_177373.3,2106-2124).
cactgaaatgtctgatatt

SEQ ID NO: 795637 - DNA, 19 bp, Mus musculus
  siRNA target sequence for E130120L08Rik (NM_177373.3,2221-2239).
caattggatgcaatcaata

SEQ ID NO: 795638 - DNA, 19 bp, Mus musculus
  siRNA target sequence for E130120L08Rik (NM_177373.3,2301-2319).
gaatagagtggctagtgta

SEQ ID NO: 795639 - DNA, 19 bp, Mus musculus
  siRNA target sequence for E130120L08Rik (NM_177373.3,2306-2324).
gagtggctagtgtaagctt

SEQ ID NO: 795640 - DNA, 19 bp, Mus musculus
  siRNA target sequence for E130120L08Rik (NM_177373.3,2310-2328).
ggctagtgtaagcttagaa

SEQ ID NO: 795641 - DNA, 19 bp, Mus musculus
  siRNA target sequence for E130120L08Rik (NM_177373.3,2478-2496).
gatgaccctgccaagtgat

SEQ ID NO: 795642 - DNA, 19 bp, Mus musculus
  siRNA target sequence for E130120L08Rik (NM_177373.3,2481-2499).
gaccctgccaagtgatcta

SEQ ID NO: 795643 - DNA, 19 bp, Mus musculus
  siRNA target sequence for E130120L08Rik (NM_177373.3,2487-2505).
gccaagtgatctaaggaaa

SEQ ID NO: 795644 - DNA, 19 bp, Mus musculus
  siRNA target sequence for E130120L08Rik (NM_177373.3,2588-2606).
cacccagagccgtcagaat

SEQ ID NO: 795645 - DNA, 19 bp, Mus musculus
  siRNA target sequence for E130120L08Rik (NM_177373.3,2634-2652).
caatgatgcccggagttta

SEQ ID NO: 795646 - DNA, 19 bp, Mus musculus
  siRNA target sequence for E130120L08Rik (NM_177373.3,2683-2701).
cttggcagtgccaatagca

SEQ ID NO: 795647 - DNA, 19 bp, Mus musculus
  siRNA target sequence for E130120L08Rik (NM_177373.3,2692-2710).
gccaatagcagccaagatt

SEQ ID NO: 795648 - DNA, 19 bp, Mus musculus
  siRNA target sequence for E130120L08Rik (NM_177373.3,2747-2765).
cttcaattgggcgcttatt

SEQ ID NO: 795649 - DNA, 19 bp, Mus musculus
  siRNA target sequence for E130120L08Rik (NM_177373.3,2838-2856).
cctgggcttaggcaaactt

SEQ ID NO: 795650 - DNA, 19 bp, Mus musculus
  siRNA target sequence for E130120L08Rik (NM_177373.3,3049-3067).
gcgttatcggacactgaaa

SEQ ID NO: 795651 - DNA, 19 bp, Mus musculus
  siRNA target sequence for E130120L08Rik (NM_177373.3,3050-3068).
cgttatcggacactgaaat

SEQ ID NO: 795652 - DNA, 19 bp, Mus musculus
  siRNA target sequence for E130120L08Rik (NM_177373.3,3095-3113).
ctctgcaccgcttaaagct

SEQ ID NO: 795653 - DNA, 19 bp, Mus musculus
  siRNA target sequence for E130120L08Rik (NM_177373.3,3267-3285).
ccagtgtccggtttttcta

SEQ ID NO: 795654 - DNA, 19 bp, Mus musculus
  siRNA target sequence for E130120L08Rik (NM_177373.3,3344-3362).
gcctggggttacctcaata

SEQ ID NO: 795655 - DNA, 19 bp, Mus musculus
  siRNA target sequence for E130120L08Rik (NM_177373.3,3346-3364).
ctggggttacctcaataca

SEQ ID NO: 795656 - DNA, 19 bp, Mus musculus
  siRNA target sequence for E130120L08Rik (NM_177373.3,3355-3373).
cctcaatacagaagttact

SEQ ID NO: 795657 - DNA, 19 bp, Mus musculus
  siRNA target sequence for E130120L08Rik (NM_177373.3,3383-3401).
gcttggttgatgcaagaat

SEQ ID NO: 795658 - DNA, 19 bp, Mus musculus
  siRNA target sequence for E130120L08Rik (NM_177373.3,3387-3405).
ggttgatgcaagaatgtta

SEQ ID NO: 795659 - DNA, 19 bp, Mus musculus
  siRNA target sequence for E130120L08Rik (NM_177373.3,3408-3426).
ccacctcacaaaaaaggat

SEQ ID NO: 795660 - DNA, 19 bp, Mus musculus
  siRNA target sequence for E130120L08Rik (NM_177373.3,3423-3441).
ggatcttcgtgtccattta

SEQ ID NO: 795661 - DNA, 19 bp, Mus musculus
  siRNA target sequence for E130120L08Rik (NM_177373.3,3424-3442).
gatcttcgtgtccatttaa

SEQ ID NO: 795662 - DNA, 19 bp, Mus musculus
  siRNA target sequence for E130120L08Rik (NM_177373.3,3460-3478).
catcgaacaagtttacagt

SEQ ID NO: 795663 - DNA, 19 bp, Mus musculus
  siRNA target sequence for E130120L08Rik (NM_177373.3,3470-3488).
gtttacagtatggaattat

SEQ ID NO: 795664 - DNA, 19 bp, Mus musculus
  siRNA target sequence for E130120L08Rik (NM_177373.3,3489-3507).
gtgcttgaaaagattgaat

SEQ ID NO: 795665 - DNA, 19 bp, Mus musculus
  siRNA target sequence for E130120L08Rik (NM_177373.3,3491-3509).
gcttgaaaagattgaatta

SEQ ID NO: 795666 - DNA, 19 bp, Mus musculus
  siRNA target sequence for E130120L08Rik (NM_177373.3,3492-3510).
cttgaaaagattgaattat

SEQ ID NO: 795667 - DNA, 19 bp, Mus musculus
  siRNA target sequence for E130120L08Rik (NM_177373.3,3575-3593).
ggagcaatgatcgagttat

SEQ ID NO: 795668 - DNA, 19 bp, Mus musculus
  siRNA target sequence for E130120L08Rik (NM_177373.3,3613-3631).
ggacttcgggaatatgcaa

SEQ ID NO: 795669 - DNA, 19 bp, Mus musculus
  siRNA target sequence for E130120L08Rik (NM_177373.3,3614-3632).
gacttcgggaatatgcaaa

SEQ ID NO: 795670 - DNA, 19 bp, Mus musculus
  siRNA target sequence for E130120L08Rik (NM_177373.3,3619-3637).
cgggaatatgcaaacaaca

SEQ ID NO: 795671 - DNA, 19 bp, Mus musculus
  siRNA target sequence for E130120L08Rik (NM_177373.3,3620-3638).
gggaatatgcaaacaacat

SEQ ID NO: 795672 - DNA, 19 bp, Mus musculus
  siRNA target sequence for E130120L08Rik (NM_177373.3,3650-3668).
gcgtgcatggctcacttat

SEQ ID NO: 795673 - DNA, 19 bp, Mus musculus
  siRNA target sequence for E130120L08Rik (NM_177373.3,3651-3669).
cgtgcatggctcacttata

SEQ ID NO: 795674 - DNA, 19 bp, Mus musculus
  siRNA target sequence for E130120L08Rik (NM_177373.3,3751-3769).
cttgaacgtgagtacaaca

SEQ ID NO: 795675 - DNA, 19 bp, Mus musculus
  siRNA target sequence for E130120L08Rik (NM_177373.3,3792-3810).
gcggagactggatgaaagt

SEQ ID NO: 795676 - DNA, 19 bp, Mus musculus
  siRNA target sequence for E130120L08Rik (NM_177373.3,3805-3823).
gaaagtgacgacaagaatt

SEQ ID NO: 795677 - DNA, 19 bp, Mus musculus
  siRNA target sequence for E130120L08Rik (NM_177373.3,3852-3870).
gttccctcctcgtgaagtt

SEQ ID NO: 795678 - DNA, 19 bp, Mus musculus
  siRNA target sequence for E130120L08Rik (NM_177373.3,3860-3878).
ctcgtgaagttcatggaat

SEQ ID NO: 795679 - DNA, 19 bp, Mus musculus
  siRNA target sequence for E130120L08Rik (NM_177373.3,3890-3908).
ctgggtcctcagaaacatt

SEQ ID NO: 795680 - DNA, 19 bp, Mus musculus
  siRNA target sequence for E130120L08Rik (NM_177373.3,3894-3912).
gtcctcagaaacattacca

SEQ ID NO: 795681 - DNA, 19 bp, Mus musculus
  siRNA target sequence for E130120L08Rik (NM_177373.3,3960-3978).
gacagacgttgcttcatca

SEQ ID NO: 795682 - DNA, 19 bp, Mus musculus
  siRNA target sequence for E130120L08Rik (NM_177373.3,3980-3998).
gactgcagaggttagacaa

SEQ ID NO: 795683 - DNA, 19 bp, Mus musculus
  siRNA target sequence for E130120L08Rik (NM_177373.3,4002-4020).
cactgttcgcacatactca

SEQ ID NO: 795684 - DNA, 19 bp, Mus musculus
  siRNA target sequence for E130120L08Rik (NM_177373.3,4006-4024).
gttcgcacatactcatgtt

SEQ ID NO: 795685 - DNA, 19 bp, Mus musculus
  siRNA target sequence for 4833436C18Rik (NM_177377.2,82-100).
cggcgagaatccgcattat

SEQ ID NO: 795686 - DNA, 19 bp, Mus musculus
  siRNA target sequence for 4833436C18Rik (NM_177377.2,83-101).
ggcgagaatccgcattata

SEQ ID NO: 795687 - DNA, 19 bp, Mus musculus
  siRNA target sequence for 4833436C18Rik (NM_177377.2,84-102).
gcgagaatccgcattatat

SEQ ID NO: 795688 - DNA, 19 bp, Mus musculus
  siRNA target sequence for 4833436C18Rik (NM_177377.2,85-103).
cgagaatccgcattatatt

SEQ ID NO: 795689 - DNA, 19 bp, Mus musculus
  siRNA target sequence for 4833436C18Rik (NM_177377.2,88-106).
gaatccgcattatattcca

SEQ ID NO: 795690 - DNA, 19 bp, Mus musculus
  siRNA target sequence for 4833436C18Rik (NM_177377.2,313-331).
cataatccctgggtataca

SEQ ID NO: 795691 - DNA, 19 bp, Mus musculus
  siRNA target sequence for 4833436C18Rik (NM_177377.2,321-339).
ctgggtatacaggttttat

SEQ ID NO: 795692 - DNA, 19 bp, Mus musculus
  siRNA target sequence for 4833436C18Rik (NM_177377.2,536-554).
ccctactccatggatgata

SEQ ID NO: 795693 - DNA, 19 bp, Mus musculus
  siRNA target sequence for 4833436C18Rik (NM_177377.2,538-556).
ctactccatggatgataca

SEQ ID NO: 795694 - DNA, 19 bp, Mus musculus
  siRNA target sequence for 4833436C18Rik (NM_177377.2,541-559).
ctccatggatgatacagat

SEQ ID NO: 795695 - DNA, 19 bp, Mus musculus
  siRNA target sequence for 4833436C18Rik (NM_177377.2,557-575).
gatccccacaagttcttca

SEQ ID NO: 795696 - DNA, 19 bp, Mus musculus
  siRNA target sequence for 4833436C18Rik (NM_177377.2,589-607).
gaagtgggtagcaaccaaa

SEQ ID NO: 795697 - DNA, 19 bp, Mus musculus
  siRNA target sequence for 4833436C18Rik (NM_177377.2,799-817).
cccaggcccacgtttcaga

SEQ ID NO: 795698 - DNA, 19 bp, Mus musculus
  siRNA target sequence for 4833436C18Rik (NM_177377.2,801-819).
caggcccacgtttcagaat

SEQ ID NO: 795699 - DNA, 19 bp, Mus musculus
  siRNA target sequence for 4833436C18Rik (NM_177377.2,845-863).
gctacgtgccaggttagaa

SEQ ID NO: 795700 - DNA, 19 bp, Mus musculus
  siRNA target sequence for 4833436C18Rik (NM_177377.2,918-936).
ggcaacgggaattaacaga

SEQ ID NO: 795701 - DNA, 19 bp, Mus musculus
  siRNA target sequence for 4833436C18Rik (NM_177377.2,950-968).
ccgaccctgggatttagct

SEQ ID NO: 795702 - DNA, 19 bp, Mus musculus
  siRNA target sequence for 4833436C18Rik (NM_177377.2,951-969).
cgaccctgggatttagctt

SEQ ID NO: 795703 - DNA, 19 bp, Mus musculus
  siRNA target sequence for 4833436C18Rik (NM_177377.2,955-973).
cctgggatttagctttaga

SEQ ID NO: 795704 - DNA, 19 bp, Mus musculus
  siRNA target sequence for 4833436C18Rik (NM_177377.2,1001-1019).
gagttgggagcagatttta

SEQ ID NO: 795705 - DNA, 19 bp, Mus musculus
  siRNA target sequence for 4833436C18Rik (NM_177377.2,1039-1057).
gacgcaactggctttttca

SEQ ID NO: 795706 - DNA, 19 bp, Mus musculus
  siRNA target sequence for 4833436C18Rik (NM_177377.2,1085-1103).
cttggccacgcaggatata

SEQ ID NO: 795707 - DNA, 19 bp, Mus musculus
  siRNA target sequence for 4833436C18Rik (NM_177377.2,1088-1106).
ggccacgcaggatataagt

SEQ ID NO: 795708 - DNA, 19 bp, Mus musculus
  siRNA target sequence for 4833436C18Rik (NM_177377.2,1089-1107).
gccacgcaggatataagtt

SEQ ID NO: 795709 - DNA, 19 bp, Mus musculus
  siRNA target sequence for 4833436C18Rik (NM_177377.2,1108-1126).
ccagtttggcggtacattt

SEQ ID NO: 795710 - DNA, 19 bp, Mus musculus
  siRNA target sequence for 4833436C18Rik (NM_177377.2,1118-1136).
ggtacatttgggcatctta

SEQ ID NO: 795711 - DNA, 19 bp, Mus musculus
  siRNA target sequence for Grit (NM_177379.2,113-131).
gaagtctcgcccaacaaaa

SEQ ID NO: 795712 - DNA, 19 bp, Mus musculus
  siRNA target sequence for Grit (NM_177379.2,118-136).
ctcgcccaacaaaacagaa

SEQ ID NO: 795713 - DNA, 19 bp, Mus musculus
  siRNA target sequence for Grit (NM_177379.2,186-204).
ggggagcacctcctcaatt

SEQ ID NO: 795714 - DNA, 19 bp, Mus musculus
  siRNA target sequence for Grit (NM_177379.2,292-310).
gcgttgcctccaatatcca

SEQ ID NO: 795715 - DNA, 19 bp, Mus musculus
  siRNA target sequence for Grit (NM_177379.2,313-331).
gacttcgtcatgaatttga

SEQ ID NO: 795716 - DNA, 19 bp, Mus musculus
  siRNA target sequence for Grit (NM_177379.2,344-362).
ccccgacctgacaaaagaa

SEQ ID NO: 795717 - DNA, 19 bp, Mus musculus
  siRNA target sequence for Grit (NM_177379.2,350-368).
cctgacaaaagaaccttat

SEQ ID NO: 795718 - DNA, 19 bp, Mus musculus
  siRNA target sequence for Grit (NM_177379.2,353-371).
gacaaaagaaccttatgtt

SEQ ID NO: 795719 - DNA, 19 bp, Mus musculus
  siRNA target sequence for Grit (NM_177379.2,355-373).
caaaagaaccttatgttca

SEQ ID NO: 795720 - DNA, 19 bp, Mus musculus
  siRNA target sequence for Grit (NM_177379.2,444-462).
cagctatacgagaagttct

SEQ ID NO: 795721 - DNA, 19 bp, Mus musculus
  siRNA target sequence for Grit (NM_177379.2,485-503).
ggatgaagaacggttgata

SEQ ID NO: 795722 - DNA, 19 bp, Mus musculus
  siRNA target sequence for Grit (NM_177379.2,486-504).
gatgaagaacggttgataa

SEQ ID NO: 795723 - DNA, 19 bp, Mus musculus
  siRNA target sequence for Grit (NM_177379.2,489-507).
gaagaacggttgataaaaa

SEQ ID NO: 795724 - DNA, 19 bp, Mus musculus
  siRNA target sequence for Grit (NM_177379.2,531-549).
cccccaccacactatagaa

SEQ ID NO: 795725 - DNA, 19 bp, Mus musculus
  siRNA target sequence for Grit (NM_177379.2,579-597).
cttctagcagactattgct

SEQ ID NO: 795726 - DNA, 19 bp, Mus musculus
  siRNA target sequence for Grit (NM_177379.2,590-608).
ctattgctccatcacaaat

SEQ ID NO: 795727 - DNA, 19 bp, Mus musculus
  siRNA target sequence for Grit (NM_177379.2,595-613).
gctccatcacaaatatgca

SEQ ID NO: 795728 - DNA, 19 bp, Mus musculus
  siRNA target sequence for Grit (NM_177379.2,596-614).
ctccatcacaaatatgcat

SEQ ID NO: 795729 - DNA, 19 bp, Mus musculus
  siRNA target sequence for Grit (NM_177379.2,642-660).
ccaaacctgctgagatcaa

SEQ ID NO: 795730 - DNA, 19 bp, Mus musculus
  siRNA target sequence for Grit (NM_177379.2,894-912).
gtcagttctcctattgtga

SEQ ID NO: 795731 - DNA, 19 bp, Mus musculus
  siRNA target sequence for Grit (NM_177379.2,903-921).
cctattgtgacggaaaata

SEQ ID NO: 795732 - DNA, 19 bp, Mus musculus
  siRNA target sequence for Grit (NM_177379.2,952-970).
cgctgcaagggaagtttca

SEQ ID NO: 795733 - DNA, 19 bp, Mus musculus
  siRNA target sequence for Grit (NM_177379.2,954-972).
ctgcaagggaagtttcaca

SEQ ID NO: 795734 - DNA, 19 bp, Mus musculus
  siRNA target sequence for Grit (NM_177379.2,1003-1021).
ggcctcagaataagatgaa

SEQ ID NO: 795735 - DNA, 19 bp, Mus musculus
  siRNA target sequence for Grit (NM_177379.2,1036-1054).
gcagctggcgttccttttt

SEQ ID NO: 795736 - DNA, 19 bp, Mus musculus
  siRNA target sequence for Grit (NM_177379.2,1039-1057).
gctggcgttcctttttcaa

SEQ ID NO: 795737 - DNA, 19 bp, Mus musculus
  siRNA target sequence for Grit (NM_177379.2,1040-1058).
ctggcgttcctttttcaat

SEQ ID NO: 795738 - DNA, 19 bp, Mus musculus
  siRNA target sequence for Grit (NM_177379.2,1042-1060).
ggcgttcctttttcaattt

SEQ ID NO: 795739 - DNA, 19 bp, Mus musculus
  siRNA target sequence for Grit (NM_177379.2,1087-1105).
gcaagttgcagcgtaatga

SEQ ID NO: 795740 - DNA, 19 bp, Mus musculus
  siRNA target sequence for Grit (NM_177379.2,1088-1106).
caagttgcagcgtaatgaa

SEQ ID NO: 795741 - DNA, 19 bp, Mus musculus
  siRNA target sequence for Grit (NM_177379.2,1091-1109).
gttgcagcgtaatgaaagt

SEQ ID NO: 795742 - DNA, 19 bp, Mus musculus
  siRNA target sequence for Grit (NM_177379.2,1104-1122).
gaaagtgagccctcagaaa

SEQ ID NO: 795743 - DNA, 19 bp, Mus musculus
  siRNA target sequence for Grit (NM_177379.2,1163-1181).
cctccgctcagctaaaagt

SEQ ID NO: 795744 - DNA, 19 bp, Mus musculus
  siRNA target sequence for Grit (NM_177379.2,1166-1184).
ccgctcagctaaaagtgaa

SEQ ID NO: 795745 - DNA, 19 bp, Mus musculus
  siRNA target sequence for Grit (NM_177379.2,1207-1225).
cagttgacggtgattccaa

SEQ ID NO: 795746 - DNA, 19 bp, Mus musculus
  siRNA target sequence for Grit (NM_177379.2,1212-1230).
gacggtgattccaagttgt

SEQ ID NO: 795747 - DNA, 19 bp, Mus musculus
  siRNA target sequence for Grit (NM_177379.2,1226-1244).
gttgttccgacctagaaga

SEQ ID NO: 795748 - DNA, 19 bp, Mus musculus
  siRNA target sequence for Grit (NM_177379.2,1264-1282).
cgctctctgcctctttcaa

SEQ ID NO: 795749 - DNA, 19 bp, Mus musculus
  siRNA target sequence for Grit (NM_177379.2,1293-1311).
ctggggaaccggtgcaatt

SEQ ID NO: 795750 - DNA, 19 bp, Mus musculus
  siRNA target sequence for Grit (NM_177379.2,1302-1320).
cggtgcaattcctatgaca

SEQ ID NO: 795751 - DNA, 19 bp, Mus musculus
  siRNA target sequence for Grit (NM_177379.2,1303-1321).
ggtgcaattcctatgacaa

SEQ ID NO: 795752 - DNA, 19 bp, Mus musculus
  siRNA target sequence for Grit (NM_177379.2,1304-1322).
gtgcaattcctatgacaat

SEQ ID NO: 795753 - DNA, 19 bp, Mus musculus
  siRNA target sequence for Grit (NM_177379.2,1306-1324).
gcaattcctatgacaatct

SEQ ID NO: 795754 - DNA, 19 bp, Mus musculus
  siRNA target sequence for Grit (NM_177379.2,1449-1467).
gatcccatgtcatttcaat

SEQ ID NO: 795755 - DNA, 19 bp, Mus musculus
  siRNA target sequence for Grit (NM_177379.2,1514-1532).
ctttctggattcattaggt

SEQ ID NO: 795756 - DNA, 19 bp, Mus musculus
  siRNA target sequence for Grit (NM_177379.2,1521-1539).
gattcattaggttatacca

SEQ ID NO: 795757 - DNA, 19 bp, Mus musculus
  siRNA target sequence for Grit (NM_177379.2,1531-1549).
gttataccagggataaact

SEQ ID NO: 795758 - DNA, 19 bp, Mus musculus
  siRNA target sequence for Grit (NM_177379.2,1677-1695).
cccactgacgacaagtctt

SEQ ID NO: 795759 - DNA, 19 bp, Mus musculus
  siRNA target sequence for Grit (NM_177379.2,1681-1699).
ctgacgacaagtcttctaa

SEQ ID NO: 795760 - DNA, 19 bp, Mus musculus
  siRNA target sequence for Grit (NM_177379.2,1749-1767).
gggcggaagctaagcaaat

SEQ ID NO: 795761 - DNA, 19 bp, Mus musculus
  siRNA target sequence for Grit (NM_177379.2,1751-1769).
gcggaagctaagcaaatct

SEQ ID NO: 795762 - DNA, 19 bp, Mus musculus
  siRNA target sequence for Grit (NM_177379.2,1771-1789).
cttccatgaacatatctga

SEQ ID NO: 795763 - DNA, 19 bp, Mus musculus
  siRNA target sequence for Grit (NM_177379.2,1813-1831).
ctcgggtatcagaagtcat

SEQ ID NO: 795764 - DNA, 19 bp, Mus musculus
  siRNA target sequence for Grit (NM_177379.2,1832-1850).
cggtacggtctccaatact

SEQ ID NO: 795765 - DNA, 19 bp, Mus musculus
  siRNA target sequence for Grit (NM_177379.2,1834-1852).
gtacggtctccaatactgt

SEQ ID NO: 795766 - DNA, 19 bp, Mus musculus
  siRNA target sequence for Grit (NM_177379.2,1844-1862).
caatactgtagctcagaat

SEQ ID NO: 795767 - DNA, 19 bp, Mus musculus
  siRNA target sequence for Grit (NM_177379.2,1859-1877).
gaatgcatcacctacatct

SEQ ID NO: 795768 - DNA, 19 bp, Mus musculus
  siRNA target sequence for Grit (NM_177379.2,1873-1891).
catcttgggacaaaagtgt

SEQ ID NO: 795769 - DNA, 19 bp, Mus musculus
  siRNA target sequence for Grit (NM_177379.2,1924-1942).
cccagctgcagctaggaaa

SEQ ID NO: 795770 - DNA, 19 bp, Mus musculus
  siRNA target sequence for Grit (NM_177379.2,2164-2182).
caccaccgcctccgaaaaa

SEQ ID NO: 795771 - DNA, 19 bp, Mus musculus
  siRNA target sequence for Grit (NM_177379.2,2265-2283).
caggctgggtgcactagtt

SEQ ID NO: 795772 - DNA, 19 bp, Mus musculus
  siRNA target sequence for Grit (NM_177379.2,2267-2285).
ggctgggtgcactagttat

SEQ ID NO: 795773 - DNA, 19 bp, Mus musculus
  siRNA target sequence for Grit (NM_177379.2,2294-2312).
ggcagtcgttccatctgaa

SEQ ID NO: 795774 - DNA, 19 bp, Mus musculus
  siRNA target sequence for Grit (NM_177379.2,2329-2347).
cctactctagccttactct

SEQ ID NO: 795775 - DNA, 19 bp, Mus musculus
  siRNA target sequence for Grit (NM_177379.2,2330-2348).
ctactctagccttactcta

SEQ ID NO: 795776 - DNA, 19 bp, Mus musculus
  siRNA target sequence for Grit (NM_177379.2,2333-2351).
ctctagccttactctagat

SEQ ID NO: 795777 - DNA, 19 bp, Mus musculus
  siRNA target sequence for Grit (NM_177379.2,2335-2353).
ctagccttactctagataa

SEQ ID NO: 795778 - DNA, 19 bp, Mus musculus
  siRNA target sequence for Grit (NM_177379.2,2340-2358).
cttactctagataaaacct

SEQ ID NO: 795779 - DNA, 19 bp, Mus musculus
  siRNA target sequence for Grit (NM_177379.2,2493-2511).
ctccaccaagtagacttaa

SEQ ID NO: 795780 - DNA, 19 bp, Mus musculus
  siRNA target sequence for Grit (NM_177379.2,2495-2513).
ccaccaagtagacttaata

SEQ ID NO: 795781 - DNA, 19 bp, Mus musculus
  siRNA target sequence for Grit (NM_177379.2,2515-2533).
ggaattcgctacatcgaaa

SEQ ID NO: 795782 - DNA, 19 bp, Mus musculus
  siRNA target sequence for Grit (NM_177379.2,2521-2539).
cgctacatcgaaaccatat

SEQ ID NO: 795783 - DNA, 19 bp, Mus musculus
  siRNA target sequence for Grit (NM_177379.2,2522-2540).
gctacatcgaaaccatata

SEQ ID NO: 795784 - DNA, 19 bp, Mus musculus
  siRNA target sequence for Grit (NM_177379.2,2523-2541).
ctacatcgaaaccatatat

SEQ ID NO: 795785 - DNA, 19 bp, Mus musculus
  siRNA target sequence for Grit (NM_177379.2,2599-2617).
ctgatgatcatggaagttt

SEQ ID NO: 795786 - DNA, 19 bp, Mus musculus
  siRNA target sequence for Grit (NM_177379.2,2823-2841).
gggtcccctgaagagaatt

SEQ ID NO: 795787 - DNA, 19 bp, Mus musculus
  siRNA target sequence for Grit (NM_177379.2,2964-2982).
cagcgcacgcacagaacta

SEQ ID NO: 795788 - DNA, 19 bp, Mus musculus
  siRNA target sequence for Grit (NM_177379.2,2966-2984).
gcgcacgcacagaactaat

SEQ ID NO: 795789 - DNA, 19 bp, Mus musculus
  siRNA target sequence for Grit (NM_177379.2,3051-3069).
gaagcaccaagtataggat

SEQ ID NO: 795790 - DNA, 19 bp, Mus musculus
  siRNA target sequence for Grit (NM_177379.2,3263-3281).
cttacgtgctgagtctttt

SEQ ID NO: 795791 - DNA, 19 bp, Mus musculus
  siRNA target sequence for Grit (NM_177379.2,3375-3393).
gccaccagcagttcaaatt

SEQ ID NO: 795792 - DNA, 19 bp, Mus musculus
  siRNA target sequence for Grit (NM_177379.2,3452-3470).
cgtctcacagcctaagcat

SEQ ID NO: 795793 - DNA, 19 bp, Mus musculus
  siRNA target sequence for Grit (NM_177379.2,3591-3609).
gttcctccacaccacaata

SEQ ID NO: 795794 - DNA, 19 bp, Mus musculus
  siRNA target sequence for Grit (NM_177379.2,3595-3613).
ctccacaccacaataagtt

SEQ ID NO: 795795 - DNA, 19 bp, Mus musculus
  siRNA target sequence for Grit (NM_177379.2,3656-3674).
ctccatgggtcctcgttat

SEQ ID NO: 795796 - DNA, 19 bp, Mus musculus
  siRNA target sequence for Grit (NM_177379.2,3658-3676).
ccatgggtcctcgttataa

SEQ ID NO: 795797 - DNA, 19 bp, Mus musculus
  siRNA target sequence for Grit (NM_177379.2,3724-3742).
cgtgtagtcgggttgagta

SEQ ID NO: 795798 - DNA, 19 bp, Mus musculus
  siRNA target sequence for Grit (NM_177379.2,3725-3743).
gtgtagtcgggttgagtat

SEQ ID NO: 795799 - DNA, 19 bp, Mus musculus
  siRNA target sequence for Grit (NM_177379.2,3727-3745).
gtagtcgggttgagtatgt

SEQ ID NO: 795800 - DNA, 19 bp, Mus musculus
  siRNA target sequence for Grit (NM_177379.2,3755-3773).
gggctcctcggttaggaat

SEQ ID NO: 795801 - DNA, 19 bp, Mus musculus
  siRNA target sequence for Grit (NM_177379.2,3775-3793).
cttgttgccctgaagacat

SEQ ID NO: 795802 - DNA, 19 bp, Mus musculus
  siRNA target sequence for Grit (NM_177379.2,3854-3872).
ccgctctgttcccatttca

SEQ ID NO: 795803 - DNA, 19 bp, Mus musculus
  siRNA target sequence for Grit (NM_177379.2,3866-3884).
catttcacggacagaagtt

SEQ ID NO: 795804 - DNA, 19 bp, Mus musculus
  siRNA target sequence for Grit (NM_177379.2,3916-3934).
gaccagtctaccagtataa

SEQ ID NO: 795805 - DNA, 19 bp, Mus musculus
  siRNA target sequence for Grit (NM_177379.2,3998-4016).
gaatggacgggtccattat

SEQ ID NO: 795806 - DNA, 19 bp, Mus musculus
  siRNA target sequence for Grit (NM_177379.2,4007-4025).
ggtccattatcgctatagt

SEQ ID NO: 795807 - DNA, 19 bp, Mus musculus
  siRNA target sequence for Grit (NM_177379.2,4036-4054).
gctcctccagctcctatta

SEQ ID NO: 795808 - DNA, 19 bp, Mus musculus
  siRNA target sequence for Grit (NM_177379.2,4126-4144).
ccagtcgggactttgcttt

SEQ ID NO: 795809 - DNA, 19 bp, Mus musculus
  siRNA target sequence for Grit (NM_177379.2,4129-4147).
gtcgggactttgctttcta

SEQ ID NO: 795810 - DNA, 19 bp, Mus musculus
  siRNA target sequence for Grit (NM_177379.2,4200-4218).
cgcccacgggccaatgcaa

SEQ ID NO: 795811 - DNA, 19 bp, Mus musculus
  siRNA target sequence for Grit (NM_177379.2,4229-4247).
ctctggtaatgaccataat

SEQ ID NO: 795812 - DNA, 19 bp, Mus musculus
  siRNA target sequence for Grit (NM_177379.2,4365-4383).
gtaaaagggcctatcatgt

SEQ ID NO: 795813 - DNA, 19 bp, Mus musculus
  siRNA target sequence for Grit (NM_177379.2,4375-4393).
ctatcatgtcgcagtatga

SEQ ID NO: 795814 - DNA, 19 bp, Mus musculus
  siRNA target sequence for Grit (NM_177379.2,4539-4557).
ggggacgagcgtttctaca

SEQ ID NO: 795815 - DNA, 19 bp, Mus musculus
  siRNA target sequence for Grit (NM_177379.2,4562-4580).
gcacccagagtccgaattt

SEQ ID NO: 795816 - DNA, 19 bp, Mus musculus
  siRNA target sequence for Grit (NM_177379.2,4719-4737).
gcaagccataggcaattat

SEQ ID NO: 795817 - DNA, 19 bp, Mus musculus
  siRNA target sequence for Grit (NM_177379.2,4723-4741).
gccataggcaattatgtga

SEQ ID NO: 795818 - DNA, 19 bp, Mus musculus
  siRNA target sequence for Grit (NM_177379.2,4769-4787).
gggagctggccagttagat

SEQ ID NO: 795819 - DNA, 19 bp, Mus musculus
  siRNA target sequence for Grit (NM_177379.2,4818-4836).
gagccaagcaactaccata

SEQ ID NO: 795820 - DNA, 19 bp, Mus musculus
  siRNA target sequence for Grit (NM_177379.2,4832-4850).
ccataactctgggaaatat

SEQ ID NO: 795821 - DNA, 19 bp, Mus musculus
  siRNA target sequence for Grit (NM_177379.2,5074-5092).
gcgtgctataccagtatca

SEQ ID NO: 795822 - DNA, 19 bp, Mus musculus
  siRNA target sequence for Grit (NM_177379.2,5076-5094).
gtgctataccagtatcaga

SEQ ID NO: 795823 - DNA, 19 bp, Mus musculus
  siRNA target sequence for Grit (NM_177379.2,5124-5142).
gttgtgtcccagtatgata

SEQ ID NO: 795824 - DNA, 19 bp, Mus musculus
  siRNA target sequence for Cog3 (NM_177381.2,236-254).
ccgagctcccaattgaaga

SEQ ID NO: 795825 - DNA, 19 bp, Mus musculus
  siRNA target sequence for Cog3 (NM_177381.2,237-255).
cgagctcccaattgaagat

SEQ ID NO: 795826 - DNA, 19 bp, Mus musculus
  siRNA target sequence for Cog3 (NM_177381.2,240-258).
gctcccaattgaagatgta

SEQ ID NO: 795827 - DNA, 19 bp, Mus musculus
  siRNA target sequence for Cog3 (NM_177381.2,241-259).
ctcccaattgaagatgtat

SEQ ID NO: 795828 - DNA, 19 bp, Mus musculus
  siRNA target sequence for Cog3 (NM_177381.2,328-346).
ctgttaaagggcttcactt

SEQ ID NO: 795829 - DNA, 19 bp, Mus musculus
  siRNA target sequence for Cog3 (NM_177381.2,373-391).
gagactgcgcagcagtttt

SEQ ID NO: 795830 - DNA, 19 bp, Mus musculus
  siRNA target sequence for Cog3 (NM_177381.2,427-445).
caggatgaaggaactaaat

SEQ ID NO: 795831 - DNA, 19 bp, Mus musculus
  siRNA target sequence for Cog3 (NM_177381.2,451-469).
cagatgagggattacttgt

SEQ ID NO: 795832 - DNA, 19 bp, Mus musculus
  siRNA target sequence for Cog3 (NM_177381.2,484-502).
cagtgtgatgctatactga

SEQ ID NO: 795833 - DNA, 19 bp, Mus musculus
  siRNA target sequence for Cog3 (NM_177381.2,488-506).
gtgatgctatactgaatga

SEQ ID NO: 795834 - DNA, 19 bp, Mus musculus
  siRNA target sequence for Cog3 (NM_177381.2,532-550).
gagtcgttgcagaaacagt

SEQ ID NO: 795835 - DNA, 19 bp, Mus musculus
  siRNA target sequence for Cog3 (NM_177381.2,536-554).
cgttgcagaaacagtatct

SEQ ID NO: 795836 - DNA, 19 bp, Mus musculus
  siRNA target sequence for Cog3 (NM_177381.2,537-555).
gttgcagaaacagtatctt

SEQ ID NO: 795837 - DNA, 19 bp, Mus musculus
  siRNA target sequence for Cog3 (NM_177381.2,570-588).
gacaggaactcttcatgaa

SEQ ID NO: 795838 - DNA, 19 bp, Mus musculus
  siRNA target sequence for Cog3 (NM_177381.2,615-633).
gtcggagcttgctgatctt

SEQ ID NO: 795839 - DNA, 19 bp, Mus musculus
  siRNA target sequence for Cog3 (NM_177381.2,645-663).
ccaacagaagctgtcttat

SEQ ID NO: 795840 - DNA, 19 bp, Mus musculus
  siRNA target sequence for Cog3 (NM_177381.2,649-667).
cagaagctgtcttatttta

SEQ ID NO: 795841 - DNA, 19 bp, Mus musculus
  siRNA target sequence for Cog3 (NM_177381.2,670-688).
gagttggagacgattaaca

SEQ ID NO: 795842 - DNA, 19 bp, Mus musculus
  siRNA target sequence for Cog3 (NM_177381.2,672-690).
gttggagacgattaacaca

SEQ ID NO: 795843 - DNA, 19 bp, Mus musculus
  siRNA target sequence for Cog3 (NM_177381.2,676-694).
gagacgattaacacaaaat

SEQ ID NO: 795844 - DNA, 19 bp, Mus musculus
  siRNA target sequence for Cog3 (NM_177381.2,680-698).
cgattaacacaaaattgaa

SEQ ID NO: 795845 - DNA, 19 bp, Mus musculus
  siRNA target sequence for Cog3 (NM_177381.2,681-699).
gattaacacaaaattgaat

SEQ ID NO: 795846 - DNA, 19 bp, Mus musculus
  siRNA target sequence for Cog3 (NM_177381.2,702-720).
ccctacgttgtctgtgaat

SEQ ID NO: 795847 - DNA, 19 bp, Mus musculus
  siRNA target sequence for Cog3 (NM_177381.2,703-721).
cctacgttgtctgtgaata

SEQ ID NO: 795848 - DNA, 19 bp, Mus musculus
  siRNA target sequence for Cog3 (NM_177381.2,715-733).
gtgaatagtgaaggattta

SEQ ID NO: 795849 - DNA, 19 bp, Mus musculus
  siRNA target sequence for Cog3 (NM_177381.2,735-753).
ccctatgttggccaagtta

SEQ ID NO: 795850 - DNA, 19 bp, Mus musculus
  siRNA target sequence for Cog3 (NM_177381.2,737-755).
ctatgttggccaagttaga

SEQ ID NO: 795851 - DNA, 19 bp, Mus musculus
  siRNA target sequence for Cog3 (NM_177381.2,744-762).
ggccaagttagatgattgt

SEQ ID NO: 795852 - DNA, 19 bp, Mus musculus
  siRNA target sequence for Cog3 (NM_177381.2,745-763).
gccaagttagatgattgta

SEQ ID NO: 795853 - DNA, 19 bp, Mus musculus
  siRNA target sequence for Cog3 (NM_177381.2,746-764).
ccaagttagatgattgtat

SEQ ID NO: 795854 - DNA, 19 bp, Mus musculus
  siRNA target sequence for Cog3 (NM_177381.2,754-772).
gatgattgtataacatata

SEQ ID NO: 795855 - DNA, 19 bp, Mus musculus
  siRNA target sequence for Cog3 (NM_177381.2,884-902).
ctctcacaaatcagttact

SEQ ID NO: 795856 - DNA, 19 bp, Mus musculus
  siRNA target sequence for Cog3 (NM_177381.2,934-952).
gacaatgccttcacactat

SEQ ID NO: 795857 - DNA, 19 bp, Mus musculus
  siRNA target sequence for Cog3 (NM_177381.2,947-965).
cactattttatgtgaaatt

SEQ ID NO: 795858 - DNA, 19 bp, Mus musculus
  siRNA target sequence for Cog3 (NM_177381.2,970-988).
gccgctgcccctaaagtca

SEQ ID NO: 795859 - DNA, 19 bp, Mus musculus
  siRNA target sequence for Cog3 (NM_177381.2,1005-1023).
gatagagcaacgatctgaa

SEQ ID NO: 795860 - DNA, 19 bp, Mus musculus
  siRNA target sequence for Cog3 (NM_177381.2,1011-1029).
gcaacgatctgaaaagata

SEQ ID NO: 795861 - DNA, 19 bp, Mus musculus
  siRNA target sequence for Cog3 (NM_177381.2,1198-1216).
caagatgagcaccaacttt

SEQ ID NO: 795862 - DNA, 19 bp, Mus musculus
  siRNA target sequence for Cog3 (NM_177381.2,1201-1219).
gatgagcaccaactttaca

SEQ ID NO: 795863 - DNA, 19 bp, Mus musculus
  siRNA target sequence for Cog3 (NM_177381.2,1272-1290).
gtgcgtgtcgttgtatgat

SEQ ID NO: 795864 - DNA, 19 bp, Mus musculus
  siRNA target sequence for Cog3 (NM_177381.2,1274-1292).
gcgtgtcgttgtatgatgt

SEQ ID NO: 795865 - DNA, 19 bp, Mus musculus
  siRNA target sequence for Cog3 (NM_177381.2,1308-1326).
catccatgtcattcactta

SEQ ID NO: 795866 - DNA, 19 bp, Mus musculus
  siRNA target sequence for Cog3 (NM_177381.2,1338-1356).
ggagctctgtgggattctt

SEQ ID NO: 795867 - DNA, 19 bp, Mus musculus
  siRNA target sequence for Cog3 (NM_177381.2,1346-1364).
gtgggattcttaaaaacga

SEQ ID NO: 795868 - DNA, 19 bp, Mus musculus
  siRNA target sequence for Cog3 (NM_177381.2,1428-1446).
gcagatgttggaagatgta

SEQ ID NO: 795869 - DNA, 19 bp, Mus musculus
  siRNA target sequence for Cog3 (NM_177381.2,1450-1468).
gagaggcttgtgtatcgaa

SEQ ID NO: 795870 - DNA, 19 bp, Mus musculus
  siRNA target sequence for Cog3 (NM_177381.2,1459-1477).
gtgtatcgaacccatatct

SEQ ID NO: 795871 - DNA, 19 bp, Mus musculus
  siRNA target sequence for Cog3 (NM_177381.2,1524-1542).
ggcatatcctgataagcta

SEQ ID NO: 795872 - DNA, 19 bp, Mus musculus
  siRNA target sequence for Cog3 (NM_177381.2,1532-1550).
ctgataagctagtcatgat

SEQ ID NO: 795873 - DNA, 19 bp, Mus musculus
  siRNA target sequence for Cog3 (NM_177381.2,1560-1578).
cgcacagagtttaaaggat

SEQ ID NO: 795874 - DNA, 19 bp, Mus musculus
  siRNA target sequence for Cog3 (NM_177381.2,1613-1631).
cagatgtacggttagaaga

SEQ ID NO: 795875 - DNA, 19 bp, Mus musculus
  siRNA target sequence for Cog3 (NM_177381.2,1636-1654).
gaagccagtggtttaagaa

SEQ ID NO: 795876 - DNA, 19 bp, Mus musculus
  siRNA target sequence for Cog3 (NM_177381.2,1639-1657).
gccagtggtttaagaaagt

SEQ ID NO: 795877 - DNA, 19 bp, Mus musculus
  siRNA target sequence for Cog3 (NM_177381.2,1759-1777).
ctctccaaattatatagat

SEQ ID NO: 795878 - DNA, 19 bp, Mus musculus
  siRNA target sequence for Cog3 (NM_177381.2,1787-1805).
gggcggtgttccaaggatt

SEQ ID NO: 795879 - DNA, 19 bp, Mus musculus
  siRNA target sequence for Cog3 (NM_177381.2,1788-1806).
ggcggtgttccaaggatta

SEQ ID NO: 795880 - DNA, 19 bp, Mus musculus
  siRNA target sequence for Cog3 (NM_177381.2,1789-1807).
gcggtgttccaaggattat

SEQ ID NO: 795881 - DNA, 19 bp, Mus musculus
  siRNA target sequence for Cog3 (NM_177381.2,1791-1809).
ggtgttccaaggattatca

SEQ ID NO: 795882 - DNA, 19 bp, Mus musculus
  siRNA target sequence for Cog3 (NM_177381.2,1846-1864).
ggagcatcagagtctatca

SEQ ID NO: 795883 - DNA, 19 bp, Mus musculus
  siRNA target sequence for Cog3 (NM_177381.2,1937-1955).
ctccatttcacactgaatt

SEQ ID NO: 795884 - DNA, 19 bp, Mus musculus
  siRNA target sequence for Cog3 (NM_177381.2,1951-1969).
gaattcaccattaaggaaa

SEQ ID NO: 795885 - DNA, 19 bp, Mus musculus
  siRNA target sequence for Cog3 (NM_177381.2,1980-1998).
cctcaagaaaactagagat

SEQ ID NO: 795886 - DNA, 19 bp, Mus musculus
  siRNA target sequence for Cog3 (NM_177381.2,1991-2009).
ctagagatgcagcatttaa

SEQ ID NO: 795887 - DNA, 19 bp, Mus musculus
  siRNA target sequence for Cog3 (NM_177381.2,2025-2043).
gactgttccacgatttttt

SEQ ID NO: 795888 - DNA, 19 bp, Mus musculus
  siRNA target sequence for Cog3 (NM_177381.2,2035-2053).
cgattttttaggctgaata

SEQ ID NO: 795889 - DNA, 19 bp, Mus musculus
  siRNA target sequence for Cog3 (NM_177381.2,2054-2072).
gcaacaatgccttgataga

SEQ ID NO: 795890 - DNA, 19 bp, Mus musculus
  siRNA target sequence for Cog3 (NM_177381.2,2205-2223).
ggagttcatgacaaaggta

SEQ ID NO: 795891 - DNA, 19 bp, Mus musculus
  siRNA target sequence for Cog3 (NM_177381.2,2216-2234).
caaaggtatcagcattgaa

SEQ ID NO: 795892 - DNA, 19 bp, Mus musculus
  siRNA target sequence for Cog3 (NM_177381.2,2248-2266).
cagggaggccccaagtaca

SEQ ID NO: 795893 - DNA, 19 bp, Mus musculus
  siRNA target sequence for Cog3 (NM_177381.2,2318-2336).
ccactgcctacaagacaat

SEQ ID NO: 795894 - DNA, 19 bp, Mus musculus
  siRNA target sequence for Cog3 (NM_177381.2,2319-2337).
cactgcctacaagacaata

SEQ ID NO: 795895 - DNA, 19 bp, Mus musculus
  siRNA target sequence for Cog3 (NM_177381.2,2394-2412).
cacggagttcatcttgttt

SEQ ID NO: 795896 - DNA, 19 bp, Mus musculus
  siRNA target sequence for Cog3 (NM_177381.2,2454-2472).
ccacgctctgctaaaggaa

SEQ ID NO: 795897 - DNA, 19 bp, Mus musculus
  siRNA target sequence for Cog3 (NM_177381.2,2480-2498).
gttctgaagacatccaaat

SEQ ID NO: 795898 - DNA, 19 bp, Mus musculus
  siRNA target sequence for Cyp2r1 (NM_177382.3,196-214).
cttccccacgtctacatga

SEQ ID NO: 795899 - DNA, 19 bp, Mus musculus
  siRNA target sequence for Cyp2r1 (NM_177382.3,226-244).
cgggtgtatggcgagattt

SEQ ID NO: 795900 - DNA, 19 bp, Mus musculus
  siRNA target sequence for Cyp2r1 (NM_177382.3,227-245).
gggtgtatggcgagatttt

SEQ ID NO: 795901 - DNA, 19 bp, Mus musculus
  siRNA target sequence for Cyp2r1 (NM_177382.3,229-247).
gtgtatggcgagattttca

SEQ ID NO: 795902 - DNA, 19 bp, Mus musculus
  siRNA target sequence for Cyp2r1 (NM_177382.3,231-249).
gtatggcgagattttcagt

SEQ ID NO: 795903 - DNA, 19 bp, Mus musculus
  siRNA target sequence for Cyp2r1 (NM_177382.3,276-294).
cgttctaaatggctatgat

SEQ ID NO: 795904 - DNA, 19 bp, Mus musculus
  siRNA target sequence for Cyp2r1 (NM_177382.3,308-326).
gccttgttcatcaaagtga

SEQ ID NO: 795905 - DNA, 19 bp, Mus musculus
  siRNA target sequence for Cyp2r1 (NM_177382.3,309-327).
ccttgttcatcaaagtgaa

SEQ ID NO: 795906 - DNA, 19 bp, Mus musculus
  siRNA target sequence for Cyp2r1 (NM_177382.3,341-359).
gaccatgccttcctttgtt

SEQ ID NO: 795907 - DNA, 19 bp, Mus musculus
  siRNA target sequence for Cyp2r1 (NM_177382.3,379-397).
ggaggcttactcaattcca

SEQ ID NO: 795908 - DNA, 19 bp, Mus musculus
  siRNA target sequence for Cyp2r1 (NM_177382.3,461-479).
gtggccaaaaatcttttga

SEQ ID NO: 795909 - DNA, 19 bp, Mus musculus
  siRNA target sequence for Cyp2r1 (NM_177382.3,503-521).
ggtctttaattgatgctat

SEQ ID NO: 795910 - DNA, 19 bp, Mus musculus
  siRNA target sequence for Cyp2r1 (NM_177382.3,504-522).
gtctttaattgatgctatt

SEQ ID NO: 795911 - DNA, 19 bp, Mus musculus
  siRNA target sequence for Cyp2r1 (NM_177382.3,506-524).
ctttaattgatgctattga

SEQ ID NO: 795912 - DNA, 19 bp, Mus musculus
  siRNA target sequence for Cyp2r1 (NM_177382.3,547-565).
gacctcaagcaactgataa

SEQ ID NO: 795913 - DNA, 19 bp, Mus musculus
  siRNA target sequence for Cyp2r1 (NM_177382.3,550-568).
ctcaagcaactgataacaa

SEQ ID NO: 795914 - DNA, 19 bp, Mus musculus
  siRNA target sequence for Cyp2r1 (NM_177382.3,578-596).
caaacataactaaccttat

SEQ ID NO: 795915 - DNA, 19 bp, Mus musculus
  siRNA target sequence for Cyp2r1 (NM_177382.3,582-600).
cataactaaccttatcctt

SEQ ID NO: 795916 - DNA, 19 bp, Mus musculus
  siRNA target sequence for Cyp2r1 (NM_177382.3,605-623).
gagaacgattcacttatga

SEQ ID NO: 795917 - DNA, 19 bp, Mus musculus
  siRNA target sequence for Cyp2r1 (NM_177382.3,617-635).
cttatgaagacactgattt

SEQ ID NO: 795918 - DNA, 19 bp, Mus musculus
  siRNA target sequence for Cyp2r1 (NM_177382.3,640-658).
cacatgattgaattattta

SEQ ID NO: 795919 - DNA, 19 bp, Mus musculus
  siRNA target sequence for Cyp2r1 (NM_177382.3,642-660).
catgattgaattatttagt

SEQ ID NO: 795920 - DNA, 19 bp, Mus musculus
  siRNA target sequence for Cyp2r1 (NM_177382.3,683-701).
gtgctccagtcttccttta

SEQ ID NO: 795921 - DNA, 19 bp, Mus musculus
  siRNA target sequence for Cyp2r1 (NM_177382.3,697-715).
ctttataatgcatttccat

SEQ ID NO: 795922 - DNA, 19 bp, Mus musculus
  siRNA target sequence for Cyp2r1 (NM_177382.3,716-734).
ggattggcatcttaccttt

SEQ ID NO: 795923 - DNA, 19 bp, Mus musculus
  siRNA target sequence for Cyp2r1 (NM_177382.3,717-735).
gattggcatcttacctttt

SEQ ID NO: 795924 - DNA, 19 bp, Mus musculus
  siRNA target sequence for Cyp2r1 (NM_177382.3,730-748).
ccttttgggaaacatcaaa

SEQ ID NO: 795925 - DNA, 19 bp, Mus musculus
  siRNA target sequence for Cyp2r1 (NM_177382.3,799-817).
gaaaaagctgcagtcaata

SEQ ID NO: 795926 - DNA, 19 bp, Mus musculus
  siRNA target sequence for Cyp2r1 (NM_177382.3,864-882).
gatggatcaaggtcaaaat

SEQ ID NO: 795927 - DNA, 19 bp, Mus musculus
  siRNA target sequence for Cyp2r1 (NM_177382.3,923-941).
cagtgggtgaactcatcat

SEQ ID NO: 795928 - DNA, 19 bp, Mus musculus
  siRNA target sequence for Cyp2r1 (NM_177382.3,969-987).
gctccgctgggcaattctt

SEQ ID NO: 795929 - DNA, 19 bp, Mus musculus
  siRNA target sequence for Cyp2r1 (NM_177382.3,993-1011).
ggccctttatcctaatatt

SEQ ID NO: 795930 - DNA, 19 bp, Mus musculus
  siRNA target sequence for Cyp2r1 (NM_177382.3,995-1013).
ccctttatcctaatattca

SEQ ID NO: 795931 - DNA, 19 bp, Mus musculus
  siRNA target sequence for Cyp2r1 (NM_177382.3,996-1014).
cctttatcctaatattcaa

SEQ ID NO: 795932 - DNA, 19 bp, Mus musculus
  siRNA target sequence for Cyp2r1 (NM_177382.3,1061-1079).
gaccttcttgggaatacaa

SEQ ID NO: 795933 - DNA, 19 bp, Mus musculus
  siRNA target sequence for Cyp2r1 (NM_177382.3,1177-1195).
gttgtacgtggctattcca

SEQ ID NO: 795934 - DNA, 19 bp, Mus musculus
  siRNA target sequence for Cyp2r1 (NM_177382.3,1183-1201).
cgtggctattccattccta

SEQ ID NO: 795935 - DNA, 19 bp, Mus musculus
  siRNA target sequence for Cyp2r1 (NM_177382.3,1204-1222).
ggcacaacagtcattacaa

SEQ ID NO: 795936 - DNA, 19 bp, Mus musculus
  siRNA target sequence for Cyp2r1 (NM_177382.3,1215-1233).
cattacaaatctttattct

SEQ ID NO: 795937 - DNA, 19 bp, Mus musculus
  siRNA target sequence for Cyp2r1 (NM_177382.3,1291-1309).
ctggacagcaatggatatt

SEQ ID NO: 795938 - DNA, 19 bp, Mus musculus
  siRNA target sequence for Cyp2r1 (NM_177382.3,1293-1311).
ggacagcaatggatatttt

SEQ ID NO: 795939 - DNA, 19 bp, Mus musculus
  siRNA target sequence for Cyp2r1 (NM_177382.3,1369-1387).
cagctggctcgaatggaaa

SEQ ID NO: 795940 - DNA, 19 bp, Mus musculus
  siRNA target sequence for Cyp2r1 (NM_177382.3,1375-1393).
gctcgaatggaaatgttct

SEQ ID NO: 795941 - DNA, 19 bp, Mus musculus
  siRNA target sequence for Cyp2r1 (NM_177382.3,1403-1421).
catcattacttcagcaatt

SEQ ID NO: 795942 - DNA, 19 bp, Mus musculus
  siRNA target sequence for Cyp2r1 (NM_177382.3,1441-1459).
gaactagttccaaatctga

SEQ ID NO: 795943 - DNA, 19 bp, Mus musculus
  siRNA target sequence for Cyp2r1 (NM_177382.3,1462-1480).
cccaggttgggcatgacat

SEQ ID NO: 795944 - DNA, 19 bp, Mus musculus
  siRNA target sequence for 1200002K10Rik (NM_177384.1,514-532).
gacagatcctacaaaacga

SEQ ID NO: 795945 - DNA, 19 bp, Mus musculus
  siRNA target sequence for 1200002K10Rik (NM_177384.1,662-680).
ctggtagacttctatgtat

SEQ ID NO: 795946 - DNA, 19 bp, Mus musculus
  siRNA target sequence for 1200002K10Rik (NM_177384.1,984-1002).
gggccagcgctgatgtcta

SEQ ID NO: 795947 - DNA, 19 bp, Mus musculus
  siRNA target sequence for 1200002K10Rik (NM_177384.1,987-1005).
ccagcgctgatgtctacat

SEQ ID NO: 795948 - DNA, 19 bp, Mus musculus
  siRNA target sequence for 1200002K10Rik (NM_177384.1,1010-1028).
cgggctcggctctacaact

SEQ ID NO: 795949 - DNA, 19 bp, Mus musculus
  siRNA target sequence for 1200002K10Rik (NM_177384.1,1011-1029).
gggctcggctctacaactt

SEQ ID NO: 795950 - DNA, 19 bp, Mus musculus
  siRNA target sequence for 1200002K10Rik (NM_177384.1,1013-1031).
gctcggctctacaacttct

SEQ ID NO: 795951 - DNA, 19 bp, Mus musculus
  siRNA target sequence for 1200002K10Rik (NM_177384.1,1190-1208).
gcactgaagtgcatcaact

SEQ ID NO: 795952 - DNA, 19 bp, Mus musculus
  siRNA target sequence for 1200002K10Rik (NM_177384.1,1266-1284).
gtagacggctccagcaatt

SEQ ID NO: 795953 - DNA, 19 bp, Mus musculus
  siRNA target sequence for 1200002K10Rik (NM_177384.1,1375-1393).
gctgacttacaatgacttt

SEQ ID NO: 795954 - DNA, 19 bp, Mus musculus
  siRNA target sequence for 1200002K10Rik (NM_177384.1,1472-1490).
gagaagggcttgtacatca

SEQ ID NO: 795955 - DNA, 19 bp, Mus musculus
  siRNA target sequence for 1200002K10Rik (NM_177384.1,1762-1780).
cctggatgtcgctactgta

SEQ ID NO: 795956 - DNA, 19 bp, Mus musculus
  siRNA target sequence for 1200002K10Rik (NM_177384.1,1891-1909).
ccagctaagtcggatgata

SEQ ID NO: 795957 - DNA, 19 bp, Mus musculus
  siRNA target sequence for 1200002K10Rik (NM_177384.1,1894-1912).
gctaagtcggatgatagaa

SEQ ID NO: 795958 - DNA, 19 bp, Mus musculus
  siRNA target sequence for 1200002K10Rik (NM_177384.1,1895-1913).
ctaagtcggatgatagaaa

SEQ ID NO: 795959 - DNA, 19 bp, Mus musculus
  siRNA target sequence for 1200002K10Rik (NM_177384.1,1910-1928).
gaaaatgggccgaagaaca

SEQ ID NO: 795960 - DNA, 19 bp, Mus musculus
  siRNA target sequence for 1200002K10Rik (NM_177384.1,1948-1966).
ggtgcagcggttattggaa

SEQ ID NO: 795961 - DNA, 19 bp, Mus musculus
  siRNA target sequence for 1200002K10Rik (NM_177384.1,2133-2151).
caggctccgtctttagcat

SEQ ID NO: 795962 - DNA, 19 bp, Mus musculus
  siRNA target sequence for 1200002K10Rik (NM_177384.1,2184-2202).
caaccagtcaggagtataa

SEQ ID NO: 795963 - DNA, 19 bp, Mus musculus
  siRNA target sequence for 1200002K10Rik (NM_177384.1,2312-2330).
gcagtcacagagaacctaa

SEQ ID NO: 795964 - DNA, 19 bp, Mus musculus
  siRNA target sequence for 1200002K10Rik (NM_177384.1,2363-2381).
ggccaaagggactccaaaa

SEQ ID NO: 795965 - DNA, 19 bp, Mus musculus
  siRNA target sequence for 1200002K10Rik (NM_177384.1,2490-2508).
ctaccctgagcgtaaagga

SEQ ID NO: 795966 - DNA, 19 bp, Mus musculus
  siRNA target sequence for 1200002K10Rik (NM_177384.1,2500-2518).
cgtaaaggagagaatcaga

SEQ ID NO: 795967 - DNA, 19 bp, Mus musculus
  siRNA target sequence for 1200002K10Rik (NM_177384.1,2564-2582).
cgcagcagccagaaagtaa

SEQ ID NO: 795968 - DNA, 19 bp, Mus musculus
  siRNA target sequence for 1200002K10Rik (NM_177384.1,2608-2626).
cacgacccatagtgacatt

SEQ ID NO: 795969 - DNA, 19 bp, Mus musculus
  siRNA target sequence for 1200002K10Rik (NM_177384.1,2675-2693).
gctgctgatagcttaagct

SEQ ID NO: 795970 - DNA, 19 bp, Mus musculus
  siRNA target sequence for 1200002K10Rik (NM_177384.1,2676-2694).
ctgctgatagcttaagctt

SEQ ID NO: 795971 - DNA, 19 bp, Mus musculus
  siRNA target sequence for 1200002K10Rik (NM_177384.1,2733-2751).
gcttcttggaactgactaa

SEQ ID NO: 795972 - DNA, 19 bp, Mus musculus
  siRNA target sequence for 1200002K10Rik (NM_177384.1,2741-2759).
gaactgactaaccttttaa

SEQ ID NO: 795973 - DNA, 19 bp, Mus musculus
  siRNA target sequence for D530005L17Rik (NM_177385.2,200-218).
ggaggtcgtcgcggataaa

SEQ ID NO: 795974 - DNA, 19 bp, Mus musculus
  siRNA target sequence for D530005L17Rik (NM_177385.2,201-219).
gaggtcgtcgcggataaaa

SEQ ID NO: 795975 - DNA, 19 bp, Mus musculus
  siRNA target sequence for D530005L17Rik (NM_177385.2,211-229).
cggataaaagcgacttact

SEQ ID NO: 795976 - DNA, 19 bp, Mus musculus
  siRNA target sequence for D530005L17Rik (NM_177385.2,422-440).
ggctgacaaggaatttgta

SEQ ID NO: 795977 - DNA, 19 bp, Mus musculus
  siRNA target sequence for D530005L17Rik (NM_177385.2,423-441).
gctgacaaggaatttgtat

SEQ ID NO: 795978 - DNA, 19 bp, Mus musculus
  siRNA target sequence for D530005L17Rik (NM_177385.2,598-616).
ctgaatctgtactaaaaca

SEQ ID NO: 795979 - DNA, 19 bp, Mus musculus
  siRNA target sequence for D530005L17Rik (NM_177385.2,674-692).
gaggaaagaattatgtgat

SEQ ID NO: 795980 - DNA, 19 bp, Mus musculus
  siRNA target sequence for D530005L17Rik (NM_177385.2,772-790).
gattggttataaaaaacct

SEQ ID NO: 795981 - DNA, 19 bp, Mus musculus
  siRNA target sequence for D530005L17Rik (NM_177385.2,821-839).
ctgcactgacctgctaaat

SEQ ID NO: 795982 - DNA, 19 bp, Mus musculus
  siRNA target sequence for D530005L17Rik (NM_177385.2,956-974).
cttacagcagccgaatata

SEQ ID NO: 795983 - DNA, 19 bp, Mus musculus
  siRNA target sequence for D530005L17Rik (NM_177385.2,960-978).
cagcagccgaatataagat

SEQ ID NO: 795984 - DNA, 19 bp, Mus musculus
  siRNA target sequence for D530005L17Rik (NM_177385.2,962-980).
gcagccgaatataagattt

SEQ ID NO: 795985 - DNA, 19 bp, Mus musculus
  siRNA target sequence for D530005L17Rik (NM_177385.2,963-981).
cagccgaatataagatttt

SEQ ID NO: 795986 - DNA, 19 bp, Mus musculus
  siRNA target sequence for D530005L17Rik (NM_177385.2,983-1001).
cttaaataacaagttatct

SEQ ID NO: 795987 - DNA, 19 bp, Mus musculus
  siRNA target sequence for Sfmbt2 (NM_177386.2,286-304).
gatatttgccagtttcgaa

SEQ ID NO: 795988 - DNA, 19 bp, Mus musculus
  siRNA target sequence for Sfmbt2 (NM_177386.2,319-337).
cctcctctttggaaaagat

SEQ ID NO: 795989 - DNA, 19 bp, Mus musculus
  siRNA target sequence for Sfmbt2 (NM_177386.2,320-338).
ctcctctttggaaaagata

SEQ ID NO: 795990 - DNA, 19 bp, Mus musculus
  siRNA target sequence for Sfmbt2 (NM_177386.2,356-374).
gaatgggactctttactca

SEQ ID NO: 795991 - DNA, 19 bp, Mus musculus
  siRNA target sequence for Sfmbt2 (NM_177386.2,670-688).
ggtggtgcacgcagaacaa

SEQ ID NO: 795992 - DNA, 19 bp, Mus musculus
  siRNA target sequence for Sfmbt2 (NM_177386.2,673-691).
ggtgcacgcagaacaacaa

SEQ ID NO: 795993 - DNA, 19 bp, Mus musculus
  siRNA target sequence for Sfmbt2 (NM_177386.2,700-718).
ggcctccggatgctatcaa

SEQ ID NO: 795994 - DNA, 19 bp, Mus musculus
  siRNA target sequence for Sfmbt2 (NM_177386.2,701-719).
gcctccggatgctatcaaa

SEQ ID NO: 795995 - DNA, 19 bp, Mus musculus
  siRNA target sequence for Sfmbt2 (NM_177386.2,711-729).
gctatcaaagacaagtact

SEQ ID NO: 795996 - DNA, 19 bp, Mus musculus
  siRNA target sequence for Sfmbt2 (NM_177386.2,746-764).
cctcatccgtgaattgact

SEQ ID NO: 795997 - DNA, 19 bp, Mus musculus
  siRNA target sequence for Sfmbt2 (NM_177386.2,794-812).
ggaaggtgtatgtattgct

SEQ ID NO: 795998 - DNA, 19 bp, Mus musculus
  siRNA target sequence for Sfmbt2 (NM_177386.2,795-813).
gaaggtgtatgtattgcta

SEQ ID NO: 795999 - DNA, 19 bp, Mus musculus
  siRNA target sequence for Sfmbt2 (NM_177386.2,798-816).
ggtgtatgtattgctatta

SEQ ID NO: 796000 - DNA, 19 bp, Mus musculus
  siRNA target sequence for D930010O20Rik (NM_177387.2,602-620).
ctcgacctgcggcagtatt

SEQ ID NO: 796001 - DNA, 19 bp, Mus musculus
  siRNA target sequence for D930010O20Rik (NM_177387.2,611-629).
cggcagtatttgggaaatt

SEQ ID NO: 796002 - DNA, 19 bp, Mus musculus
  siRNA target sequence for D930010O20Rik (NM_177387.2,731-749).
gtcttgcttctgagaatct

SEQ ID NO: 796003 - DNA, 19 bp, Mus musculus
  siRNA target sequence for D930010O20Rik (NM_177387.2,796-814).
caagacccggcttactaaa

SEQ ID NO: 796004 - DNA, 19 bp, Mus musculus
  siRNA target sequence for D930010O20Rik (NM_177387.2,799-817).
gacccggcttactaaaaat

SEQ ID NO: 796005 - DNA, 19 bp, Mus musculus
  siRNA target sequence for D930010O20Rik (NM_177387.2,801-819).
cccggcttactaaaaatga

SEQ ID NO: 796006 - DNA, 19 bp, Mus musculus
  siRNA target sequence for D930010O20Rik (NM_177387.2,802-820).
ccggcttactaaaaatgaa

SEQ ID NO: 796007 - DNA, 19 bp, Mus musculus
  siRNA target sequence for D930010O20Rik (NM_177387.2,804-822).
ggcttactaaaaatgaaca

SEQ ID NO: 796008 - DNA, 19 bp, Mus musculus
  siRNA target sequence for D930010O20Rik (NM_177387.2,818-836).
gaacaaatggaactgatta

SEQ ID NO: 796009 - DNA, 19 bp, Mus musculus
  siRNA target sequence for D930010O20Rik (NM_177387.2,827-845).
gaactgattaagaatataa

SEQ ID NO: 796010 - DNA, 19 bp, Mus musculus
  siRNA target sequence for D930010O20Rik (NM_177387.2,849-867).
ccgccgaacagccctattt

SEQ ID NO: 796011 - DNA, 19 bp, Mus musculus
  siRNA target sequence for D930010O20Rik (NM_177387.2,850-868).
cgccgaacagccctattta

SEQ ID NO: 796012 - DNA, 19 bp, Mus musculus
  siRNA target sequence for D930010O20Rik (NM_177387.2,852-870).
ccgaacagccctatttatt

SEQ ID NO: 796013 - DNA, 19 bp, Mus musculus
  siRNA target sequence for D930010O20Rik (NM_177387.2,947-965).
cccgtcagtagatttctgt

SEQ ID NO: 796014 - DNA, 19 bp, Mus musculus
  siRNA target sequence for D930010O20Rik (NM_177387.2,954-972).
gtagatttctgtctaacta

SEQ ID NO: 796015 - DNA, 19 bp, Mus musculus
  siRNA target sequence for D930010O20Rik (NM_177387.2,957-975).
gatttctgtctaactattt

SEQ ID NO: 796016 - DNA, 19 bp, Mus musculus
  siRNA target sequence for D930010O20Rik (NM_177387.2,1002-1020).
gggaacagaatcacatgat

SEQ ID NO: 796017 - DNA, 19 bp, Mus musculus
  siRNA target sequence for D930010O20Rik (NM_177387.2,1136-1154).
ggacagcaccccagatgta

SEQ ID NO: 796018 - DNA, 19 bp, Mus musculus
  siRNA target sequence for D930010O20Rik (NM_177387.2,1247-1265).
ctgctcttactggaaagat

SEQ ID NO: 796019 - DNA, 19 bp, Mus musculus
  siRNA target sequence for D930010O20Rik (NM_177387.2,1250-1268).
ctcttactggaaagatttt

SEQ ID NO: 796020 - DNA, 19 bp, Mus musculus
  siRNA target sequence for D930010O20Rik (NM_177387.2,1386-1404).
ctctaccagcgaatgagat

SEQ ID NO: 796021 - DNA, 19 bp, Mus musculus
  siRNA target sequence for D930010O20Rik (NM_177387.2,1402-1420).
gatacgagtacgagttcta

SEQ ID NO: 796022 - DNA, 19 bp, Mus musculus
  siRNA target sequence for D930010O20Rik (NM_177387.2,1492-1510).
ccgtgagaccacagttctt

SEQ ID NO: 796023 - DNA, 19 bp, Mus musculus
  siRNA target sequence for A930039G15Rik (NM_177389.2,133-151).
cgaagagtgcagcatgtta

SEQ ID NO: 796024 - DNA, 19 bp, Mus musculus
  siRNA target sequence for A930039G15Rik (NM_177389.2,137-155).
gagtgcagcatgttaatgt

SEQ ID NO: 796025 - DNA, 19 bp, Mus musculus
  siRNA target sequence for A930039G15Rik (NM_177389.2,188-206).
cctgattgtcgttttgtga

SEQ ID NO: 796026 - DNA, 19 bp, Mus musculus
  siRNA target sequence for A930039G15Rik (NM_177389.2,191-209).
gattgtcgttttgtgaatt

SEQ ID NO: 796027 - DNA, 19 bp, Mus musculus
  siRNA target sequence for A930039G15Rik (NM_177389.2,218-236).
ggtgacgatgtatatgtct

SEQ ID NO: 796028 - DNA, 19 bp, Mus musculus
  siRNA target sequence for A930039G15Rik (NM_177389.2,251-269).
gggggatcccttgaacttt

SEQ ID NO: 796029 - DNA, 19 bp, Mus musculus
  siRNA target sequence for A930039G15Rik (NM_177389.2,289-307).
cagttttggatattttcca

SEQ ID NO: 796030 - DNA, 19 bp, Mus musculus
  siRNA target sequence for A930039G15Rik (NM_177389.2,316-334).
gatcaaggtacttcataaa

SEQ ID NO: 796031 - DNA, 19 bp, Mus musculus
  siRNA target sequence for A930039G15Rik (NM_177389.2,339-357).
cggaagaagagctacatat

SEQ ID NO: 796032 - DNA, 19 bp, Mus musculus
  siRNA target sequence for A930039G15Rik (NM_177389.2,365-383).
gatgagacagactttgtct

SEQ ID NO: 796033 - DNA, 19 bp, Mus musculus
  siRNA target sequence for A930039G15Rik (NM_177389.2,472-490).
gtcgaagaaagctgaagaa

SEQ ID NO: 796034 - DNA, 19 bp, Mus musculus
  siRNA target sequence for A930039G15Rik (NM_177389.2,562-580).
ggcattcagagctgattca

SEQ ID NO: 796035 - DNA, 19 bp, Mus musculus
  siRNA target sequence for A930039G15Rik (NM_177389.2,696-714).
cttcgttggacacttttga

SEQ ID NO: 796036 - DNA, 19 bp, Mus musculus
  siRNA target sequence for A930039G15Rik (NM_177389.2,699-717).
cgttggacacttttgaaga

SEQ ID NO: 796037 - DNA, 19 bp, Mus musculus
  siRNA target sequence for A930039G15Rik (NM_177389.2,716-734).
gaaattctgcacgataaat

SEQ ID NO: 796038 - DNA, 19 bp, Mus musculus
  siRNA target sequence for A930039G15Rik (NM_177389.2,898-916).
cagactggtcacttcatta

SEQ ID NO: 796039 - DNA, 19 bp, Mus musculus
  siRNA target sequence for A930039G15Rik (NM_177389.2,900-918).
gactggtcacttcattaga

SEQ ID NO: 796040 - DNA, 19 bp, Mus musculus
  siRNA target sequence for A930039G15Rik (NM_177389.2,935-953).
gcgctggatgctgagtatt

SEQ ID NO: 796041 - DNA, 19 bp, Mus musculus
  siRNA target sequence for A930039G15Rik (NM_177389.2,936-954).
cgctggatgctgagtatta

SEQ ID NO: 796042 - DNA, 19 bp, Mus musculus
  siRNA target sequence for A930039G15Rik (NM_177389.2,996-1014).
gctctgatgagctaccatt

SEQ ID NO: 796043 - DNA, 19 bp, Mus musculus
  siRNA target sequence for A930039G15Rik (NM_177389.2,997-1015).
ctctgatgagctaccatta

SEQ ID NO: 796044 - DNA, 19 bp, Mus musculus
  siRNA target sequence for A930039G15Rik (NM_177389.2,999-1017).
ctgatgagctaccattact

SEQ ID NO: 796045 - DNA, 19 bp, Mus musculus
  siRNA target sequence for A930039G15Rik (NM_177389.2,1001-1019).
gatgagctaccattactaa

SEQ ID NO: 796046 - DNA, 19 bp, Mus musculus
  siRNA target sequence for A930039G15Rik (NM_177389.2,1051-1069).
gaagcccatgatagagaaa

SEQ ID NO: 796047 - DNA, 19 bp, Mus musculus
  siRNA target sequence for A930039G15Rik (NM_177389.2,1054-1072).
gcccatgatagagaaatat

SEQ ID NO: 796048 - DNA, 19 bp, Mus musculus
  siRNA target sequence for A930039G15Rik (NM_177389.2,1055-1073).
cccatgatagagaaatatt

SEQ ID NO: 796049 - DNA, 19 bp, Mus musculus
  siRNA target sequence for A930039G15Rik (NM_177389.2,1057-1075).
catgatagagaaatattta

SEQ ID NO: 796050 - DNA, 19 bp, Mus musculus
  siRNA target sequence for A930039G15Rik (NM_177389.2,1077-1095).
cagataaggatccgaattt

SEQ ID NO: 796051 - DNA, 19 bp, Mus musculus
  siRNA target sequence for A930039G15Rik (NM_177389.2,1122-1140).
ctacctggggggatgcttt

SEQ ID NO: 796052 - DNA, 19 bp, Mus musculus
  siRNA target sequence for A930039G15Rik (NM_177389.2,1210-1228).
ggaagatgtgtcagtttca

SEQ ID NO: 796053 - DNA, 19 bp, Mus musculus
  siRNA target sequence for A930039G15Rik (NM_177389.2,1214-1232).
gatgtgtcagtttcatcta

SEQ ID NO: 796054 - DNA, 19 bp, Mus musculus
  siRNA target sequence for A930039G15Rik (NM_177389.2,1287-1305).
gtgacgatctttttgtaga

SEQ ID NO: 796055 - DNA, 19 bp, Mus musculus
  siRNA target sequence for A930039G15Rik (NM_177389.2,1345-1363).
cccagaacttgtcattaca

SEQ ID NO: 796056 - DNA, 19 bp, Mus musculus
  siRNA target sequence for A930039G15Rik (NM_177389.2,1496-1514).
gaaaagggcagagacttta

SEQ ID NO: 796057 - DNA, 19 bp, Mus musculus
  siRNA target sequence for A930039G15Rik (NM_177389.2,1501-1519).
gggcagagactttacacta

SEQ ID NO: 796058 - DNA, 19 bp, Mus musculus
  siRNA target sequence for A930039G15Rik (NM_177389.2,1556-1574).
gaatcagttatccatatct

SEQ ID NO: 796059 - DNA, 19 bp, Mus musculus
  siRNA target sequence for A930039G15Rik (NM_177389.2,1560-1578).
cagttatccatatctcaaa

SEQ ID NO: 796060 - DNA, 19 bp, Mus musculus
  siRNA target sequence for A930039G15Rik (NM_177389.2,1573-1591).
ctcaaaggaaacactacat

SEQ ID NO: 796061 - DNA, 19 bp, Mus musculus
  siRNA target sequence for A930039G15Rik (NM_177389.2,1619-1637).
gacagcttggagagtgaat

SEQ ID NO: 796062 - DNA, 19 bp, Mus musculus
  siRNA target sequence for A930039G15Rik (NM_177389.2,1623-1641).
gcttggagagtgaattggt

SEQ ID NO: 796063 - DNA, 19 bp, Mus musculus
  siRNA target sequence for A930039G15Rik (NM_177389.2,1700-1718).
gcaccactcttgggaaata

SEQ ID NO: 796064 - DNA, 19 bp, Mus musculus
  siRNA target sequence for A930039G15Rik (NM_177389.2,1720-1738).
caagcccgatgcatccaaa

SEQ ID NO: 796065 - DNA, 19 bp, Mus musculus
  siRNA target sequence for A930039G15Rik (NM_177389.2,1765-1783).
cgtcagtggaccaaaagca

SEQ ID NO: 796066 - DNA, 19 bp, Mus musculus
  siRNA target sequence for A930039G15Rik (NM_177389.2,1786-1804).
ccagcaggagggatttcta

SEQ ID NO: 796067 - DNA, 19 bp, Mus musculus
  siRNA target sequence for A930039G15Rik (NM_177389.2,1802-1820).
ctagaaccaggtcttaaaa

SEQ ID NO: 796068 - DNA, 19 bp, Mus musculus
  siRNA target sequence for A930039G15Rik (NM_177389.2,1946-1964).
ggtaagcatgcgaatgaga

SEQ ID NO: 796069 - DNA, 19 bp, Mus musculus
  siRNA target sequence for A930039G15Rik (NM_177389.2,2104-2122).
ggaagagggcgacaactat

SEQ ID NO: 796070 - DNA, 19 bp, Mus musculus
  siRNA target sequence for A930039G15Rik (NM_177389.2,2165-2183).
cagcagtctagagaaaatt

SEQ ID NO: 796071 - DNA, 19 bp, Mus musculus
  siRNA target sequence for A930039G15Rik (NM_177389.2,2195-2213).
cgcgacgggaggtcagata

SEQ ID NO: 796072 - DNA, 19 bp, Mus musculus
  siRNA target sequence for A930039G15Rik (NM_177389.2,2196-2214).
gcgacgggaggtcagatat

SEQ ID NO: 796073 - DNA, 19 bp, Mus musculus
  siRNA target sequence for A930039G15Rik (NM_177389.2,2198-2216).
gacgggaggtcagatatga

SEQ ID NO: 796074 - DNA, 19 bp, Mus musculus
  siRNA target sequence for A930039G15Rik (NM_177389.2,2200-2218).
cgggaggtcagatatgaat

SEQ ID NO: 796075 - DNA, 19 bp, Mus musculus
  siRNA target sequence for A930039G15Rik (NM_177389.2,2215-2233).
gaattctcaagtttttgaa

SEQ ID NO: 796076 - DNA, 19 bp, Mus musculus
  siRNA target sequence for A930039G15Rik (NM_177389.2,2246-2264).
gggacccttaatcttaaca

SEQ ID NO: 796077 - DNA, 19 bp, Mus musculus
  siRNA target sequence for A930039G15Rik (NM_177389.2,2283-2301).
cagctaatatgattttgga

SEQ ID NO: 796078 - DNA, 19 bp, Mus musculus
  siRNA target sequence for A930039G15Rik (NM_177389.2,2561-2579).
cctggcgtaggagaaatct

SEQ ID NO: 796079 - DNA, 19 bp, Mus musculus
  siRNA target sequence for A930039G15Rik (NM_177389.2,2692-2710).
catagtgctcaagagtata

SEQ ID NO: 796080 - DNA, 19 bp, Mus musculus
  siRNA target sequence for A930039G15Rik (NM_177389.2,2712-2730).
gggaagacttgcctatcat

SEQ ID NO: 796081 - DNA, 19 bp, Mus musculus
  siRNA target sequence for A930039G15Rik (NM_177389.2,2810-2828).
cttgaagacatgtcgataa

SEQ ID NO: 796082 - DNA, 19 bp, Mus musculus
  siRNA target sequence for A930039G15Rik (NM_177389.2,2869-2887).
ggagaaagtcctagataaa

SEQ ID NO: 796083 - DNA, 19 bp, Mus musculus
  siRNA target sequence for A930039G15Rik (NM_177389.2,2898-2916).
cctctgagtcacgaattct

SEQ ID NO: 796084 - DNA, 19 bp, Mus musculus
  siRNA target sequence for A930039G15Rik (NM_177389.2,2899-2917).
ctctgagtcacgaattcta

SEQ ID NO: 796085 - DNA, 19 bp, Mus musculus
  siRNA target sequence for A930039G15Rik (NM_177389.2,2903-2921).
gagtcacgaattctaagta

SEQ ID NO: 796086 - DNA, 19 bp, Mus musculus
  siRNA target sequence for A930039G15Rik (NM_177389.2,2915-2933).
ctaagtatggcggagaaaa

SEQ ID NO: 796087 - DNA, 19 bp, Mus musculus
  siRNA target sequence for A930039G15Rik (NM_177389.2,2924-2942).
gcggagaaaatgcttgata

SEQ ID NO: 796088 - DNA, 19 bp, Mus musculus
  siRNA target sequence for A930039G15Rik (NM_177389.2,3001-3019).
cgaggtgttggatgacata

SEQ ID NO: 796089 - DNA, 19 bp, Mus musculus
  siRNA target sequence for A930039G15Rik (NM_177389.2,3062-3080).
gagactgccccattagtca

SEQ ID NO: 796090 - DNA, 19 bp, Mus musculus
  siRNA target sequence for C920005C14Rik (NM_177391.2,321-339).
ctatgcgctgagtgattct

SEQ ID NO: 796091 - DNA, 19 bp, Mus musculus
  siRNA target sequence for C920005C14Rik (NM_177391.2,403-421).
ggcactggccgaagatact

SEQ ID NO: 796092 - DNA, 19 bp, Mus musculus
  siRNA target sequence for C920005C14Rik (NM_177391.2,435-453).
gggcaatctgctattctct

SEQ ID NO: 796093 - DNA, 19 bp, Mus musculus
  siRNA target sequence for C920005C14Rik (NM_177391.2,436-454).
ggcaatctgctattctctt

SEQ ID NO: 796094 - DNA, 19 bp, Mus musculus
  siRNA target sequence for C920005C14Rik (NM_177391.2,479-497).
cgctgagtcttgtggtatt

SEQ ID NO: 796095 - DNA, 19 bp, Mus musculus
  siRNA target sequence for C920005C14Rik (NM_177391.2,549-567).
cttcgctattcgctttgat

SEQ ID NO: 796096 - DNA, 19 bp, Mus musculus
  siRNA target sequence for C920005C14Rik (NM_177391.2,665-683).
gacttgtggtgcgagaatt

SEQ ID NO: 796097 - DNA, 19 bp, Mus musculus
  siRNA target sequence for C920005C14Rik (NM_177391.2,741-759).
gagggctgttgccaattgt

SEQ ID NO: 796098 - DNA, 19 bp, Mus musculus
  siRNA target sequence for C920005C14Rik (NM_177391.2,744-762).
ggctgttgccaattgtagt

SEQ ID NO: 796099 - DNA, 19 bp, Mus musculus
  siRNA target sequence for C920005C14Rik (NM_177391.2,745-763).
gctgttgccaattgtagta

SEQ ID NO: 796100 - DNA, 19 bp, Mus musculus
  siRNA target sequence for C920005C14Rik (NM_177391.2,746-764).
ctgttgccaattgtagtaa

SEQ ID NO: 796101 - DNA, 19 bp, Mus musculus
  siRNA target sequence for C920005C14Rik (NM_177391.2,748-766).
gttgccaattgtagtaaat

SEQ ID NO: 796102 - DNA, 19 bp, Mus musculus
  siRNA target sequence for C920005C14Rik (NM_177391.2,797-815).
ctgagaacggccactttct

SEQ ID NO: 796103 - DNA, 19 bp, Mus musculus
  siRNA target sequence for C920005C14Rik (NM_177391.2,819-837).
cagggaccgcagttccatt

SEQ ID NO: 796104 - DNA, 19 bp, Mus musculus
  siRNA target sequence for C920005C14Rik (NM_177391.2,823-841).
gaccgcagttccattggta

SEQ ID NO: 796105 - DNA, 19 bp, Mus musculus
  siRNA target sequence for C920005C14Rik (NM_177391.2,855-873).
ggggatccggccaataggt

SEQ ID NO: 796106 - DNA, 19 bp, Mus musculus
  siRNA target sequence for C920005C14Rik (NM_177391.2,865-883).
ccaataggtcgggatttga

SEQ ID NO: 796107 - DNA, 19 bp, Mus musculus
  siRNA target sequence for A730055C05Rik (NM_177392.1,106-124).
ccgctgtggtgcaggtaaa

SEQ ID NO: 796108 - DNA, 19 bp, Mus musculus
  siRNA target sequence for A730055C05Rik (NM_177392.1,109-127).
ctgtggtgcaggtaaacga

SEQ ID NO: 796109 - DNA, 19 bp, Mus musculus
  siRNA target sequence for A730055C05Rik (NM_177392.1,145-163).
gggtgacacgaaagtcttt

SEQ ID NO: 796110 - DNA, 19 bp, Mus musculus
  siRNA target sequence for A730055C05Rik (NM_177392.1,166-184).
gcagagagagcttatacca

SEQ ID NO: 796111 - DNA, 19 bp, Mus musculus
  siRNA target sequence for A730055C05Rik (NM_177392.1,214-232).
gcatgacagtggtgtacat

SEQ ID NO: 796112 - DNA, 19 bp, Mus musculus
  siRNA target sequence for A730055C05Rik (NM_177392.1,250-268).
ccctgcttgttgggtttaa

SEQ ID NO: 796113 - DNA, 19 bp, Mus musculus
  siRNA target sequence for A730055C05Rik (NM_177392.1,254-272).
gcttgttgggtttaatcct

SEQ ID NO: 796114 - DNA, 19 bp, Mus musculus
  siRNA target sequence for A730055C05Rik (NM_177392.1,273-291).
cttgtcacaggcaacttca

SEQ ID NO: 796115 - DNA, 19 bp, Mus musculus
  siRNA target sequence for A730055C05Rik (NM_177392.1,346-364).
gcttggcgtaccacttctt

SEQ ID NO: 796116 - DNA, 19 bp, Mus musculus
  siRNA target sequence for A730055C05Rik (NM_177392.1,532-550).
cgtgggtctacgtacacat

SEQ ID NO: 796117 - DNA, 19 bp, Mus musculus
  siRNA target sequence for A730055C05Rik (NM_177392.1,535-553).
gggtctacgtacacatgaa

SEQ ID NO: 796118 - DNA, 19 bp, Mus musculus
  siRNA target sequence for A730055C05Rik (NM_177392.1,582-600).
cactgcaagacagtcattt

SEQ ID NO: 796119 - DNA, 19 bp, Mus musculus
  siRNA target sequence for A730011L01Rik (NM_177394.2,560-578).
ggccggaggagacacattt

SEQ ID NO: 796120 - DNA, 19 bp, Mus musculus
  siRNA target sequence for A730011L01Rik (NM_177394.2,563-581).
cggaggagacacatttcct

SEQ ID NO: 796121 - DNA, 19 bp, Mus musculus
  siRNA target sequence for A730011L01Rik (NM_177394.2,719-737).
ccggatcccagaacctata

SEQ ID NO: 796122 - DNA, 19 bp, Mus musculus
  siRNA target sequence for Tram2 (NM_177409.2,679-697).
cacgccagctgcaatacat

SEQ ID NO: 796123 - DNA, 19 bp, Mus musculus
  siRNA target sequence for Tram2 (NM_177409.2,721-739).
ctggggcatacctcttaaa

SEQ ID NO: 796124 - DNA, 19 bp, Mus musculus
  siRNA target sequence for Ofd1 (NM_177429.2,316-334).
gaactgcgcaaaaagctat

SEQ ID NO: 796125 - DNA, 19 bp, Mus musculus
  siRNA target sequence for Ofd1 (NM_177429.2,384-402).
ccgaaaccagctaattcat

SEQ ID NO: 796126 - DNA, 19 bp, Mus musculus
  siRNA target sequence for Ofd1 (NM_177429.2,408-426).
gatgcatcctgtattgagt

SEQ ID NO: 796127 - DNA, 19 bp, Mus musculus
  siRNA target sequence for Ofd1 (NM_177429.2,433-451).
gtgaagccgccatccattt

SEQ ID NO: 796128 - DNA, 19 bp, Mus musculus
  siRNA target sequence for Ofd1 (NM_177429.2,472-490).
ctaataggggcttctaact

SEQ ID NO: 796129 - DNA, 19 bp, Mus musculus
  siRNA target sequence for Ofd1 (NM_177429.2,526-544).
gaatattcactctctgttt

SEQ ID NO: 796130 - DNA, 19 bp, Mus musculus
  siRNA target sequence for Ofd1 (NM_177429.2,584-602).
ctatgcaggatctactaca

SEQ ID NO: 796131 - DNA, 19 bp, Mus musculus
  siRNA target sequence for Ofd1 (NM_177429.2,591-609).
ggatctactacaactcatt

SEQ ID NO: 796132 - DNA, 19 bp, Mus musculus
  siRNA target sequence for Ofd1 (NM_177429.2,629-647).
gtctctataaatcattgat

SEQ ID NO: 796133 - DNA, 19 bp, Mus musculus
  siRNA target sequence for Ofd1 (NM_177429.2,631-649).
ctctataaatcattgattt

SEQ ID NO: 796134 - DNA, 19 bp, Mus musculus
  siRNA target sequence for Ofd1 (NM_177429.2,641-659).
cattgatttcaggatttga

SEQ ID NO: 796135 - DNA, 19 bp, Mus musculus
  siRNA target sequence for Ofd1 (NM_177429.2,645-663).
gatttcaggatttgataaa

SEQ ID NO: 796136 - DNA, 19 bp, Mus musculus
  siRNA target sequence for Ofd1 (NM_177429.2,702-720).
gttggcagaatattatcaa

SEQ ID NO: 796137 - DNA, 19 bp, Mus musculus
  siRNA target sequence for Ofd1 (NM_177429.2,779-797).
ccctagccgagaagtttca

SEQ ID NO: 796138 - DNA, 19 bp, Mus musculus
  siRNA target sequence for Ofd1 (NM_177429.2,785-803).
ccgagaagtttcagcttat

SEQ ID NO: 796139 - DNA, 19 bp, Mus musculus
  siRNA target sequence for Ofd1 (NM_177429.2,786-804).
cgagaagtttcagcttatt

SEQ ID NO: 796140 - DNA, 19 bp, Mus musculus
  siRNA target sequence for Ofd1 (NM_177429.2,798-816).
gcttattgacgctcaattt

SEQ ID NO: 796141 - DNA, 19 bp, Mus musculus
  siRNA target sequence for Ofd1 (NM_177429.2,836-854).
gttccaagctagaatcttt

SEQ ID NO: 796142 - DNA, 19 bp, Mus musculus
  siRNA target sequence for Ofd1 (NM_177429.2,870-888).
cgagtataagaaagaagta

SEQ ID NO: 796143 - DNA, 19 bp, Mus musculus
  siRNA target sequence for Ofd1 (NM_177429.2,897-915).
gcttcaggtagaaatgtgt

SEQ ID NO: 796144 - DNA, 19 bp, Mus musculus
  siRNA target sequence for Ofd1 (NM_177429.2,912-930).
gtgtcataagctgaagtat

SEQ ID NO: 796145 - DNA, 19 bp, Mus musculus
  siRNA target sequence for Ofd1 (NM_177429.2,914-932).
gtcataagctgaagtattt

SEQ ID NO: 796146 - DNA, 19 bp, Mus musculus
  siRNA target sequence for Ofd1 (NM_177429.2,916-934).
cataagctgaagtatttta

SEQ ID NO: 796147 - DNA, 19 bp, Mus musculus
  siRNA target sequence for Ofd1 (NM_177429.2,1087-1105).
caccgagagatggaatcaa

SEQ ID NO: 796148 - DNA, 19 bp, Mus musculus
  siRNA target sequence for Ofd1 (NM_177429.2,1089-1107).
ccgagagatggaatcaaaa

SEQ ID NO: 796149 - DNA, 19 bp, Mus musculus
  siRNA target sequence for Ofd1 (NM_177429.2,1128-1146).
gcttctactaaatgatata

SEQ ID NO: 796150 - DNA, 19 bp, Mus musculus
  siRNA target sequence for Ofd1 (NM_177429.2,1179-1197).
ggagcgaatcgaaactttt

SEQ ID NO: 796151 - DNA, 19 bp, Mus musculus
  siRNA target sequence for Ofd1 (NM_177429.2,1417-1435).
gaggagctcacagttatta

SEQ ID NO: 796152 - DNA, 19 bp, Mus musculus
  siRNA target sequence for Ofd1 (NM_177429.2,1419-1437).
ggagctcacagttattaat

SEQ ID NO: 796153 - DNA, 19 bp, Mus musculus
  siRNA target sequence for Ofd1 (NM_177429.2,1422-1440).
gctcacagttattaattca

SEQ ID NO: 796154 - DNA, 19 bp, Mus musculus
  siRNA target sequence for Ofd1 (NM_177429.2,1423-1441).
ctcacagttattaattcaa

SEQ ID NO: 796155 - DNA, 19 bp, Mus musculus
  siRNA target sequence for Ofd1 (NM_177429.2,1455-1473).
cagtaaatctgttaagcat

SEQ ID NO: 796156 - DNA, 19 bp, Mus musculus
  siRNA target sequence for Ofd1 (NM_177429.2,1605-1623).
gcttcaggcacaaaataaa

SEQ ID NO: 796157 - DNA, 19 bp, Mus musculus
  siRNA target sequence for Ofd1 (NM_177429.2,1611-1629).
ggcacaaaataaactactt

SEQ ID NO: 796158 - DNA, 19 bp, Mus musculus
  siRNA target sequence for Ofd1 (NM_177429.2,1612-1630).
gcacaaaataaactactta

SEQ ID NO: 796159 - DNA, 19 bp, Mus musculus
  siRNA target sequence for Ofd1 (NM_177429.2,1778-1796).
ggcaggctcttgagaaaca

SEQ ID NO: 796160 - DNA, 19 bp, Mus musculus
  siRNA target sequence for Ofd1 (NM_177429.2,1800-1818).
gcagagtgaaattgaaaat

SEQ ID NO: 796161 - DNA, 19 bp, Mus musculus
  siRNA target sequence for Ofd1 (NM_177429.2,1832-1850).
ggacccagatagcagaata

SEQ ID NO: 796162 - DNA, 19 bp, Mus musculus
  siRNA target sequence for Ofd1 (NM_177429.2,1852-1870).
gatgcttctgtcaaaaggt

SEQ ID NO: 796163 - DNA, 19 bp, Mus musculus
  siRNA target sequence for Ofd1 (NM_177429.2,1855-1873).
gcttctgtcaaaaggttaa

SEQ ID NO: 796164 - DNA, 19 bp, Mus musculus
  siRNA target sequence for Ofd1 (NM_177429.2,1859-1877).
ctgtcaaaaggttaactgt

SEQ ID NO: 796165 - DNA, 19 bp, Mus musculus
  siRNA target sequence for Ofd1 (NM_177429.2,1876-1894).
gttcaggtggctgagttaa

SEQ ID NO: 796166 - DNA, 19 bp, Mus musculus
  siRNA target sequence for Ofd1 (NM_177429.2,1881-1899).
ggtggctgagttaaagtca

SEQ ID NO: 796167 - DNA, 19 bp, Mus musculus
  siRNA target sequence for Ofd1 (NM_177429.2,1933-1951).
gaagtgtaccgaaatccaa

SEQ ID NO: 796168 - DNA, 19 bp, Mus musculus
  siRNA target sequence for Ofd1 (NM_177429.2,1972-1990).
ctgagtggcctcctattga

SEQ ID NO: 796169 - DNA, 19 bp, Mus musculus
  siRNA target sequence for Ofd1 (NM_177429.2,2003-2021).
caccccacagtgaagataa

SEQ ID NO: 796170 - DNA, 19 bp, Mus musculus
  siRNA target sequence for Ofd1 (NM_177429.2,2017-2035).
gataaaagtggggatttct

SEQ ID NO: 796171 - DNA, 19 bp, Mus musculus
  siRNA target sequence for Ofd1 (NM_177429.2,2068-2086).
gcaggtgcagttatgtcaa

SEQ ID NO: 796172 - DNA, 19 bp, Mus musculus
  siRNA target sequence for Ofd1 (NM_177429.2,2082-2100).
gtcaagggtcccaccttat

SEQ ID NO: 796173 - DNA, 19 bp, Mus musculus
  siRNA target sequence for Ofd1 (NM_177429.2,2087-2105).
gggtcccaccttatgtaaa

SEQ ID NO: 796174 - DNA, 19 bp, Mus musculus
  siRNA target sequence for Ofd1 (NM_177429.2,2088-2106).
ggtcccaccttatgtaaat

SEQ ID NO: 796175 - DNA, 19 bp, Mus musculus
  siRNA target sequence for Ofd1 (NM_177429.2,2131-2149).
gagtctgactttgagttta

SEQ ID NO: 796176 - DNA, 19 bp, Mus musculus
  siRNA target sequence for Ofd1 (NM_177429.2,2143-2161).
gagtttatagccagtagta

SEQ ID NO: 796177 - DNA, 19 bp, Mus musculus
  siRNA target sequence for Ofd1 (NM_177429.2,2191-2209).
gaggctgaacgcttggaaa

SEQ ID NO: 796178 - DNA, 19 bp, Mus musculus
  siRNA target sequence for Ofd1 (NM_177429.2,2211-2229).
ggcattcagaacttactat

SEQ ID NO: 796179 - DNA, 19 bp, Mus musculus
  siRNA target sequence for Ofd1 (NM_177429.2,2259-2277).
ccctcagccggcaaagagt

SEQ ID NO: 796180 - DNA, 19 bp, Mus musculus
  siRNA target sequence for Ofd1 (NM_177429.2,2395-2413).
gaagaaatgagtgatatgt

SEQ ID NO: 796181 - DNA, 19 bp, Mus musculus
  siRNA target sequence for Ofd1 (NM_177429.2,2498-2516).
cgagaagaagtcttgataa

SEQ ID NO: 796182 - DNA, 19 bp, Mus musculus
  siRNA target sequence for Ofd1 (NM_177429.2,2504-2522).
gaagtcttgataatgaaat

SEQ ID NO: 796183 - DNA, 19 bp, Mus musculus
  siRNA target sequence for Ofd1 (NM_177429.2,2529-2547).
ggaaggtctcgggagatta

SEQ ID NO: 796184 - DNA, 19 bp, Mus musculus
  siRNA target sequence for Ofd1 (NM_177429.2,2533-2551).
ggtctcgggagattacaca

SEQ ID NO: 796185 - DNA, 19 bp, Mus musculus
  siRNA target sequence for Ofd1 (NM_177429.2,2534-2552).
gtctcgggagattacacat

SEQ ID NO: 796186 - DNA, 19 bp, Mus musculus
  siRNA target sequence for Ofd1 (NM_177429.2,2539-2557).
gggagattacacatgactt

SEQ ID NO: 796187 - DNA, 19 bp, Mus musculus
  siRNA target sequence for Ofd1 (NM_177429.2,2677-2695).
gagcaaaatgcctgtttat

SEQ ID NO: 796188 - DNA, 19 bp, Mus musculus
  siRNA target sequence for Ofd1 (NM_177429.2,2704-2722).
caaactgaaacgcaagata

SEQ ID NO: 796189 - DNA, 19 bp, Mus musculus
  siRNA target sequence for Ofd1 (NM_177429.2,2740-2758).
gtggacaagcaatctttga

SEQ ID NO: 796190 - DNA, 19 bp, Mus musculus
  siRNA target sequence for Ofd1 (NM_177429.2,2841-2859).
gcctggaatagattttgct

SEQ ID NO: 796191 - DNA, 19 bp, Mus musculus
  siRNA target sequence for Ofd1 (NM_177429.2,2948-2966).
gggagcttcacatgaaaga

SEQ ID NO: 796192 - DNA, 19 bp, Mus musculus
  siRNA target sequence for Ofd1 (NM_177429.2,3202-3220).
gcagataagagctccaaaa

SEQ ID NO: 796193 - DNA, 19 bp, Mus musculus
  siRNA target sequence for Ofd1 (NM_177429.2,3236-3254).
gctcactagtggacatgat

SEQ ID NO: 796194 - DNA, 19 bp, Mus musculus
  siRNA target sequence for Ofd1 (NM_177429.2,3284-3302).
caggattttctcatgaaga

SEQ ID NO: 796195 - DNA, 19 bp, Mus musculus
  siRNA target sequence for Adamts20 (NM_177431.3,228-246).
ggtcctgggaagttcgttt

SEQ ID NO: 796196 - DNA, 19 bp, Mus musculus
  siRNA target sequence for Adamts20 (NM_177431.3,300-318).
cccccacgcgggtcaatga

SEQ ID NO: 796197 - DNA, 19 bp, Mus musculus
  siRNA target sequence for Adamts20 (NM_177431.3,302-320).
cccacgcgggtcaatgagt

SEQ ID NO: 796198 - DNA, 19 bp, Mus musculus
  siRNA target sequence for Adamts20 (NM_177431.3,303-321).
ccacgcgggtcaatgagtt

SEQ ID NO: 796199 - DNA, 19 bp, Mus musculus
  siRNA target sequence for Adamts20 (NM_177431.3,618-636).
gactgatggggacattcaa

SEQ ID NO: 796200 - DNA, 19 bp, Mus musculus
  siRNA target sequence for Adamts20 (NM_177431.3,625-643).
ggggacattcaaagcaaat

SEQ ID NO: 796201 - DNA, 19 bp, Mus musculus
  siRNA target sequence for Adamts20 (NM_177431.3,638-656).
gcaaatgatggggagtatt

SEQ ID NO: 796202 - DNA, 19 bp, Mus musculus
  siRNA target sequence for Adamts20 (NM_177431.3,639-657).
caaatgatggggagtattt

SEQ ID NO: 796203 - DNA, 19 bp, Mus musculus
  siRNA target sequence for Adamts20 (NM_177431.3,721-739).
gatctacagacaggaatta

SEQ ID NO: 796204 - DNA, 19 bp, Mus musculus
  siRNA target sequence for Adamts20 (NM_177431.3,834-852).
cgactggagatgttgatat

SEQ ID NO: 796205 - DNA, 19 bp, Mus musculus
  siRNA target sequence for Adamts20 (NM_177431.3,837-855).
ctggagatgttgatatcga

SEQ ID NO: 796206 - DNA, 19 bp, Mus musculus
  siRNA target sequence for Adamts20 (NM_177431.3,882-900).
gcgaacggagccagttaca

SEQ ID NO: 796207 - DNA, 19 bp, Mus musculus
  siRNA target sequence for Adamts20 (NM_177431.3,883-901).
cgaacggagccagttacat

SEQ ID NO: 796208 - DNA, 19 bp, Mus musculus
  siRNA target sequence for Adamts20 (NM_177431.3,893-911).
cagttacattccaggaata

SEQ ID NO: 796209 - DNA, 19 bp, Mus musculus
  siRNA target sequence for Adamts20 (NM_177431.3,903-921).
ccaggaataagcgtttttt

SEQ ID NO: 796210 - DNA, 19 bp, Mus musculus
  siRNA target sequence for Adamts20 (NM_177431.3,904-922).
caggaataagcgtttttta

SEQ ID NO: 796211 - DNA, 19 bp, Mus musculus
  siRNA target sequence for Adamts20 (NM_177431.3,929-947).
ccaagatacgtggaagtta

SEQ ID NO: 796212 - DNA, 19 bp, Mus musculus
  siRNA target sequence for Adamts20 (NM_177431.3,930-948).
caagatacgtggaagttat

SEQ ID NO: 796213 - DNA, 19 bp, Mus musculus
  siRNA target sequence for Adamts20 (NM_177431.3,1009-1027).
gacactgatgtcgattgtt

SEQ ID NO: 796214 - DNA, 19 bp, Mus musculus
  siRNA target sequence for Adamts20 (NM_177431.3,1020-1038).
cgattgttgctgcaatcta

SEQ ID NO: 796215 - DNA, 19 bp, Mus musculus
  siRNA target sequence for Adamts20 (NM_177431.3,1051-1069).
cattgggaaccttatcaat

SEQ ID NO: 796216 - DNA, 19 bp, Mus musculus
  siRNA target sequence for Adamts20 (NM_177431.3,1109-1127).
gaaggaccagtgatcagtt

SEQ ID NO: 796217 - DNA, 19 bp, Mus musculus
  siRNA target sequence for Adamts20 (NM_177431.3,1113-1131).
gaccagtgatcagttttaa

SEQ ID NO: 796218 - DNA, 19 bp, Mus musculus
  siRNA target sequence for Adamts20 (NM_177431.3,1138-1156).
caccacgttacgcaacttt

SEQ ID NO: 796219 - DNA, 19 bp, Mus musculus
  siRNA target sequence for Adamts20 (NM_177431.3,1367-1385).
gagcttggacacgtgttta

SEQ ID NO: 796220 - DNA, 19 bp, Mus musculus
  siRNA target sequence for Adamts20 (NM_177431.3,1392-1410).
cacacgacgacagctttaa

SEQ ID NO: 796221 - DNA, 19 bp, Mus musculus
  siRNA target sequence for Adamts20 (NM_177431.3,1394-1412).
cacgacgacagctttaaat

SEQ ID NO: 796222 - DNA, 19 bp, Mus musculus
  siRNA target sequence for Adamts20 (NM_177431.3,1396-1414).
cgacgacagctttaaatgt

SEQ ID NO: 796223 - DNA, 19 bp, Mus musculus
  siRNA target sequence for Adamts20 (NM_177431.3,1397-1415).
gacgacagctttaaatgta

SEQ ID NO: 796224 - DNA, 19 bp, Mus musculus
  siRNA target sequence for Adamts20 (NM_177431.3,1399-1417).
cgacagctttaaatgtaaa

SEQ ID NO: 796225 - DNA, 19 bp, Mus musculus
  siRNA target sequence for Adamts20 (NM_177431.3,1422-1440).
ccggaattaaacatcagta

SEQ ID NO: 796226 - DNA, 19 bp, Mus musculus
  siRNA target sequence for Adamts20 (NM_177431.3,1423-1441).
cggaattaaacatcagtat

SEQ ID NO: 796227 - DNA, 19 bp, Mus musculus
  siRNA target sequence for Adamts20 (NM_177431.3,1425-1443).
gaattaaacatcagtatca

SEQ ID NO: 796228 - DNA, 19 bp, Mus musculus
  siRNA target sequence for Adamts20 (NM_177431.3,1494-1512).
catgcagtcagaagcatat

SEQ ID NO: 796229 - DNA, 19 bp, Mus musculus
  siRNA target sequence for Adamts20 (NM_177431.3,1502-1520).
cagaagcatatcacagaat

SEQ ID NO: 796230 - DNA, 19 bp, Mus musculus
  siRNA target sequence for Adamts20 (NM_177431.3,1560-1578).
ccaacgggagaacatatga

SEQ ID NO: 796231 - DNA, 19 bp, Mus musculus
  siRNA target sequence for Adamts20 (NM_177431.3,1652-1670).
caagtgtgtccctacttga

SEQ ID NO: 796232 - DNA, 19 bp, Mus musculus
  siRNA target sequence for Adamts20 (NM_177431.3,1872-1890).
catgcggaggtggaatcaa

SEQ ID NO: 796233 - DNA, 19 bp, Mus musculus
  siRNA target sequence for Adamts20 (NM_177431.3,1952-1970).
cgcaggatgaaatttcgat

SEQ ID NO: 796234 - DNA, 19 bp, Mus musculus
  siRNA target sequence for Adamts20 (NM_177431.3,1957-1975).
gatgaaatttcgatcatgt

SEQ ID NO: 796235 - DNA, 19 bp, Mus musculus
  siRNA target sequence for Adamts20 (NM_177431.3,1960-1978).
gaaatttcgatcatgtaat

SEQ ID NO: 796236 - DNA, 19 bp, Mus musculus
  siRNA target sequence for Adamts20 (NM_177431.3,2004-2022).
gagacttccgagaaaagca

SEQ ID NO: 796237 - DNA, 19 bp, Mus musculus
  siRNA target sequence for Adamts20 (NM_177431.3,2006-2024).
gacttccgagaaaagcaat

SEQ ID NO: 796238 - DNA, 19 bp, Mus musculus
  siRNA target sequence for Adamts20 (NM_177431.3,2028-2046).
ccgacttcgacggtaaaca

SEQ ID NO: 796239 - DNA, 19 bp, Mus musculus
  siRNA target sequence for Adamts20 (NM_177431.3,2029-2047).
cgacttcgacggtaaacat

SEQ ID NO: 796240 - DNA, 19 bp, Mus musculus
  siRNA target sequence for Adamts20 (NM_177431.3,2040-2058).
gtaaacatttcgacatcaa

SEQ ID NO: 796241 - DNA, 19 bp, Mus musculus
  siRNA target sequence for Adamts20 (NM_177431.3,2095-2113).
cagcgggattgccgtaaaa

SEQ ID NO: 796242 - DNA, 19 bp, Mus musculus
  siRNA target sequence for Adamts20 (NM_177431.3,2097-2115).
gcgggattgccgtaaaaga

SEQ ID NO: 796243 - DNA, 19 bp, Mus musculus
  siRNA target sequence for Adamts20 (NM_177431.3,2098-2116).
cgggattgccgtaaaagat

SEQ ID NO: 796244 - DNA, 19 bp, Mus musculus
  siRNA target sequence for Adamts20 (NM_177431.3,2192-2210).
ccctgtgggacggaaacta

SEQ ID NO: 796245 - DNA, 19 bp, Mus musculus
  siRNA target sequence for Adamts20 (NM_177431.3,2193-2211).
cctgtgggacggaaactaa

SEQ ID NO: 796246 - DNA, 19 bp, Mus musculus
  siRNA target sequence for Adamts20 (NM_177431.3,2246-2264).
ggctgtgatcacgtgttaa

SEQ ID NO: 796247 - DNA, 19 bp, Mus musculus
  siRNA target sequence for Adamts20 (NM_177431.3,2346-2364).
gtgcccattacggttacaa

SEQ ID NO: 796248 - DNA, 19 bp, Mus musculus
  siRNA target sequence for Adamts20 (NM_177431.3,2349-2367).
cccattacggttacaatgt

SEQ ID NO: 796249 - DNA, 19 bp, Mus musculus
  siRNA target sequence for Adamts20 (NM_177431.3,2357-2375).
ggttacaatgtggttgtaa

SEQ ID NO: 796250 - DNA, 19 bp, Mus musculus
  siRNA target sequence for Adamts20 (NM_177431.3,2358-2376).
gttacaatgtggttgtaaa

SEQ ID NO: 796251 - DNA, 19 bp, Mus musculus
  siRNA target sequence for Adamts20 (NM_177431.3,2388-2406).
gggctacaaacattgaaat

SEQ ID NO: 796252 - DNA, 19 bp, Mus musculus
  siRNA target sequence for Adamts20 (NM_177431.3,2391-2409).
ctacaaacattgaaatcct

SEQ ID NO: 796253 - DNA, 19 bp, Mus musculus
  siRNA target sequence for Adamts20 (NM_177431.3,2441-2459).
gacaactatctcgcattat

SEQ ID NO: 796254 - DNA, 19 bp, Mus musculus
  siRNA target sequence for Adamts20 (NM_177431.3,2443-2461).
caactatctcgcattatct

SEQ ID NO: 796255 - DNA, 19 bp, Mus musculus
  siRNA target sequence for Adamts20 (NM_177431.3,2505-2523).
gtatggcgaagaaagagat

SEQ ID NO: 796256 - DNA, 19 bp, Mus musculus
  siRNA target sequence for Adamts20 (NM_177431.3,2531-2549).
cagggtgctgttttcgaat

SEQ ID NO: 796257 - DNA, 19 bp, Mus musculus
  siRNA target sequence for Adamts20 (NM_177431.3,2534-2552).
ggtgctgttttcgaataca

SEQ ID NO: 796258 - DNA, 19 bp, Mus musculus
  siRNA target sequence for Adamts20 (NM_177431.3,2546-2564).
gaatacagcgggtcaaaca

SEQ ID NO: 796259 - DNA, 19 bp, Mus musculus
  siRNA target sequence for Adamts20 (NM_177431.3,2557-2575).
gtcaaacaactcgattgaa

SEQ ID NO: 796260 - DNA, 19 bp, Mus musculus
  siRNA target sequence for Adamts20 (NM_177431.3,2563-2581).
caactcgattgaaagaatt

SEQ ID NO: 796261 - DNA, 19 bp, Mus musculus
  siRNA target sequence for Adamts20 (NM_177431.3,2623-2641).
gttgtgtgtgggtaattta

SEQ ID NO: 796262 - DNA, 19 bp, Mus musculus
  siRNA target sequence for Adamts20 (NM_177431.3,2628-2646).
gtgtgggtaatttatacaa

SEQ ID NO: 796263 - DNA, 19 bp, Mus musculus
  siRNA target sequence for Adamts20 (NM_177431.3,2648-2666).
cctgacgtgcgctattcct

SEQ ID NO: 796264 - DNA, 19 bp, Mus musculus
  siRNA target sequence for Adamts20 (NM_177431.3,2649-2667).
ctgacgtgcgctattcctt

SEQ ID NO: 796265 - DNA, 19 bp, Mus musculus
  siRNA target sequence for Adamts20 (NM_177431.3,2654-2672).
gtgcgctattccttcaaca

SEQ ID NO: 796266 - DNA, 19 bp, Mus musculus
  siRNA target sequence for Adamts20 (NM_177431.3,2785-2803).
gagcgaccatgcagttgta

SEQ ID NO: 796267 - DNA, 19 bp, Mus musculus
  siRNA target sequence for Adamts20 (NM_177431.3,2788-2806).
cgaccatgcagttgtatct

SEQ ID NO: 796268 - DNA, 19 bp, Mus musculus
  siRNA target sequence for Adamts20 (NM_177431.3,2798-2816).
gttgtatctgaccacaatt

SEQ ID NO: 796269 - DNA, 19 bp, Mus musculus
  siRNA target sequence for Adamts20 (NM_177431.3,2824-2842).
cttaccgatgccactgttt

SEQ ID NO: 796270 - DNA, 19 bp, Mus musculus
  siRNA target sequence for Adamts20 (NM_177431.3,2843-2861).
gtgactgaaaagtgcaata

SEQ ID NO: 796271 - DNA, 19 bp, Mus musculus
  siRNA target sequence for Adamts20 (NM_177431.3,2953-2971).
gaagtactcggttcataaa

SEQ ID NO: 796272 - DNA, 19 bp, Mus musculus
  siRNA target sequence for Adamts20 (NM_177431.3,3124-3142).
ggaatcctactgcgtaaat

SEQ ID NO: 796273 - DNA, 19 bp, Mus musculus
  siRNA target sequence for Adamts20 (NM_177431.3,3319-3337).
catgagggatggtttctgt

SEQ ID NO: 796274 - DNA, 19 bp, Mus musculus
  siRNA target sequence for Adamts20 (NM_177431.3,3322-3340).
gagggatggtttctgtaat

SEQ ID NO: 796275 - DNA, 19 bp, Mus musculus
  siRNA target sequence for Adamts20 (NM_177431.3,3432-3450).
gtggacatggatatcagat

SEQ ID NO: 796276 - DNA, 19 bp, Mus musculus
  siRNA target sequence for Adamts20 (NM_177431.3,3452-3470).
cgtgctgttaagtgtatca

SEQ ID NO: 796277 - DNA, 19 bp, Mus musculus
  siRNA target sequence for Adamts20 (NM_177431.3,3691-3709).
ctgccgggatgctcatgat

SEQ ID NO: 796278 - DNA, 19 bp, Mus musculus
  siRNA target sequence for Adamts20 (NM_177431.3,3875-3893).
ctggtcgatgagagttact

SEQ ID NO: 796279 - DNA, 19 bp, Mus musculus
  siRNA target sequence for Adamts20 (NM_177431.3,3877-3895).
ggtcgatgagagttactgt

SEQ ID NO: 796280 - DNA, 19 bp, Mus musculus
  siRNA target sequence for Adamts20 (NM_177431.3,3907-3925).
ccgtcctgtgactgaacaa

SEQ ID NO: 796281 - DNA, 19 bp, Mus musculus
  siRNA target sequence for Adamts20 (NM_177431.3,3941-3959).
gcctgcccacccttataca

SEQ ID NO: 796282 - DNA, 19 bp, Mus musculus
  siRNA target sequence for Adamts20 (NM_177431.3,3991-4009).
ccacgttcccagcagaaat

SEQ ID NO: 796283 - DNA, 19 bp, Mus musculus
  siRNA target sequence for Adamts20 (NM_177431.3,3999-4017).
ccagcagaaatgttccatt

SEQ ID NO: 796284 - DNA, 19 bp, Mus musculus
  siRNA target sequence for Adamts20 (NM_177431.3,4000-4018).
cagcagaaatgttccatta

SEQ ID NO: 796285 - DNA, 19 bp, Mus musculus
  siRNA target sequence for Adamts20 (NM_177431.3,4024-4042).
caaaccaggagagaatcaa

SEQ ID NO: 796286 - DNA, 19 bp, Mus musculus
  siRNA target sequence for Adamts20 (NM_177431.3,4229-4247).
ccttgtccgcactggaatt

SEQ ID NO: 796287 - DNA, 19 bp, Mus musculus
  siRNA target sequence for Adamts20 (NM_177431.3,4283-4301).
ggaggggtaaaatcaagat

SEQ ID NO: 796288 - DNA, 19 bp, Mus musculus
  siRNA target sequence for Adamts20 (NM_177431.3,4287-4305).
gggtaaaatcaagatttgt

SEQ ID NO: 796289 - DNA, 19 bp, Mus musculus
  siRNA target sequence for Adamts20 (NM_177431.3,4390-4408).
gcacgcctgccctgaagat

SEQ ID NO: 796290 - DNA, 19 bp, Mus musculus
  siRNA target sequence for Adamts20 (NM_177431.3,4468-4486).
gtaccgggaggttctttgt

SEQ ID NO: 796291 - DNA, 19 bp, Mus musculus
  siRNA target sequence for Adamts20 (NM_177431.3,4471-4489).
ccgggaggttctttgtatt

SEQ ID NO: 796292 - DNA, 19 bp, Mus musculus
  siRNA target sequence for Adamts20 (NM_177431.3,4473-4491).
gggaggttctttgtattga

SEQ ID NO: 796293 - DNA, 19 bp, Mus musculus
  siRNA target sequence for Adamts20 (NM_177431.3,4474-4492).
ggaggttctttgtattgat

SEQ ID NO: 796294 - DNA, 19 bp, Mus musculus
  siRNA target sequence for Adamts20 (NM_177431.3,4477-4495).
ggttctttgtattgatcaa

SEQ ID NO: 796295 - DNA, 19 bp, Mus musculus
  siRNA target sequence for Adamts20 (NM_177431.3,4478-4496).
gttctttgtattgatcaat

SEQ ID NO: 796296 - DNA, 19 bp, Mus musculus
  siRNA target sequence for Adamts20 (NM_177431.3,4584-4602).
ggaaggccaataaatggaa

SEQ ID NO: 796297 - DNA, 19 bp, Mus musculus
  siRNA target sequence for Adamts20 (NM_177431.3,4782-4800).
gttcaacatcgtgtaagaa

SEQ ID NO: 796298 - DNA, 19 bp, Mus musculus
  siRNA target sequence for Adamts20 (NM_177431.3,4827-4845).
gtgtgaatgagcaaaacgt

SEQ ID NO: 796299 - DNA, 19 bp, Mus musculus
  siRNA target sequence for Adamts20 (NM_177431.3,4862-4880).
ctctgtgaccctttaacga

SEQ ID NO: 796300 - DNA, 19 bp, Mus musculus
  siRNA target sequence for Adamts20 (NM_177431.3,4972-4990).
cacttccccacagaagatt

SEQ ID NO: 796301 - DNA, 19 bp, Mus musculus
  siRNA target sequence for Adamts20 (NM_177431.3,4977-4995).
ccccacagaagattacata

SEQ ID NO: 796302 - DNA, 19 bp, Mus musculus
  siRNA target sequence for Adamts20 (NM_177431.3,4979-4997).
ccacagaagattacatact

SEQ ID NO: 796303 - DNA, 19 bp, Mus musculus
  siRNA target sequence for Adamts20 (NM_177431.3,5013-5031).
cctctaagaagcatacgtt

SEQ ID NO: 796304 - DNA, 19 bp, Mus musculus
  siRNA target sequence for Adamts20 (NM_177431.3,5116-5134).
gcatgtagccacttggaaa

SEQ ID NO: 796305 - DNA, 19 bp, Mus musculus
  siRNA target sequence for Adamts20 (NM_177431.3,5155-5173).
ctcagtaacttgtggaatt

SEQ ID NO: 796306 - DNA, 19 bp, Mus musculus
  siRNA target sequence for Adamts20 (NM_177431.3,5163-5181).
cttgtggaattgggataat

SEQ ID NO: 796307 - DNA, 19 bp, Mus musculus
  siRNA target sequence for Adamts20 (NM_177431.3,5176-5194).
gataatggagagaagagta

SEQ ID NO: 796308 - DNA, 19 bp, Mus musculus
  siRNA target sequence for Adamts20 (NM_177431.3,5212-5230).
cggttggcccagtgactta

SEQ ID NO: 796309 - DNA, 19 bp, Mus musculus
  siRNA target sequence for Adamts20 (NM_177431.3,5213-5231).
ggttggcccagtgacttat

SEQ ID NO: 796310 - DNA, 19 bp, Mus musculus
  siRNA target sequence for Adamts20 (NM_177431.3,5268-5286).
gttatgccaatgactgtaa

SEQ ID NO: 796311 - DNA, 19 bp, Mus musculus
  siRNA target sequence for Adamts20 (NM_177431.3,5302-5320).
caaggaactccaagttaca

SEQ ID NO: 796312 - DNA, 19 bp, Mus musculus
  siRNA target sequence for Adamts20 (NM_177431.3,5357-5375).
gtcaggggaagaatattga

SEQ ID NO: 796313 - DNA, 19 bp, Mus musculus
  siRNA target sequence for Adamts20 (NM_177431.3,5401-5419).
ggagaaccctagagaatat

SEQ ID NO: 796314 - DNA, 19 bp, Mus musculus
  siRNA target sequence for Adamts20 (NM_177431.3,5402-5420).
gagaaccctagagaatatt

SEQ ID NO: 796315 - DNA, 19 bp, Mus musculus
  siRNA target sequence for Adamts20 (NM_177431.3,5404-5422).
gaaccctagagaatattta

SEQ ID NO: 796316 - DNA, 19 bp, Mus musculus
  siRNA target sequence for Adamts20 (NM_177431.3,5514-5532).
cagactgtgcgtgtgaaaa

SEQ ID NO: 796317 - DNA, 19 bp, Mus musculus
  siRNA target sequence for Adamts20 (NM_177431.3,5543-5561).
cctgccgggtacactgttt

SEQ ID NO: 796318 - DNA, 19 bp, Mus musculus
  siRNA target sequence for Adamts20 (NM_177431.3,5544-5562).
ctgccgggtacactgtttt

SEQ ID NO: 796319 - DNA, 19 bp, Mus musculus
  siRNA target sequence for Adamts20 (NM_177431.3,5546-5564).
gccgggtacactgttttta

SEQ ID NO: 796320 - DNA, 19 bp, Mus musculus
  siRNA target sequence for Adamts20 (NM_177431.3,5574-5592).
gagtggatctcgaatccat

SEQ ID NO: 796321 - DNA, 19 bp, Mus musculus
  siRNA target sequence for Adamts20 (NM_177431.3,5579-5597).
gatctcgaatccatgcaaa

SEQ ID NO: 796322 - DNA, 19 bp, Mus musculus
  siRNA target sequence for Adamts20 (NM_177431.3,5582-5600).
ctcgaatccatgcaaatca

SEQ ID NO: 796323 - DNA, 19 bp, Mus musculus
  siRNA target sequence for Adamts20 (NM_177431.3,5599-5617).
caaaactgcagatcttctt

SEQ ID NO: 796324 - DNA, 19 bp, Mus musculus
  siRNA target sequence for Adamts20 (NM_177431.3,5720-5738).
ggaactgggatgaagatat

SEQ ID NO: 796325 - DNA, 19 bp, Mus musculus
  siRNA target sequence for Adamts20 (NM_177431.3,5769-5787).
ggtatgcctctgtcatcat

SEQ ID NO: 796326 - DNA, 19 bp, Mus musculus
  siRNA target sequence for Adamts20 (NM_177431.3,5794-5812).
gtcccaagacggaaccaaa

SEQ ID NO: 796327 - DNA, 19 bp, Mus musculus
  siRNA target sequence for Adamts20 (NM_177431.3,5860-5878).
ggctacggggctctcaatt

SEQ ID NO: 796328 - DNA, 19 bp, Mus musculus
  siRNA target sequence for Adamts20 (NM_177431.3,5862-5880).
ctacggggctctcaattca

SEQ ID NO: 796329 - DNA, 19 bp, Mus musculus
  siRNA target sequence for Adamts20 (NM_177431.3,5865-5883).
cggggctctcaattcaagt

SEQ ID NO: 796330 - DNA, 19 bp, Mus musculus
  siRNA target sequence for Adamts20 (NM_177431.3,5866-5884).
ggggctctcaattcaagta

SEQ ID NO: 796331 - DNA, 19 bp, Mus musculus
  siRNA target sequence for Adamts20 (NM_177431.3,5868-5886).
ggctctcaattcaagtact

SEQ ID NO: 796332 - DNA, 19 bp, Mus musculus
  siRNA target sequence for C2b (NM_177446.2,98-116).
ggatatgctggtgttatct

SEQ ID NO: 796333 - DNA, 19 bp, Mus musculus
  siRNA target sequence for C2b (NM_177446.2,172-190).
ggaaacagtggcctatgaa

SEQ ID NO: 796334 - DNA, 19 bp, Mus musculus
  siRNA target sequence for C2b (NM_177446.2,199-217).
ggactgctacaaagaacaa

SEQ ID NO: 796335 - DNA, 19 bp, Mus musculus
  siRNA target sequence for C2b (NM_177446.2,219-237).
gagttaaatcccaaacact

SEQ ID NO: 796336 - DNA, 19 bp, Mus musculus
  siRNA target sequence for C2b (NM_177446.2,273-291).
cagaatgcctgcagtacta

SEQ ID NO: 796337 - DNA, 19 bp, Mus musculus
  siRNA target sequence for C2b (NM_177446.2,284-302).
cagtactattccgaagaaa

SEQ ID NO: 796338 - DNA, 19 bp, Mus musculus
  siRNA target sequence for C2b (NM_177446.2,294-312).
ccgaagaaacctttacgaa

SEQ ID NO: 796339 - DNA, 19 bp, Mus musculus
  siRNA target sequence for C2b (NM_177446.2,295-313).
cgaagaaacctttacgaaa

SEQ ID NO: 796340 - DNA, 19 bp, Mus musculus
  siRNA target sequence for C2b (NM_177446.2,299-317).
gaaacctttacgaaaatta

SEQ ID NO: 796341 - DNA, 19 bp, Mus musculus
  siRNA target sequence for C2b (NM_177446.2,303-321).
cctttacgaaaattaagga

SEQ ID NO: 796342 - DNA, 19 bp, Mus musculus
  siRNA target sequence for C2b (NM_177446.2,304-322).
ctttacgaaaattaaggat

SEQ ID NO: 796343 - DNA, 19 bp, Mus musculus
  siRNA target sequence for C2b (NM_177446.2,309-327).
cgaaaattaaggatgcatt

SEQ ID NO: 796344 - DNA, 19 bp, Mus musculus
  siRNA target sequence for C2a (NM_177447.1,82-100).
gtcggagcctatgttaaaa

SEQ ID NO: 796345 - DNA, 19 bp, Mus musculus
  siRNA target sequence for C2a (NM_177447.1,84-102).
cggagcctatgttaaaata

SEQ ID NO: 796346 - DNA, 19 bp, Mus musculus
  siRNA target sequence for C2a (NM_177447.1,86-104).
gagcctatgttaaaatact

SEQ ID NO: 796347 - DNA, 19 bp, Mus musculus
  siRNA target sequence for C2a (NM_177447.1,131-149).
cctacctttcgatgtttca

SEQ ID NO: 796348 - DNA, 19 bp, Mus musculus
  siRNA target sequence for C2a (NM_177447.1,132-150).
ctacctttcgatgtttcaa

SEQ ID NO: 796349 - DNA, 19 bp, Mus musculus
  siRNA target sequence for C2a (NM_177447.1,194-212).
gcttcaatgaggaaccatt

SEQ ID NO: 796350 - DNA, 19 bp, Mus musculus
  siRNA target sequence for C2a (NM_177447.1,195-213).
cttcaatgaggaaccatta

SEQ ID NO: 796351 - DNA, 19 bp, Mus musculus
  siRNA target sequence for C2a (NM_177447.1,274-292).
gcatactatcccgaagatt

SEQ ID NO: 796352 - DNA, 19 bp, Mus musculus
  siRNA target sequence for C2a (NM_177447.1,279-297).
ctatcccgaagattctgta

SEQ ID NO: 796353 - DNA, 19 bp, Mus musculus
  siRNA target sequence for C2a (NM_177447.1,283-301).
cccgaagattctgtaaaca

SEQ ID NO: 796354 - DNA, 19 bp, Mus musculus
  siRNA target sequence for C2a (NM_177447.1,284-302).
ccgaagattctgtaaacaa

SEQ ID NO: 796355 - DNA, 19 bp, Mus musculus
  siRNA target sequence for C2a (NM_177447.1,300-318).
caaaatggcggatatgttt

SEQ ID NO: 796356 - DNA, 19 bp, Mus musculus
  siRNA target sequence for A630024J02Rik (NM_177449.2,56-74).
gcctctgtcagatcagaaa

SEQ ID NO: 796357 - DNA, 19 bp, Mus musculus
  siRNA target sequence for A630024J02Rik (NM_177449.2,58-76).
ctctgtcagatcagaaaga

SEQ ID NO: 796358 - DNA, 19 bp, Mus musculus
  siRNA target sequence for A630024J02Rik (NM_177449.2,139-157).
ctcacttggtccattctta

SEQ ID NO: 796359 - DNA, 19 bp, Mus musculus
  siRNA target sequence for A630024J02Rik (NM_177449.2,143-161).
cttggtccattcttactta

SEQ ID NO: 796360 - DNA, 19 bp, Mus musculus
  siRNA target sequence for A630024J02Rik (NM_177449.2,180-198).
catggccctgcttatctat

SEQ ID NO: 796361 - DNA, 19 bp, Mus musculus
  siRNA target sequence for A630024J02Rik (NM_177449.2,204-222).
gtctatccatccttatata

SEQ ID NO: 796362 - DNA, 19 bp, Mus musculus
  siRNA target sequence for A630024J02Rik (NM_177449.2,210-228).
ccatccttatatacttaca

SEQ ID NO: 796363 - DNA, 19 bp, Mus musculus
  siRNA target sequence for A630024J02Rik (NM_177449.2,214-232).
ccttatatacttacacatt

SEQ ID NO: 796364 - DNA, 19 bp, Mus musculus
  siRNA target sequence for A630024J02Rik (NM_177449.2,263-281).
gagtgcacaggtgaataga

SEQ ID NO: 796365 - DNA, 19 bp, Mus musculus
  siRNA target sequence for A630024J02Rik (NM_177449.2,267-285).
gcacaggtgaatagaacat

SEQ ID NO: 796366 - DNA, 19 bp, Mus musculus
  siRNA target sequence for A630024J02Rik (NM_177449.2,270-288).
caggtgaatagaacatcat

SEQ ID NO: 796367 - DNA, 19 bp, Mus musculus
  siRNA target sequence for LOC214424 (NM_177460.3,440-458).
ggcaggttacccaacttga

SEQ ID NO: 796368 - DNA, 19 bp, Mus musculus
  siRNA target sequence for LOC214424 (NM_177460.3,441-459).
gcaggttacccaacttgaa

SEQ ID NO: 796369 - DNA, 19 bp, Mus musculus
  siRNA target sequence for LOC214424 (NM_177460.3,525-543).
cctccaagatcctgacaat

SEQ ID NO: 796370 - DNA, 19 bp, Mus musculus
  siRNA target sequence for LOC214424 (NM_177460.3,610-628).
ccccaccccggatttccta

SEQ ID NO: 796371 - DNA, 19 bp, Mus musculus
  siRNA target sequence for LOC214424 (NM_177460.3,611-629).
cccaccccggatttcctat

SEQ ID NO: 796372 - DNA, 19 bp, Mus musculus
  siRNA target sequence for LOC214424 (NM_177460.3,612-630).
ccaccccggatttcctatt

SEQ ID NO: 796373 - DNA, 19 bp, Mus musculus
  siRNA target sequence for LOC214424 (NM_177460.3,613-631).
caccccggatttcctattt

SEQ ID NO: 796374 - DNA, 19 bp, Mus musculus
  siRNA target sequence for LOC214424 (NM_177460.3,615-633).
ccccggatttcctatttga

SEQ ID NO: 796375 - DNA, 19 bp, Mus musculus
  siRNA target sequence for LOC214424 (NM_177460.3,616-634).
cccggatttcctatttgaa

SEQ ID NO: 796376 - DNA, 19 bp, Mus musculus
  siRNA target sequence for LOC214424 (NM_177460.3,617-635).
ccggatttcctatttgaaa

SEQ ID NO: 796377 - DNA, 19 bp, Mus musculus
  siRNA target sequence for LOC214424 (NM_177460.3,618-636).
cggatttcctatttgaaat

SEQ ID NO: 796378 - DNA, 19 bp, Mus musculus
  siRNA target sequence for LOC214424 (NM_177460.3,619-637).
ggatttcctatttgaaatt

SEQ ID NO: 796379 - DNA, 19 bp, Mus musculus
  siRNA target sequence for LOC214424 (NM_177460.3,652-670).
ggccaactccagattttat

SEQ ID NO: 796380 - DNA, 19 bp, Mus musculus
  siRNA target sequence for LOC214424 (NM_177460.3,654-672).
ccaactccagattttatga

SEQ ID NO: 796381 - DNA, 19 bp, Mus musculus
  siRNA target sequence for LOC214424 (NM_177460.3,681-699).
gagaacgagacctaatcta

SEQ ID NO: 796382 - DNA, 19 bp, Mus musculus
  siRNA target sequence for LOC214424 (NM_177460.3,711-729).
gtagccgcctagagaactt

SEQ ID NO: 796383 - DNA, 19 bp, Mus musculus
  siRNA target sequence for LOC214424 (NM_177460.3,755-773).
cactgccacctgaacaaga

SEQ ID NO: 796384 - DNA, 19 bp, Mus musculus
  siRNA target sequence for LOC214424 (NM_177460.3,814-832).
gagcctggccctcatttat

SEQ ID NO: 796385 - DNA, 19 bp, Mus musculus
  siRNA target sequence for LOC214424 (NM_177460.3,842-860).
ggccacgggtggcaacata

SEQ ID NO: 796386 - DNA, 19 bp, Mus musculus
  siRNA target sequence for LOC214424 (NM_177460.3,917-935).
gatgtcaagtgccaaatca

SEQ ID NO: 796387 - DNA, 19 bp, Mus musculus
  siRNA target sequence for LOC214424 (NM_177460.3,962-980).
cgcagccgagcaagaatca

SEQ ID NO: 796388 - DNA, 19 bp, Mus musculus
  siRNA target sequence for LOC214424 (NM_177460.3,963-981).
gcagccgagcaagaatcaa

SEQ ID NO: 796389 - DNA, 19 bp, Mus musculus
  siRNA target sequence for LOC214424 (NM_177460.3,996-1014).
gagagatcccccctaagta

SEQ ID NO: 796390 - DNA, 19 bp, Mus musculus
  siRNA target sequence for LOC214424 (NM_177460.3,998-1016).
gagatcccccctaagtact

SEQ ID NO: 796391 - DNA, 19 bp, Mus musculus
  siRNA target sequence for LOC214424 (NM_177460.3,1000-1018).
gatcccccctaagtacttt

SEQ ID NO: 796392 - DNA, 19 bp, Mus musculus
  siRNA target sequence for LOC214424 (NM_177460.3,1003-1021).
cccccctaagtactttgta

SEQ ID NO: 796393 - DNA, 19 bp, Mus musculus
  siRNA target sequence for LOC214424 (NM_177460.3,1118-1136).
cactggttcgtgatcatga

SEQ ID NO: 796394 - DNA, 19 bp, Mus musculus
  siRNA target sequence for 9330177P20Rik (NM_177462.2,284-302).
ggatggtggatgtgacaaa

SEQ ID NO: 796395 - DNA, 19 bp, Mus musculus
  siRNA target sequence for 9330177P20Rik (NM_177462.2,320-338).
gcttctggacagaattaaa

SEQ ID NO: 796396 - DNA, 19 bp, Mus musculus
  siRNA target sequence for 9330177P20Rik (NM_177462.2,345-363).
cctgatgatgctcatgaat

SEQ ID NO: 796397 - DNA, 19 bp, Mus musculus
  siRNA target sequence for 9330177P20Rik (NM_177462.2,346-364).
ctgatgatgctcatgaata

SEQ ID NO: 796398 - DNA, 19 bp, Mus musculus
  siRNA target sequence for 9330177P20Rik (NM_177462.2,375-393).
gaaagtgaactaaaaatca

SEQ ID NO: 796399 - DNA, 19 bp, Mus musculus
  siRNA target sequence for 9330177P20Rik (NM_177462.2,455-473).
cccgagtacatcatttcct

SEQ ID NO: 796400 - DNA, 19 bp, Mus musculus
  siRNA target sequence for 9330177P20Rik (NM_177462.2,550-568).
ccggatttgcccagcttta

SEQ ID NO: 796401 - DNA, 19 bp, Mus musculus
  siRNA target sequence for 9330177P20Rik (NM_177462.2,552-570).
ggatttgcccagctttact

SEQ ID NO: 796402 - DNA, 19 bp, Mus musculus
  siRNA target sequence for 9330177P20Rik (NM_177462.2,677-695).
gatcacaactcagtttgaa

SEQ ID NO: 796403 - DNA, 19 bp, Mus musculus
  siRNA target sequence for 9330177P20Rik (NM_177462.2,730-748).
catgcctattttcttatga

SEQ ID NO: 796404 - DNA, 19 bp, Mus musculus
  siRNA target sequence for 9330177P20Rik (NM_177462.2,755-773).
gaagcctgttgttaccata

SEQ ID NO: 796405 - DNA, 19 bp, Mus musculus
  siRNA target sequence for 9330177P20Rik (NM_177462.2,758-776).
gcctgttgttaccatatat

SEQ ID NO: 796406 - DNA, 19 bp, Mus musculus
  siRNA target sequence for 9330177P20Rik (NM_177462.2,845-863).
ctatgccttggggaattca

SEQ ID NO: 796407 - DNA, 19 bp, Mus musculus
  siRNA target sequence for 9330177P20Rik (NM_177462.2,918-936).
cttttttgctctattaact

SEQ ID NO: 796408 - DNA, 19 bp, Mus musculus
  siRNA target sequence for 9330177P20Rik (NM_177462.2,937-955).
gcttatctgcgtacagaat

SEQ ID NO: 796409 - DNA, 19 bp, Mus musculus
  siRNA target sequence for 9330177P20Rik (NM_177462.2,938-956).
cttatctgcgtacagaatt

SEQ ID NO: 796410 - DNA, 19 bp, Mus musculus
  siRNA target sequence for 9330177P20Rik (NM_177462.2,950-968).
cagaattaagactgttatt

SEQ ID NO: 796411 - DNA, 19 bp, Mus musculus
  siRNA target sequence for 9330177P20Rik (NM_177462.2,1044-1062).
ggaactatttgcagtttct

SEQ ID NO: 796412 - DNA, 19 bp, Mus musculus
  siRNA target sequence for 9330177P20Rik (NM_177462.2,1126-1144).
cattggcacccatatctca

SEQ ID NO: 796413 - DNA, 19 bp, Mus musculus
  siRNA target sequence for 9330177P20Rik (NM_177462.2,1249-1267).
ccctggagactcttgctaa

SEQ ID NO: 796414 - DNA, 19 bp, Mus musculus
  siRNA target sequence for 9330177P20Rik (NM_177462.2,1250-1268).
cctggagactcttgctaaa

SEQ ID NO: 796415 - DNA, 19 bp, Mus musculus
  siRNA target sequence for 9330177P20Rik (NM_177462.2,1280-1298).
gattgctttgacccattta

SEQ ID NO: 796416 - DNA, 19 bp, Mus musculus
  siRNA target sequence for 9330177P20Rik (NM_177462.2,1285-1303).
ctttgacccatttattctt

SEQ ID NO: 796417 - DNA, 19 bp, Mus musculus
  siRNA target sequence for 9330177P20Rik (NM_177462.2,1289-1307).
gacccatttattcttgaaa

SEQ ID NO: 796418 - DNA, 19 bp, Mus musculus
  siRNA target sequence for 9330177P20Rik (NM_177462.2,1367-1385).
gggtaggatgtttatgttt

SEQ ID NO: 796419 - DNA, 19 bp, Mus musculus
  siRNA target sequence for 9330177P20Rik (NM_177462.2,1395-1413).
gcttgctgtgatgaataca

SEQ ID NO: 796420 - DNA, 19 bp, Mus musculus
  siRNA target sequence for 9330177P20Rik (NM_177462.2,1434-1452).
gccttgtgcgactactgta

SEQ ID NO: 796421 - DNA, 19 bp, Mus musculus
  siRNA target sequence for 9330177P20Rik (NM_177462.2,1435-1453).
ccttgtgcgactactgtaa

SEQ ID NO: 796422 - DNA, 19 bp, Mus musculus
  siRNA target sequence for 9330177P20Rik (NM_177462.2,1439-1457).
gtgcgactactgtaagcta

SEQ ID NO: 796423 - DNA, 19 bp, Mus musculus
  siRNA target sequence for 9330177P20Rik (NM_177462.2,1502-1520).
gccgttctgtagtgaagtt

SEQ ID NO: 796424 - DNA, 19 bp, Mus musculus
  siRNA target sequence for 9330177P20Rik (NM_177462.2,1503-1521).
ccgttctgtagtgaagttt

SEQ ID NO: 796425 - DNA, 19 bp, Mus musculus
  siRNA target sequence for 9330177P20Rik (NM_177462.2,1529-1547).
cctctcggctcgagacttt

SEQ ID NO: 796426 - DNA, 19 bp, Mus musculus
  siRNA target sequence for 9330177P20Rik (NM_177462.2,1555-1573).
gatggggaagctactgtaa

SEQ ID NO: 796427 - DNA, 19 bp, Mus musculus
  siRNA target sequence for 9330177P20Rik (NM_177462.2,1574-1592).
gacgtgcagttactgttta

SEQ ID NO: 796428 - DNA, 19 bp, Mus musculus
  siRNA target sequence for 9330177P20Rik (NM_177462.2,1629-1647).
ggcaagctccaggtttttt

SEQ ID NO: 796429 - DNA, 19 bp, Mus musculus
  siRNA target sequence for 9330177P20Rik (NM_177462.2,1717-1735).
ggcagggtaagctaagtga

SEQ ID NO: 796430 - DNA, 19 bp, Mus musculus
  siRNA target sequence for 9330177P20Rik (NM_177462.2,1793-1811).
gttttgccatcagtatagt

SEQ ID NO: 796431 - DNA, 19 bp, Mus musculus
  siRNA target sequence for 9330177P20Rik (NM_177462.2,1799-1817).
ccatcagtatagtgtgaat

SEQ ID NO: 796432 - DNA, 19 bp, Mus musculus
  siRNA target sequence for 9330177P20Rik (NM_177462.2,1818-1836).
gacccaattccacaaagaa

SEQ ID NO: 796433 - DNA, 19 bp, Mus musculus
  siRNA target sequence for 9330177P20Rik (NM_177462.2,1920-1938).
gctacaacaccagttataa

SEQ ID NO: 796434 - DNA, 19 bp, Mus musculus
  siRNA target sequence for 9330177P20Rik (NM_177462.2,1981-1999).
ccaggaacacgaacaatgt

SEQ ID NO: 796435 - DNA, 19 bp, Mus musculus
  siRNA target sequence for 9330177P20Rik (NM_177462.2,1988-2006).
cacgaacaatgttttaaca

SEQ ID NO: 796436 - DNA, 19 bp, Mus musculus
  siRNA target sequence for 9330177P20Rik (NM_177462.2,2013-2031).
ggtcctacagaggtaacaa

SEQ ID NO: 796437 - DNA, 19 bp, Mus musculus
  siRNA target sequence for 9330177P20Rik (NM_177462.2,2025-2043).
gtaacaaagatcattggaa

SEQ ID NO: 796438 - DNA, 19 bp, Mus musculus
  siRNA target sequence for 9330177P20Rik (NM_177462.2,2176-2194).
ctgcatgccagacagattt

SEQ ID NO: 796439 - DNA, 19 bp, Mus musculus
  siRNA target sequence for 9330177P20Rik (NM_177462.2,2226-2244).
gagtctccaccggcaaaaa

SEQ ID NO: 796440 - DNA, 19 bp, Mus musculus
  siRNA target sequence for 9330177P20Rik (NM_177462.2,2269-2287).
cttacaatgcagagtatat

SEQ ID NO: 796441 - DNA, 19 bp, Mus musculus
  siRNA target sequence for 9330177P20Rik (NM_177462.2,2358-2376).
gaggtcttacctagtgaaa

SEQ ID NO: 796442 - DNA, 19 bp, Mus musculus
  siRNA target sequence for 9330177P20Rik (NM_177462.2,2377-2395).
gtgtgatgccagtaagtct

SEQ ID NO: 796443 - DNA, 19 bp, Mus musculus
  siRNA target sequence for 9330177P20Rik (NM_177462.2,2379-2397).
gtgatgccagtaagtcttt

SEQ ID NO: 796444 - DNA, 19 bp, Mus musculus
  siRNA target sequence for 9330177P20Rik (NM_177462.2,2402-2420).
ccatttgaaggcaaaacat

SEQ ID NO: 796445 - DNA, 19 bp, Mus musculus
  siRNA target sequence for 9330177P20Rik (NM_177462.2,2413-2431).
caaaacattcagacttaga

SEQ ID NO: 796446 - DNA, 19 bp, Mus musculus
  siRNA target sequence for 9330177P20Rik (NM_177462.2,2464-2482).
cacttgaaatggaatgtca

SEQ ID NO: 796447 - DNA, 19 bp, Mus musculus
  siRNA target sequence for 9330177P20Rik (NM_177462.2,2466-2484).
cttgaaatggaatgtcaaa

SEQ ID NO: 796448 - DNA, 19 bp, Mus musculus
  siRNA target sequence for 9330177P20Rik (NM_177462.2,2475-2493).
gaatgtcaaaatagttctt

SEQ ID NO: 796449 - DNA, 19 bp, Mus musculus
  siRNA target sequence for 9330177P20Rik (NM_177462.2,2521-2539).
cacttgtgaaagcttctta

SEQ ID NO: 796450 - DNA, 19 bp, Mus musculus
  siRNA target sequence for 9330177P20Rik (NM_177462.2,2553-2571).
caaattgccgccaggaata

SEQ ID NO: 796451 - DNA, 19 bp, Mus musculus
  siRNA target sequence for 9330177P20Rik (NM_177462.2,2579-2597).
ctcgattgctgaagaatta

SEQ ID NO: 796452 - DNA, 19 bp, Mus musculus
  siRNA target sequence for 9330177P20Rik (NM_177462.2,2581-2599).
cgattgctgaagaattaat

SEQ ID NO: 796453 - DNA, 19 bp, Mus musculus
  siRNA target sequence for 9330177P20Rik (NM_177462.2,2604-2622).
ccatatttagtagaaatgt

SEQ ID NO: 796454 - DNA, 19 bp, Mus musculus
  siRNA target sequence for 9330177P20Rik (NM_177462.2,2621-2639).
gtgttcagaagttttaggt

SEQ ID NO: 796455 - DNA, 19 bp, Mus musculus
  siRNA target sequence for 9330177P20Rik (NM_177462.2,2713-2731).
ctgatgacatcgaagatca

SEQ ID NO: 796456 - DNA, 19 bp, Mus musculus
  siRNA target sequence for 9330177P20Rik (NM_177462.2,2890-2908).
ctccgagcacagatcttga

SEQ ID NO: 796457 - DNA, 19 bp, Mus musculus
  siRNA target sequence for 9330177P20Rik (NM_177462.2,2893-2911).
cgagcacagatcttgaagt

SEQ ID NO: 796458 - DNA, 19 bp, Mus musculus
  siRNA target sequence for 9330177P20Rik (NM_177462.2,2901-2919).
gatcttgaagtgtttgaat

SEQ ID NO: 796459 - DNA, 19 bp, Mus musculus
  siRNA target sequence for 9330177P20Rik (NM_177462.2,2956-2974).
ggaaccattgtgttggttt

SEQ ID NO: 796460 - DNA, 19 bp, Mus musculus
  siRNA target sequence for 9330177P20Rik (NM_177462.2,2995-3013).
gcatgactgacaggtattt

SEQ ID NO: 796461 - DNA, 19 bp, Mus musculus
  siRNA target sequence for 9330177P20Rik (NM_177462.2,2999-3017).
gactgacaggtattttcgt

SEQ ID NO: 796462 - DNA, 19 bp, Mus musculus
  siRNA target sequence for 9330177P20Rik (NM_177462.2,3001-3019).
ctgacaggtattttcgttt

SEQ ID NO: 796463 - DNA, 19 bp, Mus musculus
  siRNA target sequence for 9330177P20Rik (NM_177462.2,3003-3021).
gacaggtattttcgtttaa

SEQ ID NO: 796464 - DNA, 19 bp, Mus musculus
  siRNA target sequence for 9330177P20Rik (NM_177462.2,3058-3076).
catttacacattgtttcat

SEQ ID NO: 796465 - DNA, 19 bp, Mus musculus
  siRNA target sequence for 9330177P20Rik (NM_177462.2,3074-3092).
cattcaccgtgaacactta

SEQ ID NO: 796466 - DNA, 19 bp, Mus musculus
  siRNA target sequence for 9330177P20Rik (NM_177462.2,3135-3153).
cagtcatcacaaattttaa

SEQ ID NO: 796467 - DNA, 19 bp, Mus musculus
  siRNA target sequence for 9330177P20Rik (NM_177462.2,3139-3157).
catcacaaattttaagctt

SEQ ID NO: 796468 - DNA, 19 bp, Mus musculus
  siRNA target sequence for 9330177P20Rik (NM_177462.2,3164-3182).
gaacagtgcttcagattca

SEQ ID NO: 796469 - DNA, 19 bp, Mus musculus
  siRNA target sequence for 9330177P20Rik (NM_177462.2,3177-3195).
gattcacaaatgttgacaa

SEQ ID NO: 796470 - DNA, 19 bp, Mus musculus
  siRNA target sequence for 9330177P20Rik (NM_177462.2,3181-3199).
cacaaatgttgacaatttt

SEQ ID NO: 796471 - DNA, 19 bp, Mus musculus
  siRNA target sequence for 9330177P20Rik (NM_177462.2,3212-3230).
gggatctgagcatgtgaat

SEQ ID NO: 796472 - DNA, 19 bp, Mus musculus
  siRNA target sequence for 9330177P20Rik (NM_177462.2,3213-3231).
ggatctgagcatgtgaatt

SEQ ID NO: 796473 - DNA, 19 bp, Mus musculus
  siRNA target sequence for 9330177P20Rik (NM_177462.2,3214-3232).
gatctgagcatgtgaattt

SEQ ID NO: 796474 - DNA, 19 bp, Mus musculus
  siRNA target sequence for 9330177P20Rik (NM_177462.2,3227-3245).
gaatttaccacttaatgct

SEQ ID NO: 796475 - DNA, 19 bp, Mus musculus
  siRNA target sequence for 9330177P20Rik (NM_177462.2,3257-3275).
gctgtcgagagggagaatt

SEQ ID NO: 796476 - DNA, 19 bp, Mus musculus
  siRNA target sequence for 9330177P20Rik (NM_177462.2,3258-3276).
ctgtcgagagggagaattt

SEQ ID NO: 796477 - DNA, 19 bp, Mus musculus
  siRNA target sequence for 9330177P20Rik (NM_177462.2,3260-3278).
gtcgagagggagaatttta

SEQ ID NO: 796478 - DNA, 19 bp, Mus musculus
  siRNA target sequence for 9330177P20Rik (NM_177462.2,3381-3399).
gcctatctagcagatatat

SEQ ID NO: 796479 - DNA, 19 bp, Mus musculus
  siRNA target sequence for 9330177P20Rik (NM_177462.2,3382-3400).
cctatctagcagatatatt

SEQ ID NO: 796480 - DNA, 19 bp, Mus musculus
  siRNA target sequence for 9330177P20Rik (NM_177462.2,3429-3447).
ctccaaggaaccatgacta

SEQ ID NO: 796481 - DNA, 19 bp, Mus musculus
  siRNA target sequence for 9330177P20Rik (NM_177462.2,3471-3489).
gttgacgtatttcagaaaa

SEQ ID NO: 796482 - DNA, 19 bp, Mus musculus
  siRNA target sequence for 9330177P20Rik (NM_177462.2,3509-3527).
gcgtgcacaggagaatgat

SEQ ID NO: 796483 - DNA, 19 bp, Mus musculus
  siRNA target sequence for 9330177P20Rik (NM_177462.2,3510-3528).
cgtgcacaggagaatgatt

SEQ ID NO: 796484 - DNA, 19 bp, Mus musculus
  siRNA target sequence for 9330177P20Rik (NM_177462.2,3554-3572).
gttcttggactcatcagat

SEQ ID NO: 796485 - DNA, 19 bp, Mus musculus
  siRNA target sequence for 9330177P20Rik (NM_177462.2,3560-3578).
ggactcatcagatgtaagt

SEQ ID NO: 796486 - DNA, 19 bp, Mus musculus
  siRNA target sequence for 9330177P20Rik (NM_177462.2,3680-3698).
gtggctcacagatcctttt

SEQ ID NO: 796487 - DNA, 19 bp, Mus musculus
  siRNA target sequence for 9330177P20Rik (NM_177462.2,3699-3717).
gccacttaccacagtaaca

SEQ ID NO: 796488 - DNA, 19 bp, Mus musculus
  siRNA target sequence for 9330177P20Rik (NM_177462.2,3700-3718).
ccacttaccacagtaacaa

SEQ ID NO: 796489 - DNA, 19 bp, Mus musculus
  siRNA target sequence for 9330177P20Rik (NM_177462.2,3701-3719).
cacttaccacagtaacaat

SEQ ID NO: 796490 - DNA, 19 bp, Mus musculus
  siRNA target sequence for 9330177P20Rik (NM_177462.2,3703-3721).
cttaccacagtaacaatct

SEQ ID NO: 796491 - DNA, 19 bp, Mus musculus
  siRNA target sequence for 9330177P20Rik (NM_177462.2,3738-3756).
gagaaactcgccgtgttat

SEQ ID NO: 796492 - DNA, 19 bp, Mus musculus
  siRNA target sequence for 9330177P20Rik (NM_177462.2,3740-3758).
gaaactcgccgtgttatct

SEQ ID NO: 796493 - DNA, 19 bp, Mus musculus
  siRNA target sequence for 9330177P20Rik (NM_177462.2,3757-3775).
ctgccgatacgggatttca

SEQ ID NO: 796494 - DNA, 19 bp, Mus musculus
  siRNA target sequence for 9330177P20Rik (NM_177462.2,3774-3792).
cagtcagttcacaagtcaa

SEQ ID NO: 796495 - DNA, 19 bp, Mus musculus
  siRNA target sequence for 9330177P20Rik (NM_177462.2,3890-3908).
gtgcgatgccaccttttca

SEQ ID NO: 796496 - DNA, 19 bp, Mus musculus
  siRNA target sequence for 9330177P20Rik (NM_177462.2,3946-3964).
gcggtcccaccctaagact

SEQ ID NO: 796497 - DNA, 19 bp, Mus musculus
  siRNA target sequence for 9330177P20Rik (NM_177462.2,3961-3979).
gactggcagtcacatcatt

SEQ ID NO: 796498 - DNA, 19 bp, Mus musculus
  siRNA target sequence for 9330177P20Rik (NM_177462.2,3965-3983).
ggcagtcacatcattagtt

SEQ ID NO: 796499 - DNA, 19 bp, Mus musculus
  siRNA target sequence for D19Ertd386e (NM_177464.2,110-128).
gcctgacatggcactctat

SEQ ID NO: 796500 - DNA, 19 bp, Mus musculus
  siRNA target sequence for D19Ertd386e (NM_177464.2,921-939).
gagggtacagtcaacagta

SEQ ID NO: 796501 - DNA, 19 bp, Mus musculus
  siRNA target sequence for D19Ertd386e (NM_177464.2,953-971).
gggtcaaaaaggtgtagat

SEQ ID NO: 796502 - DNA, 19 bp, Mus musculus
  siRNA target sequence for D19Ertd386e (NM_177464.2,954-972).
ggtcaaaaaggtgtagatt

SEQ ID NO: 796503 - DNA, 19 bp, Mus musculus
  siRNA target sequence for D19Ertd386e (NM_177464.2,981-999).
gagactgtggataacgttt

SEQ ID NO: 796504 - DNA, 19 bp, Mus musculus
  siRNA target sequence for D19Ertd386e (NM_177464.2,985-1003).
ctgtggataacgtttctct

SEQ ID NO: 796505 - DNA, 19 bp, Mus musculus
  siRNA target sequence for D19Ertd386e (NM_177464.2,989-1007).
ggataacgtttctcttaaa

SEQ ID NO: 796506 - DNA, 19 bp, Mus musculus
  siRNA target sequence for D19Ertd386e (NM_177464.2,1010-1028).
ggcggtagtcagcaaatta

SEQ ID NO: 796507 - DNA, 19 bp, Mus musculus
  siRNA target sequence for D19Ertd386e (NM_177464.2,1012-1030).
cggtagtcagcaaattaga

SEQ ID NO: 796508 - DNA, 19 bp, Mus musculus
  siRNA target sequence for D19Ertd386e (NM_177464.2,1022-1040).
caaattagagagcacaaat

SEQ ID NO: 796509 - DNA, 19 bp, Mus musculus
  siRNA target sequence for D19Ertd386e (NM_177464.2,1031-1049).
gagcacaaatggcactatt

SEQ ID NO: 796510 - DNA, 19 bp, Mus musculus
  siRNA target sequence for D19Ertd386e (NM_177464.2,1034-1052).
cacaaatggcactattgat

SEQ ID NO: 796511 - DNA, 19 bp, Mus musculus
  siRNA target sequence for D19Ertd386e (NM_177464.2,1089-1107).
gctgatgagttatgtgtaa

SEQ ID NO: 796512 - DNA, 19 bp, Mus musculus
  siRNA target sequence for D19Ertd386e (NM_177464.2,1090-1108).
ctgatgagttatgtgtaaa

SEQ ID NO: 796513 - DNA, 19 bp, Mus musculus
  siRNA target sequence for D19Ertd386e (NM_177464.2,1092-1110).
gatgagttatgtgtaaagt

SEQ ID NO: 796514 - DNA, 19 bp, Mus musculus
  siRNA target sequence for D19Ertd386e (NM_177464.2,1134-1152).
ctcgtgcatgaaatagaca

SEQ ID NO: 796515 - DNA, 19 bp, Mus musculus
  siRNA target sequence for D19Ertd386e (NM_177464.2,1183-1201).
gtaccagcaaggcttgtat

SEQ ID NO: 796516 - DNA, 19 bp, Mus musculus
  siRNA target sequence for D19Ertd386e (NM_177464.2,1329-1347).
gatgtagctccacttgata

SEQ ID NO: 796517 - DNA, 19 bp, Mus musculus
  siRNA target sequence for D19Ertd386e (NM_177464.2,1386-1404).
ctaagtgcttgctcagata

SEQ ID NO: 796518 - DNA, 19 bp, Mus musculus
  siRNA target sequence for D19Ertd386e (NM_177464.2,1441-1459).
caacaggaaagttgataga

SEQ ID NO: 796519 - DNA, 19 bp, Mus musculus
  siRNA target sequence for D19Ertd386e (NM_177464.2,1447-1465).
gaaagttgatagaaagtgt

SEQ ID NO: 796520 - DNA, 19 bp, Mus musculus
  siRNA target sequence for D19Ertd386e (NM_177464.2,1496-1514).
gaagactgctgatagtaat

SEQ ID NO: 796521 - DNA, 19 bp, Mus musculus
  siRNA target sequence for D19Ertd386e (NM_177464.2,1532-1550).
ctctgaactgagtatgtca

SEQ ID NO: 796522 - DNA, 19 bp, Mus musculus
  siRNA target sequence for D19Ertd386e (NM_177464.2,1619-1637).
ggccttgcacgacctaaaa

SEQ ID NO: 796523 - DNA, 19 bp, Mus musculus
  siRNA target sequence for D19Ertd386e (NM_177464.2,1683-1701).
gtagtgtgtggcatatcat

SEQ ID NO: 796524 - DNA, 19 bp, Mus musculus
  siRNA target sequence for D19Ertd386e (NM_177464.2,1694-1712).
catatcattttctgattca

SEQ ID NO: 796525 - DNA, 19 bp, Mus musculus
  siRNA target sequence for D19Ertd386e (NM_177464.2,1719-1737).
gaaacatctgtagatctaa

SEQ ID NO: 796526 - DNA, 19 bp, Mus musculus
  siRNA target sequence for D19Ertd386e (NM_177464.2,1779-1797).
gaggaaagctgggaatcta

SEQ ID NO: 796527 - DNA, 19 bp, Mus musculus
  siRNA target sequence for D19Ertd386e (NM_177464.2,1786-1804).
gctgggaatctatgtttaa

SEQ ID NO: 796528 - DNA, 19 bp, Mus musculus
  siRNA target sequence for D19Ertd386e (NM_177464.2,1787-1805).
ctgggaatctatgtttaat

SEQ ID NO: 796529 - DNA, 19 bp, Mus musculus
  siRNA target sequence for D19Ertd386e (NM_177464.2,1789-1807).
gggaatctatgtttaatga

SEQ ID NO: 796530 - DNA, 19 bp, Mus musculus
  siRNA target sequence for D19Ertd386e (NM_177464.2,1790-1808).
ggaatctatgtttaatgat

SEQ ID NO: 796531 - DNA, 19 bp, Mus musculus
  siRNA target sequence for D19Ertd386e (NM_177464.2,1828-1846).
cacgtcttctactagagtt

SEQ ID NO: 796532 - DNA, 19 bp, Mus musculus
  siRNA target sequence for D19Ertd386e (NM_177464.2,1874-1892).
catccaggagcctagattt

SEQ ID NO: 796533 - DNA, 19 bp, Mus musculus
  siRNA target sequence for D19Ertd386e (NM_177464.2,1878-1896).
caggagcctagatttgatt

SEQ ID NO: 796534 - DNA, 19 bp, Mus musculus
  siRNA target sequence for D19Ertd386e (NM_177464.2,1884-1902).
cctagatttgattattaca

SEQ ID NO: 796535 - DNA, 19 bp, Mus musculus
  siRNA target sequence for D19Ertd386e (NM_177464.2,1904-1922).
ccatgaacttcctgatatt

SEQ ID NO: 796536 - DNA, 19 bp, Mus musculus
  siRNA target sequence for D19Ertd386e (NM_177464.2,1917-1935).
gatattgacctcagtgaat

SEQ ID NO: 796537 - DNA, 19 bp, Mus musculus
  siRNA target sequence for D19Ertd386e (NM_177464.2,1936-1954).
gtgaattcccacatgtcat

SEQ ID NO: 796538 - DNA, 19 bp, Mus musculus
  siRNA target sequence for D19Ertd386e (NM_177464.2,1992-2010).
gaccttttgcggattttct

SEQ ID NO: 796539 - DNA, 19 bp, Mus musculus
  siRNA target sequence for D19Ertd386e (NM_177464.2,2056-2074).
cacatgccttaggagtttt

SEQ ID NO: 796540 - DNA, 19 bp, Mus musculus
  siRNA target sequence for D19Ertd386e (NM_177464.2,2095-2113).
gcgatgccctgggtactaa

SEQ ID NO: 796541 - DNA, 19 bp, Mus musculus
  siRNA target sequence for D19Ertd386e (NM_177464.2,2096-2114).
cgatgccctgggtactaaa

SEQ ID NO: 796542 - DNA, 19 bp, Mus musculus
  siRNA target sequence for D19Ertd386e (NM_177464.2,2258-2276).
ccttggggttcgaagcaaa

SEQ ID NO: 796543 - DNA, 19 bp, Mus musculus
  siRNA target sequence for D19Ertd386e (NM_177464.2,2262-2280).
ggggttcgaagcaaacaga

SEQ ID NO: 796544 - DNA, 19 bp, Mus musculus
  siRNA target sequence for D19Ertd386e (NM_177464.2,2347-2365).
ccaagcaacgggaagacat

SEQ ID NO: 796545 - DNA, 19 bp, Mus musculus
  siRNA target sequence for D17Ertd488e (NM_177465.2,1397-1415).
ggacatgcaggaacacttt

SEQ ID NO: 796546 - DNA, 19 bp, Mus musculus
  siRNA target sequence for D17Ertd488e (NM_177465.2,1410-1428).
cactttcgggtcttttaca

SEQ ID NO: 796547 - DNA, 19 bp, Mus musculus
  siRNA target sequence for D17Ertd488e (NM_177465.2,1451-1469).
ctgactcacaggtggaata

SEQ ID NO: 796548 - DNA, 19 bp, Mus musculus
  siRNA target sequence for D17Ertd488e (NM_177465.2,1793-1811).
ggaccatcttacagagtaa

SEQ ID NO: 796549 - DNA, 19 bp, Mus musculus
  siRNA target sequence for D17Ertd488e (NM_177465.2,1977-1995).
cctccacgggactggaaat

SEQ ID NO: 796550 - DNA, 19 bp, Mus musculus
  siRNA target sequence for D17Ertd488e (NM_177465.2,1980-1998).
ccacgggactggaaatttt

SEQ ID NO: 796551 - DNA, 19 bp, Mus musculus
  siRNA target sequence for D17Ertd488e (NM_177465.2,2030-2048).
ctcccatacctcagaacta

SEQ ID NO: 796552 - DNA, 19 bp, Mus musculus
  siRNA target sequence for D17Ertd488e (NM_177465.2,2032-2050).
cccatacctcagaactata

SEQ ID NO: 796553 - DNA, 19 bp, Mus musculus
  siRNA target sequence for D17Ertd488e (NM_177465.2,2057-2075).
ccgccagcgatgagatcaa

SEQ ID NO: 796554 - DNA, 19 bp, Mus musculus
  siRNA target sequence for D17Ertd488e (NM_177465.2,2061-2079).
cagcgatgagatcaagatt

SEQ ID NO: 796555 - DNA, 19 bp, Mus musculus
  siRNA target sequence for D17Ertd488e (NM_177465.2,2063-2081).
gcgatgagatcaagattga

SEQ ID NO: 796556 - DNA, 19 bp, Mus musculus
  siRNA target sequence for D17Ertd488e (NM_177465.2,2167-2185).
gtaaccttcagcttcatca

SEQ ID NO: 796557 - DNA, 19 bp, Mus musculus
  siRNA target sequence for D17Ertd488e (NM_177465.2,2210-2228).
cctacaccagcgtgattca

SEQ ID NO: 796558 - DNA, 19 bp, Mus musculus
  siRNA target sequence for D17Ertd488e (NM_177465.2,2214-2232).
caccagcgtgattcagaat

SEQ ID NO: 796559 - DNA, 19 bp, Mus musculus
  siRNA target sequence for D17Ertd488e (NM_177465.2,2249-2267).
cccagttcaagctgagaat

SEQ ID NO: 796560 - DNA, 19 bp, Mus musculus
  siRNA target sequence for D17Ertd488e (NM_177465.2,2367-2385).
ccggtcgctgagaagtagt

SEQ ID NO: 796561 - DNA, 19 bp, Mus musculus
  siRNA target sequence for D17Ertd488e (NM_177465.2,2370-2388).
gtcgctgagaagtagtgaa

SEQ ID NO: 796562 - DNA, 19 bp, Mus musculus
  siRNA target sequence for D17Ertd488e (NM_177465.2,2458-2476).
ctggggaccggttacatca

SEQ ID NO: 796563 - DNA, 19 bp, Mus musculus
  siRNA target sequence for D17Ertd488e (NM_177465.2,2460-2478).
ggggaccggttacatcatt

SEQ ID NO: 796564 - DNA, 19 bp, Mus musculus
  siRNA target sequence for D17Ertd488e (NM_177465.2,2462-2480).
ggaccggttacatcattct

SEQ ID NO: 796565 - DNA, 19 bp, Mus musculus
  siRNA target sequence for D6Ertd160e (NM_177467.2,998-1016).
cttgcctctctttgtttca

SEQ ID NO: 796566 - DNA, 19 bp, Mus musculus
  siRNA target sequence for D7Ertd413e (NM_177468.2,760-778).
gtgctggtagaccttttat

SEQ ID NO: 796567 - DNA, 19 bp, Mus musculus
  siRNA target sequence for D7Ertd413e (NM_177468.2,856-874).
gtgggcttccagattttta

SEQ ID NO: 796568 - DNA, 19 bp, Mus musculus
  siRNA target sequence for D7Ertd413e (NM_177468.2,859-877).
ggcttccagatttttaggt

SEQ ID NO: 796569 - DNA, 19 bp, Mus musculus
  siRNA target sequence for D7Ertd413e (NM_177468.2,875-893).
ggttccgtttgctcagtaa

SEQ ID NO: 796570 - DNA, 19 bp, Mus musculus
  siRNA target sequence for D7Ertd413e (NM_177468.2,876-894).
gttccgtttgctcagtaaa

SEQ ID NO: 796571 - DNA, 19 bp, Mus musculus
  siRNA target sequence for D7Ertd413e (NM_177468.2,879-897).
ccgtttgctcagtaaatgt

SEQ ID NO: 796572 - DNA, 19 bp, Mus musculus
  siRNA target sequence for D7Ertd413e (NM_177468.2,896-914).
gtgtgagtttgatagtatt

SEQ ID NO: 796573 - DNA, 19 bp, Mus musculus
  siRNA target sequence for D7Ertd413e (NM_177468.2,898-916).
gtgagtttgatagtatttt

SEQ ID NO: 796574 - DNA, 19 bp, Mus musculus
  siRNA target sequence for D7Ertd413e (NM_177468.2,972-990).
gcataaactactcatttct

SEQ ID NO: 796575 - DNA, 19 bp, Mus musculus
  siRNA target sequence for D7Ertd413e (NM_177468.2,1016-1034).
cagctgtaaaccgatatat

SEQ ID NO: 796576 - DNA, 19 bp, Mus musculus
  siRNA target sequence for D11Ertd461e (NM_177471.2,218-236).
cgaatgcacaggagaaagt

SEQ ID NO: 796577 - DNA, 19 bp, Mus musculus
  siRNA target sequence for D11Ertd461e (NM_177471.2,317-335).
cgcaagccaagatgaacaa

SEQ ID NO: 796578 - DNA, 19 bp, Mus musculus
  siRNA target sequence for D11Ertd461e (NM_177471.2,337-355).
gtggacgggtccatcctta

SEQ ID NO: 796579 - DNA, 19 bp, Mus musculus
  siRNA target sequence for D11Ertd461e (NM_177471.2,348-366).
catccttagccgactctat

SEQ ID NO: 796580 - DNA, 19 bp, Mus musculus
  siRNA target sequence for D11Ertd461e (NM_177471.2,423-441).
gagtttacaccatgttatt

SEQ ID NO: 796581 - DNA, 19 bp, Mus musculus
  siRNA target sequence for D11Ertd461e (NM_177471.2,425-443).
gtttacaccatgttattga

SEQ ID NO: 796582 - DNA, 19 bp, Mus musculus
  siRNA target sequence for D11Ertd461e (NM_177471.2,433-451).
catgttattgagatgaaga

SEQ ID NO: 796583 - DNA, 19 bp, Mus musculus
  siRNA target sequence for D11Ertd461e (NM_177471.2,550-568).
gaggttgaggacctacaat

SEQ ID NO: 796584 - DNA, 19 bp, Mus musculus
  siRNA target sequence for D16Bwg1016e (NM_177472.2,520-538).
ggtgctaaccagaaaaaga

SEQ ID NO: 796585 - DNA, 19 bp, Mus musculus
  siRNA target sequence for D16Bwg1016e (NM_177472.2,566-584).
caatgccaaggtattcgat

SEQ ID NO: 796586 - DNA, 19 bp, Mus musculus
  siRNA target sequence for D16Bwg1016e (NM_177472.2,732-750).
ccagatacccgcagaacta

SEQ ID NO: 796587 - DNA, 19 bp, Mus musculus
  siRNA target sequence for D16Bwg1016e (NM_177472.2,877-895).
ggcagtgacaactccttta

SEQ ID NO: 796588 - DNA, 19 bp, Mus musculus
  siRNA target sequence for D16Bwg1016e (NM_177472.2,922-940).
ggagctgcgtttgagtatt

SEQ ID NO: 796589 - DNA, 19 bp, Mus musculus
  siRNA target sequence for D16Bwg1016e (NM_177472.2,926-944).
ctgcgtttgagtattcaga

SEQ ID NO: 796590 - DNA, 19 bp, Mus musculus
  siRNA target sequence for D16Bwg1016e (NM_177472.2,1187-1205).
cagcccgaaaggagaaact

SEQ ID NO: 796591 - DNA, 19 bp, Mus musculus
  siRNA target sequence for D16Bwg1016e (NM_177472.2,1189-1207).
gcccgaaaggagaaactca

SEQ ID NO: 796592 - DNA, 19 bp, Mus musculus
  siRNA target sequence for D16Bwg1016e (NM_177472.2,1190-1208).
cccgaaaggagaaactcaa

SEQ ID NO: 796593 - DNA, 19 bp, Mus musculus
  siRNA target sequence for D16Bwg1016e (NM_177472.2,1224-1242).
gccctcaggccgaaagaaa

SEQ ID NO: 796594 - DNA, 19 bp, Mus musculus
  siRNA target sequence for D10Jhu82e (NM_177475.2,100-118).
gccattcacggtagatgat

SEQ ID NO: 796595 - DNA, 19 bp, Mus musculus
  siRNA target sequence for D10Jhu82e (NM_177475.2,277-295).
gccagccaactcgaacatt

SEQ ID NO: 796596 - DNA, 19 bp, Mus musculus
  siRNA target sequence for D10Jhu82e (NM_177475.2,278-296).
ccagccaactcgaacattt

SEQ ID NO: 796597 - DNA, 19 bp, Mus musculus
  siRNA target sequence for D10Jhu82e (NM_177475.2,281-299).
gccaactcgaacattttga

SEQ ID NO: 796598 - DNA, 19 bp, Mus musculus
  siRNA target sequence for D10Jhu82e (NM_177475.2,309-327).
ccccaggttcacggttaaa

SEQ ID NO: 796599 - DNA, 19 bp, Mus musculus
  siRNA target sequence for D10Jhu82e (NM_177475.2,310-328).
cccaggttcacggttaaaa

SEQ ID NO: 796600 - DNA, 19 bp, Mus musculus
  siRNA target sequence for D10Jhu82e (NM_177475.2,314-332).
ggttcacggttaaaaagaa

SEQ ID NO: 796601 - DNA, 19 bp, Mus musculus
  siRNA target sequence for D10Jhu82e (NM_177475.2,399-417).
cagaggccgtggttgtctt

SEQ ID NO: 796602 - DNA, 19 bp, Mus musculus
  siRNA target sequence for D10Jhu82e (NM_177475.2,442-460).
gtcgacggatagtcctatt

SEQ ID NO: 796603 - DNA, 19 bp, Mus musculus
  siRNA target sequence for D10Jhu82e (NM_177475.2,445-463).
gacggatagtcctattgct

SEQ ID NO: 796604 - DNA, 19 bp, Mus musculus
  siRNA target sequence for D10Jhu82e (NM_177475.2,447-465).
cggatagtcctattgctat

SEQ ID NO: 796605 - DNA, 19 bp, Mus musculus
  siRNA target sequence for D10Jhu82e (NM_177475.2,448-466).
ggatagtcctattgctatt

SEQ ID NO: 796606 - DNA, 19 bp, Mus musculus
  siRNA target sequence for D10Jhu82e (NM_177475.2,470-488).
cctttgtccgagtctgatt

SEQ ID NO: 796607 - DNA, 19 bp, Mus musculus
  siRNA target sequence for D10Jhu82e (NM_177475.2,471-489).
ctttgtccgagtctgatta

SEQ ID NO: 796608 - DNA, 19 bp, Mus musculus
  siRNA target sequence for D10Jhu82e (NM_177475.2,475-493).
gtccgagtctgattataga

SEQ ID NO: 796609 - DNA, 19 bp, Mus musculus
  siRNA target sequence for D10Jhu82e (NM_177475.2,478-496).
cgagtctgattatagaagt

SEQ ID NO: 796610 - DNA, 19 bp, Mus musculus
  siRNA target sequence for D10Jhu82e (NM_177475.2,481-499).
gtctgattatagaagtagt

SEQ ID NO: 796611 - DNA, 19 bp, Mus musculus
  siRNA target sequence for D10Jhu82e (NM_177475.2,547-565).
ggtcacactctcaagttca

SEQ ID NO: 796612 - DNA, 19 bp, Mus musculus
  siRNA target sequence for D10Jhu82e (NM_177475.2,597-615).
gaggagatctgaatgaaaa

SEQ ID NO: 796613 - DNA, 19 bp, Mus musculus
  siRNA target sequence for D10Jhu82e (NM_177475.2,623-641).
gtatcgaagtgccattttt

SEQ ID NO: 796614 - DNA, 19 bp, Mus musculus
  siRNA target sequence for D10Jhu82e (NM_177475.2,627-645).
cgaagtgccatttttccat

SEQ ID NO: 796615 - DNA, 19 bp, Mus musculus
  siRNA target sequence for D10Jhu82e (NM_177475.2,655-673).
gaggcctgaccatagtatt

SEQ ID NO: 796616 - DNA, 19 bp, Mus musculus
  siRNA target sequence for D10Jhu82e (NM_177475.2,657-675).
ggcctgaccatagtattga

SEQ ID NO: 796617 - DNA, 19 bp, Mus musculus
  siRNA target sequence for D10Jhu82e (NM_177475.2,659-677).
cctgaccatagtattgaga

SEQ ID NO: 796618 - DNA, 19 bp, Mus musculus
  siRNA target sequence for D10Jhu82e (NM_177475.2,664-682).
ccatagtattgagattgta

SEQ ID NO: 796619 - DNA, 19 bp, Mus musculus
  siRNA target sequence for D10Jhu82e (NM_177475.2,707-725).
ccttcaggtaccttccata

SEQ ID NO: 796620 - DNA, 19 bp, Mus musculus
  siRNA target sequence for D10Jhu82e (NM_177475.2,717-735).
ccttccatacctcgaatat

SEQ ID NO: 796621 - DNA, 19 bp, Mus musculus
  siRNA target sequence for D10Jhu82e (NM_177475.2,721-739).
ccatacctcgaatatgcaa

SEQ ID NO: 796622 - DNA, 19 bp, Mus musculus
  siRNA target sequence for D10Jhu82e (NM_177475.2,844-862).
ggaagcagacttttcaagt

SEQ ID NO: 796623 - DNA, 19 bp, Mus musculus
  siRNA target sequence for D10Jhu82e (NM_177475.2,867-885).
caagtcaagagacttttga

SEQ ID NO: 796624 - DNA, 19 bp, Mus musculus
  siRNA target sequence for D10Jhu82e (NM_177475.2,1176-1194).
cttccgtggtctgcaaaat

SEQ ID NO: 796625 - DNA, 19 bp, Mus musculus
  siRNA target sequence for D10Jhu82e (NM_177475.2,1180-1198).
cgtggtctgcaaaatctgt

SEQ ID NO: 796626 - DNA, 19 bp, Mus musculus
  siRNA target sequence for D10Jhu82e (NM_177475.2,1215-1233).
ccgaccaagtccttttaca

SEQ ID NO: 796627 - DNA, 19 bp, Mus musculus
  siRNA target sequence for D10Jhu82e (NM_177475.2,1315-1333).
cgtggagacacactttaca

SEQ ID NO: 796628 - DNA, 19 bp, Mus musculus
  siRNA target sequence for D10Jhu82e (NM_177475.2,1316-1334).
gtggagacacactttacaa

SEQ ID NO: 796629 - DNA, 19 bp, Mus musculus
  siRNA target sequence for D10Jhu82e (NM_177475.2,1365-1383).
gtccattttgtcttaagat

SEQ ID NO: 796630 - DNA, 19 bp, Mus musculus
  siRNA target sequence for D10Jhu82e (NM_177475.2,1452-1470).
ccaagtgccgactacagtt

SEQ ID NO: 796631 - DNA, 19 bp, Mus musculus
  siRNA target sequence for D10Jhu82e (NM_177475.2,1453-1471).
caagtgccgactacagttt

SEQ ID NO: 796632 - DNA, 19 bp, Mus musculus
  siRNA target sequence for D10Jhu82e (NM_177475.2,1456-1474).
gtgccgactacagttttta

SEQ ID NO: 796633 - DNA, 19 bp, Mus musculus
  siRNA target sequence for D10Jhu82e (NM_177475.2,1460-1478).
cgactacagtttttaacct

SEQ ID NO: 796634 - DNA, 19 bp, Mus musculus
  siRNA target sequence for D10Jhu82e (NM_177475.2,1461-1479).
gactacagtttttaacctt

SEQ ID NO: 796635 - DNA, 19 bp, Mus musculus
  siRNA target sequence for D10Jhu82e (NM_177475.2,1590-1608).
ccgtggagtcagaatctgt

SEQ ID NO: 796636 - DNA, 19 bp, Mus musculus
  siRNA target sequence for D10Jhu82e (NM_177475.2,1638-1656).
ctgactgggagccttctaa

SEQ ID NO: 796637 - DNA, 19 bp, Mus musculus
  siRNA target sequence for D10Jhu82e (NM_177475.2,1661-1679).
cgacctcaaggcagacttt

SEQ ID NO: 796638 - DNA, 19 bp, Mus musculus
  siRNA target sequence for Vangl1 (NM_177545.2,726-744).
cttttcttccgcaagcaaa

SEQ ID NO: 796639 - DNA, 19 bp, Mus musculus
  siRNA target sequence for Vangl1 (NM_177545.2,782-800).
gttactggtccttatcttt

SEQ ID NO: 796640 - DNA, 19 bp, Mus musculus
  siRNA target sequence for Vangl1 (NM_177545.2,846-864).
gactctcgggaccaaaatt

SEQ ID NO: 796641 - DNA, 19 bp, Mus musculus
  siRNA target sequence for Vangl1 (NM_177545.2,850-868).
ctcgggaccaaaattacaa

SEQ ID NO: 796642 - DNA, 19 bp, Mus musculus
  siRNA target sequence for Vangl1 (NM_177545.2,897-915).
gtggacgcgctgcttttca

SEQ ID NO: 796643 - DNA, 19 bp, Mus musculus
  siRNA target sequence for Vangl1 (NM_177545.2,996-1014).
ggagagtcccgcttctaca

SEQ ID NO: 796644 - DNA, 19 bp, Mus musculus
  siRNA target sequence for Vangl1 (NM_177545.2,1050-1068).
gtggttctggaaaattact

SEQ ID NO: 796645 - DNA, 19 bp, Mus musculus
  siRNA target sequence for Vangl1 (NM_177545.2,1141-1159).
gcctgaaagtctacaatgt

SEQ ID NO: 796646 - DNA, 19 bp, Mus musculus
  siRNA target sequence for Vangl1 (NM_177545.2,1142-1160).
cctgaaagtctacaatgta

SEQ ID NO: 796647 - DNA, 19 bp, Mus musculus
  siRNA target sequence for Vangl1 (NM_177545.2,1158-1176).
gtagatgggcctagtaata

SEQ ID NO: 796648 - DNA, 19 bp, Mus musculus
  siRNA target sequence for Vangl1 (NM_177545.2,1238-1256).
caacgagttgtattatgaa

SEQ ID NO: 796649 - DNA, 19 bp, Mus musculus
  siRNA target sequence for Vangl1 (NM_177545.2,1597-1615).
cgacacagtggagacttat

SEQ ID NO: 796650 - DNA, 19 bp, Mus musculus
  siRNA target sequence for Vangl1 (NM_177545.2,1637-1655).
cgggttacgggatggaatt

SEQ ID NO: 796651 - DNA, 19 bp, Mus musculus
  siRNA target sequence for Vangl1 (NM_177545.2,1639-1657).
ggttacgggatggaattgt

SEQ ID NO: 796652 - DNA, 19 bp, Mus musculus
  siRNA target sequence for Vangl1 (NM_177545.2,1640-1658).
gttacgggatggaattgtt

SEQ ID NO: 796653 - DNA, 19 bp, Mus musculus
  siRNA target sequence for Vangl1 (NM_177545.2,1651-1669).
gaattgttttcgtccttaa

SEQ ID NO: 796654 - DNA, 19 bp, Mus musculus
  siRNA target sequence for Vangl1 (NM_177545.2,1684-1702).
gcctcgtggtcaatgtgaa

SEQ ID NO: 796655 - DNA, 19 bp, Mus musculus
  siRNA target sequence for Vangl1 (NM_177545.2,1703-1721).
gaaaatcccattcattgta

SEQ ID NO: 796656 - DNA, 19 bp, Mus musculus
  siRNA target sequence for Vangl1 (NM_177545.2,1731-1749).
gagttcatagaccctaaat

SEQ ID NO: 796657 - DNA, 19 bp, Mus musculus
  siRNA target sequence for Vangl1 (NM_177545.2,1733-1751).
gttcatagaccctaaatct

SEQ ID NO: 796658 - DNA, 19 bp, Mus musculus
  siRNA target sequence for Vangl1 (NM_177545.2,1742-1760).
ccctaaatctcacaagttt

SEQ ID NO: 796659 - DNA, 19 bp, Mus musculus
  siRNA target sequence for 9830132L24 (NM_177563.1,120-138).
ggccgtgtatcctgttcat

SEQ ID NO: 796660 - DNA, 19 bp, Mus musculus
  siRNA target sequence for 9830132L24 (NM_177563.1,122-140).
ccgtgtatcctgttcatga

SEQ ID NO: 796661 - DNA, 19 bp, Mus musculus
  siRNA target sequence for 9830132L24 (NM_177563.1,123-141).
cgtgtatcctgttcatgat

SEQ ID NO: 796662 - DNA, 19 bp, Mus musculus
  siRNA target sequence for 9830132L24 (NM_177563.1,126-144).
gtatcctgttcatgattct

SEQ ID NO: 796663 - DNA, 19 bp, Mus musculus
  siRNA target sequence for 9830132L24 (NM_177563.1,136-154).
catgattctgacagtactt

SEQ ID NO: 796664 - DNA, 19 bp, Mus musculus
  siRNA target sequence for 9830132L24 (NM_177563.1,145-163).
gacagtacttcgttttcaa

SEQ ID NO: 796665 - DNA, 19 bp, Mus musculus
  siRNA target sequence for 9830132L24 (NM_177563.1,147-165).
cagtacttcgttttcaaga

SEQ ID NO: 796666 - DNA, 19 bp, Mus musculus
  siRNA target sequence for 9830132L24 (NM_177563.1,236-254).
gttcaaggacttctttgta

SEQ ID NO: 796667 - DNA, 19 bp, Mus musculus
  siRNA target sequence for 9830132L24 (NM_177563.1,260-278).
ggctcaagttgtagaaaca

SEQ ID NO: 796668 - DNA, 19 bp, Mus musculus
  siRNA target sequence for 9830132L24 (NM_177563.1,261-279).
gctcaagttgtagaaacat

SEQ ID NO: 796669 - DNA, 19 bp, Mus musculus
  siRNA target sequence for 9830132L24 (NM_177563.1,291-309).
gttccatggatcatcattt

SEQ ID NO: 796670 - DNA, 19 bp, Mus musculus
  siRNA target sequence for 9830132L24 (NM_177563.1,302-320).
catcattttcggtatgaga

SEQ ID NO: 796671 - DNA, 19 bp, Mus musculus
  siRNA target sequence for D130071N09 (NM_177566.2,575-593).
cacgcctcgggatcatcat

SEQ ID NO: 796672 - DNA, 19 bp, Mus musculus
  siRNA target sequence for D130071N09 (NM_177566.2,626-644).
cgtcagtgagcggtttcta

SEQ ID NO: 796673 - DNA, 19 bp, Mus musculus
  siRNA target sequence for D130071N09 (NM_177566.2,775-793).
cctatagccgccttatgga

SEQ ID NO: 796674 - DNA, 19 bp, Mus musculus
  siRNA target sequence for D130071N09 (NM_177566.2,776-794).
ctatagccgccttatggat

SEQ ID NO: 796675 - DNA, 19 bp, Mus musculus
  siRNA target sequence for D130071N09 (NM_177566.2,781-799).
gccgccttatggatacaaa

SEQ ID NO: 796676 - DNA, 19 bp, Mus musculus
  siRNA target sequence for D130071N09 (NM_177566.2,981-999).
gtgtctggtgtagttatca

SEQ ID NO: 796677 - DNA, 19 bp, Mus musculus
  siRNA target sequence for D130071N09 (NM_177566.2,990-1008).
gtagttatcaccatttcct

SEQ ID NO: 796678 - DNA, 19 bp, Mus musculus
  siRNA target sequence for D130071N09 (NM_177566.2,1118-1136).
ccactcacctctaactagt

SEQ ID NO: 796679 - DNA, 19 bp, Mus musculus
  siRNA target sequence for 4930503F14 (NM_177567.2,401-419).
gggattgaacccttgtttt

SEQ ID NO: 796680 - DNA, 19 bp, Mus musculus
  siRNA target sequence for 4930503F14 (NM_177567.2,591-609).
ggaacgcactgccaatgat

SEQ ID NO: 796681 - DNA, 19 bp, Mus musculus
  siRNA target sequence for 4930503F14 (NM_177567.2,652-670).
ccccaaccattcaatgtca

SEQ ID NO: 796682 - DNA, 19 bp, Mus musculus
  siRNA target sequence for 4930503F14 (NM_177567.2,667-685).
gtcagctccaaacttactt

SEQ ID NO: 796683 - DNA, 19 bp, Mus musculus
  siRNA target sequence for BC035954 (NM_177569.2,307-325).
gccaaaaagcgcttttgga

SEQ ID NO: 796684 - DNA, 19 bp, Mus musculus
  siRNA target sequence for BC035954 (NM_177569.2,308-326).
ccaaaaagcgcttttggat

SEQ ID NO: 796685 - DNA, 19 bp, Mus musculus
  siRNA target sequence for BC035954 (NM_177569.2,484-502).
cactgcacgcgggaaaact

SEQ ID NO: 796686 - DNA, 19 bp, Mus musculus
  siRNA target sequence for BC035954 (NM_177569.2,496-514).
gaaaactgcggctacaagt

SEQ ID NO: 796687 - DNA, 19 bp, Mus musculus
  siRNA target sequence for BC035954 (NM_177569.2,518-536).
gcggacgcacgcacatgta

SEQ ID NO: 796688 - DNA, 19 bp, Mus musculus
  siRNA target sequence for BC035954 (NM_177569.2,521-539).
gacgcacgcacatgtacaa

SEQ ID NO: 796689 - DNA, 19 bp, Mus musculus
  siRNA target sequence for 4933406A14 (NM_177570.2,464-482).
cctagagttacccctaaaa

SEQ ID NO: 796690 - DNA, 19 bp, Mus musculus
  siRNA target sequence for 4933406A14 (NM_177570.2,513-531).
gcggttcccagcacacata

SEQ ID NO: 796691 - DNA, 19 bp, Mus musculus
  siRNA target sequence for 4933406A14 (NM_177570.2,523-541).
gcacacatactctttacgt

SEQ ID NO: 796692 - DNA, 19 bp, Mus musculus
  siRNA target sequence for 4933406A14 (NM_177570.2,653-671).
gccacggaacacttatgca

SEQ ID NO: 796693 - DNA, 19 bp, Mus musculus
  siRNA target sequence for 4933406A14 (NM_177570.2,997-1015).
ccattgtgcaccataagat

SEQ ID NO: 796694 - DNA, 19 bp, Mus musculus
  siRNA target sequence for 4933406A14 (NM_177570.2,1414-1432).
ctgaccagggggaggtatt

SEQ ID NO: 796695 - DNA, 19 bp, Mus musculus
  siRNA target sequence for 9930104L06 (NM_177573.2,381-399).
gcgtccctttccagactta

SEQ ID NO: 796696 - DNA, 19 bp, Mus musculus
  siRNA target sequence for 9930104L06 (NM_177573.2,383-401).
gtccctttccagacttaca

SEQ ID NO: 796697 - DNA, 19 bp, Mus musculus
  siRNA target sequence for Wbscr24 (NM_177574.1,149-167).
ccgggatctgcttcaagat

SEQ ID NO: 796698 - DNA, 19 bp, Mus musculus
  siRNA target sequence for Wbscr24 (NM_177574.1,151-169).
gggatctgcttcaagatga

SEQ ID NO: 796699 - DNA, 19 bp, Mus musculus
  siRNA target sequence for Wbscr24 (NM_177574.1,301-319).
cacaggccgagaaactaca

SEQ ID NO: 796700 - DNA, 19 bp, Mus musculus
  siRNA target sequence for D630047F21 (NM_177576.2,249-267).
ggagcaacaggaactttta

SEQ ID NO: 796701 - DNA, 19 bp, Mus musculus
  siRNA target sequence for D630047F21 (NM_177576.2,360-378).
gaaggacggcgtacacaat

SEQ ID NO: 796702 - DNA, 19 bp, Mus musculus
  siRNA target sequence for D630047F21 (NM_177576.2,364-382).
gacggcgtacacaatcaca

SEQ ID NO: 796703 - DNA, 19 bp, Mus musculus
  siRNA target sequence for D630047F21 (NM_177576.2,419-437).
ccactactgacgttctaga

SEQ ID NO: 796704 - DNA, 19 bp, Mus musculus
  siRNA target sequence for D630047F21 (NM_177576.2,447-465).
gtcaaacttggtacattat

SEQ ID NO: 796705 - DNA, 19 bp, Mus musculus
  siRNA target sequence for D630047F21 (NM_177576.2,477-495).
gttcagaggggaccaaata

SEQ ID NO: 796706 - DNA, 19 bp, Mus musculus
  siRNA target sequence for D630047F21 (NM_177576.2,596-614).
gcatagggttcctcaacta

SEQ ID NO: 796707 - DNA, 19 bp, Mus musculus
  siRNA target sequence for D630047F21 (NM_177576.2,616-634).
gagatgcctccggatatga

SEQ ID NO: 796708 - DNA, 19 bp, Mus musculus
  siRNA target sequence for D630047F21 (NM_177576.2,618-636).
gatgcctccggatatgata

SEQ ID NO: 796709 - DNA, 19 bp, Mus musculus
  siRNA target sequence for D630047F21 (NM_177576.2,621-639).
gcctccggatatgatactt

SEQ ID NO: 796710 - DNA, 19 bp, Mus musculus
  siRNA target sequence for D630047F21 (NM_177576.2,623-641).
ctccggatatgatacttca

SEQ ID NO: 796711 - DNA, 19 bp, Mus musculus
  siRNA target sequence for D630047F21 (NM_177576.2,689-707).
gtcacatcctgattaagct

SEQ ID NO: 796712 - DNA, 19 bp, Mus musculus
  siRNA target sequence for D630047F21 (NM_177576.2,803-821).
ctgtctatggcgttatgaa

SEQ ID NO: 796713 - DNA, 19 bp, Mus musculus
  siRNA target sequence for D630047F21 (NM_177576.2,805-823).
gtctatggcgttatgaaga

SEQ ID NO: 796714 - DNA, 19 bp, Mus musculus
  siRNA target sequence for D630047F21 (NM_177576.2,807-825).
ctatggcgttatgaagaaa

SEQ ID NO: 796715 - DNA, 19 bp, Mus musculus
  siRNA target sequence for D630047F21 (NM_177576.2,812-830).
gcgttatgaagaaatgtga

SEQ ID NO: 796716 - DNA, 19 bp, Mus musculus
  siRNA target sequence for D630047F21 (NM_177576.2,846-864).
cctaggtcagtttatttat

SEQ ID NO: 796717 - DNA, 19 bp, Mus musculus
  siRNA target sequence for D630047F21 (NM_177576.2,914-932).
ctgaatctttgctatgtgt

SEQ ID NO: 796718 - DNA, 19 bp, Mus musculus
  siRNA target sequence for D630047F21 (NM_177576.2,916-934).
gaatctttgctatgtgtaa

SEQ ID NO: 796719 - DNA, 19 bp, Mus musculus
  siRNA target sequence for D630047F21 (NM_177576.2,924-942).
gctatgtgtaaaacttcaa

SEQ ID NO: 796720 - DNA, 19 bp, Mus musculus
  siRNA target sequence for D630047F21 (NM_177576.2,925-943).
ctatgtgtaaaacttcaaa

SEQ ID NO: 796721 - DNA, 19 bp, Mus musculus
  siRNA target sequence for D630047F21 (NM_177576.2,929-947).
gtgtaaaacttcaaatcct

SEQ ID NO: 796722 - DNA, 19 bp, Mus musculus
  siRNA target sequence for D630047F21 (NM_177576.2,931-949).
gtaaaacttcaaatcctta

SEQ ID NO: 796723 - DNA, 19 bp, Mus musculus
  siRNA target sequence for D630047F21 (NM_177576.2,950-968).
gcaactggggacatccaaa

SEQ ID NO: 796724 - DNA, 19 bp, Mus musculus
  siRNA target sequence for D630047F21 (NM_177576.2,954-972).
ctggggacatccaaagtat

SEQ ID NO: 796725 - DNA, 19 bp, Mus musculus
  siRNA target sequence for D630047F21 (NM_177576.2,958-976).
ggacatccaaagtatacgt

SEQ ID NO: 796726 - DNA, 19 bp, Mus musculus
  siRNA target sequence for D630047F21 (NM_177576.2,964-982).
ccaaagtatacgtgtttgt

SEQ ID NO: 796727 - DNA, 19 bp, Mus musculus
  siRNA target sequence for D630047F21 (NM_177576.2,975-993).
gtgtttgtaccgatttaga

SEQ ID NO: 796728 - DNA, 19 bp, Mus musculus
  siRNA target sequence for D630047F21 (NM_177576.2,977-995).
gtttgtaccgatttagagt

SEQ ID NO: 796729 - DNA, 19 bp, Mus musculus
  siRNA target sequence for D630047F21 (NM_177576.2,997-1015).
cacggcatccccagtgatt

SEQ ID NO: 796730 - DNA, 19 bp, Mus musculus
  siRNA target sequence for D630047F21 (NM_177576.2,1002-1020).
catccccagtgattacact

SEQ ID NO: 796731 - DNA, 19 bp, Mus musculus
  siRNA target sequence for A430090E18 (NM_177578.2,209-227).
gggatctatacaaataatt

SEQ ID NO: 796732 - DNA, 19 bp, Mus musculus
  siRNA target sequence for A430090E18 (NM_177578.2,210-228).
ggatctatacaaataattt

SEQ ID NO: 796733 - DNA, 19 bp, Mus musculus
  siRNA target sequence for A430090E18 (NM_177578.2,251-269).
gtgcgtcctccagatgtta

SEQ ID NO: 796734 - DNA, 19 bp, Mus musculus
  siRNA target sequence for A430090E18 (NM_177578.2,254-272).
cgtcctccagatgttagta

SEQ ID NO: 796735 - DNA, 19 bp, Mus musculus
  siRNA target sequence for A430090E18 (NM_177578.2,356-374).
gttgtccccaccacaaaat

SEQ ID NO: 796736 - DNA, 19 bp, Mus musculus
  siRNA target sequence for A430090E18 (NM_177578.2,638-656).
ctcagatataaagattata

SEQ ID NO: 796737 - DNA, 19 bp, Mus musculus
  siRNA target sequence for A430090E18 (NM_177578.2,834-852).
ggcctacaccagattgtca

SEQ ID NO: 796738 - DNA, 19 bp, Mus musculus
  siRNA target sequence for A430090E18 (NM_177578.2,845-863).
gattgtcacttgctacatt

SEQ ID NO: 796739 - DNA, 19 bp, Mus musculus
  siRNA target sequence for A430090E18 (NM_177578.2,905-923).
cctaacagtcccaatttca

SEQ ID NO: 796740 - DNA, 19 bp, Mus musculus
  siRNA target sequence for A430090E18 (NM_177578.2,936-954).
gaattggatactttatact

SEQ ID NO: 796741 - DNA, 19 bp, Mus musculus
  siRNA target sequence for A430090E18 (NM_177578.2,946-964).
ctttatacttggaagatat

SEQ ID NO: 796742 - DNA, 19 bp, Mus musculus
  siRNA target sequence for A430090E18 (NM_177578.2,1025-1043).
cagattggaacgtaaatat

SEQ ID NO: 796743 - DNA, 19 bp, Mus musculus
  siRNA target sequence for A430090E18 (NM_177578.2,1027-1045).
gattggaacgtaaatatga

SEQ ID NO: 796744 - DNA, 19 bp, Mus musculus
  siRNA target sequence for A430090E18 (NM_177578.2,1068-1086).
gcatgcttctatatattaa

SEQ ID NO: 796745 - DNA, 19 bp, Mus musculus
  siRNA target sequence for A430090E18 (NM_177578.2,1106-1124).
gccattcgtgtttaccttt

SEQ ID NO: 796746 - DNA, 19 bp, Mus musculus
  siRNA target sequence for A430090E18 (NM_177578.2,1121-1139).
ctttgggtgctataatgca

SEQ ID NO: 796747 - DNA, 19 bp, Mus musculus
  siRNA target sequence for A430090E18 (NM_177578.2,1126-1144).
ggtgctataatgcaatctt

SEQ ID NO: 796748 - DNA, 19 bp, Mus musculus
  siRNA target sequence for A430090E18 (NM_177578.2,1127-1145).
gtgctataatgcaatcttt

SEQ ID NO: 796749 - DNA, 19 bp, Mus musculus
  siRNA target sequence for A430090E18 (NM_177578.2,1177-1195).
ctattccagatcccttata

SEQ ID NO: 796750 - DNA, 19 bp, Mus musculus
  siRNA target sequence for A430090E18 (NM_177578.2,1185-1203).
gatcccttatattacttct

SEQ ID NO: 796751 - DNA, 19 bp, Mus musculus
  siRNA target sequence for A430090E18 (NM_177578.2,1188-1206).
cccttatattacttctaca

SEQ ID NO: 796752 - DNA, 19 bp, Mus musculus
  siRNA target sequence for A430090E18 (NM_177578.2,1205-1223).
cactagctggcttgtgaat

SEQ ID NO: 796753 - DNA, 19 bp, Mus musculus
  siRNA target sequence for A430090E18 (NM_177578.2,1237-1255).
gagtatttctggtcttctt

SEQ ID NO: 796754 - DNA, 19 bp, Mus musculus
  siRNA target sequence for A430090E18 (NM_177578.2,1278-1296).
gaattttcgcaattcataa

SEQ ID NO: 796755 - DNA, 19 bp, Mus musculus
  siRNA target sequence for A430090E18 (NM_177578.2,1285-1303).
cgcaattcataaaaactgt

SEQ ID NO: 796756 - DNA, 19 bp, Mus musculus
  siRNA target sequence for A430090E18 (NM_177578.2,1286-1304).
gcaattcataaaaactgtt

SEQ ID NO: 796757 - DNA, 19 bp, Mus musculus
  siRNA target sequence for A430090E18 (NM_177578.2,1302-1320).
gttccaaagcccatatggt

SEQ ID NO: 796758 - DNA, 19 bp, Mus musculus
  siRNA target sequence for 0610005I04 (NM_177579.2,916-934).
gctatcgctcatttcttca

SEQ ID NO: 796759 - DNA, 19 bp, Mus musculus
  siRNA target sequence for 0610005I04 (NM_177579.2,1032-1050).
ctacctatgcttgtataaa

SEQ ID NO: 796760 - DNA, 19 bp, Mus musculus
  siRNA target sequence for 0610005I04 (NM_177579.2,1110-1128).
gtatatgcagtcatttgga

SEQ ID NO: 796761 - DNA, 19 bp, Mus musculus
  siRNA target sequence for 0610005I04 (NM_177579.2,1126-1144).
ggaatagatagggtaattt

SEQ ID NO: 796762 - DNA, 19 bp, Mus musculus
  siRNA target sequence for 0610005I04 (NM_177579.2,1146-1164).
gatacacagggataaagat

SEQ ID NO: 796763 - DNA, 19 bp, Mus musculus
  siRNA target sequence for BC048937 (NM_177580.2,198-216).
gcggctgaggtgtatttca

SEQ ID NO: 796764 - DNA, 19 bp, Mus musculus
  siRNA target sequence for BC048937 (NM_177580.2,253-271).
gctccacatcgcagattct

SEQ ID NO: 796765 - DNA, 19 bp, Mus musculus
  siRNA target sequence for BC048937 (NM_177580.2,387-405).
ctggacatgcagttcatca

SEQ ID NO: 796766 - DNA, 19 bp, Mus musculus
  siRNA target sequence for BC048937 (NM_177580.2,415-433).
gccaacactacgagattga

SEQ ID NO: 796767 - DNA, 19 bp, Mus musculus
  siRNA target sequence for BC048937 (NM_177580.2,488-506).
ggaacgcaagagagacaaa

SEQ ID NO: 796768 - DNA, 19 bp, Mus musculus
  siRNA target sequence for BC048937 (NM_177580.2,687-705).
cagaaccgcgtcttgctat

SEQ ID NO: 796769 - DNA, 19 bp, Mus musculus
  siRNA target sequence for BC048937 (NM_177580.2,987-1005).
cagcgctcgcggtccaatt

SEQ ID NO: 796770 - DNA, 19 bp, Mus musculus
  siRNA target sequence for BC048937 (NM_177580.2,990-1008).
cgctcgcggtccaattcct

SEQ ID NO: 796771 - DNA, 19 bp, Mus musculus
  siRNA target sequence for BC048937 (NM_177580.2,991-1009).
gctcgcggtccaattcctt

SEQ ID NO: 796772 - DNA, 19 bp, Mus musculus
  siRNA target sequence for BC048937 (NM_177580.2,1099-1117).
cggctggagacgtagttga

SEQ ID NO: 796773 - DNA, 19 bp, Mus musculus
  siRNA target sequence for BC048937 (NM_177580.2,1242-1260).
cctgtggcccctatgaact

SEQ ID NO: 796774 - DNA, 19 bp, Mus musculus
  siRNA target sequence for BC048937 (NM_177580.2,1492-1510).
cagccaccgacgtcaagaa

SEQ ID NO: 796775 - DNA, 19 bp, Mus musculus
  siRNA target sequence for BC048937 (NM_177580.2,1495-1513).
ccaccgacgtcaagaaact

SEQ ID NO: 796776 - DNA, 19 bp, Mus musculus
  siRNA target sequence for BC048937 (NM_177580.2,1496-1514).
caccgacgtcaagaaactt

SEQ ID NO: 796777 - DNA, 19 bp, Mus musculus
  siRNA target sequence for BC048937 (NM_177580.2,1498-1516).
ccgacgtcaagaaacttat

SEQ ID NO: 796778 - DNA, 19 bp, Mus musculus
  siRNA target sequence for BC048937 (NM_177580.2,1500-1518).
gacgtcaagaaacttatgt

SEQ ID NO: 796779 - DNA, 19 bp, Mus musculus
  siRNA target sequence for BC048937 (NM_177580.2,1544-1562).
ctttccacggggtacaaat

SEQ ID NO: 796780 - DNA, 19 bp, Mus musculus
  siRNA target sequence for BC035291 (NM_177581.2,681-699).
cagcgatggccagattgat

SEQ ID NO: 796781 - DNA, 19 bp, Mus musculus
  siRNA target sequence for BC035291 (NM_177581.2,684-702).
cgatggccagattgattca

SEQ ID NO: 796782 - DNA, 19 bp, Mus musculus
  siRNA target sequence for BC035291 (NM_177581.2,865-883).
gagtccgagtcttcatctt

SEQ ID NO: 796783 - DNA, 19 bp, Mus musculus
  siRNA target sequence for BC035291 (NM_177581.2,1019-1037).
cgggtggccaggactttga

SEQ ID NO: 796784 - DNA, 19 bp, Mus musculus
  siRNA target sequence for BC035291 (NM_177581.2,1296-1314).
cccatcaccgcctgaacat

SEQ ID NO: 796785 - DNA, 19 bp, Mus musculus
  siRNA target sequence for BC035291 (NM_177581.2,2653-2671).
cgaagcgagggcttctaca

SEQ ID NO: 796786 - DNA, 19 bp, Mus musculus
  siRNA target sequence for BC035291 (NM_177581.2,3093-3111).
caccaagtgcggcaacttt

SEQ ID NO: 796787 - DNA, 19 bp, Mus musculus
  siRNA target sequence for 4632417K02 (NM_177583.2,108-126).
gcgctcgctctttatgtct

SEQ ID NO: 796788 - DNA, 19 bp, Mus musculus
  siRNA target sequence for 4632417K02 (NM_177583.2,109-127).
cgctcgctctttatgtctt

SEQ ID NO: 796789 - DNA, 19 bp, Mus musculus
  siRNA target sequence for Btla (NM_177584.2,43-61).
gggactcctcggttattta

SEQ ID NO: 796790 - DNA, 19 bp, Mus musculus
  siRNA target sequence for Btla (NM_177584.2,52-70).
cggttatttagggaattct

SEQ ID NO: 796791 - DNA, 19 bp, Mus musculus
  siRNA target sequence for Btla (NM_177584.2,133-151).
gagtgtccagtgcaactta

SEQ ID NO: 796792 - DNA, 19 bp, Mus musculus
  siRNA target sequence for Btla (NM_177584.2,135-153).
gtgtccagtgcaacttact

SEQ ID NO: 796793 - DNA, 19 bp, Mus musculus
  siRNA target sequence for Btla (NM_177584.2,137-155).
gtccagtgcaacttactat

SEQ ID NO: 796794 - DNA, 19 bp, Mus musculus
  siRNA target sequence for Btla (NM_177584.2,139-157).
ccagtgcaacttactatta

SEQ ID NO: 796795 - DNA, 19 bp, Mus musculus
  siRNA target sequence for Btla (NM_177584.2,142-160).
gtgcaacttactattacga

SEQ ID NO: 796796 - DNA, 19 bp, Mus musculus
  siRNA target sequence for Btla (NM_177584.2,148-166).
cttactattacgaggaatt

SEQ ID NO: 796797 - DNA, 19 bp, Mus musculus
  siRNA target sequence for Btla (NM_177584.2,152-170).
ctattacgaggaattccaa

SEQ ID NO: 796798 - DNA, 19 bp, Mus musculus
  siRNA target sequence for Btla (NM_177584.2,182-200).
ggacaggagagttatttaa

SEQ ID NO: 796799 - DNA, 19 bp, Mus musculus
  siRNA target sequence for Btla (NM_177584.2,222-240).
ctgtgttcatagacctaat

SEQ ID NO: 796800 - DNA, 19 bp, Mus musculus
  siRNA target sequence for Btla (NM_177584.2,224-242).
gtgttcatagacctaatgt

SEQ ID NO: 796801 - DNA, 19 bp, Mus musculus
  siRNA target sequence for Btla (NM_177584.2,226-244).
gttcatagacctaatgtga

SEQ ID NO: 796802 - DNA, 19 bp, Mus musculus
  siRNA target sequence for Btla (NM_177584.2,255-273).
gcacaatggaacaatctgt

SEQ ID NO: 796803 - DNA, 19 bp, Mus musculus
  siRNA target sequence for Btla (NM_177584.2,286-304).
gttagccctcagctataca

SEQ ID NO: 796804 - DNA, 19 bp, Mus musculus
  siRNA target sequence for Btla (NM_177584.2,292-310).
cctcagctatacactagtt

SEQ ID NO: 796805 - DNA, 19 bp, Mus musculus
  siRNA target sequence for Btla (NM_177584.2,305-323).
ctagttgggaagaaaatca

SEQ ID NO: 796806 - DNA, 19 bp, Mus musculus
  siRNA target sequence for Btla (NM_177584.2,355-373).
ccaatacatctcagtgata

SEQ ID NO: 796807 - DNA, 19 bp, Mus musculus
  siRNA target sequence for Btla (NM_177584.2,356-374).
caatacatctcagtgataa

SEQ ID NO: 796808 - DNA, 19 bp, Mus musculus
  siRNA target sequence for Btla (NM_177584.2,370-388).
gataatgggtcgtatagct

SEQ ID NO: 796809 - DNA, 19 bp, Mus musculus
  siRNA target sequence for Btla (NM_177584.2,376-394).
gggtcgtatagctgttcta

SEQ ID NO: 796810 - DNA, 19 bp, Mus musculus
  siRNA target sequence for Btla (NM_177584.2,378-396).
gtcgtatagctgttctaca

SEQ ID NO: 796811 - DNA, 19 bp, Mus musculus
  siRNA target sequence for Btla (NM_177584.2,380-398).
cgtatagctgttctacaaa

SEQ ID NO: 796812 - DNA, 19 bp, Mus musculus
  siRNA target sequence for Btla (NM_177584.2,386-404).
gctgttctacaaacttcaa

SEQ ID NO: 796813 - DNA, 19 bp, Mus musculus
  siRNA target sequence for Btla (NM_177584.2,387-405).
ctgttctacaaacttcaat

SEQ ID NO: 796814 - DNA, 19 bp, Mus musculus
  siRNA target sequence for Btla (NM_177584.2,399-417).
cttcaattctcaagttatt

SEQ ID NO: 796815 - DNA, 19 bp, Mus musculus
  siRNA target sequence for Btla (NM_177584.2,402-420).
caattctcaagttattaat

SEQ ID NO: 796816 - DNA, 19 bp, Mus musculus
  siRNA target sequence for Btla (NM_177584.2,442-460).
gtgacagaaaggactcaaa

SEQ ID NO: 796817 - DNA, 19 bp, Mus musculus
  siRNA target sequence for Btla (NM_177584.2,467-485).
cagaacacccactaataat

SEQ ID NO: 796818 - DNA, 19 bp, Mus musculus
  siRNA target sequence for Btla (NM_177584.2,469-487).
gaacacccactaataatat

SEQ ID NO: 796819 - DNA, 19 bp, Mus musculus
  siRNA target sequence for Btla (NM_177584.2,678-696).
cactaacctggttgatatt

SEQ ID NO: 796820 - DNA, 19 bp, Mus musculus
  siRNA target sequence for Btla (NM_177584.2,778-796).
gatgaatctgaattgacaa

SEQ ID NO: 796821 - DNA, 19 bp, Mus musculus
  siRNA target sequence for Btla (NM_177584.2,846-864).
gaaccattgtgttattgga

SEQ ID NO: 796822 - DNA, 19 bp, Mus musculus
  siRNA target sequence for D230050A05 (NM_177585.2,115-133).
gagactacagaatccttta

SEQ ID NO: 796823 - DNA, 19 bp, Mus musculus
  siRNA target sequence for D230050A05 (NM_177585.2,180-198).
ccatggatgtggagaataa

SEQ ID NO: 796824 - DNA, 19 bp, Mus musculus
  siRNA target sequence for D230050A05 (NM_177585.2,221-239).
ctacagcccttggaatcaa

SEQ ID NO: 796825 - DNA, 19 bp, Mus musculus
  siRNA target sequence for D230050A05 (NM_177585.2,258-276).
gagcatggcgagagtactt

SEQ ID NO: 796826 - DNA, 19 bp, Mus musculus
  siRNA target sequence for A730098P15 (NM_177589.2,896-914).
gattgcgttgctcaacaat

SEQ ID NO: 796827 - DNA, 19 bp, Mus musculus
  siRNA target sequence for A730098P15 (NM_177589.2,911-929).
caatctggttgcctacaaa

SEQ ID NO: 796828 - DNA, 19 bp, Mus musculus
  siRNA target sequence for A730098P15 (NM_177589.2,966-984).
gttggtcatgtctgtaaca

SEQ ID NO: 796829 - DNA, 19 bp, Mus musculus
  siRNA target sequence for A730098P15 (NM_177589.2,1014-1032).
gacagggacaataaaacca

SEQ ID NO: 796830 - DNA, 19 bp, Mus musculus
  siRNA target sequence for A730098P15 (NM_177589.2,1083-1101).
ggcatgctgacctacactt

SEQ ID NO: 796831 - DNA, 19 bp, Mus musculus
  siRNA target sequence for A730098P15 (NM_177589.2,1519-1537).
gcatatcctgtgctctatt

SEQ ID NO: 796832 - DNA, 19 bp, Mus musculus
  siRNA target sequence for A730098P15 (NM_177589.2,1594-1612).
gctgcggtccctcacataa

SEQ ID NO: 796833 - DNA, 19 bp, Mus musculus
  siRNA target sequence for A730098P15 (NM_177589.2,1595-1613).
ctgcggtccctcacataaa

SEQ ID NO: 796834 - DNA, 19 bp, Mus musculus
  siRNA target sequence for Igsf1 (NM_177591.3,183-201).
cttcggaccttcactcttt

SEQ ID NO: 796835 - DNA, 19 bp, Mus musculus
  siRNA target sequence for Igsf1 (NM_177591.3,219-237).
ctcaatccgggtatgactt

SEQ ID NO: 796836 - DNA, 19 bp, Mus musculus
  siRNA target sequence for Igsf1 (NM_177591.3,253-271).
ctcaaccagagctatggat

SEQ ID NO: 796837 - DNA, 19 bp, Mus musculus
  siRNA target sequence for Igsf1 (NM_177591.3,258-276).
ccagagctatggatagagt

SEQ ID NO: 796838 - DNA, 19 bp, Mus musculus
  siRNA target sequence for Igsf1 (NM_177591.3,353-371).
gcttctgaaggataactca

SEQ ID NO: 796839 - DNA, 19 bp, Mus musculus
  siRNA target sequence for Igsf1 (NM_177591.3,398-416).
caagacattccaagtttca

SEQ ID NO: 796840 - DNA, 19 bp, Mus musculus
  siRNA target sequence for Igsf1 (NM_177591.3,429-447).
gcccttactgagtccaata

SEQ ID NO: 796841 - DNA, 19 bp, Mus musculus
  siRNA target sequence for Igsf1 (NM_177591.3,440-458).
gtccaatacaggtctttat

SEQ ID NO: 796842 - DNA, 19 bp, Mus musculus
  siRNA target sequence for Igsf1 (NM_177591.3,443-461).
caatacaggtctttatcga

SEQ ID NO: 796843 - DNA, 19 bp, Mus musculus
  siRNA target sequence for Igsf1 (NM_177591.3,576-594).
cctggatgcaatgttaaca

SEQ ID NO: 796844 - DNA, 19 bp, Mus musculus
  siRNA target sequence for Igsf1 (NM_177591.3,577-595).
ctggatgcaatgttaacat

SEQ ID NO: 796845 - DNA, 19 bp, Mus musculus
  siRNA target sequence for Igsf1 (NM_177591.3,610-628).
ggctccaggatttggtatt

SEQ ID NO: 796846 - DNA, 19 bp, Mus musculus
  siRNA target sequence for Igsf1 (NM_177591.3,652-670).
cagagcccgtagattacca

SEQ ID NO: 796847 - DNA, 19 bp, Mus musculus
  siRNA target sequence for Igsf1 (NM_177591.3,720-738).
gagaatgaaggggtttaca

SEQ ID NO: 796848 - DNA, 19 bp, Mus musculus
  siRNA target sequence for Igsf1 (NM_177591.3,886-904).
ggtgtcaagggccaatata

SEQ ID NO: 796849 - DNA, 19 bp, Mus musculus
  siRNA target sequence for Igsf1 (NM_177591.3,887-905).
gtgtcaagggccaatatat

SEQ ID NO: 796850 - DNA, 19 bp, Mus musculus
  siRNA target sequence for Igsf1 (NM_177591.3,891-909).
caagggccaatatatggaa

SEQ ID NO: 796851 - DNA, 19 bp, Mus musculus
  siRNA target sequence for Igsf1 (NM_177591.3,907-925).
gaatgacgtttgctttaat

SEQ ID NO: 796852 - DNA, 19 bp, Mus musculus
  siRNA target sequence for Igsf1 (NM_177591.3,957-975).
cacaagaagccaataaaaa

SEQ ID NO: 796853 - DNA, 19 bp, Mus musculus
  siRNA target sequence for Igsf1 (NM_177591.3,1020-1038).
gggcactacctctgttttt

SEQ ID NO: 796854 - DNA, 19 bp, Mus musculus
  siRNA target sequence for Igsf1 (NM_177591.3,1021-1039).
ggcactacctctgttttta

SEQ ID NO: 796855 - DNA, 19 bp, Mus musculus
  siRNA target sequence for Igsf1 (NM_177591.3,1023-1041).
cactacctctgtttttact

SEQ ID NO: 796856 - DNA, 19 bp, Mus musculus
  siRNA target sequence for Igsf1 (NM_177591.3,1108-1126).
ctaagacctggctacttgt

SEQ ID NO: 796857 - DNA, 19 bp, Mus musculus
  siRNA target sequence for Igsf1 (NM_177591.3,1130-1148).
gcccagtcctgtgattcaa

SEQ ID NO: 796858 - DNA, 19 bp, Mus musculus
  siRNA target sequence for Igsf1 (NM_177591.3,1197-1215).
ggtcttgcactctacaaga

SEQ ID NO: 796859 - DNA, 19 bp, Mus musculus
  siRNA target sequence for Igsf1 (NM_177591.3,1198-1216).
gtcttgcactctacaagaa

SEQ ID NO: 796860 - DNA, 19 bp, Mus musculus
  siRNA target sequence for Igsf1 (NM_177591.3,1298-1316).
cagggatgctggcatctat

SEQ ID NO: 796861 - DNA, 19 bp, Mus musculus
  siRNA target sequence for Igsf1 (NM_177591.3,1310-1328).
catctatagctgtcactat

SEQ ID NO: 796862 - DNA, 19 bp, Mus musculus
  siRNA target sequence for Igsf1 (NM_177591.3,1396-1414).
ggcccagttccgtgttcaa

SEQ ID NO: 796863 - DNA, 19 bp, Mus musculus
  siRNA target sequence for Igsf1 (NM_177591.3,1399-1417).
ccagttccgtgttcaaagt

SEQ ID NO: 796864 - DNA, 19 bp, Mus musculus
  siRNA target sequence for Igsf1 (NM_177591.3,1400-1418).
cagttccgtgttcaaagta

SEQ ID NO: 796865 - DNA, 19 bp, Mus musculus
  siRNA target sequence for Igsf1 (NM_177591.3,1405-1423).
ccgtgttcaaagtaggaaa

SEQ ID NO: 796866 - DNA, 19 bp, Mus musculus
  siRNA target sequence for Igsf1 (NM_177591.3,1450-1468).
ctcatccagtgcttgaatt

SEQ ID NO: 796867 - DNA, 19 bp, Mus musculus
  siRNA target sequence for Igsf1 (NM_177591.3,1456-1474).
cagtgcttgaattttcttt

SEQ ID NO: 796868 - DNA, 19 bp, Mus musculus
  siRNA target sequence for Igsf1 (NM_177591.3,1489-1507).
gaacaacattccaaaaatt

SEQ ID NO: 796869 - DNA, 19 bp, Mus musculus
  siRNA target sequence for Igsf1 (NM_177591.3,1565-1583).
cagttgcagctatcgtatt

SEQ ID NO: 796870 - DNA, 19 bp, Mus musculus
  siRNA target sequence for Igsf1 (NM_177591.3,1567-1585).
gttgcagctatcgtattga

SEQ ID NO: 796871 - DNA, 19 bp, Mus musculus
  siRNA target sequence for Igsf1 (NM_177591.3,1658-1676).
gaattccattctgaatgaa

SEQ ID NO: 796872 - DNA, 19 bp, Mus musculus
  siRNA target sequence for Igsf1 (NM_177591.3,1795-1813).
gggtcgccatgctcttcat

SEQ ID NO: 796873 - DNA, 19 bp, Mus musculus
  siRNA target sequence for Igsf1 (NM_177591.3,1796-1814).
ggtcgccatgctcttcata

SEQ ID NO: 796874 - DNA, 19 bp, Mus musculus
  siRNA target sequence for Igsf1 (NM_177591.3,1841-1859).
gtgcaatggggcattgaca

SEQ ID NO: 796875 - DNA, 19 bp, Mus musculus
  siRNA target sequence for Igsf1 (NM_177591.3,1960-1978).
gcccatctggctcaactaa

SEQ ID NO: 796876 - DNA, 19 bp, Mus musculus
  siRNA target sequence for Igsf1 (NM_177591.3,1969-1987).
gctcaactaaggagtttgt

SEQ ID NO: 796877 - DNA, 19 bp, Mus musculus
  siRNA target sequence for Igsf1 (NM_177591.3,1975-1993).
ctaaggagtttgtgttact

SEQ ID NO: 796878 - DNA, 19 bp, Mus musculus
  siRNA target sequence for Igsf1 (NM_177591.3,2134-2152).
gtgaagcgcttgaactagt

SEQ ID NO: 796879 - DNA, 19 bp, Mus musculus
  siRNA target sequence for Igsf1 (NM_177591.3,2216-2234).
gcagatccgctgtaaagga

SEQ ID NO: 796880 - DNA, 19 bp, Mus musculus
  siRNA target sequence for Igsf1 (NM_177591.3,2250-2268).
gggtttgctctgtataaga

SEQ ID NO: 796881 - DNA, 19 bp, Mus musculus
  siRNA target sequence for Igsf1 (NM_177591.3,2382-2400).
gaaatgcagcccttcaagt

SEQ ID NO: 796882 - DNA, 19 bp, Mus musculus
  siRNA target sequence for Igsf1 (NM_177591.3,2491-2509).
ctggttcccgagtgacttt

SEQ ID NO: 796883 - DNA, 19 bp, Mus musculus
  siRNA target sequence for Igsf1 (NM_177591.3,2493-2511).
ggttcccgagtgactttca

SEQ ID NO: 796884 - DNA, 19 bp, Mus musculus
  siRNA target sequence for Igsf1 (NM_177591.3,2494-2512).
gttcccgagtgactttcaa

SEQ ID NO: 796885 - DNA, 19 bp, Mus musculus
  siRNA target sequence for Igsf1 (NM_177591.3,2498-2516).
ccgagtgactttcaattgt

SEQ ID NO: 796886 - DNA, 19 bp, Mus musculus
  siRNA target sequence for Igsf1 (NM_177591.3,2499-2517).
cgagtgactttcaattgtt

SEQ ID NO: 796887 - DNA, 19 bp, Mus musculus
  siRNA target sequence for Igsf1 (NM_177591.3,2526-2544).
catgaacacatgagcttta

SEQ ID NO: 796888 - DNA, 19 bp, Mus musculus
  siRNA target sequence for Igsf1 (NM_177591.3,2532-2550).
cacatgagctttattcttt

SEQ ID NO: 796889 - DNA, 19 bp, Mus musculus
  siRNA target sequence for Igsf1 (NM_177591.3,2608-2626).
gtacagcccactttctgat

SEQ ID NO: 796890 - DNA, 19 bp, Mus musculus
  siRNA target sequence for Igsf1 (NM_177591.3,2613-2631).
gcccactttctgatcattt

SEQ ID NO: 796891 - DNA, 19 bp, Mus musculus
  siRNA target sequence for Igsf1 (NM_177591.3,2663-2681).
ctgtcgttattatgacttt

SEQ ID NO: 796892 - DNA, 19 bp, Mus musculus
  siRNA target sequence for Igsf1 (NM_177591.3,2715-2733).
ctcgttgtgacagaattct

SEQ ID NO: 796893 - DNA, 19 bp, Mus musculus
  siRNA target sequence for Igsf1 (NM_177591.3,2795-2813).
cctgcgctgccaaggaatt

SEQ ID NO: 796894 - DNA, 19 bp, Mus musculus
  siRNA target sequence for Igsf1 (NM_177591.3,2796-2814).
ctgcgctgccaaggaattt

SEQ ID NO: 796895 - DNA, 19 bp, Mus musculus
  siRNA target sequence for Igsf1 (NM_177591.3,2837-2855).
cttgcaggagggtactcat

SEQ ID NO: 796896 - DNA, 19 bp, Mus musculus
  siRNA target sequence for Igsf1 (NM_177591.3,3038-3056).
gtctgctgagcctagttct

SEQ ID NO: 796897 - DNA, 19 bp, Mus musculus
  siRNA target sequence for Igsf1 (NM_177591.3,3065-3083).
catggggcagaatgttact

SEQ ID NO: 796898 - DNA, 19 bp, Mus musculus
  siRNA target sequence for Igsf1 (NM_177591.3,3068-3086).
ggggcagaatgttactcta

SEQ ID NO: 796899 - DNA, 19 bp, Mus musculus
  siRNA target sequence for Igsf1 (NM_177591.3,3069-3087).
gggcagaatgttactctat

SEQ ID NO: 796900 - DNA, 19 bp, Mus musculus
  siRNA target sequence for Igsf1 (NM_177591.3,3104-3122).
ccgtggagttgggtacatt

SEQ ID NO: 796901 - DNA, 19 bp, Mus musculus
  siRNA target sequence for Igsf1 (NM_177591.3,3106-3124).
gtggagttgggtacattct

SEQ ID NO: 796902 - DNA, 19 bp, Mus musculus
  siRNA target sequence for Igsf1 (NM_177591.3,3115-3133).
ggtacattctgcacaaaga

SEQ ID NO: 796903 - DNA, 19 bp, Mus musculus
  siRNA target sequence for Igsf1 (NM_177591.3,3161-3179).
ggggtccactagcaatgaa

SEQ ID NO: 796904 - DNA, 19 bp, Mus musculus
  siRNA target sequence for Igsf1 (NM_177591.3,3180-3198).
ggagcattccctatcatca

SEQ ID NO: 796905 - DNA, 19 bp, Mus musculus
  siRNA target sequence for Igsf1 (NM_177591.3,3181-3199).
gagcattccctatcatcaa

SEQ ID NO: 796906 - DNA, 19 bp, Mus musculus
  siRNA target sequence for Igsf1 (NM_177591.3,3183-3201).
gcattccctatcatcaata

SEQ ID NO: 796907 - DNA, 19 bp, Mus musculus
  siRNA target sequence for Igsf1 (NM_177591.3,3184-3202).
cattccctatcatcaatat

SEQ ID NO: 796908 - DNA, 19 bp, Mus musculus
  siRNA target sequence for Igsf1 (NM_177591.3,3210-3228).
gctagcataggacgttata

SEQ ID NO: 796909 - DNA, 19 bp, Mus musculus
  siRNA target sequence for Igsf1 (NM_177591.3,3251-3269).
gatgagccctatcaagata

SEQ ID NO: 796910 - DNA, 19 bp, Mus musculus
  siRNA target sequence for Igsf1 (NM_177591.3,3278-3296).
caacactctggaactcata

SEQ ID NO: 796911 - DNA, 19 bp, Mus musculus
  siRNA target sequence for Igsf1 (NM_177591.3,3313-3331).
ctaagcccagcctgttagt

SEQ ID NO: 796912 - DNA, 19 bp, Mus musculus
  siRNA target sequence for Igsf1 (NM_177591.3,3360-3378).
gaaaacgtgactcttcaat

SEQ ID NO: 796913 - DNA, 19 bp, Mus musculus
  siRNA target sequence for Igsf1 (NM_177591.3,3365-3383).
cgtgactcttcaatgtcaa

SEQ ID NO: 796914 - DNA, 19 bp, Mus musculus
  siRNA target sequence for Igsf1 (NM_177591.3,3425-3443).
gacgcgacagcccttagaa

SEQ ID NO: 796915 - DNA, 19 bp, Mus musculus
  siRNA target sequence for Igsf1 (NM_177591.3,3427-3445).
cgcgacagcccttagaaca

SEQ ID NO: 796916 - DNA, 19 bp, Mus musculus
  siRNA target sequence for Igsf1 (NM_177591.3,3428-3446).
gcgacagcccttagaacaa

SEQ ID NO: 796917 - DNA, 19 bp, Mus musculus
  siRNA target sequence for Igsf1 (NM_177591.3,3430-3448).
gacagcccttagaacaaca

SEQ ID NO: 796918 - DNA, 19 bp, Mus musculus
  siRNA target sequence for Igsf1 (NM_177591.3,3626-3644).
cagcaccatcttcaaacta

SEQ ID NO: 796919 - DNA, 19 bp, Mus musculus
  siRNA target sequence for Igsf1 (NM_177591.3,3675-3693).
cccctgccaggagttgaat

SEQ ID NO: 796920 - DNA, 19 bp, Mus musculus
  siRNA target sequence for Igsf1 (NM_177591.3,3676-3694).
ccctgccaggagttgaatt

SEQ ID NO: 796921 - DNA, 19 bp, Mus musculus
  siRNA target sequence for Igsf1 (NM_177591.3,3677-3695).
cctgccaggagttgaattt

SEQ ID NO: 796922 - DNA, 19 bp, Mus musculus
  siRNA target sequence for Igsf1 (NM_177591.3,3717-3735).
gaggctccacaacagtttt

SEQ ID NO: 796923 - DNA, 19 bp, Mus musculus
  siRNA target sequence for Igsf1 (NM_177591.3,3810-3828).
caggcctaccctgatatct

SEQ ID NO: 796924 - DNA, 19 bp, Mus musculus
  siRNA target sequence for Igsf1 (NM_177591.3,3957-3975).
gccgtagagtggaagaagt

SEQ ID NO: 796925 - DNA, 19 bp, Mus musculus
  siRNA target sequence for Igsf1 (NM_177591.3,4059-4077).
ccaggcactaccaccaatt

SEQ ID NO: 796926 - DNA, 19 bp, Mus musculus
  siRNA target sequence for Igsf1 (NM_177591.3,4109-4127).
ggaactgacagttccaata

SEQ ID NO: 796927 - DNA, 19 bp, Mus musculus
  siRNA target sequence for Igsf1 (NM_177591.3,4110-4128).
gaactgacagttccaatat

SEQ ID NO: 796928 - DNA, 19 bp, Mus musculus
  siRNA target sequence for AW547186 (NM_177592.2,384-402).
cgtcgaccccagttttgca

SEQ ID NO: 796929 - DNA, 19 bp, Mus musculus
  siRNA target sequence for AW547186 (NM_177592.2,758-776).
ctaccgtcatcttcaagtt

SEQ ID NO: 796930 - DNA, 19 bp, Mus musculus
  siRNA target sequence for AW547186 (NM_177592.2,761-779).
ccgtcatcttcaagttaca

SEQ ID NO: 796931 - DNA, 19 bp, Mus musculus
  siRNA target sequence for AW547186 (NM_177592.2,813-831).
gctgttccccgtggtaaat

SEQ ID NO: 796932 - DNA, 19 bp, Mus musculus
  siRNA target sequence for AW547186 (NM_177592.2,814-832).
ctgttccccgtggtaaata

SEQ ID NO: 796933 - DNA, 19 bp, Mus musculus
  siRNA target sequence for AW547186 (NM_177592.2,834-852).
ccggctgctcccctttgaa

SEQ ID NO: 796934 - DNA, 19 bp, Mus musculus
  siRNA target sequence for AW547186 (NM_177592.2,837-855).
gctgctcccctttgaacta

SEQ ID NO: 796935 - DNA, 19 bp, Mus musculus
  siRNA target sequence for AW547186 (NM_177592.2,843-861).
cccctttgaactagagatt

SEQ ID NO: 796936 - DNA, 19 bp, Mus musculus
  siRNA target sequence for AW547186 (NM_177592.2,845-863).
cctttgaactagagattta

SEQ ID NO: 796937 - DNA, 19 bp, Mus musculus
  siRNA target sequence for AW547186 (NM_177592.2,850-868).
gaactagagatttactaca

SEQ ID NO: 796938 - DNA, 19 bp, Mus musculus
  siRNA target sequence for AW547186 (NM_177592.2,931-949).
ccagagcccctctgcaatt

SEQ ID NO: 796939 - DNA, 19 bp, Mus musculus
  siRNA target sequence for AW547186 (NM_177592.2,932-950).
cagagcccctctgcaattt

SEQ ID NO: 796940 - DNA, 19 bp, Mus musculus
  siRNA target sequence for AW547186 (NM_177592.2,969-987).
gactggcctcatgttcttt

SEQ ID NO: 796941 - DNA, 19 bp, Mus musculus
  siRNA target sequence for AW547186 (NM_177592.2,974-992).
gcctcatgttcttttacca

SEQ ID NO: 796942 - DNA, 19 bp, Mus musculus
  siRNA target sequence for AW547186 (NM_177592.2,1016-1034).
gcctggtcaccgaagtgaa

SEQ ID NO: 796943 - DNA, 19 bp, Mus musculus
  siRNA target sequence for AW547186 (NM_177592.2,1021-1039).
gtcaccgaagtgaatttga

SEQ ID NO: 796944 - DNA, 19 bp, Mus musculus
  siRNA target sequence for AW547186 (NM_177592.2,1144-1162).
gtcatcctgttctcataca

SEQ ID NO: 796945 - DNA, 19 bp, Mus musculus
  siRNA target sequence for AW547186 (NM_177592.2,1164-1182).
ggctgggcccttgtgtaaa

SEQ ID NO: 796946 - DNA, 19 bp, Mus musculus
  siRNA target sequence for AW547186 (NM_177592.2,1165-1183).
gctgggcccttgtgtaaat

SEQ ID NO: 796947 - DNA, 19 bp, Mus musculus
  siRNA target sequence for AW547186 (NM_177592.2,1166-1184).
ctgggcccttgtgtaaata

SEQ ID NO: 796948 - DNA, 19 bp, Mus musculus
  siRNA target sequence for AW547186 (NM_177592.2,1245-1263).
ccacaacctcaaaaagaga

SEQ ID NO: 796949 - DNA, 19 bp, Mus musculus
  siRNA target sequence for AW547186 (NM_177592.2,1279-1297).
ctgaggaatgttaaggaat

SEQ ID NO: 796950 - DNA, 19 bp, Mus musculus
  siRNA target sequence for AW547186 (NM_177592.2,1306-1324).
gtcctacatctttcactat

SEQ ID NO: 796951 - DNA, 19 bp, Mus musculus
  siRNA target sequence for AW547186 (NM_177592.2,1319-1337).
cactatcgccatttgtcaa

SEQ ID NO: 796952 - DNA, 19 bp, Mus musculus
  siRNA target sequence for Mtmr9 (NM_177594.1,320-338).
gtttgcggagctgattaaa

SEQ ID NO: 796953 - DNA, 19 bp, Mus musculus
  siRNA target sequence for Mtmr9 (NM_177594.1,340-358).
ccccacgggtagacaatgt

SEQ ID NO: 796954 - DNA, 19 bp, Mus musculus
  siRNA target sequence for Mtmr9 (NM_177594.1,458-476).
ctggctcctccattcaaat

SEQ ID NO: 796955 - DNA, 19 bp, Mus musculus
  siRNA target sequence for Mtmr9 (NM_177594.1,460-478).
ggctcctccattcaaatat

SEQ ID NO: 796956 - DNA, 19 bp, Mus musculus
  siRNA target sequence for Mtmr9 (NM_177594.1,480-498).
gacgccatcgacaaacgat

SEQ ID NO: 796957 - DNA, 19 bp, Mus musculus
  siRNA target sequence for Mtmr9 (NM_177594.1,482-500).
cgccatcgacaaacgattt

SEQ ID NO: 796958 - DNA, 19 bp, Mus musculus
  siRNA target sequence for Mtmr9 (NM_177594.1,484-502).
ccatcgacaaacgatttgt

SEQ ID NO: 796959 - DNA, 19 bp, Mus musculus
  siRNA target sequence for Mtmr9 (NM_177594.1,512-530).
gggtaccatcatcataaaa

SEQ ID NO: 796960 - DNA, 19 bp, Mus musculus
  siRNA target sequence for Mtmr9 (NM_177594.1,513-531).
ggtaccatcatcataaaat

SEQ ID NO: 796961 - DNA, 19 bp, Mus musculus
  siRNA target sequence for Mtmr9 (NM_177594.1,532-550).
gtaaagatttccgaatcat

SEQ ID NO: 796962 - DNA, 19 bp, Mus musculus
  siRNA target sequence for Mtmr9 (NM_177594.1,543-561).
cgaatcattcagttggata

SEQ ID NO: 796963 - DNA, 19 bp, Mus musculus
  siRNA target sequence for Mtmr9 (NM_177594.1,544-562).
gaatcattcagttggatat

SEQ ID NO: 796964 - DNA, 19 bp, Mus musculus
  siRNA target sequence for Mtmr9 (NM_177594.1,548-566).
cattcagttggatattcct

SEQ ID NO: 796965 - DNA, 19 bp, Mus musculus
  siRNA target sequence for Mtmr9 (NM_177594.1,631-649).
ccctgatgtaccctttctt

SEQ ID NO: 796966 - DNA, 19 bp, Mus musculus
  siRNA target sequence for Mtmr9 (NM_177594.1,633-651).
ctgatgtaccctttcttct

SEQ ID NO: 796967 - DNA, 19 bp, Mus musculus
  siRNA target sequence for Mtmr9 (NM_177594.1,675-693).
gaagatggctggcattctt

SEQ ID NO: 796968 - DNA, 19 bp, Mus musculus
  siRNA target sequence for Mtmr9 (NM_177594.1,742-760).
ggagactgagctatatcaa

SEQ ID NO: 796969 - DNA, 19 bp, Mus musculus
  siRNA target sequence for Mtmr9 (NM_177594.1,785-803).
ctacccaccaactgtcatt

SEQ ID NO: 796970 - DNA, 19 bp, Mus musculus
  siRNA target sequence for Mtmr9 (NM_177594.1,873-891).
gtcctgagctattaccata

SEQ ID NO: 796971 - DNA, 19 bp, Mus musculus
  siRNA target sequence for Mtmr9 (NM_177594.1,875-893).
cctgagctattaccataaa

SEQ ID NO: 796972 - DNA, 19 bp, Mus musculus
  siRNA target sequence for Mtmr9 (NM_177594.1,1002-1020).
cgtggctaccttattgaca

SEQ ID NO: 796973 - DNA, 19 bp, Mus musculus
  siRNA target sequence for Mtmr9 (NM_177594.1,1092-1110).
cagtggaggcggattcaca

SEQ ID NO: 796974 - DNA, 19 bp, Mus musculus
  siRNA target sequence for Mtmr9 (NM_177594.1,1112-1130).
gtccattgagagataccat

SEQ ID NO: 796975 - DNA, 19 bp, Mus musculus
  siRNA target sequence for Mtmr9 (NM_177594.1,1134-1152).
cttcaggagagcctaatca

SEQ ID NO: 796976 - DNA, 19 bp, Mus musculus
  siRNA target sequence for Mtmr9 (NM_177594.1,1157-1175).
cgtggaagcatgtaatgaa

SEQ ID NO: 796977 - DNA, 19 bp, Mus musculus
  siRNA target sequence for Mtmr9 (NM_177594.1,1161-1179).
gaagcatgtaatgaacaaa

SEQ ID NO: 796978 - DNA, 19 bp, Mus musculus
  siRNA target sequence for Mtmr9 (NM_177594.1,1291-1309).
gtgcatcagtgttgattca

SEQ ID NO: 796979 - DNA, 19 bp, Mus musculus
  siRNA target sequence for Mtmr9 (NM_177594.1,1427-1445).
ggctggtcacccattccaa

SEQ ID NO: 796980 - DNA, 19 bp, Mus musculus
  siRNA target sequence for Mtmr9 (NM_177594.1,1549-1567).
cttgctccttcgagtttaa

SEQ ID NO: 796981 - DNA, 19 bp, Mus musculus
  siRNA target sequence for Mtmr9 (NM_177594.1,1552-1570).
gctccttcgagtttaatga

SEQ ID NO: 796982 - DNA, 19 bp, Mus musculus
  siRNA target sequence for Mtmr9 (NM_177594.1,1586-1604).
gctctttgagcatgcttat

SEQ ID NO: 796983 - DNA, 19 bp, Mus musculus
  siRNA target sequence for Mtmr9 (NM_177594.1,1707-1725).
ggcgagctgagtaagttca

SEQ ID NO: 796984 - DNA, 19 bp, Mus musculus
  siRNA target sequence for Mtmr9 (NM_177594.1,1721-1739).
gttcaccaatccactcttt

SEQ ID NO: 796985 - DNA, 19 bp, Mus musculus
  siRNA target sequence for Mtmr9 (NM_177594.1,1817-1835).
gagcagatcctccaagtat

SEQ ID NO: 796986 - DNA, 19 bp, Mus musculus
  siRNA target sequence for Mtmr9 (NM_177594.1,1845-1863).
gcatatgaggaaatggtta

SEQ ID NO: 796987 - DNA, 19 bp, Mus musculus
  siRNA target sequence for Mtmr9 (NM_177594.1,1846-1864).
catatgaggaaatggttaa

SEQ ID NO: 796988 - DNA, 19 bp, Mus musculus
  siRNA target sequence for Mtmr9 (NM_177594.1,1912-1930).
gaaggcagttggctgaatt

SEQ ID NO: 796989 - DNA, 19 bp, Mus musculus
  siRNA target sequence for 9430023B20 (NM_177595.2,242-260).
cgggggagccgtgcttttt

SEQ ID NO: 796990 - DNA, 19 bp, Mus musculus
  siRNA target sequence for 9430023B20 (NM_177595.2,244-262).
ggggagccgtgctttttga

SEQ ID NO: 796991 - DNA, 19 bp, Mus musculus
  siRNA target sequence for 9430023B20 (NM_177595.2,245-263).
gggagccgtgctttttgaa

SEQ ID NO: 796992 - DNA, 19 bp, Mus musculus
  siRNA target sequence for 9430023B20 (NM_177595.2,508-526).
ctacgaagactgagaagat

SEQ ID NO: 796993 - DNA, 19 bp, Mus musculus
  siRNA target sequence for 9430023B20 (NM_177595.2,554-572).
gctagtgcaggtgtcaaat

SEQ ID NO: 796994 - DNA, 19 bp, Mus musculus
  siRNA target sequence for 9430023B20 (NM_177595.2,555-573).
ctagtgcaggtgtcaaatt

SEQ ID NO: 796995 - DNA, 19 bp, Mus musculus
  siRNA target sequence for 9430023B20 (NM_177595.2,558-576).
gtgcaggtgtcaaattggt

SEQ ID NO: 796996 - DNA, 19 bp, Mus musculus
  siRNA target sequence for 9430023B20 (NM_177595.2,586-604).
ctagacgtcggctgaagaa

SEQ ID NO: 796997 - DNA, 19 bp, Mus musculus
  siRNA target sequence for 9430023B20 (NM_177595.2,609-627).
gtccggcagccagatttaa

SEQ ID NO: 796998 - DNA, 19 bp, Mus musculus
  siRNA target sequence for 9430023B20 (NM_177595.2,611-629).
ccggcagccagatttaagt

SEQ ID NO: 796999 - DNA, 19 bp, Mus musculus
  siRNA target sequence for 9430023B20 (NM_177595.2,612-630).
cggcagccagatttaagtt

SEQ ID NO: 797000 - DNA, 19 bp, Mus musculus
  siRNA target sequence for 9430023B20 (NM_177595.2,628-646).
gttgggccttaagaataaa

SEQ ID NO: 797001 - DNA, 19 bp, Mus musculus
  siRNA target sequence for 9430023B20 (NM_177595.2,632-650).
ggccttaagaataaagtta

SEQ ID NO: 797002 - DNA, 19 bp, Mus musculus
  siRNA target sequence for 9430023B20 (NM_177595.2,633-651).
gccttaagaataaagttat

SEQ ID NO: 797003 - DNA, 19 bp, Mus musculus
  siRNA target sequence for 9430023B20 (NM_177595.2,647-665).
gttatacaacaagtatgtt

SEQ ID NO: 797004 - DNA, 19 bp, Mus musculus
  siRNA target sequence for 9430023B20 (NM_177595.2,796-814).
gggaaagctcagcgataaa

SEQ ID NO: 797005 - DNA, 19 bp, Mus musculus
  siRNA target sequence for 9430023B20 (NM_177595.2,797-815).
ggaaagctcagcgataaaa

SEQ ID NO: 797006 - DNA, 19 bp, Mus musculus
  siRNA target sequence for 9430023B20 (NM_177595.2,835-853).
cgagggctgccgaggatta

SEQ ID NO: 797007 - DNA, 19 bp, Mus musculus
  siRNA target sequence for 9430023B20 (NM_177595.2,836-854).
gagggctgccgaggattat

SEQ ID NO: 797008 - DNA, 19 bp, Mus musculus
  siRNA target sequence for 9430023B20 (NM_177595.2,838-856).
gggctgccgaggattatgt

SEQ ID NO: 797009 - DNA, 19 bp, Mus musculus
  siRNA target sequence for 9430023B20 (NM_177595.2,840-858).
gctgccgaggattatgtgt

SEQ ID NO: 797010 - DNA, 19 bp, Mus musculus
  siRNA target sequence for 9430023B20 (NM_177595.2,881-899).
cttgttgaaccgttacctt

SEQ ID NO: 797011 - DNA, 19 bp, Mus musculus
  siRNA target sequence for 9430023B20 (NM_177595.2,962-980).
gaaccattcggggtctttt

SEQ ID NO: 797012 - DNA, 19 bp, Mus musculus
  siRNA target sequence for 9430023B20 (NM_177595.2,982-1000).
gctccaacgaatttgaaga

SEQ ID NO: 797013 - DNA, 19 bp, Mus musculus
  siRNA target sequence for 9430023B20 (NM_177595.2,983-1001).
ctccaacgaatttgaagaa

SEQ ID NO: 797014 - DNA, 19 bp, Mus musculus
  siRNA target sequence for 9430023B20 (NM_177595.2,1061-1079).
cccggacatcggatctact

SEQ ID NO: 797015 - DNA, 19 bp, Mus musculus
  siRNA target sequence for 9430023B20 (NM_177595.2,1062-1080).
ccggacatcggatctacta

SEQ ID NO: 797016 - DNA, 19 bp, Mus musculus
  siRNA target sequence for 9430023B20 (NM_177595.2,1063-1081).
cggacatcggatctactaa

SEQ ID NO: 797017 - DNA, 19 bp, Mus musculus
  siRNA target sequence for 9430023B20 (NM_177595.2,1146-1164).
gcagccatggccttaacaa

SEQ ID NO: 797018 - DNA, 19 bp, Mus musculus
  siRNA target sequence for 9630025C22 (NM_177597.2,624-642).
gaaacacgctccgtatgta

SEQ ID NO: 797019 - DNA, 19 bp, Mus musculus
  siRNA target sequence for 9630025C22 (NM_177597.2,702-720).
caccatcagcccatttgca

SEQ ID NO: 797020 - DNA, 19 bp, Mus musculus
  siRNA target sequence for 9630025C22 (NM_177597.2,743-761).
gcagggtgagttgttaaat

SEQ ID NO: 797021 - DNA, 19 bp, Mus musculus
  siRNA target sequence for 9630025C22 (NM_177597.2,772-790).
gtgatgggtctgttcgata

SEQ ID NO: 797022 - DNA, 19 bp, Mus musculus
  siRNA target sequence for 9630025C22 (NM_177597.2,842-860).
ctgcgagctgtgctgttat

SEQ ID NO: 797023 - DNA, 19 bp, Mus musculus
  siRNA target sequence for 9630025C22 (NM_177597.2,845-863).
cgagctgtgctgttataga

SEQ ID NO: 797024 - DNA, 19 bp, Mus musculus
  siRNA target sequence for 9630025C22 (NM_177597.2,895-913).
cttgccaggtagacacaat

SEQ ID NO: 797025 - DNA, 19 bp, Mus musculus
  siRNA target sequence for 9630025C22 (NM_177597.2,898-916).
gccaggtagacacaatgtt

SEQ ID NO: 797026 - DNA, 19 bp, Mus musculus
  siRNA target sequence for 9630025C22 (NM_177597.2,900-918).
caggtagacacaatgttca

SEQ ID NO: 797027 - DNA, 19 bp, Mus musculus
  siRNA target sequence for 9630025C22 (NM_177597.2,943-961).
cacgggtacacttgaattt

SEQ ID NO: 797028 - DNA, 19 bp, Mus musculus
  siRNA target sequence for 9630025C22 (NM_177597.2,946-964).
gggtacacttgaattttgt

SEQ ID NO: 797029 - DNA, 19 bp, Mus musculus
  siRNA target sequence for E330017E16 (NM_177598.2,281-299).
caattcgagaagatttcat

SEQ ID NO: 797030 - DNA, 19 bp, Mus musculus
  siRNA target sequence for E330017E16 (NM_177598.2,729-747).
ccaatgcagtattaatcaa

SEQ ID NO: 797031 - DNA, 19 bp, Mus musculus
  siRNA target sequence for E330017E16 (NM_177598.2,946-964).
cgtcgcacccaaaagatca

SEQ ID NO: 797032 - DNA, 19 bp, Mus musculus
  siRNA target sequence for E330017E16 (NM_177598.2,955-973).
caaaagatcacaaagttta

SEQ ID NO: 797033 - DNA, 19 bp, Mus musculus
  siRNA target sequence for E330017E16 (NM_177598.2,1057-1075).
gatatggggagaccaaaat

SEQ ID NO: 797034 - DNA, 19 bp, Mus musculus
  siRNA target sequence for E330017E16 (NM_177598.2,1137-1155).
caacataaaaggtgtctat

SEQ ID NO: 797035 - DNA, 19 bp, Mus musculus
  siRNA target sequence for E330017E16 (NM_177598.2,1150-1168).
gtctatctgcagacaatta

SEQ ID NO: 797036 - DNA, 19 bp, Mus musculus
  siRNA target sequence for E330017E16 (NM_177598.2,1275-1293).
gcagctcaatgggtgttat

SEQ ID NO: 797037 - DNA, 19 bp, Mus musculus
  siRNA target sequence for E330017E16 (NM_177598.2,1313-1331).
ggctaccacagcaaagctt

SEQ ID NO: 797038 - DNA, 19 bp, Mus musculus
  siRNA target sequence for 4931417A20 (NM_177600.2,108-126).
ggaagaaagtatagatcta

SEQ ID NO: 797039 - DNA, 19 bp, Mus musculus
  siRNA target sequence for 4931417A20 (NM_177600.2,116-134).
gtatagatctaataattaa

SEQ ID NO: 797040 - DNA, 19 bp, Mus musculus
  siRNA target sequence for 4931417A20 (NM_177600.2,160-178).
gaaagactcaacatggaat

SEQ ID NO: 797041 - DNA, 19 bp, Mus musculus
  siRNA target sequence for 4931417A20 (NM_177600.2,164-182).
gactcaacatggaattaga

SEQ ID NO: 797042 - DNA, 19 bp, Mus musculus
  siRNA target sequence for 4931417A20 (NM_177600.2,175-193).
gaattagaagtaaataaga

SEQ ID NO: 797043 - DNA, 19 bp, Mus musculus
  siRNA target sequence for 4931417A20 (NM_177600.2,315-333).
gaaggtgctaagagaaaat

SEQ ID NO: 797044 - DNA, 19 bp, Mus musculus
  siRNA target sequence for 4931417A20 (NM_177600.2,318-336).
ggtgctaagagaaaataat

SEQ ID NO: 797045 - DNA, 19 bp, Mus musculus
  siRNA target sequence for 4931417A20 (NM_177600.2,341-359).
cccttgaaagagataatga

SEQ ID NO: 797046 - DNA, 19 bp, Mus musculus
  siRNA target sequence for 4931417A20 (NM_177600.2,497-515).
catcacttagggaaactca

SEQ ID NO: 797047 - DNA, 19 bp, Mus musculus
  siRNA target sequence for 4931417A20 (NM_177600.2,529-547).
gaacattacaacaaattat

SEQ ID NO: 797048 - DNA, 19 bp, Mus musculus
  siRNA target sequence for 4931417A20 (NM_177600.2,548-566).
gtgaacagaaaaaaactga

SEQ ID NO: 797049 - DNA, 19 bp, Mus musculus
  siRNA target sequence for 4931417A20 (NM_177600.2,563-581).
ctgaggaatataagaagtt

SEQ ID NO: 797050 - DNA, 19 bp, Mus musculus
  siRNA target sequence for 4931417A20 (NM_177600.2,568-586).
gaatataagaagtttcaga

SEQ ID NO: 797051 - DNA, 19 bp, Mus musculus
  siRNA target sequence for 4931417A20 (NM_177600.2,695-713).
caaagagtttttgtttaga

SEQ ID NO: 797052 - DNA, 19 bp, Mus musculus
  siRNA target sequence for 4931417A20 (NM_177600.2,699-717).
gagtttttgtttagatact

SEQ ID NO: 797053 - DNA, 19 bp, Mus musculus
  siRNA target sequence for 4931417A20 (NM_177600.2,793-811).
gccaaaagcgaaattaata

SEQ ID NO: 797054 - DNA, 19 bp, Mus musculus
  siRNA target sequence for 4931417A20 (NM_177600.2,795-813).
caaaagcgaaattaatact

SEQ ID NO: 797055 - DNA, 19 bp, Mus musculus
  siRNA target sequence for 4931417A20 (NM_177600.2,857-875).
gagtcctttgcctagataa

SEQ ID NO: 797056 - DNA, 19 bp, Mus musculus
  siRNA target sequence for 4931417A20 (NM_177600.2,907-925).
gttactgacagtagaaaat

SEQ ID NO: 797057 - DNA, 19 bp, Mus musculus
  siRNA target sequence for 4931417A20 (NM_177600.2,968-986).
ccagtggatgttcagaatt

SEQ ID NO: 797058 - DNA, 19 bp, Mus musculus
  siRNA target sequence for 4931417A20 (NM_177600.2,1014-1032).
ggtagatgaatcactagaa

SEQ ID NO: 797059 - DNA, 19 bp, Mus musculus
  siRNA target sequence for 4931417A20 (NM_177600.2,1015-1033).
gtagatgaatcactagaaa

SEQ ID NO: 797060 - DNA, 19 bp, Mus musculus
  siRNA target sequence for 4931417A20 (NM_177600.2,1034-1052).
cagaaatggtacgtttaga

SEQ ID NO: 797061 - DNA, 19 bp, Mus musculus
  siRNA target sequence for 4931417A20 (NM_177600.2,1077-1095).
ccacagtggtggagatata

SEQ ID NO: 797062 - DNA, 19 bp, Mus musculus
  siRNA target sequence for 4931417A20 (NM_177600.2,1080-1098).
cagtggtggagatatacct

SEQ ID NO: 797063 - DNA, 19 bp, Mus musculus
  siRNA target sequence for 4931417A20 (NM_177600.2,1097-1115).
ctctggacactcgaagtaa

SEQ ID NO: 797064 - DNA, 19 bp, Mus musculus
  siRNA target sequence for 4931417A20 (NM_177600.2,1099-1117).
ctggacactcgaagtaaca

SEQ ID NO: 797065 - DNA, 19 bp, Mus musculus
  siRNA target sequence for 4931417A20 (NM_177600.2,1101-1119).
ggacactcgaagtaacaaa

SEQ ID NO: 797066 - DNA, 19 bp, Mus musculus
  siRNA target sequence for 4931417A20 (NM_177600.2,1125-1143).
ctctaatggcatgtcaaat

SEQ ID NO: 797067 - DNA, 19 bp, Mus musculus
  siRNA target sequence for 4931417A20 (NM_177600.2,1127-1145).
ctaatggcatgtcaaatga

SEQ ID NO: 797068 - DNA, 19 bp, Mus musculus
  siRNA target sequence for 4931417A20 (NM_177600.2,1150-1168).
gctcacaaaagaaactata

SEQ ID NO: 797069 - DNA, 19 bp, Mus musculus
  siRNA target sequence for 4931417A20 (NM_177600.2,1193-1211).
cattcaaacagcaatccaa

SEQ ID NO: 797070 - DNA, 19 bp, Mus musculus
  siRNA target sequence for 4931417A20 (NM_177600.2,1272-1290).
caaagcaggtttagattca

SEQ ID NO: 797071 - DNA, 19 bp, Mus musculus
  siRNA target sequence for 4931417A20 (NM_177600.2,1322-1340).
gtaagaaacatggtttaca

SEQ ID NO: 797072 - DNA, 19 bp, Mus musculus
  siRNA target sequence for 4931417A20 (NM_177600.2,1346-1364).
caagtcatgttacattaga

SEQ ID NO: 797073 - DNA, 19 bp, Mus musculus
  siRNA target sequence for 4931417A20 (NM_177600.2,1510-1528).
ccatctgctagttctgata

SEQ ID NO: 797074 - DNA, 19 bp, Mus musculus
  siRNA target sequence for 4931417A20 (NM_177600.2,1511-1529).
catctgctagttctgataa

SEQ ID NO: 797075 - DNA, 19 bp, Mus musculus
  siRNA target sequence for 4931417A20 (NM_177600.2,1514-1532).
ctgctagttctgataataa

SEQ ID NO: 797076 - DNA, 19 bp, Mus musculus
  siRNA target sequence for 4931417A20 (NM_177600.2,1623-1641).
gacaaatacaaatgacata

SEQ ID NO: 797077 - DNA, 19 bp, Mus musculus
  siRNA target sequence for 4931417A20 (NM_177600.2,1765-1783).
ctgacaacttcctcagaaa

SEQ ID NO: 797078 - DNA, 19 bp, Mus musculus
  siRNA target sequence for 4931417A20 (NM_177600.2,1796-1814).
gtgagagtcagataactga

SEQ ID NO: 797079 - DNA, 19 bp, Mus musculus
  siRNA target sequence for 4931417A20 (NM_177600.2,1798-1816).
gagagtcagataactgaaa

SEQ ID NO: 797080 - DNA, 19 bp, Mus musculus
  siRNA target sequence for 4931417A20 (NM_177600.2,1806-1824).
gataactgaaactccaaaa

SEQ ID NO: 797081 - DNA, 19 bp, Mus musculus
  siRNA target sequence for 4931417A20 (NM_177600.2,1972-1990).
ccatctgcagactcagtaa

SEQ ID NO: 797082 - DNA, 19 bp, Mus musculus
  siRNA target sequence for 4931417A20 (NM_177600.2,2045-2063).
ctccaggctacataaagtt

SEQ ID NO: 797083 - DNA, 19 bp, Mus musculus
  siRNA target sequence for 4931417A20 (NM_177600.2,2120-2138).
cgcccagcatccctttatt

SEQ ID NO: 797084 - DNA, 19 bp, Mus musculus
  siRNA target sequence for 4931417A20 (NM_177600.2,2121-2139).
gcccagcatccctttattt

SEQ ID NO: 797085 - DNA, 19 bp, Mus musculus
  siRNA target sequence for 4931417A20 (NM_177600.2,2126-2144).
gcatccctttatttctgaa

SEQ ID NO: 797086 - DNA, 19 bp, Mus musculus
  siRNA target sequence for 4931417A20 (NM_177600.2,2178-2196).
gatcactcccgtgactttt

SEQ ID NO: 797087 - DNA, 19 bp, Mus musculus
  siRNA target sequence for 4931417A20 (NM_177600.2,2181-2199).
cactcccgtgactttttgt

SEQ ID NO: 797088 - DNA, 19 bp, Mus musculus
  siRNA target sequence for 4931417A20 (NM_177600.2,2183-2201).
ctcccgtgactttttgtaa

SEQ ID NO: 797089 - DNA, 19 bp, Mus musculus
  siRNA target sequence for 4931417A20 (NM_177600.2,2185-2203).
cccgtgactttttgtaaga

SEQ ID NO: 797090 - DNA, 19 bp, Mus musculus
  siRNA target sequence for 4931417A20 (NM_177600.2,2186-2204).
ccgtgactttttgtaagaa

SEQ ID NO: 797091 - DNA, 19 bp, Mus musculus
  siRNA target sequence for 4931417A20 (NM_177600.2,2187-2205).
cgtgactttttgtaagaat

SEQ ID NO: 797092 - DNA, 19 bp, Mus musculus
  siRNA target sequence for 4931417A20 (NM_177600.2,2209-2227).
gttctggatgacactagaa

SEQ ID NO: 797093 - DNA, 19 bp, Mus musculus
  siRNA target sequence for 4931417A20 (NM_177600.2,2242-2260).
gatcctaccagcaatagca

SEQ ID NO: 797094 - DNA, 19 bp, Mus musculus
  siRNA target sequence for 4931417A20 (NM_177600.2,2263-2281).
gctgctgacaccatgagta

SEQ ID NO: 797095 - DNA, 19 bp, Mus musculus
  siRNA target sequence for 4931417A20 (NM_177600.2,2266-2284).
gctgacaccatgagtaact

SEQ ID NO: 797096 - DNA, 19 bp, Mus musculus
  siRNA target sequence for 4931417A20 (NM_177600.2,2336-2354).
ctgcacagacggtttatga

SEQ ID NO: 797097 - DNA, 19 bp, Mus musculus
  siRNA target sequence for 4931417A20 (NM_177600.2,2338-2356).
gcacagacggtttatgact

SEQ ID NO: 797098 - DNA, 19 bp, Mus musculus
  siRNA target sequence for 4931417A20 (NM_177600.2,2345-2363).
cggtttatgactcttcttt

SEQ ID NO: 797099 - DNA, 19 bp, Mus musculus
  siRNA target sequence for 4931417A20 (NM_177600.2,2460-2478).
cttttctcctggtaacaat

SEQ ID NO: 797100 - DNA, 19 bp, Mus musculus
  siRNA target sequence for 4931417A20 (NM_177600.2,2572-2590).
gagatgctggataacataa

SEQ ID NO: 797101 - DNA, 19 bp, Mus musculus
  siRNA target sequence for 4931417A20 (NM_177600.2,2574-2592).
gatgctggataacataatt

SEQ ID NO: 797102 - DNA, 19 bp, Mus musculus
  siRNA target sequence for 4931417A20 (NM_177600.2,2578-2596).
ctggataacataattgatt

SEQ ID NO: 797103 - DNA, 19 bp, Mus musculus
  siRNA target sequence for BC027828 (NM_177601.2,77-95).
cattactcttcctcatcat

SEQ ID NO: 797104 - DNA, 19 bp, Mus musculus
  siRNA target sequence for BC027828 (NM_177601.2,159-177).
gatatttgacactatcctt

SEQ ID NO: 797105 - DNA, 19 bp, Mus musculus
  siRNA target sequence for BC027828 (NM_177601.2,201-219).
ggccggacggtgtaagtct

SEQ ID NO: 797106 - DNA, 19 bp, Mus musculus
  siRNA target sequence for BC027828 (NM_177601.2,232-250).
cgacatggatcgcacaata

SEQ ID NO: 797107 - DNA, 19 bp, Mus musculus
  siRNA target sequence for BC027828 (NM_177601.2,235-253).
catggatcgcacaatatta

SEQ ID NO: 797108 - DNA, 19 bp, Mus musculus
  siRNA target sequence for BC027828 (NM_177601.2,238-256).
ggatcgcacaatattaaaa

SEQ ID NO: 797109 - DNA, 19 bp, Mus musculus
  siRNA target sequence for BC027828 (NM_177601.2,239-257).
gatcgcacaatattaaaaa

SEQ ID NO: 797110 - DNA, 19 bp, Mus musculus
  siRNA target sequence for BC027828 (NM_177601.2,263-281).
cctggtacctcattgcaat

SEQ ID NO: 797111 - DNA, 19 bp, Mus musculus
  siRNA target sequence for BC027828 (NM_177601.2,267-285).
gtacctcattgcaatgtta

SEQ ID NO: 797112 - DNA, 19 bp, Mus musculus
  siRNA target sequence for BC027828 (NM_177601.2,270-288).
cctcattgcaatgttactt

SEQ ID NO: 797113 - DNA, 19 bp, Mus musculus
  siRNA target sequence for BC027828 (NM_177601.2,330-348).
gtttactaccatgaatctt

SEQ ID NO: 797114 - DNA, 19 bp, Mus musculus
  siRNA target sequence for BC027828 (NM_177601.2,335-353).
ctaccatgaatctttccta

SEQ ID NO: 797115 - DNA, 19 bp, Mus musculus
  siRNA target sequence for BC027828 (NM_177601.2,351-369).
ctatgtcttcattccttta

SEQ ID NO: 797116 - DNA, 19 bp, Mus musculus
  siRNA target sequence for BC027828 (NM_177601.2,381-399).
ggctggcgctctaacagaa

SEQ ID NO: 797117 - DNA, 19 bp, Mus musculus
  siRNA target sequence for BC027828 (NM_177601.2,391-409).
ctaacagaacttggatata

SEQ ID NO: 797118 - DNA, 19 bp, Mus musculus
  siRNA target sequence for BC027828 (NM_177601.2,397-415).
gaacttggatataatgtct

SEQ ID NO: 797119 - DNA, 19 bp, Mus musculus
  siRNA target sequence for B930090D16 (NM_177602.2,143-161).
ggagggctccgagtttctt

SEQ ID NO: 797120 - DNA, 19 bp, Mus musculus
  siRNA target sequence for B930090D16 (NM_177602.2,188-206).
ctctgctgaccgaaccatt

SEQ ID NO: 797121 - DNA, 19 bp, Mus musculus
  siRNA target sequence for B930090D16 (NM_177602.2,190-208).
ctgctgaccgaaccattat

SEQ ID NO: 797122 - DNA, 19 bp, Mus musculus
  siRNA target sequence for B930090D16 (NM_177602.2,222-240).
cggaccgctgccaagatct

SEQ ID NO: 797123 - DNA, 19 bp, Mus musculus
  siRNA target sequence for B930090D16 (NM_177602.2,503-521).
ccgagcgtgcacactacaa

SEQ ID NO: 797124 - DNA, 19 bp, Mus musculus
  siRNA target sequence for AA986860 (NM_177604.2,1719-1737).
cccagtctgcttgtaaata

SEQ ID NO: 797125 - DNA, 19 bp, Mus musculus
  siRNA target sequence for AA986860 (NM_177604.2,1720-1738).
ccagtctgcttgtaaataa

SEQ ID NO: 797126 - DNA, 19 bp, Mus musculus
  siRNA target sequence for AA986860 (NM_177604.2,1725-1743).
ctgcttgtaaataagcata

SEQ ID NO: 797127 - DNA, 19 bp, Mus musculus
  siRNA target sequence for AA986860 (NM_177604.2,1965-1983).
cctatccctaagaccttaa

SEQ ID NO: 797128 - DNA, 19 bp, Mus musculus
  siRNA target sequence for AA986860 (NM_177604.2,1966-1984).
ctatccctaagaccttaaa

SEQ ID NO: 797129 - DNA, 19 bp, Mus musculus
  siRNA target sequence for AA986860 (NM_177604.2,1976-1994).
gaccttaaaggaaaacagt

SEQ ID NO: 797130 - DNA, 19 bp, Mus musculus
  siRNA target sequence for AA986860 (NM_177604.2,2197-2215).
cacccagcgcctttcgtaa

SEQ ID NO: 797131 - DNA, 19 bp, Mus musculus
  siRNA target sequence for AA986860 (NM_177604.2,2199-2217).
cccagcgcctttcgtaatt

SEQ ID NO: 797132 - DNA, 19 bp, Mus musculus
  siRNA target sequence for 4933430I17 (NM_177607.2,72-90).
cttcggagctcaatttggt

SEQ ID NO: 797133 - DNA, 19 bp, Mus musculus
  siRNA target sequence for 4933430I17 (NM_177607.2,88-106).
ggtctggttcggtactgaa

SEQ ID NO: 797134 - DNA, 19 bp, Mus musculus
  siRNA target sequence for 4933430I17 (NM_177607.2,89-107).
gtctggttcggtactgaaa

SEQ ID NO: 797135 - DNA, 19 bp, Mus musculus
  siRNA target sequence for 4933430I17 (NM_177607.2,99-117).
gtactgaaagcgcaagaat

SEQ ID NO: 797136 - DNA, 19 bp, Mus musculus
  siRNA target sequence for 4933430I17 (NM_177607.2,104-122).
gaaagcgcaagaatcattt

SEQ ID NO: 797137 - DNA, 19 bp, Mus musculus
  siRNA target sequence for 4933430I17 (NM_177607.2,110-128).
gcaagaatcatttgattct

SEQ ID NO: 797138 - DNA, 19 bp, Mus musculus
  siRNA target sequence for 4933430I17 (NM_177607.2,111-129).
caagaatcatttgattcta

SEQ ID NO: 797139 - DNA, 19 bp, Mus musculus
  siRNA target sequence for 4933430I17 (NM_177607.2,255-273).
cccaaatctcccagagaaa

SEQ ID NO: 797140 - DNA, 19 bp, Mus musculus
  siRNA target sequence for 4933430I17 (NM_177607.2,287-305).
cccgacactcaccattgta

SEQ ID NO: 797141 - DNA, 19 bp, Mus musculus
  siRNA target sequence for 4933430I17 (NM_177607.2,288-306).
ccgacactcaccattgtaa

SEQ ID NO: 797142 - DNA, 19 bp, Mus musculus
  siRNA target sequence for 4933430I17 (NM_177607.2,289-307).
cgacactcaccattgtaaa

SEQ ID NO: 797143 - DNA, 19 bp, Mus musculus
  siRNA target sequence for 4933430I17 (NM_177607.2,294-312).
ctcaccattgtaaacatca

SEQ ID NO: 797144 - DNA, 19 bp, Mus musculus
  siRNA target sequence for 4933430I17 (NM_177607.2,348-366).
cagcaacaaccatcagaat

SEQ ID NO: 797145 - DNA, 19 bp, Mus musculus
  siRNA target sequence for 4933430I17 (NM_177607.2,354-372).
caaccatcagaatttacct

SEQ ID NO: 797146 - DNA, 19 bp, Mus musculus
  siRNA target sequence for 4933430I17 (NM_177607.2,425-443).
gtctccgaaggctttacgt

SEQ ID NO: 797147 - DNA, 19 bp, Mus musculus
  siRNA target sequence for 4933430I17 (NM_177607.2,431-449).
gaaggctttacgtgacaaa

SEQ ID NO: 797148 - DNA, 19 bp, Mus musculus
  siRNA target sequence for 4933430I17 (NM_177607.2,434-452).
ggctttacgtgacaaagat

SEQ ID NO: 797149 - DNA, 19 bp, Mus musculus
  siRNA target sequence for 4933430I17 (NM_177607.2,466-484).
ctcctaggcctctcaaact

SEQ ID NO: 797150 - DNA, 19 bp, Mus musculus
  siRNA target sequence for 4933430I17 (NM_177607.2,479-497).
caaactctcagtgttgaat

SEQ ID NO: 797151 - DNA, 19 bp, Mus musculus
  siRNA target sequence for 4933430I17 (NM_177607.2,487-505).
cagtgttgaatttgaatga

SEQ ID NO: 797152 - DNA, 19 bp, Mus musculus
  siRNA target sequence for 4933430I17 (NM_177607.2,494-512).
gaatttgaatgaagcaaaa

SEQ ID NO: 797153 - DNA, 19 bp, Mus musculus
  siRNA target sequence for 4933430I17 (NM_177607.2,576-594).
gacgtgagcccagttcaaa

SEQ ID NO: 797154 - DNA, 19 bp, Mus musculus
  siRNA target sequence for 4933430I17 (NM_177607.2,652-670).
gcaagccatctctgtacta

SEQ ID NO: 797155 - DNA, 19 bp, Mus musculus
  siRNA target sequence for 4933430I17 (NM_177607.2,691-709).
gaagtccagcggcaattgt

SEQ ID NO: 797156 - DNA, 19 bp, Mus musculus
  siRNA target sequence for 4933430I17 (NM_177607.2,729-747).
caccacttggagcaattaa

SEQ ID NO: 797157 - DNA, 19 bp, Mus musculus
  siRNA target sequence for 4933430I17 (NM_177607.2,731-749).
ccacttggagcaattaagt

SEQ ID NO: 797158 - DNA, 19 bp, Mus musculus
  siRNA target sequence for 4933430I17 (NM_177607.2,812-830).
catcttggcacatgagaaa

SEQ ID NO: 797159 - DNA, 19 bp, Mus musculus
  siRNA target sequence for 4933430I17 (NM_177607.2,818-836).
ggcacatgagaaatccata

SEQ ID NO: 797160 - DNA, 19 bp, Mus musculus
  siRNA target sequence for 4933430I17 (NM_177607.2,819-837).
gcacatgagaaatccataa

SEQ ID NO: 797161 - DNA, 19 bp, Mus musculus
  siRNA target sequence for 4933430I17 (NM_177607.2,820-838).
cacatgagaaatccataat

SEQ ID NO: 797162 - DNA, 19 bp, Mus musculus
  siRNA target sequence for 4933430I17 (NM_177607.2,858-876).
gagttgtccaagatgagaa

SEQ ID NO: 797163 - DNA, 19 bp, Mus musculus
  siRNA target sequence for 4933430I17 (NM_177607.2,981-999).
gctcgtctgaggaagcttt

SEQ ID NO: 797164 - DNA, 19 bp, Mus musculus
  siRNA target sequence for 4933430I17 (NM_177607.2,1087-1105).
cgaaacaggagcctaagaa

SEQ ID NO: 797165 - DNA, 19 bp, Mus musculus
  siRNA target sequence for 4933430I17 (NM_177607.2,1147-1165).
ccacgtcgggccatttctt

SEQ ID NO: 797166 - DNA, 19 bp, Mus musculus
  siRNA target sequence for 4933430I17 (NM_177607.2,1172-1190).
cagtgtaggactcagaata

SEQ ID NO: 797167 - DNA, 19 bp, Mus musculus
  siRNA target sequence for 4933430I17 (NM_177607.2,1319-1337).
ggagagcgctgtactatat

SEQ ID NO: 797168 - DNA, 19 bp, Mus musculus
  siRNA target sequence for 4933430I17 (NM_177607.2,1407-1425).
cgtaacctcaagaaccttt

SEQ ID NO: 797169 - DNA, 19 bp, Mus musculus
  siRNA target sequence for C630011I23 (NM_177608.2,306-324).
cgtcccccagaagaagaat

SEQ ID NO: 797170 - DNA, 19 bp, Mus musculus
  siRNA target sequence for C630011I23 (NM_177608.2,348-366).
ggctctccccagtgataat

SEQ ID NO: 797171 - DNA, 19 bp, Mus musculus
  siRNA target sequence for C630011I23 (NM_177608.2,352-370).
ctccccagtgataatggaa

SEQ ID NO: 797172 - DNA, 19 bp, Mus musculus
  siRNA target sequence for C630011I23 (NM_177608.2,389-407).
caactccaatccctagtta

SEQ ID NO: 797173 - DNA, 19 bp, Mus musculus
  siRNA target sequence for C630011I23 (NM_177608.2,416-434).
cttgctacccgtttgttca

SEQ ID NO: 797174 - DNA, 19 bp, Mus musculus
  siRNA target sequence for C630011I23 (NM_177608.2,425-443).
cgtttgttcaggaaaacca

SEQ ID NO: 797175 - DNA, 19 bp, Mus musculus
  siRNA target sequence for C630011I23 (NM_177608.2,435-453).
ggaaaaccagtccaataga

SEQ ID NO: 797176 - DNA, 19 bp, Mus musculus
  siRNA target sequence for C630011I23 (NM_177608.2,441-459).
ccagtccaatagacaattt

SEQ ID NO: 797177 - DNA, 19 bp, Mus musculus
  siRNA target sequence for C630011I23 (NM_177608.2,444-462).
gtccaatagacaatttcct

SEQ ID NO: 797178 - DNA, 19 bp, Mus musculus
  siRNA target sequence for C630011I23 (NM_177608.2,460-478).
cctttatataacaacgata

SEQ ID NO: 797179 - DNA, 19 bp, Mus musculus
  siRNA target sequence for C630011I23 (NM_177608.2,461-479).
ctttatataacaacgatat

SEQ ID NO: 797180 - DNA, 19 bp, Mus musculus
  siRNA target sequence for C630011I23 (NM_177608.2,519-537).
ccttgcctaccccattata

SEQ ID NO: 797181 - DNA, 19 bp, Mus musculus
  siRNA target sequence for C630011I23 (NM_177608.2,589-607).
gcaccctgtgcccaagtta

SEQ ID NO: 797182 - DNA, 19 bp, Mus musculus
  siRNA target sequence for C630011I23 (NM_177608.2,654-672).
ggctgcaaacactgtcaat

SEQ ID NO: 797183 - DNA, 19 bp, Mus musculus
  siRNA target sequence for C630011I23 (NM_177608.2,689-707).
gcaccgagcgtccaaatca

SEQ ID NO: 797184 - DNA, 19 bp, Mus musculus
  siRNA target sequence for C630011I23 (NM_177608.2,736-754).
catcggagcaggaatggta

SEQ ID NO: 797185 - DNA, 19 bp, Mus musculus
  siRNA target sequence for C630011I23 (NM_177608.2,812-830).
gaccacaggtgaagaatgt

SEQ ID NO: 797186 - DNA, 19 bp, Mus musculus
  siRNA target sequence for C630011I23 (NM_177608.2,860-878).
gtcctgatagccgatcaaa

SEQ ID NO: 797187 - DNA, 19 bp, Mus musculus
  siRNA target sequence for C630011I23 (NM_177608.2,862-880).
cctgatagccgatcaaaaa

SEQ ID NO: 797188 - DNA, 19 bp, Mus musculus
  siRNA target sequence for C630011I23 (NM_177608.2,863-881).
ctgatagccgatcaaaaat

SEQ ID NO: 797189 - DNA, 19 bp, Mus musculus
  siRNA target sequence for C630011I23 (NM_177608.2,919-937).
ccatcagacatcgctaata

SEQ ID NO: 797190 - DNA, 19 bp, Mus musculus
  siRNA target sequence for C630011I23 (NM_177608.2,920-938).
catcagacatcgctaataa

SEQ ID NO: 797191 - DNA, 19 bp, Mus musculus
  siRNA target sequence for C630011I23 (NM_177608.2,1073-1091).
gcagtcccaagcacaacaa

SEQ ID NO: 797192 - DNA, 19 bp, Mus musculus
  siRNA target sequence for C630011I23 (NM_177608.2,1157-1175).
gctgttcaggtggtgtaaa

SEQ ID NO: 797193 - DNA, 19 bp, Mus musculus
  siRNA target sequence for C630011I23 (NM_177608.2,1171-1189).
gtaaactggcccaaagtaa

SEQ ID NO: 797194 - DNA, 19 bp, Mus musculus
  siRNA target sequence for C630011I23 (NM_177608.2,1305-1323).
cagtacttcctcagaaaga

SEQ ID NO: 797195 - DNA, 19 bp, Mus musculus
  siRNA target sequence for C630011I23 (NM_177608.2,1345-1363).
caagacaataagcacttaa

SEQ ID NO: 797196 - DNA, 19 bp, Mus musculus
  siRNA target sequence for C630011I23 (NM_177608.2,1348-1366).
gacaataagcacttaaact

SEQ ID NO: 797197 - DNA, 19 bp, Mus musculus
  siRNA target sequence for C630011I23 (NM_177608.2,1389-1407).
cccaaattccgagtcttta

SEQ ID NO: 797198 - DNA, 19 bp, Mus musculus
  siRNA target sequence for C630011I23 (NM_177608.2,1390-1408).
ccaaattccgagtctttat

SEQ ID NO: 797199 - DNA, 19 bp, Mus musculus
  siRNA target sequence for C630011I23 (NM_177608.2,1391-1409).
caaattccgagtctttata

SEQ ID NO: 797200 - DNA, 19 bp, Mus musculus
  siRNA target sequence for C630011I23 (NM_177608.2,1397-1415).
ccgagtctttatattttga

SEQ ID NO: 797201 - DNA, 19 bp, Mus musculus
  siRNA target sequence for C630011I23 (NM_177608.2,1416-1434).
ggatgaagatgggtttcaa

SEQ ID NO: 797202 - DNA, 19 bp, Mus musculus
  siRNA target sequence for C630011I23 (NM_177608.2,1518-1536).
ctcacccatcaatatagtt

SEQ ID NO: 797203 - DNA, 19 bp, Mus musculus
  siRNA target sequence for C630011I23 (NM_177608.2,1615-1633).
gctacagcacaggaatact

SEQ ID NO: 797204 - DNA, 19 bp, Mus musculus
  siRNA target sequence for C630011I23 (NM_177608.2,1626-1644).
ggaatactcagaaataagt

SEQ ID NO: 797205 - DNA, 19 bp, Mus musculus
  siRNA target sequence for C630011I23 (NM_177608.2,1659-1677).
gttgcaggaagctctatca

SEQ ID NO: 797206 - DNA, 19 bp, Mus musculus
  siRNA target sequence for C630011I23 (NM_177608.2,1665-1683).
ggaagctctatcaaaagca

SEQ ID NO: 797207 - DNA, 19 bp, Mus musculus
  siRNA target sequence for 5730458D16 (NM_177609.2,665-683).
gcccaaccctgagaaaaat

SEQ ID NO: 797208 - DNA, 19 bp, Mus musculus
  siRNA target sequence for BC046518 (NM_177611.2,506-524).
gcttggaagacaacttaca

SEQ ID NO: 797209 - DNA, 19 bp, Mus musculus
  siRNA target sequence for BC046518 (NM_177611.2,539-557).
catatccaagtgaaataca

SEQ ID NO: 797210 - DNA, 19 bp, Mus musculus
  siRNA target sequence for BC046518 (NM_177611.2,577-595).
gaaccttgccaggaacata

SEQ ID NO: 797211 - DNA, 19 bp, Mus musculus
  siRNA target sequence for BC046518 (NM_177611.2,603-621).
gtttgaccccccagaatct

SEQ ID NO: 797212 - DNA, 19 bp, Mus musculus
  siRNA target sequence for BC046518 (NM_177611.2,658-676).
gagtccactcatctagaaa

SEQ ID NO: 797213 - DNA, 19 bp, Mus musculus
  siRNA target sequence for BC046518 (NM_177611.2,773-791).
catccacccaggtggtatt

SEQ ID NO: 797214 - DNA, 19 bp, Mus musculus
  siRNA target sequence for BC046518 (NM_177611.2,1042-1060).
gctgaggaggacagtatct

SEQ ID NO: 797215 - DNA, 19 bp, Mus musculus
  siRNA target sequence for BC046518 (NM_177611.2,1043-1061).
ctgaggaggacagtatctt

SEQ ID NO: 797216 - DNA, 19 bp, Mus musculus
  siRNA target sequence for BC046518 (NM_177611.2,1051-1069).
gacagtatcttctttgata

SEQ ID NO: 797217 - DNA, 19 bp, Mus musculus
  siRNA target sequence for BC046518 (NM_177611.2,1292-1310).
ctgtgccttcctataagat

SEQ ID NO: 797218 - DNA, 19 bp, Mus musculus
  siRNA target sequence for BC046518 (NM_177611.2,1315-1333).
ccctgcttggccttaggat

SEQ ID NO: 797219 - DNA, 19 bp, Mus musculus
  siRNA target sequence for BC046518 (NM_177611.2,1371-1389).
gggtgagacttcttgtgaa

SEQ ID NO: 797220 - DNA, 19 bp, Mus musculus
  siRNA target sequence for BC046518 (NM_177611.2,1401-1419).
ccatggctcacctaaagca

SEQ ID NO: 797221 - DNA, 19 bp, Mus musculus
  siRNA target sequence for BC046518 (NM_177611.2,1420-1438).
ccctttgtagaccatgaat

SEQ ID NO: 797222 - DNA, 19 bp, Mus musculus
  siRNA target sequence for BC046518 (NM_177611.2,1421-1439).
cctttgtagaccatgaatt

SEQ ID NO: 797223 - DNA, 19 bp, Mus musculus
  siRNA target sequence for BC046518 (NM_177611.2,1443-1461).
ccaagaatcagataacttt

SEQ ID NO: 797224 - DNA, 19 bp, Mus musculus
  siRNA target sequence for BC046518 (NM_177611.2,1536-1554).
cctgactcaacccatactt

SEQ ID NO: 797225 - DNA, 19 bp, Mus musculus
  siRNA target sequence for BC046518 (NM_177611.2,1788-1806).
ccccaagtggccacaagat

SEQ ID NO: 797226 - DNA, 19 bp, Mus musculus
  siRNA target sequence for BC046518 (NM_177611.2,1816-1834).
cttctccagaaggatagat

SEQ ID NO: 797227 - DNA, 19 bp, Mus musculus
  siRNA target sequence for BC046518 (NM_177611.2,1884-1902).
gaggcaggaggcagaatgt

SEQ ID NO: 797228 - DNA, 19 bp, Mus musculus
  siRNA target sequence for BC046518 (NM_177611.2,1891-1909).
gaggcagaatgtgaagata

SEQ ID NO: 797229 - DNA, 19 bp, Mus musculus
  siRNA target sequence for BC046518 (NM_177611.2,1893-1911).
ggcagaatgtgaagataca

SEQ ID NO: 797230 - DNA, 19 bp, Mus musculus
  siRNA target sequence for BC046518 (NM_177611.2,1894-1912).
gcagaatgtgaagatacat

SEQ ID NO: 797231 - DNA, 19 bp, Mus musculus
  siRNA target sequence for BC046518 (NM_177611.2,1934-1952).
ccaaccagcaccatgttca

SEQ ID NO: 797232 - DNA, 19 bp, Mus musculus
  siRNA target sequence for BC046518 (NM_177611.2,1986-2004).
catgccccaagctcaatct

SEQ ID NO: 797233 - DNA, 19 bp, Mus musculus
  siRNA target sequence for BC046518 (NM_177611.2,2046-2064).
ggctaatgacatcagaaat

SEQ ID NO: 797234 - DNA, 19 bp, Mus musculus
  siRNA target sequence for BC046518 (NM_177611.2,2087-2105).
ccctgcgcctctatcaact

SEQ ID NO: 797235 - DNA, 19 bp, Mus musculus
  siRNA target sequence for BC046518 (NM_177611.2,2135-2153).
cccacctacgcaagaacaa

SEQ ID NO: 797236 - DNA, 19 bp, Mus musculus
  siRNA target sequence for BC046518 (NM_177611.2,2136-2154).
ccacctacgcaagaacaat

SEQ ID NO: 797237 - DNA, 19 bp, Mus musculus
  siRNA target sequence for BC046518 (NM_177611.2,2170-2188).
gtagccgaggcctacttgt

SEQ ID NO: 797238 - DNA, 19 bp, Mus musculus
  siRNA target sequence for BC046518 (NM_177611.2,2173-2191).
gccgaggcctacttgtctt

SEQ ID NO: 797239 - DNA, 19 bp, Mus musculus
  siRNA target sequence for BC046518 (NM_177611.2,2174-2192).
ccgaggcctacttgtcttt

SEQ ID NO: 797240 - DNA, 19 bp, Mus musculus
  siRNA target sequence for BC046518 (NM_177611.2,2267-2285).
ctcaggagcgggaacgaat

SEQ ID NO: 797241 - DNA, 19 bp, Mus musculus
  siRNA target sequence for BC046518 (NM_177611.2,2272-2290).
gagcgggaacgaattctct

SEQ ID NO: 797242 - DNA, 19 bp, Mus musculus
  siRNA target sequence for BC046518 (NM_177611.2,2281-2299).
cgaattctctaccagtttt

SEQ ID NO: 797243 - DNA, 19 bp, Mus musculus
  siRNA target sequence for BC046518 (NM_177611.2,2329-2347).
gccttcccctcagtagatt

SEQ ID NO: 797244 - DNA, 19 bp, Mus musculus
  siRNA target sequence for BC046518 (NM_177611.2,2366-2384).
gtgcaatcatgctccttaa

SEQ ID NO: 797245 - DNA, 19 bp, Mus musculus
  siRNA target sequence for BC046518 (NM_177611.2,2368-2386).
gcaatcatgctccttaaca

SEQ ID NO: 797246 - DNA, 19 bp, Mus musculus
  siRNA target sequence for BC046518 (NM_177611.2,2421-2439).
gagctgtcaggaatttgta

SEQ ID NO: 797247 - DNA, 19 bp, Mus musculus
  siRNA target sequence for BC046518 (NM_177611.2,2426-2444).
gtcaggaatttgtaaccaa

SEQ ID NO: 797248 - DNA, 19 bp, Mus musculus
  siRNA target sequence for BC046518 (NM_177611.2,2431-2449).
gaatttgtaaccaacttga

SEQ ID NO: 797249 - DNA, 19 bp, Mus musculus
  siRNA target sequence for BC046518 (NM_177611.2,2523-2541).
gctcgaatgggctatagat

SEQ ID NO: 797250 - DNA, 19 bp, Mus musculus
  siRNA target sequence for BC046518 (NM_177611.2,2526-2544).
cgaatgggctatagatgaa

SEQ ID NO: 797251 - DNA, 19 bp, Mus musculus
  siRNA target sequence for BC046518 (NM_177611.2,2629-2647).
cccacgatgcccacctata

SEQ ID NO: 797252 - DNA, 19 bp, Mus musculus
  siRNA target sequence for BC046518 (NM_177611.2,2633-2651).
cgatgcccacctataagca

SEQ ID NO: 797253 - DNA, 19 bp, Mus musculus
  siRNA target sequence for BC046518 (NM_177611.2,2663-2681).
ctcggaagatgcatcacat

SEQ ID NO: 797254 - DNA, 19 bp, Mus musculus
  siRNA target sequence for BC046518 (NM_177611.2,2798-2816).
gtttggtaggacatatggt

SEQ ID NO: 797255 - DNA, 19 bp, Mus musculus
  siRNA target sequence for BC046518 (NM_177611.2,2954-2972).
cctggattgcgcgaatcaa

SEQ ID NO: 797256 - DNA, 19 bp, Mus musculus
  siRNA target sequence for BC046518 (NM_177611.2,3194-3212).
gcttacggaaggagtatct

SEQ ID NO: 797257 - DNA, 19 bp, Mus musculus
  siRNA target sequence for BC046518 (NM_177611.2,3216-3234).
gcacgagaaaactcgatat

SEQ ID NO: 797258 - DNA, 19 bp, Mus musculus
  siRNA target sequence for BC046518 (NM_177611.2,3220-3238).
gagaaaactcgatatgaga

SEQ ID NO: 797259 - DNA, 19 bp, Mus musculus
  siRNA target sequence for Vr22 (NM_177612.1,102-120).
cgccaataaccctgaatat

SEQ ID NO: 797260 - DNA, 19 bp, Mus musculus
  siRNA target sequence for Vr22 (NM_177612.1,147-165).
cgttcactgtggagaaact

SEQ ID NO: 797261 - DNA, 19 bp, Mus musculus
  siRNA target sequence for Vr22 (NM_177612.1,176-194).
ctgataatccaggttacta

SEQ ID NO: 797262 - DNA, 19 bp, Mus musculus
  siRNA target sequence for Vr22 (NM_177612.1,188-206).
gttactaccctggtgaatt

SEQ ID NO: 797263 - DNA, 19 bp, Mus musculus
  siRNA target sequence for Vr22 (NM_177612.1,228-246).
ggaagaaaggacgttcaaa

SEQ ID NO: 797264 - DNA, 19 bp, Mus musculus
  siRNA target sequence for Vr22 (NM_177612.1,232-250).
gaaaggacgttcaaagaga

SEQ ID NO: 797265 - DNA, 19 bp, Mus musculus
  siRNA target sequence for Vr22 (NM_177612.1,395-413).
gtatcagctgagagattta

SEQ ID NO: 797266 - DNA, 19 bp, Mus musculus
  siRNA target sequence for Vr22 (NM_177612.1,541-559).
gtcatctttccaaagaaca

SEQ ID NO: 797267 - DNA, 19 bp, Mus musculus
  siRNA target sequence for Vr22 (NM_177612.1,558-576).
cattcgagtctctcaaaaa

SEQ ID NO: 797268 - DNA, 19 bp, Mus musculus
  siRNA target sequence for Vr22 (NM_177612.1,562-580).
cgagtctctcaaaaatgtt

SEQ ID NO: 797269 - DNA, 19 bp, Mus musculus
  siRNA target sequence for Vr22 (NM_177612.1,640-658).
ggattatttggccttcaaa

SEQ ID NO: 797270 - DNA, 19 bp, Mus musculus
  siRNA target sequence for Vr22 (NM_177612.1,685-703).
ccagagggatgaaattgca

SEQ ID NO: 797271 - DNA, 19 bp, Mus musculus
  siRNA target sequence for Vr22 (NM_177612.1,734-752).
ccactcctgcattctattt

SEQ ID NO: 797272 - DNA, 19 bp, Mus musculus
  siRNA target sequence for Vr22 (NM_177612.1,820-838).
gatccagaacgctcttgat

SEQ ID NO: 797273 - DNA, 19 bp, Mus musculus
  siRNA target sequence for Vr22 (NM_177612.1,823-841).
ccagaacgctcttgatgta

SEQ ID NO: 797274 - DNA, 19 bp, Mus musculus
  siRNA target sequence for Vr22 (NM_177612.1,824-842).
cagaacgctcttgatgtaa

SEQ ID NO: 797275 - DNA, 19 bp, Mus musculus
  siRNA target sequence for Vr22 (NM_177612.1,826-844).
gaacgctcttgatgtaatt

SEQ ID NO: 797276 - DNA, 19 bp, Mus musculus
  siRNA target sequence for Vr22 (NM_177612.1,829-847).
cgctcttgatgtaatttca

SEQ ID NO: 797277 - DNA, 19 bp, Mus musculus
  siRNA target sequence for Vr22 (NM_177612.1,830-848).
gctcttgatgtaatttcaa

SEQ ID NO: 797278 - DNA, 19 bp, Mus musculus
  siRNA target sequence for Vr22 (NM_177612.1,836-854).
gatgtaatttcaaatgctt

SEQ ID NO: 797279 - DNA, 19 bp, Mus musculus
  siRNA target sequence for Vr22 (NM_177612.1,1112-1130).
ctgctgacggagtacatga

SEQ ID NO: 797280 - DNA, 19 bp, Mus musculus
  siRNA target sequence for Vr22 (NM_177612.1,1115-1133).
ctgacggagtacatgagta

SEQ ID NO: 797281 - DNA, 19 bp, Mus musculus
  siRNA target sequence for Vr22 (NM_177612.1,1117-1135).
gacggagtacatgagtaat

SEQ ID NO: 797282 - DNA, 19 bp, Mus musculus
  siRNA target sequence for Vr22 (NM_177612.1,1120-1138).
ggagtacatgagtaatact

SEQ ID NO: 797283 - DNA, 19 bp, Mus musculus
  siRNA target sequence for Vr22 (NM_177612.1,1153-1171).
gagtaataccctgaatact

SEQ ID NO: 797284 - DNA, 19 bp, Mus musculus
  siRNA target sequence for Vr22 (NM_177612.1,1163-1181).
ctgaatactgccattgtca

SEQ ID NO: 797285 - DNA, 19 bp, Mus musculus
  siRNA target sequence for Vr22 (NM_177612.1,1216-1234).
gctccgcaaagctatcata

SEQ ID NO: 797286 - DNA, 19 bp, Mus musculus
  siRNA target sequence for Vr22 (NM_177612.1,1219-1237).
ccgcaaagctatcatagat

SEQ ID NO: 797287 - DNA, 19 bp, Mus musculus
  siRNA target sequence for Vr22 (NM_177612.1,1221-1239).
gcaaagctatcatagatca

SEQ ID NO: 797288 - DNA, 19 bp, Mus musculus
  siRNA target sequence for Vr22 (NM_177612.1,1304-1322).
ggccgagtcaaggaaatca

SEQ ID NO: 797289 - DNA, 19 bp, Mus musculus
  siRNA target sequence for Vr22 (NM_177612.1,1305-1323).
gccgagtcaaggaaatcaa

SEQ ID NO: 797290 - DNA, 19 bp, Mus musculus
  siRNA target sequence for Vr22 (NM_177612.1,1306-1324).
ccgagtcaaggaaatcaaa

SEQ ID NO: 797291 - DNA, 19 bp, Mus musculus
  siRNA target sequence for Vr22 (NM_177612.1,1410-1428).
ggattaaaatcgtcagaat

SEQ ID NO: 797292 - DNA, 19 bp, Mus musculus
  siRNA target sequence for Vr22 (NM_177612.1,1411-1429).
gattaaaatcgtcagaatt

SEQ ID NO: 797293 - DNA, 19 bp, Mus musculus
  siRNA target sequence for Vr22 (NM_177612.1,1449-1467).
ccctgtgtccacagatcat

SEQ ID NO: 797294 - DNA, 19 bp, Mus musculus
  siRNA target sequence for Vr22 (NM_177612.1,1450-1468).
cctgtgtccacagatcata

SEQ ID NO: 797295 - DNA, 19 bp, Mus musculus
  siRNA target sequence for Vr22 (NM_177612.1,1451-1469).
ctgtgtccacagatcataa

SEQ ID NO: 797296 - DNA, 19 bp, Mus musculus
  siRNA target sequence for Vr22 (NM_177612.1,1453-1471).
gtgtccacagatcataaat

SEQ ID NO: 797297 - DNA, 19 bp, Mus musculus
  siRNA target sequence for Vr22 (NM_177612.1,1539-1557).
gcacatgggaacactacat

SEQ ID NO: 797298 - DNA, 19 bp, Mus musculus
  siRNA target sequence for Vr22 (NM_177612.1,1569-1587).
ctgaagctgtagatgacat

SEQ ID NO: 797299 - DNA, 19 bp, Mus musculus
  siRNA target sequence for Vr22 (NM_177612.1,1738-1756).
cgttgcgggtgaaatggat

SEQ ID NO: 797300 - DNA, 19 bp, Mus musculus
  siRNA target sequence for Vr22 (NM_177612.1,1831-1849).
gttcgtgacacaagtgaat

SEQ ID NO: 797301 - DNA, 19 bp, Mus musculus
  siRNA target sequence for Vr22 (NM_177612.1,1878-1896).
ctctgactgcgcttgatga

SEQ ID NO: 797302 - DNA, 19 bp, Mus musculus
  siRNA target sequence for Vr22 (NM_177612.1,1880-1898).
ctgactgcgcttgatgata

SEQ ID NO: 797303 - DNA, 19 bp, Mus musculus
  siRNA target sequence for Vr22 (NM_177612.1,1882-1900).
gactgcgcttgatgataat

SEQ ID NO: 797304 - DNA, 19 bp, Mus musculus
  siRNA target sequence for Vr22 (NM_177612.1,1886-1904).
gcgcttgatgataatcagt

SEQ ID NO: 797305 - DNA, 19 bp, Mus musculus
  siRNA target sequence for Vr22 (NM_177612.1,1887-1905).
cgcttgatgataatcagtt

SEQ ID NO: 797306 - DNA, 19 bp, Mus musculus
  siRNA target sequence for Vr22 (NM_177612.1,1924-1942).
gatctatgacacaatccat

SEQ ID NO: 797307 - DNA, 19 bp, Mus musculus
  siRNA target sequence for Vr22 (NM_177612.1,1950-1968).
ggtgttcggtcatgatgat

SEQ ID NO: 797308 - DNA, 19 bp, Mus musculus
  siRNA target sequence for Vr22 (NM_177612.1,2114-2132).
caagtcgccgacttcaaga

SEQ ID NO: 797309 - DNA, 19 bp, Mus musculus
  siRNA target sequence for Vr22 (NM_177612.1,2150-2168).
gacgctgagattgagatat

SEQ ID NO: 797310 - DNA, 19 bp, Mus musculus
  siRNA target sequence for Vr22 (NM_177612.1,2289-2307).
cagctaaaatgatatcaga

SEQ ID NO: 797311 - DNA, 19 bp, Mus musculus
  siRNA target sequence for Vr22 (NM_177612.1,2330-2348).
cttgctcggcagattgcta

SEQ ID NO: 797312 - DNA, 19 bp, Mus musculus
  siRNA target sequence for Vr22 (NM_177612.1,2387-2405).
gcttacctggaacagatta

SEQ ID NO: 797313 - DNA, 19 bp, Mus musculus
  siRNA target sequence for Vr22 (NM_177612.1,2465-2483).
gggggagaactcatcgtat

SEQ ID NO: 797314 - DNA, 19 bp, Mus musculus
  siRNA target sequence for Vr22 (NM_177612.1,2550-2568).
cagtgaaaatgtcatacat

SEQ ID NO: 797315 - DNA, 19 bp, Mus musculus
  siRNA target sequence for Vr22 (NM_177612.1,2647-2665).
ggctaagaagcccttgatt

SEQ ID NO: 797316 - DNA, 19 bp, Mus musculus
  siRNA target sequence for Vr22 (NM_177612.1,2648-2666).
gctaagaagcccttgatta

SEQ ID NO: 797317 - DNA, 19 bp, Mus musculus
  siRNA target sequence for Vr22 (NM_177612.1,2653-2671).
gaagcccttgattaaaaga

SEQ ID NO: 797318 - DNA, 19 bp, Mus musculus
  siRNA target sequence for Vr22 (NM_177612.1,2735-2753).
gttcaagtcatgagtgaat

SEQ ID NO: 797319 - DNA, 19 bp, Mus musculus
  siRNA target sequence for Vr22 (NM_177612.1,2738-2756).
caagtcatgagtgaattca

SEQ ID NO: 797320 - DNA, 19 bp, Mus musculus
  siRNA target sequence for 4632413K17Rik (NM_177614.2,37-55).
gttgggattgctatttcta

SEQ ID NO: 797321 - DNA, 19 bp, Mus musculus
  siRNA target sequence for 4632413K17Rik (NM_177614.2,86-104).
ggtgtcgggagcctgaatt

SEQ ID NO: 797322 - DNA, 19 bp, Mus musculus
  siRNA target sequence for 4632413K17Rik (NM_177614.2,87-105).
gtgtcgggagcctgaattt

SEQ ID NO: 797323 - DNA, 19 bp, Mus musculus
  siRNA target sequence for 4632413K17Rik (NM_177614.2,126-144).
gttatggcatccagatctt

SEQ ID NO: 797324 - DNA, 19 bp, Mus musculus
  siRNA target sequence for 4632413K17Rik (NM_177614.2,234-252).
cagctggagctattcactt

SEQ ID NO: 797325 - DNA, 19 bp, Mus musculus
  siRNA target sequence for 4632413K17Rik (NM_177614.2,296-314).
gggatccctgaattgttga

SEQ ID NO: 797326 - DNA, 19 bp, Mus musculus
  siRNA target sequence for 4632413K17Rik (NM_177614.2,353-371).
gactggtggacatatgaat

SEQ ID NO: 797327 - DNA, 19 bp, Mus musculus
  siRNA target sequence for 4632413K17Rik (NM_177614.2,375-393).
gttatggacgtcatatcca

SEQ ID NO: 797328 - DNA, 19 bp, Mus musculus
  siRNA target sequence for 4632413K17Rik (NM_177614.2,386-404).
catatccagcagtaccata

SEQ ID NO: 797329 - DNA, 19 bp, Mus musculus
  siRNA target sequence for 4632413K17Rik (NM_177614.2,406-424).
ggaagactcggagatcaaa

SEQ ID NO: 797330 - DNA, 19 bp, Mus musculus
  siRNA target sequence for 4632413K17Rik (NM_177614.2,532-550).
cggcaacgggtccaaatgt

SEQ ID NO: 797331 - DNA, 19 bp, Mus musculus
  siRNA target sequence for 4632413K17Rik (NM_177614.2,534-552).
gcaacgggtccaaatgtga

SEQ ID NO: 797332 - DNA, 19 bp, Mus musculus
  siRNA target sequence for 4632413K17Rik (NM_177614.2,598-616).
cgagggtgcgggcatatct

SEQ ID NO: 797333 - DNA, 19 bp, Mus musculus
  siRNA target sequence for 4632413K17Rik (NM_177614.2,622-640).
ctacattgaccgagtagat

SEQ ID NO: 797334 - DNA, 19 bp, Mus musculus
  siRNA target sequence for 4632413K17Rik (NM_177614.2,753-771).
ccctgcagcctgatgagta

SEQ ID NO: 797335 - DNA, 19 bp, Mus musculus
  siRNA target sequence for 4632413K17Rik (NM_177614.2,1374-1392).
gcctccgctctgaggttaa

SEQ ID NO: 797336 - DNA, 19 bp, Mus musculus
  siRNA target sequence for 4632413K17Rik (NM_177614.2,1475-1493).
gagcgggagcaggcaatat

SEQ ID NO: 797337 - DNA, 19 bp, Mus musculus
  siRNA target sequence for 4632413K17Rik (NM_177614.2,1487-1505).
gcaatattggctctaacat

SEQ ID NO: 797338 - DNA, 19 bp, Mus musculus
  siRNA target sequence for 4632413K17Rik (NM_177614.2,1548-1566).
gtccagagcttgtgcaaaa

SEQ ID NO: 797339 - DNA, 19 bp, Mus musculus
  siRNA target sequence for 4632413K17Rik (NM_177614.2,1553-1571).
gagcttgtgcaaaaataca

SEQ ID NO: 797340 - DNA, 19 bp, Mus musculus
  siRNA target sequence for 4632413K17Rik (NM_177614.2,1620-1638).
caggcaagattgagatcaa

SEQ ID NO: 797341 - DNA, 19 bp, Mus musculus
  siRNA target sequence for 4632413K17Rik (NM_177614.2,1622-1640).
ggcaagattgagatcaaga

SEQ ID NO: 797342 - DNA, 19 bp, Mus musculus
  siRNA target sequence for 4632413K17Rik (NM_177614.2,1687-1705).
gactgatgaggatacaaga

SEQ ID NO: 797343 - DNA, 19 bp, Mus musculus
  siRNA target sequence for 4632413K17Rik (NM_177614.2,1689-1707).
ctgatgaggatacaagaaa

SEQ ID NO: 797344 - DNA, 19 bp, Mus musculus
  siRNA target sequence for 4632413K17Rik (NM_177614.2,1743-1761).
gagccgaagaggccaataa

SEQ ID NO: 797345 - DNA, 19 bp, Mus musculus
  siRNA target sequence for 4632413K17Rik (NM_177614.2,1746-1764).
ccgaagaggccaataaaga

SEQ ID NO: 797346 - DNA, 19 bp, Mus musculus
  siRNA target sequence for D630010I07 (NM_177615.2,396-414).
ggactctacacgtctttct

SEQ ID NO: 797347 - DNA, 19 bp, Mus musculus
  siRNA target sequence for D630010I07 (NM_177615.2,397-415).
gactctacacgtctttctt

SEQ ID NO: 797348 - DNA, 19 bp, Mus musculus
  siRNA target sequence for D630010I07 (NM_177615.2,536-554).
gaacctcagtggaatcgaa

SEQ ID NO: 797349 - DNA, 19 bp, Mus musculus
  siRNA target sequence for D630010I07 (NM_177615.2,759-777).
cgccagatcggctgctttt

SEQ ID NO: 797350 - DNA, 19 bp, Mus musculus
  siRNA target sequence for D630010I07 (NM_177615.2,761-779).
ccagatcggctgcttttct

SEQ ID NO: 797351 - DNA, 19 bp, Mus musculus
  siRNA target sequence for D630010I07 (NM_177615.2,874-892).
cagtcaaggaactaaacgt

SEQ ID NO: 797352 - DNA, 19 bp, Mus musculus
  siRNA target sequence for D630010I07 (NM_177615.2,899-917).
ccgggacaggctacttact

SEQ ID NO: 797353 - DNA, 19 bp, Mus musculus
  siRNA target sequence for D630010I07 (NM_177615.2,973-991).
cttccctggacacaagata

SEQ ID NO: 797354 - DNA, 19 bp, Mus musculus
  siRNA target sequence for D630010I07 (NM_177615.2,976-994).
ccctggacacaagatacaa

SEQ ID NO: 797355 - DNA, 19 bp, Mus musculus
  siRNA target sequence for 4930562D19 (NM_177616.2,700-718).
gtccgtgggacttacagta

SEQ ID NO: 797356 - DNA, 19 bp, Mus musculus
  siRNA target sequence for 4930562D19 (NM_177616.2,785-803).
gcaaaccaaggggagattt

SEQ ID NO: 797357 - DNA, 19 bp, Mus musculus
  siRNA target sequence for 4930562D19 (NM_177616.2,791-809).
caaggggagatttctatca

SEQ ID NO: 797358 - DNA, 19 bp, Mus musculus
  siRNA target sequence for 4930562D19 (NM_177616.2,836-854).
gccaggagcccggaatgta

SEQ ID NO: 797359 - DNA, 19 bp, Mus musculus
  siRNA target sequence for 4930562D19 (NM_177616.2,841-859).
gagcccggaatgtatgact

SEQ ID NO: 797360 - DNA, 19 bp, Mus musculus
  siRNA target sequence for 4930562D19 (NM_177616.2,852-870).
gtatgactgccaagttcat

SEQ ID NO: 797361 - DNA, 19 bp, Mus musculus
  siRNA target sequence for 4930562D19 (NM_177616.2,1202-1220).
gacctgactcgtctcaata

SEQ ID NO: 797362 - DNA, 19 bp, Mus musculus
  siRNA target sequence for 4930562D19 (NM_177616.2,1204-1222).
cctgactcgtctcaataaa

SEQ ID NO: 797363 - DNA, 19 bp, Mus musculus
  siRNA target sequence for 4930562D19 (NM_177616.2,2032-2050).
gatccaaagctctagcaat

SEQ ID NO: 797364 - DNA, 19 bp, Mus musculus
  siRNA target sequence for 4930562D19 (NM_177616.2,2129-2147).
cagtcgatgctgaccaaaa

SEQ ID NO: 797365 - DNA, 19 bp, Mus musculus
  siRNA target sequence for 4930562D19 (NM_177616.2,2389-2407).
gggggatggaagtcattca

SEQ ID NO: 797366 - DNA, 19 bp, Mus musculus
  siRNA target sequence for 4930562D19 (NM_177616.2,2470-2488).
ccgtcaggctggttctaca

SEQ ID NO: 797367 - DNA, 19 bp, Mus musculus
  siRNA target sequence for 4930562D19 (NM_177616.2,2471-2489).
cgtcaggctggttctacat

SEQ ID NO: 797368 - DNA, 19 bp, Mus musculus
  siRNA target sequence for 4930562D19 (NM_177616.2,2472-2490).
gtcaggctggttctacata

SEQ ID NO: 797369 - DNA, 19 bp, Mus musculus
  siRNA target sequence for C920025J10 (NM_177623.2,273-291).
gaccttcagttccattgat

SEQ ID NO: 797370 - DNA, 19 bp, Mus musculus
  siRNA target sequence for C920025J10 (NM_177623.2,418-436).
gcatcttccctcagttata

SEQ ID NO: 797371 - DNA, 19 bp, Mus musculus
  siRNA target sequence for C920025J10 (NM_177623.2,419-437).
catcttccctcagttataa

SEQ ID NO: 797372 - DNA, 19 bp, Mus musculus
  siRNA target sequence for C920025J10 (NM_177623.2,425-443).
ccctcagttataaaaacgt

SEQ ID NO: 797373 - DNA, 19 bp, Mus musculus
  siRNA target sequence for C920025J10 (NM_177623.2,426-444).
cctcagttataaaaacgta

SEQ ID NO: 797374 - DNA, 19 bp, Mus musculus
  siRNA target sequence for C920025J10 (NM_177623.2,467-485).
caagtttcgtcgaggtaaa

SEQ ID NO: 797375 - DNA, 19 bp, Mus musculus
  siRNA target sequence for C920025J10 (NM_177623.2,470-488).
gtttcgtcgaggtaaatga

SEQ ID NO: 797376 - DNA, 19 bp, Mus musculus
  siRNA target sequence for C920025J10 (NM_177623.2,474-492).
cgtcgaggtaaatgatata

SEQ ID NO: 797377 - DNA, 19 bp, Mus musculus
  siRNA target sequence for C920025J10 (NM_177623.2,475-493).
gtcgaggtaaatgatatat

SEQ ID NO: 797378 - DNA, 19 bp, Mus musculus
  siRNA target sequence for C920025J10 (NM_177623.2,477-495).
cgaggtaaatgatatatta

SEQ ID NO: 797379 - DNA, 19 bp, Mus musculus
  siRNA target sequence for B230359F08 (NM_177626.2,515-533).
ccatcctatcacttgcata

SEQ ID NO: 797380 - DNA, 19 bp, Mus musculus
  siRNA target sequence for B230359F08 (NM_177626.2,516-534).
catcctatcacttgcataa

SEQ ID NO: 797381 - DNA, 19 bp, Mus musculus
  siRNA target sequence for A030013D21 (NM_177628.2,146-164).
gagtatcgatgaagctata

SEQ ID NO: 797382 - DNA, 19 bp, Mus musculus
  siRNA target sequence for A030013D21 (NM_177628.2,234-252).
ctccgaggagacatcaaca

SEQ ID NO: 797383 - DNA, 19 bp, Mus musculus
  siRNA target sequence for A030013D21 (NM_177628.2,237-255).
cgaggagacatcaacaagt

SEQ ID NO: 797384 - DNA, 19 bp, Mus musculus
  siRNA target sequence for A030013D21 (NM_177628.2,243-261).
gacatcaacaagttgaaga

SEQ ID NO: 797385 - DNA, 19 bp, Mus musculus
  siRNA target sequence for A030013D21 (NM_177628.2,330-348).
gagctgtccgacctctttt

SEQ ID NO: 797386 - DNA, 19 bp, Mus musculus
  siRNA target sequence for A030013D21 (NM_177628.2,367-385).
cctctttcagcctttccat

SEQ ID NO: 797387 - DNA, 19 bp, Mus musculus
  siRNA target sequence for AU021034 (NM_177629.2,122-140).
gaatgttccgcgaatacct

SEQ ID NO: 797388 - DNA, 19 bp, Mus musculus
  siRNA target sequence for AU021034 (NM_177629.2,130-148).
cgcgaatacctcgaattca

SEQ ID NO: 797389 - DNA, 19 bp, Mus musculus
  siRNA target sequence for AU021034 (NM_177629.2,131-149).
gcgaatacctcgaattcaa

SEQ ID NO: 797390 - DNA, 19 bp, Mus musculus
  siRNA target sequence for AU021034 (NM_177629.2,133-151).
gaatacctcgaattcaagt

SEQ ID NO: 797391 - DNA, 19 bp, Mus musculus
  siRNA target sequence for AU021034 (NM_177629.2,160-178).
cggctgctgacaattcatt

SEQ ID NO: 797392 - DNA, 19 bp, Mus musculus
  siRNA target sequence for AU021034 (NM_177629.2,218-236).
cagcatcatgaggatttat

SEQ ID NO: 797393 - DNA, 19 bp, Mus musculus
  siRNA target sequence for AU021034 (NM_177629.2,264-282).
cagacccgctacattcaca

SEQ ID NO: 797394 - DNA, 19 bp, Mus musculus
  siRNA target sequence for AU021034 (NM_177629.2,428-446).
gaagggtcaaccagcaaaa

SEQ ID NO: 797395 - DNA, 19 bp, Mus musculus
  siRNA target sequence for AU021034 (NM_177629.2,442-460).
caaaacctgggtttagagt

SEQ ID NO: 797396 - DNA, 19 bp, Mus musculus
  siRNA target sequence for AU021034 (NM_177629.2,493-511).
gcaccaagaccttagacaa

SEQ ID NO: 797397 - DNA, 19 bp, Mus musculus
  siRNA target sequence for BC058638 (NM_177630.2,811-829).
ccctggcgctctacagatt

SEQ ID NO: 797398 - DNA, 19 bp, Mus musculus
  siRNA target sequence for BC058638 (NM_177630.2,812-830).
cctggcgctctacagatta

SEQ ID NO: 797399 - DNA, 19 bp, Mus musculus
  siRNA target sequence for BC058638 (NM_177630.2,944-962).
cagatggacaggttcatga

SEQ ID NO: 797400 - DNA, 19 bp, Mus musculus
  siRNA target sequence for BC058638 (NM_177630.2,1069-1087).
cagccctttgcgaaacaat

SEQ ID NO: 797401 - DNA, 19 bp, Mus musculus
  siRNA target sequence for BC058638 (NM_177630.2,1071-1089).
gccctttgcgaaacaatta

SEQ ID NO: 797402 - DNA, 19 bp, Mus musculus
  siRNA target sequence for BC058638 (NM_177630.2,1074-1092).
ctttgcgaaacaattacca

SEQ ID NO: 797403 - DNA, 19 bp, Mus musculus
  siRNA target sequence for BC058638 (NM_177630.2,1109-1127).
ctccgcagaacctacaagt

SEQ ID NO: 797404 - DNA, 19 bp, Mus musculus
  siRNA target sequence for BC058638 (NM_177630.2,1151-1169).
gcacaaatccggaagacat

SEQ ID NO: 797405 - DNA, 19 bp, Mus musculus
  siRNA target sequence for BC058638 (NM_177630.2,1202-1220).
cgggagcgccagatgttgt

SEQ ID NO: 797406 - DNA, 19 bp, Mus musculus
  siRNA target sequence for BC048502 (NM_177631.2,220-238).
caaagatagctaaaaagat

SEQ ID NO: 797407 - DNA, 19 bp, Mus musculus
  siRNA target sequence for BC048502 (NM_177631.2,291-309).
gaacatgaggccaactgta

SEQ ID NO: 797408 - DNA, 19 bp, Mus musculus
  siRNA target sequence for BC048502 (NM_177631.2,333-351).
gagccacttaaccttcaaa

SEQ ID NO: 797409 - DNA, 19 bp, Mus musculus
  siRNA target sequence for BC048502 (NM_177631.2,353-371).
gattactcacccagttttt

SEQ ID NO: 797410 - DNA, 19 bp, Mus musculus
  siRNA target sequence for BC048502 (NM_177631.2,392-410).
cagtgctgggagtcaattt

SEQ ID NO: 797411 - DNA, 19 bp, Mus musculus
  siRNA target sequence for BC048502 (NM_177631.2,432-450).
gtggatcatgcgcatcatt

SEQ ID NO: 797412 - DNA, 19 bp, Mus musculus
  siRNA target sequence for BC048502 (NM_177631.2,434-452).
ggatcatgcgcatcatttt

SEQ ID NO: 797413 - DNA, 19 bp, Mus musculus
  siRNA target sequence for BC048502 (NM_177631.2,477-495).
gctccaaagaagctagttt

SEQ ID NO: 797414 - DNA, 19 bp, Mus musculus
  siRNA target sequence for BC048502 (NM_177631.2,524-542).
ggctatggctgataagcat

SEQ ID NO: 797415 - DNA, 19 bp, Mus musculus
  siRNA target sequence for BC048502 (NM_177631.2,540-558).
catcctaacagcttcaagt

SEQ ID NO: 797416 - DNA, 19 bp, Mus musculus
  siRNA target sequence for BC048502 (NM_177631.2,564-582).
ggaagagggcagaaaaact

SEQ ID NO: 797417 - DNA, 19 bp, Mus musculus
  siRNA target sequence for BC022623 (NM_177632.2,1185-1203).
gccgtcaagggactaagat

SEQ ID NO: 797418 - DNA, 19 bp, Mus musculus
  siRNA target sequence for BC022623 (NM_177632.2,1187-1205).
cgtcaagggactaagatga

SEQ ID NO: 797419 - DNA, 19 bp, Mus musculus
  siRNA target sequence for BC022623 (NM_177632.2,1188-1206).
gtcaagggactaagatgaa

SEQ ID NO: 797420 - DNA, 19 bp, Mus musculus
  siRNA target sequence for BC022623 (NM_177632.2,1363-1381).
gcacaaggcggtaatgcta

SEQ ID NO: 797421 - DNA, 19 bp, Mus musculus
  siRNA target sequence for BC022623 (NM_177632.2,1456-1474).
caacgctctggcagagttt

SEQ ID NO: 797422 - DNA, 19 bp, Mus musculus
  siRNA target sequence for BC022623 (NM_177632.2,1459-1477).
cgctctggcagagtttaaa

SEQ ID NO: 797423 - DNA, 19 bp, Mus musculus
  siRNA target sequence for BC022623 (NM_177632.2,1794-1812).
ccatgcagttggaatgtga

SEQ ID NO: 797424 - DNA, 19 bp, Mus musculus
  siRNA target sequence for BC022623 (NM_177632.2,1882-1900).
cagctcggggacatcactt

SEQ ID NO: 797425 - DNA, 19 bp, Mus musculus
  siRNA target sequence for BC022623 (NM_177632.2,1933-1951).
ccaactgtcacagcttatt

SEQ ID NO: 797426 - DNA, 19 bp, Mus musculus
  siRNA target sequence for BC022623 (NM_177632.2,1957-1975).
cctgggcgaccttagcttt

SEQ ID NO: 797427 - DNA, 19 bp, Mus musculus
  siRNA target sequence for Crb3 (NM_177638.3,218-236).
gtgctcttggcgtttggtt

SEQ ID NO: 797428 - DNA, 19 bp, Mus musculus
  siRNA target sequence for Crb3 (NM_177638.3,270-288).
caccggaccctttcacaaa

SEQ ID NO: 797429 - DNA, 19 bp, Mus musculus
  siRNA target sequence for Crb3 (NM_177638.3,275-293).
gaccctttcacaaatagca

SEQ ID NO: 797430 - DNA, 19 bp, Mus musculus
  siRNA target sequence for Crb3 (NM_177638.3,283-301).
cacaaatagcacaactcaa

SEQ ID NO: 797431 - DNA, 19 bp, Mus musculus
  siRNA target sequence for Crb3 (NM_177638.3,331-349).
gtcttcaggggctattgta

SEQ ID NO: 797432 - DNA, 19 bp, Mus musculus
  siRNA target sequence for C130057E09 (NM_177641.2,329-347).
gccgacctagtgtgttaat

SEQ ID NO: 797433 - DNA, 19 bp, Mus musculus
  siRNA target sequence for C130057E09 (NM_177641.2,330-348).
ccgacctagtgtgttaatt

SEQ ID NO: 797434 - DNA, 19 bp, Mus musculus
  siRNA target sequence for C130057E09 (NM_177641.2,332-350).
gacctagtgtgttaattgt

SEQ ID NO: 797435 - DNA, 19 bp, Mus musculus
  siRNA target sequence for C130057E09 (NM_177641.2,338-356).
gtgtgttaattgtaacata

SEQ ID NO: 797436 - DNA, 19 bp, Mus musculus
  siRNA target sequence for C130057E09 (NM_177641.2,340-358).
gtgttaattgtaacataca

SEQ ID NO: 797437 - DNA, 19 bp, Mus musculus
  siRNA target sequence for C130057E09 (NM_177641.2,360-378).
ggaaccagctaaatcatct

SEQ ID NO: 797438 - DNA, 19 bp, Mus musculus
  siRNA target sequence for C130057E09 (NM_177641.2,361-379).
gaaccagctaaatcatcta

SEQ ID NO: 797439 - DNA, 19 bp, Mus musculus
  siRNA target sequence for C130057E09 (NM_177641.2,488-506).
gggataaatacctttatga

SEQ ID NO: 797440 - DNA, 19 bp, Mus musculus
  siRNA target sequence for C130057E09 (NM_177641.2,489-507).
ggataaatacctttatgaa

SEQ ID NO: 797441 - DNA, 19 bp, Mus musculus
  siRNA target sequence for C130057E09 (NM_177641.2,518-536).
ccaaaggaagtccacaaat

SEQ ID NO: 797442 - DNA, 19 bp, Mus musculus
  siRNA target sequence for C130057E09 (NM_177641.2,542-560).
ggatacctcattttaagga

SEQ ID NO: 797443 - DNA, 19 bp, Mus musculus
  siRNA target sequence for C130057E09 (NM_177641.2,572-590).
ccccagcattgaatttaga

SEQ ID NO: 797444 - DNA, 19 bp, Mus musculus
  siRNA target sequence for C130057E09 (NM_177641.2,575-593).
cagcattgaatttagaaat

SEQ ID NO: 797445 - DNA, 19 bp, Mus musculus
  siRNA target sequence for C130057E09 (NM_177641.2,619-637).
cccattatgaggtatggta

SEQ ID NO: 797446 - DNA, 19 bp, Mus musculus
  siRNA target sequence for C130057E09 (NM_177641.2,620-638).
ccattatgaggtatggtat

SEQ ID NO: 797447 - DNA, 19 bp, Mus musculus
  siRNA target sequence for C130057E09 (NM_177641.2,635-653).
gtatgctggttaagtttga

SEQ ID NO: 797448 - DNA, 19 bp, Mus musculus
  siRNA target sequence for 9830123M21 (NM_177642.2,691-709).
cacaggcaccaggttctat

SEQ ID NO: 797449 - DNA, 19 bp, Mus musculus
  siRNA target sequence for 9830123M21 (NM_177642.2,774-792).
cagggcatccccttgcatt

SEQ ID NO: 797450 - DNA, 19 bp, Mus musculus
  siRNA target sequence for 9830123M21 (NM_177642.2,779-797).
catccccttgcattacaca

SEQ ID NO: 797451 - DNA, 19 bp, Mus musculus
  siRNA target sequence for 9830123M21 (NM_177642.2,1219-1237).
ccagcgtgtcccttaagga

SEQ ID NO: 797452 - DNA, 19 bp, Mus musculus
  siRNA target sequence for 9830123M21 (NM_177642.2,1297-1315).
ccctcattgtcacagaata

SEQ ID NO: 797453 - DNA, 19 bp, Mus musculus
  siRNA target sequence for LOC226442 (NM_177643.2,1075-1093).
gatcagtgcagcatgaagt

SEQ ID NO: 797454 - DNA, 19 bp, Mus musculus
  siRNA target sequence for LOC226442 (NM_177643.2,1159-1177).
gacacttgccaacagtatt

SEQ ID NO: 797455 - DNA, 19 bp, Mus musculus
  siRNA target sequence for LOC226442 (NM_177643.2,1181-1199).
caaggactgacagattgtt

SEQ ID NO: 797456 - DNA, 19 bp, Mus musculus
  siRNA target sequence for LOC226442 (NM_177643.2,1217-1235).
gtggtgaagccatagcaaa

SEQ ID NO: 797457 - DNA, 19 bp, Mus musculus
  siRNA target sequence for LOC226442 (NM_177643.2,1255-1273).
cctgggtcatcaaaccata

SEQ ID NO: 797458 - DNA, 19 bp, Mus musculus
  siRNA target sequence for LOC226442 (NM_177643.2,1258-1276).
gggtcatcaaaccataaca

SEQ ID NO: 797459 - DNA, 19 bp, Mus musculus
  siRNA target sequence for LOC226442 (NM_177643.2,1260-1278).
gtcatcaaaccataacagt

SEQ ID NO: 797460 - DNA, 19 bp, Mus musculus
  siRNA target sequence for LOC226442 (NM_177643.2,1262-1280).
catcaaaccataacagtat

SEQ ID NO: 797461 - DNA, 19 bp, Mus musculus
  siRNA target sequence for LOC226442 (NM_177643.2,1294-1312).
gtgttgtctcagggaaata

SEQ ID NO: 797462 - DNA, 19 bp, Mus musculus
  siRNA target sequence for LOC226442 (NM_177643.2,1299-1317).
gtctcagggaaatacaagt

SEQ ID NO: 797463 - DNA, 19 bp, Mus musculus
  siRNA target sequence for LOC226442 (NM_177643.2,1332-1350).
gtcgaagtcgaaaagcata

SEQ ID NO: 797464 - DNA, 19 bp, Mus musculus
  siRNA target sequence for LOC226442 (NM_177643.2,1338-1356).
gtcgaaaagcatagctatt

SEQ ID NO: 797465 - DNA, 19 bp, Mus musculus
  siRNA target sequence for LOC226442 (NM_177643.2,1369-1387).
cacaagactggcaaaacaa

SEQ ID NO: 797466 - DNA, 19 bp, Mus musculus
  siRNA target sequence for LOC226442 (NM_177643.2,1390-1408).
gaatcacaaatgtcaaaca

SEQ ID NO: 797467 - DNA, 19 bp, Mus musculus
  siRNA target sequence for LOC226442 (NM_177643.2,1464-1482).
cataattggcactggaata

SEQ ID NO: 797468 - DNA, 19 bp, Mus musculus
  siRNA target sequence for LOC226442 (NM_177643.2,1501-1519).
gtgccaaaattgatcttta

SEQ ID NO: 797469 - DNA, 19 bp, Mus musculus
  siRNA target sequence for LOC226442 (NM_177643.2,1540-1558).
gcagataaaagctacctta

SEQ ID NO: 797470 - DNA, 19 bp, Mus musculus
  siRNA target sequence for LOC226442 (NM_177643.2,1541-1559).
cagataaaagctaccttaa

SEQ ID NO: 797471 - DNA, 19 bp, Mus musculus
  siRNA target sequence for LOC226442 (NM_177643.2,1543-1561).
gataaaagctaccttaatt

SEQ ID NO: 797472 - DNA, 19 bp, Mus musculus
  siRNA target sequence for LOC226442 (NM_177643.2,1624-1642).
cttggcatcgtatcgaata

SEQ ID NO: 797473 - DNA, 19 bp, Mus musculus
  siRNA target sequence for LOC226442 (NM_177643.2,1627-1645).
ggcatcgtatcgaataata

SEQ ID NO: 797474 - DNA, 19 bp, Mus musculus
  siRNA target sequence for LOC226442 (NM_177643.2,1629-1647).
catcgtatcgaataatagt

SEQ ID NO: 797475 - DNA, 19 bp, Mus musculus
  siRNA target sequence for LOC226442 (NM_177643.2,1683-1701).
caagcaaggcccgataagt

SEQ ID NO: 797476 - DNA, 19 bp, Mus musculus
  siRNA target sequence for LOC226442 (NM_177643.2,1686-1704).
gcaaggcccgataagtagt

SEQ ID NO: 797477 - DNA, 19 bp, Mus musculus
  siRNA target sequence for LOC226442 (NM_177643.2,1687-1705).
caaggcccgataagtagta

SEQ ID NO: 797478 - DNA, 19 bp, Mus musculus
  siRNA target sequence for LOC226442 (NM_177643.2,1690-1708).
ggcccgataagtagtaatt

SEQ ID NO: 797479 - DNA, 19 bp, Mus musculus
  siRNA target sequence for LOC226442 (NM_177643.2,1691-1709).
gcccgataagtagtaatta

SEQ ID NO: 797480 - DNA, 19 bp, Mus musculus
  siRNA target sequence for LOC226442 (NM_177643.2,1692-1710).
cccgataagtagtaattat

SEQ ID NO: 797481 - DNA, 19 bp, Mus musculus
  siRNA target sequence for LOC226442 (NM_177643.2,1694-1712).
cgataagtagtaattatga

SEQ ID NO: 797482 - DNA, 19 bp, Mus musculus
  siRNA target sequence for LOC226442 (NM_177643.2,1695-1713).
gataagtagtaattatgat

SEQ ID NO: 797483 - DNA, 19 bp, Mus musculus
  siRNA target sequence for LOC226442 (NM_177643.2,1717-1735).
gccatgcagttttcaaaga

SEQ ID NO: 797484 - DNA, 19 bp, Mus musculus
  siRNA target sequence for LOC226442 (NM_177643.2,1763-1781).
gcaacagtgccttttctat

SEQ ID NO: 797485 - DNA, 19 bp, Mus musculus
  siRNA target sequence for LOC226442 (NM_177643.2,1769-1787).
gtgccttttctatcaatgt

SEQ ID NO: 797486 - DNA, 19 bp, Mus musculus
  siRNA target sequence for LOC226442 (NM_177643.2,1845-1863).
caatgaggcgccattgtca

SEQ ID NO: 797487 - DNA, 19 bp, Mus musculus
  siRNA target sequence for LOC226442 (NM_177643.2,1849-1867).
gaggcgccattgtcactta

SEQ ID NO: 797488 - DNA, 19 bp, Mus musculus
  siRNA target sequence for LOC226442 (NM_177643.2,1851-1869).
ggcgccattgtcacttatt

SEQ ID NO: 797489 - DNA, 19 bp, Mus musculus
  siRNA target sequence for LOC226442 (NM_177643.2,1853-1871).
cgccattgtcacttattga

SEQ ID NO: 797490 - DNA, 19 bp, Mus musculus
  siRNA target sequence for LOC226442 (NM_177643.2,1855-1873).
ccattgtcacttattgact

SEQ ID NO: 797491 - DNA, 19 bp, Mus musculus
  siRNA target sequence for LOC226442 (NM_177643.2,1877-1895).
cagctctaaatgctgaaat

SEQ ID NO: 797492 - DNA, 19 bp, Mus musculus
  siRNA target sequence for LOC226442 (NM_177643.2,1908-1926).
cgacaagtctggaattcct

SEQ ID NO: 797493 - DNA, 19 bp, Mus musculus
  siRNA target sequence for LOC226442 (NM_177643.2,1930-1948).
gaggttttacaaagtattt

SEQ ID NO: 797494 - DNA, 19 bp, Mus musculus
  siRNA target sequence for LOC226442 (NM_177643.2,1956-1974).
gtactctggcaaatcagaa

SEQ ID NO: 797495 - DNA, 19 bp, Mus musculus
  siRNA target sequence for LOC226442 (NM_177643.2,2042-2060).
ctgaattggttcaagaaga

SEQ ID NO: 797496 - DNA, 19 bp, Mus musculus
  siRNA target sequence for LOC226442 (NM_177643.2,2075-2093).
gcacccaaacaccttcaaa

SEQ ID NO: 797497 - DNA, 19 bp, Mus musculus
  siRNA target sequence for LOC226442 (NM_177643.2,2076-2094).
cacccaaacaccttcaaat

SEQ ID NO: 797498 - DNA, 19 bp, Mus musculus
  siRNA target sequence for LOC226442 (NM_177643.2,2079-2097).
ccaaacaccttcaaatgat

SEQ ID NO: 797499 - DNA, 19 bp, Mus musculus
  siRNA target sequence for LOC226442 (NM_177643.2,2130-2148).
cctccaacaggctttcgaa

SEQ ID NO: 797500 - DNA, 19 bp, Mus musculus
  siRNA target sequence for LOC226442 (NM_177643.2,2131-2149).
ctccaacaggctttcgaaa

SEQ ID NO: 797501 - DNA, 19 bp, Mus musculus
  siRNA target sequence for LOC226442 (NM_177643.2,2133-2151).
ccaacaggctttcgaaaaa

SEQ ID NO: 797502 - DNA, 19 bp, Mus musculus
  siRNA target sequence for LOC226442 (NM_177643.2,2134-2152).
caacaggctttcgaaaaat

SEQ ID NO: 797503 - DNA, 19 bp, Mus musculus
  siRNA target sequence for LOC226442 (NM_177643.2,2179-2197).
cacggtttccaatttgtca

SEQ ID NO: 797504 - DNA, 19 bp, Mus musculus
  siRNA target sequence for LOC226442 (NM_177643.2,2214-2232).
ccacaaccacactttgttt

SEQ ID NO: 797505 - DNA, 19 bp, Mus musculus
  siRNA target sequence for LOC226442 (NM_177643.2,2272-2290).
ggttttggccagtctgtta

SEQ ID NO: 797506 - DNA, 19 bp, Mus musculus
  siRNA target sequence for LOC226442 (NM_177643.2,2412-2430).
ggatgatctgatagattct

SEQ ID NO: 797507 - DNA, 19 bp, Mus musculus
  siRNA target sequence for LOC226442 (NM_177643.2,2436-2454).
gaacttagagacatcatca

SEQ ID NO: 797508 - DNA, 19 bp, Mus musculus
  siRNA target sequence for LOC226442 (NM_177643.2,2547-2565).
gttagctagccagattgat

SEQ ID NO: 797509 - DNA, 19 bp, Mus musculus
  siRNA target sequence for LOC226442 (NM_177643.2,2588-2606).
gaacaacgtaccagattga

SEQ ID NO: 797510 - DNA, 19 bp, Mus musculus
  siRNA target sequence for LOC226442 (NM_177643.2,2591-2609).
caacgtaccagattgagaa

SEQ ID NO: 797511 - DNA, 19 bp, Mus musculus
  siRNA target sequence for LOC226442 (NM_177643.2,2594-2612).
cgtaccagattgagaactt

SEQ ID NO: 797512 - DNA, 19 bp, Mus musculus
  siRNA target sequence for LOC226442 (NM_177643.2,2620-2638).
gcattcggttctcagttta

SEQ ID NO: 797513 - DNA, 19 bp, Mus musculus
  siRNA target sequence for LOC226442 (NM_177643.2,2651-2669).
gggtgccaatgacctttat

SEQ ID NO: 797514 - DNA, 19 bp, Mus musculus
  siRNA target sequence for LOC226442 (NM_177643.2,2653-2671).
gtgccaatgacctttatca

SEQ ID NO: 797515 - DNA, 19 bp, Mus musculus
  siRNA target sequence for LOC226442 (NM_177643.2,2655-2673).
gccaatgacctttatcact

SEQ ID NO: 797516 - DNA, 19 bp, Mus musculus
  siRNA target sequence for LOC226442 (NM_177643.2,2656-2674).
ccaatgacctttatcacta

SEQ ID NO: 797517 - DNA, 19 bp, Mus musculus
  siRNA target sequence for LOC226442 (NM_177643.2,2657-2675).
caatgacctttatcactaa

SEQ ID NO: 797518 - DNA, 19 bp, Mus musculus
  siRNA target sequence for LOC226442 (NM_177643.2,2663-2681).
cctttatcactaactctaa

SEQ ID NO: 797519 - DNA, 19 bp, Mus musculus
  siRNA target sequence for 6530401P13 (NM_177644.2,752-770).
gtaagtaccgtgtctctat

SEQ ID NO: 797520 - DNA, 19 bp, Mus musculus
  siRNA target sequence for 6530401P13 (NM_177644.2,880-898).
cataagccatctgactaaa

SEQ ID NO: 797521 - DNA, 19 bp, Mus musculus
  siRNA target sequence for 6530401P13 (NM_177644.2,914-932).
cagaaaagggctaactata

SEQ ID NO: 797522 - DNA, 19 bp, Mus musculus
  siRNA target sequence for 6530401P13 (NM_177644.2,916-934).
gaaaagggctaactataca

SEQ ID NO: 797523 - DNA, 19 bp, Mus musculus
  siRNA target sequence for 6530401P13 (NM_177644.2,948-966).
ctctgaatatcccactaaa

SEQ ID NO: 797524 - DNA, 19 bp, Mus musculus
  siRNA target sequence for 6530401P13 (NM_177644.2,952-970).
gaatatcccactaaacgtt

SEQ ID NO: 797525 - DNA, 19 bp, Mus musculus
  siRNA target sequence for Tmem15 (NM_177648.2,200-218).
ccttctacgtccagtacaa

SEQ ID NO: 797526 - DNA, 19 bp, Mus musculus
  siRNA target sequence for Tmem15 (NM_177648.2,344-362).
ctgcagggaacccatactt

SEQ ID NO: 797527 - DNA, 19 bp, Mus musculus
  siRNA target sequence for Tmem15 (NM_177648.2,423-441).
gttggcactgggcattact

SEQ ID NO: 797528 - DNA, 19 bp, Mus musculus
  siRNA target sequence for Tmem15 (NM_177648.2,445-463).
ccggtgcccaccaatactt

SEQ ID NO: 797529 - DNA, 19 bp, Mus musculus
  siRNA target sequence for Tmem15 (NM_177648.2,447-465).
ggtgcccaccaatacttgt

SEQ ID NO: 797530 - DNA, 19 bp, Mus musculus
  siRNA target sequence for Tmem15 (NM_177648.2,480-498).
ggctggaggcgttatcatt

SEQ ID NO: 797531 - DNA, 19 bp, Mus musculus
  siRNA target sequence for Tmem15 (NM_177648.2,481-499).
gctggaggcgttatcattt

SEQ ID NO: 797532 - DNA, 19 bp, Mus musculus
  siRNA target sequence for Tmem15 (NM_177648.2,482-500).
ctggaggcgttatcattta

SEQ ID NO: 797533 - DNA, 19 bp, Mus musculus
  siRNA target sequence for Tmem15 (NM_177648.2,484-502).
ggaggcgttatcatttata

SEQ ID NO: 797534 - DNA, 19 bp, Mus musculus
  siRNA target sequence for Tmem15 (NM_177648.2,485-503).
gaggcgttatcatttatat

SEQ ID NO: 797535 - DNA, 19 bp, Mus musculus
  siRNA target sequence for Tmem15 (NM_177648.2,487-505).
ggcgttatcatttatatta

SEQ ID NO: 797536 - DNA, 19 bp, Mus musculus
  siRNA target sequence for Tmem15 (NM_177648.2,631-649).
gtattgggtggcattagct

SEQ ID NO: 797537 - DNA, 19 bp, Mus musculus
  siRNA target sequence for Tmem15 (NM_177648.2,641-659).
gcattagcttcgtccttaa

SEQ ID NO: 797538 - DNA, 19 bp, Mus musculus
  siRNA target sequence for Tmem15 (NM_177648.2,794-812).
gggcctcttccatcttctt

SEQ ID NO: 797539 - DNA, 19 bp, Mus musculus
  siRNA target sequence for Tmem15 (NM_177648.2,859-877).
ctgcactggctcattcgta

SEQ ID NO: 797540 - DNA, 19 bp, Mus musculus
  siRNA target sequence for Tmem15 (NM_177648.2,906-924).
cctcttctacactgaaact

SEQ ID NO: 797541 - DNA, 19 bp, Mus musculus
  siRNA target sequence for Tmem15 (NM_177648.2,1162-1180).
gtgcgctatttccgaataa

SEQ ID NO: 797542 - DNA, 19 bp, Mus musculus
  siRNA target sequence for Tmem15 (NM_177648.2,1236-1254).
cagtggaccccttatccta

SEQ ID NO: 797543 - DNA, 19 bp, Mus musculus
  siRNA target sequence for Tmem15 (NM_177648.2,1275-1293).
gggcatgtctcttcctatt

SEQ ID NO: 797544 - DNA, 19 bp, Mus musculus
  siRNA target sequence for Tmem15 (NM_177648.2,1436-1454).
ctggaactaagaaaacctt

SEQ ID NO: 797545 - DNA, 19 bp, Mus musculus
  siRNA target sequence for Tmem15 (NM_177648.2,1469-1487).
catctatatttgcacaaat

SEQ ID NO: 797546 - DNA, 19 bp, Mus musculus
  siRNA target sequence for Tmem15 (NM_177648.2,1495-1513).
gtagctctaatcttaatct

SEQ ID NO: 797547 - DNA, 19 bp, Mus musculus
  siRNA target sequence for Tmem15 (NM_177648.2,1520-1538).
gtggagtagacctgaacta

SEQ ID NO: 797548 - DNA, 19 bp, Mus musculus
  siRNA target sequence for Tmem15 (NM_177648.2,1558-1576).
gggtccatcagcactgtat

SEQ ID NO: 797549 - DNA, 19 bp, Mus musculus
  siRNA target sequence for Tmem15 (NM_177648.2,1620-1638).
gcctctctacctactgata

SEQ ID NO: 797550 - DNA, 19 bp, Mus musculus
  siRNA target sequence for 5830402J09 (NM_177650.2,167-185).
ggttaaatatagacaagaa

SEQ ID NO: 797551 - DNA, 19 bp, Mus musculus
  siRNA target sequence for 5830402J09 (NM_177650.2,197-215).
gcgtttgatggagagaaaa

SEQ ID NO: 797552 - DNA, 19 bp, Mus musculus
  siRNA target sequence for 5830402J09 (NM_177650.2,198-216).
cgtttgatggagagaaaaa

SEQ ID NO: 797553 - DNA, 19 bp, Mus musculus
  siRNA target sequence for 5830402J09 (NM_177650.2,304-322).
ctgacccagttagaatgat

SEQ ID NO: 797554 - DNA, 19 bp, Mus musculus
  siRNA target sequence for 5830402J09 (NM_177650.2,306-324).
gacccagttagaatgatgt

SEQ ID NO: 797555 - DNA, 19 bp, Mus musculus
  siRNA target sequence for 5830402J09 (NM_177650.2,425-443).
ggtacttatgggaattgca

SEQ ID NO: 797556 - DNA, 19 bp, Mus musculus
  siRNA target sequence for 5830402J09 (NM_177650.2,442-460).
cattactggtgcaaagtct

SEQ ID NO: 797557 - DNA, 19 bp, Mus musculus
  siRNA target sequence for 4933409G03 (NM_177651.2,266-284).
ccaccgaagtggaagattt

SEQ ID NO: 797558 - DNA, 19 bp, Mus musculus
  siRNA target sequence for 4933409G03 (NM_177651.2,267-285).
caccgaagtggaagatttt

SEQ ID NO: 797559 - DNA, 19 bp, Mus musculus
  siRNA target sequence for 4933409G03 (NM_177651.2,269-287).
ccgaagtggaagattttca

SEQ ID NO: 797560 - DNA, 19 bp, Mus musculus
  siRNA target sequence for 4933409G03 (NM_177651.2,374-392).
catctgaccacaatgaaaa

SEQ ID NO: 797561 - DNA, 19 bp, Mus musculus
  siRNA target sequence for 4933409G03 (NM_177651.2,417-435).
ctctagggatgaagaagaa

SEQ ID NO: 797562 - DNA, 19 bp, Mus musculus
  siRNA target sequence for 4933409G03 (NM_177651.2,714-732).
ccaagaggatccttccaat

SEQ ID NO: 797563 - DNA, 19 bp, Mus musculus
  siRNA target sequence for 4933409G03 (NM_177651.2,715-733).
caagaggatccttccaata

SEQ ID NO: 797564 - DNA, 19 bp, Mus musculus
  siRNA target sequence for 4933409G03 (NM_177651.2,876-894).
gccaccattaggacaagat

SEQ ID NO: 797565 - DNA, 19 bp, Mus musculus
  siRNA target sequence for 4933409G03 (NM_177651.2,958-976).
cagccagtagaaaagtgta

SEQ ID NO: 797566 - DNA, 19 bp, Mus musculus
  siRNA target sequence for 4933409G03 (NM_177651.2,1097-1115).
ggagtccttgtaagcaaat

SEQ ID NO: 797567 - DNA, 19 bp, Mus musculus
  siRNA target sequence for 4933409G03 (NM_177651.2,1100-1118).
gtccttgtaagcaaatgaa

SEQ ID NO: 797568 - DNA, 19 bp, Mus musculus
  siRNA target sequence for 4933409G03 (NM_177651.2,1102-1120).
ccttgtaagcaaatgaata

SEQ ID NO: 797569 - DNA, 19 bp, Mus musculus
  siRNA target sequence for 4933409G03 (NM_177651.2,1157-1175).
ctaacaacagcgatatgct

SEQ ID NO: 797570 - DNA, 19 bp, Mus musculus
  siRNA target sequence for 4933409G03 (NM_177651.2,1164-1182).
cagcgatatgcttgaagat

SEQ ID NO: 797571 - DNA, 19 bp, Mus musculus
  siRNA target sequence for 4933409G03 (NM_177651.2,1166-1184).
gcgatatgcttgaagatat

SEQ ID NO: 797572 - DNA, 19 bp, Mus musculus
  siRNA target sequence for 4933409G03 (NM_177651.2,1180-1198).
gatatgcatgaagattgtt

SEQ ID NO: 797573 - DNA, 19 bp, Mus musculus
  siRNA target sequence for 4933409G03 (NM_177651.2,1196-1214).
gttccatgctcaaacacta

SEQ ID NO: 797574 - DNA, 19 bp, Mus musculus
  siRNA target sequence for BC034902 (NM_177654.2,58-76).
cattcttgcgtcagctatt

SEQ ID NO: 797575 - DNA, 19 bp, Mus musculus
  siRNA target sequence for BC034902 (NM_177654.2,84-102).
ccctatatgccgtctactt

SEQ ID NO: 797576 - DNA, 19 bp, Mus musculus
  siRNA target sequence for BC034902 (NM_177654.2,86-104).
ctatatgccgtctacttga

SEQ ID NO: 797577 - DNA, 19 bp, Mus musculus
  siRNA target sequence for BC034902 (NM_177654.2,112-130).
cacaggtacttttatctta

SEQ ID NO: 797578 - DNA, 19 bp, Mus musculus
  siRNA target sequence for 6820408C15 (NM_177656.2,440-458).
ctcgagacctcaattctca

SEQ ID NO: 797579 - DNA, 19 bp, Mus musculus
  siRNA target sequence for 6820408C15 (NM_177656.2,455-473).
ctcagggaacaagtttcaa

SEQ ID NO: 797580 - DNA, 19 bp, Mus musculus
  siRNA target sequence for 6820408C15 (NM_177656.2,489-507).
gggccagagaagaacttga

SEQ ID NO: 797581 - DNA, 19 bp, Mus musculus
  siRNA target sequence for 6820408C15 (NM_177656.2,523-541).
ctcccctccgacaagtcaa

SEQ ID NO: 797582 - DNA, 19 bp, Mus musculus
  siRNA target sequence for 6820408C15 (NM_177656.2,537-555).
gtcaaaggccgcaacaaaa

SEQ ID NO: 797583 - DNA, 19 bp, Mus musculus
  siRNA target sequence for 6820408C15 (NM_177656.2,817-835).
ccttgagcgtgcgtgaaat

SEQ ID NO: 797584 - DNA, 19 bp, Mus musculus
  siRNA target sequence for 6820408C15 (NM_177656.2,821-839).
gagcgtgcgtgaaatgcta

SEQ ID NO: 797585 - DNA, 19 bp, Mus musculus
  siRNA target sequence for 6820408C15 (NM_177656.2,850-868).
gtatcctcgggagtatcat

SEQ ID NO: 797586 - DNA, 19 bp, Mus musculus
  siRNA target sequence for 6820408C15 (NM_177656.2,859-877).
ggagtatcatcgacatctt

SEQ ID NO: 797587 - DNA, 19 bp, Mus musculus
  siRNA target sequence for 6820408C15 (NM_177656.2,1054-1072).
ccgtcaagttggttcagat

SEQ ID NO: 797588 - DNA, 19 bp, Mus musculus
  siRNA target sequence for 6820408C15 (NM_177656.2,1119-1137).
gatgagctggacaacctta

SEQ ID NO: 797589 - DNA, 19 bp, Mus musculus
  siRNA target sequence for 6820408C15 (NM_177656.2,1138-1156).
gcgagatgcgggaaaccat

SEQ ID NO: 797590 - DNA, 19 bp, Mus musculus
  siRNA target sequence for 6820408C15 (NM_177656.2,1161-1179).
gcacttttttccaacgtaa

SEQ ID NO: 797591 - DNA, 19 bp, Mus musculus
  siRNA target sequence for 6820408C15 (NM_177656.2,1171-1189).
ccaacgtaattcaagagaa

SEQ ID NO: 797592 - DNA, 19 bp, Mus musculus
  siRNA target sequence for 6820408C15 (NM_177656.2,1208-1226).
gtctctggtcgtgaatact

SEQ ID NO: 797593 - DNA, 19 bp, Mus musculus
  siRNA target sequence for 6820408C15 (NM_177656.2,1210-1228).
ctctggtcgtgaatactca

SEQ ID NO: 797594 - DNA, 19 bp, Mus musculus
  siRNA target sequence for 6820408C15 (NM_177656.2,1214-1232).
ggtcgtgaatactcagaaa

SEQ ID NO: 797595 - DNA, 19 bp, Mus musculus
  siRNA target sequence for 6820408C15 (NM_177656.2,1298-1316).
gttcagagagcttattgaa

SEQ ID NO: 797596 - DNA, 19 bp, Mus musculus
  siRNA target sequence for 6820408C15 (NM_177656.2,1382-1400).
cccgagagaggccgtttat

SEQ ID NO: 797597 - DNA, 19 bp, Mus musculus
  siRNA target sequence for 6820408C15 (NM_177656.2,1383-1401).
ccgagagaggccgtttata

SEQ ID NO: 797598 - DNA, 19 bp, Mus musculus
  siRNA target sequence for 6820408C15 (NM_177656.2,1384-1402).
cgagagaggccgtttataa

SEQ ID NO: 797599 - DNA, 19 bp, Mus musculus
  siRNA target sequence for 6820408C15 (NM_177656.2,1393-1411).
ccgtttataaggatgttct

SEQ ID NO: 797600 - DNA, 19 bp, Mus musculus
  siRNA target sequence for D630003M21 (NM_177657.2,217-235).
ctgtcctgggtcaagtgtt

SEQ ID NO: 797601 - DNA, 19 bp, Mus musculus
  siRNA target sequence for D630003M21 (NM_177657.2,435-453).
ctacgtcagggtgatttct

SEQ ID NO: 797602 - DNA, 19 bp, Mus musculus
  siRNA target sequence for D630003M21 (NM_177657.2,551-569).
gtcctcctactctctcatt

SEQ ID NO: 797603 - DNA, 19 bp, Mus musculus
  siRNA target sequence for D630003M21 (NM_177657.2,588-606).
gaggccatcaacaatgact

SEQ ID NO: 797604 - DNA, 19 bp, Mus musculus
  siRNA target sequence for D630003M21 (NM_177657.2,609-627).
gagggacgtcccttacaca

SEQ ID NO: 797605 - DNA, 19 bp, Mus musculus
  siRNA target sequence for D630003M21 (NM_177657.2,740-758).
ggactcctgtccactagaa

SEQ ID NO: 797606 - DNA, 19 bp, Mus musculus
  siRNA target sequence for D630003M21 (NM_177657.2,906-924).
ggtcagctcgcctttagga

SEQ ID NO: 797607 - DNA, 19 bp, Mus musculus
  siRNA target sequence for D630003M21 (NM_177657.2,1010-1028).
cagtgaggtagtgacatta

SEQ ID NO: 797608 - DNA, 19 bp, Mus musculus
  siRNA target sequence for D630003M21 (NM_177657.2,1016-1034).
ggtagtgacattaagtgta

SEQ ID NO: 797609 - DNA, 19 bp, Mus musculus
  siRNA target sequence for D630003M21 (NM_177657.2,1020-1038).
gtgacattaagtgtagata

SEQ ID NO: 797610 - DNA, 19 bp, Mus musculus
  siRNA target sequence for D630003M21 (NM_177657.2,1134-1152).
ggaagatgggcatgtgaaa

SEQ ID NO: 797611 - DNA, 19 bp, Mus musculus
  siRNA target sequence for D630003M21 (NM_177657.2,1242-1260).
ccacagcagccccatacta

SEQ ID NO: 797612 - DNA, 19 bp, Mus musculus
  siRNA target sequence for D630003M21 (NM_177657.2,1491-1509).
cctgaggactgcctcaata

SEQ ID NO: 797613 - DNA, 19 bp, Mus musculus
  siRNA target sequence for D630003M21 (NM_177657.2,1667-1685).
caaggccccaggcaaagat

SEQ ID NO: 797614 - DNA, 19 bp, Mus musculus
  siRNA target sequence for D630003M21 (NM_177657.2,1782-1800).
cgcctggaggagtgttcta

SEQ ID NO: 797615 - DNA, 19 bp, Mus musculus
  siRNA target sequence for D630003M21 (NM_177657.2,1926-1944).
gaggcaccatggtgtacta

SEQ ID NO: 797616 - DNA, 19 bp, Mus musculus
  siRNA target sequence for D630003M21 (NM_177657.2,1958-1976).
ggagttgctgtcctactta

SEQ ID NO: 797617 - DNA, 19 bp, Mus musculus
  siRNA target sequence for D630003M21 (NM_177657.2,1959-1977).
gagttgctgtcctacttat

SEQ ID NO: 797618 - DNA, 19 bp, Mus musculus
  siRNA target sequence for D630003M21 (NM_177657.2,2011-2029).
ggctcctggtggtgattga

SEQ ID NO: 797619 - DNA, 19 bp, Mus musculus
  siRNA target sequence for D630003M21 (NM_177657.2,2092-2110).
ctccggcctccgtcagtaa

SEQ ID NO: 797620 - DNA, 19 bp, Mus musculus
  siRNA target sequence for D630003M21 (NM_177657.2,2137-2155).
ccattccccagctatctgt

SEQ ID NO: 797621 - DNA, 19 bp, Mus musculus
  siRNA target sequence for D630003M21 (NM_177657.2,2185-2203).
cgctgaaggccctcagaaa

SEQ ID NO: 797622 - DNA, 19 bp, Mus musculus
  siRNA target sequence for D630003M21 (NM_177657.2,2263-2281).
gcgagtgggtgcagttctt

SEQ ID NO: 797623 - DNA, 19 bp, Mus musculus
  siRNA target sequence for D630003M21 (NM_177657.2,2462-2480).
gagggaaggtggaactact

SEQ ID NO: 797624 - DNA, 19 bp, Mus musculus
  siRNA target sequence for D630003M21 (NM_177657.2,2503-2521).
ccagcgggctaaatgctaa

SEQ ID NO: 797625 - DNA, 19 bp, Mus musculus
  siRNA target sequence for D630003M21 (NM_177657.2,2594-2612).
ggtcactgcgtccaatcaa

SEQ ID NO: 797626 - DNA, 19 bp, Mus musculus
  siRNA target sequence for D630003M21 (NM_177657.2,2926-2944).
ggctgacacacttctacat

SEQ ID NO: 797627 - DNA, 19 bp, Mus musculus
  siRNA target sequence for D630003M21 (NM_177657.2,2985-3003).
catctccaccgtttcagaa

SEQ ID NO: 797628 - DNA, 19 bp, Mus musculus
  siRNA target sequence for D630003M21 (NM_177657.2,3301-3319).
cccaagtggcactcataga

SEQ ID NO: 797629 - DNA, 19 bp, Mus musculus
  siRNA target sequence for D630003M21 (NM_177657.2,3612-3630).
ccaactgggggaagctttt

SEQ ID NO: 797630 - DNA, 19 bp, Mus musculus
  siRNA target sequence for AU021107 (NM_177660.2,102-120).
ggatgctggagcatcacat

SEQ ID NO: 797631 - DNA, 19 bp, Mus musculus
  siRNA target sequence for AU021107 (NM_177660.2,109-127).
ggagcatcacatgatttca

SEQ ID NO: 797632 - DNA, 19 bp, Mus musculus
  siRNA target sequence for AU021107 (NM_177660.2,110-128).
gagcatcacatgatttcaa

SEQ ID NO: 797633 - DNA, 19 bp, Mus musculus
  siRNA target sequence for AU021107 (NM_177660.2,141-159).
gcctggcacttcaagtgat

SEQ ID NO: 797634 - DNA, 19 bp, Mus musculus
  siRNA target sequence for AU021107 (NM_177660.2,143-161).
ctggcacttcaagtgattt

SEQ ID NO: 797635 - DNA, 19 bp, Mus musculus
  siRNA target sequence for AU021107 (NM_177660.2,145-163).
ggcacttcaagtgatttca

SEQ ID NO: 797636 - DNA, 19 bp, Mus musculus
  siRNA target sequence for AU021107 (NM_177660.2,169-187).
gggttgctaccaagtactt

SEQ ID NO: 797637 - DNA, 19 bp, Mus musculus
  siRNA target sequence for AU021107 (NM_177660.2,195-213).
cttcaaattcggattgcta

SEQ ID NO: 797638 - DNA, 19 bp, Mus musculus
  siRNA target sequence for AU021107 (NM_177660.2,210-228).
gctaccgggtgcttcaaat

SEQ ID NO: 797639 - DNA, 19 bp, Mus musculus
  siRNA target sequence for AU021107 (NM_177660.2,214-232).
ccgggtgcttcaaatgatt

SEQ ID NO: 797640 - DNA, 19 bp, Mus musculus
  siRNA target sequence for AU021107 (NM_177660.2,215-233).
cgggtgcttcaaatgattt

SEQ ID NO: 797641 - DNA, 19 bp, Mus musculus
  siRNA target sequence for AU021107 (NM_177660.2,217-235).
ggtgcttcaaatgatttca

SEQ ID NO: 797642 - DNA, 19 bp, Mus musculus
  siRNA target sequence for AU021107 (NM_177660.2,229-247).
gatttcaagtatggattat

SEQ ID NO: 797643 - DNA, 19 bp, Mus musculus
  siRNA target sequence for AU021107 (NM_177660.2,287-305).
gtgactcatctctaatcat

SEQ ID NO: 797644 - DNA, 19 bp, Mus musculus
  siRNA target sequence for AU021107 (NM_177660.2,289-307).
gactcatctctaatcatga

SEQ ID NO: 797645 - DNA, 19 bp, Mus musculus
  siRNA target sequence for AU021107 (NM_177660.2,321-339).
ccctcattgtagctatgta

SEQ ID NO: 797646 - DNA, 19 bp, Mus musculus
  siRNA target sequence for AU021107 (NM_177660.2,392-410).
gatcatttaagtgtgaaat

SEQ ID NO: 797647 - DNA, 19 bp, Mus musculus
  siRNA target sequence for AU021107 (NM_177660.2,428-446).
ctagaagagaacacgtaaa

SEQ ID NO: 797648 - DNA, 19 bp, Mus musculus
  siRNA target sequence for AU021107 (NM_177660.2,456-474).
cctggtacataaaaaggat

SEQ ID NO: 797649 - DNA, 19 bp, Mus musculus
  siRNA target sequence for D3Bwg0562e (NM_177664.3,930-948).
ggattcagttgctatgata

SEQ ID NO: 797650 - DNA, 19 bp, Mus musculus
  siRNA target sequence for D3Bwg0562e (NM_177664.3,984-1002).
gaggccataccattcctta

SEQ ID NO: 797651 - DNA, 19 bp, Mus musculus
  siRNA target sequence for D3Bwg0562e (NM_177664.3,1023-1041).
gctggacctgcaattacga

SEQ ID NO: 797652 - DNA, 19 bp, Mus musculus
  siRNA target sequence for D3Bwg0562e (NM_177664.3,1024-1042).
ctggacctgcaattacgat

SEQ ID NO: 797653 - DNA, 19 bp, Mus musculus
  siRNA target sequence for D3Bwg0562e (NM_177664.3,1046-1064).
ggtgggtgaagggattcta

SEQ ID NO: 797654 - DNA, 19 bp, Mus musculus
  siRNA target sequence for D3Bwg0562e (NM_177664.3,1050-1068).
ggtgaagggattctatact

SEQ ID NO: 797655 - DNA, 19 bp, Mus musculus
  siRNA target sequence for D3Bwg0562e (NM_177664.3,1096-1114).
ctggattggagcctaacat

SEQ ID NO: 797656 - DNA, 19 bp, Mus musculus
  siRNA target sequence for D3Bwg0562e (NM_177664.3,1151-1169).
gagagccgtcagattcgtt

SEQ ID NO: 797657 - DNA, 19 bp, Mus musculus
  siRNA target sequence for D3Bwg0562e (NM_177664.3,1193-1211).
ctccacagctctcattaca

SEQ ID NO: 797658 - DNA, 19 bp, Mus musculus
  siRNA target sequence for D3Bwg0562e (NM_177664.3,1200-1218).
gctctcattacagatatca

SEQ ID NO: 797659 - DNA, 19 bp, Mus musculus
  siRNA target sequence for D3Bwg0562e (NM_177664.3,1234-1252).
gatatcaggcaccatactt

SEQ ID NO: 797660 - DNA, 19 bp, Mus musculus
  siRNA target sequence for D3Bwg0562e (NM_177664.3,1239-1257).
caggcaccatactttctga

SEQ ID NO: 797661 - DNA, 19 bp, Mus musculus
  siRNA target sequence for D3Bwg0562e (NM_177664.3,1274-1292).
ctatacctctctgaatgta

SEQ ID NO: 797662 - DNA, 19 bp, Mus musculus
  siRNA target sequence for D3Bwg0562e (NM_177664.3,1290-1308).
gtatcctgcaaagaaaact

SEQ ID NO: 797663 - DNA, 19 bp, Mus musculus
  siRNA target sequence for D3Bwg0562e (NM_177664.3,1309-1327).
cctacatcgtggaagatat

SEQ ID NO: 797664 - DNA, 19 bp, Mus musculus
  siRNA target sequence for D3Bwg0562e (NM_177664.3,1310-1328).
ctacatcgtggaagatatt

SEQ ID NO: 797665 - DNA, 19 bp, Mus musculus
  siRNA target sequence for D3Bwg0562e (NM_177664.3,1313-1331).
catcgtggaagatatttgt

SEQ ID NO: 797666 - DNA, 19 bp, Mus musculus
  siRNA target sequence for D3Bwg0562e (NM_177664.3,1419-1437).
gtgtccatgtacttcaatt

SEQ ID NO: 797667 - DNA, 19 bp, Mus musculus
  siRNA target sequence for D3Bwg0562e (NM_177664.3,1427-1445).
gtacttcaattccacatta

SEQ ID NO: 797668 - DNA, 19 bp, Mus musculus
  siRNA target sequence for D3Bwg0562e (NM_177664.3,1502-1520).
gatcatctgcggactaaca

SEQ ID NO: 797669 - DNA, 19 bp, Mus musculus
  siRNA target sequence for D3Bwg0562e (NM_177664.3,1511-1529).
cggactaacacggataact

SEQ ID NO: 797670 - DNA, 19 bp, Mus musculus
  siRNA target sequence for D3Bwg0562e (NM_177664.3,1513-1531).
gactaacacggataactca

SEQ ID NO: 797671 - DNA, 19 bp, Mus musculus
  siRNA target sequence for D3Bwg0562e (NM_177664.3,1515-1533).
ctaacacggataactcaat

SEQ ID NO: 797672 - DNA, 19 bp, Mus musculus
  siRNA target sequence for D3Bwg0562e (NM_177664.3,1519-1537).
cacggataactcaatataa

SEQ ID NO: 797673 - DNA, 19 bp, Mus musculus
  siRNA target sequence for D3Bwg0562e (NM_177664.3,1521-1539).
cggataactcaatataaga

SEQ ID NO: 797674 - DNA, 19 bp, Mus musculus
  siRNA target sequence for D3Bwg0562e (NM_177664.3,1522-1540).
ggataactcaatataagaa

SEQ ID NO: 797675 - DNA, 19 bp, Mus musculus
  siRNA target sequence for D3Bwg0562e (NM_177664.3,1541-1559).
ccatccagtcgatgtctat

SEQ ID NO: 797676 - DNA, 19 bp, Mus musculus
  siRNA target sequence for D3Bwg0562e (NM_177664.3,1554-1572).
gtctattgtggctttttaa

SEQ ID NO: 797677 - DNA, 19 bp, Mus musculus
  siRNA target sequence for D3Bwg0562e (NM_177664.3,1578-1596).
ggaggaatcgcactatatt

SEQ ID NO: 797678 - DNA, 19 bp, Mus musculus
  siRNA target sequence for D3Bwg0562e (NM_177664.3,1579-1597).
gaggaatcgcactatattt

SEQ ID NO: 797679 - DNA, 19 bp, Mus musculus
  siRNA target sequence for D3Bwg0562e (NM_177664.3,1604-1622).
gtatgctgtagggaatttt

SEQ ID NO: 797680 - DNA, 19 bp, Mus musculus
  siRNA target sequence for D3Bwg0562e (NM_177664.3,1697-1715).
cagggttttatcagctaaa

SEQ ID NO: 797681 - DNA, 19 bp, Mus musculus
  siRNA target sequence for D3Bwg0562e (NM_177664.3,1724-1742).
cagtggtgatggaattgct

SEQ ID NO: 797682 - DNA, 19 bp, Mus musculus
  siRNA target sequence for D3Bwg0562e (NM_177664.3,1776-1794).
gatgcaagctccttgacaa

SEQ ID NO: 797683 - DNA, 19 bp, Mus musculus
  siRNA target sequence for D3Bwg0562e (NM_177664.3,1780-1798).
caagctccttgacaaatct

SEQ ID NO: 797684 - DNA, 19 bp, Mus musculus
  siRNA target sequence for D3Bwg0562e (NM_177664.3,1783-1801).
gctccttgacaaatctcaa

SEQ ID NO: 797685 - DNA, 19 bp, Mus musculus
  siRNA target sequence for D3Bwg0562e (NM_177664.3,1807-1825).
ccaacgctgacgtagaaat

SEQ ID NO: 797686 - DNA, 19 bp, Mus musculus
  siRNA target sequence for D3Bwg0562e (NM_177664.3,2055-2073).
cccaggtccatagaaatga

SEQ ID NO: 797687 - DNA, 19 bp, Mus musculus
  siRNA target sequence for D3Bwg0562e (NM_177664.3,2128-2146).
gcaatcagtacctcaagat

SEQ ID NO: 797688 - DNA, 19 bp, Mus musculus
  siRNA target sequence for D3Bwg0562e (NM_177664.3,2218-2236).
ctggctcttcccaattggt

SEQ ID NO: 797689 - DNA, 19 bp, Mus musculus
  siRNA target sequence for D3Bwg0562e (NM_177664.3,2602-2620).
gtagtctgcgccaaaccta

SEQ ID NO: 797690 - DNA, 19 bp, Mus musculus
  siRNA target sequence for D3Bwg0562e (NM_177664.3,2664-2682).
ctcaaagacagctttggtt

SEQ ID NO: 797691 - DNA, 19 bp, Mus musculus
  siRNA target sequence for D3Bwg0562e (NM_177664.3,2824-2842).
gcaggaagggcaacatcat

SEQ ID NO: 797692 - DNA, 19 bp, Mus musculus
  siRNA target sequence for 9230109N16 (NM_177665.2,209-227).
gccagaactggatctatca

SEQ ID NO: 797693 - DNA, 19 bp, Mus musculus
  siRNA target sequence for 9230109N16 (NM_177665.2,213-231).
gaactggatctatcatata

SEQ ID NO: 797694 - DNA, 19 bp, Mus musculus
  siRNA target sequence for 9230109N16 (NM_177665.2,240-258).
gaggatgagtgcagcaaaa

SEQ ID NO: 797695 - DNA, 19 bp, Mus musculus
  siRNA target sequence for 9230109N16 (NM_177665.2,242-260).
ggatgagtgcagcaaaagt

SEQ ID NO: 797696 - DNA, 19 bp, Mus musculus
  siRNA target sequence for 9230109N16 (NM_177665.2,345-363).
cacgctggtctttactcta

SEQ ID NO: 797697 - DNA, 19 bp, Mus musculus
  siRNA target sequence for 9230109N16 (NM_177665.2,366-384).
catccttggcacttatgtt

SEQ ID NO: 797698 - DNA, 19 bp, Mus musculus
  siRNA target sequence for 9230109N16 (NM_177665.2,377-395).
cttatgttagtgattcctt

SEQ ID NO: 797699 - DNA, 19 bp, Mus musculus
  siRNA target sequence for 9230109N16 (NM_177665.2,454-472).
ccaccgtcccatagatttt

SEQ ID NO: 797700 - DNA, 19 bp, Mus musculus
  siRNA target sequence for 9230109N16 (NM_177665.2,457-475).
ccgtcccatagattttgct

SEQ ID NO: 797701 - DNA, 19 bp, Mus musculus
  siRNA target sequence for 9230109N16 (NM_177665.2,458-476).
cgtcccatagattttgctt

SEQ ID NO: 797702 - DNA, 19 bp, Mus musculus
  siRNA target sequence for A130070M06 (NM_177666.2,318-336).
ctatgtaccatgttgttta

SEQ ID NO: 797703 - DNA, 19 bp, Mus musculus
  siRNA target sequence for A130070M06 (NM_177666.2,532-550).
cagccaggacatctaacaa

SEQ ID NO: 797704 - DNA, 19 bp, Mus musculus
  siRNA target sequence for A130070M06 (NM_177666.2,573-591).
ggcgagtgtgagcacttta

SEQ ID NO: 797705 - DNA, 19 bp, Mus musculus
  siRNA target sequence for A130070M06 (NM_177666.2,587-605).
ctttacacgtccagaaaat

SEQ ID NO: 797706 - DNA, 19 bp, Mus musculus
  siRNA target sequence for A130070M06 (NM_177666.2,807-825).
gcttgcccagacctttaca

SEQ ID NO: 797707 - DNA, 19 bp, Mus musculus
  siRNA target sequence for A130070M06 (NM_177666.2,868-886).
ggaaccgcacacagacatt

SEQ ID NO: 797708 - DNA, 19 bp, Mus musculus
  siRNA target sequence for A130070M06 (NM_177666.2,869-887).
gaaccgcacacagacattt

SEQ ID NO: 797709 - DNA, 19 bp, Mus musculus
  siRNA target sequence for A130070M06 (NM_177666.2,873-891).
cgcacacagacatttcact

SEQ ID NO: 797710 - DNA, 19 bp, Mus musculus
  siRNA target sequence for A130070M06 (NM_177666.2,874-892).
gcacacagacatttcactt

SEQ ID NO: 797711 - DNA, 19 bp, Mus musculus
  siRNA target sequence for A130070M06 (NM_177666.2,899-917).
gggcttgctgggcttttat

SEQ ID NO: 797712 - DNA, 19 bp, Mus musculus
  siRNA target sequence for A130070M06 (NM_177666.2,901-919).
gcttgctgggcttttatga

SEQ ID NO: 797713 - DNA, 19 bp, Mus musculus
  siRNA target sequence for A130070M06 (NM_177666.2,918-936).
gatagactcagaaatagca

SEQ ID NO: 797714 - DNA, 19 bp, Mus musculus
  siRNA target sequence for A130070M06 (NM_177666.2,959-977).
gtttagggcttgttctaga

SEQ ID NO: 797715 - DNA, 19 bp, Mus musculus
  siRNA target sequence for 4732467L16 (NM_177667.2,1008-1026).
ccaaaatcttccacttctt

SEQ ID NO: 797716 - DNA, 19 bp, Mus musculus
  siRNA target sequence for 4732467L16 (NM_177667.2,1250-1268).
ctcaggacctacctagata

SEQ ID NO: 797717 - DNA, 19 bp, Mus musculus
  siRNA target sequence for 4732467L16 (NM_177667.2,1265-1283).
gatatcagtcaggtttact

SEQ ID NO: 797718 - DNA, 19 bp, Mus musculus
  siRNA target sequence for 4732467L16 (NM_177667.2,1272-1290).
gtcaggtttactactacat

SEQ ID NO: 797719 - DNA, 19 bp, Mus musculus
  siRNA target sequence for A630048M13 (NM_177670.2,330-348).
gaagatacaatgctatcat

SEQ ID NO: 797720 - DNA, 19 bp, Mus musculus
  siRNA target sequence for A630048M13 (NM_177670.2,459-477).
ggggttaatcccctttact

SEQ ID NO: 797721 - DNA, 19 bp, Mus musculus
  siRNA target sequence for A630048M13 (NM_177670.2,476-494).
ctgctcccccacttctcat

SEQ ID NO: 797722 - DNA, 19 bp, Mus musculus
  siRNA target sequence for A630048M13 (NM_177670.2,483-501).
cccacttctcatggtaata

SEQ ID NO: 797723 - DNA, 19 bp, Mus musculus
  siRNA target sequence for A630048M13 (NM_177670.2,487-505).
cttctcatggtaataacaa

SEQ ID NO: 797724 - DNA, 19 bp, Mus musculus
  siRNA target sequence for A630048M13 (NM_177670.2,490-508).
ctcatggtaataacaaagt

SEQ ID NO: 797725 - DNA, 19 bp, Mus musculus
  siRNA target sequence for A630048M13 (NM_177670.2,516-534).
ccccgtcctagctttcact

SEQ ID NO: 797726 - DNA, 19 bp, Mus musculus
  siRNA target sequence for A630048M13 (NM_177670.2,548-566).
gagccggtttcctagcttt

SEQ ID NO: 797727 - DNA, 19 bp, Mus musculus
  siRNA target sequence for A630048M13 (NM_177670.2,611-629).
cagccaaaccagactacat

SEQ ID NO: 797728 - DNA, 19 bp, Mus musculus
  siRNA target sequence for A630048M13 (NM_177670.2,613-631).
gccaaaccagactacatta

SEQ ID NO: 797729 - DNA, 19 bp, Mus musculus
  siRNA target sequence for A630048M13 (NM_177670.2,614-632).
ccaaaccagactacattaa

SEQ ID NO: 797730 - DNA, 19 bp, Mus musculus
  siRNA target sequence for A630048M13 (NM_177670.2,622-640).
gactacattaatttagcta

SEQ ID NO: 797731 - DNA, 19 bp, Mus musculus
  siRNA target sequence for A630048M13 (NM_177670.2,641-659).
gcagtatgagtcctattct

SEQ ID NO: 797732 - DNA, 19 bp, Mus musculus
  siRNA target sequence for A630048M13 (NM_177670.2,665-683).
catgggcagccatcctatt

SEQ ID NO: 797733 - DNA, 19 bp, Mus musculus
  siRNA target sequence for A630048M13 (NM_177670.2,671-689).
cagccatcctattttctga

SEQ ID NO: 797734 - DNA, 19 bp, Mus musculus
  siRNA target sequence for A630048M13 (NM_177670.2,673-691).
gccatcctattttctgaaa

SEQ ID NO: 797735 - DNA, 19 bp, Mus musculus
  siRNA target sequence for A630048M13 (NM_177670.2,700-718).
gaagccatagtcacattaa

SEQ ID NO: 797736 - DNA, 19 bp, Mus musculus
  siRNA target sequence for A630048M13 (NM_177670.2,711-729).
cacattaataataggttta

SEQ ID NO: 797737 - DNA, 19 bp, Mus musculus
  siRNA target sequence for A630048M13 (NM_177670.2,725-743).
gtttagggatagcattaca

SEQ ID NO: 797738 - DNA, 19 bp, Mus musculus
  siRNA target sequence for A630048M13 (NM_177670.2,731-749).
ggatagcattacacaatga

SEQ ID NO: 797739 - DNA, 19 bp, Mus musculus
  siRNA target sequence for A630048M13 (NM_177670.2,732-750).
gatagcattacacaatgaa

SEQ ID NO: 797740 - DNA, 19 bp, Mus musculus
  siRNA target sequence for A630048M13 (NM_177670.2,748-766).
gaacttttcctcttactga

SEQ ID NO: 797741 - DNA, 19 bp, Mus musculus
  siRNA target sequence for AV028368 (NM_177672.2,241-259).
gcagtacaatggctttcaa

SEQ ID NO: 797742 - DNA, 19 bp, Mus musculus
  siRNA target sequence for AV028368 (NM_177672.2,536-554).
gccgtcgagtactacatca

SEQ ID NO: 797743 - DNA, 19 bp, Mus musculus
  siRNA target sequence for AV028368 (NM_177672.2,537-555).
ccgtcgagtactacatcaa

SEQ ID NO: 797744 - DNA, 19 bp, Mus musculus
  siRNA target sequence for AV028368 (NM_177672.2,538-556).
cgtcgagtactacatcaaa

SEQ ID NO: 797745 - DNA, 19 bp, Mus musculus
  siRNA target sequence for AV028368 (NM_177672.2,1039-1057).
gcacctggcagagcattat

SEQ ID NO: 797746 - DNA, 19 bp, Mus musculus
  siRNA target sequence for AV028368 (NM_177672.2,1042-1060).
cctggcagagcattatcta

SEQ ID NO: 797747 - DNA, 19 bp, Mus musculus
  siRNA target sequence for AV028368 (NM_177672.2,1139-1157).
gctgtggctacgaggaaat

SEQ ID NO: 797748 - DNA, 19 bp, Mus musculus
  siRNA target sequence for AV028368 (NM_177672.2,1142-1160).
gtggctacgaggaaatcga

SEQ ID NO: 797749 - DNA, 19 bp, Mus musculus
  siRNA target sequence for A930027E11 (NM_177673.2,81-99).
cccacaagattggatttgt

SEQ ID NO: 797750 - DNA, 19 bp, Mus musculus
  siRNA target sequence for A930027E11 (NM_177673.2,108-126).
gctcctctggacatgaaga

SEQ ID NO: 797751 - DNA, 19 bp, Mus musculus
  siRNA target sequence for A930027E11 (NM_177673.2,130-148).
cttcagtgcccgagaacta

SEQ ID NO: 797752 - DNA, 19 bp, Mus musculus
  siRNA target sequence for A930027E11 (NM_177673.2,135-153).
gtgcccgagaactaatgat

SEQ ID NO: 797753 - DNA, 19 bp, Mus musculus
  siRNA target sequence for A930027E11 (NM_177673.2,229-247).
ggagaggtgtcgagtaaga

SEQ ID NO: 797754 - DNA, 19 bp, Mus musculus
  siRNA target sequence for A930027E11 (NM_177673.2,230-248).
gagaggtgtcgagtaagaa

SEQ ID NO: 797755 - DNA, 19 bp, Mus musculus
  siRNA target sequence for A930027E11 (NM_177673.2,260-278).
cttgctcaccagtacatga

SEQ ID NO: 797756 - DNA, 19 bp, Mus musculus
  siRNA target sequence for A930027E11 (NM_177673.2,263-281).
gctcaccagtacatgatct

SEQ ID NO: 797757 - DNA, 19 bp, Mus musculus
  siRNA target sequence for A930027E11 (NM_177673.2,266-284).
caccagtacatgatctcta

SEQ ID NO: 797758 - DNA, 19 bp, Mus musculus
  siRNA target sequence for A930027E11 (NM_177673.2,271-289).
gtacatgatctctagcaaa

SEQ ID NO: 797759 - DNA, 19 bp, Mus musculus
  siRNA target sequence for A930027E11 (NM_177673.2,282-300).
ctagcaaagtcgagttcta

SEQ ID NO: 797760 - DNA, 19 bp, Mus musculus
  siRNA target sequence for A930027E11 (NM_177673.2,285-303).
gcaaagtcgagttctacat

SEQ ID NO: 797761 - DNA, 19 bp, Mus musculus
  siRNA target sequence for A930027E11 (NM_177673.2,293-311).
gagttctacatcagtgaaa

SEQ ID NO: 797762 - DNA, 19 bp, Mus musculus
  siRNA target sequence for A930027E11 (NM_177673.2,441-459).
ggcagtttcttaaactgat

SEQ ID NO: 797763 - DNA, 19 bp, Mus musculus
  siRNA target sequence for A930027E11 (NM_177673.2,442-460).
gcagtttcttaaactgatt

SEQ ID NO: 797764 - DNA, 19 bp, Mus musculus
  siRNA target sequence for A930027E11 (NM_177673.2,457-475).
gatttttcaccaaaaccat

SEQ ID NO: 797765 - DNA, 19 bp, Mus musculus
  siRNA target sequence for A930027E11 (NM_177673.2,476-494).
gccaacaaatacaacatat

SEQ ID NO: 797766 - DNA, 19 bp, Mus musculus
  siRNA target sequence for A930027E11 (NM_177673.2,481-499).
caaatacaacatatataat

SEQ ID NO: 797767 - DNA, 19 bp, Mus musculus
  siRNA target sequence for A930027E11 (NM_177673.2,502-520).
ggtggctttggttgcaata

SEQ ID NO: 797768 - DNA, 19 bp, Mus musculus
  siRNA target sequence for A930027E11 (NM_177673.2,539-557).
gcagatctgggtgatgaaa

SEQ ID NO: 797769 - DNA, 19 bp, Mus musculus
  siRNA target sequence for A930027E11 (NM_177673.2,545-563).
ctgggtgatgaaagcaata

SEQ ID NO: 797770 - DNA, 19 bp, Mus musculus
  siRNA target sequence for A930027E11 (NM_177673.2,631-649).
cctagatggaactttctct

SEQ ID NO: 797771 - DNA, 19 bp, Mus musculus
  siRNA target sequence for A930027E11 (NM_177673.2,648-666).
ctgggcgatctgactacat

SEQ ID NO: 797772 - DNA, 19 bp, Mus musculus
  siRNA target sequence for A930027E11 (NM_177673.2,650-668).
gggcgatctgactacatct

SEQ ID NO: 797773 - DNA, 19 bp, Mus musculus
  siRNA target sequence for A930027E11 (NM_177673.2,829-847).
gcgcctagggcgctatgaa

SEQ ID NO: 797774 - DNA, 19 bp, Mus musculus
  siRNA target sequence for A930027E11 (NM_177673.2,1198-1216).
ggaagtcctgccctatgat

SEQ ID NO: 797775 - DNA, 19 bp, Mus musculus
  siRNA target sequence for A930027E11 (NM_177673.2,1391-1409).
gtggctggggcctattcta

SEQ ID NO: 797776 - DNA, 19 bp, Mus musculus
  siRNA target sequence for A930027E11 (NM_177673.2,1394-1412).
gctggggcctattctaaga

SEQ ID NO: 797777 - DNA, 19 bp, Mus musculus
  siRNA target sequence for A930027E11 (NM_177673.2,1395-1413).
ctggggcctattctaagat

SEQ ID NO: 797778 - DNA, 19 bp, Mus musculus
  siRNA target sequence for A930027E11 (NM_177673.2,1397-1415).
ggggcctattctaagatgt

SEQ ID NO: 797779 - DNA, 19 bp, Mus musculus
  siRNA target sequence for A930027E11 (NM_177673.2,1433-1451).
gcactactggcgttgtaca

SEQ ID NO: 797780 - DNA, 19 bp, Mus musculus
  siRNA target sequence for A930027E11 (NM_177673.2,1434-1452).
cactactggcgttgtacaa

SEQ ID NO: 797781 - DNA, 19 bp, Mus musculus
  siRNA target sequence for A930027E11 (NM_177673.2,1436-1454).
ctactggcgttgtacaaga

SEQ ID NO: 797782 - DNA, 19 bp, Mus musculus
  siRNA target sequence for A930027E11 (NM_177673.2,1533-1551).
gagccataaaggacattgt

SEQ ID NO: 797783 - DNA, 19 bp, Mus musculus
  siRNA target sequence for A930027E11 (NM_177673.2,1557-1575).
cagtctttcaggcttcatt

SEQ ID NO: 797784 - DNA, 19 bp, Mus musculus
  siRNA target sequence for A930027E11 (NM_177673.2,1705-1723).
ccgtgtcatggccttgaat

SEQ ID NO: 797785 - DNA, 19 bp, Mus musculus
  siRNA target sequence for A930027E11 (NM_177673.2,1706-1724).
cgtgtcatggccttgaatt

SEQ ID NO: 797786 - DNA, 19 bp, Mus musculus
  siRNA target sequence for A930027E11 (NM_177673.2,1793-1811).
ccgctgaaggccaatgctt

SEQ ID NO: 797787 - DNA, 19 bp, Mus musculus
  siRNA target sequence for A930027E11 (NM_177673.2,1803-1821).
ccaatgcttccgttcatct

SEQ ID NO: 797788 - DNA, 19 bp, Mus musculus
  siRNA target sequence for A930027E11 (NM_177673.2,1965-1983).
ggatcatcctggacatgta

SEQ ID NO: 797789 - DNA, 19 bp, Mus musculus
  siRNA target sequence for A930027E11 (NM_177673.2,2037-2055).
cacgcaggaaccttctcta

SEQ ID NO: 797790 - DNA, 19 bp, Mus musculus
  siRNA target sequence for A930027E11 (NM_177673.2,2040-2058).
gcaggaaccttctctacaa

SEQ ID NO: 797791 - DNA, 19 bp, Mus musculus
  siRNA target sequence for A930027E11 (NM_177673.2,2041-2059).
caggaaccttctctacaaa

SEQ ID NO: 797792 - DNA, 19 bp, Mus musculus
  siRNA target sequence for A930027E11 (NM_177673.2,2114-2132).
gaggtgagggcccagaaaa

SEQ ID NO: 797793 - DNA, 19 bp, Mus musculus
  siRNA target sequence for A930027E11 (NM_177673.2,2119-2137).
gagggcccagaaaagagta

SEQ ID NO: 797794 - DNA, 19 bp, Mus musculus
  siRNA target sequence for A930027E11 (NM_177673.2,2452-2470).
gatatccagccttacagaa

SEQ ID NO: 797795 - DNA, 19 bp, Mus musculus
  siRNA target sequence for A930027E11 (NM_177673.2,2468-2486).
gaacacctgctgacagaat

SEQ ID NO: 797796 - DNA, 19 bp, Mus musculus
  siRNA target sequence for A930027E11 (NM_177673.2,2617-2635).
cctgtgtcatgagaacttt

SEQ ID NO: 797797 - DNA, 19 bp, Mus musculus
  siRNA target sequence for A930027E11 (NM_177673.2,2652-2670).
cgtggaaggttcatctgat

SEQ ID NO: 797798 - DNA, 19 bp, Mus musculus
  siRNA target sequence for A930027E11 (NM_177673.2,2695-2713).
cctgcgcaagacacatgtt

SEQ ID NO: 797799 - DNA, 19 bp, Mus musculus
  siRNA target sequence for A930027E11 (NM_177673.2,2807-2825).
ccaaagggaggccttagta

SEQ ID NO: 797800 - DNA, 19 bp, Mus musculus
  siRNA target sequence for A530045M11 (NM_177674.2,406-424).
ccatgtggcacattgagat

SEQ ID NO: 797801 - DNA, 19 bp, Mus musculus
  siRNA target sequence for A530045M11 (NM_177674.2,780-798).
gccagtcgggaaacactaa

SEQ ID NO: 797802 - DNA, 19 bp, Mus musculus
  siRNA target sequence for A530045M11 (NM_177674.2,782-800).
cagtcgggaaacactaaaa

SEQ ID NO: 797803 - DNA, 19 bp, Mus musculus
  siRNA target sequence for A530045M11 (NM_177674.2,858-876).
gagaaagaagtgatcctat

SEQ ID NO: 797804 - DNA, 19 bp, Mus musculus
  siRNA target sequence for A530045M11 (NM_177674.2,882-900).
ggcggagatgccttcaagt

SEQ ID NO: 797805 - DNA, 19 bp, Mus musculus
  siRNA target sequence for A530045M11 (NM_177674.2,883-901).
gcggagatgccttcaagta

SEQ ID NO: 797806 - DNA, 19 bp, Mus musculus
  siRNA target sequence for A530045M11 (NM_177674.2,937-955).
cccagaagcgggcttttga

SEQ ID NO: 797807 - DNA, 19 bp, Mus musculus
  siRNA target sequence for A530045M11 (NM_177674.2,1036-1054).
gacagcatccgctctctaa

SEQ ID NO: 797808 - DNA, 19 bp, Mus musculus
  siRNA target sequence for A530045M11 (NM_177674.2,1091-1109).
gcagtacatctctgacttt

SEQ ID NO: 797809 - DNA, 19 bp, Mus musculus
  siRNA target sequence for A530045M11 (NM_177674.2,1147-1165).
gtgagcgtgagctgctatt

SEQ ID NO: 797810 - DNA, 19 bp, Mus musculus
  siRNA target sequence for A530045M11 (NM_177674.2,1149-1167).
gagcgtgagctgctattat

SEQ ID NO: 797811 - DNA, 19 bp, Mus musculus
  siRNA target sequence for A530045M11 (NM_177674.2,1185-1203).
gtaataaaagccatctcta

SEQ ID NO: 797812 - DNA, 19 bp, Mus musculus
  siRNA target sequence for A530045M11 (NM_177674.2,1199-1217).
ctctagtgagtctgttcaa

SEQ ID NO: 797813 - DNA, 19 bp, Mus musculus
  siRNA target sequence for A530045M11 (NM_177674.2,1221-1239).
gacctaggaagcatcagta

SEQ ID NO: 797814 - DNA, 19 bp, Mus musculus
  siRNA target sequence for A530045M11 (NM_177674.2,1256-1274).
ggctgaaccagatatttca

SEQ ID NO: 797815 - DNA, 19 bp, Mus musculus
  siRNA target sequence for A530045M11 (NM_177674.2,1313-1331).
ggacatggaacgaaaacct

SEQ ID NO: 797816 - DNA, 19 bp, Mus musculus
  siRNA target sequence for A530045M11 (NM_177674.2,1329-1347).
cctgtgggcggaagtaaga

SEQ ID NO: 797817 - DNA, 19 bp, Mus musculus
  siRNA target sequence for A530045M11 (NM_177674.2,1386-1404).
cgcagtggggtggttcaaa

SEQ ID NO: 797818 - DNA, 19 bp, Mus musculus
  siRNA target sequence for A530045M11 (NM_177674.2,1456-1474).
ctgaggtcatccacttcaa

SEQ ID NO: 797819 - DNA, 19 bp, Mus musculus
  siRNA target sequence for A530045M11 (NM_177674.2,1513-1531).
cgctgatcaatgctactta

SEQ ID NO: 797820 - DNA, 19 bp, Mus musculus
  siRNA target sequence for A530045M11 (NM_177674.2,1515-1533).
ctgatcaatgctacttaca

SEQ ID NO: 797821 - DNA, 19 bp, Mus musculus
  siRNA target sequence for A530045M11 (NM_177674.2,1517-1535).
gatcaatgctacttacaca

SEQ ID NO: 797822 - DNA, 19 bp, Mus musculus
  siRNA target sequence for A530045M11 (NM_177674.2,1649-1667).
cttcaaacctatgataaat

SEQ ID NO: 797823 - DNA, 19 bp, Mus musculus
  siRNA target sequence for A530045M11 (NM_177674.2,1703-1721).
gacgggcagcttttctgtt

SEQ ID NO: 797824 - DNA, 19 bp, Mus musculus
  siRNA target sequence for A530045M11 (NM_177674.2,1719-1737).
gttccactgaaatgttcaa

SEQ ID NO: 797825 - DNA, 19 bp, Mus musculus
  siRNA target sequence for A530045M11 (NM_177674.2,1930-1948).
cctgtgaggaaaaaattat

SEQ ID NO: 797826 - DNA, 19 bp, Mus musculus
  siRNA target sequence for A530045M11 (NM_177674.2,1933-1951).
gtgaggaaaaaattatata

SEQ ID NO: 797827 - DNA, 19 bp, Mus musculus
  siRNA target sequence for A530045M11 (NM_177674.2,1958-1976).
gatcatgaccagtctttct

SEQ ID NO: 797828 - DNA, 19 bp, Mus musculus
  siRNA target sequence for A530045M11 (NM_177674.2,2145-2163).
gaaatcggtcccttcagtt

SEQ ID NO: 797829 - DNA, 19 bp, Mus musculus
  siRNA target sequence for A530045M11 (NM_177674.2,2155-2173).
ccttcagttccgtcaaagt

SEQ ID NO: 797830 - DNA, 19 bp, Mus musculus
  siRNA target sequence for A530045M11 (NM_177674.2,2156-2174).
cttcagttccgtcaaagta

SEQ ID NO: 797831 - DNA, 19 bp, Mus musculus
  siRNA target sequence for A530045M11 (NM_177674.2,2200-2218).
caggagaagtccaaactaa

SEQ ID NO: 797832 - DNA, 19 bp, Mus musculus
  siRNA target sequence for A530045M11 (NM_177674.2,2205-2223).
gaagtccaaactaaattca

SEQ ID NO: 797833 - DNA, 19 bp, Mus musculus
  siRNA target sequence for A530045M11 (NM_177674.2,2242-2260).
cacagagtccaccgttata

SEQ ID NO: 797834 - DNA, 19 bp, Mus musculus
  siRNA target sequence for A530045M11 (NM_177674.2,2244-2262).
cagagtccaccgttatatt

SEQ ID NO: 797835 - DNA, 19 bp, Mus musculus
  siRNA target sequence for A530045M11 (NM_177674.2,2270-2288).
caccggtactgccatagat

SEQ ID NO: 797836 - DNA, 19 bp, Mus musculus
  siRNA target sequence for A530045M11 (NM_177674.2,2272-2290).
ccggtactgccatagatgt

SEQ ID NO: 797837 - DNA, 19 bp, Mus musculus
  siRNA target sequence for 9130230L23 (NM_177679.2,654-672).
gttactcctggttgattga

SEQ ID NO: 797838 - DNA, 19 bp, Mus musculus
  siRNA target sequence for 9130230L23 (NM_177679.2,692-710).
gcccatgactggacttctt

SEQ ID NO: 797839 - DNA, 19 bp, Mus musculus
  siRNA target sequence for 9130230L23 (NM_177679.2,703-721).
gacttcttgtaccatacat

SEQ ID NO: 797840 - DNA, 19 bp, Mus musculus
  siRNA target sequence for 9130230L23 (NM_177679.2,705-723).
cttcttgtaccatacatga

SEQ ID NO: 797841 - DNA, 19 bp, Mus musculus
  siRNA target sequence for 9130230L23 (NM_177679.2,741-759).
gcttctcactcaaagttgt

SEQ ID NO: 797842 - DNA, 19 bp, Mus musculus
  siRNA target sequence for 9130230L23 (NM_177679.2,745-763).
ctcactcaaagttgtatct

SEQ ID NO: 797843 - DNA, 19 bp, Mus musculus
  siRNA target sequence for 9130230L23 (NM_177679.2,795-813).
ctgacctccggcttacgaa

SEQ ID NO: 797844 - DNA, 19 bp, Mus musculus
  siRNA target sequence for 9130230L23 (NM_177679.2,830-848).
ccggtgtgttgcaattaca

SEQ ID NO: 797845 - DNA, 19 bp, Mus musculus
  siRNA target sequence for 9130230L23 (NM_177679.2,886-904).
gaggcccaagatttcaatt

SEQ ID NO: 797846 - DNA, 19 bp, Mus musculus
  siRNA target sequence for 9130230L23 (NM_177679.2,890-908).
cccaagatttcaattagct

SEQ ID NO: 797847 - DNA, 19 bp, Mus musculus
  siRNA target sequence for 9130230L23 (NM_177679.2,959-977).
caaatgggttacagagaaa

SEQ ID NO: 797848 - DNA, 19 bp, Mus musculus
  siRNA target sequence for A730098D12Rik (NM_177680.2,195-213).
ggatttgcaggcgtgaatt

SEQ ID NO: 797849 - DNA, 19 bp, Mus musculus
  siRNA target sequence for A730098D12Rik (NM_177680.2,196-214).
gatttgcaggcgtgaatta

SEQ ID NO: 797850 - DNA, 19 bp, Mus musculus
  siRNA target sequence for A730098D12Rik (NM_177680.2,205-223).
gcgtgaattaccctttact

SEQ ID NO: 797851 - DNA, 19 bp, Mus musculus
  siRNA target sequence for A730098D12Rik (NM_177680.2,206-224).
cgtgaattaccctttacta

SEQ ID NO: 797852 - DNA, 19 bp, Mus musculus
  siRNA target sequence for A730098D12Rik (NM_177680.2,207-225).
gtgaattaccctttactaa

SEQ ID NO: 797853 - DNA, 19 bp, Mus musculus
  siRNA target sequence for A730098D12Rik (NM_177680.2,209-227).
gaattaccctttactaaat

SEQ ID NO: 797854 - DNA, 19 bp, Mus musculus
  siRNA target sequence for A730098D12Rik (NM_177680.2,238-256).
caccaatccctggaatgaa

SEQ ID NO: 797855 - DNA, 19 bp, Mus musculus
  siRNA target sequence for A730098D12Rik (NM_177680.2,279-297).
gtgatggacaggaaattga

SEQ ID NO: 797856 - DNA, 19 bp, Mus musculus
  siRNA target sequence for A730098D12Rik (NM_177680.2,306-324).
gtggaactcagctttgtct

SEQ ID NO: 797857 - DNA, 19 bp, Mus musculus
  siRNA target sequence for A730098D12Rik (NM_177680.2,333-351).
cccctgatgaaagtattga

SEQ ID NO: 797858 - DNA, 19 bp, Mus musculus
  siRNA target sequence for A730098D12Rik (NM_177680.2,335-353).
cctgatgaaagtattgact

SEQ ID NO: 797859 - DNA, 19 bp, Mus musculus
  siRNA target sequence for A730098D12Rik (NM_177680.2,456-474).
ggcgtcgaccagaagatta

SEQ ID NO: 797860 - DNA, 19 bp, Mus musculus
  siRNA target sequence for A730098D12Rik (NM_177680.2,457-475).
gcgtcgaccagaagattat

SEQ ID NO: 797861 - DNA, 19 bp, Mus musculus
  siRNA target sequence for A730098D12Rik (NM_177680.2,459-477).
gtcgaccagaagattatga

SEQ ID NO: 797862 - DNA, 19 bp, Mus musculus
  siRNA target sequence for A730098D12Rik (NM_177680.2,461-479).
cgaccagaagattatgata

SEQ ID NO: 797863 - DNA, 19 bp, Mus musculus
  siRNA target sequence for A730098D12Rik (NM_177680.2,496-514).
gaaaccaaggattgactat

SEQ ID NO: 797864 - DNA, 19 bp, Mus musculus
  siRNA target sequence for A730098D12Rik (NM_177680.2,534-552).
gaccagggtatgtaaagga

SEQ ID NO: 797865 - DNA, 19 bp, Mus musculus
  siRNA target sequence for A730098D12Rik (NM_177680.2,566-584).
gaagtggacagacgatttt

SEQ ID NO: 797866 - DNA, 19 bp, Mus musculus
  siRNA target sequence for A730098D12Rik (NM_177680.2,588-606).
gagttcgccgagatgtgtt

SEQ ID NO: 797867 - DNA, 19 bp, Mus musculus
  siRNA target sequence for A730098D12Rik (NM_177680.2,593-611).
cgccgagatgtgtttttaa

SEQ ID NO: 797868 - DNA, 19 bp, Mus musculus
  siRNA target sequence for A730098D12Rik (NM_177680.2,799-817).
cagagataaacgagtacat

SEQ ID NO: 797869 - DNA, 19 bp, Mus musculus
  siRNA target sequence for A730098D12Rik (NM_177680.2,801-819).
gagataaacgagtacatga

SEQ ID NO: 797870 - DNA, 19 bp, Mus musculus
  siRNA target sequence for A730098D12Rik (NM_177680.2,809-827).
cgagtacatgactatgata

SEQ ID NO: 797871 - DNA, 19 bp, Mus musculus
  siRNA target sequence for A730098D12Rik (NM_177680.2,810-828).
gagtacatgactatgatat

SEQ ID NO: 797872 - DNA, 19 bp, Mus musculus
  siRNA target sequence for A730098D12Rik (NM_177680.2,812-830).
gtacatgactatgatatga

SEQ ID NO: 797873 - DNA, 19 bp, Mus musculus
  siRNA target sequence for A730098D12Rik (NM_177680.2,824-842).
gatatgagggtcgatgatt

SEQ ID NO: 797874 - DNA, 19 bp, Mus musculus
  siRNA target sequence for A730098D12Rik (NM_177680.2,829-847).
gagggtcgatgatttcctt

SEQ ID NO: 797875 - DNA, 19 bp, Mus musculus
  siRNA target sequence for A730098D12Rik (NM_177680.2,868-886).
cagtggtcggagaagtaga

SEQ ID NO: 797876 - DNA, 19 bp, Mus musculus
  siRNA target sequence for A730098D12Rik (NM_177680.2,960-978).
gtcgtgatcgagaaagaga

SEQ ID NO: 797877 - DNA, 19 bp, Mus musculus
  siRNA target sequence for MGC56855 (NM_177682.3,103-121).
cgctgctgagcttcttcat

SEQ ID NO: 797878 - DNA, 19 bp, Mus musculus
  siRNA target sequence for MGC56855 (NM_177682.3,254-272).
gacttttagcccatcgaaa

SEQ ID NO: 797879 - DNA, 19 bp, Mus musculus
  siRNA target sequence for MGC56855 (NM_177682.3,511-529).
gaggcgtcaagctcctaaa

SEQ ID NO: 797880 - DNA, 19 bp, Mus musculus
  siRNA target sequence for MGC56855 (NM_177682.3,514-532).
gcgtcaagctcctaaagga

SEQ ID NO: 797881 - DNA, 19 bp, Mus musculus
  siRNA target sequence for MGC56855 (NM_177682.3,515-533).
cgtcaagctcctaaaggaa

SEQ ID NO: 797882 - DNA, 19 bp, Mus musculus
  siRNA target sequence for MGC56855 (NM_177682.3,557-575).
gtatttgcagacactacat

SEQ ID NO: 797883 - DNA, 19 bp, Mus musculus
  siRNA target sequence for MGC56855 (NM_177682.3,581-599).
gtcatgtgacctacttgat

SEQ ID NO: 797884 - DNA, 19 bp, Mus musculus
  siRNA target sequence for MGC56855 (NM_177682.3,583-601).
catgtgacctacttgatat

SEQ ID NO: 797885 - DNA, 19 bp, Mus musculus
  siRNA target sequence for MGC56855 (NM_177682.3,586-604).
gtgacctacttgatatttt

SEQ ID NO: 797886 - DNA, 19 bp, Mus musculus
  siRNA target sequence for MGC56855 (NM_177682.3,614-632).
cagcttcttcccattggat

SEQ ID NO: 797887 - DNA, 19 bp, Mus musculus
  siRNA target sequence for MGC56855 (NM_177682.3,623-641).
cccattggataaaatgact

SEQ ID NO: 797888 - DNA, 19 bp, Mus musculus
  siRNA target sequence for MGC56855 (NM_177682.3,624-642).
ccattggataaaatgactt

SEQ ID NO: 797889 - DNA, 19 bp, Mus musculus
  siRNA target sequence for MGC56855 (NM_177682.3,682-700).
gcctaagtgtagtcaaata

SEQ ID NO: 797890 - DNA, 19 bp, Mus musculus
  siRNA target sequence for MGC56855 (NM_177682.3,703-721).
cagcattcctctacaatga

SEQ ID NO: 797891 - DNA, 19 bp, Mus musculus
  siRNA target sequence for MGC56855 (NM_177682.3,746-764).
gcaagatgacatgagaatt

SEQ ID NO: 797892 - DNA, 19 bp, Mus musculus
  siRNA target sequence for MGC56855 (NM_177682.3,753-771).
gacatgagaattttgtaca

SEQ ID NO: 797893 - DNA, 19 bp, Mus musculus
  siRNA target sequence for MGC56855 (NM_177682.3,755-773).
catgagaattttgtacaaa

SEQ ID NO: 797894 - DNA, 19 bp, Mus musculus
  siRNA target sequence for MGC56855 (NM_177682.3,866-884).
gcactatggaagatttctt

SEQ ID NO: 797895 - DNA, 19 bp, Mus musculus
  siRNA target sequence for MGC56855 (NM_177682.3,889-907).
gacccttgaaccttaatga

SEQ ID NO: 797896 - DNA, 19 bp, Mus musculus
  siRNA target sequence for MGC56855 (NM_177682.3,958-976).
cgtatgaagagctccattt

SEQ ID NO: 797897 - DNA, 19 bp, Mus musculus
  siRNA target sequence for MGC56855 (NM_177682.3,969-987).
ctccatttaattgtttata

SEQ ID NO: 797898 - DNA, 19 bp, Mus musculus
  siRNA target sequence for MGC56855 (NM_177682.3,1156-1174).
cccagtttaagttcatcta

SEQ ID NO: 797899 - DNA, 19 bp, Mus musculus
  siRNA target sequence for MGC56855 (NM_177682.3,1187-1205).
gaatttagcagagaaaagt

SEQ ID NO: 797900 - DNA, 19 bp, Mus musculus
  siRNA target sequence for MGC56855 (NM_177682.3,1246-1264).
ccgtccacccagatctaat

SEQ ID NO: 797901 - DNA, 19 bp, Mus musculus
  siRNA target sequence for MGC56855 (NM_177682.3,1248-1266).
gtccacccagatctaatga

SEQ ID NO: 797902 - DNA, 19 bp, Mus musculus
  siRNA target sequence for MGC56855 (NM_177682.3,1251-1269).
cacccagatctaatgaaga

SEQ ID NO: 797903 - DNA, 19 bp, Mus musculus
  siRNA target sequence for MGC56855 (NM_177682.3,1253-1271).
cccagatctaatgaagata

SEQ ID NO: 797904 - DNA, 19 bp, Mus musculus
  siRNA target sequence for MGC56855 (NM_177682.3,1254-1272).
ccagatctaatgaagatat

SEQ ID NO: 797905 - DNA, 19 bp, Mus musculus
  siRNA target sequence for MGC56855 (NM_177682.3,1375-1393).
gggagctgtacgtgattct

SEQ ID NO: 797906 - DNA, 19 bp, Mus musculus
  siRNA target sequence for MGC56855 (NM_177682.3,1377-1395).
gagctgtacgtgattctca

SEQ ID NO: 797907 - DNA, 19 bp, Mus musculus
  siRNA target sequence for MGC56855 (NM_177682.3,1412-1430).
cctgatcgaggtcaatgaa

SEQ ID NO: 797908 - DNA, 19 bp, Mus musculus
  siRNA target sequence for MGC56855 (NM_177682.3,1449-1467).
gccacgcagttcaacaaca

SEQ ID NO: 797909 - DNA, 19 bp, Mus musculus
  siRNA target sequence for MGC56855 (NM_177682.3,1453-1471).
cgcagttcaacaacatctt

SEQ ID NO: 797910 - DNA, 19 bp, Mus musculus
  siRNA target sequence for BC048841 (NM_177683.2,396-414).
ggacaagatgaacaacaat

SEQ ID NO: 797911 - DNA, 19 bp, Mus musculus
  siRNA target sequence for BC048841 (NM_177683.2,527-545).
gccccagcaagaggaaatt

SEQ ID NO: 797912 - DNA, 19 bp, Mus musculus
  siRNA target sequence for BC048841 (NM_177683.2,763-781).
cctcttgccctgactaaga

SEQ ID NO: 797913 - DNA, 19 bp, Mus musculus
  siRNA target sequence for BC048841 (NM_177683.2,766-784).
cttgccctgactaagaaca

SEQ ID NO: 797914 - DNA, 19 bp, Mus musculus
  siRNA target sequence for LOC232337 (NM_177684.2,216-234).
cctcaagctgggatttcca

SEQ ID NO: 797915 - DNA, 19 bp, Mus musculus
  siRNA target sequence for LOC232337 (NM_177684.2,445-463).
gggcaacctggttacacat

SEQ ID NO: 797916 - DNA, 19 bp, Mus musculus
  siRNA target sequence for LOC232337 (NM_177684.2,600-618).
gcttccgaaatcaaagtaa

SEQ ID NO: 797917 - DNA, 19 bp, Mus musculus
  siRNA target sequence for LOC232337 (NM_177684.2,622-640).
cgccgtgcaccgaagagtt

SEQ ID NO: 797918 - DNA, 19 bp, Mus musculus
  siRNA target sequence for D130058E03 (NM_177685.2,97-115).
cccacctttccctatatga

SEQ ID NO: 797919 - DNA, 19 bp, Mus musculus
  siRNA target sequence for D130058E03 (NM_177685.2,173-191).
cgccaatcagagtgaaagt

SEQ ID NO: 797920 - DNA, 19 bp, Mus musculus
  siRNA target sequence for D130058E03 (NM_177685.2,174-192).
gccaatcagagtgaaagtt

SEQ ID NO: 797921 - DNA, 19 bp, Mus musculus
  siRNA target sequence for D130058E03 (NM_177685.2,175-193).
ccaatcagagtgaaagttt

SEQ ID NO: 797922 - DNA, 19 bp, Mus musculus
  siRNA target sequence for D130058E03 (NM_177685.2,180-198).
cagagtgaaagtttaccta

SEQ ID NO: 797923 - DNA, 19 bp, Mus musculus
  siRNA target sequence for D130058E03 (NM_177685.2,221-239).
ccgtcggcaaacacaagaa

SEQ ID NO: 797924 - DNA, 19 bp, Mus musculus
  siRNA target sequence for D130058E03 (NM_177685.2,294-312).
ctggaaaccactgatcttt

SEQ ID NO: 797925 - DNA, 19 bp, Mus musculus
  siRNA target sequence for D130058E03 (NM_177685.2,297-315).
gaaaccactgatcttttta

SEQ ID NO: 797926 - DNA, 19 bp, Mus musculus
  siRNA target sequence for D130058E03 (NM_177685.2,301-319).
ccactgatctttttacagt

SEQ ID NO: 797927 - DNA, 19 bp, Mus musculus
  siRNA target sequence for D130058E03 (NM_177685.2,336-354).
cctctaggatactatgaaa

SEQ ID NO: 797928 - DNA, 19 bp, Mus musculus
  siRNA target sequence for B230205M03 (NM_177687.2,285-303).
gacggaagccagccaaaat

SEQ ID NO: 797929 - DNA, 19 bp, Mus musculus
  siRNA target sequence for B230205M03 (NM_177687.2,288-306).
ggaagccagccaaaatcga

SEQ ID NO: 797930 - DNA, 19 bp, Mus musculus
  siRNA target sequence for B230205M03 (NM_177687.2,304-322).
cgacttgaaagcgaaactt

SEQ ID NO: 797931 - DNA, 19 bp, Mus musculus
  siRNA target sequence for B230205M03 (NM_177687.2,332-350).
cggcagagtgcgagagaat

SEQ ID NO: 797932 - DNA, 19 bp, Mus musculus
  siRNA target sequence for B230205M03 (NM_177687.2,400-418).
cagtcgggaaagagctata

SEQ ID NO: 797933 - DNA, 19 bp, Mus musculus
  siRNA target sequence for B230205M03 (NM_177687.2,428-446).
cgagaggaactggaaatgt

SEQ ID NO: 797934 - DNA, 19 bp, Mus musculus
  siRNA target sequence for B930018B01 (NM_177689.2,93-111).
gcatcatctgggagacttt

SEQ ID NO: 797935 - DNA, 19 bp, Mus musculus
  siRNA target sequence for B930018B01 (NM_177689.2,150-168).
ctgatctgtggcattaggt

SEQ ID NO: 797936 - DNA, 19 bp, Mus musculus
  siRNA target sequence for B930018B01 (NM_177689.2,248-266).
gcacatgcttggctattct

SEQ ID NO: 797937 - DNA, 19 bp, Mus musculus
  siRNA target sequence for B930018B01 (NM_177689.2,289-307).
gggctttctccaatcgtaa

SEQ ID NO: 797938 - DNA, 19 bp, Mus musculus
  siRNA target sequence for B930018B01 (NM_177689.2,292-310).
ctttctccaatcgtaaact

SEQ ID NO: 797939 - DNA, 19 bp, Mus musculus
  siRNA target sequence for B930018B01 (NM_177689.2,296-314).
ctccaatcgtaaactatgt

SEQ ID NO: 797940 - DNA, 19 bp, Mus musculus
  siRNA target sequence for B930018B01 (NM_177689.2,316-334).
cctggaacgtgaacttcat

SEQ ID NO: 797941 - DNA, 19 bp, Mus musculus
  siRNA target sequence for BC043666 (NM_177692.2,144-162).
cgtccgaggaggaactata

SEQ ID NO: 797942 - DNA, 19 bp, Mus musculus
  siRNA target sequence for BC043666 (NM_177692.2,147-165).
ccgaggaggaactatacct

SEQ ID NO: 797943 - DNA, 19 bp, Mus musculus
  siRNA target sequence for BC043666 (NM_177692.2,546-564).
ccgagcgcctggatatcgt

SEQ ID NO: 797944 - DNA, 19 bp, Mus musculus
  siRNA target sequence for 9330162L24 (NM_177694.2,574-592).
gggaagtcctggtcactta

SEQ ID NO: 797945 - DNA, 19 bp, Mus musculus
  siRNA target sequence for 9330162L24 (NM_177694.2,737-755).
cagcagacaccgtcaagaa

SEQ ID NO: 797946 - DNA, 19 bp, Mus musculus
  siRNA target sequence for 9330162L24 (NM_177694.2,739-757).
gcagacaccgtcaagaact

SEQ ID NO: 797947 - DNA, 19 bp, Mus musculus
  siRNA target sequence for 9330162L24 (NM_177694.2,742-760).
gacaccgtcaagaactctt

SEQ ID NO: 797948 - DNA, 19 bp, Mus musculus
  siRNA target sequence for 9330162L24 (NM_177694.2,921-939).
catgatggccagtattgga

SEQ ID NO: 797949 - DNA, 19 bp, Mus musculus
  siRNA target sequence for 9330162L24 (NM_177694.2,927-945).
ggccagtattggaaaccat

SEQ ID NO: 797950 - DNA, 19 bp, Mus musculus
  siRNA target sequence for 9330162L24 (NM_177694.2,955-973).
ctcgccccaatgaaaggta

SEQ ID NO: 797951 - DNA, 19 bp, Mus musculus
  siRNA target sequence for 9330162L24 (NM_177694.2,983-1001).
caagaactgggctcgattt

SEQ ID NO: 797952 - DNA, 19 bp, Mus musculus
  siRNA target sequence for 9330162L24 (NM_177694.2,992-1010).
ggctcgattttcctacttt

SEQ ID NO: 797953 - DNA, 19 bp, Mus musculus
  siRNA target sequence for 9330162L24 (NM_177694.2,993-1011).
gctcgattttcctactttt

SEQ ID NO: 797954 - DNA, 19 bp, Mus musculus
  siRNA target sequence for 9330162L24 (NM_177694.2,1013-1031).
caaggagcaaccttttcat

SEQ ID NO: 797955 - DNA, 19 bp, Mus musculus
  siRNA target sequence for 9330162L24 (NM_177694.2,1029-1047).
catttgattcggaattatt

SEQ ID NO: 797956 - DNA, 19 bp, Mus musculus
  siRNA target sequence for 9330162L24 (NM_177694.2,1074-1092).
gtatttctcgggtattaca

SEQ ID NO: 797957 - DNA, 19 bp, Mus musculus
  siRNA target sequence for 9330162L24 (NM_177694.2,1080-1098).
ctcgggtattacacagaaa

SEQ ID NO: 797958 - DNA, 19 bp, Mus musculus
  siRNA target sequence for 9330162L24 (NM_177694.2,1136-1154).
catctatggcttgttatca

SEQ ID NO: 797959 - DNA, 19 bp, Mus musculus
  siRNA target sequence for 9330162L24 (NM_177694.2,1200-1218).
ggaggtcagatgatcatgt

SEQ ID NO: 797960 - DNA, 19 bp, Mus musculus
  siRNA target sequence for 9330162L24 (NM_177694.2,1219-1237).
gcccactttgcgatgaagt

SEQ ID NO: 797961 - DNA, 19 bp, Mus musculus
  siRNA target sequence for 9330162L24 (NM_177694.2,1256-1274).
gaacaccacgtgtttgcat

SEQ ID NO: 797962 - DNA, 19 bp, Mus musculus
  siRNA target sequence for 9330162L24 (NM_177694.2,1276-1294).
caaagttctcccatctgtt

SEQ ID NO: 797963 - DNA, 19 bp, Mus musculus
  siRNA target sequence for 9330162L24 (NM_177694.2,1285-1303).
cccatctgtttgataacga

SEQ ID NO: 797964 - DNA, 19 bp, Mus musculus
  siRNA target sequence for 9330162L24 (NM_177694.2,1301-1319).
cgagtcgactgtgttcttt

SEQ ID NO: 797965 - DNA, 19 bp, Mus musculus
  siRNA target sequence for 9330162L24 (NM_177694.2,1334-1352).
gatctgggtcacattgttt

SEQ ID NO: 797966 - DNA, 19 bp, Mus musculus
  siRNA target sequence for 9330162L24 (NM_177694.2,1377-1395).
gccaggcttgagtacgaat

SEQ ID NO: 797967 - DNA, 19 bp, Mus musculus
  siRNA target sequence for 9330162L24 (NM_177694.2,1452-1470).
gaagctatgtgtaaacaca

SEQ ID NO: 797968 - DNA, 19 bp, Mus musculus
  siRNA target sequence for 9330162L24 (NM_177694.2,1670-1688).
cgtgaagagcttctttact

SEQ ID NO: 797969 - DNA, 19 bp, Mus musculus
  siRNA target sequence for 9330162L24 (NM_177694.2,1720-1738).
gcctgaactgcattgtcat

SEQ ID NO: 797970 - DNA, 19 bp, Mus musculus
  siRNA target sequence for 9330162L24 (NM_177694.2,1729-1747).
gcattgtcattttgatact

SEQ ID NO: 797971 - DNA, 19 bp, Mus musculus
  siRNA target sequence for 9330162L24 (NM_177694.2,1771-1789).
ctgcctggattacgaaaat

SEQ ID NO: 797972 - DNA, 19 bp, Mus musculus
  siRNA target sequence for 9330162L24 (NM_177694.2,1774-1792).
cctggattacgaaaatgga

SEQ ID NO: 797973 - DNA, 19 bp, Mus musculus
  siRNA target sequence for 9330162L24 (NM_177694.2,1825-1843).
gcctcactctgaagatgtt

SEQ ID NO: 797974 - DNA, 19 bp, Mus musculus
  siRNA target sequence for 9330162L24 (NM_177694.2,1847-1865).
cttccaatttgtgaactat

SEQ ID NO: 797975 - DNA, 19 bp, Mus musculus
  siRNA target sequence for 9330162L24 (NM_177694.2,1901-1919).
gaagttcgtgggatatcct

SEQ ID NO: 797976 - DNA, 19 bp, Mus musculus
  siRNA target sequence for 9330162L24 (NM_177694.2,1911-1929).
ggatatcctgggagttaca

SEQ ID NO: 797977 - DNA, 19 bp, Mus musculus
  siRNA target sequence for 9330162L24 (NM_177694.2,1996-2014).
cccagctaaccatcattat

SEQ ID NO: 797978 - DNA, 19 bp, Mus musculus
  siRNA target sequence for 9330162L24 (NM_177694.2,2005-2023).
ccatcattatgattggaaa

SEQ ID NO: 797979 - DNA, 19 bp, Mus musculus
  siRNA target sequence for 9330162L24 (NM_177694.2,2050-2068).
cctttcaacccttgatttt

SEQ ID NO: 797980 - DNA, 19 bp, Mus musculus
  siRNA target sequence for 9330162L24 (NM_177694.2,2093-2111).
ccgaacccactctgagaaa

SEQ ID NO: 797981 - DNA, 19 bp, Mus musculus
  siRNA target sequence for 9330162L24 (NM_177694.2,2095-2113).
gaacccactctgagaaact

SEQ ID NO: 797982 - DNA, 19 bp, Mus musculus
  siRNA target sequence for 9330162L24 (NM_177694.2,2098-2116).
cccactctgagaaactgta

SEQ ID NO: 797983 - DNA, 19 bp, Mus musculus
  siRNA target sequence for 9330162L24 (NM_177694.2,2161-2179).
gtgggctgttttatgagta

SEQ ID NO: 797984 - DNA, 19 bp, Mus musculus
  siRNA target sequence for 9330162L24 (NM_177694.2,2203-2221).
ggtttgccacgctgtttgt

SEQ ID NO: 797985 - DNA, 19 bp, Mus musculus
  siRNA target sequence for 9330162L24 (NM_177694.2,2368-2386).
gaatggccatcgtttctgt

SEQ ID NO: 797986 - DNA, 19 bp, Mus musculus
  siRNA target sequence for 9330162L24 (NM_177694.2,2378-2396).
cgtttctgttgcaactaat

SEQ ID NO: 797987 - DNA, 19 bp, Mus musculus
  siRNA target sequence for 9330162L24 (NM_177694.2,2389-2407).
caactaatgccttcattgt

SEQ ID NO: 797988 - DNA, 19 bp, Mus musculus
  siRNA target sequence for 9330162L24 (NM_177694.2,2432-2450).
ccggttagtttacttctat

SEQ ID NO: 797989 - DNA, 19 bp, Mus musculus
  siRNA target sequence for 9330162L24 (NM_177694.2,2451-2469).
gcctactcaacgaattcca

SEQ ID NO: 797990 - DNA, 19 bp, Mus musculus
  siRNA target sequence for 9330162L24 (NM_177694.2,2510-2528).
gttcctgatagctgacttt

SEQ ID NO: 797991 - DNA, 19 bp, Mus musculus
  siRNA target sequence for 9330162L24 (NM_177694.2,2573-2591).
cagcacgtcgtgtttctgt

SEQ ID NO: 797992 - DNA, 19 bp, Mus musculus
  siRNA target sequence for 9330162L24 (NM_177694.2,2575-2593).
gcacgtcgtgtttctgttt

SEQ ID NO: 797993 - DNA, 19 bp, Mus musculus
  siRNA target sequence for 9330162L24 (NM_177694.2,2576-2594).
cacgtcgtgtttctgttta

SEQ ID NO: 797994 - DNA, 19 bp, Mus musculus
  siRNA target sequence for 9330162L24 (NM_177694.2,2578-2596).
cgtcgtgtttctgtttaaa

SEQ ID NO: 797995 - DNA, 19 bp, Mus musculus
  siRNA target sequence for 4921513O04 (NM_177696.2,309-327).
gcctggtaatagcattcat

SEQ ID NO: 797996 - DNA, 19 bp, Mus musculus
  siRNA target sequence for 4921513O04 (NM_177696.2,311-329).
ctggtaatagcattcatct

SEQ ID NO: 797997 - DNA, 19 bp, Mus musculus
  siRNA target sequence for 4921513O04 (NM_177696.2,344-362).
ctgttcgtctgggtagaaa

SEQ ID NO: 797998 - DNA, 19 bp, Mus musculus
  siRNA target sequence for 4921513O04 (NM_177696.2,359-377).
gaaacctccaatgaataca

SEQ ID NO: 797999 - DNA, 19 bp, Mus musculus
  siRNA target sequence for 4921513O04 (NM_177696.2,381-399).
gctttgactgggttgttta

SEQ ID NO: 798000 - DNA, 19 bp, Mus musculus
  siRNA target sequence for 4921513O04 (NM_177696.2,406-424).
gacaggatgctggttcttt

SEQ ID NO: 798001 - DNA, 19 bp, Mus musculus
  siRNA target sequence for 4921513O04 (NM_177696.2,464-482).
gcctacactaccttgcttt

SEQ ID NO: 798002 - DNA, 19 bp, Mus musculus
  siRNA target sequence for 4921513O04 (NM_177696.2,465-483).
cctacactaccttgctttt

SEQ ID NO: 798003 - DNA, 19 bp, Mus musculus
  siRNA target sequence for 4921513O04 (NM_177696.2,507-525).
gggaaaggattgaactaaa

SEQ ID NO: 798004 - DNA, 19 bp, Mus musculus
  siRNA target sequence for 4921513O04 (NM_177696.2,547-565).
cttcatttgcctagtcatt

SEQ ID NO: 798005 - DNA, 19 bp, Mus musculus
  siRNA target sequence for 4921513O04 (NM_177696.2,568-586).
cctgtgctccttcttactt

SEQ ID NO: 798006 - DNA, 19 bp, Mus musculus
  siRNA target sequence for 4921513O04 (NM_177696.2,658-676).
cgtgcacctgagccttata

SEQ ID NO: 798007 - DNA, 19 bp, Mus musculus
  siRNA target sequence for 4921513O04 (NM_177696.2,659-677).
gtgcacctgagccttataa

SEQ ID NO: 798008 - DNA, 19 bp, Mus musculus
  siRNA target sequence for 4921513O04 (NM_177696.2,661-679).
gcacctgagccttataact

SEQ ID NO: 798009 - DNA, 19 bp, Mus musculus
  siRNA target sequence for 4921513O04 (NM_177696.2,721-739).
ccgcttggaatcagaagtt

SEQ ID NO: 798010 - DNA, 19 bp, Mus musculus
  siRNA target sequence for 4921513O04 (NM_177696.2,722-740).
cgcttggaatcagaagtta

SEQ ID NO: 798011 - DNA, 19 bp, Mus musculus
  siRNA target sequence for 4921513O04 (NM_177696.2,750-768).
gatacaggatggcagatta

SEQ ID NO: 798012 - DNA, 19 bp, Mus musculus
  siRNA target sequence for 4921513O04 (NM_177696.2,761-779).
gcagattacgagcaagaaa

SEQ ID NO: 798013 - DNA, 19 bp, Mus musculus
  siRNA target sequence for 4921513O04 (NM_177696.2,762-780).
cagattacgagcaagaaat

SEQ ID NO: 798014 - DNA, 19 bp, Mus musculus
  siRNA target sequence for 4921513O04 (NM_177696.2,834-852).
gactgtccttcctgatcat

SEQ ID NO: 798015 - DNA, 19 bp, Mus musculus
  siRNA target sequence for 4921513O04 (NM_177696.2,838-856).
gtccttcctgatcattctt

SEQ ID NO: 798016 - DNA, 19 bp, Mus musculus
  siRNA target sequence for 4921513O04 (NM_177696.2,871-889).
gatgccactggggatttat

SEQ ID NO: 798017 - DNA, 19 bp, Mus musculus
  siRNA target sequence for 4921513O04 (NM_177696.2,958-976).
catgttggcgccagagaat

SEQ ID NO: 798018 - DNA, 19 bp, Mus musculus
  siRNA target sequence for 4921513O04 (NM_177696.2,1025-1043).
gagacagatatatacttaa

SEQ ID NO: 798019 - DNA, 19 bp, Mus musculus
  siRNA target sequence for 4921513O04 (NM_177696.2,1073-1091).
gactatgacctgactagaa

SEQ ID NO: 798020 - DNA, 19 bp, Mus musculus
  siRNA target sequence for 4921513O04 (NM_177696.2,1082-1100).
ctgactagaacaactaaca

SEQ ID NO: 798021 - DNA, 19 bp, Mus musculus
  siRNA target sequence for 4921513O04 (NM_177696.2,1169-1187).
ctgaatgccggcaaatggt

SEQ ID NO: 798022 - DNA, 19 bp, Mus musculus
  siRNA target sequence for 4921513O04 (NM_177696.2,1201-1219).
gccattttttggcatgaaa

SEQ ID NO: 798023 - DNA, 19 bp, Mus musculus
  siRNA target sequence for 4921513O04 (NM_177696.2,1212-1230).
gcatgaaacctctatcaga

SEQ ID NO: 798024 - DNA, 19 bp, Mus musculus
  siRNA target sequence for 4921513O04 (NM_177696.2,1245-1263).
gagcaggcaaccagtcaat

SEQ ID NO: 798025 - DNA, 19 bp, Mus musculus
  siRNA target sequence for 4921513O04 (NM_177696.2,1279-1297).
gttattggcacttgcaaaa

SEQ ID NO: 798026 - DNA, 19 bp, Mus musculus
  siRNA target sequence for 4921513O04 (NM_177696.2,1298-1316).
cgggaacagaagattgtga

SEQ ID NO: 798027 - DNA, 19 bp, Mus musculus
  siRNA target sequence for 4921513O04 (NM_177696.2,1300-1318).
ggaacagaagattgtgata

SEQ ID NO: 798028 - DNA, 19 bp, Mus musculus
  siRNA target sequence for 4921513O04 (NM_177696.2,1405-1423).
cgagcagcgtctgatattt

SEQ ID NO: 798029 - DNA, 19 bp, Mus musculus
  siRNA target sequence for 4921513O04 (NM_177696.2,1406-1424).
gagcagcgtctgatatttt

SEQ ID NO: 798030 - DNA, 19 bp, Mus musculus
  siRNA target sequence for 4921513O04 (NM_177696.2,1409-1427).
cagcgtctgatattttggt

SEQ ID NO: 798031 - DNA, 19 bp, Mus musculus
  siRNA target sequence for 4921513O04 (NM_177696.2,1432-1450).
gggttttgatagagactat

SEQ ID NO: 798032 - DNA, 19 bp, Mus musculus
  siRNA target sequence for 4921513O04 (NM_177696.2,1434-1452).
gttttgatagagactatgt

SEQ ID NO: 798033 - DNA, 19 bp, Mus musculus
  siRNA target sequence for 4921513O04 (NM_177696.2,1475-1493).
cagcacgtgggccgtttat

SEQ ID NO: 798034 - DNA, 19 bp, Mus musculus
  siRNA target sequence for 4921513O04 (NM_177696.2,1478-1496).
cacgtgggccgtttatggt

SEQ ID NO: 798035 - DNA, 19 bp, Mus musculus
  siRNA target sequence for 4921513O04 (NM_177696.2,1484-1502).
ggccgtttatggtccatta

SEQ ID NO: 798036 - DNA, 19 bp, Mus musculus
  siRNA target sequence for 4921513O04 (NM_177696.2,1485-1503).
gccgtttatggtccattaa

SEQ ID NO: 798037 - DNA, 19 bp, Mus musculus
  siRNA target sequence for 4921513O04 (NM_177696.2,1486-1504).
ccgtttatggtccattaaa

SEQ ID NO: 798038 - DNA, 19 bp, Mus musculus
  siRNA target sequence for 4921513O04 (NM_177696.2,1527-1545).
ctataataaatgttgacta

SEQ ID NO: 798039 - DNA, 19 bp, Mus musculus
  siRNA target sequence for 4921513O04 (NM_177696.2,1538-1556).
gttgactataagagattgt

SEQ ID NO: 798040 - DNA, 19 bp, Mus musculus
  siRNA target sequence for 4921513O04 (NM_177696.2,1541-1559).
gactataagagattgttct

SEQ ID NO: 798041 - DNA, 19 bp, Mus musculus
  siRNA target sequence for 4921513O04 (NM_177696.2,1562-1580).
gctgggttaagagattata

SEQ ID NO: 798042 - DNA, 19 bp, Mus musculus
  siRNA target sequence for 4921513O04 (NM_177696.2,1563-1581).
ctgggttaagagattataa

SEQ ID NO: 798043 - DNA, 19 bp, Mus musculus
  siRNA target sequence for 4921513O04 (NM_177696.2,1641-1659).
cctggtgttctagtatcaa

SEQ ID NO: 798044 - DNA, 19 bp, Mus musculus
  siRNA target sequence for 4921513O04 (NM_177696.2,1675-1693).
caacattgagctcctaaat

SEQ ID NO: 798045 - DNA, 19 bp, Mus musculus
  siRNA target sequence for 4921513O04 (NM_177696.2,1724-1742).
ccaggattctacatgttca

SEQ ID NO: 798046 - DNA, 19 bp, Mus musculus
  siRNA target sequence for 4921513O04 (NM_177696.2,1747-1765).
gcttttcttggatattgct

SEQ ID NO: 798047 - DNA, 19 bp, Mus musculus
  siRNA target sequence for 4921513O04 (NM_177696.2,1868-1886).
gagactataacagatataa

SEQ ID NO: 798048 - DNA, 19 bp, Mus musculus
  siRNA target sequence for 4921513O04 (NM_177696.2,1870-1888).
gactataacagatataaca

SEQ ID NO: 798049 - DNA, 19 bp, Mus musculus
  siRNA target sequence for 4921513O04 (NM_177696.2,1872-1890).
ctataacagatataacaga

SEQ ID NO: 798050 - DNA, 19 bp, Mus musculus
  siRNA target sequence for 4921513O04 (NM_177696.2,1927-1945).
ccctacgtctgccaactta

SEQ ID NO: 798051 - DNA, 19 bp, Mus musculus
  siRNA target sequence for 4921513O04 (NM_177696.2,1939-1957).
caacttagcccctgaaaat

SEQ ID NO: 798052 - DNA, 19 bp, Mus musculus
  siRNA target sequence for 4921513O04 (NM_177696.2,1979-1997).
gagcctaaaacagaaaact

SEQ ID NO: 798053 - DNA, 19 bp, Mus musculus
  siRNA target sequence for E030013G06 (NM_177697.2,114-132).
cgcagaagcaagagaacaa

SEQ ID NO: 798054 - DNA, 19 bp, Mus musculus
  siRNA target sequence for E030013G06 (NM_177697.2,264-282).
ggcttgcaatgcacagttt

SEQ ID NO: 798055 - DNA, 19 bp, Mus musculus
  siRNA target sequence for E030013G06 (NM_177697.2,265-283).
gcttgcaatgcacagttta

SEQ ID NO: 798056 - DNA, 19 bp, Mus musculus
  siRNA target sequence for E030013G06 (NM_177697.2,266-284).
cttgcaatgcacagtttaa

SEQ ID NO: 798057 - DNA, 19 bp, Mus musculus
  siRNA target sequence for E030013G06 (NM_177697.2,298-316).
caccttggctgacttgata

SEQ ID NO: 798058 - DNA, 19 bp, Mus musculus
  siRNA target sequence for E030013G06 (NM_177697.2,329-347).
gttgagctggaggattgta

SEQ ID NO: 798059 - DNA, 19 bp, Mus musculus
  siRNA target sequence for E030013G06 (NM_177697.2,332-350).
gagctggaggattgtaaca

SEQ ID NO: 798060 - DNA, 19 bp, Mus musculus
  siRNA target sequence for E030013G06 (NM_177697.2,334-352).
gctggaggattgtaacaat

SEQ ID NO: 798061 - DNA, 19 bp, Mus musculus
  siRNA target sequence for E030013G06 (NM_177697.2,405-423).
ggctttctgacactattga

SEQ ID NO: 798062 - DNA, 19 bp, Mus musculus
  siRNA target sequence for E030013G06 (NM_177697.2,411-429).
ctgacactattgaactcta

SEQ ID NO: 798063 - DNA, 19 bp, Mus musculus
  siRNA target sequence for E030013G06 (NM_177697.2,478-496).
cctcatcaagggatcaaga

SEQ ID NO: 798064 - DNA, 19 bp, Mus musculus
  siRNA target sequence for E030013G06 (NM_177697.2,528-546).
gcagcggctctcagacaaa

SEQ ID NO: 798065 - DNA, 19 bp, Mus musculus
  siRNA target sequence for E030013G06 (NM_177697.2,534-552).
gctctcagacaaaggaatt

SEQ ID NO: 798066 - DNA, 19 bp, Mus musculus
  siRNA target sequence for E030013G06 (NM_177697.2,779-797).
ctggtgatcatcttgagaa

SEQ ID NO: 798067 - DNA, 19 bp, Mus musculus
  siRNA target sequence for E030013G06 (NM_177697.2,853-871).
gggacggagcgtcttcatt

SEQ ID NO: 798068 - DNA, 19 bp, Mus musculus
  siRNA target sequence for E030013G06 (NM_177697.2,855-873).
gacggagcgtcttcattca

SEQ ID NO: 798069 - DNA, 19 bp, Mus musculus
  siRNA target sequence for E030013G06 (NM_177697.2,872-890).
catgtaaccacctacaaat

SEQ ID NO: 798070 - DNA, 19 bp, Mus musculus
  siRNA target sequence for E030013G06 (NM_177697.2,880-898).
cacctacaaatgtgatgat

SEQ ID NO: 798071 - DNA, 19 bp, Mus musculus
  siRNA target sequence for E030013G06 (NM_177697.2,882-900).
cctacaaatgtgatgatca

SEQ ID NO: 798072 - DNA, 19 bp, Mus musculus
  siRNA target sequence for E030013G06 (NM_177697.2,906-924).
cctctgccgttctgaagaa

SEQ ID NO: 798073 - DNA, 19 bp, Mus musculus
  siRNA target sequence for E030013G06 (NM_177697.2,1060-1078).
ccacaacaacccatgtgaa

SEQ ID NO: 798074 - DNA, 19 bp, Mus musculus
  siRNA target sequence for E030013G06 (NM_177697.2,1079-1097).
gagctgtcctgcatgatca

SEQ ID NO: 798075 - DNA, 19 bp, Mus musculus
  siRNA target sequence for E030013G06 (NM_177697.2,1219-1237).
gaagatcaatggtctaaaa

SEQ ID NO: 798076 - DNA, 19 bp, Mus musculus
  siRNA target sequence for E030013G06 (NM_177697.2,1229-1247).
ggtctaaaagccaagaagt

SEQ ID NO: 798077 - DNA, 19 bp, Mus musculus
  siRNA target sequence for E030013G06 (NM_177697.2,1240-1258).
caagaagttaagtctttat

SEQ ID NO: 798078 - DNA, 19 bp, Mus musculus
  siRNA target sequence for E030013G06 (NM_177697.2,1267-1285).
ggcacccaacgcctttaat

SEQ ID NO: 798079 - DNA, 19 bp, Mus musculus
  siRNA target sequence for E030013G06 (NM_177697.2,1326-1344).
cagctactatccatgagaa

SEQ ID NO: 798080 - DNA, 19 bp, Mus musculus
  siRNA target sequence for E030013G06 (NM_177697.2,1346-1364).
gcaatggtacaatttgaat

SEQ ID NO: 798081 - DNA, 19 bp, Mus musculus
  siRNA target sequence for E030013G06 (NM_177697.2,1400-1418).
ccacccgtcctctttgagt

SEQ ID NO: 798082 - DNA, 19 bp, Mus musculus
  siRNA target sequence for E030013G06 (NM_177697.2,1401-1419).
cacccgtcctctttgagta

SEQ ID NO: 798083 - DNA, 19 bp, Mus musculus
  siRNA target sequence for E030013G06 (NM_177697.2,1435-1453).
gaaagctgtgcagatatat

SEQ ID NO: 798084 - DNA, 19 bp, Mus musculus
  siRNA target sequence for E030013G06 (NM_177697.2,1498-1516).
gggcaccgtctgtcaaaga

SEQ ID NO: 798085 - DNA, 19 bp, Mus musculus
  siRNA target sequence for E030013G06 (NM_177697.2,1499-1517).
ggcaccgtctgtcaaagaa

SEQ ID NO: 798086 - DNA, 19 bp, Mus musculus
  siRNA target sequence for E030013G06 (NM_177697.2,1515-1533).
gaagggtggttatattgct

SEQ ID NO: 798087 - DNA, 19 bp, Mus musculus
  siRNA target sequence for E030013G06 (NM_177697.2,1538-1556).
gtctcggtgaccaattcca

SEQ ID NO: 798088 - DNA, 19 bp, Mus musculus
  siRNA target sequence for E030013G06 (NM_177697.2,1544-1562).
gtgaccaattccatgtaca

SEQ ID NO: 798089 - DNA, 19 bp, Mus musculus
  siRNA target sequence for E030013G06 (NM_177697.2,1546-1564).
gaccaattccatgtacatt

SEQ ID NO: 798090 - DNA, 19 bp, Mus musculus
  siRNA target sequence for E030013G06 (NM_177697.2,1548-1566).
ccaattccatgtacattat

SEQ ID NO: 798091 - DNA, 19 bp, Mus musculus
  siRNA target sequence for E030013G06 (NM_177697.2,1549-1567).
caattccatgtacattatt

SEQ ID NO: 798092 - DNA, 19 bp, Mus musculus
  siRNA target sequence for E030013G06 (NM_177697.2,1554-1572).
ccatgtacattattcatat

SEQ ID NO: 798093 - DNA, 19 bp, Mus musculus
  siRNA target sequence for E030013G06 (NM_177697.2,1611-1629).
ccaacaaagactacttcaa

SEQ ID NO: 798094 - DNA, 19 bp, Mus musculus
  siRNA target sequence for E030013G06 (NM_177697.2,1772-1790).
gccatagaagtggatttca

SEQ ID NO: 798095 - DNA, 19 bp, Mus musculus
  siRNA target sequence for E030013G06 (NM_177697.2,1839-1857).
gtatccctgaccaagatgt

SEQ ID NO: 798096 - DNA, 19 bp, Mus musculus
  siRNA target sequence for E030013G06 (NM_177697.2,1896-1914).
ggtgcgacctccagctaaa

SEQ ID NO: 798097 - DNA, 19 bp, Mus musculus
  siRNA target sequence for E030013G06 (NM_177697.2,1899-1917).
gcgacctccagctaaatgt

SEQ ID NO: 798098 - DNA, 19 bp, Mus musculus
  siRNA target sequence for E030013G06 (NM_177697.2,1901-1919).
gacctccagctaaatgtct

SEQ ID NO: 798099 - DNA, 19 bp, Mus musculus
  siRNA target sequence for E030013G06 (NM_177697.2,2041-2059).
gtttggagagacaggtatt

SEQ ID NO: 798100 - DNA, 19 bp, Mus musculus
  siRNA target sequence for E030013G06 (NM_177697.2,2046-2064).
gagagacaggtatttatga

SEQ ID NO: 798101 - DNA, 19 bp, Mus musculus
  siRNA target sequence for E030013G06 (NM_177697.2,2050-2068).
gacaggtatttatgaaagt

SEQ ID NO: 798102 - DNA, 19 bp, Mus musculus
  siRNA target sequence for E030013G06 (NM_177697.2,2072-2090).
gatatcaacgccatcgtat

SEQ ID NO: 798103 - DNA, 19 bp, Mus musculus
  siRNA target sequence for E030013G06 (NM_177697.2,2080-2098).
cgccatcgtatctgagata

SEQ ID NO: 798104 - DNA, 19 bp, Mus musculus
  siRNA target sequence for E030013G06 (NM_177697.2,2082-2100).
ccatcgtatctgagataga

SEQ ID NO: 798105 - DNA, 19 bp, Mus musculus
  siRNA target sequence for E030013G06 (NM_177697.2,2215-2233).
gcaaagtcaacccaagaaa

SEQ ID NO: 798106 - DNA, 19 bp, Mus musculus
  siRNA target sequence for E030013G06 (NM_177697.2,2220-2238).
gtcaacccaagaaacacta

SEQ ID NO: 798107 - DNA, 19 bp, Mus musculus
  siRNA target sequence for E030013G06 (NM_177697.2,2268-2286).
ccagaatgagcattaaaga

SEQ ID NO: 798108 - DNA, 19 bp, Mus musculus
  siRNA target sequence for E030013G06 (NM_177697.2,2269-2287).
cagaatgagcattaaagat

SEQ ID NO: 798109 - DNA, 19 bp, Mus musculus
  siRNA target sequence for E030013G06 (NM_177697.2,2409-2427).
gaccaaagctctttctgtt

SEQ ID NO: 798110 - DNA, 19 bp, Mus musculus
  siRNA target sequence for E030013G06 (NM_177697.2,2470-2488).
gtacactcaaggaaaatct

SEQ ID NO: 798111 - DNA, 19 bp, Mus musculus
  siRNA target sequence for E030013G06 (NM_177697.2,2473-2491).
cactcaaggaaaatctatt

SEQ ID NO: 798112 - DNA, 19 bp, Mus musculus
  siRNA target sequence for E030013G06 (NM_177697.2,2477-2495).
caaggaaaatctattagaa

SEQ ID NO: 798113 - DNA, 19 bp, Mus musculus
  siRNA target sequence for E030013G06 (NM_177697.2,2603-2621).
cttggtcccaactgtagat

SEQ ID NO: 798114 - DNA, 19 bp, Mus musculus
  siRNA target sequence for E030013G06 (NM_177697.2,2607-2625).
gtcccaactgtagatatca

SEQ ID NO: 798115 - DNA, 19 bp, Mus musculus
  siRNA target sequence for E030013G06 (NM_177697.2,2609-2627).
cccaactgtagatatcaaa

SEQ ID NO: 798116 - DNA, 19 bp, Mus musculus
  siRNA target sequence for E030013G06 (NM_177697.2,2671-2689).
ccccagtatagagatcaat

SEQ ID NO: 798117 - DNA, 19 bp, Mus musculus
  siRNA target sequence for E030013G06 (NM_177697.2,2723-2741).
gagatggaaacgtacatca

SEQ ID NO: 798118 - DNA, 19 bp, Mus musculus
  siRNA target sequence for E030013G06 (NM_177697.2,2817-2835).
gcaccatcttggaaagaaa

SEQ ID NO: 798119 - DNA, 19 bp, Mus musculus
  siRNA target sequence for E030013G06 (NM_177697.2,2818-2836).
caccatcttggaaagaaat

SEQ ID NO: 798120 - DNA, 19 bp, Mus musculus
  siRNA target sequence for E030013G06 (NM_177697.2,2873-2891).
ccccacttgcagtggataa

SEQ ID NO: 798121 - DNA, 19 bp, Mus musculus
  siRNA target sequence for E030013G06 (NM_177697.2,2897-2915).
gagctcgttctactgattt

SEQ ID NO: 798122 - DNA, 19 bp, Mus musculus
  siRNA target sequence for E030013G06 (NM_177697.2,2984-3002).
caggacacgctggtagaaa

SEQ ID NO: 798123 - DNA, 19 bp, Mus musculus
  siRNA target sequence for E030013G06 (NM_177697.2,3071-3089).
gtcttagcagcattaacga

SEQ ID NO: 798124 - DNA, 19 bp, Mus musculus
  siRNA target sequence for E030013G06 (NM_177697.2,3073-3091).
cttagcagcattaacgaaa

SEQ ID NO: 798125 - DNA, 19 bp, Mus musculus
  siRNA target sequence for E030013G06 (NM_177697.2,3106-3124).
ggatgtgcaaggactgtat

SEQ ID NO: 798126 - DNA, 19 bp, Mus musculus
  siRNA target sequence for E030013G06 (NM_177697.2,3148-3166).
cacaagctgcagccttata

SEQ ID NO: 798127 - DNA, 19 bp, Mus musculus
  siRNA target sequence for E030013G06 (NM_177697.2,3150-3168).
caagctgcagccttatact

SEQ ID NO: 798128 - DNA, 19 bp, Mus musculus
  siRNA target sequence for E030013G06 (NM_177697.2,3200-3218).
ggcgtgaaagtgcatacta

SEQ ID NO: 798129 - DNA, 19 bp, Mus musculus
  siRNA target sequence for E030013G06 (NM_177697.2,3201-3219).
gcgtgaaagtgcatactat

SEQ ID NO: 798130 - DNA, 19 bp, Mus musculus
  siRNA target sequence for E030013G06 (NM_177697.2,3205-3223).
gaaagtgcatactatctct

SEQ ID NO: 798131 - DNA, 19 bp, Mus musculus
  siRNA target sequence for E030013G06 (NM_177697.2,3369-3387).
ccaaattgccactctttga

SEQ ID NO: 798132 - DNA, 19 bp, Mus musculus
  siRNA target sequence for E030013G06 (NM_177697.2,3370-3388).
caaattgccactctttgaa

SEQ ID NO: 798133 - DNA, 19 bp, Mus musculus
  siRNA target sequence for D430018P08 (NM_177698.2,182-200).
cctcaggttctgtgaagta

SEQ ID NO: 798134 - DNA, 19 bp, Mus musculus
  siRNA target sequence for D430018P08 (NM_177698.2,226-244).
cagtcccaccggtcaaagt

SEQ ID NO: 798135 - DNA, 19 bp, Mus musculus
  siRNA target sequence for D430018P08 (NM_177698.2,228-246).
gtcccaccggtcaaagtct

SEQ ID NO: 798136 - DNA, 19 bp, Mus musculus
  siRNA target sequence for D430018P08 (NM_177698.2,230-248).
cccaccggtcaaagtctat

SEQ ID NO: 798137 - DNA, 19 bp, Mus musculus
  siRNA target sequence for D430018P08 (NM_177698.2,321-339).
gcttgaatgggcagtagat

SEQ ID NO: 798138 - DNA, 19 bp, Mus musculus
  siRNA target sequence for D430018P08 (NM_177698.2,391-409).
ggaacgcacccaaagacta

SEQ ID NO: 798139 - DNA, 19 bp, Mus musculus
  siRNA target sequence for D430018P08 (NM_177698.2,392-410).
gaacgcacccaaagactat

SEQ ID NO: 798140 - DNA, 19 bp, Mus musculus
  siRNA target sequence for D430018P08 (NM_177698.2,425-443).
gtacaacgaacccattttt

SEQ ID NO: 798141 - DNA, 19 bp, Mus musculus
  siRNA target sequence for D430018P08 (NM_177698.2,460-478).
ccgaatgctgctgtataca

SEQ ID NO: 798142 - DNA, 19 bp, Mus musculus
  siRNA target sequence for D430018P08 (NM_177698.2,461-479).
cgaatgctgctgtatacaa

SEQ ID NO: 798143 - DNA, 19 bp, Mus musculus
  siRNA target sequence for D430018P08 (NM_177698.2,538-556).
ggaaagcgaggatggaaaa

SEQ ID NO: 798144 - DNA, 19 bp, Mus musculus
  siRNA target sequence for D430018P08 (NM_177698.2,571-589).
ctgaagggaaccgttcttt

SEQ ID NO: 798145 - DNA, 19 bp, Mus musculus
  siRNA target sequence for D430018P08 (NM_177698.2,576-594).
gggaaccgttctttactta

SEQ ID NO: 798146 - DNA, 19 bp, Mus musculus
  siRNA target sequence for D430018P08 (NM_177698.2,578-596).
gaaccgttctttacttaca

SEQ ID NO: 798147 - DNA, 19 bp, Mus musculus
  siRNA target sequence for D430018P08 (NM_177698.2,629-647).
ccgatgaagacttgaagaa

SEQ ID NO: 798148 - DNA, 19 bp, Mus musculus
  siRNA target sequence for D430018P08 (NM_177698.2,699-717).
gaagccgaacgtgtttaaa

SEQ ID NO: 798149 - DNA, 19 bp, Mus musculus
  siRNA target sequence for D430018P08 (NM_177698.2,703-721).
ccgaacgtgtttaaactca

SEQ ID NO: 798150 - DNA, 19 bp, Mus musculus
  siRNA target sequence for D430018P08 (NM_177698.2,704-722).
cgaacgtgtttaaactcaa

SEQ ID NO: 798151 - DNA, 19 bp, Mus musculus
  siRNA target sequence for D430018P08 (NM_177698.2,734-752).
ggagggtcttgcttttcca

SEQ ID NO: 798152 - DNA, 19 bp, Mus musculus
  siRNA target sequence for D430018P08 (NM_177698.2,735-753).
gagggtcttgcttttccaa

SEQ ID NO: 798153 - DNA, 19 bp, Mus musculus
  siRNA target sequence for D430018P08 (NM_177698.2,774-792).
gcaaggctggataaacaaa

SEQ ID NO: 798154 - DNA, 19 bp, Mus musculus
  siRNA target sequence for D430018P08 (NM_177698.2,775-793).
caaggctggataaacaaaa

SEQ ID NO: 798155 - DNA, 19 bp, Mus musculus
  siRNA target sequence for D430018P08 (NM_177698.2,880-898).
gccactacaacaaaattat

SEQ ID NO: 798156 - DNA, 19 bp, Mus musculus
  siRNA target sequence for D430018P08 (NM_177698.2,910-928).
cagctgaagtcccatgaaa

SEQ ID NO: 798157 - DNA, 19 bp, Mus musculus
  siRNA target sequence for D430018P08 (NM_177698.2,957-975).
ggctgagcatcgctcatat

SEQ ID NO: 798158 - DNA, 19 bp, Mus musculus
  siRNA target sequence for D430018P08 (NM_177698.2,1038-1056).
ggagttcgagagtttaggt

SEQ ID NO: 798159 - DNA, 19 bp, Mus musculus
  siRNA target sequence for D430018P08 (NM_177698.2,1044-1062).
cgagagtttaggtcaaaat

SEQ ID NO: 798160 - DNA, 19 bp, Mus musculus
  siRNA target sequence for D430018P08 (NM_177698.2,1047-1065).
gagtttaggtcaaaatcaa

SEQ ID NO: 798161 - DNA, 19 bp, Mus musculus
  siRNA target sequence for D430018P08 (NM_177698.2,1185-1203).
gacagcggaacgaagactt

SEQ ID NO: 798162 - DNA, 19 bp, Mus musculus
  siRNA target sequence for D430018P08 (NM_177698.2,1195-1213).
cgaagacttggctcattca

SEQ ID NO: 798163 - DNA, 19 bp, Mus musculus
  siRNA target sequence for D430018P08 (NM_177698.2,1199-1217).
gacttggctcattcatctt

SEQ ID NO: 798164 - DNA, 19 bp, Mus musculus
  siRNA target sequence for D430018P08 (NM_177698.2,1201-1219).
cttggctcattcatcttga

SEQ ID NO: 798165 - DNA, 19 bp, Mus musculus
  siRNA target sequence for D430018P08 (NM_177698.2,1244-1262).
ggagagaggcagatattca

SEQ ID NO: 798166 - DNA, 19 bp, Mus musculus
  siRNA target sequence for D430018P08 (NM_177698.2,1245-1263).
gagagaggcagatattcaa

SEQ ID NO: 798167 - DNA, 19 bp, Mus musculus
  siRNA target sequence for BC060631 (NM_177700.3,338-356).
ctgcaggatggcatagtaa

SEQ ID NO: 798168 - DNA, 19 bp, Mus musculus
  siRNA target sequence for BC060631 (NM_177700.3,349-367).
catagtaaacccgacaata

SEQ ID NO: 798169 - DNA, 19 bp, Mus musculus
  siRNA target sequence for BC060631 (NM_177700.3,353-371).
gtaaacccgacaataagga

SEQ ID NO: 798170 - DNA, 19 bp, Mus musculus
  siRNA target sequence for BC060631 (NM_177700.3,359-377).
ccgacaataaggaaagact

SEQ ID NO: 798171 - DNA, 19 bp, Mus musculus
  siRNA target sequence for BC060631 (NM_177700.3,360-378).
cgacaataaggaaagactt

SEQ ID NO: 798172 - DNA, 19 bp, Mus musculus
  siRNA target sequence for BC060631 (NM_177700.3,386-404).
gcaccgaaattctactgtt

SEQ ID NO: 798173 - DNA, 19 bp, Mus musculus
  siRNA target sequence for BC060631 (NM_177700.3,397-415).
ctactgttgtccaatcaaa

SEQ ID NO: 798174 - DNA, 19 bp, Mus musculus
  siRNA target sequence for BC060631 (NM_177700.3,432-450).
ccgaccgaccgttttctca

SEQ ID NO: 798175 - DNA, 19 bp, Mus musculus
  siRNA target sequence for BC060631 (NM_177700.3,436-454).
ccgaccgttttctcagttt

SEQ ID NO: 798176 - DNA, 19 bp, Mus musculus
  siRNA target sequence for BC060631 (NM_177700.3,437-455).
cgaccgttttctcagtttt

SEQ ID NO: 798177 - DNA, 19 bp, Mus musculus
  siRNA target sequence for BC060631 (NM_177700.3,469-487).
gcactttatgaaaatgcat

SEQ ID NO: 798178 - DNA, 19 bp, Mus musculus
  siRNA target sequence for BC060631 (NM_177700.3,535-553).
cgagtgggacctgaaaaga

SEQ ID NO: 798179 - DNA, 19 bp, Mus musculus
  siRNA target sequence for BC060631 (NM_177700.3,675-693).
cacctagtaaaaaaaggaa

SEQ ID NO: 798180 - DNA, 19 bp, Mus musculus
  siRNA target sequence for BC060631 (NM_177700.3,834-852).
gcgcccacaccaaaaagca

SEQ ID NO: 798181 - DNA, 19 bp, Mus musculus
  siRNA target sequence for BC060631 (NM_177700.3,1020-1038).
ccggtactgtgcacttagt

SEQ ID NO: 798182 - DNA, 19 bp, Mus musculus
  siRNA target sequence for BC060631 (NM_177700.3,1021-1039).
cggtactgtgcacttagta

SEQ ID NO: 798183 - DNA, 19 bp, Mus musculus
  siRNA target sequence for BC060631 (NM_177700.3,1102-1120).
cctacctctctcaaaaatt

SEQ ID NO: 798184 - DNA, 19 bp, Mus musculus
  siRNA target sequence for BC060631 (NM_177700.3,1103-1121).
ctacctctctcaaaaatta

SEQ ID NO: 798185 - DNA, 19 bp, Mus musculus
  siRNA target sequence for BC060631 (NM_177700.3,1128-1146).
ctgttgttgagccaatgaa

SEQ ID NO: 798186 - DNA, 19 bp, Mus musculus
  siRNA target sequence for BC060631 (NM_177700.3,1149-1167).
caggtgttcaagtgaactt

SEQ ID NO: 798187 - DNA, 19 bp, Mus musculus
  siRNA target sequence for BC060631 (NM_177700.3,1176-1194).
gcctgtgtagtcctttaca

SEQ ID NO: 798188 - DNA, 19 bp, Mus musculus
  siRNA target sequence for BC060631 (NM_177700.3,1330-1348).
gactgacctgtcgtttgat

SEQ ID NO: 798189 - DNA, 19 bp, Mus musculus
  siRNA target sequence for BC060631 (NM_177700.3,1564-1582).
cgtgcatgcgtcatacagt

SEQ ID NO: 798190 - DNA, 19 bp, Mus musculus
  siRNA target sequence for BC060631 (NM_177700.3,1600-1618).
catgagtagcagcttagtt

SEQ ID NO: 798191 - DNA, 19 bp, Mus musculus
  siRNA target sequence for BC060631 (NM_177700.3,1647-1665).
ctcagagtgaccctaagat

SEQ ID NO: 798192 - DNA, 19 bp, Mus musculus
  siRNA target sequence for BC060631 (NM_177700.3,1651-1669).
gagtgaccctaagatctta

SEQ ID NO: 798193 - DNA, 19 bp, Mus musculus
  siRNA target sequence for BC060631 (NM_177700.3,1672-1690).
ccaagtcatggaaaagtct

SEQ ID NO: 798194 - DNA, 19 bp, Mus musculus
  siRNA target sequence for BC060631 (NM_177700.3,1689-1707).
ctgcacccgtgttaaactt

SEQ ID NO: 798195 - DNA, 19 bp, Mus musculus
  siRNA target sequence for BC060631 (NM_177700.3,1691-1709).
gcacccgtgttaaacttca

SEQ ID NO: 798196 - DNA, 19 bp, Mus musculus
  siRNA target sequence for BC060631 (NM_177700.3,1880-1898).
gctggctcagcgcagaatt

SEQ ID NO: 798197 - DNA, 19 bp, Mus musculus
  siRNA target sequence for BC060631 (NM_177700.3,2111-2129).
cagacacaaacagacttaa

SEQ ID NO: 798198 - DNA, 19 bp, Mus musculus
  siRNA target sequence for BC060631 (NM_177700.3,2121-2139).
cagacttaaacttcttctt

SEQ ID NO: 798199 - DNA, 19 bp, Mus musculus
  siRNA target sequence for BC060631 (NM_177700.3,2281-2299).
gttgagcagcacagaaaca

SEQ ID NO: 798200 - DNA, 19 bp, Mus musculus
  siRNA target sequence for BC060631 (NM_177700.3,2294-2312).
gaaacacaaaccatgagtt

SEQ ID NO: 798201 - DNA, 19 bp, Mus musculus
  siRNA target sequence for BC060631 (NM_177700.3,2387-2405).
gccgatctggcctggaata

SEQ ID NO: 798202 - DNA, 19 bp, Mus musculus
  siRNA target sequence for BC060631 (NM_177700.3,2390-2408).
gatctggcctggaatacga

SEQ ID NO: 798203 - DNA, 19 bp, Mus musculus
  siRNA target sequence for A430041E03 (NM_177701.2,208-226).
gcccctcgtcagtttagtt

SEQ ID NO: 798204 - DNA, 19 bp, Mus musculus
  siRNA target sequence for A430041E03 (NM_177701.2,210-228).
ccctcgtcagtttagttca

SEQ ID NO: 798205 - DNA, 19 bp, Mus musculus
  siRNA target sequence for A430041E03 (NM_177701.2,244-262).
gaattggtgctgtctacaa

SEQ ID NO: 798206 - DNA, 19 bp, Mus musculus
  siRNA target sequence for A430041E03 (NM_177701.2,266-284).
gctgtctcctcccacattt

SEQ ID NO: 798207 - DNA, 19 bp, Mus musculus
  siRNA target sequence for A430041E03 (NM_177701.2,274-292).
ctcccacatttatcaacat

SEQ ID NO: 798208 - DNA, 19 bp, Mus musculus
  siRNA target sequence for A430041E03 (NM_177701.2,357-375).
cagaagtatggcagataca

SEQ ID NO: 798209 - DNA, 19 bp, Mus musculus
  siRNA target sequence for A430041E03 (NM_177701.2,359-377).
gaagtatggcagatacact

SEQ ID NO: 798210 - DNA, 19 bp, Mus musculus
  siRNA target sequence for A430041E03 (NM_177701.2,370-388).
gatacactctacagtcaat

SEQ ID NO: 798211 - DNA, 19 bp, Mus musculus
  siRNA target sequence for A430041E03 (NM_177701.2,374-392).
cactctacagtcaatgaga

SEQ ID NO: 798212 - DNA, 19 bp, Mus musculus
  siRNA target sequence for A430041E03 (NM_177701.2,381-399).
cagtcaatgagatttcaca

SEQ ID NO: 798213 - DNA, 19 bp, Mus musculus
  siRNA target sequence for A430041E03 (NM_177701.2,420-438).
gacagaactctgtaatcat

SEQ ID NO: 798214 - DNA, 19 bp, Mus musculus
  siRNA target sequence for A430041E03 (NM_177701.2,422-440).
cagaactctgtaatcattt

SEQ ID NO: 798215 - DNA, 19 bp, Mus musculus
  siRNA target sequence for A430041E03 (NM_177701.2,424-442).
gaactctgtaatcatttca

SEQ ID NO: 798216 - DNA, 19 bp, Mus musculus
  siRNA target sequence for A430041E03 (NM_177701.2,453-471).
ctgatgccccatgtttact

SEQ ID NO: 798217 - DNA, 19 bp, Mus musculus
  siRNA target sequence for 4833427G06Rik (NM_177702.2,133-151).
cctagcggcaggaaggaat

SEQ ID NO: 798218 - DNA, 19 bp, Mus musculus
  siRNA target sequence for 4833427G06Rik (NM_177702.2,325-343).
gttctgagagagaaaagtt

SEQ ID NO: 798219 - DNA, 19 bp, Mus musculus
  siRNA target sequence for 4833427G06Rik (NM_177702.2,367-385).
caggacaaggatgcaatta

SEQ ID NO: 798220 - DNA, 19 bp, Mus musculus
  siRNA target sequence for 4833427G06Rik (NM_177702.2,370-388).
gacaaggatgcaattatct

SEQ ID NO: 798221 - DNA, 19 bp, Mus musculus
  siRNA target sequence for 4833427G06Rik (NM_177702.2,446-464).
ccaaaacgcgagatgagat

SEQ ID NO: 798222 - DNA, 19 bp, Mus musculus
  siRNA target sequence for 4833427G06Rik (NM_177702.2,447-465).
caaaacgcgagatgagatt

SEQ ID NO: 798223 - DNA, 19 bp, Mus musculus
  siRNA target sequence for 4833427G06Rik (NM_177702.2,457-475).
gatgagattctccaacttt

SEQ ID NO: 798224 - DNA, 19 bp, Mus musculus
  siRNA target sequence for 4833427G06Rik (NM_177702.2,497-515).
ggatctcgaaagaactgat

SEQ ID NO: 798225 - DNA, 19 bp, Mus musculus
  siRNA target sequence for 4833427G06Rik (NM_177702.2,498-516).
gatctcgaaagaactgatt

SEQ ID NO: 798226 - DNA, 19 bp, Mus musculus
  siRNA target sequence for 4833427G06Rik (NM_177702.2,518-536).
cattaccttataaacctaa

SEQ ID NO: 798227 - DNA, 19 bp, Mus musculus
  siRNA target sequence for 4833427G06Rik (NM_177702.2,537-555).
ggacaaagtgcccaaatca

SEQ ID NO: 798228 - DNA, 19 bp, Mus musculus
  siRNA target sequence for E330023O18 (NM_177703.2,768-786).
caaagacatgtcttgacaa

SEQ ID NO: 798229 - DNA, 19 bp, Mus musculus
  siRNA target sequence for E330023O18 (NM_177703.2,908-926).
cttgatgtccagtactata

SEQ ID NO: 798230 - DNA, 19 bp, Mus musculus
  siRNA target sequence for C130069F04 (NM_177709.2,645-663).
ccccttatcttttctatca

SEQ ID NO: 798231 - DNA, 19 bp, Mus musculus
  siRNA target sequence for C130069F04 (NM_177709.2,646-664).
cccttatcttttctatcat

SEQ ID NO: 798232 - DNA, 19 bp, Mus musculus
  siRNA target sequence for BC030940 (NM_177710.3,141-159).
gcgagagcttcttaactgt

SEQ ID NO: 798233 - DNA, 19 bp, Mus musculus
  siRNA target sequence for BC030940 (NM_177710.3,145-163).
gagcttcttaactgtcaaa

SEQ ID NO: 798234 - DNA, 19 bp, Mus musculus
  siRNA target sequence for BC030940 (NM_177710.3,295-313).
cataaggctggctgtaaga

SEQ ID NO: 798235 - DNA, 19 bp, Mus musculus
  siRNA target sequence for BC030940 (NM_177710.3,305-323).
gctgtaagactggaaagta

SEQ ID NO: 798236 - DNA, 19 bp, Mus musculus
  siRNA target sequence for BC030940 (NM_177710.3,308-326).
gtaagactggaaagtactt

SEQ ID NO: 798237 - DNA, 19 bp, Mus musculus
  siRNA target sequence for BC030940 (NM_177710.3,352-370).
cgtggtttcaactaatggt

SEQ ID NO: 798238 - DNA, 19 bp, Mus musculus
  siRNA target sequence for BC030940 (NM_177710.3,402-420).
gaatggatttttcttctaa

SEQ ID NO: 798239 - DNA, 19 bp, Mus musculus
  siRNA target sequence for BC030940 (NM_177710.3,407-425).
gatttttcttctaatgaca

SEQ ID NO: 798240 - DNA, 19 bp, Mus musculus
  siRNA target sequence for BC030940 (NM_177710.3,460-478).
ctggagtgacaccctaatt

SEQ ID NO: 798241 - DNA, 19 bp, Mus musculus
  siRNA target sequence for BC030940 (NM_177710.3,462-480).
ggagtgacaccctaattca

SEQ ID NO: 798242 - DNA, 19 bp, Mus musculus
  siRNA target sequence for BC030940 (NM_177710.3,463-481).
gagtgacaccctaattcat

SEQ ID NO: 798243 - DNA, 19 bp, Mus musculus
  siRNA target sequence for BC030940 (NM_177710.3,469-487).
caccctaattcatttggat

SEQ ID NO: 798244 - DNA, 19 bp, Mus musculus
  siRNA target sequence for BC030940 (NM_177710.3,499-517).
gttcagcgtatcaacagat

SEQ ID NO: 798245 - DNA, 19 bp, Mus musculus
  siRNA target sequence for BC030940 (NM_177710.3,561-579).
ggtctgcactacagagttt

SEQ ID NO: 798246 - DNA, 19 bp, Mus musculus
  siRNA target sequence for BC030940 (NM_177710.3,599-617).
gccagaatgcataactact

SEQ ID NO: 798247 - DNA, 19 bp, Mus musculus
  siRNA target sequence for BC030940 (NM_177710.3,600-618).
ccagaatgcataactacta

SEQ ID NO: 798248 - DNA, 19 bp, Mus musculus
  siRNA target sequence for BC030940 (NM_177710.3,601-619).
cagaatgcataactactat

SEQ ID NO: 798249 - DNA, 19 bp, Mus musculus
  siRNA target sequence for BC030940 (NM_177710.3,635-653).
ctcacttgggtgagttatt

SEQ ID NO: 798250 - DNA, 19 bp, Mus musculus
  siRNA target sequence for BC030940 (NM_177710.3,764-782).
gaacgtgagcgaacagaaa

SEQ ID NO: 798251 - DNA, 19 bp, Mus musculus
  siRNA target sequence for BC030940 (NM_177710.3,773-791).
cgaacagaaaggcttatta

SEQ ID NO: 798252 - DNA, 19 bp, Mus musculus
  siRNA target sequence for BC030940 (NM_177710.3,779-797).
gaaaggcttattaagacta

SEQ ID NO: 798253 - DNA, 19 bp, Mus musculus
  siRNA target sequence for BC030940 (NM_177710.3,795-813).
ctaaattaagggagatcat

SEQ ID NO: 798254 - DNA, 19 bp, Mus musculus
  siRNA target sequence for BC030940 (NM_177710.3,880-898).
gtgcaacttgcgagaattt

SEQ ID NO: 798255 - DNA, 19 bp, Mus musculus
  siRNA target sequence for BC030940 (NM_177710.3,886-904).
cttgcgagaatttaaggaa

SEQ ID NO: 798256 - DNA, 19 bp, Mus musculus
  siRNA target sequence for BC030940 (NM_177710.3,890-908).
cgagaatttaaggaattca

SEQ ID NO: 798257 - DNA, 19 bp, Mus musculus
  siRNA target sequence for BC030940 (NM_177710.3,1022-1040).
cgaggggtacggtatatct

SEQ ID NO: 798258 - DNA, 19 bp, Mus musculus
  siRNA target sequence for BC030940 (NM_177710.3,1023-1041).
gaggggtacggtatatctt

SEQ ID NO: 798259 - DNA, 19 bp, Mus musculus
  siRNA target sequence for BC030940 (NM_177710.3,1025-1043).
ggggtacggtatatcttga

SEQ ID NO: 798260 - DNA, 19 bp, Mus musculus
  siRNA target sequence for BC030940 (NM_177710.3,1026-1044).
gggtacggtatatcttgaa

SEQ ID NO: 798261 - DNA, 19 bp, Mus musculus
  siRNA target sequence for BC030940 (NM_177710.3,1031-1049).
cggtatatcttgaatgtta

SEQ ID NO: 798262 - DNA, 19 bp, Mus musculus
  siRNA target sequence for BC030940 (NM_177710.3,1042-1060).
gaatgttactcgagagata

SEQ ID NO: 798263 - DNA, 19 bp, Mus musculus
  siRNA target sequence for BC030940 (NM_177710.3,1046-1064).
gttactcgagagatagata

SEQ ID NO: 798264 - DNA, 19 bp, Mus musculus
  siRNA target sequence for BC030940 (NM_177710.3,1052-1070).
cgagagatagataacttct

SEQ ID NO: 798265 - DNA, 19 bp, Mus musculus
  siRNA target sequence for BC030940 (NM_177710.3,1072-1090).
ccctggagtctttgagtat

SEQ ID NO: 798266 - DNA, 19 bp, Mus musculus
  siRNA target sequence for BC030940 (NM_177710.3,1079-1097).
gtctttgagtatcataaca

SEQ ID NO: 798267 - DNA, 19 bp, Mus musculus
  siRNA target sequence for BC030940 (NM_177710.3,1096-1114).
cattcgagtatatgatgaa

SEQ ID NO: 798268 - DNA, 19 bp, Mus musculus
  siRNA target sequence for BC030940 (NM_177710.3,1130-1148).
ctggcttactggaatgaca

SEQ ID NO: 798269 - DNA, 19 bp, Mus musculus
  siRNA target sequence for BC030940 (NM_177710.3,1134-1152).
cttactggaatgacactta

SEQ ID NO: 798270 - DNA, 19 bp, Mus musculus
  siRNA target sequence for BC030940 (NM_177710.3,1138-1156).
ctggaatgacacttacaaa

SEQ ID NO: 798271 - DNA, 19 bp, Mus musculus
  siRNA target sequence for BC030940 (NM_177710.3,1140-1158).
ggaatgacacttacaaatt

SEQ ID NO: 798272 - DNA, 19 bp, Mus musculus
  siRNA target sequence for BC030940 (NM_177710.3,1247-1265).
gcaatgaaggagtatggat

SEQ ID NO: 798273 - DNA, 19 bp, Mus musculus
  siRNA target sequence for BC030940 (NM_177710.3,1271-1289).
ctggatcgagcctatgact

SEQ ID NO: 798274 - DNA, 19 bp, Mus musculus
  siRNA target sequence for BC030940 (NM_177710.3,1273-1291).
ggatcgagcctatgactat

SEQ ID NO: 798275 - DNA, 19 bp, Mus musculus
  siRNA target sequence for BC030940 (NM_177710.3,1319-1337).
cctaaccccagcttcatga

SEQ ID NO: 798276 - DNA, 19 bp, Mus musculus
  siRNA target sequence for BC030940 (NM_177710.3,1396-1414).
ctggagatctcattcagat

SEQ ID NO: 798277 - DNA, 19 bp, Mus musculus
  siRNA target sequence for BC030940 (NM_177710.3,1399-1417).
gagatctcattcagatagt

SEQ ID NO: 798278 - DNA, 19 bp, Mus musculus
  siRNA target sequence for BC030940 (NM_177710.3,1432-1450).
ccacgaacccatctgtaaa

SEQ ID NO: 798279 - DNA, 19 bp, Mus musculus
  siRNA target sequence for BC030940 (NM_177710.3,1435-1453).
cgaacccatctgtaaacct

SEQ ID NO: 798280 - DNA, 19 bp, Mus musculus
  siRNA target sequence for BC030940 (NM_177710.3,1452-1470).
ctgggctcgagctcaacaa

SEQ ID NO: 798281 - DNA, 19 bp, Mus musculus
  siRNA target sequence for BC030940 (NM_177710.3,1537-1555).
gcctaccgtctttatggaa

SEQ ID NO: 798282 - DNA, 19 bp, Mus musculus
  siRNA target sequence for BC030940 (NM_177710.3,1542-1560).
ccgtctttatggaacatgt

SEQ ID NO: 798283 - DNA, 19 bp, Mus musculus
  siRNA target sequence for BC030940 (NM_177710.3,1561-1579).
ggtcccacaagatgcaaat

SEQ ID NO: 798284 - DNA, 19 bp, Mus musculus
  siRNA target sequence for BC030940 (NM_177710.3,1636-1654).
gtttcgtgccggacagatt

SEQ ID NO: 798285 - DNA, 19 bp, Mus musculus
  siRNA target sequence for BC030940 (NM_177710.3,1645-1663).
cggacagattgaagatgaa

SEQ ID NO: 798286 - DNA, 19 bp, Mus musculus
  siRNA target sequence for BC030940 (NM_177710.3,1646-1664).
ggacagattgaagatgaat

SEQ ID NO: 798287 - DNA, 19 bp, Mus musculus
  siRNA target sequence for BC030940 (NM_177710.3,1647-1665).
gacagattgaagatgaatt

SEQ ID NO: 798288 - DNA, 19 bp, Mus musculus
  siRNA target sequence for BC030940 (NM_177710.3,1701-1719).
gttgtctcagtgaatcaaa

SEQ ID NO: 798289 - DNA, 19 bp, Mus musculus
  siRNA target sequence for BC030940 (NM_177710.3,1732-1750).
caactgccatgcgtctaaa

SEQ ID NO: 798290 - DNA, 19 bp, Mus musculus
  siRNA target sequence for BC030940 (NM_177710.3,1775-1793).
ccagacattgccaacaagt

SEQ ID NO: 798291 - DNA, 19 bp, Mus musculus
  siRNA target sequence for BC030940 (NM_177710.3,1776-1794).
cagacattgccaacaagtt

SEQ ID NO: 798292 - DNA, 19 bp, Mus musculus
  siRNA target sequence for BC030940 (NM_177710.3,1786-1804).
caacaagttcccagactta

SEQ ID NO: 798293 - DNA, 19 bp, Mus musculus
  siRNA target sequence for BC030940 (NM_177710.3,1819-1837).
ggagacagacgcactgaaa

SEQ ID NO: 798294 - DNA, 19 bp, Mus musculus
  siRNA target sequence for BC030940 (NM_177710.3,1873-1891).
gttgacatctcgactgaaa

SEQ ID NO: 798295 - DNA, 19 bp, Mus musculus
  siRNA target sequence for BC030940 (NM_177710.3,1943-1961).
caagctgccatctcagatt

SEQ ID NO: 798296 - DNA, 19 bp, Mus musculus
  siRNA target sequence for BC030940 (NM_177710.3,1965-1983).
gtacagatcgtattgactt

SEQ ID NO: 798297 - DNA, 19 bp, Mus musculus
  siRNA target sequence for BC030940 (NM_177710.3,1968-1986).
cagatcgtattgacttttt

SEQ ID NO: 798298 - DNA, 19 bp, Mus musculus
  siRNA target sequence for BC030940 (NM_177710.3,1970-1988).
gatcgtattgactttttta

SEQ ID NO: 798299 - DNA, 19 bp, Mus musculus
  siRNA target sequence for BC030940 (NM_177710.3,1989-2007).
gtgccctggagaaatttgt

SEQ ID NO: 798300 - DNA, 19 bp, Mus musculus
  siRNA target sequence for BC030940 (NM_177710.3,2026-2044).
ccggtctcggtctttttct

SEQ ID NO: 798301 - DNA, 19 bp, Mus musculus
  siRNA target sequence for BC030940 (NM_177710.3,2028-2046).
ggtctcggtctttttctca

SEQ ID NO: 798302 - DNA, 19 bp, Mus musculus
  siRNA target sequence for BC030940 (NM_177710.3,2088-2106).
gtcgtttgtcagtgataga

SEQ ID NO: 798303 - DNA, 19 bp, Mus musculus
  siRNA target sequence for BC030940 (NM_177710.3,2231-2249).
ccagacatcatcatgcaat

SEQ ID NO: 798304 - DNA, 19 bp, Mus musculus
  siRNA target sequence for BC030940 (NM_177710.3,2438-2456).
gagcaggatgagagtttct

SEQ ID NO: 798305 - DNA, 19 bp, Mus musculus
  siRNA target sequence for BC030940 (NM_177710.3,2693-2711).
gcaggccccacattatcca

SEQ ID NO: 798306 - DNA, 19 bp, Mus musculus
  siRNA target sequence for BC030940 (NM_177710.3,2722-2740).
ctctaagaatgattcttct

SEQ ID NO: 798307 - DNA, 19 bp, Mus musculus
  siRNA target sequence for BC030940 (NM_177710.3,2744-2762).
gcagacttaatgccaaaat

SEQ ID NO: 798308 - DNA, 19 bp, Mus musculus
  siRNA target sequence for BC030940 (NM_177710.3,2774-2792).
gaaactaccccagaacatt

SEQ ID NO: 798309 - DNA, 19 bp, Mus musculus
  siRNA target sequence for BC030940 (NM_177710.3,2784-2802).
cagaacattcatttttcct

SEQ ID NO: 798310 - DNA, 19 bp, Mus musculus
  siRNA target sequence for BC030940 (NM_177710.3,2945-2963).
gggtcagatagtagaagta

SEQ ID NO: 798311 - DNA, 19 bp, Mus musculus
  siRNA target sequence for BC030940 (NM_177710.3,3068-3086).
gagtatacgccgacagtta

SEQ ID NO: 798312 - DNA, 19 bp, Mus musculus
  siRNA target sequence for BC030940 (NM_177710.3,3070-3088).
gtatacgccgacagttaca

SEQ ID NO: 798313 - DNA, 19 bp, Mus musculus
  siRNA target sequence for BC030940 (NM_177710.3,3170-3188).
gagcagtctatcactatgt

SEQ ID NO: 798314 - DNA, 19 bp, Mus musculus
  siRNA target sequence for BC030940 (NM_177710.3,3172-3190).
gcagtctatcactatgttt

SEQ ID NO: 798315 - DNA, 19 bp, Mus musculus
  siRNA target sequence for BC030940 (NM_177710.3,3173-3191).
cagtctatcactatgtttt

SEQ ID NO: 798316 - DNA, 19 bp, Mus musculus
  siRNA target sequence for BC030940 (NM_177710.3,3175-3193).
gtctatcactatgttttgt

SEQ ID NO: 798317 - DNA, 19 bp, Mus musculus
  siRNA target sequence for BC030940 (NM_177710.3,3192-3210).
gtgcgctggatgaaaatct

SEQ ID NO: 798318 - DNA, 19 bp, Mus musculus
  siRNA target sequence for BC030940 (NM_177710.3,3223-3241).
ggagcccagtcaagtttct

SEQ ID NO: 798319 - DNA, 19 bp, Mus musculus
  siRNA target sequence for BC030940 (NM_177710.3,3297-3315).
ctgacccaaaccctatgtt

SEQ ID NO: 798320 - DNA, 19 bp, Mus musculus
  siRNA target sequence for BC030940 (NM_177710.3,3302-3320).
ccaaaccctatgttaagta

SEQ ID NO: 798321 - DNA, 19 bp, Mus musculus
  siRNA target sequence for BC030940 (NM_177710.3,3399-3417).
catctttcagcttggatta

SEQ ID NO: 798322 - DNA, 19 bp, Mus musculus
  siRNA target sequence for BC030940 (NM_177710.3,3468-3486).
gtgccactgacaatgaact

SEQ ID NO: 798323 - DNA, 19 bp, Mus musculus
  siRNA target sequence for BC030940 (NM_177710.3,3562-3580).
ctccccattaactaacgaa

SEQ ID NO: 798324 - DNA, 19 bp, Mus musculus
  siRNA target sequence for BC030940 (NM_177710.3,3581-3599).
gacctaagtttaattaaca

SEQ ID NO: 798325 - DNA, 19 bp, Mus musculus
  siRNA target sequence for BC030940 (NM_177710.3,3618-3636).
gtgtgttacagaaaaaact

SEQ ID NO: 798326 - DNA, 19 bp, Mus musculus
  siRNA target sequence for BC030940 (NM_177710.3,3645-3663).
cacctgaagcctgtagaat

SEQ ID NO: 798327 - DNA, 19 bp, Mus musculus
  siRNA target sequence for BC030940 (NM_177710.3,3673-3691).
ctctagtagtgaaaatata

SEQ ID NO: 798328 - DNA, 19 bp, Mus musculus
  siRNA target sequence for BC030940 (NM_177710.3,3718-3736).
ggtgaaggagcatgctaaa

SEQ ID NO: 798329 - DNA, 19 bp, Mus musculus
  siRNA target sequence for BC030940 (NM_177710.3,3824-3842).
ctggacctttgtaaagact

SEQ ID NO: 798330 - DNA, 19 bp, Mus musculus
  siRNA target sequence for BC030940 (NM_177710.3,3870-3888).
cagaatcccctcatctcaa

SEQ ID NO: 798331 - DNA, 19 bp, Mus musculus
  siRNA target sequence for BC030940 (NM_177710.3,3872-3890).
gaatcccctcatctcaaat

SEQ ID NO: 798332 - DNA, 19 bp, Mus musculus
  siRNA target sequence for BC030940 (NM_177710.3,3877-3895).
ccctcatctcaaattgctt

SEQ ID NO: 798333 - DNA, 19 bp, Mus musculus
  siRNA target sequence for BC030940 (NM_177710.3,3977-3995).
ccacagcccaccaagtatt

SEQ ID NO: 798334 - DNA, 19 bp, Mus musculus
  siRNA target sequence for BC030940 (NM_177710.3,3998-4016).
gtagagcaactcaaaacat

SEQ ID NO: 798335 - DNA, 19 bp, Mus musculus
  siRNA target sequence for BC030940 (NM_177710.3,4109-4127).
gcaagaccagaattgacta

SEQ ID NO: 798336 - DNA, 19 bp, Mus musculus
  siRNA target sequence for BC030940 (NM_177710.3,4232-4250).
ccccttagaagactgaaaa

SEQ ID NO: 798337 - DNA, 19 bp, Mus musculus
  siRNA target sequence for BC030940 (NM_177710.3,4244-4262).
ctgaaaagagcaaatgata

SEQ ID NO: 798338 - DNA, 19 bp, Mus musculus
  siRNA target sequence for BC030940 (NM_177710.3,4272-4290).
caaccaaccccttctataa

SEQ ID NO: 798339 - DNA, 19 bp, Mus musculus
  siRNA target sequence for 4932411G14 (NM_177711.2,1734-1752).
ctgacgggttccagaagat

SEQ ID NO: 798340 - DNA, 19 bp, Mus musculus
  siRNA target sequence for 4932411G14 (NM_177711.2,1736-1754).
gacgggttccagaagatgt

SEQ ID NO: 798341 - DNA, 19 bp, Mus musculus
  siRNA target sequence for 4932411G14 (NM_177711.2,1798-1816).
cctgcctcaggggatctat

SEQ ID NO: 798342 - DNA, 19 bp, Mus musculus
  siRNA target sequence for 4932411G14 (NM_177711.2,1799-1817).
ctgcctcaggggatctata

SEQ ID NO: 798343 - DNA, 19 bp, Mus musculus
  siRNA target sequence for 4932411G14 (NM_177711.2,1802-1820).
cctcaggggatctataagt

SEQ ID NO: 798344 - DNA, 19 bp, Mus musculus
  siRNA target sequence for 4932411G14 (NM_177711.2,1997-2015).
ctagagattatccaaaaat

SEQ ID NO: 798345 - DNA, 19 bp, Mus musculus
  siRNA target sequence for 4932411G14 (NM_177711.2,2179-2197).
ccacatcgatggaaccaat

SEQ ID NO: 798346 - DNA, 19 bp, Mus musculus
  siRNA target sequence for 4932411G14 (NM_177711.2,2233-2251).
gcatcgtccccttcatttt

SEQ ID NO: 798347 - DNA, 19 bp, Mus musculus
  siRNA target sequence for 4932411G14 (NM_177711.2,2234-2252).
catcgtccccttcatttta

SEQ ID NO: 798348 - DNA, 19 bp, Mus musculus
  siRNA target sequence for 4932411G14 (NM_177711.2,2291-2309).
cagtcaccttctgatatca

SEQ ID NO: 798349 - DNA, 19 bp, Mus musculus
  siRNA target sequence for 4932411G14 (NM_177711.2,2353-2371).
cgtgcagcagacatctgtt

SEQ ID NO: 798350 - DNA, 19 bp, Mus musculus
  siRNA target sequence for 4932411G14 (NM_177711.2,2462-2480).
gtgggtaagagcctaagtt

SEQ ID NO: 798351 - DNA, 19 bp, Mus musculus
  siRNA target sequence for 4932411G14 (NM_177711.2,2465-2483).
ggtaagagcctaagttcta

SEQ ID NO: 798352 - DNA, 19 bp, Mus musculus
  siRNA target sequence for 4932411G14 (NM_177711.2,2472-2490).
gcctaagttctagcaaaat

SEQ ID NO: 798353 - DNA, 19 bp, Mus musculus
  siRNA target sequence for 4932411G14 (NM_177711.2,2518-2536).
ggatgacaaacacgtattt

SEQ ID NO: 798354 - DNA, 19 bp, Mus musculus
  siRNA target sequence for 4932411G14 (NM_177711.2,2522-2540).
gacaaacacgtatttgtat

SEQ ID NO: 798355 - DNA, 19 bp, Mus musculus
  siRNA target sequence for 4932411G14 (NM_177711.2,2548-2566).
ggtcagtaacatagtcaaa

SEQ ID NO: 798356 - DNA, 19 bp, Mus musculus
  siRNA target sequence for 4932411G14 (NM_177711.2,2588-2606).
ccacgacctaccaagatct

SEQ ID NO: 798357 - DNA, 19 bp, Mus musculus
  siRNA target sequence for 4932411G14 (NM_177711.2,2755-2773).
ggagaaatccgaatcagaa

SEQ ID NO: 798358 - DNA, 19 bp, Mus musculus
  siRNA target sequence for 4932411G14 (NM_177711.2,2796-2814).
cagagcccccaaaagtcat

SEQ ID NO: 798359 - DNA, 19 bp, Mus musculus
  siRNA target sequence for 4932411G14 (NM_177711.2,2973-2991).
ccaagaggtcgtggaaaat

SEQ ID NO: 798360 - DNA, 19 bp, Mus musculus
  siRNA target sequence for 4932411G14 (NM_177711.2,2974-2992).
caagaggtcgtggaaaata

SEQ ID NO: 798361 - DNA, 19 bp, Mus musculus
  siRNA target sequence for 9830130M13 (NM_177713.2,663-681).
gtttaccctaccgaagttt

SEQ ID NO: 798362 - DNA, 19 bp, Mus musculus
  siRNA target sequence for 9830130M13 (NM_177713.2,669-687).
cctaccgaagtttatgcaa

SEQ ID NO: 798363 - DNA, 19 bp, Mus musculus
  siRNA target sequence for 9830130M13 (NM_177713.2,670-688).
ctaccgaagtttatgcaaa

SEQ ID NO: 798364 - DNA, 19 bp, Mus musculus
  siRNA target sequence for 9830130M13 (NM_177713.2,703-721).
cagaaagacgtcacaaaaa

SEQ ID NO: 798365 - DNA, 19 bp, Mus musculus
  siRNA target sequence for 9830130M13 (NM_177713.2,744-762).
gattagcccaagcatgaaa

SEQ ID NO: 798366 - DNA, 19 bp, Mus musculus
  siRNA target sequence for 9830130M13 (NM_177713.2,794-812).
ctgccaagagaaacaagat

SEQ ID NO: 798367 - DNA, 19 bp, Mus musculus
  siRNA target sequence for 9830130M13 (NM_177713.2,813-831).
gcatggcaactatgaaaat

SEQ ID NO: 798368 - DNA, 19 bp, Mus musculus
  siRNA target sequence for 9830130M13 (NM_177713.2,913-931).
cacgtctacgggaatcaaa

SEQ ID NO: 798369 - DNA, 19 bp, Mus musculus
  siRNA target sequence for 9830130M13 (NM_177713.2,928-946).
caaacggaccccctctatt

SEQ ID NO: 798370 - DNA, 19 bp, Mus musculus
  siRNA target sequence for 9830130M13 (NM_177713.2,932-950).
cggaccccctctattataa

SEQ ID NO: 798371 - DNA, 19 bp, Mus musculus
  siRNA target sequence for 9830130M13 (NM_177713.2,934-952).
gaccccctctattataact

SEQ ID NO: 798372 - DNA, 19 bp, Mus musculus
  siRNA target sequence for 9830130M13 (NM_177713.2,974-992).
cgcctcaagatgacgatat

SEQ ID NO: 798373 - DNA, 19 bp, Mus musculus
  siRNA target sequence for 9830130M13 (NM_177713.2,975-993).
gcctcaagatgacgatata

SEQ ID NO: 798374 - DNA, 19 bp, Mus musculus
  siRNA target sequence for AI836003 (NM_177716.1,1049-1067).
gggtcgtgatcctgatgaa

SEQ ID NO: 798375 - DNA, 19 bp, Mus musculus
  siRNA target sequence for 4732456N10 (NM_177717.2,160-178).
gggggcacgcggaacttca

SEQ ID NO: 798376 - DNA, 19 bp, Mus musculus
  siRNA target sequence for 4732456N10 (NM_177717.2,385-403).
ggtgtcagcggcataggat

SEQ ID NO: 798377 - DNA, 19 bp, Mus musculus
  siRNA target sequence for 4732456N10 (NM_177717.2,386-404).
gtgtcagcggcataggata

SEQ ID NO: 798378 - DNA, 19 bp, Mus musculus
  siRNA target sequence for 4732456N10 (NM_177717.2,390-408).
cagcggcataggatacaga

SEQ ID NO: 798379 - DNA, 19 bp, Mus musculus
  siRNA target sequence for 4732456N10 (NM_177717.2,621-639).
gcagcagaacaaagtctta

SEQ ID NO: 798380 - DNA, 19 bp, Mus musculus
  siRNA target sequence for 4732456N10 (NM_177717.2,856-874).
gagtttgtggtactcaaaa

SEQ ID NO: 798381 - DNA, 19 bp, Mus musculus
  siRNA target sequence for 4732456N10 (NM_177717.2,951-969).
cctgagagctttctttgaa

SEQ ID NO: 798382 - DNA, 19 bp, Mus musculus
  siRNA target sequence for 4732456N10 (NM_177717.2,1173-1191).
ggatgacctccgtactact

SEQ ID NO: 798383 - DNA, 19 bp, Mus musculus
  siRNA target sequence for 4732456N10 (NM_177717.2,1174-1192).
gatgacctccgtactacta

SEQ ID NO: 798384 - DNA, 19 bp, Mus musculus
  siRNA target sequence for 4732456N10 (NM_177717.2,1177-1195).
gacctccgtactactaaga

SEQ ID NO: 798385 - DNA, 19 bp, Mus musculus
  siRNA target sequence for 4732456N10 (NM_177717.2,1227-1245).
gaggctgcgttctgagatt

SEQ ID NO: 798386 - DNA, 19 bp, Mus musculus
  siRNA target sequence for 4732456N10 (NM_177717.2,1229-1247).
ggctgcgttctgagattga

SEQ ID NO: 798387 - DNA, 19 bp, Mus musculus
  siRNA target sequence for 4732456N10 (NM_177717.2,1231-1249).
ctgcgttctgagattgaca

SEQ ID NO: 798388 - DNA, 19 bp, Mus musculus
  siRNA target sequence for 4732456N10 (NM_177717.2,1233-1251).
gcgttctgagattgacaat

SEQ ID NO: 798389 - DNA, 19 bp, Mus musculus
  siRNA target sequence for 4732456N10 (NM_177717.2,1235-1253).
gttctgagattgacaatct

SEQ ID NO: 798390 - DNA, 19 bp, Mus musculus
  siRNA target sequence for 4732456N10 (NM_177717.2,1499-1517).
gtgttggtgccgtgaacat

SEQ ID NO: 798391 - DNA, 19 bp, Mus musculus
  siRNA target sequence for 4732456N10 (NM_177717.2,1501-1519).
gttggtgccgtgaacatct

SEQ ID NO: 798392 - DNA, 19 bp, Mus musculus
  siRNA target sequence for 4732456N10 (NM_177717.2,1682-1700).
gcagttcaagcatgagaat

SEQ ID NO: 798393 - DNA, 19 bp, Mus musculus
  siRNA target sequence for 4732456N10 (NM_177717.2,1683-1701).
cagttcaagcatgagaatt

SEQ ID NO: 798394 - DNA, 19 bp, Mus musculus
  siRNA target sequence for A430031N04 (NM_177718.2,237-255).
ccgtggccaacgagtatct

SEQ ID NO: 798395 - DNA, 19 bp, Mus musculus
  siRNA target sequence for A430031N04 (NM_177718.2,293-311).
ctggacctagatgagttaa

SEQ ID NO: 798396 - DNA, 19 bp, Mus musculus
  siRNA target sequence for A430031N04 (NM_177718.2,327-345).
gcactgactacgatatgga

SEQ ID NO: 798397 - DNA, 19 bp, Mus musculus
  siRNA target sequence for A430031N04 (NM_177718.2,332-350).
gactacgatatggacttta

SEQ ID NO: 798398 - DNA, 19 bp, Mus musculus
  siRNA target sequence for A430031N04 (NM_177718.2,439-457).
gagcctcaggctctttgat

SEQ ID NO: 798399 - DNA, 19 bp, Mus musculus
  siRNA target sequence for A430031N04 (NM_177718.2,455-473).
gatgaggggacaatcagta

SEQ ID NO: 798400 - DNA, 19 bp, Mus musculus
  siRNA target sequence for A430031N04 (NM_177718.2,458-476).
gaggggacaatcagtaaat

SEQ ID NO: 798401 - DNA, 19 bp, Mus musculus
  siRNA target sequence for A430031N04 (NM_177718.2,489-507).
gcacaatcgccgatcacat

SEQ ID NO: 798402 - DNA, 19 bp, Mus musculus
  siRNA target sequence for A430031N04 (NM_177718.2,492-510).
caatcgccgatcacatcaa

SEQ ID NO: 798403 - DNA, 19 bp, Mus musculus
  siRNA target sequence for A430031N04 (NM_177718.2,578-596).
gtcctctcggagatacaga

SEQ ID NO: 798404 - DNA, 19 bp, Mus musculus
  siRNA target sequence for A430031N04 (NM_177718.2,583-601).
ctcggagatacagaagaaa

SEQ ID NO: 798405 - DNA, 19 bp, Mus musculus
  siRNA target sequence for A430031N04 (NM_177718.2,675-693).
ggagcagccgcatgttgta

SEQ ID NO: 798406 - DNA, 19 bp, Mus musculus
  siRNA target sequence for A430031N04 (NM_177718.2,870-888).
ccaggagcgaggtacaact

SEQ ID NO: 798407 - DNA, 19 bp, Mus musculus
  siRNA target sequence for A430031N04 (NM_177718.2,873-891).
ggagcgaggtacaactgaa

SEQ ID NO: 798408 - DNA, 19 bp, Mus musculus
  siRNA target sequence for A430031N04 (NM_177718.2,876-894).
gcgaggtacaactgaagaa

SEQ ID NO: 798409 - DNA, 19 bp, Mus musculus
  siRNA target sequence for A430031N04 (NM_177718.2,878-896).
gaggtacaactgaagaagt

SEQ ID NO: 798410 - DNA, 19 bp, Mus musculus
  siRNA target sequence for A430031N04 (NM_177718.2,884-902).
caactgaagaagtgcattt

SEQ ID NO: 798411 - DNA, 19 bp, Mus musculus
  siRNA target sequence for A430031N04 (NM_177718.2,897-915).
gcatttcaggcagtctaat

SEQ ID NO: 798412 - DNA, 19 bp, Mus musculus
  siRNA target sequence for A430031N04 (NM_177718.2,1036-1054).
cttggctcaagaagactat

SEQ ID NO: 798413 - DNA, 19 bp, Mus musculus
  siRNA target sequence for A430031N04 (NM_177718.2,1049-1067).
gactatgcagcccactttt

SEQ ID NO: 798414 - DNA, 19 bp, Mus musculus
  siRNA target sequence for A430031N04 (NM_177718.2,1094-1112).
cactgcctggtcaacaaga

SEQ ID NO: 798415 - DNA, 19 bp, Mus musculus
  siRNA target sequence for A430031N04 (NM_177718.2,1108-1126).
caagatgtgccctaattat

SEQ ID NO: 798416 - DNA, 19 bp, Mus musculus
  siRNA target sequence for A430031N04 (NM_177718.2,1346-1364).
gatgaccgtctggcaaaaa

SEQ ID NO: 798417 - DNA, 19 bp, Mus musculus
  siRNA target sequence for A430031N04 (NM_177718.2,1372-1390).
gcagctagtgactgagaat

SEQ ID NO: 798418 - DNA, 19 bp, Mus musculus
  siRNA target sequence for A430031N04 (NM_177718.2,1438-1456).
gccccatttcagaatcgat

SEQ ID NO: 798419 - DNA, 19 bp, Mus musculus
  siRNA target sequence for A430031N04 (NM_177718.2,1447-1465).
cagaatcgatgataaattt

SEQ ID NO: 798420 - DNA, 19 bp, Mus musculus
  siRNA target sequence for A430031N04 (NM_177718.2,1449-1467).
gaatcgatgataaattttt

SEQ ID NO: 798421 - DNA, 19 bp, Mus musculus
  siRNA target sequence for Ranbp6 (NM_177721.2,89-107).
ctatgcgaaggagttaaga

SEQ ID NO: 798422 - DNA, 19 bp, Mus musculus
  siRNA target sequence for Ranbp6 (NM_177721.2,221-239).
ggaatgtgcaagaattcgt

SEQ ID NO: 798423 - DNA, 19 bp, Mus musculus
  siRNA target sequence for Ranbp6 (NM_177721.2,241-259).
gctcagagtatctttcaca

SEQ ID NO: 798424 - DNA, 19 bp, Mus musculus
  siRNA target sequence for Ranbp6 (NM_177721.2,260-278).
gatgtggcagtttatatgt

SEQ ID NO: 798425 - DNA, 19 bp, Mus musculus
  siRNA target sequence for Ranbp6 (NM_177721.2,263-281).
gtggcagtttatatgtgat

SEQ ID NO: 798426 - DNA, 19 bp, Mus musculus
  siRNA target sequence for Ranbp6 (NM_177721.2,290-308).
caaggcaattggaactgaa

SEQ ID NO: 798427 - DNA, 19 bp, Mus musculus
  siRNA target sequence for Ranbp6 (NM_177721.2,440-458).
ctttaaaaaccaagagtta

SEQ ID NO: 798428 - DNA, 19 bp, Mus musculus
  siRNA target sequence for Ranbp6 (NM_177721.2,491-509).
ccaacaggttgaaatgtct

SEQ ID NO: 798429 - DNA, 19 bp, Mus musculus
  siRNA target sequence for Ranbp6 (NM_177721.2,510-528).
cttcaagatgaggatgaat

SEQ ID NO: 798430 - DNA, 19 bp, Mus musculus
  siRNA target sequence for Ranbp6 (NM_177721.2,566-584).
gcactcattatttagtact

SEQ ID NO: 798431 - DNA, 19 bp, Mus musculus
  siRNA target sequence for Ranbp6 (NM_177721.2,571-589).
cattatttagtacttacaa

SEQ ID NO: 798432 - DNA, 19 bp, Mus musculus
  siRNA target sequence for Ranbp6 (NM_177721.2,614-632).
gcagctactcccactaatt

SEQ ID NO: 798433 - DNA, 19 bp, Mus musculus
  siRNA target sequence for Ranbp6 (NM_177721.2,617-635).
gctactcccactaattgta

SEQ ID NO: 798434 - DNA, 19 bp, Mus musculus
  siRNA target sequence for Ranbp6 (NM_177721.2,618-636).
ctactcccactaattgtaa

SEQ ID NO: 798435 - DNA, 19 bp, Mus musculus
  siRNA target sequence for Ranbp6 (NM_177721.2,672-690).
caatggggactatgcatat

SEQ ID NO: 798436 - DNA, 19 bp, Mus musculus
  siRNA target sequence for Ranbp6 (NM_177721.2,676-694).
ggggactatgcatatttga

SEQ ID NO: 798437 - DNA, 19 bp, Mus musculus
  siRNA target sequence for Ranbp6 (NM_177721.2,677-695).
gggactatgcatatttgat

SEQ ID NO: 798438 - DNA, 19 bp, Mus musculus
  siRNA target sequence for Ranbp6 (NM_177721.2,712-730).
gcagtccaacctcattcaa

SEQ ID NO: 798439 - DNA, 19 bp, Mus musculus
  siRNA target sequence for Ranbp6 (NM_177721.2,718-736).
caacctcattcaagtatgt

SEQ ID NO: 798440 - DNA, 19 bp, Mus musculus
  siRNA target sequence for Ranbp6 (NM_177721.2,721-739).
cctcattcaagtatgttga

SEQ ID NO: 798441 - DNA, 19 bp, Mus musculus
  siRNA target sequence for Ranbp6 (NM_177721.2,724-742).
cattcaagtatgttgagta

SEQ ID NO: 798442 - DNA, 19 bp, Mus musculus
  siRNA target sequence for Ranbp6 (NM_177721.2,751-769).
ggccgatgcttctcaatat

SEQ ID NO: 798443 - DNA, 19 bp, Mus musculus
  siRNA target sequence for Ranbp6 (NM_177721.2,843-861).
gactaccgttccttgtgtt

SEQ ID NO: 798444 - DNA, 19 bp, Mus musculus
  siRNA target sequence for Ranbp6 (NM_177721.2,848-866).
ccgttccttgtgttcagaa

SEQ ID NO: 798445 - DNA, 19 bp, Mus musculus
  siRNA target sequence for Ranbp6 (NM_177721.2,867-885).
gccgttccactcttggtaa

SEQ ID NO: 798446 - DNA, 19 bp, Mus musculus
  siRNA target sequence for Ranbp6 (NM_177721.2,868-886).
ccgttccactcttggtaaa

SEQ ID NO: 798447 - DNA, 19 bp, Mus musculus
  siRNA target sequence for Ranbp6 (NM_177721.2,869-887).
cgttccactcttggtaaaa

SEQ ID NO: 798448 - DNA, 19 bp, Mus musculus
  siRNA target sequence for Ranbp6 (NM_177721.2,874-892).
cactcttggtaaaagttat

SEQ ID NO: 798449 - DNA, 19 bp, Mus musculus
  siRNA target sequence for Ranbp6 (NM_177721.2,881-899).
ggtaaaagttattaagtgt

SEQ ID NO: 798450 - DNA, 19 bp, Mus musculus
  siRNA target sequence for Ranbp6 (NM_177721.2,947-965).
ctcagcaatcggaaagatt

SEQ ID NO: 798451 - DNA, 19 bp, Mus musculus
  siRNA target sequence for Ranbp6 (NM_177721.2,949-967).
cagcaatcggaaagattct

SEQ ID NO: 798452 - DNA, 19 bp, Mus musculus
  siRNA target sequence for Ranbp6 (NM_177721.2,951-969).
gcaatcggaaagattctga

SEQ ID NO: 798453 - DNA, 19 bp, Mus musculus
  siRNA target sequence for Ranbp6 (NM_177721.2,956-974).
cggaaagattctgaagttt

SEQ ID NO: 798454 - DNA, 19 bp, Mus musculus
  siRNA target sequence for Ranbp6 (NM_177721.2,1005-1023).
ctcccacactggttatcgt

SEQ ID NO: 798455 - DNA, 19 bp, Mus musculus
  siRNA target sequence for Ranbp6 (NM_177721.2,1025-1043).
gcttccgctgcatgaagat

SEQ ID NO: 798456 - DNA, 19 bp, Mus musculus
  siRNA target sequence for Ranbp6 (NM_177721.2,1053-1071).
gctattcagactttgaatt

SEQ ID NO: 798457 - DNA, 19 bp, Mus musculus
  siRNA target sequence for Ranbp6 (NM_177721.2,1074-1092).
ctctgtgacctaattgaaa

SEQ ID NO: 798458 - DNA, 19 bp, Mus musculus
  siRNA target sequence for Ranbp6 (NM_177721.2,1093-1111).
gcaaccacccagttgtgat

SEQ ID NO: 798459 - DNA, 19 bp, Mus musculus
  siRNA target sequence for Ranbp6 (NM_177721.2,1107-1125).
gtgattggtccaaataatt

SEQ ID NO: 798460 - DNA, 19 bp, Mus musculus
  siRNA target sequence for Ranbp6 (NM_177721.2,1154-1172).
cgcagaaggaaaaattaat

SEQ ID NO: 798461 - DNA, 19 bp, Mus musculus
  siRNA target sequence for Ranbp6 (NM_177721.2,1202-1220).
caaacgcctagctaatgtt

SEQ ID NO: 798462 - DNA, 19 bp, Mus musculus
  siRNA target sequence for Ranbp6 (NM_177721.2,1218-1236).
gttgtccgtcagatacaga

SEQ ID NO: 798463 - DNA, 19 bp, Mus musculus
  siRNA target sequence for Ranbp6 (NM_177721.2,1242-1260).
gaagaattgtggttggaat

SEQ ID NO: 798464 - DNA, 19 bp, Mus musculus
  siRNA target sequence for Ranbp6 (NM_177721.2,1264-1282).
catctcaactcgatgatga

SEQ ID NO: 798465 - DNA, 19 bp, Mus musculus
  siRNA target sequence for 6030422M02 (NM_177722.2,123-141).
cagcccttgtctatcttga

SEQ ID NO: 798466 - DNA, 19 bp, Mus musculus
  siRNA target sequence for 6030422M02 (NM_177722.2,149-167).
ggaggcctccaaaagttta

SEQ ID NO: 798467 - DNA, 19 bp, Mus musculus
  siRNA target sequence for 6030422M02 (NM_177722.2,210-228).
ctgtctatcggttcagtat

SEQ ID NO: 798468 - DNA, 19 bp, Mus musculus
  siRNA target sequence for 6030422M02 (NM_177722.2,214-232).
ctatcggttcagtattcta

SEQ ID NO: 798469 - DNA, 19 bp, Mus musculus
  siRNA target sequence for 6030422M02 (NM_177722.2,219-237).
ggttcagtattctaataga

SEQ ID NO: 798470 - DNA, 19 bp, Mus musculus
  siRNA target sequence for 6030422M02 (NM_177722.2,239-257).
ccctgtgacgttgttgaat

SEQ ID NO: 798471 - DNA, 19 bp, Mus musculus
  siRNA target sequence for 6030422M02 (NM_177722.2,240-258).
cctgtgacgttgttgaatt

SEQ ID NO: 798472 - DNA, 19 bp, Mus musculus
  siRNA target sequence for 6030422M02 (NM_177722.2,241-259).
ctgtgacgttgttgaatta

SEQ ID NO: 798473 - DNA, 19 bp, Mus musculus
  siRNA target sequence for 6030422M02 (NM_177722.2,243-261).
gtgacgttgttgaattaga

SEQ ID NO: 798474 - DNA, 19 bp, Mus musculus
  siRNA target sequence for 6030422M02 (NM_177722.2,306-324).
ctcgagtttttcaatcatt

SEQ ID NO: 798475 - DNA, 19 bp, Mus musculus
  siRNA target sequence for 6030422M02 (NM_177722.2,309-327).
gagtttttcaatcattaca

SEQ ID NO: 798476 - DNA, 19 bp, Mus musculus
  siRNA target sequence for 6030422M02 (NM_177722.2,379-397).
gccaagctatactcttgat

SEQ ID NO: 798477 - DNA, 19 bp, Mus musculus
  siRNA target sequence for 6030422M02 (NM_177722.2,381-399).
caagctatactcttgatct

SEQ ID NO: 798478 - DNA, 19 bp, Mus musculus
  siRNA target sequence for 6030422M02 (NM_177722.2,402-420).
gtgagtttccacttaatta

SEQ ID NO: 798479 - DNA, 19 bp, Mus musculus
  siRNA target sequence for 6030422M02 (NM_177722.2,442-460).
gatgcaaggaattgtgatt

SEQ ID NO: 798480 - DNA, 19 bp, Mus musculus
  siRNA target sequence for 6030422M02 (NM_177722.2,455-473).
gtgattgcaatgacaacta

SEQ ID NO: 798481 - DNA, 19 bp, Mus musculus
  siRNA target sequence for 6030422M02 (NM_177722.2,457-475).
gattgcaatgacaactata

SEQ ID NO: 798482 - DNA, 19 bp, Mus musculus
  siRNA target sequence for 6030422M02 (NM_177722.2,461-479).
gcaatgacaactataacca

SEQ ID NO: 798483 - DNA, 19 bp, Mus musculus
  siRNA target sequence for 6030422M02 (NM_177722.2,488-506).
caaggtgcaaggttcttgt

SEQ ID NO: 798484 - DNA, 19 bp, Mus musculus
  siRNA target sequence for 6030422M02 (NM_177722.2,648-666).
gagtacttggtgataaaca

SEQ ID NO: 798485 - DNA, 19 bp, Mus musculus
  siRNA target sequence for 6030422M02 (NM_177722.2,657-675).
gtgataaacagatagttga

SEQ ID NO: 798486 - DNA, 19 bp, Mus musculus
  siRNA target sequence for 6030422M02 (NM_177722.2,682-700).
caccacaaaaatgtttcat

SEQ ID NO: 798487 - DNA, 19 bp, Mus musculus
  siRNA target sequence for 6030422M02 (NM_177722.2,724-742).
ccagccatttaggtttcaa

SEQ ID NO: 798488 - DNA, 19 bp, Mus musculus
  siRNA target sequence for 6030422M02 (NM_177722.2,729-747).
catttaggtttcaatcact

SEQ ID NO: 798489 - DNA, 19 bp, Mus musculus
  siRNA target sequence for 6030422M02 (NM_177722.2,735-753).
ggtttcaatcacttggtat

SEQ ID NO: 798490 - DNA, 19 bp, Mus musculus
  siRNA target sequence for 6030422M02 (NM_177722.2,736-754).
gtttcaatcacttggtatt

SEQ ID NO: 798491 - DNA, 19 bp, Mus musculus
  siRNA target sequence for 6030422M02 (NM_177722.2,764-782).
gatgaactagtgaataaga

SEQ ID NO: 798492 - DNA, 19 bp, Mus musculus
  siRNA target sequence for 6030422M02 (NM_177722.2,846-864).
ctctctgtgtagaagcaaa

SEQ ID NO: 798493 - DNA, 19 bp, Mus musculus
  siRNA target sequence for 6030422M02 (NM_177722.2,850-868).
ctgtgtagaagcaaataat

SEQ ID NO: 798494 - DNA, 19 bp, Mus musculus
  siRNA target sequence for 6030422M02 (NM_177722.2,854-872).
gtagaagcaaataatatca

SEQ ID NO: 798495 - DNA, 19 bp, Mus musculus
  siRNA target sequence for 6030422M02 (NM_177722.2,880-898).
cacagcaaaagttccttta

SEQ ID NO: 798496 - DNA, 19 bp, Mus musculus
  siRNA target sequence for 6030422M02 (NM_177722.2,943-961).
ctcgtgctggaaattcaca

SEQ ID NO: 798497 - DNA, 19 bp, Mus musculus
  siRNA target sequence for 6030422M02 (NM_177722.2,995-1013).
gttgctcctgggacttaca

SEQ ID NO: 798498 - DNA, 19 bp, Mus musculus
  siRNA target sequence for A030011M19 (NM_177723.2,299-317).
ccaacagtctggacattga

SEQ ID NO: 798499 - DNA, 19 bp, Mus musculus
  siRNA target sequence for A030011M19 (NM_177723.2,505-523).
gagtgccgggtgaagaaga

SEQ ID NO: 798500 - DNA, 19 bp, Mus musculus
  siRNA target sequence for A030011M19 (NM_177723.2,590-608).
cggaaggccacatgtcaaa

SEQ ID NO: 798501 - DNA, 19 bp, Mus musculus
  siRNA target sequence for A030011M19 (NM_177723.2,829-847).
gacgatgggctgtatcagt

SEQ ID NO: 798502 - DNA, 19 bp, Mus musculus
  siRNA target sequence for A030011M19 (NM_177723.2,1286-1304).
gtccctcccccgtctacat

SEQ ID NO: 798503 - DNA, 19 bp, Mus musculus
  siRNA target sequence for A030011M19 (NM_177723.2,1367-1385).
gcaaggacggcctcttagt

SEQ ID NO: 798504 - DNA, 19 bp, Mus musculus
  siRNA target sequence for D230039L06 (NM_177724.2,447-465).
cggtagccggaaataaaga

SEQ ID NO: 798505 - DNA, 19 bp, Mus musculus
  siRNA target sequence for D230039L06 (NM_177724.2,478-496).
ctccaccaggggcaagaaa

SEQ ID NO: 798506 - DNA, 19 bp, Mus musculus
  siRNA target sequence for D230039L06 (NM_177724.2,701-719).
gcatctccgggcattggta

SEQ ID NO: 798507 - DNA, 19 bp, Mus musculus
  siRNA target sequence for D230039L06 (NM_177724.2,938-956).
ctccaggttcccaatacta

SEQ ID NO: 798508 - DNA, 19 bp, Mus musculus
  siRNA target sequence for D230039L06 (NM_177724.2,941-959).
caggttcccaatactatca

SEQ ID NO: 798509 - DNA, 19 bp, Mus musculus
  siRNA target sequence for D230039L06 (NM_177724.2,980-998).
gacaaccgctgtgacattt

SEQ ID NO: 798510 - DNA, 19 bp, Mus musculus
  siRNA target sequence for D230039L06 (NM_177724.2,1005-1023).
cacacctgaaccagctaaa

SEQ ID NO: 798511 - DNA, 19 bp, Mus musculus
  siRNA target sequence for D230039L06 (NM_177724.2,1260-1278).
gcaacggagcggaaaagaa

SEQ ID NO: 798512 - DNA, 19 bp, Mus musculus
  siRNA target sequence for Lrrc8 (NM_177725.2,481-499).
ccccacaggtatcaagtat

SEQ ID NO: 798513 - DNA, 19 bp, Mus musculus
  siRNA target sequence for Lrrc8 (NM_177725.2,506-524).
gatcgacaccagtacaact

SEQ ID NO: 798514 - DNA, 19 bp, Mus musculus
  siRNA target sequence for Lrrc8 (NM_177725.2,547-565).
gaaccgcctgcattggttt

SEQ ID NO: 798515 - DNA, 19 bp, Mus musculus
  siRNA target sequence for Lrrc8 (NM_177725.2,1039-1057).
ctgctacaccgtctactat

SEQ ID NO: 798516 - DNA, 19 bp, Mus musculus
  siRNA target sequence for Lrrc8 (NM_177725.2,1041-1059).
gctacaccgtctactatgt

SEQ ID NO: 798517 - DNA, 19 bp, Mus musculus
  siRNA target sequence for Lrrc8 (NM_177725.2,1199-1217).
ggcctcatctgcatgtaca

SEQ ID NO: 798518 - DNA, 19 bp, Mus musculus
  siRNA target sequence for Lrrc8 (NM_177725.2,1238-1256).
cgctccctcaagaagtact

SEQ ID NO: 798519 - DNA, 19 bp, Mus musculus
  siRNA target sequence for Lrrc8 (NM_177725.2,1959-1977).
gcctcaagaagatggttaa

SEQ ID NO: 798520 - DNA, 19 bp, Mus musculus
  siRNA target sequence for Lrrc8 (NM_177725.2,2344-2362).
cgtcacagccaataggatt

SEQ ID NO: 798521 - DNA, 19 bp, Mus musculus
  siRNA target sequence for Lrrc8 (NM_177725.2,2347-2365).
cacagccaataggattgaa

SEQ ID NO: 798522 - DNA, 19 bp, Mus musculus
  siRNA target sequence for Lrrc8 (NM_177725.2,2523-2541).
gagagtgccccctactcaa

SEQ ID NO: 798523 - DNA, 19 bp, Mus musculus
  siRNA target sequence for A030011P16 (NM_177726.2,104-122).
cgactggcagcattcgaaa

SEQ ID NO: 798524 - DNA, 19 bp, Mus musculus
  siRNA target sequence for A030011P16 (NM_177726.2,105-123).
gactggcagcattcgaaaa

SEQ ID NO: 798525 - DNA, 19 bp, Mus musculus
  siRNA target sequence for A030011P16 (NM_177726.2,107-125).
ctggcagcattcgaaaaat

SEQ ID NO: 798526 - DNA, 19 bp, Mus musculus
  siRNA target sequence for A030011P16 (NM_177726.2,110-128).
gcagcattcgaaaaatggt

SEQ ID NO: 798527 - DNA, 19 bp, Mus musculus
  siRNA target sequence for A030011P16 (NM_177726.2,174-192).
cgaagaggccagttattca

SEQ ID NO: 798528 - DNA, 19 bp, Mus musculus
  siRNA target sequence for A030011P16 (NM_177726.2,326-344).
cacttggacagctgcaaaa

SEQ ID NO: 798529 - DNA, 19 bp, Mus musculus
  siRNA target sequence for A030011P16 (NM_177726.2,377-395).
cctctcgagcccttccaat

SEQ ID NO: 798530 - DNA, 19 bp, Mus musculus
  siRNA target sequence for A030011P16 (NM_177726.2,456-474).
cgaaagctgggccagttta

SEQ ID NO: 798531 - DNA, 19 bp, Mus musculus
  siRNA target sequence for A030011P16 (NM_177726.2,535-553).
ggcaggagtacgtgcttaa

SEQ ID NO: 798532 - DNA, 19 bp, Mus musculus
  siRNA target sequence for A030011P16 (NM_177726.2,707-725).
ccgccatgacccagtctat

SEQ ID NO: 798533 - DNA, 19 bp, Mus musculus
  siRNA target sequence for A030011P16 (NM_177726.2,709-727).
gccatgacccagtctatgt

SEQ ID NO: 798534 - DNA, 19 bp, Mus musculus
  siRNA target sequence for A030011P16 (NM_177726.2,872-890).
gtacaagccagtcaaatat

SEQ ID NO: 798535 - DNA, 19 bp, Mus musculus
  siRNA target sequence for A030011P16 (NM_177726.2,1010-1028).
caaatatgtggactcttat

SEQ ID NO: 798536 - DNA, 19 bp, Mus musculus
  siRNA target sequence for A030011P16 (NM_177726.2,1649-1667).
ccagcgggtccgagtcaat

SEQ ID NO: 798537 - DNA, 19 bp, Mus musculus
  siRNA target sequence for A030011P16 (NM_177726.2,1653-1671).
cgggtccgagtcaatgtga

SEQ ID NO: 798538 - DNA, 19 bp, Mus musculus
  siRNA target sequence for A030011P16 (NM_177726.2,1736-1754).
gaagctggggccactagaa

SEQ ID NO: 798539 - DNA, 19 bp, Mus musculus
  siRNA target sequence for A030011P16 (NM_177726.2,1739-1757).
gctggggccactagaagaa

SEQ ID NO: 798540 - DNA, 19 bp, Mus musculus
  siRNA target sequence for A030011P16 (NM_177726.2,1763-1781).
gatcccagtcacaatatct

SEQ ID NO: 798541 - DNA, 19 bp, Mus musculus
  siRNA target sequence for A030011P16 (NM_177726.2,1767-1785).
ccagtcacaatatcttact

SEQ ID NO: 798542 - DNA, 19 bp, Mus musculus
  siRNA target sequence for A030011P16 (NM_177726.2,2022-2040).
ctccaaggacagctaagta

SEQ ID NO: 798543 - DNA, 19 bp, Mus musculus
  siRNA target sequence for A030011P16 (NM_177726.2,2024-2042).
ccaaggacagctaagtatt

SEQ ID NO: 798544 - DNA, 19 bp, Mus musculus
  siRNA target sequence for A030011P16 (NM_177726.2,2073-2091).
gccttgattcaattcaaca

SEQ ID NO: 798545 - DNA, 19 bp, Mus musculus
  siRNA target sequence for 9430078B04 (NM_177727.2,513-531).
gcagtatgccgcttcctta

SEQ ID NO: 798546 - DNA, 19 bp, Mus musculus
  siRNA target sequence for 9430078B04 (NM_177727.2,532-550).
ggtctagagaagttggtaa

SEQ ID NO: 798547 - DNA, 19 bp, Mus musculus
  siRNA target sequence for 9430078B04 (NM_177727.2,703-721).
caggctgtccagactagtt

SEQ ID NO: 798548 - DNA, 19 bp, Mus musculus
  siRNA target sequence for 9430078B04 (NM_177727.2,716-734).
ctagttctgttgataactt

SEQ ID NO: 798549 - DNA, 19 bp, Mus musculus
  siRNA target sequence for 9430078B04 (NM_177727.2,724-742).
gttgataacttgaatgcta

SEQ ID NO: 798550 - DNA, 19 bp, Mus musculus
  siRNA target sequence for 9430078B04 (NM_177727.2,851-869).
ctcaagggcaggtgaatga

SEQ ID NO: 798551 - DNA, 19 bp, Mus musculus
  siRNA target sequence for 9430078B04 (NM_177727.2,903-921).
caatcggagaacaagaaat

SEQ ID NO: 798552 - DNA, 19 bp, Mus musculus
  siRNA target sequence for 9430078B04 (NM_177727.2,907-925).
cggagaacaagaaatcgtt

SEQ ID NO: 798553 - DNA, 19 bp, Mus musculus
  siRNA target sequence for 9430078B04 (NM_177727.2,941-959).
gtccaactaacgttaagga

SEQ ID NO: 798554 - DNA, 19 bp, Mus musculus
  siRNA target sequence for 9430078B04 (NM_177727.2,943-961).
ccaactaacgttaaggaaa

SEQ ID NO: 798555 - DNA, 19 bp, Mus musculus
  siRNA target sequence for 9430078B04 (NM_177727.2,944-962).
caactaacgttaaggaaaa

SEQ ID NO: 798556 - DNA, 19 bp, Mus musculus
  siRNA target sequence for 9430078B04 (NM_177727.2,952-970).
gttaaggaaaacacaatca

SEQ ID NO: 798557 - DNA, 19 bp, Mus musculus
  siRNA target sequence for 9430078B04 (NM_177727.2,969-987).
caagtttgaaggtgacttt

SEQ ID NO: 798558 - DNA, 19 bp, Mus musculus
  siRNA target sequence for 9430078B04 (NM_177727.2,998-1016).
gtgcaaatgcccagttcaa

SEQ ID NO: 798559 - DNA, 19 bp, Mus musculus
  siRNA target sequence for 9430078B04 (NM_177727.2,1146-1164).
ggggcctaactgttactat

SEQ ID NO: 798560 - DNA, 19 bp, Mus musculus
  siRNA target sequence for 9430078B04 (NM_177727.2,1248-1266).
gctgaacactgagactttt

SEQ ID NO: 798561 - DNA, 19 bp, Mus musculus
  siRNA target sequence for 4930477M19 (NM_177729.2,484-502).
gacctagggggcagcattt

SEQ ID NO: 798562 - DNA, 19 bp, Mus musculus
  siRNA target sequence for 4930477M19 (NM_177729.2,486-504).
cctagggggcagcatttat

SEQ ID NO: 798563 - DNA, 19 bp, Mus musculus
  siRNA target sequence for 4930477M19 (NM_177729.2,515-533).
ctctatctggcctcataga

SEQ ID NO: 798564 - DNA, 19 bp, Mus musculus
  siRNA target sequence for 4930477M19 (NM_177729.2,517-535).
ctatctggcctcatagaga

SEQ ID NO: 798565 - DNA, 19 bp, Mus musculus
  siRNA target sequence for 4930477M19 (NM_177729.2,523-541).
ggcctcatagagattccat

SEQ ID NO: 798566 - DNA, 19 bp, Mus musculus
  siRNA target sequence for 4930477M19 (NM_177729.2,555-573).
catctacctgattaaccaa

SEQ ID NO: 798567 - DNA, 19 bp, Mus musculus
  siRNA target sequence for 4930477M19 (NM_177729.2,564-582).
gattaaccaaagatggttt

SEQ ID NO: 798568 - DNA, 19 bp, Mus musculus
  siRNA target sequence for 4930477M19 (NM_177729.2,733-751).
gcctttaacattgtttaca

SEQ ID NO: 798569 - DNA, 19 bp, Mus musculus
  siRNA target sequence for 4930477M19 (NM_177729.2,774-792).
cactgtcatcagaaacgtt

SEQ ID NO: 798570 - DNA, 19 bp, Mus musculus
  siRNA target sequence for 4930477M19 (NM_177729.2,799-817).
ggagcgtgctccatgttct

SEQ ID NO: 798571 - DNA, 19 bp, Mus musculus
  siRNA target sequence for C130073F10 (NM_177731.2,196-214).
cccctcagtgtttttccta

SEQ ID NO: 798572 - DNA, 19 bp, Mus musculus
  siRNA target sequence for C130073F10 (NM_177731.2,235-253).
cactaagagacgacataaa

SEQ ID NO: 798573 - DNA, 19 bp, Mus musculus
  siRNA target sequence for C130073F10 (NM_177731.2,259-277).
gaagcacctggtagtaact

SEQ ID NO: 798574 - DNA, 19 bp, Mus musculus
  siRNA target sequence for C130073F10 (NM_177731.2,313-331).
gcacagcttcaatttgtat

SEQ ID NO: 798575 - DNA, 19 bp, Mus musculus
  siRNA target sequence for C130073F10 (NM_177731.2,318-336).
gcttcaatttgtataactt

SEQ ID NO: 798576 - DNA, 19 bp, Mus musculus
  siRNA target sequence for C130073F10 (NM_177731.2,354-372).
gagtagattggctgagtaa

SEQ ID NO: 798577 - DNA, 19 bp, Mus musculus
  siRNA target sequence for C130073F10 (NM_177731.2,434-452).
gacttcctggtaataatga

SEQ ID NO: 798578 - DNA, 19 bp, Mus musculus
  siRNA target sequence for C130073F10 (NM_177731.2,436-454).
cttcctggtaataatgaat

SEQ ID NO: 798579 - DNA, 19 bp, Mus musculus
  siRNA target sequence for C130073F10 (NM_177731.2,517-535).
gcagaggaaaccaataact

SEQ ID NO: 798580 - DNA, 19 bp, Mus musculus
  siRNA target sequence for C130073F10 (NM_177731.2,571-589).
caaaccctatcgtgattta

SEQ ID NO: 798581 - DNA, 19 bp, Mus musculus
  siRNA target sequence for C130073F10 (NM_177731.2,576-594).
cctatcgtgatttattgga

SEQ ID NO: 798582 - DNA, 19 bp, Mus musculus
  siRNA target sequence for C130073F10 (NM_177731.2,618-636).
ctacaatgagcgtgaattt

SEQ ID NO: 798583 - DNA, 19 bp, Mus musculus
  siRNA target sequence for AI834976 (NM_177732.2,43-61).
gcatgctccggttaaagga

SEQ ID NO: 798584 - DNA, 19 bp, Mus musculus
  siRNA target sequence for AI834976 (NM_177732.2,206-224).
gtgctcaccaactacagat

SEQ ID NO: 798585 - DNA, 19 bp, Mus musculus
  siRNA target sequence for AI834976 (NM_177732.2,315-333).
ctgacttcgacagaaatgt

SEQ ID NO: 798586 - DNA, 19 bp, Mus musculus
  siRNA target sequence for AI834976 (NM_177732.2,350-368).
ccactacctctactatatt

SEQ ID NO: 798587 - DNA, 19 bp, Mus musculus
  siRNA target sequence for AI834976 (NM_177732.2,351-369).
cactacctctactatattt

SEQ ID NO: 798588 - DNA, 19 bp, Mus musculus
  siRNA target sequence for AI834976 (NM_177732.2,407-425).
ctgaacctgcccatgttta

SEQ ID NO: 798589 - DNA, 19 bp, Mus musculus
  siRNA target sequence for AI834976 (NM_177732.2,412-430).
cctgcccatgtttacagtt

SEQ ID NO: 798590 - DNA, 19 bp, Mus musculus
  siRNA target sequence for AI834976 (NM_177732.2,444-462).
ccattctgtttacaatgtt

SEQ ID NO: 798591 - DNA, 19 bp, Mus musculus
  siRNA target sequence for AI834976 (NM_177732.2,465-483).
ctgaaggcgctctactcaa

SEQ ID NO: 798592 - DNA, 19 bp, Mus musculus
  siRNA target sequence for AI834976 (NM_177732.2,489-507).
ctttctcctggggtattaa

SEQ ID NO: 798593 - DNA, 19 bp, Mus musculus
  siRNA target sequence for AI834976 (NM_177732.2,500-518).
ggtattaagatgactgtat

SEQ ID NO: 798594 - DNA, 19 bp, Mus musculus
  siRNA target sequence for AI834976 (NM_177732.2,565-583).
ctttgatctggaaggatat

SEQ ID NO: 798595 - DNA, 19 bp, Mus musculus
  siRNA target sequence for AI834976 (NM_177732.2,623-641).
ggtgcatacgtgaaacaga

SEQ ID NO: 798596 - DNA, 19 bp, Mus musculus
  siRNA target sequence for AI834976 (NM_177732.2,631-649).
cgtgaaacagaagttagat

SEQ ID NO: 798597 - DNA, 19 bp, Mus musculus
  siRNA target sequence for AI834976 (NM_177732.2,651-669).
caaaagagctgggaaagta

SEQ ID NO: 798598 - DNA, 19 bp, Mus musculus
  siRNA target sequence for AI834976 (NM_177732.2,713-731).
ctggccattgcgtatttca

SEQ ID NO: 798599 - DNA, 19 bp, Mus musculus
  siRNA target sequence for AI834976 (NM_177732.2,715-733).
ggccattgcgtatttcaca

SEQ ID NO: 798600 - DNA, 19 bp, Mus musculus
  siRNA target sequence for AI834976 (NM_177732.2,776-794).
gtctttggtggagattata

SEQ ID NO: 798601 - DNA, 19 bp, Mus musculus
  siRNA target sequence for AI834976 (NM_177732.2,785-803).
ggagattatattttcacat

SEQ ID NO: 798602 - DNA, 19 bp, Mus musculus
  siRNA target sequence for AI834976 (NM_177732.2,817-835).
cggcctaaatatcagtatt

SEQ ID NO: 798603 - DNA, 19 bp, Mus musculus
  siRNA target sequence for AI834976 (NM_177732.2,839-857).
ggaagcctggtgtactctt

SEQ ID NO: 798604 - DNA, 19 bp, Mus musculus
  siRNA target sequence for AI834976 (NM_177732.2,840-858).
gaagcctggtgtactctta

SEQ ID NO: 798605 - DNA, 19 bp, Mus musculus
  siRNA target sequence for AI834976 (NM_177732.2,845-863).
ctggtgtactcttacatca

SEQ ID NO: 798606 - DNA, 19 bp, Mus musculus
  siRNA target sequence for AI834976 (NM_177732.2,848-866).
gtgtactcttacatcactt

SEQ ID NO: 798607 - DNA, 19 bp, Mus musculus
  siRNA target sequence for C130036G08 (NM_177735.2,330-348).
gggactactgcttcatctt

SEQ ID NO: 798608 - DNA, 19 bp, Mus musculus
  siRNA target sequence for C130036G08 (NM_177735.2,437-455).
ccgtgtgccacgctaatca

SEQ ID NO: 798609 - DNA, 19 bp, Mus musculus
  siRNA target sequence for C130036G08 (NM_177735.2,591-609).
cgtctgagtacctggaaat

SEQ ID NO: 798610 - DNA, 19 bp, Mus musculus
  siRNA target sequence for C130036G08 (NM_177735.2,631-649).
gcttccacccctctacaaa

SEQ ID NO: 798611 - DNA, 19 bp, Mus musculus
  siRNA target sequence for C130036G08 (NM_177735.2,640-658).
cctctacaaacctgtgaaa

SEQ ID NO: 798612 - DNA, 19 bp, Mus musculus
  siRNA target sequence for C130036G08 (NM_177735.2,651-669).
ctgtgaaaacttacaatgt

SEQ ID NO: 798613 - DNA, 19 bp, Mus musculus
  siRNA target sequence for BC027309 (NM_177736.2,516-534).
gctcaacgtctccaataat

SEQ ID NO: 798614 - DNA, 19 bp, Mus musculus
  siRNA target sequence for BC027309 (NM_177736.2,690-708).
caacccgctctgtgcaaat

SEQ ID NO: 798615 - DNA, 19 bp, Mus musculus
  siRNA target sequence for BC027309 (NM_177736.2,983-1001).
gtcaggccagcgatagctt

SEQ ID NO: 798616 - DNA, 19 bp, Mus musculus
  siRNA target sequence for AI854703 (NM_177737.2,892-910).
gccttcagcgtcaaacaca

SEQ ID NO: 798617 - DNA, 19 bp, Mus musculus
  siRNA target sequence for AI854703 (NM_177737.2,893-911).
ccttcagcgtcaaacacaa

SEQ ID NO: 798618 - DNA, 19 bp, Mus musculus
  siRNA target sequence for AI854703 (NM_177737.2,1151-1169).
gagcggcgaccctacttct

SEQ ID NO: 798619 - DNA, 19 bp, Mus musculus
  siRNA target sequence for BC048671 (NM_177738.1,627-645).
caagacttatgagagattt

SEQ ID NO: 798620 - DNA, 19 bp, Mus musculus
  siRNA target sequence for BC048671 (NM_177738.1,632-650).
cttatgagagatttgtcaa

SEQ ID NO: 798621 - DNA, 19 bp, Mus musculus
  siRNA target sequence for BC048671 (NM_177738.1,659-677).
cttacaggttacctcattt

SEQ ID NO: 798622 - DNA, 19 bp, Mus musculus
  siRNA target sequence for BC048671 (NM_177738.1,695-713).
catgcccaccatcttgtaa

SEQ ID NO: 798623 - DNA, 19 bp, Mus musculus
  siRNA target sequence for BC048671 (NM_177738.1,857-875).
gtaacctctgggaacttaa

SEQ ID NO: 798624 - DNA, 19 bp, Mus musculus
  siRNA target sequence for BC048671 (NM_177738.1,861-879).
cctctgggaacttaaatta

SEQ ID NO: 798625 - DNA, 19 bp, Mus musculus
  siRNA target sequence for BC048671 (NM_177738.1,888-906).
ccgtttccccacacaagat

SEQ ID NO: 798626 - DNA, 19 bp, Mus musculus
  siRNA target sequence for BC059072 (NM_177740.2,680-698).
ccgagatctgccactatga

SEQ ID NO: 798627 - DNA, 19 bp, Mus musculus
  siRNA target sequence for BC059072 (NM_177740.2,815-833).
ggcctctcatcgacaataa

SEQ ID NO: 798628 - DNA, 19 bp, Mus musculus
  siRNA target sequence for BC059072 (NM_177740.2,816-834).
gcctctcatcgacaataat

SEQ ID NO: 798629 - DNA, 19 bp, Mus musculus
  siRNA target sequence for BC059072 (NM_177740.2,817-835).
cctctcatcgacaataatt

SEQ ID NO: 798630 - DNA, 19 bp, Mus musculus
  siRNA target sequence for BC059072 (NM_177740.2,818-836).
ctctcatcgacaataatta

SEQ ID NO: 798631 - DNA, 19 bp, Mus musculus
  siRNA target sequence for BC059072 (NM_177740.2,843-861).
cgtgcaagtcaccaataca

SEQ ID NO: 798632 - DNA, 19 bp, Mus musculus
  siRNA target sequence for Ppp1r3b (NM_177741.2,159-177).
cgcttcaccttcaagatct

SEQ ID NO: 798633 - DNA, 19 bp, Mus musculus
  siRNA target sequence for Ppp1r3b (NM_177741.2,344-362).
cgatgacccactagatatt

SEQ ID NO: 798634 - DNA, 19 bp, Mus musculus
  siRNA target sequence for Ppp1r3b (NM_177741.2,352-370).
cactagatattccctttaa

SEQ ID NO: 798635 - DNA, 19 bp, Mus musculus
  siRNA target sequence for Ppp1r3b (NM_177741.2,354-372).
ctagatattccctttaaca

SEQ ID NO: 798636 - DNA, 19 bp, Mus musculus
  siRNA target sequence for Ppp1r3b (NM_177741.2,419-437).
cgagagctttgttttggat

SEQ ID NO: 798637 - DNA, 19 bp, Mus musculus
  siRNA target sequence for Ppp1r3b (NM_177741.2,420-438).
gagagctttgttttggatt

SEQ ID NO: 798638 - DNA, 19 bp, Mus musculus
  siRNA target sequence for Ppp1r3b (NM_177741.2,442-460).
cgcagccttccgcagatta

SEQ ID NO: 798639 - DNA, 19 bp, Mus musculus
  siRNA target sequence for Ppp1r3b (NM_177741.2,444-462).
cagccttccgcagattact

SEQ ID NO: 798640 - DNA, 19 bp, Mus musculus
  siRNA target sequence for Ppp1r3b (NM_177741.2,446-464).
gccttccgcagattactta

SEQ ID NO: 798641 - DNA, 19 bp, Mus musculus
  siRNA target sequence for Ppp1r3b (NM_177741.2,448-466).
cttccgcagattacttaga

SEQ ID NO: 798642 - DNA, 19 bp, Mus musculus
  siRNA target sequence for Ppp1r3b (NM_177741.2,451-469).
ccgcagattacttagactt

SEQ ID NO: 798643 - DNA, 19 bp, Mus musculus
  siRNA target sequence for Ppp1r3b (NM_177741.2,494-512).
cgtctgcctagaaaactgt

SEQ ID NO: 798644 - DNA, 19 bp, Mus musculus
  siRNA target sequence for Ppp1r3b (NM_177741.2,688-706).
gcttacccgagaaaattca

SEQ ID NO: 798645 - DNA, 19 bp, Mus musculus
  siRNA target sequence for Ppp1r3b (NM_177741.2,694-712).
ccgagaaaattcagtctta

SEQ ID NO: 798646 - DNA, 19 bp, Mus musculus
  siRNA target sequence for Ppp1r3b (NM_177741.2,698-716).
gaaaattcagtcttacgaa

SEQ ID NO: 798647 - DNA, 19 bp, Mus musculus
  siRNA target sequence for Ppp1r3b (NM_177741.2,811-829).
gatcctctccgggaaagat

SEQ ID NO: 798648 - DNA, 19 bp, Mus musculus
  siRNA target sequence for Ppp1r3b (NM_177741.2,814-832).
cctctccgggaaagattga

SEQ ID NO: 798649 - DNA, 19 bp, Mus musculus
  siRNA target sequence for Ppp1r3b (NM_177741.2,835-853).
cgtacaatggaccagattt

SEQ ID NO: 798650 - DNA, 19 bp, Mus musculus
  siRNA target sequence for Ppp1r3b (NM_177741.2,836-854).
gtacaatggaccagatttt

SEQ ID NO: 798651 - DNA, 19 bp, Mus musculus
  siRNA target sequence for Ppp1r3b (NM_177741.2,878-896).
gagccctcggtgttccttt

SEQ ID NO: 798652 - DNA, 19 bp, Mus musculus
  siRNA target sequence for Ppp1r3b (NM_177741.2,916-934).
ctagttatctgggatatga

SEQ ID NO: 798653 - DNA, 19 bp, Mus musculus
  siRNA target sequence for Ppp1r3b (NM_177741.2,919-937).
gttatctgggatatgaaaa

SEQ ID NO: 798654 - DNA, 19 bp, Mus musculus
  siRNA target sequence for 4933403D14 (NM_177742.2,250-268).
gagcacaacacacctttat

SEQ ID NO: 798655 - DNA, 19 bp, Mus musculus
  siRNA target sequence for 4933403D14 (NM_177742.2,255-273).
caacacacctttatcttgt

SEQ ID NO: 798656 - DNA, 19 bp, Mus musculus
  siRNA target sequence for 4933403D14 (NM_177742.2,290-308).
ctttgggagccccacattt

SEQ ID NO: 798657 - DNA, 19 bp, Mus musculus
  siRNA target sequence for 4933403D14 (NM_177742.2,294-312).
gggagccccacattttcaa

SEQ ID NO: 798658 - DNA, 19 bp, Mus musculus
  siRNA target sequence for 4933403D14 (NM_177742.2,327-345).
ggggagactggctaatatt

SEQ ID NO: 798659 - DNA, 19 bp, Mus musculus
  siRNA target sequence for 4933403D14 (NM_177742.2,435-453).
cgatgagcagagtgtcatt

SEQ ID NO: 798660 - DNA, 19 bp, Mus musculus
  siRNA target sequence for 4933403D14 (NM_177742.2,480-498).
gaacaaggcgtgtttctca

SEQ ID NO: 798661 - DNA, 19 bp, Mus musculus
  siRNA target sequence for 4933403D14 (NM_177742.2,529-547).
ctccaagatatcataaata

SEQ ID NO: 798662 - DNA, 19 bp, Mus musculus
  siRNA target sequence for 4933403D14 (NM_177742.2,598-616).
gaacgagtgatgttgtgta

SEQ ID NO: 798663 - DNA, 19 bp, Mus musculus
  siRNA target sequence for 4933403D14 (NM_177742.2,640-658).
caggtcgttgtgtctgaat

SEQ ID NO: 798664 - DNA, 19 bp, Mus musculus
  siRNA target sequence for 4933403D14 (NM_177742.2,643-661).
gtcgttgtgtctgaataca

SEQ ID NO: 798665 - DNA, 19 bp, Mus musculus
  siRNA target sequence for 4933403D14 (NM_177742.2,823-841).
cagaacttgacgttagaat

SEQ ID NO: 798666 - DNA, 19 bp, Mus musculus
  siRNA target sequence for 4933403D14 (NM_177742.2,825-843).
gaacttgacgttagaatct

SEQ ID NO: 798667 - DNA, 19 bp, Mus musculus
  siRNA target sequence for 4933403D14 (NM_177742.2,862-880).
gccatggatcggtatgagt

SEQ ID NO: 798668 - DNA, 19 bp, Mus musculus
  siRNA target sequence for 4933403D14 (NM_177742.2,947-965).
gggagatgctgcgaaaatt

SEQ ID NO: 798669 - DNA, 19 bp, Mus musculus
  siRNA target sequence for 4933403D14 (NM_177742.2,949-967).
gagatgctgcgaaaattca

SEQ ID NO: 798670 - DNA, 19 bp, Mus musculus
  siRNA target sequence for 4933403D14 (NM_177742.2,1017-1035).
gtccgaagatctgaaaagt

SEQ ID NO: 798671 - DNA, 19 bp, Mus musculus
  siRNA target sequence for 4933403D14 (NM_177742.2,1050-1068).
gaccaggcagcaattacct

SEQ ID NO: 798672 - DNA, 19 bp, Mus musculus
  siRNA target sequence for 4933403D14 (NM_177742.2,1242-1260).
ctcactcataggcttaaaa

SEQ ID NO: 798673 - DNA, 19 bp, Mus musculus
  siRNA target sequence for 4933403D14 (NM_177742.2,1244-1262).
cactcataggcttaaaaat

SEQ ID NO: 798674 - DNA, 19 bp, Mus musculus
  siRNA target sequence for 4933403D14 (NM_177742.2,1295-1313).
ccctgaaagggcaacatgt

SEQ ID NO: 798675 - DNA, 19 bp, Mus musculus
  siRNA target sequence for 4933403D14 (NM_177742.2,1316-1334).
gagaacccgtgcataaagt

SEQ ID NO: 798676 - DNA, 19 bp, Mus musculus
  siRNA target sequence for 4933403D14 (NM_177742.2,1339-1357).
gtgttcttggactatgact

SEQ ID NO: 798677 - DNA, 19 bp, Mus musculus
  siRNA target sequence for 4933403D14 (NM_177742.2,1360-1378).
ggacacatagccttctaca

SEQ ID NO: 798678 - DNA, 19 bp, Mus musculus
  siRNA target sequence for 4933403D14 (NM_177742.2,1361-1379).
gacacatagccttctacaa

SEQ ID NO: 798679 - DNA, 19 bp, Mus musculus
  siRNA target sequence for 4933403D14 (NM_177742.2,1462-1480).
ccgaatgaggggacgaata

SEQ ID NO: 798680 - DNA, 19 bp, Mus musculus
  siRNA target sequence for 4933403D14 (NM_177742.2,1464-1482).
gaatgaggggacgaataca

SEQ ID NO: 798681 - DNA, 19 bp, Mus musculus
  siRNA target sequence for C730027P07 (NM_177743.2,385-403).
ccaggctttgcccagaaat

SEQ ID NO: 798682 - DNA, 19 bp, Mus musculus
  siRNA target sequence for C730027P07 (NM_177743.2,502-520).
ggatcgtgagcttctatta

SEQ ID NO: 798683 - DNA, 19 bp, Mus musculus
  siRNA target sequence for C730027P07 (NM_177743.2,564-582).
ctgggcataatggtttagt

SEQ ID NO: 798684 - DNA, 19 bp, Mus musculus
  siRNA target sequence for C730027P07 (NM_177743.2,629-647).
gagagaagccacgaatctt

SEQ ID NO: 798685 - DNA, 19 bp, Mus musculus
  siRNA target sequence for C730027P07 (NM_177743.2,631-649).
gagaagccacgaatctttt

SEQ ID NO: 798686 - DNA, 19 bp, Mus musculus
  siRNA target sequence for C730027P07 (NM_177743.2,633-651).
gaagccacgaatcttttca

SEQ ID NO: 798687 - DNA, 19 bp, Mus musculus
  siRNA target sequence for C730027P07 (NM_177743.2,882-900).
catggttcatggaacatga

SEQ ID NO: 798688 - DNA, 19 bp, Mus musculus
  siRNA target sequence for C730027P07 (NM_177743.2,1049-1067).
ggtctctgtggcctgatta

SEQ ID NO: 798689 - DNA, 19 bp, Mus musculus
  siRNA target sequence for C730027P07 (NM_177743.2,1050-1068).
gtctctgtggcctgattaa

SEQ ID NO: 798690 - DNA, 19 bp, Mus musculus
  siRNA target sequence for C730027P07 (NM_177743.2,1052-1070).
ctctgtggcctgattaaga

SEQ ID NO: 798691 - DNA, 19 bp, Mus musculus
  siRNA target sequence for C730027P07 (NM_177743.2,1301-1319).
ctggcccgaggctgcaaat

SEQ ID NO: 798692 - DNA, 19 bp, Mus musculus
  siRNA target sequence for C730027P07 (NM_177743.2,1363-1381).
ggcacgtttggctctcttt

SEQ ID NO: 798693 - DNA, 19 bp, Mus musculus
  siRNA target sequence for C730027P07 (NM_177743.2,1367-1385).
cgtttggctctctttgact

SEQ ID NO: 798694 - DNA, 19 bp, Mus musculus
  siRNA target sequence for C730027P07 (NM_177743.2,1463-1481).
gagggtctccgagaaaaat

SEQ ID NO: 798695 - DNA, 19 bp, Mus musculus
  siRNA target sequence for C730027P07 (NM_177743.2,1535-1553).
ccatctcgcttggtgtata

SEQ ID NO: 798696 - DNA, 19 bp, Mus musculus
  siRNA target sequence for C730027P07 (NM_177743.2,1536-1554).
catctcgcttggtgtatat

SEQ ID NO: 798697 - DNA, 19 bp, Mus musculus
  siRNA target sequence for C730027P07 (NM_177743.2,1774-1792).
gatcctgctgagacacatt

SEQ ID NO: 798698 - DNA, 19 bp, Mus musculus
  siRNA target sequence for 8030476J24 (NM_177745.2,1408-1426).
ggagattttcccctttgta

SEQ ID NO: 798699 - DNA, 19 bp, Mus musculus
  siRNA target sequence for 8030476J24 (NM_177745.2,1431-1449).
caagacagtagcaagcttt

SEQ ID NO: 798700 - DNA, 19 bp, Mus musculus
  siRNA target sequence for 8030476J24 (NM_177745.2,1434-1452).
gacagtagcaagctttcaa

SEQ ID NO: 798701 - DNA, 19 bp, Mus musculus
  siRNA target sequence for 8030476J24 (NM_177745.2,1531-1549).
gtatcacagtggaatgtgt

SEQ ID NO: 798702 - DNA, 19 bp, Mus musculus
  siRNA target sequence for 8030476J24 (NM_177745.2,1548-1566).
gttcctgtagatttaccaa

SEQ ID NO: 798703 - DNA, 19 bp, Mus musculus
  siRNA target sequence for 8030476J24 (NM_177745.2,1554-1572).
gtagatttaccaaattgta

SEQ ID NO: 798704 - DNA, 19 bp, Mus musculus
  siRNA target sequence for 8030476J24 (NM_177745.2,1570-1588).
gtattacctcttcatatgt

SEQ ID NO: 798705 - DNA, 19 bp, Mus musculus
  siRNA target sequence for 8030476J24 (NM_177745.2,1610-1628).
gaattgtcagaatattact

SEQ ID NO: 798706 - DNA, 19 bp, Mus musculus
  siRNA target sequence for 8030476J24 (NM_177745.2,1669-1687).
gttatccattcactattta

SEQ ID NO: 798707 - DNA, 19 bp, Mus musculus
  siRNA target sequence for 8030476J24 (NM_177745.2,1704-1722).
gtatatcccttgcaattaa

SEQ ID NO: 798708 - DNA, 19 bp, Mus musculus
  siRNA target sequence for 8030476J24 (NM_177745.2,1770-1788).
cttggagcgtgccatatta

SEQ ID NO: 798709 - DNA, 19 bp, Mus musculus
  siRNA target sequence for 9430062J17 (NM_177746.2,651-669).
gcgtctgtggaaacactat

SEQ ID NO: 798710 - DNA, 19 bp, Mus musculus
  siRNA target sequence for 9430062J17 (NM_177746.2,713-731).
cacctgaccgcaactacat

SEQ ID NO: 798711 - DNA, 19 bp, Mus musculus
  siRNA target sequence for 9430062J17 (NM_177746.2,751-769).
gggctcatggcccattcat

SEQ ID NO: 798712 - DNA, 19 bp, Mus musculus
  siRNA target sequence for 9430062J17 (NM_177746.2,753-771).
gctcatggcccattcatgt

SEQ ID NO: 798713 - DNA, 19 bp, Mus musculus
  siRNA target sequence for 9430062J17 (NM_177746.2,754-772).
ctcatggcccattcatgtt

SEQ ID NO: 798714 - DNA, 19 bp, Mus musculus
  siRNA target sequence for 9430062J17 (NM_177746.2,756-774).
catggcccattcatgtttt

SEQ ID NO: 798715 - DNA, 19 bp, Mus musculus
  siRNA target sequence for 9430062J17 (NM_177746.2,759-777).
ggcccattcatgttttggt

SEQ ID NO: 798716 - DNA, 19 bp, Mus musculus
  siRNA target sequence for 9430062J17 (NM_177746.2,817-835).
cctggtatcactccttata

SEQ ID NO: 798717 - DNA, 19 bp, Mus musculus
  siRNA target sequence for 9430062J17 (NM_177746.2,821-839).
gtatcactccttatatgct

SEQ ID NO: 798718 - DNA, 19 bp, Mus musculus
  siRNA target sequence for 9430062J17 (NM_177746.2,1326-1344).
caaataccacacactctat

SEQ ID NO: 798719 - DNA, 19 bp, Mus musculus
  siRNA target sequence for 9430062J17 (NM_177746.2,1332-1350).
ccacacactctatattgat

SEQ ID NO: 798720 - DNA, 19 bp, Mus musculus
  siRNA target sequence for 9430062J17 (NM_177746.2,1348-1366).
gatgccctacgaaaattgt

SEQ ID NO: 798721 - DNA, 19 bp, Mus musculus
  siRNA target sequence for 9430062J17 (NM_177746.2,1352-1370).
ccctacgaaaattgtttga

SEQ ID NO: 798722 - DNA, 19 bp, Mus musculus
  siRNA target sequence for 9430062J17 (NM_177746.2,1353-1371).
cctacgaaaattgtttgat

SEQ ID NO: 798723 - DNA, 19 bp, Mus musculus
  siRNA target sequence for A230078I01 (NM_177747.2,467-485).
ccatgattatgcaggattt

SEQ ID NO: 798724 - DNA, 19 bp, Mus musculus
  siRNA target sequence for A230078I01 (NM_177747.2,500-518).
ctggtactgcacatatcga

SEQ ID NO: 798725 - DNA, 19 bp, Mus musculus
  siRNA target sequence for A230078I01 (NM_177747.2,516-534).
cgatggagaccatattgta

SEQ ID NO: 798726 - DNA, 19 bp, Mus musculus
  siRNA target sequence for A230078I01 (NM_177747.2,520-538).
ggagaccatattgtagttt

SEQ ID NO: 798727 - DNA, 19 bp, Mus musculus
  siRNA target sequence for A230078I01 (NM_177747.2,525-543).
ccatattgtagtttcagtt

SEQ ID NO: 798728 - DNA, 19 bp, Mus musculus
  siRNA target sequence for A230078I01 (NM_177747.2,602-620).
gccttgcagctgaagttgt

SEQ ID NO: 798729 - DNA, 19 bp, Mus musculus
  siRNA target sequence for A230078I01 (NM_177747.2,622-640).
catgggcctgatattatta

SEQ ID NO: 798730 - DNA, 19 bp, Mus musculus
  siRNA target sequence for A230078I01 (NM_177747.2,695-713).
ccgatgttgccattgaaga

SEQ ID NO: 798731 - DNA, 19 bp, Mus musculus
  siRNA target sequence for A230078I01 (NM_177747.2,727-745).
gatgatggagatcatatct

SEQ ID NO: 798732 - DNA, 19 bp, Mus musculus
  siRNA target sequence for A230078I01 (NM_177747.2,733-751).
ggagatcatatcttaactt

SEQ ID NO: 798733 - DNA, 19 bp, Mus musculus
  siRNA target sequence for A230078I01 (NM_177747.2,777-795).
ggtacctgagcaggttttt

SEQ ID NO: 798734 - DNA, 19 bp, Mus musculus
  siRNA target sequence for A230078I01 (NM_177747.2,789-807).
ggtttttgtggctgatctt

SEQ ID NO: 798735 - DNA, 19 bp, Mus musculus
  siRNA target sequence for A230078I01 (NM_177747.2,832-850).
gaacatgtggtccaagatt

SEQ ID NO: 798736 - DNA, 19 bp, Mus musculus
  siRNA target sequence for A230078I01 (NM_177747.2,950-968).
gttctactgttaccataaa

SEQ ID NO: 798737 - DNA, 19 bp, Mus musculus
  siRNA target sequence for A230078I01 (NM_177747.2,1001-1019).
gcacttccgaagactactt

SEQ ID NO: 798738 - DNA, 19 bp, Mus musculus
  siRNA target sequence for A230078I01 (NM_177747.2,1002-1020).
cacttccgaagactactta

SEQ ID NO: 798739 - DNA, 19 bp, Mus musculus
  siRNA target sequence for A230078I01 (NM_177747.2,1004-1022).
cttccgaagactacttaat

SEQ ID NO: 798740 - DNA, 19 bp, Mus musculus
  siRNA target sequence for A230078I01 (NM_177747.2,1007-1025).
ccgaagactacttaatgat

SEQ ID NO: 798741 - DNA, 19 bp, Mus musculus
  siRNA target sequence for A230078I01 (NM_177747.2,1008-1026).
cgaagactacttaatgata

SEQ ID NO: 798742 - DNA, 19 bp, Mus musculus
  siRNA target sequence for A230078I01 (NM_177747.2,1062-1080).
ggggaacacgccattgaaa

SEQ ID NO: 798743 - DNA, 19 bp, Mus musculus
  siRNA target sequence for A230078I01 (NM_177747.2,1063-1081).
gggaacacgccattgaaaa

SEQ ID NO: 798744 - DNA, 19 bp, Mus musculus
  siRNA target sequence for A230078I01 (NM_177747.2,1064-1082).
ggaacacgccattgaaaat

SEQ ID NO: 798745 - DNA, 19 bp, Mus musculus
  siRNA target sequence for A230078I01 (NM_177747.2,1083-1101).
cgctagcgatggttcacaa

SEQ ID NO: 798746 - DNA, 19 bp, Mus musculus
  siRNA target sequence for A230078I01 (NM_177747.2,1137-1155).
gataaaagtatatatcttt

SEQ ID NO: 798747 - DNA, 19 bp, Mus musculus
  siRNA target sequence for A230078I01 (NM_177747.2,1257-1275).
ccgaatgcagcgagagaaa

SEQ ID NO: 798748 - DNA, 19 bp, Mus musculus
  siRNA target sequence for A230078I01 (NM_177747.2,1258-1276).
cgaatgcagcgagagaaaa

SEQ ID NO: 798749 - DNA, 19 bp, Mus musculus
  siRNA target sequence for A230078I01 (NM_177747.2,1259-1277).
gaatgcagcgagagaaaat

SEQ ID NO: 798750 - DNA, 19 bp, Mus musculus
  siRNA target sequence for A230078I01 (NM_177747.2,1263-1281).
gcagcgagagaaaatggtt

SEQ ID NO: 798751 - DNA, 19 bp, Mus musculus
  siRNA target sequence for A230078I01 (NM_177747.2,1264-1282).
cagcgagagaaaatggttt

SEQ ID NO: 798752 - DNA, 19 bp, Mus musculus
  siRNA target sequence for A230078I01 (NM_177747.2,1267-1285).
cgagagaaaatggtttaca

SEQ ID NO: 798753 - DNA, 19 bp, Mus musculus
  siRNA target sequence for A230078I01 (NM_177747.2,1309-1327).
gaacaggatgatatcagta

SEQ ID NO: 798754 - DNA, 19 bp, Mus musculus
  siRNA target sequence for A230078I01 (NM_177747.2,1337-1355).
gcactgtagtgacttacaa

SEQ ID NO: 798755 - DNA, 19 bp, Mus musculus
  siRNA target sequence for Kirl2 (NM_177748.2,984-1002).
gatcccaaaatacataact

SEQ ID NO: 798756 - DNA, 19 bp, Mus musculus
  siRNA target sequence for 6820428D13 (NM_177752.2,120-138).
ctctccacggagagtgatt

SEQ ID NO: 798757 - DNA, 19 bp, Mus musculus
  siRNA target sequence for 6820428D13 (NM_177752.2,122-140).
ctccacggagagtgattct

SEQ ID NO: 798758 - DNA, 19 bp, Mus musculus
  siRNA target sequence for 6820428D13 (NM_177752.2,151-169).
ccacatttgcctttttgaa

SEQ ID NO: 798759 - DNA, 19 bp, Mus musculus
  siRNA target sequence for 6820428D13 (NM_177752.2,202-220).
ctcagagggcgaagaacat

SEQ ID NO: 798760 - DNA, 19 bp, Mus musculus
  siRNA target sequence for 6820428D13 (NM_177752.2,222-240).
gtggttgtcacctcagatt

SEQ ID NO: 798761 - DNA, 19 bp, Mus musculus
  siRNA target sequence for 6820428D13 (NM_177752.2,375-393).
ctagctgagaggatcacat

SEQ ID NO: 798762 - DNA, 19 bp, Mus musculus
  siRNA target sequence for 6820428D13 (NM_177752.2,383-401).
gaggatcacatgtaagctt

SEQ ID NO: 798763 - DNA, 19 bp, Mus musculus
  siRNA target sequence for 6820428D13 (NM_177752.2,499-517).
ggcaaccatggccaaagat

SEQ ID NO: 798764 - DNA, 19 bp, Mus musculus
  siRNA target sequence for 6820428D13 (NM_177752.2,500-518).
gcaaccatggccaaagatt

SEQ ID NO: 798765 - DNA, 19 bp, Mus musculus
  siRNA target sequence for 6820428D13 (NM_177752.2,531-549).
ctccacggtgccttagaga

SEQ ID NO: 798766 - DNA, 19 bp, Mus musculus
  siRNA target sequence for 6820428D13 (NM_177752.2,627-645).
gagctggcagtctccaaaa

SEQ ID NO: 798767 - DNA, 19 bp, Mus musculus
  siRNA target sequence for 6820428D13 (NM_177752.2,657-675).
cgacctctacccaagaaga

SEQ ID NO: 798768 - DNA, 19 bp, Mus musculus
  siRNA target sequence for 6820428D13 (NM_177752.2,758-776).
cccgaggcagcatgaaaga

SEQ ID NO: 798769 - DNA, 19 bp, Mus musculus
  siRNA target sequence for 6820428D13 (NM_177752.2,851-869).
gctggatccagtgctttta

SEQ ID NO: 798770 - DNA, 19 bp, Mus musculus
  siRNA target sequence for 6820428D13 (NM_177752.2,1055-1073).
gtccatggcctacaactta

SEQ ID NO: 798771 - DNA, 19 bp, Mus musculus
  siRNA target sequence for 6820428D13 (NM_177752.2,1057-1075).
ccatggcctacaacttaaa

SEQ ID NO: 798772 - DNA, 19 bp, Mus musculus
  siRNA target sequence for 6820428D13 (NM_177752.2,1112-1130).
gacccttcggagctttgta

SEQ ID NO: 798773 - DNA, 19 bp, Mus musculus
  siRNA target sequence for 6820428D13 (NM_177752.2,1115-1133).
ccttcggagctttgtaact

SEQ ID NO: 798774 - DNA, 19 bp, Mus musculus
  siRNA target sequence for 6820428D13 (NM_177752.2,1143-1161).
gcaaagacggggaaagcat

SEQ ID NO: 798775 - DNA, 19 bp, Mus musculus
  siRNA target sequence for 6820428D13 (NM_177752.2,1325-1343).
ggtggatctgcagctttat

SEQ ID NO: 798776 - DNA, 19 bp, Mus musculus
  siRNA target sequence for 6820428D13 (NM_177752.2,1328-1346).
ggatctgcagctttataca

SEQ ID NO: 798777 - DNA, 19 bp, Mus musculus
  siRNA target sequence for 6820428D13 (NM_177752.2,1420-1438).
ctgaagcacccttcaagaa

SEQ ID NO: 798778 - DNA, 19 bp, Mus musculus
  siRNA target sequence for 6820428D13 (NM_177752.2,1443-1461).
cgggatcaagtcacctttt

SEQ ID NO: 798779 - DNA, 19 bp, Mus musculus
  siRNA target sequence for 6820428D13 (NM_177752.2,1446-1464).
gatcaagtcaccttttcct

SEQ ID NO: 798780 - DNA, 19 bp, Mus musculus
  siRNA target sequence for 6820428D13 (NM_177752.2,1647-1665).
gagcaagaacgtcagaatt

SEQ ID NO: 798781 - DNA, 19 bp, Mus musculus
  siRNA target sequence for 6820428D13 (NM_177752.2,1661-1679).
gaatttgctggctgacata

SEQ ID NO: 798782 - DNA, 19 bp, Mus musculus
  siRNA target sequence for 6820428D13 (NM_177752.2,1717-1735).
gccgtgttgggccagaatt

SEQ ID NO: 798783 - DNA, 19 bp, Mus musculus
  siRNA target sequence for 6820428D13 (NM_177752.2,1718-1736).
ccgtgttgggccagaatta

SEQ ID NO: 798784 - DNA, 19 bp, Mus musculus
  siRNA target sequence for 6820428D13 (NM_177752.2,1719-1737).
cgtgttgggccagaattat

SEQ ID NO: 798785 - DNA, 19 bp, Mus musculus
  siRNA target sequence for 6820428D13 (NM_177752.2,1722-1740).
gttgggccagaattatcca

SEQ ID NO: 798786 - DNA, 19 bp, Mus musculus
  siRNA target sequence for 6820428D13 (NM_177752.2,1741-1759).
ggcggatctaccttcaaat

SEQ ID NO: 798787 - DNA, 19 bp, Mus musculus
  siRNA target sequence for A930012M17 (NM_177754.2,130-148).
gaagaaaccgatatgatct

SEQ ID NO: 798788 - DNA, 19 bp, Mus musculus
  siRNA target sequence for A930012M17 (NM_177754.2,133-151).
gaaaccgatatgatctctt

SEQ ID NO: 798789 - DNA, 19 bp, Mus musculus
  siRNA target sequence for A930012M17 (NM_177754.2,176-194).
ggtggtgctccattttgct

SEQ ID NO: 798790 - DNA, 19 bp, Mus musculus
  siRNA target sequence for A930012M17 (NM_177754.2,225-243).
gcctgcgtgattgtcttta

SEQ ID NO: 798791 - DNA, 19 bp, Mus musculus
  siRNA target sequence for A930012M17 (NM_177754.2,229-247).
gcgtgattgtctttagatt

SEQ ID NO: 798792 - DNA, 19 bp, Mus musculus
  siRNA target sequence for A930012M17 (NM_177754.2,230-248).
cgtgattgtctttagattt

SEQ ID NO: 798793 - DNA, 19 bp, Mus musculus
  siRNA target sequence for A930012M17 (NM_177754.2,261-279).
gggaagcatgtgacattaa

SEQ ID NO: 798794 - DNA, 19 bp, Mus musculus
  siRNA target sequence for A930012M17 (NM_177754.2,262-280).
ggaagcatgtgacattaaa

SEQ ID NO: 798795 - DNA, 19 bp, Mus musculus
  siRNA target sequence for A930012M17 (NM_177754.2,308-326).
catgtacaagagctttttt

SEQ ID NO: 798796 - DNA, 19 bp, Mus musculus
  siRNA target sequence for A930012M17 (NM_177754.2,383-401).
gtttggtaccgtaaagtat

SEQ ID NO: 798797 - DNA, 19 bp, Mus musculus
  siRNA target sequence for A930012M17 (NM_177754.2,480-498).
gaagactggaacaagatta

SEQ ID NO: 798798 - DNA, 19 bp, Mus musculus
  siRNA target sequence for A930012M17 (NM_177754.2,491-509).
caagattatgcatgattgt

SEQ ID NO: 798799 - DNA, 19 bp, Mus musculus
  siRNA target sequence for A930012M17 (NM_177754.2,512-530).
ggttcaacctccattttgt

SEQ ID NO: 798800 - DNA, 19 bp, Mus musculus
  siRNA target sequence for A930012M17 (NM_177754.2,556-574).
caacagactgtggcaatta

SEQ ID NO: 798801 - DNA, 19 bp, Mus musculus
  siRNA target sequence for A930012M17 (NM_177754.2,576-594).
gcaggggcacttatgtact

SEQ ID NO: 798802 - DNA, 19 bp, Mus musculus
  siRNA target sequence for A930012M17 (NM_177754.2,590-608).
gtacttctgctcattctat

SEQ ID NO: 798803 - DNA, 19 bp, Mus musculus
  siRNA target sequence for A930012M17 (NM_177754.2,645-663).
gccataattgtggagaatt

SEQ ID NO: 798804 - DNA, 19 bp, Mus musculus
  siRNA target sequence for A930012M17 (NM_177754.2,646-664).
ccataattgtggagaattt

SEQ ID NO: 798805 - DNA, 19 bp, Mus musculus
  siRNA target sequence for A930012M17 (NM_177754.2,707-725).
caatgatcttcgccatttt

SEQ ID NO: 798806 - DNA, 19 bp, Mus musculus
  siRNA target sequence for A930012M17 (NM_177754.2,714-732).
cttcgccattttcaaatca

SEQ ID NO: 798807 - DNA, 19 bp, Mus musculus
  siRNA target sequence for A930012M17 (NM_177754.2,717-735).
cgccattttcaaatcatat

SEQ ID NO: 798808 - DNA, 19 bp, Mus musculus
  siRNA target sequence for A930012M17 (NM_177754.2,736-754).
ggaacatggtagatgataa

SEQ ID NO: 798809 - DNA, 19 bp, Mus musculus
  siRNA target sequence for A930012M17 (NM_177754.2,815-833).
gctggaagtggatcttgat

SEQ ID NO: 798810 - DNA, 19 bp, Mus musculus
  siRNA target sequence for A930012M17 (NM_177754.2,979-997).
caagggagcagctagaata

SEQ ID NO: 798811 - DNA, 19 bp, Mus musculus
  siRNA target sequence for A930012M17 (NM_177754.2,1060-1078).
gcatccgggctaaacaaca

SEQ ID NO: 798812 - DNA, 19 bp, Mus musculus
  siRNA target sequence for A930012M17 (NM_177754.2,1336-1354).
cctcagcccccaaaccaat

SEQ ID NO: 798813 - DNA, 19 bp, Mus musculus
  siRNA target sequence for A930012M17 (NM_177754.2,1363-1381).
ctgtatcttcggttaacct

SEQ ID NO: 798814 - DNA, 19 bp, Mus musculus
  siRNA target sequence for 4832420M10 (NM_177757.3,210-228).
gcagaacctgggcattatt

SEQ ID NO: 798815 - DNA, 19 bp, Mus musculus
  siRNA target sequence for 4832420M10 (NM_177757.3,213-231).
gaacctgggcattattcca

SEQ ID NO: 798816 - DNA, 19 bp, Mus musculus
  siRNA target sequence for 4832420M10 (NM_177757.3,236-254).
ctatttcttggctgttcaa

SEQ ID NO: 798817 - DNA, 19 bp, Mus musculus
  siRNA target sequence for 4832420M10 (NM_177757.3,245-263).
ggctgttcaagcttatcaa

SEQ ID NO: 798818 - DNA, 19 bp, Mus musculus
  siRNA target sequence for 4832420M10 (NM_177757.3,518-536).
gcaaccaacaggattgtga

SEQ ID NO: 798819 - DNA, 19 bp, Mus musculus
  siRNA target sequence for 4832420M10 (NM_177757.3,606-624).
cgggaagggtggaatgtct

SEQ ID NO: 798820 - DNA, 19 bp, Mus musculus
  siRNA target sequence for 4832420M10 (NM_177757.3,667-685).
gtgaaagctctcagcaaaa

SEQ ID NO: 798821 - DNA, 19 bp, Mus musculus
  siRNA target sequence for 4832420M10 (NM_177757.3,904-922).
gcgtcgagagtcttaagga

SEQ ID NO: 798822 - DNA, 19 bp, Mus musculus
  siRNA target sequence for 4832420M10 (NM_177757.3,905-923).
cgtcgagagtcttaaggat

SEQ ID NO: 798823 - DNA, 19 bp, Mus musculus
  siRNA target sequence for 4832420M10 (NM_177757.3,1106-1124).
gcgacaccgtcatctacat

SEQ ID NO: 798824 - DNA, 19 bp, Mus musculus
  siRNA target sequence for 4832420M10 (NM_177757.3,1280-1298).
gtctgaagtgcaatacgtt

SEQ ID NO: 798825 - DNA, 19 bp, Mus musculus
  siRNA target sequence for 4832420M10 (NM_177757.3,1337-1355).
gcgaagaacccagtaagtt

SEQ ID NO: 798826 - DNA, 19 bp, Mus musculus
  siRNA target sequence for 4832420M10 (NM_177757.3,1338-1356).
cgaagaacccagtaagttt

SEQ ID NO: 798827 - DNA, 19 bp, Mus musculus
  siRNA target sequence for 4832420M10 (NM_177757.3,1663-1681).
cgggagagtctgaactcat

SEQ ID NO: 798828 - DNA, 19 bp, Mus musculus
  siRNA target sequence for 4832420M10 (NM_177757.3,1746-1764).
caagacctcagagtacaaa

SEQ ID NO: 798829 - DNA, 19 bp, Mus musculus
  siRNA target sequence for 4832420M10 (NM_177757.3,1898-1916).
gcactcccccagttggaat

SEQ ID NO: 798830 - DNA, 19 bp, Mus musculus
  siRNA target sequence for 4832420M10 (NM_177757.3,2000-2018).
gccctccagcggactctaa

SEQ ID NO: 798831 - DNA, 19 bp, Mus musculus
  siRNA target sequence for 4832420M10 (NM_177757.3,2003-2021).
ctccagcggactctaagaa

SEQ ID NO: 798832 - DNA, 19 bp, Mus musculus
  siRNA target sequence for 4832420M10 (NM_177757.3,2140-2158).
cgccctaccagcatcatca

SEQ ID NO: 798833 - DNA, 19 bp, Mus musculus
  siRNA target sequence for 4832420M10 (NM_177757.3,2536-2554).
gacaacctgctcatcttat

SEQ ID NO: 798834 - DNA, 19 bp, Mus musculus
  siRNA target sequence for 4832420M10 (NM_177757.3,2580-2598).
caaagccgctcccatcaaa

SEQ ID NO: 798835 - DNA, 19 bp, Mus musculus
  siRNA target sequence for 4832420M10 (NM_177757.3,2591-2609).
ccatcaaaggctgcaaaat

SEQ ID NO: 798836 - DNA, 19 bp, Mus musculus
  siRNA target sequence for 4832420M10 (NM_177757.3,2838-2856).
ggatccttggcttaaacga

SEQ ID NO: 798837 - DNA, 19 bp, Mus musculus
  siRNA target sequence for 4832420M10 (NM_177757.3,2892-2910).
cgaggaaggggttaagtgt

SEQ ID NO: 798838 - DNA, 19 bp, Mus musculus
  siRNA target sequence for 4832420M10 (NM_177757.3,2927-2945).
ccctgaagactgaaggtaa

SEQ ID NO: 798839 - DNA, 19 bp, Mus musculus
  siRNA target sequence for 4832420M10 (NM_177757.3,3016-3034).
gcctttcaagggactgata

SEQ ID NO: 798840 - DNA, 19 bp, Mus musculus
  siRNA target sequence for 4832420M10 (NM_177757.3,3017-3035).
cctttcaagggactgataa

SEQ ID NO: 798841 - DNA, 19 bp, Mus musculus
  siRNA target sequence for 4832420M10 (NM_177757.3,3099-3117).
ccatgtcaaccgaaaccta

SEQ ID NO: 798842 - DNA, 19 bp, Mus musculus
  siRNA target sequence for 4832420M10 (NM_177757.3,3128-3146).
gcctcccaagggcatttca

SEQ ID NO: 798843 - DNA, 19 bp, Mus musculus
  siRNA target sequence for 4832420M10 (NM_177757.3,3169-3187).
ctggacagcttctaccatt

SEQ ID NO: 798844 - DNA, 19 bp, Mus musculus
  siRNA target sequence for 4832420M10 (NM_177757.3,3329-3347).
ctagcttggaccagaagaa

SEQ ID NO: 798845 - DNA, 19 bp, Mus musculus
  siRNA target sequence for 4832420M10 (NM_177757.3,3436-3454).
gagtccaacggcaagacta

SEQ ID NO: 798846 - DNA, 19 bp, Mus musculus
  siRNA target sequence for 4832420M10 (NM_177757.3,3603-3621).
gcatgccggcaaagatagt

SEQ ID NO: 798847 - DNA, 19 bp, Mus musculus
  siRNA target sequence for 4832420M10 (NM_177757.3,3604-3622).
catgccggcaaagatagta

SEQ ID NO: 798848 - DNA, 19 bp, Mus musculus
  siRNA target sequence for 4832420M10 (NM_177757.3,3710-3728).
ccaaggccagccagtctaa

SEQ ID NO: 798849 - DNA, 19 bp, Mus musculus
  siRNA target sequence for 4832420M10 (NM_177757.3,3715-3733).
gccagccagtctaagatct

SEQ ID NO: 798850 - DNA, 19 bp, Mus musculus
  siRNA target sequence for 4832420M10 (NM_177757.3,3859-3877).
ccgcccagcgggaaacaca

SEQ ID NO: 798851 - DNA, 19 bp, Mus musculus
  siRNA target sequence for 4832420M10 (NM_177757.3,4127-4145).
gcgggcacggtagtgataa

SEQ ID NO: 798852 - DNA, 19 bp, Mus musculus
  siRNA target sequence for 4832420M10 (NM_177757.3,4129-4147).
gggcacggtagtgataaca

SEQ ID NO: 798853 - DNA, 19 bp, Mus musculus
  siRNA target sequence for 4832420M10 (NM_177757.3,4184-4202).
ggaagactgccctcttcta

SEQ ID NO: 798854 - DNA, 19 bp, Mus musculus
  siRNA target sequence for 4832420M10 (NM_177757.3,4479-4497).
ccttggggaaccattcgaa

SEQ ID NO: 798855 - DNA, 19 bp, Mus musculus
  siRNA target sequence for 4832420M10 (NM_177757.3,4480-4498).
cttggggaaccattcgaaa

SEQ ID NO: 798856 - DNA, 19 bp, Mus musculus
  siRNA target sequence for 4832420M10 (NM_177757.3,4483-4501).
ggggaaccattcgaaatta

SEQ ID NO: 798857 - DNA, 19 bp, Mus musculus
  siRNA target sequence for 4832420M10 (NM_177757.3,4484-4502).
gggaaccattcgaaattaa

SEQ ID NO: 798858 - DNA, 19 bp, Mus musculus
  siRNA target sequence for 4832420M10 (NM_177757.3,4584-4602).
gctgaaaatcctagaacat

SEQ ID NO: 798859 - DNA, 19 bp, Mus musculus
  siRNA target sequence for 4832420M10 (NM_177757.3,4695-4713).
caagtggcttcgtgaattt

SEQ ID NO: 798860 - DNA, 19 bp, Mus musculus
  siRNA target sequence for C130098D09 (NM_177759.2,464-482).
cagccaccaaaaagttaca

SEQ ID NO: 798861 - DNA, 19 bp, Mus musculus
  siRNA target sequence for C130098D09 (NM_177759.2,513-531).
cttttccagcgcagatcaa

SEQ ID NO: 798862 - DNA, 19 bp, Mus musculus
  siRNA target sequence for C130098D09 (NM_177759.2,550-568).
gacaagacagcgaagaact

SEQ ID NO: 798863 - DNA, 19 bp, Mus musculus
  siRNA target sequence for C130098D09 (NM_177759.2,557-575).
cagcgaagaactccaaata

SEQ ID NO: 798864 - DNA, 19 bp, Mus musculus
  siRNA target sequence for C130098D09 (NM_177759.2,561-579).
gaagaactccaaatatata

SEQ ID NO: 798865 - DNA, 19 bp, Mus musculus
  siRNA target sequence for C130098D09 (NM_177759.2,649-667).
ggccgaggctacttcaaca

SEQ ID NO: 798866 - DNA, 19 bp, Mus musculus
  siRNA target sequence for C130098D09 (NM_177759.2,1067-1085).
ggcagaggtgggatcactt

SEQ ID NO: 798867 - DNA, 19 bp, Mus musculus
  siRNA target sequence for C130098D09 (NM_177759.2,1092-1110).
ggcacccaagaccaagaaa

SEQ ID NO: 798868 - DNA, 19 bp, Mus musculus
  siRNA target sequence for C130098D09 (NM_177759.2,1093-1111).
gcacccaagaccaagaaat

SEQ ID NO: 798869 - DNA, 19 bp, Mus musculus
  siRNA target sequence for C130098D09 (NM_177759.2,1205-1223).
ctccccagagcagtatgat

SEQ ID NO: 798870 - DNA, 19 bp, Mus musculus
  siRNA target sequence for C130098D09 (NM_177759.2,1207-1225).
ccccagagcagtatgatgt

SEQ ID NO: 798871 - DNA, 19 bp, Mus musculus
  siRNA target sequence for C130098D09 (NM_177759.2,1249-1267).
cccatgggcagcaaagaca

SEQ ID NO: 798872 - DNA, 19 bp, Mus musculus
  siRNA target sequence for C130098D09 (NM_177759.2,1264-1282).
gacatcgaagacaatgagt

SEQ ID NO: 798873 - DNA, 19 bp, Mus musculus
  siRNA target sequence for C130098D09 (NM_177759.2,1406-1424).
gcatcctgtctttagtcaa

SEQ ID NO: 798874 - DNA, 19 bp, Mus musculus
  siRNA target sequence for C130098D09 (NM_177759.2,1411-1429).
ctgtctttagtcaagcaaa

SEQ ID NO: 798875 - DNA, 19 bp, Mus musculus
  siRNA target sequence for C130098D09 (NM_177759.2,1425-1443).
gcaaatcaagagtgagtat

SEQ ID NO: 798876 - DNA, 19 bp, Mus musculus
  siRNA target sequence for C130098D09 (NM_177759.2,1480-1498).
gagcggtccagcactacaa

SEQ ID NO: 798877 - DNA, 19 bp, Mus musculus
  siRNA target sequence for C130098D09 (NM_177759.2,1544-1562).
gagttaaccgtgacatcat

SEQ ID NO: 798878 - DNA, 19 bp, Mus musculus
  siRNA target sequence for C130098D09 (NM_177759.2,1552-1570).
cgtgacatcatctattgca

SEQ ID NO: 798879 - DNA, 19 bp, Mus musculus
  siRNA target sequence for C130098D09 (NM_177759.2,1719-1737).
cttccagaaggacataaca

SEQ ID NO: 798880 - DNA, 19 bp, Mus musculus
  siRNA target sequence for C130098D09 (NM_177759.2,1838-1856).
gcttccggcctgccaaaaa

SEQ ID NO: 798881 - DNA, 19 bp, Mus musculus
  siRNA target sequence for C130098D09 (NM_177759.2,1994-2012).
gagaacacattattcatat

SEQ ID NO: 798882 - DNA, 19 bp, Mus musculus
  siRNA target sequence for 5031404N07 (NM_177760.2,2239-2257).
ctggccaccatctcagatt

SEQ ID NO: 798883 - DNA, 19 bp, Mus musculus
  siRNA target sequence for 5031404N07 (NM_177760.2,2241-2259).
ggccaccatctcagattct

SEQ ID NO: 798884 - DNA, 19 bp, Mus musculus
  siRNA target sequence for 5031404N07 (NM_177760.2,2326-2344).
cttcccaaggagtatggtt

SEQ ID NO: 798885 - DNA, 19 bp, Mus musculus
  siRNA target sequence for 5031404N07 (NM_177760.2,2461-2479).
ccggttttaacagagaaaa

SEQ ID NO: 798886 - DNA, 19 bp, Mus musculus
  siRNA target sequence for 5031404N07 (NM_177760.2,2523-2541).
cttgaagttaccacaagta

SEQ ID NO: 798887 - DNA, 19 bp, Mus musculus
  siRNA target sequence for 5031404N07 (NM_177760.2,2639-2657).
ctcgtaaactggtccattt

SEQ ID NO: 798888 - DNA, 19 bp, Mus musculus
  siRNA target sequence for 5031404N07 (NM_177760.2,2642-2660).
gtaaactggtccatttaca

SEQ ID NO: 798889 - DNA, 19 bp, Mus musculus
  siRNA target sequence for 5031404N07 (NM_177760.2,2685-2703).
gacaatcgacagctacatt

SEQ ID NO: 798890 - DNA, 19 bp, Mus musculus
  siRNA target sequence for 5031404N07 (NM_177760.2,2687-2705).
caatcgacagctacattgt

SEQ ID NO: 798891 - DNA, 19 bp, Mus musculus
  siRNA target sequence for 5031404N07 (NM_177760.2,2713-2731).
gacattaagggcaacatta

SEQ ID NO: 798892 - DNA, 19 bp, Mus musculus
  siRNA target sequence for 5031404N07 (NM_177760.2,2802-2820).
gtccttttcaaaaaccata

SEQ ID NO: 798893 - DNA, 19 bp, Mus musculus
  siRNA target sequence for 5031404N07 (NM_177760.2,2864-2882).
ctctaagaggcgacctttt

SEQ ID NO: 798894 - DNA, 19 bp, Mus musculus
  siRNA target sequence for 5031404N07 (NM_177760.2,2878-2896).
cttttcgttgtcaggaatt

SEQ ID NO: 798895 - DNA, 19 bp, Mus musculus
  siRNA target sequence for 5031404N07 (NM_177760.2,3067-3085).
gagaagaaggtctatctgt

SEQ ID NO: 798896 - DNA, 19 bp, Mus musculus
  siRNA target sequence for 5031404N07 (NM_177760.2,3165-3183).
caccgaggggacagtttat

SEQ ID NO: 798897 - DNA, 19 bp, Mus musculus
  siRNA target sequence for 5031404N07 (NM_177760.2,3171-3189).
ggggacagtttatattctt

SEQ ID NO: 798898 - DNA, 19 bp, Mus musculus
  siRNA target sequence for 5031404N07 (NM_177760.2,3215-3233).
gcccggagcccttcaaata

SEQ ID NO: 798899 - DNA, 19 bp, Mus musculus
  siRNA target sequence for 5031404N07 (NM_177760.2,3220-3238).
gagcccttcaaatattcca

SEQ ID NO: 798900 - DNA, 19 bp, Mus musculus
  siRNA target sequence for 5031404N07 (NM_177760.2,3287-3305).
cgacagccgacgtcaactt

SEQ ID NO: 798901 - DNA, 19 bp, Mus musculus
  siRNA target sequence for 5031404N07 (NM_177760.2,3324-3342).
ggtggtggtcaaaaatgga

SEQ ID NO: 798902 - DNA, 19 bp, Mus musculus
  siRNA target sequence for 5031404N07 (NM_177760.2,3446-3464).
gccttgggaaagacagatt

SEQ ID NO: 798903 - DNA, 19 bp, Mus musculus
  siRNA target sequence for BC022713 (NM_177761.2,166-184).
ctgggctatgtgatttgga

SEQ ID NO: 798904 - DNA, 19 bp, Mus musculus
  siRNA target sequence for C79663 (NM_177762.3,115-133).
ccaggtggcagaccatttt

SEQ ID NO: 798905 - DNA, 19 bp, Mus musculus
  siRNA target sequence for C79663 (NM_177762.3,259-277).
ggctttatccaaatattct

SEQ ID NO: 798906 - DNA, 19 bp, Mus musculus
  siRNA target sequence for C79663 (NM_177762.3,268-286).
caaatattctcgacactat

SEQ ID NO: 798907 - DNA, 19 bp, Mus musculus
  siRNA target sequence for C79663 (NM_177762.3,326-344).
gctgcctacaagattgttt

SEQ ID NO: 798908 - DNA, 19 bp, Mus musculus
  siRNA target sequence for C79663 (NM_177762.3,330-348).
cctacaagattgtttcaca

SEQ ID NO: 798909 - DNA, 19 bp, Mus musculus
  siRNA target sequence for B230384L07 (NM_177763.2,612-630).
ctgctactgtctacaagat

SEQ ID NO: 798910 - DNA, 19 bp, Mus musculus
  siRNA target sequence for B230384L07 (NM_177763.2,665-683).
ctcgtcttgggctgtatga

SEQ ID NO: 798911 - DNA, 19 bp, Mus musculus
  siRNA target sequence for 6030458H05 (NM_177766.2,230-248).
ctgtcccggatcatcatga

SEQ ID NO: 798912 - DNA, 19 bp, Mus musculus
  siRNA target sequence for 6030458H05 (NM_177766.2,456-474).
gctgccacgccgtgttctt

SEQ ID NO: 798913 - DNA, 19 bp, Mus musculus
  siRNA target sequence for 6030458H05 (NM_177766.2,459-477).
gccacgccgtgttcttcat

SEQ ID NO: 798914 - DNA, 19 bp, Mus musculus
  siRNA target sequence for 6030458H05 (NM_177766.2,461-479).
cacgccgtgttcttcatga

SEQ ID NO: 798915 - DNA, 19 bp, Mus musculus
  siRNA target sequence for 6030458H05 (NM_177766.2,879-897).
cccacaatggtgcattgtt

SEQ ID NO: 798916 - DNA, 19 bp, Mus musculus
  siRNA target sequence for 6030458H05 (NM_177766.2,984-1002).
ctctcagccgacatgatgt

SEQ ID NO: 798917 - DNA, 19 bp, Mus musculus
  siRNA target sequence for 6030458H05 (NM_177766.2,986-1004).
ctcagccgacatgatgtat

SEQ ID NO: 798918 - DNA, 19 bp, Mus musculus
  siRNA target sequence for BC038156 (NM_177768.2,1797-1815).
gggaatgatactgttacta

SEQ ID NO: 798919 - DNA, 19 bp, Mus musculus
  siRNA target sequence for BC038156 (NM_177768.2,1809-1827).
gttactaccgggagttaga

SEQ ID NO: 798920 - DNA, 19 bp, Mus musculus
  siRNA target sequence for BC038156 (NM_177768.2,1816-1834).
ccgggagttagactgttat

SEQ ID NO: 798921 - DNA, 19 bp, Mus musculus
  siRNA target sequence for BC038156 (NM_177768.2,1817-1835).
cgggagttagactgttatt

SEQ ID NO: 798922 - DNA, 19 bp, Mus musculus
  siRNA target sequence for BC038156 (NM_177768.2,1818-1836).
gggagttagactgttatta

SEQ ID NO: 798923 - DNA, 19 bp, Mus musculus
  siRNA target sequence for BC038156 (NM_177768.2,1819-1837).
ggagttagactgttattaa

SEQ ID NO: 798924 - DNA, 19 bp, Mus musculus
  siRNA target sequence for BC038156 (NM_177768.2,1820-1838).
gagttagactgttattaat

SEQ ID NO: 798925 - DNA, 19 bp, Mus musculus
  siRNA target sequence for BC038156 (NM_177768.2,1822-1840).
gttagactgttattaatgt

SEQ ID NO: 798926 - DNA, 19 bp, Mus musculus
  siRNA target sequence for BC038156 (NM_177768.2,1860-1878).
gacgctttcccgatatcat

SEQ ID NO: 798927 - DNA, 19 bp, Mus musculus
  siRNA target sequence for BC038156 (NM_177768.2,1862-1880).
cgctttcccgatatcataa

SEQ ID NO: 798928 - DNA, 19 bp, Mus musculus
  siRNA target sequence for BC038156 (NM_177768.2,1863-1881).
gctttcccgatatcataaa

SEQ ID NO: 798929 - DNA, 19 bp, Mus musculus
  siRNA target sequence for BC038156 (NM_177768.2,1864-1882).
ctttcccgatatcataaat

SEQ ID NO: 798930 - DNA, 19 bp, Mus musculus
  siRNA target sequence for BC038156 (NM_177768.2,1946-1964).
gctgctggaaccttgcttt

SEQ ID NO: 798931 - DNA, 19 bp, Mus musculus
  siRNA target sequence for BC038156 (NM_177768.2,1995-2013).
cggcttctgcagcttagta

SEQ ID NO: 798932 - DNA, 19 bp, Mus musculus
  siRNA target sequence for BC038156 (NM_177768.2,1997-2015).
gcttctgcagcttagtagt

SEQ ID NO: 798933 - DNA, 19 bp, Mus musculus
  siRNA target sequence for BC038156 (NM_177768.2,2067-2085).
gtacacaacaaaaaacgta

SEQ ID NO: 798934 - DNA, 19 bp, Mus musculus
  siRNA target sequence for BC038156 (NM_177768.2,2089-2107).
gttcagaccatgattgaaa

SEQ ID NO: 798935 - DNA, 19 bp, Mus musculus
  siRNA target sequence for 4831417L10 (NM_177769.2,789-807).
caatttgcaatattttgca

SEQ ID NO: 798936 - DNA, 19 bp, Mus musculus
  siRNA target sequence for 4831417L10 (NM_177769.2,866-884).
gcaaattcagcaaaataga

SEQ ID NO: 798937 - DNA, 19 bp, Mus musculus
  siRNA target sequence for 4831417L10 (NM_177769.2,917-935).
ggtactcctttgcaattgt

SEQ ID NO: 798938 - DNA, 19 bp, Mus musculus
  siRNA target sequence for 4831417L10 (NM_177769.2,928-946).
gcaattgtgggcatcaata

SEQ ID NO: 798939 - DNA, 19 bp, Mus musculus
  siRNA target sequence for 4831417L10 (NM_177769.2,929-947).
caattgtgggcatcaatat

SEQ ID NO: 798940 - DNA, 19 bp, Mus musculus
  siRNA target sequence for 4831417L10 (NM_177769.2,948-966).
caccgacctggcatataat

SEQ ID NO: 798941 - DNA, 19 bp, Mus musculus
  siRNA target sequence for 4831417L10 (NM_177769.2,950-968).
ccgacctggcatataatct

SEQ ID NO: 798942 - DNA, 19 bp, Mus musculus
  siRNA target sequence for 4831417L10 (NM_177769.2,983-1001).
ctctaaaaacacacttcta

SEQ ID NO: 798943 - DNA, 19 bp, Mus musculus
  siRNA target sequence for 4831417L10 (NM_177769.2,1027-1045).
ctgtctcacttccaacaaa

SEQ ID NO: 798944 - DNA, 19 bp, Mus musculus
  siRNA target sequence for 4831417L10 (NM_177769.2,1029-1047).
gtctcacttccaacaaaca

SEQ ID NO: 798945 - DNA, 19 bp, Mus musculus
  siRNA target sequence for 4831417L10 (NM_177769.2,1031-1049).
ctcacttccaacaaacatt

SEQ ID NO: 798946 - DNA, 19 bp, Mus musculus
  siRNA target sequence for BC043934 (NM_177770.2,910-928).
ctgtgggctgccgattctt

SEQ ID NO: 798947 - DNA, 19 bp, Mus musculus
  siRNA target sequence for BC043934 (NM_177770.2,912-930).
gtgggctgccgattcttgt

SEQ ID NO: 798948 - DNA, 19 bp, Mus musculus
  siRNA target sequence for BC043934 (NM_177770.2,969-987).
gaccgagagactgttttga

SEQ ID NO: 798949 - DNA, 19 bp, Mus musculus
  siRNA target sequence for BC043934 (NM_177770.2,1107-1125).
ctgagactgcagttcacat

SEQ ID NO: 798950 - DNA, 19 bp, Mus musculus
  siRNA target sequence for BC043934 (NM_177770.2,1118-1136).
gttcacatgccgaagacaa

SEQ ID NO: 798951 - DNA, 19 bp, Mus musculus
  siRNA target sequence for 4933408B17 (NM_177773.2,1300-1318).
ctccagtctggatcttgat

SEQ ID NO: 798952 - DNA, 19 bp, Mus musculus
  siRNA target sequence for 4933408B17 (NM_177773.2,1302-1320).
ccagtctggatcttgatgt

SEQ ID NO: 798953 - DNA, 19 bp, Mus musculus
  siRNA target sequence for 4933408B17 (NM_177773.2,1411-1429).
gggtgacgtagaaagtgaa

SEQ ID NO: 798954 - DNA, 19 bp, Mus musculus
  siRNA target sequence for 4933408B17 (NM_177773.2,1486-1504).
ggctcagcaagactcaaaa

SEQ ID NO: 798955 - DNA, 19 bp, Mus musculus
  siRNA target sequence for 4933408B17 (NM_177773.2,1612-1630).
cagctcctcacaactgaat

SEQ ID NO: 798956 - DNA, 19 bp, Mus musculus
  siRNA target sequence for 4933408B17 (NM_177773.2,1638-1656).
gccaaggtgatcctattca

SEQ ID NO: 798957 - DNA, 19 bp, Mus musculus
  siRNA target sequence for 4933408B17 (NM_177773.2,1687-1705).
gcaagtctggaagatgatt

SEQ ID NO: 798958 - DNA, 19 bp, Mus musculus
  siRNA target sequence for 4933408B17 (NM_177773.2,1706-1724).
gccagtcacaggtttagca

SEQ ID NO: 798959 - DNA, 19 bp, Mus musculus
  siRNA target sequence for 4933408B17 (NM_177773.2,1716-1734).
ggtttagcagcccatttct

SEQ ID NO: 798960 - DNA, 19 bp, Mus musculus
  siRNA target sequence for 4933408B17 (NM_177773.2,1717-1735).
gtttagcagcccatttcta

SEQ ID NO: 798961 - DNA, 19 bp, Mus musculus
  siRNA target sequence for 4933408B17 (NM_177773.2,1864-1882).
gatgctgatgttccaaaat

SEQ ID NO: 798962 - DNA, 19 bp, Mus musculus
  siRNA target sequence for 4933408B17 (NM_177773.2,1891-1909).
gtacaacgactctgatcat

SEQ ID NO: 798963 - DNA, 19 bp, Mus musculus
  siRNA target sequence for 4933408B17 (NM_177773.2,1898-1916).
gactctgatcatcacatat

SEQ ID NO: 798964 - DNA, 19 bp, Mus musculus
  siRNA target sequence for Srrp (NM_177774.2,161-179).
gatgggggatcggatctat

SEQ ID NO: 798965 - DNA, 19 bp, Mus musculus
  siRNA target sequence for Srrp (NM_177774.2,381-399).
gcaccaggccaaatgaagt

SEQ ID NO: 798966 - DNA, 19 bp, Mus musculus
  siRNA target sequence for Srrp (NM_177774.2,531-549).
cacaggcggtcttcttaca

SEQ ID NO: 798967 - DNA, 19 bp, Mus musculus
  siRNA target sequence for Srrp (NM_177774.2,541-559).
cttcttacagtcagtctaa

SEQ ID NO: 798968 - DNA, 19 bp, Mus musculus
  siRNA target sequence for Srrp (NM_177774.2,611-629).
gacaccgagaaggaattct

SEQ ID NO: 798969 - DNA, 19 bp, Mus musculus
  siRNA target sequence for Srrp (NM_177774.2,674-692).
caagtcgatggagaaatca

SEQ ID NO: 798970 - DNA, 19 bp, Mus musculus
  siRNA target sequence for Srrp (NM_177774.2,697-715).
cacgctcgcctcaaaagca

SEQ ID NO: 798971 - DNA, 19 bp, Mus musculus
  siRNA target sequence for Srrp (NM_177774.2,862-880).
ctcggagttaccaccataa

SEQ ID NO: 798972 - DNA, 19 bp, Mus musculus
  siRNA target sequence for Srrp (NM_177774.2,864-882).
cggagttaccaccataaaa

SEQ ID NO: 798973 - DNA, 19 bp, Mus musculus
  siRNA target sequence for Srrp (NM_177774.2,865-883).
ggagttaccaccataaaaa

SEQ ID NO: 798974 - DNA, 19 bp, Mus musculus
  siRNA target sequence for D930024E11 (NM_177775.2,509-527).
gagtgggccaataagatca

SEQ ID NO: 798975 - DNA, 19 bp, Mus musculus
  siRNA target sequence for D930024E11 (NM_177775.2,516-534).
ccaataagatcatcataca

SEQ ID NO: 798976 - DNA, 19 bp, Mus musculus
  siRNA target sequence for D930024E11 (NM_177775.2,533-551).
cagatctggccctacctaa

SEQ ID NO: 798977 - DNA, 19 bp, Mus musculus
  siRNA target sequence for D930024E11 (NM_177775.2,543-561).
cctacctaagcatgatcat

SEQ ID NO: 798978 - DNA, 19 bp, Mus musculus
  siRNA target sequence for D930024E11 (NM_177775.2,631-649).
cttcaccaagctctacttt

SEQ ID NO: 798979 - DNA, 19 bp, Mus musculus
  siRNA target sequence for D930024E11 (NM_177775.2,698-716).
cgcaaccggaggaaagtga

SEQ ID NO: 798980 - DNA, 19 bp, Mus musculus
  siRNA target sequence for D930024E11 (NM_177775.2,759-777).
gcgtggaacttcagaagat

SEQ ID NO: 798981 - DNA, 19 bp, Mus musculus
  siRNA target sequence for D930024E11 (NM_177775.2,890-908).
ccgcacctgcagattaact

SEQ ID NO: 798982 - DNA, 19 bp, Mus musculus
  siRNA target sequence for D930024E11 (NM_177775.2,1071-1089).
gtgtgatccgagtccattt

SEQ ID NO: 798983 - DNA, 19 bp, Mus musculus
  siRNA target sequence for D930024E11 (NM_177775.2,1187-1205).
cggagcagaaccatctaca

SEQ ID NO: 798984 - DNA, 19 bp, Mus musculus
  siRNA target sequence for D930024E11 (NM_177775.2,1217-1235).
cccacctggaatgaagtat

SEQ ID NO: 798985 - DNA, 19 bp, Mus musculus
  siRNA target sequence for D930024E11 (NM_177775.2,1451-1469).
gcgctgacggagaatgata

SEQ ID NO: 798986 - DNA, 19 bp, Mus musculus
  siRNA target sequence for D930024E11 (NM_177775.2,1453-1471).
gctgacggagaatgatagt

SEQ ID NO: 798987 - DNA, 19 bp, Mus musculus
  siRNA target sequence for D930024E11 (NM_177775.2,1527-1545).
gaaacccttttgactatct

SEQ ID NO: 798988 - DNA, 19 bp, Mus musculus
  siRNA target sequence for D930024E11 (NM_177775.2,1573-1591).
ctccaggtttgtcaaaaat

SEQ ID NO: 798989 - DNA, 19 bp, Mus musculus
  siRNA target sequence for D930024E11 (NM_177775.2,1575-1593).
ccaggtttgtcaaaaataa

SEQ ID NO: 798990 - DNA, 19 bp, Mus musculus
  siRNA target sequence for D930024E11 (NM_177775.2,1631-1649).
gtaggcaagaagaccttta

SEQ ID NO: 798991 - DNA, 19 bp, Mus musculus
  siRNA target sequence for D930024E11 (NM_177775.2,1642-1660).
gacctttacaagtaagact

SEQ ID NO: 798992 - DNA, 19 bp, Mus musculus
  siRNA target sequence for D930024E11 (NM_177775.2,1935-1953).
ctggacccgacgctctaaa

SEQ ID NO: 798993 - DNA, 19 bp, Mus musculus
  siRNA target sequence for D930024E11 (NM_177775.2,1937-1955).
ggacccgacgctctaaaga

SEQ ID NO: 798994 - DNA, 19 bp, Mus musculus
  siRNA target sequence for D930024E11 (NM_177775.2,1938-1956).
gacccgacgctctaaagaa

SEQ ID NO: 798995 - DNA, 19 bp, Mus musculus
  siRNA target sequence for D930024E11 (NM_177775.2,1983-2001).
ccaccaaccagggttgtaa

SEQ ID NO: 798996 - DNA, 19 bp, Mus musculus
  siRNA target sequence for D930024E11 (NM_177775.2,1984-2002).
caccaaccagggttgtaaa

SEQ ID NO: 798997 - DNA, 19 bp, Mus musculus
  siRNA target sequence for D930024E11 (NM_177775.2,2050-2068).
ccctgcctcttacatcaaa

SEQ ID NO: 798998 - DNA, 19 bp, Mus musculus
  siRNA target sequence for D930024E11 (NM_177775.2,2076-2094).
ccaagagcattgacaatat

SEQ ID NO: 798999 - DNA, 19 bp, Mus musculus
  siRNA target sequence for D930024E11 (NM_177775.2,2415-2433).
gacggctgggtgagattca

SEQ ID NO: 799000 - DNA, 19 bp, Mus musculus
  siRNA target sequence for D930024E11 (NM_177775.2,2435-2453).
ctcacagtgcgctatgtgt

SEQ ID NO: 799001 - DNA, 19 bp, Mus musculus
  siRNA target sequence for D930024E11 (NM_177775.2,2482-2500).
caacggctgcagaaactta

SEQ ID NO: 799002 - DNA, 19 bp, Mus musculus
  siRNA target sequence for D930024E11 (NM_177775.2,2602-2620).
ccctggagcccctattcga

SEQ ID NO: 799003 - DNA, 19 bp, Mus musculus
  siRNA target sequence for D930024E11 (NM_177775.2,2603-2621).
cctggagcccctattcgat

SEQ ID NO: 799004 - DNA, 19 bp, Mus musculus
  siRNA target sequence for D130058I21Rik (NM_177776.2,464-482).
gcccgagcgtggaacatga

SEQ ID NO: 799005 - DNA, 19 bp, Mus musculus
  siRNA target sequence for D130058I21Rik (NM_177776.2,465-483).
cccgagcgtggaacatgat

SEQ ID NO: 799006 - DNA, 19 bp, Mus musculus
  siRNA target sequence for D130058I21Rik (NM_177776.2,467-485).
cgagcgtggaacatgatga

SEQ ID NO: 799007 - DNA, 19 bp, Mus musculus
  siRNA target sequence for D130058I21Rik (NM_177776.2,468-486).
gagcgtggaacatgatgaa

SEQ ID NO: 799008 - DNA, 19 bp, Mus musculus
  siRNA target sequence for D130058I21Rik (NM_177776.2,502-520).
gtgagacgtgcttcaaatt

SEQ ID NO: 799009 - DNA, 19 bp, Mus musculus
  siRNA target sequence for D130058I21Rik (NM_177776.2,504-522).
gagacgtgcttcaaattca

SEQ ID NO: 799010 - DNA, 19 bp, Mus musculus
  siRNA target sequence for D130058I21Rik (NM_177776.2,786-804).
cagtcccactgagaaaagt

SEQ ID NO: 799011 - DNA, 19 bp, Mus musculus
  siRNA target sequence for D130058I21Rik (NM_177776.2,1007-1025).
ctcgaaaggcgctgtttga

SEQ ID NO: 799012 - DNA, 19 bp, Mus musculus
  siRNA target sequence for D130058I21Rik (NM_177776.2,1009-1027).
cgaaaggcgctgtttgaga

SEQ ID NO: 799013 - DNA, 19 bp, Mus musculus
  siRNA target sequence for D130058I21Rik (NM_177776.2,1109-1127).
gtgccagcagcatcaaaca

SEQ ID NO: 799014 - DNA, 19 bp, Mus musculus
  siRNA target sequence for D130058I21Rik (NM_177776.2,1171-1189).
cacgtggacctgcagaatt

SEQ ID NO: 799015 - DNA, 19 bp, Mus musculus
  siRNA target sequence for D130058I21Rik (NM_177776.2,1247-1265).
ctgatgccttcgactacaa

SEQ ID NO: 799016 - DNA, 19 bp, Mus musculus
  siRNA target sequence for D130058I21Rik (NM_177776.2,1337-1355).
gtgagcgcctcattgaagt

SEQ ID NO: 799017 - DNA, 19 bp, Mus musculus
  siRNA target sequence for D130058I21Rik (NM_177776.2,1429-1447).
caccttcgtcgctttgagt

SEQ ID NO: 799018 - DNA, 19 bp, Mus musculus
  siRNA target sequence for D11Wsu47e (NM_177777.3,457-475).
gccgtttaagcgtttaaaa

SEQ ID NO: 799019 - DNA, 19 bp, Mus musculus
  siRNA target sequence for D11Wsu47e (NM_177777.3,478-496).
ccacttgccgcactgtaaa

SEQ ID NO: 799020 - DNA, 19 bp, Mus musculus
  siRNA target sequence for D11Wsu47e (NM_177777.3,508-526).
gtccatatctgctgatcaa

SEQ ID NO: 799021 - DNA, 19 bp, Mus musculus
  siRNA target sequence for D11Wsu47e (NM_177777.3,511-529).
catatctgctgatcaaaat

SEQ ID NO: 799022 - DNA, 19 bp, Mus musculus
  siRNA target sequence for D11Wsu47e (NM_177777.3,551-569).
gcacttgctcaaaaagaga

SEQ ID NO: 799023 - DNA, 19 bp, Mus musculus
  siRNA target sequence for D11Wsu47e (NM_177777.3,616-634).
ggtagaccgtccgaaaaga

SEQ ID NO: 799024 - DNA, 19 bp, Mus musculus
  siRNA target sequence for D11Wsu47e (NM_177777.3,703-721).
gggaagcgtgcggataaca

SEQ ID NO: 799025 - DNA, 19 bp, Mus musculus
  siRNA target sequence for D11Wsu47e (NM_177777.3,704-722).
ggaagcgtgcggataacaa

SEQ ID NO: 799026 - DNA, 19 bp, Mus musculus
  siRNA target sequence for D11Wsu47e (NM_177777.3,705-723).
gaagcgtgcggataacaaa

SEQ ID NO: 799027 - DNA, 19 bp, Mus musculus
  siRNA target sequence for D11Wsu47e (NM_177777.3,709-727).
cgtgcggataacaaaagca

SEQ ID NO: 799028 - DNA, 19 bp, Mus musculus
  siRNA target sequence for D11Wsu47e (NM_177777.3,939-957).
cttttcttgctaatcaaga

SEQ ID NO: 799029 - DNA, 19 bp, Mus musculus
  siRNA target sequence for D11Wsu47e (NM_177777.3,947-965).
gctaatcaagatagaaaat

SEQ ID NO: 799030 - DNA, 19 bp, Mus musculus
  siRNA target sequence for D11Wsu47e (NM_177777.3,999-1017).
cttctgtcgggctcaagtt

SEQ ID NO: 799031 - DNA, 19 bp, Mus musculus
  siRNA target sequence for D11Wsu47e (NM_177777.3,1045-1063).
gcttcgggtaaaattatta

SEQ ID NO: 799032 - DNA, 19 bp, Mus musculus
  siRNA target sequence for D11Wsu47e (NM_177777.3,1050-1068).
gggtaaaattattagatgt

SEQ ID NO: 799033 - DNA, 19 bp, Mus musculus
  siRNA target sequence for D11Wsu47e (NM_177777.3,1106-1124).
cacggggttcagagagtaa

SEQ ID NO: 799034 - DNA, 19 bp, Mus musculus
  siRNA target sequence for D11Wsu47e (NM_177777.3,1108-1126).
cggggttcagagagtaaca

SEQ ID NO: 799035 - DNA, 19 bp, Mus musculus
  siRNA target sequence for D11Wsu47e (NM_177777.3,1418-1436).
cataccgccctcgaactta

SEQ ID NO: 799036 - DNA, 19 bp, Mus musculus
  siRNA target sequence for D11Wsu47e (NM_177777.3,1451-1469).
ccggagtcagggaatcaga

SEQ ID NO: 799037 - DNA, 19 bp, Mus musculus
  siRNA target sequence for D11Wsu47e (NM_177777.3,1502-1520).
gaagagaatgctcaattct

SEQ ID NO: 799038 - DNA, 19 bp, Mus musculus
  siRNA target sequence for D11Wsu47e (NM_177777.3,1560-1578).
gaagtgtgagagatgttct

SEQ ID NO: 799039 - DNA, 19 bp, Mus musculus
  siRNA target sequence for D11Wsu47e (NM_177777.3,1619-1637).
gggcactgcctaatgtcat

SEQ ID NO: 799040 - DNA, 19 bp, Mus musculus
  siRNA target sequence for D11Wsu47e (NM_177777.3,1620-1638).
ggcactgcctaatgtcata

SEQ ID NO: 799041 - DNA, 19 bp, Mus musculus
  siRNA target sequence for D11Wsu47e (NM_177777.3,1622-1640).
cactgcctaatgtcatact

SEQ ID NO: 799042 - DNA, 19 bp, Mus musculus
  siRNA target sequence for D11Wsu47e (NM_177777.3,1633-1651).
gtcatactcagctcagtat

SEQ ID NO: 799043 - DNA, 19 bp, Mus musculus
  siRNA target sequence for D11Wsu47e (NM_177777.3,1644-1662).
ctcagtatcccgttcctaa

SEQ ID NO: 799044 - DNA, 19 bp, Mus musculus
  siRNA target sequence for D11Wsu47e (NM_177777.3,1892-1910).
gaacccctgacgcttacaa

SEQ ID NO: 799045 - DNA, 19 bp, Mus musculus
  siRNA target sequence for D11Wsu47e (NM_177777.3,1895-1913).
cccctgacgcttacaactt

SEQ ID NO: 799046 - DNA, 19 bp, Mus musculus
  siRNA target sequence for D11Wsu47e (NM_177777.3,1915-1933).
cagcctccctctaatgaga

SEQ ID NO: 799047 - DNA, 19 bp, Mus musculus
  siRNA target sequence for D11Wsu47e (NM_177777.3,2011-2029).
gctcttcgctggctacttt

SEQ ID NO: 799048 - DNA, 19 bp, Mus musculus
  siRNA target sequence for D11Wsu47e (NM_177777.3,2012-2030).
ctcttcgctggctacttta

SEQ ID NO: 799049 - DNA, 19 bp, Mus musculus
  siRNA target sequence for D11Wsu47e (NM_177777.3,2046-2064).
ggagcttcaagcatctgaa

SEQ ID NO: 799050 - DNA, 19 bp, Mus musculus
  siRNA target sequence for BC023126 (NM_177778.3,263-281).
ggcacagaaacccaagata

SEQ ID NO: 799051 - DNA, 19 bp, Mus musculus
  siRNA target sequence for BC023126 (NM_177778.3,413-431).
gtacctacggcaactacaa

SEQ ID NO: 799052 - DNA, 19 bp, Mus musculus
  siRNA target sequence for BC023126 (NM_177778.3,426-444).
ctacaagtcctggacttat

SEQ ID NO: 799053 - DNA, 19 bp, Mus musculus
  siRNA target sequence for BC023126 (NM_177778.3,437-455).
ggacttattccttgattct

SEQ ID NO: 799054 - DNA, 19 bp, Mus musculus
  siRNA target sequence for BC023126 (NM_177778.3,475-493).
ccctaatcaagtttgctat

SEQ ID NO: 799055 - DNA, 19 bp, Mus musculus
  siRNA target sequence for BC023126 (NM_177778.3,613-631).
ctgtcaccactctcatgta

SEQ ID NO: 799056 - DNA, 19 bp, Mus musculus
  siRNA target sequence for BC023126 (NM_177778.3,729-747).
cggaacctggcccagatat

SEQ ID NO: 799057 - DNA, 19 bp, Mus musculus
  siRNA target sequence for BC023126 (NM_177778.3,730-748).
ggaacctggcccagatatt

SEQ ID NO: 799058 - DNA, 19 bp, Mus musculus
  siRNA target sequence for BC023126 (NM_177778.3,818-836).
gatcccactgccaaagact

SEQ ID NO: 799059 - DNA, 19 bp, Mus musculus
  siRNA target sequence for A530001H01 (NM_177779.2,53-71).
ccctcggaagccagctatt

SEQ ID NO: 799060 - DNA, 19 bp, Mus musculus
  siRNA target sequence for A530001H01 (NM_177779.2,57-75).
cggaagccagctattcagt

SEQ ID NO: 799061 - DNA, 19 bp, Mus musculus
  siRNA target sequence for A530001H01 (NM_177779.2,480-498).
gatccagcagtttatacaa

SEQ ID NO: 799062 - DNA, 19 bp, Mus musculus
  siRNA target sequence for G630042G04 (NM_177782.2,201-219).
cgacaagcaggacaaactt

SEQ ID NO: 799063 - DNA, 19 bp, Mus musculus
  siRNA target sequence for G630042G04 (NM_177782.2,367-385).
gtccgagggcggaacttga

SEQ ID NO: 799064 - DNA, 19 bp, Mus musculus
  siRNA target sequence for G630042G04 (NM_177782.2,369-387).
ccgagggcggaacttgatt

SEQ ID NO: 799065 - DNA, 19 bp, Mus musculus
  siRNA target sequence for G630042G04 (NM_177782.2,373-391).
gggcggaacttgattcaga

SEQ ID NO: 799066 - DNA, 19 bp, Mus musculus
  siRNA target sequence for G630042G04 (NM_177782.2,374-392).
ggcggaacttgattcagat

SEQ ID NO: 799067 - DNA, 19 bp, Mus musculus
  siRNA target sequence for G630042G04 (NM_177782.2,872-890).
cactgaaggtagtcttcta

SEQ ID NO: 799068 - DNA, 19 bp, Mus musculus
  siRNA target sequence for G630042G04 (NM_177782.2,957-975).
cacggtgctcttcacaaaa

SEQ ID NO: 799069 - DNA, 19 bp, Mus musculus
  siRNA target sequence for G630042G04 (NM_177782.2,1065-1083).
ggtgcagcagtactataga

SEQ ID NO: 799070 - DNA, 19 bp, Mus musculus
  siRNA target sequence for G630042G04 (NM_177782.2,1066-1084).
gtgcagcagtactatagaa

SEQ ID NO: 799071 - DNA, 19 bp, Mus musculus
  siRNA target sequence for G630042G04 (NM_177782.2,1133-1151).
gcgccacagctgtgaagat

SEQ ID NO: 799072 - DNA, 19 bp, Mus musculus
  siRNA target sequence for G630042G04 (NM_177782.2,1158-1176).
gctgattcgtcccatcaat

SEQ ID NO: 799073 - DNA, 19 bp, Mus musculus
  siRNA target sequence for G630042G04 (NM_177782.2,1189-1207).
ctctaccgcctcatgaaga

SEQ ID NO: 799074 - DNA, 19 bp, Mus musculus
  siRNA target sequence for BC049635 (NM_177785.2,69-87).
gtgggatcctcggtatata

SEQ ID NO: 799075 - DNA, 19 bp, Mus musculus
  siRNA target sequence for BC049635 (NM_177785.2,71-89).
gggatcctcggtatataca

SEQ ID NO: 799076 - DNA, 19 bp, Mus musculus
  siRNA target sequence for BC049635 (NM_177785.2,72-90).
ggatcctcggtatatacat

SEQ ID NO: 799077 - DNA, 19 bp, Mus musculus
  siRNA target sequence for BC049635 (NM_177785.2,73-91).
gatcctcggtatatacata

SEQ ID NO: 799078 - DNA, 19 bp, Mus musculus
  siRNA target sequence for BC049635 (NM_177785.2,77-95).
ctcggtatatacatatgga

SEQ ID NO: 799079 - DNA, 19 bp, Mus musculus
  siRNA target sequence for BC049635 (NM_177785.2,97-115).
ctctcttcattattgcatt

SEQ ID NO: 799080 - DNA, 19 bp, Mus musculus
  siRNA target sequence for BC049635 (NM_177785.2,139-157).
gccaccgaggattaaggtt

SEQ ID NO: 799081 - DNA, 19 bp, Mus musculus
  siRNA target sequence for BC049635 (NM_177785.2,178-196).
ccaagtgtttccgaagaat

SEQ ID NO: 799082 - DNA, 19 bp, Mus musculus
  siRNA target sequence for BC049635 (NM_177785.2,211-229).
gtgatagaacgctaagagt

SEQ ID NO: 799083 - DNA, 19 bp, Mus musculus
  siRNA target sequence for BC049635 (NM_177785.2,217-235).
gaacgctaagagttaagaa

SEQ ID NO: 799084 - DNA, 19 bp, Mus musculus
  siRNA target sequence for BC049635 (NM_177785.2,434-452).
gcactcccgcagcttttct

SEQ ID NO: 799085 - DNA, 19 bp, Mus musculus
  siRNA target sequence for BC049635 (NM_177785.2,644-662).
ccaacactccaaagacatt

SEQ ID NO: 799086 - DNA, 19 bp, Mus musculus
  siRNA target sequence for BC049635 (NM_177785.2,680-698).
catgcagtcacaatcaaca

SEQ ID NO: 799087 - DNA, 19 bp, Mus musculus
  siRNA target sequence for BC049635 (NM_177785.2,683-701).
gcagtcacaatcaacagat

SEQ ID NO: 799088 - DNA, 19 bp, Mus musculus
  siRNA target sequence for BC049635 (NM_177785.2,813-831).
gtaagcggtctgtcatctt

SEQ ID NO: 799089 - DNA, 19 bp, Mus musculus
  siRNA target sequence for BC049635 (NM_177785.2,818-836).
cggtctgtcatcttcaagt

SEQ ID NO: 799090 - DNA, 19 bp, Mus musculus
  siRNA target sequence for BC049635 (NM_177785.2,820-838).
gtctgtcatcttcaagtat

SEQ ID NO: 799091 - DNA, 19 bp, Mus musculus
  siRNA target sequence for BC049635 (NM_177785.2,962-980).
ggttaaccctgaagtgaaa

SEQ ID NO: 799092 - DNA, 19 bp, Mus musculus
  siRNA target sequence for AV016528 (NM_177786.2,120-138).
cacaaaggtctacaaactt

SEQ ID NO: 799093 - DNA, 19 bp, Mus musculus
  siRNA target sequence for AV016528 (NM_177786.2,122-140).
caaaggtctacaaacttgt

SEQ ID NO: 799094 - DNA, 19 bp, Mus musculus
  siRNA target sequence for AV016528 (NM_177786.2,181-199).
gtcgtgaaccctaaagtat

SEQ ID NO: 799095 - DNA, 19 bp, Mus musculus
  siRNA target sequence for AV016528 (NM_177786.2,183-201).
cgtgaaccctaaagtattt

SEQ ID NO: 799096 - DNA, 19 bp, Mus musculus
  siRNA target sequence for AV016528 (NM_177786.2,186-204).
gaaccctaaagtatttcct

SEQ ID NO: 799097 - DNA, 19 bp, Mus musculus
  siRNA target sequence for AV016528 (NM_177786.2,236-254).
ctcaccccaatgatgagta

SEQ ID NO: 799098 - DNA, 19 bp, Mus musculus
  siRNA target sequence for AV016528 (NM_177786.2,250-268).
gagtacagtcctttgcttt

SEQ ID NO: 799099 - DNA, 19 bp, Mus musculus
  siRNA target sequence for AV016528 (NM_177786.2,260-278).
ctttgcttttgcaagtcaa

SEQ ID NO: 799100 - DNA, 19 bp, Mus musculus
  siRNA target sequence for AV016528 (NM_177786.2,279-297).
gtcgcttaaggaagattta

SEQ ID NO: 799101 - DNA, 19 bp, Mus musculus
  siRNA target sequence for AV016528 (NM_177786.2,281-299).
cgcttaaggaagatttaca

SEQ ID NO: 799102 - DNA, 19 bp, Mus musculus
  siRNA target sequence for AV016528 (NM_177786.2,321-339).
ccagactgtgactcaagta

SEQ ID NO: 799103 - DNA, 19 bp, Mus musculus
  siRNA target sequence for AV016528 (NM_177786.2,322-340).
cagactgtgactcaagtat

SEQ ID NO: 799104 - DNA, 19 bp, Mus musculus
  siRNA target sequence for AV016528 (NM_177786.2,342-360).
ccggctaagaccttatcaa

SEQ ID NO: 799105 - DNA, 19 bp, Mus musculus
  siRNA target sequence for AV016528 (NM_177786.2,344-362).
ggctaagaccttatcaaga

SEQ ID NO: 799106 - DNA, 19 bp, Mus musculus
  siRNA target sequence for AV016528 (NM_177786.2,345-363).
gctaagaccttatcaagat

SEQ ID NO: 799107 - DNA, 19 bp, Mus musculus
  siRNA target sequence for AV016528 (NM_177786.2,350-368).
gaccttatcaagatgtcta

SEQ ID NO: 799108 - DNA, 19 bp, Mus musculus
  siRNA target sequence for AV016528 (NM_177786.2,398-416).
ctcttgacctggtggaatt

SEQ ID NO: 799109 - DNA, 19 bp, Mus musculus
  siRNA target sequence for AV016528 (NM_177786.2,400-418).
cttgacctggtggaattga

SEQ ID NO: 799110 - DNA, 19 bp, Mus musculus
  siRNA target sequence for AV016528 (NM_177786.2,405-423).
cctggtggaattgactttt

SEQ ID NO: 799111 - DNA, 19 bp, Mus musculus
  siRNA target sequence for AV016528 (NM_177786.2,406-424).
ctggtggaattgactttta

SEQ ID NO: 799112 - DNA, 19 bp, Mus musculus
  siRNA target sequence for AV016528 (NM_177786.2,417-435).
gacttttaaggatcagtat

SEQ ID NO: 799113 - DNA, 19 bp, Mus musculus
  siRNA target sequence for AV016528 (NM_177786.2,419-437).
cttttaaggatcagtatat

SEQ ID NO: 799114 - DNA, 19 bp, Mus musculus
  siRNA target sequence for AV016528 (NM_177786.2,446-464).
gggatatgtggcgactaaa

SEQ ID NO: 799115 - DNA, 19 bp, Mus musculus
  siRNA target sequence for AV016528 (NM_177786.2,448-466).
gatatgtggcgactaaaga

SEQ ID NO: 799116 - DNA, 19 bp, Mus musculus
  siRNA target sequence for AV016528 (NM_177786.2,453-471).
gtggcgactaaagaaaagt

SEQ ID NO: 799117 - DNA, 19 bp, Mus musculus
  siRNA target sequence for AV016528 (NM_177786.2,488-506).
cctatatcactcaaaaagt

SEQ ID NO: 799118 - DNA, 19 bp, Mus musculus
  siRNA target sequence for AV016528 (NM_177786.2,564-582).
catgtgtggttacattagt

SEQ ID NO: 799119 - DNA, 19 bp, Mus musculus
  siRNA target sequence for AV016528 (NM_177786.2,608-626).
ctacgtcggctatggttta

SEQ ID NO: 799120 - DNA, 19 bp, Mus musculus
  siRNA target sequence for AV016528 (NM_177786.2,611-629).
cgtcggctatggtttacat

SEQ ID NO: 799121 - DNA, 19 bp, Mus musculus
  siRNA target sequence for AV016528 (NM_177786.2,615-633).
ggctatggtttacatattt

SEQ ID NO: 799122 - DNA, 19 bp, Mus musculus
  siRNA target sequence for AV016528 (NM_177786.2,708-726).
cctcgccgacctgtttact

SEQ ID NO: 799123 - DNA, 19 bp, Mus musculus
  siRNA target sequence for AV016528 (NM_177786.2,709-727).
ctcgccgacctgtttacta

SEQ ID NO: 799124 - DNA, 19 bp, Mus musculus
  siRNA target sequence for AV016528 (NM_177786.2,711-729).
cgccgacctgtttactaaa

SEQ ID NO: 799125 - DNA, 19 bp, Mus musculus
  siRNA target sequence for AV016528 (NM_177786.2,712-730).
gccgacctgtttactaaat

SEQ ID NO: 799126 - DNA, 19 bp, Mus musculus
  siRNA target sequence for AV016528 (NM_177786.2,779-797).
gaactttctatgatgcaaa

SEQ ID NO: 799127 - DNA, 19 bp, Mus musculus
  siRNA target sequence for AV016528 (NM_177786.2,786-804).
ctatgatgcaaaatctatt

SEQ ID NO: 799128 - DNA, 19 bp, Mus musculus
  siRNA target sequence for AV016528 (NM_177786.2,857-875).
gattctatgaggactttta

SEQ ID NO: 799129 - DNA, 19 bp, Mus musculus
  siRNA target sequence for AV016528 (NM_177786.2,917-935).
cactcctcgtgaccattaa

SEQ ID NO: 799130 - DNA, 19 bp, Mus musculus
  siRNA target sequence for AV016528 (NM_177786.2,919-937).
ctcctcgtgaccattaaaa

SEQ ID NO: 799131 - DNA, 19 bp, Mus musculus
  siRNA target sequence for AV016528 (NM_177786.2,921-939).
cctcgtgaccattaaaaaa

SEQ ID NO: 799132 - DNA, 19 bp, Mus musculus
  siRNA target sequence for AV016528 (NM_177786.2,925-943).
gtgaccattaaaaaactct

SEQ ID NO: 799133 - DNA, 19 bp, Mus musculus
  siRNA target sequence for AV016528 (NM_177786.2,991-1009).
cctcaaggagacaattcta

SEQ ID NO: 799134 - DNA, 19 bp, Mus musculus
  siRNA target sequence for AV016528 (NM_177786.2,1007-1025).
ctacctcagcacaaggaaa

SEQ ID NO: 799135 - DNA, 19 bp, Mus musculus
  siRNA target sequence for AV016528 (NM_177786.2,1071-1089).
ctacatcaaccgaaacttt

SEQ ID NO: 799136 - DNA, 19 bp, Mus musculus
  siRNA target sequence for AV016528 (NM_177786.2,1127-1145).
gggtgggtgtctttgaagt

SEQ ID NO: 799137 - DNA, 19 bp, Mus musculus
  siRNA target sequence for AV016528 (NM_177786.2,1150-1168).
cgcctactcatgatcttga

SEQ ID NO: 799138 - DNA, 19 bp, Mus musculus
  siRNA target sequence for AV016528 (NM_177786.2,1167-1185).
gaccaagcagcggatgatt

SEQ ID NO: 799139 - DNA, 19 bp, Mus musculus
  siRNA target sequence for AV016528 (NM_177786.2,1169-1187).
ccaagcagcggatgattga

SEQ ID NO: 799140 - DNA, 19 bp, Mus musculus
  siRNA target sequence for AV016528 (NM_177786.2,1170-1188).
caagcagcggatgattgat

SEQ ID NO: 799141 - DNA, 19 bp, Mus musculus
  siRNA target sequence for AV016528 (NM_177786.2,1176-1194).
gcggatgattgataatgga

SEQ ID NO: 799142 - DNA, 19 bp, Mus musculus
  siRNA target sequence for AV016528 (NM_177786.2,1178-1196).
ggatgattgataatggaat

SEQ ID NO: 799143 - DNA, 19 bp, Mus musculus
  siRNA target sequence for AV016528 (NM_177786.2,1179-1197).
gatgattgataatggaatt

SEQ ID NO: 799144 - DNA, 19 bp, Mus musculus
  siRNA target sequence for AV016528 (NM_177786.2,1193-1211).
gaattggtgtggacttagt

SEQ ID NO: 799145 - DNA, 19 bp, Mus musculus
  siRNA target sequence for AV016528 (NM_177786.2,1243-1261).
ccattattcaagctacata

SEQ ID NO: 799146 - DNA, 19 bp, Mus musculus
  siRNA target sequence for AV016528 (NM_177786.2,1244-1262).
cattattcaagctacataa

SEQ ID NO: 799147 - DNA, 19 bp, Mus musculus
  siRNA target sequence for AV016528 (NM_177786.2,1283-1301).
ctcgactgggtgatgatta

SEQ ID NO: 799148 - DNA, 19 bp, Mus musculus
  siRNA target sequence for AV016528 (NM_177786.2,1285-1303).
cgactgggtgatgattata

SEQ ID NO: 799149 - DNA, 19 bp, Mus musculus
  siRNA target sequence for AV016528 (NM_177786.2,1286-1304).
gactgggtgatgattataa

SEQ ID NO: 799150 - DNA, 19 bp, Mus musculus
  siRNA target sequence for AV016528 (NM_177786.2,1312-1330).
cactggataaaccatagtt

SEQ ID NO: 799151 - DNA, 19 bp, Mus musculus
  siRNA target sequence for AV016528 (NM_177786.2,1316-1334).
ggataaaccatagtttcta

SEQ ID NO: 799152 - DNA, 19 bp, Mus musculus
  siRNA target sequence for AV016528 (NM_177786.2,1364-1382).
gtttcactccacggataaa

SEQ ID NO: 799153 - DNA, 19 bp, Mus musculus
  siRNA target sequence for AV016528 (NM_177786.2,1368-1386).
cactccacggataaaacta

SEQ ID NO: 799154 - DNA, 19 bp, Mus musculus
  siRNA target sequence for AV016528 (NM_177786.2,1416-1434).
caaaaatggtcgtgataca

SEQ ID NO: 799155 - DNA, 19 bp, Mus musculus
  siRNA target sequence for AV016528 (NM_177786.2,1442-1460).
ggactccaaaggaatctga

SEQ ID NO: 799156 - DNA, 19 bp, Mus musculus
  siRNA target sequence for AV016528 (NM_177786.2,1443-1461).
gactccaaaggaatctgaa

SEQ ID NO: 799157 - DNA, 19 bp, Mus musculus
  siRNA target sequence for AV016528 (NM_177786.2,1467-1485).
ccttcccatccaagtagat

SEQ ID NO: 799158 - DNA, 19 bp, Mus musculus
  siRNA target sequence for AV016528 (NM_177786.2,1472-1490).
ccatccaagtagattatga

SEQ ID NO: 799159 - DNA, 19 bp, Mus musculus
  siRNA target sequence for AV016528 (NM_177786.2,1575-1593).
gaatcacagtcgcaaaagt

SEQ ID NO: 799160 - DNA, 19 bp, Mus musculus
  siRNA target sequence for AV016528 (NM_177786.2,1724-1742).
cccacctgcaccagtatga

SEQ ID NO: 799161 - DNA, 19 bp, Mus musculus
  siRNA target sequence for AV016528 (NM_177786.2,2011-2029).
catcagacccggcaaaaca

SEQ ID NO: 799162 - DNA, 19 bp, Mus musculus
  siRNA target sequence for AV016528 (NM_177786.2,2085-2103).
gttggagttggcataccat

SEQ ID NO: 799163 - DNA, 19 bp, Mus musculus
  siRNA target sequence for AV016528 (NM_177786.2,2183-2201).
ctgtcagcctgcttagcaa

SEQ ID NO: 799164 - DNA, 19 bp, Mus musculus
  siRNA target sequence for AV016528 (NM_177786.2,2393-2411).
cagagggctgctatgatct

SEQ ID NO: 799165 - DNA, 19 bp, Mus musculus
  siRNA target sequence for AV016528 (NM_177786.2,2505-2523).
gcagggttaccaaatcata

SEQ ID NO: 799166 - DNA, 19 bp, Mus musculus
  siRNA target sequence for AV016528 (NM_177786.2,2508-2526).
gggttaccaaatcatagta

SEQ ID NO: 799167 - DNA, 19 bp, Mus musculus
  siRNA target sequence for AV016528 (NM_177786.2,2571-2589).
gagcagtagcccactctat

SEQ ID NO: 799168 - DNA, 19 bp, Mus musculus
  siRNA target sequence for AV016528 (NM_177786.2,2623-2641).
gaggaaggccagtattggt

SEQ ID NO: 799169 - DNA, 19 bp, Mus musculus
  siRNA target sequence for AV016528 (NM_177786.2,2629-2647).
ggccagtattggttaagta

SEQ ID NO: 799170 - DNA, 19 bp, Mus musculus
  siRNA target sequence for AV016528 (NM_177786.2,2630-2648).
gccagtattggttaagtat

SEQ ID NO: 799171 - DNA, 19 bp, Mus musculus
  siRNA target sequence for AV016528 (NM_177786.2,2682-2700).
caagatgatcacagtaact

SEQ ID NO: 799172 - DNA, 19 bp, Mus musculus
  siRNA target sequence for AV016528 (NM_177786.2,2691-2709).
cacagtaactcgttacctt

SEQ ID NO: 799173 - DNA, 19 bp, Mus musculus
  siRNA target sequence for AV016528 (NM_177786.2,2812-2830).
gaacggctcgaggaataca

SEQ ID NO: 799174 - DNA, 19 bp, Mus musculus
  siRNA target sequence for AV016528 (NM_177786.2,2815-2833).
cggctcgaggaatacaagt

SEQ ID NO: 799175 - DNA, 19 bp, Mus musculus
  siRNA target sequence for AV016528 (NM_177786.2,2821-2839).
gaggaatacaagtggaatt

SEQ ID NO: 799176 - DNA, 19 bp, Mus musculus
  siRNA target sequence for AV016528 (NM_177786.2,2834-2852).
ggaattacttagatcagta

SEQ ID NO: 799177 - DNA, 19 bp, Mus musculus
  siRNA target sequence for AV016528 (NM_177786.2,2835-2853).
gaattacttagatcagtat

SEQ ID NO: 799178 - DNA, 19 bp, Mus musculus
  siRNA target sequence for AV016528 (NM_177786.2,2841-2859).
cttagatcagtatatttgt

SEQ ID NO: 799179 - DNA, 19 bp, Mus musculus
  siRNA target sequence for AV016528 (NM_177786.2,2904-2922).
ctggagaacccgattttta

SEQ ID NO: 799180 - DNA, 19 bp, Mus musculus
  siRNA target sequence for AV016528 (NM_177786.2,2906-2924).
ggagaacccgatttttact

SEQ ID NO: 799181 - DNA, 19 bp, Mus musculus
  siRNA target sequence for AV016528 (NM_177786.2,2907-2925).
gagaacccgatttttacta

SEQ ID NO: 799182 - DNA, 19 bp, Mus musculus
  siRNA target sequence for AV016528 (NM_177786.2,2923-2941).
ctactgccagcctgtgtta

SEQ ID NO: 799183 - DNA, 19 bp, Mus musculus
  siRNA target sequence for AV016528 (NM_177786.2,3044-3062).
gctttgtagagggcttaaa

SEQ ID NO: 799184 - DNA, 19 bp, Mus musculus
  siRNA target sequence for AV016528 (NM_177786.2,3081-3099).
ccgctcagaccgcatgatt

SEQ ID NO: 799185 - DNA, 19 bp, Mus musculus
  siRNA target sequence for AV016528 (NM_177786.2,3171-3189).
ccctccagtcggcaagaaa

SEQ ID NO: 799186 - DNA, 19 bp, Mus musculus
  siRNA target sequence for 9830102E05 (NM_177787.2,147-165).
gcttttccagcggagaatt

SEQ ID NO: 799187 - DNA, 19 bp, Mus musculus
  siRNA target sequence for 9830102E05 (NM_177787.2,148-166).
cttttccagcggagaattt

SEQ ID NO: 799188 - DNA, 19 bp, Mus musculus
  siRNA target sequence for 9830102E05 (NM_177787.2,153-171).
ccagcggagaatttctaca

SEQ ID NO: 799189 - DNA, 19 bp, Mus musculus
  siRNA target sequence for 9830102E05 (NM_177787.2,174-192).
ggcgcttatcctgtgttta

SEQ ID NO: 799190 - DNA, 19 bp, Mus musculus
  siRNA target sequence for 9830102E05 (NM_177787.2,175-193).
gcgcttatcctgtgtttaa

SEQ ID NO: 799191 - DNA, 19 bp, Mus musculus
  siRNA target sequence for 9830102E05 (NM_177787.2,178-196).
cttatcctgtgtttaacaa

SEQ ID NO: 799192 - DNA, 19 bp, Mus musculus
  siRNA target sequence for 9830102E05 (NM_177787.2,251-269).
cctgggcacaggaggaata

SEQ ID NO: 799193 - DNA, 19 bp, Mus musculus
  siRNA target sequence for 9830102E05 (NM_177787.2,304-322).
gtcaggaacgggaatcaaa

SEQ ID NO: 799194 - DNA, 19 bp, Mus musculus
  siRNA target sequence for 9830102E05 (NM_177787.2,460-478).
ccgccctggtgactcttta

SEQ ID NO: 799195 - DNA, 19 bp, Mus musculus
  siRNA target sequence for 9830102E05 (NM_177787.2,485-503).
gcactgcgacctgatctat

SEQ ID NO: 799196 - DNA, 19 bp, Mus musculus
  siRNA target sequence for 9830102E05 (NM_177787.2,533-551).
gatcgccagggcgtttgtt

SEQ ID NO: 799197 - DNA, 19 bp, Mus musculus
  siRNA target sequence for 9830102E05 (NM_177787.2,798-816).
ctgccgattgcgctaatga

SEQ ID NO: 799198 - DNA, 19 bp, Mus musculus
  siRNA target sequence for 9830102E05 (NM_177787.2,824-842).
cagccttctgccgttatta

SEQ ID NO: 799199 - DNA, 19 bp, Mus musculus
  siRNA target sequence for 9830102E05 (NM_177787.2,826-844).
gccttctgccgttattaat

SEQ ID NO: 799200 - DNA, 19 bp, Mus musculus
  siRNA target sequence for 9830102E05 (NM_177787.2,827-845).
ccttctgccgttattaatt

SEQ ID NO: 799201 - DNA, 19 bp, Mus musculus
  siRNA target sequence for 9830102E05 (NM_177787.2,849-867).
cctccctttatggattact

SEQ ID NO: 799202 - DNA, 19 bp, Mus musculus
  siRNA target sequence for 9830102E05 (NM_177787.2,850-868).
ctccctttatggattactt

SEQ ID NO: 799203 - DNA, 19 bp, Mus musculus
  siRNA target sequence for 9830102E05 (NM_177787.2,908-926).
cctgtcagcgtgcatgatt

SEQ ID NO: 799204 - DNA, 19 bp, Mus musculus
  siRNA target sequence for 9830102E05 (NM_177787.2,920-938).
catgattgctggtaacatt

SEQ ID NO: 799205 - DNA, 19 bp, Mus musculus
  siRNA target sequence for 9830102E05 (NM_177787.2,971-989).
cctagaaatatacagaaaa

SEQ ID NO: 799206 - DNA, 19 bp, Mus musculus
  siRNA target sequence for 9830102E05 (NM_177787.2,1137-1155).
ggcgcttccatggcttttt

SEQ ID NO: 799207 - DNA, 19 bp, Mus musculus
  siRNA target sequence for 9830102E05 (NM_177787.2,1185-1203).
gcaggggcaatgctgatta

SEQ ID NO: 799208 - DNA, 19 bp, Mus musculus
  siRNA target sequence for 9830102E05 (NM_177787.2,1196-1214).
gctgattaagttgctttat

SEQ ID NO: 799209 - DNA, 19 bp, Mus musculus
  siRNA target sequence for 9830102E05 (NM_177787.2,1220-1238).
ctcggaaggcaattggttt

SEQ ID NO: 799210 - DNA, 19 bp, Mus musculus
  siRNA target sequence for 9830102E05 (NM_177787.2,1234-1252).
ggtttccaaacacattaga

SEQ ID NO: 799211 - DNA, 19 bp, Mus musculus
  siRNA target sequence for 9830102E05 (NM_177787.2,1257-1275).
ggcaatctagagaacttct

SEQ ID NO: 799212 - DNA, 19 bp, Mus musculus
  siRNA target sequence for 9830102E05 (NM_177787.2,1326-1344).
gcttcatggagatattgta

SEQ ID NO: 799213 - DNA, 19 bp, Mus musculus
  siRNA target sequence for 9830102E05 (NM_177787.2,1364-1382).
ccagcgcatccgtggaaat

SEQ ID NO: 799214 - DNA, 19 bp, Mus musculus
  siRNA target sequence for 9830102E05 (NM_177787.2,1367-1385).
gcgcatccgtggaaatcgt

SEQ ID NO: 799215 - DNA, 19 bp, Mus musculus
  siRNA target sequence for 9830102E05 (NM_177787.2,1442-1460).
gggagcatcttcaagtatt

SEQ ID NO: 799216 - DNA, 19 bp, Mus musculus
  siRNA target sequence for C730015A04 (NM_177788.2,400-418).
gtaccgaagccgtgaaata

SEQ ID NO: 799217 - DNA, 19 bp, Mus musculus
  siRNA target sequence for C730015A04 (NM_177788.2,413-431).
gaaatacagcgtaactatt

SEQ ID NO: 799218 - DNA, 19 bp, Mus musculus
  siRNA target sequence for C730015A04 (NM_177788.2,548-566).
caggcccatcacttactaa

SEQ ID NO: 799219 - DNA, 19 bp, Mus musculus
  siRNA target sequence for C730015A04 (NM_177788.2,559-577).
cttactaaagggtttgtct

SEQ ID NO: 799220 - DNA, 19 bp, Mus musculus
  siRNA target sequence for C730015A04 (NM_177788.2,612-630).
gtgttgtccagcacaaaca

SEQ ID NO: 799221 - DNA, 19 bp, Mus musculus
  siRNA target sequence for C730015A04 (NM_177788.2,717-735).
gactcttggaggcatatgt

SEQ ID NO: 799222 - DNA, 19 bp, Mus musculus
  siRNA target sequence for C730015A04 (NM_177788.2,970-988).
ctggcggcagcgatgtctt

SEQ ID NO: 799223 - DNA, 19 bp, Mus musculus
  siRNA target sequence for C730015A04 (NM_177788.2,1476-1494).
cagatccatccggtttcta

SEQ ID NO: 799224 - DNA, 19 bp, Mus musculus
  siRNA target sequence for C730015A04 (NM_177788.2,1607-1625).
ctgggcgcattcttgagaa

SEQ ID NO: 799225 - DNA, 19 bp, Mus musculus
  siRNA target sequence for C730015A04 (NM_177788.2,1636-1654).
cgctctgatccgattctct

SEQ ID NO: 799226 - DNA, 19 bp, Mus musculus
  siRNA target sequence for C730015A04 (NM_177788.2,1675-1693).
cgccgtggcccctcactat

SEQ ID NO: 799227 - DNA, 19 bp, Mus musculus
  siRNA target sequence for C730015A04 (NM_177788.2,1677-1695).
ccgtggcccctcactatgt

SEQ ID NO: 799228 - DNA, 19 bp, Mus musculus
  siRNA target sequence for C730015A04 (NM_177788.2,1802-1820).
gcgctggacgacgtacaaa

SEQ ID NO: 799229 - DNA, 19 bp, Mus musculus
  siRNA target sequence for C730015A04 (NM_177788.2,2012-2030).
cgaaccgtggtgttacaat

SEQ ID NO: 799230 - DNA, 19 bp, Mus musculus
  siRNA target sequence for C730015A04 (NM_177788.2,2013-2031).
gaaccgtggtgttacaata

SEQ ID NO: 799231 - DNA, 19 bp, Mus musculus
  siRNA target sequence for C730015A04 (NM_177788.2,2016-2034).
ccgtggtgttacaatacct

SEQ ID NO: 799232 - DNA, 19 bp, Mus musculus
  siRNA target sequence for C730015A04 (NM_177788.2,2017-2035).
cgtggtgttacaataccta

SEQ ID NO: 799233 - DNA, 19 bp, Mus musculus
  siRNA target sequence for BC025105 (NM_177789.2,185-203).
gattcagtgcatctatgat

SEQ ID NO: 799234 - DNA, 19 bp, Mus musculus
  siRNA target sequence for BC025105 (NM_177789.2,357-375).
gtgtccctccaaataaata

SEQ ID NO: 799235 - DNA, 19 bp, Mus musculus
  siRNA target sequence for BC025105 (NM_177789.2,386-404).
ggatgacaggaatcactat

SEQ ID NO: 799236 - DNA, 19 bp, Mus musculus
  siRNA target sequence for BC025105 (NM_177789.2,387-405).
gatgacaggaatcactata

SEQ ID NO: 799237 - DNA, 19 bp, Mus musculus
  siRNA target sequence for BC025105 (NM_177789.2,429-447).
cctgatggaaaccaagtaa

SEQ ID NO: 799238 - DNA, 19 bp, Mus musculus
  siRNA target sequence for BC025105 (NM_177789.2,430-448).
ctgatggaaaccaagtaat

SEQ ID NO: 799239 - DNA, 19 bp, Mus musculus
  siRNA target sequence for BC025105 (NM_177789.2,444-462).
gtaataagagataagatca

SEQ ID NO: 799240 - DNA, 19 bp, Mus musculus
  siRNA target sequence for BC025105 (NM_177789.2,468-486).
ctccgtgttcggaaatata

SEQ ID NO: 799241 - DNA, 19 bp, Mus musculus
  siRNA target sequence for BC025105 (NM_177789.2,470-488).
ccgtgttcggaaatataat

SEQ ID NO: 799242 - DNA, 19 bp, Mus musculus
  siRNA target sequence for BC025105 (NM_177789.2,532-550).
ctttggaagcaacaactat

SEQ ID NO: 799243 - DNA, 19 bp, Mus musculus
  siRNA target sequence for BC025105 (NM_177789.2,563-581).
ctctgacttgaccactaat

SEQ ID NO: 799244 - DNA, 19 bp, Mus musculus
  siRNA target sequence for BC025105 (NM_177789.2,577-595).
ctaatgggactggaaaact

SEQ ID NO: 799245 - DNA, 19 bp, Mus musculus
  siRNA target sequence for BC025105 (NM_177789.2,630-648).
ccaatctttgccataatct

SEQ ID NO: 799246 - DNA, 19 bp, Mus musculus
  siRNA target sequence for BC025105 (NM_177789.2,656-674).
ctccctttgctgcatagta

SEQ ID NO: 799247 - DNA, 19 bp, Mus musculus
  siRNA target sequence for BC025105 (NM_177789.2,672-690).
gtagctgtcaccatacctt

SEQ ID NO: 799248 - DNA, 19 bp, Mus musculus
  siRNA target sequence for BC025105 (NM_177789.2,676-694).
ctgtcaccataccttatat

SEQ ID NO: 799249 - DNA, 19 bp, Mus musculus
  siRNA target sequence for BC025105 (NM_177789.2,712-730).
cattccaacaagagtatgt

SEQ ID NO: 799250 - DNA, 19 bp, Mus musculus
  siRNA target sequence for BC025105 (NM_177789.2,816-834).
gattcccaggctctgatta

SEQ ID NO: 799251 - DNA, 19 bp, Mus musculus
  siRNA target sequence for BC025105 (NM_177789.2,820-838).
cccaggctctgattagtga

SEQ ID NO: 799252 - DNA, 19 bp, Mus musculus
  siRNA target sequence for BC025105 (NM_177789.2,860-878).
cagccaggagtaccaaata

SEQ ID NO: 799253 - DNA, 19 bp, Mus musculus
  siRNA target sequence for BC025105 (NM_177789.2,864-882).
caggagtaccaaataacca

SEQ ID NO: 799254 - DNA, 19 bp, Mus musculus
  siRNA target sequence for BC025105 (NM_177789.2,884-902).
cagatcaacaatgtctatt

SEQ ID NO: 799255 - DNA, 19 bp, Mus musculus
  siRNA target sequence for 9230106D20 (NM_177792.2,634-652).
ctgccacaggtggctattt

SEQ ID NO: 799256 - DNA, 19 bp, Mus musculus
  siRNA target sequence for 9230106D20 (NM_177792.2,659-677).
cttcttccatggcagtaat

SEQ ID NO: 799257 - DNA, 19 bp, Mus musculus
  siRNA target sequence for 9230106D20 (NM_177792.2,825-843).
cattatcagcacttggttt

SEQ ID NO: 799258 - DNA, 19 bp, Mus musculus
  siRNA target sequence for 9230106D20 (NM_177792.2,858-876).
ctctccggtagcctctttt

SEQ ID NO: 799259 - DNA, 19 bp, Mus musculus
  siRNA target sequence for 9230106D20 (NM_177792.2,864-882).
ggtagcctcttttcagtta

SEQ ID NO: 799260 - DNA, 19 bp, Mus musculus
  siRNA target sequence for 9230106D20 (NM_177792.2,897-915).
caaacatgaacccttatct

SEQ ID NO: 799261 - DNA, 19 bp, Mus musculus
  siRNA target sequence for 9230106D20 (NM_177792.2,908-926).
ccttatctgcagacaataa

SEQ ID NO: 799262 - DNA, 19 bp, Mus musculus
  siRNA target sequence for 9230106D20 (NM_177792.2,948-966).
gagggagctgaagactatt

SEQ ID NO: 799263 - DNA, 19 bp, Mus musculus
  siRNA target sequence for 9230106D20 (NM_177792.2,960-978).
gactattggccgcattagt

SEQ ID NO: 799264 - DNA, 19 bp, Mus musculus
  siRNA target sequence for 9230106D20 (NM_177792.2,1106-1124).
gcaagtccagagacaatga

SEQ ID NO: 799265 - DNA, 19 bp, Mus musculus
  siRNA target sequence for 9030224M15 (NM_177793.2,428-446).
ctcggtccctggatgaaga

SEQ ID NO: 799266 - DNA, 19 bp, Mus musculus
  siRNA target sequence for 9030224M15 (NM_177793.2,548-566).
ggctggtgtgtcttgatga

SEQ ID NO: 799267 - DNA, 19 bp, Mus musculus
  siRNA target sequence for 9030224M15 (NM_177793.2,601-619).
cggtgccgcctctactctt

SEQ ID NO: 799268 - DNA, 19 bp, Mus musculus
  siRNA target sequence for 9030224M15 (NM_177793.2,671-689).
gatgtgaagtgcatcgttt

SEQ ID NO: 799269 - DNA, 19 bp, Mus musculus
  siRNA target sequence for 9030224M15 (NM_177793.2,742-760).
caccgcttgtccatcgatt

SEQ ID NO: 799270 - DNA, 19 bp, Mus musculus
  siRNA target sequence for 9030224M15 (NM_177793.2,798-816).
gcacggcaacaccagaaaa

SEQ ID NO: 799271 - DNA, 19 bp, Mus musculus
  siRNA target sequence for 9030224M15 (NM_177793.2,942-960).
gctcgtcttcgagattcat

SEQ ID NO: 799272 - DNA, 19 bp, Mus musculus
  siRNA target sequence for 9030224M15 (NM_177793.2,945-963).
cgtcttcgagattcatctt

SEQ ID NO: 799273 - DNA, 19 bp, Mus musculus
  siRNA target sequence for 9030224M15 (NM_177793.2,1000-1018).
ggcgtggtgcgcttttggt

SEQ ID NO: 799274 - DNA, 19 bp, Mus musculus
  siRNA target sequence for 9030224M15 (NM_177793.2,1001-1019).
gcgtggtgcgcttttggta

SEQ ID NO: 799275 - DNA, 19 bp, Mus musculus
  siRNA target sequence for 9030224M15 (NM_177793.2,1043-1061).
ggaagcacttccgactttt

SEQ ID NO: 799276 - DNA, 19 bp, Mus musculus
  siRNA target sequence for 9030224M15 (NM_177793.2,1044-1062).
gaagcacttccgacttttt

SEQ ID NO: 799277 - DNA, 19 bp, Mus musculus
  siRNA target sequence for 9030224M15 (NM_177793.2,1048-1066).
cacttccgactttttcaca

SEQ ID NO: 799278 - DNA, 19 bp, Mus musculus
  siRNA target sequence for 9030224M15 (NM_177793.2,1054-1072).
cgactttttcacacctata

SEQ ID NO: 799279 - DNA, 19 bp, Mus musculus
  siRNA target sequence for 9030224M15 (NM_177793.2,1055-1073).
gactttttcacacctataa

SEQ ID NO: 799280 - DNA, 19 bp, Mus musculus
  siRNA target sequence for 9030224M15 (NM_177793.2,1116-1134).
caacgctagcagctgttat

SEQ ID NO: 799281 - DNA, 19 bp, Mus musculus
  siRNA target sequence for AI195372 (NM_177794.2,283-301).
gtgctcaccctcaagttca

SEQ ID NO: 799282 - DNA, 19 bp, Mus musculus
  siRNA target sequence for AI195372 (NM_177794.2,303-321).
gcgcggacgaggctacaaa

SEQ ID NO: 799283 - DNA, 19 bp, Mus musculus
  siRNA target sequence for AI195372 (NM_177794.2,365-383).
cgtccctgtggcttcttga

SEQ ID NO: 799284 - DNA, 19 bp, Mus musculus
  siRNA target sequence for AI195372 (NM_177794.2,388-406).
caccatggaaaccagtatt

SEQ ID NO: 799285 - DNA, 19 bp, Mus musculus
  siRNA target sequence for AI195372 (NM_177794.2,391-409).
catggaaaccagtattgca

SEQ ID NO: 799286 - DNA, 19 bp, Mus musculus
  siRNA target sequence for AI195372 (NM_177794.2,410-428).
gcacccaatctgagagaat

SEQ ID NO: 799287 - DNA, 19 bp, Mus musculus
  siRNA target sequence for AI195372 (NM_177794.2,488-506).
ccaatggaatggggaatat

SEQ ID NO: 799288 - DNA, 19 bp, Mus musculus
  siRNA target sequence for AI195372 (NM_177794.2,523-541).
ggctttgtcgacaatttat

SEQ ID NO: 799289 - DNA, 19 bp, Mus musculus
  siRNA target sequence for AI195372 (NM_177794.2,532-550).
gacaatttatccatggtat

SEQ ID NO: 799290 - DNA, 19 bp, Mus musculus
  siRNA target sequence for AI195372 (NM_177794.2,586-604).
ctcctgctaatattaatca

SEQ ID NO: 799291 - DNA, 19 bp, Mus musculus
  siRNA target sequence for AI195372 (NM_177794.2,588-606).
cctgctaatattaatcatt

SEQ ID NO: 799292 - DNA, 19 bp, Mus musculus
  siRNA target sequence for AI195372 (NM_177794.2,691-709).
gacatactggagttcacta

SEQ ID NO: 799293 - DNA, 19 bp, Mus musculus
  siRNA target sequence for AI195372 (NM_177794.2,880-898).
cagtacagtgcggatctat

SEQ ID NO: 799294 - DNA, 19 bp, Mus musculus
  siRNA target sequence for AI195372 (NM_177794.2,949-967).
cgcctcgtcctgatgatct

SEQ ID NO: 799295 - DNA, 19 bp, Mus musculus
  siRNA target sequence for AI195372 (NM_177794.2,950-968).
gcctcgtcctgatgatcta

SEQ ID NO: 799296 - DNA, 19 bp, Mus musculus
  siRNA target sequence for AI195372 (NM_177794.2,952-970).
ctcgtcctgatgatctact

SEQ ID NO: 799297 - DNA, 19 bp, Mus musculus
  siRNA target sequence for AI195372 (NM_177794.2,957-975).
cctgatgatctactttaaa

SEQ ID NO: 799298 - DNA, 19 bp, Mus musculus
  siRNA target sequence for AI195372 (NM_177794.2,1071-1089).
ggacttcatgcgagatcat

SEQ ID NO: 799299 - DNA, 19 bp, Mus musculus
  siRNA target sequence for 9630020C08 (NM_177797.2,856-874).
cgatttattcggaatctca

SEQ ID NO: 799300 - DNA, 19 bp, Mus musculus
  siRNA target sequence for A930010I02 (NM_177799.2,270-288).
cctgggttcacgaagagat

SEQ ID NO: 799301 - DNA, 19 bp, Mus musculus
  siRNA target sequence for A930010I02 (NM_177799.2,301-319).
gtacccttggagttgtaca

SEQ ID NO: 799302 - DNA, 19 bp, Mus musculus
  siRNA target sequence for A930010I02 (NM_177799.2,304-322).
cccttggagttgtacaaaa

SEQ ID NO: 799303 - DNA, 19 bp, Mus musculus
  siRNA target sequence for A930010I02 (NM_177799.2,305-323).
ccttggagttgtacaaaaa

SEQ ID NO: 799304 - DNA, 19 bp, Mus musculus
  siRNA target sequence for C730049P21 (NM_177800.2,843-861).
cataccactgtgcattact

SEQ ID NO: 799305 - DNA, 19 bp, Mus musculus
  siRNA target sequence for C730049P21 (NM_177800.2,929-947).
caagaaggcctcgaataaa

SEQ ID NO: 799306 - DNA, 19 bp, Mus musculus
  siRNA target sequence for 4933400C05 (NM_177801.2,82-100).
gggggtgacaggtatcagt

SEQ ID NO: 799307 - DNA, 19 bp, Mus musculus
  siRNA target sequence for 4933400C05 (NM_177801.2,88-106).
gacaggtatcagtacattt

SEQ ID NO: 799308 - DNA, 19 bp, Mus musculus
  siRNA target sequence for 4933400C05 (NM_177801.2,107-125).
ccctgctgcggcaaggatt

SEQ ID NO: 799309 - DNA, 19 bp, Mus musculus
  siRNA target sequence for 4933400C05 (NM_177801.2,295-313).
gccagaattaccctctaaa

SEQ ID NO: 799310 - DNA, 19 bp, Mus musculus
  siRNA target sequence for 4933400C05 (NM_177801.2,449-467).
catcttttctggtcaaaca

SEQ ID NO: 799311 - DNA, 19 bp, Mus musculus
  siRNA target sequence for 4933400C05 (NM_177801.2,533-551).
gagaagtccatctccatat

SEQ ID NO: 799312 - DNA, 19 bp, Mus musculus
  siRNA target sequence for 4933400C05 (NM_177801.2,682-700).
catggccttgcctaactta

SEQ ID NO: 799313 - DNA, 19 bp, Mus musculus
  siRNA target sequence for 4933400C05 (NM_177801.2,761-779).
cctgtccaggccatcaagt

SEQ ID NO: 799314 - DNA, 19 bp, Mus musculus
  siRNA target sequence for 4933400C05 (NM_177801.2,810-828).
cctcagagaagcaagatga

SEQ ID NO: 799315 - DNA, 19 bp, Mus musculus
  siRNA target sequence for 4933400C05 (NM_177801.2,931-949).
ccaaggggaagtgaagttt

SEQ ID NO: 799316 - DNA, 19 bp, Mus musculus
  siRNA target sequence for 4933400C05 (NM_177801.2,1011-1029).
ccaagaaagggaatccatt

SEQ ID NO: 799317 - DNA, 19 bp, Mus musculus
  siRNA target sequence for 4933400C05 (NM_177801.2,1012-1030).
caagaaagggaatccatta

SEQ ID NO: 799318 - DNA, 19 bp, Mus musculus
  siRNA target sequence for 4933400C05 (NM_177801.2,1064-1082).
cagccccagagaaatgact

SEQ ID NO: 799319 - DNA, 19 bp, Mus musculus
  siRNA target sequence for Prpf39 (NM_177806.2,453-471).
gattatcttgagaacgttt

SEQ ID NO: 799320 - DNA, 19 bp, Mus musculus
  siRNA target sequence for Prpf39 (NM_177806.2,488-506).
gattggcaatggttcgatt

SEQ ID NO: 799321 - DNA, 19 bp, Mus musculus
  siRNA target sequence for Prpf39 (NM_177806.2,498-516).
ggttcgattgcgaagagta

SEQ ID NO: 799322 - DNA, 19 bp, Mus musculus
  siRNA target sequence for Prpf39 (NM_177806.2,499-517).
gttcgattgcgaagagtaa

SEQ ID NO: 799323 - DNA, 19 bp, Mus musculus
  siRNA target sequence for Prpf39 (NM_177806.2,502-520).
cgattgcgaagagtaagtt

SEQ ID NO: 799324 - DNA, 19 bp, Mus musculus
  siRNA target sequence for Prpf39 (NM_177806.2,527-545).
gacggcatggaaatatgga

SEQ ID NO: 799325 - DNA, 19 bp, Mus musculus
  siRNA target sequence for Prpf39 (NM_177806.2,583-601).
gccaaatcaaataatgagt

SEQ ID NO: 799326 - DNA, 19 bp, Mus musculus
  siRNA target sequence for Prpf39 (NM_177806.2,618-636).
caaactagcccgacatctt

SEQ ID NO: 799327 - DNA, 19 bp, Mus musculus
  siRNA target sequence for Prpf39 (NM_177806.2,622-640).
ctagcccgacatcttttca

SEQ ID NO: 799328 - DNA, 19 bp, Mus musculus
  siRNA target sequence for Prpf39 (NM_177806.2,625-643).
gcccgacatcttttcaaaa

SEQ ID NO: 799329 - DNA, 19 bp, Mus musculus
  siRNA target sequence for Prpf39 (NM_177806.2,626-644).
cccgacatcttttcaaaat

SEQ ID NO: 799330 - DNA, 19 bp, Mus musculus
  siRNA target sequence for Prpf39 (NM_177806.2,682-700).
gaagcaatcgaaaaagata

SEQ ID NO: 799331 - DNA, 19 bp, Mus musculus
  siRNA target sequence for Prpf39 (NM_177806.2,753-771).
cctcaagcaaaatgaagaa

SEQ ID NO: 799332 - DNA, 19 bp, Mus musculus
  siRNA target sequence for Prpf39 (NM_177806.2,777-795).
cctcaattgctttgacaaa

SEQ ID NO: 799333 - DNA, 19 bp, Mus musculus
  siRNA target sequence for Prpf39 (NM_177806.2,802-820).
catggttcattgcctatta

SEQ ID NO: 799334 - DNA, 19 bp, Mus musculus
  siRNA target sequence for Prpf39 (NM_177806.2,805-823).
ggttcattgcctattaaaa

SEQ ID NO: 799335 - DNA, 19 bp, Mus musculus
  siRNA target sequence for Prpf39 (NM_177806.2,806-824).
gttcattgcctattaaaat

SEQ ID NO: 799336 - DNA, 19 bp, Mus musculus
  siRNA target sequence for Prpf39 (NM_177806.2,907-925).
gaacaccaaacacttctaa

SEQ ID NO: 799337 - DNA, 19 bp, Mus musculus
  siRNA target sequence for Prpf39 (NM_177806.2,991-1009).
cacacagaagatttgtcat

SEQ ID NO: 799338 - DNA, 19 bp, Mus musculus
  siRNA target sequence for Prpf39 (NM_177806.2,1017-1035).
gatcattgatggggattta

SEQ ID NO: 799339 - DNA, 19 bp, Mus musculus
  siRNA target sequence for Prpf39 (NM_177806.2,1028-1046).
gggatttacaggcaaatca

SEQ ID NO: 799340 - DNA, 19 bp, Mus musculus
  siRNA target sequence for Prpf39 (NM_177806.2,1074-1092).
ccagtacaattatcagaat

SEQ ID NO: 799341 - DNA, 19 bp, Mus musculus
  siRNA target sequence for Prpf39 (NM_177806.2,1089-1107).
gaatccttggaattatgga

SEQ ID NO: 799342 - DNA, 19 bp, Mus musculus
  siRNA target sequence for Prpf39 (NM_177806.2,1097-1115).
ggaattatggacagtatta

SEQ ID NO: 799343 - DNA, 19 bp, Mus musculus
  siRNA target sequence for Prpf39 (NM_177806.2,1098-1116).
gaattatggacagtattat

SEQ ID NO: 799344 - DNA, 19 bp, Mus musculus
  siRNA target sequence for D130057M20 (NM_177807.2,219-237).
gggagttaatggaaagcat

SEQ ID NO: 799345 - DNA, 19 bp, Mus musculus
  siRNA target sequence for D130057M20 (NM_177807.2,230-248).
gaaagcatcaaggatgtta

SEQ ID NO: 799346 - DNA, 19 bp, Mus musculus
  siRNA target sequence for D130057M20 (NM_177807.2,303-321).
gcgacagggtggaaaacaa

SEQ ID NO: 799347 - DNA, 19 bp, Mus musculus
  siRNA target sequence for D130057M20 (NM_177807.2,304-322).
cgacagggtggaaaacaaa

SEQ ID NO: 799348 - DNA, 19 bp, Mus musculus
  siRNA target sequence for D130057M20 (NM_177807.2,380-398).
ctcgagttaaccttcagtt

SEQ ID NO: 799349 - DNA, 19 bp, Mus musculus
  siRNA target sequence for D130057M20 (NM_177807.2,382-400).
cgagttaaccttcagttat

SEQ ID NO: 799350 - DNA, 19 bp, Mus musculus
  siRNA target sequence for D130057M20 (NM_177807.2,525-543).
cctgcttgcggaggatatt

SEQ ID NO: 799351 - DNA, 19 bp, Mus musculus
  siRNA target sequence for D130057M20 (NM_177807.2,660-678).
gtgggttttctcagatgta

SEQ ID NO: 799352 - DNA, 19 bp, Mus musculus
  siRNA target sequence for D130057M20 (NM_177807.2,691-709).
cgactggctgggcttttca

SEQ ID NO: 799353 - DNA, 19 bp, Mus musculus
  siRNA target sequence for D130057M20 (NM_177807.2,734-752).
gtggatacaatttatctga

SEQ ID NO: 799354 - DNA, 19 bp, Mus musculus
  siRNA target sequence for A030008J09 (NM_177808.2,958-976).
ggtttgctttgccatgata

SEQ ID NO: 799355 - DNA, 19 bp, Mus musculus
  siRNA target sequence for A030008J09 (NM_177808.2,1006-1024).
gctaagttcattgatagta

SEQ ID NO: 799356 - DNA, 19 bp, Mus musculus
  siRNA target sequence for A030008J09 (NM_177808.2,1007-1025).
ctaagttcattgatagtaa

SEQ ID NO: 799357 - DNA, 19 bp, Mus musculus
  siRNA target sequence for A030008J09 (NM_177808.2,1049-1067).
gtctcccacatcaagtcaa

SEQ ID NO: 799358 - DNA, 19 bp, Mus musculus
  siRNA target sequence for A030008J09 (NM_177808.2,1051-1069).
ctcccacatcaagtcaatt

SEQ ID NO: 799359 - DNA, 19 bp, Mus musculus
  siRNA target sequence for A030008J09 (NM_177808.2,1063-1081).
gtcaattcccaataacatt

SEQ ID NO: 799360 - DNA, 19 bp, Mus musculus
  siRNA target sequence for A030008J09 (NM_177808.2,1065-1083).
caattcccaataacattat

SEQ ID NO: 799361 - DNA, 19 bp, Mus musculus
  siRNA target sequence for A030008J09 (NM_177808.2,1114-1132).
gtctctctacattcattgt

SEQ ID NO: 799362 - DNA, 19 bp, Mus musculus
  siRNA target sequence for A030008J09 (NM_177808.2,1220-1238).
cgggttcatcatattgtca

SEQ ID NO: 799363 - DNA, 19 bp, Mus musculus
  siRNA target sequence for A030008J09 (NM_177808.2,1221-1239).
gggttcatcatattgtcaa

SEQ ID NO: 799364 - DNA, 19 bp, Mus musculus
  siRNA target sequence for A030008J09 (NM_177808.2,1222-1240).
ggttcatcatattgtcaaa

SEQ ID NO: 799365 - DNA, 19 bp, Mus musculus
  siRNA target sequence for A030008J09 (NM_177808.2,1226-1244).
catcatattgtcaaaacgt

SEQ ID NO: 799366 - DNA, 19 bp, Mus musculus
  siRNA target sequence for A030007L22 (NM_177810.2,2244-2262).
ggtcatgctcgcaagtcat

SEQ ID NO: 799367 - DNA, 19 bp, Mus musculus
  siRNA target sequence for A030007L22 (NM_177810.2,2250-2268).
gctcgcaagtcatgttagt

SEQ ID NO: 799368 - DNA, 19 bp, Mus musculus
  siRNA target sequence for A030007L22 (NM_177810.2,2363-2381).
ctgatctcttcctcttaca

SEQ ID NO: 799369 - DNA, 19 bp, Mus musculus
  siRNA target sequence for A030007L22 (NM_177810.2,2521-2539).
gccagagagtcaaggttaa

SEQ ID NO: 799370 - DNA, 19 bp, Mus musculus
  siRNA target sequence for A030007L22 (NM_177810.2,2523-2541).
cagagagtcaaggttaaca

SEQ ID NO: 799371 - DNA, 19 bp, Mus musculus
  siRNA target sequence for A030007L22 (NM_177810.2,2527-2545).
gagtcaaggttaacacatt

SEQ ID NO: 799372 - DNA, 19 bp, Mus musculus
  siRNA target sequence for A030007L22 (NM_177810.2,2535-2553).
gttaacacatttagaacat

SEQ ID NO: 799373 - DNA, 19 bp, Mus musculus
  siRNA target sequence for 4932411K12 (NM_177812.2,101-119).
caagtgcctccaatcagat

SEQ ID NO: 799374 - DNA, 19 bp, Mus musculus
  siRNA target sequence for 4932411K12 (NM_177812.2,155-173).
gctccagggtcaatggtat

SEQ ID NO: 799375 - DNA, 19 bp, Mus musculus
  siRNA target sequence for 4932411K12 (NM_177812.2,226-244).
gtgtcccttgcagttttga

SEQ ID NO: 799376 - DNA, 19 bp, Mus musculus
  siRNA target sequence for 4932411K12 (NM_177812.2,228-246).
gtcccttgcagttttgaat

SEQ ID NO: 799377 - DNA, 19 bp, Mus musculus
  siRNA target sequence for 4932411K12 (NM_177812.2,326-344).
gaggtgatgagcattttca

SEQ ID NO: 799378 - DNA, 19 bp, Mus musculus
  siRNA target sequence for C630025C03 (NM_177813.2,364-382).
cttctatgacagtacatga

SEQ ID NO: 799379 - DNA, 19 bp, Mus musculus
  siRNA target sequence for C630025C03 (NM_177813.2,459-477).
gcgtatgttccaaatccaa

SEQ ID NO: 799380 - DNA, 19 bp, Mus musculus
  siRNA target sequence for CAST (NM_177814.3,713-731).
caggtgccctccatgttga

SEQ ID NO: 799381 - DNA, 19 bp, Mus musculus
  siRNA target sequence for CAST (NM_177814.3,747-765).
gcacgatgttggatcttca

SEQ ID NO: 799382 - DNA, 19 bp, Mus musculus
  siRNA target sequence for CAST (NM_177814.3,748-766).
cacgatgttggatcttcaa

SEQ ID NO: 799383 - DNA, 19 bp, Mus musculus
  siRNA target sequence for CAST (NM_177814.3,806-824).
cgcaaggagcttgacatta

SEQ ID NO: 799384 - DNA, 19 bp, Mus musculus
  siRNA target sequence for CAST (NM_177814.3,807-825).
gcaaggagcttgacattaa

SEQ ID NO: 799385 - DNA, 19 bp, Mus musculus
  siRNA target sequence for CAST (NM_177814.3,948-966).
gggtttctcacgaagaaaa

SEQ ID NO: 799386 - DNA, 19 bp, Mus musculus
  siRNA target sequence for CAST (NM_177814.3,1042-1060).
gcaagagagcggcaataga

SEQ ID NO: 799387 - DNA, 19 bp, Mus musculus
  siRNA target sequence for CAST (NM_177814.3,1211-1229).
gcccgagacgagtccatta

SEQ ID NO: 799388 - DNA, 19 bp, Mus musculus
  siRNA target sequence for CAST (NM_177814.3,1212-1230).
cccgagacgagtccattaa

SEQ ID NO: 799389 - DNA, 19 bp, Mus musculus
  siRNA target sequence for CAST (NM_177814.3,1213-1231).
ccgagacgagtccattaaa

SEQ ID NO: 799390 - DNA, 19 bp, Mus musculus
  siRNA target sequence for CAST (NM_177814.3,1214-1232).
cgagacgagtccattaaaa

SEQ ID NO: 799391 - DNA, 19 bp, Mus musculus
  siRNA target sequence for CAST (NM_177814.3,1266-1284).
catcgaaaagccttgaaga

SEQ ID NO: 799392 - DNA, 19 bp, Mus musculus
  siRNA target sequence for CAST (NM_177814.3,1269-1287).
cgaaaagccttgaagatga

SEQ ID NO: 799393 - DNA, 19 bp, Mus musculus
  siRNA target sequence for CAST (NM_177814.3,1507-1525).
ggatgaggtccagatgtta

SEQ ID NO: 799394 - DNA, 19 bp, Mus musculus
  siRNA target sequence for CAST (NM_177814.3,1508-1526).
gatgaggtccagatgttaa

SEQ ID NO: 799395 - DNA, 19 bp, Mus musculus
  siRNA target sequence for CAST (NM_177814.3,1574-1592).
caaatcgaggtgtacaaaa

SEQ ID NO: 799396 - DNA, 19 bp, Mus musculus
  siRNA target sequence for CAST (NM_177814.3,1658-1676).
gaacttcttgccttacaaa

SEQ ID NO: 799397 - DNA, 19 bp, Mus musculus
  siRNA target sequence for CAST (NM_177814.3,1681-1699).
gcttgaaacccttagcaat

SEQ ID NO: 799398 - DNA, 19 bp, Mus musculus
  siRNA target sequence for CAST (NM_177814.3,1685-1703).
gaaacccttagcaatcaaa

SEQ ID NO: 799399 - DNA, 19 bp, Mus musculus
  siRNA target sequence for CAST (NM_177814.3,1713-1731).
gcaagcaacacattgaagt

SEQ ID NO: 799400 - DNA, 19 bp, Mus musculus
  siRNA target sequence for CAST (NM_177814.3,1741-1759).
gtcgcttactgccaaagaa

SEQ ID NO: 799401 - DNA, 19 bp, Mus musculus
  siRNA target sequence for CAST (NM_177814.3,1884-1902).
ctggagagatccgtgatat

SEQ ID NO: 799402 - DNA, 19 bp, Mus musculus
  siRNA target sequence for CAST (NM_177814.3,1886-1904).
ggagagatccgtgatatga

SEQ ID NO: 799403 - DNA, 19 bp, Mus musculus
  siRNA target sequence for CAST (NM_177814.3,1895-1913).
cgtgatatgaaagatatgt

SEQ ID NO: 799404 - DNA, 19 bp, Mus musculus
  siRNA target sequence for CAST (NM_177814.3,2153-2171).
gagatagaatcctttcgaa

SEQ ID NO: 799405 - DNA, 19 bp, Mus musculus
  siRNA target sequence for CAST (NM_177814.3,2238-2256).
gtttaatcgacctcaaaga

SEQ ID NO: 799406 - DNA, 19 bp, Mus musculus
  siRNA target sequence for CAST (NM_177814.3,2258-2276).
catgcatcctcgttagctt

SEQ ID NO: 799407 - DNA, 19 bp, Mus musculus
  siRNA target sequence for CAST (NM_177814.3,2354-2372).
ctggaggcacaattaaaaa

SEQ ID NO: 799408 - DNA, 19 bp, Mus musculus
  siRNA target sequence for CAST (NM_177814.3,2374-2392).
ggcacataatattgaagat

SEQ ID NO: 799409 - DNA, 19 bp, Mus musculus
  siRNA target sequence for CAST (NM_177814.3,2413-2431).
gtttgcagaccgactaaaa

SEQ ID NO: 799410 - DNA, 19 bp, Mus musculus
  siRNA target sequence for CAST (NM_177814.3,2424-2442).
gactaaaacagcttgacaa

SEQ ID NO: 799411 - DNA, 19 bp, Mus musculus
  siRNA target sequence for CAST (NM_177814.3,2438-2456).
gacaaggaagcatcttact

SEQ ID NO: 799412 - DNA, 19 bp, Mus musculus
  siRNA target sequence for CAST (NM_177814.3,2563-2581).
ggagaggcacatgaaagat

SEQ ID NO: 799413 - DNA, 19 bp, Mus musculus
  siRNA target sequence for CAST (NM_177814.3,2568-2586).
ggcacatgaaagatcagaa

SEQ ID NO: 799414 - DNA, 19 bp, Mus musculus
  siRNA target sequence for CAST (NM_177814.3,2691-2709).
cgcagcatttgcagattga

SEQ ID NO: 799415 - DNA, 19 bp, Mus musculus
  siRNA target sequence for CAST (NM_177814.3,2782-2800).
gcaatctctggctgaaaaa

SEQ ID NO: 799416 - DNA, 19 bp, Mus musculus
  siRNA target sequence for CAST (NM_177814.3,2813-2831).
gccaacctccggattgaga

SEQ ID NO: 799417 - DNA, 19 bp, Mus musculus
  siRNA target sequence for CAST (NM_177814.3,2892-2910).
gtgaaaaagacgcaaacat

SEQ ID NO: 799418 - DNA, 19 bp, Mus musculus
  siRNA target sequence for CAST (NM_177814.3,2921-2939).
gagttatctgcctccaaaa

SEQ ID NO: 799419 - DNA, 19 bp, Mus musculus
  siRNA target sequence for CAST (NM_177814.3,2986-3004).
ccgactggtgcatcagtta

SEQ ID NO: 799420 - DNA, 19 bp, Mus musculus
  siRNA target sequence for CAST (NM_177814.3,2987-3005).
cgactggtgcatcagttaa

SEQ ID NO: 799421 - DNA, 19 bp, Mus musculus
  siRNA target sequence for CAST (NM_177814.3,2988-3006).
gactggtgcatcagttaaa

SEQ ID NO: 799422 - DNA, 19 bp, Mus musculus
  siRNA target sequence for CAST (NM_177814.3,3108-3126).
ggaggtcacagcattccaa

SEQ ID NO: 799423 - DNA, 19 bp, Mus musculus
  siRNA target sequence for CAST (NM_177814.3,3186-3204).
gcagcagtatcctgataat

SEQ ID NO: 799424 - DNA, 19 bp, Mus musculus
  siRNA target sequence for CAST (NM_177814.3,3189-3207).
gcagtatcctgataatcta

SEQ ID NO: 799425 - DNA, 19 bp, Mus musculus
  siRNA target sequence for CAST (NM_177814.3,3190-3208).
cagtatcctgataatctat

SEQ ID NO: 799426 - DNA, 19 bp, Mus musculus
  siRNA target sequence for CAST (NM_177814.3,3289-3307).
cactttcctgctcaattct

SEQ ID NO: 799427 - DNA, 19 bp, Mus musculus
  siRNA target sequence for D930025H04 (NM_177815.2,85-103).
ctgcaggtcttgtttcgat

SEQ ID NO: 799428 - DNA, 19 bp, Mus musculus
  siRNA target sequence for D930025H04 (NM_177815.2,87-105).
gcaggtcttgtttcgatta

SEQ ID NO: 799429 - DNA, 19 bp, Mus musculus
  siRNA target sequence for D930025H04 (NM_177815.2,91-109).
gtcttgtttcgattaatca

SEQ ID NO: 799430 - DNA, 19 bp, Mus musculus
  siRNA target sequence for D930025H04 (NM_177815.2,100-118).
cgattaatcacctttgtct

SEQ ID NO: 799431 - DNA, 19 bp, Mus musculus
  siRNA target sequence for D930025H04 (NM_177815.2,101-119).
gattaatcacctttgtctt

SEQ ID NO: 799432 - DNA, 19 bp, Mus musculus
  siRNA target sequence for D930025H04 (NM_177815.2,110-128).
cctttgtcttgaatgcatt

SEQ ID NO: 799433 - DNA, 19 bp, Mus musculus
  siRNA target sequence for D930025H04 (NM_177815.2,153-171).
gattgtgggcatagtgaat

SEQ ID NO: 799434 - DNA, 19 bp, Mus musculus
  siRNA target sequence for D930025H04 (NM_177815.2,157-175).
gtgggcatagtgaatgtca

SEQ ID NO: 799435 - DNA, 19 bp, Mus musculus
  siRNA target sequence for D930025H04 (NM_177815.2,178-196).
ctaacgctgctttactcaa

SEQ ID NO: 799436 - DNA, 19 bp, Mus musculus
  siRNA target sequence for D930025H04 (NM_177815.2,293-311).
ctgtcccactgggtatatt

SEQ ID NO: 799437 - DNA, 19 bp, Mus musculus
  siRNA target sequence for D930025H04 (NM_177815.2,338-356).
ggttgcagttgcttgaagt

SEQ ID NO: 799438 - DNA, 19 bp, Mus musculus
  siRNA target sequence for D930025H04 (NM_177815.2,461-479).
cacatatgtttgttaagct

SEQ ID NO: 799439 - DNA, 19 bp, Mus musculus
  siRNA target sequence for D930025H04 (NM_177815.2,555-573).
ctggggtctgtacatcttt

SEQ ID NO: 799440 - DNA, 19 bp, Mus musculus
  siRNA target sequence for D930025H04 (NM_177815.2,592-610).
gttgtggccttactcttta

SEQ ID NO: 799441 - DNA, 19 bp, Mus musculus
  siRNA target sequence for D930025H04 (NM_177815.2,634-652).
cccactagcatgtgcttat

SEQ ID NO: 799442 - DNA, 19 bp, Mus musculus
  siRNA target sequence for D930025H04 (NM_177815.2,645-663).
gtgcttatgttcacagtat

SEQ ID NO: 799443 - DNA, 19 bp, Mus musculus
  siRNA target sequence for 6530402A20 (NM_177817.2,575-593).
ctctgcgccttacagatta

SEQ ID NO: 799444 - DNA, 19 bp, Mus musculus
  siRNA target sequence for 6530402A20 (NM_177817.2,577-595).
ctgcgccttacagattata

SEQ ID NO: 799445 - DNA, 19 bp, Mus musculus
  siRNA target sequence for 6530402A20 (NM_177817.2,579-597).
gcgccttacagattataaa

SEQ ID NO: 799446 - DNA, 19 bp, Mus musculus
  siRNA target sequence for 6530402A20 (NM_177817.2,628-646).
gccacacgagcacactttt

SEQ ID NO: 799447 - DNA, 19 bp, Mus musculus
  siRNA target sequence for 6530402A20 (NM_177817.2,630-648).
cacacgagcacacttttga

SEQ ID NO: 799448 - DNA, 19 bp, Mus musculus
  siRNA target sequence for 6530402A20 (NM_177817.2,634-652).
cgagcacacttttgaagaa

SEQ ID NO: 799449 - DNA, 19 bp, Mus musculus
  siRNA target sequence for 6530402A20 (NM_177817.2,676-694).
cagcatagatgctcttgat

SEQ ID NO: 799450 - DNA, 19 bp, Mus musculus
  siRNA target sequence for 6530402A20 (NM_177817.2,704-722).
gactccggaggggatttgt

SEQ ID NO: 799451 - DNA, 19 bp, Mus musculus
  siRNA target sequence for 6530402A20 (NM_177817.2,706-724).
ctccggaggggatttgtct

SEQ ID NO: 799452 - DNA, 19 bp, Mus musculus
  siRNA target sequence for 6530402A20 (NM_177817.2,708-726).
ccggaggggatttgtcttt

SEQ ID NO: 799453 - DNA, 19 bp, Mus musculus
  siRNA target sequence for 6530402A20 (NM_177817.2,709-727).
cggaggggatttgtctttt

SEQ ID NO: 799454 - DNA, 19 bp, Mus musculus
  siRNA target sequence for 6530402A20 (NM_177817.2,748-766).
gcatctcttgtattataca

SEQ ID NO: 799455 - DNA, 19 bp, Mus musculus
  siRNA target sequence for 6530402A20 (NM_177817.2,749-767).
catctcttgtattatacaa

SEQ ID NO: 799456 - DNA, 19 bp, Mus musculus
  siRNA target sequence for 6530402A20 (NM_177817.2,765-783).
caataccaggcaatcaatt

SEQ ID NO: 799457 - DNA, 19 bp, Mus musculus
  siRNA target sequence for 6530402A20 (NM_177817.2,774-792).
gcaatcaattggtaggtaa

SEQ ID NO: 799458 - DNA, 19 bp, Mus musculus
  siRNA target sequence for 6530402A20 (NM_177817.2,812-830).
catgcttccagtaatactt

SEQ ID NO: 799459 - DNA, 19 bp, Mus musculus
  siRNA target sequence for C130057D23 (NM_177818.2,248-266).
cacacagtgtgatgcatat

SEQ ID NO: 799460 - DNA, 19 bp, Mus musculus
  siRNA target sequence for C130057D23 (NM_177818.2,359-377).
caaatcgtacagagtttgt

SEQ ID NO: 799461 - DNA, 19 bp, Mus musculus
  siRNA target sequence for C130057D23 (NM_177818.2,439-457).
gatggaccttaccaatgtt

SEQ ID NO: 799462 - DNA, 19 bp, Mus musculus
  siRNA target sequence for C130057D23 (NM_177818.2,442-460).
ggaccttaccaatgttcat

SEQ ID NO: 799463 - DNA, 19 bp, Mus musculus
  siRNA target sequence for C130057D23 (NM_177818.2,443-461).
gaccttaccaatgttcatt

SEQ ID NO: 799464 - DNA, 19 bp, Mus musculus
  siRNA target sequence for C130057D23 (NM_177818.2,564-582).
catggtggagtgtaattca

SEQ ID NO: 799465 - DNA, 19 bp, Mus musculus
  siRNA target sequence for C130057D23 (NM_177818.2,632-650).
caacacttccgcactcatt

SEQ ID NO: 799466 - DNA, 19 bp, Mus musculus
  siRNA target sequence for C130057D23 (NM_177818.2,635-653).
cacttccgcactcattaaa

SEQ ID NO: 799467 - DNA, 19 bp, Mus musculus
  siRNA target sequence for C130057D23 (NM_177818.2,640-658).
ccgcactcattaaaatcat

SEQ ID NO: 799468 - DNA, 19 bp, Mus musculus
  siRNA target sequence for C130057D23 (NM_177818.2,641-659).
cgcactcattaaaatcata

SEQ ID NO: 799469 - DNA, 19 bp, Mus musculus
  siRNA target sequence for C130057D23 (NM_177818.2,698-716).
ctcttctcctcacaaacat

SEQ ID NO: 799470 - DNA, 19 bp, Mus musculus
  siRNA target sequence for C130057D23 (NM_177818.2,700-718).
cttctcctcacaaacatgt

SEQ ID NO: 799471 - DNA, 19 bp, Mus musculus
  siRNA target sequence for C130057D23 (NM_177818.2,721-739).
catggcagcatcatttgct

SEQ ID NO: 799472 - DNA, 19 bp, Mus musculus
  siRNA target sequence for C130057D23 (NM_177818.2,771-789).
gcaaacaagtatcattcta

SEQ ID NO: 799473 - DNA, 19 bp, Mus musculus
  siRNA target sequence for A830008O07 (NM_177819.2,222-240).
ctgtggagctacataaatt

SEQ ID NO: 799474 - DNA, 19 bp, Mus musculus
  siRNA target sequence for A830008O07 (NM_177819.2,224-242).
gtggagctacataaatttt

SEQ ID NO: 799475 - DNA, 19 bp, Mus musculus
  siRNA target sequence for A830008O07 (NM_177819.2,277-295).
gatccgagtgaccttgaaa

SEQ ID NO: 799476 - DNA, 19 bp, Mus musculus
  siRNA target sequence for A830008O07 (NM_177819.2,398-416).
cgtgtcttccagatcttat

SEQ ID NO: 799477 - DNA, 19 bp, Mus musculus
  siRNA target sequence for A830008O07 (NM_177819.2,420-438).
gaaacgaagaagtttccat

SEQ ID NO: 799478 - DNA, 19 bp, Mus musculus
  siRNA target sequence for A830008O07 (NM_177819.2,459-477).
gggttcatttgctcttaga

SEQ ID NO: 799479 - DNA, 19 bp, Mus musculus
  siRNA target sequence for A830008O07 (NM_177819.2,648-666).
ctgtcatgttcgactactt

SEQ ID NO: 799480 - DNA, 19 bp, Mus musculus
  siRNA target sequence for A830008O07 (NM_177819.2,679-697).
gatctcagtggccatacat

SEQ ID NO: 799481 - DNA, 19 bp, Mus musculus
  siRNA target sequence for A830008O07 (NM_177819.2,721-739).
gcccctgatcagtttcact

SEQ ID NO: 799482 - DNA, 19 bp, Mus musculus
  siRNA target sequence for A830008O07 (NM_177819.2,853-871).
ctcagagggaagcttctat

SEQ ID NO: 799483 - DNA, 19 bp, Mus musculus
  siRNA target sequence for A830008O07 (NM_177819.2,1050-1068).
gctcagagttacaggtaat

SEQ ID NO: 799484 - DNA, 19 bp, Mus musculus
  siRNA target sequence for A830008O07 (NM_177819.2,1090-1108).
gaacagatggaagtactta

SEQ ID NO: 799485 - DNA, 19 bp, Mus musculus
  siRNA target sequence for A830008O07 (NM_177819.2,1113-1131).
gcgggatcaagctggtttt

SEQ ID NO: 799486 - DNA, 19 bp, Mus musculus
  siRNA target sequence for 9130218O11 (NM_177820.2,683-701).
gagactctcagatgaatct

SEQ ID NO: 799487 - DNA, 19 bp, Mus musculus
  siRNA target sequence for 9130218O11 (NM_177820.2,744-762).
gagattgtaaagatcatgt

SEQ ID NO: 799488 - DNA, 19 bp, Mus musculus
  siRNA target sequence for 9130218O11 (NM_177820.2,750-768).
gtaaagatcatgtctaaga

SEQ ID NO: 799489 - DNA, 19 bp, Mus musculus
  siRNA target sequence for 9130218O11 (NM_177820.2,767-785).
gatcacattcaagctttta

SEQ ID NO: 799490 - DNA, 19 bp, Mus musculus
  siRNA target sequence for 9130218O11 (NM_177820.2,847-865).
ggagagcgagaatcatcat

SEQ ID NO: 799491 - DNA, 19 bp, Mus musculus
  siRNA target sequence for 9130218O11 (NM_177820.2,848-866).
gagagcgagaatcatcatt

SEQ ID NO: 799492 - DNA, 19 bp, Mus musculus
  siRNA target sequence for 9130218O11 (NM_177820.2,850-868).
gagcgagaatcatcatttt

SEQ ID NO: 799493 - DNA, 19 bp, Mus musculus
  siRNA target sequence for 9130218O11 (NM_177820.2,957-975).
gcagtagggtttacaagtt

SEQ ID NO: 799494 - DNA, 19 bp, Mus musculus
  siRNA target sequence for 9130218O11 (NM_177820.2,960-978).
gtagggtttacaagtttgt

SEQ ID NO: 799495 - DNA, 19 bp, Mus musculus
  siRNA target sequence for 9130218O11 (NM_177820.2,984-1002).
gcgtgggatgtgtatgact

SEQ ID NO: 799496 - DNA, 19 bp, Mus musculus
  siRNA target sequence for 9130218O11 (NM_177820.2,1011-1029).
caatcaaaagatctgtata

SEQ ID NO: 799497 - DNA, 19 bp, Mus musculus
  siRNA target sequence for 9130218O11 (NM_177820.2,1023-1041).
ctgtataatggggcaaaaa

SEQ ID NO: 799498 - DNA, 19 bp, Mus musculus
  siRNA target sequence for 9130218O11 (NM_177820.2,1025-1043).
gtataatggggcaaaaaca

SEQ ID NO: 799499 - DNA, 19 bp, Mus musculus
  siRNA target sequence for 9130218O11 (NM_177820.2,1095-1113).
caggtattcgagcagatat

SEQ ID NO: 799500 - DNA, 19 bp, Mus musculus
  siRNA target sequence for 9130218O11 (NM_177820.2,1097-1115).
ggtattcgagcagatatat

SEQ ID NO: 799501 - DNA, 19 bp, Mus musculus
  siRNA target sequence for 9130218O11 (NM_177820.2,1098-1116).
gtattcgagcagatatata

SEQ ID NO: 799502 - DNA, 19 bp, Mus musculus
  siRNA target sequence for 4732467B22 (NM_177822.2,543-561).
gaacagctctccagtttaa

SEQ ID NO: 799503 - DNA, 19 bp, Mus musculus
  siRNA target sequence for 4732467B22 (NM_177822.2,546-564).
cagctctccagtttaatca

SEQ ID NO: 799504 - DNA, 19 bp, Mus musculus
  siRNA target sequence for 4732467B22 (NM_177822.2,549-567).
ctctccagtttaatcagaa

SEQ ID NO: 799505 - DNA, 19 bp, Mus musculus
  siRNA target sequence for 4732467B22 (NM_177822.2,642-660).
ctccaggatgacttcgaat

SEQ ID NO: 799506 - DNA, 19 bp, Mus musculus
  siRNA target sequence for 4732467B22 (NM_177822.2,699-717).
caggtgggggacactaact

SEQ ID NO: 799507 - DNA, 19 bp, Mus musculus
  siRNA target sequence for 4732467B22 (NM_177822.2,1171-1189).
ccagacgcttcgttgacaa

SEQ ID NO: 799508 - DNA, 19 bp, Mus musculus
  siRNA target sequence for 4732467B22 (NM_177822.2,1174-1192).
gacgcttcgttgacaactt

SEQ ID NO: 799509 - DNA, 19 bp, Mus musculus
  siRNA target sequence for 4732467B22 (NM_177822.2,1397-1415).
gtgccagcgcgttgtcaaa

SEQ ID NO: 799510 - DNA, 19 bp, Mus musculus
  siRNA target sequence for 4732467B22 (NM_177822.2,1490-1508).
ctactccctcgctgaaata

SEQ ID NO: 799511 - DNA, 19 bp, Mus musculus
  siRNA target sequence for 4732467B22 (NM_177822.2,1528-1546).
ccggggacacagtgatgat

SEQ ID NO: 799512 - DNA, 19 bp, Mus musculus
  siRNA target sequence for 4732467B22 (NM_177822.2,1577-1595).
ccagacggaggcagttcta

SEQ ID NO: 799513 - DNA, 19 bp, Mus musculus
  siRNA target sequence for 4732467B22 (NM_177822.2,1790-1808).
ctttaggaacaccagtaat

SEQ ID NO: 799514 - DNA, 19 bp, Mus musculus
  siRNA target sequence for 4732467B22 (NM_177822.2,1804-1822).
gtaatgtgggagaatatta

SEQ ID NO: 799515 - DNA, 19 bp, Mus musculus
  siRNA target sequence for 4732467B22 (NM_177822.2,1809-1827).
gtgggagaatattactact

SEQ ID NO: 799516 - DNA, 19 bp, Mus musculus
  siRNA target sequence for 4732467B22 (NM_177822.2,1811-1829).
gggagaatattactactta

SEQ ID NO: 799517 - DNA, 19 bp, Mus musculus
  siRNA target sequence for 4732467B22 (NM_177822.2,2153-2171).
ggatccgccaggcaatgat

SEQ ID NO: 799518 - DNA, 19 bp, Mus musculus
  siRNA target sequence for 4732467B22 (NM_177822.2,2191-2209).
gaagtcctccagttcatct

SEQ ID NO: 799519 - DNA, 19 bp, Mus musculus
  siRNA target sequence for 4732467B22 (NM_177822.2,2255-2273).
gctgctactgtgtcagtta

SEQ ID NO: 799520 - DNA, 19 bp, Mus musculus
  siRNA target sequence for A130033B22 (NM_177825.2,1371-1389).
gcatgtgacttttcaaact

SEQ ID NO: 799521 - DNA, 19 bp, Mus musculus
  siRNA target sequence for A130033B22 (NM_177825.2,1372-1390).
catgtgacttttcaaactt

SEQ ID NO: 799522 - DNA, 19 bp, Mus musculus
  siRNA target sequence for A130033B22 (NM_177825.2,1440-1458).
ccattctctagacataaca

SEQ ID NO: 799523 - DNA, 19 bp, Mus musculus
  siRNA target sequence for A130033B22 (NM_177825.2,1447-1465).
ctagacataacagtaaata

SEQ ID NO: 799524 - DNA, 19 bp, Mus musculus
  siRNA target sequence for A130033B22 (NM_177825.2,1662-1680).
gttttgcaaaggctctatt

SEQ ID NO: 799525 - DNA, 19 bp, Mus musculus
  siRNA target sequence for A130033B22 (NM_177825.2,1672-1690).
ggctctattcaatgctatt

SEQ ID NO: 799526 - DNA, 19 bp, Mus musculus
  siRNA target sequence for A130033B22 (NM_177825.2,1673-1691).
gctctattcaatgctattt

SEQ ID NO: 799527 - DNA, 19 bp, Mus musculus
  siRNA target sequence for A930021O22 (NM_177826.2,284-302).
gtcacaaatccactctatt

SEQ ID NO: 799528 - DNA, 19 bp, Mus musculus
  siRNA target sequence for A930021O22 (NM_177826.2,293-311).
ccactctattaaacagatt

SEQ ID NO: 799529 - DNA, 19 bp, Mus musculus
  siRNA target sequence for A930021O22 (NM_177826.2,451-469).
gcctacctgaggtttttct

SEQ ID NO: 799530 - DNA, 19 bp, Mus musculus
  siRNA target sequence for A930021O22 (NM_177826.2,453-471).
ctacctgaggtttttctaa

SEQ ID NO: 799531 - DNA, 19 bp, Mus musculus
  siRNA target sequence for A930021O22 (NM_177826.2,457-475).
ctgaggtttttctaactca

SEQ ID NO: 799532 - DNA, 19 bp, Mus musculus
  siRNA target sequence for A930021O22 (NM_177826.2,472-490).
ctcaggcaacacacagttt

SEQ ID NO: 799533 - DNA, 19 bp, Mus musculus
  siRNA target sequence for A930021O22 (NM_177826.2,525-543).
gacttatattcttatagaa

SEQ ID NO: 799534 - DNA, 19 bp, Mus musculus
  siRNA target sequence for A930021O22 (NM_177826.2,589-607).
gtagagcaagtgtggttaa

SEQ ID NO: 799535 - DNA, 19 bp, Mus musculus
  siRNA target sequence for A930021O22 (NM_177826.2,592-610).
gagcaagtgtggttaatct

SEQ ID NO: 799536 - DNA, 19 bp, Mus musculus
  siRNA target sequence for A930021O22 (NM_177826.2,598-616).
gtgtggttaatctgcttaa

SEQ ID NO: 799537 - DNA, 19 bp, Mus musculus
  siRNA target sequence for A930021O22 (NM_177826.2,602-620).
ggttaatctgcttaaagat

SEQ ID NO: 799538 - DNA, 19 bp, Mus musculus
  siRNA target sequence for A930021O22 (NM_177826.2,674-692).
gtttgctggaaatcgtatt

SEQ ID NO: 799539 - DNA, 19 bp, Mus musculus
  siRNA target sequence for A930021O22 (NM_177826.2,679-697).
ctggaaatcgtattgttca

SEQ ID NO: 799540 - DNA, 19 bp, Mus musculus
  siRNA target sequence for A930021O22 (NM_177826.2,719-737).
gctggtaggtgttagagtt

SEQ ID NO: 799541 - DNA, 19 bp, Mus musculus
  siRNA target sequence for A930021O22 (NM_177826.2,774-792).
ggcagcctctggaatgact

SEQ ID NO: 799542 - DNA, 19 bp, Mus musculus
  siRNA target sequence for A930021O22 (NM_177826.2,803-821).
catctggcagagtatgtgt

SEQ ID NO: 799543 - DNA, 19 bp, Mus musculus
  siRNA target sequence for A930021O22 (NM_177826.2,891-909).
ggattagctgttattcttt

SEQ ID NO: 799544 - DNA, 19 bp, Mus musculus
  siRNA target sequence for A930021O22 (NM_177826.2,995-1013).
ccctgagtggctcatgaat

SEQ ID NO: 799545 - DNA, 19 bp, Mus musculus
  siRNA target sequence for 9530053H22 (NM_177827.2,1486-1504).
cacacgaatagggtatcat

SEQ ID NO: 799546 - DNA, 19 bp, Mus musculus
  siRNA target sequence for 9530053H22 (NM_177827.2,1491-1509).
gaatagggtatcatagtgt

SEQ ID NO: 799547 - DNA, 19 bp, Mus musculus
  siRNA target sequence for 9530053H22 (NM_177827.2,1765-1783).
ccacataaccagaaacaca

SEQ ID NO: 799548 - DNA, 19 bp, Mus musculus
  siRNA target sequence for 9530053H22 (NM_177827.2,1766-1784).
cacataaccagaaacacaa

SEQ ID NO: 799549 - DNA, 19 bp, Mus musculus
  siRNA target sequence for 4933429F08 (NM_177828.2,454-472).
gaccttcgggtctcagttt

SEQ ID NO: 799550 - DNA, 19 bp, Mus musculus
  siRNA target sequence for 4933429F08 (NM_177828.2,597-615).
gatgtgaacggcaatatca

SEQ ID NO: 799551 - DNA, 19 bp, Mus musculus
  siRNA target sequence for 4933429F08 (NM_177828.2,606-624).
ggcaatatcaacgaataca

SEQ ID NO: 799552 - DNA, 19 bp, Mus musculus
  siRNA target sequence for 4933429F08 (NM_177828.2,607-625).
gcaatatcaacgaatacaa

SEQ ID NO: 799553 - DNA, 19 bp, Mus musculus
  siRNA target sequence for 4933429F08 (NM_177828.2,636-654).
gaagtggccttaaagtata

SEQ ID NO: 799554 - DNA, 19 bp, Mus musculus
  siRNA target sequence for 4933429F08 (NM_177828.2,692-710).
ccgcatcaacacacatact

SEQ ID NO: 799555 - DNA, 19 bp, Mus musculus
  siRNA target sequence for 4933429F08 (NM_177828.2,844-862).
gaaacaatgtggtcgattt

SEQ ID NO: 799556 - DNA, 19 bp, Mus musculus
  siRNA target sequence for 4933429F08 (NM_177828.2,868-886).
gtaatctggaggttttcct

SEQ ID NO: 799557 - DNA, 19 bp, Mus musculus
  siRNA target sequence for 4933429F08 (NM_177828.2,986-1004).
gtttaagcagcggttaaga

SEQ ID NO: 799558 - DNA, 19 bp, Mus musculus
  siRNA target sequence for 4933429F08 (NM_177828.2,1047-1065).
gctggtcctcagaacttga

SEQ ID NO: 799559 - DNA, 19 bp, Mus musculus
  siRNA target sequence for 4933429F08 (NM_177828.2,1050-1068).
ggtcctcagaacttgatca

SEQ ID NO: 799560 - DNA, 19 bp, Mus musculus
  siRNA target sequence for 4933429F08 (NM_177828.2,1051-1069).
gtcctcagaacttgatcaa

SEQ ID NO: 799561 - DNA, 19 bp, Mus musculus
  siRNA target sequence for 4933429F08 (NM_177828.2,1172-1190).
ggcgctcaactccttacta

SEQ ID NO: 799562 - DNA, 19 bp, Mus musculus
  siRNA target sequence for 4933429F08 (NM_177828.2,1174-1192).
cgctcaactccttactagt

SEQ ID NO: 799563 - DNA, 19 bp, Mus musculus
  siRNA target sequence for 4933429F08 (NM_177828.2,1193-1211).
ggccgagctcccacagttt

SEQ ID NO: 799564 - DNA, 19 bp, Mus musculus
  siRNA target sequence for 4933429F08 (NM_177828.2,1270-1288).
gagacctcgccgatcaagt

SEQ ID NO: 799565 - DNA, 19 bp, Mus musculus
  siRNA target sequence for 4933429F08 (NM_177828.2,1390-1408).
gtcagctccgcctctttca

SEQ ID NO: 799566 - DNA, 19 bp, Mus musculus
  siRNA target sequence for 4933429F08 (NM_177828.2,1587-1605).
cttctacaaaacaaggata

SEQ ID NO: 799567 - DNA, 19 bp, Mus musculus
  siRNA target sequence for 4933429F08 (NM_177828.2,1663-1681).
cagctggaaaacttcagtt

SEQ ID NO: 799568 - DNA, 19 bp, Mus musculus
  siRNA target sequence for A430085C19 (NM_177830.2,882-900).
ctacctggtttcaagttta

SEQ ID NO: 799569 - DNA, 19 bp, Mus musculus
  siRNA target sequence for 6330513E13 (NM_177831.2,349-367).
ggaacttctgggtaagtca

SEQ ID NO: 799570 - DNA, 19 bp, Mus musculus
  siRNA target sequence for AI447957 (NM_177832.2,167-185).
gtcaccgtcagccatttca

SEQ ID NO: 799571 - DNA, 19 bp, Mus musculus
  siRNA target sequence for AI447957 (NM_177832.2,239-257).
gctgacgctggctgatact

SEQ ID NO: 799572 - DNA, 19 bp, Mus musculus
  siRNA target sequence for AI447957 (NM_177832.2,277-295).
ggctggatacggttacact

SEQ ID NO: 799573 - DNA, 19 bp, Mus musculus
  siRNA target sequence for AI447957 (NM_177832.2,288-306).
gttacactgaacatcactt

SEQ ID NO: 799574 - DNA, 19 bp, Mus musculus
  siRNA target sequence for AI447957 (NM_177832.2,367-385).
caggctcaccacaagtcat

SEQ ID NO: 799575 - DNA, 19 bp, Mus musculus
  siRNA target sequence for AI447957 (NM_177832.2,375-393).
ccacaagtcatcttagtga

SEQ ID NO: 799576 - DNA, 19 bp, Mus musculus
  siRNA target sequence for AI447957 (NM_177832.2,575-593).
cgggaaggagcgaatccat

SEQ ID NO: 799577 - DNA, 19 bp, Mus musculus
  siRNA target sequence for AI447957 (NM_177832.2,826-844).
cgctgcaggtgcacttgaa

SEQ ID NO: 799578 - DNA, 19 bp, Mus musculus
  siRNA target sequence for C230050L11 (NM_177833.2,360-378).
cattctcagccctcaaaaa

SEQ ID NO: 799579 - DNA, 19 bp, Mus musculus
  siRNA target sequence for C230050L11 (NM_177833.2,381-399).
cgagggaatcttaattggt

SEQ ID NO: 799580 - DNA, 19 bp, Mus musculus
  siRNA target sequence for C230050L11 (NM_177833.2,428-446).
gagctgcatgggtattcca

SEQ ID NO: 799581 - DNA, 19 bp, Mus musculus
  siRNA target sequence for C230050L11 (NM_177833.2,430-448).
gctgcatgggtattccaat

SEQ ID NO: 799582 - DNA, 19 bp, Mus musculus
  siRNA target sequence for C230050L11 (NM_177833.2,458-476).
gcagccatatctattccaa

SEQ ID NO: 799583 - DNA, 19 bp, Mus musculus
  siRNA target sequence for C230050L11 (NM_177833.2,501-519).
gtccctcttcctatctgta

SEQ ID NO: 799584 - DNA, 19 bp, Mus musculus
  siRNA target sequence for C230050L11 (NM_177833.2,505-523).
ctcttcctatctgtataga

SEQ ID NO: 799585 - DNA, 19 bp, Mus musculus
  siRNA target sequence for C230050L11 (NM_177833.2,549-567).
gcaggcctacagtactata

SEQ ID NO: 799586 - DNA, 19 bp, Mus musculus
  siRNA target sequence for C230050L11 (NM_177833.2,552-570).
ggcctacagtactatataa

SEQ ID NO: 799587 - DNA, 19 bp, Mus musculus
  siRNA target sequence for C230050L11 (NM_177833.2,588-606).
ggccgtgcttgctatcctt

SEQ ID NO: 799588 - DNA, 19 bp, Mus musculus
  siRNA target sequence for C230050L11 (NM_177833.2,705-723).
cctcaggagttcctgttat

SEQ ID NO: 799589 - DNA, 19 bp, Mus musculus
  siRNA target sequence for C230050L11 (NM_177833.2,711-729).
gagttcctgttattagaga

SEQ ID NO: 799590 - DNA, 19 bp, Mus musculus
  siRNA target sequence for A130096K20 (NM_177835.2,295-313).
cgcatgctcatccataaga

SEQ ID NO: 799591 - DNA, 19 bp, Mus musculus
  siRNA target sequence for A130096K20 (NM_177835.2,408-426).
gtcaggagctcgtgtaaat

SEQ ID NO: 799592 - DNA, 19 bp, Mus musculus
  siRNA target sequence for A130096K20 (NM_177835.2,486-504).
ggcagtgcaagtattgatt

SEQ ID NO: 799593 - DNA, 19 bp, Mus musculus
  siRNA target sequence for A130096K20 (NM_177835.2,487-505).
gcagtgcaagtattgatta

SEQ ID NO: 799594 - DNA, 19 bp, Mus musculus
  siRNA target sequence for A130096K20 (NM_177835.2,488-506).
cagtgcaagtattgattaa

SEQ ID NO: 799595 - DNA, 19 bp, Mus musculus
  siRNA target sequence for A130096K20 (NM_177835.2,493-511).
caagtattgattaaacact

SEQ ID NO: 799596 - DNA, 19 bp, Mus musculus
  siRNA target sequence for A130096K20 (NM_177835.2,678-696).
catggagatggtcaattta

SEQ ID NO: 799597 - DNA, 19 bp, Mus musculus
  siRNA target sequence for A130096K20 (NM_177835.2,703-721).
gccaaaggggcaaacatca

SEQ ID NO: 799598 - DNA, 19 bp, Mus musculus
  siRNA target sequence for A130096K20 (NM_177835.2,713-731).
caaacatcaatgcatttga

SEQ ID NO: 799599 - DNA, 19 bp, Mus musculus
  siRNA target sequence for A130096K20 (NM_177835.2,784-802).
gttgtggcgctgctcatta

SEQ ID NO: 799600 - DNA, 19 bp, Mus musculus
  siRNA target sequence for A130096K20 (NM_177835.2,789-807).
ggcgctgctcattaaccat

SEQ ID NO: 799601 - DNA, 19 bp, Mus musculus
  siRNA target sequence for A130096K20 (NM_177835.2,817-835).
gttacctgcaaggataaga

SEQ ID NO: 799602 - DNA, 19 bp, Mus musculus
  siRNA target sequence for A130096K20 (NM_177835.2,908-926).
gggtggagattgatgaaat

SEQ ID NO: 799603 - DNA, 19 bp, Mus musculus
  siRNA target sequence for A130096K20 (NM_177835.2,971-989).
gccaggatgctgtcgttaa

SEQ ID NO: 799604 - DNA, 19 bp, Mus musculus
  siRNA target sequence for A130096K20 (NM_177835.2,1015-1033).
gtgaatcagcccaacaaca

SEQ ID NO: 799605 - DNA, 19 bp, Mus musculus
  siRNA target sequence for AW046396 (NM_177836.2,496-514).
cactggcccatttttacca

SEQ ID NO: 799606 - DNA, 19 bp, Mus musculus
  siRNA target sequence for AW046396 (NM_177836.2,502-520).
cccatttttaccaagaaga

SEQ ID NO: 799607 - DNA, 19 bp, Mus musculus
  siRNA target sequence for AW046396 (NM_177836.2,513-531).
caagaagacatccagataa

SEQ ID NO: 799608 - DNA, 19 bp, Mus musculus
  siRNA target sequence for AW046396 (NM_177836.2,516-534).
gaagacatccagataaact

SEQ ID NO: 799609 - DNA, 19 bp, Mus musculus
  siRNA target sequence for AW046396 (NM_177836.2,527-545).
gataaactatgcatttctt

SEQ ID NO: 799610 - DNA, 19 bp, Mus musculus
  siRNA target sequence for AW046396 (NM_177836.2,547-565).
ccggcactgagttactttt

SEQ ID NO: 799611 - DNA, 19 bp, Mus musculus
  siRNA target sequence for AW046396 (NM_177836.2,548-566).
cggcactgagttacttttt

SEQ ID NO: 799612 - DNA, 19 bp, Mus musculus
  siRNA target sequence for AW046396 (NM_177836.2,605-623).
cttaagttttacaacatat

SEQ ID NO: 799613 - DNA, 19 bp, Mus musculus
  siRNA target sequence for AW046396 (NM_177836.2,690-708).
cccaaagatatctttaagt

SEQ ID NO: 799614 - DNA, 19 bp, Mus musculus
  siRNA target sequence for AW046396 (NM_177836.2,692-710).
caaagatatctttaagtgt

SEQ ID NO: 799615 - DNA, 19 bp, Mus musculus
  siRNA target sequence for 6530439I21 (NM_177837.2,81-99).
gtgggatcttcctttccta

SEQ ID NO: 799616 - DNA, 19 bp, Mus musculus
  siRNA target sequence for A230106N23 (NM_177838.2,466-484).
gatcactggcggaatccta

SEQ ID NO: 799617 - DNA, 19 bp, Mus musculus
  siRNA target sequence for A230106N23 (NM_177838.2,493-511).
gatcctcctctgtatcatt

SEQ ID NO: 799618 - DNA, 19 bp, Mus musculus
  siRNA target sequence for A230106N23 (NM_177838.2,751-769).
ccgcacccccttttacata

SEQ ID NO: 799619 - DNA, 19 bp, Mus musculus
  siRNA target sequence for A230106N23 (NM_177838.2,822-840).
cccctacacactacaaaga

SEQ ID NO: 799620 - DNA, 19 bp, Mus musculus
  siRNA target sequence for A230106N23 (NM_177838.2,846-864).
gaaccccatccctcaagtt

SEQ ID NO: 799621 - DNA, 19 bp, Mus musculus
  siRNA target sequence for A230106N23 (NM_177838.2,905-923).
gggcatgaggccttcacta

SEQ ID NO: 799622 - DNA, 19 bp, Mus musculus
  siRNA target sequence for A230106N23 (NM_177838.2,907-925).
gcatgaggccttcactaat

SEQ ID NO: 799623 - DNA, 19 bp, Mus musculus
  siRNA target sequence for A230106N23 (NM_177838.2,911-929).
gaggccttcactaatccaa

SEQ ID NO: 799624 - DNA, 19 bp, Mus musculus
  siRNA target sequence for A230106N23 (NM_177838.2,932-950).
gctattagtaccgatgtat

SEQ ID NO: 799625 - DNA, 19 bp, Mus musculus
  siRNA target sequence for 9230101D24 (NM_177840.2,767-785).
gaggcccttctcacatctt

SEQ ID NO: 799626 - DNA, 19 bp, Mus musculus
  siRNA target sequence for 9230101D24 (NM_177840.2,839-857).
cccgatgggtgtttgagaa

SEQ ID NO: 799627 - DNA, 19 bp, Mus musculus
  siRNA target sequence for 9230101D24 (NM_177840.2,840-858).
ccgatgggtgtttgagaat

SEQ ID NO: 799628 - DNA, 19 bp, Mus musculus
  siRNA target sequence for 9230101D24 (NM_177840.2,860-878).
cctctctgggtatattgga

SEQ ID NO: 799629 - DNA, 19 bp, Mus musculus
  siRNA target sequence for 9230101D24 (NM_177840.2,863-881).
ctctgggtatattggatta

SEQ ID NO: 799630 - DNA, 19 bp, Mus musculus
  siRNA target sequence for 9230101D24 (NM_177840.2,883-901).
cgggtactgggcactaact

SEQ ID NO: 799631 - DNA, 19 bp, Mus musculus
  siRNA target sequence for 9230101D24 (NM_177840.2,886-904).
gtactgggcactaacttca

SEQ ID NO: 799632 - DNA, 19 bp, Mus musculus
  siRNA target sequence for 9230101D24 (NM_177840.2,893-911).
gcactaacttcaaagacta

SEQ ID NO: 799633 - DNA, 19 bp, Mus musculus
  siRNA target sequence for 4932418E24 (NM_177841.2,197-215).
gtgatgcccacctccttaa

SEQ ID NO: 799634 - DNA, 19 bp, Mus musculus
  siRNA target sequence for 4932418E24 (NM_177841.2,397-415).
gttgagtccacctcaaaca

SEQ ID NO: 799635 - DNA, 19 bp, Mus musculus
  siRNA target sequence for 4932418E24 (NM_177841.2,400-418).
gagtccacctcaaacagtt

SEQ ID NO: 799636 - DNA, 19 bp, Mus musculus
  siRNA target sequence for 4932418E24 (NM_177841.2,449-467).
gatccaagcccctacatga

SEQ ID NO: 799637 - DNA, 19 bp, Mus musculus
  siRNA target sequence for 4932418E24 (NM_177841.2,529-547).
gtcatccggcagaatgtct

SEQ ID NO: 799638 - DNA, 19 bp, Mus musculus
  siRNA target sequence for 4932418E24 (NM_177841.2,563-581).
catgaatcatgcacacttt

SEQ ID NO: 799639 - DNA, 19 bp, Mus musculus
  siRNA target sequence for 4932418E24 (NM_177841.2,738-756).
gtgcctcgtgcctctacaa

SEQ ID NO: 799640 - DNA, 19 bp, Mus musculus
  siRNA target sequence for 4932418E24 (NM_177841.2,740-758).
gcctcgtgcctctacaaaa

SEQ ID NO: 799641 - DNA, 19 bp, Mus musculus
  siRNA target sequence for 4932418E24 (NM_177841.2,901-919).
ggttccccagcatcatact

SEQ ID NO: 799642 - DNA, 19 bp, Mus musculus
  siRNA target sequence for 4932418E24 (NM_177841.2,902-920).
gttccccagcatcatactt

SEQ ID NO: 799643 - DNA, 19 bp, Mus musculus
  siRNA target sequence for 4932418E24 (NM_177841.2,907-925).
ccagcatcatacttcagtt

SEQ ID NO: 799644 - DNA, 19 bp, Mus musculus
  siRNA target sequence for 4932418E24 (NM_177841.2,921-939).
cagttccaaggacaaactt

SEQ ID NO: 799645 - DNA, 19 bp, Mus musculus
  siRNA target sequence for 4932418E24 (NM_177841.2,937-955).
cttcaaaaaggtcaaaaat

SEQ ID NO: 799646 - DNA, 19 bp, Mus musculus
  siRNA target sequence for 4932418E24 (NM_177841.2,971-989).
gagatctcaaagtcttcta

SEQ ID NO: 799647 - DNA, 19 bp, Mus musculus
  siRNA target sequence for 4932418E24 (NM_177841.2,1055-1073).
gcccacacctggttgtgta

SEQ ID NO: 799648 - DNA, 19 bp, Mus musculus
  siRNA target sequence for 4932418E24 (NM_177841.2,1056-1074).
cccacacctggttgtgtaa

SEQ ID NO: 799649 - DNA, 19 bp, Mus musculus
  siRNA target sequence for 4932418E24 (NM_177841.2,1057-1075).
ccacacctggttgtgtaaa

SEQ ID NO: 799650 - DNA, 19 bp, Mus musculus
  siRNA target sequence for 4932418E24 (NM_177841.2,1175-1193).
caagacctgcgccaacaaa

SEQ ID NO: 799651 - DNA, 19 bp, Mus musculus
  siRNA target sequence for 4932418E24 (NM_177841.2,1232-1250).
gacaggaagctctcactat

SEQ ID NO: 799652 - DNA, 19 bp, Mus musculus
  siRNA target sequence for 4932418E24 (NM_177841.2,1241-1259).
ctctcactatcgaaaccaa

SEQ ID NO: 799653 - DNA, 19 bp, Mus musculus
  siRNA target sequence for 4932418E24 (NM_177841.2,1489-1507).
gagcaccccagaaaaacca

SEQ ID NO: 799654 - DNA, 19 bp, Mus musculus
  siRNA target sequence for 4932418E24 (NM_177841.2,1497-1515).
cagaaaaaccacgtttctt

SEQ ID NO: 799655 - DNA, 19 bp, Mus musculus
  siRNA target sequence for 4932418E24 (NM_177841.2,1683-1701).
gtgaagatcgggaggtatt

SEQ ID NO: 799656 - DNA, 19 bp, Mus musculus
  siRNA target sequence for 4932418E24 (NM_177841.2,1748-1766).
caggatccctggagtaatt

SEQ ID NO: 799657 - DNA, 19 bp, Mus musculus
  siRNA target sequence for 4932418E24 (NM_177841.2,1750-1768).
ggatccctggagtaattct

SEQ ID NO: 799658 - DNA, 19 bp, Mus musculus
  siRNA target sequence for 4932418E24 (NM_177841.2,1751-1769).
gatccctggagtaattctt

SEQ ID NO: 799659 - DNA, 19 bp, Mus musculus
  siRNA target sequence for 4932418E24 (NM_177841.2,1755-1773).
cctggagtaattcttttgt

SEQ ID NO: 799660 - DNA, 19 bp, Mus musculus
  siRNA target sequence for 4932418E24 (NM_177841.2,2121-2139).
ctggcatcgtcacttttgt

SEQ ID NO: 799661 - DNA, 19 bp, Mus musculus
  siRNA target sequence for 4932418E24 (NM_177841.2,2276-2294).
ccgtggaaccgcattgaga

SEQ ID NO: 799662 - DNA, 19 bp, Mus musculus
  siRNA target sequence for 4932418E24 (NM_177841.2,2375-2393).
caacgtgttgacatcctaa

SEQ ID NO: 799663 - DNA, 19 bp, Mus musculus
  siRNA target sequence for 4932418E24 (NM_177841.2,2503-2521).
ctcttacctcagaacctta

SEQ ID NO: 799664 - DNA, 19 bp, Mus musculus
  siRNA target sequence for 4932418E24 (NM_177841.2,2512-2530).
cagaaccttaatgtctaaa

SEQ ID NO: 799665 - DNA, 19 bp, Mus musculus
  siRNA target sequence for 4932418E24 (NM_177841.2,2595-2613).
gcttccaggatggtgaaat

SEQ ID NO: 799666 - DNA, 19 bp, Mus musculus
  siRNA target sequence for 4932418E24 (NM_177841.2,2599-2617).
ccaggatggtgaaatgcta

SEQ ID NO: 799667 - DNA, 19 bp, Mus musculus
  siRNA target sequence for 4932418E24 (NM_177841.2,2654-2672).
ctggggacccacattgaaa

SEQ ID NO: 799668 - DNA, 19 bp, Mus musculus
  siRNA target sequence for 4932418E24 (NM_177841.2,2837-2855).
ctcggtgcgtgcatgaaga

SEQ ID NO: 799669 - DNA, 19 bp, Mus musculus
  siRNA target sequence for 4932418E24 (NM_177841.2,2898-2916).
ccctttggcaggaagagat

SEQ ID NO: 799670 - DNA, 19 bp, Mus musculus
  siRNA target sequence for 4932418E24 (NM_177841.2,2909-2927).
gaagagatgccagaagtaa

SEQ ID NO: 799671 - DNA, 19 bp, Mus musculus
  siRNA target sequence for C130021I20 (NM_177842.2,1362-1380).
ctaaggaagaacaatacga

SEQ ID NO: 799672 - DNA, 19 bp, Mus musculus
  siRNA target sequence for C130021I20 (NM_177842.2,1448-1466).
gcccgtctcttctgtacaa

SEQ ID NO: 799673 - DNA, 19 bp, Mus musculus
  siRNA target sequence for C130021I20 (NM_177842.2,1500-1518).
cgcaggtggcctatctctt

SEQ ID NO: 799674 - DNA, 19 bp, Mus musculus
  siRNA target sequence for C130021I20 (NM_177842.2,1615-1633).
gctggaatcgcaagaaaca

SEQ ID NO: 799675 - DNA, 19 bp, Mus musculus
  siRNA target sequence for C130021I20 (NM_177842.2,1618-1636).
ggaatcgcaagaaacaaaa

SEQ ID NO: 799676 - DNA, 19 bp, Mus musculus
  siRNA target sequence for A830093M07 (NM_177843.2,1282-1300).
ggactcctgtatcaatgtt

SEQ ID NO: 799677 - DNA, 19 bp, Mus musculus
  siRNA target sequence for A830093M07 (NM_177843.2,1283-1301).
gactcctgtatcaatgttt

SEQ ID NO: 799678 - DNA, 19 bp, Mus musculus
  siRNA target sequence for A830093M07 (NM_177843.2,1346-1364).
gctgtcccagcctaaagga

SEQ ID NO: 799679 - DNA, 19 bp, Mus musculus
  siRNA target sequence for A830093M07 (NM_177843.2,1347-1365).
ctgtcccagcctaaaggat

SEQ ID NO: 799680 - DNA, 19 bp, Mus musculus
  siRNA target sequence for A830093M07 (NM_177843.2,1355-1373).
gcctaaaggatttaattat

SEQ ID NO: 799681 - DNA, 19 bp, Mus musculus
  siRNA target sequence for A830093M07 (NM_177843.2,1528-1546).
gtcctagaagtgatcctta

SEQ ID NO: 799682 - DNA, 19 bp, Mus musculus
  siRNA target sequence for A830093M07 (NM_177843.2,1531-1549).
ctagaagtgatccttagtt

SEQ ID NO: 799683 - DNA, 19 bp, Mus musculus
  siRNA target sequence for A730036I17 (NM_177847.2,325-343).
cttttacctgacatcttgt

SEQ ID NO: 799684 - DNA, 19 bp, Mus musculus
  siRNA target sequence for A730036I17 (NM_177847.2,468-486).
cactgcagatattgagaaa

SEQ ID NO: 799685 - DNA, 19 bp, Mus musculus
  siRNA target sequence for A730036I17 (NM_177847.2,670-688).
ccgtgtgtactttcataat

SEQ ID NO: 799686 - DNA, 19 bp, Mus musculus
  siRNA target sequence for A730036I17 (NM_177847.2,723-741).
ctcgaggccacaatggata

SEQ ID NO: 799687 - DNA, 19 bp, Mus musculus
  siRNA target sequence for 9430083I22 (NM_177848.2,681-699).
gactcactcagcactttta

SEQ ID NO: 799688 - DNA, 19 bp, Mus musculus
  siRNA target sequence for 9430083I22 (NM_177848.2,714-732).
ctctgttctgacatctcat

SEQ ID NO: 799689 - DNA, 19 bp, Mus musculus
  siRNA target sequence for 9430083I22 (NM_177848.2,784-802).
ctgttttacttactttcta

SEQ ID NO: 799690 - DNA, 19 bp, Mus musculus
  siRNA target sequence for 9430083I22 (NM_177848.2,786-804).
gttttacttactttctatt

SEQ ID NO: 799691 - DNA, 19 bp, Mus musculus
  siRNA target sequence for A530013C23 (NM_177851.2,496-514).
gccttagttgggaagttct

SEQ ID NO: 799692 - DNA, 19 bp, Mus musculus
  siRNA target sequence for A530013C23 (NM_177851.2,497-515).
ccttagttgggaagttcta

SEQ ID NO: 799693 - DNA, 19 bp, Mus musculus
  siRNA target sequence for A530013C23 (NM_177851.2,498-516).
cttagttgggaagttctat

SEQ ID NO: 799694 - DNA, 19 bp, Mus musculus
  siRNA target sequence for A930011G24 (NM_177853.2,856-874).
caatgatctgtctcataga

SEQ ID NO: 799695 - DNA, 19 bp, Mus musculus
  siRNA target sequence for A930011G24 (NM_177853.2,869-887).
catagaggtcacatagaga

SEQ ID NO: 799696 - DNA, 19 bp, Mus musculus
  siRNA target sequence for A930011G24 (NM_177853.2,889-907).
gtctgtgaccagttccatt

SEQ ID NO: 799697 - DNA, 19 bp, Mus musculus
  siRNA target sequence for A930011G24 (NM_177853.2,1027-1045).
gttgagaatgagacataga

SEQ ID NO: 799698 - DNA, 19 bp, Mus musculus
  siRNA target sequence for A930011G24 (NM_177853.2,1069-1087).
ggccttccctcccaaaaga

SEQ ID NO: 799699 - DNA, 19 bp, Mus musculus
  siRNA target sequence for A930011G24 (NM_177853.2,1105-1123).
gcccctgaagggaactctt

SEQ ID NO: 799700 - DNA, 19 bp, Mus musculus
  siRNA target sequence for 6030405A18 (NM_177854.2,666-684).
gtccaacgtctacatctat

SEQ ID NO: 799701 - DNA, 19 bp, Mus musculus
  siRNA target sequence for 6030405A18 (NM_177854.2,668-686).
ccaacgtctacatctatgt

SEQ ID NO: 799702 - DNA, 19 bp, Mus musculus
  siRNA target sequence for 6030405A18 (NM_177854.2,794-812).
gtgacgctgggagttcttt

SEQ ID NO: 799703 - DNA, 19 bp, Mus musculus
  siRNA target sequence for 6030405A18 (NM_177854.2,820-838).
ctagaggtgtgtagtatct

SEQ ID NO: 799704 - DNA, 19 bp, Mus musculus
  siRNA target sequence for 6030405A18 (NM_177854.2,844-862).
cagaggtcgacgttttcaa

SEQ ID NO: 799705 - DNA, 19 bp, Mus musculus
  siRNA target sequence for AU044581 (NM_177855.2,483-501).
cttacagctgtgaatgtaa

SEQ ID NO: 799706 - DNA, 19 bp, Mus musculus
  siRNA target sequence for AU044581 (NM_177855.2,550-568).
cagccagaaacattgtaat

SEQ ID NO: 799707 - DNA, 19 bp, Mus musculus
  siRNA target sequence for AU044581 (NM_177855.2,577-595).
ccaagatcggtgcgtattt

SEQ ID NO: 799708 - DNA, 19 bp, Mus musculus
  siRNA target sequence for AU044581 (NM_177855.2,588-606).
gcgtatttcagcagcatat

SEQ ID NO: 799709 - DNA, 19 bp, Mus musculus
  siRNA target sequence for AU044581 (NM_177855.2,589-607).
cgtatttcagcagcatatt

SEQ ID NO: 799710 - DNA, 19 bp, Mus musculus
  siRNA target sequence for AU044581 (NM_177855.2,601-619).
gcatattggccgagaaact

SEQ ID NO: 799711 - DNA, 19 bp, Mus musculus
  siRNA target sequence for AU044581 (NM_177855.2,658-676).
cccaagttaatgctaaaga

SEQ ID NO: 799712 - DNA, 19 bp, Mus musculus
  siRNA target sequence for AU044581 (NM_177855.2,700-718).
gatcgcagagtgcaattca

SEQ ID NO: 799713 - DNA, 19 bp, Mus musculus
  siRNA target sequence for AU044581 (NM_177855.2,704-722).
gcagagtgcaattcatagt

SEQ ID NO: 799714 - DNA, 19 bp, Mus musculus
  siRNA target sequence for AU044581 (NM_177855.2,742-760).
ggaataaaccacttgctat

SEQ ID NO: 799715 - DNA, 19 bp, Mus musculus
  siRNA target sequence for AU044581 (NM_177855.2,757-775).
ctatcttggcaaaaaagga

SEQ ID NO: 799716 - DNA, 19 bp, Mus musculus
  siRNA target sequence for AU044581 (NM_177855.2,830-848).
ggacgtctttgcatattta

SEQ ID NO: 799717 - DNA, 19 bp, Mus musculus
  siRNA target sequence for AU044581 (NM_177855.2,833-851).
cgtctttgcatatttagct

SEQ ID NO: 799718 - DNA, 19 bp, Mus musculus
  siRNA target sequence for AU044581 (NM_177855.2,834-852).
gtctttgcatatttagcta

SEQ ID NO: 799719 - DNA, 19 bp, Mus musculus
  siRNA target sequence for AU044581 (NM_177855.2,840-858).
gcatatttagctaagtatt

SEQ ID NO: 799720 - DNA, 19 bp, Mus musculus
  siRNA target sequence for AU044581 (NM_177855.2,854-872).
gtattctgtgccaatggtt

SEQ ID NO: 799721 - DNA, 19 bp, Mus musculus
  siRNA target sequence for AU044581 (NM_177855.2,876-894).
gcaacgtggctgatcaaga

SEQ ID NO: 799722 - DNA, 19 bp, Mus musculus
  siRNA target sequence for AU044581 (NM_177855.2,896-914).
gacttgtgcctattactct

SEQ ID NO: 799723 - DNA, 19 bp, Mus musculus
  siRNA target sequence for AU044581 (NM_177855.2,903-921).
gcctattactctgctattt

SEQ ID NO: 799724 - DNA, 19 bp, Mus musculus
  siRNA target sequence for AU044581 (NM_177855.2,905-923).
ctattactctgctatttct

SEQ ID NO: 799725 - DNA, 19 bp, Mus musculus
  siRNA target sequence for AU044581 (NM_177855.2,949-967).
ctcccgatcccaatttgga

SEQ ID NO: 799726 - DNA, 19 bp, Mus musculus
  siRNA target sequence for AU044581 (NM_177855.2,1149-1167).
gaaaagcacgagtatttga

SEQ ID NO: 799727 - DNA, 19 bp, Mus musculus
  siRNA target sequence for AU044581 (NM_177855.2,1171-1189).
ggatcctggacgtcttaga

SEQ ID NO: 799728 - DNA, 19 bp, Mus musculus
  siRNA target sequence for AU044581 (NM_177855.2,1247-1265).
gtattcagatgagtttgtt

SEQ ID NO: 799729 - DNA, 19 bp, Mus musculus
  siRNA target sequence for AU044581 (NM_177855.2,1284-1302).
cgtcgtctcgcgtactttt

SEQ ID NO: 799730 - DNA, 19 bp, Mus musculus
  siRNA target sequence for AU044581 (NM_177855.2,1356-1374).
cactcgccccacatgataa

SEQ ID NO: 799731 - DNA, 19 bp, Mus musculus
  siRNA target sequence for AU044581 (NM_177855.2,1448-1466).
ggccttctcggatttcctt

SEQ ID NO: 799732 - DNA, 19 bp, Mus musculus
  siRNA target sequence for AU044581 (NM_177855.2,1449-1467).
gccttctcggatttccttt

SEQ ID NO: 799733 - DNA, 19 bp, Mus musculus
  siRNA target sequence for AU044581 (NM_177855.2,1491-1509).
gtttatggacttagttgta

SEQ ID NO: 799734 - DNA, 19 bp, Mus musculus
  siRNA target sequence for AU044581 (NM_177855.2,1542-1560).
gccttggtgtggaattatt

SEQ ID NO: 799735 - DNA, 19 bp, Mus musculus
  siRNA target sequence for AU044581 (NM_177855.2,1553-1571).
gaattattccaccaatgaa

SEQ ID NO: 799736 - DNA, 19 bp, Mus musculus
  siRNA target sequence for AU044581 (NM_177855.2,1642-1660).
gtgggaacacggctttcaa

SEQ ID NO: 799737 - DNA, 19 bp, Mus musculus
  siRNA target sequence for AU044581 (NM_177855.2,1664-1682).
gcaggttcgggcaaggatt

SEQ ID NO: 799738 - DNA, 19 bp, Mus musculus
  siRNA target sequence for AU044581 (NM_177855.2,1665-1683).
caggttcgggcaaggattt

SEQ ID NO: 799739 - DNA, 19 bp, Mus musculus
  siRNA target sequence for AU044581 (NM_177855.2,1667-1685).
ggttcgggcaaggatttat

SEQ ID NO: 799740 - DNA, 19 bp, Mus musculus
  siRNA target sequence for AU044581 (NM_177855.2,1759-1777).
cgacggcaggggtgactat

SEQ ID NO: 799741 - DNA, 19 bp, Mus musculus
  siRNA target sequence for AU044581 (NM_177855.2,1763-1781).
ggcaggggtgactattagt

SEQ ID NO: 799742 - DNA, 19 bp, Mus musculus
  siRNA target sequence for AU044581 (NM_177855.2,1780-1798).
gtcgggtcttgcatacact

SEQ ID NO: 799743 - DNA, 19 bp, Mus musculus
  siRNA target sequence for AU044581 (NM_177855.2,1790-1808).
gcatacactggaagtctta

SEQ ID NO: 799744 - DNA, 19 bp, Mus musculus
  siRNA target sequence for AU044581 (NM_177855.2,1803-1821).
gtcttagatcgtcattgtt

SEQ ID NO: 799745 - DNA, 19 bp, Mus musculus
  siRNA target sequence for AU044581 (NM_177855.2,1831-1849).
ctgattccagcaattcaat

SEQ ID NO: 799746 - DNA, 19 bp, Mus musculus
  siRNA target sequence for AU044581 (NM_177855.2,1877-1895).
ggcaaaccaaaacaaagat

SEQ ID NO: 799747 - DNA, 19 bp, Mus musculus
  siRNA target sequence for AU044581 (NM_177855.2,1928-1946).
ggtgacattgttatgtgaa

SEQ ID NO: 799748 - DNA, 19 bp, Mus musculus
  siRNA target sequence for AU044581 (NM_177855.2,1929-1947).
gtgacattgttatgtgaat

SEQ ID NO: 799749 - DNA, 19 bp, Mus musculus
  siRNA target sequence for AU044581 (NM_177855.2,2089-2107).
ctcttgcaggatctagttt

SEQ ID NO: 799750 - DNA, 19 bp, Mus musculus
  siRNA target sequence for AU044581 (NM_177855.2,2182-2200).
gcgagaaggtagagtttgt

SEQ ID NO: 799751 - DNA, 19 bp, Mus musculus
  siRNA target sequence for AU044581 (NM_177855.2,2273-2291).
catctctcgaggagactta

SEQ ID NO: 799752 - DNA, 19 bp, Mus musculus
  siRNA target sequence for AU044581 (NM_177855.2,2276-2294).
ctctcgaggagacttatca

SEQ ID NO: 799753 - DNA, 19 bp, Mus musculus
  siRNA target sequence for AU044581 (NM_177855.2,2278-2296).
ctcgaggagacttatcagt

SEQ ID NO: 799754 - DNA, 19 bp, Mus musculus
  siRNA target sequence for AU044581 (NM_177855.2,2280-2298).
cgaggagacttatcagtta

SEQ ID NO: 799755 - DNA, 19 bp, Mus musculus
  siRNA target sequence for AU044581 (NM_177855.2,2398-2416).
gagaatcctgtgagaacat

SEQ ID NO: 799756 - DNA, 19 bp, Mus musculus
  siRNA target sequence for AU044581 (NM_177855.2,2607-2625).
gtgattggctgtcagatta

SEQ ID NO: 799757 - DNA, 19 bp, Mus musculus
  siRNA target sequence for 4933431E20 (NM_177858.2,1965-1983).
gctaggtcacactctctaa

SEQ ID NO: 799758 - DNA, 19 bp, Mus musculus
  siRNA target sequence for 4933431E20 (NM_177858.2,2002-2020).
cctgtggttctcccattta

SEQ ID NO: 799759 - DNA, 19 bp, Mus musculus
  siRNA target sequence for 4933431E20 (NM_177858.2,2129-2147).
cattggggcctggaatcaa

SEQ ID NO: 799760 - DNA, 19 bp, Mus musculus
  siRNA target sequence for 4933431E20 (NM_177858.2,2141-2159).
gaatcaaggagcactagaa

SEQ ID NO: 799761 - DNA, 19 bp, Mus musculus
  siRNA target sequence for 4933431E20 (NM_177858.2,2162-2180).
cagaggtcatcccatctta

SEQ ID NO: 799762 - DNA, 19 bp, Mus musculus
  siRNA target sequence for 4933431E20 (NM_177858.2,2164-2182).
gaggtcatcccatcttaca

SEQ ID NO: 799763 - DNA, 19 bp, Mus musculus
  siRNA target sequence for 4933431E20 (NM_177858.2,2166-2184).
ggtcatcccatcttacaaa

SEQ ID NO: 799764 - DNA, 19 bp, Mus musculus
  siRNA target sequence for 4933431E20 (NM_177858.2,2200-2218).
gtattgggtcccttctact

SEQ ID NO: 799765 - DNA, 19 bp, Mus musculus
  siRNA target sequence for 4933431E20 (NM_177858.2,2224-2242).
cccatcaggatgcttatct

SEQ ID NO: 799766 - DNA, 19 bp, Mus musculus
  siRNA target sequence for 4921525H12 (NM_177859.2,198-216).
ggacgaaaccgacttttca

SEQ ID NO: 799767 - DNA, 19 bp, Mus musculus
  siRNA target sequence for 4921525H12 (NM_177859.2,201-219).
cgaaaccgacttttcagaa

SEQ ID NO: 799768 - DNA, 19 bp, Mus musculus
  siRNA target sequence for 4921525H12 (NM_177859.2,206-224).
ccgacttttcagaagatat

SEQ ID NO: 799769 - DNA, 19 bp, Mus musculus
  siRNA target sequence for 4921525H12 (NM_177859.2,210-228).
cttttcagaagatatgact

SEQ ID NO: 799770 - DNA, 19 bp, Mus musculus
  siRNA target sequence for 4921525H12 (NM_177859.2,417-435).
ggataagatgactgaactt

SEQ ID NO: 799771 - DNA, 19 bp, Mus musculus
  siRNA target sequence for 4921525H12 (NM_177859.2,436-454).
gtcggcaataggcatgata

SEQ ID NO: 799772 - DNA, 19 bp, Mus musculus
  siRNA target sequence for 4921525H12 (NM_177859.2,438-456).
cggcaataggcatgataaa

SEQ ID NO: 799773 - DNA, 19 bp, Mus musculus
  siRNA target sequence for 4921525H12 (NM_177859.2,440-458).
gcaataggcatgataaaga

SEQ ID NO: 799774 - DNA, 19 bp, Mus musculus
  siRNA target sequence for 4921525H12 (NM_177859.2,441-459).
caataggcatgataaagat

SEQ ID NO: 799775 - DNA, 19 bp, Mus musculus
  siRNA target sequence for 4921525H12 (NM_177859.2,516-534).
ccacgtctcagatatttta

SEQ ID NO: 799776 - DNA, 19 bp, Mus musculus
  siRNA target sequence for 4921525H12 (NM_177859.2,606-624).
gaatgctgacagtcttgaa

SEQ ID NO: 799777 - DNA, 19 bp, Mus musculus
  siRNA target sequence for 4921525H12 (NM_177859.2,626-644).
gctcagatactcttataaa

SEQ ID NO: 799778 - DNA, 19 bp, Mus musculus
  siRNA target sequence for 4921525H12 (NM_177859.2,709-727).
cccagtccccaaaatggtt

SEQ ID NO: 799779 - DNA, 19 bp, Mus musculus
  siRNA target sequence for 4921525H12 (NM_177859.2,713-731).
gtccccaaaatggttcaat

SEQ ID NO: 799780 - DNA, 19 bp, Mus musculus
  siRNA target sequence for 4921525H12 (NM_177859.2,715-733).
ccccaaaatggttcaataa

SEQ ID NO: 799781 - DNA, 19 bp, Mus musculus
  siRNA target sequence for 4921525H12 (NM_177859.2,717-735).
ccaaaatggttcaataaat

SEQ ID NO: 799782 - DNA, 19 bp, Mus musculus
  siRNA target sequence for 4921525H12 (NM_177859.2,777-795).
cgcctctcccttagaagaa

SEQ ID NO: 799783 - DNA, 19 bp, Mus musculus
  siRNA target sequence for 4921525H12 (NM_177859.2,825-843).
ggaagatccaagctttcta

SEQ ID NO: 799784 - DNA, 19 bp, Mus musculus
  siRNA target sequence for 4921525H12 (NM_177859.2,856-874).
ggtccaggtgataaatata

SEQ ID NO: 799785 - DNA, 19 bp, Mus musculus
  siRNA target sequence for 4921525H12 (NM_177859.2,857-875).
gtccaggtgataaatataa

SEQ ID NO: 799786 - DNA, 19 bp, Mus musculus
  siRNA target sequence for 4921525H12 (NM_177859.2,859-877).
ccaggtgataaatataaaa

SEQ ID NO: 799787 - DNA, 19 bp, Mus musculus
  siRNA target sequence for 4921525H12 (NM_177859.2,906-924).
gctgccagacaaagcaaat

SEQ ID NO: 799788 - DNA, 19 bp, Mus musculus
  siRNA target sequence for 4921525H12 (NM_177859.2,907-925).
ctgccagacaaagcaaatt

SEQ ID NO: 799789 - DNA, 19 bp, Mus musculus
  siRNA target sequence for 4921525H12 (NM_177859.2,926-944).
caggcgactggctcagata

SEQ ID NO: 799790 - DNA, 19 bp, Mus musculus
  siRNA target sequence for 4921525H12 (NM_177859.2,928-946).
ggcgactggctcagataca

SEQ ID NO: 799791 - DNA, 19 bp, Mus musculus
  siRNA target sequence for 4921525H12 (NM_177859.2,1049-1067).
ctccgaggttgacgaataa

SEQ ID NO: 799792 - DNA, 19 bp, Mus musculus
  siRNA target sequence for 4921525H12 (NM_177859.2,1051-1069).
ccgaggttgacgaataaat

SEQ ID NO: 799793 - DNA, 19 bp, Mus musculus
  siRNA target sequence for 4921525H12 (NM_177859.2,1053-1071).
gaggttgacgaataaatca

SEQ ID NO: 799794 - DNA, 19 bp, Mus musculus
  siRNA target sequence for 4921525H12 (NM_177859.2,1056-1074).
gttgacgaataaatcaaca

SEQ ID NO: 799795 - DNA, 19 bp, Mus musculus
  siRNA target sequence for 4921525H12 (NM_177859.2,1070-1088).
caacagttgtgcaagataa

SEQ ID NO: 799796 - DNA, 19 bp, Mus musculus
  siRNA target sequence for 4921525H12 (NM_177859.2,1098-1116).
cacgtctgggtcaaatcgt

SEQ ID NO: 799797 - DNA, 19 bp, Mus musculus
  siRNA target sequence for 4921525H12 (NM_177859.2,1106-1124).
ggtcaaatcgtgttgaaaa

SEQ ID NO: 799798 - DNA, 19 bp, Mus musculus
  siRNA target sequence for 4921525H12 (NM_177859.2,1107-1125).
gtcaaatcgtgttgaaaaa

SEQ ID NO: 799799 - DNA, 19 bp, Mus musculus
  siRNA target sequence for 4921525H12 (NM_177859.2,1126-1144).
caaccggagcagaaatgga

SEQ ID NO: 799800 - DNA, 19 bp, Mus musculus
  siRNA target sequence for 4921525H12 (NM_177859.2,1150-1168).
cctgaaccttcgcaacaaa

SEQ ID NO: 799801 - DNA, 19 bp, Mus musculus
  siRNA target sequence for 4921525H12 (NM_177859.2,1213-1231).
ggacttgaacctgagaaat

SEQ ID NO: 799802 - DNA, 19 bp, Mus musculus
  siRNA target sequence for 4921525H12 (NM_177859.2,1340-1358).
ctgaccaactgaagaataa

SEQ ID NO: 799803 - DNA, 19 bp, Mus musculus
  siRNA target sequence for 4921525H12 (NM_177859.2,1344-1362).
ccaactgaagaataaggta

SEQ ID NO: 799804 - DNA, 19 bp, Mus musculus
  siRNA target sequence for 4921525H12 (NM_177859.2,1359-1377).
ggtacaagaattttccaaa

SEQ ID NO: 799805 - DNA, 19 bp, Mus musculus
  siRNA target sequence for 4921525H12 (NM_177859.2,1398-1416).
ctgccatttgcaagacata

SEQ ID NO: 799806 - DNA, 19 bp, Mus musculus
  siRNA target sequence for 4921525H12 (NM_177859.2,1401-1419).
ccatttgcaagacataaga

SEQ ID NO: 799807 - DNA, 19 bp, Mus musculus
  siRNA target sequence for 4921525H12 (NM_177859.2,1420-1438).
ctgcagatgcgccttcatt

SEQ ID NO: 799808 - DNA, 19 bp, Mus musculus
  siRNA target sequence for D830013H12 (NM_177860.2,640-658).
gctcatgtactctccattt

SEQ ID NO: 799809 - DNA, 19 bp, Mus musculus
  siRNA target sequence for D830013H12 (NM_177860.2,666-684).
ctcccgagacttctactta

SEQ ID NO: 799810 - DNA, 19 bp, Mus musculus
  siRNA target sequence for D830013H12 (NM_177860.2,739-757).
gcagtatggtcatggaaaa

SEQ ID NO: 799811 - DNA, 19 bp, Mus musculus
  siRNA target sequence for D830013H12 (NM_177860.2,881-899).
ggactgattcggctttcaa

SEQ ID NO: 799812 - DNA, 19 bp, Mus musculus
  siRNA target sequence for D830013H12 (NM_177860.2,900-918).
ctgtcaccggtcaccaaat

SEQ ID NO: 799813 - DNA, 19 bp, Mus musculus
  siRNA target sequence for D830013H12 (NM_177860.2,902-920).
gtcaccggtcaccaaatga

SEQ ID NO: 799814 - DNA, 19 bp, Mus musculus
  siRNA target sequence for D830013H12 (NM_177860.2,904-922).
caccggtcaccaaatgact

SEQ ID NO: 799815 - DNA, 19 bp, Mus musculus
  siRNA target sequence for D830013H12 (NM_177860.2,906-924).
ccggtcaccaaatgactta

SEQ ID NO: 799816 - DNA, 19 bp, Mus musculus
  siRNA target sequence for D830013H12 (NM_177860.2,907-925).
cggtcaccaaatgacttat

SEQ ID NO: 799817 - DNA, 19 bp, Mus musculus
  siRNA target sequence for D830013H12 (NM_177860.2,909-927).
gtcaccaaatgacttatct

SEQ ID NO: 799818 - DNA, 19 bp, Mus musculus
  siRNA target sequence for 5330408M12Rik (NM_177861.2,57-75).
ggtcagatctcgttcttca

SEQ ID NO: 799819 - DNA, 19 bp, Mus musculus
  siRNA target sequence for 5330408M12Rik (NM_177861.2,58-76).
gtcagatctcgttcttcat

SEQ ID NO: 799820 - DNA, 19 bp, Mus musculus
  siRNA target sequence for 5330408M12Rik (NM_177861.2,89-107).
ccgcctaccttctcttagt

SEQ ID NO: 799821 - DNA, 19 bp, Mus musculus
  siRNA target sequence for 5330408M12Rik (NM_177861.2,90-108).
cgcctaccttctcttagtt

SEQ ID NO: 799822 - DNA, 19 bp, Mus musculus
  siRNA target sequence for 5330408M12Rik (NM_177861.2,118-136).
gtctcatgggcacaaatct

SEQ ID NO: 799823 - DNA, 19 bp, Mus musculus
  siRNA target sequence for 5330408M12Rik (NM_177861.2,168-186).
cgacttcaaccagtacttt

SEQ ID NO: 799824 - DNA, 19 bp, Mus musculus
  siRNA target sequence for 5330408M12Rik (NM_177861.2,241-259).
ctaggaacttcctgtgtat

SEQ ID NO: 799825 - DNA, 19 bp, Mus musculus
  siRNA target sequence for 5330408M12Rik (NM_177861.2,260-278).
gtctaccaggatatcatat

SEQ ID NO: 799826 - DNA, 19 bp, Mus musculus
  siRNA target sequence for 5330408M12Rik (NM_177861.2,262-280).
ctaccaggatatcatatga

SEQ ID NO: 799827 - DNA, 19 bp, Mus musculus
  siRNA target sequence for 5330408M12Rik (NM_177861.2,292-310).
ggaggaccttctattattt

SEQ ID NO: 799828 - DNA, 19 bp, Mus musculus
  siRNA target sequence for 5330408M12Rik (NM_177861.2,330-348).
catgaaaggcgttactaaa

SEQ ID NO: 799829 - DNA, 19 bp, Mus musculus
  siRNA target sequence for 5330408M12Rik (NM_177861.2,410-428).
ccactggccatatattagt

SEQ ID NO: 799830 - DNA, 19 bp, Mus musculus
  siRNA target sequence for 5330408M12Rik (NM_177861.2,471-489).
cgagctttgtgatgaaagt

SEQ ID NO: 799831 - DNA, 19 bp, Mus musculus
  siRNA target sequence for 5330408M12Rik (NM_177861.2,536-554).
gctgcgaaccaacatttgt

SEQ ID NO: 799832 - DNA, 19 bp, Mus musculus
  siRNA target sequence for 5330408M12Rik (NM_177861.2,539-557).
gcgaaccaacatttgtgaa

SEQ ID NO: 799833 - DNA, 19 bp, Mus musculus
  siRNA target sequence for 5330408M12Rik (NM_177861.2,540-558).
cgaaccaacatttgtgaat

SEQ ID NO: 799834 - DNA, 19 bp, Mus musculus
  siRNA target sequence for 5330408M12Rik (NM_177861.2,578-596).
gttcagagcctcacacttt

SEQ ID NO: 799835 - DNA, 19 bp, Mus musculus
  siRNA target sequence for 5330408M12Rik (NM_177861.2,617-635).
gcaacacagggaattttca

SEQ ID NO: 799836 - DNA, 19 bp, Mus musculus
  siRNA target sequence for 5330408M12Rik (NM_177861.2,634-652).
catcaacgtgtaatttcca

SEQ ID NO: 799837 - DNA, 19 bp, Mus musculus
  siRNA target sequence for 5330408M12Rik (NM_177861.2,667-685).
gagcttggcatgtcattaa

SEQ ID NO: 799838 - DNA, 19 bp, Mus musculus
  siRNA target sequence for 5330408M12Rik (NM_177861.2,669-687).
gcttggcatgtcattaaat

SEQ ID NO: 799839 - DNA, 19 bp, Mus musculus
  siRNA target sequence for 5330408M12Rik (NM_177861.2,695-713).
ggtttgccaagtatttgca

SEQ ID NO: 799840 - DNA, 19 bp, Mus musculus
  siRNA target sequence for 5330408M12Rik (NM_177861.2,770-788).
gaaatatgtgcgtgatgaa

SEQ ID NO: 799841 - DNA, 19 bp, Mus musculus
  siRNA target sequence for 5330408M12Rik (NM_177861.2,821-839).
cttgtcgactgttccatta

SEQ ID NO: 799842 - DNA, 19 bp, Mus musculus
  siRNA target sequence for 5330408M12Rik (NM_177861.2,824-842).
gtcgactgttccattacat

SEQ ID NO: 799843 - DNA, 19 bp, Mus musculus
  siRNA target sequence for 5330408M12Rik (NM_177861.2,826-844).
cgactgttccattacatct

SEQ ID NO: 799844 - DNA, 19 bp, Mus musculus
  siRNA target sequence for 5330408M12Rik (NM_177861.2,827-845).
gactgttccattacatctt

SEQ ID NO: 799845 - DNA, 19 bp, Mus musculus
  siRNA target sequence for 5330408M12Rik (NM_177861.2,940-958).
cctcaagttctcagtacta

SEQ ID NO: 799846 - DNA, 19 bp, Mus musculus
  siRNA target sequence for 5330408M12Rik (NM_177861.2,964-982).
cttcctacaaatttcagtt

SEQ ID NO: 799847 - DNA, 19 bp, Mus musculus
  siRNA target sequence for 5330408M12Rik (NM_177861.2,1030-1048).
cgaggaaacttcatcaaat

SEQ ID NO: 799848 - DNA, 19 bp, Mus musculus
  siRNA target sequence for 5330408M12Rik (NM_177861.2,1044-1062).
caaatggcaacctttagaa

SEQ ID NO: 799849 - DNA, 19 bp, Mus musculus
  siRNA target sequence for 5330408M12Rik (NM_177861.2,1130-1148).
cgtaccagcaaaattgtga

SEQ ID NO: 799850 - DNA, 19 bp, Mus musculus
  siRNA target sequence for 5330408M12Rik (NM_177861.2,1131-1149).
gtaccagcaaaattgtgaa

SEQ ID NO: 799851 - DNA, 19 bp, Mus musculus
  siRNA target sequence for 5330408M12Rik (NM_177861.2,1135-1153).
cagcaaaattgtgaaatct

SEQ ID NO: 799852 - DNA, 19 bp, Mus musculus
  siRNA target sequence for 5330408M12Rik (NM_177861.2,1145-1163).
gtgaaatctctctctctaa

SEQ ID NO: 799853 - DNA, 19 bp, Mus musculus
  siRNA target sequence for 5330408M12Rik (NM_177861.2,1160-1178).
ctaaactcctggttgactt

SEQ ID NO: 799854 - DNA, 19 bp, Mus musculus
  siRNA target sequence for 5330408M12Rik (NM_177861.2,1181-1199).
gcagccctgtattttatga

SEQ ID NO: 799855 - DNA, 19 bp, Mus musculus
  siRNA target sequence for 5330408M12Rik (NM_177861.2,1182-1200).
cagccctgtattttatgat

SEQ ID NO: 799856 - DNA, 19 bp, Mus musculus
  siRNA target sequence for 5330408M12Rik (NM_177861.2,1185-1203).
ccctgtattttatgatgtt

SEQ ID NO: 799857 - DNA, 19 bp, Mus musculus
  siRNA target sequence for 5330408M12Rik (NM_177861.2,1198-1216).
gatgtttacctcgaataca

SEQ ID NO: 799858 - DNA, 19 bp, Mus musculus
  siRNA target sequence for 5330408M12Rik (NM_177861.2,1244-1262).
ggcctatcccagtgttaaa

SEQ ID NO: 799859 - DNA, 19 bp, Mus musculus
  siRNA target sequence for 5330408M12Rik (NM_177861.2,1253-1271).
cagtgttaaacctaaatct

SEQ ID NO: 799860 - DNA, 19 bp, Mus musculus
  siRNA target sequence for 5330408M12Rik (NM_177861.2,1270-1288).
cttcaacacaacaaactgt

SEQ ID NO: 799861 - DNA, 19 bp, Mus musculus
  siRNA target sequence for 5330408M12Rik (NM_177861.2,1324-1342).
ctgactcggcgcattttct

SEQ ID NO: 799862 - DNA, 19 bp, Mus musculus
  siRNA target sequence for 5330408M12Rik (NM_177861.2,1326-1344).
gactcggcgcattttctta

SEQ ID NO: 799863 - DNA, 19 bp, Mus musculus
  siRNA target sequence for 5330408M12Rik (NM_177861.2,1328-1346).
ctcggcgcattttcttagt

SEQ ID NO: 799864 - DNA, 19 bp, Mus musculus
  siRNA target sequence for 5330408M12Rik (NM_177861.2,1341-1359).
cttagtggatgcagtaagt

SEQ ID NO: 799865 - DNA, 19 bp, Mus musculus
  siRNA target sequence for 5330408M12Rik (NM_177861.2,1352-1370).
cagtaagtgggcgagaaaa

SEQ ID NO: 799866 - DNA, 19 bp, Mus musculus
  siRNA target sequence for 5330408M12Rik (NM_177861.2,1378-1396).
ggaaatcagccaagagtaa

SEQ ID NO: 799867 - DNA, 19 bp, Mus musculus
  siRNA target sequence for 5330408M12Rik (NM_177861.2,1379-1397).
gaaatcagccaagagtaat

SEQ ID NO: 799868 - DNA, 19 bp, Mus musculus
  siRNA target sequence for 5330408M12Rik (NM_177861.2,1399-1417).
cgagttgctacccagattt

SEQ ID NO: 799869 - DNA, 19 bp, Mus musculus
  siRNA target sequence for 5330408M12Rik (NM_177861.2,1479-1497).
cattgcctacagtgacatt

SEQ ID NO: 799870 - DNA, 19 bp, Mus musculus
  siRNA target sequence for 5330408M12Rik (NM_177861.2,1545-1563).
gaagtatgagatgaatcaa

SEQ ID NO: 799871 - DNA, 19 bp, Mus musculus
  siRNA target sequence for 5330408M12Rik (NM_177861.2,1609-1627).
gggctggctgtgctatcat

SEQ ID NO: 799872 - DNA, 19 bp, Mus musculus
  siRNA target sequence for 5330408M12Rik (NM_177861.2,1614-1632).
ggctgtgctatcatctctt

SEQ ID NO: 799873 - DNA, 19 bp, Mus musculus
  siRNA target sequence for 5330408M12Rik (NM_177861.2,1616-1634).
ctgtgctatcatctctttt

SEQ ID NO: 799874 - DNA, 19 bp, Mus musculus
  siRNA target sequence for 5330408M12Rik (NM_177861.2,1618-1636).
gtgctatcatctcttttga

SEQ ID NO: 799875 - DNA, 19 bp, Mus musculus
  siRNA target sequence for 5330408M12Rik (NM_177861.2,1662-1680).
cgggagccccatgattgat

SEQ ID NO: 799876 - DNA, 19 bp, Mus musculus
  siRNA target sequence for 5330408M12Rik (NM_177861.2,1663-1681).
gggagccccatgattgatt

SEQ ID NO: 799877 - DNA, 19 bp, Mus musculus
  siRNA target sequence for 5330408M12Rik (NM_177861.2,1664-1682).
ggagccccatgattgattt

SEQ ID NO: 799878 - DNA, 19 bp, Mus musculus
  siRNA target sequence for 5330408M12Rik (NM_177861.2,1665-1683).
gagccccatgattgattta

SEQ ID NO: 799879 - DNA, 19 bp, Mus musculus
  siRNA target sequence for 5330408M12Rik (NM_177861.2,1667-1685).
gccccatgattgatttaca

SEQ ID NO: 799880 - DNA, 19 bp, Mus musculus
  siRNA target sequence for 5330408M12Rik (NM_177861.2,1669-1687).
cccatgattgatttacaga

SEQ ID NO: 799881 - DNA, 19 bp, Mus musculus
  siRNA target sequence for 5330408M12Rik (NM_177861.2,1718-1736).
gtgatctggccaatgtgtt

SEQ ID NO: 799882 - DNA, 19 bp, Mus musculus
  siRNA target sequence for 5330408M12Rik (NM_177861.2,1726-1744).
gccaatgtgttttttatca

SEQ ID NO: 799883 - DNA, 19 bp, Mus musculus
  siRNA target sequence for 5330408M12Rik (NM_177861.2,1759-1777).
ggtctttattggcttattt

SEQ ID NO: 799884 - DNA, 19 bp, Mus musculus
  siRNA target sequence for 5330408M12Rik (NM_177861.2,1828-1846).
gaagaacgtttcgttactt

SEQ ID NO: 799885 - DNA, 19 bp, Mus musculus
  siRNA target sequence for 5330408M12Rik (NM_177861.2,1853-1871).
ggtgcgcctttgctatgaa

SEQ ID NO: 799886 - DNA, 19 bp, Mus musculus
  siRNA target sequence for 5330408M12Rik (NM_177861.2,1873-1891).
gctctccagtttttacata

SEQ ID NO: 799887 - DNA, 19 bp, Mus musculus
  siRNA target sequence for 5330408M12Rik (NM_177861.2,1874-1892).
ctctccagtttttacataa

SEQ ID NO: 799888 - DNA, 19 bp, Mus musculus
  siRNA target sequence for 5330408M12Rik (NM_177861.2,1896-1914).
catatcccagatttccata

SEQ ID NO: 799889 - DNA, 19 bp, Mus musculus
  siRNA target sequence for 5330408M12Rik (NM_177861.2,1934-1952).
gggaacggccgaaaggaaa

SEQ ID NO: 799890 - DNA, 19 bp, Mus musculus
  siRNA target sequence for 5330408M12Rik (NM_177861.2,1935-1953).
ggaacggccgaaaggaaaa

SEQ ID NO: 799891 - DNA, 19 bp, Mus musculus
  siRNA target sequence for 5330408M12Rik (NM_177861.2,1940-1958).
ggccgaaaggaaaagttct

SEQ ID NO: 799892 - DNA, 19 bp, Mus musculus
  siRNA target sequence for 5330408M12Rik (NM_177861.2,1942-1960).
ccgaaaggaaaagttctta

SEQ ID NO: 799893 - DNA, 19 bp, Mus musculus
  siRNA target sequence for 5330408M12Rik (NM_177861.2,1943-1961).
cgaaaggaaaagttcttaa

SEQ ID NO: 799894 - DNA, 19 bp, Mus musculus
  siRNA target sequence for 5330408M12Rik (NM_177861.2,2021-2039).
cgtatttcgtggcaaatga

SEQ ID NO: 799895 - DNA, 19 bp, Mus musculus
  siRNA target sequence for 5330408M12Rik (NM_177861.2,2038-2056).
gaatggaatgagattcaga

SEQ ID NO: 799896 - DNA, 19 bp, Mus musculus
  siRNA target sequence for 5330408M12Rik (NM_177861.2,2113-2131).
gttgtgggattcaaaaatt

SEQ ID NO: 799897 - DNA, 19 bp, Mus musculus
  siRNA target sequence for 5330408M12Rik (NM_177861.2,2188-2206).
ccttacagccgcattctga

SEQ ID NO: 799898 - DNA, 19 bp, Mus musculus
  siRNA target sequence for 5330408M12Rik (NM_177861.2,2231-2249).
ggctggtgattggaataat

SEQ ID NO: 799899 - DNA, 19 bp, Mus musculus
  siRNA target sequence for 5330408M12Rik (NM_177861.2,2232-2250).
gctggtgattggaataata

SEQ ID NO: 799900 - DNA, 19 bp, Mus musculus
  siRNA target sequence for 5330408M12Rik (NM_177861.2,2269-2287).
gccttttatgagagattca

SEQ ID NO: 799901 - DNA, 19 bp, Mus musculus
  siRNA target sequence for 5330408M12Rik (NM_177861.2,2270-2288).
ccttttatgagagattcat

SEQ ID NO: 799902 - DNA, 19 bp, Mus musculus
  siRNA target sequence for 5330408M12Rik (NM_177861.2,2280-2298).
gagattcatagaagacaaa

SEQ ID NO: 799903 - DNA, 19 bp, Mus musculus
  siRNA target sequence for 5330408M12Rik (NM_177861.2,2295-2313).
caaaatccggcagtttgtt

SEQ ID NO: 799904 - DNA, 19 bp, Mus musculus
  siRNA target sequence for 5330408M12Rik (NM_177861.2,2314-2332).
gacctgtgctccatgagta

SEQ ID NO: 799905 - DNA, 19 bp, Mus musculus
  siRNA target sequence for 5330408M12Rik (NM_177861.2,2316-2334).
cctgtgctccatgagtaat

SEQ ID NO: 799906 - DNA, 19 bp, Mus musculus
  siRNA target sequence for 5330408M12Rik (NM_177861.2,2352-2370).
gtcccacagatgttttgga

SEQ ID NO: 799907 - DNA, 19 bp, Mus musculus
  siRNA target sequence for 5330408M12Rik (NM_177861.2,2360-2378).
gatgttttggatattacat

SEQ ID NO: 799908 - DNA, 19 bp, Mus musculus
  siRNA target sequence for 5330408M12Rik (NM_177861.2,2398-2416).
ggccatgcagacactaaca

SEQ ID NO: 799909 - DNA, 19 bp, Mus musculus
  siRNA target sequence for 5330408M12Rik (NM_177861.2,2522-2540).
gtcagatgagacaacacta

SEQ ID NO: 799910 - DNA, 19 bp, Mus musculus
  siRNA target sequence for 5330408M12Rik (NM_177861.2,2547-2565).
gattcatgagactttaaca

SEQ ID NO: 799911 - DNA, 19 bp, Mus musculus
  siRNA target sequence for 5330408M12Rik (NM_177861.2,2594-2612).
gttcgtcggggagtacttt

SEQ ID NO: 799912 - DNA, 19 bp, Mus musculus
  siRNA target sequence for 5330408M12Rik (NM_177861.2,2598-2616).
gtcggggagtacttttgaa

SEQ ID NO: 799913 - DNA, 19 bp, Mus musculus
  siRNA target sequence for 5330408M12Rik (NM_177861.2,2600-2618).
cggggagtacttttgaaca

SEQ ID NO: 799914 - DNA, 19 bp, Mus musculus
  siRNA target sequence for 5330408M12Rik (NM_177861.2,2601-2619).
ggggagtacttttgaacaa

SEQ ID NO: 799915 - DNA, 19 bp, Mus musculus
  siRNA target sequence for 5330408M12Rik (NM_177861.2,2602-2620).
gggagtacttttgaacaaa

SEQ ID NO: 799916 - DNA, 19 bp, Mus musculus
  siRNA target sequence for 5330408M12Rik (NM_177861.2,2614-2632).
gaacaaagcatcaaagcat

SEQ ID NO: 799917 - DNA, 19 bp, Mus musculus
  siRNA target sequence for 5330408M12Rik (NM_177861.2,2629-2647).
gcataccacgcaatgaata

SEQ ID NO: 799918 - DNA, 19 bp, Mus musculus
  siRNA target sequence for 5330408M12Rik (NM_177861.2,2630-2648).
cataccacgcaatgaataa

SEQ ID NO: 799919 - DNA, 19 bp, Mus musculus
  siRNA target sequence for 5330408M12Rik (NM_177861.2,2673-2691).
cgttcataaggaaatggat

SEQ ID NO: 799920 - DNA, 19 bp, Mus musculus
  siRNA target sequence for 5330408M12Rik (NM_177861.2,2688-2706).
ggattactttataaaagat

SEQ ID NO: 799921 - DNA, 19 bp, Mus musculus
  siRNA target sequence for 5330408M12Rik (NM_177861.2,2755-2773).
gagaagagcatcttctata

SEQ ID NO: 799922 - DNA, 19 bp, Mus musculus
  siRNA target sequence for 5330408M12Rik (NM_177861.2,2793-2811).
cagcagtgtgctgtattat

SEQ ID NO: 799923 - DNA, 19 bp, Mus musculus
  siRNA target sequence for 5330408M12Rik (NM_177861.2,2820-2838).
ggccacgctcctcatcttt

SEQ ID NO: 799924 - DNA, 19 bp, Mus musculus
  siRNA target sequence for 5330408M12Rik (NM_177861.2,2822-2840).
ccacgctcctcatctttga

SEQ ID NO: 799925 - DNA, 19 bp, Mus musculus
  siRNA target sequence for 5330408M12Rik (NM_177861.2,2823-2841).
cacgctcctcatctttgat

SEQ ID NO: 799926 - DNA, 19 bp, Mus musculus
  siRNA target sequence for 5330408M12Rik (NM_177861.2,2825-2843).
cgctcctcatctttgatct

SEQ ID NO: 799927 - DNA, 19 bp, Mus musculus
  siRNA target sequence for 5330408M12Rik (NM_177861.2,2868-2886).
ggcttgccaggactttgtt

SEQ ID NO: 799928 - DNA, 19 bp, Mus musculus
  siRNA target sequence for 5330408M12Rik (NM_177861.2,2903-2921).
catacctgcaacaagagat

SEQ ID NO: 799929 - DNA, 19 bp, Mus musculus
  siRNA target sequence for 5330408M12Rik (NM_177861.2,2914-2932).
caagagattttccgattta

SEQ ID NO: 799930 - DNA, 19 bp, Mus musculus
  siRNA target sequence for 5330408M12Rik (NM_177861.2,2925-2943).
ccgatttatccgaaataca

SEQ ID NO: 799931 - DNA, 19 bp, Mus musculus
  siRNA target sequence for 5330408M12Rik (NM_177861.2,2927-2945).
gatttatccgaaatacagt

SEQ ID NO: 799932 - DNA, 19 bp, Mus musculus
  siRNA target sequence for 5330408M12Rik (NM_177861.2,2955-2973).
gaatttggcaaccaaaaca

SEQ ID NO: 799933 - DNA, 19 bp, Mus musculus
  siRNA target sequence for 5330408M12Rik (NM_177861.2,2977-2995).
gtggatgaaagatttctga

SEQ ID NO: 799934 - DNA, 19 bp, Mus musculus
  siRNA target sequence for A030013N09 (NM_177864.2,200-218).
ctactgctggagtgtactt

SEQ ID NO: 799935 - DNA, 19 bp, Mus musculus
  siRNA target sequence for A030013N09 (NM_177864.2,278-296).
ccacattcaactgcattta

SEQ ID NO: 799936 - DNA, 19 bp, Mus musculus
  siRNA target sequence for A030013N09 (NM_177864.2,279-297).
cacattcaactgcatttaa

SEQ ID NO: 799937 - DNA, 19 bp, Mus musculus
  siRNA target sequence for A030013N09 (NM_177864.2,302-320).
caggatagagacggattat

SEQ ID NO: 799938 - DNA, 19 bp, Mus musculus
  siRNA target sequence for A030013N09 (NM_177864.2,305-323).
gatagagacggattattgt

SEQ ID NO: 799939 - DNA, 19 bp, Mus musculus
  siRNA target sequence for A030013N09 (NM_177864.2,309-327).
gagacggattattgtattt

SEQ ID NO: 799940 - DNA, 19 bp, Mus musculus
  siRNA target sequence for A030013N09 (NM_177864.2,311-329).
gacggattattgtatttga

SEQ ID NO: 799941 - DNA, 19 bp, Mus musculus
  siRNA target sequence for A030013N09 (NM_177864.2,352-370).
cagagcaaaaggtcctatt

SEQ ID NO: 799942 - DNA, 19 bp, Mus musculus
  siRNA target sequence for A030013N09 (NM_177864.2,356-374).
gcaaaaggtcctattactt

SEQ ID NO: 799943 - DNA, 19 bp, Mus musculus
  siRNA target sequence for A030013N09 (NM_177864.2,437-455).
ctgttcaaatcggagaata

SEQ ID NO: 799944 - DNA, 19 bp, Mus musculus
  siRNA target sequence for A030013N09 (NM_177864.2,526-544).
cagaggaatacttgttttt

SEQ ID NO: 799945 - DNA, 19 bp, Mus musculus
  siRNA target sequence for A030013N09 (NM_177864.2,593-611).
gtaatggaagctttgtata

SEQ ID NO: 799946 - DNA, 19 bp, Mus musculus
  siRNA target sequence for A030013N09 (NM_177864.2,598-616).
ggaagctttgtatagtaaa

SEQ ID NO: 799947 - DNA, 19 bp, Mus musculus
  siRNA target sequence for A030013N09 (NM_177864.2,599-617).
gaagctttgtatagtaaaa

SEQ ID NO: 799948 - DNA, 19 bp, Mus musculus
  siRNA target sequence for A030013N09 (NM_177864.2,640-658).
ctgggagtgcctactgtta

SEQ ID NO: 799949 - DNA, 19 bp, Mus musculus
  siRNA target sequence for A030013N09 (NM_177864.2,721-739).
cgatacatatccattgtat

SEQ ID NO: 799950 - DNA, 19 bp, Mus musculus
  siRNA target sequence for A030013N09 (NM_177864.2,726-744).
catatccattgtatactaa

SEQ ID NO: 799951 - DNA, 19 bp, Mus musculus
  siRNA target sequence for A030013N09 (NM_177864.2,774-792).
ctgttataatggtactttt

SEQ ID NO: 799952 - DNA, 19 bp, Mus musculus
  siRNA target sequence for A030013N09 (NM_177864.2,849-867).
ccttacctccaacaagtat

SEQ ID NO: 799953 - DNA, 19 bp, Mus musculus
  siRNA target sequence for A030013N09 (NM_177864.2,909-927).
ctgatgactcccaagaaaa

SEQ ID NO: 799954 - DNA, 19 bp, Mus musculus
  siRNA target sequence for A030013N09 (NM_177864.2,911-929).
gatgactcccaagaaaatt

SEQ ID NO: 799955 - DNA, 19 bp, Mus musculus
  siRNA target sequence for A030013N09 (NM_177864.2,949-967).
cctagaaacttgtgaaagt

SEQ ID NO: 799956 - DNA, 19 bp, Mus musculus
  siRNA target sequence for A430070M19 (NM_177865.2,25-43).
gagctacaggagtacttct

SEQ ID NO: 799957 - DNA, 19 bp, Mus musculus
  siRNA target sequence for A430070M19 (NM_177865.2,436-454).
ccacaagctcagtcatgta

SEQ ID NO: 799958 - DNA, 19 bp, Mus musculus
  siRNA target sequence for A430070M19 (NM_177865.2,443-461).
ctcagtcatgtacattcta

SEQ ID NO: 799959 - DNA, 19 bp, Mus musculus
  siRNA target sequence for A430070M19 (NM_177865.2,445-463).
cagtcatgtacattctaat

SEQ ID NO: 799960 - DNA, 19 bp, Mus musculus
  siRNA target sequence for A430070M19 (NM_177865.2,459-477).
ctaatgcagccccctaata

SEQ ID NO: 799961 - DNA, 19 bp, Mus musculus
  siRNA target sequence for A430070M19 (NM_177865.2,545-563).
caacaagggaaatatcatt

SEQ ID NO: 799962 - DNA, 19 bp, Mus musculus
  siRNA target sequence for A430070M19 (NM_177865.2,809-827).
gcaacatctcttatatggt

SEQ ID NO: 799963 - DNA, 19 bp, Mus musculus
  siRNA target sequence for A430070M19 (NM_177865.2,810-828).
caacatctcttatatggta

SEQ ID NO: 799964 - DNA, 19 bp, Mus musculus
  siRNA target sequence for A430070M19 (NM_177865.2,839-857).
ggggaaatgtcattggtta

SEQ ID NO: 799965 - DNA, 19 bp, Mus musculus
  siRNA target sequence for A430070M19 (NM_177865.2,849-867).
cattggttaaagagtacaa

SEQ ID NO: 799966 - DNA, 19 bp, Mus musculus
  siRNA target sequence for B230311F11 (NM_177868.2,362-380).
gagcgctgatggctttttt

SEQ ID NO: 799967 - DNA, 19 bp, Mus musculus
  siRNA target sequence for B230311F11 (NM_177868.2,364-382).
gcgctgatggcttttttgt

SEQ ID NO: 799968 - DNA, 19 bp, Mus musculus
  siRNA target sequence for B230311F11 (NM_177868.2,456-474).
caccatgccctcattgaat

SEQ ID NO: 799969 - DNA, 19 bp, Mus musculus
  siRNA target sequence for B230311F11 (NM_177868.2,459-477).
catgccctcattgaattca

SEQ ID NO: 799970 - DNA, 19 bp, Mus musculus
  siRNA target sequence for B230311F11 (NM_177868.2,498-516).
gtccttcaggactttaact

SEQ ID NO: 799971 - DNA, 19 bp, Mus musculus
  siRNA target sequence for B230311F11 (NM_177868.2,519-537).
cgcaacggcacgtttgtca

SEQ ID NO: 799972 - DNA, 19 bp, Mus musculus
  siRNA target sequence for B230311F11 (NM_177868.2,520-538).
gcaacggcacgtttgtcaa

SEQ ID NO: 799973 - DNA, 19 bp, Mus musculus
  siRNA target sequence for B230311F11 (NM_177868.2,828-846).
gccagcgggaagatgtttt

SEQ ID NO: 799974 - DNA, 19 bp, Mus musculus
  siRNA target sequence for B230311F11 (NM_177868.2,832-850).
gcgggaagatgttttcctt

SEQ ID NO: 799975 - DNA, 19 bp, Mus musculus
  siRNA target sequence for B230311F11 (NM_177868.2,833-851).
cgggaagatgttttccttt

SEQ ID NO: 799976 - DNA, 19 bp, Mus musculus
  siRNA target sequence for B230311F11 (NM_177868.2,949-967).
ctcccaccgagatcttcat

SEQ ID NO: 799977 - DNA, 19 bp, Mus musculus
  siRNA target sequence for B230311F11 (NM_177868.2,1013-1031).
cttggggagagaggttaat

SEQ ID NO: 799978 - DNA, 19 bp, Mus musculus
  siRNA target sequence for B230311F11 (NM_177868.2,1143-1161).
gcagccaggcagagtaaca

SEQ ID NO: 799979 - DNA, 19 bp, Mus musculus
  siRNA target sequence for B230311F11 (NM_177868.2,1215-1233).
gagattgagagcatgaaaa

SEQ ID NO: 799980 - DNA, 19 bp, Mus musculus
  siRNA target sequence for B230311F11 (NM_177868.2,1235-1253).
ccagatcaacgctcttcaa

SEQ ID NO: 799981 - DNA, 19 bp, Mus musculus
  siRNA target sequence for B230311F11 (NM_177868.2,1236-1254).
cagatcaacgctcttcaaa

SEQ ID NO: 799982 - DNA, 19 bp, Mus musculus
  siRNA target sequence for B230311F11 (NM_177868.2,1292-1310).
gcgcaacacggaaatcgaa

SEQ ID NO: 799983 - DNA, 19 bp, Mus musculus
  siRNA target sequence for B230311F11 (NM_177868.2,1293-1311).
cgcaacacggaaatcgaat

SEQ ID NO: 799984 - DNA, 19 bp, Mus musculus
  siRNA target sequence for B230311F11 (NM_177868.2,1319-1337).
gaatgagggcgagaactta

SEQ ID NO: 799985 - DNA, 19 bp, Mus musculus
  siRNA target sequence for B230311F11 (NM_177868.2,1325-1343).
gggcgagaacttaaagaga

SEQ ID NO: 799986 - DNA, 19 bp, Mus musculus
  siRNA target sequence for B230311F11 (NM_177868.2,1367-1385).
ggtgacatctttacagaaa

SEQ ID NO: 799987 - DNA, 19 bp, Mus musculus
  siRNA target sequence for B230311F11 (NM_177868.2,1396-1414).
cacgcaacgagcaagttca

SEQ ID NO: 799988 - DNA, 19 bp, Mus musculus
  siRNA target sequence for B230311F11 (NM_177868.2,1399-1417).
gcaacgagcaagttcaaca

SEQ ID NO: 799989 - DNA, 19 bp, Mus musculus
  siRNA target sequence for B230311F11 (NM_177868.2,1421-1439).
gcaggaggaggtaaatcga

SEQ ID NO: 799990 - DNA, 19 bp, Mus musculus
  siRNA target sequence for B230311F11 (NM_177868.2,1490-1508).
caggtgttcagtgatgaaa

SEQ ID NO: 799991 - DNA, 19 bp, Mus musculus
  siRNA target sequence for B230311F11 (NM_177868.2,1492-1510).
ggtgttcagtgatgaaaga

SEQ ID NO: 799992 - DNA, 19 bp, Mus musculus
  siRNA target sequence for B230311F11 (NM_177868.2,1625-1643).
ggaactaaagaagaactat

SEQ ID NO: 799993 - DNA, 19 bp, Mus musculus
  siRNA target sequence for B230311F11 (NM_177868.2,1663-1681).
ccaagacgctacgagaaaa

SEQ ID NO: 799994 - DNA, 19 bp, Mus musculus
  siRNA target sequence for B230311F11 (NM_177868.2,1669-1687).
cgctacgagaaaagaacaa

SEQ ID NO: 799995 - DNA, 19 bp, Mus musculus
  siRNA target sequence for AI847670 (NM_177869.2,567-585).
cgtcaaatttgatttgagt

SEQ ID NO: 799996 - DNA, 19 bp, Mus musculus
  siRNA target sequence for AI847670 (NM_177869.2,568-586).
gtcaaatttgatttgagta

SEQ ID NO: 799997 - DNA, 19 bp, Mus musculus
  siRNA target sequence for AI847670 (NM_177869.2,570-588).
caaatttgatttgagtatt

SEQ ID NO: 799998 - DNA, 19 bp, Mus musculus
  siRNA target sequence for AI847670 (NM_177869.2,615-633).
ggtgcagaatattgaatgt

SEQ ID NO: 799999 - DNA, 19 bp, Mus musculus
  siRNA target sequence for AI847670 (NM_177869.2,619-637).
cagaatattgaatgtgata

SEQ ID NO: 800000 - DNA, 19 bp, Mus musculus
  siRNA target sequence for AI847670 (NM_177869.2,628-646).
gaatgtgatagctgtaaaa

SEQ ID NO: 800001 - DNA, 19 bp, Mus musculus
  siRNA target sequence for AI847670 (NM_177869.2,632-650).
gtgatagctgtaaaatcga

SEQ ID NO: 800002 - DNA, 19 bp, Mus musculus
  siRNA target sequence for AI847670 (NM_177869.2,689-707).
gtcaaaagttgcatgttca

SEQ ID NO: 800003 - DNA, 19 bp, Mus musculus
  siRNA target sequence for AI847670 (NM_177869.2,691-709).
caaaagttgcatgttcaaa

SEQ ID NO: 800004 - DNA, 19 bp, Mus musculus
  siRNA target sequence for AI847670 (NM_177869.2,715-733).
ggaggcgatgtgatctgtt

SEQ ID NO: 800005 - DNA, 19 bp, Mus musculus
  siRNA target sequence for AI847670 (NM_177869.2,736-754).
ggaacggtttacggaaata

SEQ ID NO: 800006 - DNA, 19 bp, Mus musculus
  siRNA target sequence for AI847670 (NM_177869.2,737-755).
gaacggtttacggaaatat

SEQ ID NO: 800007 - DNA, 19 bp, Mus musculus
  siRNA target sequence for AI847670 (NM_177869.2,740-758).
cggtttacggaaatataga

SEQ ID NO: 800008 - DNA, 19 bp, Mus musculus
  siRNA target sequence for AI847670 (NM_177869.2,741-759).
ggtttacggaaatatagat

SEQ ID NO: 800009 - DNA, 19 bp, Mus musculus
  siRNA target sequence for AI847670 (NM_177869.2,742-760).
gtttacggaaatatagata

SEQ ID NO: 800010 - DNA, 19 bp, Mus musculus
  siRNA target sequence for AI847670 (NM_177869.2,747-765).
cggaaatatagatattcat

SEQ ID NO: 800011 - DNA, 19 bp, Mus musculus
  siRNA target sequence for AI847670 (NM_177869.2,766-784).
gcatcggataaaagtgtaa

SEQ ID NO: 800012 - DNA, 19 bp, Mus musculus
  siRNA target sequence for D130065D13 (NM_177871.2,571-589).
cagtgctcagcctcactaa

SEQ ID NO: 800013 - DNA, 19 bp, Mus musculus
  siRNA target sequence for D130065D13 (NM_177871.2,575-593).
gctcagcctcactaactat

SEQ ID NO: 800014 - DNA, 19 bp, Mus musculus
  siRNA target sequence for D130065D13 (NM_177871.2,580-598).
gcctcactaactatttgtt

SEQ ID NO: 800015 - DNA, 19 bp, Mus musculus
  siRNA target sequence for D130065D13 (NM_177871.2,596-614).
gtttagctggaacatgaaa

SEQ ID NO: 800016 - DNA, 19 bp, Mus musculus
  siRNA target sequence for D130065D13 (NM_177871.2,669-687).
gtggtttcggccttgacat

SEQ ID NO: 800017 - DNA, 19 bp, Mus musculus
  siRNA target sequence for D130065D13 (NM_177871.2,672-690).
gtttcggccttgacattca

SEQ ID NO: 800018 - DNA, 19 bp, Mus musculus
  siRNA target sequence for D130065D13 (NM_177871.2,699-717).
ggtctgagagcttctgtaa

SEQ ID NO: 800019 - DNA, 19 bp, Mus musculus
  siRNA target sequence for 6330442E02 (NM_177872.1,526-544).
cgaaatggtgcaaatagat

SEQ ID NO: 800020 - DNA, 19 bp, Mus musculus
  siRNA target sequence for 6330442E02 (NM_177872.1,532-550).
ggtgcaaatagatttacca

SEQ ID NO: 800021 - DNA, 19 bp, Mus musculus
  siRNA target sequence for 6330442E02 (NM_177872.1,533-551).
gtgcaaatagatttaccaa

SEQ ID NO: 800022 - DNA, 19 bp, Mus musculus
  siRNA target sequence for 6330442E02 (NM_177872.1,584-602).
ccagttagcacgaatctaa

SEQ ID NO: 800023 - DNA, 19 bp, Mus musculus
  siRNA target sequence for 6330442E02 (NM_177872.1,594-612).
cgaatctaaaaggacatta

SEQ ID NO: 800024 - DNA, 19 bp, Mus musculus
  siRNA target sequence for 6330442E02 (NM_177872.1,595-613).
gaatctaaaaggacattat

SEQ ID NO: 800025 - DNA, 19 bp, Mus musculus
  siRNA target sequence for 6330442E02 (NM_177872.1,653-671).
cccagggacgtgtcatcta

SEQ ID NO: 800026 - DNA, 19 bp, Mus musculus
  siRNA target sequence for 6330442E02 (NM_177872.1,654-672).
ccagggacgtgtcatctaa

SEQ ID NO: 800027 - DNA, 19 bp, Mus musculus
  siRNA target sequence for 6330442E02 (NM_177872.1,658-676).
ggacgtgtcatctaactca

SEQ ID NO: 800028 - DNA, 19 bp, Mus musculus
  siRNA target sequence for 6330442E02 (NM_177872.1,669-687).
ctaactcagagcatttgtt

SEQ ID NO: 800029 - DNA, 19 bp, Mus musculus
  siRNA target sequence for 6330442E02 (NM_177872.1,697-715).
cacggcatttggaagagat

SEQ ID NO: 800030 - DNA, 19 bp, Mus musculus
  siRNA target sequence for 6330442E02 (NM_177872.1,939-957).
gtgatggtctgacttttga

SEQ ID NO: 800031 - DNA, 19 bp, Mus musculus
  siRNA target sequence for 6330442E02 (NM_177872.1,1066-1084).
cgcaaagatggctattgca

SEQ ID NO: 800032 - DNA, 19 bp, Mus musculus
  siRNA target sequence for F830003B07 (NM_177874.2,422-440).
ccagctttcaacaaaatca

SEQ ID NO: 800033 - DNA, 19 bp, Mus musculus
  siRNA target sequence for F830003B07 (NM_177874.2,460-478).
gccaaatggatatctcttt

SEQ ID NO: 800034 - DNA, 19 bp, Mus musculus
  siRNA target sequence for F830003B07 (NM_177874.2,492-510).
cttcactccctgacagaat

SEQ ID NO: 800035 - DNA, 19 bp, Mus musculus
  siRNA target sequence for F830003B07 (NM_177874.2,501-519).
ctgacagaatagagtcaat

SEQ ID NO: 800036 - DNA, 19 bp, Mus musculus
  siRNA target sequence for F830003B07 (NM_177874.2,563-581).
gcaggcccttcaagaatct

SEQ ID NO: 800037 - DNA, 19 bp, Mus musculus
  siRNA target sequence for F830003B07 (NM_177874.2,660-678).
gccatgcaagcatgacaaa

SEQ ID NO: 800038 - DNA, 19 bp, Mus musculus
  siRNA target sequence for C130026L21 (NM_177875.2,217-235).
gccgacacacggacattta

SEQ ID NO: 800039 - DNA, 19 bp, Mus musculus
  siRNA target sequence for C130026L21 (NM_177875.2,218-236).
ccgacacacggacatttat

SEQ ID NO: 800040 - DNA, 19 bp, Mus musculus
  siRNA target sequence for C130026L21 (NM_177875.2,250-268).
ggaaaaacaccccattaga

SEQ ID NO: 800041 - DNA, 19 bp, Mus musculus
  siRNA target sequence for C130026L21 (NM_177875.2,251-269).
gaaaaacaccccattagaa

SEQ ID NO: 800042 - DNA, 19 bp, Mus musculus
  siRNA target sequence for C130026L21 (NM_177875.2,262-280).
cattagaaggcagaaattt

SEQ ID NO: 800043 - DNA, 19 bp, Mus musculus
  siRNA target sequence for C130026L21 (NM_177875.2,321-339).
gaggagggctactggaaat

SEQ ID NO: 800044 - DNA, 19 bp, Mus musculus
  siRNA target sequence for C130026L21 (NM_177875.2,340-358).
ggcaccaggacatcatatt

SEQ ID NO: 800045 - DNA, 19 bp, Mus musculus
  siRNA target sequence for C130026L21 (NM_177875.2,345-363).
caggacatcatattcgttt

SEQ ID NO: 800046 - DNA, 19 bp, Mus musculus
  siRNA target sequence for C130026L21 (NM_177875.2,348-366).
gacatcatattcgttttct

SEQ ID NO: 800047 - DNA, 19 bp, Mus musculus
  siRNA target sequence for BC026744 (NM_177876.2,162-180).
cgcagacggttcagcttaa

SEQ ID NO: 800048 - DNA, 19 bp, Mus musculus
  siRNA target sequence for BC026744 (NM_177876.2,164-182).
cagacggttcagcttaaca

SEQ ID NO: 800049 - DNA, 19 bp, Mus musculus
  siRNA target sequence for BC026744 (NM_177876.2,166-184).
gacggttcagcttaacaaa

SEQ ID NO: 800050 - DNA, 19 bp, Mus musculus
  siRNA target sequence for BC026744 (NM_177876.2,298-316).
ctttgaggcctatcagata

SEQ ID NO: 800051 - DNA, 19 bp, Mus musculus
  siRNA target sequence for BC026744 (NM_177876.2,329-347).
ctagataaacagtctaaca

SEQ ID NO: 800052 - DNA, 19 bp, Mus musculus
  siRNA target sequence for BC026744 (NM_177876.2,384-402).
cggaaggggcaaagattga

SEQ ID NO: 800053 - DNA, 19 bp, Mus musculus
  siRNA target sequence for BC026744 (NM_177876.2,440-458).
ggagagcttcctctagatt

SEQ ID NO: 800054 - DNA, 19 bp, Mus musculus
  siRNA target sequence for BC026744 (NM_177876.2,445-463).
gcttcctctagattccttt

SEQ ID NO: 800055 - DNA, 19 bp, Mus musculus
  siRNA target sequence for BC026744 (NM_177876.2,496-514).
gcacatgcgccgtgtgaaa

SEQ ID NO: 800056 - DNA, 19 bp, Mus musculus
  siRNA target sequence for BC026744 (NM_177876.2,747-765).
ctgcatacccgggattaca

SEQ ID NO: 800057 - DNA, 19 bp, Mus musculus
  siRNA target sequence for BC026744 (NM_177876.2,749-767).
gcatacccgggattacagt

SEQ ID NO: 800058 - DNA, 19 bp, Mus musculus
  siRNA target sequence for BC038925 (NM_177878.1,437-455).
cacggacactcggatcata

SEQ ID NO: 800059 - DNA, 19 bp, Mus musculus
  siRNA target sequence for BC038925 (NM_177878.1,477-495).
ccgaggcagctttgttagt

SEQ ID NO: 800060 - DNA, 19 bp, Mus musculus
  siRNA target sequence for BC038925 (NM_177878.1,533-551).
ccccatgggctgtgtgaaa

SEQ ID NO: 800061 - DNA, 19 bp, Mus musculus
  siRNA target sequence for BC038925 (NM_177878.1,831-849).
cagaggatttgatatgtga

SEQ ID NO: 800062 - DNA, 19 bp, Mus musculus
  siRNA target sequence for 6720466O15Rik (NM_177879.3,300-318).
gttgccccaggcaacagaa

SEQ ID NO: 800063 - DNA, 19 bp, Mus musculus
  siRNA target sequence for 6720466O15Rik (NM_177879.3,544-562).
ccttcctttccatcataga

SEQ ID NO: 800064 - DNA, 19 bp, Mus musculus
  siRNA target sequence for 6720466O15Rik (NM_177879.3,584-602).
gccagagagtcggatttta

SEQ ID NO: 800065 - DNA, 19 bp, Mus musculus
  siRNA target sequence for 6720466O15Rik (NM_177879.3,699-717).
ctccagaaccctaggtata

SEQ ID NO: 800066 - DNA, 19 bp, Mus musculus
  siRNA target sequence for 6720466O15Rik (NM_177879.3,701-719).
ccagaaccctaggtataaa

SEQ ID NO: 800067 - DNA, 19 bp, Mus musculus
  siRNA target sequence for 6720466O15Rik (NM_177879.3,730-748).
gcggaggcctccacattca

SEQ ID NO: 800068 - DNA, 19 bp, Mus musculus
  siRNA target sequence for 6720466O15Rik (NM_177879.3,732-750).
ggaggcctccacattcaga

SEQ ID NO: 800069 - DNA, 19 bp, Mus musculus
  siRNA target sequence for 6720466O15Rik (NM_177879.3,733-751).
gaggcctccacattcagaa

SEQ ID NO: 800070 - DNA, 19 bp, Mus musculus
  siRNA target sequence for 6720466O15Rik (NM_177879.3,738-756).
ctccacattcagaagttga

SEQ ID NO: 800071 - DNA, 19 bp, Mus musculus
  siRNA target sequence for 6720466O15Rik (NM_177879.3,782-800).
gtgctttgccagtaacgaa

SEQ ID NO: 800072 - DNA, 19 bp, Mus musculus
  siRNA target sequence for 6720466O15Rik (NM_177879.3,827-845).
cctggatgtgaccaatatt

SEQ ID NO: 800073 - DNA, 19 bp, Mus musculus
  siRNA target sequence for 6720466O15Rik (NM_177879.3,930-948).
cccaaacccgccatcacat

SEQ ID NO: 800074 - DNA, 19 bp, Mus musculus
  siRNA target sequence for 6720466O15Rik (NM_177879.3,978-996).
ggctctgtccggattccta

SEQ ID NO: 800075 - DNA, 19 bp, Mus musculus
  siRNA target sequence for 6720466O15Rik (NM_177879.3,1113-1131).
ctcaccgtgtggaatcgaa

SEQ ID NO: 800076 - DNA, 19 bp, Mus musculus
  siRNA target sequence for 6720466O15Rik (NM_177879.3,1152-1170).
gaagaccgcgtggtgatta

SEQ ID NO: 800077 - DNA, 19 bp, Mus musculus
  siRNA target sequence for 6720466O15Rik (NM_177879.3,1222-1240).
ctctccgctacgtttggaa

SEQ ID NO: 800078 - DNA, 19 bp, Mus musculus
  siRNA target sequence for 6720466O15Rik (NM_177879.3,1295-1313).
ggatgggtcgcttgtcatt

SEQ ID NO: 800079 - DNA, 19 bp, Mus musculus
  siRNA target sequence for 6720466O15Rik (NM_177879.3,1296-1314).
gatgggtcgcttgtcatta

SEQ ID NO: 800080 - DNA, 19 bp, Mus musculus
  siRNA target sequence for 6720466O15Rik (NM_177879.3,1343-1361).
ctacacctgtgaaatcata

SEQ ID NO: 800081 - DNA, 19 bp, Mus musculus
  siRNA target sequence for 6720466O15Rik (NM_177879.3,1460-1478).
ccactcggtgacactatct

SEQ ID NO: 800082 - DNA, 19 bp, Mus musculus
  siRNA target sequence for 6720466O15Rik (NM_177879.3,1461-1479).
cactcggtgacactatctt

SEQ ID NO: 800083 - DNA, 19 bp, Mus musculus
  siRNA target sequence for 6720466O15Rik (NM_177879.3,1504-1522).
gcccggtcctttactacat

SEQ ID NO: 800084 - DNA, 19 bp, Mus musculus
  siRNA target sequence for 6720466O15Rik (NM_177879.3,1505-1523).
cccggtcctttactacatt

SEQ ID NO: 800085 - DNA, 19 bp, Mus musculus
  siRNA target sequence for 6720466O15Rik (NM_177879.3,1507-1525).
cggtcctttactacattgt

SEQ ID NO: 800086 - DNA, 19 bp, Mus musculus
  siRNA target sequence for 6720466O15Rik (NM_177879.3,1614-1632).
ccagcccggacctatcagt

SEQ ID NO: 800087 - DNA, 19 bp, Mus musculus
  siRNA target sequence for 6720466O15Rik (NM_177879.3,1615-1633).
cagcccggacctatcagtt

SEQ ID NO: 800088 - DNA, 19 bp, Mus musculus
  siRNA target sequence for 6720466O15Rik (NM_177879.3,1637-1655).
ggtgtgcgctgtgaatcaa

SEQ ID NO: 800089 - DNA, 19 bp, Mus musculus
  siRNA target sequence for 6720466O15Rik (NM_177879.3,1714-1732).
cgagtgctcccccaaaaaa

SEQ ID NO: 800090 - DNA, 19 bp, Mus musculus
  siRNA target sequence for 6720466O15Rik (NM_177879.3,1879-1897).
gcagcccagaggtgaacta

SEQ ID NO: 800091 - DNA, 19 bp, Mus musculus
  siRNA target sequence for 6720466O15Rik (NM_177879.3,2040-2058).
caggcagaggctgtgaatt

SEQ ID NO: 800092 - DNA, 19 bp, Mus musculus
  siRNA target sequence for 6720466O15Rik (NM_177879.3,2086-2104).
cgccaccccagcagttcat

SEQ ID NO: 800093 - DNA, 19 bp, Mus musculus
  siRNA target sequence for 6720466O15Rik (NM_177879.3,2246-2264).
cacatccgtcctgtgtttt

SEQ ID NO: 800094 - DNA, 19 bp, Mus musculus
  siRNA target sequence for 6720466O15Rik (NM_177879.3,2343-2361).
ctgagcttcacggagattt

SEQ ID NO: 800095 - DNA, 19 bp, Mus musculus
  siRNA target sequence for 6720466O15Rik (NM_177879.3,2414-2432).
cattatgggctatcagatt

SEQ ID NO: 800096 - DNA, 19 bp, Mus musculus
  siRNA target sequence for 6720466O15Rik (NM_177879.3,2485-2503).
gcacgacgcacgagtataa

SEQ ID NO: 800097 - DNA, 19 bp, Mus musculus
  siRNA target sequence for 6720466O15Rik (NM_177879.3,2488-2506).
cgacgcacgagtataagat

SEQ ID NO: 800098 - DNA, 19 bp, Mus musculus
  siRNA target sequence for 6720466O15Rik (NM_177879.3,2678-2696).
gttccgacctggctatgat

SEQ ID NO: 800099 - DNA, 19 bp, Mus musculus
  siRNA target sequence for 6720466O15Rik (NM_177879.3,2836-2854).
cacactacaggtttcgaat

SEQ ID NO: 800100 - DNA, 19 bp, Mus musculus
  siRNA target sequence for 6720466O15Rik (NM_177879.3,3243-3261).
gcagctcctgaaaatgtgt

SEQ ID NO: 800101 - DNA, 19 bp, Mus musculus
  siRNA target sequence for 6720466O15Rik (NM_177879.3,3339-3357).
ctaggctacaaggttctat

SEQ ID NO: 800102 - DNA, 19 bp, Mus musculus
  siRNA target sequence for 6720466O15Rik (NM_177879.3,3563-3581).
ggtgttccccgaagtaaga

SEQ ID NO: 800103 - DNA, 19 bp, Mus musculus
  siRNA target sequence for 6720466O15Rik (NM_177879.3,3566-3584).
gttccccgaagtaagactt

SEQ ID NO: 800104 - DNA, 19 bp, Mus musculus
  siRNA target sequence for 6720466O15Rik (NM_177879.3,3569-3587).
ccccgaagtaagacttact

SEQ ID NO: 800105 - DNA, 19 bp, Mus musculus
  siRNA target sequence for 6720466O15Rik (NM_177879.3,3705-3723).
gccacggtgcggcaattca

SEQ ID NO: 800106 - DNA, 19 bp, Mus musculus
  siRNA target sequence for 6720466O15Rik (NM_177879.3,3707-3725).
cacggtgcggcaattcaca

SEQ ID NO: 800107 - DNA, 19 bp, Mus musculus
  siRNA target sequence for 6720466O15Rik (NM_177879.3,3744-3762).
gagtctgcctacatcttca

SEQ ID NO: 800108 - DNA, 19 bp, Mus musculus
  siRNA target sequence for 6720466O15Rik (NM_177879.3,3801-3819).
ctggaggccacagttatca

SEQ ID NO: 800109 - DNA, 19 bp, Mus musculus
  siRNA target sequence for 6720466O15Rik (NM_177879.3,3803-3821).
ggaggccacagttatcact

SEQ ID NO: 800110 - DNA, 19 bp, Mus musculus
  siRNA target sequence for 6720466O15Rik (NM_177879.3,3804-3822).
gaggccacagttatcacta

SEQ ID NO: 800111 - DNA, 19 bp, Mus musculus
  siRNA target sequence for 6720466O15Rik (NM_177879.3,3989-4007).
ctactcctcatctatcagt

SEQ ID NO: 800112 - DNA, 19 bp, Mus musculus
  siRNA target sequence for 6720466O15Rik (NM_177879.3,4118-4136).
ggctgtgaccactttgcaa

SEQ ID NO: 800113 - DNA, 19 bp, Mus musculus
  siRNA target sequence for 6720466O15Rik (NM_177879.3,4183-4201).
ccacgtcctccgttctgat

SEQ ID NO: 800114 - DNA, 19 bp, Mus musculus
  siRNA target sequence for 6720466O15Rik (NM_177879.3,4382-4400).
ctcgttaaccacctatgaa

SEQ ID NO: 800115 - DNA, 19 bp, Mus musculus
  siRNA target sequence for 6720466O15Rik (NM_177879.3,4385-4403).
gttaaccacctatgaatta

SEQ ID NO: 800116 - DNA, 19 bp, Mus musculus
  siRNA target sequence for 6720466O15Rik (NM_177879.3,4390-4408).
ccacctatgaattaacaca

SEQ ID NO: 800117 - DNA, 19 bp, Mus musculus
  siRNA target sequence for 6720466O15Rik (NM_177879.3,4391-4409).
cacctatgaattaacacat

SEQ ID NO: 800118 - DNA, 19 bp, Mus musculus
  siRNA target sequence for 6720466O15Rik (NM_177879.3,4434-4452).
gtcatcatgactgcttata

SEQ ID NO: 800119 - DNA, 19 bp, Mus musculus
  siRNA target sequence for 6720466O15Rik (NM_177879.3,4614-4632).
cagggttataaggtttact

SEQ ID NO: 800120 - DNA, 19 bp, Mus musculus
  siRNA target sequence for 6720466O15Rik (NM_177879.3,4641-4659).
gcagacagtcgcaatgaga

SEQ ID NO: 800121 - DNA, 19 bp, Mus musculus
  siRNA target sequence for 6720466O15Rik (NM_177879.3,4835-4853).
ggcattctcagaaataact

SEQ ID NO: 800122 - DNA, 19 bp, Mus musculus
  siRNA target sequence for 6720466O15Rik (NM_177879.3,4912-4930).
gctatcgagtggtgtatga

SEQ ID NO: 800123 - DNA, 19 bp, Mus musculus
  siRNA target sequence for 6720466O15Rik (NM_177879.3,5206-5224).
ctacaggctacgtcataga

SEQ ID NO: 800124 - DNA, 19 bp, Mus musculus
  siRNA target sequence for 6720466O15Rik (NM_177879.3,5274-5292).
cccaggagtgctacatcat

SEQ ID NO: 800125 - DNA, 19 bp, Mus musculus
  siRNA target sequence for 6720466O15Rik (NM_177879.3,5275-5293).
ccaggagtgctacatcata

SEQ ID NO: 800126 - DNA, 19 bp, Mus musculus
  siRNA target sequence for 6720466O15Rik (NM_177879.3,5508-5526).
ggacaaagcaagaagtaca

SEQ ID NO: 800127 - DNA, 19 bp, Mus musculus
  siRNA target sequence for 6720466O15Rik (NM_177879.3,5854-5872).
gcgaccccacctactacaa

SEQ ID NO: 800128 - DNA, 19 bp, Mus musculus
  siRNA target sequence for 6720466O15Rik (NM_177879.3,5896-5914).
ccgcagcaccacataggta

SEQ ID NO: 800129 - DNA, 19 bp, Mus musculus
  siRNA target sequence for 4933411G11 (NM_177880.2,573-591).
gtgcaccatgccgtctaaa

SEQ ID NO: 800130 - DNA, 19 bp, Mus musculus
  siRNA target sequence for 4933411G11 (NM_177880.2,1005-1023).
ggcccctaagcaagacatt

SEQ ID NO: 800131 - DNA, 19 bp, Mus musculus
  siRNA target sequence for 4933411G11 (NM_177880.2,1008-1026).
ccctaagcaagacattttt

SEQ ID NO: 800132 - DNA, 19 bp, Mus musculus
  siRNA target sequence for 4933411G11 (NM_177880.2,1172-1190).
ggacacgggatcgtactaa

SEQ ID NO: 800133 - DNA, 19 bp, Mus musculus
  siRNA target sequence for 4933411G11 (NM_177880.2,1227-1245).
ccatccgcctgccatagat

SEQ ID NO: 800134 - DNA, 19 bp, Mus musculus
  siRNA target sequence for 9430029A11 (NM_177881.2,200-218).
catcaaagcttctagtgaa

SEQ ID NO: 800135 - DNA, 19 bp, Mus musculus
  siRNA target sequence for 9430029A11 (NM_177881.2,249-267).
ggactcctctatcaataga

SEQ ID NO: 800136 - DNA, 19 bp, Mus musculus
  siRNA target sequence for 9430029A11 (NM_177881.2,250-268).
gactcctctatcaatagat

SEQ ID NO: 800137 - DNA, 19 bp, Mus musculus
  siRNA target sequence for 9430029A11 (NM_177881.2,252-270).
ctcctctatcaatagatca

SEQ ID NO: 800138 - DNA, 19 bp, Mus musculus
  siRNA target sequence for 9430029A11 (NM_177881.2,395-413).
ccactggccgtgagttagt

SEQ ID NO: 800139 - DNA, 19 bp, Mus musculus
  siRNA target sequence for 9430029A11 (NM_177881.2,398-416).
ctggccgtgagttagtcat

SEQ ID NO: 800140 - DNA, 19 bp, Mus musculus
  siRNA target sequence for 9430029A11 (NM_177881.2,404-422).
gtgagttagtcatagcttt

SEQ ID NO: 800141 - DNA, 19 bp, Mus musculus
  siRNA target sequence for 9430029A11 (NM_177881.2,512-530).
ggctggctgcattgtttct

SEQ ID NO: 800142 - DNA, 19 bp, Mus musculus
  siRNA target sequence for 9430029A11 (NM_177881.2,566-584).
gcatggcaaaacagacatt

SEQ ID NO: 800143 - DNA, 19 bp, Mus musculus
  siRNA target sequence for C330043M08 (NM_177883.2,341-359).
gctcattaccaggtacttt

SEQ ID NO: 800144 - DNA, 19 bp, Mus musculus
  siRNA target sequence for C330043M08 (NM_177883.2,360-378).
ctggataatgttggaaata

SEQ ID NO: 800145 - DNA, 19 bp, Mus musculus
  siRNA target sequence for C330043M08 (NM_177883.2,412-430).
ctgcaatccctgttccaaa

SEQ ID NO: 800146 - DNA, 19 bp, Mus musculus
  siRNA target sequence for C330043M08 (NM_177883.2,469-487).
cattggtgaatatatacga

SEQ ID NO: 800147 - DNA, 19 bp, Mus musculus
  siRNA target sequence for C330043M08 (NM_177883.2,553-571).
gtctggatggggacatact

SEQ ID NO: 800148 - DNA, 19 bp, Mus musculus
  siRNA target sequence for C330043M08 (NM_177883.2,561-579).
ggggacatacttggtaatt

SEQ ID NO: 800149 - DNA, 19 bp, Mus musculus
  siRNA target sequence for C330043M08 (NM_177883.2,562-580).
gggacatacttggtaattt

SEQ ID NO: 800150 - DNA, 19 bp, Mus musculus
  siRNA target sequence for C330043M08 (NM_177883.2,570-588).
cttggtaatttcgtatcat

SEQ ID NO: 800151 - DNA, 19 bp, Mus musculus
  siRNA target sequence for C330043M08 (NM_177883.2,688-706).
cagagcccggtatagatgt

SEQ ID NO: 800152 - DNA, 19 bp, Mus musculus
  siRNA target sequence for C330043M08 (NM_177883.2,733-751).
ctaagtctggcctgattgt

SEQ ID NO: 800153 - DNA, 19 bp, Mus musculus
  siRNA target sequence for C330043M08 (NM_177883.2,965-983).
gctgaatgaactgtctata

SEQ ID NO: 800154 - DNA, 19 bp, Mus musculus
  siRNA target sequence for C330043M08 (NM_177883.2,1039-1057).
ggctaagaagtgtttcaga

SEQ ID NO: 800155 - DNA, 19 bp, Mus musculus
  siRNA target sequence for C330043M08 (NM_177883.2,1180-1198).
ctgacaggacggatgataa

SEQ ID NO: 800156 - DNA, 19 bp, Mus musculus
  siRNA target sequence for C330043M08 (NM_177883.2,1341-1359).
ctgtttggctctacctttt

SEQ ID NO: 800157 - DNA, 19 bp, Mus musculus
  siRNA target sequence for C330043M08 (NM_177883.2,1457-1475).
ggttctggcagctgttcaa

SEQ ID NO: 800158 - DNA, 19 bp, Mus musculus
  siRNA target sequence for C330043M08 (NM_177883.2,1509-1527).
gataacagaaccaactcta

SEQ ID NO: 800159 - DNA, 19 bp, Mus musculus
  siRNA target sequence for AW146020 (NM_177884.2,554-572).
gctgaagaaacgtcaatca

SEQ ID NO: 800160 - DNA, 19 bp, Mus musculus
  siRNA target sequence for AW146020 (NM_177884.2,686-704).
cacagcagtaagtctcaaa

SEQ ID NO: 800161 - DNA, 19 bp, Mus musculus
  siRNA target sequence for AW146020 (NM_177884.2,732-750).
catttccaccggtaaattt

SEQ ID NO: 800162 - DNA, 19 bp, Mus musculus
  siRNA target sequence for AW146020 (NM_177884.2,737-755).
ccaccggtaaatttggaaa

SEQ ID NO: 800163 - DNA, 19 bp, Mus musculus
  siRNA target sequence for AW146020 (NM_177884.2,738-756).
caccggtaaatttggaaat

SEQ ID NO: 800164 - DNA, 19 bp, Mus musculus
  siRNA target sequence for AW146020 (NM_177884.2,740-758).
ccggtaaatttggaaatta

SEQ ID NO: 800165 - DNA, 19 bp, Mus musculus
  siRNA target sequence for AW146020 (NM_177884.2,767-785).
cagttaaataatagattaa

SEQ ID NO: 800166 - DNA, 19 bp, Mus musculus
  siRNA target sequence for AW146020 (NM_177884.2,806-824).
cgctcacaccagagagaat

SEQ ID NO: 800167 - DNA, 19 bp, Mus musculus
  siRNA target sequence for AW146020 (NM_177884.2,808-826).
ctcacaccagagagaatat

SEQ ID NO: 800168 - DNA, 19 bp, Mus musculus
  siRNA target sequence for AW146020 (NM_177884.2,836-854).
gaacaagacatcaagagtt

SEQ ID NO: 800169 - DNA, 19 bp, Mus musculus
  siRNA target sequence for AW146020 (NM_177884.2,859-877).
gacggctatccagaatctt

SEQ ID NO: 800170 - DNA, 19 bp, Mus musculus
  siRNA target sequence for AW146020 (NM_177884.2,885-903).
catcagaccatgctcaaaa

SEQ ID NO: 800171 - DNA, 19 bp, Mus musculus
  siRNA target sequence for AW146020 (NM_177884.2,888-906).
cagaccatgctcaaaacta

SEQ ID NO: 800172 - DNA, 19 bp, Mus musculus
  siRNA target sequence for AW146020 (NM_177884.2,890-908).
gaccatgctcaaaactaca

SEQ ID NO: 800173 - DNA, 19 bp, Mus musculus
  siRNA target sequence for AW146020 (NM_177884.2,896-914).
gctcaaaactacagattct

SEQ ID NO: 800174 - DNA, 19 bp, Mus musculus
  siRNA target sequence for AW146020 (NM_177884.2,899-917).
caaaactacagattctaca

SEQ ID NO: 800175 - DNA, 19 bp, Mus musculus
  siRNA target sequence for AW146020 (NM_177884.2,918-936).
ggggcatgaaaagttatgt

SEQ ID NO: 800176 - DNA, 19 bp, Mus musculus
  siRNA target sequence for AW146020 (NM_177884.2,986-1004).
ctagaatcatccatgtaca

SEQ ID NO: 800177 - DNA, 19 bp, Mus musculus
  siRNA target sequence for AW146020 (NM_177884.2,997-1015).
catgtacacgttgctttta

SEQ ID NO: 800178 - DNA, 19 bp, Mus musculus
  siRNA target sequence for AW146020 (NM_177884.2,1000-1018).
gtacacgttgcttttaaaa

SEQ ID NO: 800179 - DNA, 19 bp, Mus musculus
  siRNA target sequence for AW146020 (NM_177884.2,1019-1037).
cggtcagaagcacttttga

SEQ ID NO: 800180 - DNA, 19 bp, Mus musculus
  siRNA target sequence for AW146020 (NM_177884.2,1036-1054).
gaaacgcaggcaagatgaa

SEQ ID NO: 800181 - DNA, 19 bp, Mus musculus
  siRNA target sequence for AW146020 (NM_177884.2,1052-1070).
gaattaaaatgcgaatcat

SEQ ID NO: 800182 - DNA, 19 bp, Mus musculus
  siRNA target sequence for AW146020 (NM_177884.2,1081-1099).
gcagttatcacgcaaagat

SEQ ID NO: 800183 - DNA, 19 bp, Mus musculus
  siRNA target sequence for AW146020 (NM_177884.2,1138-1156).
ggatcaacggattttagaa

SEQ ID NO: 800184 - DNA, 19 bp, Mus musculus
  siRNA target sequence for AW146020 (NM_177884.2,1222-1240).
ggaagggatgtctagtgat

SEQ ID NO: 800185 - DNA, 19 bp, Mus musculus
  siRNA target sequence for AW146020 (NM_177884.2,1227-1245).
ggatgtctagtgatgatga

SEQ ID NO: 800186 - DNA, 19 bp, Mus musculus
  siRNA target sequence for AW146020 (NM_177884.2,1300-1318).
ggattgtaagaaagttttt

SEQ ID NO: 800187 - DNA, 19 bp, Mus musculus
  siRNA target sequence for AW146020 (NM_177884.2,1372-1390).
gcagtggcgagaaaagttt

SEQ ID NO: 800188 - DNA, 19 bp, Mus musculus
  siRNA target sequence for AW146020 (NM_177884.2,1387-1405).
gtttcctgattcctactat

SEQ ID NO: 800189 - DNA, 19 bp, Mus musculus
  siRNA target sequence for AW146020 (NM_177884.2,1446-1464).
ccctgatacgagttcagtt

SEQ ID NO: 800190 - DNA, 19 bp, Mus musculus
  siRNA target sequence for AW146020 (NM_177884.2,1469-1487).
gactggaatcctcttaaga

SEQ ID NO: 800191 - DNA, 19 bp, Mus musculus
  siRNA target sequence for AW146020 (NM_177884.2,1494-1512).
ccataggtctagacaagat

SEQ ID NO: 800192 - DNA, 19 bp, Mus musculus
  siRNA target sequence for AW146020 (NM_177884.2,1513-1531).
gccctggttcacagctata

SEQ ID NO: 800193 - DNA, 19 bp, Mus musculus
  siRNA target sequence for AW146020 (NM_177884.2,1514-1532).
ccctggttcacagctataa

SEQ ID NO: 800194 - DNA, 19 bp, Mus musculus
  siRNA target sequence for AW146020 (NM_177884.2,1546-1564).
gagcagcatggacgatata

SEQ ID NO: 800195 - DNA, 19 bp, Mus musculus
  siRNA target sequence for AW146020 (NM_177884.2,1622-1640).
gttcctcgacttacagatt

SEQ ID NO: 800196 - DNA, 19 bp, Mus musculus
  siRNA target sequence for AW146020 (NM_177884.2,1715-1733).
gaacagttcgcttctgaaa

SEQ ID NO: 800197 - DNA, 19 bp, Mus musculus
  siRNA target sequence for AW146020 (NM_177884.2,1754-1772).
caggatttacttaaatcta

SEQ ID NO: 800198 - DNA, 19 bp, Mus musculus
  siRNA target sequence for AW146020 (NM_177884.2,1756-1774).
ggatttacttaaatctatt

SEQ ID NO: 800199 - DNA, 19 bp, Mus musculus
  siRNA target sequence for AW146020 (NM_177884.2,1770-1788).
ctattgttgcaagaatgaa

SEQ ID NO: 800200 - DNA, 19 bp, Mus musculus
  siRNA target sequence for AW146020 (NM_177884.2,1786-1804).
gaagaagtcaatagaagat

SEQ ID NO: 800201 - DNA, 19 bp, Mus musculus
  siRNA target sequence for AW146020 (NM_177884.2,1863-1881).
ccaagttccaagaaagaca

SEQ ID NO: 800202 - DNA, 19 bp, Mus musculus
  siRNA target sequence for AW146020 (NM_177884.2,1895-1913).
ctaaagctcttccgaaata

SEQ ID NO: 800203 - DNA, 19 bp, Mus musculus
  siRNA target sequence for AW146020 (NM_177884.2,1903-1921).
cttccgaaatattcttctt

SEQ ID NO: 800204 - DNA, 19 bp, Mus musculus
  siRNA target sequence for AW146020 (NM_177884.2,1976-1994).
ctgaatcgctaccttatca

SEQ ID NO: 800205 - DNA, 19 bp, Mus musculus
  siRNA target sequence for AW146020 (NM_177884.2,2016-2034).
ctggaccagatgtggttaa

SEQ ID NO: 800206 - DNA, 19 bp, Mus musculus
  siRNA target sequence for AW146020 (NM_177884.2,2044-2062).
ccagatagcagcatgtcta

SEQ ID NO: 800207 - DNA, 19 bp, Mus musculus
  siRNA target sequence for AW146020 (NM_177884.2,2085-2103).
ctgctatgaggacatcaat

SEQ ID NO: 800208 - DNA, 19 bp, Mus musculus
  siRNA target sequence for AW146020 (NM_177884.2,2100-2118).
caattccccagctagaaaa

SEQ ID NO: 800209 - DNA, 19 bp, Mus musculus
  siRNA target sequence for AW146020 (NM_177884.2,2111-2129).
ctagaaaacttcattaagt

SEQ ID NO: 800210 - DNA, 19 bp, Mus musculus
  siRNA target sequence for AW146020 (NM_177884.2,2180-2198).
gtcagtgaaataattctta

SEQ ID NO: 800211 - DNA, 19 bp, Mus musculus
  siRNA target sequence for C630010N09 (NM_177885.2,529-547).
gagactctgcccacatcat

SEQ ID NO: 800212 - DNA, 19 bp, Mus musculus
  siRNA target sequence for C630010N09 (NM_177885.2,540-558).
cacatcatcttggttatca

SEQ ID NO: 800213 - DNA, 19 bp, Mus musculus
  siRNA target sequence for C630010N09 (NM_177885.2,583-601).
cgaagacaaatgtctttaa

SEQ ID NO: 800214 - DNA, 19 bp, Mus musculus
  siRNA target sequence for C630010N09 (NM_177885.2,603-621).
gtcccactgtccagttaca

SEQ ID NO: 800215 - DNA, 19 bp, Mus musculus
  siRNA target sequence for C630010N09 (NM_177885.2,605-623).
cccactgtccagttacaaa

SEQ ID NO: 800216 - DNA, 19 bp, Mus musculus
  siRNA target sequence for C630010N09 (NM_177885.2,607-625).
cactgtccagttacaaata

SEQ ID NO: 800217 - DNA, 19 bp, Mus musculus
  siRNA target sequence for C630010N09 (NM_177885.2,719-737).
cgaactctggaggacttat

SEQ ID NO: 800218 - DNA, 19 bp, Mus musculus
  siRNA target sequence for C630010N09 (NM_177885.2,738-756).
ctcatccaagagagagata

SEQ ID NO: 800219 - DNA, 19 bp, Mus musculus
  siRNA target sequence for C630010N09 (NM_177885.2,784-802).
gagacaccccagtctctaa

SEQ ID NO: 800220 - DNA, 19 bp, Mus musculus
  siRNA target sequence for C630010N09 (NM_177885.2,841-859).
gccaaaatatacactttaa

SEQ ID NO: 800221 - DNA, 19 bp, Mus musculus
  siRNA target sequence for BC022651 (NM_177887.2,295-313).
cttgctgcctgtcatctta

SEQ ID NO: 800222 - DNA, 19 bp, Mus musculus
  siRNA target sequence for BC022651 (NM_177887.2,386-404).
gaaggcttcccttttatca

SEQ ID NO: 800223 - DNA, 19 bp, Mus musculus
  siRNA target sequence for BC022651 (NM_177887.2,403-421).
cagtatctgtggctcttat

SEQ ID NO: 800224 - DNA, 19 bp, Mus musculus
  siRNA target sequence for BC022651 (NM_177887.2,423-441).
ctcctcagagctgcatttt

SEQ ID NO: 800225 - DNA, 19 bp, Mus musculus
  siRNA target sequence for BC022651 (NM_177887.2,512-530).
gactggggcgtcaaaacct

SEQ ID NO: 800226 - DNA, 19 bp, Mus musculus
  siRNA target sequence for BC022651 (NM_177887.2,528-546).
cctggcaaaaccagctaat

SEQ ID NO: 800227 - DNA, 19 bp, Mus musculus
  siRNA target sequence for BC022651 (NM_177887.2,548-566).
ctgtggtcggggatccttt

SEQ ID NO: 800228 - DNA, 19 bp, Mus musculus
  siRNA target sequence for BC022651 (NM_177887.2,571-589).
cctgggtacctccatagta

SEQ ID NO: 800229 - DNA, 19 bp, Mus musculus
  siRNA target sequence for Zfp62 (NM_177889.2,746-764).
ggttctgttaagtatcata

SEQ ID NO: 800230 - DNA, 19 bp, Mus musculus
  siRNA target sequence for Zfp62 (NM_177889.2,802-820).
gctattgtagcgaggtttt

SEQ ID NO: 800231 - DNA, 19 bp, Mus musculus
  siRNA target sequence for Zfp62 (NM_177889.2,803-821).
ctattgtagcgaggtttta

SEQ ID NO: 800232 - DNA, 19 bp, Mus musculus
  siRNA target sequence for Zfp62 (NM_177889.2,812-830).
cgaggttttaagatccatt

SEQ ID NO: 800233 - DNA, 19 bp, Mus musculus
  siRNA target sequence for Zfp62 (NM_177889.2,813-831).
gaggttttaagatccatta

SEQ ID NO: 800234 - DNA, 19 bp, Mus musculus
  siRNA target sequence for Zfp62 (NM_177889.2,816-834).
gttttaagatccattacca

SEQ ID NO: 800235 - DNA, 19 bp, Mus musculus
  siRNA target sequence for Zfp62 (NM_177889.2,1000-1018).
cttacctcaggcaaaccta

SEQ ID NO: 800236 - DNA, 19 bp, Mus musculus
  siRNA target sequence for 4921507A12 (NM_177890.2,627-645).
caccgcagatgctaagtca

SEQ ID NO: 800237 - DNA, 19 bp, Mus musculus
  siRNA target sequence for 4921507A12 (NM_177890.2,681-699).
gccaggtctattactatga

SEQ ID NO: 800238 - DNA, 19 bp, Mus musculus
  siRNA target sequence for 4921507A12 (NM_177890.2,706-724).
caacctgggccctctgata

SEQ ID NO: 800239 - DNA, 19 bp, Mus musculus
  siRNA target sequence for 4921507A12 (NM_177890.2,845-863).
caaataccactttttacct

SEQ ID NO: 800240 - DNA, 19 bp, Mus musculus
  siRNA target sequence for 4921507A12 (NM_177890.2,909-927).
gtcttcccgtggttcaaat

SEQ ID NO: 800241 - DNA, 19 bp, Mus musculus
  siRNA target sequence for A230097C02 (NM_177892.2,2365-2383).
caaaaagtgcatctgtttt

SEQ ID NO: 800242 - DNA, 19 bp, Mus musculus
  siRNA target sequence for A230097C02 (NM_177892.2,2467-2485).
cgtctcagggagactcaat

SEQ ID NO: 800243 - DNA, 19 bp, Mus musculus
  siRNA target sequence for D030069K18 (NM_177894.3,125-143).
cacctgcgggtcagattat

SEQ ID NO: 800244 - DNA, 19 bp, Mus musculus
  siRNA target sequence for D030069K18 (NM_177894.3,138-156).
gattatcgcccttatgaaa

SEQ ID NO: 800245 - DNA, 19 bp, Mus musculus
  siRNA target sequence for D030069K18 (NM_177894.3,171-189).
cgccacatacctgaagaat

SEQ ID NO: 800246 - DNA, 19 bp, Mus musculus
  siRNA target sequence for D030069K18 (NM_177894.3,223-241).
ctacctacaagcgagattt

SEQ ID NO: 800247 - DNA, 19 bp, Mus musculus
  siRNA target sequence for D030069K18 (NM_177894.3,319-337).
ctgtcccaacttataaaga

SEQ ID NO: 800248 - DNA, 19 bp, Mus musculus
  siRNA target sequence for D030069K18 (NM_177894.3,323-341).
cccaacttataaagatgat

SEQ ID NO: 800249 - DNA, 19 bp, Mus musculus
  siRNA target sequence for D030069K18 (NM_177894.3,395-413).
ccatcccccagatgtgaaa

SEQ ID NO: 800250 - DNA, 19 bp, Mus musculus
  siRNA target sequence for D030069K18 (NM_177894.3,396-414).
catcccccagatgtgaaat

SEQ ID NO: 800251 - DNA, 19 bp, Mus musculus
  siRNA target sequence for D030069K18 (NM_177894.3,416-434).
cggaaactcaactacattt

SEQ ID NO: 800252 - DNA, 19 bp, Mus musculus
  siRNA target sequence for D030069K18 (NM_177894.3,430-448).
catttcaggatgactatgt

SEQ ID NO: 800253 - DNA, 19 bp, Mus musculus
  siRNA target sequence for D030069K18 (NM_177894.3,512-530).
cccttttaatggtgataca

SEQ ID NO: 800254 - DNA, 19 bp, Mus musculus
  siRNA target sequence for D030069K18 (NM_177894.3,513-531).
ccttttaatggtgatacaa

SEQ ID NO: 800255 - DNA, 19 bp, Mus musculus
  siRNA target sequence for D030069K18 (NM_177894.3,529-547).
caagtcatcgtcgagatta

SEQ ID NO: 800256 - DNA, 19 bp, Mus musculus
  siRNA target sequence for D030069K18 (NM_177894.3,532-550).
gtcatcgtcgagattatgt

SEQ ID NO: 800257 - DNA, 19 bp, Mus musculus
  siRNA target sequence for D030069K18 (NM_177894.3,628-646).
ccactcaccggaatgactt

SEQ ID NO: 800258 - DNA, 19 bp, Mus musculus
  siRNA target sequence for D030069K18 (NM_177894.3,629-647).
cactcaccggaatgacttt

SEQ ID NO: 800259 - DNA, 19 bp, Mus musculus
  siRNA target sequence for D030069K18 (NM_177894.3,631-649).
ctcaccggaatgactttca

SEQ ID NO: 800260 - DNA, 19 bp, Mus musculus
  siRNA target sequence for D030069K18 (NM_177894.3,694-712).
ccagagtgacccaaaacat

SEQ ID NO: 800261 - DNA, 19 bp, Mus musculus
  siRNA target sequence for D030069K18 (NM_177894.3,695-713).
cagagtgacccaaaacatt

SEQ ID NO: 800262 - DNA, 19 bp, Mus musculus
  siRNA target sequence for D030069K18 (NM_177894.3,716-734).
gtttaaaggaagtactgaa

SEQ ID NO: 800263 - DNA, 19 bp, Mus musculus
  siRNA target sequence for D030069K18 (NM_177894.3,782-800).
gaaagtggcagagtatgta

SEQ ID NO: 800264 - DNA, 19 bp, Mus musculus
  siRNA target sequence for D030069K18 (NM_177894.3,832-850).
ccagccacctcgactatgt

SEQ ID NO: 800265 - DNA, 19 bp, Mus musculus
  siRNA target sequence for D030069K18 (NM_177894.3,833-851).
cagccacctcgactatgtt

SEQ ID NO: 800266 - DNA, 19 bp, Mus musculus
  siRNA target sequence for D030069K18 (NM_177894.3,866-884).
ccgcgtagttgccattaga

SEQ ID NO: 800267 - DNA, 19 bp, Mus musculus
  siRNA target sequence for D030069K18 (NM_177894.3,931-949).
gcaccacgaaggaagattt

SEQ ID NO: 800268 - DNA, 19 bp, Mus musculus
  siRNA target sequence for D030069K18 (NM_177894.3,970-988).
gccaaggacttattaagca

SEQ ID NO: 800269 - DNA, 19 bp, Mus musculus
  siRNA target sequence for D030069K18 (NM_177894.3,1023-1041).
gagggtttgagcactttca

SEQ ID NO: 800270 - DNA, 19 bp, Mus musculus
  siRNA target sequence for D030069K18 (NM_177894.3,1056-1074).
ccacatgaattgattccaa

SEQ ID NO: 800271 - DNA, 19 bp, Mus musculus
  siRNA target sequence for D030069K18 (NM_177894.3,1081-1099).
gctgcaaacctttaaatga

SEQ ID NO: 800272 - DNA, 19 bp, Mus musculus
  siRNA target sequence for D030069K18 (NM_177894.3,1082-1100).
ctgcaaacctttaaatgaa

SEQ ID NO: 800273 - DNA, 19 bp, Mus musculus
  siRNA target sequence for D030069K18 (NM_177894.3,1090-1108).
ctttaaatgaagctcttaa

SEQ ID NO: 800274 - DNA, 19 bp, Mus musculus
  siRNA target sequence for D030069K18 (NM_177894.3,1191-1209).
ccttctcctcctggttata

SEQ ID NO: 800275 - DNA, 19 bp, Mus musculus
  siRNA target sequence for D030069K18 (NM_177894.3,1195-1213).
ctcctcctggttatatatt

SEQ ID NO: 800276 - DNA, 19 bp, Mus musculus
  siRNA target sequence for D030069K18 (NM_177894.3,1228-1246).
cccaaggacataaattctt

SEQ ID NO: 800277 - DNA, 19 bp, Mus musculus
  siRNA target sequence for D030069K18 (NM_177894.3,1244-1262).
ctttcgcaagattattcct

SEQ ID NO: 800278 - DNA, 19 bp, Mus musculus
  siRNA target sequence for A530021J07 (NM_177895.2,400-418).
ctggtggcaggaattggaa

SEQ ID NO: 800279 - DNA, 19 bp, Mus musculus
  siRNA target sequence for A530021J07 (NM_177895.2,535-553).
ccctgtggccgtgaaatct

SEQ ID NO: 800280 - DNA, 19 bp, Mus musculus
  siRNA target sequence for A530021J07 (NM_177895.2,537-555).
ctgtggccgtgaaatctga

SEQ ID NO: 800281 - DNA, 19 bp, Mus musculus
  siRNA target sequence for LOC330599 (NM_177896.2,215-233).
gatcaatcctgaattgtct

SEQ ID NO: 800282 - DNA, 19 bp, Mus musculus
  siRNA target sequence for LOC330599 (NM_177896.2,234-252).
ccgaaaaaagccagtttct

SEQ ID NO: 800283 - DNA, 19 bp, Mus musculus
  siRNA target sequence for LOC330599 (NM_177896.2,361-379).
caccagttaccgagaaagt

SEQ ID NO: 800284 - DNA, 19 bp, Mus musculus
  siRNA target sequence for LOC330599 (NM_177896.2,364-382).
cagttaccgagaaagttct

SEQ ID NO: 800285 - DNA, 19 bp, Mus musculus
  siRNA target sequence for LOC330599 (NM_177896.2,366-384).
gttaccgagaaagttctta

SEQ ID NO: 800286 - DNA, 19 bp, Mus musculus
  siRNA target sequence for BC038881 (NM_177897.2,484-502).
cgggggactcgtacttcaa

SEQ ID NO: 800287 - DNA, 19 bp, Mus musculus
  siRNA target sequence for BC038881 (NM_177897.2,486-504).
ggggactcgtacttcaaca

SEQ ID NO: 800288 - DNA, 19 bp, Mus musculus
  siRNA target sequence for BC038881 (NM_177897.2,487-505).
gggactcgtacttcaacat

SEQ ID NO: 800289 - DNA, 19 bp, Mus musculus
  siRNA target sequence for BC038881 (NM_177897.2,489-507).
gactcgtacttcaacatca

SEQ ID NO: 800290 - DNA, 19 bp, Mus musculus
  siRNA target sequence for BC038881 (NM_177897.2,570-588).
cctcggtaccagtacttga

SEQ ID NO: 800291 - DNA, 19 bp, Mus musculus
  siRNA target sequence for BC038881 (NM_177897.2,571-589).
ctcggtaccagtacttgaa

SEQ ID NO: 800292 - DNA, 19 bp, Mus musculus
  siRNA target sequence for BC038881 (NM_177897.2,648-666).
gaccccagcagcatcgttt

SEQ ID NO: 800293 - DNA, 19 bp, Mus musculus
  siRNA target sequence for BC038881 (NM_177897.2,683-701).
catccacttcccacctaat

SEQ ID NO: 800294 - DNA, 19 bp, Mus musculus
  siRNA target sequence for BC038881 (NM_177897.2,825-843).
ggcctctttgggatctaca

SEQ ID NO: 800295 - DNA, 19 bp, Mus musculus
  siRNA target sequence for BC038881 (NM_177897.2,826-844).
gcctctttgggatctacaa

SEQ ID NO: 800296 - DNA, 19 bp, Mus musculus
  siRNA target sequence for BC038881 (NM_177897.2,830-848).
ctttgggatctacaaatca

SEQ ID NO: 800297 - DNA, 19 bp, Mus musculus
  siRNA target sequence for BC038881 (NM_177897.2,905-923).
cgaggactgggaacttctt

SEQ ID NO: 800298 - DNA, 19 bp, Mus musculus
  siRNA target sequence for 4933402J07 (NM_177901.2,126-144).
gaagacaccgagaatctga

SEQ ID NO: 800299 - DNA, 19 bp, Mus musculus
  siRNA target sequence for 4933402J07 (NM_177901.2,293-311).
ggcaggaaagaaaaacgta

SEQ ID NO: 800300 - DNA, 19 bp, Mus musculus
  siRNA target sequence for 4933402J07 (NM_177901.2,369-387).
gtacgtcctgtcaagaaga

SEQ ID NO: 800301 - DNA, 19 bp, Mus musculus
  siRNA target sequence for 4933402J07 (NM_177901.2,458-476).
caacttcagggatagcaat

SEQ ID NO: 800302 - DNA, 19 bp, Mus musculus
  siRNA target sequence for 4933402J07 (NM_177901.2,665-683).
ggctcccgacaacaactat

SEQ ID NO: 800303 - DNA, 19 bp, Mus musculus
  siRNA target sequence for 4933402J07 (NM_177901.2,667-685).
ctcccgacaacaactatga

SEQ ID NO: 800304 - DNA, 19 bp, Mus musculus
  siRNA target sequence for 4933402J07 (NM_177901.2,780-798).
ctgcgtttgtccaagaaca

SEQ ID NO: 800305 - DNA, 19 bp, Mus musculus
  siRNA target sequence for 4933402J07 (NM_177901.2,783-801).
cgtttgtccaagaacaaca

SEQ ID NO: 800306 - DNA, 19 bp, Mus musculus
  siRNA target sequence for 4933402J07 (NM_177901.2,784-802).
gtttgtccaagaacaacat

SEQ ID NO: 800307 - DNA, 19 bp, Mus musculus
  siRNA target sequence for 4933416K23 (NM_177902.2,899-917).
ggagtcttctccccattta

SEQ ID NO: 800308 - DNA, 19 bp, Mus musculus
  siRNA target sequence for 4933416K23 (NM_177902.2,1057-1075).
cagcaataagccatcgaaa

SEQ ID NO: 800309 - DNA, 19 bp, Mus musculus
  siRNA target sequence for 4933416K23 (NM_177902.2,1060-1078).
caataagccatcgaaatct

SEQ ID NO: 800310 - DNA, 19 bp, Mus musculus
  siRNA target sequence for A630085K21 (NM_177903.2,560-578).
ccaaccctcccaatatcca

SEQ ID NO: 800311 - DNA, 19 bp, Mus musculus
  siRNA target sequence for A630085K21 (NM_177903.2,576-594).
ccaccgctggagagtctta

SEQ ID NO: 800312 - DNA, 19 bp, Mus musculus
  siRNA target sequence for A630085K21 (NM_177903.2,579-597).
ccgctggagagtcttaact

SEQ ID NO: 800313 - DNA, 19 bp, Mus musculus
  siRNA target sequence for A630085K21 (NM_177903.2,580-598).
cgctggagagtcttaacta

SEQ ID NO: 800314 - DNA, 19 bp, Mus musculus
  siRNA target sequence for A630085K21 (NM_177903.2,591-609).
cttaactagggagacttat

SEQ ID NO: 800315 - DNA, 19 bp, Mus musculus
  siRNA target sequence for A630085K21 (NM_177903.2,659-677).
gctggaccaaaattgagat

SEQ ID NO: 800316 - DNA, 19 bp, Mus musculus
  siRNA target sequence for A630085K21 (NM_177903.2,660-678).
ctggaccaaaattgagatt

SEQ ID NO: 800317 - DNA, 19 bp, Mus musculus
  siRNA target sequence for A630085K21 (NM_177903.2,731-749).
caggtgaaggcctccatat

SEQ ID NO: 800318 - DNA, 19 bp, Mus musculus
  siRNA target sequence for A630085K21 (NM_177903.2,733-751).
ggtgaaggcctccatatat

SEQ ID NO: 800319 - DNA, 19 bp, Mus musculus
  siRNA target sequence for A630085K21 (NM_177903.2,736-754).
gaaggcctccatatatgga

SEQ ID NO: 800320 - DNA, 19 bp, Mus musculus
  siRNA target sequence for 6030452D12 (NM_177904.2,88-106).
cagaaaagtcgccaagatt

SEQ ID NO: 800321 - DNA, 19 bp, Mus musculus
  siRNA target sequence for 6030452D12 (NM_177904.2,90-108).
gaaaagtcgccaagattga

SEQ ID NO: 800322 - DNA, 19 bp, Mus musculus
  siRNA target sequence for 6030452D12 (NM_177904.2,177-195).
gggatatcttggaacatca

SEQ ID NO: 800323 - DNA, 19 bp, Mus musculus
  siRNA target sequence for 6030452D12 (NM_177904.2,368-386).
ggtttgcatggcaagaaaa

SEQ ID NO: 800324 - DNA, 19 bp, Mus musculus
  siRNA target sequence for 6030452D12 (NM_177904.2,468-486).
ccgcgtgttgcctttgtga

SEQ ID NO: 800325 - DNA, 19 bp, Mus musculus
  siRNA target sequence for 6030452D12 (NM_177904.2,522-540).
gtggcacatacaacaacta

SEQ ID NO: 800326 - DNA, 19 bp, Mus musculus
  siRNA target sequence for 6030452D12 (NM_177904.2,619-637).
gcttgttctggattcatgt

SEQ ID NO: 800327 - DNA, 19 bp, Mus musculus
  siRNA target sequence for 6030452D12 (NM_177904.2,638-656).
ccccagcaagacacatcaa

SEQ ID NO: 800328 - DNA, 19 bp, Mus musculus
  siRNA target sequence for 6030452D12 (NM_177904.2,640-658).
ccagcaagacacatcaaga

SEQ ID NO: 800329 - DNA, 19 bp, Mus musculus
  siRNA target sequence for 9230101H05 (NM_177905.2,186-204).
gttgtggtcaggaagagat

SEQ ID NO: 800330 - DNA, 19 bp, Mus musculus
  siRNA target sequence for 9230101H05 (NM_177905.2,290-308).
cggagtggtatgacttcta

SEQ ID NO: 800331 - DNA, 19 bp, Mus musculus
  siRNA target sequence for 9230101H05 (NM_177905.2,346-364).
cccacccactacaacgtta

SEQ ID NO: 800332 - DNA, 19 bp, Mus musculus
  siRNA target sequence for 9230101H05 (NM_177905.2,347-365).
ccacccactacaacgttat

SEQ ID NO: 800333 - DNA, 19 bp, Mus musculus
  siRNA target sequence for 9230101H05 (NM_177905.2,350-368).
cccactacaacgttatcta

SEQ ID NO: 800334 - DNA, 19 bp, Mus musculus
  siRNA target sequence for 9230101H05 (NM_177905.2,351-369).
ccactacaacgttatctat

SEQ ID NO: 800335 - DNA, 19 bp, Mus musculus
  siRNA target sequence for 9230101H05 (NM_177905.2,354-372).
ctacaacgttatctatgat

SEQ ID NO: 800336 - DNA, 19 bp, Mus musculus
  siRNA target sequence for 9230101H05 (NM_177905.2,360-378).
cgttatctatgatgacaat

SEQ ID NO: 800337 - DNA, 19 bp, Mus musculus
  siRNA target sequence for 9230101H05 (NM_177905.2,403-421).
cgactgaccttcaaactgt

SEQ ID NO: 800338 - DNA, 19 bp, Mus musculus
  siRNA target sequence for 9230101H05 (NM_177905.2,418-436).
ctgtgccatctctactaca

SEQ ID NO: 800339 - DNA, 19 bp, Mus musculus
  siRNA target sequence for 9230101H05 (NM_177905.2,435-453).
caactggcagtcttgtcat

SEQ ID NO: 800340 - DNA, 19 bp, Mus musculus
  siRNA target sequence for 9230101H05 (NM_177905.2,440-458).
ggcagtcttgtcatggaat

SEQ ID NO: 800341 - DNA, 19 bp, Mus musculus
  siRNA target sequence for 9230101H05 (NM_177905.2,467-485).
ctctaaaacctgtaacagt

SEQ ID NO: 800342 - DNA, 19 bp, Mus musculus
  siRNA target sequence for 3732419F12 (NM_177906.2,229-247).
caggtgtaccatagatgat

SEQ ID NO: 800343 - DNA, 19 bp, Mus musculus
  siRNA target sequence for 3732419F12 (NM_177906.2,317-335).
gaccctcgagtgatcattt

SEQ ID NO: 800344 - DNA, 19 bp, Mus musculus
  siRNA target sequence for 3732419F12 (NM_177906.2,321-339).
ctcgagtgatcattttggt

SEQ ID NO: 800345 - DNA, 19 bp, Mus musculus
  siRNA target sequence for 3732419F12 (NM_177906.2,343-361).
cacgcctacccaatacagt

SEQ ID NO: 800346 - DNA, 19 bp, Mus musculus
  siRNA target sequence for 3732419F12 (NM_177906.2,345-363).
cgcctacccaatacagtat

SEQ ID NO: 800347 - DNA, 19 bp, Mus musculus
  siRNA target sequence for 3732419F12 (NM_177906.2,347-365).
cctacccaatacagtatca

SEQ ID NO: 800348 - DNA, 19 bp, Mus musculus
  siRNA target sequence for 3732419F12 (NM_177906.2,348-366).
ctacccaatacagtatcat

SEQ ID NO: 800349 - DNA, 19 bp, Mus musculus
  siRNA target sequence for 3732419F12 (NM_177906.2,439-457).
ctcccgggtccatctcata

SEQ ID NO: 800350 - DNA, 19 bp, Mus musculus
  siRNA target sequence for 3732419F12 (NM_177906.2,492-510).
cagacattaccgtgaatga

SEQ ID NO: 800351 - DNA, 19 bp, Mus musculus
  siRNA target sequence for 3732419F12 (NM_177906.2,596-614).
gtatttaccatgcaaagtt

SEQ ID NO: 800352 - DNA, 19 bp, Mus musculus
  siRNA target sequence for AI593442 (NM_177907.2,583-601).
gtgctggaatgccatctat

SEQ ID NO: 800353 - DNA, 19 bp, Mus musculus
  siRNA target sequence for AI593442 (NM_177907.2,586-604).
ctggaatgccatctattaa

SEQ ID NO: 800354 - DNA, 19 bp, Mus musculus
  siRNA target sequence for AI593442 (NM_177907.2,589-607).
gaatgccatctattaaaaa

SEQ ID NO: 800355 - DNA, 19 bp, Mus musculus
  siRNA target sequence for AI593442 (NM_177907.2,719-737).
gatgttgggcaatttggat

SEQ ID NO: 800356 - DNA, 19 bp, Mus musculus
  siRNA target sequence for AI593442 (NM_177907.2,775-793).
gcttacaggataaaactgt

SEQ ID NO: 800357 - DNA, 19 bp, Mus musculus
  siRNA target sequence for AI593442 (NM_177907.2,776-794).
cttacaggataaaactgtt

SEQ ID NO: 800358 - DNA, 19 bp, Mus musculus
  siRNA target sequence for AI593442 (NM_177907.2,815-833).
ctccatgcctgcatctgat

SEQ ID NO: 800359 - DNA, 19 bp, Mus musculus
  siRNA target sequence for D230040E23 (NM_177908.2,479-497).
gaccagcaaaccatagtga

SEQ ID NO: 800360 - DNA, 19 bp, Mus musculus
  siRNA target sequence for D230040E23 (NM_177908.2,531-549).
gcctctcacctgaactgaa

SEQ ID NO: 800361 - DNA, 19 bp, Mus musculus
  siRNA target sequence for D230040E23 (NM_177908.2,582-600).
cggcttcggtgacatgttt

SEQ ID NO: 800362 - DNA, 19 bp, Mus musculus
  siRNA target sequence for D230040E23 (NM_177908.2,619-637).
ctccaaacagccttacgtt

SEQ ID NO: 800363 - DNA, 19 bp, Mus musculus
  siRNA target sequence for D230040E23 (NM_177908.2,650-668).
gagaatggggagatgtgta

SEQ ID NO: 800364 - DNA, 19 bp, Mus musculus
  siRNA target sequence for D230040E23 (NM_177908.2,719-737).
gacatcctgagatttttgt

SEQ ID NO: 800365 - DNA, 19 bp, Mus musculus
  siRNA target sequence for 9530008N10 (NM_177911.2,172-190).
gctgaggcgtggacagata

SEQ ID NO: 800366 - DNA, 19 bp, Mus musculus
  siRNA target sequence for 9530008N10 (NM_177911.2,173-191).
ctgaggcgtggacagatat

SEQ ID NO: 800367 - DNA, 19 bp, Mus musculus
  siRNA target sequence for 9530008N10 (NM_177911.2,178-196).
gcgtggacagatattcact

SEQ ID NO: 800368 - DNA, 19 bp, Mus musculus
  siRNA target sequence for 9530008N10 (NM_177911.2,238-256).
gctgaaggtgacattcact

SEQ ID NO: 800369 - DNA, 19 bp, Mus musculus
  siRNA target sequence for 9530008N10 (NM_177911.2,329-347).
gtgaagattgccaaacagt

SEQ ID NO: 800370 - DNA, 19 bp, Mus musculus
  siRNA target sequence for 9530008N10 (NM_177911.2,346-364).
gtctggcgtagaggttatt

SEQ ID NO: 800371 - DNA, 19 bp, Mus musculus
  siRNA target sequence for 9530008N10 (NM_177911.2,351-369).
gcgtagaggttattctgaa

SEQ ID NO: 800372 - DNA, 19 bp, Mus musculus
  siRNA target sequence for 9530008N10 (NM_177911.2,352-370).
cgtagaggttattctgaat

SEQ ID NO: 800373 - DNA, 19 bp, Mus musculus
  siRNA target sequence for 9530008N10 (NM_177911.2,395-413).
gtgggaaggtacaagatga

SEQ ID NO: 800374 - DNA, 19 bp, Mus musculus
  siRNA target sequence for 9530008N10 (NM_177911.2,415-433).
ggtgaacgagtataaagct

SEQ ID NO: 800375 - DNA, 19 bp, Mus musculus
  siRNA target sequence for 9530008N10 (NM_177911.2,435-453).
gagtattctaccttctctt

SEQ ID NO: 800376 - DNA, 19 bp, Mus musculus
  siRNA target sequence for 9530008N10 (NM_177911.2,503-521).
cgagcagagtacatcctta

SEQ ID NO: 800377 - DNA, 19 bp, Mus musculus
  siRNA target sequence for 9530008N10 (NM_177911.2,541-559).
catgggtttcgccaaacaa

SEQ ID NO: 800378 - DNA, 19 bp, Mus musculus
  siRNA target sequence for 9530008N10 (NM_177911.2,545-563).
ggtttcgccaaacaaatta

SEQ ID NO: 800379 - DNA, 19 bp, Mus musculus
  siRNA target sequence for 9530008N10 (NM_177911.2,612-630).
gctgcttcaacttgttgtt

SEQ ID NO: 800380 - DNA, 19 bp, Mus musculus
  siRNA target sequence for 9530008N10 (NM_177911.2,628-646).
gttccagttggagaacaat

SEQ ID NO: 800381 - DNA, 19 bp, Mus musculus
  siRNA target sequence for 9530008N10 (NM_177911.2,677-695).
gccatctgtactatgatgt

SEQ ID NO: 800382 - DNA, 19 bp, Mus musculus
  siRNA target sequence for 9530008N10 (NM_177911.2,885-903).
cagctcgaagcgtgactaa

SEQ ID NO: 800383 - DNA, 19 bp, Mus musculus
  siRNA target sequence for 9530008N10 (NM_177911.2,888-906).
ctcgaagcgtgactaactt

SEQ ID NO: 800384 - DNA, 19 bp, Mus musculus
  siRNA target sequence for 9530008N10 (NM_177911.2,1151-1169).
ggattgatccagatgaagt

SEQ ID NO: 800385 - DNA, 19 bp, Mus musculus
  siRNA target sequence for 9530008N10 (NM_177911.2,1152-1170).
gattgatccagatgaagta

SEQ ID NO: 800386 - DNA, 19 bp, Mus musculus
  siRNA target sequence for 9530008N10 (NM_177911.2,1195-1213).
ggtcaatggtgacaagttt

SEQ ID NO: 800387 - DNA, 19 bp, Mus musculus
  siRNA target sequence for 9530008N10 (NM_177911.2,1196-1214).
gtcaatggtgacaagttta

SEQ ID NO: 800388 - DNA, 19 bp, Mus musculus
  siRNA target sequence for 9530008N10 (NM_177911.2,1274-1292).
gccagcatcggcaagaaaa

SEQ ID NO: 800389 - DNA, 19 bp, Mus musculus
  siRNA target sequence for 9530008N10 (NM_177911.2,1312-1330).
cgagaacaggcgtgaagat

SEQ ID NO: 800390 - DNA, 19 bp, Mus musculus
  siRNA target sequence for 9530008N10 (NM_177911.2,1313-1331).
gagaacaggcgtgaagata

SEQ ID NO: 800391 - DNA, 19 bp, Mus musculus
  siRNA target sequence for 9530008N10 (NM_177911.2,1315-1333).
gaacaggcgtgaagatata

SEQ ID NO: 800392 - DNA, 19 bp, Mus musculus
  siRNA target sequence for 9530008N10 (NM_177911.2,1320-1338).
ggcgtgaagatataacctt

SEQ ID NO: 800393 - DNA, 19 bp, Mus musculus
  siRNA target sequence for 9530008N10 (NM_177911.2,1387-1405).
gaaggcttctggtaaacct

SEQ ID NO: 800394 - DNA, 19 bp, Mus musculus
  siRNA target sequence for 9530008N10 (NM_177911.2,1435-1453).
gaacaactctcttcagata

SEQ ID NO: 800395 - DNA, 19 bp, Mus musculus
  siRNA target sequence for 9530008N10 (NM_177911.2,1477-1495).
gttaggagctcccatctat

SEQ ID NO: 800396 - DNA, 19 bp, Mus musculus
  siRNA target sequence for 9530008N10 (NM_177911.2,1481-1499).
ggagctcccatctatttga

SEQ ID NO: 800397 - DNA, 19 bp, Mus musculus
  siRNA target sequence for 9530008N10 (NM_177911.2,1489-1507).
catctatttgaccataact

SEQ ID NO: 800398 - DNA, 19 bp, Mus musculus
  siRNA target sequence for 9530008N10 (NM_177911.2,1575-1593).
caggcaacaagaagacaaa

SEQ ID NO: 800399 - DNA, 19 bp, Mus musculus
  siRNA target sequence for 9530008N10 (NM_177911.2,1619-1637).
cagatccacggccaagaat

SEQ ID NO: 800400 - DNA, 19 bp, Mus musculus
  siRNA target sequence for 9530008N10 (NM_177911.2,1686-1704).
gcatggttgatgatgagat

SEQ ID NO: 800401 - DNA, 19 bp, Mus musculus
  siRNA target sequence for 9530008N10 (NM_177911.2,1723-1741).
cattgcagaaattgtagat

SEQ ID NO: 800402 - DNA, 19 bp, Mus musculus
  siRNA target sequence for 9530008N10 (NM_177911.2,1748-1766).
gaaagggtggccactgata

SEQ ID NO: 800403 - DNA, 19 bp, Mus musculus
  siRNA target sequence for 9530008N10 (NM_177911.2,1864-1882).
cctgcccatccctttgact

SEQ ID NO: 800404 - DNA, 19 bp, Mus musculus
  siRNA target sequence for 9530008N10 (NM_177911.2,1868-1886).
cccatccctttgactaaca

SEQ ID NO: 800405 - DNA, 19 bp, Mus musculus
  siRNA target sequence for 9530008N10 (NM_177911.2,1907-1925).
ctgggcctcgctaacatga

SEQ ID NO: 800406 - DNA, 19 bp, Mus musculus
  siRNA target sequence for 9530008N10 (NM_177911.2,1909-1927).
gggcctcgctaacatgaaa

SEQ ID NO: 800407 - DNA, 19 bp, Mus musculus
  siRNA target sequence for 9530008N10 (NM_177911.2,2001-2019).
gaccccagaaattcattgt

SEQ ID NO: 800408 - DNA, 19 bp, Mus musculus
  siRNA target sequence for 9530008N10 (NM_177911.2,2003-2021).
ccccagaaattcattgtca

SEQ ID NO: 800409 - DNA, 19 bp, Mus musculus
  siRNA target sequence for 9530008N10 (NM_177911.2,2004-2022).
cccagaaattcattgtcaa

SEQ ID NO: 800410 - DNA, 19 bp, Mus musculus
  siRNA target sequence for AI987692 (NM_177912.2,880-898).
cgttccaattggaagaata

SEQ ID NO: 800411 - DNA, 19 bp, Mus musculus
  siRNA target sequence for C130007D14 (NM_177914.1,46-64).
ctgccatttagctctgttt

SEQ ID NO: 800412 - DNA, 19 bp, Mus musculus
  siRNA target sequence for C130007D14 (NM_177914.1,80-98).
cagtaactgcccaagctat

SEQ ID NO: 800413 - DNA, 19 bp, Mus musculus
  siRNA target sequence for C130007D14 (NM_177914.1,82-100).
gtaactgcccaagctatat

SEQ ID NO: 800414 - DNA, 19 bp, Mus musculus
  siRNA target sequence for C130007D14 (NM_177914.1,136-154).
ctaccctttaaatgtctaa

SEQ ID NO: 800415 - DNA, 19 bp, Mus musculus
  siRNA target sequence for C130007D14 (NM_177914.1,157-175).
cagggtctacctgacaata

SEQ ID NO: 800416 - DNA, 19 bp, Mus musculus
  siRNA target sequence for C130007D14 (NM_177914.1,159-177).
gggtctacctgacaataaa

SEQ ID NO: 800417 - DNA, 19 bp, Mus musculus
  siRNA target sequence for C130007D14 (NM_177914.1,160-178).
ggtctacctgacaataaaa

SEQ ID NO: 800418 - DNA, 19 bp, Mus musculus
  siRNA target sequence for C130007D14 (NM_177914.1,163-181).
ctacctgacaataaaacca

SEQ ID NO: 800419 - DNA, 19 bp, Mus musculus
  siRNA target sequence for C130007D14 (NM_177914.1,213-231).
gggcctgcagctattagat

SEQ ID NO: 800420 - DNA, 19 bp, Mus musculus
  siRNA target sequence for C130007D14 (NM_177914.1,215-233).
gcctgcagctattagataa

SEQ ID NO: 800421 - DNA, 19 bp, Mus musculus
  siRNA target sequence for C130007D14 (NM_177914.1,240-258).
gggtcactcctcaaattat

SEQ ID NO: 800422 - DNA, 19 bp, Mus musculus
  siRNA target sequence for C130007D14 (NM_177914.1,242-260).
gtcactcctcaaattatct

SEQ ID NO: 800423 - DNA, 19 bp, Mus musculus
  siRNA target sequence for C130007D14 (NM_177914.1,259-277).
cttcaaatctcatatctta

SEQ ID NO: 800424 - DNA, 19 bp, Mus musculus
  siRNA target sequence for Igsf1 (NM_177915.2,808-826).
ctgctggcatctgacaatt

SEQ ID NO: 800425 - DNA, 19 bp, Mus musculus
  siRNA target sequence for C230004F18 (NM_177916.2,665-683).
ccctcacccatagttgaaa

SEQ ID NO: 800426 - DNA, 19 bp, Mus musculus
  siRNA target sequence for C230004F18 (NM_177916.2,667-685).
ctcacccatagttgaaact

SEQ ID NO: 800427 - DNA, 19 bp, Mus musculus
  siRNA target sequence for C230004F18 (NM_177916.2,702-720).
ctctggcacttctgacaat

SEQ ID NO: 800428 - DNA, 19 bp, Mus musculus
  siRNA target sequence for C230004F18 (NM_177916.2,704-722).
ctggcacttctgacaataa

SEQ ID NO: 800429 - DNA, 19 bp, Mus musculus
  siRNA target sequence for C230004F18 (NM_177916.2,706-724).
ggcacttctgacaataagt

SEQ ID NO: 800430 - DNA, 19 bp, Mus musculus
  siRNA target sequence for C230004F18 (NM_177916.2,708-726).
cacttctgacaataagttt

SEQ ID NO: 800431 - DNA, 19 bp, Mus musculus
  siRNA target sequence for C230004F18 (NM_177916.2,780-798).
cagcaaactctgatgttct

SEQ ID NO: 800432 - DNA, 19 bp, Mus musculus
  siRNA target sequence for C230004F18 (NM_177916.2,840-858).
cccataggtgcattgttat

SEQ ID NO: 800433 - DNA, 19 bp, Mus musculus
  siRNA target sequence for 9330152L17 (NM_177917.2,1040-1058).
gttgccctggagaatagga

SEQ ID NO: 800434 - DNA, 19 bp, Mus musculus
  siRNA target sequence for 9330152L17 (NM_177917.2,1051-1069).
gaataggaaaattaacaca

SEQ ID NO: 800435 - DNA, 19 bp, Mus musculus
  siRNA target sequence for 9330152L17 (NM_177917.2,1125-1143).
gttgtaaggtcagttatca

SEQ ID NO: 800436 - DNA, 19 bp, Mus musculus
  siRNA target sequence for 9330152L17 (NM_177917.2,1128-1146).
gtaaggtcagttatcaaca

SEQ ID NO: 800437 - DNA, 19 bp, Mus musculus
  siRNA target sequence for 9330152L17 (NM_177917.2,1137-1155).
gttatcaacaggactttta

SEQ ID NO: 800438 - DNA, 19 bp, Mus musculus
  siRNA target sequence for 9330152L17 (NM_177917.2,1175-1193).
gttagaaatgtttgttact

SEQ ID NO: 800439 - DNA, 19 bp, Mus musculus
  siRNA target sequence for 9330152L17 (NM_177917.2,1302-1320).
ctacttttagggtccttat

SEQ ID NO: 800440 - DNA, 19 bp, Mus musculus
  siRNA target sequence for 9330152L17 (NM_177917.2,1305-1323).
cttttagggtccttatatt

SEQ ID NO: 800441 - DNA, 19 bp, Mus musculus
  siRNA target sequence for 9330152L17 (NM_177917.2,1325-1343).
gggagtcctaccagtttgt

SEQ ID NO: 800442 - DNA, 19 bp, Mus musculus
  siRNA target sequence for E230019M04 (NM_177921.2,249-267).
gaacagggacaatgtacat

SEQ ID NO: 800443 - DNA, 19 bp, Mus musculus
  siRNA target sequence for E230019M04 (NM_177921.2,252-270).
cagggacaatgtacatcta

SEQ ID NO: 800444 - DNA, 19 bp, Mus musculus
  siRNA target sequence for E230019M04 (NM_177921.2,256-274).
gacaatgtacatctactat

SEQ ID NO: 800445 - DNA, 19 bp, Mus musculus
  siRNA target sequence for C030046I01Rik (NM_177994.2,160-178).
gacgcaagcagcattttat

SEQ ID NO: 800446 - DNA, 19 bp, Mus musculus
  siRNA target sequence for C030046I01Rik (NM_177994.2,234-252).
ctgcagcgtttggagaata

SEQ ID NO: 800447 - DNA, 19 bp, Mus musculus
  siRNA target sequence for C030046I01Rik (NM_177994.2,372-390).
gaggtctggaatgatttta

SEQ ID NO: 800448 - DNA, 19 bp, Mus musculus
  siRNA target sequence for C030046I01Rik (NM_177994.2,697-715).
gccaatacatggatctcat

SEQ ID NO: 800449 - DNA, 19 bp, Mus musculus
  siRNA target sequence for BC010250 (NM_178029.2,174-192).
caagagtggcggtatcaca

SEQ ID NO: 800450 - DNA, 19 bp, Mus musculus
  siRNA target sequence for BC010250 (NM_178029.2,263-281).
ggaaagagccatcagaaat

SEQ ID NO: 800451 - DNA, 19 bp, Mus musculus
  siRNA target sequence for BC010250 (NM_178029.2,393-411).
gcctccgaagcgagatgaa

SEQ ID NO: 800452 - DNA, 19 bp, Mus musculus
  siRNA target sequence for BC010250 (NM_178029.2,615-633).
ctcccagtgctctctgtat

SEQ ID NO: 800453 - DNA, 19 bp, Mus musculus
  siRNA target sequence for BC010250 (NM_178029.2,1040-1058).
gccggaaaactgtttcctt

SEQ ID NO: 800454 - DNA, 19 bp, Mus musculus
  siRNA target sequence for BC010250 (NM_178029.2,1156-1174).
gtagagcggaccattcgta

SEQ ID NO: 800455 - DNA, 19 bp, Mus musculus
  siRNA target sequence for BC010250 (NM_178029.2,1192-1210).
gcgtctctggtcaagagtt

SEQ ID NO: 800456 - DNA, 19 bp, Mus musculus
  siRNA target sequence for BC010250 (NM_178029.2,1587-1605).
ggcagaggagccaaagcaa

SEQ ID NO: 800457 - DNA, 19 bp, Mus musculus
  siRNA target sequence for BC010250 (NM_178029.2,1665-1683).
ggagtccgagtcttcagaa

SEQ ID NO: 800458 - DNA, 19 bp, Mus musculus
  siRNA target sequence for BC010250 (NM_178029.2,1856-1874).
gccttgacttggaagacat

SEQ ID NO: 800459 - DNA, 19 bp, Mus musculus
  siRNA target sequence for BC010250 (NM_178029.2,1877-1895).
gctatttgcgactcacata

SEQ ID NO: 800460 - DNA, 19 bp, Mus musculus
  siRNA target sequence for BC010250 (NM_178029.2,1878-1896).
ctatttgcgactcacatat

SEQ ID NO: 800461 - DNA, 19 bp, Mus musculus
  siRNA target sequence for BC010250 (NM_178029.2,1922-1940).
gcgctgactggcttaatga

SEQ ID NO: 800462 - DNA, 19 bp, Mus musculus
  siRNA target sequence for BC010250 (NM_178029.2,2047-2065).
ggttattaccccattagca

SEQ ID NO: 800463 - DNA, 19 bp, Mus musculus
  siRNA target sequence for BC010250 (NM_178029.2,2048-2066).
gttattaccccattagcaa

SEQ ID NO: 800464 - DNA, 19 bp, Mus musculus
  siRNA target sequence for BC010250 (NM_178029.2,2141-2159).
ctaatcgggtgctttctga

SEQ ID NO: 800465 - DNA, 19 bp, Mus musculus
  siRNA target sequence for BC010250 (NM_178029.2,2217-2235).
cagtgatctgctaaagcta

SEQ ID NO: 800466 - DNA, 19 bp, Mus musculus
  siRNA target sequence for BC010250 (NM_178029.2,2219-2237).
gtgatctgctaaagctaaa

SEQ ID NO: 800467 - DNA, 19 bp, Mus musculus
  siRNA target sequence for BC010250 (NM_178029.2,2326-2344).
gatgagatggtgatcgaat

SEQ ID NO: 800468 - DNA, 19 bp, Mus musculus
  siRNA target sequence for BC010250 (NM_178029.2,2331-2349).
gatggtgatcgaatatgtt

SEQ ID NO: 800469 - DNA, 19 bp, Mus musculus
  siRNA target sequence for BC010250 (NM_178029.2,2641-2659).
ctgtgcggcactgaaagtt

SEQ ID NO: 800470 - DNA, 19 bp, Mus musculus
  siRNA target sequence for 1810059A23Rik (NM_178051.2,133-151).
cccttctttgtcttgcaaa

SEQ ID NO: 800471 - DNA, 19 bp, Mus musculus
  siRNA target sequence for 1810059A23Rik (NM_178051.2,163-181).
gcccggtagaggaagcttt

SEQ ID NO: 800472 - DNA, 19 bp, Mus musculus
  siRNA target sequence for 1810059A23Rik (NM_178051.2,195-213).
gcattacaccccaaaagta

SEQ ID NO: 800473 - DNA, 19 bp, Mus musculus
  siRNA target sequence for 1810059A23Rik (NM_178051.2,347-365).
cacattcacagcttgttta

SEQ ID NO: 800474 - DNA, 19 bp, Mus musculus
  siRNA target sequence for 1810059A23Rik (NM_178051.2,349-367).
cattcacagcttgtttagt

SEQ ID NO: 800475 - DNA, 19 bp, Mus musculus
  siRNA target sequence for 1810059A23Rik (NM_178051.2,397-415).
gctgggtatagtttcagaa

SEQ ID NO: 800476 - DNA, 19 bp, Mus musculus
  siRNA target sequence for 1110025I09Rik (NM_178056.2,757-775).
gtcgggagatggatcctta

SEQ ID NO: 800477 - DNA, 19 bp, Mus musculus
  siRNA target sequence for 1110025I09Rik (NM_178056.2,759-777).
cgggagatggatccttaaa

SEQ ID NO: 800478 - DNA, 19 bp, Mus musculus
  siRNA target sequence for 1110025I09Rik (NM_178056.2,760-778).
gggagatggatccttaaat

SEQ ID NO: 800479 - DNA, 19 bp, Mus musculus
  siRNA target sequence for 1110025I09Rik (NM_178056.2,762-780).
gagatggatccttaaattt

SEQ ID NO: 800480 - DNA, 19 bp, Mus musculus
  siRNA target sequence for 9430077C05Rik (NM_178059.2,353-371).
gagagaaattgtttatgca

SEQ ID NO: 800481 - DNA, 19 bp, Mus musculus
  siRNA target sequence for 9430077C05Rik (NM_178059.2,451-469).
ctccggtgccccattcctt

SEQ ID NO: 800482 - DNA, 19 bp, Mus musculus
  siRNA target sequence for 9430077C05Rik (NM_178059.2,506-524).
ccgtccaatggctattcct

SEQ ID NO: 800483 - DNA, 19 bp, Mus musculus
  siRNA target sequence for 9430077C05Rik (NM_178059.2,640-658).
gcagcaaaaacctggttat

SEQ ID NO: 800484 - DNA, 19 bp, Mus musculus
  siRNA target sequence for 9430077C05Rik (NM_178059.2,643-661).
gcaaaaacctggttatgtt

SEQ ID NO: 800485 - DNA, 19 bp, Mus musculus
  siRNA target sequence for 9430077C05Rik (NM_178059.2,662-680).
cagaaatgagggtttctat

SEQ ID NO: 800486 - DNA, 19 bp, Mus musculus
  siRNA target sequence for 9430077C05Rik (NM_178059.2,682-700).
ccgacccttacctctatca

SEQ ID NO: 800487 - DNA, 19 bp, Mus musculus
  siRNA target sequence for 9430077C05Rik (NM_178059.2,683-701).
cgacccttacctctatcat

SEQ ID NO: 800488 - DNA, 19 bp, Mus musculus
  siRNA target sequence for 9430077C05Rik (NM_178059.2,686-704).
cccttacctctatcatgaa

SEQ ID NO: 800489 - DNA, 19 bp, Mus musculus
  siRNA target sequence for 9430077C05Rik (NM_178059.2,818-836).
cttgcaagcagaaatgcat

SEQ ID NO: 800490 - DNA, 19 bp, Mus musculus
  siRNA target sequence for 9430077C05Rik (NM_178059.2,834-852).
catatggagcagtcgttat

SEQ ID NO: 800491 - DNA, 19 bp, Mus musculus
  siRNA target sequence for 9430077C05Rik (NM_178059.2,843-861).
cagtcgttatacagacaaa

SEQ ID NO: 800492 - DNA, 19 bp, Mus musculus
  siRNA target sequence for 9430077C05Rik (NM_178059.2,891-909).
cctaccttgggctccaaaa

SEQ ID NO: 800493 - DNA, 19 bp, Mus musculus
  siRNA target sequence for 9430077C05Rik (NM_178059.2,929-947).
ccgtgtgggtgacttaaga

SEQ ID NO: 800494 - DNA, 19 bp, Mus musculus
  siRNA target sequence for 9430077C05Rik (NM_178059.2,930-948).
cgtgtgggtgacttaagaa

SEQ ID NO: 800495 - DNA, 19 bp, Mus musculus
  siRNA target sequence for 9430077C05Rik (NM_178059.2,954-972).
gacctgcacccgcatctta

SEQ ID NO: 800496 - DNA, 19 bp, Mus musculus
  siRNA target sequence for 9430077C05Rik (NM_178059.2,957-975).
ctgcacccgcatcttaaca

SEQ ID NO: 800497 - DNA, 19 bp, Mus musculus
  siRNA target sequence for 9430077C05Rik (NM_178059.2,959-977).
gcacccgcatcttaacaca

SEQ ID NO: 800498 - DNA, 19 bp, Mus musculus
  siRNA target sequence for 9430077C05Rik (NM_178059.2,1019-1037).
cagtcgccagtcctttaaa

SEQ ID NO: 800499 - DNA, 19 bp, Mus musculus
  siRNA target sequence for 9430077C05Rik (NM_178059.2,1045-1063).
ccggcaccctggtgtacat

SEQ ID NO: 800500 - DNA, 19 bp, Mus musculus
  siRNA target sequence for 9430077C05Rik (NM_178059.2,1064-1082).
cgaaaagccacgaaacact

SEQ ID NO: 800501 - DNA, 19 bp, Mus musculus
  siRNA target sequence for 9430077C05Rik (NM_178059.2,1074-1092).
cgaaacacttcaggattat

SEQ ID NO: 800502 - DNA, 19 bp, Mus musculus
  siRNA target sequence for 9430077C05Rik (NM_178059.2,1087-1105).
gattatccagccttgtaga

SEQ ID NO: 800503 - DNA, 19 bp, Mus musculus
  siRNA target sequence for 9430077C05Rik (NM_178059.2,1111-1129).
ggcctcctctagttgagaa

SEQ ID NO: 800504 - DNA, 19 bp, Mus musculus
  siRNA target sequence for 9430077C05Rik (NM_178059.2,1227-1245).
gcaggaacggcccatgttt

SEQ ID NO: 800505 - DNA, 19 bp, Mus musculus
  siRNA target sequence for 9430077C05Rik (NM_178059.2,1440-1458).
gagctggaaatcagtaaca

SEQ ID NO: 800506 - DNA, 19 bp, Mus musculus
  siRNA target sequence for 9430077C05Rik (NM_178059.2,1548-1566).
gaagagcggattgtcaaaa

SEQ ID NO: 800507 - DNA, 19 bp, Mus musculus
  siRNA target sequence for 9430077C05Rik (NM_178059.2,1551-1569).
gagcggattgtcaaaaagt

SEQ ID NO: 800508 - DNA, 19 bp, Mus musculus
  siRNA target sequence for 9430077C05Rik (NM_178059.2,1553-1571).
gcggattgtcaaaaagtta

SEQ ID NO: 800509 - DNA, 19 bp, Mus musculus
  siRNA target sequence for 9430077C05Rik (NM_178059.2,1698-1716).
ctcaaaggagaatttccaa

SEQ ID NO: 800510 - DNA, 19 bp, Mus musculus
  siRNA target sequence for 9430077C05Rik (NM_178059.2,1714-1732).
caactttgcaaaataagat

SEQ ID NO: 800511 - DNA, 19 bp, Mus musculus
  siRNA target sequence for 9430077C05Rik (NM_178059.2,1738-1756).
ctgtcctgcgcatagaagt

SEQ ID NO: 800512 - DNA, 19 bp, Mus musculus
  siRNA target sequence for 9430077C05Rik (NM_178059.2,1819-1837).
ggagcatgacagatgtctt

SEQ ID NO: 800513 - DNA, 19 bp, Mus musculus
  siRNA target sequence for 9430077C05Rik (NM_178059.2,1891-1909).
cccaggctgcacagtatgt

SEQ ID NO: 800514 - DNA, 19 bp, Mus musculus
  siRNA target sequence for 9430077C05Rik (NM_178059.2,1892-1910).
ccaggctgcacagtatgtt

SEQ ID NO: 800515 - DNA, 19 bp, Mus musculus
  siRNA target sequence for 9430077C05Rik (NM_178059.2,2166-2184).
gcaatcacacaggaagtaa

SEQ ID NO: 800516 - DNA, 19 bp, Mus musculus
  siRNA target sequence for 9430077C05Rik (NM_178059.2,2359-2377).
ctcaggccaacatcatgaa

SEQ ID NO: 800517 - DNA, 19 bp, Mus musculus
  siRNA target sequence for 9430077C05Rik (NM_178059.2,2361-2379).
caggccaacatcatgaagt

SEQ ID NO: 800518 - DNA, 19 bp, Mus musculus
  siRNA target sequence for 9430077C05Rik (NM_178059.2,2369-2387).
catcatgaagtcaattcca

SEQ ID NO: 800519 - DNA, 19 bp, Mus musculus
  siRNA target sequence for 9430077C05Rik (NM_178059.2,2492-2510).
caagatagggggaaagtca

SEQ ID NO: 800520 - DNA, 19 bp, Mus musculus
  siRNA target sequence for 9430077C05Rik (NM_178059.2,2646-2664).
cagactagagccacaaaat

SEQ ID NO: 800521 - DNA, 19 bp, Mus musculus
  siRNA target sequence for 9430077C05Rik (NM_178059.2,2908-2926).
catgtggtagctatacatt

SEQ ID NO: 800522 - DNA, 19 bp, Mus musculus
  siRNA target sequence for 9430077C05Rik (NM_178059.2,2913-2931).
ggtagctatacatttacca

SEQ ID NO: 800523 - DNA, 19 bp, Mus musculus
  siRNA target sequence for A430018A01Rik (NM_178061.3,717-735).
gcaggatgacctcaagtat

SEQ ID NO: 800524 - DNA, 19 bp, Mus musculus
  siRNA target sequence for A430018A01Rik (NM_178061.3,718-736).
caggatgacctcaagtata

SEQ ID NO: 800525 - DNA, 19 bp, Mus musculus
  siRNA target sequence for A430018A01Rik (NM_178061.3,727-745).
ctcaagtataagaaaccaa

SEQ ID NO: 800526 - DNA, 19 bp, Mus musculus
  siRNA target sequence for A430018A01Rik (NM_178061.3,754-772).
cccgctccccagtacatga

SEQ ID NO: 800527 - DNA, 19 bp, Mus musculus
  siRNA target sequence for A430018A01Rik (NM_178061.3,768-786).
catgaatctgcttatggat

SEQ ID NO: 800528 - DNA, 19 bp, Mus musculus
  siRNA target sequence for A430018A01Rik (NM_178061.3,807-825).
caatgaggacatatttcca

SEQ ID NO: 800529 - DNA, 19 bp, Mus musculus
  siRNA target sequence for A430018A01Rik (NM_178061.3,903-921).
cgtccatgtctacattcat

SEQ ID NO: 800530 - DNA, 19 bp, Mus musculus
  siRNA target sequence for A430018A01Rik (NM_178061.3,960-978).
cgtcaacacctgctacaaa

SEQ ID NO: 800531 - DNA, 19 bp, Mus musculus
  siRNA target sequence for 1110012D08Rik (NM_178066.2,245-263).
ctcattgcctctgactata

SEQ ID NO: 800532 - DNA, 19 bp, Mus musculus
  siRNA target sequence for 1110012D08Rik (NM_178066.2,740-758).
gtggccacgtccattcaca

SEQ ID NO: 800533 - DNA, 19 bp, Mus musculus
  siRNA target sequence for 1110012D08Rik (NM_178066.2,975-993).
gggagccgcaccaatgtga

SEQ ID NO: 800534 - DNA, 19 bp, Mus musculus
  siRNA target sequence for 1110012D08Rik (NM_178066.2,976-994).
ggagccgcaccaatgtgat

SEQ ID NO: 800535 - DNA, 19 bp, Mus musculus
  siRNA target sequence for 1110012D08Rik (NM_178066.2,979-997).
gccgcaccaatgtgatctt

SEQ ID NO: 800536 - DNA, 19 bp, Mus musculus
  siRNA target sequence for 1110012D08Rik (NM_178066.2,981-999).
cgcaccaatgtgatcttga

SEQ ID NO: 800537 - DNA, 19 bp, Mus musculus
  siRNA target sequence for 1110012D08Rik (NM_178066.2,1221-1239).
ctggacctggattctgatt

SEQ ID NO: 800538 - DNA, 19 bp, Mus musculus
  siRNA target sequence for Mybpc2 (NM_178067.2,1641-1659).
ggagtatgtacctaagcaa

SEQ ID NO: 800539 - DNA, 19 bp, Mus musculus
  siRNA target sequence for D16Bwg1547e (NM_178069.2,85-103).
ccctgggccgagtacttat

SEQ ID NO: 800540 - DNA, 19 bp, Mus musculus
  siRNA target sequence for D16Bwg1547e (NM_178069.2,144-162).
gactcctggctgcatacaa

SEQ ID NO: 800541 - DNA, 19 bp, Mus musculus
  siRNA target sequence for D16Bwg1547e (NM_178069.2,187-205).
ggggtcgtctgaatcttca

SEQ ID NO: 800542 - DNA, 19 bp, Mus musculus
  siRNA target sequence for D16Bwg1547e (NM_178069.2,281-299).
gaagctgaatattaagttt

SEQ ID NO: 800543 - DNA, 19 bp, Mus musculus
  siRNA target sequence for D16Bwg1547e (NM_178069.2,316-334).
gaaccggactgctgtcttt

SEQ ID NO: 800544 - DNA, 19 bp, Mus musculus
  siRNA target sequence for D16Bwg1547e (NM_178069.2,343-361).
gccagagaattaagaaact

SEQ ID NO: 800545 - DNA, 19 bp, Mus musculus
  siRNA target sequence for D16Bwg1547e (NM_178069.2,374-392).
cagacagttcttgtgtata

SEQ ID NO: 800546 - DNA, 19 bp, Mus musculus
  siRNA target sequence for D16Bwg1547e (NM_178069.2,402-420).
ccaaattgggacagaaaaa

SEQ ID NO: 800547 - DNA, 19 bp, Mus musculus
  siRNA target sequence for D16Bwg1547e (NM_178069.2,509-527).
gatattgactccctttgaa

SEQ ID NO: 800548 - DNA, 19 bp, Mus musculus
  siRNA target sequence for D16Bwg1547e (NM_178069.2,563-581).
cattgagagaagtgatatt

SEQ ID NO: 800549 - DNA, 19 bp, Mus musculus
  siRNA target sequence for D16Bwg1547e (NM_178069.2,603-621).
cgaaacccgctcctgttta

SEQ ID NO: 800550 - DNA, 19 bp, Mus musculus
  siRNA target sequence for D16Bwg1547e (NM_178069.2,636-654).
gagtgttacgtgaaagaga

SEQ ID NO: 800551 - DNA, 19 bp, Mus musculus
  siRNA target sequence for D16Bwg1547e (NM_178069.2,725-743).
ctgggctgtgcactttgaa

SEQ ID NO: 800552 - DNA, 19 bp, Mus musculus
  siRNA target sequence for D16Bwg1547e (NM_178069.2,781-799).
cagaaactgatcacctaaa

SEQ ID NO: 800553 - DNA, 19 bp, Mus musculus
  siRNA target sequence for D16Bwg1547e (NM_178069.2,1057-1075).
gaaaaaacgcagaaaatca

SEQ ID NO: 800554 - DNA, 19 bp, Mus musculus
  siRNA target sequence for D16Bwg1547e (NM_178069.2,1113-1131).
gaattactggaactcttta

SEQ ID NO: 800555 - DNA, 19 bp, Mus musculus
  siRNA target sequence for D16Bwg1547e (NM_178069.2,1184-1202).
ggtgggctaccctaatgtt

SEQ ID NO: 800556 - DNA, 19 bp, Mus musculus
  siRNA target sequence for D16Bwg1547e (NM_178069.2,1412-1430).
cgttccacccgtatcacta

SEQ ID NO: 800557 - DNA, 19 bp, Mus musculus
  siRNA target sequence for D16Bwg1547e (NM_178069.2,1416-1434).
ccacccgtatcactagttt

SEQ ID NO: 800558 - DNA, 19 bp, Mus musculus
  siRNA target sequence for D16Bwg1547e (NM_178069.2,1445-1463).
cccacggcgagttttggaa

SEQ ID NO: 800559 - DNA, 19 bp, Mus musculus
  siRNA target sequence for D16Bwg1547e (NM_178069.2,1453-1471).
gagttttggaagtgacata

SEQ ID NO: 800560 - DNA, 19 bp, Mus musculus
  siRNA target sequence for D16Bwg1547e (NM_178069.2,1460-1478).
ggaagtgacatatggtatt

SEQ ID NO: 800561 - DNA, 19 bp, Mus musculus
  siRNA target sequence for D16Bwg1547e (NM_178069.2,1461-1479).
gaagtgacatatggtatta

SEQ ID NO: 800562 - DNA, 19 bp, Mus musculus
  siRNA target sequence for D16Bwg1547e (NM_178069.2,1464-1482).
gtgacatatggtattaaca

SEQ ID NO: 800563 - DNA, 19 bp, Mus musculus
  siRNA target sequence for D16Bwg1547e (NM_178069.2,1536-1554).
ctgttgacggcttatggat

SEQ ID NO: 800564 - DNA, 19 bp, Mus musculus
  siRNA target sequence for D16Bwg1547e (NM_178069.2,1606-1624).
cacggtacatcctaaagga

SEQ ID NO: 800565 - DNA, 19 bp, Mus musculus
  siRNA target sequence for D16Bwg1547e (NM_178069.2,1625-1643).
ctatgttggaggtaaacta

SEQ ID NO: 800566 - DNA, 19 bp, Mus musculus
  siRNA target sequence for D16Bwg1547e (NM_178069.2,1632-1650).
ggaggtaaactactgtatt

SEQ ID NO: 800567 - DNA, 19 bp, Mus musculus
  siRNA target sequence for D16Bwg1547e (NM_178069.2,1706-1724).
cctagagagcaaagtaaaa

SEQ ID NO: 800568 - DNA, 19 bp, Mus musculus
  siRNA target sequence for D16Bwg1547e (NM_178069.2,1776-1794).
gaaaatgtagtcgacaaaa

SEQ ID NO: 800569 - DNA, 19 bp, Mus musculus
  siRNA target sequence for D16Bwg1547e (NM_178069.2,1782-1800).
gtagtcgacaaaacttttt

SEQ ID NO: 800570 - DNA, 19 bp, Mus musculus
  siRNA target sequence for D16Bwg1547e (NM_178069.2,1787-1805).
cgacaaaacttttttccat

SEQ ID NO: 800571 - DNA, 19 bp, Mus musculus
  siRNA target sequence for D16Bwg1547e (NM_178069.2,1888-1906).
ctgcgagcgctgagaatgt

SEQ ID NO: 800572 - DNA, 19 bp, Mus musculus
  siRNA target sequence for D16Bwg1547e (NM_178069.2,1922-1940).
gaaaaaacacggtaacaga

SEQ ID NO: 800573 - DNA, 19 bp, Mus musculus
  siRNA target sequence for 9430063L05Rik (NM_178080.3,418-436).
gcggcgttggatctttcat

SEQ ID NO: 800574 - DNA, 19 bp, Mus musculus
  siRNA target sequence for 9430063L05Rik (NM_178080.3,419-437).
cggcgttggatctttcata

SEQ ID NO: 800575 - DNA, 19 bp, Mus musculus
  siRNA target sequence for 9430063L05Rik (NM_178080.3,472-490).
gcacgtcctaggcaaagat

SEQ ID NO: 800576 - DNA, 19 bp, Mus musculus
  siRNA target sequence for 9430063L05Rik (NM_178080.3,522-540).
gtagcaagtgcgctttcat

SEQ ID NO: 800577 - DNA, 19 bp, Mus musculus
  siRNA target sequence for 9430063L05Rik (NM_178080.3,542-560).
ctcgatcgcatctatcgat

SEQ ID NO: 800578 - DNA, 19 bp, Mus musculus
  siRNA target sequence for 9430063L05Rik (NM_178080.3,548-566).
cgcatctatcgattcgata

SEQ ID NO: 800579 - DNA, 19 bp, Mus musculus
  siRNA target sequence for 9430063L05Rik (NM_178080.3,652-670).
cagtatgtatcggaagaat

SEQ ID NO: 800580 - DNA, 19 bp, Mus musculus
  siRNA target sequence for 9430063L05Rik (NM_178080.3,770-788).
gcctattcgggatttgagt

SEQ ID NO: 800581 - DNA, 19 bp, Mus musculus
  siRNA target sequence for 9430063L05Rik (NM_178080.3,904-922).
cgactatgaagccatttgt

SEQ ID NO: 800582 - DNA, 19 bp, Mus musculus
  siRNA target sequence for 9430063L05Rik (NM_178080.3,905-923).
gactatgaagccatttgta

SEQ ID NO: 800583 - DNA, 19 bp, Mus musculus
  siRNA target sequence for 9430063L05Rik (NM_178080.3,921-939).
gtaaggtgcctcgaaaagt

SEQ ID NO: 800584 - DNA, 19 bp, Mus musculus
  siRNA target sequence for 9430063L05Rik (NM_178080.3,933-951).
gaaaagtggcccgaagtat

SEQ ID NO: 800585 - DNA, 19 bp, Mus musculus
  siRNA target sequence for 9430063L05Rik (NM_178080.3,938-956).
gtggcccgaagtatttctt

SEQ ID NO: 800586 - DNA, 19 bp, Mus musculus
  siRNA target sequence for 9430063L05Rik (NM_178080.3,940-958).
ggcccgaagtatttcttat

SEQ ID NO: 800587 - DNA, 19 bp, Mus musculus
  siRNA target sequence for 9430063L05Rik (NM_178080.3,1019-1037).
gggccaccagacttagcaa

SEQ ID NO: 800588 - DNA, 19 bp, Mus musculus
  siRNA target sequence for 9430063L05Rik (NM_178080.3,1237-1255).
gctagctcttagcatgatt

SEQ ID NO: 800589 - DNA, 19 bp, Mus musculus
  siRNA target sequence for 9430063L05Rik (NM_178080.3,1238-1256).
ctagctcttagcatgatta

SEQ ID NO: 800590 - DNA, 19 bp, Mus musculus
  siRNA target sequence for 9430063L05Rik (NM_178080.3,1265-1283).
gattataagcccattcaga

SEQ ID NO: 800591 - DNA, 19 bp, Mus musculus
  siRNA target sequence for 9430063L05Rik (NM_178080.3,1304-1322).
cctattccagtgaaatcca

SEQ ID NO: 800592 - DNA, 19 bp, Mus musculus
  siRNA target sequence for 9430063L05Rik (NM_178080.3,1305-1323).
ctattccagtgaaatccat

SEQ ID NO: 800593 - DNA, 19 bp, Mus musculus
  siRNA target sequence for 9430063L05Rik (NM_178080.3,1341-1359).
ctggccatatcctgacaaa

SEQ ID NO: 800594 - DNA, 19 bp, Mus musculus
  siRNA target sequence for 9430063L05Rik (NM_178080.3,1351-1369).
cctgacaaacggagttagt

SEQ ID NO: 800595 - DNA, 19 bp, Mus musculus
  siRNA target sequence for 9430063L05Rik (NM_178080.3,1352-1370).
ctgacaaacggagttagtt

SEQ ID NO: 800596 - DNA, 19 bp, Mus musculus
  siRNA target sequence for 9430063L05Rik (NM_178080.3,1364-1382).
gttagttccagtttcctta

SEQ ID NO: 800597 - DNA, 19 bp, Mus musculus
  siRNA target sequence for 9430063L05Rik (NM_178080.3,1378-1396).
ccttaacaggcctttgaaa

SEQ ID NO: 800598 - DNA, 19 bp, Mus musculus
  siRNA target sequence for 9430063L05Rik (NM_178080.3,1509-1527).
ggttacccacgcaacagaa

SEQ ID NO: 800599 - DNA, 19 bp, Mus musculus
  siRNA target sequence for 9430063L05Rik (NM_178080.3,1583-1601).
gcagaactccaggacaaaa

SEQ ID NO: 800600 - DNA, 19 bp, Mus musculus
  siRNA target sequence for 9430063L05Rik (NM_178080.3,1765-1783).
ggtgatcgaaggacaaaat

SEQ ID NO: 800601 - DNA, 19 bp, Mus musculus
  siRNA target sequence for 9430063L05Rik (NM_178080.3,1889-1907).
cttcagagcgctctattct

SEQ ID NO: 800602 - DNA, 19 bp, Mus musculus
  siRNA target sequence for 9430063L05Rik (NM_178080.3,2045-2063).
cataaccaggaattacgaa

SEQ ID NO: 800603 - DNA, 19 bp, Mus musculus
  siRNA target sequence for 9430063L05Rik (NM_178080.3,2120-2138).
ctggaggcggaaaaataca

SEQ ID NO: 800604 - DNA, 19 bp, Mus musculus
  siRNA target sequence for 9430063L05Rik (NM_178080.3,2126-2144).
gcggaaaaatacaatgaga

SEQ ID NO: 800605 - DNA, 19 bp, Mus musculus
  siRNA target sequence for 9430063L05Rik (NM_178080.3,2127-2145).
cggaaaaatacaatgagat

SEQ ID NO: 800606 - DNA, 19 bp, Mus musculus
  siRNA target sequence for 9430063L05Rik (NM_178080.3,2237-2255).
cgtgacaacgcagacaaaa

SEQ ID NO: 800607 - DNA, 19 bp, Mus musculus
  siRNA target sequence for 9430063L05Rik (NM_178080.3,2284-2302).
gaaattgcggcaacgaata

SEQ ID NO: 800608 - DNA, 19 bp, Mus musculus
  siRNA target sequence for 9430063L05Rik (NM_178080.3,2405-2423).
cgagaccatgacttagaga

SEQ ID NO: 800609 - DNA, 19 bp, Mus musculus
  siRNA target sequence for 9430063L05Rik (NM_178080.3,2514-2532).
ctgccacctgccaaaacct

SEQ ID NO: 800610 - DNA, 19 bp, Mus musculus
  siRNA target sequence for 9430063L05Rik (NM_178080.3,2652-2670).
gcgcaactctgctctgtaa

SEQ ID NO: 800611 - DNA, 19 bp, Mus musculus
  siRNA target sequence for 9430063L05Rik (NM_178080.3,2655-2673).
caactctgctctgtaaact

SEQ ID NO: 800612 - DNA, 19 bp, Mus musculus
  siRNA target sequence for 9430063L05Rik (NM_178080.3,2752-2770).
gagcgatcggaacaaacaa

SEQ ID NO: 800613 - DNA, 19 bp, Mus musculus
  siRNA target sequence for 9430063L05Rik (NM_178080.3,2893-2911).
ggccctgcgccagtattta

SEQ ID NO: 800614 - DNA, 19 bp, Mus musculus
  siRNA target sequence for 9430063L05Rik (NM_178080.3,2912-2930).
ggggggaaggaactaatga

SEQ ID NO: 800615 - DNA, 19 bp, Mus musculus
  siRNA target sequence for 9430063L05Rik (NM_178080.3,2937-2955).
ctcagacgttcatctctaa

SEQ ID NO: 800616 - DNA, 19 bp, Mus musculus
  siRNA target sequence for 9430063L05Rik (NM_178080.3,3022-3040).
gatgccctctcgagatgat

SEQ ID NO: 800617 - DNA, 19 bp, Mus musculus
  siRNA target sequence for 9430063L05Rik (NM_178080.3,3267-3285).
ccaggaatgtgcagataaa

SEQ ID NO: 800618 - DNA, 19 bp, Mus musculus
  siRNA target sequence for 9430063L05Rik (NM_178080.3,3280-3298).
gataaaagaagatctcata

SEQ ID NO: 800619 - DNA, 19 bp, Mus musculus
  siRNA target sequence for 9430063L05Rik (NM_178080.3,3322-3340).
cgaccctgaagatatacca

SEQ ID NO: 800620 - DNA, 19 bp, Mus musculus
  siRNA target sequence for 9430063L05Rik (NM_178080.3,3367-3385).
cttacttcttcgggaaaaa

SEQ ID NO: 800621 - DNA, 19 bp, Mus musculus
  siRNA target sequence for 9430063L05Rik (NM_178080.3,3403-3421).
ccagggtcaggaagtatca

SEQ ID NO: 800622 - DNA, 19 bp, Mus musculus
  siRNA target sequence for 9430063L05Rik (NM_178080.3,3413-3431).
gaagtatcagggaacaaga

SEQ ID NO: 800623 - DNA, 19 bp, Mus musculus
  siRNA target sequence for 9430063L05Rik (NM_178080.3,3439-3457).
gttgctgctgatgttagaa

SEQ ID NO: 800624 - DNA, 19 bp, Mus musculus
  siRNA target sequence for 9430063L05Rik (NM_178080.3,3601-3619).
gttacgcactcgactagaa

SEQ ID NO: 800625 - DNA, 19 bp, Mus musculus
  siRNA target sequence for AW212394 (NM_178081.2,361-379).
gataaagttgctatcctaa

SEQ ID NO: 800626 - DNA, 19 bp, Mus musculus
  siRNA target sequence for AW212394 (NM_178081.2,371-389).
ctatcctaactgatgatga

SEQ ID NO: 800627 - DNA, 19 bp, Mus musculus
  siRNA target sequence for AW212394 (NM_178081.2,414-432).
gcttgctgatcccttcaat

SEQ ID NO: 800628 - DNA, 19 bp, Mus musculus
  siRNA target sequence for AW212394 (NM_178081.2,499-517).
cccgaggaggaaatagact

SEQ ID NO: 800629 - DNA, 19 bp, Mus musculus
  siRNA target sequence for AW212394 (NM_178081.2,508-526).
gaaatagactggatagaga

SEQ ID NO: 800630 - DNA, 19 bp, Mus musculus
  siRNA target sequence for AW212394 (NM_178081.2,518-536).
ggatagagaaacattgtgt

SEQ ID NO: 800631 - DNA, 19 bp, Mus musculus
  siRNA target sequence for AW212394 (NM_178081.2,590-608).
ctgcctatggctctcttta

SEQ ID NO: 800632 - DNA, 19 bp, Mus musculus
  siRNA target sequence for AW212394 (NM_178081.2,610-628).
cctctcttacctgtatatt

SEQ ID NO: 800633 - DNA, 19 bp, Mus musculus
  siRNA target sequence for AW212394 (NM_178081.2,664-682).
ctgttggtgggcattcgat

SEQ ID NO: 800634 - DNA, 19 bp, Mus musculus
  siRNA target sequence for AW212394 (NM_178081.2,670-688).
gtgggcattcgatacttca

SEQ ID NO: 800635 - DNA, 19 bp, Mus musculus
  siRNA target sequence for AW212394 (NM_178081.2,672-690).
gggcattcgatacttcatt

SEQ ID NO: 800636 - DNA, 19 bp, Mus musculus
  siRNA target sequence for AW212394 (NM_178081.2,679-697).
cgatacttcattgaattct

SEQ ID NO: 800637 - DNA, 19 bp, Mus musculus
  siRNA target sequence for AW212394 (NM_178081.2,705-723).
ccccttctggggtgtagtt

SEQ ID NO: 800638 - DNA, 19 bp, Mus musculus
  siRNA target sequence for AW212394 (NM_178081.2,716-734).
gtgtagttgcagatcgttt

SEQ ID NO: 800639 - DNA, 19 bp, Mus musculus
  siRNA target sequence for AW212394 (NM_178081.2,731-749).
gtttcagaaagggcaaaat

SEQ ID NO: 800640 - DNA, 19 bp, Mus musculus
  siRNA target sequence for AW212394 (NM_178081.2,786-804).
caacctgggcattggattt

SEQ ID NO: 800641 - DNA, 19 bp, Mus musculus
  siRNA target sequence for AW212394 (NM_178081.2,792-810).
gggcattggatttgtcaaa

SEQ ID NO: 800642 - DNA, 19 bp, Mus musculus
  siRNA target sequence for AW212394 (NM_178081.2,850-868).
gctcaccccaccaatgtaa

SEQ ID NO: 800643 - DNA, 19 bp, Mus musculus
  siRNA target sequence for AW212394 (NM_178081.2,899-917).
cctccactgtcgctttctt

SEQ ID NO: 800644 - DNA, 19 bp, Mus musculus
  siRNA target sequence for AW212394 (NM_178081.2,951-969).
cgtgcaattgtctgaaaca

SEQ ID NO: 800645 - DNA, 19 bp, Mus musculus
  siRNA target sequence for AW212394 (NM_178081.2,962-980).
ctgaaacagagcccaatat

SEQ ID NO: 800646 - DNA, 19 bp, Mus musculus
  siRNA target sequence for AW212394 (NM_178081.2,974-992).
ccaatatctcagacataga

SEQ ID NO: 800647 - DNA, 19 bp, Mus musculus
  siRNA target sequence for AW212394 (NM_178081.2,975-993).
caatatctcagacatagat

SEQ ID NO: 800648 - DNA, 19 bp, Mus musculus
  siRNA target sequence for AW212394 (NM_178081.2,1066-1084).
gttacaggcttgattttga

SEQ ID NO: 800649 - DNA, 19 bp, Mus musculus
  siRNA target sequence for AW212394 (NM_178081.2,1152-1170).
caccaccaaatctttacca

SEQ ID NO: 800650 - DNA, 19 bp, Mus musculus
  siRNA target sequence for AW212394 (NM_178081.2,1204-1222).
gaagttgaggcgatattct

SEQ ID NO: 800651 - DNA, 19 bp, Mus musculus
  siRNA target sequence for AW212394 (NM_178081.2,1207-1225).
gttgaggcgatattcttaa

SEQ ID NO: 800652 - DNA, 19 bp, Mus musculus
  siRNA target sequence for AW212394 (NM_178081.2,1210-1228).
gaggcgatattcttaatta

SEQ ID NO: 800653 - DNA, 19 bp, Mus musculus
  siRNA target sequence for AW212394 (NM_178081.2,1213-1231).
gcgatattcttaattatct

SEQ ID NO: 800654 - DNA, 19 bp, Mus musculus
  siRNA target sequence for AW212394 (NM_178081.2,1214-1232).
cgatattcttaattatctt

SEQ ID NO: 800655 - DNA, 19 bp, Mus musculus
  siRNA target sequence for AW212394 (NM_178081.2,1266-1284).
ctcttctgtcacgattgta

SEQ ID NO: 800656 - DNA, 19 bp, Mus musculus
  siRNA target sequence for Rab6ip2 (NM_178085.2,1271-1289).
gactgaggtaaagagtttt

SEQ ID NO: 800657 - DNA, 19 bp, Mus musculus
  siRNA target sequence for Rab6ip2 (NM_178085.2,1277-1295).
ggtaaagagtttttgtgat

SEQ ID NO: 800658 - DNA, 19 bp, Mus musculus
  siRNA target sequence for 1110029F20Rik (NM_178111.2,223-241).
cgcttcaccagccttttct

SEQ ID NO: 800659 - DNA, 19 bp, Mus musculus
  siRNA target sequence for 1110029F20Rik (NM_178111.2,759-777).
ccacacattgagtgctaaa

SEQ ID NO: 800660 - DNA, 19 bp, Mus musculus
  siRNA target sequence for 1110029F20Rik (NM_178111.2,764-782).
cattgagtgctaaagtgtt

SEQ ID NO: 800661 - DNA, 19 bp, Mus musculus
  siRNA target sequence for 1110029F20Rik (NM_178111.2,859-877).
cagcgccagttcaactact

SEQ ID NO: 800662 - DNA, 19 bp, Mus musculus
  siRNA target sequence for 2810013E07Rik (NM_178112.3,254-272).
ctgcaccagttcagcttat

SEQ ID NO: 800663 - DNA, 19 bp, Mus musculus
  siRNA target sequence for 2810013E07Rik (NM_178112.3,286-304).
gagcaggcttccaaacctt

SEQ ID NO: 800664 - DNA, 19 bp, Mus musculus
  siRNA target sequence for 2810013E07Rik (NM_178112.3,291-309).
ggcttccaaaccttcagtt

SEQ ID NO: 800665 - DNA, 19 bp, Mus musculus
  siRNA target sequence for 2810013E07Rik (NM_178112.3,331-349).
cctccacctgataacaaga

SEQ ID NO: 800666 - DNA, 19 bp, Mus musculus
  siRNA target sequence for 2810013E07Rik (NM_178112.3,350-368).
gaaatcgcgtcctaaagct

SEQ ID NO: 800667 - DNA, 19 bp, Mus musculus
  siRNA target sequence for 2810013E07Rik (NM_178112.3,366-384).
gcttcttgctcttaaagtt

SEQ ID NO: 800668 - DNA, 19 bp, Mus musculus
  siRNA target sequence for 2810013E07Rik (NM_178112.3,431-449).
ctgttccggtgctgaacat

SEQ ID NO: 800669 - DNA, 19 bp, Mus musculus
  siRNA target sequence for 2810013E07Rik (NM_178112.3,460-478).
gagctcctgtgcatcagta

SEQ ID NO: 800670 - DNA, 19 bp, Mus musculus
  siRNA target sequence for 2810013E07Rik (NM_178112.3,569-587).
caattaggacaattgttca

SEQ ID NO: 800671 - DNA, 19 bp, Mus musculus
  siRNA target sequence for 2810013E07Rik (NM_178112.3,616-634).
cctggaccccctcaactaa

SEQ ID NO: 800672 - DNA, 19 bp, Mus musculus
  siRNA target sequence for 2810013E07Rik (NM_178112.3,617-635).
ctggaccccctcaactaaa

SEQ ID NO: 800673 - DNA, 19 bp, Mus musculus
  siRNA target sequence for 2810013E07Rik (NM_178112.3,620-638).
gaccccctcaactaaatgt

SEQ ID NO: 800674 - DNA, 19 bp, Mus musculus
  siRNA target sequence for 2810013E07Rik (NM_178112.3,631-649).
ctaaatgtcatgaatcaga

SEQ ID NO: 800675 - DNA, 19 bp, Mus musculus
  siRNA target sequence for 2810013E07Rik (NM_178112.3,740-758).
gattaaacaaggatctgta

SEQ ID NO: 800676 - DNA, 19 bp, Mus musculus
  siRNA target sequence for 2810013E07Rik (NM_178112.3,767-785).
cgatgagaactctagactt

SEQ ID NO: 800677 - DNA, 19 bp, Mus musculus
  siRNA target sequence for 2810013E07Rik (NM_178112.3,828-846).
ctctacggctgggttgaaa

SEQ ID NO: 800678 - DNA, 19 bp, Mus musculus
  siRNA target sequence for 2810013E07Rik (NM_178112.3,835-853).
gctgggttgaaaatcagaa

SEQ ID NO: 800679 - DNA, 19 bp, Mus musculus
  siRNA target sequence for 2810013E07Rik (NM_178112.3,869-887).
gccaggtgtgttatgactt

SEQ ID NO: 800680 - DNA, 19 bp, Mus musculus
  siRNA target sequence for 2810013E07Rik (NM_178112.3,906-924).
gcaaggctccacagattca

SEQ ID NO: 800681 - DNA, 19 bp, Mus musculus
  siRNA target sequence for 2810013E07Rik (NM_178112.3,919-937).
gattcagccatctatgaaa

SEQ ID NO: 800682 - DNA, 19 bp, Mus musculus
  siRNA target sequence for 2810013E07Rik (NM_178112.3,1020-1038).
gcggttagctggctattgt

SEQ ID NO: 800683 - DNA, 19 bp, Mus musculus
  siRNA target sequence for 2810013E07Rik (NM_178112.3,1023-1041).
gttagctggctattgtcaa

SEQ ID NO: 800684 - DNA, 19 bp, Mus musculus
  siRNA target sequence for 2810013E07Rik (NM_178112.3,1057-1075).
gtaccttcttctgataata

SEQ ID NO: 800685 - DNA, 19 bp, Mus musculus
  siRNA target sequence for 2810013E07Rik (NM_178112.3,1060-1078).
ccttcttctgataataact

SEQ ID NO: 800686 - DNA, 19 bp, Mus musculus
  siRNA target sequence for 2810013E07Rik (NM_178112.3,1069-1087).
gataataactctcaacaat

SEQ ID NO: 800687 - DNA, 19 bp, Mus musculus
  siRNA target sequence for 2810013E07Rik (NM_178112.3,1098-1116).
cagtcaagtccatatttgt

SEQ ID NO: 800688 - DNA, 19 bp, Mus musculus
  siRNA target sequence for 2810013E07Rik (NM_178112.3,1100-1118).
gtcaagtccatatttgttt

SEQ ID NO: 800689 - DNA, 19 bp, Mus musculus
  siRNA target sequence for 2810013E07Rik (NM_178112.3,1105-1123).
gtccatatttgtttacgat

SEQ ID NO: 800690 - DNA, 19 bp, Mus musculus
  siRNA target sequence for 2810013E07Rik (NM_178112.3,1162-1180).
gataacttaactttcactt

SEQ ID NO: 800691 - DNA, 19 bp, Mus musculus
  siRNA target sequence for 2810013E07Rik (NM_178112.3,1191-1209).
gttccgacaatcggtatta

SEQ ID NO: 800692 - DNA, 19 bp, Mus musculus
  siRNA target sequence for 2810013E07Rik (NM_178112.3,1202-1220).
cggtattaagggaactttt

SEQ ID NO: 800693 - DNA, 19 bp, Mus musculus
  siRNA target sequence for 2810013E07Rik (NM_178112.3,1203-1221).
ggtattaagggaacttttt

SEQ ID NO: 800694 - DNA, 19 bp, Mus musculus
  siRNA target sequence for 2810013E07Rik (NM_178112.3,1236-1254).
gggaaatgaagctctagat

SEQ ID NO: 800695 - DNA, 19 bp, Mus musculus
  siRNA target sequence for 2810013E07Rik (NM_178112.3,1246-1264).
gctctagatgaaatctgtt

SEQ ID NO: 800696 - DNA, 19 bp, Mus musculus
  siRNA target sequence for 2810013E07Rik (NM_178112.3,1281-1299).
caacacagtacgagatgta

SEQ ID NO: 800697 - DNA, 19 bp, Mus musculus
  siRNA target sequence for 2810013E07Rik (NM_178112.3,1297-1315).
gtactggaaggcagaacaa

SEQ ID NO: 800698 - DNA, 19 bp, Mus musculus
  siRNA target sequence for 2810013E07Rik (NM_178112.3,1300-1318).
ctggaaggcagaacaatta

SEQ ID NO: 800699 - DNA, 19 bp, Mus musculus
  siRNA target sequence for 2810013E07Rik (NM_178112.3,1302-1320).
ggaaggcagaacaattagt

SEQ ID NO: 800700 - DNA, 19 bp, Mus musculus
  siRNA target sequence for 2810013E07Rik (NM_178112.3,1319-1337).
gtgtccagttcaatcaact

SEQ ID NO: 800701 - DNA, 19 bp, Mus musculus
  siRNA target sequence for 2810013E07Rik (NM_178112.3,1372-1390).
ctccttgaggtatgttcaa

SEQ ID NO: 800702 - DNA, 19 bp, Mus musculus
  siRNA target sequence for 2810013E07Rik (NM_178112.3,1374-1392).
ccttgaggtatgttcaaga

SEQ ID NO: 800703 - DNA, 19 bp, Mus musculus
  siRNA target sequence for 2810013E07Rik (NM_178112.3,1381-1399).
gtatgttcaagatcaataa

SEQ ID NO: 800704 - DNA, 19 bp, Mus musculus
  siRNA target sequence for 2810013E07Rik (NM_178112.3,1391-1409).
gatcaataaacgtagaaaa

SEQ ID NO: 800705 - DNA, 19 bp, Mus musculus
  siRNA target sequence for 2810013E07Rik (NM_178112.3,1401-1419).
cgtagaaaaagcttcagat

SEQ ID NO: 800706 - DNA, 19 bp, Mus musculus
  siRNA target sequence for 2810013E07Rik (NM_178112.3,1402-1420).
gtagaaaaagcttcagatt

SEQ ID NO: 800707 - DNA, 19 bp, Mus musculus
  siRNA target sequence for 2810013E07Rik (NM_178112.3,1541-1559).
gaaagctgcttgttgatca

SEQ ID NO: 800708 - DNA, 19 bp, Mus musculus
  siRNA target sequence for 2810013E07Rik (NM_178112.3,1546-1564).
ctgcttgttgatcaaatga

SEQ ID NO: 800709 - DNA, 19 bp, Mus musculus
  siRNA target sequence for 2810013E07Rik (NM_178112.3,1569-1587).
gagatccccgagagtaaat

SEQ ID NO: 800710 - DNA, 19 bp, Mus musculus
  siRNA target sequence for 2810013E07Rik (NM_178112.3,1571-1589).
gatccccgagagtaaatct

SEQ ID NO: 800711 - DNA, 19 bp, Mus musculus
  siRNA target sequence for 2810013E07Rik (NM_178112.3,1653-1671).
gttggaacatcagcttata

SEQ ID NO: 800712 - DNA, 19 bp, Mus musculus
  siRNA target sequence for 2810013E07Rik (NM_178112.3,1680-1698).
ggatccctggcggattaga

SEQ ID NO: 800713 - DNA, 19 bp, Mus musculus
  siRNA target sequence for 2810013E07Rik (NM_178112.3,1686-1704).
ctggcggattagacagatt

SEQ ID NO: 800714 - DNA, 19 bp, Mus musculus
  siRNA target sequence for 2810013E07Rik (NM_178112.3,1688-1706).
ggcggattagacagatttt

SEQ ID NO: 800715 - DNA, 19 bp, Mus musculus
  siRNA target sequence for 2810013E07Rik (NM_178112.3,1689-1707).
gcggattagacagatttta

SEQ ID NO: 800716 - DNA, 19 bp, Mus musculus
  siRNA target sequence for 2810013E07Rik (NM_178112.3,1690-1708).
cggattagacagattttaa

SEQ ID NO: 800717 - DNA, 19 bp, Mus musculus
  siRNA target sequence for 2810013E07Rik (NM_178112.3,1691-1709).
ggattagacagattttaat

SEQ ID NO: 800718 - DNA, 19 bp, Mus musculus
  siRNA target sequence for 2810013E07Rik (NM_178112.3,1711-1729).
gaattgcatggtatgactt

SEQ ID NO: 800719 - DNA, 19 bp, Mus musculus
  siRNA target sequence for 2810013E07Rik (NM_178112.3,1725-1743).
gacttcagagcgacaattt

SEQ ID NO: 800720 - DNA, 19 bp, Mus musculus
  siRNA target sequence for 2810013E07Rik (NM_178112.3,1761-1779).
gtgggaagtaccttctgta

SEQ ID NO: 800721 - DNA, 19 bp, Mus musculus
  siRNA target sequence for 2810013E07Rik (NM_178112.3,1763-1781).
gggaagtaccttctgtata

SEQ ID NO: 800722 - DNA, 19 bp, Mus musculus
  siRNA target sequence for 2810013E07Rik (NM_178112.3,1764-1782).
ggaagtaccttctgtatat

SEQ ID NO: 800723 - DNA, 19 bp, Mus musculus
  siRNA target sequence for 2810013E07Rik (NM_178112.3,1768-1786).
gtaccttctgtatatagta

SEQ ID NO: 800724 - DNA, 19 bp, Mus musculus
  siRNA target sequence for 2810013E07Rik (NM_178112.3,1784-1802).
gtagtgttatcctaggaat

SEQ ID NO: 800725 - DNA, 19 bp, Mus musculus
  siRNA target sequence for 2810013E07Rik (NM_178112.3,1787-1805).
gtgttatcctaggaattaa

SEQ ID NO: 800726 - DNA, 19 bp, Mus musculus
  siRNA target sequence for 2810013E07Rik (NM_178112.3,1795-1813).
ctaggaattaaggacaatt

SEQ ID NO: 800727 - DNA, 19 bp, Mus musculus
  siRNA target sequence for 2810013E07Rik (NM_178112.3,1934-1952).
caaaactccgccaggttat

SEQ ID NO: 800728 - DNA, 19 bp, Mus musculus
  siRNA target sequence for 2810013E07Rik (NM_178112.3,1943-1961).
gccaggttatgctgaatga

SEQ ID NO: 800729 - DNA, 19 bp, Mus musculus
  siRNA target sequence for 2810013E07Rik (NM_178112.3,1945-1963).
caggttatgctgaatgaga

SEQ ID NO: 800730 - DNA, 19 bp, Mus musculus
  siRNA target sequence for 2810013E07Rik (NM_178112.3,1962-1980).
gatgctgcttttagatatt

SEQ ID NO: 800731 - DNA, 19 bp, Mus musculus
  siRNA target sequence for 2810013E07Rik (NM_178112.3,2037-2055).
cagtagggtacgaggatat

SEQ ID NO: 800732 - DNA, 19 bp, Mus musculus
  siRNA target sequence for 2810013E07Rik (NM_178112.3,2039-2057).
gtagggtacgaggatattt

SEQ ID NO: 800733 - DNA, 19 bp, Mus musculus
  siRNA target sequence for 2810013E07Rik (NM_178112.3,2042-2060).
gggtacgaggatatttgga

SEQ ID NO: 800734 - DNA, 19 bp, Mus musculus
  siRNA target sequence for 2810013E07Rik (NM_178112.3,2155-2173).
caagttcctgcatttttat

SEQ ID NO: 800735 - DNA, 19 bp, Mus musculus
  siRNA target sequence for 2810013E07Rik (NM_178112.3,2230-2248).
cttccaggccctaaagaga

SEQ ID NO: 800736 - DNA, 19 bp, Mus musculus
  siRNA target sequence for 2810013E07Rik (NM_178112.3,2249-2267).
gtagacggaccgctaaaga

SEQ ID NO: 800737 - DNA, 19 bp, Mus musculus
  siRNA target sequence for 2810013E07Rik (NM_178112.3,2349-2367).
gcagagggaatccacatta

SEQ ID NO: 800738 - DNA, 19 bp, Mus musculus
  siRNA target sequence for 2810013E07Rik (NM_178112.3,2361-2379).
cacattaggcataatgtat

SEQ ID NO: 800739 - DNA, 19 bp, Mus musculus
  siRNA target sequence for 2810013E07Rik (NM_178112.3,2376-2394).
gtatcggagtgaactactt

SEQ ID NO: 800740 - DNA, 19 bp, Mus musculus
  siRNA target sequence for 2810013E07Rik (NM_178112.3,2380-2398).
cggagtgaactactttctt

SEQ ID NO: 800741 - DNA, 19 bp, Mus musculus
  siRNA target sequence for 2810013E07Rik (NM_178112.3,2381-2399).
ggagtgaactactttcttt

SEQ ID NO: 800742 - DNA, 19 bp, Mus musculus
  siRNA target sequence for 2810013E07Rik (NM_178112.3,2384-2402).
gtgaactactttcttttat

SEQ ID NO: 800743 - DNA, 19 bp, Mus musculus
  siRNA target sequence for 2810013E07Rik (NM_178112.3,2415-2433).
ggaaccactggttttgact

SEQ ID NO: 800744 - DNA, 19 bp, Mus musculus
  siRNA target sequence for 2810013E07Rik (NM_178112.3,2416-2434).
gaaccactggttttgacta

SEQ ID NO: 800745 - DNA, 19 bp, Mus musculus
  siRNA target sequence for 2810013E07Rik (NM_178112.3,2467-2485).
gttcgggaggacattgtga

SEQ ID NO: 800746 - DNA, 19 bp, Mus musculus
  siRNA target sequence for 2810013E07Rik (NM_178112.3,2478-2496).
cattgtgaatgatatcaca

SEQ ID NO: 800747 - DNA, 19 bp, Mus musculus
  siRNA target sequence for 2810013E07Rik (NM_178112.3,2493-2511).
cacagccgagcacatttct

SEQ ID NO: 800748 - DNA, 19 bp, Mus musculus
  siRNA target sequence for 2810013E07Rik (NM_178112.3,2495-2513).
cagccgagcacatttctat

SEQ ID NO: 800749 - DNA, 19 bp, Mus musculus
  siRNA target sequence for 2810013E07Rik (NM_178112.3,2497-2515).
gccgagcacatttctatct

SEQ ID NO: 800750 - DNA, 19 bp, Mus musculus
  siRNA target sequence for 2810013E07Rik (NM_178112.3,2516-2534).
ggccatcttccatacctaa

SEQ ID NO: 800751 - DNA, 19 bp, Mus musculus
  siRNA target sequence for 2810013E07Rik (NM_178112.3,2535-2553).
cctccaatccgtggatttt

SEQ ID NO: 800752 - DNA, 19 bp, Mus musculus
  siRNA target sequence for 2810013E07Rik (NM_178112.3,2538-2556).
ccaatccgtggattttgaa

SEQ ID NO: 800753 - DNA, 19 bp, Mus musculus
  siRNA target sequence for 2810013E07Rik (NM_178112.3,2587-2605).
cgatatacactcagtataa

SEQ ID NO: 800754 - DNA, 19 bp, Mus musculus
  siRNA target sequence for 2810013E07Rik (NM_178112.3,2616-2634).
ccatgcttggctaattatt

SEQ ID NO: 800755 - DNA, 19 bp, Mus musculus
  siRNA target sequence for 2810013E07Rik (NM_178112.3,2758-2776).
gtgataaaacgaatgataa

SEQ ID NO: 800756 - DNA, 19 bp, Mus musculus
  siRNA target sequence for 2810013E07Rik (NM_178112.3,2832-2850).
cagagaaattgactacaaa

SEQ ID NO: 800757 - DNA, 19 bp, Mus musculus
  siRNA target sequence for 2810013E07Rik (NM_178112.3,2880-2898).
cagccatgacgctatggat

SEQ ID NO: 800758 - DNA, 19 bp, Mus musculus
  siRNA target sequence for 2810013E07Rik (NM_178112.3,2889-2907).
cgctatggattcctactat

SEQ ID NO: 800759 - DNA, 19 bp, Mus musculus
  siRNA target sequence for 2810013E07Rik (NM_178112.3,2891-2909).
ctatggattcctactatga

SEQ ID NO: 800760 - DNA, 19 bp, Mus musculus
  siRNA target sequence for 2810013E07Rik (NM_178112.3,2931-2949).
cttggagtacttgacttat

SEQ ID NO: 800761 - DNA, 19 bp, Mus musculus
  siRNA target sequence for 2810013E07Rik (NM_178112.3,2974-2992).
gataaaagacagattgcaa

SEQ ID NO: 800762 - DNA, 19 bp, Mus musculus
  siRNA target sequence for 2810013E07Rik (NM_178112.3,2998-3016).
gccattggccaaacagaat

SEQ ID NO: 800763 - DNA, 19 bp, Mus musculus
  siRNA target sequence for 2810013E07Rik (NM_178112.3,2999-3017).
ccattggccaaacagaatt

SEQ ID NO: 800764 - DNA, 19 bp, Mus musculus
  siRNA target sequence for 2810013E07Rik (NM_178112.3,3007-3025).
caaacagaattgaatgcaa

SEQ ID NO: 800765 - DNA, 19 bp, Mus musculus
  siRNA target sequence for 2810013E07Rik (NM_178112.3,3026-3044).
gcaaccctgaagaagtatt

SEQ ID NO: 800766 - DNA, 19 bp, Mus musculus
  siRNA target sequence for 2810013E07Rik (NM_178112.3,3082-3100).
caagcaatggcaaaacttt

SEQ ID NO: 800767 - DNA, 19 bp, Mus musculus
  siRNA target sequence for B130055D15Rik (NM_178113.2,607-625).
cctagagactggaagagat

SEQ ID NO: 800768 - DNA, 19 bp, Mus musculus
  siRNA target sequence for B130055D15Rik (NM_178113.2,618-636).
gaagagatgcgttcacaaa

SEQ ID NO: 800769 - DNA, 19 bp, Mus musculus
  siRNA target sequence for B130055D15Rik (NM_178113.2,757-775).
cgtccaggaagcccataaa

SEQ ID NO: 800770 - DNA, 19 bp, Mus musculus
  siRNA target sequence for B130055D15Rik (NM_178113.2,758-776).
gtccaggaagcccataaaa

SEQ ID NO: 800771 - DNA, 19 bp, Mus musculus
  siRNA target sequence for B130055D15Rik (NM_178113.2,812-830).
catgctgctgggctctatt

SEQ ID NO: 800772 - DNA, 19 bp, Mus musculus
  siRNA target sequence for B130055D15Rik (NM_178113.2,921-939).
ggccacaagaatctaactt

SEQ ID NO: 800773 - DNA, 19 bp, Mus musculus
  siRNA target sequence for B130055D15Rik (NM_178113.2,923-941).
ccacaagaatctaacttga

SEQ ID NO: 800774 - DNA, 19 bp, Mus musculus
  siRNA target sequence for B130055D15Rik (NM_178113.2,959-977).
gaccactccaagagttcta

SEQ ID NO: 800775 - DNA, 19 bp, Mus musculus
  siRNA target sequence for B130055D15Rik (NM_178113.2,966-984).
ccaagagttctaaggataa

SEQ ID NO: 800776 - DNA, 19 bp, Mus musculus
  siRNA target sequence for B130055D15Rik (NM_178113.2,967-985).
caagagttctaaggataat

SEQ ID NO: 800777 - DNA, 19 bp, Mus musculus
  siRNA target sequence for B130055D15Rik (NM_178113.2,970-988).
gagttctaaggataattat

SEQ ID NO: 800778 - DNA, 19 bp, Mus musculus
  siRNA target sequence for B130055D15Rik (NM_178113.2,1014-1032).
cacctagaaaagaggatta

SEQ ID NO: 800779 - DNA, 19 bp, Mus musculus
  siRNA target sequence for B130055D15Rik (NM_178113.2,1017-1035).
ctagaaaagaggattatca

SEQ ID NO: 800780 - DNA, 19 bp, Mus musculus
  siRNA target sequence for B130055D15Rik (NM_178113.2,1034-1052).
caggtggatgaactttcaa

SEQ ID NO: 800781 - DNA, 19 bp, Mus musculus
  siRNA target sequence for B130055D15Rik (NM_178113.2,1096-1114).
ggacctttgtcaaatacga

SEQ ID NO: 800782 - DNA, 19 bp, Mus musculus
  siRNA target sequence for B130055D15Rik (NM_178113.2,1181-1199).
ccacagtctattcaaactt

SEQ ID NO: 800783 - DNA, 19 bp, Mus musculus
  siRNA target sequence for B130055D15Rik (NM_178113.2,1188-1206).
ctattcaaacttgtataga

SEQ ID NO: 800784 - DNA, 19 bp, Mus musculus
  siRNA target sequence for B130055D15Rik (NM_178113.2,1205-1223).
gaggtatttgttgcattaa

SEQ ID NO: 800785 - DNA, 19 bp, Mus musculus
  siRNA target sequence for B130055D15Rik (NM_178113.2,1232-1250).
gagccaattcctcataaat

SEQ ID NO: 800786 - DNA, 19 bp, Mus musculus
  siRNA target sequence for B130055D15Rik (NM_178113.2,1266-1284).
ccaggaacctcaatgaagt

SEQ ID NO: 800787 - DNA, 19 bp, Mus musculus
  siRNA target sequence for B130055D15Rik (NM_178113.2,1274-1292).
ctcaatgaagtcaaacaca

SEQ ID NO: 800788 - DNA, 19 bp, Mus musculus
  siRNA target sequence for B130055D15Rik (NM_178113.2,1304-1322).
gcctactatggactgtatt

SEQ ID NO: 800789 - DNA, 19 bp, Mus musculus
  siRNA target sequence for B130055D15Rik (NM_178113.2,1305-1323).
cctactatggactgtattt

SEQ ID NO: 800790 - DNA, 19 bp, Mus musculus
  siRNA target sequence for B130055D15Rik (NM_178113.2,1324-1342).
gctgtgctccccagtacat

SEQ ID NO: 800791 - DNA, 19 bp, Mus musculus
  siRNA target sequence for B130055D15Rik (NM_178113.2,1337-1355).
gtacatggagaggaaaata

SEQ ID NO: 800792 - DNA, 19 bp, Mus musculus
  siRNA target sequence for B130055D15Rik (NM_178113.2,1376-1394).
catcaaatgctaaatgtga

SEQ ID NO: 800793 - DNA, 19 bp, Mus musculus
  siRNA target sequence for B130055D15Rik (NM_178113.2,1451-1469).
caagtcatcaattgtagaa

SEQ ID NO: 800794 - DNA, 19 bp, Mus musculus
  siRNA target sequence for B130055D15Rik (NM_178113.2,1492-1510).
ctcacttgtggatgaacta

SEQ ID NO: 800795 - DNA, 19 bp, Mus musculus
  siRNA target sequence for B130055D15Rik (NM_178113.2,1494-1512).
cacttgtggatgaactaca

SEQ ID NO: 800796 - DNA, 19 bp, Mus musculus
  siRNA target sequence for B130055D15Rik (NM_178113.2,1525-1543).
cccagtccttggtactcta

SEQ ID NO: 800797 - DNA, 19 bp, Mus musculus
  siRNA target sequence for B130055D15Rik (NM_178113.2,1536-1554).
gtactctactgcagcatat

SEQ ID NO: 800798 - DNA, 19 bp, Mus musculus
  siRNA target sequence for B130055D15Rik (NM_178113.2,1567-1585).
ggtagacaaagcagagtat

SEQ ID NO: 800799 - DNA, 19 bp, Mus musculus
  siRNA target sequence for B130055D15Rik (NM_178113.2,1637-1655).
gaggagtatgccacattca

SEQ ID NO: 800800 - DNA, 19 bp, Mus musculus
  siRNA target sequence for B130055D15Rik (NM_178113.2,1654-1672).
cattgcctggctttacaaa

SEQ ID NO: 800801 - DNA, 19 bp, Mus musculus
  siRNA target sequence for B130055D15Rik (NM_178113.2,1699-1717).
ccgggtcttcactcttgat

SEQ ID NO: 800802 - DNA, 19 bp, Mus musculus
  siRNA target sequence for B130055D15Rik (NM_178113.2,1701-1719).
gggtcttcactcttgatgt

SEQ ID NO: 800803 - DNA, 19 bp, Mus musculus
  siRNA target sequence for B130055D15Rik (NM_178113.2,1751-1769).
gagctggatgacactgtat

SEQ ID NO: 800804 - DNA, 19 bp, Mus musculus
  siRNA target sequence for B130055D15Rik (NM_178113.2,1870-1888).
gtccagctttgcacattgt

SEQ ID NO: 800805 - DNA, 19 bp, Mus musculus
  siRNA target sequence for B130055D15Rik (NM_178113.2,1905-1923).
gcaacacatctgagagtat

SEQ ID NO: 800806 - DNA, 19 bp, Mus musculus
  siRNA target sequence for B130055D15Rik (NM_178113.2,1906-1924).
caacacatctgagagtata

SEQ ID NO: 800807 - DNA, 19 bp, Mus musculus
  siRNA target sequence for B130055D15Rik (NM_178113.2,1949-1967).
ctagttccagggatacaga

SEQ ID NO: 800808 - DNA, 19 bp, Mus musculus
  siRNA target sequence for B130055D15Rik (NM_178113.2,1972-1990).
ctctaacaccgtactgaat

SEQ ID NO: 800809 - DNA, 19 bp, Mus musculus
  siRNA target sequence for B130055D15Rik (NM_178113.2,2030-2048).
caaagccgtacccataaca

SEQ ID NO: 800810 - DNA, 19 bp, Mus musculus
  siRNA target sequence for B130055D15Rik (NM_178113.2,2034-2052).
gccgtacccataacaatga

SEQ ID NO: 800811 - DNA, 19 bp, Mus musculus
  siRNA target sequence for B130055D15Rik (NM_178113.2,2035-2053).
ccgtacccataacaatgat

SEQ ID NO: 800812 - DNA, 19 bp, Mus musculus
  siRNA target sequence for B130055D15Rik (NM_178113.2,2037-2055).
gtacccataacaatgatga

SEQ ID NO: 800813 - DNA, 19 bp, Mus musculus
  siRNA target sequence for B130055D15Rik (NM_178113.2,2069-2087).
ggagaaagatgcttcatga

SEQ ID NO: 800814 - DNA, 19 bp, Mus musculus
  siRNA target sequence for B130055D15Rik (NM_178113.2,2083-2101).
catgacaatgctgagaaaa

SEQ ID NO: 800815 - DNA, 19 bp, Mus musculus
  siRNA target sequence for B130055D15Rik (NM_178113.2,2111-2129).
gatgagaaaatcaatgtca

SEQ ID NO: 800816 - DNA, 19 bp, Mus musculus
  siRNA target sequence for B130055D15Rik (NM_178113.2,2136-2154).
ctgcactccaggtgttaat

SEQ ID NO: 800817 - DNA, 19 bp, Mus musculus
  siRNA target sequence for B130055D15Rik (NM_178113.2,2147-2165).
gtgttaatgagcattttga

SEQ ID NO: 800818 - DNA, 19 bp, Mus musculus
  siRNA target sequence for B130055D15Rik (NM_178113.2,2249-2267).
caagccctacagtctctta

SEQ ID NO: 800819 - DNA, 19 bp, Mus musculus
  siRNA target sequence for B130055D15Rik (NM_178113.2,2253-2271).
ccctacagtctcttacaga

SEQ ID NO: 800820 - DNA, 19 bp, Mus musculus
  siRNA target sequence for B130055D15Rik (NM_178113.2,2472-2490).
ctctcctcaccatagagaa

SEQ ID NO: 800821 - DNA, 19 bp, Mus musculus
  siRNA target sequence for B130055D15Rik (NM_178113.2,2494-2512).
ggatctgagacgctattta

SEQ ID NO: 800822 - DNA, 19 bp, Mus musculus
  siRNA target sequence for B130055D15Rik (NM_178113.2,2618-2636).
ctgctgtccaagatcactt

SEQ ID NO: 800823 - DNA, 19 bp, Mus musculus
  siRNA target sequence for B130055D15Rik (NM_178113.2,2650-2668).
gctggactacaccaaaata

SEQ ID NO: 800824 - DNA, 19 bp, Mus musculus
  siRNA target sequence for B130055D15Rik (NM_178113.2,2651-2669).
ctggactacaccaaaataa

SEQ ID NO: 800825 - DNA, 19 bp, Mus musculus
  siRNA target sequence for B130055D15Rik (NM_178113.2,2653-2671).
ggactacaccaaaataata

SEQ ID NO: 800826 - DNA, 19 bp, Mus musculus
  siRNA target sequence for B130055D15Rik (NM_178113.2,2696-2714).
gaacagtctcccaactcaa

SEQ ID NO: 800827 - DNA, 19 bp, Mus musculus
  siRNA target sequence for B130055D15Rik (NM_178113.2,2699-2717).
cagtctcccaactcaaaca

SEQ ID NO: 800828 - DNA, 19 bp, Mus musculus
  siRNA target sequence for B130055D15Rik (NM_178113.2,2712-2730).
caaacaccttaggctatat

SEQ ID NO: 800829 - DNA, 19 bp, Mus musculus
  siRNA target sequence for B130055D15Rik (NM_178113.2,2734-2752).
gtgtgtcattgggcatatt

SEQ ID NO: 800830 - DNA, 19 bp, Mus musculus
  siRNA target sequence for B130055D15Rik (NM_178113.2,2770-2788).
ggggacccgggacaagata

SEQ ID NO: 800831 - DNA, 19 bp, Mus musculus
  siRNA target sequence for B130055D15Rik (NM_178113.2,2771-2789).
gggacccgggacaagataa

SEQ ID NO: 800832 - DNA, 19 bp, Mus musculus
  siRNA target sequence for B130055D15Rik (NM_178113.2,2848-2866).
gtctgttgacgcattgcaa

SEQ ID NO: 800833 - DNA, 19 bp, Mus musculus
  siRNA target sequence for B130055D15Rik (NM_178113.2,2850-2868).
ctgttgacgcattgcaaaa

SEQ ID NO: 800834 - DNA, 19 bp, Mus musculus
  siRNA target sequence for B130055D15Rik (NM_178113.2,2855-2873).
gacgcattgcaaaagcttt

SEQ ID NO: 800835 - DNA, 19 bp, Mus musculus
  siRNA target sequence for B130055D15Rik (NM_178113.2,2949-2967).
gtgagcaacacctctctaa

SEQ ID NO: 800836 - DNA, 19 bp, Mus musculus
  siRNA target sequence for B130055D15Rik (NM_178113.2,3052-3070).
gttatgtccagccatagta

SEQ ID NO: 800837 - DNA, 19 bp, Mus musculus
  siRNA target sequence for B130055D15Rik (NM_178113.2,3057-3075).
gtccagccatagtagagaa

SEQ ID NO: 800838 - DNA, 19 bp, Mus musculus
  siRNA target sequence for B130055D15Rik (NM_178113.2,3114-3132).
ctgctcattcggatcactt

SEQ ID NO: 800839 - DNA, 19 bp, Mus musculus
  siRNA target sequence for B130055D15Rik (NM_178113.2,3119-3137).
cattcggatcacttaccat

SEQ ID NO: 800840 - DNA, 19 bp, Mus musculus
  siRNA target sequence for B130055D15Rik (NM_178113.2,3124-3142).
ggatcacttaccatcatct

SEQ ID NO: 800841 - DNA, 19 bp, Mus musculus
  siRNA target sequence for B130055D15Rik (NM_178113.2,3218-3236).
gcacatgccatcatcactt

SEQ ID NO: 800842 - DNA, 19 bp, Mus musculus
  siRNA target sequence for B130055D15Rik (NM_178113.2,3219-3237).
cacatgccatcatcacttt

SEQ ID NO: 800843 - DNA, 19 bp, Mus musculus
  siRNA target sequence for B130055D15Rik (NM_178113.2,3224-3242).
gccatcatcactttaggta

SEQ ID NO: 800844 - DNA, 19 bp, Mus musculus
  siRNA target sequence for B130055D15Rik (NM_178113.2,3225-3243).
ccatcatcactttaggtaa

SEQ ID NO: 800845 - DNA, 19 bp, Mus musculus
  siRNA target sequence for B130055D15Rik (NM_178113.2,3288-3306).
cccttgtgcgagaacttga

SEQ ID NO: 800846 - DNA, 19 bp, Mus musculus
  siRNA target sequence for B130055D15Rik (NM_178113.2,3343-3361).
cattgtgatatgtgatctt

SEQ ID NO: 800847 - DNA, 19 bp, Mus musculus
  siRNA target sequence for B130055D15Rik (NM_178113.2,3347-3365).
gtgatatgtgatctttgta

SEQ ID NO: 800848 - DNA, 19 bp, Mus musculus
  siRNA target sequence for B130055D15Rik (NM_178113.2,3388-3406).
caattatattcccaacatt

SEQ ID NO: 800849 - DNA, 19 bp, Mus musculus
  siRNA target sequence for B130055D15Rik (NM_178113.2,3535-3553).
ggactcacacccagacatt

SEQ ID NO: 800850 - DNA, 19 bp, Mus musculus
  siRNA target sequence for B130055D15Rik (NM_178113.2,3597-3615).
ggaaccctaccatgttttt

SEQ ID NO: 800851 - DNA, 19 bp, Mus musculus
  siRNA target sequence for B130055D15Rik (NM_178113.2,3620-3638).
cacttcattgagtgcatat

SEQ ID NO: 800852 - DNA, 19 bp, Mus musculus
  siRNA target sequence for B130055D15Rik (NM_178113.2,3662-3680).
catgggcagtataacaagt

SEQ ID NO: 800853 - DNA, 19 bp, Mus musculus
  siRNA target sequence for B130055D15Rik (NM_178113.2,3700-3718).
gaagcagctgtttttacta

SEQ ID NO: 800854 - DNA, 19 bp, Mus musculus
  siRNA target sequence for B130055D15Rik (NM_178113.2,3743-3761).
cgaatgagaatctacaagt

SEQ ID NO: 800855 - DNA, 19 bp, Mus musculus
  siRNA target sequence for B130055D15Rik (NM_178113.2,3744-3762).
gaatgagaatctacaagtt

SEQ ID NO: 800856 - DNA, 19 bp, Mus musculus
  siRNA target sequence for B130055D15Rik (NM_178113.2,3785-3803).
gagcagcggttcaatgtca

SEQ ID NO: 800857 - DNA, 19 bp, Mus musculus
  siRNA target sequence for B130055D15Rik (NM_178113.2,3907-3925).
ctccaaggagatcaaacta

SEQ ID NO: 800858 - DNA, 19 bp, Mus musculus
  siRNA target sequence for B130055D15Rik (NM_178113.2,3919-3937).
caaactattggcaatgaga

SEQ ID NO: 800859 - DNA, 19 bp, Mus musculus
  siRNA target sequence for B130055D15Rik (NM_178113.2,4001-4019).
gaagcacagatgaagatca

SEQ ID NO: 800860 - DNA, 19 bp, Mus musculus
  siRNA target sequence for B130055D15Rik (NM_178113.2,4045-4063).
catagagaatattattcca

SEQ ID NO: 800861 - DNA, 19 bp, Mus musculus
  siRNA target sequence for B130055D15Rik (NM_178113.2,4072-4090).
ctccacagtggaacgtaaa

SEQ ID NO: 800862 - DNA, 19 bp, Mus musculus
  siRNA target sequence for B130055D15Rik (NM_178113.2,4074-4092).
ccacagtggaacgtaaagt

SEQ ID NO: 800863 - DNA, 19 bp, Mus musculus
  siRNA target sequence for 2700050L05Rik (NM_178115.2,121-139).
gacagtgatgagaatggat

SEQ ID NO: 800864 - DNA, 19 bp, Mus musculus
  siRNA target sequence for 2700050L05Rik (NM_178115.2,155-173).
ctgacccagcagatgacaa

SEQ ID NO: 800865 - DNA, 19 bp, Mus musculus
  siRNA target sequence for 2700050L05Rik (NM_178115.2,178-196).
gcagtggctatcattaagt

SEQ ID NO: 800866 - DNA, 19 bp, Mus musculus
  siRNA target sequence for 2700050L05Rik (NM_178115.2,214-232).
gtaccggaaaaatacaagt

SEQ ID NO: 800867 - DNA, 19 bp, Mus musculus
  siRNA target sequence for 2700050L05Rik (NM_178115.2,293-311).
gtcgactcgtccttagcta

SEQ ID NO: 800868 - DNA, 19 bp, Mus musculus
  siRNA target sequence for 2700050L05Rik (NM_178115.2,313-331).
gtgttggagggtttaaaat

SEQ ID NO: 800869 - DNA, 19 bp, Mus musculus
  siRNA target sequence for 2700050L05Rik (NM_178115.2,383-401).
gcactcctatccccttaaa

SEQ ID NO: 800870 - DNA, 19 bp, Mus musculus
  siRNA target sequence for 2700050L05Rik (NM_178115.2,384-402).
cactcctatccccttaaaa

SEQ ID NO: 800871 - DNA, 19 bp, Mus musculus
  siRNA target sequence for Camta2 (NM_178116.2,222-240).
gagcggctccgatggaata

SEQ ID NO: 800872 - DNA, 19 bp, Mus musculus
  siRNA target sequence for Camta2 (NM_178116.2,224-242).
gcggctccgatggaataca

SEQ ID NO: 800873 - DNA, 19 bp, Mus musculus
  siRNA target sequence for Camta2 (NM_178116.2,365-383).
ccggaaggatggttacctt

SEQ ID NO: 800874 - DNA, 19 bp, Mus musculus
  siRNA target sequence for Camta2 (NM_178116.2,366-384).
cggaaggatggttaccttt

SEQ ID NO: 800875 - DNA, 19 bp, Mus musculus
  siRNA target sequence for Camta2 (NM_178116.2,393-411).
cggaaggatgggaagacta

SEQ ID NO: 800876 - DNA, 19 bp, Mus musculus
  siRNA target sequence for Camta2 (NM_178116.2,458-476).
ctcctggcagtgtctctat

SEQ ID NO: 800877 - DNA, 19 bp, Mus musculus
  siRNA target sequence for Camta2 (NM_178116.2,599-617).
gggctgtagccccatcttt

SEQ ID NO: 800878 - DNA, 19 bp, Mus musculus
  siRNA target sequence for Camta2 (NM_178116.2,600-618).
ggctgtagccccatctttt

SEQ ID NO: 800879 - DNA, 19 bp, Mus musculus
  siRNA target sequence for Camta2 (NM_178116.2,602-620).
ctgtagccccatcttttgt

SEQ ID NO: 800880 - DNA, 19 bp, Mus musculus
  siRNA target sequence for Camta2 (NM_178116.2,1035-1053).
gcagaacccctagaaatca

SEQ ID NO: 800881 - DNA, 19 bp, Mus musculus
  siRNA target sequence for Camta2 (NM_178116.2,1070-1088).
ctctcgagggggttcatca

SEQ ID NO: 800882 - DNA, 19 bp, Mus musculus
  siRNA target sequence for Camta2 (NM_178116.2,1257-1275).
gaccctgatcgttttctca

SEQ ID NO: 800883 - DNA, 19 bp, Mus musculus
  siRNA target sequence for Camta2 (NM_178116.2,1715-1733).
gctctctcctgcgctaaat

SEQ ID NO: 800884 - DNA, 19 bp, Mus musculus
  siRNA target sequence for Camta2 (NM_178116.2,1807-1825).
cagaggccgcagagcatta

SEQ ID NO: 800885 - DNA, 19 bp, Mus musculus
  siRNA target sequence for Camta2 (NM_178116.2,1828-1846).
cctgtgtcttcgatcacat

SEQ ID NO: 800886 - DNA, 19 bp, Mus musculus
  siRNA target sequence for Camta2 (NM_178116.2,1865-1883).
ggtccagcctggtgtctta

SEQ ID NO: 800887 - DNA, 19 bp, Mus musculus
  siRNA target sequence for Camta2 (NM_178116.2,2347-2365).
caggaagcttggacttaga

SEQ ID NO: 800888 - DNA, 19 bp, Mus musculus
  siRNA target sequence for Camta2 (NM_178116.2,2739-2757).
ccgctggcctctgacattt

SEQ ID NO: 800889 - DNA, 19 bp, Mus musculus
  siRNA target sequence for Camta2 (NM_178116.2,2742-2760).
ctggcctctgacatttcta

SEQ ID NO: 800890 - DNA, 19 bp, Mus musculus
  siRNA target sequence for Camta2 (NM_178116.2,2820-2838).
gactatgaagccactaact

SEQ ID NO: 800891 - DNA, 19 bp, Mus musculus
  siRNA target sequence for Camta2 (NM_178116.2,2977-2995).
ccacaccagagcggattaa

SEQ ID NO: 800892 - DNA, 19 bp, Mus musculus
  siRNA target sequence for Camta2 (NM_178116.2,3358-3376).
cggtgatccaacgttgtta

SEQ ID NO: 800893 - DNA, 19 bp, Mus musculus
  siRNA target sequence for Camta2 (NM_178116.2,3369-3387).
cgttgttatcggaagtaca

SEQ ID NO: 800894 - DNA, 19 bp, Mus musculus
  siRNA target sequence for Camta2 (NM_178116.2,3370-3388).
gttgttatcggaagtacaa

SEQ ID NO: 800895 - DNA, 19 bp, Mus musculus
  siRNA target sequence for Camta2 (NM_178116.2,3397-3415).
cctggattgcacttaagtt

SEQ ID NO: 800896 - DNA, 19 bp, Mus musculus
  siRNA target sequence for Camta2 (NM_178116.2,3408-3426).
cttaagtttgcactctata

SEQ ID NO: 800897 - DNA, 19 bp, Mus musculus
  siRNA target sequence for Camta2 (NM_178116.2,3464-3482).
gttccgaagctactatgaa

SEQ ID NO: 800898 - DNA, 19 bp, Mus musculus
  siRNA target sequence for Camta2 (NM_178116.2,3629-3647).
ccaggcagcccggaaaata

SEQ ID NO: 800899 - DNA, 19 bp, Mus musculus
  siRNA target sequence for Camta2 (NM_178116.2,3630-3648).
caggcagcccggaaaataa

SEQ ID NO: 800900 - DNA, 19 bp, Mus musculus
  siRNA target sequence for Camta2 (NM_178116.2,3633-3651).
gcagcccggaaaataatga

SEQ ID NO: 800901 - DNA, 19 bp, Mus musculus
  siRNA target sequence for Camta2 (NM_178116.2,3663-3681).
cgctgccgacacagaatga

SEQ ID NO: 800902 - DNA, 19 bp, Mus musculus
  siRNA target sequence for 1500004A08Rik (NM_178149.1,137-155).
ggcttgggtacacacattt

SEQ ID NO: 800903 - DNA, 19 bp, Mus musculus
  siRNA target sequence for 1500004A08Rik (NM_178149.1,139-157).
cttgggtacacacatttct

SEQ ID NO: 800904 - DNA, 19 bp, Mus musculus
  siRNA target sequence for 1500004A08Rik (NM_178149.1,668-686).
gatcatcctcgctattgga

SEQ ID NO: 800905 - DNA, 19 bp, Mus musculus
  siRNA target sequence for 1500004A08Rik (NM_178149.1,679-697).
ctattggagctggcattat

SEQ ID NO: 800906 - DNA, 19 bp, Mus musculus
  siRNA target sequence for 1500004A08Rik (NM_178149.1,699-717).
gtgggctacacttacaaga

SEQ ID NO: 800907 - DNA, 19 bp, Mus musculus
  siRNA target sequence for Hist3h2a (NM_178218.1,24-42).
cggcaaagctcgtgcaaaa

SEQ ID NO: 800908 - DNA, 19 bp, Mus musculus
  siRNA target sequence for Hist3h2a (NM_178218.1,100-118).
cttctccgtaagggtaatt

SEQ ID NO: 800909 - DNA, 19 bp, Mus musculus
  siRNA target sequence for Hist3h2a (NM_178218.1,103-121).
ctccgtaagggtaattatt

SEQ ID NO: 800910 - DNA, 19 bp, Mus musculus
  siRNA target sequence for Hist3h2a (NM_178218.1,158-176).
cggctgtgctagaatatct

SEQ ID NO: 800911 - DNA, 19 bp, Mus musculus
  siRNA target sequence for Zfp469 (NM_178242.2,562-580).
cccagtgggctatatccat

SEQ ID NO: 800912 - DNA, 19 bp, Mus musculus
  siRNA target sequence for Zfp469 (NM_178242.2,657-675).
cttcgatacccagaaagat

SEQ ID NO: 800913 - DNA, 19 bp, Mus musculus
  siRNA target sequence for Zfp469 (NM_178242.2,824-842).
cgttgtttggcaagaaaga

SEQ ID NO: 800914 - DNA, 19 bp, Mus musculus
  siRNA target sequence for Zfp469 (NM_178242.2,1914-1932).
caaatacagcggtagcttt

SEQ ID NO: 800915 - DNA, 19 bp, Mus musculus
  siRNA target sequence for Zfp469 (NM_178242.2,2161-2179).
cagggggaagccgaagtaa

SEQ ID NO: 800916 - DNA, 19 bp, Mus musculus
  siRNA target sequence for Zfp469 (NM_178242.2,2163-2181).
gggggaagccgaagtaaga

SEQ ID NO: 800917 - DNA, 19 bp, Mus musculus
  siRNA target sequence for Zfp469 (NM_178242.2,2265-2283).
ccaggaacgcactttgtca

SEQ ID NO: 800918 - DNA, 19 bp, Mus musculus
  siRNA target sequence for Zfp469 (NM_178242.2,2301-2319).
gcatggccggactgatgat

SEQ ID NO: 800919 - DNA, 19 bp, Mus musculus
  siRNA target sequence for Zfp469 (NM_178242.2,2556-2574).
gccacgctcgggtagtaca

SEQ ID NO: 800920 - DNA, 19 bp, Mus musculus
  siRNA target sequence for Zfp469 (NM_178242.2,2557-2575).
ccacgctcgggtagtacat

SEQ ID NO: 800921 - DNA, 19 bp, Mus musculus
  siRNA target sequence for Zfp469 (NM_178242.2,3045-3063).
gctcctgcctcgaaagtct

SEQ ID NO: 800922 - DNA, 19 bp, Mus musculus
  siRNA target sequence for Zfp469 (NM_178242.2,3352-3370).
caggccctgttcacagata

SEQ ID NO: 800923 - DNA, 19 bp, Mus musculus
  siRNA target sequence for Zfp469 (NM_178242.2,3354-3372).
ggccctgttcacagatatt

SEQ ID NO: 800924 - DNA, 19 bp, Mus musculus
  siRNA target sequence for Zfp469 (NM_178242.2,3815-3833).
ccgagccgcagatagaact

SEQ ID NO: 800925 - DNA, 19 bp, Mus musculus
  siRNA target sequence for Zfp469 (NM_178242.2,4308-4326).
caccctcttgagtgagata

SEQ ID NO: 800926 - DNA, 19 bp, Mus musculus
  siRNA target sequence for Zfp469 (NM_178242.2,4481-4499).
ggcttccgcgtgaactgaa

SEQ ID NO: 800927 - DNA, 19 bp, Mus musculus
  siRNA target sequence for Zfp469 (NM_178242.2,4489-4507).
cgtgaactgaactccaata

SEQ ID NO: 800928 - DNA, 19 bp, Mus musculus
  siRNA target sequence for Zfp469 (NM_178242.2,4490-4508).
gtgaactgaactccaataa

SEQ ID NO: 800929 - DNA, 19 bp, Mus musculus
  siRNA target sequence for Zfp469 (NM_178242.2,4534-4552).
gaagagcggatgtttgcta

SEQ ID NO: 800930 - DNA, 19 bp, Mus musculus
  siRNA target sequence for Zfp469 (NM_178242.2,4539-4557).
gcggatgtttgctatgaaa

SEQ ID NO: 800931 - DNA, 19 bp, Mus musculus
  siRNA target sequence for Zfp469 (NM_178242.2,4540-4558).
cggatgtttgctatgaaat

SEQ ID NO: 800932 - DNA, 19 bp, Mus musculus
  siRNA target sequence for Zfp469 (NM_178242.2,4614-4632).
ggtccagcgaaggtacaaa

SEQ ID NO: 800933 - DNA, 19 bp, Mus musculus
  siRNA target sequence for Zfp469 (NM_178242.2,4620-4638).
gcgaaggtacaaagagaaa

SEQ ID NO: 800934 - DNA, 19 bp, Mus musculus
  siRNA target sequence for Zfp469 (NM_178242.2,4830-4848).
gacatcagacgactatgat

SEQ ID NO: 800935 - DNA, 19 bp, Mus musculus
  siRNA target sequence for Zfp469 (NM_178242.2,4832-4850).
catcagacgactatgatct

SEQ ID NO: 800936 - DNA, 19 bp, Mus musculus
  siRNA target sequence for Zfp469 (NM_178242.2,4954-4972).
gactcctcatctgatttta

SEQ ID NO: 800937 - DNA, 19 bp, Mus musculus
  siRNA target sequence for Zfp469 (NM_178242.2,4959-4977).
ctcatctgattttatgagt

SEQ ID NO: 800938 - DNA, 19 bp, Mus musculus
  siRNA target sequence for e9-2 (NM_178243.2,34-52).
ggtttgaaggtcatctgtt

SEQ ID NO: 800939 - DNA, 19 bp, Mus musculus
  siRNA target sequence for e9-2 (NM_178243.2,122-140).
ctctcctgtccaatatcca

SEQ ID NO: 800940 - DNA, 19 bp, Mus musculus
  siRNA target sequence for e9-2 (NM_178243.2,172-190).
caaggttacggcaaatgta

SEQ ID NO: 800941 - DNA, 19 bp, Mus musculus
  siRNA target sequence for e9-2 (NM_178243.2,175-193).
ggttacggcaaatgtatta

SEQ ID NO: 800942 - DNA, 19 bp, Mus musculus
  siRNA target sequence for e9-2 (NM_178243.2,231-249).
gtagcccaagagttgaata

SEQ ID NO: 800943 - DNA, 19 bp, Mus musculus
  siRNA target sequence for e9-2 (NM_178243.2,235-253).
cccaagagttgaatagcat

SEQ ID NO: 800944 - DNA, 19 bp, Mus musculus
  siRNA target sequence for e9-2 (NM_178243.2,422-440).
ccaagcgttgagcatgtat

SEQ ID NO: 800945 - DNA, 19 bp, Mus musculus
  siRNA target sequence for e9-2 (NM_178243.2,450-468).
cccctgatggtgtctcata

SEQ ID NO: 800946 - DNA, 19 bp, Mus musculus
  siRNA target sequence for e9-2 (NM_178243.2,700-718).
cgttcgccaccactttctt

SEQ ID NO: 800947 - DNA, 19 bp, Mus musculus
  siRNA target sequence for e9-2 (NM_178243.2,772-790).
ccattttgtggtatcgtta

SEQ ID NO: 800948 - DNA, 19 bp, Mus musculus
  siRNA target sequence for Dppa1 (NM_178247.2,187-205).
ggagcaccactgtgacatt

SEQ ID NO: 800949 - DNA, 19 bp, Mus musculus
  siRNA target sequence for Dppa1 (NM_178247.2,188-206).
gagcaccactgtgacattt

SEQ ID NO: 800950 - DNA, 19 bp, Mus musculus
  siRNA target sequence for Dppa1 (NM_178247.2,208-226).
cacatgacccttggaataa

SEQ ID NO: 800951 - DNA, 19 bp, Mus musculus
  siRNA target sequence for Dppa1 (NM_178247.2,213-231).
gacccttggaataatcaca

SEQ ID NO: 800952 - DNA, 19 bp, Mus musculus
  siRNA target sequence for Dppa1 (NM_178247.2,268-286).
ccactaaggacctctatat

SEQ ID NO: 800953 - DNA, 19 bp, Mus musculus
  siRNA target sequence for Dppa1 (NM_178247.2,269-287).
cactaaggacctctatatt

SEQ ID NO: 800954 - DNA, 19 bp, Mus musculus
  siRNA target sequence for Dppa1 (NM_178247.2,324-342).
gcaagtgccctgactatca

SEQ ID NO: 800955 - DNA, 19 bp, Mus musculus
  siRNA target sequence for Dppa1 (NM_178247.2,330-348).
gccctgactatcataaagt

SEQ ID NO: 800956 - DNA, 19 bp, Mus musculus
  siRNA target sequence for Dppa1 (NM_178247.2,382-400).
cggttgtcttccatggatt

SEQ ID NO: 800957 - DNA, 19 bp, Mus musculus
  siRNA target sequence for Dppa1 (NM_178247.2,389-407).
cttccatggatttcagaat

SEQ ID NO: 800958 - DNA, 19 bp, Mus musculus
  siRNA target sequence for Dppa1 (NM_178247.2,441-459).
gtagacactgtcgacatta

SEQ ID NO: 800959 - DNA, 19 bp, Mus musculus
  siRNA target sequence for Dppa1 (NM_178247.2,444-462).
gacactgtcgacattatca

SEQ ID NO: 800960 - DNA, 19 bp, Mus musculus
  siRNA target sequence for Dppa1 (NM_178247.2,446-464).
cactgtcgacattatcaaa

SEQ ID NO: 800961 - DNA, 19 bp, Mus musculus
  siRNA target sequence for Pramel6 (NM_178249.2,33-51).
gtgggcaagagacaatcta

SEQ ID NO: 800962 - DNA, 19 bp, Mus musculus
  siRNA target sequence for Pramel6 (NM_178249.2,35-53).
gggcaagagacaatctact

SEQ ID NO: 800963 - DNA, 19 bp, Mus musculus
  siRNA target sequence for Pramel6 (NM_178249.2,84-102).
ggaggaactgcccattcat

SEQ ID NO: 800964 - DNA, 19 bp, Mus musculus
  siRNA target sequence for Pramel6 (NM_178249.2,87-105).
ggaactgcccattcatcta

SEQ ID NO: 800965 - DNA, 19 bp, Mus musculus
  siRNA target sequence for Pramel6 (NM_178249.2,194-212).
ctgtaggaaccctaataga

SEQ ID NO: 800966 - DNA, 19 bp, Mus musculus
  siRNA target sequence for Pramel6 (NM_178249.2,424-442).
cctagaagggagatacctt

SEQ ID NO: 800967 - DNA, 19 bp, Mus musculus
  siRNA target sequence for Pramel6 (NM_178249.2,447-465).
ggtggtgaccgactttgaa

SEQ ID NO: 800968 - DNA, 19 bp, Mus musculus
  siRNA target sequence for Pramel6 (NM_178249.2,468-486).
cacgcaggagagtttcgat

SEQ ID NO: 800969 - DNA, 19 bp, Mus musculus
  siRNA target sequence for Pramel6 (NM_178249.2,472-490).
caggagagtttcgatgaat

SEQ ID NO: 800970 - DNA, 19 bp, Mus musculus
  siRNA target sequence for Pramel6 (NM_178249.2,484-502).
gatgaatggaccatatact

SEQ ID NO: 800971 - DNA, 19 bp, Mus musculus
  siRNA target sequence for Pramel6 (NM_178249.2,575-593).
cagtctctaatgtcataga

SEQ ID NO: 800972 - DNA, 19 bp, Mus musculus
  siRNA target sequence for Pramel6 (NM_178249.2,577-595).
gtctctaatgtcatagaga

SEQ ID NO: 800973 - DNA, 19 bp, Mus musculus
  siRNA target sequence for Pramel6 (NM_178249.2,581-599).
ctaatgtcatagagatctt

SEQ ID NO: 800974 - DNA, 19 bp, Mus musculus
  siRNA target sequence for Pramel6 (NM_178249.2,684-702).
ggagggaatgaataatctt

SEQ ID NO: 800975 - DNA, 19 bp, Mus musculus
  siRNA target sequence for Pramel6 (NM_178249.2,721-739).
ggattgaagcccttcagat

SEQ ID NO: 800976 - DNA, 19 bp, Mus musculus
  siRNA target sequence for Pramel6 (NM_178249.2,722-740).
gattgaagcccttcagatt

SEQ ID NO: 800977 - DNA, 19 bp, Mus musculus
  siRNA target sequence for Pramel6 (NM_178249.2,726-744).
gaagcccttcagatttact

SEQ ID NO: 800978 - DNA, 19 bp, Mus musculus
  siRNA target sequence for Pramel6 (NM_178249.2,735-753).
cagatttactgcttgtgaa

SEQ ID NO: 800979 - DNA, 19 bp, Mus musculus
  siRNA target sequence for Pramel6 (NM_178249.2,942-960).
cgagtgcctgccaaattgt

SEQ ID NO: 800980 - DNA, 19 bp, Mus musculus
  siRNA target sequence for Pramel6 (NM_178249.2,951-969).
gccaaattgtccgaatatt

SEQ ID NO: 800981 - DNA, 19 bp, Mus musculus
  siRNA target sequence for Pramel6 (NM_178249.2,952-970).
ccaaattgtccgaatattt

SEQ ID NO: 800982 - DNA, 19 bp, Mus musculus
  siRNA target sequence for Pramel6 (NM_178249.2,1091-1109).
gaatgacagaccctcattt

SEQ ID NO: 800983 - DNA, 19 bp, Mus musculus
  siRNA target sequence for Pramel6 (NM_178249.2,1158-1176).
cagcttctgtcataatgat

SEQ ID NO: 800984 - DNA, 19 bp, Mus musculus
  siRNA target sequence for Pramel6 (NM_178249.2,1266-1284).
ctatgaggattacaagata

SEQ ID NO: 800985 - DNA, 19 bp, Mus musculus
  siRNA target sequence for Pramel6 (NM_178249.2,1270-1288).
gaggattacaagatactta

SEQ ID NO: 800986 - DNA, 19 bp, Mus musculus
  siRNA target sequence for Pramel6 (NM_178249.2,1272-1290).
ggattacaagatacttaaa

SEQ ID NO: 800987 - DNA, 19 bp, Mus musculus
  siRNA target sequence for Pramel6 (NM_178249.2,1357-1375).
gtctcttttactacacaaa

SEQ ID NO: 800988 - DNA, 19 bp, Mus musculus
  siRNA target sequence for Pramel6 (NM_178249.2,1372-1390).
caaacctgcttgaagtgtt

SEQ ID NO: 800989 - DNA, 19 bp, Mus musculus
  siRNA target sequence for Pramel6 (NM_178249.2,1388-1406).
gtttacattcctgtcatta

SEQ ID NO: 800990 - DNA, 19 bp, Mus musculus
  siRNA target sequence for Pramel6 (NM_178249.2,1434-1452).
cctttgtcagtgcatttgt

SEQ ID NO: 800991 - DNA, 19 bp, Mus musculus
  siRNA target sequence for Pramel7 (NM_178250.2,76-94).
gatgcggagtgcctaataa

SEQ ID NO: 800992 - DNA, 19 bp, Mus musculus
  siRNA target sequence for Pramel7 (NM_178250.2,86-104).
gcctaataagggaattctt

SEQ ID NO: 800993 - DNA, 19 bp, Mus musculus
  siRNA target sequence for Pramel7 (NM_178250.2,121-139).
gaggccagcactcaaaaaa

SEQ ID NO: 800994 - DNA, 19 bp, Mus musculus
  siRNA target sequence for Pramel7 (NM_178250.2,1263-1281).
gtccaactatgttatagta

SEQ ID NO: 800995 - DNA, 19 bp, Mus musculus
  siRNA target sequence for Pramel7 (NM_178250.2,1265-1283).
ccaactatgttatagtaga

SEQ ID NO: 800996 - DNA, 19 bp, Mus musculus
  siRNA target sequence for Pramel7 (NM_178250.2,1375-1393).
gactgtgataatcgttatt

SEQ ID NO: 800997 - DNA, 19 bp, Mus musculus
  siRNA target sequence for Snx26 (NM_178252.2,336-354).
gcccatttccactatgaga

SEQ ID NO: 800998 - DNA, 19 bp, Mus musculus
  siRNA target sequence for Snx26 (NM_178252.2,337-355).
cccatttccactatgagaa

SEQ ID NO: 800999 - DNA, 19 bp, Mus musculus
  siRNA target sequence for Snx26 (NM_178252.2,338-356).
ccatttccactatgagaat

SEQ ID NO: 801000 - DNA, 19 bp, Mus musculus
  siRNA target sequence for Snx26 (NM_178252.2,513-531).
catctccaccggtgcatat

SEQ ID NO: 801001 - DNA, 19 bp, Mus musculus
  siRNA target sequence for Snx26 (NM_178252.2,527-545).
catatttgaccggagattt

SEQ ID NO: 801002 - DNA, 19 bp, Mus musculus
  siRNA target sequence for Snx26 (NM_178252.2,1268-1286).
gcttcggcatgagtttgat

SEQ ID NO: 801003 - DNA, 19 bp, Mus musculus
  siRNA target sequence for Snx26 (NM_178252.2,1412-1430).
gttcagtgaggctatgtca

SEQ ID NO: 801004 - DNA, 19 bp, Mus musculus
  siRNA target sequence for Snx26 (NM_178252.2,1601-1619).
cctgctacggtctatggaa

SEQ ID NO: 801005 - DNA, 19 bp, Mus musculus
  siRNA target sequence for Snx26 (NM_178252.2,1918-1936).
gagagagggcggagaaaca

SEQ ID NO: 801006 - DNA, 19 bp, Mus musculus
  siRNA target sequence for Snx26 (NM_178252.2,1955-1973).
cagctggaagacattcttt

SEQ ID NO: 801007 - DNA, 19 bp, Mus musculus
  siRNA target sequence for Snx26 (NM_178252.2,2165-2183).
ctccagcagcgatgctttt

SEQ ID NO: 801008 - DNA, 19 bp, Mus musculus
  siRNA target sequence for Snx26 (NM_178252.2,2345-2363).
cgatgatctggatttcagt

SEQ ID NO: 801009 - DNA, 19 bp, Mus musculus
  siRNA target sequence for Snx26 (NM_178252.2,2695-2713).
ctgaggcccagctaagtga

SEQ ID NO: 801010 - DNA, 19 bp, Mus musculus
  siRNA target sequence for Snx26 (NM_178252.2,3290-3308).
gtgtttgccacctttcctt

SEQ ID NO: 801011 - DNA, 19 bp, Mus musculus
  siRNA target sequence for Snx26 (NM_178252.2,3305-3323).
ccttggcgtccccaaacaa

SEQ ID NO: 801012 - DNA, 19 bp, Mus musculus
  siRNA target sequence for Snx26 (NM_178252.2,3411-3429).
gacaggggagagaatctgt

SEQ ID NO: 801013 - DNA, 19 bp, Mus musculus
  siRNA target sequence for Snx26 (NM_178252.2,3415-3433).
ggggagagaatctgtacta

SEQ ID NO: 801014 - DNA, 19 bp, Mus musculus
  siRNA target sequence for Snx26 (NM_178252.2,3503-3521).
gcctcccgacaggcataat

SEQ ID NO: 801015 - DNA, 19 bp, Mus musculus
  siRNA target sequence for Snx26 (NM_178252.2,3516-3534).
cataatgcctcctatggta

SEQ ID NO: 801016 - DNA, 19 bp, Mus musculus
  siRNA target sequence for Snx26 (NM_178252.2,3667-3685).
ctgagcccctctatgtcaa

SEQ ID NO: 801017 - DNA, 19 bp, Mus musculus
  siRNA target sequence for Snx26 (NM_178252.2,3850-3868).
ggggttcccccgaaccttt

SEQ ID NO: 801018 - DNA, 19 bp, Mus musculus
  siRNA target sequence for Snx26 (NM_178252.2,3851-3869).
gggttcccccgaacctttt

SEQ ID NO: 801019 - DNA, 19 bp, Mus musculus
  siRNA target sequence for Snx26 (NM_178252.2,3853-3871).
gttcccccgaaccttttct

SEQ ID NO: 801020 - DNA, 19 bp, Mus musculus
  siRNA target sequence for Snx26 (NM_178252.2,3881-3899).
gccagctccaccatcctat

SEQ ID NO: 801021 - DNA, 19 bp, Mus musculus
  siRNA target sequence for Snx26 (NM_178252.2,3915-3933).
gtccgaggatccttgtaca

SEQ ID NO: 801022 - DNA, 19 bp, Mus musculus
  siRNA target sequence for Snx26 (NM_178252.2,3918-3936).
cgaggatccttgtacagaa

SEQ ID NO: 801023 - DNA, 19 bp, Mus musculus
  siRNA target sequence for Snx26 (NM_178252.2,3987-4005).
cccagctggtccttacatt

SEQ ID NO: 801024 - DNA, 19 bp, Mus musculus
  siRNA target sequence for Snx26 (NM_178252.2,3991-4009).
gctggtccttacattcaga

SEQ ID NO: 801025 - DNA, 19 bp, Mus musculus
  siRNA target sequence for Klhdc1 (NM_178253.2,173-191).
gggctacgtgtctattgaa

SEQ ID NO: 801026 - DNA, 19 bp, Mus musculus
  siRNA target sequence for Klhdc1 (NM_178253.2,175-193).
gctacgtgtctattgaaga

SEQ ID NO: 801027 - DNA, 19 bp, Mus musculus
  siRNA target sequence for Klhdc1 (NM_178253.2,179-197).
cgtgtctattgaagacaat

SEQ ID NO: 801028 - DNA, 19 bp, Mus musculus
  siRNA target sequence for Klhdc1 (NM_178253.2,219-237).
gaaatgtggacctacgata

SEQ ID NO: 801029 - DNA, 19 bp, Mus musculus
  siRNA target sequence for Klhdc1 (NM_178253.2,227-245).
gacctacgatattgatagt

SEQ ID NO: 801030 - DNA, 19 bp, Mus musculus
  siRNA target sequence for Klhdc1 (NM_178253.2,240-258).
gatagtgggctgtggaaaa

SEQ ID NO: 801031 - DNA, 19 bp, Mus musculus
  siRNA target sequence for Klhdc1 (NM_178253.2,244-262).
gtgggctgtggaaaatgca

SEQ ID NO: 801032 - DNA, 19 bp, Mus musculus
  siRNA target sequence for Klhdc1 (NM_178253.2,342-360).
ggctatgacgacaaaggat

SEQ ID NO: 801033 - DNA, 19 bp, Mus musculus
  siRNA target sequence for Klhdc1 (NM_178253.2,343-361).
gctatgacgacaaaggata

SEQ ID NO: 801034 - DNA, 19 bp, Mus musculus
  siRNA target sequence for Klhdc1 (NM_178253.2,364-382).
gcaaccggctttactttgt

SEQ ID NO: 801035 - DNA, 19 bp, Mus musculus
  siRNA target sequence for Klhdc1 (NM_178253.2,368-386).
ccggctttactttgtcaat

SEQ ID NO: 801036 - DNA, 19 bp, Mus musculus
  siRNA target sequence for Klhdc1 (NM_178253.2,369-387).
cggctttactttgtcaatt

SEQ ID NO: 801037 - DNA, 19 bp, Mus musculus
  siRNA target sequence for Klhdc1 (NM_178253.2,391-409).
gaacaagagatggaactta

SEQ ID NO: 801038 - DNA, 19 bp, Mus musculus
  siRNA target sequence for Klhdc1 (NM_178253.2,445-463).
cacccacaccacgtgataa

SEQ ID NO: 801039 - DNA, 19 bp, Mus musculus
  siRNA target sequence for Klhdc1 (NM_178253.2,449-467).
cacaccacgtgataaactt

SEQ ID NO: 801040 - DNA, 19 bp, Mus musculus
  siRNA target sequence for Klhdc1 (NM_178253.2,533-551).
gcttcaagaatgttttgat

SEQ ID NO: 801041 - DNA, 19 bp, Mus musculus
  siRNA target sequence for Klhdc1 (NM_178253.2,723-741).
ggcggacgtgttttgcaaa

SEQ ID NO: 801042 - DNA, 19 bp, Mus musculus
  siRNA target sequence for Klhdc1 (NM_178253.2,745-763).
ggatgaatgacctacacta

SEQ ID NO: 801043 - DNA, 19 bp, Mus musculus
  siRNA target sequence for Klhdc1 (NM_178253.2,746-764).
gatgaatgacctacactat

SEQ ID NO: 801044 - DNA, 19 bp, Mus musculus
  siRNA target sequence for Klhdc1 (NM_178253.2,749-767).
gaatgacctacactatcta

SEQ ID NO: 801045 - DNA, 19 bp, Mus musculus
  siRNA target sequence for Klhdc1 (NM_178253.2,782-800).
ggtctggtctggaaggatt

SEQ ID NO: 801046 - DNA, 19 bp, Mus musculus
  siRNA target sequence for Klhdc1 (NM_178253.2,783-801).
gtctggtctggaaggattt

SEQ ID NO: 801047 - DNA, 19 bp, Mus musculus
  siRNA target sequence for Klhdc1 (NM_178253.2,827-845).
ccggtcatggcacacttta

SEQ ID NO: 801048 - DNA, 19 bp, Mus musculus
  siRNA target sequence for Klhdc1 (NM_178253.2,828-846).
cggtcatggcacactttaa

SEQ ID NO: 801049 - DNA, 19 bp, Mus musculus
  siRNA target sequence for Klhdc1 (NM_178253.2,836-854).
gcacactttaacagcaata

SEQ ID NO: 801050 - DNA, 19 bp, Mus musculus
  siRNA target sequence for Klhdc1 (NM_178253.2,837-855).
cacactttaacagcaataa

SEQ ID NO: 801051 - DNA, 19 bp, Mus musculus
  siRNA target sequence for Klhdc1 (NM_178253.2,839-857).
cactttaacagcaataact

SEQ ID NO: 801052 - DNA, 19 bp, Mus musculus
  siRNA target sequence for Klhdc1 (NM_178253.2,841-859).
ctttaacagcaataactga

SEQ ID NO: 801053 - DNA, 19 bp, Mus musculus
  siRNA target sequence for Klhdc1 (NM_178253.2,850-868).
caataactgatgataagct

SEQ ID NO: 801054 - DNA, 19 bp, Mus musculus
  siRNA target sequence for Klhdc1 (NM_178253.2,856-874).
ctgatgataagcttttcct

SEQ ID NO: 801055 - DNA, 19 bp, Mus musculus
  siRNA target sequence for Klhdc1 (NM_178253.2,880-898).
gtggactaaatgcagataa

SEQ ID NO: 801056 - DNA, 19 bp, Mus musculus
  siRNA target sequence for Klhdc1 (NM_178253.2,882-900).
ggactaaatgcagataata

SEQ ID NO: 801057 - DNA, 19 bp, Mus musculus
  siRNA target sequence for Klhdc1 (NM_178253.2,883-901).
gactaaatgcagataatat

SEQ ID NO: 801058 - DNA, 19 bp, Mus musculus
  siRNA target sequence for Klhdc1 (NM_178253.2,937-955).
caaactgttggaaacaact

SEQ ID NO: 801059 - DNA, 19 bp, Mus musculus
  siRNA target sequence for Klhdc1 (NM_178253.2,943-961).
gttggaaacaacttagaca

SEQ ID NO: 801060 - DNA, 19 bp, Mus musculus
  siRNA target sequence for Klhdc1 (NM_178253.2,1075-1093).
gtaatgatttattgatctt

SEQ ID NO: 801061 - DNA, 19 bp, Mus musculus
  siRNA target sequence for Klhdc1 (NM_178253.2,1133-1151).
ctgcattgggaaaaatgct

SEQ ID NO: 801062 - DNA, 19 bp, Mus musculus
  siRNA target sequence for Klhdc1 (NM_178253.2,1135-1153).
gcattgggaaaaatgctat

SEQ ID NO: 801063 - DNA, 19 bp, Mus musculus
  siRNA target sequence for Klhdc1 (NM_178253.2,1194-1212).
ctgcagcaagtcctcaaaa

SEQ ID NO: 801064 - DNA, 19 bp, Mus musculus
  siRNA target sequence for Klhdc1 (NM_178253.2,1196-1214).
gcagcaagtcctcaaaaaa

SEQ ID NO: 801065 - DNA, 19 bp, Mus musculus
  siRNA target sequence for 4930554N11Rik (NM_178255.3,211-229).
gcgttttgggacttccatt

SEQ ID NO: 801066 - DNA, 19 bp, Mus musculus
  siRNA target sequence for 4930554N11Rik (NM_178255.3,287-305).
cggggaaggcctattcaat

SEQ ID NO: 801067 - DNA, 19 bp, Mus musculus
  siRNA target sequence for 4930554N11Rik (NM_178255.3,376-394).
cctgccactaccactatga

SEQ ID NO: 801068 - DNA, 19 bp, Mus musculus
  siRNA target sequence for 4930554N11Rik (NM_178255.3,412-430).
caagacatgtgcgtgttaa

SEQ ID NO: 801069 - DNA, 19 bp, Mus musculus
  siRNA target sequence for 4930554N11Rik (NM_178255.3,512-530).
ctaccaagggcgagttcaa

SEQ ID NO: 801070 - DNA, 19 bp, Mus musculus
  siRNA target sequence for 4930554N11Rik (NM_178255.3,694-712).
ggcgctaccagctcaactt

SEQ ID NO: 801071 - DNA, 19 bp, Mus musculus
  siRNA target sequence for 4930554N11Rik (NM_178255.3,737-755).
ggagcagggtgctatggta

SEQ ID NO: 801072 - DNA, 19 bp, Mus musculus
  siRNA target sequence for 4930554N11Rik (NM_178255.3,832-850).
ccgtgcagtacccaatagt

SEQ ID NO: 801073 - DNA, 19 bp, Mus musculus
  siRNA target sequence for 4930554N11Rik (NM_178255.3,917-935).
ccaccgcctgcatcgttat

SEQ ID NO: 801074 - DNA, 19 bp, Mus musculus
  siRNA target sequence for 4930554N11Rik (NM_178255.3,920-938).
ccgcctgcatcgttatgat

SEQ ID NO: 801075 - DNA, 19 bp, Mus musculus
  siRNA target sequence for 4930554N11Rik (NM_178255.3,922-940).
gcctgcatcgttatgatgt

SEQ ID NO: 801076 - DNA, 19 bp, Mus musculus
  siRNA target sequence for 4930554N11Rik (NM_178255.3,1129-1147).
gtgcccgctaccctatagt

SEQ ID NO: 801077 - DNA, 19 bp, Mus musculus
  siRNA target sequence for 4930554N11Rik (NM_178255.3,1132-1150).
cccgctaccctatagttca

SEQ ID NO: 801078 - DNA, 19 bp, Mus musculus
  siRNA target sequence for Kiss1 (NM_178260.2,94-112).
gggagccgctggcaaaagt

SEQ ID NO: 801079 - DNA, 19 bp, Mus musculus
  siRNA target sequence for Kiss1 (NM_178260.2,154-172).
gaccccaggaactcgttaa

SEQ ID NO: 801080 - DNA, 19 bp, Mus musculus
  siRNA target sequence for D830050J10Rik (NM_178264.2,334-352).
cgttggttgcggtcacatt

SEQ ID NO: 801081 - DNA, 19 bp, Mus musculus
  siRNA target sequence for D830050J10Rik (NM_178264.2,462-480).
gagggcctgcggagaacaa

SEQ ID NO: 801082 - DNA, 19 bp, Mus musculus
  siRNA target sequence for Caps2 (NM_178278.2,280-298).
ggaggataatttttcacaa

SEQ ID NO: 801083 - DNA, 19 bp, Mus musculus
  siRNA target sequence for Caps2 (NM_178278.2,409-427).
ggaacaggacgtaatacct

SEQ ID NO: 801084 - DNA, 19 bp, Mus musculus
  siRNA target sequence for Caps2 (NM_178278.2,438-456).
cagcgccaacaggcaaata

SEQ ID NO: 801085 - DNA, 19 bp, Mus musculus
  siRNA target sequence for Caps2 (NM_178278.2,440-458).
gcgccaacaggcaaataca

SEQ ID NO: 801086 - DNA, 19 bp, Mus musculus
  siRNA target sequence for Caps2 (NM_178278.2,449-467).
ggcaaatacaggctaaagt

SEQ ID NO: 801087 - DNA, 19 bp, Mus musculus
  siRNA target sequence for Caps2 (NM_178278.2,450-468).
gcaaatacaggctaaagta

SEQ ID NO: 801088 - DNA, 19 bp, Mus musculus
  siRNA target sequence for Caps2 (NM_178278.2,469-487).
ccagcagtacgcaagtgaa

SEQ ID NO: 801089 - DNA, 19 bp, Mus musculus
  siRNA target sequence for Caps2 (NM_178278.2,470-488).
cagcagtacgcaagtgaaa

SEQ ID NO: 801090 - DNA, 19 bp, Mus musculus
  siRNA target sequence for Caps2 (NM_178278.2,475-493).
gtacgcaagtgaaatgaaa

SEQ ID NO: 801091 - DNA, 19 bp, Mus musculus
  siRNA target sequence for Caps2 (NM_178278.2,494-512).
gacggctacaagcagtata

SEQ ID NO: 801092 - DNA, 19 bp, Mus musculus
  siRNA target sequence for Caps2 (NM_178278.2,496-514).
cggctacaagcagtatatt

SEQ ID NO: 801093 - DNA, 19 bp, Mus musculus
  siRNA target sequence for Caps2 (NM_178278.2,590-608).
gacctcatgactttggata

SEQ ID NO: 801094 - DNA, 19 bp, Mus musculus
  siRNA target sequence for Caps2 (NM_178278.2,658-676).
gagcatcacgaggaaatca

SEQ ID NO: 801095 - DNA, 19 bp, Mus musculus
  siRNA target sequence for Caps2 (NM_178278.2,660-678).
gcatcacgaggaaatcaga

SEQ ID NO: 801096 - DNA, 19 bp, Mus musculus
  siRNA target sequence for Caps2 (NM_178278.2,714-732).
ccgttgcagagcagatgat

SEQ ID NO: 801097 - DNA, 19 bp, Mus musculus
  siRNA target sequence for Caps2 (NM_178278.2,852-870).
gaactctgcatgaaacgaa

SEQ ID NO: 801098 - DNA, 19 bp, Mus musculus
  siRNA target sequence for Caps2 (NM_178278.2,956-974).
gatgcctgccgggaactaa

SEQ ID NO: 801099 - DNA, 19 bp, Mus musculus
  siRNA target sequence for Caps2 (NM_178278.2,1022-1040).
cggatgttcgggaaaaaca

SEQ ID NO: 801100 - DNA, 19 bp, Mus musculus
  siRNA target sequence for Caps2 (NM_178278.2,1030-1048).
cgggaaaaacagaacaagt

SEQ ID NO: 801101 - DNA, 19 bp, Mus musculus
  siRNA target sequence for Caps2 (NM_178278.2,1117-1135).
gcttggtgacgtctatact

SEQ ID NO: 801102 - DNA, 19 bp, Mus musculus
  siRNA target sequence for Caps2 (NM_178278.2,1136-1154).
ggtgcaactttgacatttt

SEQ ID NO: 801103 - DNA, 19 bp, Mus musculus
  siRNA target sequence for Caps2 (NM_178278.2,1173-1191).
gccttccaaagaccataaa

SEQ ID NO: 801104 - DNA, 19 bp, Mus musculus
  siRNA target sequence for Caps2 (NM_178278.2,1174-1192).
ccttccaaagaccataaaa

SEQ ID NO: 801105 - DNA, 19 bp, Mus musculus
  siRNA target sequence for Caps2 (NM_178278.2,1200-1218).
cattgcttagacttcgaat

SEQ ID NO: 801106 - DNA, 19 bp, Mus musculus
  siRNA target sequence for Caps2 (NM_178278.2,1204-1222).
gcttagacttcgaattaca

SEQ ID NO: 801107 - DNA, 19 bp, Mus musculus
  siRNA target sequence for Caps2 (NM_178278.2,1205-1223).
cttagacttcgaattacaa

SEQ ID NO: 801108 - DNA, 19 bp, Mus musculus
  siRNA target sequence for Caps2 (NM_178278.2,1209-1227).
gacttcgaattacaaatat

SEQ ID NO: 801109 - DNA, 19 bp, Mus musculus
  siRNA target sequence for Caps2 (NM_178278.2,1296-1314).
cggaggctcatgatcagtt

SEQ ID NO: 801110 - DNA, 19 bp, Mus musculus
  siRNA target sequence for Caps2 (NM_178278.2,1322-1340).
caggccattcaggataaat

SEQ ID NO: 801111 - DNA, 19 bp, Mus musculus
  siRNA target sequence for Caps2 (NM_178278.2,1327-1345).
cattcaggataaattgaaa

SEQ ID NO: 801112 - DNA, 19 bp, Mus musculus
  siRNA target sequence for Caps2 (NM_178278.2,1357-1375).
caagaagggtgctcgtatt

SEQ ID NO: 801113 - DNA, 19 bp, Mus musculus
  siRNA target sequence for Caps2 (NM_178278.2,1363-1381).
gggtgctcgtattttgact

SEQ ID NO: 801114 - DNA, 19 bp, Mus musculus
  siRNA target sequence for Caps2 (NM_178278.2,1389-1407).
gaagatacttccaaggttt

SEQ ID NO: 801115 - DNA, 19 bp, Mus musculus
  siRNA target sequence for Caps2 (NM_178278.2,1506-1524).
ggctaattctgcaaggata

SEQ ID NO: 801116 - DNA, 19 bp, Mus musculus
  siRNA target sequence for Caps2 (NM_178278.2,1533-1551).
gcaagaacaaggttgacta

SEQ ID NO: 801117 - DNA, 19 bp, Mus musculus
  siRNA target sequence for Caps2 (NM_178278.2,1644-1662).
ccggcattgtgtctgtaat

SEQ ID NO: 801118 - DNA, 19 bp, Mus musculus
  siRNA target sequence for Caps2 (NM_178278.2,1645-1663).
cggcattgtgtctgtaata

SEQ ID NO: 801119 - DNA, 19 bp, Mus musculus
  siRNA target sequence for Caps2 (NM_178278.2,1654-1672).
gtctgtaatagacataaga

SEQ ID NO: 801120 - DNA, 19 bp, Mus musculus
  siRNA target sequence for Caps2 (NM_178278.2,1656-1674).
ctgtaatagacataagaaa

SEQ ID NO: 801121 - DNA, 19 bp, Mus musculus
  siRNA target sequence for Caps2 (NM_178278.2,1658-1676).
gtaatagacataagaaagt

SEQ ID NO: 801122 - DNA, 19 bp, Mus musculus
  siRNA target sequence for Caps2 (NM_178278.2,1724-1742).
gaggaggaaatcaaatcat

SEQ ID NO: 801123 - DNA, 19 bp, Mus musculus
  siRNA target sequence for Caps2 (NM_178278.2,1726-1744).
ggaggaaatcaaatcatct

SEQ ID NO: 801124 - DNA, 19 bp, Mus musculus
  siRNA target sequence for Caps2 (NM_178278.2,1743-1761).
ctttcctagagacgttaaa

SEQ ID NO: 801125 - DNA, 19 bp, Mus musculus
  siRNA target sequence for Caps2 (NM_178278.2,1770-1788).
gcagcaagtgcgatgaagt

SEQ ID NO: 801126 - DNA, 19 bp, Mus musculus
  siRNA target sequence for Caps2 (NM_178278.2,1771-1789).
cagcaagtgcgatgaagtt

SEQ ID NO: 801127 - DNA, 19 bp, Mus musculus
  siRNA target sequence for Caps2 (NM_178278.2,1796-1814).
ggagaattcgaagattact

SEQ ID NO: 801128 - DNA, 19 bp, Mus musculus
  siRNA target sequence for Caps2 (NM_178278.2,1813-1831).
ctatgaaggcctaagtata

SEQ ID NO: 801129 - DNA, 19 bp, Mus musculus
  siRNA target sequence for Caps2 (NM_178278.2,1839-1857).
caggcgatgaagactttgt

SEQ ID NO: 801130 - DNA, 19 bp, Mus musculus
  siRNA target sequence for C2d (NM_178308.1,91-109).
cagaacttacggagcaata

SEQ ID NO: 801131 - DNA, 19 bp, Mus musculus
  siRNA target sequence for C2d (NM_178308.1,93-111).
gaacttacggagcaatact

SEQ ID NO: 801132 - DNA, 19 bp, Mus musculus
  siRNA target sequence for C2d (NM_178308.1,100-118).
cggagcaatacttactcta

SEQ ID NO: 801133 - DNA, 19 bp, Mus musculus
  siRNA target sequence for C2d (NM_178308.1,101-119).
ggagcaatacttactctaa

SEQ ID NO: 801134 - DNA, 19 bp, Mus musculus
  siRNA target sequence for Cdc23 (NM_178347.2,93-111).
cactgtcgcggatttttca

SEQ ID NO: 801135 - DNA, 19 bp, Mus musculus
  siRNA target sequence for Cdc23 (NM_178347.2,95-113).
ctgtcgcggatttttcaga

SEQ ID NO: 801136 - DNA, 19 bp, Mus musculus
  siRNA target sequence for Cdc23 (NM_178347.2,172-190).
ctgctgcatagcagcaaat

SEQ ID NO: 801137 - DNA, 19 bp, Mus musculus
  siRNA target sequence for Cdc23 (NM_178347.2,303-321).
ggcctactttgatgttaaa

SEQ ID NO: 801138 - DNA, 19 bp, Mus musculus
  siRNA target sequence for Cdc23 (NM_178347.2,351-369).
cggctgcaatagcaagaaa

SEQ ID NO: 801139 - DNA, 19 bp, Mus musculus
  siRNA target sequence for Cdc23 (NM_178347.2,362-380).
gcaagaaagcctatttcct

SEQ ID NO: 801140 - DNA, 19 bp, Mus musculus
  siRNA target sequence for Cdc23 (NM_178347.2,370-388).
gcctatttcctgtacatgt

SEQ ID NO: 801141 - DNA, 19 bp, Mus musculus
  siRNA target sequence for Cdc23 (NM_178347.2,371-389).
cctatttcctgtacatgta

SEQ ID NO: 801142 - DNA, 19 bp, Mus musculus
  siRNA target sequence for Cdc23 (NM_178347.2,421-439).
gatgacgaaacagttgata

SEQ ID NO: 801143 - DNA, 19 bp, Mus musculus
  siRNA target sequence for Cdc23 (NM_178347.2,516-534).
ccaggctcggggacttgat

SEQ ID NO: 801144 - DNA, 19 bp, Mus musculus
  siRNA target sequence for Cdc23 (NM_178347.2,521-539).
ctcggggacttgatggatt

SEQ ID NO: 801145 - DNA, 19 bp, Mus musculus
  siRNA target sequence for Cdc23 (NM_178347.2,570-588).
gaaactggacttagtgaaa

SEQ ID NO: 801146 - DNA, 19 bp, Mus musculus
  siRNA target sequence for Cdc23 (NM_178347.2,603-621).
gtttgtggaggctactcat

SEQ ID NO: 801147 - DNA, 19 bp, Mus musculus
  siRNA target sequence for Cdc23 (NM_178347.2,607-625).
gtggaggctactcatgttt

SEQ ID NO: 801148 - DNA, 19 bp, Mus musculus
  siRNA target sequence for Cdc23 (NM_178347.2,704-722).
ctgacacctggatgaaaga

SEQ ID NO: 801149 - DNA, 19 bp, Mus musculus
  siRNA target sequence for Cdc23 (NM_178347.2,706-724).
gacacctggatgaaagagt

SEQ ID NO: 801150 - DNA, 19 bp, Mus musculus
  siRNA target sequence for Cdc23 (NM_178347.2,729-747).
cttggctcacatatacaca

SEQ ID NO: 801151 - DNA, 19 bp, Mus musculus
  siRNA target sequence for Cdc23 (NM_178347.2,780-798).
gtatcagcatctcattgat

SEQ ID NO: 801152 - DNA, 19 bp, Mus musculus
  siRNA target sequence for Cdc23 (NM_178347.2,809-827).
ccaagagctcgtacattgt

SEQ ID NO: 801153 - DNA, 19 bp, Mus musculus
  siRNA target sequence for Cdc23 (NM_178347.2,810-828).
caagagctcgtacattgtt

SEQ ID NO: 801154 - DNA, 19 bp, Mus musculus
  siRNA target sequence for Cdc23 (NM_178347.2,838-856).
gcagttgcctatcacaata

SEQ ID NO: 801155 - DNA, 19 bp, Mus musculus
  siRNA target sequence for Cdc23 (NM_178347.2,867-885).
cgacaaagccctttctatt

SEQ ID NO: 801156 - DNA, 19 bp, Mus musculus
  siRNA target sequence for Cdc23 (NM_178347.2,868-886).
gacaaagccctttctattt

SEQ ID NO: 801157 - DNA, 19 bp, Mus musculus
  siRNA target sequence for Cdc23 (NM_178347.2,911-929).
cttacaggattgaaaatat

SEQ ID NO: 801158 - DNA, 19 bp, Mus musculus
  siRNA target sequence for Cdc23 (NM_178347.2,922-940).
gaaaatatggacacattct

SEQ ID NO: 801159 - DNA, 19 bp, Mus musculus
  siRNA target sequence for Cdc23 (NM_178347.2,988-1006).
gcgcataacctctgtgaaa

SEQ ID NO: 801160 - DNA, 19 bp, Mus musculus
  siRNA target sequence for Cdc23 (NM_178347.2,997-1015).
ctctgtgaaattgataaat

SEQ ID NO: 801161 - DNA, 19 bp, Mus musculus
  siRNA target sequence for Cdc23 (NM_178347.2,1009-1027).
gataaataccgagtagaaa

SEQ ID NO: 801162 - DNA, 19 bp, Mus musculus
  siRNA target sequence for Cdc23 (NM_178347.2,1032-1050).
ctgtgtaattggcaattat

SEQ ID NO: 801163 - DNA, 19 bp, Mus musculus
  siRNA target sequence for Cdc23 (NM_178347.2,1095-1113).
gagagccctaaagttgaat

SEQ ID NO: 801164 - DNA, 19 bp, Mus musculus
  siRNA target sequence for Cdc23 (NM_178347.2,1167-1185).
gaacacgtctgcagctatt

SEQ ID NO: 801165 - DNA, 19 bp, Mus musculus
  siRNA target sequence for Cdc23 (NM_178347.2,1242-1260).
ccttgggcagacttacgaa

SEQ ID NO: 801166 - DNA, 19 bp, Mus musculus
  siRNA target sequence for Cdc23 (NM_178347.2,1243-1261).
cttgggcagacttacgaaa

SEQ ID NO: 801167 - DNA, 19 bp, Mus musculus
  siRNA target sequence for Cdc23 (NM_178347.2,1247-1265).
ggcagacttacgaaatcct

SEQ ID NO: 801168 - DNA, 19 bp, Mus musculus
  siRNA target sequence for Cdc23 (NM_178347.2,1248-1266).
gcagacttacgaaatcctt

SEQ ID NO: 801169 - DNA, 19 bp, Mus musculus
  siRNA target sequence for Cdc23 (NM_178347.2,1251-1269).
gacttacgaaatccttaaa

SEQ ID NO: 801170 - DNA, 19 bp, Mus musculus
  siRNA target sequence for Cdc23 (NM_178347.2,1253-1271).
cttacgaaatccttaaaat

SEQ ID NO: 801171 - DNA, 19 bp, Mus musculus
  siRNA target sequence for Cdc23 (NM_178347.2,1311-1329).
gcttcgtcccaatgattct

SEQ ID NO: 801172 - DNA, 19 bp, Mus musculus
  siRNA target sequence for Cdc23 (NM_178347.2,1338-1356).
ggttgccttaggagaatgt

SEQ ID NO: 801173 - DNA, 19 bp, Mus musculus
  siRNA target sequence for Cdc23 (NM_178347.2,1380-1398).
ggaagccaaaaagtgttat

SEQ ID NO: 801174 - DNA, 19 bp, Mus musculus
  siRNA target sequence for Cdc23 (NM_178347.2,1392-1410).
gtgttattggagagcatat

SEQ ID NO: 801175 - DNA, 19 bp, Mus musculus
  siRNA target sequence for Cdc23 (NM_178347.2,1414-1432).
gtgggagacgtggagaaaa

SEQ ID NO: 801176 - DNA, 19 bp, Mus musculus
  siRNA target sequence for Cdc23 (NM_178347.2,1490-1508).
cccagtgttacatcaaata

SEQ ID NO: 801177 - DNA, 19 bp, Mus musculus
  siRNA target sequence for Cdc23 (NM_178347.2,1492-1510).
cagtgttacatcaaataca

SEQ ID NO: 801178 - DNA, 19 bp, Mus musculus
  siRNA target sequence for Cdc23 (NM_178347.2,1571-1589).
gatacctggcccagtacta

SEQ ID NO: 801179 - DNA, 19 bp, Mus musculus
  siRNA target sequence for Cdc23 (NM_178347.2,1576-1594).
ctggcccagtactatttta

SEQ ID NO: 801180 - DNA, 19 bp, Mus musculus
  siRNA target sequence for Cdc23 (NM_178347.2,1579-1597).
gcccagtactattttaagt

SEQ ID NO: 801181 - DNA, 19 bp, Mus musculus
  siRNA target sequence for Cdc23 (NM_178347.2,1608-1626).
ggatgaagcttcaacttgt

SEQ ID NO: 801182 - DNA, 19 bp, Mus musculus
  siRNA target sequence for Tieg3 (NM_178357.1,1425-1443).
ccggaagacctacttcaaa

SEQ ID NO: 801183 - DNA, 19 bp, Mus musculus
  siRNA target sequence for Tieg3 (NM_178357.1,1428-1446).
gaagacctacttcaaaagt

SEQ ID NO: 801184 - DNA, 19 bp, Mus musculus
  siRNA target sequence for Lhfp (NM_178358.3,330-348).
gaacagccttactatggta

SEQ ID NO: 801185 - DNA, 19 bp, Mus musculus
  siRNA target sequence for Lhfp (NM_178358.3,361-379).
gccttcctgtccctagtta

SEQ ID NO: 801186 - DNA, 19 bp, Mus musculus
  siRNA target sequence for Lhfp (NM_178358.3,700-718).
gtaggagggctgctgataa

SEQ ID NO: 801187 - DNA, 19 bp, Mus musculus
  siRNA target sequence for Lhfp (NM_178358.3,724-742).
ggctgtgcattatatcctt

SEQ ID NO: 801188 - DNA, 19 bp, Mus musculus
  siRNA target sequence for Lhfp (NM_178358.3,753-771).
cagcccggaggtaatgcaa

SEQ ID NO: 801189 - DNA, 19 bp, Mus musculus
  siRNA target sequence for Lhfp (NM_178358.3,777-795).
cgggaatgtctccaatcaa

SEQ ID NO: 801190 - DNA, 19 bp, Mus musculus
  siRNA target sequence for Lhfp (NM_178358.3,779-797).
ggaatgtctccaatcaatt

SEQ ID NO: 801191 - DNA, 19 bp, Mus musculus
  siRNA target sequence for Lhfp (NM_178358.3,780-798).
gaatgtctccaatcaattt

SEQ ID NO: 801192 - DNA, 19 bp, Mus musculus
  siRNA target sequence for Lhfp (NM_178358.3,815-833).
gactcggctgggcctatta

SEQ ID NO: 801193 - DNA, 19 bp, Mus musculus
  siRNA target sequence for Lhfp (NM_178358.3,925-943).
gagaacatcatgagaaata

SEQ ID NO: 801194 - DNA, 19 bp, Mus musculus
  siRNA target sequence for Lhfp (NM_178358.3,930-948).
catcatgagaaataccaat

SEQ ID NO: 801195 - DNA, 19 bp, Mus musculus
  siRNA target sequence for Rnut1 (NM_178374.2,54-72).
gccctggctagtagctttt

SEQ ID NO: 801196 - DNA, 19 bp, Mus musculus
  siRNA target sequence for Rnut1 (NM_178374.2,56-74).
cctggctagtagcttttct

SEQ ID NO: 801197 - DNA, 19 bp, Mus musculus
  siRNA target sequence for Rnut1 (NM_178374.2,68-86).
cttttctgtgtctcaagaa

SEQ ID NO: 801198 - DNA, 19 bp, Mus musculus
  siRNA target sequence for Rnut1 (NM_178374.2,108-126).
cacccacgcctgtgtcaat

SEQ ID NO: 801199 - DNA, 19 bp, Mus musculus
  siRNA target sequence for Rnut1 (NM_178374.2,111-129).
ccacgcctgtgtcaataca

SEQ ID NO: 801200 - DNA, 19 bp, Mus musculus
  siRNA target sequence for Rnut1 (NM_178374.2,114-132).
cgcctgtgtcaatacaagt

SEQ ID NO: 801201 - DNA, 19 bp, Mus musculus
  siRNA target sequence for Rnut1 (NM_178374.2,123-141).
caatacaagtccaagtaca

SEQ ID NO: 801202 - DNA, 19 bp, Mus musculus
  siRNA target sequence for Rnut1 (NM_178374.2,193-211).
ccaagcggttggattatgt

SEQ ID NO: 801203 - DNA, 19 bp, Mus musculus
  siRNA target sequence for Rnut1 (NM_178374.2,306-324).
cctagcaagaagttaccaa

SEQ ID NO: 801204 - DNA, 19 bp, Mus musculus
  siRNA target sequence for Rnut1 (NM_178374.2,307-325).
ctagcaagaagttaccaaa

SEQ ID NO: 801205 - DNA, 19 bp, Mus musculus
  siRNA target sequence for Rnut1 (NM_178374.2,418-436).
ggaaaagagcccttatcgt

SEQ ID NO: 801206 - DNA, 19 bp, Mus musculus
  siRNA target sequence for Rnut1 (NM_178374.2,440-458).
ctccaggggttcaacaagt

SEQ ID NO: 801207 - DNA, 19 bp, Mus musculus
  siRNA target sequence for Rnut1 (NM_178374.2,573-591).
gaggtgaatcagacatact

SEQ ID NO: 801208 - DNA, 19 bp, Mus musculus
  siRNA target sequence for Rnut1 (NM_178374.2,575-593).
ggtgaatcagacatactat

SEQ ID NO: 801209 - DNA, 19 bp, Mus musculus
  siRNA target sequence for Rnut1 (NM_178374.2,584-602).
gacatactatgttttggat

SEQ ID NO: 801210 - DNA, 19 bp, Mus musculus
  siRNA target sequence for Rnut1 (NM_178374.2,616-634).
ggggacatcctttttatga

SEQ ID NO: 801211 - DNA, 19 bp, Mus musculus
  siRNA target sequence for Rnut1 (NM_178374.2,659-677).
ctggatgcattcaaagtta

SEQ ID NO: 801212 - DNA, 19 bp, Mus musculus
  siRNA target sequence for Rnut1 (NM_178374.2,813-831).
ctcttctaccataaacaga

SEQ ID NO: 801213 - DNA, 19 bp, Mus musculus
  siRNA target sequence for Rnut1 (NM_178374.2,876-894).
ccctacatggtgtcagata

SEQ ID NO: 801214 - DNA, 19 bp, Mus musculus
  siRNA target sequence for Rnut1 (NM_178374.2,878-896).
ctacatggtgtcagatatt

SEQ ID NO: 801215 - DNA, 19 bp, Mus musculus
  siRNA target sequence for Rnut1 (NM_178374.2,982-1000).
ggagccaggaagacacaaa

SEQ ID NO: 801216 - DNA, 19 bp, Mus musculus
  siRNA target sequence for Rnut1 (NM_178374.2,1052-1070).
cctgtctactcccaagtta

SEQ ID NO: 801217 - DNA, 19 bp, Mus musculus
  siRNA target sequence for Rnut1 (NM_178374.2,1055-1073).
gtctactcccaagttaaga

SEQ ID NO: 801218 - DNA, 19 bp, Mus musculus
  siRNA target sequence for 4921517A06Rik (NM_178375.2,208-226).
gtgtttcagcgcctacaaa

SEQ ID NO: 801219 - DNA, 19 bp, Mus musculus
  siRNA target sequence for 4921517A06Rik (NM_178375.2,210-228).
gtttcagcgcctacaaaaa

SEQ ID NO: 801220 - DNA, 19 bp, Mus musculus
  siRNA target sequence for 4921517A06Rik (NM_178375.2,297-315).
cctctttccgcgaggatat

SEQ ID NO: 801221 - DNA, 19 bp, Mus musculus
  siRNA target sequence for 4921517A06Rik (NM_178375.2,300-318).
ctttccgcgaggatatcct

SEQ ID NO: 801222 - DNA, 19 bp, Mus musculus
  siRNA target sequence for 4921517A06Rik (NM_178375.2,304-322).
ccgcgaggatatcctatat

SEQ ID NO: 801223 - DNA, 19 bp, Mus musculus
  siRNA target sequence for 4921517A06Rik (NM_178375.2,306-324).
gcgaggatatcctatatgt

SEQ ID NO: 801224 - DNA, 19 bp, Mus musculus
  siRNA target sequence for 4921517A06Rik (NM_178375.2,342-360).
gtattcggacgcagtcaaa

SEQ ID NO: 801225 - DNA, 19 bp, Mus musculus
  siRNA target sequence for 4921517A06Rik (NM_178375.2,396-414).
cgtatctgctgctgcaata

SEQ ID NO: 801226 - DNA, 19 bp, Mus musculus
  siRNA target sequence for 4921517A06Rik (NM_178375.2,415-433).
caacgagactctagataga

SEQ ID NO: 801227 - DNA, 19 bp, Mus musculus
  siRNA target sequence for 4921517A06Rik (NM_178375.2,423-441).
ctctagatagactgtttat

SEQ ID NO: 801228 - DNA, 19 bp, Mus musculus
  siRNA target sequence for 4921517A06Rik (NM_178375.2,425-443).
ctagatagactgtttatca

SEQ ID NO: 801229 - DNA, 19 bp, Mus musculus
  siRNA target sequence for 4921517A06Rik (NM_178375.2,451-469).
gaatacccagcacattcat

SEQ ID NO: 801230 - DNA, 19 bp, Mus musculus
  siRNA target sequence for 4921517A06Rik (NM_178375.2,586-604).
ctcagtagagccgtcattt

SEQ ID NO: 801231 - DNA, 19 bp, Mus musculus
  siRNA target sequence for 4921517A06Rik (NM_178375.2,597-615).
cgtcattttgcctcgataa

SEQ ID NO: 801232 - DNA, 19 bp, Mus musculus
  siRNA target sequence for 4921517A06Rik (NM_178375.2,600-618).
cattttgcctcgataagat

SEQ ID NO: 801233 - DNA, 19 bp, Mus musculus
  siRNA target sequence for 4921517A06Rik (NM_178375.2,606-624).
gcctcgataagatacacaa

SEQ ID NO: 801234 - DNA, 19 bp, Mus musculus
  siRNA target sequence for 4921517A06Rik (NM_178375.2,647-665).
ggcatcagtccttctgata

SEQ ID NO: 801235 - DNA, 19 bp, Mus musculus
  siRNA target sequence for 4921517A06Rik (NM_178375.2,648-666).
gcatcagtccttctgatat

SEQ ID NO: 801236 - DNA, 19 bp, Mus musculus
  siRNA target sequence for 4921517A06Rik (NM_178375.2,938-956).
gtggccaagatgctcaata

SEQ ID NO: 801237 - DNA, 19 bp, Mus musculus
  siRNA target sequence for 4921517A06Rik (NM_178375.2,946-964).
gatgctcaatatctttaca

SEQ ID NO: 801238 - DNA, 19 bp, Mus musculus
  siRNA target sequence for 4921517A06Rik (NM_178375.2,1018-1036).
ccctcaccgagcgatctta

SEQ ID NO: 801239 - DNA, 19 bp, Mus musculus
  siRNA target sequence for 4921517A06Rik (NM_178375.2,1020-1038).
ctcaccgagcgatcttaca

SEQ ID NO: 801240 - DNA, 19 bp, Mus musculus
  siRNA target sequence for 4921517A06Rik (NM_178375.2,1029-1047).
cgatcttacaggagatctt

SEQ ID NO: 801241 - DNA, 19 bp, Mus musculus
  siRNA target sequence for 4921517A06Rik (NM_178375.2,1105-1123).
gttacaccagagttcagta

SEQ ID NO: 801242 - DNA, 19 bp, Mus musculus
  siRNA target sequence for 4921517A06Rik (NM_178375.2,1213-1231).
gtcccaagtcctactagat

SEQ ID NO: 801243 - DNA, 19 bp, Mus musculus
  siRNA target sequence for 4921517A06Rik (NM_178375.2,1215-1233).
cccaagtcctactagatga

SEQ ID NO: 801244 - DNA, 19 bp, Mus musculus
  siRNA target sequence for 4921517A06Rik (NM_178375.2,1327-1345).
catggacagcctagacata

SEQ ID NO: 801245 - DNA, 19 bp, Mus musculus
  siRNA target sequence for 4921517A06Rik (NM_178375.2,1403-1421).
cttcactttgtggattaca

SEQ ID NO: 801246 - DNA, 19 bp, Mus musculus
  siRNA target sequence for 4921517A06Rik (NM_178375.2,1447-1465).
gaagagcttgcccacaaat

SEQ ID NO: 801247 - DNA, 19 bp, Mus musculus
  siRNA target sequence for 4921517A06Rik (NM_178375.2,1510-1528).
gcccaagaagccttttaga

SEQ ID NO: 801248 - DNA, 19 bp, Mus musculus
  siRNA target sequence for 4921517A06Rik (NM_178375.2,1513-1531).
caagaagccttttagaatt

SEQ ID NO: 801249 - DNA, 19 bp, Mus musculus
  siRNA target sequence for 4921517A06Rik (NM_178375.2,1668-1686).
ctgaactagcctacaagtt

SEQ ID NO: 801250 - DNA, 19 bp, Mus musculus
  siRNA target sequence for 4921517A06Rik (NM_178375.2,1670-1688).
gaactagcctacaagttgt

SEQ ID NO: 801251 - DNA, 19 bp, Mus musculus
  siRNA target sequence for 4921517A06Rik (NM_178375.2,1677-1695).
cctacaagttgtgtcataa

SEQ ID NO: 801252 - DNA, 19 bp, Mus musculus
  siRNA target sequence for 4921517A06Rik (NM_178375.2,1703-1721).
gaggtggtacagaattcca

SEQ ID NO: 801253 - DNA, 19 bp, Mus musculus
  siRNA target sequence for 4921517A06Rik (NM_178375.2,1902-1920).
gctgccggtggcagaagaa

SEQ ID NO: 801254 - DNA, 19 bp, Mus musculus
  siRNA target sequence for 4921517A06Rik (NM_178375.2,1905-1923).
gccggtggcagaagaaata

SEQ ID NO: 801255 - DNA, 19 bp, Mus musculus
  siRNA target sequence for 4921517A06Rik (NM_178375.2,2086-2104).
ctccaccctgcgcaagatt

SEQ ID NO: 801256 - DNA, 19 bp, Mus musculus
  siRNA target sequence for 4921517A06Rik (NM_178375.2,2088-2106).
ccaccctgcgcaagattgt

SEQ ID NO: 801257 - DNA, 19 bp, Mus musculus
  siRNA target sequence for 2310003A05Rik (NM_178377.3,67-85).
gtgccgctgataaatgcaa

SEQ ID NO: 801258 - DNA, 19 bp, Mus musculus
  siRNA target sequence for 2310003A05Rik (NM_178377.3,69-87).
gccgctgataaatgcaata

SEQ ID NO: 801259 - DNA, 19 bp, Mus musculus
  siRNA target sequence for 2310003A05Rik (NM_178377.3,71-89).
cgctgataaatgcaataga

SEQ ID NO: 801260 - DNA, 19 bp, Mus musculus
  siRNA target sequence for 2310003A05Rik (NM_178377.3,116-134).
gccggattcttcaaaagct

SEQ ID NO: 801261 - DNA, 19 bp, Mus musculus
  siRNA target sequence for 2310003A05Rik (NM_178377.3,144-162).
ggccgagagcagtttcagt

SEQ ID NO: 801262 - DNA, 19 bp, Mus musculus
  siRNA target sequence for 2310003A05Rik (NM_178377.3,222-240).
ggttctggagacaatatca

SEQ ID NO: 801263 - DNA, 19 bp, Mus musculus
  siRNA target sequence for 2310003A05Rik (NM_178377.3,250-268).
gaacaggcagtgtatcaca

SEQ ID NO: 801264 - DNA, 19 bp, Mus musculus
  siRNA target sequence for 2310003A05Rik (NM_178377.3,294-312).
gcaactagagatgattcat

SEQ ID NO: 801265 - DNA, 19 bp, Mus musculus
  siRNA target sequence for 2310003A05Rik (NM_178377.3,298-316).
ctagagatgattcatctta

SEQ ID NO: 801266 - DNA, 19 bp, Mus musculus
  siRNA target sequence for 2310003A05Rik (NM_178377.3,428-446).
ggcagcttaacctgcaaat

SEQ ID NO: 801267 - DNA, 19 bp, Mus musculus
  siRNA target sequence for 2310003A05Rik (NM_178377.3,538-556).
ctcgtggaattcaatcaca

SEQ ID NO: 801268 - DNA, 19 bp, Mus musculus
  siRNA target sequence for 2310003A05Rik (NM_178377.3,562-580).
ctgttcgatttctacaaca

SEQ ID NO: 801269 - DNA, 19 bp, Mus musculus
  siRNA target sequence for 2400003L07Rik (NM_178378.2,298-316).
ctattctcggctacatcat

SEQ ID NO: 801270 - DNA, 19 bp, Mus musculus
  siRNA target sequence for 2400003L07Rik (NM_178378.2,365-383).
cgaaggagcatctatgatt

SEQ ID NO: 801271 - DNA, 19 bp, Mus musculus
  siRNA target sequence for 2400003L07Rik (NM_178378.2,366-384).
gaaggagcatctatgatta

SEQ ID NO: 801272 - DNA, 19 bp, Mus musculus
  siRNA target sequence for 2400003L07Rik (NM_178378.2,369-387).
ggagcatctatgattacaa

SEQ ID NO: 801273 - DNA, 19 bp, Mus musculus
  siRNA target sequence for 2400003L07Rik (NM_178378.2,393-411).
ccgaaaaaatctacttctt

SEQ ID NO: 801274 - DNA, 19 bp, Mus musculus
  siRNA target sequence for 2400003L07Rik (NM_178378.2,458-476).
gcaggactttacctttaaa

SEQ ID NO: 801275 - DNA, 19 bp, Mus musculus
  siRNA target sequence for 2400003L07Rik (NM_178378.2,569-587).
gatggagatgcaagattct

SEQ ID NO: 801276 - DNA, 19 bp, Mus musculus
  siRNA target sequence for 2400003L07Rik (NM_178378.2,579-597).
caagattctggctctttca

SEQ ID NO: 801277 - DNA, 19 bp, Mus musculus
  siRNA target sequence for 2400003L07Rik (NM_178378.2,694-712).
cccttcaaaaacagttact

SEQ ID NO: 801278 - DNA, 19 bp, Mus musculus
  siRNA target sequence for 2400003L07Rik (NM_178378.2,705-723).
cagttacttgatgtcaaaa

SEQ ID NO: 801279 - DNA, 19 bp, Mus musculus
  siRNA target sequence for 2400003L07Rik (NM_178378.2,730-748).
gtcaaatgcaagtacagaa

SEQ ID NO: 801280 - DNA, 19 bp, Mus musculus
  siRNA target sequence for 2400003L07Rik (NM_178378.2,741-759).
gtacagaacgggaatgaat

SEQ ID NO: 801281 - DNA, 19 bp, Mus musculus
  siRNA target sequence for 2400003L07Rik (NM_178378.2,746-764).
gaacgggaatgaatacatt

SEQ ID NO: 801282 - DNA, 19 bp, Mus musculus
  siRNA target sequence for 2400003L07Rik (NM_178378.2,775-793).
gggaccagctacaagagat

SEQ ID NO: 801283 - DNA, 19 bp, Mus musculus
  siRNA target sequence for 2400003L07Rik (NM_178378.2,789-807).
gagatgaaggcgaaaacca

SEQ ID NO: 801284 - DNA, 19 bp, Mus musculus
  siRNA target sequence for 2400003L07Rik (NM_178378.2,812-830).
ggagaatctttatatgaaa

SEQ ID NO: 801285 - DNA, 19 bp, Mus musculus
  siRNA target sequence for 2400003L07Rik (NM_178378.2,947-965).
cacggagatcgaaatgttt

SEQ ID NO: 801286 - DNA, 19 bp, Mus musculus
  siRNA target sequence for 2400003L07Rik (NM_178378.2,949-967).
cggagatcgaaatgtttct

SEQ ID NO: 801287 - DNA, 19 bp, Mus musculus
  siRNA target sequence for 2400003L07Rik (NM_178378.2,951-969).
gagatcgaaatgtttctta

SEQ ID NO: 801288 - DNA, 19 bp, Mus musculus
  siRNA target sequence for 2400003L07Rik (NM_178378.2,1043-1061).
gcagaacgagttaaatgct

SEQ ID NO: 801289 - DNA, 19 bp, Mus musculus
  siRNA target sequence for 2400003L07Rik (NM_178378.2,1122-1140).
gagtacgagcaggtcatta

SEQ ID NO: 801290 - DNA, 19 bp, Mus musculus
  siRNA target sequence for 2400003L07Rik (NM_178378.2,1124-1142).
gtacgagcaggtcattatt

SEQ ID NO: 801291 - DNA, 19 bp, Mus musculus
  siRNA target sequence for 2400003L07Rik (NM_178378.2,1268-1286).
caaaatgcccaagaaagat

SEQ ID NO: 801292 - DNA, 19 bp, Mus musculus
  siRNA target sequence for 5430425C04Rik (NM_178381.2,393-411).
ggctttgccctgtttgatt

SEQ ID NO: 801293 - DNA, 19 bp, Mus musculus
  siRNA target sequence for 5430425C04Rik (NM_178381.2,431-449).
gatctgtagtgccaatgat

SEQ ID NO: 801294 - DNA, 19 bp, Mus musculus
  siRNA target sequence for 5430425C04Rik (NM_178381.2,436-454).
gtagtgccaatgatatctt

SEQ ID NO: 801295 - DNA, 19 bp, Mus musculus
  siRNA target sequence for 5430425C04Rik (NM_178381.2,522-540).
ctcactcatctctttgaca

SEQ ID NO: 801296 - DNA, 19 bp, Mus musculus
  siRNA target sequence for 5430425C04Rik (NM_178381.2,542-560).
cgagggcaccgtgctattt

SEQ ID NO: 801297 - DNA, 19 bp, Mus musculus
  siRNA target sequence for 5430425C04Rik (NM_178381.2,610-628).
gaaagcgtgcccatgaagt

SEQ ID NO: 801298 - DNA, 19 bp, Mus musculus
  siRNA target sequence for 5430425C04Rik (NM_178381.2,627-645).
gtccagagctggaaactgt

SEQ ID NO: 801299 - DNA, 19 bp, Mus musculus
  siRNA target sequence for 5430425C04Rik (NM_178381.2,697-715).
cgcactataagctgaaaga

SEQ ID NO: 801300 - DNA, 19 bp, Mus musculus
  siRNA target sequence for 5430425C04Rik (NM_178381.2,793-811).
gggctagagacccagttat

SEQ ID NO: 801301 - DNA, 19 bp, Mus musculus
  siRNA target sequence for 5430425C04Rik (NM_178381.2,956-974).
ctggggcagtggtacatta

SEQ ID NO: 801302 - DNA, 19 bp, Mus musculus
  siRNA target sequence for 5430425C04Rik (NM_178381.2,958-976).
ggggcagtggtacattata

SEQ ID NO: 801303 - DNA, 19 bp, Mus musculus
  siRNA target sequence for 5430425C04Rik (NM_178381.2,959-977).
gggcagtggtacattatat

SEQ ID NO: 801304 - DNA, 19 bp, Mus musculus
  siRNA target sequence for 5430425C04Rik (NM_178381.2,960-978).
ggcagtggtacattatata

SEQ ID NO: 801305 - DNA, 19 bp, Mus musculus
  siRNA target sequence for 5430425C04Rik (NM_178381.2,961-979).
gcagtggtacattatataa

SEQ ID NO: 801306 - DNA, 19 bp, Mus musculus
  siRNA target sequence for 5430425C04Rik (NM_178381.2,970-988).
cattatataatcattgtca

SEQ ID NO: 801307 - DNA, 19 bp, Mus musculus
  siRNA target sequence for Tbcc (NM_178385.2,599-617).
cagcgcgacgtccttttga

SEQ ID NO: 801308 - DNA, 19 bp, Mus musculus
  siRNA target sequence for Tbcc (NM_178385.2,911-929).
ggtttagataggagcaaaa

SEQ ID NO: 801309 - DNA, 19 bp, Mus musculus
  siRNA target sequence for Tbcc (NM_178385.2,912-930).
gtttagataggagcaaaaa

SEQ ID NO: 801310 - DNA, 19 bp, Mus musculus
  siRNA target sequence for Tbcc (NM_178385.2,936-954).
gggaccaggttgatgattt

SEQ ID NO: 801311 - DNA, 19 bp, Mus musculus
  siRNA target sequence for Tbcc (NM_178385.2,979-997).
ctccccaaactggagtatt

SEQ ID NO: 801312 - DNA, 19 bp, Mus musculus
  siRNA target sequence for Tbcc (NM_178385.2,982-1000).
cccaaactggagtattctt

SEQ ID NO: 801313 - DNA, 19 bp, Mus musculus
  siRNA target sequence for 1700067I02Rik (NM_178387.2,867-885).
cggtgcagcggatcattta

SEQ ID NO: 801314 - DNA, 19 bp, Mus musculus
  siRNA target sequence for 1700067I02Rik (NM_178387.2,923-941).
gcattcaggcatttcaaga

SEQ ID NO: 801315 - DNA, 19 bp, Mus musculus
  siRNA target sequence for 1700067I02Rik (NM_178387.2,924-942).
cattcaggcatttcaagat

SEQ ID NO: 801316 - DNA, 19 bp, Mus musculus
  siRNA target sequence for 1700067I02Rik (NM_178387.2,966-984).
catcgaacgtgggatctaa

SEQ ID NO: 801317 - DNA, 19 bp, Mus musculus
  siRNA target sequence for 1700067I02Rik (NM_178387.2,970-988).
gaacgtgggatctaatact

SEQ ID NO: 801318 - DNA, 19 bp, Mus musculus
  siRNA target sequence for 1700067I02Rik (NM_178387.2,976-994).
gggatctaatactgacttt

SEQ ID NO: 801319 - DNA, 19 bp, Mus musculus
  siRNA target sequence for 1700067I02Rik (NM_178387.2,999-1017).
ccgcagtctccgaatacat

SEQ ID NO: 801320 - DNA, 19 bp, Mus musculus
  siRNA target sequence for 1700067I02Rik (NM_178387.2,1000-1018).
cgcagtctccgaatacatt

SEQ ID NO: 801321 - DNA, 19 bp, Mus musculus
  siRNA target sequence for 1700067I02Rik (NM_178387.2,1002-1020).
cagtctccgaatacattgt

SEQ ID NO: 801322 - DNA, 19 bp, Mus musculus
  siRNA target sequence for 1700067I02Rik (NM_178387.2,1042-1060).
ctcgcaaagcagtgtcaat

SEQ ID NO: 801323 - DNA, 19 bp, Mus musculus
  siRNA target sequence for 1700067I02Rik (NM_178387.2,1044-1062).
cgcaaagcagtgtcaatga

SEQ ID NO: 801324 - DNA, 19 bp, Mus musculus
  siRNA target sequence for 1700067I02Rik (NM_178387.2,1045-1063).
gcaaagcagtgtcaatgat

SEQ ID NO: 801325 - DNA, 19 bp, Mus musculus
  siRNA target sequence for 1700067I02Rik (NM_178387.2,1082-1100).
gtcaaccccaagatctcat

SEQ ID NO: 801326 - DNA, 19 bp, Mus musculus
  siRNA target sequence for 1700067I02Rik (NM_178387.2,1133-1151).
gacttcatccaggagattt

SEQ ID NO: 801327 - DNA, 19 bp, Mus musculus
  siRNA target sequence for 1700067I02Rik (NM_178387.2,1207-1225).
ggcagatggggaaatcttt

SEQ ID NO: 801328 - DNA, 19 bp, Mus musculus
  siRNA target sequence for 1700067I02Rik (NM_178387.2,1298-1316).
gctctcatggagaatgact

SEQ ID NO: 801329 - DNA, 19 bp, Mus musculus
  siRNA target sequence for 1700067I02Rik (NM_178387.2,1366-1384).
gttccgtgcgaccagtaat

SEQ ID NO: 801330 - DNA, 19 bp, Mus musculus
  siRNA target sequence for 4930425N13Rik (NM_178388.2,96-114).
cctgaggtcatcaaaataa

SEQ ID NO: 801331 - DNA, 19 bp, Mus musculus
  siRNA target sequence for 4930425N13Rik (NM_178388.2,97-115).
ctgaggtcatcaaaataaa

SEQ ID NO: 801332 - DNA, 19 bp, Mus musculus
  siRNA target sequence for 4930425N13Rik (NM_178388.2,116-134).
gggggacctgagataccaa

SEQ ID NO: 801333 - DNA, 19 bp, Mus musculus
  siRNA target sequence for 4930425N13Rik (NM_178388.2,324-342).
gcaggactctggaccttat

SEQ ID NO: 801334 - DNA, 19 bp, Mus musculus
  siRNA target sequence for 4930425N13Rik (NM_178388.2,328-346).
gactctggaccttatgcta

SEQ ID NO: 801335 - DNA, 19 bp, Mus musculus
  siRNA target sequence for 4930425N13Rik (NM_178388.2,373-391).
ccaagccaccctattatct

SEQ ID NO: 801336 - DNA, 19 bp, Mus musculus
  siRNA target sequence for 4930425N13Rik (NM_178388.2,567-585).
ctggcgcaggttgaattat

SEQ ID NO: 801337 - DNA, 19 bp, Mus musculus
  siRNA target sequence for 4930425N13Rik (NM_178388.2,570-588).
gcgcaggttgaattataca

SEQ ID NO: 801338 - DNA, 19 bp, Mus musculus
  siRNA target sequence for 4930425N13Rik (NM_178388.2,615-633).
ctgtggacctactatctta

SEQ ID NO: 801339 - DNA, 19 bp, Mus musculus
  siRNA target sequence for 4930425N13Rik (NM_178388.2,617-635).
gtggacctactatcttagt

SEQ ID NO: 801340 - DNA, 19 bp, Mus musculus
  siRNA target sequence for 4930425N13Rik (NM_178388.2,638-656).
gtgcagtgaggtcttatat

SEQ ID NO: 801341 - DNA, 19 bp, Mus musculus
  siRNA target sequence for 4930425N13Rik (NM_178388.2,640-658).
gcagtgaggtcttatatat

SEQ ID NO: 801342 - DNA, 19 bp, Mus musculus
  siRNA target sequence for 4930425N13Rik (NM_178388.2,661-679).
gtgttgggatcatctcttt

SEQ ID NO: 801343 - DNA, 19 bp, Mus musculus
  siRNA target sequence for 4930425N13Rik (NM_178388.2,720-738).
ggtgtcagcgcggatctat

SEQ ID NO: 801344 - DNA, 19 bp, Mus musculus
  siRNA target sequence for 4930425N13Rik (NM_178388.2,763-781).
ggccagtgccaaaaacact

SEQ ID NO: 801345 - DNA, 19 bp, Mus musculus
  siRNA target sequence for 5430419M09Rik (NM_178390.2,325-343).
gcagaaccagagtttggat

SEQ ID NO: 801346 - DNA, 19 bp, Mus musculus
  siRNA target sequence for 5430419M09Rik (NM_178390.2,424-442).
gatcagcgtggataaaagt

SEQ ID NO: 801347 - DNA, 19 bp, Mus musculus
  siRNA target sequence for 5430419M09Rik (NM_178390.2,987-1005).
cacaagagcaccttgtaga

SEQ ID NO: 801348 - DNA, 19 bp, Mus musculus
  siRNA target sequence for 5430419M09Rik (NM_178390.2,1088-1106).
cgctcacagccttgtgtat

SEQ ID NO: 801349 - DNA, 19 bp, Mus musculus
  siRNA target sequence for 5430419M09Rik (NM_178390.2,1166-1184).
ccgtccttggactttctga

SEQ ID NO: 801350 - DNA, 19 bp, Mus musculus
  siRNA target sequence for 5430419M09Rik (NM_178390.2,1273-1291).
gtcctccccgtgtaactca

SEQ ID NO: 801351 - DNA, 19 bp, Mus musculus
  siRNA target sequence for 5430419M09Rik (NM_178390.2,1318-1336).
gagctctagcccaaggatt

SEQ ID NO: 801352 - DNA, 19 bp, Mus musculus
  siRNA target sequence for 5830404F24Rik (NM_178391.2,92-110).
cccgacagaacaacaagat

SEQ ID NO: 801353 - DNA, 19 bp, Mus musculus
  siRNA target sequence for 5830404F24Rik (NM_178391.2,182-200).
ccagtatactcctgatcat

SEQ ID NO: 801354 - DNA, 19 bp, Mus musculus
  siRNA target sequence for 5830404F24Rik (NM_178391.2,249-267).
ggatgtgcttgcatcgaaa

SEQ ID NO: 801355 - DNA, 19 bp, Mus musculus
  siRNA target sequence for 5830404F24Rik (NM_178391.2,292-310).
cttgtcttcgccatgagaa

SEQ ID NO: 801356 - DNA, 19 bp, Mus musculus
  siRNA target sequence for 5830404F24Rik (NM_178391.2,297-315).
cttcgccatgagaataact

SEQ ID NO: 801357 - DNA, 19 bp, Mus musculus
  siRNA target sequence for 5830404F24Rik (NM_178391.2,362-380).
cgccaagccagtttttgaa

SEQ ID NO: 801358 - DNA, 19 bp, Mus musculus
  siRNA target sequence for 5830404F24Rik (NM_178391.2,363-381).
gccaagccagtttttgaat

SEQ ID NO: 801359 - DNA, 19 bp, Mus musculus
  siRNA target sequence for 5830404F24Rik (NM_178391.2,368-386).
gccagtttttgaatgcaat

SEQ ID NO: 801360 - DNA, 19 bp, Mus musculus
  siRNA target sequence for 5830404F24Rik (NM_178391.2,402-420).
ggcatgcgctgcagaaata

SEQ ID NO: 801361 - DNA, 19 bp, Mus musculus
  siRNA target sequence for 5830404F24Rik (NM_178391.2,455-473).
ggtgttccagacagagaaa

SEQ ID NO: 801362 - DNA, 19 bp, Mus musculus
  siRNA target sequence for 5830404F24Rik (NM_178391.2,458-476).
gttccagacagagaaaaaa

SEQ ID NO: 801363 - DNA, 19 bp, Mus musculus
  siRNA target sequence for 5830404F24Rik (NM_178391.2,482-500).
gggacttcggactttggaa

SEQ ID NO: 801364 - DNA, 19 bp, Mus musculus
  siRNA target sequence for 5830404F24Rik (NM_178391.2,483-501).
ggacttcggactttggaat

SEQ ID NO: 801365 - DNA, 19 bp, Mus musculus
  siRNA target sequence for 5830404F24Rik (NM_178391.2,486-504).
cttcggactttggaattta

SEQ ID NO: 801366 - DNA, 19 bp, Mus musculus
  siRNA target sequence for 5830404F24Rik (NM_178391.2,535-553).
ctggggaggtgttaggatt

SEQ ID NO: 801367 - DNA, 19 bp, Mus musculus
  siRNA target sequence for 5830404F24Rik (NM_178391.2,591-609).
catgactcaaattacatca

SEQ ID NO: 801368 - DNA, 19 bp, Mus musculus
  siRNA target sequence for 5830404F24Rik (NM_178391.2,660-678).
gaccctacctacataggaa

SEQ ID NO: 801369 - DNA, 19 bp, Mus musculus
  siRNA target sequence for 5830404F24Rik (NM_178391.2,662-680).
ccctacctacataggaaat

SEQ ID NO: 801370 - DNA, 19 bp, Mus musculus
  siRNA target sequence for 5830404F24Rik (NM_178391.2,663-681).
cctacctacataggaaata

SEQ ID NO: 801371 - DNA, 19 bp, Mus musculus
  siRNA target sequence for 5830404F24Rik (NM_178391.2,664-682).
ctacctacataggaaatat

SEQ ID NO: 801372 - DNA, 19 bp, Mus musculus
  siRNA target sequence for 5830404F24Rik (NM_178391.2,692-710).
cctcaaccattcttgtgaa

SEQ ID NO: 801373 - DNA, 19 bp, Mus musculus
  siRNA target sequence for 5830404F24Rik (NM_178391.2,698-716).
ccattcttgtgaaccaaat

SEQ ID NO: 801374 - DNA, 19 bp, Mus musculus
  siRNA target sequence for 5830404F24Rik (NM_178391.2,706-724).
gtgaaccaaatctgttgat

SEQ ID NO: 801375 - DNA, 19 bp, Mus musculus
  siRNA target sequence for 5830404F24Rik (NM_178391.2,730-748).
ctgtccgaattgactcaat

SEQ ID NO: 801376 - DNA, 19 bp, Mus musculus
  siRNA target sequence for 5830404F24Rik (NM_178391.2,734-752).
ccgaattgactcaatggta

SEQ ID NO: 801377 - DNA, 19 bp, Mus musculus
  siRNA target sequence for 5830404F24Rik (NM_178391.2,812-830).
ctattcaggaagattcctt

SEQ ID NO: 801378 - DNA, 19 bp, Mus musculus
  siRNA target sequence for 5830404F24Rik (NM_178391.2,874-892).
caccacgaaagccttgtta

SEQ ID NO: 801379 - DNA, 19 bp, Mus musculus
  siRNA target sequence for 5830404F24Rik (NM_178391.2,876-894).
ccacgaaagccttgttact

SEQ ID NO: 801380 - DNA, 19 bp, Mus musculus
  siRNA target sequence for 5830404F24Rik (NM_178391.2,923-941).
gccctatgacagttcacta

SEQ ID NO: 801381 - DNA, 19 bp, Mus musculus
  siRNA target sequence for 5830404F24Rik (NM_178391.2,924-942).
ccctatgacagttcactat

SEQ ID NO: 801382 - DNA, 19 bp, Mus musculus
  siRNA target sequence for 5830404F24Rik (NM_178391.2,925-943).
cctatgacagttcactata

SEQ ID NO: 801383 - DNA, 19 bp, Mus musculus
  siRNA target sequence for 5830404F24Rik (NM_178391.2,926-944).
ctatgacagttcactatat

SEQ ID NO: 801384 - DNA, 19 bp, Mus musculus
  siRNA target sequence for 2700033G17Rik (NM_178392.2,165-183).
ctctggcgcagcatgaagt

SEQ ID NO: 801385 - DNA, 19 bp, Mus musculus
  siRNA target sequence for 2700033G17Rik (NM_178392.2,293-311).
cagagttggcgctttgtat

SEQ ID NO: 801386 - DNA, 19 bp, Mus musculus
  siRNA target sequence for 2700033G17Rik (NM_178392.2,315-333).
ctgtacgggttgtacaaca

SEQ ID NO: 801387 - DNA, 19 bp, Mus musculus
  siRNA target sequence for 2700033G17Rik (NM_178392.2,338-356).
gctgtgccagccgaaacaa

SEQ ID NO: 801388 - DNA, 19 bp, Mus musculus
  siRNA target sequence for 2700033G17Rik (NM_178392.2,339-357).
ctgtgccagccgaaacaaa

SEQ ID NO: 801389 - DNA, 19 bp, Mus musculus
  siRNA target sequence for 2700033G17Rik (NM_178392.2,432-450).
gacgcggcttttgttttca

SEQ ID NO: 801390 - DNA, 19 bp, Mus musculus
  siRNA target sequence for 2700033G17Rik (NM_178392.2,505-523).
cgtgtagaatgaagaaaaa

SEQ ID NO: 801391 - DNA, 19 bp, Mus musculus
  siRNA target sequence for 2700033G17Rik (NM_178392.2,535-553).
ctgaagtgacacagaaatt

SEQ ID NO: 801392 - DNA, 19 bp, Mus musculus
  siRNA target sequence for 2700033G17Rik (NM_178392.2,561-579).
ccgaatgatcgtgtaatga

SEQ ID NO: 801393 - DNA, 19 bp, Mus musculus
  siRNA target sequence for 2700033G17Rik (NM_178392.2,562-580).
cgaatgatcgtgtaatgaa

SEQ ID NO: 801394 - DNA, 19 bp, Mus musculus
  siRNA target sequence for 2700033G17Rik (NM_178392.2,570-588).
cgtgtaatgaaacttatca

SEQ ID NO: 801395 - DNA, 19 bp, Mus musculus
  siRNA target sequence for 2700033G17Rik (NM_178392.2,573-591).
gtaatgaaacttatcactt

SEQ ID NO: 801396 - DNA, 19 bp, Mus musculus
  siRNA target sequence for 2700033G17Rik (NM_178392.2,582-600).
cttatcacttctgatgtat

SEQ ID NO: 801397 - DNA, 19 bp, Mus musculus
  siRNA target sequence for 2700033G17Rik (NM_178392.2,612-630).
ctgaatgttcacgatcatt

SEQ ID NO: 801398 - DNA, 19 bp, Mus musculus
  siRNA target sequence for 2700033G17Rik (NM_178392.2,618-636).
gttcacgatcattatcaaa

SEQ ID NO: 801399 - DNA, 19 bp, Mus musculus
  siRNA target sequence for 2700033G17Rik (NM_178392.2,621-639).
cacgatcattatcaaaata

SEQ ID NO: 801400 - DNA, 19 bp, Mus musculus
  siRNA target sequence for 2700033G17Rik (NM_178392.2,690-708).
ctggtaaaggaggactttt

SEQ ID NO: 801401 - DNA, 19 bp, Mus musculus
  siRNA target sequence for 2700033G17Rik (NM_178392.2,759-777).
cggaagaatccctccttaa

SEQ ID NO: 801402 - DNA, 19 bp, Mus musculus
  siRNA target sequence for 2700033G17Rik (NM_178392.2,847-865).
ctgtgtctttagcgaaaat

SEQ ID NO: 801403 - DNA, 19 bp, Mus musculus
  siRNA target sequence for 2700033G17Rik (NM_178392.2,1086-1104).
cacctgagtatgcctatta

SEQ ID NO: 801404 - DNA, 19 bp, Mus musculus
  siRNA target sequence for 2700033G17Rik (NM_178392.2,1088-1106).
cctgagtatgcctattatt

SEQ ID NO: 801405 - DNA, 19 bp, Mus musculus
  siRNA target sequence for 2700033G17Rik (NM_178392.2,1089-1107).
ctgagtatgcctattatta

SEQ ID NO: 801406 - DNA, 19 bp, Mus musculus
  siRNA target sequence for 2700033G17Rik (NM_178392.2,1091-1109).
gagtatgcctattattaca

SEQ ID NO: 801407 - DNA, 19 bp, Mus musculus
  siRNA target sequence for 5830437M04Rik (NM_178394.2,385-403).
cgccacaccgcctacatct

SEQ ID NO: 801408 - DNA, 19 bp, Mus musculus
  siRNA target sequence for 5830437M04Rik (NM_178394.2,691-709).
gaagaggcactcagtaact

SEQ ID NO: 801409 - DNA, 19 bp, Mus musculus
  siRNA target sequence for 5830437M04Rik (NM_178394.2,1001-1019).
gtgacatggcggagcttat

SEQ ID NO: 801410 - DNA, 19 bp, Mus musculus
  siRNA target sequence for 5830437M04Rik (NM_178394.2,1021-1039).
ggtggccaggatcaacata

SEQ ID NO: 801411 - DNA, 19 bp, Mus musculus
  siRNA target sequence for 5830437M04Rik (NM_178394.2,1022-1040).
gtggccaggatcaacatat

SEQ ID NO: 801412 - DNA, 19 bp, Mus musculus
  siRNA target sequence for 5830437M04Rik (NM_178394.2,1058-1076).
ggcgatttcaactgaaaat

SEQ ID NO: 801413 - DNA, 19 bp, Mus musculus
  siRNA target sequence for 5830437M04Rik (NM_178394.2,1059-1077).
gcgatttcaactgaaaatt

SEQ ID NO: 801414 - DNA, 19 bp, Mus musculus
  siRNA target sequence for 5830437M04Rik (NM_178394.2,1071-1089).
gaaaattgctgaactgaat

SEQ ID NO: 801415 - DNA, 19 bp, Mus musculus
  siRNA target sequence for 5830437M04Rik (NM_178394.2,1540-1558).
gtggactctgaaacattgt

SEQ ID NO: 801416 - DNA, 19 bp, Mus musculus
  siRNA target sequence for 5830437M04Rik (NM_178394.2,1605-1623).
gccggaagaggacttagat

SEQ ID NO: 801417 - DNA, 19 bp, Mus musculus
  siRNA target sequence for 5830437M04Rik (NM_178394.2,1796-1814).
ccaaaatcgaggacttaga

SEQ ID NO: 801418 - DNA, 19 bp, Mus musculus
  siRNA target sequence for 5830437M04Rik (NM_178394.2,1893-1911).
gctggagaagatttacaga

SEQ ID NO: 801419 - DNA, 19 bp, Mus musculus
  siRNA target sequence for 5830437M04Rik (NM_178394.2,1932-1950).
gctaaagagcgaaatgcaa

SEQ ID NO: 801420 - DNA, 19 bp, Mus musculus
  siRNA target sequence for 5830437M04Rik (NM_178394.2,1968-1986).
cgagctgttagaattcaga

SEQ ID NO: 801421 - DNA, 19 bp, Mus musculus
  siRNA target sequence for 5830437M04Rik (NM_178394.2,1987-2005).
gtgctagaactcgaagtaa

SEQ ID NO: 801422 - DNA, 19 bp, Mus musculus
  siRNA target sequence for 5830437M04Rik (NM_178394.2,1989-2007).
gctagaactcgaagtaaga

SEQ ID NO: 801423 - DNA, 19 bp, Mus musculus
  siRNA target sequence for 5830437M04Rik (NM_178394.2,2006-2024).
gagactctatctgttgtaa

SEQ ID NO: 801424 - DNA, 19 bp, Mus musculus
  siRNA target sequence for 5830437M04Rik (NM_178394.2,2028-2046).
ctcaaacggagcagacatt

SEQ ID NO: 801425 - DNA, 19 bp, Mus musculus
  siRNA target sequence for 2310047E01Rik (NM_178396.3,293-311).
cgacatccttcagtatgat

SEQ ID NO: 801426 - DNA, 19 bp, Mus musculus
  siRNA target sequence for 2310047E01Rik (NM_178396.3,365-383).
gttgaacctgaccaatgat

SEQ ID NO: 801427 - DNA, 19 bp, Mus musculus
  siRNA target sequence for 2310047E01Rik (NM_178396.3,376-394).
ccaatgatggccattcagt

SEQ ID NO: 801428 - DNA, 19 bp, Mus musculus
  siRNA target sequence for 2310047E01Rik (NM_178396.3,539-557).
gctgcacattgtccattat

SEQ ID NO: 801429 - DNA, 19 bp, Mus musculus
  siRNA target sequence for 2310047E01Rik (NM_178396.3,540-558).
ctgcacattgtccattata

SEQ ID NO: 801430 - DNA, 19 bp, Mus musculus
  siRNA target sequence for 2310047E01Rik (NM_178396.3,665-683).
gatcttcagccatcttcaa

SEQ ID NO: 801431 - DNA, 19 bp, Mus musculus
  siRNA target sequence for 2310047E01Rik (NM_178396.3,828-846).
cgaaaccctgtgcagattt

SEQ ID NO: 801432 - DNA, 19 bp, Mus musculus
  siRNA target sequence for 2310047E01Rik (NM_178396.3,910-928).
ccagagaaatgatcaacaa

SEQ ID NO: 801433 - DNA, 19 bp, Mus musculus
  siRNA target sequence for 2310047E01Rik (NM_178396.3,1073-1091).
gtctatttggctcttcaaa

SEQ ID NO: 801434 - DNA, 19 bp, Mus musculus
  siRNA target sequence for 2310047E01Rik (NM_178396.3,1121-1139).
gggagtcatttataaacca

SEQ ID NO: 801435 - DNA, 19 bp, Mus musculus
  siRNA target sequence for 2210404D11Rik (NM_178397.2,125-143).
gctttggagcagcataact

SEQ ID NO: 801436 - DNA, 19 bp, Mus musculus
  siRNA target sequence for 2210404D11Rik (NM_178397.2,247-265).
caggatctacagctatgtt

SEQ ID NO: 801437 - DNA, 19 bp, Mus musculus
  siRNA target sequence for 2210404D11Rik (NM_178397.2,293-311).
cttggatggggttattact

SEQ ID NO: 801438 - DNA, 19 bp, Mus musculus
  siRNA target sequence for 2210404D11Rik (NM_178397.2,300-318).
ggggttattacttgataat

SEQ ID NO: 801439 - DNA, 19 bp, Mus musculus
  siRNA target sequence for 2210404D11Rik (NM_178397.2,303-321).
gttattacttgataatgct

SEQ ID NO: 801440 - DNA, 19 bp, Mus musculus
  siRNA target sequence for 2210404D11Rik (NM_178397.2,323-341).
ccattccggtttacctatt

SEQ ID NO: 801441 - DNA, 19 bp, Mus musculus
  siRNA target sequence for 2210404D11Rik (NM_178397.2,324-342).
cattccggtttacctatta

SEQ ID NO: 801442 - DNA, 19 bp, Mus musculus
  siRNA target sequence for 2210404D11Rik (NM_178397.2,336-354).
cctattacacgatacttga

SEQ ID NO: 801443 - DNA, 19 bp, Mus musculus
  siRNA target sequence for 2210404D11Rik (NM_178397.2,337-355).
ctattacacgatacttgat

SEQ ID NO: 801444 - DNA, 19 bp, Mus musculus
  siRNA target sequence for 2210404D11Rik (NM_178397.2,416-434).
gttggggacattgtttcat

SEQ ID NO: 801445 - DNA, 19 bp, Mus musculus
  siRNA target sequence for 2210404D11Rik (NM_178397.2,492-510).
cgtacagccaggcacttaa

SEQ ID NO: 801446 - DNA, 19 bp, Mus musculus
  siRNA target sequence for 2210404D11Rik (NM_178397.2,496-514).
cagccaggcacttaacgat

SEQ ID NO: 801447 - DNA, 19 bp, Mus musculus
  siRNA target sequence for 2210404D11Rik (NM_178397.2,516-534).
ccaagcgggaacttcgatt

SEQ ID NO: 801448 - DNA, 19 bp, Mus musculus
  siRNA target sequence for 2210404D11Rik (NM_178397.2,517-535).
caagcgggaacttcgattt

SEQ ID NO: 801449 - DNA, 19 bp, Mus musculus
  siRNA target sequence for 2210404D11Rik (NM_178397.2,520-538).
gcgggaacttcgatttctt

SEQ ID NO: 801450 - DNA, 19 bp, Mus musculus
  siRNA target sequence for 2210404D11Rik (NM_178397.2,521-539).
cgggaacttcgatttcttt

SEQ ID NO: 801451 - DNA, 19 bp, Mus musculus
  siRNA target sequence for 2210404D11Rik (NM_178397.2,527-545).
cttcgatttcttttggttt

SEQ ID NO: 801452 - DNA, 19 bp, Mus musculus
  siRNA target sequence for 2210404D11Rik (NM_178397.2,638-656).
cttttctgggcttgttcta

SEQ ID NO: 801453 - DNA, 19 bp, Mus musculus
  siRNA target sequence for 2210404D11Rik (NM_178397.2,645-663).
gggcttgttctacaaacaa

SEQ ID NO: 801454 - DNA, 19 bp, Mus musculus
  siRNA target sequence for 2210404D11Rik (NM_178397.2,695-713).
cgggagaacacctatccat

SEQ ID NO: 801455 - DNA, 19 bp, Mus musculus
  siRNA target sequence for 2210404D11Rik (NM_178397.2,696-714).
gggagaacacctatccatt

SEQ ID NO: 801456 - DNA, 19 bp, Mus musculus
  siRNA target sequence for 2210404D11Rik (NM_178397.2,711-729).
cattcctagctatgattat

SEQ ID NO: 801457 - DNA, 19 bp, Mus musculus
  siRNA target sequence for 2210404D11Rik (NM_178397.2,733-751).
gaaggatcggcgaatgact

SEQ ID NO: 801458 - DNA, 19 bp, Mus musculus
  siRNA target sequence for 2210404D11Rik (NM_178397.2,762-780).
ggctagaaggcctcattca

SEQ ID NO: 801459 - DNA, 19 bp, Mus musculus
  siRNA target sequence for 2210404D11Rik (NM_178397.2,763-781).
gctagaaggcctcattcaa

SEQ ID NO: 801460 - DNA, 19 bp, Mus musculus
  siRNA target sequence for 2210404D11Rik (NM_178397.2,838-856).
ggtgtcagaacgtctagaa

SEQ ID NO: 801461 - DNA, 19 bp, Mus musculus
  siRNA target sequence for 2210404D11Rik (NM_178397.2,839-857).
gtgtcagaacgtctagaaa

SEQ ID NO: 801462 - DNA, 19 bp, Mus musculus
  siRNA target sequence for 2210404D11Rik (NM_178397.2,1204-1222).
ggaaagccctgaaaagttt

SEQ ID NO: 801463 - DNA, 19 bp, Mus musculus
  siRNA target sequence for 2210404D11Rik (NM_178397.2,1225-1243).
gattgaagccaattttcca

SEQ ID NO: 801464 - DNA, 19 bp, Mus musculus
  siRNA target sequence for 1110018O08Rik (NM_178398.2,277-295).
ccctagctgttggtagtaa

SEQ ID NO: 801465 - DNA, 19 bp, Mus musculus
  siRNA target sequence for 1110018O08Rik (NM_178398.2,292-310).
gtaagtccgggtataagtt

SEQ ID NO: 801466 - DNA, 19 bp, Mus musculus
  siRNA target sequence for 1110018O08Rik (NM_178398.2,335-353).
gctggaacagatctatgaa

SEQ ID NO: 801467 - DNA, 19 bp, Mus musculus
  siRNA target sequence for 1110018O08Rik (NM_178398.2,441-459).
ctgaaggtttgccatttta

SEQ ID NO: 801468 - DNA, 19 bp, Mus musculus
  siRNA target sequence for 1110018O08Rik (NM_178398.2,545-563).
ggaagagtcgctctacata

SEQ ID NO: 801469 - DNA, 19 bp, Mus musculus
  siRNA target sequence for 1110018O08Rik (NM_178398.2,549-567).
gagtcgctctacatacaca

SEQ ID NO: 801470 - DNA, 19 bp, Mus musculus
  siRNA target sequence for 1110018O08Rik (NM_178398.2,553-571).
cgctctacatacacaacat

SEQ ID NO: 801471 - DNA, 19 bp, Mus musculus
  siRNA target sequence for 1110018O08Rik (NM_178398.2,699-717).
caggtcttcgacaccatta

SEQ ID NO: 801472 - DNA, 19 bp, Mus musculus
  siRNA target sequence for 1110018O08Rik (NM_178398.2,702-720).
gtcttcgacaccattaact

SEQ ID NO: 801473 - DNA, 19 bp, Mus musculus
  siRNA target sequence for 1110018O08Rik (NM_178398.2,822-840).
gtgattcgggtgttttcca

SEQ ID NO: 801474 - DNA, 19 bp, Mus musculus
  siRNA target sequence for 1110018O08Rik (NM_178398.2,952-970).
ccgaaacagtgcacatctt

SEQ ID NO: 801475 - DNA, 19 bp, Mus musculus
  siRNA target sequence for 1110018O08Rik (NM_178398.2,1071-1089).
caagtgacagaaatgttca

SEQ ID NO: 801476 - DNA, 19 bp, Mus musculus
  siRNA target sequence for 1110018O08Rik (NM_178398.2,1147-1165).
gctcactaaccacaattca

SEQ ID NO: 801477 - DNA, 19 bp, Mus musculus
  siRNA target sequence for 1110018O08Rik (NM_178398.2,1150-1168).
cactaaccacaattcagaa

SEQ ID NO: 801478 - DNA, 19 bp, Mus musculus
  siRNA target sequence for 1110018O08Rik (NM_178398.2,1181-1199).
gctggtaggagcatcagat

SEQ ID NO: 801479 - DNA, 19 bp, Mus musculus
  siRNA target sequence for 1110018O08Rik (NM_178398.2,1201-1219).
gctatttgtacatgtacaa

SEQ ID NO: 801480 - DNA, 19 bp, Mus musculus
  siRNA target sequence for 1110018O08Rik (NM_178398.2,1286-1304).
gacgaccagtgaaatcgta

SEQ ID NO: 801481 - DNA, 19 bp, Mus musculus
  siRNA target sequence for 1110018O08Rik (NM_178398.2,1301-1319).
cgtagactctgcatctcat

SEQ ID NO: 801482 - DNA, 19 bp, Mus musculus
  siRNA target sequence for 1110018O08Rik (NM_178398.2,1317-1335).
catgactgccccttagcaa

SEQ ID NO: 801483 - DNA, 19 bp, Mus musculus
  siRNA target sequence for 1110018O08Rik (NM_178398.2,1379-1397).
ctcgtcccccacaagactt

SEQ ID NO: 801484 - DNA, 19 bp, Mus musculus
  siRNA target sequence for 1110018O08Rik (NM_178398.2,1405-1423).
ggcaggacgccaacttaga

SEQ ID NO: 801485 - DNA, 19 bp, Mus musculus
  siRNA target sequence for 1110018O08Rik (NM_178398.2,1406-1424).
gcaggacgccaacttagaa

SEQ ID NO: 801486 - DNA, 19 bp, Mus musculus
  siRNA target sequence for 3110035E14Rik (NM_178399.2,599-617).
gacctgtggggatttctga

SEQ ID NO: 801487 - DNA, 19 bp, Mus musculus
  siRNA target sequence for 3110035E14Rik (NM_178399.2,614-632).
ctgaacccaaaacatcaaa

SEQ ID NO: 801488 - DNA, 19 bp, Mus musculus
  siRNA target sequence for 3110035E14Rik (NM_178399.2,619-637).
cccaaaacatcaaatctgt

SEQ ID NO: 801489 - DNA, 19 bp, Mus musculus
  siRNA target sequence for 3110035E14Rik (NM_178399.2,636-654).
gtgtgggaatcgagcatat

SEQ ID NO: 801490 - DNA, 19 bp, Mus musculus
  siRNA target sequence for 3110035E14Rik (NM_178399.2,814-832).
gaagcctccctgccattaa

SEQ ID NO: 801491 - DNA, 19 bp, Mus musculus
  siRNA target sequence for 3110035E14Rik (NM_178399.2,857-875).
ctggcatcctacgaaaaat

SEQ ID NO: 801492 - DNA, 19 bp, Mus musculus
  siRNA target sequence for 3110035E14Rik (NM_178399.2,859-877).
ggcatcctacgaaaaatgt

SEQ ID NO: 801493 - DNA, 19 bp, Mus musculus
  siRNA target sequence for 3110035E14Rik (NM_178399.2,915-933).
caccaacagcgcctttgaa

SEQ ID NO: 801494 - DNA, 19 bp, Mus musculus
  siRNA target sequence for 9130221H12Rik (NM_178400.2,760-778).
ggttggatggacagttcta

SEQ ID NO: 801495 - DNA, 19 bp, Mus musculus
  siRNA target sequence for 9130221H12Rik (NM_178400.2,803-821).
caagaagaggcaaagctta

SEQ ID NO: 801496 - DNA, 19 bp, Mus musculus
  siRNA target sequence for 9130221H12Rik (NM_178400.2,901-919).
cacaggactcctaagtgta

SEQ ID NO: 801497 - DNA, 19 bp, Mus musculus
  siRNA target sequence for 9130221H12Rik (NM_178400.2,906-924).
gactcctaagtgtaacagt

SEQ ID NO: 801498 - DNA, 19 bp, Mus musculus
  siRNA target sequence for 9130221H12Rik (NM_178400.2,1056-1074).
ccaggactgaagttgaaca

SEQ ID NO: 801499 - DNA, 19 bp, Mus musculus
  siRNA target sequence for 9130221H12Rik (NM_178400.2,1110-1128).
ccgagtctccgcagttcat

SEQ ID NO: 801500 - DNA, 19 bp, Mus musculus
  siRNA target sequence for MGC58999 (NM_178412.2,154-172).
gttctataaaggcaatgaa

SEQ ID NO: 801501 - DNA, 19 bp, Mus musculus
  siRNA target sequence for MGC58999 (NM_178412.2,196-214).
ggcaaccatatccaagtta

SEQ ID NO: 801502 - DNA, 19 bp, Mus musculus
  siRNA target sequence for MGC58999 (NM_178412.2,207-225).
ccaagttagttttcatcat

SEQ ID NO: 801503 - DNA, 19 bp, Mus musculus
  siRNA target sequence for MGC58999 (NM_178412.2,228-246).
gtctcaacctccttctgaa

SEQ ID NO: 801504 - DNA, 19 bp, Mus musculus
  siRNA target sequence for MGC58999 (NM_178412.2,269-287).
cagctgatgtgttacttca

SEQ ID NO: 801505 - DNA, 19 bp, Mus musculus
  siRNA target sequence for MGC58999 (NM_178412.2,307-325).
gccagatgtgagagatata

SEQ ID NO: 801506 - DNA, 19 bp, Mus musculus
  siRNA target sequence for MGC58999 (NM_178412.2,377-395).
gctgggatttgggaaaata

SEQ ID NO: 801507 - DNA, 19 bp, Mus musculus
  siRNA target sequence for MGC58999 (NM_178412.2,380-398).
gggatttgggaaaataact

SEQ ID NO: 801508 - DNA, 19 bp, Mus musculus
  siRNA target sequence for MGC58999 (NM_178412.2,414-432).
ggaaagaattggatgacta

SEQ ID NO: 801509 - DNA, 19 bp, Mus musculus
  siRNA target sequence for MGC58999 (NM_178412.2,539-557).
cctgagaaccgccattctt

SEQ ID NO: 801510 - DNA, 19 bp, Mus musculus
  siRNA target sequence for MGC58999 (NM_178412.2,540-558).
ctgagaaccgccattcttt

SEQ ID NO: 801511 - DNA, 19 bp, Mus musculus
  siRNA target sequence for MGC58999 (NM_178412.2,542-560).
gagaaccgccattctttca

SEQ ID NO: 801512 - DNA, 19 bp, Mus musculus
  siRNA target sequence for MGC58999 (NM_178412.2,580-598).
cctgcggaagtatggattt

SEQ ID NO: 801513 - DNA, 19 bp, Mus musculus
  siRNA target sequence for MGC58999 (NM_178412.2,593-611).
ggatttgatggacttaatt

SEQ ID NO: 801514 - DNA, 19 bp, Mus musculus
  siRNA target sequence for MGC58999 (NM_178412.2,669-687).
ctatcctgatgcatgaaat

SEQ ID NO: 801515 - DNA, 19 bp, Mus musculus
  siRNA target sequence for MGC58999 (NM_178412.2,673-691).
cctgatgcatgaaatacgt

SEQ ID NO: 801516 - DNA, 19 bp, Mus musculus
  siRNA target sequence for MGC58999 (NM_178412.2,674-692).
ctgatgcatgaaatacgta

SEQ ID NO: 801517 - DNA, 19 bp, Mus musculus
  siRNA target sequence for MGC58999 (NM_178412.2,707-725).
gaggtgagcaagaacaaaa

SEQ ID NO: 801518 - DNA, 19 bp, Mus musculus
  siRNA target sequence for MGC58999 (NM_178412.2,752-770).
gttgctggtgttatctcta

SEQ ID NO: 801519 - DNA, 19 bp, Mus musculus
  siRNA target sequence for MGC58999 (NM_178412.2,755-773).
gctggtgttatctctacaa

SEQ ID NO: 801520 - DNA, 19 bp, Mus musculus
  siRNA target sequence for MGC58999 (NM_178412.2,761-779).
gttatctctacaatccaat

SEQ ID NO: 801521 - DNA, 19 bp, Mus musculus
  siRNA target sequence for MGC58999 (NM_178412.2,804-822).
cacagtccttggactatat

SEQ ID NO: 801522 - DNA, 19 bp, Mus musculus
  siRNA target sequence for MGC58999 (NM_178412.2,886-904).
ctataaatctccaattgaa

SEQ ID NO: 801523 - DNA, 19 bp, Mus musculus
  siRNA target sequence for MGC58999 (NM_178412.2,897-915).
caattgaaactggagtaaa

SEQ ID NO: 801524 - DNA, 19 bp, Mus musculus
  siRNA target sequence for MGC58999 (NM_178412.2,916-934).
ggcctttcacaacataaaa

SEQ ID NO: 801525 - DNA, 19 bp, Mus musculus
  siRNA target sequence for MGC58999 (NM_178412.2,1025-1043).
gactccactaaaacagaaa

SEQ ID NO: 801526 - DNA, 19 bp, Mus musculus
  siRNA target sequence for MGC58999 (NM_178412.2,1027-1045).
ctccactaaaacagaaatt

SEQ ID NO: 801527 - DNA, 19 bp, Mus musculus
  siRNA target sequence for MGC58999 (NM_178412.2,1245-1263).
ggcttaagcggaacaacta

SEQ ID NO: 801528 - DNA, 19 bp, Mus musculus
  siRNA target sequence for MGC58999 (NM_178412.2,1246-1264).
gcttaagcggaacaactat

SEQ ID NO: 801529 - DNA, 19 bp, Mus musculus
  siRNA target sequence for MGC58999 (NM_178412.2,1372-1390).
cagtgcaagttgcaatgta

SEQ ID NO: 801530 - DNA, 19 bp, Mus musculus
  siRNA target sequence for MGC58999 (NM_178412.2,1377-1395).
caagttgcaatgtaactgt

SEQ ID NO: 801531 - DNA, 19 bp, Mus musculus
  siRNA target sequence for MGC58999 (NM_178412.2,1409-1427).
gtgactgttagcaggaata

SEQ ID NO: 801532 - DNA, 19 bp, Mus musculus
  siRNA target sequence for MGC58791 (NM_178418.2,142-160).
ggaagatgttggtgactta

SEQ ID NO: 801533 - DNA, 19 bp, Mus musculus
  siRNA target sequence for MGC58791 (NM_178418.2,143-161).
gaagatgttggtgacttaa

SEQ ID NO: 801534 - DNA, 19 bp, Mus musculus
  siRNA target sequence for MGC58791 (NM_178418.2,195-213).
ggcctccctgccctaatta

SEQ ID NO: 801535 - DNA, 19 bp, Mus musculus
  siRNA target sequence for MGC58791 (NM_178418.2,219-237).
ctatactgaggctcattga

SEQ ID NO: 801536 - DNA, 19 bp, Mus musculus
  siRNA target sequence for MGC58791 (NM_178418.2,240-258).
gtctcagcctggaatgcaa

SEQ ID NO: 801537 - DNA, 19 bp, Mus musculus
  siRNA target sequence for MGC58791 (NM_178418.2,284-302).
cagaatgcaattcattcat

SEQ ID NO: 801538 - DNA, 19 bp, Mus musculus
  siRNA target sequence for MGC58791 (NM_178418.2,296-314).
cattcatataaaaggttaa

SEQ ID NO: 801539 - DNA, 19 bp, Mus musculus
  siRNA target sequence for MGC58791 (NM_178418.2,442-460).
ctgcaatgtaaggtttact

SEQ ID NO: 801540 - DNA, 19 bp, Mus musculus
  siRNA target sequence for MGC58791 (NM_178418.2,491-509).
gtcgtctgggtttatgaca

SEQ ID NO: 801541 - DNA, 19 bp, Mus musculus
  siRNA target sequence for MGC58791 (NM_178418.2,493-511).
cgtctgggtttatgacaaa

SEQ ID NO: 801542 - DNA, 19 bp, Mus musculus
  siRNA target sequence for MGC58791 (NM_178418.2,585-603).
gtgttagggaactggatat

SEQ ID NO: 801543 - DNA, 19 bp, Mus musculus
  siRNA target sequence for MGC58791 (NM_178418.2,613-631).
gactgtgagacataatctt

SEQ ID NO: 801544 - DNA, 19 bp, Mus musculus
  siRNA target sequence for MGC58791 (NM_178418.2,661-679).
cgagagacaactttttcaa

SEQ ID NO: 801545 - DNA, 19 bp, Mus musculus
  siRNA target sequence for MGC58791 (NM_178418.2,801-819).
cccagtgcacggagaagat

SEQ ID NO: 801546 - DNA, 19 bp, Mus musculus
  siRNA target sequence for MGC58791 (NM_178418.2,822-840).
gggactgcatacaaaagct

SEQ ID NO: 801547 - DNA, 19 bp, Mus musculus
  siRNA target sequence for MGC58791 (NM_178418.2,823-841).
ggactgcatacaaaagctt

SEQ ID NO: 801548 - DNA, 19 bp, Mus musculus
  siRNA target sequence for MGC58791 (NM_178418.2,926-944).
gttttgagtgatgatctta

SEQ ID NO: 801549 - DNA, 19 bp, Mus musculus
  siRNA target sequence for MGC58791 (NM_178418.2,931-949).
gagtgatgatcttactgaa

SEQ ID NO: 801550 - DNA, 19 bp, Mus musculus
  siRNA target sequence for MGC58791 (NM_178418.2,933-951).
gtgatgatcttactgaaaa

SEQ ID NO: 801551 - DNA, 19 bp, Mus musculus
  siRNA target sequence for MGC58791 (NM_178418.2,969-987).
ccaaatatctacatctcta

SEQ ID NO: 801552 - DNA, 19 bp, Mus musculus
  siRNA target sequence for MGC58791 (NM_178418.2,1010-1028).
cgggagttactgtctatga

SEQ ID NO: 801553 - DNA, 19 bp, Mus musculus
  siRNA target sequence for MGC58791 (NM_178418.2,1060-1078).
gaagcataaaaagaagtta

SEQ ID NO: 801554 - DNA, 19 bp, Mus musculus
  siRNA target sequence for MGC58791 (NM_178418.2,1095-1113).
gccttagaagtcacatgaa

SEQ ID NO: 801555 - DNA, 19 bp, Mus musculus
  siRNA target sequence for MGC58791 (NM_178418.2,1131-1149).
gtggccaaatagaacagta

SEQ ID NO: 801556 - DNA, 19 bp, Mus musculus
  siRNA target sequence for MGC58791 (NM_178418.2,1135-1153).
ccaaatagaacagtataaa

SEQ ID NO: 801557 - DNA, 19 bp, Mus musculus
  siRNA target sequence for MGC58791 (NM_178418.2,1147-1165).
gtataaatgggaaatcgaa

SEQ ID NO: 801558 - DNA, 19 bp, Mus musculus
  siRNA target sequence for MGC58791 (NM_178418.2,1387-1405).
ctacctagcggaagtgaaa

SEQ ID NO: 801559 - DNA, 19 bp, Mus musculus
  siRNA target sequence for MGC58791 (NM_178418.2,1391-1409).
ctagcggaagtgaaaatta

SEQ ID NO: 801560 - DNA, 19 bp, Mus musculus
  siRNA target sequence for MGC58791 (NM_178418.2,1548-1566).
gtcctagagacagtaataa

SEQ ID NO: 801561 - DNA, 19 bp, Mus musculus
  siRNA target sequence for MGC58791 (NM_178418.2,1551-1569).
ctagagacagtaataaatt

SEQ ID NO: 801562 - DNA, 19 bp, Mus musculus
  siRNA target sequence for MGC58791 (NM_178418.2,1629-1647).
caattgagaccatggaaaa

SEQ ID NO: 801563 - DNA, 19 bp, Mus musculus
  siRNA target sequence for BC034204 (NM_178420.2,211-229).
ctaccagatgagcatatct

SEQ ID NO: 801564 - DNA, 19 bp, Mus musculus
  siRNA target sequence for BC034204 (NM_178420.2,243-261).
gtggagctggccctttaaa

SEQ ID NO: 801565 - DNA, 19 bp, Mus musculus
  siRNA target sequence for BC034204 (NM_178420.2,288-306).
ggcctttatccgttaccat

SEQ ID NO: 801566 - DNA, 19 bp, Mus musculus
  siRNA target sequence for BC034204 (NM_178420.2,370-388).
gccacagaagctatccaaa

SEQ ID NO: 801567 - DNA, 19 bp, Mus musculus
  siRNA target sequence for BC034204 (NM_178420.2,441-459).
ccagtttggaccaaccttt

SEQ ID NO: 801568 - DNA, 19 bp, Mus musculus
  siRNA target sequence for BC034204 (NM_178420.2,461-479).
ctctagacacagttcatgt

SEQ ID NO: 801569 - DNA, 19 bp, Mus musculus
  siRNA target sequence for BC034204 (NM_178420.2,592-610).
ctttttgacccggattctt

SEQ ID NO: 801570 - DNA, 19 bp, Mus musculus
  siRNA target sequence for BC034204 (NM_178420.2,624-642).
gcagaccgtggtgttgtat

SEQ ID NO: 801571 - DNA, 19 bp, Mus musculus
  siRNA target sequence for BC034204 (NM_178420.2,676-694).
cggaagatggtcttagact

SEQ ID NO: 801572 - DNA, 19 bp, Mus musculus
  siRNA target sequence for BC034204 (NM_178420.2,848-866).
gatcccgcctgctctttgt

SEQ ID NO: 801573 - DNA, 19 bp, Mus musculus
  siRNA target sequence for BC034204 (NM_178420.2,947-965).
caccagctgccatcatagt

SEQ ID NO: 801574 - DNA, 19 bp, Mus musculus
  siRNA target sequence for BC034204 (NM_178420.2,1035-1053).
ccgaatccctagcaagtat

SEQ ID NO: 801575 - DNA, 19 bp, Mus musculus
  siRNA target sequence for BC034204 (NM_178420.2,1037-1055).
gaatccctagcaagtatgt

SEQ ID NO: 801576 - DNA, 19 bp, Mus musculus
  siRNA target sequence for BC034204 (NM_178420.2,1185-1203).
gcgcgacaacctgattcaa

SEQ ID NO: 801577 - DNA, 19 bp, Mus musculus
  siRNA target sequence for BC034204 (NM_178420.2,1186-1204).
cgcgacaacctgattcaaa

SEQ ID NO: 801578 - DNA, 19 bp, Mus musculus
  siRNA target sequence for BC034204 (NM_178420.2,1187-1205).
gcgacaacctgattcaaat

SEQ ID NO: 801579 - DNA, 19 bp, Mus musculus
  siRNA target sequence for BC034204 (NM_178420.2,1323-1341).
gaccctcacaagcatctat

SEQ ID NO: 801580 - DNA, 19 bp, Mus musculus
  siRNA target sequence for BC034204 (NM_178420.2,1346-1364).
gctttctacgcctgaactt

SEQ ID NO: 801581 - DNA, 19 bp, Mus musculus
  siRNA target sequence for BC034204 (NM_178420.2,1386-1404).
cacccacacgtccaatcta

SEQ ID NO: 801582 - DNA, 19 bp, Mus musculus
  siRNA target sequence for BC034204 (NM_178420.2,1521-1539).
gacagaggaagagtttcaa

SEQ ID NO: 801583 - DNA, 19 bp, Mus musculus
  siRNA target sequence for BC034204 (NM_178420.2,1559-1577).
gggacgccctgaggttttt

SEQ ID NO: 801584 - DNA, 19 bp, Mus musculus
  siRNA target sequence for BC034204 (NM_178420.2,1692-1710).
gcagcgggtgggcaaagaa

SEQ ID NO: 801585 - DNA, 19 bp, Mus musculus
  siRNA target sequence for BC034204 (NM_178420.2,1818-1836).
ggtagttccgcgagtgttt

SEQ ID NO: 801586 - DNA, 19 bp, Mus musculus
  siRNA target sequence for BC034204 (NM_178420.2,1898-1916).
gggaggaagactactacaa

SEQ ID NO: 801587 - DNA, 19 bp, Mus musculus
  siRNA target sequence for BC034204 (NM_178420.2,2008-2026).
gagctcttccccatgttca

SEQ ID NO: 801588 - DNA, 19 bp, Mus musculus
  siRNA target sequence for BC034204 (NM_178420.2,2071-2089).
cttggctgtcccatcaaga

SEQ ID NO: 801589 - DNA, 19 bp, Mus musculus
  siRNA target sequence for BC034204 (NM_178420.2,2237-2255).
ccctacgccagctcaattt

SEQ ID NO: 801590 - DNA, 19 bp, Mus musculus
  siRNA target sequence for BC034204 (NM_178420.2,2238-2256).
cctacgccagctcaattta

SEQ ID NO: 801591 - DNA, 19 bp, Mus musculus
  siRNA target sequence for BC034204 (NM_178420.2,2412-2430).
ggggttgcaactcaacaat

SEQ ID NO: 801592 - DNA, 19 bp, Mus musculus
  siRNA target sequence for BC034204 (NM_178420.2,2464-2482).
ctgctcttacacgatcaat

SEQ ID NO: 801593 - DNA, 19 bp, Mus musculus
  siRNA target sequence for BC034204 (NM_178420.2,2527-2545).
gctggtgtgggcttactga

SEQ ID NO: 801594 - DNA, 19 bp, Mus musculus
  siRNA target sequence for BC034204 (NM_178420.2,2528-2546).
ctggtgtgggcttactgat

SEQ ID NO: 801595 - DNA, 19 bp, Mus musculus
  siRNA target sequence for BC034204 (NM_178420.2,2550-2568).
cgggctggcaggaaacact

SEQ ID NO: 801596 - DNA, 19 bp, Mus musculus
  siRNA target sequence for BC034204 (NM_178420.2,2634-2652).
ccagctggaccgaaacaaa

SEQ ID NO: 801597 - DNA, 19 bp, Mus musculus
  siRNA target sequence for BC034204 (NM_178420.2,2748-2766).
gctgcacctctacttcaat

SEQ ID NO: 801598 - DNA, 19 bp, Mus musculus
  siRNA target sequence for BC034204 (NM_178420.2,2876-2894).
ggtcagtgatccttagtga

SEQ ID NO: 801599 - DNA, 19 bp, Mus musculus
  siRNA target sequence for BC034204 (NM_178420.2,2930-2948).
gggtccagaggcatctcaa

SEQ ID NO: 801600 - DNA, 19 bp, Mus musculus
  siRNA target sequence for Nanos1 (NM_178421.2,549-567).
gcgacaacgcacataccat

SEQ ID NO: 801601 - DNA, 19 bp, Mus musculus
  siRNA target sequence for Nanos1 (NM_178421.2,556-574).
cgcacataccatcaagtat

SEQ ID NO: 801602 - DNA, 19 bp, Mus musculus
  siRNA target sequence for MGC18837 (NM_178577.3,195-213).
ggacccgggaagtctgatt

SEQ ID NO: 801603 - DNA, 19 bp, Mus musculus
  siRNA target sequence for MGC18837 (NM_178577.3,196-214).
gacccgggaagtctgatta

SEQ ID NO: 801604 - DNA, 19 bp, Mus musculus
  siRNA target sequence for MGC18837 (NM_178577.3,198-216).
cccgggaagtctgattaaa

SEQ ID NO: 801605 - DNA, 19 bp, Mus musculus
  siRNA target sequence for MGC18837 (NM_178577.3,468-486).
cacactggccaccatcaat

SEQ ID NO: 801606 - DNA, 19 bp, Mus musculus
  siRNA target sequence for MGC18837 (NM_178577.3,634-652).
gctctacgccggaagttct

SEQ ID NO: 801607 - DNA, 19 bp, Mus musculus
  siRNA target sequence for MGC18837 (NM_178577.3,635-653).
ctctacgccggaagttcta

SEQ ID NO: 801608 - DNA, 19 bp, Mus musculus
  siRNA target sequence for BC025872 (NM_178593.2,302-320).
cagaacggtgaggagaaat

SEQ ID NO: 801609 - DNA, 19 bp, Mus musculus
  siRNA target sequence for BC025872 (NM_178593.2,304-322).
gaacggtgaggagaaatca

SEQ ID NO: 801610 - DNA, 19 bp, Mus musculus
  siRNA target sequence for BC025872 (NM_178593.2,572-590).
cacctgccctcttacaata

SEQ ID NO: 801611 - DNA, 19 bp, Mus musculus
  siRNA target sequence for BC025872 (NM_178593.2,655-673).
ggactgtggggattttaga

SEQ ID NO: 801612 - DNA, 19 bp, Mus musculus
  siRNA target sequence for BC025872 (NM_178593.2,1078-1096).
ggagagggtagcagatgaa

SEQ ID NO: 801613 - DNA, 19 bp, Mus musculus
  siRNA target sequence for BC025872 (NM_178593.2,1097-1115).
gataggctcggacagaaaa

SEQ ID NO: 801614 - DNA, 19 bp, Mus musculus
  siRNA target sequence for BC025872 (NM_178593.2,1208-1226).
gagccggatacaaagcaaa

SEQ ID NO: 801615 - DNA, 19 bp, Mus musculus
  siRNA target sequence for BC025872 (NM_178593.2,1212-1230).
cggatacaaagcaaaagga

SEQ ID NO: 801616 - DNA, 19 bp, Mus musculus
  siRNA target sequence for B7-H4 (NM_178594.2,68-86).
gatcatcttttggagtatt

SEQ ID NO: 801617 - DNA, 19 bp, Mus musculus
  siRNA target sequence for B7-H4 (NM_178594.2,112-130).
gggccatcgcactcatcat

SEQ ID NO: 801618 - DNA, 19 bp, Mus musculus
  siRNA target sequence for B7-H4 (NM_178594.2,113-131).
ggccatcgcactcatcatt

SEQ ID NO: 801619 - DNA, 19 bp, Mus musculus
  siRNA target sequence for B7-H4 (NM_178594.2,220-238).
cttttgaacctgacatcaa

SEQ ID NO: 801620 - DNA, 19 bp, Mus musculus
  siRNA target sequence for B7-H4 (NM_178594.2,283-301).
gtttggtccacgagttcaa

SEQ ID NO: 801621 - DNA, 19 bp, Mus musculus
  siRNA target sequence for B7-H4 (NM_178594.2,322-340).
cacagcagcatgagatgtt

SEQ ID NO: 801622 - DNA, 19 bp, Mus musculus
  siRNA target sequence for B7-H4 (NM_178594.2,391-409).
ccctgagactgaaaaacgt

SEQ ID NO: 801623 - DNA, 19 bp, Mus musculus
  siRNA target sequence for B7-H4 (NM_178594.2,467-485).
gaatgcaaaccttgagtat

SEQ ID NO: 801624 - DNA, 19 bp, Mus musculus
  siRNA target sequence for B7-H4 (NM_178594.2,497-515).
cttcagtatgccagagata

SEQ ID NO: 801625 - DNA, 19 bp, Mus musculus
  siRNA target sequence for B7-H4 (NM_178594.2,500-518).
cagtatgccagagataaat

SEQ ID NO: 801626 - DNA, 19 bp, Mus musculus
  siRNA target sequence for B7-H4 (NM_178594.2,502-520).
gtatgccagagataaatgt

SEQ ID NO: 801627 - DNA, 19 bp, Mus musculus
  siRNA target sequence for B7-H4 (NM_178594.2,512-530).
gataaatgtggactataat

SEQ ID NO: 801628 - DNA, 19 bp, Mus musculus
  siRNA target sequence for B7-H4 (NM_178594.2,690-708).
ctctacaatgtcacaatca

SEQ ID NO: 801629 - DNA, 19 bp, Mus musculus
  siRNA target sequence for B7-H4 (NM_178594.2,713-731).
cacatactcctgtatgatt

SEQ ID NO: 801630 - DNA, 19 bp, Mus musculus
  siRNA target sequence for Gjc1 (NM_178596.1,266-284).
cggtgctgttcgtcatcta

SEQ ID NO: 801631 - DNA, 19 bp, Mus musculus
  siRNA target sequence for Gjc1 (NM_178596.1,521-539).
cgcacacggtcgactgttt

SEQ ID NO: 801632 - DNA, 19 bp, Mus musculus
  siRNA target sequence for Gjc1 (NM_178596.1,565-583).
gtcttcgtggtcttctact

SEQ ID NO: 801633 - DNA, 19 bp, Mus musculus
  siRNA target sequence for Tagln2 (NM_178598.1,283-301).
gtgcaagcttattaattca

SEQ ID NO: 801634 - DNA, 19 bp, Mus musculus
  siRNA target sequence for Tagln2 (NM_178598.1,396-414).
ccgagcgctatggcattaa

SEQ ID NO: 801635 - DNA, 19 bp, Mus musculus
  siRNA target sequence for Tagln2 (NM_178598.1,398-416).
gagcgctatggcattaaca

SEQ ID NO: 801636 - DNA, 19 bp, Mus musculus
  siRNA target sequence for Tagln2 (NM_178598.1,536-554).
gatcccaactggtttccta

SEQ ID NO: 801637 - DNA, 19 bp, Mus musculus
  siRNA target sequence for Tagln2 (NM_178598.1,566-584).
gagaaccctcggaacttct

SEQ ID NO: 801638 - DNA, 19 bp, Mus musculus
  siRNA target sequence for D5Buc26e (NM_178599.2,62-80).
cgctttggcggctacagaa

SEQ ID NO: 801639 - DNA, 19 bp, Mus musculus
  siRNA target sequence for D5Buc26e (NM_178599.2,196-214).
catgttctcgaagatgtta

SEQ ID NO: 801640 - DNA, 19 bp, Mus musculus
  siRNA target sequence for D5Buc26e (NM_178599.2,205-223).
gaagatgttaccacgtttt

SEQ ID NO: 801641 - DNA, 19 bp, Mus musculus
  siRNA target sequence for D5Buc26e (NM_178599.2,208-226).
gatgttaccacgtttttca

SEQ ID NO: 801642 - DNA, 19 bp, Mus musculus
  siRNA target sequence for D5Buc26e (NM_178599.2,229-247).
gcggtcgttggcaaaaact

SEQ ID NO: 801643 - DNA, 19 bp, Mus musculus
  siRNA target sequence for D5Buc26e (NM_178599.2,230-248).
cggtcgttggcaaaaactt

SEQ ID NO: 801644 - DNA, 19 bp, Mus musculus
  siRNA target sequence for D5Buc26e (NM_178599.2,271-289).
caactgaaccaactgaatt

SEQ ID NO: 801645 - DNA, 19 bp, Mus musculus
  siRNA target sequence for D5Buc26e (NM_178599.2,276-294).
gaaccaactgaattcatgt

SEQ ID NO: 801646 - DNA, 19 bp, Mus musculus
  siRNA target sequence for D5Buc26e (NM_178599.2,351-369).
cctgttgggggaaatagtt

SEQ ID NO: 801647 - DNA, 19 bp, Mus musculus
  siRNA target sequence for D5Buc26e (NM_178599.2,455-473).
cccttttgaaccttcatct

SEQ ID NO: 801648 - DNA, 19 bp, Mus musculus
  siRNA target sequence for D5Buc26e (NM_178599.2,509-527).
ctgttgagatgagtaaaga

SEQ ID NO: 801649 - DNA, 19 bp, Mus musculus
  siRNA target sequence for D5Buc26e (NM_178599.2,551-569).
ccttggaggccgctaataa

SEQ ID NO: 801650 - DNA, 19 bp, Mus musculus
  siRNA target sequence for D5Buc26e (NM_178599.2,570-588).
ggtggtcctgcagttaaaa

SEQ ID NO: 801651 - DNA, 19 bp, Mus musculus
  siRNA target sequence for D7Wsu86e (NM_178600.1,251-269).
ccaatccaacagcatattt

SEQ ID NO: 801652 - DNA, 19 bp, Mus musculus
  siRNA target sequence for D1Wsu40e (NM_178601.2,121-139).
caagcgtgctctagaagaa

SEQ ID NO: 801653 - DNA, 19 bp, Mus musculus
  siRNA target sequence for D1Wsu40e (NM_178601.2,222-240).
gtgtaaccagccatgtaga

SEQ ID NO: 801654 - DNA, 19 bp, Mus musculus
  siRNA target sequence for D1Wsu40e (NM_178601.2,236-254).
gtagatgatgaatatcgat

SEQ ID NO: 801655 - DNA, 19 bp, Mus musculus
  siRNA target sequence for D1Wsu40e (NM_178601.2,302-320).
cctagttctcgcctgaaaa

SEQ ID NO: 801656 - DNA, 19 bp, Mus musculus
  siRNA target sequence for D1Wsu40e (NM_178601.2,303-321).
ctagttctcgcctgaaaat

SEQ ID NO: 801657 - DNA, 19 bp, Mus musculus
  siRNA target sequence for D1Wsu40e (NM_178601.2,306-324).
gttctcgcctgaaaatgtt

SEQ ID NO: 801658 - DNA, 19 bp, Mus musculus
  siRNA target sequence for D1Wsu40e (NM_178601.2,311-329).
cgcctgaaaatgtttgcaa

SEQ ID NO: 801659 - DNA, 19 bp, Mus musculus
  siRNA target sequence for D1Wsu40e (NM_178601.2,312-330).
gcctgaaaatgtttgcaaa

SEQ ID NO: 801660 - DNA, 19 bp, Mus musculus
  siRNA target sequence for D1Wsu40e (NM_178601.2,459-477).
cacccgtggggctcattgt

SEQ ID NO: 801661 - DNA, 19 bp, Mus musculus
  siRNA target sequence for D1Wsu40e (NM_178601.2,625-643).
ggacatccttcgttaccta

SEQ ID NO: 801662 - DNA, 19 bp, Mus musculus
  siRNA target sequence for D1Wsu40e (NM_178601.2,626-644).
gacatccttcgttacctat

SEQ ID NO: 801663 - DNA, 19 bp, Mus musculus
  siRNA target sequence for D1Wsu40e (NM_178601.2,687-705).
caaaccaggatgactacat

SEQ ID NO: 801664 - DNA, 19 bp, Mus musculus
  siRNA target sequence for D1Wsu40e (NM_178601.2,713-731).
cggcaccatgtctacaaga

SEQ ID NO: 801665 - DNA, 19 bp, Mus musculus
  siRNA target sequence for D1Wsu40e (NM_178601.2,771-789).
ctcgatttgagctcaagtt

SEQ ID NO: 801666 - DNA, 19 bp, Mus musculus
  siRNA target sequence for D1Wsu40e (NM_178601.2,773-791).
cgatttgagctcaagttgt

SEQ ID NO: 801667 - DNA, 19 bp, Mus musculus
  siRNA target sequence for D1Wsu40e (NM_178601.2,820-838).
ggaggccaccgcagatgta

SEQ ID NO: 801668 - DNA, 19 bp, Mus musculus
  siRNA target sequence for Grinl1a (NM_178602.1,205-223).
ggcgccaggagagactttt

SEQ ID NO: 801669 - DNA, 19 bp, Mus musculus
  siRNA target sequence for Grinl1a (NM_178602.1,219-237).
cttttgcgcaacgaaaaat

SEQ ID NO: 801670 - DNA, 19 bp, Mus musculus
  siRNA target sequence for Grinl1a (NM_178602.1,224-242).
gcgcaacgaaaaattcatt

SEQ ID NO: 801671 - DNA, 19 bp, Mus musculus
  siRNA target sequence for Grinl1a (NM_178602.1,225-243).
cgcaacgaaaaattcattt

SEQ ID NO: 801672 - DNA, 19 bp, Mus musculus
  siRNA target sequence for Grinl1a (NM_178602.1,230-248).
cgaaaaattcatttgcaaa

SEQ ID NO: 801673 - DNA, 19 bp, Mus musculus
  siRNA target sequence for Grinl1a (NM_178602.1,252-270).
cccgacaaaggtaaaaaga

SEQ ID NO: 801674 - DNA, 19 bp, Mus musculus
  siRNA target sequence for Grinl1a (NM_178602.1,253-271).
ccgacaaaggtaaaaagat

SEQ ID NO: 801675 - DNA, 19 bp, Mus musculus
  siRNA target sequence for Grinl1a (NM_178602.1,329-347).
gagaagtgaactgtttcat

SEQ ID NO: 801676 - DNA, 19 bp, Mus musculus
  siRNA target sequence for Grinl1a (NM_178602.1,426-444).
gacctgatgcttgatactt

SEQ ID NO: 801677 - DNA, 19 bp, Mus musculus
  siRNA target sequence for Grinl1a (NM_178602.1,428-446).
cctgatgcttgatacttca

SEQ ID NO: 801678 - DNA, 19 bp, Mus musculus
  siRNA target sequence for Grinl1a (NM_178602.1,431-449).
gatgcttgatacttcatca

SEQ ID NO: 801679 - DNA, 19 bp, Mus musculus
  siRNA target sequence for Grinl1a (NM_178602.1,434-452).
gcttgatacttcatcatta

SEQ ID NO: 801680 - DNA, 19 bp, Mus musculus
  siRNA target sequence for Grinl1a (NM_178602.1,459-477).
gactgttcctcaatagaca

SEQ ID NO: 801681 - DNA, 19 bp, Mus musculus
  siRNA target sequence for Grinl1a (NM_178602.1,463-481).
gttcctcaatagacattaa

SEQ ID NO: 801682 - DNA, 19 bp, Mus musculus
  siRNA target sequence for Grinl1a (NM_178602.1,467-485).
ctcaatagacattaagtca

SEQ ID NO: 801683 - DNA, 19 bp, Mus musculus
  siRNA target sequence for Grinl1a (NM_178602.1,607-625).
cctcatccgaagttaagga

SEQ ID NO: 801684 - DNA, 19 bp, Mus musculus
  siRNA target sequence for Grinl1a (NM_178602.1,789-807).
cctaagaagcctcattaca

SEQ ID NO: 801685 - DNA, 19 bp, Mus musculus
  siRNA target sequence for Grinl1a (NM_178602.1,790-808).
ctaagaagcctcattacat

SEQ ID NO: 801686 - DNA, 19 bp, Mus musculus
  siRNA target sequence for Grinl1a (NM_178602.1,840-858).
gtgccccctcctcataagt

SEQ ID NO: 801687 - DNA, 19 bp, Mus musculus
  siRNA target sequence for Grinl1a (NM_178602.1,842-860).
gccccctcctcataagttt

SEQ ID NO: 801688 - DNA, 19 bp, Mus musculus
  siRNA target sequence for Grinl1a (NM_178602.1,843-861).
ccccctcctcataagttta

SEQ ID NO: 801689 - DNA, 19 bp, Mus musculus
  siRNA target sequence for Grinl1a (NM_178602.1,844-862).
cccctcctcataagtttaa

SEQ ID NO: 801690 - DNA, 19 bp, Mus musculus
  siRNA target sequence for Grinl1a (NM_178602.1,846-864).
cctcctcataagtttaaga

SEQ ID NO: 801691 - DNA, 19 bp, Mus musculus
  siRNA target sequence for Grinl1a (NM_178602.1,857-875).
gtttaagaccaatgtgtta

SEQ ID NO: 801692 - DNA, 19 bp, Mus musculus
  siRNA target sequence for Grinl1a (NM_178602.1,887-905).
gagtgactcaccaagtcat

SEQ ID NO: 801693 - DNA, 19 bp, Mus musculus
  siRNA target sequence for Grinl1a (NM_178602.1,953-971).
ggctaggcagcatcttgat

SEQ ID NO: 801694 - DNA, 19 bp, Mus musculus
  siRNA target sequence for Grinl1a (NM_178602.1,958-976).
ggcagcatcttgatgatat

SEQ ID NO: 801695 - DNA, 19 bp, Mus musculus
  siRNA target sequence for Grinl1a (NM_178602.1,962-980).
gcatcttgatgatatcaca

SEQ ID NO: 801696 - DNA, 19 bp, Mus musculus
  siRNA target sequence for Grinl1a (NM_178602.1,1110-1128).
gccgagagactgaatatta

SEQ ID NO: 801697 - DNA, 19 bp, Mus musculus
  siRNA target sequence for Grinl1a (NM_178602.1,1111-1129).
ccgagagactgaatattaa

SEQ ID NO: 801698 - DNA, 19 bp, Mus musculus
  siRNA target sequence for Mrpl50 (NM_178603.2,49-67).
gtctcggttagcaagaaga

SEQ ID NO: 801699 - DNA, 19 bp, Mus musculus
  siRNA target sequence for Mrpl50 (NM_178603.2,91-109).
ggcaacacgtagagaattt

SEQ ID NO: 801700 - DNA, 19 bp, Mus musculus
  siRNA target sequence for Mrpl50 (NM_178603.2,92-110).
gcaacacgtagagaatttt

SEQ ID NO: 801701 - DNA, 19 bp, Mus musculus
  siRNA target sequence for Mrpl50 (NM_178603.2,185-203).
gtgtgtccacccttacgaa

SEQ ID NO: 801702 - DNA, 19 bp, Mus musculus
  siRNA target sequence for Mrpl50 (NM_178603.2,230-248).
ctccagagtcgcttggaat

SEQ ID NO: 801703 - DNA, 19 bp, Mus musculus
  siRNA target sequence for Mrpl50 (NM_178603.2,235-253).
gagtcgcttggaatctcat

SEQ ID NO: 801704 - DNA, 19 bp, Mus musculus
  siRNA target sequence for Mrpl50 (NM_178603.2,237-255).
gtcgcttggaatctcatat

SEQ ID NO: 801705 - DNA, 19 bp, Mus musculus
  siRNA target sequence for Mrpl50 (NM_178603.2,239-257).
cgcttggaatctcatatta

SEQ ID NO: 801706 - DNA, 19 bp, Mus musculus
  siRNA target sequence for Mrpl50 (NM_178603.2,244-262).
ggaatctcatattaaagaa

SEQ ID NO: 801707 - DNA, 19 bp, Mus musculus
  siRNA target sequence for Mrpl50 (NM_178603.2,269-287).
ggttcatctcttcctaata

SEQ ID NO: 801708 - DNA, 19 bp, Mus musculus
  siRNA target sequence for Mrpl50 (NM_178603.2,281-299).
cctaataactggcaagata

SEQ ID NO: 801709 - DNA, 19 bp, Mus musculus
  siRNA target sequence for Mrpl50 (NM_178603.2,282-300).
ctaataactggcaagatat

SEQ ID NO: 801710 - DNA, 19 bp, Mus musculus
  siRNA target sequence for Mrpl50 (NM_178603.2,400-418).
ggtcagagatgttcttgat

SEQ ID NO: 801711 - DNA, 19 bp, Mus musculus
  siRNA target sequence for Mrpl50 (NM_178603.2,421-439).
ctataatgttcctgttcaa

SEQ ID NO: 801712 - DNA, 19 bp, Mus musculus
  siRNA target sequence for Mrpl50 (NM_178603.2,428-446).
gttcctgttcaagacaaat

SEQ ID NO: 801713 - DNA, 19 bp, Mus musculus
  siRNA target sequence for Mrpl50 (NM_178603.2,463-481).
cgttgctagtaatttacct

SEQ ID NO: 801714 - DNA, 19 bp, Mus musculus
  siRNA target sequence for D13Wsu177e (NM_178605.2,137-155).
ggcagaagttcggttacaa

SEQ ID NO: 801715 - DNA, 19 bp, Mus musculus
  siRNA target sequence for D13Wsu177e (NM_178605.2,196-214).
gcagcgccacggattgagt

SEQ ID NO: 801716 - DNA, 19 bp, Mus musculus
  siRNA target sequence for D13Wsu177e (NM_178605.2,232-250).
gcctgggaccacaccaaat

SEQ ID NO: 801717 - DNA, 19 bp, Mus musculus
  siRNA target sequence for D13Wsu177e (NM_178605.2,302-320).
cggttcccctccgtaagaa

SEQ ID NO: 801718 - DNA, 19 bp, Mus musculus
  siRNA target sequence for D13Wsu177e (NM_178605.2,310-328).
ctccgtaagaagaaggtaa

SEQ ID NO: 801719 - DNA, 19 bp, Mus musculus
  siRNA target sequence for D13Wsu177e (NM_178605.2,446-464).
gggacctcatcgactatgt

SEQ ID NO: 801720 - DNA, 19 bp, Mus musculus
  siRNA target sequence for D13Wsu177e (NM_178605.2,549-567).
gatccggaataagatcaat

SEQ ID NO: 801721 - DNA, 19 bp, Mus musculus
  siRNA target sequence for D13Wsu177e (NM_178605.2,553-571).
cggaataagatcaatgtct

SEQ ID NO: 801722 - DNA, 19 bp, Mus musculus
  siRNA target sequence for D10Ucla1 (NM_178606.2,85-103).
gctctatccagcgtactat

SEQ ID NO: 801723 - DNA, 19 bp, Mus musculus
  siRNA target sequence for D10Ucla1 (NM_178606.2,86-104).
ctctatccagcgtactatt

SEQ ID NO: 801724 - DNA, 19 bp, Mus musculus
  siRNA target sequence for D10Ucla1 (NM_178606.2,142-160).
cgttcgctggatgatgtat

SEQ ID NO: 801725 - DNA, 19 bp, Mus musculus
  siRNA target sequence for D10Ucla1 (NM_178606.2,216-234).
catggtttcccctgtacta

SEQ ID NO: 801726 - DNA, 19 bp, Mus musculus
  siRNA target sequence for D10Ucla1 (NM_178606.2,219-237).
ggtttcccctgtactatga

SEQ ID NO: 801727 - DNA, 19 bp, Mus musculus
  siRNA target sequence for D10Ucla1 (NM_178606.2,263-281).
ctgctgtcgccctacacta

SEQ ID NO: 801728 - DNA, 19 bp, Mus musculus
  siRNA target sequence for D10Ucla1 (NM_178606.2,277-295).
cactagaggggcgagttta

SEQ ID NO: 801729 - DNA, 19 bp, Mus musculus
  siRNA target sequence for D10Ucla1 (NM_178606.2,279-297).
ctagaggggcgagtttaat

SEQ ID NO: 801730 - DNA, 19 bp, Mus musculus
  siRNA target sequence for D10Ucla1 (NM_178606.2,282-300).
gaggggcgagtttaatcta

SEQ ID NO: 801731 - DNA, 19 bp, Mus musculus
  siRNA target sequence for D10Ucla1 (NM_178606.2,284-302).
ggggcgagtttaatctata

SEQ ID NO: 801732 - DNA, 19 bp, Mus musculus
  siRNA target sequence for D10Ucla1 (NM_178606.2,286-304).
ggcgagtttaatctataga

SEQ ID NO: 801733 - DNA, 19 bp, Mus musculus
  siRNA target sequence for D10Ucla1 (NM_178606.2,287-305).
gcgagtttaatctatagaa

SEQ ID NO: 801734 - DNA, 19 bp, Mus musculus
  siRNA target sequence for D10Ucla1 (NM_178606.2,288-306).
cgagtttaatctatagaaa

SEQ ID NO: 801735 - DNA, 19 bp, Mus musculus
  siRNA target sequence for D10Ucla1 (NM_178606.2,291-309).
gtttaatctatagaaagtt

SEQ ID NO: 801736 - DNA, 19 bp, Mus musculus
  siRNA target sequence for D10Ucla1 (NM_178606.2,401-419).
ggacggcaaggtttgaatt

SEQ ID NO: 801737 - DNA, 19 bp, Mus musculus
  siRNA target sequence for D10Ucla1 (NM_178606.2,402-420).
gacggcaaggtttgaattt

SEQ ID NO: 801738 - DNA, 19 bp, Mus musculus
  siRNA target sequence for D10Ucla1 (NM_178606.2,471-489).
cggagcgtctgcgaagttt

SEQ ID NO: 801739 - DNA, 19 bp, Mus musculus
  siRNA target sequence for D10Ucla1 (NM_178606.2,473-491).
gagcgtctgcgaagtttca

SEQ ID NO: 801740 - DNA, 19 bp, Mus musculus
  siRNA target sequence for D10Ucla1 (NM_178606.2,486-504).
gtttcagcatgcatgatct

SEQ ID NO: 801741 - DNA, 19 bp, Mus musculus
  siRNA target sequence for D10Ucla1 (NM_178606.2,590-608).
gagtcaccagcctatggaa

SEQ ID NO: 801742 - DNA, 19 bp, Mus musculus
  siRNA target sequence for D10Ucla1 (NM_178606.2,746-764).
gtgcggtatggctcactaa

SEQ ID NO: 801743 - DNA, 19 bp, Mus musculus
  siRNA target sequence for D10Ucla1 (NM_178606.2,748-766).
gcggtatggctcactaaaa

SEQ ID NO: 801744 - DNA, 19 bp, Mus musculus
  siRNA target sequence for D10Ucla1 (NM_178606.2,749-767).
cggtatggctcactaaaat

SEQ ID NO: 801745 - DNA, 19 bp, Mus musculus
  siRNA target sequence for D10Ucla1 (NM_178606.2,750-768).
ggtatggctcactaaaata

SEQ ID NO: 801746 - DNA, 19 bp, Mus musculus
  siRNA target sequence for D10Ucla1 (NM_178606.2,751-769).
gtatggctcactaaaatat

SEQ ID NO: 801747 - DNA, 19 bp, Mus musculus
  siRNA target sequence for D10Ucla1 (NM_178606.2,781-799).
gagaccgcaagtgtatttt

SEQ ID NO: 801748 - DNA, 19 bp, Mus musculus
  siRNA target sequence for Rnf24 (NM_178607.1,128-146).
ctcagatttcccacattat

SEQ ID NO: 801749 - DNA, 19 bp, Mus musculus
  siRNA target sequence for Rnf24 (NM_178607.1,152-170).
caggatgcctaatattgga

SEQ ID NO: 801750 - DNA, 19 bp, Mus musculus
  siRNA target sequence for Rnf24 (NM_178607.1,154-172).
ggatgcctaatattggatt

SEQ ID NO: 801751 - DNA, 19 bp, Mus musculus
  siRNA target sequence for Rnf24 (NM_178607.1,184-202).
ctctcaacatctatatcgt

SEQ ID NO: 801752 - DNA, 19 bp, Mus musculus
  siRNA target sequence for Rnf24 (NM_178607.1,299-317).
ctacaaacaggttatatta

SEQ ID NO: 801753 - DNA, 19 bp, Mus musculus
  siRNA target sequence for Rnf24 (NM_178607.1,423-441).
cacagaaagtgccttgtta

SEQ ID NO: 801754 - DNA, 19 bp, Mus musculus
  siRNA target sequence for Rnf24 (NM_178607.1,497-515).
ggcccaattgcacagtaaa

SEQ ID NO: 801755 - DNA, 19 bp, Mus musculus
  siRNA target sequence for D6Ertd253e (NM_178608.2,132-150).
caggctggtggtgcttata

SEQ ID NO: 801756 - DNA, 19 bp, Mus musculus
  siRNA target sequence for D6Ertd253e (NM_178608.2,135-153).
gctggtggtgcttatattt

SEQ ID NO: 801757 - DNA, 19 bp, Mus musculus
  siRNA target sequence for D6Ertd253e (NM_178608.2,293-311).
ggtttccattctattatga

SEQ ID NO: 801758 - DNA, 19 bp, Mus musculus
  siRNA target sequence for D6Ertd253e (NM_178608.2,342-360).
gtctccctatacaaaagga

SEQ ID NO: 801759 - DNA, 19 bp, Mus musculus
  siRNA target sequence for D6Ertd253e (NM_178608.2,426-444).
ctgcctggtccaagcaaaa

SEQ ID NO: 801760 - DNA, 19 bp, Mus musculus
  siRNA target sequence for E2f7 (NM_178609.3,226-244).
gtttaacactaaaagactt

SEQ ID NO: 801761 - DNA, 19 bp, Mus musculus
  siRNA target sequence for E2f7 (NM_178609.3,296-314).
cgcacaaaaggaaaatata

SEQ ID NO: 801762 - DNA, 19 bp, Mus musculus
  siRNA target sequence for E2f7 (NM_178609.3,365-383).
gatcgacctgtcaaagcaa

SEQ ID NO: 801763 - DNA, 19 bp, Mus musculus
  siRNA target sequence for E2f7 (NM_178609.3,690-708).
ccgagctaccccttgtcaa

SEQ ID NO: 801764 - DNA, 19 bp, Mus musculus
  siRNA target sequence for E2f7 (NM_178609.3,763-781).
ggagacgcatctatgacat

SEQ ID NO: 801765 - DNA, 19 bp, Mus musculus
  siRNA target sequence for E2f7 (NM_178609.3,768-786).
cgcatctatgacatcgtaa

SEQ ID NO: 801766 - DNA, 19 bp, Mus musculus
  siRNA target sequence for E2f7 (NM_178609.3,812-830).
cagccgggtggctaagaat

SEQ ID NO: 801767 - DNA, 19 bp, Mus musculus
  siRNA target sequence for E2f7 (NM_178609.3,814-832).
gccgggtggctaagaatca

SEQ ID NO: 801768 - DNA, 19 bp, Mus musculus
  siRNA target sequence for E2f7 (NM_178609.3,816-834).
cgggtggctaagaatcagt

SEQ ID NO: 801769 - DNA, 19 bp, Mus musculus
  siRNA target sequence for E2f7 (NM_178609.3,817-835).
gggtggctaagaatcagta

SEQ ID NO: 801770 - DNA, 19 bp, Mus musculus
  siRNA target sequence for E2f7 (NM_178609.3,818-836).
ggtggctaagaatcagtat

SEQ ID NO: 801771 - DNA, 19 bp, Mus musculus
  siRNA target sequence for E2f7 (NM_178609.3,945-963).
gacctgatggggtataggt

SEQ ID NO: 801772 - DNA, 19 bp, Mus musculus
  siRNA target sequence for E2f7 (NM_178609.3,1002-1020).
gatccacacctacttgatt

SEQ ID NO: 801773 - DNA, 19 bp, Mus musculus
  siRNA target sequence for E2f7 (NM_178609.3,1005-1023).
ccacacctacttgattttt

SEQ ID NO: 801774 - DNA, 19 bp, Mus musculus
  siRNA target sequence for E2f7 (NM_178609.3,1029-1047).
gccgactacccctcttcat

SEQ ID NO: 801775 - DNA, 19 bp, Mus musculus
  siRNA target sequence for E2f7 (NM_178609.3,1031-1049).
cgactacccctcttcatct

SEQ ID NO: 801776 - DNA, 19 bp, Mus musculus
  siRNA target sequence for E2f7 (NM_178609.3,1048-1066).
ctgcaaacagtcgaaaaga

SEQ ID NO: 801777 - DNA, 19 bp, Mus musculus
  siRNA target sequence for E2f7 (NM_178609.3,1050-1068).
gcaaacagtcgaaaagata

SEQ ID NO: 801778 - DNA, 19 bp, Mus musculus
  siRNA target sequence for E2f7 (NM_178609.3,1055-1073).
cagtcgaaaagataaatct

SEQ ID NO: 801779 - DNA, 19 bp, Mus musculus
  siRNA target sequence for E2f7 (NM_178609.3,1112-1130).
cgtctccaaaaccaagatt

SEQ ID NO: 801780 - DNA, 19 bp, Mus musculus
  siRNA target sequence for E2f7 (NM_178609.3,1147-1165).
ctgccaaaatcctcataga

SEQ ID NO: 801781 - DNA, 19 bp, Mus musculus
  siRNA target sequence for E2f7 (NM_178609.3,1150-1168).
ccaaaatcctcatagaaga

SEQ ID NO: 801782 - DNA, 19 bp, Mus musculus
  siRNA target sequence for E2f7 (NM_178609.3,1180-1198).
ccccggaccacagcaaatt

SEQ ID NO: 801783 - DNA, 19 bp, Mus musculus
  siRNA target sequence for E2f7 (NM_178609.3,1183-1201).
cggaccacagcaaattcaa

SEQ ID NO: 801784 - DNA, 19 bp, Mus musculus
  siRNA target sequence for E2f7 (NM_178609.3,1193-1211).
caaattcaaaacaaaggta

SEQ ID NO: 801785 - DNA, 19 bp, Mus musculus
  siRNA target sequence for E2f7 (NM_178609.3,1209-1227).
gtacggaggctctatgaca

SEQ ID NO: 801786 - DNA, 19 bp, Mus musculus
  siRNA target sequence for E2f7 (NM_178609.3,1220-1238).
ctatgacatagccaatgtt

SEQ ID NO: 801787 - DNA, 19 bp, Mus musculus
  siRNA target sequence for E2f7 (NM_178609.3,1290-1308).
cggaaaccagccttcaagt

SEQ ID NO: 801788 - DNA, 19 bp, Mus musculus
  siRNA target sequence for E2f7 (NM_178609.3,1330-1348).
gctccattgatgaagaact

SEQ ID NO: 801789 - DNA, 19 bp, Mus musculus
  siRNA target sequence for E2f7 (NM_178609.3,1355-1373).
cgtctctgcatccatctta

SEQ ID NO: 801790 - DNA, 19 bp, Mus musculus
  siRNA target sequence for E2f7 (NM_178609.3,1430-1448).
ggtgcggtacggttccttt

SEQ ID NO: 801791 - DNA, 19 bp, Mus musculus
  siRNA target sequence for E2f7 (NM_178609.3,1431-1449).
gtgcggtacggttccttta

SEQ ID NO: 801792 - DNA, 19 bp, Mus musculus
  siRNA target sequence for E2f7 (NM_178609.3,1434-1452).
cggtacggttcctttaaca

SEQ ID NO: 801793 - DNA, 19 bp, Mus musculus
  siRNA target sequence for E2f7 (NM_178609.3,1528-1546).
cagcctattccctggaaat

SEQ ID NO: 801794 - DNA, 19 bp, Mus musculus
  siRNA target sequence for E2f7 (NM_178609.3,1658-1676).
catggactctgaatactgt

SEQ ID NO: 801795 - DNA, 19 bp, Mus musculus
  siRNA target sequence for E2f7 (NM_178609.3,1684-1702).
ctttagcccagccagtatt

SEQ ID NO: 801796 - DNA, 19 bp, Mus musculus
  siRNA target sequence for E2f7 (NM_178609.3,1705-1723).
ctgttgctcaaacagattt

SEQ ID NO: 801797 - DNA, 19 bp, Mus musculus
  siRNA target sequence for E2f7 (NM_178609.3,1786-1804).
cctccgacacagagaactt

SEQ ID NO: 801798 - DNA, 19 bp, Mus musculus
  siRNA target sequence for E2f7 (NM_178609.3,1787-1805).
ctccgacacagagaactta

SEQ ID NO: 801799 - DNA, 19 bp, Mus musculus
  siRNA target sequence for E2f7 (NM_178609.3,2053-2071).
gccccttatccctagttat

SEQ ID NO: 801800 - DNA, 19 bp, Mus musculus
  siRNA target sequence for E2f7 (NM_178609.3,2063-2081).
cctagttatgcccaagaaa

SEQ ID NO: 801801 - DNA, 19 bp, Mus musculus
  siRNA target sequence for E2f7 (NM_178609.3,2142-2160).
ctggaagacgcctgtgtta

SEQ ID NO: 801802 - DNA, 19 bp, Mus musculus
  siRNA target sequence for E2f7 (NM_178609.3,2324-2342).
gtctcccgcagggttaaat

SEQ ID NO: 801803 - DNA, 19 bp, Mus musculus
  siRNA target sequence for E2f7 (NM_178609.3,2328-2346).
cccgcagggttaaatggtt

SEQ ID NO: 801804 - DNA, 19 bp, Mus musculus
  siRNA target sequence for E2f7 (NM_178609.3,2329-2347).
ccgcagggttaaatggttt

SEQ ID NO: 801805 - DNA, 19 bp, Mus musculus
  siRNA target sequence for E2f7 (NM_178609.3,2330-2348).
cgcagggttaaatggtttt

SEQ ID NO: 801806 - DNA, 19 bp, Mus musculus
  siRNA target sequence for E2f7 (NM_178609.3,2331-2349).
gcagggttaaatggtttta

SEQ ID NO: 801807 - DNA, 19 bp, Mus musculus
  siRNA target sequence for E2f7 (NM_178609.3,2332-2350).
cagggttaaatggttttaa

SEQ ID NO: 801808 - DNA, 19 bp, Mus musculus
  siRNA target sequence for E2f7 (NM_178609.3,2335-2353).
ggttaaatggttttaacat

SEQ ID NO: 801809 - DNA, 19 bp, Mus musculus
  siRNA target sequence for E2f7 (NM_178609.3,2455-2473).
gcccttttccagttctcta

SEQ ID NO: 801810 - DNA, 19 bp, Mus musculus
  siRNA target sequence for E2f7 (NM_178609.3,2590-2608).
cagccatggtcaatccaaa

SEQ ID NO: 801811 - DNA, 19 bp, Mus musculus
  siRNA target sequence for E2f7 (NM_178609.3,2727-2745).
catccggtatcgatggtaa

SEQ ID NO: 801812 - DNA, 19 bp, Mus musculus
  siRNA target sequence for E2f7 (NM_178609.3,2796-2814).
catcgggagacgttcttca

SEQ ID NO: 801813 - DNA, 19 bp, Mus musculus
  siRNA target sequence for E2f7 (NM_178609.3,2799-2817).
cgggagacgttcttcaaga

SEQ ID NO: 801814 - DNA, 19 bp, Mus musculus
  siRNA target sequence for E2f7 (NM_178609.3,2829-2847).
ctcggcgatccggtcttta

SEQ ID NO: 801815 - DNA, 19 bp, Mus musculus
  siRNA target sequence for E2f7 (NM_178609.3,2831-2849).
cggcgatccggtctttaga

SEQ ID NO: 801816 - DNA, 19 bp, Mus musculus
  siRNA target sequence for E2f7 (NM_178609.3,2832-2850).
ggcgatccggtctttagaa

SEQ ID NO: 801817 - DNA, 19 bp, Mus musculus
  siRNA target sequence for E2f7 (NM_178609.3,2835-2853).
gatccggtctttagaagaa

SEQ ID NO: 801818 - DNA, 19 bp, Mus musculus
  siRNA target sequence for E2f7 (NM_178609.3,2861-2879).
gaaccaatcaagaaacact

SEQ ID NO: 801819 - DNA, 19 bp, Mus musculus
  siRNA target sequence for E2f7 (NM_178609.3,2887-2905).
cccagaggagactagaaat

SEQ ID NO: 801820 - DNA, 19 bp, Mus musculus
  siRNA target sequence for D7Bwg0421e (NM_178611.2,139-157).
cacacaggaggatacatct

SEQ ID NO: 801821 - DNA, 19 bp, Mus musculus
  siRNA target sequence for D7Bwg0421e (NM_178611.2,149-167).
gatacatcttggctaaaga

SEQ ID NO: 801822 - DNA, 19 bp, Mus musculus
  siRNA target sequence for D7Bwg0421e (NM_178611.2,166-184).
gacatacagcatttacatt

SEQ ID NO: 801823 - DNA, 19 bp, Mus musculus
  siRNA target sequence for D7Bwg0421e (NM_178611.2,216-234).
gtctttccgcccttctgtt

SEQ ID NO: 801824 - DNA, 19 bp, Mus musculus
  siRNA target sequence for D7Bwg0421e (NM_178611.2,242-260).
ctcaggcaccgtcagaaaa

SEQ ID NO: 801825 - DNA, 19 bp, Mus musculus
  siRNA target sequence for D7Bwg0421e (NM_178611.2,246-264).
ggcaccgtcagaaaaagca

SEQ ID NO: 801826 - DNA, 19 bp, Mus musculus
  siRNA target sequence for D7Bwg0421e (NM_178611.2,263-281).
cagggactcccaaacaaca

SEQ ID NO: 801827 - DNA, 19 bp, Mus musculus
  siRNA target sequence for D7Bwg0421e (NM_178611.2,309-327).
ggctaaatctagctactaa

SEQ ID NO: 801828 - DNA, 19 bp, Mus musculus
  siRNA target sequence for D7Bwg0421e (NM_178611.2,310-328).
gctaaatctagctactaat

SEQ ID NO: 801829 - DNA, 19 bp, Mus musculus
  siRNA target sequence for D7Bwg0421e (NM_178611.2,416-434).
cttcaagaggtgacgtata

SEQ ID NO: 801830 - DNA, 19 bp, Mus musculus
  siRNA target sequence for 2610019P18Rik (NM_178612.2,129-147).
gggctgaggcgacaaaaga

SEQ ID NO: 801831 - DNA, 19 bp, Mus musculus
  siRNA target sequence for 2610019P18Rik (NM_178612.2,315-333).
ctgagacgcggctagaaga

SEQ ID NO: 801832 - DNA, 19 bp, Mus musculus
  siRNA target sequence for 2610019P18Rik (NM_178612.2,357-375).
ggatcctggattacaatgt

SEQ ID NO: 801833 - DNA, 19 bp, Mus musculus
  siRNA target sequence for 2610019P18Rik (NM_178612.2,358-376).
gatcctggattacaatgtt

SEQ ID NO: 801834 - DNA, 19 bp, Mus musculus
  siRNA target sequence for 2610019P18Rik (NM_178612.2,383-401).
gaacgcaagggctcactaa

SEQ ID NO: 801835 - DNA, 19 bp, Mus musculus
  siRNA target sequence for 2610019P18Rik (NM_178612.2,386-404).
cgcaagggctcactaagat

SEQ ID NO: 801836 - DNA, 19 bp, Mus musculus
  siRNA target sequence for 2610019P18Rik (NM_178612.2,504-522).
ccagtgtggaggtcacatt

SEQ ID NO: 801837 - DNA, 19 bp, Mus musculus
  siRNA target sequence for 2610019P18Rik (NM_178612.2,602-620).
cccctccagcattttctct

SEQ ID NO: 801838 - DNA, 19 bp, Mus musculus
  siRNA target sequence for 2610019P18Rik (NM_178612.2,766-784).
caagcatgacccagaagat

SEQ ID NO: 801839 - DNA, 19 bp, Mus musculus
  siRNA target sequence for 4933433P14Rik (NM_178613.2,80-98).
cgagctcaatgggtttgaa

SEQ ID NO: 801840 - DNA, 19 bp, Mus musculus
  siRNA target sequence for 4933433P14Rik (NM_178613.2,130-148).
ccgaggcagttgtaaacga

SEQ ID NO: 801841 - DNA, 19 bp, Mus musculus
  siRNA target sequence for 4933433P14Rik (NM_178613.2,131-149).
cgaggcagttgtaaacgat

SEQ ID NO: 801842 - DNA, 19 bp, Mus musculus
  siRNA target sequence for 4933433P14Rik (NM_178613.2,136-154).
cagttgtaaacgatgtact

SEQ ID NO: 801843 - DNA, 19 bp, Mus musculus
  siRNA target sequence for 4933433P14Rik (NM_178613.2,167-185).
ccacatgtttgtctcaaaa

SEQ ID NO: 801844 - DNA, 19 bp, Mus musculus
  siRNA target sequence for 1110030L07Rik (NM_178614.2,202-220).
ccgagtttgtggaagttga

SEQ ID NO: 801845 - DNA, 19 bp, Mus musculus
  siRNA target sequence for 1110030L07Rik (NM_178614.2,260-278).
ggtggttcagcatgttcat

SEQ ID NO: 801846 - DNA, 19 bp, Mus musculus
  siRNA target sequence for 1110030L07Rik (NM_178614.2,292-310).
ggcggactaaggatgacat

SEQ ID NO: 801847 - DNA, 19 bp, Mus musculus
  siRNA target sequence for 1110030L07Rik (NM_178614.2,295-313).
ggactaaggatgacatcat

SEQ ID NO: 801848 - DNA, 19 bp, Mus musculus
  siRNA target sequence for 1110030L07Rik (NM_178614.2,302-320).
ggatgacatcatcatttgt

SEQ ID NO: 801849 - DNA, 19 bp, Mus musculus
  siRNA target sequence for 1110030L07Rik (NM_178614.2,359-377).
ggtaatgcggcgatctcat

SEQ ID NO: 801850 - DNA, 19 bp, Mus musculus
  siRNA target sequence for 1110030L07Rik (NM_178614.2,415-433).
gacaagtggatgttttgat

SEQ ID NO: 801851 - DNA, 19 bp, Mus musculus
  siRNA target sequence for 1110030L07Rik (NM_178614.2,423-441).
gatgttttgatcgatacat

SEQ ID NO: 801852 - DNA, 19 bp, Mus musculus
  siRNA target sequence for 1110030L07Rik (NM_178614.2,458-476).
cctgcccaatgggttagat

SEQ ID NO: 801853 - DNA, 19 bp, Mus musculus
  siRNA target sequence for 1110030L07Rik (NM_178614.2,505-523).
gactgacgggcagttacaa

SEQ ID NO: 801854 - DNA, 19 bp, Mus musculus
  siRNA target sequence for 1110030L07Rik (NM_178614.2,507-525).
ctgacgggcagttacaaca

SEQ ID NO: 801855 - DNA, 19 bp, Mus musculus
  siRNA target sequence for 1110030L07Rik (NM_178614.2,539-557).
caacgaaggcagtatggta

SEQ ID NO: 801856 - DNA, 19 bp, Mus musculus
  siRNA target sequence for 1110030L07Rik (NM_178614.2,756-774).
gtgtctgcagagtacagtt

SEQ ID NO: 801857 - DNA, 19 bp, Mus musculus
  siRNA target sequence for 1110030L07Rik (NM_178614.2,758-776).
gtctgcagagtacagtttt

SEQ ID NO: 801858 - DNA, 19 bp, Mus musculus
  siRNA target sequence for 1110030L07Rik (NM_178614.2,911-929).
ggtcatcgactctcgaaat

SEQ ID NO: 801859 - DNA, 19 bp, Mus musculus
  siRNA target sequence for 1110030L07Rik (NM_178614.2,912-930).
gtcatcgactctcgaaatt

SEQ ID NO: 801860 - DNA, 19 bp, Mus musculus
  siRNA target sequence for 1110030L07Rik (NM_178614.2,914-932).
catcgactctcgaaattca

SEQ ID NO: 801861 - DNA, 19 bp, Mus musculus
  siRNA target sequence for 1110030L07Rik (NM_178614.2,917-935).
cgactctcgaaattcatct

SEQ ID NO: 801862 - DNA, 19 bp, Mus musculus
  siRNA target sequence for 1110030L07Rik (NM_178614.2,918-936).
gactctcgaaattcatcta

SEQ ID NO: 801863 - DNA, 19 bp, Mus musculus
  siRNA target sequence for 1110030L07Rik (NM_178614.2,922-940).
ctcgaaattcatctatctt

SEQ ID NO: 801864 - DNA, 19 bp, Mus musculus
  siRNA target sequence for 1110030L07Rik (NM_178614.2,946-964).
gaagaggggccttgttcaa

SEQ ID NO: 801865 - DNA, 19 bp, Mus musculus
  siRNA target sequence for 1110030L07Rik (NM_178614.2,949-967).
gaggggccttgttcaaagt

SEQ ID NO: 801866 - DNA, 19 bp, Mus musculus
  siRNA target sequence for 1110030L07Rik (NM_178614.2,951-969).
ggggccttgttcaaagtca

SEQ ID NO: 801867 - DNA, 19 bp, Mus musculus
  siRNA target sequence for 1110030L07Rik (NM_178614.2,1050-1068).
gccttggactcggtattct

SEQ ID NO: 801868 - DNA, 19 bp, Mus musculus
  siRNA target sequence for 1110030L07Rik (NM_178614.2,1151-1169).
cacgagtgtccgaggattt

SEQ ID NO: 801869 - DNA, 19 bp, Mus musculus
  siRNA target sequence for 1110030L07Rik (NM_178614.2,1156-1174).
gtgtccgaggatttagcat

SEQ ID NO: 801870 - DNA, 19 bp, Mus musculus
  siRNA target sequence for 1110030L07Rik (NM_178614.2,1279-1297).
gtggcttcggagagctttt

SEQ ID NO: 801871 - DNA, 19 bp, Mus musculus
  siRNA target sequence for 1110030L07Rik (NM_178614.2,1281-1299).
ggcttcggagagcttttca

SEQ ID NO: 801872 - DNA, 19 bp, Mus musculus
  siRNA target sequence for 1110030L07Rik (NM_178614.2,1440-1458).
cggctggagctgaactact

SEQ ID NO: 801873 - DNA, 19 bp, Mus musculus
  siRNA target sequence for 1110030L07Rik (NM_178614.2,1449-1467).
ctgaactactgcattccta

SEQ ID NO: 801874 - DNA, 19 bp, Mus musculus
  siRNA target sequence for 1110059F19Rik (NM_178615.3,656-674).
gccgctgatgggtttgact

SEQ ID NO: 801875 - DNA, 19 bp, Mus musculus
  siRNA target sequence for 1110059F19Rik (NM_178615.3,709-727).
ctgcacccagcgaacttca

SEQ ID NO: 801876 - DNA, 19 bp, Mus musculus
  siRNA target sequence for 1110059F19Rik (NM_178615.3,904-922).
gagacctcccaattacctt

SEQ ID NO: 801877 - DNA, 19 bp, Mus musculus
  siRNA target sequence for 1110059F19Rik (NM_178615.3,944-962).
cctcaccttcgaactttca

SEQ ID NO: 801878 - DNA, 19 bp, Mus musculus
  siRNA target sequence for 1110059F19Rik (NM_178615.3,954-972).
gaactttcaaggatcactt

SEQ ID NO: 801879 - DNA, 19 bp, Mus musculus
  siRNA target sequence for 1110059F19Rik (NM_178615.3,999-1017).
ggccactcatagacaacaa

SEQ ID NO: 801880 - DNA, 19 bp, Mus musculus
  siRNA target sequence for 1110059F19Rik (NM_178615.3,1000-1018).
gccactcatagacaacaat

SEQ ID NO: 801881 - DNA, 19 bp, Mus musculus
  siRNA target sequence for 1110059F19Rik (NM_178615.3,1001-1019).
ccactcatagacaacaatt

SEQ ID NO: 801882 - DNA, 19 bp, Mus musculus
  siRNA target sequence for 1110059F19Rik (NM_178615.3,1002-1020).
cactcatagacaacaatta

SEQ ID NO: 801883 - DNA, 19 bp, Mus musculus
  siRNA target sequence for 1110059F19Rik (NM_178615.3,1077-1095).
caaacaaggtcacgattat

SEQ ID NO: 801884 - DNA, 19 bp, Mus musculus
  siRNA target sequence for 1110059F19Rik (NM_178615.3,1084-1102).
ggtcacgattatcttcaaa

SEQ ID NO: 801885 - DNA, 19 bp, Mus musculus
  siRNA target sequence for 1110059F19Rik (NM_178615.3,1233-1251).
gtggccgctacgtagagat

SEQ ID NO: 801886 - DNA, 19 bp, Mus musculus
  siRNA target sequence for 1110059F19Rik (NM_178615.3,1249-1267).
gatgcatgcccgctacata

SEQ ID NO: 801887 - DNA, 19 bp, Mus musculus
  siRNA target sequence for 1110059F19Rik (NM_178615.3,1289-1307).
cagctgggtcgctacctaa

SEQ ID NO: 801888 - DNA, 19 bp, Mus musculus
  siRNA target sequence for 1110059F19Rik (NM_178615.3,1382-1400).
ggctgccccatgagtgaat

SEQ ID NO: 801889 - DNA, 19 bp, Mus musculus
  siRNA target sequence for 1110059F19Rik (NM_178615.3,1386-1404).
gccccatgagtgaatgcat

SEQ ID NO: 801890 - DNA, 19 bp, Mus musculus
  siRNA target sequence for 1110059F19Rik (NM_178615.3,1387-1405).
ccccatgagtgaatgcatt

SEQ ID NO: 801891 - DNA, 19 bp, Mus musculus
  siRNA target sequence for 1110059F19Rik (NM_178615.3,1390-1408).
catgagtgaatgcattgat

SEQ ID NO: 801892 - DNA, 19 bp, Mus musculus
  siRNA target sequence for 1110059F19Rik (NM_178615.3,1506-1524).
cccaatgccacgagaagat

SEQ ID NO: 801893 - DNA, 19 bp, Mus musculus
  siRNA target sequence for 1110059F19Rik (NM_178615.3,1525-1543).
gccggtgaaggacatctat

SEQ ID NO: 801894 - DNA, 19 bp, Mus musculus
  siRNA target sequence for 1110059F19Rik (NM_178615.3,1526-1544).
ccggtgaaggacatctatt

SEQ ID NO: 801895 - DNA, 19 bp, Mus musculus
  siRNA target sequence for 1110059F19Rik (NM_178615.3,1527-1545).
cggtgaaggacatctattt

SEQ ID NO: 801896 - DNA, 19 bp, Mus musculus
  siRNA target sequence for 1110059F19Rik (NM_178615.3,1531-1549).
gaaggacatctatttccaa

SEQ ID NO: 801897 - DNA, 19 bp, Mus musculus
  siRNA target sequence for 1110059F19Rik (NM_178615.3,1711-1729).
cacatgcttgatccttatt

SEQ ID NO: 801898 - DNA, 19 bp, Mus musculus
  siRNA target sequence for 1110059F19Rik (NM_178615.3,1716-1734).
gcttgatccttattatgtt

SEQ ID NO: 801899 - DNA, 19 bp, Mus musculus
  siRNA target sequence for Psmd11 (NM_178616.2,125-143).
catcgtgaaacgtgacatt

SEQ ID NO: 801900 - DNA, 19 bp, Mus musculus
  siRNA target sequence for Psmd11 (NM_178616.2,128-146).
cgtgaaacgtgacattcaa

SEQ ID NO: 801901 - DNA, 19 bp, Mus musculus
  siRNA target sequence for Psmd11 (NM_178616.2,131-149).
gaaacgtgacattcaagaa

SEQ ID NO: 801902 - DNA, 19 bp, Mus musculus
  siRNA target sequence for Psmd11 (NM_178616.2,353-371).
ggaggtcgagctatgttta

SEQ ID NO: 801903 - DNA, 19 bp, Mus musculus
  siRNA target sequence for Psmd11 (NM_178616.2,377-395).
catcgaatgggccaaatca

SEQ ID NO: 801904 - DNA, 19 bp, Mus musculus
  siRNA target sequence for Psmd11 (NM_178616.2,406-424).
ctttcttacgccaagcatt

SEQ ID NO: 801905 - DNA, 19 bp, Mus musculus
  siRNA target sequence for Psmd11 (NM_178616.2,498-516).
cttcgggagttgaaaaaga

SEQ ID NO: 801906 - DNA, 19 bp, Mus musculus
  siRNA target sequence for Psmd11 (NM_178616.2,565-583).
cttaccatgctctgagtaa

SEQ ID NO: 801907 - DNA, 19 bp, Mus musculus
  siRNA target sequence for Psmd11 (NM_178616.2,674-692).
gcagtcaggcattattcat

SEQ ID NO: 801908 - DNA, 19 bp, Mus musculus
  siRNA target sequence for Psmd11 (NM_178616.2,712-730).
ggaaaactgcatactcata

SEQ ID NO: 801909 - DNA, 19 bp, Mus musculus
  siRNA target sequence for Psmd11 (NM_178616.2,718-736).
ctgcatactcatacttcta

SEQ ID NO: 801910 - DNA, 19 bp, Mus musculus
  siRNA target sequence for Psmd11 (NM_178616.2,721-739).
catactcatacttctatga

SEQ ID NO: 801911 - DNA, 19 bp, Mus musculus
  siRNA target sequence for Psmd11 (NM_178616.2,731-749).
cttctatgaggcattcgaa

SEQ ID NO: 801912 - DNA, 19 bp, Mus musculus
  siRNA target sequence for Psmd11 (NM_178616.2,750-768).
ggctacgactccattgata

SEQ ID NO: 801913 - DNA, 19 bp, Mus musculus
  siRNA target sequence for Psmd11 (NM_178616.2,818-836).
gctcaacaccccagaagat

SEQ ID NO: 801914 - DNA, 19 bp, Mus musculus
  siRNA target sequence for Psmd11 (NM_178616.2,885-903).
cagacagaagcattgaaat

SEQ ID NO: 801915 - DNA, 19 bp, Mus musculus
  siRNA target sequence for Psmd11 (NM_178616.2,978-996).
cgggatgacccaatcatca

SEQ ID NO: 801916 - DNA, 19 bp, Mus musculus
  siRNA target sequence for Psmd11 (NM_178616.2,987-1005).
ccaatcatcagcacacatt

SEQ ID NO: 801917 - DNA, 19 bp, Mus musculus
  siRNA target sequence for Psmd11 (NM_178616.2,1009-1027).
ccaagctgtacgataactt

SEQ ID NO: 801918 - DNA, 19 bp, Mus musculus
  siRNA target sequence for Psmd11 (NM_178616.2,1010-1028).
caagctgtacgataactta

SEQ ID NO: 801919 - DNA, 19 bp, Mus musculus
  siRNA target sequence for Psmd11 (NM_178616.2,1071-1089).
gtccagattgaacacatat

SEQ ID NO: 801920 - DNA, 19 bp, Mus musculus
  siRNA target sequence for Psmd11 (NM_178616.2,1085-1103).
catatctagcctcatcaaa

SEQ ID NO: 801921 - DNA, 19 bp, Mus musculus
  siRNA target sequence for Psmd11 (NM_178616.2,1112-1130).
ggccgacgtggaaagaaaa

SEQ ID NO: 801922 - DNA, 19 bp, Mus musculus
  siRNA target sequence for Psmd11 (NM_178616.2,1115-1133).
cgacgtggaaagaaaatta

SEQ ID NO: 801923 - DNA, 19 bp, Mus musculus
  siRNA target sequence for Psmd11 (NM_178616.2,1181-1199).
ggagggtgtcctgatcatt

SEQ ID NO: 801924 - DNA, 19 bp, Mus musculus
  siRNA target sequence for Psmd11 (NM_178616.2,1186-1204).
gtgtcctgatcattttcga

SEQ ID NO: 801925 - DNA, 19 bp, Mus musculus
  siRNA target sequence for Psmd11 (NM_178616.2,1202-1220).
cgatgaacccccagtagat

SEQ ID NO: 801926 - DNA, 19 bp, Mus musculus
  siRNA target sequence for Psmd11 (NM_178616.2,1203-1221).
gatgaacccccagtagata

SEQ ID NO: 801927 - DNA, 19 bp, Mus musculus
  siRNA target sequence for Psmd11 (NM_178616.2,1209-1227).
cccccagtagataaaactt

SEQ ID NO: 801928 - DNA, 19 bp, Mus musculus
  siRNA target sequence for Psmd11 (NM_178616.2,1210-1228).
ccccagtagataaaactta

SEQ ID NO: 801929 - DNA, 19 bp, Mus musculus
  siRNA target sequence for Psmd11 (NM_178616.2,1213-1231).
cagtagataaaacttatga

SEQ ID NO: 801930 - DNA, 19 bp, Mus musculus
  siRNA target sequence for Psmd11 (NM_178616.2,1237-1255).
ctctggaaactattcagaa

SEQ ID NO: 801931 - DNA, 19 bp, Mus musculus
  siRNA target sequence for 2310040C09Rik (NM_178618.2,133-151).
cgaagcccgagttcttcta

SEQ ID NO: 801932 - DNA, 19 bp, Mus musculus
  siRNA target sequence for 2310040C09Rik (NM_178618.2,230-248).
gaacatccgcgactttctt

SEQ ID NO: 801933 - DNA, 19 bp, Mus musculus
  siRNA target sequence for 2310040C09Rik (NM_178618.2,411-429).
ctgccctcgctggagtatt

SEQ ID NO: 801934 - DNA, 19 bp, Mus musculus
  siRNA target sequence for 2310040C09Rik (NM_178618.2,690-708).
gtggatgagagtaatgtca

SEQ ID NO: 801935 - DNA, 19 bp, Mus musculus
  siRNA target sequence for 2310040C09Rik (NM_178618.2,750-768).
gggcacctcaagaatctca

SEQ ID NO: 801936 - DNA, 19 bp, Mus musculus
  siRNA target sequence for 2310040C09Rik (NM_178618.2,937-955).
ctggtcaggtagtagagat

SEQ ID NO: 801937 - DNA, 19 bp, Mus musculus
  siRNA target sequence for 2310040C09Rik (NM_178618.2,940-958).
gtcaggtagtagagatgtt

SEQ ID NO: 801938 - DNA, 19 bp, Mus musculus
  siRNA target sequence for 2310040C09Rik (NM_178618.2,944-962).
ggtagtagagatgtttgat

SEQ ID NO: 801939 - DNA, 19 bp, Mus musculus
  siRNA target sequence for 2310040C09Rik (NM_178618.2,972-990).
caggagctgtaccttatgt

SEQ ID NO: 801940 - DNA, 19 bp, Mus musculus
  siRNA target sequence for 2310040C09Rik (NM_178618.2,974-992).
ggagctgtaccttatgtct

SEQ ID NO: 801941 - DNA, 19 bp, Mus musculus
  siRNA target sequence for 2310040C09Rik (NM_178618.2,1275-1293).
ctggagagggccaatatgt

SEQ ID NO: 801942 - DNA, 19 bp, Mus musculus
  siRNA target sequence for 2310040C09Rik (NM_178618.2,1277-1295).
ggagagggccaatatgttt

SEQ ID NO: 801943 - DNA, 19 bp, Mus musculus
  siRNA target sequence for 2310040C09Rik (NM_178618.2,1282-1300).
gggccaatatgtttgagta

SEQ ID NO: 801944 - DNA, 19 bp, Mus musculus
  siRNA target sequence for 2310040C09Rik (NM_178618.2,1398-1416).
cagatgaaccgcatcaaga

SEQ ID NO: 801945 - DNA, 19 bp, Mus musculus
  siRNA target sequence for 2310040C09Rik (NM_178618.2,1909-1927).
ccatgtcagacgagtactt

SEQ ID NO: 801946 - DNA, 19 bp, Mus musculus
  siRNA target sequence for 2310040C09Rik (NM_178618.2,1931-1949).
ggtgagggaacgatcagta

SEQ ID NO: 801947 - DNA, 19 bp, Mus musculus
  siRNA target sequence for 2310040C09Rik (NM_178618.2,2012-2030).
gctcagtgcccctcatgta

SEQ ID NO: 801948 - DNA, 19 bp, Mus musculus
  siRNA target sequence for 2310040C09Rik (NM_178618.2,2078-2096).
gggtcggagcagagaagat

SEQ ID NO: 801949 - DNA, 19 bp, Mus musculus
  siRNA target sequence for 2310040C09Rik (NM_178618.2,2080-2098).
gtcggagcagagaagatgt

SEQ ID NO: 801950 - DNA, 19 bp, Mus musculus
  siRNA target sequence for 2310040C09Rik (NM_178618.2,2159-2177).
ccaccgacatggaagtact

SEQ ID NO: 801951 - DNA, 19 bp, Mus musculus
  siRNA target sequence for 2310040C09Rik (NM_178618.2,2160-2178).
caccgacatggaagtacta

SEQ ID NO: 801952 - DNA, 19 bp, Mus musculus
  siRNA target sequence for 1810026J23Rik (NM_178619.2,72-90).
gtgacagcggctcttaaga

SEQ ID NO: 801953 - DNA, 19 bp, Mus musculus
  siRNA target sequence for 1810026J23Rik (NM_178619.2,74-92).
gacagcggctcttaagaga

SEQ ID NO: 801954 - DNA, 19 bp, Mus musculus
  siRNA target sequence for 1810026J23Rik (NM_178619.2,459-477).
gtgaacctgggcttttgct

SEQ ID NO: 801955 - DNA, 19 bp, Mus musculus
  siRNA target sequence for 1810026J23Rik (NM_178619.2,469-487).
gcttttgctcgctggttta

SEQ ID NO: 801956 - DNA, 19 bp, Mus musculus
  siRNA target sequence for 1810026J23Rik (NM_178619.2,575-593).
cctcgacgtgggtttcgtt

SEQ ID NO: 801957 - DNA, 19 bp, Mus musculus
  siRNA target sequence for 1810026J23Rik (NM_178619.2,612-630).
cagaatcgcatgcatgatt

SEQ ID NO: 801958 - DNA, 19 bp, Mus musculus
  siRNA target sequence for 1810026J23Rik (NM_178619.2,731-749).
gaagtacaagccgatcata

SEQ ID NO: 801959 - DNA, 19 bp, Mus musculus
  siRNA target sequence for 1810026J23Rik (NM_178619.2,843-861).
ctggttcagtccgatgttt

SEQ ID NO: 801960 - DNA, 19 bp, Mus musculus
  siRNA target sequence for 2600014M03Rik (NM_178620.2,265-283).
cccggagtctaaaaagctt

SEQ ID NO: 801961 - DNA, 19 bp, Mus musculus
  siRNA target sequence for 2600014M03Rik (NM_178620.2,267-285).
cggagtctaaaaagctttt

SEQ ID NO: 801962 - DNA, 19 bp, Mus musculus
  siRNA target sequence for 2600014M03Rik (NM_178620.2,273-291).
ctaaaaagcttttcaacat

SEQ ID NO: 801963 - DNA, 19 bp, Mus musculus
  siRNA target sequence for 2600014M03Rik (NM_178620.2,280-298).
gcttttcaacatcgttatt

SEQ ID NO: 801964 - DNA, 19 bp, Mus musculus
  siRNA target sequence for 2600014M03Rik (NM_178620.2,331-349).
ctttcagacttgtggaaat

SEQ ID NO: 801965 - DNA, 19 bp, Mus musculus
  siRNA target sequence for 2600014M03Rik (NM_178620.2,345-363).
gaaatgtggcgcaaactgt

SEQ ID NO: 801966 - DNA, 19 bp, Mus musculus
  siRNA target sequence for 2600014M03Rik (NM_178620.2,360-378).
ctgtcatcaggagcttaaa

SEQ ID NO: 801967 - DNA, 19 bp, Mus musculus
  siRNA target sequence for 2600014M03Rik (NM_178620.2,362-380).
gtcatcaggagcttaaata

SEQ ID NO: 801968 - DNA, 19 bp, Mus musculus
  siRNA target sequence for 2600014M03Rik (NM_178620.2,430-448).
cgtgttctctgcttcaaat

SEQ ID NO: 801969 - DNA, 19 bp, Mus musculus
  siRNA target sequence for 2600014M03Rik (NM_178620.2,431-449).
gtgttctctgcttcaaatt

SEQ ID NO: 801970 - DNA, 19 bp, Mus musculus
  siRNA target sequence for 2600014M03Rik (NM_178620.2,460-478).
gtccgtggtcgccattgtt

SEQ ID NO: 801971 - DNA, 19 bp, Mus musculus
  siRNA target sequence for 2600014M03Rik (NM_178620.2,617-635).
ggaaattgcctgacgataa

SEQ ID NO: 801972 - DNA, 19 bp, Mus musculus
  siRNA target sequence for 2600014M03Rik (NM_178620.2,656-674).
gggagaaacagcggaattt

SEQ ID NO: 801973 - DNA, 19 bp, Mus musculus
  siRNA target sequence for 2600014M03Rik (NM_178620.2,657-675).
ggagaaacagcggaatttt

SEQ ID NO: 801974 - DNA, 19 bp, Mus musculus
  siRNA target sequence for 2600014M03Rik (NM_178620.2,703-721).
ctttgggaatctctacata

SEQ ID NO: 801975 - DNA, 19 bp, Mus musculus
  siRNA target sequence for 2600014M03Rik (NM_178620.2,707-725).
gggaatctctacatatatt

SEQ ID NO: 801976 - DNA, 19 bp, Mus musculus
  siRNA target sequence for 2600014M03Rik (NM_178620.2,761-779).
gaccgaaggacagtgttta

SEQ ID NO: 801977 - DNA, 19 bp, Mus musculus
  siRNA target sequence for 2600014M03Rik (NM_178620.2,763-781).
ccgaaggacagtgtttatt

SEQ ID NO: 801978 - DNA, 19 bp, Mus musculus
  siRNA target sequence for 2600014M03Rik (NM_178620.2,897-915).
ccgagtctgcccagaacaa

SEQ ID NO: 801979 - DNA, 19 bp, Mus musculus
  siRNA target sequence for 2600014M03Rik (NM_178620.2,925-943).
ggcagtcgatgcgtttaaa

SEQ ID NO: 801980 - DNA, 19 bp, Mus musculus
  siRNA target sequence for 2600014M03Rik (NM_178620.2,926-944).
gcagtcgatgcgtttaaaa

SEQ ID NO: 801981 - DNA, 19 bp, Mus musculus
  siRNA target sequence for 2600014M03Rik (NM_178620.2,927-945).
cagtcgatgcgtttaaaaa

SEQ ID NO: 801982 - DNA, 19 bp, Mus musculus
  siRNA target sequence for 2600014M03Rik (NM_178620.2,929-947).
gtcgatgcgtttaaaaagt

SEQ ID NO: 801983 - DNA, 19 bp, Mus musculus
  siRNA target sequence for 2600014M03Rik (NM_178620.2,931-949).
cgatgcgtttaaaaagtct

SEQ ID NO: 801984 - DNA, 19 bp, Mus musculus
  siRNA target sequence for 2600014M03Rik (NM_178620.2,1033-1051).
ggtgtacggtacctgtatt

SEQ ID NO: 801985 - DNA, 19 bp, Mus musculus
  siRNA target sequence for 2600014M03Rik (NM_178620.2,1114-1132).
cggcattggagagatttta

SEQ ID NO: 801986 - DNA, 19 bp, Mus musculus
  siRNA target sequence for 2600014M03Rik (NM_178620.2,1117-1135).
cattggagagattttaggt

SEQ ID NO: 801987 - DNA, 19 bp, Mus musculus
  siRNA target sequence for 2600014M03Rik (NM_178620.2,1211-1229).
cacttcgtagccttctact

SEQ ID NO: 801988 - DNA, 19 bp, Mus musculus
  siRNA target sequence for 2600014M03Rik (NM_178620.2,1217-1235).
gtagccttctacttgatct

SEQ ID NO: 801989 - DNA, 19 bp, Mus musculus
  siRNA target sequence for 2600014M03Rik (NM_178620.2,1300-1318).
caggcccagcaaagaagtt

SEQ ID NO: 801990 - DNA, 19 bp, Mus musculus
  siRNA target sequence for 2600014M03Rik (NM_178620.2,1380-1398).
gcattctgggttttctcta

SEQ ID NO: 801991 - DNA, 19 bp, Mus musculus
  siRNA target sequence for 2600014M03Rik (NM_178620.2,1418-1436).
gccttcgcggtctttaagt

SEQ ID NO: 801992 - DNA, 19 bp, Mus musculus
  siRNA target sequence for 2600014M03Rik (NM_178620.2,1419-1437).
ccttcgcggtctttaagtt

SEQ ID NO: 801993 - DNA, 19 bp, Mus musculus
  siRNA target sequence for 2600014M03Rik (NM_178620.2,1420-1438).
cttcgcggtctttaagttt

SEQ ID NO: 801994 - DNA, 19 bp, Mus musculus
  siRNA target sequence for 2600014M03Rik (NM_178620.2,1423-1441).
cgcggtctttaagtttgtt

SEQ ID NO: 801995 - DNA, 19 bp, Mus musculus
  siRNA target sequence for 2600014M03Rik (NM_178620.2,1452-1470).
gcgcagccgtggccttttt

SEQ ID NO: 801996 - DNA, 19 bp, Mus musculus
  siRNA target sequence for 2600014M03Rik (NM_178620.2,1457-1475).
gccgtggcctttttctaca

SEQ ID NO: 801997 - DNA, 19 bp, Mus musculus
  siRNA target sequence for 2600014M03Rik (NM_178620.2,1588-1606).
ctcggactaccgaagcatt

SEQ ID NO: 801998 - DNA, 19 bp, Mus musculus
  siRNA target sequence for 4921522K17Rik (NM_178621.2,217-235).
ccgtgtgaggagatcaaga

SEQ ID NO: 801999 - DNA, 19 bp, Mus musculus
  siRNA target sequence for 4921522K17Rik (NM_178621.2,263-281).
gcgaccgtgatggtaacaa

SEQ ID NO: 802000 - DNA, 19 bp, Mus musculus
  siRNA target sequence for 4921522K17Rik (NM_178621.2,264-282).
cgaccgtgatggtaacaaa

SEQ ID NO: 802001 - DNA, 19 bp, Mus musculus
  siRNA target sequence for 4921522K17Rik (NM_178621.2,265-283).
gaccgtgatggtaacaaat

SEQ ID NO: 802002 - DNA, 19 bp, Mus musculus
  siRNA target sequence for 4921522K17Rik (NM_178621.2,267-285).
ccgtgatggtaacaaatca

SEQ ID NO: 802003 - DNA, 19 bp, Mus musculus
  siRNA target sequence for 4921522K17Rik (NM_178621.2,325-343).
ccacataacatcaaaataa

SEQ ID NO: 802004 - DNA, 19 bp, Mus musculus
  siRNA target sequence for 4921522K17Rik (NM_178621.2,403-421).
cgcatcacgcactacttca

SEQ ID NO: 802005 - DNA, 19 bp, Mus musculus
  siRNA target sequence for 4921522K17Rik (NM_178621.2,444-462).
caagaactcgaacaagttt

SEQ ID NO: 802006 - DNA, 19 bp, Mus musculus
  siRNA target sequence for 4921522K17Rik (NM_178621.2,447-465).
gaactcgaacaagtttaaa

SEQ ID NO: 802007 - DNA, 19 bp, Mus musculus
  siRNA target sequence for 4921522K17Rik (NM_178621.2,452-470).
cgaacaagtttaaacacaa

SEQ ID NO: 802008 - DNA, 19 bp, Mus musculus
  siRNA target sequence for 4921522K17Rik (NM_178621.2,540-558).
gagcccaaggactgagtat

SEQ ID NO: 802009 - DNA, 19 bp, Mus musculus
  siRNA target sequence for 4921522K17Rik (NM_178621.2,567-585).
ggtacagactgcctcaaaa

SEQ ID NO: 802010 - DNA, 19 bp, Mus musculus
  siRNA target sequence for 4921522K17Rik (NM_178621.2,598-616).
gattacgtcgtgtctgaat

SEQ ID NO: 802011 - DNA, 19 bp, Mus musculus
  siRNA target sequence for 4921522K17Rik (NM_178621.2,609-627).
gtctgaatggagtgagatt

SEQ ID NO: 802012 - DNA, 19 bp, Mus musculus
  siRNA target sequence for 4921522K17Rik (NM_178621.2,644-662).
cagattactccaaagttca

SEQ ID NO: 802013 - DNA, 19 bp, Mus musculus
  siRNA target sequence for 4921522K17Rik (NM_178621.2,651-669).
ctccaaagttcatctaaca

SEQ ID NO: 802014 - DNA, 19 bp, Mus musculus
  siRNA target sequence for 4921522K17Rik (NM_178621.2,697-715).
gcaggacgcatgcttaagt

SEQ ID NO: 802015 - DNA, 19 bp, Mus musculus
  siRNA target sequence for 4921522K17Rik (NM_178621.2,698-716).
caggacgcatgcttaagtt

SEQ ID NO: 802016 - DNA, 19 bp, Mus musculus
  siRNA target sequence for 4921522K17Rik (NM_178621.2,730-748).
cggaaccagcacaaagagt

SEQ ID NO: 802017 - DNA, 19 bp, Mus musculus
  siRNA target sequence for 4921522K17Rik (NM_178621.2,731-749).
ggaaccagcacaaagagta

SEQ ID NO: 802018 - DNA, 19 bp, Mus musculus
  siRNA target sequence for 4921522K17Rik (NM_178621.2,739-757).
cacaaagagtattttgact

SEQ ID NO: 802019 - DNA, 19 bp, Mus musculus
  siRNA target sequence for 4921522K17Rik (NM_178621.2,756-774).
ctatgtgagagaacactat

SEQ ID NO: 802020 - DNA, 19 bp, Mus musculus
  siRNA target sequence for 4921522K17Rik (NM_178621.2,766-784).
gaacactatgggaatgcta

SEQ ID NO: 802021 - DNA, 19 bp, Mus musculus
  siRNA target sequence for 4921522K17Rik (NM_178621.2,790-808).
ccttccatcaaggataaca

SEQ ID NO: 802022 - DNA, 19 bp, Mus musculus
  siRNA target sequence for 4921522K17Rik (NM_178621.2,894-912).
ccaggattcaccatatgga

SEQ ID NO: 802023 - DNA, 19 bp, Mus musculus
  siRNA target sequence for 4921522K17Rik (NM_178621.2,895-913).
caggattcaccatatggaa

SEQ ID NO: 802024 - DNA, 19 bp, Mus musculus
  siRNA target sequence for 4921522K17Rik (NM_178621.2,927-945).
gattgcagcagaaaaactt

SEQ ID NO: 802025 - DNA, 19 bp, Mus musculus
  siRNA target sequence for 4921522K17Rik (NM_178621.2,931-949).
gcagcagaaaaacttttca

SEQ ID NO: 802026 - DNA, 19 bp, Mus musculus
  siRNA target sequence for 4921522K17Rik (NM_178621.2,952-970).
cccaatactaacttatact

SEQ ID NO: 802027 - DNA, 19 bp, Mus musculus
  siRNA target sequence for 4921522K17Rik (NM_178621.2,953-971).
ccaatactaacttatactt

SEQ ID NO: 802028 - DNA, 19 bp, Mus musculus
  siRNA target sequence for 4921522K17Rik (NM_178621.2,986-1004).
gtatgtacacggcttatca

SEQ ID NO: 802029 - DNA, 19 bp, Mus musculus
  siRNA target sequence for 4921522K17Rik (NM_178621.2,990-1008).
gtacacggcttatcattat

SEQ ID NO: 802030 - DNA, 19 bp, Mus musculus
  siRNA target sequence for 4921522K17Rik (NM_178621.2,995-1013).
cggcttatcattatgtgat

SEQ ID NO: 802031 - DNA, 19 bp, Mus musculus
  siRNA target sequence for 4921522K17Rik (NM_178621.2,998-1016).
cttatcattatgtgattct

SEQ ID NO: 802032 - DNA, 19 bp, Mus musculus
  siRNA target sequence for 4921522K17Rik (NM_178621.2,1034-1052).
gatcaccaggagatgaatt

SEQ ID NO: 802033 - DNA, 19 bp, Mus musculus
  siRNA target sequence for 4921522K17Rik (NM_178621.2,1059-1077).
gcagcgccttcctcaacta

SEQ ID NO: 802034 - DNA, 19 bp, Mus musculus
  siRNA target sequence for 4921522K17Rik (NM_178621.2,1060-1078).
cagcgccttcctcaactaa

SEQ ID NO: 802035 - DNA, 19 bp, Mus musculus
  siRNA target sequence for 4921522K17Rik (NM_178621.2,1062-1080).
gcgccttcctcaactaaat

SEQ ID NO: 802036 - DNA, 19 bp, Mus musculus
  siRNA target sequence for 4921522K17Rik (NM_178621.2,1063-1081).
cgccttcctcaactaaatt

SEQ ID NO: 802037 - DNA, 19 bp, Mus musculus
  siRNA target sequence for 4921522K17Rik (NM_178621.2,1066-1084).
cttcctcaactaaattcca

SEQ ID NO: 802038 - DNA, 19 bp, Mus musculus
  siRNA target sequence for 4921522K17Rik (NM_178621.2,1075-1093).
ctaaattccaaggataata

SEQ ID NO: 802039 - DNA, 19 bp, Mus musculus
  siRNA target sequence for 4921522K17Rik (NM_178621.2,1101-1119).
gacctgtacagaagaagat

SEQ ID NO: 802040 - DNA, 19 bp, Mus musculus
  siRNA target sequence for 4921522K17Rik (NM_178621.2,1138-1156).
cacgcccaggatgtcattt

SEQ ID NO: 802041 - DNA, 19 bp, Mus musculus
  siRNA target sequence for 4921522K17Rik (NM_178621.2,1197-1215).
caccgtggcagaaatcact

SEQ ID NO: 802042 - DNA, 19 bp, Mus musculus
  siRNA target sequence for 4921522K17Rik (NM_178621.2,1217-1235).
gtcatcagctcatgagttt

SEQ ID NO: 802043 - DNA, 19 bp, Mus musculus
  siRNA target sequence for 2400003N08Rik (NM_178622.3,389-407).
gtacgctccaggaatatca

SEQ ID NO: 802044 - DNA, 19 bp, Mus musculus
  siRNA target sequence for 2400003N08Rik (NM_178622.3,392-410).
cgctccaggaatatcagaa

SEQ ID NO: 802045 - DNA, 19 bp, Mus musculus
  siRNA target sequence for 2400003N08Rik (NM_178622.3,490-508).
gtggagaggaattacatta

SEQ ID NO: 802046 - DNA, 19 bp, Mus musculus
  siRNA target sequence for 2400003N08Rik (NM_178622.3,492-510).
ggagaggaattacattaaa

SEQ ID NO: 802047 - DNA, 19 bp, Mus musculus
  siRNA target sequence for 2400003N08Rik (NM_178622.3,625-643).
gagctgactggagattcta

SEQ ID NO: 802048 - DNA, 19 bp, Mus musculus
  siRNA target sequence for 2400003N08Rik (NM_178622.3,630-648).
gactggagattctatggaa

SEQ ID NO: 802049 - DNA, 19 bp, Mus musculus
  siRNA target sequence for 2400003N08Rik (NM_178622.3,635-653).
gagattctatggaagtgaa

SEQ ID NO: 802050 - DNA, 19 bp, Mus musculus
  siRNA target sequence for 2400003N08Rik (NM_178622.3,646-664).
gaagtgaaacccatcatga

SEQ ID NO: 802051 - DNA, 19 bp, Mus musculus
  siRNA target sequence for 2400003N08Rik (NM_178622.3,656-674).
ccatcatgaccagaaaatt

SEQ ID NO: 802052 - DNA, 19 bp, Mus musculus
  siRNA target sequence for 2400003N08Rik (NM_178622.3,782-800).
ggacgctgaacaagcttaa

SEQ ID NO: 802053 - DNA, 19 bp, Mus musculus
  siRNA target sequence for 2400003N08Rik (NM_178622.3,786-804).
gctgaacaagcttaagtca

SEQ ID NO: 802054 - DNA, 19 bp, Mus musculus
  siRNA target sequence for 2400003N08Rik (NM_178622.3,824-842).
catcctctcctgaacactt

SEQ ID NO: 802055 - DNA, 19 bp, Mus musculus
  siRNA target sequence for 2400003N08Rik (NM_178622.3,904-922).
ctgtactatgataagagat

SEQ ID NO: 802056 - DNA, 19 bp, Mus musculus
  siRNA target sequence for 2400003N08Rik (NM_178622.3,940-958).
gccatctacctggaatcta

SEQ ID NO: 802057 - DNA, 19 bp, Mus musculus
  siRNA target sequence for 2010005J08Rik (NM_178623.2,52-70).
ggggatagaagtggaatta

SEQ ID NO: 802058 - DNA, 19 bp, Mus musculus
  siRNA target sequence for 2010005J08Rik (NM_178623.2,103-121).
ggccccagaagtaaaacct

SEQ ID NO: 802059 - DNA, 19 bp, Mus musculus
  siRNA target sequence for 2010005J08Rik (NM_178623.2,143-161).
gcaattgcagatttggaat

SEQ ID NO: 802060 - DNA, 19 bp, Mus musculus
  siRNA target sequence for 2010005J08Rik (NM_178623.2,157-175).
ggaatggagagaaatggaa

SEQ ID NO: 802061 - DNA, 19 bp, Mus musculus
  siRNA target sequence for 2010005J08Rik (NM_178623.2,184-202).
ctgcgggttccattatgga

SEQ ID NO: 802062 - DNA, 19 bp, Mus musculus
  siRNA target sequence for 2010005J08Rik (NM_178623.2,322-340).
ctccctgcagatcagtttt

SEQ ID NO: 802063 - DNA, 19 bp, Mus musculus
  siRNA target sequence for 2010005J08Rik (NM_178623.2,530-548).
gtcgctgctgacatctact

SEQ ID NO: 802064 - DNA, 19 bp, Mus musculus
  siRNA target sequence for 2010005J08Rik (NM_178623.2,533-551).
gctgctgacatctactctt

SEQ ID NO: 802065 - DNA, 19 bp, Mus musculus
  siRNA target sequence for 2700094F01Rik (NM_178625.3,32-50).
gacgtaagccccaatcctt

SEQ ID NO: 802066 - DNA, 19 bp, Mus musculus
  siRNA target sequence for 2700094F01Rik (NM_178625.3,117-135).
gactcctaaatgtatccat

SEQ ID NO: 802067 - DNA, 19 bp, Mus musculus
  siRNA target sequence for 2700094F01Rik (NM_178625.3,132-150).
ccatggctggaatgatata

SEQ ID NO: 802068 - DNA, 19 bp, Mus musculus
  siRNA target sequence for 2700094F01Rik (NM_178625.3,138-156).
ctggaatgatatatactga

SEQ ID NO: 802069 - DNA, 19 bp, Mus musculus
  siRNA target sequence for 2700094F01Rik (NM_178625.3,165-183).
gaaagttaatcagtacata

SEQ ID NO: 802070 - DNA, 19 bp, Mus musculus
  siRNA target sequence for 2700094F01Rik (NM_178625.3,201-219).
ggcccctctggtatatcga

SEQ ID NO: 802071 - DNA, 19 bp, Mus musculus
  siRNA target sequence for 2700094F01Rik (NM_178625.3,230-248).
gcatcgctcttcagtctta

SEQ ID NO: 802072 - DNA, 19 bp, Mus musculus
  siRNA target sequence for 2700094F01Rik (NM_178625.3,231-249).
catcgctcttcagtcttaa

SEQ ID NO: 802073 - DNA, 19 bp, Mus musculus
  siRNA target sequence for 2700094F01Rik (NM_178625.3,316-334).
cggacagcaagcactgtta

SEQ ID NO: 802074 - DNA, 19 bp, Mus musculus
  siRNA target sequence for 2700094F01Rik (NM_178625.3,327-345).
cactgttagggttgaaaca

SEQ ID NO: 802075 - DNA, 19 bp, Mus musculus
  siRNA target sequence for 2700094F01Rik (NM_178625.3,360-378).
ctacacctccccgtgattt

SEQ ID NO: 802076 - DNA, 19 bp, Mus musculus
  siRNA target sequence for 2700094F01Rik (NM_178625.3,379-397).
ggcagcaacccaaatctct

SEQ ID NO: 802077 - DNA, 19 bp, Mus musculus
  siRNA target sequence for 2700094F01Rik (NM_178625.3,425-443).
ggtcaaagtgtgttaagtt

SEQ ID NO: 802078 - DNA, 19 bp, Mus musculus
  siRNA target sequence for 2700094F01Rik (NM_178625.3,426-444).
gtcaaagtgtgttaagtta

SEQ ID NO: 802079 - DNA, 19 bp, Mus musculus
  siRNA target sequence for 2700094F01Rik (NM_178625.3,428-446).
caaagtgtgttaagttata

SEQ ID NO: 802080 - DNA, 19 bp, Mus musculus
  siRNA target sequence for 2700094F01Rik (NM_178625.3,572-590).
cctgtcagtggctacaata

SEQ ID NO: 802081 - DNA, 19 bp, Mus musculus
  siRNA target sequence for 2700094F01Rik (NM_178625.3,573-591).
ctgtcagtggctacaataa

SEQ ID NO: 802082 - DNA, 19 bp, Mus musculus
  siRNA target sequence for 2700094F01Rik (NM_178625.3,575-593).
gtcagtggctacaataagt

SEQ ID NO: 802083 - DNA, 19 bp, Mus musculus
  siRNA target sequence for 2700094F01Rik (NM_178625.3,649-667).
ggagagcagtggattgaga

SEQ ID NO: 802084 - DNA, 19 bp, Mus musculus
  siRNA target sequence for 2700094F01Rik (NM_178625.3,681-699).
ctccacccacggtctacaa

SEQ ID NO: 802085 - DNA, 19 bp, Mus musculus
  siRNA target sequence for 2700094F01Rik (NM_178625.3,683-701).
ccacccacggtctacaact

SEQ ID NO: 802086 - DNA, 19 bp, Mus musculus
  siRNA target sequence for 2700094F01Rik (NM_178625.3,697-715).
caactcacccactgacaaa

SEQ ID NO: 802087 - DNA, 19 bp, Mus musculus
  siRNA target sequence for 2700094F01Rik (NM_178625.3,745-763).
ggacacgttccttagaagt

SEQ ID NO: 802088 - DNA, 19 bp, Mus musculus
  siRNA target sequence for 2700094F01Rik (NM_178625.3,846-864).
gtcgttctgtgggtgatta

SEQ ID NO: 802089 - DNA, 19 bp, Mus musculus
  siRNA target sequence for 2700094F01Rik (NM_178625.3,873-891).
ccttaaagaagtttcagta

SEQ ID NO: 802090 - DNA, 19 bp, Mus musculus
  siRNA target sequence for 2700094F01Rik (NM_178625.3,915-933).
ccccatgtgctaacaaaga

SEQ ID NO: 802091 - DNA, 19 bp, Mus musculus
  siRNA target sequence for 2700094F01Rik (NM_178625.3,916-934).
cccatgtgctaacaaagat

SEQ ID NO: 802092 - DNA, 19 bp, Mus musculus
  siRNA target sequence for 2700094F01Rik (NM_178625.3,932-950).
gatgaagccgatctcattt

SEQ ID NO: 802093 - DNA, 19 bp, Mus musculus
  siRNA target sequence for 2700094F01Rik (NM_178625.3,935-953).
gaagccgatctcatttcta

SEQ ID NO: 802094 - DNA, 19 bp, Mus musculus
  siRNA target sequence for 2700094F01Rik (NM_178625.3,940-958).
cgatctcatttctaagcaa

SEQ ID NO: 802095 - DNA, 19 bp, Mus musculus
  siRNA target sequence for 2700094F01Rik (NM_178625.3,975-993).
gggcaagagtgactatgaa

SEQ ID NO: 802096 - DNA, 19 bp, Mus musculus
  siRNA target sequence for 2700094F01Rik (NM_178625.3,976-994).
ggcaagagtgactatgaat

SEQ ID NO: 802097 - DNA, 19 bp, Mus musculus
  siRNA target sequence for 2700094F01Rik (NM_178625.3,996-1014).
gacagcttctcgatcacat

SEQ ID NO: 802098 - DNA, 19 bp, Mus musculus
  siRNA target sequence for 2700094F01Rik (NM_178625.3,1001-1019).
cttctcgatcacatggatt

SEQ ID NO: 802099 - DNA, 19 bp, Mus musculus
  siRNA target sequence for 2700094F01Rik (NM_178625.3,1004-1022).
ctcgatcacatggattcat

SEQ ID NO: 802100 - DNA, 19 bp, Mus musculus
  siRNA target sequence for 2700094F01Rik (NM_178625.3,1024-1042).
gacagccaagtttagaaat

SEQ ID NO: 802101 - DNA, 19 bp, Mus musculus
  siRNA target sequence for 2700094F01Rik (NM_178625.3,1066-1084).
gccgcttgtgcaagagatt

SEQ ID NO: 802102 - DNA, 19 bp, Mus musculus
  siRNA target sequence for 2700094F01Rik (NM_178625.3,1068-1086).
cgcttgtgcaagagattga

SEQ ID NO: 802103 - DNA, 19 bp, Mus musculus
  siRNA target sequence for 2700094F01Rik (NM_178625.3,1116-1134).
gctgtccagagctacaaat

SEQ ID NO: 802104 - DNA, 19 bp, Mus musculus
  siRNA target sequence for 2700094F01Rik (NM_178625.3,1117-1135).
ctgtccagagctacaaata

SEQ ID NO: 802105 - DNA, 19 bp, Mus musculus
  siRNA target sequence for 2700094F01Rik (NM_178625.3,1230-1248).
caccaaatcaggagtactt

SEQ ID NO: 802106 - DNA, 19 bp, Mus musculus
  siRNA target sequence for 2700094F01Rik (NM_178625.3,1326-1344).
gacgcaaatgggatacaga

SEQ ID NO: 802107 - DNA, 19 bp, Mus musculus
  siRNA target sequence for 2700094F01Rik (NM_178625.3,1350-1368).
ccactgattctgctatcat

SEQ ID NO: 802108 - DNA, 19 bp, Mus musculus
  siRNA target sequence for 2700094F01Rik (NM_178625.3,1387-1405).
ctaccttgattccagatta

SEQ ID NO: 802109 - DNA, 19 bp, Mus musculus
  siRNA target sequence for 2700094F01Rik (NM_178625.3,1420-1438).
gtaccctgatggaaaaaca

SEQ ID NO: 802110 - DNA, 19 bp, Mus musculus
  siRNA target sequence for 2700094F01Rik (NM_178625.3,1456-1474).
cgttcagacgccaaataaa

SEQ ID NO: 802111 - DNA, 19 bp, Mus musculus
  siRNA target sequence for 2700094F01Rik (NM_178625.3,1466-1484).
ccaaataaaccagatgtta

SEQ ID NO: 802112 - DNA, 19 bp, Mus musculus
  siRNA target sequence for 2700094F01Rik (NM_178625.3,1475-1493).
ccagatgttacgaatgaaa

SEQ ID NO: 802113 - DNA, 19 bp, Mus musculus
  siRNA target sequence for 2700094F01Rik (NM_178625.3,1518-1536).
ctgtcaaccctccacatta

SEQ ID NO: 802114 - DNA, 19 bp, Mus musculus
  siRNA target sequence for 2700094F01Rik (NM_178625.3,1527-1545).
ctccacattatgagctaat

SEQ ID NO: 802115 - DNA, 19 bp, Mus musculus
  siRNA target sequence for 2700094F01Rik (NM_178625.3,1529-1547).
ccacattatgagctaatct

SEQ ID NO: 802116 - DNA, 19 bp, Mus musculus
  siRNA target sequence for 2700094F01Rik (NM_178625.3,1530-1548).
cacattatgagctaatcta

SEQ ID NO: 802117 - DNA, 19 bp, Mus musculus
  siRNA target sequence for 2700094F01Rik (NM_178625.3,1552-1570).
gcggcatgtctacaatctt

SEQ ID NO: 802118 - DNA, 19 bp, Mus musculus
  siRNA target sequence for 2700094F01Rik (NM_178625.3,1579-1597).
caggaataatatgtttcat

SEQ ID NO: 802119 - DNA, 19 bp, Mus musculus
  siRNA target sequence for 2700094F01Rik (NM_178625.3,1599-1617).
cgttgctgatgttccttta

SEQ ID NO: 802120 - DNA, 19 bp, Mus musculus
  siRNA target sequence for 2700094F01Rik (NM_178625.3,1600-1618).
gttgctgatgttcctttat

SEQ ID NO: 802121 - DNA, 19 bp, Mus musculus
  siRNA target sequence for 2700094F01Rik (NM_178625.3,1630-1648).
caaagagtcaggaatgctt

SEQ ID NO: 802122 - DNA, 19 bp, Mus musculus
  siRNA target sequence for 2700094F01Rik (NM_178625.3,1640-1658).
ggaatgcttgggagagtta

SEQ ID NO: 802123 - DNA, 19 bp, Mus musculus
  siRNA target sequence for 2700094F01Rik (NM_178625.3,1641-1659).
gaatgcttgggagagttaa

SEQ ID NO: 802124 - DNA, 19 bp, Mus musculus
  siRNA target sequence for 2700094F01Rik (NM_178625.3,1645-1663).
gcttgggagagttaacctt

SEQ ID NO: 802125 - DNA, 19 bp, Mus musculus
  siRNA target sequence for 2700094F01Rik (NM_178625.3,1665-1683).
ggctctctggcgtgaacat

SEQ ID NO: 802126 - DNA, 19 bp, Mus musculus
  siRNA target sequence for 2700094F01Rik (NM_178625.3,1666-1684).
gctctctggcgtgaacatt

SEQ ID NO: 802127 - DNA, 19 bp, Mus musculus
  siRNA target sequence for 2700094F01Rik (NM_178625.3,1667-1685).
ctctctggcgtgaacattt

SEQ ID NO: 802128 - DNA, 19 bp, Mus musculus
  siRNA target sequence for 2810404F18Rik (NM_178626.1,579-597).
cggagagccaaccaacttt

SEQ ID NO: 802129 - DNA, 19 bp, Mus musculus
  siRNA target sequence for 2810404F18Rik (NM_178626.1,581-599).
gagagccaaccaactttgt

SEQ ID NO: 802130 - DNA, 19 bp, Mus musculus
  siRNA target sequence for 2810404F18Rik (NM_178626.1,616-634).
ggatccggagacctattta

SEQ ID NO: 802131 - DNA, 19 bp, Mus musculus
  siRNA target sequence for 2810404F18Rik (NM_178626.1,628-646).
ctatttagtgggatgaact

SEQ ID NO: 802132 - DNA, 19 bp, Mus musculus
  siRNA target sequence for 1110008P04Rik (NM_178627.1,147-165).
cagtgtcaggccaggaatt

SEQ ID NO: 802133 - DNA, 19 bp, Mus musculus
  siRNA target sequence for 1110008P04Rik (NM_178627.1,227-245).
ccaccttccagcagagatt

SEQ ID NO: 802134 - DNA, 19 bp, Mus musculus
  siRNA target sequence for 1110008P04Rik (NM_178627.1,228-246).
caccttccagcagagattt

SEQ ID NO: 802135 - DNA, 19 bp, Mus musculus
  siRNA target sequence for 1110008P04Rik (NM_178627.1,511-529).
ctgaagctcaccaaaacta

SEQ ID NO: 802136 - DNA, 19 bp, Mus musculus
  siRNA target sequence for 1110008P04Rik (NM_178627.1,549-567).
ggccatggtgccacttcat

SEQ ID NO: 802137 - DNA, 19 bp, Mus musculus
  siRNA target sequence for 1110008P04Rik (NM_178627.1,578-596).
ctggaatgaggatcaatgt

SEQ ID NO: 802138 - DNA, 19 bp, Mus musculus
  siRNA target sequence for 1110008P04Rik (NM_178627.1,581-599).
gaatgaggatcaatgttgt

SEQ ID NO: 802139 - DNA, 19 bp, Mus musculus
  siRNA target sequence for 1110008P04Rik (NM_178627.1,610-628).
caggctaaacagaacttgt

SEQ ID NO: 802140 - DNA, 19 bp, Mus musculus
  siRNA target sequence for 1110008P04Rik (NM_178627.1,612-630).
ggctaaacagaacttgtat

SEQ ID NO: 802141 - DNA, 19 bp, Mus musculus
  siRNA target sequence for 1110008P04Rik (NM_178627.1,667-685).
cctcccaagcagatgaagt

SEQ ID NO: 802142 - DNA, 19 bp, Mus musculus
  siRNA target sequence for 1110008P04Rik (NM_178627.1,753-771).
ggccctccctctcacaaaa

SEQ ID NO: 802143 - DNA, 19 bp, Mus musculus
  siRNA target sequence for 1110008P04Rik (NM_178627.1,755-773).
ccctccctctcacaaaagt

SEQ ID NO: 802144 - DNA, 19 bp, Mus musculus
  siRNA target sequence for 1110008P04Rik (NM_178627.1,924-942).
caagatgaccgtgaataat

SEQ ID NO: 802145 - DNA, 19 bp, Mus musculus
  siRNA target sequence for 1110008P04Rik (NM_178627.1,967-985).
gacatagttgagcttttct

SEQ ID NO: 802146 - DNA, 19 bp, Mus musculus
  siRNA target sequence for 1110008P04Rik (NM_178627.1,969-987).
catagttgagcttttctgt

SEQ ID NO: 802147 - DNA, 19 bp, Mus musculus
  siRNA target sequence for 1110008P04Rik (NM_178627.1,1060-1078).
gacgccatcactgcttata

SEQ ID NO: 802148 - DNA, 19 bp, Mus musculus
  siRNA target sequence for 1110008P04Rik (NM_178627.1,1063-1081).
gccatcactgcttataaga

SEQ ID NO: 802149 - DNA, 19 bp, Mus musculus
  siRNA target sequence for 1110008P04Rik (NM_178627.1,1070-1088).
ctgcttataagaagtacaa

SEQ ID NO: 802150 - DNA, 19 bp, Mus musculus
  siRNA target sequence for 1110008P04Rik (NM_178627.1,1072-1090).
gcttataagaagtacaata

SEQ ID NO: 802151 - DNA, 19 bp, Mus musculus
  siRNA target sequence for 1110008P04Rik (NM_178627.1,1073-1091).
cttataagaagtacaataa

SEQ ID NO: 802152 - DNA, 19 bp, Mus musculus
  siRNA target sequence for 1110008P04Rik (NM_178627.1,1102-1120).
gatgggcaacctatgaagt

SEQ ID NO: 802153 - DNA, 19 bp, Mus musculus
  siRNA target sequence for 1110008P04Rik (NM_178627.1,1119-1137).
gtgcaaccttcacatgaat

SEQ ID NO: 802154 - DNA, 19 bp, Mus musculus
  siRNA target sequence for 1110008P04Rik (NM_178627.1,1183-1201).
gacagcccctcagtgaaaa

SEQ ID NO: 802155 - DNA, 19 bp, Mus musculus
  siRNA target sequence for 1110008P04Rik (NM_178627.1,1187-1205).
gcccctcagtgaaaaagga

SEQ ID NO: 802156 - DNA, 19 bp, Mus musculus
  siRNA target sequence for 1110008P04Rik (NM_178627.1,1188-1206).
cccctcagtgaaaaaggaa

SEQ ID NO: 802157 - DNA, 19 bp, Mus musculus
  siRNA target sequence for 1110008P04Rik (NM_178627.1,1276-1294).
ctcagagcgctcttcaagt

SEQ ID NO: 802158 - DNA, 19 bp, Mus musculus
  siRNA target sequence for 5930412E23Rik (NM_178632.4,130-148).
caggagctggacgctaatt

SEQ ID NO: 802159 - DNA, 19 bp, Mus musculus
  siRNA target sequence for 5930412E23Rik (NM_178632.4,143-161).
ctaattccgctcttatgga

SEQ ID NO: 802160 - DNA, 19 bp, Mus musculus
  siRNA target sequence for 5930412E23Rik (NM_178632.4,245-263).
cgttccctatcctcatcaa

SEQ ID NO: 802161 - DNA, 19 bp, Mus musculus
  siRNA target sequence for 5930412E23Rik (NM_178632.4,524-542).
cccatgataatgtagaagt

SEQ ID NO: 802162 - DNA, 19 bp, Mus musculus
  siRNA target sequence for 5930412E23Rik (NM_178632.4,595-613).
gctgtggggatctgtaaca

SEQ ID NO: 802163 - DNA, 19 bp, Mus musculus
  siRNA target sequence for 5930412E23Rik (NM_178632.4,596-614).
ctgtggggatctgtaacaa

SEQ ID NO: 802164 - DNA, 19 bp, Mus musculus
  siRNA target sequence for 5930412E23Rik (NM_178632.4,601-619).
gggatctgtaacaaaatca

SEQ ID NO: 802165 - DNA, 19 bp, Mus musculus
  siRNA target sequence for 5930412E23Rik (NM_178632.4,603-621).
gatctgtaacaaaatcagt

SEQ ID NO: 802166 - DNA, 19 bp, Mus musculus
  siRNA target sequence for 5930412E23Rik (NM_178632.4,777-795).
gtctctgcacactttcact

SEQ ID NO: 802167 - DNA, 19 bp, Mus musculus
  siRNA target sequence for 5930412E23Rik (NM_178632.4,935-953).
cgtggagtaaggagaatat

SEQ ID NO: 802168 - DNA, 19 bp, Mus musculus
  siRNA target sequence for 5930412E23Rik (NM_178632.4,974-992).
cactgcacactccttatga

SEQ ID NO: 802169 - DNA, 19 bp, Mus musculus
  siRNA target sequence for 5930412E23Rik (NM_178632.4,986-1004).
cttatgacagcttgaaact

SEQ ID NO: 802170 - DNA, 19 bp, Mus musculus
  siRNA target sequence for 5930412E23Rik (NM_178632.4,1045-1063).
gccattaaacattacttca

SEQ ID NO: 802171 - DNA, 19 bp, Mus musculus
  siRNA target sequence for 5930412E23Rik (NM_178632.4,1091-1109).
cccccagatcttctgattt

SEQ ID NO: 802172 - DNA, 19 bp, Mus musculus
  siRNA target sequence for 5930412E23Rik (NM_178632.4,1094-1112).
ccagatcttctgatttagt

SEQ ID NO: 802173 - DNA, 19 bp, Mus musculus
  siRNA target sequence for 5930412E23Rik (NM_178632.4,1111-1129).
gtcaaattagctcaagaat

SEQ ID NO: 802174 - DNA, 19 bp, Mus musculus
  siRNA target sequence for 5930412E23Rik (NM_178632.4,1165-1183).
ggagtgagagtgctaacta

SEQ ID NO: 802175 - DNA, 19 bp, Mus musculus
  siRNA target sequence for 5930412E23Rik (NM_178632.4,1166-1184).
gagtgagagtgctaactaa

SEQ ID NO: 802176 - DNA, 19 bp, Mus musculus
  siRNA target sequence for 5930412E23Rik (NM_178632.4,1170-1188).
gagagtgctaactaatata

SEQ ID NO: 802177 - DNA, 19 bp, Mus musculus
  siRNA target sequence for 5930412E23Rik (NM_178632.4,1460-1478).
cggtactgggcgatggaat

SEQ ID NO: 802178 - DNA, 19 bp, Mus musculus
  siRNA target sequence for 5930412E23Rik (NM_178632.4,1537-1555).
caggaacttctggtaagtt

SEQ ID NO: 802179 - DNA, 19 bp, Mus musculus
  siRNA target sequence for 5930412E23Rik (NM_178632.4,1557-1575).
ggctactgtgattttcgta

SEQ ID NO: 802180 - DNA, 19 bp, Mus musculus
  siRNA target sequence for 5930412E23Rik (NM_178632.4,1600-1618).
gaagtgaaggcggtaatca

SEQ ID NO: 802181 - DNA, 19 bp, Mus musculus
  siRNA target sequence for 5930412E23Rik (NM_178632.4,1706-1724).
gagagctttaccagagttt

SEQ ID NO: 802182 - DNA, 19 bp, Mus musculus
  siRNA target sequence for 5930412E23Rik (NM_178632.4,1728-1746).
gacgcaggttgcatcagaa

SEQ ID NO: 802183 - DNA, 19 bp, Mus musculus
  siRNA target sequence for 5930412E23Rik (NM_178632.4,1738-1756).
gcatcagaacacttctact

SEQ ID NO: 802184 - DNA, 19 bp, Mus musculus
  siRNA target sequence for 5930412E23Rik (NM_178632.4,1901-1919).
gcacaccgctgaatccttt

SEQ ID NO: 802185 - DNA, 19 bp, Mus musculus
  siRNA target sequence for 5930412E23Rik (NM_178632.4,1978-1996).
ctcatttgcacgtgtaaca

SEQ ID NO: 802186 - DNA, 19 bp, Mus musculus
  siRNA target sequence for 5930412E23Rik (NM_178632.4,2040-2058).
catgaccttaggaaacgat

SEQ ID NO: 802187 - DNA, 19 bp, Mus musculus
  siRNA target sequence for 5930412E23Rik (NM_178632.4,2045-2063).
ccttaggaaacgatcttca

SEQ ID NO: 802188 - DNA, 19 bp, Mus musculus
  siRNA target sequence for 5930412E23Rik (NM_178632.4,2075-2093).
ggatctccaatcagatgaa

SEQ ID NO: 802189 - DNA, 19 bp, Mus musculus
  siRNA target sequence for 5930412E23Rik (NM_178632.4,2126-2144).
cccggtacagagatctcta

SEQ ID NO: 802190 - DNA, 19 bp, Mus musculus
  siRNA target sequence for 5930412E23Rik (NM_178632.4,2129-2147).
ggtacagagatctctatca

SEQ ID NO: 802191 - DNA, 19 bp, Mus musculus
  siRNA target sequence for 5930412E23Rik (NM_178632.4,2169-2187).
ggccactctgaggaatgta

SEQ ID NO: 802192 - DNA, 19 bp, Mus musculus
  siRNA target sequence for 5930412E23Rik (NM_178632.4,2171-2189).
ccactctgaggaatgtaga

SEQ ID NO: 802193 - DNA, 19 bp, Mus musculus
  siRNA target sequence for 5930412E23Rik (NM_178632.4,2214-2232).
gatagctcatgccatagaa

SEQ ID NO: 802194 - DNA, 19 bp, Mus musculus
  siRNA target sequence for 5930412E23Rik (NM_178632.4,2238-2256).
ggttttggatcctgaatca

SEQ ID NO: 802195 - DNA, 19 bp, Mus musculus
  siRNA target sequence for 5930412E23Rik (NM_178632.4,2292-2310).
ccacgccgacagtgagtat

SEQ ID NO: 802196 - DNA, 19 bp, Mus musculus
  siRNA target sequence for 5930412E23Rik (NM_178632.4,2358-2376).
gtcgcttaaccggaagtat

SEQ ID NO: 802197 - DNA, 19 bp, Mus musculus
  siRNA target sequence for 5930412E23Rik (NM_178632.4,2430-2448).
gctgaaagttcctctttca

SEQ ID NO: 802198 - DNA, 19 bp, Mus musculus
  siRNA target sequence for 5930412E23Rik (NM_178632.4,2443-2461).
ctttcatttcagagatact

SEQ ID NO: 802199 - DNA, 19 bp, Mus musculus
  siRNA target sequence for 5930412E23Rik (NM_178632.4,2643-2661).
ctccacactgcagagtaaa

SEQ ID NO: 802200 - DNA, 19 bp, Mus musculus
  siRNA target sequence for 5930412E23Rik (NM_178632.4,2657-2675).
gtaaatctggccaagacta

SEQ ID NO: 802201 - DNA, 19 bp, Mus musculus
  siRNA target sequence for 5930412E23Rik (NM_178632.4,2663-2681).
ctggccaagactacaagat

SEQ ID NO: 802202 - DNA, 19 bp, Mus musculus
  siRNA target sequence for 5930412E23Rik (NM_178632.4,2715-2733).
gagggttgagccacataat

SEQ ID NO: 802203 - DNA, 19 bp, Mus musculus
  siRNA target sequence for 5930412E23Rik (NM_178632.4,2717-2735).
gggttgagccacataatga

SEQ ID NO: 802204 - DNA, 19 bp, Mus musculus
  siRNA target sequence for 5930412E23Rik (NM_178632.4,2718-2736).
ggttgagccacataatgat

SEQ ID NO: 802205 - DNA, 19 bp, Mus musculus
  siRNA target sequence for 5930412E23Rik (NM_178632.4,2719-2737).
gttgagccacataatgatt

SEQ ID NO: 802206 - DNA, 19 bp, Mus musculus
  siRNA target sequence for 5930412E23Rik (NM_178632.4,2744-2762).
gcacccagttcctgttgaa

SEQ ID NO: 802207 - DNA, 19 bp, Mus musculus
  siRNA target sequence for 5930412E23Rik (NM_178632.4,2835-2853).
gactggccccagaactact

SEQ ID NO: 802208 - DNA, 19 bp, Mus musculus
  siRNA target sequence for 5930412E23Rik (NM_178632.4,2839-2857).
ggccccagaactactatgt

SEQ ID NO: 802209 - DNA, 19 bp, Mus musculus
  siRNA target sequence for 5930412E23Rik (NM_178632.4,2840-2858).
gccccagaactactatgtt

SEQ ID NO: 802210 - DNA, 19 bp, Mus musculus
  siRNA target sequence for 5930412E23Rik (NM_178632.4,2843-2861).
ccagaactactatgtttgt

SEQ ID NO: 802211 - DNA, 19 bp, Mus musculus
  siRNA target sequence for 5930412E23Rik (NM_178632.4,2846-2864).
gaactactatgtttgtcaa

SEQ ID NO: 802212 - DNA, 19 bp, Mus musculus
  siRNA target sequence for Uvrag1 (NM_178635.2,304-322).
catcgctgctcggaacatt

SEQ ID NO: 802213 - DNA, 19 bp, Mus musculus
  siRNA target sequence for Uvrag1 (NM_178635.2,307-325).
cgctgctcggaacattgtt

SEQ ID NO: 802214 - DNA, 19 bp, Mus musculus
  siRNA target sequence for Uvrag1 (NM_178635.2,314-332).
cggaacattgttaatagaa

SEQ ID NO: 802215 - DNA, 19 bp, Mus musculus
  siRNA target sequence for Uvrag1 (NM_178635.2,409-427).
gagtgaagtgattaagaat

SEQ ID NO: 802216 - DNA, 19 bp, Mus musculus
  siRNA target sequence for Uvrag1 (NM_178635.2,413-431).
gaagtgattaagaattcct

SEQ ID NO: 802217 - DNA, 19 bp, Mus musculus
  siRNA target sequence for Uvrag1 (NM_178635.2,441-459).
cgtggaggagtcttgactt

SEQ ID NO: 802218 - DNA, 19 bp, Mus musculus
  siRNA target sequence for Uvrag1 (NM_178635.2,442-460).
gtggaggagtcttgacttt

SEQ ID NO: 802219 - DNA, 19 bp, Mus musculus
  siRNA target sequence for Uvrag1 (NM_178635.2,470-488).
ccggatcgtctggatacat

SEQ ID NO: 802220 - DNA, 19 bp, Mus musculus
  siRNA target sequence for Uvrag1 (NM_178635.2,472-490).
ggatcgtctggatacatct

SEQ ID NO: 802221 - DNA, 19 bp, Mus musculus
  siRNA target sequence for Uvrag1 (NM_178635.2,602-620).
gcccgcaaccagaatgaaa

SEQ ID NO: 802222 - DNA, 19 bp, Mus musculus
  siRNA target sequence for Uvrag1 (NM_178635.2,603-621).
cccgcaaccagaatgaaat

SEQ ID NO: 802223 - DNA, 19 bp, Mus musculus
  siRNA target sequence for Uvrag1 (NM_178635.2,605-623).
cgcaaccagaatgaaatca

SEQ ID NO: 802224 - DNA, 19 bp, Mus musculus
  siRNA target sequence for Uvrag1 (NM_178635.2,607-625).
caaccagaatgaaatcatt

SEQ ID NO: 802225 - DNA, 19 bp, Mus musculus
  siRNA target sequence for Uvrag1 (NM_178635.2,622-640).
catttttgggctgaatgat

SEQ ID NO: 802226 - DNA, 19 bp, Mus musculus
  siRNA target sequence for Uvrag1 (NM_178635.2,723-741).
gcaattcttacgatgtctt

SEQ ID NO: 802227 - DNA, 19 bp, Mus musculus
  siRNA target sequence for Uvrag1 (NM_178635.2,795-813).
ctgttcagagacttggaaa

SEQ ID NO: 802228 - DNA, 19 bp, Mus musculus
  siRNA target sequence for Uvrag1 (NM_178635.2,870-888).
gtgaatgtctgcgattgaa

SEQ ID NO: 802229 - DNA, 19 bp, Mus musculus
  siRNA target sequence for Uvrag1 (NM_178635.2,876-894).
gtctgcgattgaaaatttt

SEQ ID NO: 802230 - DNA, 19 bp, Mus musculus
  siRNA target sequence for Uvrag1 (NM_178635.2,1137-1155).
cctacatttaccctattga

SEQ ID NO: 802231 - DNA, 19 bp, Mus musculus
  siRNA target sequence for Uvrag1 (NM_178635.2,1138-1156).
ctacatttaccctattgat

SEQ ID NO: 802232 - DNA, 19 bp, Mus musculus
  siRNA target sequence for Uvrag1 (NM_178635.2,1187-1205).
ggtgtcaagttgcctaatt

SEQ ID NO: 802233 - DNA, 19 bp, Mus musculus
  siRNA target sequence for Uvrag1 (NM_178635.2,1206-1224).
ccgaggacttccaagcaaa

SEQ ID NO: 802234 - DNA, 19 bp, Mus musculus
  siRNA target sequence for Uvrag1 (NM_178635.2,1207-1225).
cgaggacttccaagcaaaa

SEQ ID NO: 802235 - DNA, 19 bp, Mus musculus
  siRNA target sequence for Uvrag1 (NM_178635.2,1302-1320).
ccctcaggtatcccataat

SEQ ID NO: 802236 - DNA, 19 bp, Mus musculus
  siRNA target sequence for Uvrag1 (NM_178635.2,1303-1321).
cctcaggtatcccataatt

SEQ ID NO: 802237 - DNA, 19 bp, Mus musculus
  siRNA target sequence for Uvrag1 (NM_178635.2,1308-1326).
ggtatcccataattcacaa

SEQ ID NO: 802238 - DNA, 19 bp, Mus musculus
  siRNA target sequence for Uvrag1 (NM_178635.2,1322-1340).
cacaaggggtccagatcaa

SEQ ID NO: 802239 - DNA, 19 bp, Mus musculus
  siRNA target sequence for Uvrag1 (NM_178635.2,1381-1399).
gcgagagtttccactgtat

SEQ ID NO: 802240 - DNA, 19 bp, Mus musculus
  siRNA target sequence for Uvrag1 (NM_178635.2,1441-1459).
ccttctgaacaagaacata

SEQ ID NO: 802241 - DNA, 19 bp, Mus musculus
  siRNA target sequence for Uvrag1 (NM_178635.2,1644-1662).
gtatcccatcaccagataa

SEQ ID NO: 802242 - DNA, 19 bp, Mus musculus
  siRNA target sequence for Uvrag1 (NM_178635.2,1693-1711).
cgagagactccagtacaaa

SEQ ID NO: 802243 - DNA, 19 bp, Mus musculus
  siRNA target sequence for Uvrag1 (NM_178635.2,1694-1712).
gagagactccagtacaaaa

SEQ ID NO: 802244 - DNA, 19 bp, Mus musculus
  siRNA target sequence for Uvrag1 (NM_178635.2,1714-1732).
cccacctcccagctacaat

SEQ ID NO: 802245 - DNA, 19 bp, Mus musculus
  siRNA target sequence for Uvrag1 (NM_178635.2,1823-1841).
ctggacttctccaaagaaa

SEQ ID NO: 802246 - DNA, 19 bp, Mus musculus
  siRNA target sequence for Uvrag1 (NM_178635.2,2185-2203).
gttctctcgcaggatctat

SEQ ID NO: 802247 - DNA, 19 bp, Mus musculus
  siRNA target sequence for B130017P16Rik (NM_178638.2,226-244).
cctctattgccaactatta

SEQ ID NO: 802248 - DNA, 19 bp, Mus musculus
  siRNA target sequence for B130017P16Rik (NM_178638.2,227-245).
ctctattgccaactattaa

SEQ ID NO: 802249 - DNA, 19 bp, Mus musculus
  siRNA target sequence for B130017P16Rik (NM_178638.2,624-642).
ccactaccctgccaacaaa

SEQ ID NO: 802250 - DNA, 19 bp, Mus musculus
  siRNA target sequence for B130017P16Rik (NM_178638.2,1031-1049).
gacaagccaggctttatca

SEQ ID NO: 802251 - DNA, 19 bp, Mus musculus
  siRNA target sequence for B130017P16Rik (NM_178638.2,1033-1051).
caagccaggctttatcaga

SEQ ID NO: 802252 - DNA, 19 bp, Mus musculus
  siRNA target sequence for B130017P16Rik (NM_178638.2,1061-1079).
gggagtggccccatcctta

SEQ ID NO: 802253 - DNA, 19 bp, Mus musculus
  siRNA target sequence for B130017P16Rik (NM_178638.2,1714-1732).
cctgagctactggaacaat

SEQ ID NO: 802254 - DNA, 19 bp, Mus musculus
  siRNA target sequence for B130017P16Rik (NM_178638.2,1734-1752).
ccatcacaatggactactt

SEQ ID NO: 802255 - DNA, 19 bp, Mus musculus
  siRNA target sequence for Inpp5f (NM_178641.3,348-366).
cctggaaccccatttgttt

SEQ ID NO: 802256 - DNA, 19 bp, Mus musculus
  siRNA target sequence for Inpp5f (NM_178641.3,369-387).
gattagtggaaggtgtaat

SEQ ID NO: 802257 - DNA, 19 bp, Mus musculus
  siRNA target sequence for Inpp5f (NM_178641.3,381-399).
gtgtaattgggaaaattca

SEQ ID NO: 802258 - DNA, 19 bp, Mus musculus
  siRNA target sequence for Inpp5f (NM_178641.3,416-434).
ccatggtggcttattttaa

SEQ ID NO: 802259 - DNA, 19 bp, Mus musculus
  siRNA target sequence for Inpp5f (NM_178641.3,493-511).
caagattgctgtattgtca

SEQ ID NO: 802260 - DNA, 19 bp, Mus musculus
  siRNA target sequence for Inpp5f (NM_178641.3,548-566).
ctctgtaagaagcatcatt

SEQ ID NO: 802261 - DNA, 19 bp, Mus musculus
  siRNA target sequence for Inpp5f (NM_178641.3,580-598).
gcctgagaagattatacca

SEQ ID NO: 802262 - DNA, 19 bp, Mus musculus
  siRNA target sequence for Inpp5f (NM_178641.3,603-621).
ctgacgactccaagtttct

SEQ ID NO: 802263 - DNA, 19 bp, Mus musculus
  siRNA target sequence for Inpp5f (NM_178641.3,652-670).
cgtgtctgctcccaacaaa

SEQ ID NO: 802264 - DNA, 19 bp, Mus musculus
  siRNA target sequence for Inpp5f (NM_178641.3,752-770).
gagtccttctattatagct

SEQ ID NO: 802265 - DNA, 19 bp, Mus musculus
  siRNA target sequence for Inpp5f (NM_178641.3,845-863).
gttgatgaccgatttttct

SEQ ID NO: 802266 - DNA, 19 bp, Mus musculus
  siRNA target sequence for Inpp5f (NM_178641.3,851-869).
gaccgatttttctggaata

SEQ ID NO: 802267 - DNA, 19 bp, Mus musculus
  siRNA target sequence for Inpp5f (NM_178641.3,921-939).
ggatcatccccattatcca

SEQ ID NO: 802268 - DNA, 19 bp, Mus musculus
  siRNA target sequence for Inpp5f (NM_178641.3,940-958).
gggttttgtgcagattgaa

SEQ ID NO: 802269 - DNA, 19 bp, Mus musculus
  siRNA target sequence for Inpp5f (NM_178641.3,942-960).
gttttgtgcagattgaaga

SEQ ID NO: 802270 - DNA, 19 bp, Mus musculus
  siRNA target sequence for Inpp5f (NM_178641.3,965-983).
gtggttaattacaatgagt

SEQ ID NO: 802271 - DNA, 19 bp, Mus musculus
  siRNA target sequence for Inpp5f (NM_178641.3,1032-1050).
cttgtgtagatgacattca

SEQ ID NO: 802272 - DNA, 19 bp, Mus musculus
  siRNA target sequence for Inpp5f (NM_178641.3,1056-1074).
gatttctagtggctcttat

SEQ ID NO: 802273 - DNA, 19 bp, Mus musculus
  siRNA target sequence for Inpp5f (NM_178641.3,1095-1113).
gagcaggaatgcggtataa

SEQ ID NO: 802274 - DNA, 19 bp, Mus musculus
  siRNA target sequence for Inpp5f (NM_178641.3,1100-1118).
ggaatgcggtataaacgaa

SEQ ID NO: 802275 - DNA, 19 bp, Mus musculus
  siRNA target sequence for Inpp5f (NM_178641.3,1137-1155).
gaaatgttgcgaattatgt

SEQ ID NO: 802276 - DNA, 19 bp, Mus musculus
  siRNA target sequence for Inpp5f (NM_178641.3,1165-1183).
gcagttaatccatgttcat

SEQ ID NO: 802277 - DNA, 19 bp, Mus musculus
  siRNA target sequence for Inpp5f (NM_178641.3,1244-1262).
gggtatcgctataatccaa

SEQ ID NO: 802278 - DNA, 19 bp, Mus musculus
  siRNA target sequence for Inpp5f (NM_178641.3,1260-1278).
caagacctcggctagacaa

SEQ ID NO: 802279 - DNA, 19 bp, Mus musculus
  siRNA target sequence for Inpp5f (NM_178641.3,1266-1284).
ctcggctagacaaaagtga

SEQ ID NO: 802280 - DNA, 19 bp, Mus musculus
  siRNA target sequence for Inpp5f (NM_178641.3,1289-1307).
gaaacggttgactgtttct

SEQ ID NO: 802281 - DNA, 19 bp, Mus musculus
  siRNA target sequence for Inpp5f (NM_178641.3,1479-1497).
gaatgaagttcgagaatgt

SEQ ID NO: 802282 - DNA, 19 bp, Mus musculus
  siRNA target sequence for Inpp5f (NM_178641.3,1515-1533).
ccattcatgacatcatcat

SEQ ID NO: 802283 - DNA, 19 bp, Mus musculus
  siRNA target sequence for Inpp5f (NM_178641.3,1559-1577).
caagctggtgtgatatgta

SEQ ID NO: 802284 - DNA, 19 bp, Mus musculus
  siRNA target sequence for Inpp5f (NM_178641.3,1575-1593).
gtaagcaagaagggatttt

SEQ ID NO: 802285 - DNA, 19 bp, Mus musculus
  siRNA target sequence for Inpp5f (NM_178641.3,1579-1597).
gcaagaagggatttttcga

SEQ ID NO: 802286 - DNA, 19 bp, Mus musculus
  siRNA target sequence for Inpp5f (NM_178641.3,1663-1681).
ggaacagcagcttaaaaaa

SEQ ID NO: 802287 - DNA, 19 bp, Mus musculus
  siRNA target sequence for Inpp5f (NM_178641.3,1853-1871).
ggcgttaactcggcaaata

SEQ ID NO: 802288 - DNA, 19 bp, Mus musculus
  siRNA target sequence for Inpp5f (NM_178641.3,1856-1874).
gttaactcggcaaataggt

SEQ ID NO: 802289 - DNA, 19 bp, Mus musculus
  siRNA target sequence for Inpp5f (NM_178641.3,1903-1921).
caggcaagccgtcatagat

SEQ ID NO: 802290 - DNA, 19 bp, Mus musculus
  siRNA target sequence for Inpp5f (NM_178641.3,1905-1923).
ggcaagccgtcatagatct

SEQ ID NO: 802291 - DNA, 19 bp, Mus musculus
  siRNA target sequence for Inpp5f (NM_178641.3,1949-1967).
gacctttactccatattta

SEQ ID NO: 802292 - DNA, 19 bp, Mus musculus
  siRNA target sequence for Inpp5f (NM_178641.3,1979-1997).
gagcatgaagctttgcata

SEQ ID NO: 802293 - DNA, 19 bp, Mus musculus
  siRNA target sequence for Inpp5f (NM_178641.3,2033-2051).
cagctcttacagagttata

SEQ ID NO: 802294 - DNA, 19 bp, Mus musculus
  siRNA target sequence for Inpp5f (NM_178641.3,2164-2182).
gtctaacgctgcctactat

SEQ ID NO: 802295 - DNA, 19 bp, Mus musculus
  siRNA target sequence for Inpp5f (NM_178641.3,2175-2193).
cctactatgtggcctatta

SEQ ID NO: 802296 - DNA, 19 bp, Mus musculus
  siRNA target sequence for Inpp5f (NM_178641.3,2176-2194).
ctactatgtggcctattat

SEQ ID NO: 802297 - DNA, 19 bp, Mus musculus
  siRNA target sequence for Inpp5f (NM_178641.3,2198-2216).
gacgaagttgataaagtaa

SEQ ID NO: 802298 - DNA, 19 bp, Mus musculus
  siRNA target sequence for Inpp5f (NM_178641.3,2265-2283).
gtcctgaacctactctttt

SEQ ID NO: 802299 - DNA, 19 bp, Mus musculus
  siRNA target sequence for Inpp5f (NM_178641.3,2311-2329).
gctgcactacaggtgtaaa

SEQ ID NO: 802300 - DNA, 19 bp, Mus musculus
  siRNA target sequence for Inpp5f (NM_178641.3,2314-2332).
gcactacaggtgtaaagaa

SEQ ID NO: 802301 - DNA, 19 bp, Mus musculus
  siRNA target sequence for Inpp5f (NM_178641.3,2333-2351).
gcaggcggttacttccata

SEQ ID NO: 802302 - DNA, 19 bp, Mus musculus
  siRNA target sequence for Inpp5f (NM_178641.3,2365-2383).
gccacgtagtcctgaagaa

SEQ ID NO: 802303 - DNA, 19 bp, Mus musculus
  siRNA target sequence for Inpp5f (NM_178641.3,2367-2385).
cacgtagtcctgaagaaga

SEQ ID NO: 802304 - DNA, 19 bp, Mus musculus
  siRNA target sequence for Inpp5f (NM_178641.3,2445-2463).
gactggacgttcctatcat

SEQ ID NO: 802305 - DNA, 19 bp, Mus musculus
  siRNA target sequence for Inpp5f (NM_178641.3,2450-2468).
gacgttcctatcattgaga

SEQ ID NO: 802306 - DNA, 19 bp, Mus musculus
  siRNA target sequence for Inpp5f (NM_178641.3,2457-2475).
ctatcattgagaagaaact

SEQ ID NO: 802307 - DNA, 19 bp, Mus musculus
  siRNA target sequence for Inpp5f (NM_178641.3,2540-2558).
cttgcccaggggaaaagct

SEQ ID NO: 802308 - DNA, 19 bp, Mus musculus
  siRNA target sequence for Inpp5f (NM_178641.3,2543-2561).
gcccaggggaaaagctttt

SEQ ID NO: 802309 - DNA, 19 bp, Mus musculus
  siRNA target sequence for Inpp5f (NM_178641.3,2620-2638).
catcggcaacctacgaaaa

SEQ ID NO: 802310 - DNA, 19 bp, Mus musculus
  siRNA target sequence for Inpp5f (NM_178641.3,2623-2641).
cggcaacctacgaaaatta

SEQ ID NO: 802311 - DNA, 19 bp, Mus musculus
  siRNA target sequence for Inpp5f (NM_178641.3,2626-2644).
caacctacgaaaattagga

SEQ ID NO: 802312 - DNA, 19 bp, Mus musculus
  siRNA target sequence for Inpp5f (NM_178641.3,2633-2651).
cgaaaattaggaaacttta

SEQ ID NO: 802313 - DNA, 19 bp, Mus musculus
  siRNA target sequence for Inpp5f (NM_178641.3,2674-2692).
ctttctaaaaccaaactta

SEQ ID NO: 802314 - DNA, 19 bp, Mus musculus
  siRNA target sequence for Inpp5f (NM_178641.3,2745-2763).
gagtgatgggtaataaggt

SEQ ID NO: 802315 - DNA, 19 bp, Mus musculus
  siRNA target sequence for Inpp5f (NM_178641.3,2803-2821).
ctcgtaccactctgatgaa

SEQ ID NO: 802316 - DNA, 19 bp, Mus musculus
  siRNA target sequence for Inpp5f (NM_178641.3,2805-2823).
cgtaccactctgatgaatt

SEQ ID NO: 802317 - DNA, 19 bp, Mus musculus
  siRNA target sequence for Inpp5f (NM_178641.3,2809-2827).
ccactctgatgaattcctt

SEQ ID NO: 802318 - DNA, 19 bp, Mus musculus
  siRNA target sequence for Inpp5f (NM_178641.3,2810-2828).
cactctgatgaattcctta

SEQ ID NO: 802319 - DNA, 19 bp, Mus musculus
  siRNA target sequence for Inpp5f (NM_178641.3,2835-2853).
ctaagtcggaggaagacaa

SEQ ID NO: 802320 - DNA, 19 bp, Mus musculus
  siRNA target sequence for Inpp5f (NM_178641.3,2851-2869).
caagcagctagccaattct

SEQ ID NO: 802321 - DNA, 19 bp, Mus musculus
  siRNA target sequence for Inpp5f (NM_178641.3,2875-2893).
gagcgtagggccaatagat

SEQ ID NO: 802322 - DNA, 19 bp, Mus musculus
  siRNA target sequence for Inpp5f (NM_178641.3,2877-2895).
gcgtagggccaatagatta

SEQ ID NO: 802323 - DNA, 19 bp, Mus musculus
  siRNA target sequence for Inpp5f (NM_178641.3,2879-2897).
gtagggccaatagattaca

SEQ ID NO: 802324 - DNA, 19 bp, Mus musculus
  siRNA target sequence for Inpp5f (NM_178641.3,2902-2920).
cccaagctgtgggattatt

SEQ ID NO: 802325 - DNA, 19 bp, Mus musculus
  siRNA target sequence for Inpp5f (NM_178641.3,3078-3096).
cacggactggcttcacaaa

SEQ ID NO: 802326 - DNA, 19 bp, Mus musculus
  siRNA target sequence for Inpp5f (NM_178641.3,3127-3145).
gcaggatgcacagaacaaa

SEQ ID NO: 802327 - DNA, 19 bp, Mus musculus
  siRNA target sequence for Inpp5f (NM_178641.3,3191-3209).
gagggaagtcacaagacta

SEQ ID NO: 802328 - DNA, 19 bp, Mus musculus
  siRNA target sequence for Inpp5f (NM_178641.3,3207-3225).
ctaaccgtgtgtctaatga

SEQ ID NO: 802329 - DNA, 19 bp, Mus musculus
  siRNA target sequence for Inpp5f (NM_178641.3,3264-3282).
gaccctctcagttaaacgt

SEQ ID NO: 802330 - DNA, 19 bp, Mus musculus
  siRNA target sequence for Inpp5f (NM_178641.3,3272-3290).
cagttaaacgtctcttgtt

SEQ ID NO: 802331 - DNA, 19 bp, Mus musculus
  siRNA target sequence for Inpp5f (NM_178641.3,3300-3318).
gcccaccattcttatcagt

SEQ ID NO: 802332 - DNA, 19 bp, Mus musculus
  siRNA target sequence for Inpp5f (NM_178641.3,3301-3319).
cccaccattcttatcagtt

SEQ ID NO: 802333 - DNA, 19 bp, Mus musculus
  siRNA target sequence for Inpp5f (NM_178641.3,3466-3484).
ggtccaagtcgctaatatt

SEQ ID NO: 802334 - DNA, 19 bp, Mus musculus
  siRNA target sequence for Inpp5f (NM_178641.3,3467-3485).
gtccaagtcgctaatatta

SEQ ID NO: 802335 - DNA, 19 bp, Mus musculus
  siRNA target sequence for Inpp5f (NM_178641.3,3486-3504).
cccaagctgggctaactca

SEQ ID NO: 802336 - DNA, 19 bp, Mus musculus
  siRNA target sequence for Inpp5f (NM_178641.3,3519-3537).
cggttgccaaagttcagaa

SEQ ID NO: 802337 - DNA, 19 bp, Mus musculus
  siRNA target sequence for Inpp5f (NM_178641.3,3551-3569).
cccgaagcggttaacgaaa

SEQ ID NO: 802338 - DNA, 19 bp, Mus musculus
  siRNA target sequence for Inpp5f (NM_178641.3,3552-3570).
ccgaagcggttaacgaaat

SEQ ID NO: 802339 - DNA, 19 bp, Mus musculus
  siRNA target sequence for Inpp5f (NM_178641.3,3553-3571).
cgaagcggttaacgaaatt

SEQ ID NO: 802340 - DNA, 19 bp, Mus musculus
  siRNA target sequence for Inpp5f (NM_178641.3,3558-3576).
cggttaacgaaattcaaca

SEQ ID NO: 802341 - DNA, 19 bp, Mus musculus
  siRNA target sequence for Inpp5f (NM_178641.3,3559-3577).
ggttaacgaaattcaacaa

SEQ ID NO: 802342 - DNA, 19 bp, Mus musculus
  siRNA target sequence for Inpp5f (NM_178641.3,3602-3620).
caatgccagacacgaataa

SEQ ID NO: 802343 - DNA, 19 bp, Mus musculus
  siRNA target sequence for Inpp5f (NM_178641.3,3610-3628).
gacacgaataattcagatt

SEQ ID NO: 802344 - DNA, 19 bp, Mus musculus
  siRNA target sequence for AU040576 (NM_178642.3,1329-1347).
gtgaccagagatacaacat

SEQ ID NO: 802345 - DNA, 19 bp, Mus musculus
  siRNA target sequence for AU040576 (NM_178642.3,1413-1431).
cccgtgccagtcacctttt

SEQ ID NO: 802346 - DNA, 19 bp, Mus musculus
  siRNA target sequence for AU040576 (NM_178642.3,1414-1432).
ccgtgccagtcaccttttt

SEQ ID NO: 802347 - DNA, 19 bp, Mus musculus
  siRNA target sequence for AU040576 (NM_178642.3,1418-1436).
gccagtcacctttttgata

SEQ ID NO: 802348 - DNA, 19 bp, Mus musculus
  siRNA target sequence for AU040576 (NM_178642.3,1419-1437).
ccagtcacctttttgataa

SEQ ID NO: 802349 - DNA, 19 bp, Mus musculus
  siRNA target sequence for AU040576 (NM_178642.3,1595-1613).
gaagccagagtcttagaga

SEQ ID NO: 802350 - DNA, 19 bp, Mus musculus
  siRNA target sequence for AU040576 (NM_178642.3,1676-1694).
cgattcccagcctatttca

SEQ ID NO: 802351 - DNA, 19 bp, Mus musculus
  siRNA target sequence for AU040576 (NM_178642.3,1720-1738).
gatcgcagtgacatttgca

SEQ ID NO: 802352 - DNA, 19 bp, Mus musculus
  siRNA target sequence for AU040576 (NM_178642.3,1737-1755).
caatcgtcctcggagttat

SEQ ID NO: 802353 - DNA, 19 bp, Mus musculus
  siRNA target sequence for AU040576 (NM_178642.3,1747-1765).
cggagttatcatctataga

SEQ ID NO: 802354 - DNA, 19 bp, Mus musculus
  siRNA target sequence for AU040576 (NM_178642.3,1748-1766).
ggagttatcatctatagaa

SEQ ID NO: 802355 - DNA, 19 bp, Mus musculus
  siRNA target sequence for AU040576 (NM_178642.3,1749-1767).
gagttatcatctatagaat

SEQ ID NO: 802356 - DNA, 19 bp, Mus musculus
  siRNA target sequence for AU040576 (NM_178642.3,1751-1769).
gttatcatctatagaatct

SEQ ID NO: 802357 - DNA, 19 bp, Mus musculus
  siRNA target sequence for AU040576 (NM_178642.3,1839-1857).
ccaccgctgttatcatcaa

SEQ ID NO: 802358 - DNA, 19 bp, Mus musculus
  siRNA target sequence for AU040576 (NM_178642.3,1903-1921).
caggtggctcaccaagatt

SEQ ID NO: 802359 - DNA, 19 bp, Mus musculus
  siRNA target sequence for AU040576 (NM_178642.3,1905-1923).
ggtggctcaccaagattga

SEQ ID NO: 802360 - DNA, 19 bp, Mus musculus
  siRNA target sequence for AU040576 (NM_178642.3,2049-2067).
ccggtgactacgtgtacat

SEQ ID NO: 802361 - DNA, 19 bp, Mus musculus
  siRNA target sequence for AU040576 (NM_178642.3,2052-2070).
gtgactacgtgtacatctt

SEQ ID NO: 802362 - DNA, 19 bp, Mus musculus
  siRNA target sequence for AU040576 (NM_178642.3,2109-2127).
gcctcatggagctctgtat

SEQ ID NO: 802363 - DNA, 19 bp, Mus musculus
  siRNA target sequence for AU040576 (NM_178642.3,2241-2259).
cctcagaccgtgaagagta

SEQ ID NO: 802364 - DNA, 19 bp, Mus musculus
  siRNA target sequence for AU040576 (NM_178642.3,2391-2409).
cactcttcgccctgctaaa

SEQ ID NO: 802365 - DNA, 19 bp, Mus musculus
  siRNA target sequence for AU040576 (NM_178642.3,2399-2417).
gccctgctaaacaacatca

SEQ ID NO: 802366 - DNA, 19 bp, Mus musculus
  siRNA target sequence for AU040576 (NM_178642.3,2400-2418).
ccctgctaaacaacatcat

SEQ ID NO: 802367 - DNA, 19 bp, Mus musculus
  siRNA target sequence for AU040576 (NM_178642.3,2486-2504).
gacatcggcatctggtata

SEQ ID NO: 802368 - DNA, 19 bp, Mus musculus
  siRNA target sequence for AU040576 (NM_178642.3,2585-2603).
ctggtgtacctctacatgt

SEQ ID NO: 802369 - DNA, 19 bp, Mus musculus
  siRNA target sequence for AU040576 (NM_178642.3,2596-2614).
ctacatgtacagtcagaat

SEQ ID NO: 802370 - DNA, 19 bp, Mus musculus
  siRNA target sequence for AU040576 (NM_178642.3,2641-2659).
cacgctctcttccttcaat

SEQ ID NO: 802371 - DNA, 19 bp, Mus musculus
  siRNA target sequence for AU040576 (NM_178642.3,2808-2826).
cccgactggcatttgtcat

SEQ ID NO: 802372 - DNA, 19 bp, Mus musculus
  siRNA target sequence for AU040576 (NM_178642.3,2809-2827).
ccgactggcatttgtcatt

SEQ ID NO: 802373 - DNA, 19 bp, Mus musculus
  siRNA target sequence for AU040576 (NM_178642.3,2811-2829).
gactggcatttgtcattgt

SEQ ID NO: 802374 - DNA, 19 bp, Mus musculus
  siRNA target sequence for AU040576 (NM_178642.3,3003-3021).
caagggatgtgccttgtaa

SEQ ID NO: 802375 - DNA, 19 bp, Mus musculus
  siRNA target sequence for C230052I12Rik (NM_178643.3,489-507).
cgtgccactaggacatatt

SEQ ID NO: 802376 - DNA, 19 bp, Mus musculus
  siRNA target sequence for C230052I12Rik (NM_178643.3,502-520).
catattgtggctagtgaaa

SEQ ID NO: 802377 - DNA, 19 bp, Mus musculus
  siRNA target sequence for C230052I12Rik (NM_178643.3,542-560).
ctcaggagatgcaaggaaa

SEQ ID NO: 802378 - DNA, 19 bp, Mus musculus
  siRNA target sequence for C230052I12Rik (NM_178643.3,556-574).
ggaaaagttagactcattt

SEQ ID NO: 802379 - DNA, 19 bp, Mus musculus
  siRNA target sequence for C230052I12Rik (NM_178643.3,557-575).
gaaaagttagactcatttt

SEQ ID NO: 802380 - DNA, 19 bp, Mus musculus
  siRNA target sequence for C230052I12Rik (NM_178643.3,586-604).
ctggcatcagcagattttt

SEQ ID NO: 802381 - DNA, 19 bp, Mus musculus
  siRNA target sequence for C230052I12Rik (NM_178643.3,609-627).
gtctagcaaatcttgcatt

SEQ ID NO: 802382 - DNA, 19 bp, Mus musculus
  siRNA target sequence for C230052I12Rik (NM_178643.3,615-633).
caaatcttgcattctctat

SEQ ID NO: 802383 - DNA, 19 bp, Mus musculus
  siRNA target sequence for C230052I12Rik (NM_178643.3,656-674).
ccggacatggctacagaaa

SEQ ID NO: 802384 - DNA, 19 bp, Mus musculus
  siRNA target sequence for C230052I12Rik (NM_178643.3,657-675).
cggacatggctacagaaaa

SEQ ID NO: 802385 - DNA, 19 bp, Mus musculus
  siRNA target sequence for C230052I12Rik (NM_178643.3,677-695).
gactcgctcgctttagaaa

SEQ ID NO: 802386 - DNA, 19 bp, Mus musculus
  siRNA target sequence for C230052I12Rik (NM_178643.3,682-700).
gctcgctttagaaattcct

SEQ ID NO: 802387 - DNA, 19 bp, Mus musculus
  siRNA target sequence for C230052I12Rik (NM_178643.3,703-721).
catcttcaagggatcataa

SEQ ID NO: 802388 - DNA, 19 bp, Mus musculus
  siRNA target sequence for C230052I12Rik (NM_178643.3,713-731).
ggatcataatagttgagaa

SEQ ID NO: 802389 - DNA, 19 bp, Mus musculus
  siRNA target sequence for C230052I12Rik (NM_178643.3,734-752).
cccagatgagtgaacagta

SEQ ID NO: 802390 - DNA, 19 bp, Mus musculus
  siRNA target sequence for C230052I12Rik (NM_178643.3,735-753).
ccagatgagtgaacagtat

SEQ ID NO: 802391 - DNA, 19 bp, Mus musculus
  siRNA target sequence for C230052I12Rik (NM_178643.3,761-779).
cagtccagaagtttactgt

SEQ ID NO: 802392 - DNA, 19 bp, Mus musculus
  siRNA target sequence for C230052I12Rik (NM_178643.3,918-936).
gctctcccttgttcaaaca

SEQ ID NO: 802393 - DNA, 19 bp, Mus musculus
  siRNA target sequence for C230052I12Rik (NM_178643.3,1055-1073).
cggcagcacagcaaatcca

SEQ ID NO: 802394 - DNA, 19 bp, Mus musculus
  siRNA target sequence for D130038B21Rik (NM_178644.2,686-704).
gtctggaacagttacatat

SEQ ID NO: 802395 - DNA, 19 bp, Mus musculus
  siRNA target sequence for D130038B21Rik (NM_178644.2,690-708).
ggaacagttacatatggat

SEQ ID NO: 802396 - DNA, 19 bp, Mus musculus
  siRNA target sequence for D130038B21Rik (NM_178644.2,706-724).
gatatcgctgttaacttca

SEQ ID NO: 802397 - DNA, 19 bp, Mus musculus
  siRNA target sequence for D130038B21Rik (NM_178644.2,745-763).
ccccatctccacaacgtat

SEQ ID NO: 802398 - DNA, 19 bp, Mus musculus
  siRNA target sequence for D130038B21Rik (NM_178644.2,907-925).
cgaggaaagccctgtactt

SEQ ID NO: 802399 - DNA, 19 bp, Mus musculus
  siRNA target sequence for D130038B21Rik (NM_178644.2,988-1006).
cggccagcgccctacaagt

SEQ ID NO: 802400 - DNA, 19 bp, Mus musculus
  siRNA target sequence for Cggbp1 (NM_178647.2,404-422).
ggaacgatttgttgtaaca

SEQ ID NO: 802401 - DNA, 19 bp, Mus musculus
  siRNA target sequence for Cggbp1 (NM_178647.2,430-448).
ctgctcgaaatcgttctaa

SEQ ID NO: 802402 - DNA, 19 bp, Mus musculus
  siRNA target sequence for Cggbp1 (NM_178647.2,432-450).
gctcgaaatcgttctaaga

SEQ ID NO: 802403 - DNA, 19 bp, Mus musculus
  siRNA target sequence for Cggbp1 (NM_178647.2,471-489).
ctggatcgagtcactgaat

SEQ ID NO: 802404 - DNA, 19 bp, Mus musculus
  siRNA target sequence for Cggbp1 (NM_178647.2,539-557).
caatgtggtgctgaatcat

SEQ ID NO: 802405 - DNA, 19 bp, Mus musculus
  siRNA target sequence for Cggbp1 (NM_178647.2,562-580).
gcaagtctgccattagtga

SEQ ID NO: 802406 - DNA, 19 bp, Mus musculus
  siRNA target sequence for Cggbp1 (NM_178647.2,585-603).
ctcaagtcaaagactcata

SEQ ID NO: 802407 - DNA, 19 bp, Mus musculus
  siRNA target sequence for Cggbp1 (NM_178647.2,858-876).
gatggctacgagaatgaaa

SEQ ID NO: 802408 - DNA, 19 bp, Mus musculus
  siRNA target sequence for Cggbp1 (NM_178647.2,882-900).
ctcctcagctcacaagatt

SEQ ID NO: 802409 - DNA, 19 bp, Mus musculus
  siRNA target sequence for Cggbp1 (NM_178647.2,884-902).
cctcagctcacaagattgt

SEQ ID NO: 802410 - DNA, 19 bp, Mus musculus
  siRNA target sequence for D0H8S2298E (NM_178648.1,329-347).
gattcggagtttgaaaatt

SEQ ID NO: 802411 - DNA, 19 bp, Mus musculus
  siRNA target sequence for D0H8S2298E (NM_178648.1,353-371).
caggcatcttttgaaacaa

SEQ ID NO: 802412 - DNA, 19 bp, Mus musculus
  siRNA target sequence for D0H8S2298E (NM_178648.1,395-413).
cagaacttgcctaagtttt

SEQ ID NO: 802413 - DNA, 19 bp, Mus musculus
  siRNA target sequence for D0H8S2298E (NM_178648.1,400-418).
cttgcctaagttttcaact

SEQ ID NO: 802414 - DNA, 19 bp, Mus musculus
  siRNA target sequence for D0H8S2298E (NM_178648.1,403-421).
gcctaagttttcaactgaa

SEQ ID NO: 802415 - DNA, 19 bp, Mus musculus
  siRNA target sequence for D0H8S2298E (NM_178648.1,454-472).
ggaggttcctgatttacct

SEQ ID NO: 802416 - DNA, 19 bp, Mus musculus
  siRNA target sequence for D0H8S2298E (NM_178648.1,492-510).
ctgaagaggtagttactgt

SEQ ID NO: 802417 - DNA, 19 bp, Mus musculus
  siRNA target sequence for D0H8S2298E (NM_178648.1,604-622).
gtaccacaaatccctatat

SEQ ID NO: 802418 - DNA, 19 bp, Mus musculus
  siRNA target sequence for D0H8S2298E (NM_178648.1,607-625).
ccacaaatccctatataga

SEQ ID NO: 802419 - DNA, 19 bp, Mus musculus
  siRNA target sequence for D0H8S2298E (NM_178648.1,610-628).
caaatccctatatagactt

SEQ ID NO: 802420 - DNA, 19 bp, Mus musculus
  siRNA target sequence for D0H8S2298E (NM_178648.1,615-633).
ccctatatagactttccaa

SEQ ID NO: 802421 - DNA, 19 bp, Mus musculus
  siRNA target sequence for D0H8S2298E (NM_178648.1,679-697).
ggaggacataggaataact

SEQ ID NO: 802422 - DNA, 19 bp, Mus musculus
  siRNA target sequence for 4933409K07Rik (NM_178649.2,1189-1207).
gtaggcaatctggatatat

SEQ ID NO: 802423 - DNA, 19 bp, Mus musculus
  siRNA target sequence for 4933409K07Rik (NM_178649.2,1193-1211).
gcaatctggatatataaga

SEQ ID NO: 802424 - DNA, 19 bp, Mus musculus
  siRNA target sequence for 4933409K07Rik (NM_178649.2,1194-1212).
caatctggatatataagaa

SEQ ID NO: 802425 - DNA, 19 bp, Mus musculus
  siRNA target sequence for 4933409K07Rik (NM_178649.2,1360-1378).
caccctcatccgagtactt

SEQ ID NO: 802426 - DNA, 19 bp, Mus musculus
  siRNA target sequence for 4933409K07Rik (NM_178649.2,1387-1405).
gtcagggctccgtactcta

SEQ ID NO: 802427 - DNA, 19 bp, Mus musculus
  siRNA target sequence for 4933409K07Rik (NM_178649.2,1426-1444).
cgaagcgatggctggaata

SEQ ID NO: 802428 - DNA, 19 bp, Mus musculus
  siRNA target sequence for 4933409K07Rik (NM_178649.2,1553-1571).
ggacaagttgtcgtacttt

SEQ ID NO: 802429 - DNA, 19 bp, Mus musculus
  siRNA target sequence for 4933409K07Rik (NM_178649.2,1554-1572).
gacaagttgtcgtactttt

SEQ ID NO: 802430 - DNA, 19 bp, Mus musculus
  siRNA target sequence for 4933409K07Rik (NM_178649.2,1613-1631).
cgtcagagctgagtacatt

SEQ ID NO: 802431 - DNA, 19 bp, Mus musculus
  siRNA target sequence for 4933409K07Rik (NM_178649.2,1633-1651).
ggcctcatgatggtataga

SEQ ID NO: 802432 - DNA, 19 bp, Mus musculus
  siRNA target sequence for 4933409K07Rik (NM_178649.2,1634-1652).
gcctcatgatggtatagat

SEQ ID NO: 802433 - DNA, 19 bp, Mus musculus
  siRNA target sequence for 4933409K07Rik (NM_178649.2,1636-1654).
ctcatgatggtatagatga

SEQ ID NO: 802434 - DNA, 19 bp, Mus musculus
  siRNA target sequence for 1810062O14Rik (NM_178650.2,132-150).
cctgggagaggacttgtta

SEQ ID NO: 802435 - DNA, 19 bp, Mus musculus
  siRNA target sequence for 1810062O14Rik (NM_178650.2,141-159).
ggacttgttatcagaacta

SEQ ID NO: 802436 - DNA, 19 bp, Mus musculus
  siRNA target sequence for 1810062O14Rik (NM_178650.2,154-172).
gaactacaggatgattcta

SEQ ID NO: 802437 - DNA, 19 bp, Mus musculus
  siRNA target sequence for 1810062O14Rik (NM_178650.2,198-216).
gagtgggcccagtccatat

SEQ ID NO: 802438 - DNA, 19 bp, Mus musculus
  siRNA target sequence for 1810062O14Rik (NM_178650.2,294-312).
ccgccagcgagagatgaaa

SEQ ID NO: 802439 - DNA, 19 bp, Mus musculus
  siRNA target sequence for 1810062O14Rik (NM_178650.2,295-313).
cgccagcgagagatgaaat

SEQ ID NO: 802440 - DNA, 19 bp, Mus musculus
  siRNA target sequence for 1810062O14Rik (NM_178650.2,344-362).
ccatgtcccgacgatacaa

SEQ ID NO: 802441 - DNA, 19 bp, Mus musculus
  siRNA target sequence for 1810062O14Rik (NM_178650.2,352-370).
cgacgatacaagaaggtaa

SEQ ID NO: 802442 - DNA, 19 bp, Mus musculus
  siRNA target sequence for 1810062O14Rik (NM_178650.2,355-373).
cgatacaagaaggtaaaga

SEQ ID NO: 802443 - DNA, 19 bp, Mus musculus
  siRNA target sequence for 1810062O14Rik (NM_178650.2,356-374).
gatacaagaaggtaaagat

SEQ ID NO: 802444 - DNA, 19 bp, Mus musculus
  siRNA target sequence for 1810062O14Rik (NM_178650.2,439-457).
cggatgtgtcagaagaaca

SEQ ID NO: 802445 - DNA, 19 bp, Mus musculus
  siRNA target sequence for C330023F11Rik (NM_178653.2,315-333).
gggaagaccatcactatca

SEQ ID NO: 802446 - DNA, 19 bp, Mus musculus
  siRNA target sequence for C330023F11Rik (NM_178653.2,344-362).
gagtcataatctgtgatat

SEQ ID NO: 802447 - DNA, 19 bp, Mus musculus
  siRNA target sequence for C330023F11Rik (NM_178653.2,346-364).
gtcataatctgtgatatca

SEQ ID NO: 802448 - DNA, 19 bp, Mus musculus
  siRNA target sequence for C330023F11Rik (NM_178653.2,348-366).
cataatctgtgatatcagt

SEQ ID NO: 802449 - DNA, 19 bp, Mus musculus
  siRNA target sequence for C330023F11Rik (NM_178653.2,354-372).
ctgtgatatcagtaatcca

SEQ ID NO: 802450 - DNA, 19 bp, Mus musculus
  siRNA target sequence for C330023F11Rik (NM_178653.2,370-388).
ccagcctcacttgatgaaa

SEQ ID NO: 802451 - DNA, 19 bp, Mus musculus
  siRNA target sequence for C330023F11Rik (NM_178653.2,371-389).
cagcctcacttgatgaaat

SEQ ID NO: 802452 - DNA, 19 bp, Mus musculus
  siRNA target sequence for C330023F11Rik (NM_178653.2,390-408).
ggctaaacaggcaaagctt

SEQ ID NO: 802453 - DNA, 19 bp, Mus musculus
  siRNA target sequence for C330023F11Rik (NM_178653.2,419-437).
gcgtaggaccgtatcgatt

SEQ ID NO: 802454 - DNA, 19 bp, Mus musculus
  siRNA target sequence for C330023F11Rik (NM_178653.2,420-438).
cgtaggaccgtatcgattt

SEQ ID NO: 802455 - DNA, 19 bp, Mus musculus
  siRNA target sequence for C330023F11Rik (NM_178653.2,421-439).
gtaggaccgtatcgatttt

SEQ ID NO: 802456 - DNA, 19 bp, Mus musculus
  siRNA target sequence for C330023F11Rik (NM_178653.2,449-467).
ctgtagtaaaagcatgtat

SEQ ID NO: 802457 - DNA, 19 bp, Mus musculus
  siRNA target sequence for C330023F11Rik (NM_178653.2,551-569).
cagagaagggggtttatat

SEQ ID NO: 802458 - DNA, 19 bp, Mus musculus
  siRNA target sequence for C330023F11Rik (NM_178653.2,602-620).
cagatctaggagtgctata

SEQ ID NO: 802459 - DNA, 19 bp, Mus musculus
  siRNA target sequence for C330023F11Rik (NM_178653.2,604-622).
gatctaggagtgctataca

SEQ ID NO: 802460 - DNA, 19 bp, Mus musculus
  siRNA target sequence for C330023F11Rik (NM_178653.2,631-649).
cagatgaacggtactttga

SEQ ID NO: 802461 - DNA, 19 bp, Mus musculus
  siRNA target sequence for C330023F11Rik (NM_178653.2,633-651).
gatgaacggtactttgact

SEQ ID NO: 802462 - DNA, 19 bp, Mus musculus
  siRNA target sequence for C330023F11Rik (NM_178653.2,658-676).
gaaagcttcctgacaataa

SEQ ID NO: 802463 - DNA, 19 bp, Mus musculus
  siRNA target sequence for C330023F11Rik (NM_178653.2,686-704).
ctgaggggttgtgtattca

SEQ ID NO: 802464 - DNA, 19 bp, Mus musculus
  siRNA target sequence for C330023F11Rik (NM_178653.2,713-731).
cctggaagtcggcaattta

SEQ ID NO: 802465 - DNA, 19 bp, Mus musculus
  siRNA target sequence for C330023F11Rik (NM_178653.2,714-732).
ctggaagtcggcaatttat

SEQ ID NO: 802466 - DNA, 19 bp, Mus musculus
  siRNA target sequence for C330023F11Rik (NM_178653.2,720-738).
gtcggcaatttatggtttt

SEQ ID NO: 802467 - DNA, 19 bp, Mus musculus
  siRNA target sequence for C330023F11Rik (NM_178653.2,739-757).
ggcgataagggtagtttaa

SEQ ID NO: 802468 - DNA, 19 bp, Mus musculus
  siRNA target sequence for C330023F11Rik (NM_178653.2,742-760).
gataagggtagtttaagaa

SEQ ID NO: 802469 - DNA, 19 bp, Mus musculus
  siRNA target sequence for C330023F11Rik (NM_178653.2,747-765).
gggtagtttaagaaaacta

SEQ ID NO: 802470 - DNA, 19 bp, Mus musculus
  siRNA target sequence for C330023F11Rik (NM_178653.2,783-801).
gaaacctgtcccaattgtt

SEQ ID NO: 802471 - DNA, 19 bp, Mus musculus
  siRNA target sequence for C330023F11Rik (NM_178653.2,793-811).
ccaattgttggtacaaagt

SEQ ID NO: 802472 - DNA, 19 bp, Mus musculus
  siRNA target sequence for C330023F11Rik (NM_178653.2,794-812).
caattgttggtacaaagtt

SEQ ID NO: 802473 - DNA, 19 bp, Mus musculus
  siRNA target sequence for C330023F11Rik (NM_178653.2,844-862).
gagctgaactcgtattcca

SEQ ID NO: 802474 - DNA, 19 bp, Mus musculus
  siRNA target sequence for C330023F11Rik (NM_178653.2,852-870).
ctcgtattccattcctttt

SEQ ID NO: 802475 - DNA, 19 bp, Mus musculus
  siRNA target sequence for C330023F11Rik (NM_178653.2,865-883).
ccttttttgggatctgata

SEQ ID NO: 802476 - DNA, 19 bp, Mus musculus
  siRNA target sequence for C330023F11Rik (NM_178653.2,866-884).
cttttttgggatctgatat

SEQ ID NO: 802477 - DNA, 19 bp, Mus musculus
  siRNA target sequence for C330023F11Rik (NM_178653.2,873-891).
gggatctgatatatctgtt

SEQ ID NO: 802478 - DNA, 19 bp, Mus musculus
  siRNA target sequence for C330023F11Rik (NM_178653.2,899-917).
ggactcagcgttacttaca

SEQ ID NO: 802479 - DNA, 19 bp, Mus musculus
  siRNA target sequence for C330023F11Rik (NM_178653.2,900-918).
gactcagcgttacttacat

SEQ ID NO: 802480 - DNA, 19 bp, Mus musculus
  siRNA target sequence for C330023F11Rik (NM_178653.2,902-920).
ctcagcgttacttacatga

SEQ ID NO: 802481 - DNA, 19 bp, Mus musculus
  siRNA target sequence for C330023F11Rik (NM_178653.2,904-922).
cagcgttacttacatgaaa

SEQ ID NO: 802482 - DNA, 19 bp, Mus musculus
  siRNA target sequence for C330023F11Rik (NM_178653.2,906-924).
gcgttacttacatgaaaat

SEQ ID NO: 802483 - DNA, 19 bp, Mus musculus
  siRNA target sequence for C330023F11Rik (NM_178653.2,930-948).
ggactcaccagttcagtat

SEQ ID NO: 802484 - DNA, 19 bp, Mus musculus
  siRNA target sequence for C330023F11Rik (NM_178653.2,943-961).
cagtatgctgcttatgtga

SEQ ID NO: 802485 - DNA, 19 bp, Mus musculus
  siRNA target sequence for C330023F11Rik (NM_178653.2,980-998).
ctgtgattaagctgatgtt

SEQ ID NO: 802486 - DNA, 19 bp, Mus musculus
  siRNA target sequence for C330023F11Rik (NM_178653.2,1039-1057).
ggaagacaacttctcataa

SEQ ID NO: 802487 - DNA, 19 bp, Mus musculus
  siRNA target sequence for C330023F11Rik (NM_178653.2,1077-1095).
ctttggctatttttcaaaa

SEQ ID NO: 802488 - DNA, 19 bp, Mus musculus
  siRNA target sequence for C330023F11Rik (NM_178653.2,1099-1117).
ggtccaacacaaaaacaga

SEQ ID NO: 802489 - DNA, 19 bp, Mus musculus
  siRNA target sequence for C330023F11Rik (NM_178653.2,1119-1137).
ggatgagacatcatttaca

SEQ ID NO: 802490 - DNA, 19 bp, Mus musculus
  siRNA target sequence for C330023F11Rik (NM_178653.2,1123-1141).
gagacatcatttacaatga

SEQ ID NO: 802491 - DNA, 19 bp, Mus musculus
  siRNA target sequence for C330023F11Rik (NM_178653.2,1168-1186).
ggcacttgtgttgaaaaga

SEQ ID NO: 802492 - DNA, 19 bp, Mus musculus
  siRNA target sequence for C330023F11Rik (NM_178653.2,1343-1361).
ccagaacaaagttgattga

SEQ ID NO: 802493 - DNA, 19 bp, Mus musculus
  siRNA target sequence for A530088H08Rik (NM_178656.2,330-348).
cacaagcccatcatcatca

SEQ ID NO: 802494 - DNA, 19 bp, Mus musculus
  siRNA target sequence for A530088H08Rik (NM_178656.2,400-418).
cctacatcttggaagagaa

SEQ ID NO: 802495 - DNA, 19 bp, Mus musculus
  siRNA target sequence for A530088H08Rik (NM_178656.2,502-520).
gggtccccataatcaaaaa

SEQ ID NO: 802496 - DNA, 19 bp, Mus musculus
  siRNA target sequence for 6330500D04Rik (NM_178658.2,249-267).
caaccagactcccagaaat

SEQ ID NO: 802497 - DNA, 19 bp, Mus musculus
  siRNA target sequence for 6330500D04Rik (NM_178658.2,328-346).
gtccttcgcaggtttcagt

SEQ ID NO: 802498 - DNA, 19 bp, Mus musculus
  siRNA target sequence for 6330500D04Rik (NM_178658.2,369-387).
ggtgtaactccttcattga

SEQ ID NO: 802499 - DNA, 19 bp, Mus musculus
  siRNA target sequence for 6330500D04Rik (NM_178658.2,545-563).
cagacggagctggacaaat

SEQ ID NO: 802500 - DNA, 19 bp, Mus musculus
  siRNA target sequence for 6330500D04Rik (NM_178658.2,559-577).
caaattgactgctcaatta

SEQ ID NO: 802501 - DNA, 19 bp, Mus musculus
  siRNA target sequence for 6330500D04Rik (NM_178658.2,565-583).
gactgctcaattaaaagat

SEQ ID NO: 802502 - DNA, 19 bp, Mus musculus
  siRNA target sequence for 6330500D04Rik (NM_178658.2,569-587).
gctcaattaaaagatatga

SEQ ID NO: 802503 - DNA, 19 bp, Mus musculus
  siRNA target sequence for 6330500D04Rik (NM_178658.2,623-641).
gacaagcaaattaaaacga

SEQ ID NO: 802504 - DNA, 19 bp, Mus musculus
  siRNA target sequence for 6330500D04Rik (NM_178658.2,625-643).
caagcaaattaaaacgatt

SEQ ID NO: 802505 - DNA, 19 bp, Mus musculus
  siRNA target sequence for 6330500D04Rik (NM_178658.2,656-674).
cgacgcctggagtttcaca

SEQ ID NO: 802506 - DNA, 19 bp, Mus musculus
  siRNA target sequence for 6330500D04Rik (NM_178658.2,657-675).
gacgcctggagtttcacat

SEQ ID NO: 802507 - DNA, 19 bp, Mus musculus
  siRNA target sequence for 6330500D04Rik (NM_178658.2,659-677).
cgcctggagtttcacatta

SEQ ID NO: 802508 - DNA, 19 bp, Mus musculus
  siRNA target sequence for 6330500D04Rik (NM_178658.2,661-679).
cctggagtttcacattagt

SEQ ID NO: 802509 - DNA, 19 bp, Mus musculus
  siRNA target sequence for 6330500D04Rik (NM_178658.2,662-680).
ctggagtttcacattagta

SEQ ID NO: 802510 - DNA, 19 bp, Mus musculus
  siRNA target sequence for 6330500D04Rik (NM_178658.2,667-685).
gtttcacattagtaaggta

SEQ ID NO: 802511 - DNA, 19 bp, Mus musculus
  siRNA target sequence for 6330500D04Rik (NM_178658.2,809-827).
cgcagctacaaggaataca

SEQ ID NO: 802512 - DNA, 19 bp, Mus musculus
  siRNA target sequence for 6330500D04Rik (NM_178658.2,872-890).
ggagaattctccatcaaga

SEQ ID NO: 802513 - DNA, 19 bp, Mus musculus
  siRNA target sequence for 6330500D04Rik (NM_178658.2,873-891).
gagaattctccatcaagat

SEQ ID NO: 802514 - DNA, 19 bp, Mus musculus
  siRNA target sequence for 6330500D04Rik (NM_178658.2,932-950).
caatatgaaattttcatga

SEQ ID NO: 802515 - DNA, 19 bp, Mus musculus
  siRNA target sequence for 6330500D04Rik (NM_178658.2,1331-1349).
gaccagtccttctttagat

SEQ ID NO: 802516 - DNA, 19 bp, Mus musculus
  siRNA target sequence for 6330500D04Rik (NM_178658.2,1374-1392).
ccttgcgagacactttctt

SEQ ID NO: 802517 - DNA, 19 bp, Mus musculus
  siRNA target sequence for 6330500D04Rik (NM_178658.2,1454-1472).
gccctgctagaattctatt

SEQ ID NO: 802518 - DNA, 19 bp, Mus musculus
  siRNA target sequence for 6330500D04Rik (NM_178658.2,1609-1627).
ctcagcccatccagagatt

SEQ ID NO: 802519 - DNA, 19 bp, Mus musculus
  siRNA target sequence for 6330500D04Rik (NM_178658.2,1614-1632).
cccatccagagattaccat

SEQ ID NO: 802520 - DNA, 19 bp, Mus musculus
  siRNA target sequence for 6330500D04Rik (NM_178658.2,1700-1718).
gcgtcttccaggaattcct

SEQ ID NO: 802521 - DNA, 19 bp, Mus musculus
  siRNA target sequence for 6330500D04Rik (NM_178658.2,1701-1719).
cgtcttccaggaattcctt

SEQ ID NO: 802522 - DNA, 19 bp, Mus musculus
  siRNA target sequence for 6330500D04Rik (NM_178658.2,1738-1756).
caagtcccacccaaagagt

SEQ ID NO: 802523 - DNA, 19 bp, Mus musculus
  siRNA target sequence for 6330500D04Rik (NM_178658.2,1800-1818).
gtaccgagagcctgtttct

SEQ ID NO: 802524 - DNA, 19 bp, Mus musculus
  siRNA target sequence for 6330500D04Rik (NM_178658.2,1952-1970).
gtcactactgacaagcttt

SEQ ID NO: 802525 - DNA, 19 bp, Mus musculus
  siRNA target sequence for 6330500D04Rik (NM_178658.2,2049-2067).
gactcttccttgcattaga

SEQ ID NO: 802526 - DNA, 19 bp, Mus musculus
  siRNA target sequence for 6330500D04Rik (NM_178658.2,2116-2134).
cactcacttggatgatgtt

SEQ ID NO: 802527 - DNA, 19 bp, Mus musculus
  siRNA target sequence for 6330500D04Rik (NM_178658.2,2137-2155).
caaagatgctaaacatctt

SEQ ID NO: 802528 - DNA, 19 bp, Mus musculus
  siRNA target sequence for AU020939 (NM_178659.3,245-263).
cagcggcgtgaccttcatt

SEQ ID NO: 802529 - DNA, 19 bp, Mus musculus
  siRNA target sequence for AU020939 (NM_178659.3,247-265).
gcggcgtgaccttcattca

SEQ ID NO: 802530 - DNA, 19 bp, Mus musculus
  siRNA target sequence for AU020939 (NM_178659.3,454-472).
gtggagtgcgagaatacaa

SEQ ID NO: 802531 - DNA, 19 bp, Mus musculus
  siRNA target sequence for AU020939 (NM_178659.3,456-474).
ggagtgcgagaatacaatt

SEQ ID NO: 802532 - DNA, 19 bp, Mus musculus
  siRNA target sequence for AU020939 (NM_178659.3,459-477).
gtgcgagaatacaattcaa

SEQ ID NO: 802533 - DNA, 19 bp, Mus musculus
  siRNA target sequence for AU020939 (NM_178659.3,501-519).
cgcgactatatcagttact

SEQ ID NO: 802534 - DNA, 19 bp, Mus musculus
  siRNA target sequence for AU020939 (NM_178659.3,592-610).
gagactccttggtgaatga

SEQ ID NO: 802535 - DNA, 19 bp, Mus musculus
  siRNA target sequence for AU020939 (NM_178659.3,646-664).
cgtcagactggctgaatga

SEQ ID NO: 802536 - DNA, 19 bp, Mus musculus
  siRNA target sequence for AU020939 (NM_178659.3,687-705).
gatgactatcgttttgtct

SEQ ID NO: 802537 - DNA, 19 bp, Mus musculus
  siRNA target sequence for AU020939 (NM_178659.3,917-935).
ccttcccattgaagtcata

SEQ ID NO: 802538 - DNA, 19 bp, Mus musculus
  siRNA target sequence for AU020939 (NM_178659.3,967-985).
gcgggtggcaccatcaagt

SEQ ID NO: 802539 - DNA, 19 bp, Mus musculus
  siRNA target sequence for AU020939 (NM_178659.3,973-991).
ggcaccatcaagtgtacaa

SEQ ID NO: 802540 - DNA, 19 bp, Mus musculus
  siRNA target sequence for AU020939 (NM_178659.3,996-1014).
gatgacaccatttctatta

SEQ ID NO: 802541 - DNA, 19 bp, Mus musculus
  siRNA target sequence for AU020939 (NM_178659.3,1086-1104).
cagcatgaggtcgaagaat

SEQ ID NO: 802542 - DNA, 19 bp, Mus musculus
  siRNA target sequence for AU020939 (NM_178659.3,1154-1172).
gtcctgcacagggatcaat

SEQ ID NO: 802543 - DNA, 19 bp, Mus musculus
  siRNA target sequence for AU020939 (NM_178659.3,1156-1174).
cctgcacagggatcaattt

SEQ ID NO: 802544 - DNA, 19 bp, Mus musculus
  siRNA target sequence for AU020939 (NM_178659.3,1159-1177).
gcacagggatcaattttga

SEQ ID NO: 802545 - DNA, 19 bp, Mus musculus
  siRNA target sequence for AU020939 (NM_178659.3,1162-1180).
cagggatcaattttgaaga

SEQ ID NO: 802546 - DNA, 19 bp, Mus musculus
  siRNA target sequence for AU020939 (NM_178659.3,1361-1379).
ggacaccagcgcattctca

SEQ ID NO: 802547 - DNA, 19 bp, Mus musculus
  siRNA target sequence for Atcay (NM_178662.2,502-520).
cggagcacatcgaaagaga

SEQ ID NO: 802548 - DNA, 19 bp, Mus musculus
  siRNA target sequence for Atcay (NM_178662.2,710-728).
gtggccaccgccaaaaaca

SEQ ID NO: 802549 - DNA, 19 bp, Mus musculus
  siRNA target sequence for Atcay (NM_178662.2,799-817).
gtggcgaactgtcatcata

SEQ ID NO: 802550 - DNA, 19 bp, Mus musculus
  siRNA target sequence for Atcay (NM_178662.2,833-851).
cgcatcgacctgcatatga

SEQ ID NO: 802551 - DNA, 19 bp, Mus musculus
  siRNA target sequence for Atcay (NM_178662.2,834-852).
gcatcgacctgcatatgat

SEQ ID NO: 802552 - DNA, 19 bp, Mus musculus
  siRNA target sequence for Atcay (NM_178662.2,954-972).
cagactatcactacatcat

SEQ ID NO: 802553 - DNA, 19 bp, Mus musculus
  siRNA target sequence for Atcay (NM_178662.2,1290-1308).
cagactgtgtcctgcaata

SEQ ID NO: 802554 - DNA, 19 bp, Mus musculus
  siRNA target sequence for E130319B15Rik (NM_178663.2,177-195).
cagaattcagcaatgatgt

SEQ ID NO: 802555 - DNA, 19 bp, Mus musculus
  siRNA target sequence for E130319B15Rik (NM_178663.2,214-232).
gacacaacccatttactta

SEQ ID NO: 802556 - DNA, 19 bp, Mus musculus
  siRNA target sequence for E130319B15Rik (NM_178663.2,233-251).
ggagacgaaagcatggaaa

SEQ ID NO: 802557 - DNA, 19 bp, Mus musculus
  siRNA target sequence for E130319B15Rik (NM_178663.2,238-256).
cgaaagcatggaaattaaa

SEQ ID NO: 802558 - DNA, 19 bp, Mus musculus
  siRNA target sequence for E130319B15Rik (NM_178663.2,260-278).
caaattacggggatgagaa

SEQ ID NO: 802559 - DNA, 19 bp, Mus musculus
  siRNA target sequence for E130319B15Rik (NM_178663.2,267-285).
cggggatgagaagattact

SEQ ID NO: 802560 - DNA, 19 bp, Mus musculus
  siRNA target sequence for E130319B15Rik (NM_178663.2,270-288).
ggatgagaagattactgaa

SEQ ID NO: 802561 - DNA, 19 bp, Mus musculus
  siRNA target sequence for E130319B15Rik (NM_178663.2,294-312).
gcactggaaggatatatca

SEQ ID NO: 802562 - DNA, 19 bp, Mus musculus
  siRNA target sequence for E130319B15Rik (NM_178663.2,349-367).
gccgcaggttgtggattta

SEQ ID NO: 802563 - DNA, 19 bp, Mus musculus
  siRNA target sequence for E130319B15Rik (NM_178663.2,351-369).
cgcaggttgtggatttagt

SEQ ID NO: 802564 - DNA, 19 bp, Mus musculus
  siRNA target sequence for E130319B15Rik (NM_178663.2,405-423).
cacagggcctccactctaa

SEQ ID NO: 802565 - DNA, 19 bp, Mus musculus
  siRNA target sequence for E130319B15Rik (NM_178663.2,407-425).
cagggcctccactctaatt

SEQ ID NO: 802566 - DNA, 19 bp, Mus musculus
  siRNA target sequence for E130319B15Rik (NM_178663.2,409-427).
gggcctccactctaattca

SEQ ID NO: 802567 - DNA, 19 bp, Mus musculus
  siRNA target sequence for E130319B15Rik (NM_178663.2,429-447).
gtggggcgtggaatgaact

SEQ ID NO: 802568 - DNA, 19 bp, Mus musculus
  siRNA target sequence for E130319B15Rik (NM_178663.2,539-557).
gaacttccaggggtgaatt

SEQ ID NO: 802569 - DNA, 19 bp, Mus musculus
  siRNA target sequence for E130319B15Rik (NM_178663.2,542-560).
cttccaggggtgaattcaa

SEQ ID NO: 802570 - DNA, 19 bp, Mus musculus
  siRNA target sequence for E130319B15Rik (NM_178663.2,546-564).
caggggtgaattcaatagt

SEQ ID NO: 802571 - DNA, 19 bp, Mus musculus
  siRNA target sequence for E130319B15Rik (NM_178663.2,566-584).
ggatccaactgctgtactt

SEQ ID NO: 802572 - DNA, 19 bp, Mus musculus
  siRNA target sequence for E130319B15Rik (NM_178663.2,716-734).
gccgtctcacgcaagagaa

SEQ ID NO: 802573 - DNA, 19 bp, Mus musculus
  siRNA target sequence for E130319B15Rik (NM_178663.2,717-735).
ccgtctcacgcaagagaaa

SEQ ID NO: 802574 - DNA, 19 bp, Mus musculus
  siRNA target sequence for E130319B15Rik (NM_178663.2,718-736).
cgtctcacgcaagagaaat

SEQ ID NO: 802575 - DNA, 19 bp, Mus musculus
  siRNA target sequence for E130319B15Rik (NM_178663.2,719-737).
gtctcacgcaagagaaata

SEQ ID NO: 802576 - DNA, 19 bp, Mus musculus
  siRNA target sequence for E130319B15Rik (NM_178663.2,892-910).
cctgggatttggcattgtt

SEQ ID NO: 802577 - DNA, 19 bp, Mus musculus
  siRNA target sequence for E130319B15Rik (NM_178663.2,948-966).
ctgaaggcttcgatgtgtt

SEQ ID NO: 802578 - DNA, 19 bp, Mus musculus
  siRNA target sequence for E130319B15Rik (NM_178663.2,978-996).
ctcagctggactctatact

SEQ ID NO: 802579 - DNA, 19 bp, Mus musculus
  siRNA target sequence for E130319B15Rik (NM_178663.2,980-998).
cagctggactctatactgt

SEQ ID NO: 802580 - DNA, 19 bp, Mus musculus
  siRNA target sequence for E130319B15Rik (NM_178663.2,1093-1111).
gcggaaaagagggttcaat

SEQ ID NO: 802581 - DNA, 19 bp, Mus musculus
  siRNA target sequence for E130319B15Rik (NM_178663.2,1119-1137).
ggaaaggactagaccaaaa

SEQ ID NO: 802582 - DNA, 19 bp, Mus musculus
  siRNA target sequence for E130319B15Rik (NM_178663.2,1125-1143).
gactagaccaaaacattgt

SEQ ID NO: 802583 - DNA, 19 bp, Mus musculus
  siRNA target sequence for E130319B15Rik (NM_178663.2,1138-1156).
cattgtgggtgcaataaaa

SEQ ID NO: 802584 - DNA, 19 bp, Mus musculus
  siRNA target sequence for E130319B15Rik (NM_178663.2,1144-1162).
gggtgcaataaaagtcttt

SEQ ID NO: 802585 - DNA, 19 bp, Mus musculus
  siRNA target sequence for E130319B15Rik (NM_178663.2,1145-1163).
ggtgcaataaaagtcttta

SEQ ID NO: 802586 - DNA, 19 bp, Mus musculus
  siRNA target sequence for E130319B15Rik (NM_178663.2,1182-1200).
cgaatcatgtggataaact

SEQ ID NO: 802587 - DNA, 19 bp, Mus musculus
  siRNA target sequence for E130319B15Rik (NM_178663.2,1282-1300).
ggtagctgacggtgatgaa

SEQ ID NO: 802588 - DNA, 19 bp, Mus musculus
  siRNA target sequence for E130319B15Rik (NM_178663.2,1283-1301).
gtagctgacggtgatgaaa

SEQ ID NO: 802589 - DNA, 19 bp, Mus musculus
  siRNA target sequence for E130319B15Rik (NM_178663.2,1287-1305).
ctgacggtgatgaaagact

SEQ ID NO: 802590 - DNA, 19 bp, Mus musculus
  siRNA target sequence for E130319B15Rik (NM_178663.2,1322-1340).
cccccaacaggtcatacat

SEQ ID NO: 802591 - DNA, 19 bp, Mus musculus
  siRNA target sequence for E130319B15Rik (NM_178663.2,1323-1341).
ccccaacaggtcatacatt

SEQ ID NO: 802592 - DNA, 19 bp, Mus musculus
  siRNA target sequence for E130319B15Rik (NM_178663.2,1332-1350).
gtcatacatttgtcatcaa

SEQ ID NO: 802593 - DNA, 19 bp, Mus musculus
  siRNA target sequence for 6030413G23Rik (NM_178664.2,143-161).
cgctggccctagtgtctat

SEQ ID NO: 802594 - DNA, 19 bp, Mus musculus
  siRNA target sequence for 6030413G23Rik (NM_178664.2,145-163).
ctggccctagtgtctatca

SEQ ID NO: 802595 - DNA, 19 bp, Mus musculus
  siRNA target sequence for 6030413G23Rik (NM_178664.2,203-221).
gcttgatgtctgttttgca

SEQ ID NO: 802596 - DNA, 19 bp, Mus musculus
  siRNA target sequence for 6030413G23Rik (NM_178664.2,279-297).
gtctagggccatcattgaa

SEQ ID NO: 802597 - DNA, 19 bp, Mus musculus
  siRNA target sequence for 6030413G23Rik (NM_178664.2,281-299).
ctagggccatcattgaaaa

SEQ ID NO: 802598 - DNA, 19 bp, Mus musculus
  siRNA target sequence for 6030413G23Rik (NM_178664.2,362-380).
ctcccagaggagttggata

SEQ ID NO: 802599 - DNA, 19 bp, Mus musculus
  siRNA target sequence for 6030413G23Rik (NM_178664.2,366-384).
cagaggagttggatattct

SEQ ID NO: 802600 - DNA, 19 bp, Mus musculus
  siRNA target sequence for 6030413G23Rik (NM_178664.2,368-386).
gaggagttggatattctaa

SEQ ID NO: 802601 - DNA, 19 bp, Mus musculus
  siRNA target sequence for 6030413G23Rik (NM_178664.2,371-389).
gagttggatattctaaaaa

SEQ ID NO: 802602 - DNA, 19 bp, Mus musculus
  siRNA target sequence for 6030413G23Rik (NM_178664.2,405-423).
gagcacagggtcttacctt

SEQ ID NO: 802603 - DNA, 19 bp, Mus musculus
  siRNA target sequence for 6030413G23Rik (NM_178664.2,490-508).
cagcacccgacgagtatca

SEQ ID NO: 802604 - DNA, 19 bp, Mus musculus
  siRNA target sequence for 6030413G23Rik (NM_178664.2,492-510).
gcacccgacgagtatcata

SEQ ID NO: 802605 - DNA, 19 bp, Mus musculus
  siRNA target sequence for 6030413G23Rik (NM_178664.2,496-514).
ccgacgagtatcataggat

SEQ ID NO: 802606 - DNA, 19 bp, Mus musculus
  siRNA target sequence for 6030413G23Rik (NM_178664.2,557-575).
cacgttggatcaaccattt

SEQ ID NO: 802607 - DNA, 19 bp, Mus musculus
  siRNA target sequence for 6030413G23Rik (NM_178664.2,559-577).
cgttggatcaaccatttga

SEQ ID NO: 802608 - DNA, 19 bp, Mus musculus
  siRNA target sequence for 6030413G23Rik (NM_178664.2,567-585).
caaccatttgacatctgat

SEQ ID NO: 802609 - DNA, 19 bp, Mus musculus
  siRNA target sequence for 6030413G23Rik (NM_178664.2,666-684).
ccacgtgggcccatttgat

SEQ ID NO: 802610 - DNA, 19 bp, Mus musculus
  siRNA target sequence for 6030413G23Rik (NM_178664.2,669-687).
cgtgggcccatttgatgaa

SEQ ID NO: 802611 - DNA, 19 bp, Mus musculus
  siRNA target sequence for 6030413G23Rik (NM_178664.2,905-923).
gcaagcaggggcgtaagtt

SEQ ID NO: 802612 - DNA, 19 bp, Mus musculus
  siRNA target sequence for 6030413G23Rik (NM_178664.2,906-924).
caagcaggggcgtaagtta

SEQ ID NO: 802613 - DNA, 19 bp, Mus musculus
  siRNA target sequence for 6030413G23Rik (NM_178664.2,1070-1088).
cccagtctccctttgtcat

SEQ ID NO: 802614 - DNA, 19 bp, Mus musculus
  siRNA target sequence for 6030413G23Rik (NM_178664.2,1159-1177).
cgggacttcgtccatttca

SEQ ID NO: 802615 - DNA, 19 bp, Mus musculus
  siRNA target sequence for E430004N04Rik (NM_178666.3,354-372).
gaagggtctgtttatgaga

SEQ ID NO: 802616 - DNA, 19 bp, Mus musculus
  siRNA target sequence for E430004N04Rik (NM_178666.3,358-376).
ggtctgtttatgagatgtt

SEQ ID NO: 802617 - DNA, 19 bp, Mus musculus
  siRNA target sequence for E430004N04Rik (NM_178666.3,395-413).
gtcaacaggagaagtgatt

SEQ ID NO: 802618 - DNA, 19 bp, Mus musculus
  siRNA target sequence for E430004N04Rik (NM_178666.3,397-415).
caacaggagaagtgattaa

SEQ ID NO: 802619 - DNA, 19 bp, Mus musculus
  siRNA target sequence for E430004N04Rik (NM_178666.3,440-458).
gatgatggctgaaatttgt

SEQ ID NO: 802620 - DNA, 19 bp, Mus musculus
  siRNA target sequence for E430004N04Rik (NM_178666.3,509-527).
gaattttccaggtctcttt

SEQ ID NO: 802621 - DNA, 19 bp, Mus musculus
  siRNA target sequence for E430004N04Rik (NM_178666.3,547-565).
ctccatacctgtcaattga

SEQ ID NO: 802622 - DNA, 19 bp, Mus musculus
  siRNA target sequence for E430004N04Rik (NM_178666.3,626-644).
cctgaaggatataaaacta

SEQ ID NO: 802623 - DNA, 19 bp, Mus musculus
  siRNA target sequence for E430004N04Rik (NM_178666.3,642-660).
ctagagaatctcattatta

SEQ ID NO: 802624 - DNA, 19 bp, Mus musculus
  siRNA target sequence for E430004N04Rik (NM_178666.3,669-687).
gagccaatccggttcaact

SEQ ID NO: 802625 - DNA, 19 bp, Mus musculus
  siRNA target sequence for E430004N04Rik (NM_178666.3,677-695).
ccggttcaactcagttgaa

SEQ ID NO: 802626 - DNA, 19 bp, Mus musculus
  siRNA target sequence for E430004N04Rik (NM_178666.3,679-697).
ggttcaactcagttgaaga

SEQ ID NO: 802627 - DNA, 19 bp, Mus musculus
  siRNA target sequence for E430004N04Rik (NM_178666.3,741-759).
catcagagccactcattta

SEQ ID NO: 802628 - DNA, 19 bp, Mus musculus
  siRNA target sequence for E430004N04Rik (NM_178666.3,744-762).
cagagccactcatttactt

SEQ ID NO: 802629 - DNA, 19 bp, Mus musculus
  siRNA target sequence for E430004N04Rik (NM_178666.3,770-788).
gtcacaagaaggagaattt

SEQ ID NO: 802630 - DNA, 19 bp, Mus musculus
  siRNA target sequence for E430004N04Rik (NM_178666.3,796-814).
gtgaggatgaacatatcta

SEQ ID NO: 802631 - DNA, 19 bp, Mus musculus
  siRNA target sequence for E430004N04Rik (NM_178666.3,856-874).
gaacacggacagtgaaact

SEQ ID NO: 802632 - DNA, 19 bp, Mus musculus
  siRNA target sequence for E430004N04Rik (NM_178666.3,865-883).
cagtgaaacttacagattt

SEQ ID NO: 802633 - DNA, 19 bp, Mus musculus
  siRNA target sequence for E430004N04Rik (NM_178666.3,895-913).
gggactcaaccaatccatt

SEQ ID NO: 802634 - DNA, 19 bp, Mus musculus
  siRNA target sequence for E430004N04Rik (NM_178666.3,995-1013).
ccggattctcccaagttta

SEQ ID NO: 802635 - DNA, 19 bp, Mus musculus
  siRNA target sequence for E430004N04Rik (NM_178666.3,1006-1024).
caagtttagacgttgaagt

SEQ ID NO: 802636 - DNA, 19 bp, Mus musculus
  siRNA target sequence for E430004N04Rik (NM_178666.3,1014-1032).
gacgttgaagtcaaagata

SEQ ID NO: 802637 - DNA, 19 bp, Mus musculus
  siRNA target sequence for E430004N04Rik (NM_178666.3,1016-1034).
cgttgaagtcaaagatatt

SEQ ID NO: 802638 - DNA, 19 bp, Mus musculus
  siRNA target sequence for E430004N04Rik (NM_178666.3,1017-1035).
gttgaagtcaaagatatta

SEQ ID NO: 802639 - DNA, 19 bp, Mus musculus
  siRNA target sequence for E430004N04Rik (NM_178666.3,1036-1054).
ctgattcttatgatgctaa

SEQ ID NO: 802640 - DNA, 19 bp, Mus musculus
  siRNA target sequence for E430004N04Rik (NM_178666.3,1051-1069).
ctaactggtttcttcagtt

SEQ ID NO: 802641 - DNA, 19 bp, Mus musculus
  siRNA target sequence for E430004N04Rik (NM_178666.3,1073-1091).
gtctacggacgaccttttt

SEQ ID NO: 802642 - DNA, 19 bp, Mus musculus
  siRNA target sequence for E430004N04Rik (NM_178666.3,1075-1093).
ctacggacgacctttttga

SEQ ID NO: 802643 - DNA, 19 bp, Mus musculus
  siRNA target sequence for E430004N04Rik (NM_178666.3,1078-1096).
cggacgacctttttgaaat

SEQ ID NO: 802644 - DNA, 19 bp, Mus musculus
  siRNA target sequence for E430004N04Rik (NM_178666.3,1080-1098).
gacgacctttttgaaatga

SEQ ID NO: 802645 - DNA, 19 bp, Mus musculus
  siRNA target sequence for E430004N04Rik (NM_178666.3,1122-1140).
gctgaagttgtcgaaatat

SEQ ID NO: 802646 - DNA, 19 bp, Mus musculus
  siRNA target sequence for E430004N04Rik (NM_178666.3,1176-1194).
cgagagaaaaccattgtca

SEQ ID NO: 802647 - DNA, 19 bp, Mus musculus
  siRNA target sequence for E430004N04Rik (NM_178666.3,1212-1230).
gcttcgaggatcttagctt

SEQ ID NO: 802648 - DNA, 19 bp, Mus musculus
  siRNA target sequence for E430004N04Rik (NM_178666.3,1231-1249).
cagaaattcgcagcaattt

SEQ ID NO: 802649 - DNA, 19 bp, Mus musculus
  siRNA target sequence for E430004N04Rik (NM_178666.3,1239-1257).
cgcagcaatttccctaaaa

SEQ ID NO: 802650 - DNA, 19 bp, Mus musculus
  siRNA target sequence for E430004N04Rik (NM_178666.3,1243-1261).
gcaatttccctaaaagaca

SEQ ID NO: 802651 - DNA, 19 bp, Mus musculus
  siRNA target sequence for E430004N04Rik (NM_178666.3,1251-1269).
cctaaaagacacttcttga

SEQ ID NO: 802652 - DNA, 19 bp, Mus musculus
  siRNA target sequence for E430004N04Rik (NM_178666.3,1252-1270).
ctaaaagacacttcttgat

SEQ ID NO: 802653 - DNA, 19 bp, Mus musculus
  siRNA target sequence for E430004N04Rik (NM_178666.3,1260-1278).
cacttcttgatccctatta

SEQ ID NO: 802654 - DNA, 19 bp, Mus musculus
  siRNA target sequence for E430004N04Rik (NM_178666.3,1268-1286).
gatccctattagctacaaa

SEQ ID NO: 802655 - DNA, 19 bp, Mus musculus
  siRNA target sequence for E430004N04Rik (NM_178666.3,1433-1451).
gtttctagtgcatcattca

SEQ ID NO: 802656 - DNA, 19 bp, Mus musculus
  siRNA target sequence for E430004N04Rik (NM_178666.3,1504-1522).
gtgaaaaagtcctcaataa

SEQ ID NO: 802657 - DNA, 19 bp, Mus musculus
  siRNA target sequence for E430004N04Rik (NM_178666.3,1517-1535).
caataagacccgtgaagat

SEQ ID NO: 802658 - DNA, 19 bp, Mus musculus
  siRNA target sequence for E430004N04Rik (NM_178666.3,1537-1555).
cacagcttcctctatacat

SEQ ID NO: 802659 - DNA, 19 bp, Mus musculus
  siRNA target sequence for E430004N04Rik (NM_178666.3,1569-1587).
gtagaggtgattcatgata

SEQ ID NO: 802660 - DNA, 19 bp, Mus musculus
  siRNA target sequence for E430004N04Rik (NM_178666.3,1572-1590).
gaggtgattcatgataaga

SEQ ID NO: 802661 - DNA, 19 bp, Mus musculus
  siRNA target sequence for E430004N04Rik (NM_178666.3,1721-1739).
cacagattcttatctactt

SEQ ID NO: 802662 - DNA, 19 bp, Mus musculus
  siRNA target sequence for E430004N04Rik (NM_178666.3,1723-1741).
cagattcttatctacttat

SEQ ID NO: 802663 - DNA, 19 bp, Mus musculus
  siRNA target sequence for E430004N04Rik (NM_178666.3,1779-1797).
cccatgagccgcttgaata

SEQ ID NO: 802664 - DNA, 19 bp, Mus musculus
  siRNA target sequence for E430004N04Rik (NM_178666.3,1780-1798).
ccatgagccgcttgaatat

SEQ ID NO: 802665 - DNA, 19 bp, Mus musculus
  siRNA target sequence for E430004N04Rik (NM_178666.3,1799-1817).
gactgttcgactagttaat

SEQ ID NO: 802666 - DNA, 19 bp, Mus musculus
  siRNA target sequence for E430004N04Rik (NM_178666.3,1874-1892).
gattacagaagaacagtat

SEQ ID NO: 802667 - DNA, 19 bp, Mus musculus
  siRNA target sequence for E430004N04Rik (NM_178666.3,1901-1919).
gaggaggtacgaaagttct

SEQ ID NO: 802668 - DNA, 19 bp, Mus musculus
  siRNA target sequence for E430004N04Rik (NM_178666.3,1904-1922).
gaggtacgaaagttctcta

SEQ ID NO: 802669 - DNA, 19 bp, Mus musculus
  siRNA target sequence for E430004N04Rik (NM_178666.3,2095-2113).
cagttggttttcagaatga

SEQ ID NO: 802670 - DNA, 19 bp, Mus musculus
  siRNA target sequence for E430028B21Rik (NM_178668.3,540-558).
caagggacacgcaaaggta

SEQ ID NO: 802671 - DNA, 19 bp, Mus musculus
  siRNA target sequence for E430028B21Rik (NM_178668.3,653-671).
cggtggtgaagctgtacta

SEQ ID NO: 802672 - DNA, 19 bp, Mus musculus
  siRNA target sequence for E430028B21Rik (NM_178668.3,689-707).
ccgaggatgtgctcaatgt

SEQ ID NO: 802673 - DNA, 19 bp, Mus musculus
  siRNA target sequence for E430028B21Rik (NM_178668.3,1069-1087).
ccaagccgggagctagaaa

SEQ ID NO: 802674 - DNA, 19 bp, Mus musculus
  siRNA target sequence for E430028B21Rik (NM_178668.3,1110-1128).
gcctggcacctgcactttt

SEQ ID NO: 802675 - DNA, 19 bp, Mus musculus
  siRNA target sequence for E430028B21Rik (NM_178668.3,1112-1130).
ctggcacctgcacttttga

SEQ ID NO: 802676 - DNA, 19 bp, Mus musculus
  siRNA target sequence for E430028B21Rik (NM_178668.3,1156-1174).
gtgacggaggactctttca

SEQ ID NO: 802677 - DNA, 19 bp, Mus musculus
  siRNA target sequence for E430028B21Rik (NM_178668.3,1177-1195).
cgcactgtctcctacaaca

SEQ ID NO: 802678 - DNA, 19 bp, Mus musculus
  siRNA target sequence for E430028B21Rik (NM_178668.3,1276-1294).
gactaccgccagaatctca

SEQ ID NO: 802679 - DNA, 19 bp, Mus musculus
  siRNA target sequence for E430028B21Rik (NM_178668.3,1278-1296).
ctaccgccagaatctcata

SEQ ID NO: 802680 - DNA, 19 bp, Mus musculus
  siRNA target sequence for E430028B21Rik (NM_178668.3,1282-1300).
cgccagaatctcatacaga

SEQ ID NO: 802681 - DNA, 19 bp, Mus musculus
  siRNA target sequence for E430028B21Rik (NM_178668.3,1466-1484).
ggctccttagtcaacatga

SEQ ID NO: 802682 - DNA, 19 bp, Mus musculus
  siRNA target sequence for E430028B21Rik (NM_178668.3,1662-1680).
ctactggcacccaaaaggt

SEQ ID NO: 802683 - DNA, 19 bp, Mus musculus
  siRNA target sequence for E430028B21Rik (NM_178668.3,1671-1689).
cccaaaaggtggatacatt

SEQ ID NO: 802684 - DNA, 19 bp, Mus musculus
  siRNA target sequence for E430028B21Rik (NM_178668.3,1682-1700).
gatacattcgtctcattca

SEQ ID NO: 802685 - DNA, 19 bp, Mus musculus
  siRNA target sequence for E430028B21Rik (NM_178668.3,1713-1731).
cttggttcatattagacat

SEQ ID NO: 802686 - DNA, 19 bp, Mus musculus
  siRNA target sequence for E430028B21Rik (NM_178668.3,1750-1768).
cctggcataccagttatat

SEQ ID NO: 802687 - DNA, 19 bp, Mus musculus
  siRNA target sequence for E430028B21Rik (NM_178668.3,1799-1817).
caggcatgtatcattttgt

SEQ ID NO: 802688 - DNA, 19 bp, Mus musculus
  siRNA target sequence for E430028B21Rik (NM_178668.3,1801-1819).
ggcatgtatcattttgtca

SEQ ID NO: 802689 - DNA, 19 bp, Mus musculus
  siRNA target sequence for E430028B21Rik (NM_178668.3,1802-1820).
gcatgtatcattttgtcat

SEQ ID NO: 802690 - DNA, 19 bp, Mus musculus
  siRNA target sequence for E430028B21Rik (NM_178668.3,1925-1943).
gtgaacctgcctacacaaa

SEQ ID NO: 802691 - DNA, 19 bp, Mus musculus
  siRNA target sequence for E430028B21Rik (NM_178668.3,1927-1945).
gaacctgcctacacaaatt

SEQ ID NO: 802692 - DNA, 19 bp, Mus musculus
  siRNA target sequence for E430028B21Rik (NM_178668.3,1956-1974).
ctttcacggatgtctagat

SEQ ID NO: 802693 - DNA, 19 bp, Mus musculus
  siRNA target sequence for E430028B21Rik (NM_178668.3,1960-1978).
cacggatgtctagattaca

SEQ ID NO: 802694 - DNA, 19 bp, Mus musculus
  siRNA target sequence for E430028B21Rik (NM_178668.3,1962-1980).
cggatgtctagattacatt

SEQ ID NO: 802695 - DNA, 19 bp, Mus musculus
  siRNA target sequence for E430028B21Rik (NM_178668.3,1972-1990).
gattacattttcattgact

SEQ ID NO: 802696 - DNA, 19 bp, Mus musculus
  siRNA target sequence for E430028B21Rik (NM_178668.3,2005-2023).
gttgaacaggtgattccat

SEQ ID NO: 802697 - DNA, 19 bp, Mus musculus
  siRNA target sequence for E430028B21Rik (NM_178668.3,2011-2029).
caggtgattccattaccta

SEQ ID NO: 802698 - DNA, 19 bp, Mus musculus
  siRNA target sequence for E430028B21Rik (NM_178668.3,2026-2044).
cctagtcatgaagaagtta

SEQ ID NO: 802699 - DNA, 19 bp, Mus musculus
  siRNA target sequence for E430028B21Rik (NM_178668.3,2052-2070).
ccaggccttacctagtgtt

SEQ ID NO: 802700 - DNA, 19 bp, Mus musculus
  siRNA target sequence for E430028B21Rik (NM_178668.3,2057-2075).
ccttacctagtgtttctca

SEQ ID NO: 802701 - DNA, 19 bp, Mus musculus
  siRNA target sequence for E430028B21Rik (NM_178668.3,2083-2101).
gatcacatagcacttgtat

SEQ ID NO: 802702 - DNA, 19 bp, Mus musculus
  siRNA target sequence for E430028B21Rik (NM_178668.3,2092-2110).
gcacttgtatgtgacttaa

SEQ ID NO: 802703 - DNA, 19 bp, Mus musculus
  siRNA target sequence for E430028B21Rik (NM_178668.3,2098-2116).
gtatgtgacttaaaatgga

SEQ ID NO: 802704 - DNA, 19 bp, Mus musculus
  siRNA target sequence for 8030462N17Rik (NM_178670.2,296-314).
ggaggcagtgggaaaagtt

SEQ ID NO: 802705 - DNA, 19 bp, Mus musculus
  siRNA target sequence for 8030462N17Rik (NM_178670.2,520-538).
ccacaactggccgagttta

SEQ ID NO: 802706 - DNA, 19 bp, Mus musculus
  siRNA target sequence for 8030462N17Rik (NM_178670.2,523-541).
caactggccgagtttatga

SEQ ID NO: 802707 - DNA, 19 bp, Mus musculus
  siRNA target sequence for 8030462N17Rik (NM_178670.2,542-560).
gagtgactcctctaatcat

SEQ ID NO: 802708 - DNA, 19 bp, Mus musculus
  siRNA target sequence for 8030462N17Rik (NM_178670.2,586-604).
gccatttggctgattcaga

SEQ ID NO: 802709 - DNA, 19 bp, Mus musculus
  siRNA target sequence for 8030462N17Rik (NM_178670.2,597-615).
gattcagatacattgtctt

SEQ ID NO: 802710 - DNA, 19 bp, Mus musculus
  siRNA target sequence for 8030462N17Rik (NM_178670.2,633-651).
ccctcgcaagcagaaacaa

SEQ ID NO: 802711 - DNA, 19 bp, Mus musculus
  siRNA target sequence for 8030462N17Rik (NM_178670.2,653-671).
cgtggaaggagatacttca

SEQ ID NO: 802712 - DNA, 19 bp, Mus musculus
  siRNA target sequence for 8030462N17Rik (NM_178670.2,686-704).
cactgttggacgaaagtct

SEQ ID NO: 802713 - DNA, 19 bp, Mus musculus
  siRNA target sequence for 8030462N17Rik (NM_178670.2,705-723).
cggcggtcccgttctgaaa

SEQ ID NO: 802714 - DNA, 19 bp, Mus musculus
  siRNA target sequence for 8030462N17Rik (NM_178670.2,707-725).
gcggtcccgttctgaaagt

SEQ ID NO: 802715 - DNA, 19 bp, Mus musculus
  siRNA target sequence for 8030462N17Rik (NM_178670.2,709-727).
ggtcccgttctgaaagtga

SEQ ID NO: 802716 - DNA, 19 bp, Mus musculus
  siRNA target sequence for 5730509E04Rik (NM_178671.2,571-589).
cactcaggatgcacgttat

SEQ ID NO: 802717 - DNA, 19 bp, Mus musculus
  siRNA target sequence for 5730509E04Rik (NM_178671.2,831-849).
gtcctcccatccatcaaca

SEQ ID NO: 802718 - DNA, 19 bp, Mus musculus
  siRNA target sequence for 5730509E04Rik (NM_178671.2,917-935).
cgtccaggccctttaccaa

SEQ ID NO: 802719 - DNA, 19 bp, Mus musculus
  siRNA target sequence for 5730509E04Rik (NM_178671.2,927-945).
ctttaccaagaggattcaa

SEQ ID NO: 802720 - DNA, 19 bp, Mus musculus
  siRNA target sequence for 5730509E04Rik (NM_178671.2,973-991).
gtgccttagagaagaagtt

SEQ ID NO: 802721 - DNA, 19 bp, Mus musculus
  siRNA target sequence for 5730509E04Rik (NM_178671.2,992-1010).
catcatccgaaccaaaaga

SEQ ID NO: 802722 - DNA, 19 bp, Mus musculus
  siRNA target sequence for 5730509E04Rik (NM_178671.2,1248-1266).
gaatgcggcatccttcata

SEQ ID NO: 802723 - DNA, 19 bp, Mus musculus
  siRNA target sequence for D630045D17Rik (NM_178674.2,355-373).
ctctgccgtgaataaggtt

SEQ ID NO: 802724 - DNA, 19 bp, Mus musculus
  siRNA target sequence for D630045D17Rik (NM_178674.2,379-397).
gtcgtcaccagtagtgaaa

SEQ ID NO: 802725 - DNA, 19 bp, Mus musculus
  siRNA target sequence for D630045D17Rik (NM_178674.2,381-399).
cgtcaccagtagtgaaaca

SEQ ID NO: 802726 - DNA, 19 bp, Mus musculus
  siRNA target sequence for D630045D17Rik (NM_178674.2,543-561).
gcaggagatggaatgaagt

SEQ ID NO: 802727 - DNA, 19 bp, Mus musculus
  siRNA target sequence for D630045D17Rik (NM_178674.2,593-611).
gagtttgagctgaaccaat

SEQ ID NO: 802728 - DNA, 19 bp, Mus musculus
  siRNA target sequence for D630045D17Rik (NM_178674.2,614-632).
gcaacttcttatttcaagt

SEQ ID NO: 802729 - DNA, 19 bp, Mus musculus
  siRNA target sequence for D630045D17Rik (NM_178674.2,636-654).
ctcatcccgacctcattca

SEQ ID NO: 802730 - DNA, 19 bp, Mus musculus
  siRNA target sequence for D630045D17Rik (NM_178674.2,673-691).
cgctgcacatcttcagtat

SEQ ID NO: 802731 - DNA, 19 bp, Mus musculus
  siRNA target sequence for Duf6 (NM_178675.3,557-575).
gctgaacagggagatgtta

SEQ ID NO: 802732 - DNA, 19 bp, Mus musculus
  siRNA target sequence for Duf6 (NM_178675.3,605-623).
ccttctcgtttgtggaatt

SEQ ID NO: 802733 - DNA, 19 bp, Mus musculus
  siRNA target sequence for Duf6 (NM_178675.3,678-696).
cagagctttctgaactaca

SEQ ID NO: 802734 - DNA, 19 bp, Mus musculus
  siRNA target sequence for Duf6 (NM_178675.3,699-717).
ctcctcttcttggtataca

SEQ ID NO: 802735 - DNA, 19 bp, Mus musculus
  siRNA target sequence for Duf6 (NM_178675.3,931-949).
ggtacaaggctgtgcattt

SEQ ID NO: 802736 - DNA, 19 bp, Mus musculus
  siRNA target sequence for Duf6 (NM_178675.3,1075-1093).
ccctgtacgggatctcaaa

SEQ ID NO: 802737 - DNA, 19 bp, Mus musculus
  siRNA target sequence for Duf6 (NM_178675.3,1076-1094).
cctgtacgggatctcaaat

SEQ ID NO: 802738 - DNA, 19 bp, Mus musculus
  siRNA target sequence for Duf6 (NM_178675.3,1095-1113).
gtctgggaagaatccatta

SEQ ID NO: 802739 - DNA, 19 bp, Mus musculus
  siRNA target sequence for Duf6 (NM_178675.3,1133-1151).
ggagttcctgggaatgatt

SEQ ID NO: 802740 - DNA, 19 bp, Mus musculus
  siRNA target sequence for Duf6 (NM_178675.3,1142-1160).
gggaatgattggtctcttt

SEQ ID NO: 802741 - DNA, 19 bp, Mus musculus
  siRNA target sequence for Duf6 (NM_178675.3,1152-1170).
ggtctctttggtgcatttt

SEQ ID NO: 802742 - DNA, 19 bp, Mus musculus
  siRNA target sequence for Duf6 (NM_178675.3,1155-1173).
ctctttggtgcatttttca

SEQ ID NO: 802743 - DNA, 19 bp, Mus musculus
  siRNA target sequence for Duf6 (NM_178675.3,1196-1214).
ggaacacaaggaactgtta

SEQ ID NO: 802744 - DNA, 19 bp, Mus musculus
  siRNA target sequence for Duf6 (NM_178675.3,1244-1262).
gctctatgttggctttagt

SEQ ID NO: 802745 - DNA, 19 bp, Mus musculus
  siRNA target sequence for Duf6 (NM_178675.3,1317-1335).
gccacctcggtcaaccttt

SEQ ID NO: 802746 - DNA, 19 bp, Mus musculus
  siRNA target sequence for Duf6 (NM_178675.3,1454-1472).
ctccacctctacatacata

SEQ ID NO: 802747 - DNA, 19 bp, Mus musculus
  siRNA target sequence for Entpd3 (NM_178676.2,69-87).
gacccgccagccatgtgaa

SEQ ID NO: 802748 - DNA, 19 bp, Mus musculus
  siRNA target sequence for Entpd3 (NM_178676.2,157-175).
gtggtacttgtgacactta

SEQ ID NO: 802749 - DNA, 19 bp, Mus musculus
  siRNA target sequence for Entpd3 (NM_178676.2,159-177).
ggtacttgtgacacttaca

SEQ ID NO: 802750 - DNA, 19 bp, Mus musculus
  siRNA target sequence for Entpd3 (NM_178676.2,257-275).
ccactgtctacgtgtatca

SEQ ID NO: 802751 - DNA, 19 bp, Mus musculus
  siRNA target sequence for Entpd3 (NM_178676.2,304-322).
ggagtggtcagccaaactt

SEQ ID NO: 802752 - DNA, 19 bp, Mus musculus
  siRNA target sequence for Entpd3 (NM_178676.2,307-325).
gtggtcagccaaactttca

SEQ ID NO: 802753 - DNA, 19 bp, Mus musculus
  siRNA target sequence for Entpd3 (NM_178676.2,309-327).
ggtcagccaaactttcaga

SEQ ID NO: 802754 - DNA, 19 bp, Mus musculus
  siRNA target sequence for Entpd3 (NM_178676.2,348-366).
gatctccagctatgagaat

SEQ ID NO: 802755 - DNA, 19 bp, Mus musculus
  siRNA target sequence for Entpd3 (NM_178676.2,390-408).
ctttgaggactgtatacta

SEQ ID NO: 802756 - DNA, 19 bp, Mus musculus
  siRNA target sequence for Entpd3 (NM_178676.2,601-619).
ggggtgtatggatggatta

SEQ ID NO: 802757 - DNA, 19 bp, Mus musculus
  siRNA target sequence for Entpd3 (NM_178676.2,614-632).
ggattacagccaactatat

SEQ ID NO: 802758 - DNA, 19 bp, Mus musculus
  siRNA target sequence for Entpd3 (NM_178676.2,718-736).
ggcgcctccacccagatat

SEQ ID NO: 802759 - DNA, 19 bp, Mus musculus
  siRNA target sequence for Entpd3 (NM_178676.2,948-966).
caccttgggccatgtgttt

SEQ ID NO: 802760 - DNA, 19 bp, Mus musculus
  siRNA target sequence for Entpd3 (NM_178676.2,1075-1093).
gtgtttgacttcaatgctt

SEQ ID NO: 802761 - DNA, 19 bp, Mus musculus
  siRNA target sequence for Entpd3 (NM_178676.2,1160-1178).
cgttcgcaggcttctacta

SEQ ID NO: 802762 - DNA, 19 bp, Mus musculus
  siRNA target sequence for Entpd3 (NM_178676.2,1338-1356).
ctaccacttgctcgtaaat

SEQ ID NO: 802763 - DNA, 19 bp, Mus musculus
  siRNA target sequence for Entpd3 (NM_178676.2,1342-1360).
cacttgctcgtaaatggat

SEQ ID NO: 802764 - DNA, 19 bp, Mus musculus
  siRNA target sequence for Entpd3 (NM_178676.2,1383-1401).
gcctcagatacgctttgaa

SEQ ID NO: 802765 - DNA, 19 bp, Mus musculus
  siRNA target sequence for Entpd3 (NM_178676.2,1623-1641).
ccaagcagtggattctgat

SEQ ID NO: 802766 - DNA, 19 bp, Mus musculus
  siRNA target sequence for Entpd3 (NM_178676.2,1624-1642).
caagcagtggattctgatt

SEQ ID NO: 802767 - DNA, 19 bp, Mus musculus
  siRNA target sequence for Sec22l3 (NM_178677.2,337-355).
cgaggctgtgcggaaagtt

SEQ ID NO: 802768 - DNA, 19 bp, Mus musculus
  siRNA target sequence for Sec22l3 (NM_178677.2,349-367).
gaaagttgtgacttcctta

SEQ ID NO: 802769 - DNA, 19 bp, Mus musculus
  siRNA target sequence for Sec22l3 (NM_178677.2,353-371).
gttgtgacttccttatcta

SEQ ID NO: 802770 - DNA, 19 bp, Mus musculus
  siRNA target sequence for Sec22l3 (NM_178677.2,887-905).
cctgcatcgtccagtgtta

SEQ ID NO: 802771 - DNA, 19 bp, Mus musculus
  siRNA target sequence for Sec22l3 (NM_178677.2,888-906).
ctgcatcgtccagtgttat

SEQ ID NO: 802772 - DNA, 19 bp, Mus musculus
  siRNA target sequence for Sec22l3 (NM_178677.2,998-1016).
ggaacacctggcaaatcct

SEQ ID NO: 802773 - DNA, 19 bp, Mus musculus
  siRNA target sequence for Sec22l3 (NM_178677.2,1074-1092).
ggagaggcaatctgactat

SEQ ID NO: 802774 - DNA, 19 bp, Mus musculus
  siRNA target sequence for AI839779 (NM_178679.1,161-179).
ggagaccataccagattta

SEQ ID NO: 802775 - DNA, 19 bp, Mus musculus
  siRNA target sequence for AI839779 (NM_178679.1,232-250).
gcggaccctcctgacaaaa

SEQ ID NO: 802776 - DNA, 19 bp, Mus musculus
  siRNA target sequence for AI839779 (NM_178679.1,233-251).
cggaccctcctgacaaaat

SEQ ID NO: 802777 - DNA, 19 bp, Mus musculus
  siRNA target sequence for AI839779 (NM_178679.1,304-322).
cccgaagcagggaaaagta

SEQ ID NO: 802778 - DNA, 19 bp, Mus musculus
  siRNA target sequence for AI839779 (NM_178679.1,306-324).
cgaagcagggaaaagtact

SEQ ID NO: 802779 - DNA, 19 bp, Mus musculus
  siRNA target sequence for AI839779 (NM_178679.1,349-367).
gcagaagtcgagctatgtt

SEQ ID NO: 802780 - DNA, 19 bp, Mus musculus
  siRNA target sequence for AI839779 (NM_178679.1,350-368).
cagaagtcgagctatgtta

SEQ ID NO: 802781 - DNA, 19 bp, Mus musculus
  siRNA target sequence for AI839779 (NM_178679.1,509-527).
ggtctccccacccaagata

SEQ ID NO: 802782 - DNA, 19 bp, Mus musculus
  siRNA target sequence for AI839779 (NM_178679.1,545-563).
gctcacgtccgagaaaagt

SEQ ID NO: 802783 - DNA, 19 bp, Mus musculus
  siRNA target sequence for AI839779 (NM_178679.1,548-566).
cacgtccgagaaaagttca

SEQ ID NO: 802784 - DNA, 19 bp, Mus musculus
  siRNA target sequence for AI839779 (NM_178679.1,550-568).
cgtccgagaaaagttcaat

SEQ ID NO: 802785 - DNA, 19 bp, Mus musculus
  siRNA target sequence for AI839779 (NM_178679.1,611-629).
gacaaactcaccaaagagt

SEQ ID NO: 802786 - DNA, 19 bp, Mus musculus
  siRNA target sequence for AI839779 (NM_178679.1,818-836).
gtcgtcacattcaaccatt

SEQ ID NO: 802787 - DNA, 19 bp, Mus musculus
  siRNA target sequence for AI839779 (NM_178679.1,875-893).
gcgaggctccaggacttta

SEQ ID NO: 802788 - DNA, 19 bp, Mus musculus
  siRNA target sequence for AI839779 (NM_178679.1,876-894).
cgaggctccaggactttat

SEQ ID NO: 802789 - DNA, 19 bp, Mus musculus
  siRNA target sequence for AI839779 (NM_178679.1,923-941).
gcggagaagcagttggaat

SEQ ID NO: 802790 - DNA, 19 bp, Mus musculus
  siRNA target sequence for AI839779 (NM_178679.1,924-942).
cggagaagcagttggaata

SEQ ID NO: 802791 - DNA, 19 bp, Mus musculus
  siRNA target sequence for AI839779 (NM_178679.1,928-946).
gaagcagttggaatattat

SEQ ID NO: 802792 - DNA, 19 bp, Mus musculus
  siRNA target sequence for AI839779 (NM_178679.1,931-949).
gcagttggaatattatcaa

SEQ ID NO: 802793 - DNA, 19 bp, Mus musculus
  siRNA target sequence for AI839779 (NM_178679.1,932-950).
cagttggaatattatcaaa

SEQ ID NO: 802794 - DNA, 19 bp, Mus musculus
  siRNA target sequence for AI839779 (NM_178679.1,953-971).
cagcaagcctccggtttta

SEQ ID NO: 802795 - DNA, 19 bp, Mus musculus
  siRNA target sequence for AI839779 (NM_178679.1,975-993).
gtgacactagtgagcatat

SEQ ID NO: 802796 - DNA, 19 bp, Mus musculus
  siRNA target sequence for AI839779 (NM_178679.1,1072-1090).
gatgagggcccatttccat

SEQ ID NO: 802797 - DNA, 19 bp, Mus musculus
  siRNA target sequence for AI839779 (NM_178679.1,1169-1187).
gctgagtctccaagagaat

SEQ ID NO: 802798 - DNA, 19 bp, Mus musculus
  siRNA target sequence for AI839779 (NM_178679.1,1170-1188).
ctgagtctccaagagaatt

SEQ ID NO: 802799 - DNA, 19 bp, Mus musculus
  siRNA target sequence for AI839779 (NM_178679.1,1172-1190).
gagtctccaagagaattct

SEQ ID NO: 802800 - DNA, 19 bp, Mus musculus
  siRNA target sequence for AI839779 (NM_178679.1,1268-1286).
cctacagcaatcgtgaata

SEQ ID NO: 802801 - DNA, 19 bp, Mus musculus
  siRNA target sequence for AI839779 (NM_178679.1,1269-1287).
ctacagcaatcgtgaatat

SEQ ID NO: 802802 - DNA, 19 bp, Mus musculus
  siRNA target sequence for AI839779 (NM_178679.1,1272-1290).
cagcaatcgtgaatatcat

SEQ ID NO: 802803 - DNA, 19 bp, Mus musculus
  siRNA target sequence for AI839779 (NM_178679.1,1274-1292).
gcaatcgtgaatatcatct

SEQ ID NO: 802804 - DNA, 19 bp, Mus musculus
  siRNA target sequence for D230041A13Rik (NM_178680.2,67-85).
ggaggggaaccggcatttt

SEQ ID NO: 802805 - DNA, 19 bp, Mus musculus
  siRNA target sequence for D230041A13Rik (NM_178680.2,258-276).
ctgacatcaaagcattgta

SEQ ID NO: 802806 - DNA, 19 bp, Mus musculus
  siRNA target sequence for D230041A13Rik (NM_178680.2,413-431).
cagctccgtgtgcagtttt

SEQ ID NO: 802807 - DNA, 19 bp, Mus musculus
  siRNA target sequence for D230041A13Rik (NM_178680.2,415-433).
gctccgtgtgcagttttct

SEQ ID NO: 802808 - DNA, 19 bp, Mus musculus
  siRNA target sequence for D230041A13Rik (NM_178680.2,416-434).
ctccgtgtgcagttttcta

SEQ ID NO: 802809 - DNA, 19 bp, Mus musculus
  siRNA target sequence for D230041A13Rik (NM_178680.2,418-436).
ccgtgtgcagttttctaca

SEQ ID NO: 802810 - DNA, 19 bp, Mus musculus
  siRNA target sequence for D230041A13Rik (NM_178680.2,442-460).
cagggtacagacgatgttt

SEQ ID NO: 802811 - DNA, 19 bp, Mus musculus
  siRNA target sequence for D230041A13Rik (NM_178680.2,507-525).
ctgccaacaacctcattgt

SEQ ID NO: 802812 - DNA, 19 bp, Mus musculus
  siRNA target sequence for D230041A13Rik (NM_178680.2,695-713).
gtccgcatagacagaatct

SEQ ID NO: 802813 - DNA, 19 bp, Mus musculus
  siRNA target sequence for D230041A13Rik (NM_178680.2,928-946).
ggcactgaacctgcttaat

SEQ ID NO: 802814 - DNA, 19 bp, Mus musculus
  siRNA target sequence for D230041A13Rik (NM_178680.2,929-947).
gcactgaacctgcttaata

SEQ ID NO: 802815 - DNA, 19 bp, Mus musculus
  siRNA target sequence for D230041A13Rik (NM_178680.2,982-1000).
caactcacgcaccatctat

SEQ ID NO: 802816 - DNA, 19 bp, Mus musculus
  siRNA target sequence for D230041A13Rik (NM_178680.2,985-1003).
ctcacgcaccatctatgtt

SEQ ID NO: 802817 - DNA, 19 bp, Mus musculus
  siRNA target sequence for D230041A13Rik (NM_178680.2,987-1005).
cacgcaccatctatgttgt

SEQ ID NO: 802818 - DNA, 19 bp, Mus musculus
  siRNA target sequence for D230041A13Rik (NM_178680.2,1175-1193).
gagtatatcacgagcaaat

SEQ ID NO: 802819 - DNA, 19 bp, Mus musculus
  siRNA target sequence for D230041A13Rik (NM_178680.2,1177-1195).
gtatatcacgagcaaattt

SEQ ID NO: 802820 - DNA, 19 bp, Mus musculus
  siRNA target sequence for D230041A13Rik (NM_178680.2,1425-1443).
cacttcttaagcagatcta

SEQ ID NO: 802821 - DNA, 19 bp, Mus musculus
  siRNA target sequence for D230041A13Rik (NM_178680.2,1479-1497).
cgctggtggggctctgtaa

SEQ ID NO: 802822 - DNA, 19 bp, Mus musculus
  siRNA target sequence for D230041A13Rik (NM_178680.2,1483-1501).
ggtggggctctgtaaactt

SEQ ID NO: 802823 - DNA, 19 bp, Mus musculus
  siRNA target sequence for D230041A13Rik (NM_178680.2,1522-1540).
ctatggtctcagacagttt

SEQ ID NO: 802824 - DNA, 19 bp, Mus musculus
  siRNA target sequence for D230041A13Rik (NM_178680.2,1577-1595).
cgaaagtggctgtgtaaca

SEQ ID NO: 802825 - DNA, 19 bp, Mus musculus
  siRNA target sequence for D230041A13Rik (NM_178680.2,1906-1924).
gaaggcaggtgtcatatct

SEQ ID NO: 802826 - DNA, 19 bp, Mus musculus
  siRNA target sequence for D230041A13Rik (NM_178680.2,2113-2131).
ccatgggctagccaagatt

SEQ ID NO: 802827 - DNA, 19 bp, Mus musculus
  siRNA target sequence for D230041A13Rik (NM_178680.2,2161-2179).
ccctggggagagggtatat

SEQ ID NO: 802828 - DNA, 19 bp, Mus musculus
  siRNA target sequence for D230041A13Rik (NM_178680.2,2268-2286).
ctgggcgcagtgacaaact

SEQ ID NO: 802829 - DNA, 19 bp, Mus musculus
  siRNA target sequence for D230041A13Rik (NM_178680.2,2270-2288).
gggcgcagtgacaaactca

SEQ ID NO: 802830 - DNA, 19 bp, Mus musculus
  siRNA target sequence for D230041A13Rik (NM_178680.2,2311-2329).
ggccttgccagacattgaa

SEQ ID NO: 802831 - DNA, 19 bp, Mus musculus
  siRNA target sequence for D230041A13Rik (NM_178680.2,2321-2339).
gacattgaaaactacatgt

SEQ ID NO: 802832 - DNA, 19 bp, Mus musculus
  siRNA target sequence for D230041A13Rik (NM_178680.2,2422-2440).
cctggccgatgggaatgat

SEQ ID NO: 802833 - DNA, 19 bp, Mus musculus
  siRNA target sequence for 4933426M11Rik (NM_178682.3,591-609).
gttgaagggtgactacaaa

SEQ ID NO: 802834 - DNA, 19 bp, Mus musculus
  siRNA target sequence for 4933426M11Rik (NM_178682.3,729-747).
cagctctgtggcactcatt

SEQ ID NO: 802835 - DNA, 19 bp, Mus musculus
  siRNA target sequence for 4933426M11Rik (NM_178682.3,821-839).
gggtttctggggatcaagt

SEQ ID NO: 802836 - DNA, 19 bp, Mus musculus
  siRNA target sequence for 4933426M11Rik (NM_178682.3,864-882).
ggttgcactaccttcatat

SEQ ID NO: 802837 - DNA, 19 bp, Mus musculus
  siRNA target sequence for 4933426M11Rik (NM_178682.3,1108-1126).
catcaggcaaccacatctt

SEQ ID NO: 802838 - DNA, 19 bp, Mus musculus
  siRNA target sequence for 4933426M11Rik (NM_178682.3,1222-1240).
gaggagtacacagatgata

SEQ ID NO: 802839 - DNA, 19 bp, Mus musculus
  siRNA target sequence for 4933426M11Rik (NM_178682.3,1232-1250).
cagatgatatcccactatt

SEQ ID NO: 802840 - DNA, 19 bp, Mus musculus
  siRNA target sequence for AU016693 (NM_178686.2,1167-1185).
cccatgctcgtgatgacaa

SEQ ID NO: 802841 - DNA, 19 bp, Mus musculus
  siRNA target sequence for PTA1 (NM_178687.1,235-253).
cagcaccctcggatagcta

SEQ ID NO: 802842 - DNA, 19 bp, Mus musculus
  siRNA target sequence for PTA1 (NM_178687.1,311-329).
gccagtgcaacaagtcata

SEQ ID NO: 802843 - DNA, 19 bp, Mus musculus
  siRNA target sequence for PTA1 (NM_178687.1,347-365).
ccatcaggtagacatctta

SEQ ID NO: 802844 - DNA, 19 bp, Mus musculus
  siRNA target sequence for PTA1 (NM_178687.1,362-380).
cttagcttcctgtaaccta

SEQ ID NO: 802845 - DNA, 19 bp, Mus musculus
  siRNA target sequence for PTA1 (NM_178687.1,387-405).
gagacaagatacacttcaa

SEQ ID NO: 802846 - DNA, 19 bp, Mus musculus
  siRNA target sequence for PTA1 (NM_178687.1,454-472).
gcatcctcatcattccaaa

SEQ ID NO: 802847 - DNA, 19 bp, Mus musculus
  siRNA target sequence for PTA1 (NM_178687.1,481-499).
ccgctgactcaggacttta

SEQ ID NO: 802848 - DNA, 19 bp, Mus musculus
  siRNA target sequence for PTA1 (NM_178687.1,543-561).
gtcataaggctgatcataa

SEQ ID NO: 802849 - DNA, 19 bp, Mus musculus
  siRNA target sequence for PTA1 (NM_178687.1,545-563).
cataaggctgatcataact

SEQ ID NO: 802850 - DNA, 19 bp, Mus musculus
  siRNA target sequence for 4732493F09Rik (NM_178690.2,161-179).
cactggaaaagggtatatt

SEQ ID NO: 802851 - DNA, 19 bp, Mus musculus
  siRNA target sequence for 4732493F09Rik (NM_178690.2,196-214).
gaagagcgatcagatgaaa

SEQ ID NO: 802852 - DNA, 19 bp, Mus musculus
  siRNA target sequence for 4732493F09Rik (NM_178690.2,202-220).
cgatcagatgaaatttcct

SEQ ID NO: 802853 - DNA, 19 bp, Mus musculus
  siRNA target sequence for 4732493F09Rik (NM_178690.2,203-221).
gatcagatgaaatttcctt

SEQ ID NO: 802854 - DNA, 19 bp, Mus musculus
  siRNA target sequence for 4732493F09Rik (NM_178690.2,243-261).
cacacatcactatcttgta

SEQ ID NO: 802855 - DNA, 19 bp, Mus musculus
  siRNA target sequence for 4732493F09Rik (NM_178690.2,313-331).
ccacagtcaatgcaagatt

SEQ ID NO: 802856 - DNA, 19 bp, Mus musculus
  siRNA target sequence for 4732493F09Rik (NM_178690.2,318-336).
gtcaatgcaagatttgcta

SEQ ID NO: 802857 - DNA, 19 bp, Mus musculus
  siRNA target sequence for 4732493F09Rik (NM_178690.2,328-346).
gatttgctatgtatgaata

SEQ ID NO: 802858 - DNA, 19 bp, Mus musculus
  siRNA target sequence for 4732493F09Rik (NM_178690.2,384-402).
gtatggcctgcgtgagttt

SEQ ID NO: 802859 - DNA, 19 bp, Mus musculus
  siRNA target sequence for 4732493F09Rik (NM_178690.2,439-457).
ctcagtgaatccaagtgta

SEQ ID NO: 802860 - DNA, 19 bp, Mus musculus
  siRNA target sequence for 4732493F09Rik (NM_178690.2,465-483).
ccttagttccatttctatt

SEQ ID NO: 802861 - DNA, 19 bp, Mus musculus
  siRNA target sequence for 4732493F09Rik (NM_178690.2,512-530).
cactgtttgtccaaataca

SEQ ID NO: 802862 - DNA, 19 bp, Mus musculus
  siRNA target sequence for 4732493F09Rik (NM_178690.2,520-538).
gtccaaatacatcacaaat

SEQ ID NO: 802863 - DNA, 19 bp, Mus musculus
  siRNA target sequence for 4732493F09Rik (NM_178690.2,575-593).
gtgttcgtactgactttga

SEQ ID NO: 802864 - DNA, 19 bp, Mus musculus
  siRNA target sequence for 4732493F09Rik (NM_178690.2,730-748).
caggattggcagcaatact

SEQ ID NO: 802865 - DNA, 19 bp, Mus musculus
  siRNA target sequence for 4732493F09Rik (NM_178690.2,732-750).
ggattggcagcaatacttt

SEQ ID NO: 802866 - DNA, 19 bp, Mus musculus
  siRNA target sequence for 4732493F09Rik (NM_178690.2,813-831).
cggcaagttgccatttggt

SEQ ID NO: 802867 - DNA, 19 bp, Mus musculus
  siRNA target sequence for 4732493F09Rik (NM_178690.2,830-848).
gtgcctgtgaagatcctat

SEQ ID NO: 802868 - DNA, 19 bp, Mus musculus
  siRNA target sequence for 4732493F09Rik (NM_178690.2,845-863).
ctatcagtgaactccattt

SEQ ID NO: 802869 - DNA, 19 bp, Mus musculus
  siRNA target sequence for 4732493F09Rik (NM_178690.2,849-867).
cagtgaactccatttagca

SEQ ID NO: 802870 - DNA, 19 bp, Mus musculus
  siRNA target sequence for 4732493F09Rik (NM_178690.2,866-884).
caacaacgtggcctcattt

SEQ ID NO: 802871 - DNA, 19 bp, Mus musculus
  siRNA target sequence for 4732493F09Rik (NM_178690.2,885-903).
gacagaagggatcattgta

SEQ ID NO: 802872 - DNA, 19 bp, Mus musculus
  siRNA target sequence for 4732493F09Rik (NM_178690.2,944-962).
cccattggtcggttagagt

SEQ ID NO: 802873 - DNA, 19 bp, Mus musculus
  siRNA target sequence for 4732493F09Rik (NM_178690.2,945-963).
ccattggtcggttagagtt

SEQ ID NO: 802874 - DNA, 19 bp, Mus musculus
  siRNA target sequence for 4732493F09Rik (NM_178690.2,959-977).
gagttcggaaagctgataa

SEQ ID NO: 802875 - DNA, 19 bp, Mus musculus
  siRNA target sequence for 4732493F09Rik (NM_178690.2,994-1012).
ggtgattttgttactgaat

SEQ ID NO: 802876 - DNA, 19 bp, Mus musculus
  siRNA target sequence for 4732493F09Rik (NM_178690.2,1035-1053).
ggaatcaacggatgaaatt

SEQ ID NO: 802877 - DNA, 19 bp, Mus musculus
  siRNA target sequence for 4732493F09Rik (NM_178690.2,1130-1148).
cagcgccagttccaattca

SEQ ID NO: 802878 - DNA, 19 bp, Mus musculus
  siRNA target sequence for 4732493F09Rik (NM_178690.2,1132-1150).
gcgccagttccaattcata

SEQ ID NO: 802879 - DNA, 19 bp, Mus musculus
  siRNA target sequence for 4732493F09Rik (NM_178690.2,1133-1151).
cgccagttccaattcataa

SEQ ID NO: 802880 - DNA, 19 bp, Mus musculus
  siRNA target sequence for 4732493F09Rik (NM_178690.2,1171-1189).
gtacacactgcaaagaaga

SEQ ID NO: 802881 - DNA, 19 bp, Mus musculus
  siRNA target sequence for 4732493F09Rik (NM_178690.2,1176-1194).
cactgcaaagaagaagata

SEQ ID NO: 802882 - DNA, 19 bp, Mus musculus
  siRNA target sequence for 4732493F09Rik (NM_178690.2,1218-1236).
gccgctgaacagtgatgtt

SEQ ID NO: 802883 - DNA, 19 bp, Mus musculus
  siRNA target sequence for 4732493F09Rik (NM_178690.2,1220-1238).
cgctgaacagtgatgttct

SEQ ID NO: 802884 - DNA, 19 bp, Mus musculus
  siRNA target sequence for 4732493F09Rik (NM_178690.2,1224-1242).
gaacagtgatgttctcaat

SEQ ID NO: 802885 - DNA, 19 bp, Mus musculus
  siRNA target sequence for 4732493F09Rik (NM_178690.2,1275-1293).
ctctgagaagccgttagat

SEQ ID NO: 802886 - DNA, 19 bp, Mus musculus
  siRNA target sequence for 4732493F09Rik (NM_178690.2,1284-1302).
gccgttagatggaactact

SEQ ID NO: 802887 - DNA, 19 bp, Mus musculus
  siRNA target sequence for 4732493F09Rik (NM_178690.2,1301-1319).
cttcaatagacaatagcat

SEQ ID NO: 802888 - DNA, 19 bp, Mus musculus
  siRNA target sequence for 4732493F09Rik (NM_178690.2,1346-1364).
ctctctacaatcagttcaa

SEQ ID NO: 802889 - DNA, 19 bp, Mus musculus
  siRNA target sequence for 4732493F09Rik (NM_178690.2,1348-1366).
ctctacaatcagttcaagt

SEQ ID NO: 802890 - DNA, 19 bp, Mus musculus
  siRNA target sequence for 4732493F09Rik (NM_178690.2,1369-1387).
gcgccttccgacagtctaa

SEQ ID NO: 802891 - DNA, 19 bp, Mus musculus
  siRNA target sequence for 4732493F09Rik (NM_178690.2,1371-1389).
gccttccgacagtctaaca

SEQ ID NO: 802892 - DNA, 19 bp, Mus musculus
  siRNA target sequence for 4732493F09Rik (NM_178690.2,1372-1390).
ccttccgacagtctaacat

SEQ ID NO: 802893 - DNA, 19 bp, Mus musculus
  siRNA target sequence for 4732493F09Rik (NM_178690.2,1373-1391).
cttccgacagtctaacata

SEQ ID NO: 802894 - DNA, 19 bp, Mus musculus
  siRNA target sequence for 4732493F09Rik (NM_178690.2,1376-1394).
ccgacagtctaacatacaa

SEQ ID NO: 802895 - DNA, 19 bp, Mus musculus
  siRNA target sequence for 4732493F09Rik (NM_178690.2,1377-1395).
cgacagtctaacatacaaa

SEQ ID NO: 802896 - DNA, 19 bp, Mus musculus
  siRNA target sequence for 4732493F09Rik (NM_178690.2,1406-1424).
gtctttgtatgatcaactt

SEQ ID NO: 802897 - DNA, 19 bp, Mus musculus
  siRNA target sequence for 4732493F09Rik (NM_178690.2,1451-1469).
cacatctctggcaggaatt

SEQ ID NO: 802898 - DNA, 19 bp, Mus musculus
  siRNA target sequence for 4732493F09Rik (NM_178690.2,1474-1492).
cttgaaatgcgtttcagat

SEQ ID NO: 802899 - DNA, 19 bp, Mus musculus
  siRNA target sequence for 4732493F09Rik (NM_178690.2,1528-1546).
ggatcaccagatctaagat

SEQ ID NO: 802900 - DNA, 19 bp, Mus musculus
  siRNA target sequence for 4732493F09Rik (NM_178690.2,1547-1565).
gctgcttactgcatcagaa

SEQ ID NO: 802901 - DNA, 19 bp, Mus musculus
  siRNA target sequence for 4732493F09Rik (NM_178690.2,1550-1568).
gcttactgcatcagaaact

SEQ ID NO: 802902 - DNA, 19 bp, Mus musculus
  siRNA target sequence for 4732493F09Rik (NM_178690.2,1561-1579).
cagaaactacagatgttaa

SEQ ID NO: 802903 - DNA, 19 bp, Mus musculus
  siRNA target sequence for 4732493F09Rik (NM_178690.2,1606-1624).
cgtgatgaagggaaaaaga

SEQ ID NO: 802904 - DNA, 19 bp, Mus musculus
  siRNA target sequence for 4732493F09Rik (NM_178690.2,1790-1808).
gtgatacggaagaccttaa

SEQ ID NO: 802905 - DNA, 19 bp, Mus musculus
  siRNA target sequence for 4732493F09Rik (NM_178690.2,1881-1899).
gcaccagcacgggaaactt

SEQ ID NO: 802906 - DNA, 19 bp, Mus musculus
  siRNA target sequence for 4732493F09Rik (NM_178690.2,1882-1900).
caccagcacgggaaactta

SEQ ID NO: 802907 - DNA, 19 bp, Mus musculus
  siRNA target sequence for 4732493F09Rik (NM_178690.2,1981-1999).
cagtctgaggtcttagcaa

SEQ ID NO: 802908 - DNA, 19 bp, Mus musculus
  siRNA target sequence for 4732493F09Rik (NM_178690.2,2061-2079).
ctccgatatggagtctttt

SEQ ID NO: 802909 - DNA, 19 bp, Mus musculus
  siRNA target sequence for 4732493F09Rik (NM_178690.2,2063-2081).
ccgatatggagtcttttaa

SEQ ID NO: 802910 - DNA, 19 bp, Mus musculus
  siRNA target sequence for 4732493F09Rik (NM_178690.2,2073-2091).
gtcttttaaggcagctaat

SEQ ID NO: 802911 - DNA, 19 bp, Mus musculus
  siRNA target sequence for 4732493F09Rik (NM_178690.2,2127-2145).
ctcaccaagggactacatt

SEQ ID NO: 802912 - DNA, 19 bp, Mus musculus
  siRNA target sequence for 4732493F09Rik (NM_178690.2,2294-2312).
cccgagaggctgaaaaggt

SEQ ID NO: 802913 - DNA, 19 bp, Mus musculus
  siRNA target sequence for 4732493F09Rik (NM_178690.2,2380-2398).
gcagctgttctcaaggtaa

SEQ ID NO: 802914 - DNA, 19 bp, Mus musculus
  siRNA target sequence for 4732493F09Rik (NM_178690.2,2381-2399).
cagctgttctcaaggtaaa

SEQ ID NO: 802915 - DNA, 19 bp, Mus musculus
  siRNA target sequence for 4732493F09Rik (NM_178690.2,2459-2477).
cccattccagcaaagttct

SEQ ID NO: 802916 - DNA, 19 bp, Mus musculus
  siRNA target sequence for 4732493F09Rik (NM_178690.2,2465-2483).
ccagcaaagttctgcattt

SEQ ID NO: 802917 - DNA, 19 bp, Mus musculus
  siRNA target sequence for 4732493F09Rik (NM_178690.2,2517-2535).
catccttcagattactact

SEQ ID NO: 802918 - DNA, 19 bp, Mus musculus
  siRNA target sequence for 4732493F09Rik (NM_178690.2,2562-2580).
gtccctgaaggccaaattt

SEQ ID NO: 802919 - DNA, 19 bp, Mus musculus
  siRNA target sequence for 4732493F09Rik (NM_178690.2,2929-2947).
ctcgcgggtgccttttcct

SEQ ID NO: 802920 - DNA, 19 bp, Mus musculus
  siRNA target sequence for 9930028C20Rik (NM_178691.2,553-571).
ggtgctcctagttatgtca

SEQ ID NO: 802921 - DNA, 19 bp, Mus musculus
  siRNA target sequence for 9930028C20Rik (NM_178691.2,604-622).
gtcccagcagacaactctt

SEQ ID NO: 802922 - DNA, 19 bp, Mus musculus
  siRNA target sequence for 9930028C20Rik (NM_178691.2,696-714).
cctcatagcacaaattgta

SEQ ID NO: 802923 - DNA, 19 bp, Mus musculus
  siRNA target sequence for 9930028C20Rik (NM_178691.2,716-734).
caagtgatccagtcttgta

SEQ ID NO: 802924 - DNA, 19 bp, Mus musculus
  siRNA target sequence for 9930028C20Rik (NM_178691.2,742-760).
gcgatactgggaaagacaa

SEQ ID NO: 802925 - DNA, 19 bp, Mus musculus
  siRNA target sequence for 9930028C20Rik (NM_178691.2,806-824).
gggcaatcgagatctcaat

SEQ ID NO: 802926 - DNA, 19 bp, Mus musculus
  siRNA target sequence for 9930028C20Rik (NM_178691.2,821-839).
caatcctgtctaagtttta

SEQ ID NO: 802927 - DNA, 19 bp, Mus musculus
  siRNA target sequence for 9930028C20Rik (NM_178691.2,826-844).
ctgtctaagttttaccaat

SEQ ID NO: 802928 - DNA, 19 bp, Mus musculus
  siRNA target sequence for 9930028C20Rik (NM_178691.2,847-865).
gaaatatgtgtagtagata

SEQ ID NO: 802929 - DNA, 19 bp, Mus musculus
  siRNA target sequence for 9930028C20Rik (NM_178691.2,866-884).
cacagacagtcagaattga

SEQ ID NO: 802930 - DNA, 19 bp, Mus musculus
  siRNA target sequence for 9930028C20Rik (NM_178691.2,872-890).
cagtcagaattgatcgttt

SEQ ID NO: 802931 - DNA, 19 bp, Mus musculus
  siRNA target sequence for 9930028C20Rik (NM_178691.2,892-910).
ggggaagatgcaggatata

SEQ ID NO: 802932 - DNA, 19 bp, Mus musculus
  siRNA target sequence for 9930028C20Rik (NM_178691.2,902-920).
caggatataccaaaagagt

SEQ ID NO: 802933 - DNA, 19 bp, Mus musculus
  siRNA target sequence for 9930028C20Rik (NM_178691.2,1065-1083).
gagacagttcactgatgta

SEQ ID NO: 802934 - DNA, 19 bp, Mus musculus
  siRNA target sequence for 9930028C20Rik (NM_178691.2,1161-1179).
gacaggccataccaacttt

SEQ ID NO: 802935 - DNA, 19 bp, Mus musculus
  siRNA target sequence for C130074G19Rik (NM_178692.2,299-317).
ggtaccggcgaaaactgaa

SEQ ID NO: 802936 - DNA, 19 bp, Mus musculus
  siRNA target sequence for C130074G19Rik (NM_178692.2,305-323).
ggcgaaaactgaagaagta

SEQ ID NO: 802937 - DNA, 19 bp, Mus musculus
  siRNA target sequence for C130074G19Rik (NM_178692.2,318-336).
gaagtacggcaagaatttt

SEQ ID NO: 802938 - DNA, 19 bp, Mus musculus
  siRNA target sequence for C130074G19Rik (NM_178692.2,351-369).
caaaggatgccggtacatt

SEQ ID NO: 802939 - DNA, 19 bp, Mus musculus
  siRNA target sequence for C130074G19Rik (NM_178692.2,355-373).
ggatgccggtacattgtca

SEQ ID NO: 802940 - DNA, 19 bp, Mus musculus
  siRNA target sequence for C130074G19Rik (NM_178692.2,356-374).
gatgccggtacattgtcat

SEQ ID NO: 802941 - DNA, 19 bp, Mus musculus
  siRNA target sequence for D2Ertd97e (NM_178693.2,154-172).
caaccaccccgctgcaaaa

SEQ ID NO: 802942 - DNA, 19 bp, Mus musculus
  siRNA target sequence for D2Ertd97e (NM_178693.2,157-175).
ccaccccgctgcaaaagat

SEQ ID NO: 802943 - DNA, 19 bp, Mus musculus
  siRNA target sequence for D2Ertd97e (NM_178693.2,227-245).
cgacatggttgcagttcta

SEQ ID NO: 802944 - DNA, 19 bp, Mus musculus
  siRNA target sequence for D2Ertd97e (NM_178693.2,258-276).
ggatgccacaccctgaaat

SEQ ID NO: 802945 - DNA, 19 bp, Mus musculus
  siRNA target sequence for D2Ertd97e (NM_178693.2,259-277).
gatgccacaccctgaaatt

SEQ ID NO: 802946 - DNA, 19 bp, Mus musculus
  siRNA target sequence for D2Ertd97e (NM_178693.2,389-407).
ctcactgggccgtgagtat

SEQ ID NO: 802947 - DNA, 19 bp, Mus musculus
  siRNA target sequence for D2Ertd97e (NM_178693.2,391-409).
cactgggccgtgagtatct

SEQ ID NO: 802948 - DNA, 19 bp, Mus musculus
  siRNA target sequence for D2Ertd97e (NM_178693.2,474-492).
gaagagctagcctatgtga

SEQ ID NO: 802949 - DNA, 19 bp, Mus musculus
  siRNA target sequence for D2Ertd97e (NM_178693.2,558-576).
ggagaggttgtggtaaagt

SEQ ID NO: 802950 - DNA, 19 bp, Mus musculus
  siRNA target sequence for D2Ertd97e (NM_178693.2,718-736).
gtgtcctcaacatctacta

SEQ ID NO: 802951 - DNA, 19 bp, Mus musculus
  siRNA target sequence for D2Ertd97e (NM_178693.2,788-806).
cagtcctcccccaaaacat

SEQ ID NO: 802952 - DNA, 19 bp, Mus musculus
  siRNA target sequence for D2Ertd97e (NM_178693.2,793-811).
ctcccccaaaacatatcca

SEQ ID NO: 802953 - DNA, 19 bp, Mus musculus
  siRNA target sequence for C230075L19Rik (NM_178694.3,302-320).
cttctgtctccggaatctt

SEQ ID NO: 802954 - DNA, 19 bp, Mus musculus
  siRNA target sequence for C230075L19Rik (NM_178694.3,305-323).
ctgtctccggaatcttgat

SEQ ID NO: 802955 - DNA, 19 bp, Mus musculus
  siRNA target sequence for C230075L19Rik (NM_178694.3,993-1011).
cacaagctgcggagtaaga

SEQ ID NO: 802956 - DNA, 19 bp, Mus musculus
  siRNA target sequence for C230075L19Rik (NM_178694.3,1122-1140).
cagaagctggggaacctaa

SEQ ID NO: 802957 - DNA, 19 bp, Mus musculus
  siRNA target sequence for C230075L19Rik (NM_178694.3,1127-1145).
gctggggaacctaatgtca

SEQ ID NO: 802958 - DNA, 19 bp, Mus musculus
  siRNA target sequence for C230075L19Rik (NM_178694.3,1287-1305).
ctctttgagacctcattgt

SEQ ID NO: 802959 - DNA, 19 bp, Mus musculus
  siRNA target sequence for C230075L19Rik (NM_178694.3,1331-1349).
caaagtgagtggtgacaaa

SEQ ID NO: 802960 - DNA, 19 bp, Mus musculus
  siRNA target sequence for C230075L19Rik (NM_178694.3,1417-1435).
ccatcaacctgctgtttga

SEQ ID NO: 802961 - DNA, 19 bp, Mus musculus
  siRNA target sequence for C230075L19Rik (NM_178694.3,1496-1514).
cctcaagtgtcacaagtat

SEQ ID NO: 802962 - DNA, 19 bp, Mus musculus
  siRNA target sequence for C230075L19Rik (NM_178694.3,1579-1597).
cggagcagagcgtcaagtt

SEQ ID NO: 802963 - DNA, 19 bp, Mus musculus
  siRNA target sequence for C230075L19Rik (NM_178694.3,1762-1780).
cgcgtcaggacgagtcaat

SEQ ID NO: 802964 - DNA, 19 bp, Mus musculus
  siRNA target sequence for C230075L19Rik (NM_178694.3,1972-1990).
ctgacaactgcgagatgtt

SEQ ID NO: 802965 - DNA, 19 bp, Mus musculus
  siRNA target sequence for C230075L19Rik (NM_178694.3,2106-2124).
ctgcgacctcagttgatga

SEQ ID NO: 802966 - DNA, 19 bp, Mus musculus
  siRNA target sequence for C230075L19Rik (NM_178694.3,2210-2228).
ctctcacatcatgtttgat

SEQ ID NO: 802967 - DNA, 19 bp, Mus musculus
  siRNA target sequence for C230075L19Rik (NM_178694.3,2317-2335).
cccgaaggaatatcaacta

SEQ ID NO: 802968 - DNA, 19 bp, Mus musculus
  siRNA target sequence for C230075L19Rik (NM_178694.3,2401-2419).
ccacctgggccctgtacaa

SEQ ID NO: 802969 - DNA, 19 bp, Mus musculus
  siRNA target sequence for C230075L19Rik (NM_178694.3,2428-2446).
ctgtctaccctgacaagta

SEQ ID NO: 802970 - DNA, 19 bp, Mus musculus
  siRNA target sequence for C230075L19Rik (NM_178694.3,2449-2467).
gccccctgctgattaaaga

SEQ ID NO: 802971 - DNA, 19 bp, Mus musculus
  siRNA target sequence for C230075L19Rik (NM_178694.3,2481-2499).
ctgctgagagacttgatca

SEQ ID NO: 802972 - DNA, 19 bp, Mus musculus
  siRNA target sequence for C230075L19Rik (NM_178694.3,2552-2570).
gcactgcagtaactttaga

SEQ ID NO: 802973 - DNA, 19 bp, Mus musculus
  siRNA target sequence for D430024F16Rik (NM_178698.3,550-568).
gctgaacacttcctgttta

SEQ ID NO: 802974 - DNA, 19 bp, Mus musculus
  siRNA target sequence for D430024F16Rik (NM_178698.3,572-590).
ctgagcacggctaccttta

SEQ ID NO: 802975 - DNA, 19 bp, Mus musculus
  siRNA target sequence for D430024F16Rik (NM_178698.3,848-866).
gctactcagaggctttgtt

SEQ ID NO: 802976 - DNA, 19 bp, Mus musculus
  siRNA target sequence for D430024F16Rik (NM_178698.3,1099-1117).
cccttcgccctctttcagt

SEQ ID NO: 802977 - DNA, 19 bp, Mus musculus
  siRNA target sequence for D430024F16Rik (NM_178698.3,1100-1118).
ccttcgccctctttcagta

SEQ ID NO: 802978 - DNA, 19 bp, Mus musculus
  siRNA target sequence for D430024F16Rik (NM_178698.3,1101-1119).
cttcgccctctttcagtat

SEQ ID NO: 802979 - DNA, 19 bp, Mus musculus
  siRNA target sequence for D430024F16Rik (NM_178698.3,1203-1221).
ccggcttgcaggagaaaat

SEQ ID NO: 802980 - DNA, 19 bp, Mus musculus
  siRNA target sequence for D430024F16Rik (NM_178698.3,1239-1257).
ctgggaccttcctctaata

SEQ ID NO: 802981 - DNA, 19 bp, Mus musculus
  siRNA target sequence for D430024F16Rik (NM_178698.3,1241-1259).
gggaccttcctctaatata

SEQ ID NO: 802982 - DNA, 19 bp, Mus musculus
  siRNA target sequence for D430024F16Rik (NM_178698.3,1249-1267).
cctctaatatacaactata

SEQ ID NO: 802983 - DNA, 19 bp, Mus musculus
  siRNA target sequence for D430024F16Rik (NM_178698.3,1250-1268).
ctctaatatacaactatat

SEQ ID NO: 802984 - DNA, 19 bp, Mus musculus
  siRNA target sequence for D430024F16Rik (NM_178698.3,1369-1387).
gcaacctggacatatgtga

SEQ ID NO: 802985 - DNA, 19 bp, Mus musculus
  siRNA target sequence for D430024F16Rik (NM_178698.3,1475-1493).
gtccgaaggtgtttgtgta

SEQ ID NO: 802986 - DNA, 19 bp, Mus musculus
  siRNA target sequence for D430024F16Rik (NM_178698.3,1605-1623).
cctgcttcaggatcaagaa

SEQ ID NO: 802987 - DNA, 19 bp, Mus musculus
  siRNA target sequence for D430024F16Rik (NM_178698.3,1697-1715).
ccagaaactgtctcatgaa

SEQ ID NO: 802988 - DNA, 19 bp, Mus musculus
  siRNA target sequence for D430024F16Rik (NM_178698.3,1706-1724).
gtctcatgaaactcttcta

SEQ ID NO: 802989 - DNA, 19 bp, Mus musculus
  siRNA target sequence for D430024F16Rik (NM_178698.3,1793-1811).
gactaattctccattgcaa

SEQ ID NO: 802990 - DNA, 19 bp, Mus musculus
  siRNA target sequence for B930041F14Rik (NM_178699.2,471-489).
cgcgtcttcgcgctaaact

SEQ ID NO: 802991 - DNA, 19 bp, Mus musculus
  siRNA target sequence for B930041F14Rik (NM_178699.2,520-538).
cttgcgatcgcgtgctttt

SEQ ID NO: 802992 - DNA, 19 bp, Mus musculus
  siRNA target sequence for Lrrc5 (NM_178701.2,468-486).
ccatggtgggacgtgttta

SEQ ID NO: 802993 - DNA, 19 bp, Mus musculus
  siRNA target sequence for Lrrc5 (NM_178701.2,469-487).
catggtgggacgtgtttat

SEQ ID NO: 802994 - DNA, 19 bp, Mus musculus
  siRNA target sequence for Lrrc5 (NM_178701.2,473-491).
gtgggacgtgtttatggat

SEQ ID NO: 802995 - DNA, 19 bp, Mus musculus
  siRNA target sequence for Lrrc5 (NM_178701.2,509-527).
gctgatggtagccatcttt

SEQ ID NO: 802996 - DNA, 19 bp, Mus musculus
  siRNA target sequence for Lrrc5 (NM_178701.2,528-546).
gcagggaccatgcaactta

SEQ ID NO: 802997 - DNA, 19 bp, Mus musculus
  siRNA target sequence for Lrrc5 (NM_178701.2,532-550).
ggaccatgcaacttaccaa

SEQ ID NO: 802998 - DNA, 19 bp, Mus musculus
  siRNA target sequence for Lrrc5 (NM_178701.2,536-554).
catgcaacttaccaaagat

SEQ ID NO: 802999 - DNA, 19 bp, Mus musculus
  siRNA target sequence for Lrrc5 (NM_178701.2,575-593).
gttgccgtcgcctgcaaat

SEQ ID NO: 803000 - DNA, 19 bp, Mus musculus
  siRNA target sequence for Lrrc5 (NM_178701.2,578-596).
gccgtcgcctgcaaattca

SEQ ID NO: 803001 - DNA, 19 bp, Mus musculus
  siRNA target sequence for Lrrc5 (NM_178701.2,579-597).
ccgtcgcctgcaaattcaa

SEQ ID NO: 803002 - DNA, 19 bp, Mus musculus
  siRNA target sequence for Lrrc5 (NM_178701.2,580-598).
cgtcgcctgcaaattcaaa

SEQ ID NO: 803003 - DNA, 19 bp, Mus musculus
  siRNA target sequence for Lrrc5 (NM_178701.2,677-695).
cgggcagacgacaacgaat

SEQ ID NO: 803004 - DNA, 19 bp, Mus musculus
  siRNA target sequence for Lrrc5 (NM_178701.2,716-734).
cgctgtgacccctgacata

SEQ ID NO: 803005 - DNA, 19 bp, Mus musculus
  siRNA target sequence for Lrrc5 (NM_178701.2,831-849).
gattttcagcagtacgtat

SEQ ID NO: 803006 - DNA, 19 bp, Mus musculus
  siRNA target sequence for Lrrc5 (NM_178701.2,837-855).
cagcagtacgtatttatca

SEQ ID NO: 803007 - DNA, 19 bp, Mus musculus
  siRNA target sequence for Lrrc5 (NM_178701.2,854-872).
caatcagatgtgttaccat

SEQ ID NO: 803008 - DNA, 19 bp, Mus musculus
  siRNA target sequence for Lrrc5 (NM_178701.2,904-922).
cataccttgcccttataca

SEQ ID NO: 803009 - DNA, 19 bp, Mus musculus
  siRNA target sequence for Lrrc5 (NM_178701.2,980-998).
caaggttgagcattttgtt

SEQ ID NO: 803010 - DNA, 19 bp, Mus musculus
  siRNA target sequence for Lrrc5 (NM_178701.2,987-1005).
gagcattttgtttcaatat

SEQ ID NO: 803011 - DNA, 19 bp, Mus musculus
  siRNA target sequence for Lrrc5 (NM_178701.2,1020-1038).
gaatctccctggacaacta

SEQ ID NO: 803012 - DNA, 19 bp, Mus musculus
  siRNA target sequence for Lrrc5 (NM_178701.2,1156-1174).
gcacccccatgatcaacaa

SEQ ID NO: 803013 - DNA, 19 bp, Mus musculus
  siRNA target sequence for Lrrc5 (NM_178701.2,1212-1230).
gaagttcccagcatgacaa

SEQ ID NO: 803014 - DNA, 19 bp, Mus musculus
  siRNA target sequence for Lrrc5 (NM_178701.2,1334-1352).
ggtccaaacgctcatcaaa

SEQ ID NO: 803015 - DNA, 19 bp, Mus musculus
  siRNA target sequence for Lrrc5 (NM_178701.2,1335-1353).
gtccaaacgctcatcaaaa

SEQ ID NO: 803016 - DNA, 19 bp, Mus musculus
  siRNA target sequence for Lrrc5 (NM_178701.2,1337-1355).
ccaaacgctcatcaaaact

SEQ ID NO: 803017 - DNA, 19 bp, Mus musculus
  siRNA target sequence for Lrrc5 (NM_178701.2,1354-1372).
ctgccaagttcatttttat

SEQ ID NO: 803018 - DNA, 19 bp, Mus musculus
  siRNA target sequence for Lrrc5 (NM_178701.2,1586-1604).
ggagtactcgtttgagaaa

SEQ ID NO: 803019 - DNA, 19 bp, Mus musculus
  siRNA target sequence for Lrrc5 (NM_178701.2,1680-1698).
cagtacgaccagctctatt

SEQ ID NO: 803020 - DNA, 19 bp, Mus musculus
  siRNA target sequence for Lrrc5 (NM_178701.2,1703-1721).
gcgtttcggtgtgttctta

SEQ ID NO: 803021 - DNA, 19 bp, Mus musculus
  siRNA target sequence for Lrrc5 (NM_178701.2,1704-1722).
cgtttcggtgtgttcttat

SEQ ID NO: 803022 - DNA, 19 bp, Mus musculus
  siRNA target sequence for Lrrc5 (NM_178701.2,1850-1868).
ggtgcccgacgctgtcttt

SEQ ID NO: 803023 - DNA, 19 bp, Mus musculus
  siRNA target sequence for Lrrc5 (NM_178701.2,2010-2028).
ctccgagatcacttgagat

SEQ ID NO: 803024 - DNA, 19 bp, Mus musculus
  siRNA target sequence for Lrrc5 (NM_178701.2,2068-2086).
cctgggtgtatctgcttaa

SEQ ID NO: 803025 - DNA, 19 bp, Mus musculus
  siRNA target sequence for Lrrc5 (NM_178701.2,2161-2179).
gagagctgcggcaccttaa

SEQ ID NO: 803026 - DNA, 19 bp, Mus musculus
  siRNA target sequence for Lrrc5 (NM_178701.2,2163-2181).
gagctgcggcaccttaaga

SEQ ID NO: 803027 - DNA, 19 bp, Mus musculus
  siRNA target sequence for Lrrc5 (NM_178701.2,2183-2201).
cctccacgtgaagagtaat

SEQ ID NO: 803028 - DNA, 19 bp, Mus musculus
  siRNA target sequence for Lrrc5 (NM_178701.2,2186-2204).
ccacgtgaagagtaatcta

SEQ ID NO: 803029 - DNA, 19 bp, Mus musculus
  siRNA target sequence for Lrrc5 (NM_178701.2,2187-2205).
cacgtgaagagtaatctaa

SEQ ID NO: 803030 - DNA, 19 bp, Mus musculus
  siRNA target sequence for Lrrc5 (NM_178701.2,2388-2406).
caggagctggatttaaagt

SEQ ID NO: 803031 - DNA, 19 bp, Mus musculus
  siRNA target sequence for Lrrc5 (NM_178701.2,2419-2437).
ggacgatcgaggagatcat

SEQ ID NO: 803032 - DNA, 19 bp, Mus musculus
  siRNA target sequence for Lrrc5 (NM_178701.2,2458-2476).
gactgacttgcttaaagct

SEQ ID NO: 803033 - DNA, 19 bp, Mus musculus
  siRNA target sequence for Lrrc5 (NM_178701.2,2552-2570).
caacaagctcgagtcttta

SEQ ID NO: 803034 - DNA, 19 bp, Mus musculus
  siRNA target sequence for Lrrc5 (NM_178701.2,2571-2589).
ccgacggcagtgtttagtt

SEQ ID NO: 803035 - DNA, 19 bp, Mus musculus
  siRNA target sequence for Lrrc5 (NM_178701.2,2572-2590).
cgacggcagtgtttagttt

SEQ ID NO: 803036 - DNA, 19 bp, Mus musculus
  siRNA target sequence for Lrrc5 (NM_178701.2,2575-2593).
cggcagtgtttagtttaca

SEQ ID NO: 803037 - DNA, 19 bp, Mus musculus
  siRNA target sequence for Lrrc5 (NM_178701.2,2610-2628).
gacgtcagctataacaaca

SEQ ID NO: 803038 - DNA, 19 bp, Mus musculus
  siRNA target sequence for Lrrc5 (NM_178701.2,2612-2630).
cgtcagctataacaacatt

SEQ ID NO: 803039 - DNA, 19 bp, Mus musculus
  siRNA target sequence for Lrrc5 (NM_178701.2,2632-2650).
ccacgatccccatagagat

SEQ ID NO: 803040 - DNA, 19 bp, Mus musculus
  siRNA target sequence for Lrrc5 (NM_178701.2,2633-2651).
cacgatccccatagagata

SEQ ID NO: 803041 - DNA, 19 bp, Mus musculus
  siRNA target sequence for Lrrc5 (NM_178701.2,2700-2718).
gacattctgccaaaacagt

SEQ ID NO: 803042 - DNA, 19 bp, Mus musculus
  siRNA target sequence for Lrrc5 (NM_178701.2,2709-2727).
ccaaaacagttgtttaagt

SEQ ID NO: 803043 - DNA, 19 bp, Mus musculus
  siRNA target sequence for Lrrc5 (NM_178701.2,2879-2897).
gaagagcgggcttgttgta

SEQ ID NO: 803044 - DNA, 19 bp, Mus musculus
  siRNA target sequence for Lrrc5 (NM_178701.2,2884-2902).
gcgggcttgttgtagaaga

SEQ ID NO: 803045 - DNA, 19 bp, Mus musculus
  siRNA target sequence for Lrrc5 (NM_178701.2,2933-2951).
caaagaggcattgaatcaa

SEQ ID NO: 803046 - DNA, 19 bp, Mus musculus
  siRNA target sequence for 9330164H19Rik (NM_178704.2,335-353).
gaactgtggctctttgcat

SEQ ID NO: 803047 - DNA, 19 bp, Mus musculus
  siRNA target sequence for 9330164H19Rik (NM_178704.2,383-401).
ccctgcatgagaacgattt

SEQ ID NO: 803048 - DNA, 19 bp, Mus musculus
  siRNA target sequence for 9330164H19Rik (NM_178704.2,385-403).
ctgcatgagaacgatttgt

SEQ ID NO: 803049 - DNA, 19 bp, Mus musculus
  siRNA target sequence for 9330164H19Rik (NM_178704.2,391-409).
gagaacgatttgtggtttt

SEQ ID NO: 803050 - DNA, 19 bp, Mus musculus
  siRNA target sequence for 9330164H19Rik (NM_178704.2,396-414).
cgatttgtggttttccaat

SEQ ID NO: 803051 - DNA, 19 bp, Mus musculus
  siRNA target sequence for 9330164H19Rik (NM_178704.2,404-422).
ggttttccaatattaagga

SEQ ID NO: 803052 - DNA, 19 bp, Mus musculus
  siRNA target sequence for 9330164H19Rik (NM_178704.2,424-442).
gtagagcgagagatctcat

SEQ ID NO: 803053 - DNA, 19 bp, Mus musculus
  siRNA target sequence for 9330164H19Rik (NM_178704.2,427-445).
gagcgagagatctcattca

SEQ ID NO: 803054 - DNA, 19 bp, Mus musculus
  siRNA target sequence for 9330164H19Rik (NM_178704.2,449-467).
cggaatgtggactgtacta

SEQ ID NO: 803055 - DNA, 19 bp, Mus musculus
  siRNA target sequence for 9330164H19Rik (NM_178704.2,450-468).
ggaatgtggactgtactat

SEQ ID NO: 803056 - DNA, 19 bp, Mus musculus
  siRNA target sequence for 9330164H19Rik (NM_178704.2,457-475).
ggactgtactattcttact

SEQ ID NO: 803057 - DNA, 19 bp, Mus musculus
  siRNA target sequence for 9330164H19Rik (NM_178704.2,458-476).
gactgtactattcttacta

SEQ ID NO: 803058 - DNA, 19 bp, Mus musculus
  siRNA target sequence for 9330164H19Rik (NM_178704.2,517-535).
catggcttaatctatgaca

SEQ ID NO: 803059 - DNA, 19 bp, Mus musculus
  siRNA target sequence for 9330164H19Rik (NM_178704.2,565-583).
ctccttcaacggatgaaca

SEQ ID NO: 803060 - DNA, 19 bp, Mus musculus
  siRNA target sequence for 9330164H19Rik (NM_178704.2,567-585).
ccttcaacggatgaacatt

SEQ ID NO: 803061 - DNA, 19 bp, Mus musculus
  siRNA target sequence for 9330164H19Rik (NM_178704.2,568-586).
cttcaacggatgaacattt

SEQ ID NO: 803062 - DNA, 19 bp, Mus musculus
  siRNA target sequence for 9330164H19Rik (NM_178704.2,675-693).
cgggctccaagcagtctat

SEQ ID NO: 803063 - DNA, 19 bp, Mus musculus
  siRNA target sequence for 9330164H19Rik (NM_178704.2,694-712).
gtcacggccctttatataa

SEQ ID NO: 803064 - DNA, 19 bp, Mus musculus
  siRNA target sequence for 9330164H19Rik (NM_178704.2,764-782).
ggtacgtcaccaacagaat

SEQ ID NO: 803065 - DNA, 19 bp, Mus musculus
  siRNA target sequence for 9330164H19Rik (NM_178704.2,765-783).
gtacgtcaccaacagaata

SEQ ID NO: 803066 - DNA, 19 bp, Mus musculus
  siRNA target sequence for 9330164H19Rik (NM_178704.2,829-847).
gctctgcctttttttgcaa

SEQ ID NO: 803067 - DNA, 19 bp, Mus musculus
  siRNA target sequence for 9330164H19Rik (NM_178704.2,850-868).
cagattgcagcaattacct

SEQ ID NO: 803068 - DNA, 19 bp, Mus musculus
  siRNA target sequence for 9330164H19Rik (NM_178704.2,911-929).
cacttcttgccattttcgt

SEQ ID NO: 803069 - DNA, 19 bp, Mus musculus
  siRNA target sequence for 9330164H19Rik (NM_178704.2,913-931).
cttcttgccattttcgtat

SEQ ID NO: 803070 - DNA, 19 bp, Mus musculus
  siRNA target sequence for 9330164H19Rik (NM_178704.2,916-934).
cttgccattttcgtatcaa

SEQ ID NO: 803071 - DNA, 19 bp, Mus musculus
  siRNA target sequence for 9330164H19Rik (NM_178704.2,1046-1064).
ggctgtacgggatacagat

SEQ ID NO: 803072 - DNA, 19 bp, Mus musculus
  siRNA target sequence for 9330164H19Rik (NM_178704.2,1047-1065).
gctgtacgggatacagata

SEQ ID NO: 803073 - DNA, 19 bp, Mus musculus
  siRNA target sequence for 9330164H19Rik (NM_178704.2,1048-1066).
ctgtacgggatacagataa

SEQ ID NO: 803074 - DNA, 19 bp, Mus musculus
  siRNA target sequence for 9330164H19Rik (NM_178704.2,1085-1103).
gcacgcttcagttctttaa

SEQ ID NO: 803075 - DNA, 19 bp, Mus musculus
  siRNA target sequence for 9330164H19Rik (NM_178704.2,1095-1113).
gttctttaactccatgatt

SEQ ID NO: 803076 - DNA, 19 bp, Mus musculus
  siRNA target sequence for 9330164H19Rik (NM_178704.2,1117-1135).
ggatcgttgctcatcagtt

SEQ ID NO: 803077 - DNA, 19 bp, Mus musculus
  siRNA target sequence for 9330164H19Rik (NM_178704.2,1118-1136).
gatcgttgctcatcagttt

SEQ ID NO: 803078 - DNA, 19 bp, Mus musculus
  siRNA target sequence for 9330164H19Rik (NM_178704.2,1121-1139).
cgttgctcatcagttttaa

SEQ ID NO: 803079 - DNA, 19 bp, Mus musculus
  siRNA target sequence for 9330164H19Rik (NM_178704.2,1126-1144).
ctcatcagttttaaccttt

SEQ ID NO: 803080 - DNA, 19 bp, Mus musculus
  siRNA target sequence for 9330164H19Rik (NM_178704.2,1186-1204).
ggatccttcctgactagaa

SEQ ID NO: 803081 - DNA, 19 bp, Mus musculus
  siRNA target sequence for 9330164H19Rik (NM_178704.2,1187-1205).
gatccttcctgactagaat

SEQ ID NO: 803082 - DNA, 19 bp, Mus musculus
  siRNA target sequence for 9330164H19Rik (NM_178704.2,1255-1273).
ctcaacaacattattaaga

SEQ ID NO: 803083 - DNA, 19 bp, Mus musculus
  siRNA target sequence for 9330164H19Rik (NM_178704.2,1260-1278).
caacattattaagaaagtt

SEQ ID NO: 803084 - DNA, 19 bp, Mus musculus
  siRNA target sequence for 9330164H19Rik (NM_178704.2,1263-1281).
cattattaagaaagttctt

SEQ ID NO: 803085 - DNA, 19 bp, Mus musculus
  siRNA target sequence for 9330164H19Rik (NM_178704.2,1337-1355).
gagcaacaagggatttcga

SEQ ID NO: 803086 - DNA, 19 bp, Mus musculus
  siRNA target sequence for 9330164H19Rik (NM_178704.2,1354-1372).
gatgcaaatctctatctgt

SEQ ID NO: 803087 - DNA, 19 bp, Mus musculus
  siRNA target sequence for 9330164H19Rik (NM_178704.2,1419-1437).
ctcggagacactgcttttt

SEQ ID NO: 803088 - DNA, 19 bp, Mus musculus
  siRNA target sequence for 9330164H19Rik (NM_178704.2,1432-1450).
cttttttacgcatacatgt

SEQ ID NO: 803089 - DNA, 19 bp, Mus musculus
  siRNA target sequence for 9330164H19Rik (NM_178704.2,1573-1591).
gcgtacaacctgatccata

SEQ ID NO: 803090 - DNA, 19 bp, Mus musculus
  siRNA target sequence for 9330164H19Rik (NM_178704.2,1578-1596).
caacctgatccataccatt

SEQ ID NO: 803091 - DNA, 19 bp, Mus musculus
  siRNA target sequence for 9330164H19Rik (NM_178704.2,1582-1600).
ctgatccataccattctgt

SEQ ID NO: 803092 - DNA, 19 bp, Mus musculus
  siRNA target sequence for 9330164H19Rik (NM_178704.2,1603-1621).
ggggtcttggcgttgagta

SEQ ID NO: 803093 - DNA, 19 bp, Mus musculus
  siRNA target sequence for 9330164H19Rik (NM_178704.2,1619-1637).
gtacgatgaggatgaagta

SEQ ID NO: 803094 - DNA, 19 bp, Mus musculus
  siRNA target sequence for 9330164H19Rik (NM_178704.2,1777-1795).
ctgctgtacctgtgctata

SEQ ID NO: 803095 - DNA, 19 bp, Mus musculus
  siRNA target sequence for 9330164H19Rik (NM_178704.2,1822-1840).
ctctcggagctgaaagaat

SEQ ID NO: 803096 - DNA, 19 bp, Mus musculus
  siRNA target sequence for 9330164H19Rik (NM_178704.2,1864-1882).
ctgatgacctggattaact

SEQ ID NO: 803097 - DNA, 19 bp, Mus musculus
  siRNA target sequence for 9330164H19Rik (NM_178704.2,2001-2019).
gcggacccaggcggtttat

SEQ ID NO: 803098 - DNA, 19 bp, Mus musculus
  siRNA target sequence for 9330164H19Rik (NM_178704.2,2003-2021).
ggacccaggcggtttatca

SEQ ID NO: 803099 - DNA, 19 bp, Mus musculus
  siRNA target sequence for 9330164H19Rik (NM_178704.2,2006-2024).
cccaggcggtttatcagat

SEQ ID NO: 803100 - DNA, 19 bp, Mus musculus
  siRNA target sequence for 9330164H19Rik (NM_178704.2,2010-2028).
ggcggtttatcagatctat

SEQ ID NO: 803101 - DNA, 19 bp, Mus musculus
  siRNA target sequence for 9330164H19Rik (NM_178704.2,2162-2180).
ccaacggacatgaaatgga

SEQ ID NO: 803102 - DNA, 19 bp, Mus musculus
  siRNA target sequence for 9330164H19Rik (NM_178704.2,2163-2181).
caacggacatgaaatggat

SEQ ID NO: 803103 - DNA, 19 bp, Mus musculus
  siRNA target sequence for 9330164H19Rik (NM_178704.2,2227-2245).
cgcttctgtgaagagatta

SEQ ID NO: 803104 - DNA, 19 bp, Mus musculus
  siRNA target sequence for 9330164H19Rik (NM_178704.2,2269-2287).
gcccacttcactagagtat

SEQ ID NO: 803105 - DNA, 19 bp, Mus musculus
  siRNA target sequence for 9330164H19Rik (NM_178704.2,2270-2288).
cccacttcactagagtatt

SEQ ID NO: 803106 - DNA, 19 bp, Mus musculus
  siRNA target sequence for 9330164H19Rik (NM_178704.2,2279-2297).
ctagagtattccagaacaa

SEQ ID NO: 803107 - DNA, 19 bp, Mus musculus
  siRNA target sequence for 9330164H19Rik (NM_178704.2,2284-2302).
gtattccagaacaagacat

SEQ ID NO: 803108 - DNA, 19 bp, Mus musculus
  siRNA target sequence for Luzp2 (NM_178705.4,865-883).
ctggatgggatcaaagtga

SEQ ID NO: 803109 - DNA, 19 bp, Mus musculus
  siRNA target sequence for Luzp2 (NM_178705.4,882-900).
gaaccttcagtctttgaaa

SEQ ID NO: 803110 - DNA, 19 bp, Mus musculus
  siRNA target sequence for Luzp2 (NM_178705.4,904-922).
gatgagcaatcttccaaaa

SEQ ID NO: 803111 - DNA, 19 bp, Mus musculus
  siRNA target sequence for Luzp2 (NM_178705.4,943-961).
gagttaggccagagacaaa

SEQ ID NO: 803112 - DNA, 19 bp, Mus musculus
  siRNA target sequence for Luzp2 (NM_178705.4,1080-1098).
caaaatgatccgtgactta

SEQ ID NO: 803113 - DNA, 19 bp, Mus musculus
  siRNA target sequence for Luzp2 (NM_178705.4,1086-1104).
gatccgtgacttacagaat

SEQ ID NO: 803114 - DNA, 19 bp, Mus musculus
  siRNA target sequence for Luzp2 (NM_178705.4,1090-1108).
cgtgacttacagaatgaga

SEQ ID NO: 803115 - DNA, 19 bp, Mus musculus
  siRNA target sequence for Luzp2 (NM_178705.4,1200-1218).
gctccgttatgggaagaaa

SEQ ID NO: 803116 - DNA, 19 bp, Mus musculus
  siRNA target sequence for Luzp2 (NM_178705.4,1203-1221).
ccgttatgggaagaaagat

SEQ ID NO: 803117 - DNA, 19 bp, Mus musculus
  siRNA target sequence for Luzp2 (NM_178705.4,1243-1261).
ctcactgaactggaacaaa

SEQ ID NO: 803118 - DNA, 19 bp, Mus musculus
  siRNA target sequence for Luzp2 (NM_178705.4,1298-1316).
ctcttgacagggaatcaca

SEQ ID NO: 803119 - DNA, 19 bp, Mus musculus
  siRNA target sequence for Luzp2 (NM_178705.4,1339-1357).
gtacaactctgcttgtcat

SEQ ID NO: 803120 - DNA, 19 bp, Mus musculus
  siRNA target sequence for Luzp2 (NM_178705.4,1470-1488).
caagccacaaccaagttct

SEQ ID NO: 803121 - DNA, 19 bp, Mus musculus
  siRNA target sequence for Luzp2 (NM_178705.4,1698-1716).
cccatcagccagtttcgat

SEQ ID NO: 803122 - DNA, 19 bp, Mus musculus
  siRNA target sequence for 6430529G09Rik (NM_178706.2,84-102).
ccttgctctgggtgcttaa

SEQ ID NO: 803123 - DNA, 19 bp, Mus musculus
  siRNA target sequence for 6430529G09Rik (NM_178706.2,315-333).
ctacaaacaagccatatca

SEQ ID NO: 803124 - DNA, 19 bp, Mus musculus
  siRNA target sequence for 6430529G09Rik (NM_178706.2,411-429).
gtgacaacggttcttactt

SEQ ID NO: 803125 - DNA, 19 bp, Mus musculus
  siRNA target sequence for 6430529G09Rik (NM_178706.2,413-431).
gacaacggttcttacttct

SEQ ID NO: 803126 - DNA, 19 bp, Mus musculus
  siRNA target sequence for 6430529G09Rik (NM_178706.2,446-464).
ggaggcaaaacatggaatt

SEQ ID NO: 803127 - DNA, 19 bp, Mus musculus
  siRNA target sequence for 6430529G09Rik (NM_178706.2,447-465).
gaggcaaaacatggaattt

SEQ ID NO: 803128 - DNA, 19 bp, Mus musculus
  siRNA target sequence for 6430529G09Rik (NM_178706.2,449-467).
ggcaaaacatggaatttct

SEQ ID NO: 803129 - DNA, 19 bp, Mus musculus
  siRNA target sequence for 6430529G09Rik (NM_178706.2,541-559).
gcttggtcgtcctaccaat

SEQ ID NO: 803130 - DNA, 19 bp, Mus musculus
  siRNA target sequence for 6430529G09Rik (NM_178706.2,545-563).
ggtcgtcctaccaatgtga

SEQ ID NO: 803131 - DNA, 19 bp, Mus musculus
  siRNA target sequence for 6430529G09Rik (NM_178706.2,546-564).
gtcgtcctaccaatgtgat

SEQ ID NO: 803132 - DNA, 19 bp, Mus musculus
  siRNA target sequence for 6430529G09Rik (NM_178706.2,845-863).
cttgggatctgcttcttct

SEQ ID NO: 803133 - DNA, 19 bp, Mus musculus
  siRNA target sequence for 6430529G09Rik (NM_178706.2,870-888).
gcaagagatcccatacgaa

SEQ ID NO: 803134 - DNA, 19 bp, Mus musculus
  siRNA target sequence for A730014M16Rik (NM_178707.2,395-413).
gccagccgtgagtgtcatt

SEQ ID NO: 803135 - DNA, 19 bp, Mus musculus
  siRNA target sequence for A730014M16Rik (NM_178707.2,428-446).
ccgccaagagtcgtttgaa

SEQ ID NO: 803136 - DNA, 19 bp, Mus musculus
  siRNA target sequence for A730014M16Rik (NM_178707.2,437-455).
gtcgtttgaagcagagaaa

SEQ ID NO: 803137 - DNA, 19 bp, Mus musculus
  siRNA target sequence for A730014M16Rik (NM_178707.2,465-483).
gctcccagtctcctacata

SEQ ID NO: 803138 - DNA, 19 bp, Mus musculus
  siRNA target sequence for A730014M16Rik (NM_178707.2,466-484).
ctcccagtctcctacataa

SEQ ID NO: 803139 - DNA, 19 bp, Mus musculus
  siRNA target sequence for A730014M16Rik (NM_178707.2,470-488).
cagtctcctacataatgga

SEQ ID NO: 803140 - DNA, 19 bp, Mus musculus
  siRNA target sequence for A730014M16Rik (NM_178707.2,472-490).
gtctcctacataatggatt

SEQ ID NO: 803141 - DNA, 19 bp, Mus musculus
  siRNA target sequence for A730014M16Rik (NM_178707.2,524-542).
ctgtgggaagtttgattct

SEQ ID NO: 803142 - DNA, 19 bp, Mus musculus
  siRNA target sequence for A730014M16Rik (NM_178707.2,650-668).
gcctgaggatcctgtcaaa

SEQ ID NO: 803143 - DNA, 19 bp, Mus musculus
  siRNA target sequence for A730014M16Rik (NM_178707.2,652-670).
ctgaggatcctgtcaaaga

SEQ ID NO: 803144 - DNA, 19 bp, Mus musculus
  siRNA target sequence for A730014M16Rik (NM_178707.2,656-674).
ggatcctgtcaaagataat

SEQ ID NO: 803145 - DNA, 19 bp, Mus musculus
  siRNA target sequence for A730014M16Rik (NM_178707.2,692-710).
caagcactctgacagttat

SEQ ID NO: 803146 - DNA, 19 bp, Mus musculus
  siRNA target sequence for A730014M16Rik (NM_178707.2,747-765).
ctggaagctctgtcaaaat

SEQ ID NO: 803147 - DNA, 19 bp, Mus musculus
  siRNA target sequence for A730014M16Rik (NM_178707.2,773-791).
cccggaactacacatgttt

SEQ ID NO: 803148 - DNA, 19 bp, Mus musculus
  siRNA target sequence for A730014M16Rik (NM_178707.2,775-793).
cggaactacacatgtttga

SEQ ID NO: 803149 - DNA, 19 bp, Mus musculus
  siRNA target sequence for A730014M16Rik (NM_178707.2,776-794).
ggaactacacatgtttgat

SEQ ID NO: 803150 - DNA, 19 bp, Mus musculus
  siRNA target sequence for A730014M16Rik (NM_178707.2,783-801).
cacatgtttgatcactttt

SEQ ID NO: 803151 - DNA, 19 bp, Mus musculus
  siRNA target sequence for A730014M16Rik (NM_178707.2,820-838).
cagaacccttgcctttaga

SEQ ID NO: 803152 - DNA, 19 bp, Mus musculus
  siRNA target sequence for A730014M16Rik (NM_178707.2,822-840).
gaacccttgcctttagaga

SEQ ID NO: 803153 - DNA, 19 bp, Mus musculus
  siRNA target sequence for A730014M16Rik (NM_178707.2,875-893).
ggtggagcctcacaaagat

SEQ ID NO: 803154 - DNA, 19 bp, Mus musculus
  siRNA target sequence for A730014M16Rik (NM_178707.2,896-914).
ggattccagtcggttcttt

SEQ ID NO: 803155 - DNA, 19 bp, Mus musculus
  siRNA target sequence for A730014M16Rik (NM_178707.2,917-935).
ggaagctttagagttcaat

SEQ ID NO: 803156 - DNA, 19 bp, Mus musculus
  siRNA target sequence for A730014M16Rik (NM_178707.2,918-936).
gaagctttagagttcaata

SEQ ID NO: 803157 - DNA, 19 bp, Mus musculus
  siRNA target sequence for A730014M16Rik (NM_178707.2,937-955).
gtcaccctagcaacagtat

SEQ ID NO: 803158 - DNA, 19 bp, Mus musculus
  siRNA target sequence for A730014M16Rik (NM_178707.2,1026-1044).
ccagcccattccaagttat

SEQ ID NO: 803159 - DNA, 19 bp, Mus musculus
  siRNA target sequence for A730014M16Rik (NM_178707.2,1141-1159).
ccactaaagagggttctaa

SEQ ID NO: 803160 - DNA, 19 bp, Mus musculus
  siRNA target sequence for A730014M16Rik (NM_178707.2,1142-1160).
cactaaagagggttctaaa

SEQ ID NO: 803161 - DNA, 19 bp, Mus musculus
  siRNA target sequence for A730014M16Rik (NM_178707.2,1156-1174).
ctaaaggcagccccaaaat

SEQ ID NO: 803162 - DNA, 19 bp, Mus musculus
  siRNA target sequence for A730014M16Rik (NM_178707.2,1175-1193).
gcccaagtcaccaaagagt

SEQ ID NO: 803163 - DNA, 19 bp, Mus musculus
  siRNA target sequence for A730014M16Rik (NM_178707.2,1203-1221).
cctctagaggccactagaa

SEQ ID NO: 803164 - DNA, 19 bp, Mus musculus
  siRNA target sequence for A730014M16Rik (NM_178707.2,1204-1222).
ctctagaggccactagaaa

SEQ ID NO: 803165 - DNA, 19 bp, Mus musculus
  siRNA target sequence for A730014M16Rik (NM_178707.2,1212-1230).
gccactagaaaaagtatca

SEQ ID NO: 803166 - DNA, 19 bp, Mus musculus
  siRNA target sequence for A730014M16Rik (NM_178707.2,1298-1316).
cagctccccaccagcaatt

SEQ ID NO: 803167 - DNA, 19 bp, Mus musculus
  siRNA target sequence for A730014M16Rik (NM_178707.2,1319-1337).
caaagtcagaatcaaaaca

SEQ ID NO: 803168 - DNA, 19 bp, Mus musculus
  siRNA target sequence for A730014M16Rik (NM_178707.2,1425-1443).
cctgcagggagcacaatca

SEQ ID NO: 803169 - DNA, 19 bp, Mus musculus
  siRNA target sequence for A730014M16Rik (NM_178707.2,1546-1564).
gaaaaggggatgagaatat

SEQ ID NO: 803170 - DNA, 19 bp, Mus musculus
  siRNA target sequence for A730014M16Rik (NM_178707.2,1797-1815).
cctcaggtcacgcaaatga

SEQ ID NO: 803171 - DNA, 19 bp, Mus musculus
  siRNA target sequence for A730014M16Rik (NM_178707.2,1905-1923).
ctctatgcgccaaatctca

SEQ ID NO: 803172 - DNA, 19 bp, Mus musculus
  siRNA target sequence for A730014M16Rik (NM_178707.2,1986-2004).
gacgcgtttgccttagaga

SEQ ID NO: 803173 - DNA, 19 bp, Mus musculus
  siRNA target sequence for A730014M16Rik (NM_178707.2,2057-2075).
cacactgtgctctaagaca

SEQ ID NO: 803174 - DNA, 19 bp, Mus musculus
  siRNA target sequence for A730014M16Rik (NM_178707.2,2174-2192).
ctctgcggaccagatgttt

SEQ ID NO: 803175 - DNA, 19 bp, Mus musculus
  siRNA target sequence for A730014M16Rik (NM_178707.2,2176-2194).
ctgcggaccagatgtttgt

SEQ ID NO: 803176 - DNA, 19 bp, Mus musculus
  siRNA target sequence for A730014M16Rik (NM_178707.2,2270-2288).
caatgccagctctgtaatt

SEQ ID NO: 803177 - DNA, 19 bp, Mus musculus
  siRNA target sequence for A730014M16Rik (NM_178707.2,2324-2342).
catccggtatggaaccaaa

SEQ ID NO: 803178 - DNA, 19 bp, Mus musculus
  siRNA target sequence for A730014M16Rik (NM_178707.2,2327-2345).
ccggtatggaaccaaatgt

SEQ ID NO: 803179 - DNA, 19 bp, Mus musculus
  siRNA target sequence for A730014M16Rik (NM_178707.2,2357-2375).
caagcagatgcgagattat

SEQ ID NO: 803180 - DNA, 19 bp, Mus musculus
  siRNA target sequence for A730014M16Rik (NM_178707.2,2412-2430).
gaaaccgaggggctaactt

SEQ ID NO: 803181 - DNA, 19 bp, Mus musculus
  siRNA target sequence for A730014M16Rik (NM_178707.2,2775-2793).
ccctcccagctaatttata

SEQ ID NO: 803182 - DNA, 19 bp, Mus musculus
  siRNA target sequence for A730014M16Rik (NM_178707.2,2800-2818).
cctgtgaaatggtcttcaa

SEQ ID NO: 803183 - DNA, 19 bp, Mus musculus
  siRNA target sequence for A730014M16Rik (NM_178707.2,2822-2840).
gaagaggcacattcaacaa

SEQ ID NO: 803184 - DNA, 19 bp, Mus musculus
  siRNA target sequence for A730014M16Rik (NM_178707.2,2825-2843).
gaggcacattcaacaacat

SEQ ID NO: 803185 - DNA, 19 bp, Mus musculus
  siRNA target sequence for A730014M16Rik (NM_178707.2,2827-2845).
ggcacattcaacaacattt

SEQ ID NO: 803186 - DNA, 19 bp, Mus musculus
  siRNA target sequence for A730014M16Rik (NM_178707.2,2868-2886).
caggcgggtgttttcaagt

SEQ ID NO: 803187 - DNA, 19 bp, Mus musculus
  siRNA target sequence for A730014M16Rik (NM_178707.2,3038-3056).
cgagcccccagctacaaat

SEQ ID NO: 803188 - DNA, 19 bp, Mus musculus
  siRNA target sequence for A730014M16Rik (NM_178707.2,3041-3059).
gcccccagctacaaatgta

SEQ ID NO: 803189 - DNA, 19 bp, Mus musculus
  siRNA target sequence for A730014M16Rik (NM_178707.2,3196-3214).
gctacgtgtctcacatgaa

SEQ ID NO: 803190 - DNA, 19 bp, Mus musculus
  siRNA target sequence for A730014M16Rik (NM_178707.2,3197-3215).
ctacgtgtctcacatgaaa

SEQ ID NO: 803191 - DNA, 19 bp, Mus musculus
  siRNA target sequence for A730014M16Rik (NM_178707.2,3384-3402).
ctcctggagagccacatta

SEQ ID NO: 803192 - DNA, 19 bp, Mus musculus
  siRNA target sequence for A730014M16Rik (NM_178707.2,3394-3412).
gccacattagccttatgca

SEQ ID NO: 803193 - DNA, 19 bp, Mus musculus
  siRNA target sequence for A730014M16Rik (NM_178707.2,3404-3422).
ccttatgcacggtatcaga

SEQ ID NO: 803194 - DNA, 19 bp, Mus musculus
  siRNA target sequence for A730014M16Rik (NM_178707.2,3405-3423).
cttatgcacggtatcagaa

SEQ ID NO: 803195 - DNA, 19 bp, Mus musculus
  siRNA target sequence for A730014M16Rik (NM_178707.2,3475-3493).
ctcaggtgaaccatctgaa

SEQ ID NO: 803196 - DNA, 19 bp, Mus musculus
  siRNA target sequence for A730014M16Rik (NM_178707.2,3479-3497).
ggtgaaccatctgaaaaga

SEQ ID NO: 803197 - DNA, 19 bp, Mus musculus
  siRNA target sequence for A730014M16Rik (NM_178707.2,3518-3536).
cgctccaggcactagcaat

SEQ ID NO: 803198 - DNA, 19 bp, Mus musculus
  siRNA target sequence for A730014M16Rik (NM_178707.2,3965-3983).
gaacagccatgcactatct

SEQ ID NO: 803199 - DNA, 19 bp, Mus musculus
  siRNA target sequence for A730042J05Rik (NM_178708.2,672-690).
gtgcagagctggtatcctt

SEQ ID NO: 803200 - DNA, 19 bp, Mus musculus
  siRNA target sequence for A730042J05Rik (NM_178708.2,674-692).
gcagagctggtatccttta

SEQ ID NO: 803201 - DNA, 19 bp, Mus musculus
  siRNA target sequence for A730042J05Rik (NM_178708.2,688-706).
ctttaagcaccctcatgtt

SEQ ID NO: 803202 - DNA, 19 bp, Mus musculus
  siRNA target sequence for A730042J05Rik (NM_178708.2,761-779).
ggagcccccatatgatgaa

SEQ ID NO: 803203 - DNA, 19 bp, Mus musculus
  siRNA target sequence for A730042J05Rik (NM_178708.2,762-780).
gagcccccatatgatgaaa

SEQ ID NO: 803204 - DNA, 19 bp, Mus musculus
  siRNA target sequence for A730042J05Rik (NM_178708.2,765-783).
cccccatatgatgaaatgt

SEQ ID NO: 803205 - DNA, 19 bp, Mus musculus
  siRNA target sequence for A730042J05Rik (NM_178708.2,766-784).
ccccatatgatgaaatgtt

SEQ ID NO: 803206 - DNA, 19 bp, Mus musculus
  siRNA target sequence for A730042J05Rik (NM_178708.2,815-833).
ggggaatcacgacttcata

SEQ ID NO: 803207 - DNA, 19 bp, Mus musculus
  siRNA target sequence for A730042J05Rik (NM_178708.2,817-835).
ggaatcacgacttcataga

SEQ ID NO: 803208 - DNA, 19 bp, Mus musculus
  siRNA target sequence for A730042J05Rik (NM_178708.2,853-871).
cggtgatagtccaatcatt

SEQ ID NO: 803209 - DNA, 19 bp, Mus musculus
  siRNA target sequence for A730042J05Rik (NM_178708.2,878-896).
ggcattccaggctcacaaa

SEQ ID NO: 803210 - DNA, 19 bp, Mus musculus
  siRNA target sequence for A730042J05Rik (NM_178708.2,907-925).
gggctctgcctgtcatgta

SEQ ID NO: 803211 - DNA, 19 bp, Mus musculus
  siRNA target sequence for A730042J05Rik (NM_178708.2,908-926).
ggctctgcctgtcatgtat

SEQ ID NO: 803212 - DNA, 19 bp, Mus musculus
  siRNA target sequence for A730042J05Rik (NM_178708.2,1064-1082).
cacccgtgccggcatagaa

SEQ ID NO: 803213 - DNA, 19 bp, Mus musculus
  siRNA target sequence for A730042J05Rik (NM_178708.2,1066-1084).
cccgtgccggcatagaaga

SEQ ID NO: 803214 - DNA, 19 bp, Mus musculus
  siRNA target sequence for A730042J05Rik (NM_178708.2,1110-1128).
ctggtgaaccagctattta

SEQ ID NO: 803215 - DNA, 19 bp, Mus musculus
  siRNA target sequence for A730042J05Rik (NM_178708.2,1160-1178).
gtgtaaacctcttatcaga

SEQ ID NO: 803216 - DNA, 19 bp, Mus musculus
  siRNA target sequence for A730042J05Rik (NM_178708.2,1184-1202).
cgacagctcgaatctgaaa

SEQ ID NO: 803217 - DNA, 19 bp, Mus musculus
  siRNA target sequence for A730042J05Rik (NM_178708.2,1187-1205).
cagctcgaatctgaaagat

SEQ ID NO: 803218 - DNA, 19 bp, Mus musculus
  siRNA target sequence for A730042J05Rik (NM_178708.2,1192-1210).
cgaatctgaaagatgacta

SEQ ID NO: 803219 - DNA, 19 bp, Mus musculus
  siRNA target sequence for A730042J05Rik (NM_178708.2,1221-1239).
cagaggatcacgtacaagt

SEQ ID NO: 803220 - DNA, 19 bp, Mus musculus
  siRNA target sequence for A730042J05Rik (NM_178708.2,1225-1243).
ggatcacgtacaagtacta

SEQ ID NO: 803221 - DNA, 19 bp, Mus musculus
  siRNA target sequence for A730042J05Rik (NM_178708.2,1323-1341).
cgctccagccagaagaaca

SEQ ID NO: 803222 - DNA, 19 bp, Mus musculus
  siRNA target sequence for A730042J05Rik (NM_178708.2,1424-1442).
cctgatgcagttttcagaa

SEQ ID NO: 803223 - DNA, 19 bp, Mus musculus
  siRNA target sequence for A730042J05Rik (NM_178708.2,1561-1579).
cgtacaggaacctcttcaa

SEQ ID NO: 803224 - DNA, 19 bp, Mus musculus
  siRNA target sequence for A730042J05Rik (NM_178708.2,1685-1703).
cattctggccaacttgata

SEQ ID NO: 803225 - DNA, 19 bp, Mus musculus
  siRNA target sequence for D130054N24Rik (NM_178709.2,574-592).
ccgagtccttcggaatctt

SEQ ID NO: 803226 - DNA, 19 bp, Mus musculus
  siRNA target sequence for D130054N24Rik (NM_178709.2,604-622).
gcatccaagtccgatgaat

SEQ ID NO: 803227 - DNA, 19 bp, Mus musculus
  siRNA target sequence for D130054N24Rik (NM_178709.2,608-626).
ccaagtccgatgaatctct

SEQ ID NO: 803228 - DNA, 19 bp, Mus musculus
  siRNA target sequence for D130054N24Rik (NM_178709.2,649-667).
gactctgcccagaaacaga

SEQ ID NO: 803229 - DNA, 19 bp, Mus musculus
  siRNA target sequence for D130054N24Rik (NM_178709.2,686-704).
gtgtaagtagccaaatgat

SEQ ID NO: 803230 - DNA, 19 bp, Mus musculus
  siRNA target sequence for D130054N24Rik (NM_178709.2,688-706).
gtaagtagccaaatgataa

SEQ ID NO: 803231 - DNA, 19 bp, Mus musculus
  siRNA target sequence for D130054N24Rik (NM_178709.2,692-710).
gtagccaaatgataaccaa

SEQ ID NO: 803232 - DNA, 19 bp, Mus musculus
  siRNA target sequence for D130054N24Rik (NM_178709.2,708-726).
caaggagagtaacagaaat

SEQ ID NO: 803233 - DNA, 19 bp, Mus musculus
  siRNA target sequence for D130054N24Rik (NM_178709.2,735-753).
ggaacatccagaacagaat

SEQ ID NO: 803234 - DNA, 19 bp, Mus musculus
  siRNA target sequence for D130054N24Rik (NM_178709.2,782-800).
cagcgcacgaggaagttgt

SEQ ID NO: 803235 - DNA, 19 bp, Mus musculus
  siRNA target sequence for D130054N24Rik (NM_178709.2,793-811).
gaagttgtaggagaaaact

SEQ ID NO: 803236 - DNA, 19 bp, Mus musculus
  siRNA target sequence for D130054N24Rik (NM_178709.2,844-862).
gggtctcagtctgatttga

SEQ ID NO: 803237 - DNA, 19 bp, Mus musculus
  siRNA target sequence for D130054N24Rik (NM_178709.2,947-965).
ggtgccactcaaaacaact

SEQ ID NO: 803238 - DNA, 19 bp, Mus musculus
  siRNA target sequence for D130054N24Rik (NM_178709.2,948-966).
gtgccactcaaaacaactt

SEQ ID NO: 803239 - DNA, 19 bp, Mus musculus
  siRNA target sequence for D130054N24Rik (NM_178709.2,964-982).
cttgcctccgggaattgct

SEQ ID NO: 803240 - DNA, 19 bp, Mus musculus
  siRNA target sequence for D130054N24Rik (NM_178709.2,1001-1019).
cagcctccgtcctaaagga

SEQ ID NO: 803241 - DNA, 19 bp, Mus musculus
  siRNA target sequence for D130054N24Rik (NM_178709.2,1041-1059).
ggacttgctacctgtagta

SEQ ID NO: 803242 - DNA, 19 bp, Mus musculus
  siRNA target sequence for D130054N24Rik (NM_178709.2,1168-1186).
gcagattcggaagtaaaca

SEQ ID NO: 803243 - DNA, 19 bp, Mus musculus
  siRNA target sequence for D130054N24Rik (NM_178709.2,1185-1203).
cacagaccaagatattgaa

SEQ ID NO: 803244 - DNA, 19 bp, Mus musculus
  siRNA target sequence for D130054N24Rik (NM_178709.2,1201-1219).
gaaaagaatctggacaaaa

SEQ ID NO: 803245 - DNA, 19 bp, Mus musculus
  siRNA target sequence for D130054N24Rik (NM_178709.2,1239-1257).
gttgaaggagcgttaccaa

SEQ ID NO: 803246 - DNA, 19 bp, Mus musculus
  siRNA target sequence for D130054N24Rik (NM_178709.2,1344-1362).
gaatcaccaggagatacta

SEQ ID NO: 803247 - DNA, 19 bp, Mus musculus
  siRNA target sequence for D130054N24Rik (NM_178709.2,1380-1398).
gaccataaagcgagaagaa

SEQ ID NO: 803248 - DNA, 19 bp, Mus musculus
  siRNA target sequence for D130054N24Rik (NM_178709.2,1538-1556).
gtgaaatcaaccggaatat

SEQ ID NO: 803249 - DNA, 19 bp, Mus musculus
  siRNA target sequence for D130054N24Rik (NM_178709.2,1540-1558).
gaaatcaaccggaatatta

SEQ ID NO: 803250 - DNA, 19 bp, Mus musculus
  siRNA target sequence for D130054N24Rik (NM_178709.2,1545-1563).
caaccggaatattatggaa

SEQ ID NO: 803251 - DNA, 19 bp, Mus musculus
  siRNA target sequence for D130054N24Rik (NM_178709.2,1666-1684).
ctgacttacctcaagtcaa

SEQ ID NO: 803252 - DNA, 19 bp, Mus musculus
  siRNA target sequence for D130054N24Rik (NM_178709.2,1701-1719).
gacagttcgttccaaacaa

SEQ ID NO: 803253 - DNA, 19 bp, Mus musculus
  siRNA target sequence for D130054N24Rik (NM_178709.2,1703-1721).
cagttcgttccaaacaaga

SEQ ID NO: 803254 - DNA, 19 bp, Mus musculus
  siRNA target sequence for D130054N24Rik (NM_178709.2,1722-1740).
gtgggagacaagactgaat

SEQ ID NO: 803255 - DNA, 19 bp, Mus musculus
  siRNA target sequence for D130054N24Rik (NM_178709.2,1741-1759).
ggagttcggataatgaaaa

SEQ ID NO: 803256 - DNA, 19 bp, Mus musculus
  siRNA target sequence for D130054N24Rik (NM_178709.2,1744-1762).
gttcggataatgaaaaaga

SEQ ID NO: 803257 - DNA, 19 bp, Mus musculus
  siRNA target sequence for D130054N24Rik (NM_178709.2,1765-1783).
gttcgggaccagtttaata

SEQ ID NO: 803258 - DNA, 19 bp, Mus musculus
  siRNA target sequence for D130054N24Rik (NM_178709.2,1769-1787).
gggaccagtttaatagtca

SEQ ID NO: 803259 - DNA, 19 bp, Mus musculus
  siRNA target sequence for D130054N24Rik (NM_178709.2,1770-1788).
ggaccagtttaatagtcat

SEQ ID NO: 803260 - DNA, 19 bp, Mus musculus
  siRNA target sequence for D130054N24Rik (NM_178709.2,1771-1789).
gaccagtttaatagtcata

SEQ ID NO: 803261 - DNA, 19 bp, Mus musculus
  siRNA target sequence for D130054N24Rik (NM_178709.2,1915-1933).
cctcggatgcccttctcta

SEQ ID NO: 803262 - DNA, 19 bp, Mus musculus
  siRNA target sequence for D130054N24Rik (NM_178709.2,1916-1934).
ctcggatgcccttctctat

SEQ ID NO: 803263 - DNA, 19 bp, Mus musculus
  siRNA target sequence for D130054N24Rik (NM_178709.2,1931-1949).
ctatcgggcaggtcactat

SEQ ID NO: 803264 - DNA, 19 bp, Mus musculus
  siRNA target sequence for D130054N24Rik (NM_178709.2,1941-1959).
ggtcactatgcctatggtt

SEQ ID NO: 803265 - DNA, 19 bp, Mus musculus
  siRNA target sequence for D130054N24Rik (NM_178709.2,1942-1960).
gtcactatgcctatggtta

SEQ ID NO: 803266 - DNA, 19 bp, Mus musculus
  siRNA target sequence for D130054N24Rik (NM_178709.2,1971-1989).
ggatcctcgctctttgtct

SEQ ID NO: 803267 - DNA, 19 bp, Mus musculus
  siRNA target sequence for D130054N24Rik (NM_178709.2,2138-2156).
caggcttgggcggtattaa

SEQ ID NO: 803268 - DNA, 19 bp, Mus musculus
  siRNA target sequence for D130054N24Rik (NM_178709.2,2148-2166).
cggtattaaggcttcttct

SEQ ID NO: 803269 - DNA, 19 bp, Mus musculus
  siRNA target sequence for D130054N24Rik (NM_178709.2,2180-2198).
cccaaccagtagacaaact

SEQ ID NO: 803270 - DNA, 19 bp, Mus musculus
  siRNA target sequence for D130054N24Rik (NM_178709.2,2227-2245).
cggttcccacagtgcaata

SEQ ID NO: 803271 - DNA, 19 bp, Mus musculus
  siRNA target sequence for D130054N24Rik (NM_178709.2,2247-2265).
ggcccagatgaccaacatt

SEQ ID NO: 803272 - DNA, 19 bp, Mus musculus
  siRNA target sequence for D130054N24Rik (NM_178709.2,2250-2268).
ccagatgaccaacattctt

SEQ ID NO: 803273 - DNA, 19 bp, Mus musculus
  siRNA target sequence for D130054N24Rik (NM_178709.2,2258-2276).
ccaacattcttcagcaaat

SEQ ID NO: 803274 - DNA, 19 bp, Mus musculus
  siRNA target sequence for D130054N24Rik (NM_178709.2,2381-2399).
ctccacccacttgtaaact

SEQ ID NO: 803275 - DNA, 19 bp, Mus musculus
  siRNA target sequence for D130054N24Rik (NM_178709.2,2383-2401).
ccacccacttgtaaactgt

SEQ ID NO: 803276 - DNA, 19 bp, Mus musculus
  siRNA target sequence for D130054N24Rik (NM_178709.2,2466-2484).
gcacaaggagtgtatcaaa

SEQ ID NO: 803277 - DNA, 19 bp, Mus musculus
  siRNA target sequence for D130054N24Rik (NM_178709.2,2467-2485).
cacaaggagtgtatcaaat

SEQ ID NO: 803278 - DNA, 19 bp, Mus musculus
  siRNA target sequence for D130054N24Rik (NM_178709.2,2490-2508).
ggcccagaccaacacaaat

SEQ ID NO: 803279 - DNA, 19 bp, Mus musculus
  siRNA target sequence for D130054N24Rik (NM_178709.2,2518-2536).
cccttttgcccaactctta

SEQ ID NO: 803280 - DNA, 19 bp, Mus musculus
  siRNA target sequence for D130054N24Rik (NM_178709.2,2519-2537).
ccttttgcccaactcttaa

SEQ ID NO: 803281 - DNA, 19 bp, Mus musculus
  siRNA target sequence for D130054N24Rik (NM_178709.2,2520-2538).
cttttgcccaactcttaaa

SEQ ID NO: 803282 - DNA, 19 bp, Mus musculus
  siRNA target sequence for Plscr4 (NM_178711.2,36-54).
ccctgagcaacctacagaa

SEQ ID NO: 803283 - DNA, 19 bp, Mus musculus
  siRNA target sequence for Plscr4 (NM_178711.2,97-115).
gctcctcctgactacaatt

SEQ ID NO: 803284 - DNA, 19 bp, Mus musculus
  siRNA target sequence for Plscr4 (NM_178711.2,101-119).
ctcctgactacaattctca

SEQ ID NO: 803285 - DNA, 19 bp, Mus musculus
  siRNA target sequence for Plscr4 (NM_178711.2,164-182).
gcttgcctatgggatacta

SEQ ID NO: 803286 - DNA, 19 bp, Mus musculus
  siRNA target sequence for Plscr4 (NM_178711.2,168-186).
gcctatgggatactacatt

SEQ ID NO: 803287 - DNA, 19 bp, Mus musculus
  siRNA target sequence for Plscr4 (NM_178711.2,224-242).
ctggtggcacccatccaat

SEQ ID NO: 803288 - DNA, 19 bp, Mus musculus
  siRNA target sequence for Plscr4 (NM_178711.2,326-344).
gccctcctggtttggaata

SEQ ID NO: 803289 - DNA, 19 bp, Mus musculus
  siRNA target sequence for Plscr4 (NM_178711.2,393-411).
ggaactgatgacacgtttt

SEQ ID NO: 803290 - DNA, 19 bp, Mus musculus
  siRNA target sequence for Plscr4 (NM_178711.2,397-415).
ctgatgacacgttttgaaa

SEQ ID NO: 803291 - DNA, 19 bp, Mus musculus
  siRNA target sequence for Plscr4 (NM_178711.2,399-417).
gatgacacgttttgaaact

SEQ ID NO: 803292 - DNA, 19 bp, Mus musculus
  siRNA target sequence for Plscr4 (NM_178711.2,402-420).
gacacgttttgaaactaat

SEQ ID NO: 803293 - DNA, 19 bp, Mus musculus
  siRNA target sequence for Plscr4 (NM_178711.2,404-422).
cacgttttgaaactaataa

SEQ ID NO: 803294 - DNA, 19 bp, Mus musculus
  siRNA target sequence for Plscr4 (NM_178711.2,450-468).
ccagatggtctatatcgta

SEQ ID NO: 803295 - DNA, 19 bp, Mus musculus
  siRNA target sequence for Plscr4 (NM_178711.2,451-469).
cagatggtctatatcgtaa

SEQ ID NO: 803296 - DNA, 19 bp, Mus musculus
  siRNA target sequence for Plscr4 (NM_178711.2,456-474).
ggtctatatcgtaactgaa

SEQ ID NO: 803297 - DNA, 19 bp, Mus musculus
  siRNA target sequence for Plscr4 (NM_178711.2,667-685).
gcagaacactggaacttgt

SEQ ID NO: 803298 - DNA, 19 bp, Mus musculus
  siRNA target sequence for Plscr4 (NM_178711.2,761-779).
gctgtggctccgattctgt

SEQ ID NO: 803299 - DNA, 19 bp, Mus musculus
  siRNA target sequence for Plscr4 (NM_178711.2,762-780).
ctgtggctccgattctgtt

SEQ ID NO: 803300 - DNA, 19 bp, Mus musculus
  siRNA target sequence for Plscr4 (NM_178711.2,767-785).
gctccgattctgtttttga

SEQ ID NO: 803301 - DNA, 19 bp, Mus musculus
  siRNA target sequence for Plscr4 (NM_178711.2,770-788).
ccgattctgtttttgagat

SEQ ID NO: 803302 - DNA, 19 bp, Mus musculus
  siRNA target sequence for Plscr4 (NM_178711.2,794-812).
ctctagatggcgtgtctaa

SEQ ID NO: 803303 - DNA, 19 bp, Mus musculus
  siRNA target sequence for Plscr4 (NM_178711.2,796-814).
ctagatggcgtgtctaaca

SEQ ID NO: 803304 - DNA, 19 bp, Mus musculus
  siRNA target sequence for Plscr4 (NM_178711.2,809-827).
ctaacatcggcagtattat

SEQ ID NO: 803305 - DNA, 19 bp, Mus musculus
  siRNA target sequence for Plscr4 (NM_178711.2,830-848).
ggaagtggaatggcttttt

SEQ ID NO: 803306 - DNA, 19 bp, Mus musculus
  siRNA target sequence for Plscr4 (NM_178711.2,834-852).
gtggaatggctttttatca

SEQ ID NO: 803307 - DNA, 19 bp, Mus musculus
  siRNA target sequence for Plscr4 (NM_178711.2,970-988).
cctccgcgacgtatgtcaa

SEQ ID NO: 803308 - DNA, 19 bp, Mus musculus
  siRNA target sequence for Plscr4 (NM_178711.2,973-991).
ccgcgacgtatgtcaagat

SEQ ID NO: 803309 - DNA, 19 bp, Mus musculus
  siRNA target sequence for Kpnb2 (NM_178716.2,193-211).
gaggaccgtgcaacaaaaa

SEQ ID NO: 803310 - DNA, 19 bp, Mus musculus
  siRNA target sequence for Kpnb2 (NM_178716.2,195-213).
ggaccgtgcaacaaaaact

SEQ ID NO: 803311 - DNA, 19 bp, Mus musculus
  siRNA target sequence for Kpnb2 (NM_178716.2,287-305).
gagcccacacggtcattga

SEQ ID NO: 803312 - DNA, 19 bp, Mus musculus
  siRNA target sequence for Kpnb2 (NM_178716.2,306-324).
gcggtctgatcttgaagaa

SEQ ID NO: 803313 - DNA, 19 bp, Mus musculus
  siRNA target sequence for Kpnb2 (NM_178716.2,308-326).
ggtctgatcttgaagaaca

SEQ ID NO: 803314 - DNA, 19 bp, Mus musculus
  siRNA target sequence for Kpnb2 (NM_178716.2,368-386).
gacttcatcaagagtgaat

SEQ ID NO: 803315 - DNA, 19 bp, Mus musculus
  siRNA target sequence for Kpnb2 (NM_178716.2,376-394).
caagagtgaatgtctaaat

SEQ ID NO: 803316 - DNA, 19 bp, Mus musculus
  siRNA target sequence for Kpnb2 (NM_178716.2,425-443).
gccactgtcggtattttaa

SEQ ID NO: 803317 - DNA, 19 bp, Mus musculus
  siRNA target sequence for Kpnb2 (NM_178716.2,431-449).
gtcggtattttaattacaa

SEQ ID NO: 803318 - DNA, 19 bp, Mus musculus
  siRNA target sequence for Kpnb2 (NM_178716.2,475-493).
gaattggcctgatctctta

SEQ ID NO: 803319 - DNA, 19 bp, Mus musculus
  siRNA target sequence for Kpnb2 (NM_178716.2,480-498).
ggcctgatctcttaccaaa

SEQ ID NO: 803320 - DNA, 19 bp, Mus musculus
  siRNA target sequence for Kpnb2 (NM_178716.2,485-503).
gatctcttaccaaaactct

SEQ ID NO: 803321 - DNA, 19 bp, Mus musculus
  siRNA target sequence for Kpnb2 (NM_178716.2,515-533).
gattccgaagactacaaca

SEQ ID NO: 803322 - DNA, 19 bp, Mus musculus
  siRNA target sequence for Kpnb2 (NM_178716.2,608-626).
gatcgccctctcaacatca

SEQ ID NO: 803323 - DNA, 19 bp, Mus musculus
  siRNA target sequence for Kpnb2 (NM_178716.2,611-629).
cgccctctcaacatcatga

SEQ ID NO: 803324 - DNA, 19 bp, Mus musculus
  siRNA target sequence for Kpnb2 (NM_178716.2,631-649).
ccccaagtttttacagttt

SEQ ID NO: 803325 - DNA, 19 bp, Mus musculus
  siRNA target sequence for Kpnb2 (NM_178716.2,690-708).
catgtgtcaatcagttcat

SEQ ID NO: 803326 - DNA, 19 bp, Mus musculus
  siRNA target sequence for Kpnb2 (NM_178716.2,728-746).
ctcatgctgcacatcgatt

SEQ ID NO: 803327 - DNA, 19 bp, Mus musculus
  siRNA target sequence for Kpnb2 (NM_178716.2,953-971).
gctgaacagccaatatgca

SEQ ID NO: 803328 - DNA, 19 bp, Mus musculus
  siRNA target sequence for Kpnb2 (NM_178716.2,954-972).
ctgaacagccaatatgcaa

SEQ ID NO: 803329 - DNA, 19 bp, Mus musculus
  siRNA target sequence for Kpnb2 (NM_178716.2,987-1005).
ggcatctaccaaagttgat

SEQ ID NO: 803330 - DNA, 19 bp, Mus musculus
  siRNA target sequence for Kpnb2 (NM_178716.2,988-1006).
gcatctaccaaagttgatt

SEQ ID NO: 803331 - DNA, 19 bp, Mus musculus
  siRNA target sequence for Kpnb2 (NM_178716.2,1003-1021).
gattcctgtgttagtgaat

SEQ ID NO: 803332 - DNA, 19 bp, Mus musculus
  siRNA target sequence for Kpnb2 (NM_178716.2,1027-1045).
gaagtactcagatatagat

SEQ ID NO: 803333 - DNA, 19 bp, Mus musculus
  siRNA target sequence for Kpnb2 (NM_178716.2,1089-1107).
cggatagtgagcaggatat

SEQ ID NO: 803334 - DNA, 19 bp, Mus musculus
  siRNA target sequence for Kpnb2 (NM_178716.2,1252-1270).
cgatgttctcgcaaatgtt

SEQ ID NO: 803335 - DNA, 19 bp, Mus musculus
  siRNA target sequence for Kpnb2 (NM_178716.2,1253-1271).
gatgttctcgcaaatgttt

SEQ ID NO: 803336 - DNA, 19 bp, Mus musculus
  siRNA target sequence for Kpnb2 (NM_178716.2,1290-1308).
cgcacattctgccactttt

SEQ ID NO: 803337 - DNA, 19 bp, Mus musculus
  siRNA target sequence for Kpnb2 (NM_178716.2,1331-1349).
gaatgggttgtgaaagaat

SEQ ID NO: 803338 - DNA, 19 bp, Mus musculus
  siRNA target sequence for Kpnb2 (NM_178716.2,1360-1378).
ggttttaggagcaattgct

SEQ ID NO: 803339 - DNA, 19 bp, Mus musculus
  siRNA target sequence for Kpnb2 (NM_178716.2,1371-1389).
caattgctgaaggttgtat

SEQ ID NO: 803340 - DNA, 19 bp, Mus musculus
  siRNA target sequence for Kpnb2 (NM_178716.2,1515-1533).
gccagccaccagatacgta

SEQ ID NO: 803341 - DNA, 19 bp, Mus musculus
  siRNA target sequence for Kpnb2 (NM_178716.2,1530-1548).
cgtacctgaagccattaat

SEQ ID NO: 803342 - DNA, 19 bp, Mus musculus
  siRNA target sequence for Kpnb2 (NM_178716.2,1534-1552).
cctgaagccattaatgaca

SEQ ID NO: 803343 - DNA, 19 bp, Mus musculus
  siRNA target sequence for Kpnb2 (NM_178716.2,1605-1623).
gcagtgccttcgctacatt

SEQ ID NO: 803344 - DNA, 19 bp, Mus musculus
  siRNA target sequence for Kpnb2 (NM_178716.2,1606-1624).
cagtgccttcgctacatta

SEQ ID NO: 803345 - DNA, 19 bp, Mus musculus
  siRNA target sequence for Kpnb2 (NM_178716.2,1608-1626).
gtgccttcgctacattaga

SEQ ID NO: 803346 - DNA, 19 bp, Mus musculus
  siRNA target sequence for Kpnb2 (NM_178716.2,1611-1629).
ccttcgctacattagaaga

SEQ ID NO: 803347 - DNA, 19 bp, Mus musculus
  siRNA target sequence for Kpnb2 (NM_178716.2,1648-1666).
cgtcccttaccttgcttat

SEQ ID NO: 803348 - DNA, 19 bp, Mus musculus
  siRNA target sequence for Kpnb2 (NM_178716.2,1649-1667).
gtcccttaccttgcttata

SEQ ID NO: 803349 - DNA, 19 bp, Mus musculus
  siRNA target sequence for Kpnb2 (NM_178716.2,1651-1669).
cccttaccttgcttatata

SEQ ID NO: 803350 - DNA, 19 bp, Mus musculus
  siRNA target sequence for Kpnb2 (NM_178716.2,1653-1671).
cttaccttgcttatatact

SEQ ID NO: 803351 - DNA, 19 bp, Mus musculus
  siRNA target sequence for Kpnb2 (NM_178716.2,1682-1700).
gtcttcgccttcagtaaat

SEQ ID NO: 803352 - DNA, 19 bp, Mus musculus
  siRNA target sequence for Kpnb2 (NM_178716.2,1740-1758).
ggacactggcagattcagt

SEQ ID NO: 803353 - DNA, 19 bp, Mus musculus
  siRNA target sequence for Kpnb2 (NM_178716.2,1751-1769).
gattcagtgggacatcatt

SEQ ID NO: 803354 - DNA, 19 bp, Mus musculus
  siRNA target sequence for Kpnb2 (NM_178716.2,1781-1799).
gaatatattcagatgctaa

SEQ ID NO: 803355 - DNA, 19 bp, Mus musculus
  siRNA target sequence for Kpnb2 (NM_178716.2,1897-1915).
gtctggcttccttccatat

SEQ ID NO: 803356 - DNA, 19 bp, Mus musculus
  siRNA target sequence for Kpnb2 (NM_178716.2,1935-1953).
gttgcgtaaacctagttca

SEQ ID NO: 803357 - DNA, 19 bp, Mus musculus
  siRNA target sequence for Kpnb2 (NM_178716.2,1938-1956).
gcgtaaacctagttcagaa

SEQ ID NO: 803358 - DNA, 19 bp, Mus musculus
  siRNA target sequence for Kpnb2 (NM_178716.2,1999-2017).
gtatgaagctccagataaa

SEQ ID NO: 803359 - DNA, 19 bp, Mus musculus
  siRNA target sequence for Kpnb2 (NM_178716.2,2009-2027).
ccagataaagattttatga

SEQ ID NO: 803360 - DNA, 19 bp, Mus musculus
  siRNA target sequence for Kpnb2 (NM_178716.2,2026-2044).
gattgtggctcttgactta

SEQ ID NO: 803361 - DNA, 19 bp, Mus musculus
  siRNA target sequence for Kpnb2 (NM_178716.2,2030-2048).
gtggctcttgacttactca

SEQ ID NO: 803362 - DNA, 19 bp, Mus musculus
  siRNA target sequence for Kpnb2 (NM_178716.2,2064-2082).
gcctgggaggcaacattga

SEQ ID NO: 803363 - DNA, 19 bp, Mus musculus
  siRNA target sequence for Kpnb2 (NM_178716.2,2147-2165).
gaggttcggcagagttctt

SEQ ID NO: 803364 - DNA, 19 bp, Mus musculus
  siRNA target sequence for Kpnb2 (NM_178716.2,2149-2167).
ggttcggcagagttctttt

SEQ ID NO: 803365 - DNA, 19 bp, Mus musculus
  siRNA target sequence for Kpnb2 (NM_178716.2,2154-2172).
ggcagagttcttttgcatt

SEQ ID NO: 803366 - DNA, 19 bp, Mus musculus
  siRNA target sequence for Kpnb2 (NM_178716.2,2173-2191).
gctaggtgacctgactaaa

SEQ ID NO: 803367 - DNA, 19 bp, Mus musculus
  siRNA target sequence for Kpnb2 (NM_178716.2,2192-2210).
gcgtgcttccagcatgtta

SEQ ID NO: 803368 - DNA, 19 bp, Mus musculus
  siRNA target sequence for Kpnb2 (NM_178716.2,2193-2211).
cgtgcttccagcatgttaa

SEQ ID NO: 803369 - DNA, 19 bp, Mus musculus
  siRNA target sequence for Kpnb2 (NM_178716.2,2203-2221).
gcatgttaagccttgtata

SEQ ID NO: 803370 - DNA, 19 bp, Mus musculus
  siRNA target sequence for Kpnb2 (NM_178716.2,2242-2260).
gggaaccaatctaaatcca

SEQ ID NO: 803371 - DNA, 19 bp, Mus musculus
  siRNA target sequence for Kpnb2 (NM_178716.2,2290-2308).
ctgggcgattggggaaata

SEQ ID NO: 803372 - DNA, 19 bp, Mus musculus
  siRNA target sequence for Kpnb2 (NM_178716.2,2293-2311).
ggcgattggggaaatatca

SEQ ID NO: 803373 - DNA, 19 bp, Mus musculus
  siRNA target sequence for Kpnb2 (NM_178716.2,2310-2328).
caatccaaatgggtataga

SEQ ID NO: 803374 - DNA, 19 bp, Mus musculus
  siRNA target sequence for Kpnb2 (NM_178716.2,2424-2442).
caattggtcgtcttggtta

SEQ ID NO: 803375 - DNA, 19 bp, Mus musculus
  siRNA target sequence for Kpnb2 (NM_178716.2,2429-2447).
ggtcgtcttggttacgttt

SEQ ID NO: 803376 - DNA, 19 bp, Mus musculus
  siRNA target sequence for Kpnb2 (NM_178716.2,2496-2514).
gtacctctctgagaaacat

SEQ ID NO: 803377 - DNA, 19 bp, Mus musculus
  siRNA target sequence for Kpnb2 (NM_178716.2,2540-2558).
gcattccgtgggatttgta

SEQ ID NO: 803378 - DNA, 19 bp, Mus musculus
  siRNA target sequence for Kpnb2 (NM_178716.2,2549-2567).
gggatttgtaccatgatca

SEQ ID NO: 803379 - DNA, 19 bp, Mus musculus
  siRNA target sequence for Kpnb2 (NM_178716.2,2582-2600).
ggcgtaatccaagatttta

SEQ ID NO: 803380 - DNA, 19 bp, Mus musculus
  siRNA target sequence for Kpnb2 (NM_178716.2,2584-2602).
cgtaatccaagattttata

SEQ ID NO: 803381 - DNA, 19 bp, Mus musculus
  siRNA target sequence for Kpnb2 (NM_178716.2,2615-2633).
gctgttgcatcatggatta

SEQ ID NO: 803382 - DNA, 19 bp, Mus musculus
  siRNA target sequence for Kpnb2 (NM_178716.2,2616-2634).
ctgttgcatcatggattaa

SEQ ID NO: 803383 - DNA, 19 bp, Mus musculus
  siRNA target sequence for Kpnb2 (NM_178716.2,2628-2646).
ggattaacccaaaagatga

SEQ ID NO: 803384 - DNA, 19 bp, Mus musculus
  siRNA target sequence for Kpnb2 (NM_178716.2,2629-2647).
gattaacccaaaagatgat

SEQ ID NO: 803385 - DNA, 19 bp, Mus musculus
  siRNA target sequence for Kpnb2 (NM_178716.2,2668-2686).
gatccttcatggatttaaa

SEQ ID NO: 803386 - DNA, 19 bp, Mus musculus
  siRNA target sequence for AI452372 (NM_178719.3,469-487).
gtacggccatcgattttgt

SEQ ID NO: 803387 - DNA, 19 bp, Mus musculus
  siRNA target sequence for AI452372 (NM_178719.3,551-569).
ggcagttaagcggatgtat

SEQ ID NO: 803388 - DNA, 19 bp, Mus musculus
  siRNA target sequence for AI452372 (NM_178719.3,553-571).
cagttaagcggatgtatga

SEQ ID NO: 803389 - DNA, 19 bp, Mus musculus
  siRNA target sequence for AI452372 (NM_178719.3,566-584).
gtatgaccgggcaatcagt

SEQ ID NO: 803390 - DNA, 19 bp, Mus musculus
  siRNA target sequence for AI452372 (NM_178719.3,651-669).
ggctctcctcgcctattga

SEQ ID NO: 803391 - DNA, 19 bp, Mus musculus
  siRNA target sequence for AI452372 (NM_178719.3,778-796).
ggaggggccaggtagactt

SEQ ID NO: 803392 - DNA, 19 bp, Mus musculus
  siRNA target sequence for AI452372 (NM_178719.3,784-802).
gccaggtagacttgaagaa

SEQ ID NO: 803393 - DNA, 19 bp, Mus musculus
  siRNA target sequence for AI452372 (NM_178719.3,957-975).
ccacttcgggacatgtact

SEQ ID NO: 803394 - DNA, 19 bp, Mus musculus
  siRNA target sequence for AI452372 (NM_178719.3,958-976).
cacttcgggacatgtactt

SEQ ID NO: 803395 - DNA, 19 bp, Mus musculus
  siRNA target sequence for AI452372 (NM_178719.3,960-978).
cttcgggacatgtacttga

SEQ ID NO: 803396 - DNA, 19 bp, Mus musculus
  siRNA target sequence for AI452372 (NM_178719.3,982-1000).
gcagcctctatgatgatct

SEQ ID NO: 803397 - DNA, 19 bp, Mus musculus
  siRNA target sequence for AI452372 (NM_178719.3,1010-1028).
gacggctgaccatatccaa

SEQ ID NO: 803398 - DNA, 19 bp, Mus musculus
  siRNA target sequence for AI452372 (NM_178719.3,1077-1095).
ggggaggacaccatcatga

SEQ ID NO: 803399 - DNA, 19 bp, Mus musculus
  siRNA target sequence for AI452372 (NM_178719.3,1311-1329).
ctagaagttcagtatgaga

SEQ ID NO: 803400 - DNA, 19 bp, Mus musculus
  siRNA target sequence for AI452372 (NM_178719.3,1331-1349).
ggacaaacatcttgtcatt

SEQ ID NO: 803401 - DNA, 19 bp, Mus musculus
  siRNA target sequence for AI452372 (NM_178719.3,1404-1422).
cggttagctcagtatgaca

SEQ ID NO: 803402 - DNA, 19 bp, Mus musculus
  siRNA target sequence for AI452372 (NM_178719.3,1405-1423).
ggttagctcagtatgacaa

SEQ ID NO: 803403 - DNA, 19 bp, Mus musculus
  siRNA target sequence for AI452372 (NM_178719.3,1728-1746).
gagctcacccctcaagaaa

SEQ ID NO: 803404 - DNA, 19 bp, Mus musculus
  siRNA target sequence for 9430016A21Rik (NM_178720.3,209-227).
gggtctgctcagttcaaca

SEQ ID NO: 803405 - DNA, 19 bp, Mus musculus
  siRNA target sequence for 9430016A21Rik (NM_178720.3,215-233).
gctcagttcaacagttaca

SEQ ID NO: 803406 - DNA, 19 bp, Mus musculus
  siRNA target sequence for 9430016A21Rik (NM_178720.3,216-234).
ctcagttcaacagttacaa

SEQ ID NO: 803407 - DNA, 19 bp, Mus musculus
  siRNA target sequence for 9430016A21Rik (NM_178720.3,218-236).
cagttcaacagttacaact

SEQ ID NO: 803408 - DNA, 19 bp, Mus musculus
  siRNA target sequence for 9430016A21Rik (NM_178720.3,293-311).
ggagtgcaggccattacga

SEQ ID NO: 803409 - DNA, 19 bp, Mus musculus
  siRNA target sequence for 9430016A21Rik (NM_178720.3,294-312).
gagtgcaggccattacgat

SEQ ID NO: 803410 - DNA, 19 bp, Mus musculus
  siRNA target sequence for 9430016A21Rik (NM_178720.3,301-319).
ggccattacgatgaagatt

SEQ ID NO: 803411 - DNA, 19 bp, Mus musculus
  siRNA target sequence for 9430016A21Rik (NM_178720.3,302-320).
gccattacgatgaagatta

SEQ ID NO: 803412 - DNA, 19 bp, Mus musculus
  siRNA target sequence for 9430016A21Rik (NM_178720.3,304-322).
cattacgatgaagattaat

SEQ ID NO: 803413 - DNA, 19 bp, Mus musculus
  siRNA target sequence for 9430016A21Rik (NM_178720.3,332-350).
gtccttttctcgggatatt

SEQ ID NO: 803414 - DNA, 19 bp, Mus musculus
  siRNA target sequence for 9430016A21Rik (NM_178720.3,334-352).
ccttttctcgggatattca

SEQ ID NO: 803415 - DNA, 19 bp, Mus musculus
  siRNA target sequence for 9430016A21Rik (NM_178720.3,340-358).
ctcgggatattcagaaaca

SEQ ID NO: 803416 - DNA, 19 bp, Mus musculus
  siRNA target sequence for 9430016A21Rik (NM_178720.3,342-360).
cgggatattcagaaacaga

SEQ ID NO: 803417 - DNA, 19 bp, Mus musculus
  siRNA target sequence for 9430016A21Rik (NM_178720.3,359-377).
gatctggcactgaatggaa

SEQ ID NO: 803418 - DNA, 19 bp, Mus musculus
  siRNA target sequence for 9430016A21Rik (NM_178720.3,570-588).
cggaccctccagcagttat

SEQ ID NO: 803419 - DNA, 19 bp, Mus musculus
  siRNA target sequence for 9430016A21Rik (NM_178720.3,572-590).
gaccctccagcagttatca

SEQ ID NO: 803420 - DNA, 19 bp, Mus musculus
  siRNA target sequence for 9430016A21Rik (NM_178720.3,599-617).
cctgggcttctttacaaat

SEQ ID NO: 803421 - DNA, 19 bp, Mus musculus
  siRNA target sequence for 9430016A21Rik (NM_178720.3,600-618).
ctgggcttctttacaaatt

SEQ ID NO: 803422 - DNA, 19 bp, Mus musculus
  siRNA target sequence for 9430016A21Rik (NM_178720.3,602-620).
gggcttctttacaaattta

SEQ ID NO: 803423 - DNA, 19 bp, Mus musculus
  siRNA target sequence for 9430016A21Rik (NM_178720.3,604-622).
gcttctttacaaatttagt

SEQ ID NO: 803424 - DNA, 19 bp, Mus musculus
  siRNA target sequence for 9430016A21Rik (NM_178720.3,605-623).
cttctttacaaatttagtt

SEQ ID NO: 803425 - DNA, 19 bp, Mus musculus
  siRNA target sequence for 9430016A21Rik (NM_178720.3,613-631).
caaatttagttgtagttat

SEQ ID NO: 803426 - DNA, 19 bp, Mus musculus
  siRNA target sequence for 9430016A21Rik (NM_178720.3,624-642).
gtagttatccgttggaata

SEQ ID NO: 803427 - DNA, 19 bp, Mus musculus
  siRNA target sequence for 9430016A21Rik (NM_178720.3,627-645).
gttatccgttggaatacct

SEQ ID NO: 803428 - DNA, 19 bp, Mus musculus
  siRNA target sequence for 9430016A21Rik (NM_178720.3,633-651).
cgttggaatacctggttaa

SEQ ID NO: 803429 - DNA, 19 bp, Mus musculus
  siRNA target sequence for 9430016A21Rik (NM_178720.3,634-652).
gttggaatacctggttaat

SEQ ID NO: 803430 - DNA, 19 bp, Mus musculus
  siRNA target sequence for 9430016A21Rik (NM_178720.3,670-688).
gtcctcagctgctatttct

SEQ ID NO: 803431 - DNA, 19 bp, Mus musculus
  siRNA target sequence for 9430016A21Rik (NM_178720.3,672-690).
cctcagctgctatttctgt

SEQ ID NO: 803432 - DNA, 19 bp, Mus musculus
  siRNA target sequence for 9430016A21Rik (NM_178720.3,727-745).
cttgctcctttataacgat

SEQ ID NO: 803433 - DNA, 19 bp, Mus musculus
  siRNA target sequence for 9430016A21Rik (NM_178720.3,731-749).
ctcctttataacgattcaa

SEQ ID NO: 803434 - DNA, 19 bp, Mus musculus
  siRNA target sequence for 9430016A21Rik (NM_178720.3,751-769).
ctacagggagcaattaatt

SEQ ID NO: 803435 - DNA, 19 bp, Mus musculus
  siRNA target sequence for 9430016A21Rik (NM_178720.3,833-851).
gatggcagatggaatgttt

SEQ ID NO: 803436 - DNA, 19 bp, Mus musculus
  siRNA target sequence for 9430016A21Rik (NM_178720.3,881-899).
gggaatccaaatgatgata

SEQ ID NO: 803437 - DNA, 19 bp, Mus musculus
  siRNA target sequence for 9430016A21Rik (NM_178720.3,938-956).
cagaccactgtcatcgaaa

SEQ ID NO: 803438 - DNA, 19 bp, Mus musculus
  siRNA target sequence for 9430016A21Rik (NM_178720.3,940-958).
gaccactgtcatcgaaaat

SEQ ID NO: 803439 - DNA, 19 bp, Mus musculus
  siRNA target sequence for 9430016A21Rik (NM_178720.3,967-985).
ccagcgaggccggttttca

SEQ ID NO: 803440 - DNA, 19 bp, Mus musculus
  siRNA target sequence for 9430016A21Rik (NM_178720.3,968-986).
cagcgaggccggttttcat

SEQ ID NO: 803441 - DNA, 19 bp, Mus musculus
  siRNA target sequence for 9430016A21Rik (NM_178720.3,970-988).
gcgaggccggttttcattt

SEQ ID NO: 803442 - DNA, 19 bp, Mus musculus
  siRNA target sequence for 9430016A21Rik (NM_178720.3,972-990).
gaggccggttttcatttga

SEQ ID NO: 803443 - DNA, 19 bp, Mus musculus
  siRNA target sequence for 9430016A21Rik (NM_178720.3,1079-1097).
cctcttctcatgccaattt

SEQ ID NO: 803444 - DNA, 19 bp, Mus musculus
  siRNA target sequence for 9430016A21Rik (NM_178720.3,1091-1109).
ccaatttgtggcaacagaa

SEQ ID NO: 803445 - DNA, 19 bp, Mus musculus
  siRNA target sequence for 9430016A21Rik (NM_178720.3,1092-1110).
caatttgtggcaacagaaa

SEQ ID NO: 803446 - DNA, 19 bp, Mus musculus
  siRNA target sequence for 9430016A21Rik (NM_178720.3,1207-1225).
gactccaaccaacaattca

SEQ ID NO: 803447 - DNA, 19 bp, Mus musculus
  siRNA target sequence for 9430016A21Rik (NM_178720.3,1209-1227).
ctccaaccaacaattcaca

SEQ ID NO: 803448 - DNA, 19 bp, Mus musculus
  siRNA target sequence for 9430016A21Rik (NM_178720.3,1267-1285).
cgtcaccagctctctgata

SEQ ID NO: 803449 - DNA, 19 bp, Mus musculus
  siRNA target sequence for 9430016A21Rik (NM_178720.3,1268-1286).
gtcaccagctctctgatat

SEQ ID NO: 803450 - DNA, 19 bp, Mus musculus
  siRNA target sequence for 9430016A21Rik (NM_178720.3,1270-1288).
caccagctctctgatatca

SEQ ID NO: 803451 - DNA, 19 bp, Mus musculus
  siRNA target sequence for 9430016A21Rik (NM_178720.3,1359-1377).
gatctaccagcttggtatt

SEQ ID NO: 803452 - DNA, 19 bp, Mus musculus
  siRNA target sequence for 9430016A21Rik (NM_178720.3,1362-1380).
ctaccagcttggtattgaa

SEQ ID NO: 803453 - DNA, 19 bp, Mus musculus
  siRNA target sequence for 9430016A21Rik (NM_178720.3,1372-1390).
ggtattgaatggtgtaaga

SEQ ID NO: 803454 - DNA, 19 bp, Mus musculus
  siRNA target sequence for 9430016A21Rik (NM_178720.3,1373-1391).
gtattgaatggtgtaagaa

SEQ ID NO: 803455 - DNA, 19 bp, Mus musculus
  siRNA target sequence for 9430016A21Rik (NM_178720.3,1378-1396).
gaatggtgtaagaaatcct

SEQ ID NO: 803456 - DNA, 19 bp, Mus musculus
  siRNA target sequence for B830013J05Rik (NM_178722.3,202-220).
gcggaattcttcatcagta

SEQ ID NO: 803457 - DNA, 19 bp, Mus musculus
  siRNA target sequence for B830013J05Rik (NM_178722.3,230-248).
gatcaaggtgaatcaaaca

SEQ ID NO: 803458 - DNA, 19 bp, Mus musculus
  siRNA target sequence for B830013J05Rik (NM_178722.3,247-265).
catccgttctggaacaaca

SEQ ID NO: 803459 - DNA, 19 bp, Mus musculus
  siRNA target sequence for B830013J05Rik (NM_178722.3,303-321).
ggaccattgcaccaaaagt

SEQ ID NO: 803460 - DNA, 19 bp, Mus musculus
  siRNA target sequence for B830013J05Rik (NM_178722.3,306-324).
ccattgcaccaaaagttgt

SEQ ID NO: 803461 - DNA, 19 bp, Mus musculus
  siRNA target sequence for B830013J05Rik (NM_178722.3,312-330).
caccaaaagttgtacctaa

SEQ ID NO: 803462 - DNA, 19 bp, Mus musculus
  siRNA target sequence for B830013J05Rik (NM_178722.3,323-341).
gtacctaaggtcctaacat

SEQ ID NO: 803463 - DNA, 19 bp, Mus musculus
  siRNA target sequence for B830013J05Rik (NM_178722.3,377-395).
caagggagtctgactctaa

SEQ ID NO: 803464 - DNA, 19 bp, Mus musculus
  siRNA target sequence for B830013J05Rik (NM_178722.3,411-429).
gcatgcccacccagaacta

SEQ ID NO: 803465 - DNA, 19 bp, Mus musculus
  siRNA target sequence for B830013J05Rik (NM_178722.3,457-475).
ggggacgttttctcttgtt

SEQ ID NO: 803466 - DNA, 19 bp, Mus musculus
  siRNA target sequence for B830013J05Rik (NM_178722.3,639-657).
gcccatcccagctatgtca

SEQ ID NO: 803467 - DNA, 19 bp, Mus musculus
  siRNA target sequence for B830013J05Rik (NM_178722.3,642-660).
catcccagctatgtcattt

SEQ ID NO: 803468 - DNA, 19 bp, Mus musculus
  siRNA target sequence for B830013J05Rik (NM_178722.3,701-719).
cctagcctgtggaagcaaa

SEQ ID NO: 803469 - DNA, 19 bp, Mus musculus
  siRNA target sequence for B830013J05Rik (NM_178722.3,702-720).
ctagcctgtggaagcaaat

SEQ ID NO: 803470 - DNA, 19 bp, Mus musculus
  siRNA target sequence for B830013J05Rik (NM_178722.3,774-792).
gtgttggccaaggagattt

SEQ ID NO: 803471 - DNA, 19 bp, Mus musculus
  siRNA target sequence for B830013J05Rik (NM_178722.3,836-854).
gccatgccagtgtacacta

SEQ ID NO: 803472 - DNA, 19 bp, Mus musculus
  siRNA target sequence for B830013J05Rik (NM_178722.3,1045-1063).
gcccttaccaagagtgaaa

SEQ ID NO: 803473 - DNA, 19 bp, Mus musculus
  siRNA target sequence for B830013J05Rik (NM_178722.3,1084-1102).
ggaatcagatgctgataat

SEQ ID NO: 803474 - DNA, 19 bp, Mus musculus
  siRNA target sequence for B830013J05Rik (NM_178722.3,1192-1210).
caagatagctgctttgcat

SEQ ID NO: 803475 - DNA, 19 bp, Mus musculus
  siRNA target sequence for B830013J05Rik (NM_178722.3,1245-1263).
gtcctgtcaccaaattgga

SEQ ID NO: 803476 - DNA, 19 bp, Mus musculus
  siRNA target sequence for B830013J05Rik (NM_178722.3,1283-1301).
cccagcagtggaataaaga

SEQ ID NO: 803477 - DNA, 19 bp, Mus musculus
  siRNA target sequence for B830013J05Rik (NM_178722.3,1317-1335).
ggaaagtgccagatgagat

SEQ ID NO: 803478 - DNA, 19 bp, Mus musculus
  siRNA target sequence for B830013J05Rik (NM_178722.3,1441-1459).
ggttgcttcaaggaagtat

SEQ ID NO: 803479 - DNA, 19 bp, Mus musculus
  siRNA target sequence for B830013J05Rik (NM_178722.3,1445-1463).
gcttcaaggaagtatcgta

SEQ ID NO: 803480 - DNA, 19 bp, Mus musculus
  siRNA target sequence for B830013J05Rik (NM_178722.3,1446-1464).
cttcaaggaagtatcgtaa

SEQ ID NO: 803481 - DNA, 19 bp, Mus musculus
  siRNA target sequence for B830013J05Rik (NM_178722.3,1449-1467).
caaggaagtatcgtaacat

SEQ ID NO: 803482 - DNA, 19 bp, Mus musculus
  siRNA target sequence for B830013J05Rik (NM_178722.3,1452-1470).
ggaagtatcgtaacatcat

SEQ ID NO: 803483 - DNA, 19 bp, Mus musculus
  siRNA target sequence for B830013J05Rik (NM_178722.3,1548-1566).
gcctaggtcaagatgttct

SEQ ID NO: 803484 - DNA, 19 bp, Mus musculus
  siRNA target sequence for B830013J05Rik (NM_178722.3,1575-1593).
ccctgccttcaaaatgtct

SEQ ID NO: 803485 - DNA, 19 bp, Mus musculus
  siRNA target sequence for B830013J05Rik (NM_178722.3,1576-1594).
cctgccttcaaaatgtctt

SEQ ID NO: 803486 - DNA, 19 bp, Mus musculus
  siRNA target sequence for B830013J05Rik (NM_178722.3,1635-1653).
ctgtactccgaaatggatt

SEQ ID NO: 803487 - DNA, 19 bp, Mus musculus
  siRNA target sequence for B830013J05Rik (NM_178722.3,1721-1739).
cttctagaccacatgaata

SEQ ID NO: 803488 - DNA, 19 bp, Mus musculus
  siRNA target sequence for B830013J05Rik (NM_178722.3,1804-1822).
cctgagtgcacatatgaaa

SEQ ID NO: 803489 - DNA, 19 bp, Mus musculus
  siRNA target sequence for B830013J05Rik (NM_178722.3,1807-1825).
gagtgcacatatgaaactt

SEQ ID NO: 803490 - DNA, 19 bp, Mus musculus
  siRNA target sequence for B830013J05Rik (NM_178722.3,1809-1827).
gtgcacatatgaaacttca

SEQ ID NO: 803491 - DNA, 19 bp, Mus musculus
  siRNA target sequence for B830013J05Rik (NM_178722.3,1853-1871).
ctagtgtgctgtgaatttt

SEQ ID NO: 803492 - DNA, 19 bp, Mus musculus
  siRNA target sequence for B830013J05Rik (NM_178722.3,1861-1879).
ctgtgaattttgtgcaaaa

SEQ ID NO: 803493 - DNA, 19 bp, Mus musculus
  siRNA target sequence for B830013J05Rik (NM_178722.3,1886-1904).
ggtcatgtccgagtctatt

SEQ ID NO: 803494 - DNA, 19 bp, Mus musculus
  siRNA target sequence for B830013J05Rik (NM_178722.3,1887-1905).
gtcatgtccgagtctattt

SEQ ID NO: 803495 - DNA, 19 bp, Mus musculus
  siRNA target sequence for B830013J05Rik (NM_178722.3,1996-2014).
cagagatcctggtatgcaa

SEQ ID NO: 803496 - DNA, 19 bp, Mus musculus
  siRNA target sequence for B830013J05Rik (NM_178722.3,2090-2108).
gtcaaattgcaaatcagat

SEQ ID NO: 803497 - DNA, 19 bp, Mus musculus
  siRNA target sequence for B830013J05Rik (NM_178722.3,2130-2148).
ctcagtcttttgctgaaat

SEQ ID NO: 803498 - DNA, 19 bp, Mus musculus
  siRNA target sequence for D230010M03Rik (NM_178724.2,510-528).
cggaccttggaccgtttta

SEQ ID NO: 803499 - DNA, 19 bp, Mus musculus
  siRNA target sequence for D230010M03Rik (NM_178724.2,511-529).
ggaccttggaccgttttaa

SEQ ID NO: 803500 - DNA, 19 bp, Mus musculus
  siRNA target sequence for D230010M03Rik (NM_178724.2,514-532).
ccttggaccgttttaagct

SEQ ID NO: 803501 - DNA, 19 bp, Mus musculus
  siRNA target sequence for D230010M03Rik (NM_178724.2,537-555).
gatgtgactgacgaatact

SEQ ID NO: 803502 - DNA, 19 bp, Mus musculus
  siRNA target sequence for D230010M03Rik (NM_178724.2,570-588).
ggattcccccgacaattca

SEQ ID NO: 803503 - DNA, 19 bp, Mus musculus
  siRNA target sequence for D230010M03Rik (NM_178724.2,571-589).
gattcccccgacaattcat

SEQ ID NO: 803504 - DNA, 19 bp, Mus musculus
  siRNA target sequence for D230010M03Rik (NM_178724.2,576-594).
ccccgacaattcatatact

SEQ ID NO: 803505 - DNA, 19 bp, Mus musculus
  siRNA target sequence for D230010M03Rik (NM_178724.2,579-597).
cgacaattcatatacttct

SEQ ID NO: 803506 - DNA, 19 bp, Mus musculus
  siRNA target sequence for D230010M03Rik (NM_178724.2,674-692).
ggcagcattagggttttat

SEQ ID NO: 803507 - DNA, 19 bp, Mus musculus
  siRNA target sequence for D230010M03Rik (NM_178724.2,678-696).
gcattagggttttatacct

SEQ ID NO: 803508 - DNA, 19 bp, Mus musculus
  siRNA target sequence for D230010M03Rik (NM_178724.2,712-730).
ctcggatgggagatgcaat

SEQ ID NO: 803509 - DNA, 19 bp, Mus musculus
  siRNA target sequence for D230010M03Rik (NM_178724.2,752-770).
gagtcgctgcgttgcaaat

SEQ ID NO: 803510 - DNA, 19 bp, Mus musculus
  siRNA target sequence for D230010M03Rik (NM_178724.2,754-772).
gtcgctgcgttgcaaatgt

SEQ ID NO: 803511 - DNA, 19 bp, Mus musculus
  siRNA target sequence for D230010M03Rik (NM_178724.2,756-774).
cgctgcgttgcaaatgtca

SEQ ID NO: 803512 - DNA, 19 bp, Mus musculus
  siRNA target sequence for D230010M03Rik (NM_178724.2,795-813).
gcctcacagtttattcact

SEQ ID NO: 803513 - DNA, 19 bp, Mus musculus
  siRNA target sequence for D230010M03Rik (NM_178724.2,796-814).
cctcacagtttattcactt

SEQ ID NO: 803514 - DNA, 19 bp, Mus musculus
  siRNA target sequence for D230010M03Rik (NM_178724.2,828-846).
gctgccgtacagtctctaa

SEQ ID NO: 803515 - DNA, 19 bp, Mus musculus
  siRNA target sequence for D230010M03Rik (NM_178724.2,832-850).
ccgtacagtctctaaagga

SEQ ID NO: 803516 - DNA, 19 bp, Mus musculus
  siRNA target sequence for D230010M03Rik (NM_178724.2,901-919).
gtatccatgtagcaatcaa

SEQ ID NO: 803517 - DNA, 19 bp, Mus musculus
  siRNA target sequence for D230010M03Rik (NM_178724.2,1056-1074).
gtgctacagcggtcttctt

SEQ ID NO: 803518 - DNA, 19 bp, Mus musculus
  siRNA target sequence for D230010M03Rik (NM_178724.2,1058-1076).
gctacagcggtcttcttta

SEQ ID NO: 803519 - DNA, 19 bp, Mus musculus
  siRNA target sequence for D230010M03Rik (NM_178724.2,1059-1077).
ctacagcggtcttctttaa

SEQ ID NO: 803520 - DNA, 19 bp, Mus musculus
  siRNA target sequence for D230010M03Rik (NM_178724.2,1062-1080).
cagcggtcttctttaacca

SEQ ID NO: 803521 - DNA, 19 bp, Mus musculus
  siRNA target sequence for D230010M03Rik (NM_178724.2,1122-1140).
ggtaagtttgcaagtataa

SEQ ID NO: 803522 - DNA, 19 bp, Mus musculus
  siRNA target sequence for D230010M03Rik (NM_178724.2,1123-1141).
gtaagtttgcaagtataaa

SEQ ID NO: 803523 - DNA, 19 bp, Mus musculus
  siRNA target sequence for D230010M03Rik (NM_178724.2,1146-1164).
cagtttatgtccatagaaa

SEQ ID NO: 803524 - DNA, 19 bp, Mus musculus
  siRNA target sequence for 6430556C10Rik (NM_178725.3,909-927).
gtttaacagggccctattt

SEQ ID NO: 803525 - DNA, 19 bp, Mus musculus
  siRNA target sequence for 6430556C10Rik (NM_178725.3,1050-1068).
gaaaaaccttcgtgaagtt

SEQ ID NO: 803526 - DNA, 19 bp, Mus musculus
  siRNA target sequence for 6430556C10Rik (NM_178725.3,1075-1093).
ggcatctccaccaacacaa

SEQ ID NO: 803527 - DNA, 19 bp, Mus musculus
  siRNA target sequence for 6430556C10Rik (NM_178725.3,1174-1192).
cagttgagcaggaaccata

SEQ ID NO: 803528 - DNA, 19 bp, Mus musculus
  siRNA target sequence for 6430556C10Rik (NM_178725.3,1176-1194).
gttgagcaggaaccatatt

SEQ ID NO: 803529 - DNA, 19 bp, Mus musculus
  siRNA target sequence for 6430556C10Rik (NM_178725.3,1185-1203).
gaaccatattcgaaccatt

SEQ ID NO: 803530 - DNA, 19 bp, Mus musculus
  siRNA target sequence for 6430556C10Rik (NM_178725.3,1188-1206).
ccatattcgaaccattgaa

SEQ ID NO: 803531 - DNA, 19 bp, Mus musculus
  siRNA target sequence for 6430556C10Rik (NM_178725.3,1257-1275).
caatcgtcttactaccata

SEQ ID NO: 803532 - DNA, 19 bp, Mus musculus
  siRNA target sequence for 6430556C10Rik (NM_178725.3,1272-1290).
cataccgaatggagctttt

SEQ ID NO: 803533 - DNA, 19 bp, Mus musculus
  siRNA target sequence for 6430556C10Rik (NM_178725.3,1276-1294).
ccgaatggagcttttgtat

SEQ ID NO: 803534 - DNA, 19 bp, Mus musculus
  siRNA target sequence for 6430556C10Rik (NM_178725.3,1277-1295).
cgaatggagcttttgtata

SEQ ID NO: 803535 - DNA, 19 bp, Mus musculus
  siRNA target sequence for 6430556C10Rik (NM_178725.3,1323-1341).
gaggaacaaccctattgaa

SEQ ID NO: 803536 - DNA, 19 bp, Mus musculus
  siRNA target sequence for 6430556C10Rik (NM_178725.3,1387-1405).
ctggacttaggggaattga

SEQ ID NO: 803537 - DNA, 19 bp, Mus musculus
  siRNA target sequence for 6430556C10Rik (NM_178725.3,1519-1537).
cttgacgagctagatcttt

SEQ ID NO: 803538 - DNA, 19 bp, Mus musculus
  siRNA target sequence for 6430556C10Rik (NM_178725.3,1580-1598).
ggttgatgcaccttcaaaa

SEQ ID NO: 803539 - DNA, 19 bp, Mus musculus
  siRNA target sequence for 6430556C10Rik (NM_178725.3,1581-1599).
gttgatgcaccttcaaaaa

SEQ ID NO: 803540 - DNA, 19 bp, Mus musculus
  siRNA target sequence for 6430556C10Rik (NM_178725.3,1608-1626).
gatacagtctcagattcaa

SEQ ID NO: 803541 - DNA, 19 bp, Mus musculus
  siRNA target sequence for 6430556C10Rik (NM_178725.3,1614-1632).
gtctcagattcaagtgatt

SEQ ID NO: 803542 - DNA, 19 bp, Mus musculus
  siRNA target sequence for 6430556C10Rik (NM_178725.3,1633-1651).
gaacggaatgcctttgata

SEQ ID NO: 803543 - DNA, 19 bp, Mus musculus
  siRNA target sequence for 6430556C10Rik (NM_178725.3,1637-1655).
ggaatgcctttgataacct

SEQ ID NO: 803544 - DNA, 19 bp, Mus musculus
  siRNA target sequence for 6430556C10Rik (NM_178725.3,1638-1656).
gaatgcctttgataacctt

SEQ ID NO: 803545 - DNA, 19 bp, Mus musculus
  siRNA target sequence for 6430556C10Rik (NM_178725.3,1677-1695).
cttggcacacaacaatcta

SEQ ID NO: 803546 - DNA, 19 bp, Mus musculus
  siRNA target sequence for 6430556C10Rik (NM_178725.3,1682-1700).
cacacaacaatctaacatt

SEQ ID NO: 803547 - DNA, 19 bp, Mus musculus
  siRNA target sequence for 6430556C10Rik (NM_178725.3,1684-1702).
cacaacaatctaacattat

SEQ ID NO: 803548 - DNA, 19 bp, Mus musculus
  siRNA target sequence for 6430556C10Rik (NM_178725.3,1721-1739).
cacccttgcatcatctaga

SEQ ID NO: 803549 - DNA, 19 bp, Mus musculus
  siRNA target sequence for 6430556C10Rik (NM_178725.3,1742-1760).
ggatacacctccatcacaa

SEQ ID NO: 803550 - DNA, 19 bp, Mus musculus
  siRNA target sequence for 6430556C10Rik (NM_178725.3,1885-1903).
gagctggaccagaattact

SEQ ID NO: 803551 - DNA, 19 bp, Mus musculus
  siRNA target sequence for 6430556C10Rik (NM_178725.3,1890-1908).
ggaccagaattactttaca

SEQ ID NO: 803552 - DNA, 19 bp, Mus musculus
  siRNA target sequence for 6430556C10Rik (NM_178725.3,1891-1909).
gaccagaattactttacat

SEQ ID NO: 803553 - DNA, 19 bp, Mus musculus
  siRNA target sequence for 6430556C10Rik (NM_178725.3,1896-1914).
gaattactttacatgctat

SEQ ID NO: 803554 - DNA, 19 bp, Mus musculus
  siRNA target sequence for 6430556C10Rik (NM_178725.3,1910-1928).
gctatgctcccgtaattgt

SEQ ID NO: 803555 - DNA, 19 bp, Mus musculus
  siRNA target sequence for 6430556C10Rik (NM_178725.3,2001-2019).
gacttccgtatcttggatt

SEQ ID NO: 803556 - DNA, 19 bp, Mus musculus
  siRNA target sequence for 6430556C10Rik (NM_178725.3,2040-2058).
gacccacggggcatacaaa

SEQ ID NO: 803557 - DNA, 19 bp, Mus musculus
  siRNA target sequence for 6430556C10Rik (NM_178725.3,2073-2091).
gctcagcgacggtacttta

SEQ ID NO: 803558 - DNA, 19 bp, Mus musculus
  siRNA target sequence for 6430556C10Rik (NM_178725.3,2074-2092).
ctcagcgacggtactttaa

SEQ ID NO: 803559 - DNA, 19 bp, Mus musculus
  siRNA target sequence for 6430556C10Rik (NM_178725.3,2078-2096).
gcgacggtactttaaattt

SEQ ID NO: 803560 - DNA, 19 bp, Mus musculus
  siRNA target sequence for 6430556C10Rik (NM_178725.3,2130-2148).
cacatgtatggtgagtaat

SEQ ID NO: 803561 - DNA, 19 bp, Mus musculus
  siRNA target sequence for 6430556C10Rik (NM_178725.3,2135-2153).
gtatggtgagtaattctgt

SEQ ID NO: 803562 - DNA, 19 bp, Mus musculus
  siRNA target sequence for 6430556C10Rik (NM_178725.3,2206-2224).
ccgttctcgtacttttcaa

SEQ ID NO: 803563 - DNA, 19 bp, Mus musculus
  siRNA target sequence for 6430556C10Rik (NM_178725.3,2211-2229).
ctcgtacttttcaactgta

SEQ ID NO: 803564 - DNA, 19 bp, Mus musculus
  siRNA target sequence for 6430556C10Rik (NM_178725.3,2225-2243).
ctgtaacagtagagactat

SEQ ID NO: 803565 - DNA, 19 bp, Mus musculus
  siRNA target sequence for 6430556C10Rik (NM_178725.3,2263-2281).
gcacggaccacagataaca

SEQ ID NO: 803566 - DNA, 19 bp, Mus musculus
  siRNA target sequence for 6430556C10Rik (NM_178725.3,2264-2282).
cacggaccacagataacaa

SEQ ID NO: 803567 - DNA, 19 bp, Mus musculus
  siRNA target sequence for 6430556C10Rik (NM_178725.3,2348-2366).
gcacaaggtcgacagaaaa

SEQ ID NO: 803568 - DNA, 19 bp, Mus musculus
  siRNA target sequence for 6430556C10Rik (NM_178725.3,2349-2367).
cacaaggtcgacagaaaaa

SEQ ID NO: 803569 - DNA, 19 bp, Mus musculus
  siRNA target sequence for 6430556C10Rik (NM_178725.3,2354-2372).
ggtcgacagaaaaaacatt

SEQ ID NO: 803570 - DNA, 19 bp, Mus musculus
  siRNA target sequence for 6430556C10Rik (NM_178725.3,2402-2420).
gaatcccaggaattgatga

SEQ ID NO: 803571 - DNA, 19 bp, Mus musculus
  siRNA target sequence for 6430556C10Rik (NM_178725.3,2419-2437).
gaggtcatgaaaacaacta

SEQ ID NO: 803572 - DNA, 19 bp, Mus musculus
  siRNA target sequence for 6430556C10Rik (NM_178725.3,2421-2439).
ggtcatgaaaacaactaaa

SEQ ID NO: 803573 - DNA, 19 bp, Mus musculus
  siRNA target sequence for 6430556C10Rik (NM_178725.3,2479-2497).
gccgtgatgctggtcattt

SEQ ID NO: 803574 - DNA, 19 bp, Mus musculus
  siRNA target sequence for 6430556C10Rik (NM_178725.3,2480-2498).
ccgtgatgctggtcatttt

SEQ ID NO: 803575 - DNA, 19 bp, Mus musculus
  siRNA target sequence for 6430556C10Rik (NM_178725.3,2635-2653).
gagcacctaaaccactata

SEQ ID NO: 803576 - DNA, 19 bp, Mus musculus
  siRNA target sequence for 6430556C10Rik (NM_178725.3,2638-2656).
cacctaaaccactataact

SEQ ID NO: 803577 - DNA, 19 bp, Mus musculus
  siRNA target sequence for 6430556C10Rik (NM_178725.3,2640-2658).
cctaaaccactataactct

SEQ ID NO: 803578 - DNA, 19 bp, Mus musculus
  siRNA target sequence for 6430556C10Rik (NM_178725.3,2641-2659).
ctaaaccactataactctt

SEQ ID NO: 803579 - DNA, 19 bp, Mus musculus
  siRNA target sequence for 6430556C10Rik (NM_178725.3,2649-2667).
ctataactcttacaaatct

SEQ ID NO: 803580 - DNA, 19 bp, Mus musculus
  siRNA target sequence for 6430556C10Rik (NM_178725.3,2668-2686).
cccttcaaccacacaacaa

SEQ ID NO: 803581 - DNA, 19 bp, Mus musculus
  siRNA target sequence for 6430556C10Rik (NM_178725.3,2719-2737).
gtgcatgaaccgttattga

SEQ ID NO: 803582 - DNA, 19 bp, Mus musculus
  siRNA target sequence for 6430556C10Rik (NM_178725.3,2729-2747).
cgttattgatccgaatgaa

SEQ ID NO: 803583 - DNA, 19 bp, Mus musculus
  siRNA target sequence for 6430556C10Rik (NM_178725.3,2740-2758).
cgaatgaactctaaagaca

SEQ ID NO: 803584 - DNA, 19 bp, Mus musculus
  siRNA target sequence for 6430556C10Rik (NM_178725.3,2761-2779).
gtacaagagactcagatat

SEQ ID NO: 803585 - DNA, 19 bp, Mus musculus
  siRNA target sequence for D630039A03Rik (NM_178727.1,503-521).
cctgctctacccaagttct

SEQ ID NO: 803586 - DNA, 19 bp, Mus musculus
  siRNA target sequence for D630039A03Rik (NM_178727.1,504-522).
ctgctctacccaagttctt

SEQ ID NO: 803587 - DNA, 19 bp, Mus musculus
  siRNA target sequence for D630039A03Rik (NM_178727.1,575-593).
caagggcctcctgtaaaca

SEQ ID NO: 803588 - DNA, 19 bp, Mus musculus
  siRNA target sequence for D630039A03Rik (NM_178727.1,684-702).
ctactccggctgaatcgat

SEQ ID NO: 803589 - DNA, 19 bp, Mus musculus
  siRNA target sequence for D630039A03Rik (NM_178727.1,802-820).
ctgccatcaggcttctgaa

SEQ ID NO: 803590 - DNA, 19 bp, Mus musculus
  siRNA target sequence for D630039A03Rik (NM_178727.1,892-910).
gaaccccaagggatacctt

SEQ ID NO: 803591 - DNA, 19 bp, Mus musculus
  siRNA target sequence for D630039A03Rik (NM_178727.1,944-962).
gacactgatgttttgaaaa

SEQ ID NO: 803592 - DNA, 19 bp, Mus musculus
  siRNA target sequence for D630039A03Rik (NM_178727.1,1050-1068).
gctctagagctcagtatct

SEQ ID NO: 803593 - DNA, 19 bp, Mus musculus
  siRNA target sequence for D630039A03Rik (NM_178727.1,1051-1069).
ctctagagctcagtatctt

SEQ ID NO: 803594 - DNA, 19 bp, Mus musculus
  siRNA target sequence for D630039A03Rik (NM_178727.1,1152-1170).
cccggaacctgggcttata

SEQ ID NO: 803595 - DNA, 19 bp, Mus musculus
  siRNA target sequence for AI448472 (NM_178728.3,181-199).
gtctccagcgccaagctat

SEQ ID NO: 803596 - DNA, 19 bp, Mus musculus
  siRNA target sequence for AI448472 (NM_178728.3,185-203).
ccagcgccaagctatcagt

SEQ ID NO: 803597 - DNA, 19 bp, Mus musculus
  siRNA target sequence for AI448472 (NM_178728.3,186-204).
cagcgccaagctatcagta

SEQ ID NO: 803598 - DNA, 19 bp, Mus musculus
  siRNA target sequence for AI448472 (NM_178728.3,195-213).
gctatcagtatccaaaaga

SEQ ID NO: 803599 - DNA, 19 bp, Mus musculus
  siRNA target sequence for AI448472 (NM_178728.3,230-248).
cagaattcagtgcagaatt

SEQ ID NO: 803600 - DNA, 19 bp, Mus musculus
  siRNA target sequence for AI448472 (NM_178728.3,270-288).
ggttctccaggaaaagctt

SEQ ID NO: 803601 - DNA, 19 bp, Mus musculus
  siRNA target sequence for AI448472 (NM_178728.3,305-323).
ctagaggaggacgtaacta

SEQ ID NO: 803602 - DNA, 19 bp, Mus musculus
  siRNA target sequence for AI448472 (NM_178728.3,308-326).
gaggaggacgtaactaaat

SEQ ID NO: 803603 - DNA, 19 bp, Mus musculus
  siRNA target sequence for AI448472 (NM_178728.3,310-328).
ggaggacgtaactaaatca

SEQ ID NO: 803604 - DNA, 19 bp, Mus musculus
  siRNA target sequence for AI448472 (NM_178728.3,311-329).
gaggacgtaactaaatcaa

SEQ ID NO: 803605 - DNA, 19 bp, Mus musculus
  siRNA target sequence for AI448472 (NM_178728.3,314-332).
gacgtaactaaatcaaaga

SEQ ID NO: 803606 - DNA, 19 bp, Mus musculus
  siRNA target sequence for AI448472 (NM_178728.3,316-334).
cgtaactaaatcaaagaaa

SEQ ID NO: 803607 - DNA, 19 bp, Mus musculus
  siRNA target sequence for AI448472 (NM_178728.3,363-381).
ggccaacatggaaaaacat

SEQ ID NO: 803608 - DNA, 19 bp, Mus musculus
  siRNA target sequence for AI448472 (NM_178728.3,395-413).
gtgctcagatggctgataa

SEQ ID NO: 803609 - DNA, 19 bp, Mus musculus
  siRNA target sequence for AI448472 (NM_178728.3,470-488).
ccggtgcttaagccatatt

SEQ ID NO: 803610 - DNA, 19 bp, Mus musculus
  siRNA target sequence for AI448472 (NM_178728.3,471-489).
cggtgcttaagccatattt

SEQ ID NO: 803611 - DNA, 19 bp, Mus musculus
  siRNA target sequence for AI448472 (NM_178728.3,555-573).
cgacgctgatggtggaaat

SEQ ID NO: 803612 - DNA, 19 bp, Mus musculus
  siRNA target sequence for AI448472 (NM_178728.3,676-694).
cgaactccccacgatagat

SEQ ID NO: 803613 - DNA, 19 bp, Mus musculus
  siRNA target sequence for AI448472 (NM_178728.3,825-843).
gctgcgagaacgtgattga

SEQ ID NO: 803614 - DNA, 19 bp, Mus musculus
  siRNA target sequence for AI448472 (NM_178728.3,978-996).
ggccttggagtcgattctt

SEQ ID NO: 803615 - DNA, 19 bp, Mus musculus
  siRNA target sequence for AI448472 (NM_178728.3,980-998).
ccttggagtcgattcttct

SEQ ID NO: 803616 - DNA, 19 bp, Mus musculus
  siRNA target sequence for AI448472 (NM_178728.3,1091-1109).
gaaccaaggtggtttatga

SEQ ID NO: 803617 - DNA, 19 bp, Mus musculus
  siRNA target sequence for AI448472 (NM_178728.3,1098-1116).
ggtggtttatgaaatacca

SEQ ID NO: 803618 - DNA, 19 bp, Mus musculus
  siRNA target sequence for AI448472 (NM_178728.3,1117-1135).
gcatgcagacccagaagat

SEQ ID NO: 803619 - DNA, 19 bp, Mus musculus
  siRNA target sequence for AI448472 (NM_178728.3,1128-1146).
cagaagatgctgtaaggat

SEQ ID NO: 803620 - DNA, 19 bp, Mus musculus
  siRNA target sequence for AI448472 (NM_178728.3,1137-1155).
ctgtaaggattcacattga

SEQ ID NO: 803621 - DNA, 19 bp, Mus musculus
  siRNA target sequence for AI448472 (NM_178728.3,1154-1172).
gaccttcaaacaaagagat

SEQ ID NO: 803622 - DNA, 19 bp, Mus musculus
  siRNA target sequence for AI448472 (NM_178728.3,1190-1208).
gggacgtttgccttagcta

SEQ ID NO: 803623 - DNA, 19 bp, Mus musculus
  siRNA target sequence for AI448472 (NM_178728.3,1194-1212).
cgtttgccttagctaatga

SEQ ID NO: 803624 - DNA, 19 bp, Mus musculus
  siRNA target sequence for AI448472 (NM_178728.3,1200-1218).
ccttagctaatgagcatta

SEQ ID NO: 803625 - DNA, 19 bp, Mus musculus
  siRNA target sequence for AI448472 (NM_178728.3,1219-1237).
cctagagccgccagtgaaa

SEQ ID NO: 803626 - DNA, 19 bp, Mus musculus
  siRNA target sequence for AI448472 (NM_178728.3,1225-1243).
gccgccagtgaaactgaat

SEQ ID NO: 803627 - DNA, 19 bp, Mus musculus
  siRNA target sequence for AI448472 (NM_178728.3,1228-1246).
gccagtgaaactgaatgaa

SEQ ID NO: 803628 - DNA, 19 bp, Mus musculus
  siRNA target sequence for AI448472 (NM_178728.3,1263-1281).
gactttcttgtgaggattt

SEQ ID NO: 803629 - DNA, 19 bp, Mus musculus
  siRNA target sequence for AI448472 (NM_178728.3,1269-1287).
cttgtgaggatttcttcat

SEQ ID NO: 803630 - DNA, 19 bp, Mus musculus
  siRNA target sequence for AI448472 (NM_178728.3,1272-1290).
gtgaggatttcttcatact

SEQ ID NO: 803631 - DNA, 19 bp, Mus musculus
  siRNA target sequence for AI448472 (NM_178728.3,1274-1292).
gaggatttcttcatactga

SEQ ID NO: 803632 - DNA, 19 bp, Mus musculus
  siRNA target sequence for AI448472 (NM_178728.3,1295-1313).
catggagagtcgagatact

SEQ ID NO: 803633 - DNA, 19 bp, Mus musculus
  siRNA target sequence for AI448472 (NM_178728.3,1298-1316).
ggagagtcgagatacttga

SEQ ID NO: 803634 - DNA, 19 bp, Mus musculus
  siRNA target sequence for AI448472 (NM_178728.3,1299-1317).
gagagtcgagatacttgaa

SEQ ID NO: 803635 - DNA, 19 bp, Mus musculus
  siRNA target sequence for AI448472 (NM_178728.3,1301-1319).
gagtcgagatacttgaata

SEQ ID NO: 803636 - DNA, 19 bp, Mus musculus
  siRNA target sequence for AI448472 (NM_178728.3,1312-1330).
cttgaataccgatgataga

SEQ ID NO: 803637 - DNA, 19 bp, Mus musculus
  siRNA target sequence for AI448472 (NM_178728.3,1320-1338).
ccgatgatagagcttttga

SEQ ID NO: 803638 - DNA, 19 bp, Mus musculus
  siRNA target sequence for AI448472 (NM_178728.3,1321-1339).
cgatgatagagcttttgaa

SEQ ID NO: 803639 - DNA, 19 bp, Mus musculus
  siRNA target sequence for Fbxl5 (NM_178729.2,119-137).
cgctactgcgacaagcttt

SEQ ID NO: 803640 - DNA, 19 bp, Mus musculus
  siRNA target sequence for Fbxl5 (NM_178729.2,124-142).
ctgcgacaagctttctaaa

SEQ ID NO: 803641 - DNA, 19 bp, Mus musculus
  siRNA target sequence for Fbxl5 (NM_178729.2,134-152).
ctttctaaaaccaactttt

SEQ ID NO: 803642 - DNA, 19 bp, Mus musculus
  siRNA target sequence for Fbxl5 (NM_178729.2,145-163).
caacttttccaacaacaat

SEQ ID NO: 803643 - DNA, 19 bp, Mus musculus
  siRNA target sequence for Fbxl5 (NM_178729.2,260-278).
cagcgcagtcagaccatat

SEQ ID NO: 803644 - DNA, 19 bp, Mus musculus
  siRNA target sequence for Fbxl5 (NM_178729.2,262-280).
gcgcagtcagaccatatat

SEQ ID NO: 803645 - DNA, 19 bp, Mus musculus
  siRNA target sequence for Fbxl5 (NM_178729.2,263-281).
cgcagtcagaccatatata

SEQ ID NO: 803646 - DNA, 19 bp, Mus musculus
  siRNA target sequence for Fbxl5 (NM_178729.2,264-282).
gcagtcagaccatatataa

SEQ ID NO: 803647 - DNA, 19 bp, Mus musculus
  siRNA target sequence for Fbxl5 (NM_178729.2,267-285).
gtcagaccatatataatgt

SEQ ID NO: 803648 - DNA, 19 bp, Mus musculus
  siRNA target sequence for Fbxl5 (NM_178729.2,349-367).
gaatgagtacgaacagtta

SEQ ID NO: 803649 - DNA, 19 bp, Mus musculus
  siRNA target sequence for Fbxl5 (NM_178729.2,353-371).
gagtacgaacagttaaatt

SEQ ID NO: 803650 - DNA, 19 bp, Mus musculus
  siRNA target sequence for Fbxl5 (NM_178729.2,355-373).
gtacgaacagttaaattat

SEQ ID NO: 803651 - DNA, 19 bp, Mus musculus
  siRNA target sequence for Fbxl5 (NM_178729.2,358-376).
cgaacagttaaattatgca

SEQ ID NO: 803652 - DNA, 19 bp, Mus musculus
  siRNA target sequence for Fbxl5 (NM_178729.2,359-377).
gaacagttaaattatgcaa

SEQ ID NO: 803653 - DNA, 19 bp, Mus musculus
  siRNA target sequence for Fbxl5 (NM_178729.2,389-407).
gagagattggaggctttta

SEQ ID NO: 803654 - DNA, 19 bp, Mus musculus
  siRNA target sequence for Fbxl5 (NM_178729.2,446-464).
gtttttcagcccatgttaa

SEQ ID NO: 803655 - DNA, 19 bp, Mus musculus
  siRNA target sequence for Fbxl5 (NM_178729.2,477-495).
cctacgaggagcttaaaga

SEQ ID NO: 803656 - DNA, 19 bp, Mus musculus
  siRNA target sequence for Fbxl5 (NM_178729.2,485-503).
gagcttaaagatatcaaaa

SEQ ID NO: 803657 - DNA, 19 bp, Mus musculus
  siRNA target sequence for Fbxl5 (NM_178729.2,590-608).
cagaaagttctcaagtact

SEQ ID NO: 803658 - DNA, 19 bp, Mus musculus
  siRNA target sequence for Fbxl5 (NM_178729.2,683-701).
gtaatgctgtccattttca

SEQ ID NO: 803659 - DNA, 19 bp, Mus musculus
  siRNA target sequence for Fbxl5 (NM_178729.2,732-750).
gtagtcaagtcagtactaa

SEQ ID NO: 803660 - DNA, 19 bp, Mus musculus
  siRNA target sequence for Fbxl5 (NM_178729.2,809-827).
gcaagaggtgactggtata

SEQ ID NO: 803661 - DNA, 19 bp, Mus musculus
  siRNA target sequence for Fbxl5 (NM_178729.2,833-851).
cctgccactgaacttgata

SEQ ID NO: 803662 - DNA, 19 bp, Mus musculus
  siRNA target sequence for Fbxl5 (NM_178729.2,924-942).
ccgatatagatgaatctga

SEQ ID NO: 803663 - DNA, 19 bp, Mus musculus
  siRNA target sequence for Fbxl5 (NM_178729.2,951-969).
cagaggaatcggttgctat

SEQ ID NO: 803664 - DNA, 19 bp, Mus musculus
  siRNA target sequence for Fbxl5 (NM_178729.2,993-1011).
gtgtactccatggcttaat

SEQ ID NO: 803665 - DNA, 19 bp, Mus musculus
  siRNA target sequence for Fbxl5 (NM_178729.2,998-1016).
ctccatggcttaattcata

SEQ ID NO: 803666 - DNA, 19 bp, Mus musculus
  siRNA target sequence for Fbxl5 (NM_178729.2,1000-1018).
ccatggcttaattcataat

SEQ ID NO: 803667 - DNA, 19 bp, Mus musculus
  siRNA target sequence for Fbxl5 (NM_178729.2,1041-1059).
ctgtaaaaactttagtgtt

SEQ ID NO: 803668 - DNA, 19 bp, Mus musculus
  siRNA target sequence for Fbxl5 (NM_178729.2,1076-1094).
gtctccagcaaaatggtta

SEQ ID NO: 803669 - DNA, 19 bp, Mus musculus
  siRNA target sequence for Fbxl5 (NM_178729.2,1136-1154).
cttacccagaccgacattt

SEQ ID NO: 803670 - DNA, 19 bp, Mus musculus
  siRNA target sequence for Fbxl5 (NM_178729.2,1140-1158).
cccagaccgacatttctga

SEQ ID NO: 803671 - DNA, 19 bp, Mus musculus
  siRNA target sequence for Fbxl5 (NM_178729.2,1141-1159).
ccagaccgacatttctgat

SEQ ID NO: 803672 - DNA, 19 bp, Mus musculus
  siRNA target sequence for Fbxl5 (NM_178729.2,1142-1160).
cagaccgacatttctgatt

SEQ ID NO: 803673 - DNA, 19 bp, Mus musculus
  siRNA target sequence for Fbxl5 (NM_178729.2,1198-1216).
gagtcttcggcatcttgat

SEQ ID NO: 803674 - DNA, 19 bp, Mus musculus
  siRNA target sequence for Fbxl5 (NM_178729.2,1217-1235).
ctgtctggatgtgaaaaaa

SEQ ID NO: 803675 - DNA, 19 bp, Mus musculus
  siRNA target sequence for Fbxl5 (NM_178729.2,1246-1264).
ggctctagagaagatttct

SEQ ID NO: 803676 - DNA, 19 bp, Mus musculus
  siRNA target sequence for Fbxl5 (NM_178729.2,1247-1265).
gctctagagaagatttcta

SEQ ID NO: 803677 - DNA, 19 bp, Mus musculus
  siRNA target sequence for Fbxl5 (NM_178729.2,1387-1405).
gcacaatttaactgacaaa

SEQ ID NO: 803678 - DNA, 19 bp, Mus musculus
  siRNA target sequence for Fbxl5 (NM_178729.2,1453-1471).
gtcttctgaaagtttgact

SEQ ID NO: 803679 - DNA, 19 bp, Mus musculus
  siRNA target sequence for Fbxl5 (NM_178729.2,1464-1482).
gtttgacttctccttatgt

SEQ ID NO: 803680 - DNA, 19 bp, Mus musculus
  siRNA target sequence for Fbxl5 (NM_178729.2,1590-1608).
gttcctcatctggttgtta

SEQ ID NO: 803681 - DNA, 19 bp, Mus musculus
  siRNA target sequence for Fbxl5 (NM_178729.2,1677-1695).
catattgtggtcattcatt

SEQ ID NO: 803682 - DNA, 19 bp, Mus musculus
  siRNA target sequence for Fbxl5 (NM_178729.2,1706-1724).
gggacagctttaagaacta

SEQ ID NO: 803683 - DNA, 19 bp, Mus musculus
  siRNA target sequence for Fbxl5 (NM_178729.2,1739-1757).
gcgacttctgcaatgtgta

SEQ ID NO: 803684 - DNA, 19 bp, Mus musculus
  siRNA target sequence for Fbxl5 (NM_178729.2,1781-1799).
cccagggggaaagacttaa

SEQ ID NO: 803685 - DNA, 19 bp, Mus musculus
  siRNA target sequence for Fbxl5 (NM_178729.2,1829-1847).
gagactggacgagtacttt

SEQ ID NO: 803686 - DNA, 19 bp, Mus musculus
  siRNA target sequence for Fbxl5 (NM_178729.2,1833-1851).
ctggacgagtacttttgtt

SEQ ID NO: 803687 - DNA, 19 bp, Mus musculus
  siRNA target sequence for Fbxl5 (NM_178729.2,1900-1918).
ggtgatcagccctagttgt

SEQ ID NO: 803688 - DNA, 19 bp, Mus musculus
  siRNA target sequence for A730069N07Rik (NM_178735.2,491-509).
cagaccgaacagcctttta

SEQ ID NO: 803689 - DNA, 19 bp, Mus musculus
  siRNA target sequence for A730069N07Rik (NM_178735.2,496-514).
cgaacagccttttatttct

SEQ ID NO: 803690 - DNA, 19 bp, Mus musculus
  siRNA target sequence for A730069N07Rik (NM_178735.2,589-607).
cttaaatgtggaccataaa

SEQ ID NO: 803691 - DNA, 19 bp, Mus musculus
  siRNA target sequence for A730069N07Rik (NM_178735.2,643-661).
gtcagagacaagagacttt

SEQ ID NO: 803692 - DNA, 19 bp, Mus musculus
  siRNA target sequence for A730069N07Rik (NM_178735.2,719-737).
ggggaagagcggtttctat

SEQ ID NO: 803693 - DNA, 19 bp, Mus musculus
  siRNA target sequence for A730069N07Rik (NM_178735.2,740-758).
ctcgaggccagcacagaaa

SEQ ID NO: 803694 - DNA, 19 bp, Mus musculus
  siRNA target sequence for A730069N07Rik (NM_178735.2,755-773).
gaaacactagtgcacattt

SEQ ID NO: 803695 - DNA, 19 bp, Mus musculus
  siRNA target sequence for A730069N07Rik (NM_178735.2,781-799).
ggatactgattctgatcta

SEQ ID NO: 803696 - DNA, 19 bp, Mus musculus
  siRNA target sequence for A730069N07Rik (NM_178735.2,792-810).
ctgatctaaaccttatcaa

SEQ ID NO: 803697 - DNA, 19 bp, Mus musculus
  siRNA target sequence for A730069N07Rik (NM_178735.2,797-815).
ctaaaccttatcaatgact

SEQ ID NO: 803698 - DNA, 19 bp, Mus musculus
  siRNA target sequence for A730069N07Rik (NM_178735.2,846-864).
gagacagccaagatagtgt

SEQ ID NO: 803699 - DNA, 19 bp, Mus musculus
  siRNA target sequence for A730069N07Rik (NM_178735.2,850-868).
cagccaagatagtgtcaaa

SEQ ID NO: 803700 - DNA, 19 bp, Mus musculus
  siRNA target sequence for A730069N07Rik (NM_178735.2,869-887).
ggagcaggctccttcatga

SEQ ID NO: 803701 - DNA, 19 bp, Mus musculus
  siRNA target sequence for A730069N07Rik (NM_178735.2,872-890).
gcaggctccttcatgaaga

SEQ ID NO: 803702 - DNA, 19 bp, Mus musculus
  siRNA target sequence for A730069N07Rik (NM_178735.2,909-927).
gtagccaagattctcataa

SEQ ID NO: 803703 - DNA, 19 bp, Mus musculus
  siRNA target sequence for A730069N07Rik (NM_178735.2,989-1007).
gatgttgaggctataaata

SEQ ID NO: 803704 - DNA, 19 bp, Mus musculus
  siRNA target sequence for A730069N07Rik (NM_178735.2,1016-1034).
gggctttgtaagaatacga

SEQ ID NO: 803705 - DNA, 19 bp, Mus musculus
  siRNA target sequence for A730069N07Rik (NM_178735.2,1102-1120).
cactcctaagacactacta

SEQ ID NO: 803706 - DNA, 19 bp, Mus musculus
  siRNA target sequence for A730069N07Rik (NM_178735.2,1107-1125).
ctaagacactactacttga

SEQ ID NO: 803707 - DNA, 19 bp, Mus musculus
  siRNA target sequence for A730069N07Rik (NM_178735.2,1128-1146).
cttcggtactcatagaaga

SEQ ID NO: 803708 - DNA, 19 bp, Mus musculus
  siRNA target sequence for A730069N07Rik (NM_178735.2,1131-1149).
cggtactcatagaagatgt

SEQ ID NO: 803709 - DNA, 19 bp, Mus musculus
  siRNA target sequence for A730069N07Rik (NM_178735.2,1178-1196).
gcagtcatcactcaacaat

SEQ ID NO: 803710 - DNA, 19 bp, Mus musculus
  siRNA target sequence for A730069N07Rik (NM_178735.2,1496-1514).
gtcagactgcgcaagagaa

SEQ ID NO: 803711 - DNA, 19 bp, Mus musculus
  siRNA target sequence for 9830169G11Rik (NM_178736.3,104-122).
gtttttctatggacacttt

SEQ ID NO: 803712 - DNA, 19 bp, Mus musculus
  siRNA target sequence for 9830169G11Rik (NM_178736.3,152-170).
gcagatgactgggaaatgt

SEQ ID NO: 803713 - DNA, 19 bp, Mus musculus
  siRNA target sequence for 9830169G11Rik (NM_178736.3,155-173).
gatgactgggaaatgtgaa

SEQ ID NO: 803714 - DNA, 19 bp, Mus musculus
  siRNA target sequence for 9830169G11Rik (NM_178736.3,169-187).
gtgaattgcagcgaatttt

SEQ ID NO: 803715 - DNA, 19 bp, Mus musculus
  siRNA target sequence for 9830169G11Rik (NM_178736.3,209-227).
gaggacctacagaatagaa

SEQ ID NO: 803716 - DNA, 19 bp, Mus musculus
  siRNA target sequence for 9830169G11Rik (NM_178736.3,211-229).
ggacctacagaatagaaaa

SEQ ID NO: 803717 - DNA, 19 bp, Mus musculus
  siRNA target sequence for 9830169G11Rik (NM_178736.3,238-256).
catattccaagaataaggt

SEQ ID NO: 803718 - DNA, 19 bp, Mus musculus
  siRNA target sequence for 9830169G11Rik (NM_178736.3,301-319).
gtatagcgaacatcatgaa

SEQ ID NO: 803719 - DNA, 19 bp, Mus musculus
  siRNA target sequence for 9830169G11Rik (NM_178736.3,374-392).
gtgcttactgcagataact

SEQ ID NO: 803720 - DNA, 19 bp, Mus musculus
  siRNA target sequence for 9830169G11Rik (NM_178736.3,404-422).
gctctaccacgatgtagaa

SEQ ID NO: 803721 - DNA, 19 bp, Mus musculus
  siRNA target sequence for 9830169G11Rik (NM_178736.3,411-429).
cacgatgtagaaaatgtga

SEQ ID NO: 803722 - DNA, 19 bp, Mus musculus
  siRNA target sequence for 9830169G11Rik (NM_178736.3,559-577).
gtgacgatcccaaaacaga

SEQ ID NO: 803723 - DNA, 19 bp, Mus musculus
  siRNA target sequence for 9830169G11Rik (NM_178736.3,592-610).
gcatactcggactgatcaa

SEQ ID NO: 803724 - DNA, 19 bp, Mus musculus
  siRNA target sequence for 9830169G11Rik (NM_178736.3,593-611).
catactcggactgatcaat

SEQ ID NO: 803725 - DNA, 19 bp, Mus musculus
  siRNA target sequence for 9830169G11Rik (NM_178736.3,603-621).
ctgatcaatctcgtgtatt

SEQ ID NO: 803726 - DNA, 19 bp, Mus musculus
  siRNA target sequence for 9830169G11Rik (NM_178736.3,608-626).
caatctcgtgtatttcagt

SEQ ID NO: 803727 - DNA, 19 bp, Mus musculus
  siRNA target sequence for 9830169G11Rik (NM_178736.3,638-656).
cagcgaagcgcatcagatt

SEQ ID NO: 803728 - DNA, 19 bp, Mus musculus
  siRNA target sequence for 9830169G11Rik (NM_178736.3,640-658).
gcgaagcgcatcagattct

SEQ ID NO: 803729 - DNA, 19 bp, Mus musculus
  siRNA target sequence for 9830169G11Rik (NM_178736.3,674-692).
ccccaaattagggtattct

SEQ ID NO: 803730 - DNA, 19 bp, Mus musculus
  siRNA target sequence for 9830169G11Rik (NM_178736.3,675-693).
cccaaattagggtattctt

SEQ ID NO: 803731 - DNA, 19 bp, Mus musculus
  siRNA target sequence for 9830169G11Rik (NM_178736.3,676-694).
ccaaattagggtattctta

SEQ ID NO: 803732 - DNA, 19 bp, Mus musculus
  siRNA target sequence for 9830169G11Rik (NM_178736.3,685-703).
ggtattcttatgcaatagt

SEQ ID NO: 803733 - DNA, 19 bp, Mus musculus
  siRNA target sequence for 9830169G11Rik (NM_178736.3,686-704).
gtattcttatgcaatagtt

SEQ ID NO: 803734 - DNA, 19 bp, Mus musculus
  siRNA target sequence for 9830169G11Rik (NM_178736.3,691-709).
cttatgcaatagttggaat

SEQ ID NO: 803735 - DNA, 19 bp, Mus musculus
  siRNA target sequence for 9830169G11Rik (NM_178736.3,718-736).
cagagatggcttatagctt

SEQ ID NO: 803736 - DNA, 19 bp, Mus musculus
  siRNA target sequence for 9830169G11Rik (NM_178736.3,798-816).
gagcacttccaccagtttt

SEQ ID NO: 803737 - DNA, 19 bp, Mus musculus
  siRNA target sequence for 9830169G11Rik (NM_178736.3,820-838).
gttaccttgtctatgaatt

SEQ ID NO: 803738 - DNA, 19 bp, Mus musculus
  siRNA target sequence for 9830169G11Rik (NM_178736.3,861-879).
gagccagaaagcattatgt

SEQ ID NO: 803739 - DNA, 19 bp, Mus musculus
  siRNA target sequence for 9830169G11Rik (NM_178736.3,902-920).
gtttcacgagcggatcaaa

SEQ ID NO: 803740 - DNA, 19 bp, Mus musculus
  siRNA target sequence for 9830169G11Rik (NM_178736.3,922-940).
gactcttgatggattgcaa

SEQ ID NO: 803741 - DNA, 19 bp, Mus musculus
  siRNA target sequence for 9830169G11Rik (NM_178736.3,937-955).
gcaatgctgtgctcacttt

SEQ ID NO: 803742 - DNA, 19 bp, Mus musculus
  siRNA target sequence for AW551984 (NM_178737.3,236-254).
cgttctggcggcttactca

SEQ ID NO: 803743 - DNA, 19 bp, Mus musculus
  siRNA target sequence for AW551984 (NM_178737.3,245-263).
ggcttactcactagcataa

SEQ ID NO: 803744 - DNA, 19 bp, Mus musculus
  siRNA target sequence for AW551984 (NM_178737.3,326-344).
gtgtctgcaaccctaaact

SEQ ID NO: 803745 - DNA, 19 bp, Mus musculus
  siRNA target sequence for AW551984 (NM_178737.3,328-346).
gtctgcaaccctaaactat

SEQ ID NO: 803746 - DNA, 19 bp, Mus musculus
  siRNA target sequence for AW551984 (NM_178737.3,330-348).
ctgcaaccctaaactatga

SEQ ID NO: 803747 - DNA, 19 bp, Mus musculus
  siRNA target sequence for AW551984 (NM_178737.3,332-350).
gcaaccctaaactatgaga

SEQ ID NO: 803748 - DNA, 19 bp, Mus musculus
  siRNA target sequence for AW551984 (NM_178737.3,333-351).
caaccctaaactatgagaa

SEQ ID NO: 803749 - DNA, 19 bp, Mus musculus
  siRNA target sequence for AW551984 (NM_178737.3,336-354).
ccctaaactatgagaatga

SEQ ID NO: 803750 - DNA, 19 bp, Mus musculus
  siRNA target sequence for AW551984 (NM_178737.3,388-406).
ccccatggatgaagattct

SEQ ID NO: 803751 - DNA, 19 bp, Mus musculus
  siRNA target sequence for AW551984 (NM_178737.3,509-527).
ggatatcaggcctacttat

SEQ ID NO: 803752 - DNA, 19 bp, Mus musculus
  siRNA target sequence for AW551984 (NM_178737.3,510-528).
gatatcaggcctacttatt

SEQ ID NO: 803753 - DNA, 19 bp, Mus musculus
  siRNA target sequence for AW551984 (NM_178737.3,550-568).
ggatgtcttctgttgcaat

SEQ ID NO: 803754 - DNA, 19 bp, Mus musculus
  siRNA target sequence for AW551984 (NM_178737.3,577-595).
cctgcaaccagggtcaaaa

SEQ ID NO: 803755 - DNA, 19 bp, Mus musculus
  siRNA target sequence for AW551984 (NM_178737.3,581-599).
caaccagggtcaaaagtgt

SEQ ID NO: 803756 - DNA, 19 bp, Mus musculus
  siRNA target sequence for AW551984 (NM_178737.3,665-683).
ccagccatcctgaatccta

SEQ ID NO: 803757 - DNA, 19 bp, Mus musculus
  siRNA target sequence for AW551984 (NM_178737.3,702-720).
gacgtgaggacagtaatct

SEQ ID NO: 803758 - DNA, 19 bp, Mus musculus
  siRNA target sequence for AW551984 (NM_178737.3,790-808).
ctcccagcttggtatcagt

SEQ ID NO: 803759 - DNA, 19 bp, Mus musculus
  siRNA target sequence for AW551984 (NM_178737.3,794-812).
cagcttggtatcagtacaa

SEQ ID NO: 803760 - DNA, 19 bp, Mus musculus
  siRNA target sequence for AW551984 (NM_178737.3,828-846).
ccttgaatcccattgagta

SEQ ID NO: 803761 - DNA, 19 bp, Mus musculus
  siRNA target sequence for AW551984 (NM_178737.3,842-860).
gagtacactggagataaca

SEQ ID NO: 803762 - DNA, 19 bp, Mus musculus
  siRNA target sequence for AW551984 (NM_178737.3,981-999).
ggccatcagatagtttaat

SEQ ID NO: 803763 - DNA, 19 bp, Mus musculus
  siRNA target sequence for AW551984 (NM_178737.3,1046-1064).
gtggagaccacaacaaaat

SEQ ID NO: 803764 - DNA, 19 bp, Mus musculus
  siRNA target sequence for AW551984 (NM_178737.3,1048-1066).
ggagaccacaacaaaatgt

SEQ ID NO: 803765 - DNA, 19 bp, Mus musculus
  siRNA target sequence for AW551984 (NM_178737.3,1081-1099).
ccttatggaccgttcaaga

SEQ ID NO: 803766 - DNA, 19 bp, Mus musculus
  siRNA target sequence for AW551984 (NM_178737.3,1090-1108).
ccgttcaagaagcatgaat

SEQ ID NO: 803767 - DNA, 19 bp, Mus musculus
  siRNA target sequence for AW551984 (NM_178737.3,1091-1109).
cgttcaagaagcatgaata

SEQ ID NO: 803768 - DNA, 19 bp, Mus musculus
  siRNA target sequence for AW551984 (NM_178737.3,1132-1150).
gtctcagctgagaatagat

SEQ ID NO: 803769 - DNA, 19 bp, Mus musculus
  siRNA target sequence for AW551984 (NM_178737.3,1164-1182).
cactgattctgctattgaa

SEQ ID NO: 803770 - DNA, 19 bp, Mus musculus
  siRNA target sequence for AW551984 (NM_178737.3,1191-1209).
caatgggctgctatttcaa

SEQ ID NO: 803771 - DNA, 19 bp, Mus musculus
  siRNA target sequence for AW551984 (NM_178737.3,1322-1340).
ggagggactgaacttttaa

SEQ ID NO: 803772 - DNA, 19 bp, Mus musculus
  siRNA target sequence for AW551984 (NM_178737.3,1341-1359).
caccactacggaaaatttt

SEQ ID NO: 803773 - DNA, 19 bp, Mus musculus
  siRNA target sequence for AW551984 (NM_178737.3,1343-1361).
ccactacggaaaattttta

SEQ ID NO: 803774 - DNA, 19 bp, Mus musculus
  siRNA target sequence for AW551984 (NM_178737.3,1346-1364).
ctacggaaaatttttagga

SEQ ID NO: 803775 - DNA, 19 bp, Mus musculus
  siRNA target sequence for AW551984 (NM_178737.3,1434-1452).
gtgtaatcagagaagttat

SEQ ID NO: 803776 - DNA, 19 bp, Mus musculus
  siRNA target sequence for AW551984 (NM_178737.3,1500-1518).
gggcctccactagcttaat

SEQ ID NO: 803777 - DNA, 19 bp, Mus musculus
  siRNA target sequence for AW551984 (NM_178737.3,1502-1520).
gcctccactagcttaatca

SEQ ID NO: 803778 - DNA, 19 bp, Mus musculus
  siRNA target sequence for AW551984 (NM_178737.3,1503-1521).
cctccactagcttaatcaa

SEQ ID NO: 803779 - DNA, 19 bp, Mus musculus
  siRNA target sequence for AW551984 (NM_178737.3,1506-1524).
ccactagcttaatcaagaa

SEQ ID NO: 803780 - DNA, 19 bp, Mus musculus
  siRNA target sequence for AW551984 (NM_178737.3,1596-1614).
gatctctgaggcgttcttt

SEQ ID NO: 803781 - DNA, 19 bp, Mus musculus
  siRNA target sequence for AW551984 (NM_178737.3,1601-1619).
ctgaggcgttctttacagt

SEQ ID NO: 803782 - DNA, 19 bp, Mus musculus
  siRNA target sequence for AW551984 (NM_178737.3,1686-1704).
cagaacaaacttctatctt

SEQ ID NO: 803783 - DNA, 19 bp, Mus musculus
  siRNA target sequence for AW551984 (NM_178737.3,1712-1730).
caaaggctaatcatctaca

SEQ ID NO: 803784 - DNA, 19 bp, Mus musculus
  siRNA target sequence for AW551984 (NM_178737.3,1736-1754).
ctgattggaaaaataccaa

SEQ ID NO: 803785 - DNA, 19 bp, Mus musculus
  siRNA target sequence for AW551984 (NM_178737.3,1785-1803).
catataagcttcatggtaa

SEQ ID NO: 803786 - DNA, 19 bp, Mus musculus
  siRNA target sequence for AW551984 (NM_178737.3,1888-1906).
gatccagtccaaagacttt

SEQ ID NO: 803787 - DNA, 19 bp, Mus musculus
  siRNA target sequence for AW551984 (NM_178737.3,1915-1933).
ggagacgtcactaatgtat

SEQ ID NO: 803788 - DNA, 19 bp, Mus musculus
  siRNA target sequence for AW551984 (NM_178737.3,1916-1934).
gagacgtcactaatgtata

SEQ ID NO: 803789 - DNA, 19 bp, Mus musculus
  siRNA target sequence for AW551984 (NM_178737.3,2099-2117).
ggtggttatcccaaaactt

SEQ ID NO: 803790 - DNA, 19 bp, Mus musculus
  siRNA target sequence for AW551984 (NM_178737.3,2169-2187).
gaaaatgtgttgctacaat

SEQ ID NO: 803791 - DNA, 19 bp, Mus musculus
  siRNA target sequence for AW551984 (NM_178737.3,2175-2193).
gtgttgctacaatactcat

SEQ ID NO: 803792 - DNA, 19 bp, Mus musculus
  siRNA target sequence for AW551984 (NM_178737.3,2272-2290).
gccccacctggctaaatat

SEQ ID NO: 803793 - DNA, 19 bp, Mus musculus
  siRNA target sequence for AW551984 (NM_178737.3,2274-2292).
cccacctggctaaatatga

SEQ ID NO: 803794 - DNA, 19 bp, Mus musculus
  siRNA target sequence for AW551984 (NM_178737.3,2306-2324).
gggagtaaggagcatagta

SEQ ID NO: 803795 - DNA, 19 bp, Mus musculus
  siRNA target sequence for AW551984 (NM_178737.3,2307-2325).
ggagtaaggagcatagtat

SEQ ID NO: 803796 - DNA, 19 bp, Mus musculus
  siRNA target sequence for AW551984 (NM_178737.3,2365-2383).
ggatatgaatgaggattta

SEQ ID NO: 803797 - DNA, 19 bp, Mus musculus
  siRNA target sequence for AW551984 (NM_178737.3,2377-2395).
ggatttagctaagattcta

SEQ ID NO: 803798 - DNA, 19 bp, Mus musculus
  siRNA target sequence for AW551984 (NM_178737.3,2384-2402).
gctaagattctaagtacta

SEQ ID NO: 803799 - DNA, 19 bp, Mus musculus
  siRNA target sequence for AW551984 (NM_178737.3,2397-2415).
gtactagtttggaagacat

SEQ ID NO: 803800 - DNA, 19 bp, Mus musculus
  siRNA target sequence for AW551984 (NM_178737.3,2427-2445).
gccctactgaggtgttaga

SEQ ID NO: 803801 - DNA, 19 bp, Mus musculus
  siRNA target sequence for AW551984 (NM_178737.3,2486-2504).
catgccaatggcaaggaat

SEQ ID NO: 803802 - DNA, 19 bp, Mus musculus
  siRNA target sequence for AW551984 (NM_178737.3,2540-2558).
gtggtttggcttcacaata

SEQ ID NO: 803803 - DNA, 19 bp, Mus musculus
  siRNA target sequence for AW551984 (NM_178737.3,2542-2560).
ggtttggcttcacaataat

SEQ ID NO: 803804 - DNA, 19 bp, Mus musculus
  siRNA target sequence for AW551984 (NM_178737.3,2543-2561).
gtttggcttcacaataatt

SEQ ID NO: 803805 - DNA, 19 bp, Mus musculus
  siRNA target sequence for AW551984 (NM_178737.3,2562-2580).
cagtccgtggtttcaacaa

SEQ ID NO: 803806 - DNA, 19 bp, Mus musculus
  siRNA target sequence for AW551984 (NM_178737.3,2567-2585).
cgtggtttcaacaagctta

SEQ ID NO: 803807 - DNA, 19 bp, Mus musculus
  siRNA target sequence for AW551984 (NM_178737.3,2568-2586).
gtggtttcaacaagcttat

SEQ ID NO: 803808 - DNA, 19 bp, Mus musculus
  siRNA target sequence for A230038L21Rik (NM_178739.3,1106-1124).
ccccaaagccactaccaat

SEQ ID NO: 803809 - DNA, 19 bp, Mus musculus
  siRNA target sequence for A230038L21Rik (NM_178739.3,1153-1171).
ccttcagcaacaaaaacca

SEQ ID NO: 803810 - DNA, 19 bp, Mus musculus
  siRNA target sequence for A230038L21Rik (NM_178739.3,1415-1433).
gagtgtccaccagcatatt

SEQ ID NO: 803811 - DNA, 19 bp, Mus musculus
  siRNA target sequence for A230038L21Rik (NM_178739.3,1417-1435).
gtgtccaccagcatattgt

SEQ ID NO: 803812 - DNA, 19 bp, Mus musculus
  siRNA target sequence for Slitrk4 (NM_178740.3,345-363).
gtgtcagccctgatttctt

SEQ ID NO: 803813 - DNA, 19 bp, Mus musculus
  siRNA target sequence for Slitrk4 (NM_178740.3,351-369).
gccctgatttcttctacaa

SEQ ID NO: 803814 - DNA, 19 bp, Mus musculus
  siRNA target sequence for Slitrk4 (NM_178740.3,379-397).
ctgacatatcagtggaaat

SEQ ID NO: 803815 - DNA, 19 bp, Mus musculus
  siRNA target sequence for Slitrk4 (NM_178740.3,381-399).
gacatatcagtggaaattt

SEQ ID NO: 803816 - DNA, 19 bp, Mus musculus
  siRNA target sequence for Slitrk4 (NM_178740.3,413-431).
ctgcgtgtcagtagagaat

SEQ ID NO: 803817 - DNA, 19 bp, Mus musculus
  siRNA target sequence for Slitrk4 (NM_178740.3,426-444).
gagaatgtgctctatgtca

SEQ ID NO: 803818 - DNA, 19 bp, Mus musculus
  siRNA target sequence for Slitrk4 (NM_178740.3,482-500).
gaaaccaccttggtctaat

SEQ ID NO: 803819 - DNA, 19 bp, Mus musculus
  siRNA target sequence for Slitrk4 (NM_178740.3,486-504).
ccaccttggtctaatttct

SEQ ID NO: 803820 - DNA, 19 bp, Mus musculus
  siRNA target sequence for Slitrk4 (NM_178740.3,490-508).
cttggtctaatttctatca

SEQ ID NO: 803821 - DNA, 19 bp, Mus musculus
  siRNA target sequence for Slitrk4 (NM_178740.3,503-521).
ctatcatctcaatttccaa

SEQ ID NO: 803822 - DNA, 19 bp, Mus musculus
  siRNA target sequence for Slitrk4 (NM_178740.3,546-564).
ccaaatacattcgtgaatt

SEQ ID NO: 803823 - DNA, 19 bp, Mus musculus
  siRNA target sequence for Slitrk4 (NM_178740.3,553-571).
cattcgtgaatttttctca

SEQ ID NO: 803824 - DNA, 19 bp, Mus musculus
  siRNA target sequence for Slitrk4 (NM_178740.3,630-648).
ctcgggctcagtgcattaa

SEQ ID NO: 803825 - DNA, 19 bp, Mus musculus
  siRNA target sequence for Slitrk4 (NM_178740.3,651-669).
cagttgcacttgaacaaca

SEQ ID NO: 803826 - DNA, 19 bp, Mus musculus
  siRNA target sequence for Slitrk4 (NM_178740.3,653-671).
gttgcacttgaacaacaat

SEQ ID NO: 803827 - DNA, 19 bp, Mus musculus
  siRNA target sequence for Slitrk4 (NM_178740.3,686-704).
ccgagctgacactttcctt

SEQ ID NO: 803828 - DNA, 19 bp, Mus musculus
  siRNA target sequence for Slitrk4 (NM_178740.3,728-746).
ccaggctgactacaattta

SEQ ID NO: 803829 - DNA, 19 bp, Mus musculus
  siRNA target sequence for Slitrk4 (NM_178740.3,759-777).
gaacgaggagccttcaata

SEQ ID NO: 803830 - DNA, 19 bp, Mus musculus
  siRNA target sequence for Slitrk4 (NM_178740.3,769-787).
ccttcaataagctccataa

SEQ ID NO: 803831 - DNA, 19 bp, Mus musculus
  siRNA target sequence for Slitrk4 (NM_178740.3,823-841).
cattccttcctgataatat

SEQ ID NO: 803832 - DNA, 19 bp, Mus musculus
  siRNA target sequence for Slitrk4 (NM_178740.3,832-850).
ctgataatatttttcgatt

SEQ ID NO: 803833 - DNA, 19 bp, Mus musculus
  siRNA target sequence for Slitrk4 (NM_178740.3,853-871).
catctttaacccatttgga

SEQ ID NO: 803834 - DNA, 19 bp, Mus musculus
  siRNA target sequence for Slitrk4 (NM_178740.3,869-887).
ggatatacgaggaaacaga

SEQ ID NO: 803835 - DNA, 19 bp, Mus musculus
  siRNA target sequence for Slitrk4 (NM_178740.3,901-919).
cttatattggagttctaga

SEQ ID NO: 803836 - DNA, 19 bp, Mus musculus
  siRNA target sequence for Slitrk4 (NM_178740.3,944-962).
gcagctggaagataatcct

SEQ ID NO: 803837 - DNA, 19 bp, Mus musculus
  siRNA target sequence for Slitrk4 (NM_178740.3,1005-1023).
gagaatatgccatataaca

SEQ ID NO: 803838 - DNA, 19 bp, Mus musculus
  siRNA target sequence for Slitrk4 (NM_178740.3,1007-1025).
gaatatgccatataacatt

SEQ ID NO: 803839 - DNA, 19 bp, Mus musculus
  siRNA target sequence for Slitrk4 (NM_178740.3,1013-1031).
gccatataacatttacata

SEQ ID NO: 803840 - DNA, 19 bp, Mus musculus
  siRNA target sequence for Slitrk4 (NM_178740.3,1028-1046).
cataggagaagctatttgt

SEQ ID NO: 803841 - DNA, 19 bp, Mus musculus
  siRNA target sequence for Slitrk4 (NM_178740.3,1047-1065).
gaaactcccagtgacttat

SEQ ID NO: 803842 - DNA, 19 bp, Mus musculus
  siRNA target sequence for Slitrk4 (NM_178740.3,1053-1071).
cccagtgacttatatggaa

SEQ ID NO: 803843 - DNA, 19 bp, Mus musculus
  siRNA target sequence for Slitrk4 (NM_178740.3,1061-1079).
cttatatggaaggctttta

SEQ ID NO: 803844 - DNA, 19 bp, Mus musculus
  siRNA target sequence for Slitrk4 (NM_178740.3,1158-1176).
caggagaatggctttacta

SEQ ID NO: 803845 - DNA, 19 bp, Mus musculus
  siRNA target sequence for Slitrk4 (NM_178740.3,1201-1219).
caaccttgcacagattagt

SEQ ID NO: 803846 - DNA, 19 bp, Mus musculus
  siRNA target sequence for Slitrk4 (NM_178740.3,1237-1255).
caacaaatccttccaaaat

SEQ ID NO: 803847 - DNA, 19 bp, Mus musculus
  siRNA target sequence for Slitrk4 (NM_178740.3,1270-1288).
caggcaaagccctatccaa

SEQ ID NO: 803848 - DNA, 19 bp, Mus musculus
  siRNA target sequence for Slitrk4 (NM_178740.3,1300-1318).
gtcagattgtgtcatatca

SEQ ID NO: 803849 - DNA, 19 bp, Mus musculus
  siRNA target sequence for Slitrk4 (NM_178740.3,1302-1320).
cagattgtgtcatatcaaa

SEQ ID NO: 803850 - DNA, 19 bp, Mus musculus
  siRNA target sequence for Slitrk4 (NM_178740.3,1304-1322).
gattgtgtcatatcaaaca

SEQ ID NO: 803851 - DNA, 19 bp, Mus musculus
  siRNA target sequence for Slitrk4 (NM_178740.3,1421-1439).
gtccatgtctgaattgaca

SEQ ID NO: 803852 - DNA, 19 bp, Mus musculus
  siRNA target sequence for Slitrk4 (NM_178740.3,1457-1475).
caagaagttgcatgtcaat

SEQ ID NO: 803853 - DNA, 19 bp, Mus musculus
  siRNA target sequence for Slitrk4 (NM_178740.3,1470-1488).
gtcaatggtaataacatca

SEQ ID NO: 803854 - DNA, 19 bp, Mus musculus
  siRNA target sequence for Slitrk4 (NM_178740.3,1487-1505).
caaagatgtggacatttca

SEQ ID NO: 803855 - DNA, 19 bp, Mus musculus
  siRNA target sequence for Slitrk4 (NM_178740.3,1525-1543).
ggctggatttgctccattt

SEQ ID NO: 803856 - DNA, 19 bp, Mus musculus
  siRNA target sequence for Slitrk4 (NM_178740.3,1539-1557).
catttaggcagcaatcaga

SEQ ID NO: 803857 - DNA, 19 bp, Mus musculus
  siRNA target sequence for Slitrk4 (NM_178740.3,1545-1563).
ggcagcaatcagattacgt

SEQ ID NO: 803858 - DNA, 19 bp, Mus musculus
  siRNA target sequence for Slitrk4 (NM_178740.3,1546-1564).
gcagcaatcagattacgtt

SEQ ID NO: 803859 - DNA, 19 bp, Mus musculus
  siRNA target sequence for Slitrk4 (NM_178740.3,1573-1591).
gagaagtattccacaatct

SEQ ID NO: 803860 - DNA, 19 bp, Mus musculus
  siRNA target sequence for Slitrk4 (NM_178740.3,1578-1596).
gtattccacaatcttacta

SEQ ID NO: 803861 - DNA, 19 bp, Mus musculus
  siRNA target sequence for Slitrk4 (NM_178740.3,1599-1617).
ctgcgcaggctttatctca

SEQ ID NO: 803862 - DNA, 19 bp, Mus musculus
  siRNA target sequence for Slitrk4 (NM_178740.3,1601-1619).
gcgcaggctttatctcaat

SEQ ID NO: 803863 - DNA, 19 bp, Mus musculus
  siRNA target sequence for Slitrk4 (NM_178740.3,1616-1634).
caatggcaatcagattgaa

SEQ ID NO: 803864 - DNA, 19 bp, Mus musculus
  siRNA target sequence for Slitrk4 (NM_178740.3,1636-1654).
ggctataccctgaaatatt

SEQ ID NO: 803865 - DNA, 19 bp, Mus musculus
  siRNA target sequence for Slitrk4 (NM_178740.3,1638-1656).
ctataccctgaaatatttt

SEQ ID NO: 803866 - DNA, 19 bp, Mus musculus
  siRNA target sequence for Slitrk4 (NM_178740.3,1691-1709).
gtacaacttgattaaggaa

SEQ ID NO: 803867 - DNA, 19 bp, Mus musculus
  siRNA target sequence for Slitrk4 (NM_178740.3,1738-1756).
caaatttgcagctactgta

SEQ ID NO: 803868 - DNA, 19 bp, Mus musculus
  siRNA target sequence for Slitrk4 (NM_178740.3,1748-1766).
gctactgtacttgaacaat

SEQ ID NO: 803869 - DNA, 19 bp, Mus musculus
  siRNA target sequence for Slitrk4 (NM_178740.3,1749-1767).
ctactgtacttgaacaata

SEQ ID NO: 803870 - DNA, 19 bp, Mus musculus
  siRNA target sequence for Slitrk4 (NM_178740.3,1780-1798).
gcctgccagtttacatctt

SEQ ID NO: 803871 - DNA, 19 bp, Mus musculus
  siRNA target sequence for Slitrk4 (NM_178740.3,1781-1799).
cctgccagtttacatcttt

SEQ ID NO: 803872 - DNA, 19 bp, Mus musculus
  siRNA target sequence for Slitrk4 (NM_178740.3,1784-1802).
gccagtttacatcttttct

SEQ ID NO: 803873 - DNA, 19 bp, Mus musculus
  siRNA target sequence for Slitrk4 (NM_178740.3,1855-1873).
ctgtcagcggagtacttga

SEQ ID NO: 803874 - DNA, 19 bp, Mus musculus
  siRNA target sequence for Slitrk4 (NM_178740.3,1861-1879).
gcggagtacttgatcagtt

SEQ ID NO: 803875 - DNA, 19 bp, Mus musculus
  siRNA target sequence for Slitrk4 (NM_178740.3,1927-1945).
cctgcgacttggtagcatt

SEQ ID NO: 803876 - DNA, 19 bp, Mus musculus
  siRNA target sequence for Slitrk4 (NM_178740.3,1928-1946).
ctgcgacttggtagcatta

SEQ ID NO: 803877 - DNA, 19 bp, Mus musculus
  siRNA target sequence for Slitrk4 (NM_178740.3,1930-1948).
gcgacttggtagcattaaa

SEQ ID NO: 803878 - DNA, 19 bp, Mus musculus
  siRNA target sequence for Slitrk4 (NM_178740.3,1952-1970).
gtggctggagaagttaaat

SEQ ID NO: 803879 - DNA, 19 bp, Mus musculus
  siRNA target sequence for Slitrk4 (NM_178740.3,1954-1972).
ggctggagaagttaaatga

SEQ ID NO: 803880 - DNA, 19 bp, Mus musculus
  siRNA target sequence for Slitrk4 (NM_178740.3,2013-2031).
cagtttgccaacatcgaat

SEQ ID NO: 803881 - DNA, 19 bp, Mus musculus
  siRNA target sequence for Slitrk4 (NM_178740.3,2019-2037).
gccaacatcgaattgaagt

SEQ ID NO: 803882 - DNA, 19 bp, Mus musculus
  siRNA target sequence for Slitrk4 (NM_178740.3,2054-2072).
cttatgccctaaactctta

SEQ ID NO: 803883 - DNA, 19 bp, Mus musculus
  siRNA target sequence for Slitrk4 (NM_178740.3,2059-2077).
gccctaaactcttaaacaa

SEQ ID NO: 803884 - DNA, 19 bp, Mus musculus
  siRNA target sequence for Slitrk4 (NM_178740.3,2100-2118).
cctgcgcctgcaattacct

SEQ ID NO: 803885 - DNA, 19 bp, Mus musculus
  siRNA target sequence for Slitrk4 (NM_178740.3,2101-2119).
ctgcgcctgcaattacctt

SEQ ID NO: 803886 - DNA, 19 bp, Mus musculus
  siRNA target sequence for Slitrk4 (NM_178740.3,2127-2145).
ccattgggtcctattcgaa

SEQ ID NO: 803887 - DNA, 19 bp, Mus musculus
  siRNA target sequence for Slitrk4 (NM_178740.3,2163-2181).
gtgccattatctattttaa

SEQ ID NO: 803888 - DNA, 19 bp, Mus musculus
  siRNA target sequence for Slitrk4 (NM_178740.3,2166-2184).
ccattatctattttaatct

SEQ ID NO: 803889 - DNA, 19 bp, Mus musculus
  siRNA target sequence for Slitrk4 (NM_178740.3,2244-2262).
gtgctgagacgtaacaaga

SEQ ID NO: 803890 - DNA, 19 bp, Mus musculus
  siRNA target sequence for Slitrk4 (NM_178740.3,2246-2264).
gctgagacgtaacaagaaa

SEQ ID NO: 803891 - DNA, 19 bp, Mus musculus
  siRNA target sequence for Slitrk4 (NM_178740.3,2315-2333).
gctgcaactaaggaaacat

SEQ ID NO: 803892 - DNA, 19 bp, Mus musculus
  siRNA target sequence for Slitrk4 (NM_178740.3,2331-2349).
catgaccacaaaaccaata

SEQ ID NO: 803893 - DNA, 19 bp, Mus musculus
  siRNA target sequence for Slitrk4 (NM_178740.3,2393-2411).
cgaacagatgagcaaaagt

SEQ ID NO: 803894 - DNA, 19 bp, Mus musculus
  siRNA target sequence for Slitrk4 (NM_178740.3,2461-2479).
ctccgggacagaaggtaat

SEQ ID NO: 803895 - DNA, 19 bp, Mus musculus
  siRNA target sequence for Slitrk4 (NM_178740.3,2463-2481).
ccgggacagaaggtaatga

SEQ ID NO: 803896 - DNA, 19 bp, Mus musculus
  siRNA target sequence for Slitrk4 (NM_178740.3,2464-2482).
cgggacagaaggtaatgat

SEQ ID NO: 803897 - DNA, 19 bp, Mus musculus
  siRNA target sequence for Slitrk4 (NM_178740.3,2501-2519).
ggacaaagatttattgcat

SEQ ID NO: 803898 - DNA, 19 bp, Mus musculus
  siRNA target sequence for Slitrk4 (NM_178740.3,2591-2609).
gttcattcaaaattttctt

SEQ ID NO: 803899 - DNA, 19 bp, Mus musculus
  siRNA target sequence for Slitrk4 (NM_178740.3,2654-2672).
gattcgctatcctgaaaaa

SEQ ID NO: 803900 - DNA, 19 bp, Mus musculus
  siRNA target sequence for Slitrk4 (NM_178740.3,2707-2725).
gtggtaaccacagtaaaat

SEQ ID NO: 803901 - DNA, 19 bp, Mus musculus
  siRNA target sequence for Slitrk4 (NM_178740.3,2719-2737).
gtaaaattgttgttgaaca

SEQ ID NO: 803902 - DNA, 19 bp, Mus musculus
  siRNA target sequence for 6330442E10Rik (NM_178745.2,291-309).
ctgtctcgttggtacctat

SEQ ID NO: 803903 - DNA, 19 bp, Mus musculus
  siRNA target sequence for 6330442E10Rik (NM_178745.2,293-311).
gtctcgttggtacctatat

SEQ ID NO: 803904 - DNA, 19 bp, Mus musculus
  siRNA target sequence for 6330442E10Rik (NM_178745.2,297-315).
cgttggtacctatatgcta

SEQ ID NO: 803905 - DNA, 19 bp, Mus musculus
  siRNA target sequence for 6330442E10Rik (NM_178745.2,298-316).
gttggtacctatatgctat

SEQ ID NO: 803906 - DNA, 19 bp, Mus musculus
  siRNA target sequence for 6330442E10Rik (NM_178745.2,326-344).
cttctgcgaggtgatgttt

SEQ ID NO: 803907 - DNA, 19 bp, Mus musculus
  siRNA target sequence for 6330442E10Rik (NM_178745.2,329-347).
ctgcgaggtgatgtttaca

SEQ ID NO: 803908 - DNA, 19 bp, Mus musculus
  siRNA target sequence for 6330442E10Rik (NM_178745.2,346-364).
cagcggcctgggagtttgt

SEQ ID NO: 803909 - DNA, 19 bp, Mus musculus
  siRNA target sequence for BC028822 (NM_178747.2,220-238).
gcagtccagagatgtacta

SEQ ID NO: 803910 - DNA, 19 bp, Mus musculus
  siRNA target sequence for BC028822 (NM_178747.2,346-364).
gcaccgatggcttcatgat

SEQ ID NO: 803911 - DNA, 19 bp, Mus musculus
  siRNA target sequence for BC028822 (NM_178747.2,349-367).
ccgatggcttcatgattca

SEQ ID NO: 803912 - DNA, 19 bp, Mus musculus
  siRNA target sequence for BC028822 (NM_178747.2,351-369).
gatggcttcatgattcaca

SEQ ID NO: 803913 - DNA, 19 bp, Mus musculus
  siRNA target sequence for BC028822 (NM_178747.2,531-549).
gggtctggaacacataaca

SEQ ID NO: 803914 - DNA, 19 bp, Mus musculus
  siRNA target sequence for BC028822 (NM_178747.2,624-642).
gaatgttctgagtcaagta

SEQ ID NO: 803915 - DNA, 19 bp, Mus musculus
  siRNA target sequence for BC028822 (NM_178747.2,847-865).
gcatcatctaccaagatca

SEQ ID NO: 803916 - DNA, 19 bp, Mus musculus
  siRNA target sequence for BC028822 (NM_178747.2,1243-1261).
gctacatgaacatcattat

SEQ ID NO: 803917 - DNA, 19 bp, Mus musculus
  siRNA target sequence for BC028822 (NM_178747.2,1281-1299).
gatgtgcctcggttggatt

SEQ ID NO: 803918 - DNA, 19 bp, Mus musculus
  siRNA target sequence for BC028822 (NM_178747.2,1284-1302).
gtgcctcggttggattact

SEQ ID NO: 803919 - DNA, 19 bp, Mus musculus
  siRNA target sequence for BC028822 (NM_178747.2,1437-1455).
gaccccactggaatgttct

SEQ ID NO: 803920 - DNA, 19 bp, Mus musculus
  siRNA target sequence for BC028822 (NM_178747.2,1447-1465).
gaatgttcttgaattcgta

SEQ ID NO: 803921 - DNA, 19 bp, Mus musculus
  siRNA target sequence for A230053O16Rik (NM_178750.4,814-832).
gccatcagcaactatgtgt

SEQ ID NO: 803922 - DNA, 19 bp, Mus musculus
  siRNA target sequence for A230053O16Rik (NM_178750.4,829-847).
gtgtctcggaccaacatca

SEQ ID NO: 803923 - DNA, 19 bp, Mus musculus
  siRNA target sequence for A230053O16Rik (NM_178750.4,833-851).
ctcggaccaacatcaacat

SEQ ID NO: 803924 - DNA, 19 bp, Mus musculus
  siRNA target sequence for A230053O16Rik (NM_178750.4,887-905).
cagccacgtcccactacaa

SEQ ID NO: 803925 - DNA, 19 bp, Mus musculus
  siRNA target sequence for A230053O16Rik (NM_178750.4,889-907).
gccacgtcccactacaact

SEQ ID NO: 803926 - DNA, 19 bp, Mus musculus
  siRNA target sequence for A230053O16Rik (NM_178750.4,1051-1069).
ggccaagaggagtactaca

SEQ ID NO: 803927 - DNA, 19 bp, Mus musculus
  siRNA target sequence for A230053O16Rik (NM_178750.4,1106-1124).
ccatgagtcaacagtacta

SEQ ID NO: 803928 - DNA, 19 bp, Mus musculus
  siRNA target sequence for A230053O16Rik (NM_178750.4,1360-1378).
gccccctcacagtactcaa

SEQ ID NO: 803929 - DNA, 19 bp, Mus musculus
  siRNA target sequence for A230053O16Rik (NM_178750.4,1452-1470).
gcggccttacggctatgaa

SEQ ID NO: 803930 - DNA, 19 bp, Mus musculus
  siRNA target sequence for A230053O16Rik (NM_178750.4,1454-1472).
ggccttacggctatgaaca

SEQ ID NO: 803931 - DNA, 19 bp, Mus musculus
  siRNA target sequence for A730041O15Rik (NM_178751.2,191-209).
ggccacaagggcatggatt

SEQ ID NO: 803932 - DNA, 19 bp, Mus musculus
  siRNA target sequence for A730041O15Rik (NM_178751.2,192-210).
gccacaagggcatggatta

SEQ ID NO: 803933 - DNA, 19 bp, Mus musculus
  siRNA target sequence for A730041O15Rik (NM_178751.2,445-463).
ggtagccgtgcatctgttt

SEQ ID NO: 803934 - DNA, 19 bp, Mus musculus
  siRNA target sequence for D330012F22Rik (NM_178752.2,333-351).
ctgtgccacatcatttgca

SEQ ID NO: 803935 - DNA, 19 bp, Mus musculus
  siRNA target sequence for D330012F22Rik (NM_178752.2,682-700).
gtttgacccggaacagttt

SEQ ID NO: 803936 - DNA, 19 bp, Mus musculus
  siRNA target sequence for D330012F22Rik (NM_178752.2,686-704).
gacccggaacagtttaact

SEQ ID NO: 803937 - DNA, 19 bp, Mus musculus
  siRNA target sequence for D330012F22Rik (NM_178752.2,689-707).
ccggaacagtttaacttca

SEQ ID NO: 803938 - DNA, 19 bp, Mus musculus
  siRNA target sequence for D330012F22Rik (NM_178752.2,690-708).
cggaacagtttaacttcaa

SEQ ID NO: 803939 - DNA, 19 bp, Mus musculus
  siRNA target sequence for D330012F22Rik (NM_178752.2,728-746).
gtccttttccggatgcaaa

SEQ ID NO: 803940 - DNA, 19 bp, Mus musculus
  siRNA target sequence for E130309F12Rik (NM_178756.2,287-305).
gtgctgcttgcctactact

SEQ ID NO: 803941 - DNA, 19 bp, Mus musculus
  siRNA target sequence for E130309F12Rik (NM_178756.2,322-340).
ctttcaggtgcatatccaa

SEQ ID NO: 803942 - DNA, 19 bp, Mus musculus
  siRNA target sequence for E130309F12Rik (NM_178756.2,332-350).
catatccaaggattcttct

SEQ ID NO: 803943 - DNA, 19 bp, Mus musculus
  siRNA target sequence for E130309F12Rik (NM_178756.2,349-367).
ctgtcaggacggagactta

SEQ ID NO: 803944 - DNA, 19 bp, Mus musculus
  siRNA target sequence for E130309F12Rik (NM_178756.2,351-369).
gtcaggacggagacttaat

SEQ ID NO: 803945 - DNA, 19 bp, Mus musculus
  siRNA target sequence for E130309F12Rik (NM_178756.2,353-371).
caggacggagacttaatga

SEQ ID NO: 803946 - DNA, 19 bp, Mus musculus
  siRNA target sequence for E130309F12Rik (NM_178756.2,439-457).
cactccaactgctattatt

SEQ ID NO: 803947 - DNA, 19 bp, Mus musculus
  siRNA target sequence for E130309F12Rik (NM_178756.2,443-461).
ccaactgctattattttca

SEQ ID NO: 803948 - DNA, 19 bp, Mus musculus
  siRNA target sequence for E130309F12Rik (NM_178756.2,464-482).
ggtgaaatatccatgtatt

SEQ ID NO: 803949 - DNA, 19 bp, Mus musculus
  siRNA target sequence for E130309F12Rik (NM_178756.2,580-598).
gttcatcggggtatttgca

SEQ ID NO: 803950 - DNA, 19 bp, Mus musculus
  siRNA target sequence for E130309F12Rik (NM_178756.2,583-601).
catcggggtatttgcattt

SEQ ID NO: 803951 - DNA, 19 bp, Mus musculus
  siRNA target sequence for E130309F12Rik (NM_178756.2,651-669).
gtcacctaacaccatactt

SEQ ID NO: 803952 - DNA, 19 bp, Mus musculus
  siRNA target sequence for E130309F12Rik (NM_178756.2,711-729).
gggcacaccaacagttcat

SEQ ID NO: 803953 - DNA, 19 bp, Mus musculus
  siRNA target sequence for E130309F12Rik (NM_178756.2,713-731).
gcacaccaacagttcatca

SEQ ID NO: 803954 - DNA, 19 bp, Mus musculus
  siRNA target sequence for E130309F12Rik (NM_178756.2,833-851).
gccacgatgtacatcacaa

SEQ ID NO: 803955 - DNA, 19 bp, Mus musculus
  siRNA target sequence for E130309F12Rik (NM_178756.2,1120-1138).
gagcccgctggaaacctta

SEQ ID NO: 803956 - DNA, 19 bp, Mus musculus
  siRNA target sequence for E130309F12Rik (NM_178756.2,1123-1141).
cccgctggaaaccttaagt

SEQ ID NO: 803957 - DNA, 19 bp, Mus musculus
  siRNA target sequence for Irf2bp1 (NM_178757.3,705-723).
ctatgacagggctacttca

SEQ ID NO: 803958 - DNA, 19 bp, Mus musculus
  siRNA target sequence for Irf2bp1 (NM_178757.3,1083-1101).
cgcctgtgcccctttcaat

SEQ ID NO: 803959 - DNA, 19 bp, Mus musculus
  siRNA target sequence for Irf2bp1 (NM_178757.3,1091-1109).
cccctttcaatgttcgatt

SEQ ID NO: 803960 - DNA, 19 bp, Mus musculus
  siRNA target sequence for Irf2bp1 (NM_178757.3,1163-1181).
gccctccgggctatgagtt

SEQ ID NO: 803961 - DNA, 19 bp, Mus musculus
  siRNA target sequence for Irf2bp1 (NM_178757.3,1248-1266).
ggctcgccagatgtttcat

SEQ ID NO: 803962 - DNA, 19 bp, Mus musculus
  siRNA target sequence for Irf2bp1 (NM_178757.3,1504-1522).
ccacgccgtcgcaaagcat

SEQ ID NO: 803963 - DNA, 19 bp, Mus musculus
  siRNA target sequence for Irf2bp1 (NM_178757.3,1593-1611).
gccaggcggtccatactct

SEQ ID NO: 803964 - DNA, 19 bp, Mus musculus
  siRNA target sequence for Irf2bp1 (NM_178757.3,1594-1612).
ccaggcggtccatactctt

SEQ ID NO: 803965 - DNA, 19 bp, Mus musculus
  siRNA target sequence for Irf2bp1 (NM_178757.3,1957-1975).
ccttgctcccgagagttta

SEQ ID NO: 803966 - DNA, 19 bp, Mus musculus
  siRNA target sequence for Irf2bp1 (NM_178757.3,1958-1976).
cttgctcccgagagtttat

SEQ ID NO: 803967 - DNA, 19 bp, Mus musculus
  siRNA target sequence for Irf2bp1 (NM_178757.3,1961-1979).
gctcccgagagtttatcaa

SEQ ID NO: 803968 - DNA, 19 bp, Mus musculus
  siRNA target sequence for Irf2bp1 (NM_178757.3,2010-2028).
ccccagtggagacaaatgt

SEQ ID NO: 803969 - DNA, 19 bp, Mus musculus
  siRNA target sequence for Irf2bp1 (NM_178757.3,2067-2085).
gggcgagatcgctactatt

SEQ ID NO: 803970 - DNA, 19 bp, Mus musculus
  siRNA target sequence for Irf2bp1 (NM_178757.3,2069-2087).
gcgagatcgctactattct

SEQ ID NO: 803971 - DNA, 19 bp, Mus musculus
  siRNA target sequence for Irf2bp1 (NM_178757.3,2070-2088).
cgagatcgctactattctt

SEQ ID NO: 803972 - DNA, 19 bp, Mus musculus
  siRNA target sequence for B430010N18Rik (NM_178759.3,691-709).
ggttcatgtcccaattcca

SEQ ID NO: 803973 - DNA, 19 bp, Mus musculus
  siRNA target sequence for B430010N18Rik (NM_178759.3,730-748).
cgtacagatggaacaagaa

SEQ ID NO: 803974 - DNA, 19 bp, Mus musculus
  siRNA target sequence for B430010N18Rik (NM_178759.3,870-888).
gcctggctggttcaatgat

SEQ ID NO: 803975 - DNA, 19 bp, Mus musculus
  siRNA target sequence for B430010N18Rik (NM_178759.3,1140-1158).
gtccgccttcactacagaa

SEQ ID NO: 803976 - DNA, 19 bp, Mus musculus
  siRNA target sequence for B430010N18Rik (NM_178759.3,1143-1161).
cgccttcactacagaatca

SEQ ID NO: 803977 - DNA, 19 bp, Mus musculus
  siRNA target sequence for B430010N18Rik (NM_178759.3,1174-1192).
gcatccaatcactctcaaa

SEQ ID NO: 803978 - DNA, 19 bp, Mus musculus
  siRNA target sequence for B430010N18Rik (NM_178759.3,1197-1215).
catgatgaccatatctaca

SEQ ID NO: 803979 - DNA, 19 bp, Mus musculus
  siRNA target sequence for B430010N18Rik (NM_178759.3,1317-1335).
gcagaagacaactaaatca

SEQ ID NO: 803980 - DNA, 19 bp, Mus musculus
  siRNA target sequence for B430010N18Rik (NM_178759.3,1320-1338).
gaagacaactaaatcacat

SEQ ID NO: 803981 - DNA, 19 bp, Mus musculus
  siRNA target sequence for B430010N18Rik (NM_178759.3,1352-1370).
gacagaccatcttgatcat

SEQ ID NO: 803982 - DNA, 19 bp, Mus musculus
  siRNA target sequence for B430010N18Rik (NM_178759.3,1435-1453).
gtcacaggagccaactgtt

SEQ ID NO: 803983 - DNA, 19 bp, Mus musculus
  siRNA target sequence for B430010N18Rik (NM_178759.3,1514-1532).
cacacgggagggatgatga

SEQ ID NO: 803984 - DNA, 19 bp, Mus musculus
  siRNA target sequence for AI790205 (NM_178760.2,137-155).
cctggcgctcaaagatgat

SEQ ID NO: 803985 - DNA, 19 bp, Mus musculus
  siRNA target sequence for AI790205 (NM_178760.2,324-342).
gatgaagatgtgaattact

SEQ ID NO: 803986 - DNA, 19 bp, Mus musculus
  siRNA target sequence for AI790205 (NM_178760.2,330-348).
gatgtgaattactgtattt

SEQ ID NO: 803987 - DNA, 19 bp, Mus musculus
  siRNA target sequence for AI790205 (NM_178760.2,441-459).
cagttaccagagattgtct

SEQ ID NO: 803988 - DNA, 19 bp, Mus musculus
  siRNA target sequence for AI790205 (NM_178760.2,538-556).
gaaccctcgatggtttcaa

SEQ ID NO: 803989 - DNA, 19 bp, Mus musculus
  siRNA target sequence for AI790205 (NM_178760.2,554-572).
caaggctggacgaagtaca

SEQ ID NO: 803990 - DNA, 19 bp, Mus musculus
  siRNA target sequence for AI790205 (NM_178760.2,575-593).
ggactcaaaggctatcaca

SEQ ID NO: 803991 - DNA, 19 bp, Mus musculus
  siRNA target sequence for AI790205 (NM_178760.2,592-610).
cagagcgatccttctcaat

SEQ ID NO: 803992 - DNA, 19 bp, Mus musculus
  siRNA target sequence for AI790205 (NM_178760.2,597-615).
cgatccttctcaattcaca

SEQ ID NO: 803993 - DNA, 19 bp, Mus musculus
  siRNA target sequence for AI790205 (NM_178760.2,726-744).
ggtgaacaggcctcattca

SEQ ID NO: 803994 - DNA, 19 bp, Mus musculus
  siRNA target sequence for AI790205 (NM_178760.2,807-825).
ctccccaagttatatgttt

SEQ ID NO: 803995 - DNA, 19 bp, Mus musculus
  siRNA target sequence for AI790205 (NM_178760.2,848-866).
gtctgggaccatttggatt

SEQ ID NO: 803996 - DNA, 19 bp, Mus musculus
  siRNA target sequence for AI790205 (NM_178760.2,862-880).
ggattcacatccttcgtaa

SEQ ID NO: 803997 - DNA, 19 bp, Mus musculus
  siRNA target sequence for AI790205 (NM_178760.2,867-885).
cacatccttcgtaagagaa

SEQ ID NO: 803998 - DNA, 19 bp, Mus musculus
  siRNA target sequence for AI790205 (NM_178760.2,946-964).
cgttggtgttccatgcaat

SEQ ID NO: 803999 - DNA, 19 bp, Mus musculus
  siRNA target sequence for AI790205 (NM_178760.2,961-979).
caatcgactaccactacat

SEQ ID NO: 804000 - DNA, 19 bp, Mus musculus
  siRNA target sequence for AI790205 (NM_178760.2,1005-1023).
ggctgggctgttgtatact

SEQ ID NO: 804001 - DNA, 19 bp, Mus musculus
  siRNA target sequence for AI790205 (NM_178760.2,1006-1024).
gctgggctgttgtatacta

SEQ ID NO: 804002 - DNA, 19 bp, Mus musculus
  siRNA target sequence for AI790205 (NM_178760.2,1010-1028).
ggctgttgtatactacata

SEQ ID NO: 804003 - DNA, 19 bp, Mus musculus
  siRNA target sequence for AI790205 (NM_178760.2,1011-1029).
gctgttgtatactacataa

SEQ ID NO: 804004 - DNA, 19 bp, Mus musculus
  siRNA target sequence for AI790205 (NM_178760.2,1044-1062).
ggcgcactcctgttcatca

SEQ ID NO: 804005 - DNA, 19 bp, Mus musculus
  siRNA target sequence for AI790205 (NM_178760.2,1170-1188).
gcctacatcatcatagagt

SEQ ID NO: 804006 - DNA, 19 bp, Mus musculus
  siRNA target sequence for AI790205 (NM_178760.2,1196-1214).
ggagggcacaactgagtat

SEQ ID NO: 804007 - DNA, 19 bp, Mus musculus
  siRNA target sequence for AI790205 (NM_178760.2,1283-1301).
gtggtcaatcaggcattta

SEQ ID NO: 804008 - DNA, 19 bp, Mus musculus
  siRNA target sequence for AI790205 (NM_178760.2,1285-1303).
ggtcaatcaggcatttaca

SEQ ID NO: 804009 - DNA, 19 bp, Mus musculus
  siRNA target sequence for AI790205 (NM_178760.2,1286-1304).
gtcaatcaggcatttacaa

SEQ ID NO: 804010 - DNA, 19 bp, Mus musculus
  siRNA target sequence for AI790205 (NM_178760.2,1309-1327).
cctccgccacagatggaaa

SEQ ID NO: 804011 - DNA, 19 bp, Mus musculus
  siRNA target sequence for AI790205 (NM_178760.2,1350-1368).
ctgaggcttttcagacatt

SEQ ID NO: 804012 - DNA, 19 bp, Mus musculus
  siRNA target sequence for AI790205 (NM_178760.2,1354-1372).
ggcttttcagacattacta

SEQ ID NO: 804013 - DNA, 19 bp, Mus musculus
  siRNA target sequence for AI790205 (NM_178760.2,1477-1495).
cagccacgctggtgttctt

SEQ ID NO: 804014 - DNA, 19 bp, Mus musculus
  siRNA target sequence for AI790205 (NM_178760.2,1497-1515).
gtcctgacggggtataaat

SEQ ID NO: 804015 - DNA, 19 bp, Mus musculus
  siRNA target sequence for AI790205 (NM_178760.2,1499-1517).
cctgacggggtataaattt

SEQ ID NO: 804016 - DNA, 19 bp, Mus musculus
  siRNA target sequence for A930025D01Rik (NM_178762.2,1927-1945).
gaacctggaacgagtcttt

SEQ ID NO: 804017 - DNA, 19 bp, Mus musculus
  siRNA target sequence for A930025D01Rik (NM_178762.2,2081-2099).
gttgaggggaacttctaca

SEQ ID NO: 804018 - DNA, 19 bp, Mus musculus
  siRNA target sequence for A930025D01Rik (NM_178762.2,2092-2110).
cttctacagcgctacacta

SEQ ID NO: 804019 - DNA, 19 bp, Mus musculus
  siRNA target sequence for A930025D01Rik (NM_178762.2,2124-2142).
gtttcgacgtcctagatct

SEQ ID NO: 804020 - DNA, 19 bp, Mus musculus
  siRNA target sequence for A930025D01Rik (NM_178762.2,2214-2232).
gccacctctcgcacttact

SEQ ID NO: 804021 - DNA, 19 bp, Mus musculus
  siRNA target sequence for A930025D01Rik (NM_178762.2,2215-2233).
ccacctctcgcacttactt

SEQ ID NO: 804022 - DNA, 19 bp, Mus musculus
  siRNA target sequence for A930025D01Rik (NM_178762.2,2284-2302).
gctgccagacccatggatt

SEQ ID NO: 804023 - DNA, 19 bp, Mus musculus
  siRNA target sequence for A930025D01Rik (NM_178762.2,2311-2329).
gtcagagatggatcattca

SEQ ID NO: 804024 - DNA, 19 bp, Mus musculus
  siRNA target sequence for A930025D01Rik (NM_178762.2,2504-2522).
ccaccctatgaattcaaat

SEQ ID NO: 804025 - DNA, 19 bp, Mus musculus
  siRNA target sequence for A930025D01Rik (NM_178762.2,2507-2525).
ccctatgaattcaaataca

SEQ ID NO: 804026 - DNA, 19 bp, Mus musculus
  siRNA target sequence for A930025D01Rik (NM_178762.2,2528-2546).
gcaatggaggacttctcaa

SEQ ID NO: 804027 - DNA, 19 bp, Mus musculus
  siRNA target sequence for A930025D01Rik (NM_178762.2,2529-2547).
caatggaggacttctcaat

SEQ ID NO: 804028 - DNA, 19 bp, Mus musculus
  siRNA target sequence for A930025D01Rik (NM_178762.2,2553-2571).
gatgtggccctggaatgaa

SEQ ID NO: 804029 - DNA, 19 bp, Mus musculus
  siRNA target sequence for A930025D01Rik (NM_178762.2,2556-2574).
gtggccctggaatgaactt

SEQ ID NO: 804030 - DNA, 19 bp, Mus musculus
  siRNA target sequence for A930025D01Rik (NM_178762.2,2650-2668).
gggcaagccacgttgtgtt

SEQ ID NO: 804031 - DNA, 19 bp, Mus musculus
  siRNA target sequence for A930025D01Rik (NM_178762.2,2658-2676).
cacgttgtgttctgaacaa

SEQ ID NO: 804032 - DNA, 19 bp, Mus musculus
  siRNA target sequence for A930025D01Rik (NM_178762.2,2736-2754).
gactgatccacacatacaa

SEQ ID NO: 804033 - DNA, 19 bp, Mus musculus
  siRNA target sequence for A030007D23Rik (NM_178763.2,284-302).
ccaaaaaagccacactata

SEQ ID NO: 804034 - DNA, 19 bp, Mus musculus
  siRNA target sequence for A030007D23Rik (NM_178763.2,323-341).
cccttcaagtacaaatgct

SEQ ID NO: 804035 - DNA, 19 bp, Mus musculus
  siRNA target sequence for A030007D23Rik (NM_178763.2,367-385).
gaagtcacatcttttcaat

SEQ ID NO: 804036 - DNA, 19 bp, Mus musculus
  siRNA target sequence for A030007D23Rik (NM_178763.2,391-409).
gaagtacggtctctgtaaa

SEQ ID NO: 804037 - DNA, 19 bp, Mus musculus
  siRNA target sequence for A030007D23Rik (NM_178763.2,427-445).
gtcagagcaagatcgtatt

SEQ ID NO: 804038 - DNA, 19 bp, Mus musculus
  siRNA target sequence for A030007D23Rik (NM_178763.2,446-464).
cccaagtgtcccaaatcta

SEQ ID NO: 804039 - DNA, 19 bp, Mus musculus
  siRNA target sequence for A030007D23Rik (NM_178763.2,700-718).
cgacagtggggttagacat

SEQ ID NO: 804040 - DNA, 19 bp, Mus musculus
  siRNA target sequence for A030007D23Rik (NM_178763.2,701-719).
gacagtggggttagacatt

SEQ ID NO: 804041 - DNA, 19 bp, Mus musculus
  siRNA target sequence for A030007D23Rik (NM_178763.2,779-797).
gaagtgctggccaactcta

SEQ ID NO: 804042 - DNA, 19 bp, Mus musculus
  siRNA target sequence for A030007D23Rik (NM_178763.2,802-820).
caaagcctcctcattccat

SEQ ID NO: 804043 - DNA, 19 bp, Mus musculus
  siRNA target sequence for A030007D23Rik (NM_178763.2,884-902).
gactttccacataaaatct

SEQ ID NO: 804044 - DNA, 19 bp, Mus musculus
  siRNA target sequence for A030007D23Rik (NM_178763.2,921-939).
gtgccatctccccctatat

SEQ ID NO: 804045 - DNA, 19 bp, Mus musculus
  siRNA target sequence for A030007D23Rik (NM_178763.2,1104-1122).
caattcccaagcacttgaa

SEQ ID NO: 804046 - DNA, 19 bp, Mus musculus
  siRNA target sequence for A030007D23Rik (NM_178763.2,1123-1141).
cacatccccatcaacatat

SEQ ID NO: 804047 - DNA, 19 bp, Mus musculus
  siRNA target sequence for A030007D23Rik (NM_178763.2,1125-1143).
catccccatcaacatatga

SEQ ID NO: 804048 - DNA, 19 bp, Mus musculus
  siRNA target sequence for A030007D23Rik (NM_178763.2,1137-1155).
catatgaccactacagatt

SEQ ID NO: 804049 - DNA, 19 bp, Mus musculus
  siRNA target sequence for A030007D23Rik (NM_178763.2,1182-1200).
cgatcccttatgggtttta

SEQ ID NO: 804050 - DNA, 19 bp, Mus musculus
  siRNA target sequence for A030007D23Rik (NM_178763.2,1272-1290).
gctctcgcttgcttgaaga

SEQ ID NO: 804051 - DNA, 19 bp, Mus musculus
  siRNA target sequence for A030007D23Rik (NM_178763.2,1273-1291).
ctctcgcttgcttgaagat

SEQ ID NO: 804052 - DNA, 19 bp, Mus musculus
  siRNA target sequence for A030007D23Rik (NM_178763.2,1312-1330).
ctcaagtccctcagagtta

SEQ ID NO: 804053 - DNA, 19 bp, Mus musculus
  siRNA target sequence for A030007D23Rik (NM_178763.2,1718-1736).
gggagcagtaactctttca

SEQ ID NO: 804054 - DNA, 19 bp, Mus musculus
  siRNA target sequence for A030007D23Rik (NM_178763.2,1776-1794).
gaataggtcccctcaatct

SEQ ID NO: 804055 - DNA, 19 bp, Mus musculus
  siRNA target sequence for A030007D23Rik (NM_178763.2,1782-1800).
gtcccctcaatctctctaa

SEQ ID NO: 804056 - DNA, 19 bp, Mus musculus
  siRNA target sequence for A030007D23Rik (NM_178763.2,1874-1892).
gacctgccactcaatctgt

SEQ ID NO: 804057 - DNA, 19 bp, Mus musculus
  siRNA target sequence for A030007D23Rik (NM_178763.2,1963-1981).
cgctgccactccaaagact

SEQ ID NO: 804058 - DNA, 19 bp, Mus musculus
  siRNA target sequence for A030007D23Rik (NM_178763.2,2339-2357).
cttactctccgcagaagaa

SEQ ID NO: 804059 - DNA, 19 bp, Mus musculus
  siRNA target sequence for B930006L02Rik (NM_178764.2,342-360).
cagccactctgctgatgaa

SEQ ID NO: 804060 - DNA, 19 bp, Mus musculus
  siRNA target sequence for B930006L02Rik (NM_178764.2,457-475).
ctctgcggctttcagatat

SEQ ID NO: 804061 - DNA, 19 bp, Mus musculus
  siRNA target sequence for B930006L02Rik (NM_178764.2,477-495).
ccgcagggacaccatacaa

SEQ ID NO: 804062 - DNA, 19 bp, Mus musculus
  siRNA target sequence for B930006L02Rik (NM_178764.2,499-517).
cccaccgacccagagtaat

SEQ ID NO: 804063 - DNA, 19 bp, Mus musculus
  siRNA target sequence for B930006L02Rik (NM_178764.2,500-518).
ccaccgacccagagtaata

SEQ ID NO: 804064 - DNA, 19 bp, Mus musculus
  siRNA target sequence for B930006L02Rik (NM_178764.2,553-571).
ctatcagacggccatgtat

SEQ ID NO: 804065 - DNA, 19 bp, Mus musculus
  siRNA target sequence for B930006L02Rik (NM_178764.2,557-575).
cagacggccatgtatccaa

SEQ ID NO: 804066 - DNA, 19 bp, Mus musculus
  siRNA target sequence for B930006L02Rik (NM_178764.2,562-580).
ggccatgtatccaatcaga

SEQ ID NO: 804067 - DNA, 19 bp, Mus musculus
  siRNA target sequence for 5730410E15Rik (NM_178765.2,213-231).
catcaggagaaagagattt

SEQ ID NO: 804068 - DNA, 19 bp, Mus musculus
  siRNA target sequence for 5730410E15Rik (NM_178765.2,239-257).
ccggattccccggttgatt

SEQ ID NO: 804069 - DNA, 19 bp, Mus musculus
  siRNA target sequence for 5730410E15Rik (NM_178765.2,241-259).
ggattccccggttgattct

SEQ ID NO: 804070 - DNA, 19 bp, Mus musculus
  siRNA target sequence for 5730410E15Rik (NM_178765.2,372-390).
cgctcagcaaggacgatta

SEQ ID NO: 804071 - DNA, 19 bp, Mus musculus
  siRNA target sequence for 5730410E15Rik (NM_178765.2,563-581).
gtcagctcgtcataaaaaa

SEQ ID NO: 804072 - DNA, 19 bp, Mus musculus
  siRNA target sequence for 5730410E15Rik (NM_178765.2,932-950).
catgtcttgtggcgaaaat

SEQ ID NO: 804073 - DNA, 19 bp, Mus musculus
  siRNA target sequence for 5730410E15Rik (NM_178765.2,1311-1329).
gagatggcacacaatagtt

SEQ ID NO: 804074 - DNA, 19 bp, Mus musculus
  siRNA target sequence for 5730410E15Rik (NM_178765.2,1327-1345).
gttccctgagggatgaact

SEQ ID NO: 804075 - DNA, 19 bp, Mus musculus
  siRNA target sequence for 5730410E15Rik (NM_178765.2,1365-1383).
gattccccagagaaaagtt

SEQ ID NO: 804076 - DNA, 19 bp, Mus musculus
  siRNA target sequence for 5730410E15Rik (NM_178765.2,1409-1427).
gttgccagatgggttatct

SEQ ID NO: 804077 - DNA, 19 bp, Mus musculus
  siRNA target sequence for 5730410E15Rik (NM_178765.2,1753-1771).
ctgactcgatggaaagctt

SEQ ID NO: 804078 - DNA, 19 bp, Mus musculus
  siRNA target sequence for 5730410E15Rik (NM_178765.2,1764-1782).
gaaagcttctcagaatcta

SEQ ID NO: 804079 - DNA, 19 bp, Mus musculus
  siRNA target sequence for 5730410E15Rik (NM_178765.2,1769-1787).
cttctcagaatctatctct

SEQ ID NO: 804080 - DNA, 19 bp, Mus musculus
  siRNA target sequence for 5730410E15Rik (NM_178765.2,1780-1798).
ctatctctgccttaatgct

SEQ ID NO: 804081 - DNA, 19 bp, Mus musculus
  siRNA target sequence for 5730410E15Rik (NM_178765.2,1790-1808).
cttaatgcttgatttaact

SEQ ID NO: 804082 - DNA, 19 bp, Mus musculus
  siRNA target sequence for 5730410E15Rik (NM_178765.2,1893-1911).
ctcatgagagagctagatt

SEQ ID NO: 804083 - DNA, 19 bp, Mus musculus
  siRNA target sequence for 5730410E15Rik (NM_178765.2,1895-1913).
catgagagagctagatttt

SEQ ID NO: 804084 - DNA, 19 bp, Mus musculus
  siRNA target sequence for 5730410E15Rik (NM_178765.2,1898-1916).
gagagagctagattttgca

SEQ ID NO: 804085 - DNA, 19 bp, Mus musculus
  siRNA target sequence for 5730410E15Rik (NM_178765.2,2040-2058).
gttctgtgggcattcagta

SEQ ID NO: 804086 - DNA, 19 bp, Mus musculus
  siRNA target sequence for C230095G01Rik (NM_178768.3,241-259).
ctacggctgcagtgttgat

SEQ ID NO: 804087 - DNA, 19 bp, Mus musculus
  siRNA target sequence for C230095G01Rik (NM_178768.3,306-324).
gccttctatctgctgttta

SEQ ID NO: 804088 - DNA, 19 bp, Mus musculus
  siRNA target sequence for C230095G01Rik (NM_178768.3,344-362).
gtgtgaagggacctacttt

SEQ ID NO: 804089 - DNA, 19 bp, Mus musculus
  siRNA target sequence for C230095G01Rik (NM_178768.3,524-542).
cattccaggctccatgtta

SEQ ID NO: 804090 - DNA, 19 bp, Mus musculus
  siRNA target sequence for C230095G01Rik (NM_178768.3,528-546).
ccaggctccatgttaatca

SEQ ID NO: 804091 - DNA, 19 bp, Mus musculus
  siRNA target sequence for C230095G01Rik (NM_178768.3,529-547).
caggctccatgttaatcat

SEQ ID NO: 804092 - DNA, 19 bp, Mus musculus
  siRNA target sequence for C230095G01Rik (NM_178768.3,531-549).
ggctccatgttaatcatca

SEQ ID NO: 804093 - DNA, 19 bp, Mus musculus
  siRNA target sequence for C230095G01Rik (NM_178768.3,670-688).
gggacactgagcaaaccta

SEQ ID NO: 804094 - DNA, 19 bp, Mus musculus
  siRNA target sequence for C230095G01Rik (NM_178768.3,674-692).
cactgagcaaacctatact

SEQ ID NO: 804095 - DNA, 19 bp, Mus musculus
  siRNA target sequence for C230095G01Rik (NM_178768.3,676-694).
ctgagcaaacctatacttt

SEQ ID NO: 804096 - DNA, 19 bp, Mus musculus
  siRNA target sequence for C230095G01Rik (NM_178768.3,680-698).
gcaaacctatactttccat

SEQ ID NO: 804097 - DNA, 19 bp, Mus musculus
  siRNA target sequence for C230095G01Rik (NM_178768.3,735-753).
cacatgaagagcatcctaa

SEQ ID NO: 804098 - DNA, 19 bp, Mus musculus
  siRNA target sequence for C230095G01Rik (NM_178768.3,784-802).
cccaagataccctaatgga

SEQ ID NO: 804099 - DNA, 19 bp, Mus musculus
  siRNA target sequence for C230095G01Rik (NM_178768.3,822-840).
gactccttggccaagaaaa

SEQ ID NO: 804100 - DNA, 19 bp, Mus musculus
  siRNA target sequence for A330096O15Rik (NM_178773.3,280-298).
ctggaatcactaatggaaa

SEQ ID NO: 804101 - DNA, 19 bp, Mus musculus
  siRNA target sequence for A330096O15Rik (NM_178773.3,342-360).
catcagctggatatgcaaa

SEQ ID NO: 804102 - DNA, 19 bp, Mus musculus
  siRNA target sequence for A330096O15Rik (NM_178773.3,382-400).
gcgatgtggacttttcaga

SEQ ID NO: 804103 - DNA, 19 bp, Mus musculus
  siRNA target sequence for A330096O15Rik (NM_178773.3,397-415).
cagagattcttaatgcaat

SEQ ID NO: 804104 - DNA, 19 bp, Mus musculus
  siRNA target sequence for A330096O15Rik (NM_178773.3,401-419).
gattcttaatgcaatacaa

SEQ ID NO: 804105 - DNA, 19 bp, Mus musculus
  siRNA target sequence for A330096O15Rik (NM_178773.3,425-443).
ggccaaggatgtcaatatt

SEQ ID NO: 804106 - DNA, 19 bp, Mus musculus
  siRNA target sequence for A330096O15Rik (NM_178773.3,428-446).
caaggatgtcaatattctt

SEQ ID NO: 804107 - DNA, 19 bp, Mus musculus
  siRNA target sequence for A330096O15Rik (NM_178773.3,474-492).
ccttgcaaagatgatgatt

SEQ ID NO: 804108 - DNA, 19 bp, Mus musculus
  siRNA target sequence for A330096O15Rik (NM_178773.3,562-580).
cagtgcgagaacgaaacaa

SEQ ID NO: 804109 - DNA, 19 bp, Mus musculus
  siRNA target sequence for A330096O15Rik (NM_178773.3,564-582).
gtgcgagaacgaaacaaat

SEQ ID NO: 804110 - DNA, 19 bp, Mus musculus
  siRNA target sequence for A330096O15Rik (NM_178773.3,607-625).
gaaaatgtcgaattgacta

SEQ ID NO: 804111 - DNA, 19 bp, Mus musculus
  siRNA target sequence for A330096O15Rik (NM_178773.3,613-631).
gtcgaattgactacattct

SEQ ID NO: 804112 - DNA, 19 bp, Mus musculus
  siRNA target sequence for A330096O15Rik (NM_178773.3,630-648).
cttgtgtacagaaaatcca

SEQ ID NO: 804113 - DNA, 19 bp, Mus musculus
  siRNA target sequence for A330096O15Rik (NM_178773.3,646-664).
ccaaccctcagactgaaaa

SEQ ID NO: 804114 - DNA, 19 bp, Mus musculus
  siRNA target sequence for A330096O15Rik (NM_178773.3,650-668).
ccctcagactgaaaagaga

SEQ ID NO: 804115 - DNA, 19 bp, Mus musculus
  siRNA target sequence for A330096O15Rik (NM_178773.3,658-676).
ctgaaaagagagaagtgtt

SEQ ID NO: 804116 - DNA, 19 bp, Mus musculus
  siRNA target sequence for A330096O15Rik (NM_178773.3,672-690).
gtgtttgaaagaaatatta

SEQ ID NO: 804117 - DNA, 19 bp, Mus musculus
  siRNA target sequence for A330096O15Rik (NM_178773.3,713-731).
gaaagagtcctctctaata

SEQ ID NO: 804118 - DNA, 19 bp, Mus musculus
  siRNA target sequence for A330096O15Rik (NM_178773.3,717-735).
gagtcctctctaataaata

SEQ ID NO: 804119 - DNA, 19 bp, Mus musculus
  siRNA target sequence for A330096O15Rik (NM_178773.3,719-737).
gtcctctctaataaatagt

SEQ ID NO: 804120 - DNA, 19 bp, Mus musculus
  siRNA target sequence for A330096O15Rik (NM_178773.3,726-744).
ctaataaatagtgacatta

SEQ ID NO: 804121 - DNA, 19 bp, Mus musculus
  siRNA target sequence for A330096O15Rik (NM_178773.3,736-754).
gtgacattatctttgtgaa

SEQ ID NO: 804122 - DNA, 19 bp, Mus musculus
  siRNA target sequence for A330096O15Rik (NM_178773.3,769-787).
gggaagtccttggaagata

SEQ ID NO: 804123 - DNA, 19 bp, Mus musculus
  siRNA target sequence for A330096O15Rik (NM_178773.3,857-875).
catgagcaggatcgataaa

SEQ ID NO: 804124 - DNA, 19 bp, Mus musculus
  siRNA target sequence for A330096O15Rik (NM_178773.3,860-878).
gagcaggatcgataaacaa

SEQ ID NO: 804125 - DNA, 19 bp, Mus musculus
  siRNA target sequence for A330096O15Rik (NM_178773.3,862-880).
gcaggatcgataaacaaat

SEQ ID NO: 804126 - DNA, 19 bp, Mus musculus
  siRNA target sequence for A330096O15Rik (NM_178773.3,863-881).
caggatcgataaacaaata

SEQ ID NO: 804127 - DNA, 19 bp, Mus musculus
  siRNA target sequence for A330096O15Rik (NM_178773.3,884-902).
caggttccggagatggtta

SEQ ID NO: 804128 - DNA, 19 bp, Mus musculus
  siRNA target sequence for A330096O15Rik (NM_178773.3,942-960).
gacctggaagagaatgact

SEQ ID NO: 804129 - DNA, 19 bp, Mus musculus
  siRNA target sequence for A330096O15Rik (NM_178773.3,988-1006).
ggatccatcacttcatcat

SEQ ID NO: 804130 - DNA, 19 bp, Mus musculus
  siRNA target sequence for A330096O15Rik (NM_178773.3,1045-1063).
gcagaatcgtgcatcatat

SEQ ID NO: 804131 - DNA, 19 bp, Mus musculus
  siRNA target sequence for A330096O15Rik (NM_178773.3,1046-1064).
cagaatcgtgcatcatatt

SEQ ID NO: 804132 - DNA, 19 bp, Mus musculus
  siRNA target sequence for A330096O15Rik (NM_178773.3,1048-1066).
gaatcgtgcatcatatttt

SEQ ID NO: 804133 - DNA, 19 bp, Mus musculus
  siRNA target sequence for A330096O15Rik (NM_178773.3,1052-1070).
cgtgcatcatattttacaa

SEQ ID NO: 804134 - DNA, 19 bp, Mus musculus
  siRNA target sequence for A330096O15Rik (NM_178773.3,1104-1122).
ggtctgaaccgcttgctta

SEQ ID NO: 804135 - DNA, 19 bp, Mus musculus
  siRNA target sequence for A330096O15Rik (NM_178773.3,1150-1168).
ccctgcatgagggaagtta

SEQ ID NO: 804136 - DNA, 19 bp, Mus musculus
  siRNA target sequence for A330096O15Rik (NM_178773.3,1152-1170).
ctgcatgagggaagttaca

SEQ ID NO: 804137 - DNA, 19 bp, Mus musculus
  siRNA target sequence for A330096O15Rik (NM_178773.3,1208-1226).
ccaccgacatctactgtat

SEQ ID NO: 804138 - DNA, 19 bp, Mus musculus
  siRNA target sequence for A330096O15Rik (NM_178773.3,1212-1230).
cgacatctactgtatgagt

SEQ ID NO: 804139 - DNA, 19 bp, Mus musculus
  siRNA target sequence for A330096O15Rik (NM_178773.3,1243-1261).
ggggcgtgtggtacaagta

SEQ ID NO: 804140 - DNA, 19 bp, Mus musculus
  siRNA target sequence for A330096O15Rik (NM_178773.3,1272-1290).
gatcttgtcaggcgatatt

SEQ ID NO: 804141 - DNA, 19 bp, Mus musculus
  siRNA target sequence for A330096O15Rik (NM_178773.3,1406-1424).
ctgccaagtcagtaaagaa

SEQ ID NO: 804142 - DNA, 19 bp, Mus musculus
  siRNA target sequence for A330096O15Rik (NM_178773.3,1408-1426).
gccaagtcagtaaagaagt

SEQ ID NO: 804143 - DNA, 19 bp, Mus musculus
  siRNA target sequence for A330096O15Rik (NM_178773.3,1511-1529).
caaggtgacccaccttttt

SEQ ID NO: 804144 - DNA, 19 bp, Mus musculus
  siRNA target sequence for A330096O15Rik (NM_178773.3,1517-1535).
gacccacctttttgacaat

SEQ ID NO: 804145 - DNA, 19 bp, Mus musculus
  siRNA target sequence for 9630019K15Rik (NM_178774.3,321-339).
ctcggcagagtcatgtcat

SEQ ID NO: 804146 - DNA, 19 bp, Mus musculus
  siRNA target sequence for C030030A07Rik (NM_178776.2,1598-1616).
gatccaagctgccaaacta

SEQ ID NO: 804147 - DNA, 19 bp, Mus musculus
  siRNA target sequence for C030030A07Rik (NM_178776.2,1602-1620).
caagctgccaaactattct

SEQ ID NO: 804148 - DNA, 19 bp, Mus musculus
  siRNA target sequence for C030030A07Rik (NM_178776.2,1656-1674).
cggttcgttgagctgttta

SEQ ID NO: 804149 - DNA, 19 bp, Mus musculus
  siRNA target sequence for C030030A07Rik (NM_178776.2,1657-1675).
ggttcgttgagctgtttaa

SEQ ID NO: 804150 - DNA, 19 bp, Mus musculus
  siRNA target sequence for C030030A07Rik (NM_178776.2,1715-1733).
cgaagagagctgcattaaa

SEQ ID NO: 804151 - DNA, 19 bp, Mus musculus
  siRNA target sequence for C030030A07Rik (NM_178776.2,1723-1741).
gctgcattaaagatttctt

SEQ ID NO: 804152 - DNA, 19 bp, Mus musculus
  siRNA target sequence for C030030A07Rik (NM_178776.2,1881-1899).
caccacaccgcggaagata

SEQ ID NO: 804153 - DNA, 19 bp, Mus musculus
  siRNA target sequence for C030030A07Rik (NM_178776.2,1945-1963).
ccagtcatgtgcttgtgaa

SEQ ID NO: 804154 - DNA, 19 bp, Mus musculus
  siRNA target sequence for C030030A07Rik (NM_178776.2,1946-1964).
cagtcatgtgcttgtgaat

SEQ ID NO: 804155 - DNA, 19 bp, Mus musculus
  siRNA target sequence for C030030A07Rik (NM_178776.2,1948-1966).
gtcatgtgcttgtgaatct

SEQ ID NO: 804156 - DNA, 19 bp, Mus musculus
  siRNA target sequence for C030030A07Rik (NM_178776.2,1955-1973).
gcttgtgaatctagaaact

SEQ ID NO: 804157 - DNA, 19 bp, Mus musculus
  siRNA target sequence for C030030A07Rik (NM_178776.2,1999-2017).
ccatcatgggtcttcgatt

SEQ ID NO: 804158 - DNA, 19 bp, Mus musculus
  siRNA target sequence for C030030A07Rik (NM_178776.2,2000-2018).
catcatgggtcttcgatta

SEQ ID NO: 804159 - DNA, 19 bp, Mus musculus
  siRNA target sequence for C030030A07Rik (NM_178776.2,2003-2021).
catgggtcttcgattaagt

SEQ ID NO: 804160 - DNA, 19 bp, Mus musculus
  siRNA target sequence for C030030A07Rik (NM_178776.2,2268-2286).
ggggatatctctgtactta

SEQ ID NO: 804161 - DNA, 19 bp, Mus musculus
  siRNA target sequence for A930041I02Rik (NM_178778.2,163-181).
ccccgaaaacggaaaagca

SEQ ID NO: 804162 - DNA, 19 bp, Mus musculus
  siRNA target sequence for A930041I02Rik (NM_178778.2,174-192).
gaaaagcaggactgaattt

SEQ ID NO: 804163 - DNA, 19 bp, Mus musculus
  siRNA target sequence for A930041I02Rik (NM_178778.2,180-198).
caggactgaatttactctt

SEQ ID NO: 804164 - DNA, 19 bp, Mus musculus
  siRNA target sequence for A930041I02Rik (NM_178778.2,182-200).
ggactgaatttactcttaa

SEQ ID NO: 804165 - DNA, 19 bp, Mus musculus
  siRNA target sequence for A930041I02Rik (NM_178778.2,348-366).
gtcctacttcggaagaact

SEQ ID NO: 804166 - DNA, 19 bp, Mus musculus
  siRNA target sequence for A930041I02Rik (NM_178778.2,350-368).
cctacttcggaagaacttt

SEQ ID NO: 804167 - DNA, 19 bp, Mus musculus
  siRNA target sequence for A930041I02Rik (NM_178778.2,351-369).
ctacttcggaagaactttt

SEQ ID NO: 804168 - DNA, 19 bp, Mus musculus
  siRNA target sequence for A930041I02Rik (NM_178778.2,435-453).
cttgaagcggtggcaaata

SEQ ID NO: 804169 - DNA, 19 bp, Mus musculus
  siRNA target sequence for A930041I02Rik (NM_178778.2,506-524).
cttctgagaccagttatct

SEQ ID NO: 804170 - DNA, 19 bp, Mus musculus
  siRNA target sequence for A930041I02Rik (NM_178778.2,550-568).
gcaatcagacagagatcat

SEQ ID NO: 804171 - DNA, 19 bp, Mus musculus
  siRNA target sequence for A930041I02Rik (NM_178778.2,551-569).
caatcagacagagatcata

SEQ ID NO: 804172 - DNA, 19 bp, Mus musculus
  siRNA target sequence for A930041I02Rik (NM_178778.2,566-584).
catactactctcaagtcaa

SEQ ID NO: 804173 - DNA, 19 bp, Mus musculus
  siRNA target sequence for A930041I02Rik (NM_178778.2,596-614).
ggcctgagttggttgttaa

SEQ ID NO: 804174 - DNA, 19 bp, Mus musculus
  siRNA target sequence for A930041I02Rik (NM_178778.2,598-616).
cctgagttggttgttaaga

SEQ ID NO: 804175 - DNA, 19 bp, Mus musculus
  siRNA target sequence for A930041I02Rik (NM_178778.2,621-639).
ccgatactacgcaagattt

SEQ ID NO: 804176 - DNA, 19 bp, Mus musculus
  siRNA target sequence for A930041I02Rik (NM_178778.2,622-640).
cgatactacgcaagattta

SEQ ID NO: 804177 - DNA, 19 bp, Mus musculus
  siRNA target sequence for A930041I02Rik (NM_178778.2,627-645).
ctacgcaagatttatagta

SEQ ID NO: 804178 - DNA, 19 bp, Mus musculus
  siRNA target sequence for A930041I02Rik (NM_178778.2,630-648).
cgcaagatttatagtagtt

SEQ ID NO: 804179 - DNA, 19 bp, Mus musculus
  siRNA target sequence for A930041I02Rik (NM_178778.2,631-649).
gcaagatttatagtagttt

SEQ ID NO: 804180 - DNA, 19 bp, Mus musculus
  siRNA target sequence for A930041I02Rik (NM_178778.2,722-740).
ctcatcgctttaatactga

SEQ ID NO: 804181 - DNA, 19 bp, Mus musculus
  siRNA target sequence for A930041I02Rik (NM_178778.2,796-814).
gaccctgtgatggtgttaa

SEQ ID NO: 804182 - DNA, 19 bp, Mus musculus
  siRNA target sequence for A930041I02Rik (NM_178778.2,798-816).
ccctgtgatggtgttaaat

SEQ ID NO: 804183 - DNA, 19 bp, Mus musculus
  siRNA target sequence for A930041I02Rik (NM_178778.2,800-818).
ctgtgatggtgttaaatga

SEQ ID NO: 804184 - DNA, 19 bp, Mus musculus
  siRNA target sequence for A930041I02Rik (NM_178778.2,907-925).
ctggctgatgcactcatta

SEQ ID NO: 804185 - DNA, 19 bp, Mus musculus
  siRNA target sequence for A930041I02Rik (NM_178778.2,909-927).
ggctgatgcactcattatt

SEQ ID NO: 804186 - DNA, 19 bp, Mus musculus
  siRNA target sequence for A930041I02Rik (NM_178778.2,916-934).
gcactcattattggtaatt

SEQ ID NO: 804187 - DNA, 19 bp, Mus musculus
  siRNA target sequence for A930041I02Rik (NM_178778.2,919-937).
ctcattattggtaattgta

SEQ ID NO: 804188 - DNA, 19 bp, Mus musculus
  siRNA target sequence for A930041I02Rik (NM_178778.2,921-939).
cattattggtaattgtaat

SEQ ID NO: 804189 - DNA, 19 bp, Mus musculus
  siRNA target sequence for A930041I02Rik (NM_178778.2,935-953).
gtaataatcaggtcaaatt

SEQ ID NO: 804190 - DNA, 19 bp, Mus musculus
  siRNA target sequence for A930041I02Rik (NM_178778.2,948-966).
caaattcagcgaattaact

SEQ ID NO: 804191 - DNA, 19 bp, Mus musculus
  siRNA target sequence for A930041I02Rik (NM_178778.2,956-974).
gcgaattaactgttgacat

SEQ ID NO: 804192 - DNA, 19 bp, Mus musculus
  siRNA target sequence for A930041I02Rik (NM_178778.2,1002-1020).
ggagcctatgaatttagct

SEQ ID NO: 804193 - DNA, 19 bp, Mus musculus
  siRNA target sequence for A930041I02Rik (NM_178778.2,1082-1100).
cccacaagtatctactcta

SEQ ID NO: 804194 - DNA, 19 bp, Mus musculus
  siRNA target sequence for A930041I02Rik (NM_178778.2,1106-1124).
cgactttcagccaactgta

SEQ ID NO: 804195 - DNA, 19 bp, Mus musculus
  siRNA target sequence for A930041I02Rik (NM_178778.2,1149-1167).
ggagctgcctgccaatagt

SEQ ID NO: 804196 - DNA, 19 bp, Mus musculus
  siRNA target sequence for A930041I02Rik (NM_178778.2,1222-1240).
ggtgaaggtccttatgact

SEQ ID NO: 804197 - DNA, 19 bp, Mus musculus
  siRNA target sequence for A930041I02Rik (NM_178778.2,1223-1241).
gtgaaggtccttatgactt

SEQ ID NO: 804198 - DNA, 19 bp, Mus musculus
  siRNA target sequence for A930041I02Rik (NM_178778.2,1262-1280).
gtaaccgggacattatcaa

SEQ ID NO: 804199 - DNA, 19 bp, Mus musculus
  siRNA target sequence for A930041I02Rik (NM_178778.2,1337-1355).
ctggagatctctatccatt

SEQ ID NO: 804200 - DNA, 19 bp, Mus musculus
  siRNA target sequence for A930041I02Rik (NM_178778.2,1347-1365).
ctatccattcacaaggaaa

SEQ ID NO: 804201 - DNA, 19 bp, Mus musculus
  siRNA target sequence for A930041I02Rik (NM_178778.2,1399-1417).
gttgcctacaagaatttta

SEQ ID NO: 804202 - DNA, 19 bp, Mus musculus
  siRNA target sequence for A930041I02Rik (NM_178778.2,1402-1420).
gcctacaagaattttacaa

SEQ ID NO: 804203 - DNA, 19 bp, Mus musculus
  siRNA target sequence for A930041I02Rik (NM_178778.2,1458-1476).
cacggcatatccaaaagct

SEQ ID NO: 804204 - DNA, 19 bp, Mus musculus
  siRNA target sequence for A930041I02Rik (NM_178778.2,1460-1478).
cggcatatccaaaagcttt

SEQ ID NO: 804205 - DNA, 19 bp, Mus musculus
  siRNA target sequence for A930041I02Rik (NM_178778.2,1504-1522).
ctcttcacgctctttttga

SEQ ID NO: 804206 - DNA, 19 bp, Mus musculus
  siRNA target sequence for A930041I02Rik (NM_178778.2,1509-1527).
cacgctctttttgaacaat

SEQ ID NO: 804207 - DNA, 19 bp, Mus musculus
  siRNA target sequence for A930041I02Rik (NM_178778.2,1529-1547).
ctctaatggccttcctatt

SEQ ID NO: 804208 - DNA, 19 bp, Mus musculus
  siRNA target sequence for A930041I02Rik (NM_178778.2,1581-1599).
gtgggaaaagtgtcaagaa

SEQ ID NO: 804209 - DNA, 19 bp, Mus musculus
  siRNA target sequence for A930041I02Rik (NM_178778.2,1592-1610).
gtcaagaatatcttcgaaa

SEQ ID NO: 804210 - DNA, 19 bp, Mus musculus
  siRNA target sequence for A930041I02Rik (NM_178778.2,1638-1656).
gacccattcacgttcaata

SEQ ID NO: 804211 - DNA, 19 bp, Mus musculus
  siRNA target sequence for A930041I02Rik (NM_178778.2,1640-1658).
cccattcacgttcaataga

SEQ ID NO: 804212 - DNA, 19 bp, Mus musculus
  siRNA target sequence for A930041I02Rik (NM_178778.2,1641-1659).
ccattcacgttcaatagat

SEQ ID NO: 804213 - DNA, 19 bp, Mus musculus
  siRNA target sequence for A930041I02Rik (NM_178778.2,1672-1690).
cagttttttggagatgaat

SEQ ID NO: 804214 - DNA, 19 bp, Mus musculus
  siRNA target sequence for A930041I02Rik (NM_178778.2,1682-1700).
gagatgaatttcttcgatt

SEQ ID NO: 804215 - DNA, 19 bp, Mus musculus
  siRNA target sequence for A930041I02Rik (NM_178778.2,1702-1720).
cttctcacaaggtttgtct

SEQ ID NO: 804216 - DNA, 19 bp, Mus musculus
  siRNA target sequence for A930041I02Rik (NM_178778.2,1789-1807).
caactgccaagggatgaaa

SEQ ID NO: 804217 - DNA, 19 bp, Mus musculus
  siRNA target sequence for A930041I02Rik (NM_178778.2,1853-1871).
ccattctggatgttcgaaa

SEQ ID NO: 804218 - DNA, 19 bp, Mus musculus
  siRNA target sequence for A930041I02Rik (NM_178778.2,1868-1886).
gaaacatcttctttgagaa

SEQ ID NO: 804219 - DNA, 19 bp, Mus musculus
  siRNA target sequence for A930041I02Rik (NM_178778.2,1884-1902).
gaattctatggatgactat

SEQ ID NO: 804220 - DNA, 19 bp, Mus musculus
  siRNA target sequence for A930029B02Rik (NM_178779.2,640-658).
cgacgaaggcccaagttgt

SEQ ID NO: 804221 - DNA, 19 bp, Mus musculus
  siRNA target sequence for A930029B02Rik (NM_178779.2,641-659).
gacgaaggcccaagttgtt

SEQ ID NO: 804222 - DNA, 19 bp, Mus musculus
  siRNA target sequence for A930029B02Rik (NM_178779.2,737-755).
gccgtggcatcaccaaatt

SEQ ID NO: 804223 - DNA, 19 bp, Mus musculus
  siRNA target sequence for A930029B02Rik (NM_178779.2,762-780).
gggcttctctgtatcacaa

SEQ ID NO: 804224 - DNA, 19 bp, Mus musculus
  siRNA target sequence for A930029B02Rik (NM_178779.2,835-853).
cataccccagtcttcatca

SEQ ID NO: 804225 - DNA, 19 bp, Mus musculus
  siRNA target sequence for A930029B02Rik (NM_178779.2,849-867).
catcaaacttccaagcaat

SEQ ID NO: 804226 - DNA, 19 bp, Mus musculus
  siRNA target sequence for E130307J04Rik (NM_178780.2,309-327).
gccagatcattccaatcta

SEQ ID NO: 804227 - DNA, 19 bp, Mus musculus
  siRNA target sequence for E130307J04Rik (NM_178780.2,433-451).
caggaagattaccaacttt

SEQ ID NO: 804228 - DNA, 19 bp, Mus musculus
  siRNA target sequence for E130307J04Rik (NM_178780.2,494-512).
gccatggaaaaattaatca

SEQ ID NO: 804229 - DNA, 19 bp, Mus musculus
  siRNA target sequence for E130307J04Rik (NM_178780.2,495-513).
ccatggaaaaattaatcaa

SEQ ID NO: 804230 - DNA, 19 bp, Mus musculus
  siRNA target sequence for E130307J04Rik (NM_178780.2,511-529).
caacagagttggacctaat

SEQ ID NO: 804231 - DNA, 19 bp, Mus musculus
  siRNA target sequence for E130307J04Rik (NM_178780.2,558-576).
ctgaccaagagaaacgatt

SEQ ID NO: 804232 - DNA, 19 bp, Mus musculus
  siRNA target sequence for E130307J04Rik (NM_178780.2,598-616).
caccagggtcatgaaagaa

SEQ ID NO: 804233 - DNA, 19 bp, Mus musculus
  siRNA target sequence for E130307J04Rik (NM_178780.2,651-669).
ctgaggaagccccatacat

SEQ ID NO: 804234 - DNA, 19 bp, Mus musculus
  siRNA target sequence for 9330186A19Rik (NM_178781.2,212-230).
cagggacttcgatttccta

SEQ ID NO: 804235 - DNA, 19 bp, Mus musculus
  siRNA target sequence for 9330186A19Rik (NM_178781.2,316-334).
gcctggacaagtgtgatat

SEQ ID NO: 804236 - DNA, 19 bp, Mus musculus
  siRNA target sequence for 9330186A19Rik (NM_178781.2,565-583).
caaacttcgaggcttcttt

SEQ ID NO: 804237 - DNA, 19 bp, Mus musculus
  siRNA target sequence for 9330186A19Rik (NM_178781.2,575-593).
ggcttctttgcctgatata

SEQ ID NO: 804238 - DNA, 19 bp, Mus musculus
  siRNA target sequence for 9330186A19Rik (NM_178781.2,576-594).
gcttctttgcctgatataa

SEQ ID NO: 804239 - DNA, 19 bp, Mus musculus
  siRNA target sequence for 9330186A19Rik (NM_178781.2,652-670).
ccaccgtgcacgaagatga

SEQ ID NO: 804240 - DNA, 19 bp, Mus musculus
  siRNA target sequence for 9330186A19Rik (NM_178781.2,653-671).
caccgtgcacgaagatgat

SEQ ID NO: 804241 - DNA, 19 bp, Mus musculus
  siRNA target sequence for 9330186A19Rik (NM_178781.2,895-913).
ggcgaagccacattaacca

SEQ ID NO: 804242 - DNA, 19 bp, Mus musculus
  siRNA target sequence for 9330186A19Rik (NM_178781.2,1044-1062).
cggggaatcgggtccaaat

SEQ ID NO: 804243 - DNA, 19 bp, Mus musculus
  siRNA target sequence for 9330186A19Rik (NM_178781.2,1045-1063).
ggggaatcgggtccaaatt

SEQ ID NO: 804244 - DNA, 19 bp, Mus musculus
  siRNA target sequence for 9330186A19Rik (NM_178781.2,1046-1064).
gggaatcgggtccaaattt

SEQ ID NO: 804245 - DNA, 19 bp, Mus musculus
  siRNA target sequence for 9330186A19Rik (NM_178781.2,1048-1066).
gaatcgggtccaaatttgt

SEQ ID NO: 804246 - DNA, 19 bp, Mus musculus
  siRNA target sequence for 9330186A19Rik (NM_178781.2,1191-1209).
ctggacacgtacaacaaca

SEQ ID NO: 804247 - DNA, 19 bp, Mus musculus
  siRNA target sequence for 9330186A19Rik (NM_178781.2,1228-1246).
cgtggcttgccaactgtaa

SEQ ID NO: 804248 - DNA, 19 bp, Mus musculus
  siRNA target sequence for 9330186A19Rik (NM_178781.2,1298-1316).
ggactcggaagaaaagcaa

SEQ ID NO: 804249 - DNA, 19 bp, Mus musculus
  siRNA target sequence for 9330186A19Rik (NM_178781.2,1299-1317).
gactcggaagaaaagcaaa

SEQ ID NO: 804250 - DNA, 19 bp, Mus musculus
  siRNA target sequence for 9330186A19Rik (NM_178781.2,1379-1397).
cctgctctatcaatcctat

SEQ ID NO: 804251 - DNA, 19 bp, Mus musculus
  siRNA target sequence for 9330186A19Rik (NM_178781.2,1383-1401).
ctctatcaatcctattgca

SEQ ID NO: 804252 - DNA, 19 bp, Mus musculus
  siRNA target sequence for 9330186A19Rik (NM_178781.2,1652-1670).
gtggcccaacgacatcttt

SEQ ID NO: 804253 - DNA, 19 bp, Mus musculus
  siRNA target sequence for 9330186A19Rik (NM_178781.2,1656-1674).
cccaacgacatctttggaa

SEQ ID NO: 804254 - DNA, 19 bp, Mus musculus
  siRNA target sequence for 9330186A19Rik (NM_178781.2,1692-1710).
gtccagacactcctgaata

SEQ ID NO: 804255 - DNA, 19 bp, Mus musculus
  siRNA target sequence for 9330186A19Rik (NM_178781.2,1694-1712).
ccagacactcctgaatatt

SEQ ID NO: 804256 - DNA, 19 bp, Mus musculus
  siRNA target sequence for 9330186A19Rik (NM_178781.2,1733-1751).
gggacagacgggtacttat

SEQ ID NO: 804257 - DNA, 19 bp, Mus musculus
  siRNA target sequence for B930011H20Rik (NM_178782.3,134-152).
ctaaccagcctctggtata

SEQ ID NO: 804258 - DNA, 19 bp, Mus musculus
  siRNA target sequence for B930011H20Rik (NM_178782.3,292-310).
gacctccgctcttatccat

SEQ ID NO: 804259 - DNA, 19 bp, Mus musculus
  siRNA target sequence for B930011H20Rik (NM_178782.3,300-318).
ctcttatccatgtgcattt

SEQ ID NO: 804260 - DNA, 19 bp, Mus musculus
  siRNA target sequence for B930011H20Rik (NM_178782.3,332-350).
ctttggcttcagattcaaa

SEQ ID NO: 804261 - DNA, 19 bp, Mus musculus
  siRNA target sequence for B930011H20Rik (NM_178782.3,485-503).
caacttcacagcttttgct

SEQ ID NO: 804262 - DNA, 19 bp, Mus musculus
  siRNA target sequence for B930011H20Rik (NM_178782.3,553-571).
ggtggcaccgatcaacaaa

SEQ ID NO: 804263 - DNA, 19 bp, Mus musculus
  siRNA target sequence for B930011H20Rik (NM_178782.3,557-575).
gcaccgatcaacaaacaga

SEQ ID NO: 804264 - DNA, 19 bp, Mus musculus
  siRNA target sequence for B930011H20Rik (NM_178782.3,558-576).
caccgatcaacaaacagaa

SEQ ID NO: 804265 - DNA, 19 bp, Mus musculus
  siRNA target sequence for B930011H20Rik (NM_178782.3,705-723).
gccgaaccagcgtaaaaca

SEQ ID NO: 804266 - DNA, 19 bp, Mus musculus
  siRNA target sequence for B930011H20Rik (NM_178782.3,811-829).
gctgccggcagcaacgtta

SEQ ID NO: 804267 - DNA, 19 bp, Mus musculus
  siRNA target sequence for B930011H20Rik (NM_178782.3,845-863).
ccacctcttcaccttttgt

SEQ ID NO: 804268 - DNA, 19 bp, Mus musculus
  siRNA target sequence for B930011H20Rik (NM_178782.3,848-866).
cctcttcaccttttgttat

SEQ ID NO: 804269 - DNA, 19 bp, Mus musculus
  siRNA target sequence for B930011H20Rik (NM_178782.3,851-869).
cttcaccttttgttatctt

SEQ ID NO: 804270 - DNA, 19 bp, Mus musculus
  siRNA target sequence for B930011H20Rik (NM_178782.3,977-995).
catccctgctgttgaacaa

SEQ ID NO: 804271 - DNA, 19 bp, Mus musculus
  siRNA target sequence for B930011H20Rik (NM_178782.3,1221-1239).
gcctacaggcctgacaaat

SEQ ID NO: 804272 - DNA, 19 bp, Mus musculus
  siRNA target sequence for B930011H20Rik (NM_178782.3,1222-1240).
cctacaggcctgacaaata

SEQ ID NO: 804273 - DNA, 19 bp, Mus musculus
  siRNA target sequence for B930011H20Rik (NM_178782.3,1223-1241).
ctacaggcctgacaaatat

SEQ ID NO: 804274 - DNA, 19 bp, Mus musculus
  siRNA target sequence for B930011H20Rik (NM_178782.3,1226-1244).
caggcctgacaaatatgta

SEQ ID NO: 804275 - DNA, 19 bp, Mus musculus
  siRNA target sequence for B930011H20Rik (NM_178782.3,1383-1401).
caggcccaccagcattgtt

SEQ ID NO: 804276 - DNA, 19 bp, Mus musculus
  siRNA target sequence for B930011H20Rik (NM_178782.3,1392-1410).
cagcattgtttctgagttt

SEQ ID NO: 804277 - DNA, 19 bp, Mus musculus
  siRNA target sequence for B930011H20Rik (NM_178782.3,1507-1525).
gtcacaaagaacaaaaatt

SEQ ID NO: 804278 - DNA, 19 bp, Mus musculus
  siRNA target sequence for B930011H20Rik (NM_178782.3,1542-1560).
gccttatgaagaacaagtt

SEQ ID NO: 804279 - DNA, 19 bp, Mus musculus
  siRNA target sequence for B930011H20Rik (NM_178782.3,1543-1561).
ccttatgaagaacaagtta

SEQ ID NO: 804280 - DNA, 19 bp, Mus musculus
  siRNA target sequence for B930011H20Rik (NM_178782.3,1625-1643).
gtggggacatgggagtaaa

SEQ ID NO: 804281 - DNA, 19 bp, Mus musculus
  siRNA target sequence for B930011H20Rik (NM_178782.3,1679-1697).
ctgacagtacccctaagat

SEQ ID NO: 804282 - DNA, 19 bp, Mus musculus
  siRNA target sequence for B930011H20Rik (NM_178782.3,1735-1753).
ggagacacaaagcctaaaa

SEQ ID NO: 804283 - DNA, 19 bp, Mus musculus
  siRNA target sequence for B930011H20Rik (NM_178782.3,1759-1777).
gtgctggctacctatatgt

SEQ ID NO: 804284 - DNA, 19 bp, Mus musculus
  siRNA target sequence for B930011H20Rik (NM_178782.3,1821-1839).
gcctgagctgcctttgcta

SEQ ID NO: 804285 - DNA, 19 bp, Mus musculus
  siRNA target sequence for B930011H20Rik (NM_178782.3,1851-1869).
ccactctaaggaactcatt

SEQ ID NO: 804286 - DNA, 19 bp, Mus musculus
  siRNA target sequence for B930011H20Rik (NM_178782.3,1852-1870).
cactctaaggaactcattt

SEQ ID NO: 804287 - DNA, 19 bp, Mus musculus
  siRNA target sequence for B930011H20Rik (NM_178782.3,1856-1874).
ctaaggaactcattttaga

SEQ ID NO: 804288 - DNA, 19 bp, Mus musculus
  siRNA target sequence for B930011H20Rik (NM_178782.3,1969-1987).
ggcgatgtggtcttcaatt

SEQ ID NO: 804289 - DNA, 19 bp, Mus musculus
  siRNA target sequence for B930011H20Rik (NM_178782.3,1970-1988).
gcgatgtggtcttcaattt

SEQ ID NO: 804290 - DNA, 19 bp, Mus musculus
  siRNA target sequence for B930011H20Rik (NM_178782.3,2150-2168).
ccaagaaggtcaagtgtaa

SEQ ID NO: 804291 - DNA, 19 bp, Mus musculus
  siRNA target sequence for B930011H20Rik (NM_178782.3,2154-2172).
gaaggtcaagtgtaacaaa

SEQ ID NO: 804292 - DNA, 19 bp, Mus musculus
  siRNA target sequence for B930011H20Rik (NM_178782.3,2500-2518).
cagtctggtagcatctgta

SEQ ID NO: 804293 - DNA, 19 bp, Mus musculus
  siRNA target sequence for B930011H20Rik (NM_178782.3,2511-2529).
catctgtagctcttttgct

SEQ ID NO: 804294 - DNA, 19 bp, Mus musculus
  siRNA target sequence for B930011H20Rik (NM_178782.3,2656-2674).
catcatgcccaggacaaaa

SEQ ID NO: 804295 - DNA, 19 bp, Mus musculus
  siRNA target sequence for B930011H20Rik (NM_178782.3,2818-2836).
cggcagaagagccgaaaat

SEQ ID NO: 804296 - DNA, 19 bp, Mus musculus
  siRNA target sequence for B930011H20Rik (NM_178782.3,2819-2837).
ggcagaagagccgaaaata

SEQ ID NO: 804297 - DNA, 19 bp, Mus musculus
  siRNA target sequence for B930011H20Rik (NM_178782.3,2843-2861).
ccggggagtacctgattga

SEQ ID NO: 804298 - DNA, 19 bp, Mus musculus
  siRNA target sequence for B930011H20Rik (NM_178782.3,2850-2868).
gtacctgattgaacaagaa

SEQ ID NO: 804299 - DNA, 19 bp, Mus musculus
  siRNA target sequence for B930011H20Rik (NM_178782.3,2902-2920).
gcccgtaagcagaagactt

SEQ ID NO: 804300 - DNA, 19 bp, Mus musculus
  siRNA target sequence for B930011H20Rik (NM_178782.3,2916-2934).
gacttcctcccaaagttca

SEQ ID NO: 804301 - DNA, 19 bp, Mus musculus
  siRNA target sequence for B930011H20Rik (NM_178782.3,2994-3012).
ctcaccaaacggtttcctt

SEQ ID NO: 804302 - DNA, 19 bp, Mus musculus
  siRNA target sequence for B930011H20Rik (NM_178782.3,3138-3156).
gcagaagacacgatcttct

SEQ ID NO: 804303 - DNA, 19 bp, Mus musculus
  siRNA target sequence for B930011H20Rik (NM_178782.3,3139-3157).
cagaagacacgatcttcta

SEQ ID NO: 804304 - DNA, 19 bp, Mus musculus
  siRNA target sequence for B930011H20Rik (NM_178782.3,3141-3159).
gaagacacgatcttctaaa

SEQ ID NO: 804305 - DNA, 19 bp, Mus musculus
  siRNA target sequence for B930011H20Rik (NM_178782.3,3144-3162).
gacacgatcttctaaatct

SEQ ID NO: 804306 - DNA, 19 bp, Mus musculus
  siRNA target sequence for B930011H20Rik (NM_178782.3,3268-3286).
gcacggagacttatagtga

SEQ ID NO: 804307 - DNA, 19 bp, Mus musculus
  siRNA target sequence for B930011H20Rik (NM_178782.3,3269-3287).
cacggagacttatagtgaa

SEQ ID NO: 804308 - DNA, 19 bp, Mus musculus
  siRNA target sequence for B930011H20Rik (NM_178782.3,3323-3341).
ctcgcctgggttataagga

SEQ ID NO: 804309 - DNA, 19 bp, Mus musculus
  siRNA target sequence for B930011H20Rik (NM_178782.3,3332-3350).
gttataaggacgtagttct

SEQ ID NO: 804310 - DNA, 19 bp, Mus musculus
  siRNA target sequence for B930011H20Rik (NM_178782.3,3501-3519).
cacaaggccagttcatgat

SEQ ID NO: 804311 - DNA, 19 bp, Mus musculus
  siRNA target sequence for B930011H20Rik (NM_178782.3,3697-3715).
gcgtcctgggatttctaca

SEQ ID NO: 804312 - DNA, 19 bp, Mus musculus
  siRNA target sequence for B930011H20Rik (NM_178782.3,3781-3799).
gccgagcaaggagatgatt

SEQ ID NO: 804313 - DNA, 19 bp, Mus musculus
  siRNA target sequence for B930011H20Rik (NM_178782.3,3783-3801).
cgagcaaggagatgattca

SEQ ID NO: 804314 - DNA, 19 bp, Mus musculus
  siRNA target sequence for B930011H20Rik (NM_178782.3,3802-3820).
gaacaggatgacttcatgt

SEQ ID NO: 804315 - DNA, 19 bp, Mus musculus
  siRNA target sequence for B930011H20Rik (NM_178782.3,3838-3856).
cctctcctcccttgttaca

SEQ ID NO: 804316 - DNA, 19 bp, Mus musculus
  siRNA target sequence for B930011H20Rik (NM_178782.3,3839-3857).
ctctcctcccttgttacaa

SEQ ID NO: 804317 - DNA, 19 bp, Mus musculus
  siRNA target sequence for Alg6 (NM_178784.2,178-196).
ggcagtcgtggtcttacta

SEQ ID NO: 804318 - DNA, 19 bp, Mus musculus
  siRNA target sequence for Alg6 (NM_178784.2,243-261).
ctggaaaaccacctatgtt

SEQ ID NO: 804319 - DNA, 19 bp, Mus musculus
  siRNA target sequence for Alg6 (NM_178784.2,255-273).
ctatgtttggtgattatga

SEQ ID NO: 804320 - DNA, 19 bp, Mus musculus
  siRNA target sequence for Alg6 (NM_178784.2,301-319).
ccttaatttaccagtcaaa

SEQ ID NO: 804321 - DNA, 19 bp, Mus musculus
  siRNA target sequence for A430107D22Rik (NM_178785.2,67-85).
cgttgcagagtgaagaaga

SEQ ID NO: 804322 - DNA, 19 bp, Mus musculus
  siRNA target sequence for A430107D22Rik (NM_178785.2,603-621).
gttcggacccctggaaaaa

SEQ ID NO: 804323 - DNA, 19 bp, Mus musculus
  siRNA target sequence for A430107D22Rik (NM_178785.2,607-625).
ggacccctggaaaaactga

SEQ ID NO: 804324 - DNA, 19 bp, Mus musculus
  siRNA target sequence for A430107D22Rik (NM_178785.2,653-671).
ccacaatgttcggaagtta

SEQ ID NO: 804325 - DNA, 19 bp, Mus musculus
  siRNA target sequence for A430107D22Rik (NM_178785.2,747-765).
gccctcggttccagagaat

SEQ ID NO: 804326 - DNA, 19 bp, Mus musculus
  siRNA target sequence for A430107D22Rik (NM_178785.2,1019-1037).
gctaccccgagcaactgta

SEQ ID NO: 804327 - DNA, 19 bp, Mus musculus
  siRNA target sequence for A430107D22Rik (NM_178785.2,1351-1369).
cgtcggagcgctataagga

SEQ ID NO: 804328 - DNA, 19 bp, Mus musculus
  siRNA target sequence for A430107D22Rik (NM_178785.2,1546-1564).
gccgtgaagcactgctatt

SEQ ID NO: 804329 - DNA, 19 bp, Mus musculus
  siRNA target sequence for A430107D22Rik (NM_178785.2,1555-1573).
cactgctattccgagaaaa

SEQ ID NO: 804330 - DNA, 19 bp, Mus musculus
  siRNA target sequence for A430107D22Rik (NM_178785.2,1557-1575).
ctgctattccgagaaaata

SEQ ID NO: 804331 - DNA, 19 bp, Mus musculus
  siRNA target sequence for A430107D22Rik (NM_178785.2,1560-1578).
ctattccgagaaaatacct

SEQ ID NO: 804332 - DNA, 19 bp, Mus musculus
  siRNA target sequence for A430107D22Rik (NM_178785.2,1585-1603).
caaaggccattgatgaata

SEQ ID NO: 804333 - DNA, 19 bp, Mus musculus
  siRNA target sequence for A430107D22Rik (NM_178785.2,1590-1608).
gccattgatgaatacatga

SEQ ID NO: 804334 - DNA, 19 bp, Mus musculus
  siRNA target sequence for A430107D22Rik (NM_178785.2,1591-1609).
ccattgatgaatacatgaa

SEQ ID NO: 804335 - DNA, 19 bp, Mus musculus
  siRNA target sequence for A430107D22Rik (NM_178785.2,1711-1729).
caccagagctgccaaaaca

SEQ ID NO: 804336 - DNA, 19 bp, Mus musculus
  siRNA target sequence for 9530098N22Rik (NM_178786.2,268-286).
gaagtacttacttcatact

SEQ ID NO: 804337 - DNA, 19 bp, Mus musculus
  siRNA target sequence for 9530098N22Rik (NM_178786.2,356-374).
ggcccatattggctacatt

SEQ ID NO: 804338 - DNA, 19 bp, Mus musculus
  siRNA target sequence for 9530098N22Rik (NM_178786.2,385-403).
gtagaactcaattgtcaat

SEQ ID NO: 804339 - DNA, 19 bp, Mus musculus
  siRNA target sequence for 9530098N22Rik (NM_178786.2,444-462).
gtttcggaaccgttataca

SEQ ID NO: 804340 - DNA, 19 bp, Mus musculus
  siRNA target sequence for 9530098N22Rik (NM_178786.2,461-479).
cacaacctgtgcacctata

SEQ ID NO: 804341 - DNA, 19 bp, Mus musculus
  siRNA target sequence for 9530098N22Rik (NM_178786.2,472-490).
cacctataccgtaatggta

SEQ ID NO: 804342 - DNA, 19 bp, Mus musculus
  siRNA target sequence for 9530098N22Rik (NM_178786.2,475-493).
ctataccgtaatggtaaaa

SEQ ID NO: 804343 - DNA, 19 bp, Mus musculus
  siRNA target sequence for 9530098N22Rik (NM_178786.2,480-498).
ccgtaatggtaaaaaccta

SEQ ID NO: 804344 - DNA, 19 bp, Mus musculus
  siRNA target sequence for 9530098N22Rik (NM_178786.2,568-586).
gtgatcctcaggattctta

SEQ ID NO: 804345 - DNA, 19 bp, Mus musculus
  siRNA target sequence for 9530098N22Rik (NM_178786.2,573-591).
cctcaggattcttaatgta

SEQ ID NO: 804346 - DNA, 19 bp, Mus musculus
  siRNA target sequence for 9530098N22Rik (NM_178786.2,576-594).
caggattcttaatgtaact

SEQ ID NO: 804347 - DNA, 19 bp, Mus musculus
  siRNA target sequence for 9530098N22Rik (NM_178786.2,579-597).
gattcttaatgtaactgtt

SEQ ID NO: 804348 - DNA, 19 bp, Mus musculus
  siRNA target sequence for 9530098N22Rik (NM_178786.2,700-718).
ctcatgcatacgcctaata

SEQ ID NO: 804349 - DNA, 19 bp, Mus musculus
  siRNA target sequence for 9530098N22Rik (NM_178786.2,702-720).
catgcatacgcctaatatt

SEQ ID NO: 804350 - DNA, 19 bp, Mus musculus
  siRNA target sequence for 9530098N22Rik (NM_178786.2,705-723).
gcatacgcctaatattaaa

SEQ ID NO: 804351 - DNA, 19 bp, Mus musculus
  siRNA target sequence for 9530098N22Rik (NM_178786.2,846-864).
gttcaacatgtcaatggtt

SEQ ID NO: 804352 - DNA, 19 bp, Mus musculus
  siRNA target sequence for 9530098N22Rik (NM_178786.2,881-899).
gctctcacaggaatgtcat

SEQ ID NO: 804353 - DNA, 19 bp, Mus musculus
  siRNA target sequence for 9530098N22Rik (NM_178786.2,993-1011).
gattctgagcacaatatca

SEQ ID NO: 804354 - DNA, 19 bp, Mus musculus
  siRNA target sequence for 9530098N22Rik (NM_178786.2,1024-1042).
gatttctgcatgacttact

SEQ ID NO: 804355 - DNA, 19 bp, Mus musculus
  siRNA target sequence for 9530098N22Rik (NM_178786.2,1077-1095).
gtctaccgtggacaatgat

SEQ ID NO: 804356 - DNA, 19 bp, Mus musculus
  siRNA target sequence for 9530098N22Rik (NM_178786.2,1079-1097).
ctaccgtggacaatgatca

SEQ ID NO: 804357 - DNA, 19 bp, Mus musculus
  siRNA target sequence for 9530098N22Rik (NM_178786.2,1098-1116).
gtgtgagtctgatcaatct

SEQ ID NO: 804358 - DNA, 19 bp, Mus musculus
  siRNA target sequence for 9530098N22Rik (NM_178786.2,1100-1118).
gtgagtctgatcaatctga

SEQ ID NO: 804359 - DNA, 19 bp, Mus musculus
  siRNA target sequence for 9530098N22Rik (NM_178786.2,1117-1135).
gagggtacctgctacaaga

SEQ ID NO: 804360 - DNA, 19 bp, Mus musculus
  siRNA target sequence for 9530098N22Rik (NM_178786.2,1124-1142).
cctgctacaagagaaatta

SEQ ID NO: 804361 - DNA, 19 bp, Mus musculus
  siRNA target sequence for 9530098N22Rik (NM_178786.2,1125-1143).
ctgctacaagagaaattat

SEQ ID NO: 804362 - DNA, 19 bp, Mus musculus
  siRNA target sequence for 9530098N22Rik (NM_178786.2,1159-1177).
gcagtggtacccataattt

SEQ ID NO: 804363 - DNA, 19 bp, Mus musculus
  siRNA target sequence for 9530098N22Rik (NM_178786.2,1216-1234).
ctagaacaaagagttacaa

SEQ ID NO: 804364 - DNA, 19 bp, Mus musculus
  siRNA target sequence for 9530098N22Rik (NM_178786.2,1232-1250).
caattctagaacaacattt

SEQ ID NO: 804365 - DNA, 19 bp, Mus musculus
  siRNA target sequence for 9530098N22Rik (NM_178786.2,1266-1284).
gtggttggaagatattagt

SEQ ID NO: 804366 - DNA, 19 bp, Mus musculus
  siRNA target sequence for 9530098N22Rik (NM_178786.2,1302-1320).
gatagtgtccaacatcaat

SEQ ID NO: 804367 - DNA, 19 bp, Mus musculus
  siRNA target sequence for 9530098N22Rik (NM_178786.2,1327-1345).
cctttgatatacttcagat

SEQ ID NO: 804368 - DNA, 19 bp, Mus musculus
  siRNA target sequence for 9530098N22Rik (NM_178786.2,1328-1346).
ctttgatatacttcagatt

SEQ ID NO: 804369 - DNA, 19 bp, Mus musculus
  siRNA target sequence for 9530098N22Rik (NM_178786.2,1338-1356).
cttcagattgcatgaacat

SEQ ID NO: 804370 - DNA, 19 bp, Mus musculus
  siRNA target sequence for 9530098N22Rik (NM_178786.2,1351-1369).
gaacatgtacctagattca

SEQ ID NO: 804371 - DNA, 19 bp, Mus musculus
  siRNA target sequence for 9530098N22Rik (NM_178786.2,1376-1394).
gttccccaatattaaacaa

SEQ ID NO: 804372 - DNA, 19 bp, Mus musculus
  siRNA target sequence for 9530098N22Rik (NM_178786.2,1399-1417).
gtggtattcctgcatttca

SEQ ID NO: 804373 - DNA, 19 bp, Mus musculus
  siRNA target sequence for 9530098N22Rik (NM_178786.2,1427-1445).
caatcgtatgtggaacaat

SEQ ID NO: 804374 - DNA, 19 bp, Mus musculus
  siRNA target sequence for 9530098N22Rik (NM_178786.2,1431-1449).
cgtatgtggaacaatcctt

SEQ ID NO: 804375 - DNA, 19 bp, Mus musculus
  siRNA target sequence for 9530098N22Rik (NM_178786.2,1461-1479).
gcaattacgtaacaaagtt

SEQ ID NO: 804376 - DNA, 19 bp, Mus musculus
  siRNA target sequence for 9530098N22Rik (NM_178786.2,1462-1480).
caattacgtaacaaagttt

SEQ ID NO: 804377 - DNA, 19 bp, Mus musculus
  siRNA target sequence for 9530098N22Rik (NM_178786.2,1515-1533).
ctggctgacagatatttca

SEQ ID NO: 804378 - DNA, 19 bp, Mus musculus
  siRNA target sequence for 9530098N22Rik (NM_178786.2,1574-1592).
ccattgcaaaatcatcatt

SEQ ID NO: 804379 - DNA, 19 bp, Mus musculus
  siRNA target sequence for 9530098N22Rik (NM_178786.2,1579-1597).
gcaaaatcatcattattta

SEQ ID NO: 804380 - DNA, 19 bp, Mus musculus
  siRNA target sequence for 9530098N22Rik (NM_178786.2,1580-1598).
caaaatcatcattatttaa

SEQ ID NO: 804381 - DNA, 19 bp, Mus musculus
  siRNA target sequence for 9530098N22Rik (NM_178786.2,1616-1634).
gactgtgcattcacatgaa

SEQ ID NO: 804382 - DNA, 19 bp, Mus musculus
  siRNA target sequence for A930037G23Rik (NM_178787.2,766-784).
gggagcgggacgagtacaa

SEQ ID NO: 804383 - DNA, 19 bp, Mus musculus
  siRNA target sequence for A930037G23Rik (NM_178787.2,929-947).
caaggggctcatgagtaat

SEQ ID NO: 804384 - DNA, 19 bp, Mus musculus
  siRNA target sequence for A930037G23Rik (NM_178787.2,932-950).
ggggctcatgagtaataat

SEQ ID NO: 804385 - DNA, 19 bp, Mus musculus
  siRNA target sequence for A930037G23Rik (NM_178787.2,934-952).
ggctcatgagtaataatct

SEQ ID NO: 804386 - DNA, 19 bp, Mus musculus
  siRNA target sequence for A930037G23Rik (NM_178787.2,936-954).
ctcatgagtaataatctga

SEQ ID NO: 804387 - DNA, 19 bp, Mus musculus
  siRNA target sequence for A930037G23Rik (NM_178787.2,1056-1074).
cgcaactgtgaggatatga

SEQ ID NO: 804388 - DNA, 19 bp, Mus musculus
  siRNA target sequence for A930037G23Rik (NM_178787.2,1403-1421).
cacggagtccctgttcaaa

SEQ ID NO: 804389 - DNA, 19 bp, Mus musculus
  siRNA target sequence for A930037G23Rik (NM_178787.2,1583-1601).
gtccggggaccgaaagtct

SEQ ID NO: 804390 - DNA, 19 bp, Mus musculus
  siRNA target sequence for A930037G23Rik (NM_178787.2,1668-1686).
cgagacgtctcatctgata

SEQ ID NO: 804391 - DNA, 19 bp, Mus musculus
  siRNA target sequence for B930062P21Rik (NM_178789.2,264-282).
cagaagctaatgttattgt

SEQ ID NO: 804392 - DNA, 19 bp, Mus musculus
  siRNA target sequence for B930062P21Rik (NM_178789.2,327-345).
gagttggctggaggatttt

SEQ ID NO: 804393 - DNA, 19 bp, Mus musculus
  siRNA target sequence for B930062P21Rik (NM_178789.2,329-347).
gttggctggaggattttga

SEQ ID NO: 804394 - DNA, 19 bp, Mus musculus
  siRNA target sequence for B930062P21Rik (NM_178789.2,360-378).
ggctactggccattctcat

SEQ ID NO: 804395 - DNA, 19 bp, Mus musculus
  siRNA target sequence for B930062P21Rik (NM_178789.2,370-388).
cattctcataggactgatt

SEQ ID NO: 804396 - DNA, 19 bp, Mus musculus
  siRNA target sequence for B930062P21Rik (NM_178789.2,424-442).
ccagttgctccggttaaaa

SEQ ID NO: 804397 - DNA, 19 bp, Mus musculus
  siRNA target sequence for B930062P21Rik (NM_178789.2,465-483).
cgtggatgacgatgttctt

SEQ ID NO: 804398 - DNA, 19 bp, Mus musculus
  siRNA target sequence for B930062P21Rik (NM_178789.2,544-562).
cgggaacatgggagcttat

SEQ ID NO: 804399 - DNA, 19 bp, Mus musculus
  siRNA target sequence for B930062P21Rik (NM_178789.2,580-598).
gggcatccgcaatgaaagt

SEQ ID NO: 804400 - DNA, 19 bp, Mus musculus
  siRNA target sequence for B930062P21Rik (NM_178789.2,581-599).
ggcatccgcaatgaaagtt

SEQ ID NO: 804401 - DNA, 19 bp, Mus musculus
  siRNA target sequence for B930062P21Rik (NM_178789.2,582-600).
gcatccgcaatgaaagttt

SEQ ID NO: 804402 - DNA, 19 bp, Mus musculus
  siRNA target sequence for B930062P21Rik (NM_178789.2,647-665).
gcttggatggtaactgata

SEQ ID NO: 804403 - DNA, 19 bp, Mus musculus
  siRNA target sequence for B930062P21Rik (NM_178789.2,648-666).
cttggatggtaactgatat

SEQ ID NO: 804404 - DNA, 19 bp, Mus musculus
  siRNA target sequence for B930062P21Rik (NM_178789.2,728-746).
ggcaacgtgaggatcattt

SEQ ID NO: 804405 - DNA, 19 bp, Mus musculus
  siRNA target sequence for B930062P21Rik (NM_178789.2,807-825).
ggatcagctgggacaaact

SEQ ID NO: 804406 - DNA, 19 bp, Mus musculus
  siRNA target sequence for B930062P21Rik (NM_178789.2,937-955).
gggcgacgttgatgtgaat

SEQ ID NO: 804407 - DNA, 19 bp, Mus musculus
  siRNA target sequence for B930062P21Rik (NM_178789.2,939-957).
gcgacgttgatgtgaatct

SEQ ID NO: 804408 - DNA, 19 bp, Mus musculus
  siRNA target sequence for B930062P21Rik (NM_178789.2,974-992).
cctcacatgcagttcaaga

SEQ ID NO: 804409 - DNA, 19 bp, Mus musculus
  siRNA target sequence for B930062P21Rik (NM_178789.2,1019-1037).
gaggaataccgcattcaca

SEQ ID NO: 804410 - DNA, 19 bp, Mus musculus
  siRNA target sequence for B930062P21Rik (NM_178789.2,1021-1039).
ggaataccgcattcacata

SEQ ID NO: 804411 - DNA, 19 bp, Mus musculus
  siRNA target sequence for B930062P21Rik (NM_178789.2,1022-1040).
gaataccgcattcacataa

SEQ ID NO: 804412 - DNA, 19 bp, Mus musculus
  siRNA target sequence for B930062P21Rik (NM_178789.2,1041-1059).
caggtaaatggtttaacta

SEQ ID NO: 804413 - DNA, 19 bp, Mus musculus
  siRNA target sequence for B930062P21Rik (NM_178789.2,1050-1068).
ggtttaactacggaattat

SEQ ID NO: 804414 - DNA, 19 bp, Mus musculus
  siRNA target sequence for B930062P21Rik (NM_178789.2,1105-1123).
gaaccagatattttacaaa

SEQ ID NO: 804415 - DNA, 19 bp, Mus musculus
  siRNA target sequence for B930062P21Rik (NM_178789.2,1180-1198).
ctctgaaagtttaaaggat

SEQ ID NO: 804416 - DNA, 19 bp, Mus musculus
  siRNA target sequence for B930062P21Rik (NM_178789.2,1182-1200).
ctgaaagtttaaaggattt

SEQ ID NO: 804417 - DNA, 19 bp, Mus musculus
  siRNA target sequence for B930062P21Rik (NM_178789.2,1223-1241).
gaatggcggtccaatcaca

SEQ ID NO: 804418 - DNA, 19 bp, Mus musculus
  siRNA target sequence for B930062P21Rik (NM_178789.2,1231-1249).
gtccaatcacactaatcct

SEQ ID NO: 804419 - DNA, 19 bp, Mus musculus
  siRNA target sequence for B930062P21Rik (NM_178789.2,1240-1258).
cactaatcctcagactaat

SEQ ID NO: 804420 - DNA, 19 bp, Mus musculus
  siRNA target sequence for B930062P21Rik (NM_178789.2,1268-1286).
gttgaaggtgacatgttct

SEQ ID NO: 804421 - DNA, 19 bp, Mus musculus
  siRNA target sequence for B930062P21Rik (NM_178789.2,1305-1323).
gggctagcctagatgtcaa

SEQ ID NO: 804422 - DNA, 19 bp, Mus musculus
  siRNA target sequence for B930062P21Rik (NM_178789.2,1337-1355).
gttccaagtttgatagctt

SEQ ID NO: 804423 - DNA, 19 bp, Mus musculus
  siRNA target sequence for B930062P21Rik (NM_178789.2,1341-1359).
caagtttgatagcttttgt

SEQ ID NO: 804424 - DNA, 19 bp, Mus musculus
  siRNA target sequence for B930062P21Rik (NM_178789.2,1384-1402).
ctttggacggtttctgaaa

SEQ ID NO: 804425 - DNA, 19 bp, Mus musculus
  siRNA target sequence for B930062P21Rik (NM_178789.2,1389-1407).
gacggtttctgaaaaatga

SEQ ID NO: 804426 - DNA, 19 bp, Mus musculus
  siRNA target sequence for B930062P21Rik (NM_178789.2,1413-1431).
ggatggagaatcaagataa

SEQ ID NO: 804427 - DNA, 19 bp, Mus musculus
  siRNA target sequence for B930062P21Rik (NM_178789.2,1484-1502).
ggaatcacccgagaaaaca

SEQ ID NO: 804428 - DNA, 19 bp, Mus musculus
  siRNA target sequence for B930062P21Rik (NM_178789.2,1659-1677).
cggcagcctctcaaaggat

SEQ ID NO: 804429 - DNA, 19 bp, Mus musculus
  siRNA target sequence for D930038M13Rik (NM_178790.2,49-67).
gcctggggtgtctacttct

SEQ ID NO: 804430 - DNA, 19 bp, Mus musculus
  siRNA target sequence for D930038M13Rik (NM_178790.2,130-148).
gcttgaaagtgcacatcaa

SEQ ID NO: 804431 - DNA, 19 bp, Mus musculus
  siRNA target sequence for D930038M13Rik (NM_178790.2,131-149).
cttgaaagtgcacatcaat

SEQ ID NO: 804432 - DNA, 19 bp, Mus musculus
  siRNA target sequence for D930038M13Rik (NM_178790.2,159-177).
gactccatcctcttgaagt

SEQ ID NO: 804433 - DNA, 19 bp, Mus musculus
  siRNA target sequence for D930038M13Rik (NM_178790.2,176-194).
gttcctgcgtccaaatgca

SEQ ID NO: 804434 - DNA, 19 bp, Mus musculus
  siRNA target sequence for D930038M13Rik (NM_178790.2,182-200).
gcgtccaaatgcaaacgta

SEQ ID NO: 804435 - DNA, 19 bp, Mus musculus
  siRNA target sequence for D930038M13Rik (NM_178790.2,183-201).
cgtccaaatgcaaacgtaa

SEQ ID NO: 804436 - DNA, 19 bp, Mus musculus
  siRNA target sequence for D930038M13Rik (NM_178790.2,184-202).
gtccaaatgcaaacgtaaa

SEQ ID NO: 804437 - DNA, 19 bp, Mus musculus
  siRNA target sequence for D930038M13Rik (NM_178790.2,300-318).
gcagagccgaagtatctga

SEQ ID NO: 804438 - DNA, 19 bp, Mus musculus
  siRNA target sequence for D930038M13Rik (NM_178790.2,342-360).
cccagccagaagaagtcat

SEQ ID NO: 804439 - DNA, 19 bp, Mus musculus
  siRNA target sequence for D930038M13Rik (NM_178790.2,487-505).
gtcccagtgacagatttta

SEQ ID NO: 804440 - DNA, 19 bp, Mus musculus
  siRNA target sequence for D930038M13Rik (NM_178790.2,493-511).
gtgacagattttatacaat

SEQ ID NO: 804441 - DNA, 19 bp, Mus musculus
  siRNA target sequence for D930038M13Rik (NM_178790.2,557-575).
ctgcccagctactgaaaca

SEQ ID NO: 804442 - DNA, 19 bp, Mus musculus
  siRNA target sequence for D930038M13Rik (NM_178790.2,562-580).
cagctactgaaacaattgt

SEQ ID NO: 804443 - DNA, 19 bp, Mus musculus
  siRNA target sequence for D930038M13Rik (NM_178790.2,588-606).
ctaaagcccaacacagttt

SEQ ID NO: 804444 - DNA, 19 bp, Mus musculus
  siRNA target sequence for D930038M13Rik (NM_178790.2,593-611).
gcccaacacagtttatgaa

SEQ ID NO: 804445 - DNA, 19 bp, Mus musculus
  siRNA target sequence for D930038M13Rik (NM_178790.2,594-612).
cccaacacagtttatgaat

SEQ ID NO: 804446 - DNA, 19 bp, Mus musculus
  siRNA target sequence for D930038M13Rik (NM_178790.2,595-613).
ccaacacagtttatgaatt

SEQ ID NO: 804447 - DNA, 19 bp, Mus musculus
  siRNA target sequence for D930038M13Rik (NM_178790.2,609-627).
gaatttggtgtgaaagaca

SEQ ID NO: 804448 - DNA, 19 bp, Mus musculus
  siRNA target sequence for D930038M13Rik (NM_178790.2,639-657).
ggaatttggagtaagattt

SEQ ID NO: 804449 - DNA, 19 bp, Mus musculus
  siRNA target sequence for D930038M13Rik (NM_178790.2,646-664).
ggagtaagattttcaatca

SEQ ID NO: 804450 - DNA, 19 bp, Mus musculus
  siRNA target sequence for D930038M13Rik (NM_178790.2,649-667).
gtaagattttcaatcataa

SEQ ID NO: 804451 - DNA, 19 bp, Mus musculus
  siRNA target sequence for D930038M13Rik (NM_178790.2,653-671).
gattttcaatcataagact

SEQ ID NO: 804452 - DNA, 19 bp, Mus musculus
  siRNA target sequence for D930038M13Rik (NM_178790.2,659-677).
caatcataagactattgtt

SEQ ID NO: 804453 - DNA, 19 bp, Mus musculus
  siRNA target sequence for D930038M13Rik (NM_178790.2,668-686).
gactattgttggaagtaaa

SEQ ID NO: 804454 - DNA, 19 bp, Mus musculus
  siRNA target sequence for D930038M13Rik (NM_178790.2,670-688).
ctattgttggaagtaaaaa

SEQ ID NO: 804455 - DNA, 19 bp, Mus musculus
  siRNA target sequence for D930038M13Rik (NM_178790.2,693-711).
gtaaacgggaaaatccaaa

SEQ ID NO: 804456 - DNA, 19 bp, Mus musculus
  siRNA target sequence for D930038M13Rik (NM_178790.2,701-719).
gaaaatccaaagcacttat

SEQ ID NO: 804457 - DNA, 19 bp, Mus musculus
  siRNA target sequence for D930038M13Rik (NM_178790.2,766-784).
cgatcattaagcaagtgat

SEQ ID NO: 804458 - DNA, 19 bp, Mus musculus
  siRNA target sequence for D930038M13Rik (NM_178790.2,767-785).
gatcattaagcaagtgatt

SEQ ID NO: 804459 - DNA, 19 bp, Mus musculus
  siRNA target sequence for D930038M13Rik (NM_178790.2,831-849).
ccttttgggggaacaatat

SEQ ID NO: 804460 - DNA, 19 bp, Mus musculus
  siRNA target sequence for D930038M13Rik (NM_178790.2,839-857).
gggaacaatattagttcat

SEQ ID NO: 804461 - DNA, 19 bp, Mus musculus
  siRNA target sequence for D930038M13Rik (NM_178790.2,901-919).
catccataatgcttgagat

SEQ ID NO: 804462 - DNA, 19 bp, Mus musculus
  siRNA target sequence for D930038M13Rik (NM_178790.2,935-953).
ggcacaattagctaagaat

SEQ ID NO: 804463 - DNA, 19 bp, Mus musculus
  siRNA target sequence for D930038M13Rik (NM_178790.2,937-955).
cacaattagctaagaatga

SEQ ID NO: 804464 - DNA, 19 bp, Mus musculus
  siRNA target sequence for D930038M13Rik (NM_178790.2,964-982).
ctttaccagcagaatctaa

SEQ ID NO: 804465 - DNA, 19 bp, Mus musculus
  siRNA target sequence for D930038M13Rik (NM_178790.2,985-1003).
caccagaggtcgaaaaatt

SEQ ID NO: 804466 - DNA, 19 bp, Mus musculus
  siRNA target sequence for D930038M13Rik (NM_178790.2,1004-1022).
ggcagggcagccagtaaca

SEQ ID NO: 804467 - DNA, 19 bp, Mus musculus
  siRNA target sequence for D930038M13Rik (NM_178790.2,1025-1043).
gactccggaatcagtttca

SEQ ID NO: 804468 - DNA, 19 bp, Mus musculus
  siRNA target sequence for D930038M13Rik (NM_178790.2,1060-1078).
ccctgtctagtgctttaga

SEQ ID NO: 804469 - DNA, 19 bp, Mus musculus
  siRNA target sequence for D930038M13Rik (NM_178790.2,1092-1110).
gcactgggtaatgctaaaa

SEQ ID NO: 804470 - DNA, 19 bp, Mus musculus
  siRNA target sequence for D930038M13Rik (NM_178790.2,1095-1113).
ctgggtaatgctaaaaact

SEQ ID NO: 804471 - DNA, 19 bp, Mus musculus
  siRNA target sequence for D930038M13Rik (NM_178790.2,1097-1115).
gggtaatgctaaaaactgt

SEQ ID NO: 804472 - DNA, 19 bp, Mus musculus
  siRNA target sequence for D930038M13Rik (NM_178790.2,1129-1147).
ctcccccaacaatagaaca

SEQ ID NO: 804473 - DNA, 19 bp, Mus musculus
  siRNA target sequence for E130203B14Rik (NM_178791.2,249-267).
gacctgtggtggactactt

SEQ ID NO: 804474 - DNA, 19 bp, Mus musculus
  siRNA target sequence for E130203B14Rik (NM_178791.2,388-406).
gacgaagctccggataatt

SEQ ID NO: 804475 - DNA, 19 bp, Mus musculus
  siRNA target sequence for E130203B14Rik (NM_178791.2,397-415).
ccggataattcagtactat

SEQ ID NO: 804476 - DNA, 19 bp, Mus musculus
  siRNA target sequence for E130203B14Rik (NM_178791.2,513-531).
cagatcaagggcagtatgt

SEQ ID NO: 804477 - DNA, 19 bp, Mus musculus
  siRNA target sequence for E130203B14Rik (NM_178791.2,592-610).
ctcggcgacggaaatgaga

SEQ ID NO: 804478 - DNA, 19 bp, Mus musculus
  siRNA target sequence for E130203B14Rik (NM_178791.2,626-644).
gctggcgaagattcatcat

SEQ ID NO: 804479 - DNA, 19 bp, Mus musculus
  siRNA target sequence for E130203B14Rik (NM_178791.2,627-645).
ctggcgaagattcatcatt

SEQ ID NO: 804480 - DNA, 19 bp, Mus musculus
  siRNA target sequence for E130203B14Rik (NM_178791.2,630-648).
gcgaagattcatcatttga

SEQ ID NO: 804481 - DNA, 19 bp, Mus musculus
  siRNA target sequence for E130203B14Rik (NM_178791.2,658-676).
ggtgacttgggcatttttt

SEQ ID NO: 804482 - DNA, 19 bp, Mus musculus
  siRNA target sequence for E130203B14Rik (NM_178791.2,993-1011).
ccaagatcaccgaggaaaa

SEQ ID NO: 804483 - DNA, 19 bp, Mus musculus
  siRNA target sequence for A530064D06Rik (NM_178796.3,562-580).
cagtttatctcagaaatat

SEQ ID NO: 804484 - DNA, 19 bp, Mus musculus
  siRNA target sequence for A530064D06Rik (NM_178796.3,590-608).
ggtgtcaaaaggttcttca

SEQ ID NO: 804485 - DNA, 19 bp, Mus musculus
  siRNA target sequence for A530064D06Rik (NM_178796.3,633-651).
cctgctacaaggctaacta

SEQ ID NO: 804486 - DNA, 19 bp, Mus musculus
  siRNA target sequence for A230046P18 (NM_178797.2,139-157).
ccatgatcgcagctttcta

SEQ ID NO: 804487 - DNA, 19 bp, Mus musculus
  siRNA target sequence for A230046P18 (NM_178797.2,229-247).
gtaccagcccccacttgaa

SEQ ID NO: 804488 - DNA, 19 bp, Mus musculus
  siRNA target sequence for A230046P18 (NM_178797.2,235-253).
gcccccacttgaaagtcat

SEQ ID NO: 804489 - DNA, 19 bp, Mus musculus
  siRNA target sequence for A230046P18 (NM_178797.2,319-337).
gtaagctgtttgagaaagt

SEQ ID NO: 804490 - DNA, 19 bp, Mus musculus
  siRNA target sequence for A230046P18 (NM_178797.2,419-437).
ggaagacgtgcaagaactt

SEQ ID NO: 804491 - DNA, 19 bp, Mus musculus
  siRNA target sequence for A230046P18 (NM_178797.2,648-666).
gtggagccaagaaagatca

SEQ ID NO: 804492 - DNA, 19 bp, Mus musculus
  siRNA target sequence for A230046P18 (NM_178797.2,682-700).
ggttagatgactctatcat

SEQ ID NO: 804493 - DNA, 19 bp, Mus musculus
  siRNA target sequence for A230046P18 (NM_178797.2,760-778).
ccttgggagagatagtagt

SEQ ID NO: 804494 - DNA, 19 bp, Mus musculus
  siRNA target sequence for A230046P18 (NM_178797.2,809-827).
cattgtcaggccatccata

SEQ ID NO: 804495 - DNA, 19 bp, Mus musculus
  siRNA target sequence for A230046P18 (NM_178797.2,854-872).
cccgggttgggttgataat

SEQ ID NO: 804496 - DNA, 19 bp, Mus musculus
  siRNA target sequence for A230046P18 (NM_178797.2,856-874).
cgggttgggttgataatct

SEQ ID NO: 804497 - DNA, 19 bp, Mus musculus
  siRNA target sequence for A230046P18 (NM_178797.2,857-875).
gggttgggttgataatcta

SEQ ID NO: 804498 - DNA, 19 bp, Mus musculus
  siRNA target sequence for A230046P18 (NM_178797.2,858-876).
ggttgggttgataatctaa

SEQ ID NO: 804499 - DNA, 19 bp, Mus musculus
  siRNA target sequence for A230046P18 (NM_178797.2,879-897).
ggacccagcggactcatta

SEQ ID NO: 804500 - DNA, 19 bp, Mus musculus
  siRNA target sequence for A230046P18 (NM_178797.2,880-898).
gacccagcggactcattat

SEQ ID NO: 804501 - DNA, 19 bp, Mus musculus
  siRNA target sequence for A230046P18 (NM_178797.2,901-919).
cgactgggaaaggatttct

SEQ ID NO: 804502 - DNA, 19 bp, Mus musculus
  siRNA target sequence for A230046P18 (NM_178797.2,912-930).
ggatttcttcggtccataa

SEQ ID NO: 804503 - DNA, 19 bp, Mus musculus
  siRNA target sequence for A230046P18 (NM_178797.2,913-931).
gatttcttcggtccataaa

SEQ ID NO: 804504 - DNA, 19 bp, Mus musculus
  siRNA target sequence for A230046P18 (NM_178797.2,963-981).
ccagttgacacagttgtta

SEQ ID NO: 804505 - DNA, 19 bp, Mus musculus
  siRNA target sequence for A230046P18 (NM_178797.2,964-982).
cagttgacacagttgttaa

SEQ ID NO: 804506 - DNA, 19 bp, Mus musculus
  siRNA target sequence for A230046P18 (NM_178797.2,969-987).
gacacagttgttaatctca

SEQ ID NO: 804507 - DNA, 19 bp, Mus musculus
  siRNA target sequence for A230046P18 (NM_178797.2,1011-1029).
gcagttcataggcctaaat

SEQ ID NO: 804508 - DNA, 19 bp, Mus musculus
  siRNA target sequence for A230046P18 (NM_178797.2,1014-1032).
gttcataggcctaaatcaa

SEQ ID NO: 804509 - DNA, 19 bp, Mus musculus
  siRNA target sequence for A230046P18 (NM_178797.2,1017-1035).
cataggcctaaatcaacat

SEQ ID NO: 804510 - DNA, 19 bp, Mus musculus
  siRNA target sequence for A230046P18 (NM_178797.2,1068-1086).
ccctgtaactggtataaaa

SEQ ID NO: 804511 - DNA, 19 bp, Mus musculus
  siRNA target sequence for A230046P18 (NM_178797.2,1078-1096).
ggtataaaatgggattaca

SEQ ID NO: 804512 - DNA, 19 bp, Mus musculus
  siRNA target sequence for A230046P18 (NM_178797.2,1098-1116).
gtcttggcgaccatcgaaa

SEQ ID NO: 804513 - DNA, 19 bp, Mus musculus
  siRNA target sequence for A230046P18 (NM_178797.2,1169-1187).
caatttcaccacccattat

SEQ ID NO: 804514 - DNA, 19 bp, Mus musculus
  siRNA target sequence for A230046P18 (NM_178797.2,1207-1225).
gggtcccagccatcatcta

SEQ ID NO: 804515 - DNA, 19 bp, Mus musculus
  siRNA target sequence for A230046P18 (NM_178797.2,1274-1292).
catgaaccggctgctaaaa

SEQ ID NO: 804516 - DNA, 19 bp, Mus musculus
  siRNA target sequence for A230046P18 (NM_178797.2,1281-1299).
cggctgctaaaaaccattt

SEQ ID NO: 804517 - DNA, 19 bp, Mus musculus
  siRNA target sequence for A230046P18 (NM_178797.2,1390-1408).
gagtattcaactttgatgt

SEQ ID NO: 804518 - DNA, 19 bp, Mus musculus
  siRNA target sequence for A230046P18 (NM_178797.2,1404-1422).
gatgtgcgtcagttgaact

SEQ ID NO: 804519 - DNA, 19 bp, Mus musculus
  siRNA target sequence for A230046P18 (NM_178797.2,1418-1436).
gaactggctcgaatacatt

SEQ ID NO: 804520 - DNA, 19 bp, Mus musculus
  siRNA target sequence for A230046P18 (NM_178797.2,1421-1439).
ctggctcgaatacattgaa

SEQ ID NO: 804521 - DNA, 19 bp, Mus musculus
  siRNA target sequence for A230046P18 (NM_178797.2,1423-1441).
ggctcgaatacattgaaaa

SEQ ID NO: 804522 - DNA, 19 bp, Mus musculus
  siRNA target sequence for A230046P18 (NM_178797.2,1424-1442).
gctcgaatacattgaaaat

SEQ ID NO: 804523 - DNA, 19 bp, Mus musculus
  siRNA target sequence for A230046P18 (NM_178797.2,1425-1443).
ctcgaatacattgaaaatt

SEQ ID NO: 804524 - DNA, 19 bp, Mus musculus
  siRNA target sequence for A230046P18 (NM_178797.2,1446-1464).
gttttgggggttaagaagt

SEQ ID NO: 804525 - DNA, 19 bp, Mus musculus
  siRNA target sequence for A230046P18 (NM_178797.2,1451-1469).
gggggttaagaagtatcta

SEQ ID NO: 804526 - DNA, 19 bp, Mus musculus
  siRNA target sequence for A230046P18 (NM_178797.2,1500-1518).
gcaaagcaacacctaagaa

SEQ ID NO: 804527 - DNA, 19 bp, Mus musculus
  siRNA target sequence for A230046P18 (NM_178797.2,1516-1534).
gaaggctccggaacattca

SEQ ID NO: 804528 - DNA, 19 bp, Mus musculus
  siRNA target sequence for A230046P18 (NM_178797.2,1519-1537).
ggctccggaacattcacta

SEQ ID NO: 804529 - DNA, 19 bp, Mus musculus
  siRNA target sequence for A230046P18 (NM_178797.2,1551-1569).
gccctgtttcttatcatct

SEQ ID NO: 804530 - DNA, 19 bp, Mus musculus
  siRNA target sequence for A230046P18 (NM_178797.2,1602-1620).
cggaacgtctggttcttca

SEQ ID NO: 804531 - DNA, 19 bp, Mus musculus
  siRNA target sequence for A230046P18 (NM_178797.2,1603-1621).
ggaacgtctggttcttcat

SEQ ID NO: 804532 - DNA, 19 bp, Mus musculus
  siRNA target sequence for A230046P18 (NM_178797.2,1604-1622).
gaacgtctggttcttcatt

SEQ ID NO: 804533 - DNA, 19 bp, Mus musculus
  siRNA target sequence for A230046P18 (NM_178797.2,1607-1625).
cgtctggttcttcatttgt

SEQ ID NO: 804534 - DNA, 19 bp, Mus musculus
  siRNA target sequence for D930014A20Rik (NM_178811.3,312-330).
catcccggagcctatgtct

SEQ ID NO: 804535 - DNA, 19 bp, Mus musculus
  siRNA target sequence for D930014A20Rik (NM_178811.3,435-453).
cttcggagataagcttaat

SEQ ID NO: 804536 - DNA, 19 bp, Mus musculus
  siRNA target sequence for D930014A20Rik (NM_178811.3,802-820).
gaagtgtcctccaatcagt

SEQ ID NO: 804537 - DNA, 19 bp, Mus musculus
  siRNA target sequence for D930014A20Rik (NM_178811.3,885-903).
ccagccacacctgtttcta

SEQ ID NO: 804538 - DNA, 19 bp, Mus musculus
  siRNA target sequence for D930014A20Rik (NM_178811.3,928-946).
gtgaaatcacccagtttca

SEQ ID NO: 804539 - DNA, 19 bp, Mus musculus
  siRNA target sequence for D930014A20Rik (NM_178811.3,998-1016).
gtcccagcctcagtacatt

SEQ ID NO: 804540 - DNA, 19 bp, Mus musculus
  siRNA target sequence for D930014A20Rik (NM_178811.3,1005-1023).
cctcagtacattttttgga

SEQ ID NO: 804541 - DNA, 19 bp, Mus musculus
  siRNA target sequence for D930014A20Rik (NM_178811.3,1112-1130).
gttccccagttccagaaaa

SEQ ID NO: 804542 - DNA, 19 bp, Mus musculus
  siRNA target sequence for D930014A20Rik (NM_178811.3,1407-1425).
gtatggcactgtgttcata

SEQ ID NO: 804543 - DNA, 19 bp, Mus musculus
  siRNA target sequence for D930014A20Rik (NM_178811.3,1411-1429).
ggcactgtgttcatagaca

SEQ ID NO: 804544 - DNA, 19 bp, Mus musculus
  siRNA target sequence for D930014A20Rik (NM_178811.3,1795-1813).
ccagacctatactatgaat

SEQ ID NO: 804545 - DNA, 19 bp, Mus musculus
  siRNA target sequence for D930014A20Rik (NM_178811.3,1796-1814).
cagacctatactatgaata

SEQ ID NO: 804546 - DNA, 19 bp, Mus musculus
  siRNA target sequence for D930014A20Rik (NM_178811.3,1798-1816).
gacctatactatgaatact

SEQ ID NO: 804547 - DNA, 19 bp, Mus musculus
  siRNA target sequence for D930014A20Rik (NM_178811.3,1847-1865).
ccatggtccccttttcgat

SEQ ID NO: 804548 - DNA, 19 bp, Mus musculus
  siRNA target sequence for D930014A20Rik (NM_178811.3,2196-2214).
cctccagatcggagacata

SEQ ID NO: 804549 - DNA, 19 bp, Mus musculus
  siRNA target sequence for D930014A20Rik (NM_178811.3,2197-2215).
ctccagatcggagacataa

SEQ ID NO: 804550 - DNA, 19 bp, Mus musculus
  siRNA target sequence for D930014A20Rik (NM_178811.3,2199-2217).
ccagatcggagacataaaa

SEQ ID NO: 804551 - DNA, 19 bp, Mus musculus
  siRNA target sequence for D930014A20Rik (NM_178811.3,2202-2220).
gatcggagacataaaaaca

SEQ ID NO: 804552 - DNA, 19 bp, Mus musculus
  siRNA target sequence for D930014A20Rik (NM_178811.3,2236-2254).
caagacgttgagaaagtaa

SEQ ID NO: 804553 - DNA, 19 bp, Mus musculus
  siRNA target sequence for D930014A20Rik (NM_178811.3,2266-2284).
gatggactgcagggtaaaa

SEQ ID NO: 804554 - DNA, 19 bp, Mus musculus
  siRNA target sequence for D930014A20Rik (NM_178811.3,2269-2287).
ggactgcagggtaaaataa

SEQ ID NO: 804555 - DNA, 19 bp, Mus musculus
  siRNA target sequence for D930014A20Rik (NM_178811.3,2311-2329).
ctgtaccttggccagaata

SEQ ID NO: 804556 - DNA, 19 bp, Mus musculus
  siRNA target sequence for D930014A20Rik (NM_178811.3,2335-2353).
gcagaagctcacaagttct

SEQ ID NO: 804557 - DNA, 19 bp, Mus musculus
  siRNA target sequence for D930014A20Rik (NM_178811.3,2367-2385).
gagaatggacccaacaaat

SEQ ID NO: 804558 - DNA, 19 bp, Mus musculus
  siRNA target sequence for Ttll1 (NM_178869.2,392-410).
gagaagtcggtactaatca

SEQ ID NO: 804559 - DNA, 19 bp, Mus musculus
  siRNA target sequence for Ttll1 (NM_178869.2,399-417).
cggtactaatcaacaactt

SEQ ID NO: 804560 - DNA, 19 bp, Mus musculus
  siRNA target sequence for Ttll1 (NM_178869.2,433-451).
gatccaagtgacagaaaat

SEQ ID NO: 804561 - DNA, 19 bp, Mus musculus
  siRNA target sequence for Ttll1 (NM_178869.2,471-489).
ggatgagcgtgcaaaccat

SEQ ID NO: 804562 - DNA, 19 bp, Mus musculus
  siRNA target sequence for Ttll1 (NM_178869.2,472-490).
gatgagcgtgcaaaccatt

SEQ ID NO: 804563 - DNA, 19 bp, Mus musculus
  siRNA target sequence for Ttll1 (NM_178869.2,636-654).
gtcccttggcggagaaaga

SEQ ID NO: 804564 - DNA, 19 bp, Mus musculus
  siRNA target sequence for Ttll1 (NM_178869.2,711-729).
ccgactacaacctgtttgt

SEQ ID NO: 804565 - DNA, 19 bp, Mus musculus
  siRNA target sequence for Ttll1 (NM_178869.2,868-886).
gtcgcagtccacaaaagaa

SEQ ID NO: 804566 - DNA, 19 bp, Mus musculus
  siRNA target sequence for Ttll1 (NM_178869.2,980-998).
ccgctgcgctgctacatgt

SEQ ID NO: 804567 - DNA, 19 bp, Mus musculus
  siRNA target sequence for Ttll1 (NM_178869.2,981-999).
cgctgcgctgctacatgta

SEQ ID NO: 804568 - DNA, 19 bp, Mus musculus
  siRNA target sequence for Ttll1 (NM_178869.2,1050-1068).
gtgagctcgacaacatgtt

SEQ ID NO: 804569 - DNA, 19 bp, Mus musculus
  siRNA target sequence for Ttll1 (NM_178869.2,1242-1260).
ccgtggcgccagtgatgaa

SEQ ID NO: 804570 - DNA, 19 bp, Mus musculus
  siRNA target sequence for Ttll1 (NM_178869.2,1244-1262).
gtggcgccagtgatgaaca

SEQ ID NO: 804571 - DNA, 19 bp, Mus musculus
  siRNA target sequence for Ttll1 (NM_178869.2,1264-1282).
cgacaaacactgctttgaa

SEQ ID NO: 804572 - DNA, 19 bp, Mus musculus
  siRNA target sequence for Ttll1 (NM_178869.2,1284-1302).
gctacggctacgacatcat

SEQ ID NO: 804573 - DNA, 19 bp, Mus musculus
  siRNA target sequence for Ttll1 (NM_178869.2,1365-1383).
gcaccgccaacgatcgaat

SEQ ID NO: 804574 - DNA, 19 bp, Mus musculus
  siRNA target sequence for Ttll1 (NM_178869.2,1376-1394).
gatcgaatccttaagtaca

SEQ ID NO: 804575 - DNA, 19 bp, Mus musculus
  siRNA target sequence for Ttll1 (NM_178869.2,1385-1403).
cttaagtacaacctgatta

SEQ ID NO: 804576 - DNA, 19 bp, Mus musculus
  siRNA target sequence for Ttll1 (NM_178869.2,1532-1550).
gctgaacgagagcttagaa

SEQ ID NO: 804577 - DNA, 19 bp, Mus musculus
  siRNA target sequence for Ttll1 (NM_178869.2,1533-1551).
ctgaacgagagcttagaaa

SEQ ID NO: 804578 - DNA, 19 bp, Mus musculus
  siRNA target sequence for Tbrg3 (NM_178871.2,290-308).
ctcaattcccagtgctttt

SEQ ID NO: 804579 - DNA, 19 bp, Mus musculus
  siRNA target sequence for Tbrg3 (NM_178871.2,292-310).
caattcccagtgcttttct

SEQ ID NO: 804580 - DNA, 19 bp, Mus musculus
  siRNA target sequence for Tbrg3 (NM_178871.2,322-340).
gagaaaacgcacactatta

SEQ ID NO: 804581 - DNA, 19 bp, Mus musculus
  siRNA target sequence for Tbrg3 (NM_178871.2,324-342).
gaaaacgcacactattaat

SEQ ID NO: 804582 - DNA, 19 bp, Mus musculus
  siRNA target sequence for Tbrg3 (NM_178871.2,344-362).
gcagtctagcttatgttga

SEQ ID NO: 804583 - DNA, 19 bp, Mus musculus
  siRNA target sequence for Tbrg3 (NM_178871.2,345-363).
cagtctagcttatgttgaa

SEQ ID NO: 804584 - DNA, 19 bp, Mus musculus
  siRNA target sequence for Tbrg3 (NM_178871.2,424-442).
ctaattgggaaatatggat

SEQ ID NO: 804585 - DNA, 19 bp, Mus musculus
  siRNA target sequence for Tbrg3 (NM_178871.2,445-463).
gatgattgggtctgttttt

SEQ ID NO: 804586 - DNA, 19 bp, Mus musculus
  siRNA target sequence for Tbrg3 (NM_178871.2,481-499).
cgtggggaagggatgctat

SEQ ID NO: 804587 - DNA, 19 bp, Mus musculus
  siRNA target sequence for Tbrg3 (NM_178871.2,486-504).
ggaagggatgctatttcaa

SEQ ID NO: 804588 - DNA, 19 bp, Mus musculus
  siRNA target sequence for Tbrg3 (NM_178871.2,495-513).
gctatttcaagatctttta

SEQ ID NO: 804589 - DNA, 19 bp, Mus musculus
  siRNA target sequence for Tbrg3 (NM_178871.2,636-654).
gtttgcatccccggtttat

SEQ ID NO: 804590 - DNA, 19 bp, Mus musculus
  siRNA target sequence for Tbrg3 (NM_178871.2,640-658).
gcatccccggtttattcct

SEQ ID NO: 804591 - DNA, 19 bp, Mus musculus
  siRNA target sequence for AA408112 (NM_178873.2,529-547).
cgcaatgccagactatgtt

SEQ ID NO: 804592 - DNA, 19 bp, Mus musculus
  siRNA target sequence for AA408112 (NM_178873.2,559-577).
ggtactttgcccaaattaa

SEQ ID NO: 804593 - DNA, 19 bp, Mus musculus
  siRNA target sequence for AA408112 (NM_178873.2,642-660).
gagtgacctggcggaaaat

SEQ ID NO: 804594 - DNA, 19 bp, Mus musculus
  siRNA target sequence for AA408112 (NM_178873.2,739-757).
gtgctcttggcgaaattct

SEQ ID NO: 804595 - DNA, 19 bp, Mus musculus
  siRNA target sequence for AA408112 (NM_178873.2,820-838).
catctgcttttcaaagcta

SEQ ID NO: 804596 - DNA, 19 bp, Mus musculus
  siRNA target sequence for AA408112 (NM_178873.2,848-866).
caggcccaacatatatcaa

SEQ ID NO: 804597 - DNA, 19 bp, Mus musculus
  siRNA target sequence for AA408112 (NM_178873.2,850-868).
ggcccaacatatatcaaat

SEQ ID NO: 804598 - DNA, 19 bp, Mus musculus
  siRNA target sequence for AA408112 (NM_178873.2,851-869).
gcccaacatatatcaaatt

SEQ ID NO: 804599 - DNA, 19 bp, Mus musculus
  siRNA target sequence for AA408112 (NM_178873.2,962-980).
gggcaaggacggaatactt

SEQ ID NO: 804600 - DNA, 19 bp, Mus musculus
  siRNA target sequence for AA408112 (NM_178873.2,963-981).
ggcaaggacggaatactta

SEQ ID NO: 804601 - DNA, 19 bp, Mus musculus
  siRNA target sequence for AA408112 (NM_178873.2,965-983).
caaggacggaatacttact

SEQ ID NO: 804602 - DNA, 19 bp, Mus musculus
  siRNA target sequence for AA408112 (NM_178873.2,1010-1028).
gcagcctcctctttttcga

SEQ ID NO: 804603 - DNA, 19 bp, Mus musculus
  siRNA target sequence for AA408112 (NM_178873.2,1055-1073).
gtgtggcccaagtgtacaa

SEQ ID NO: 804604 - DNA, 19 bp, Mus musculus
  siRNA target sequence for AA408112 (NM_178873.2,1071-1089).
caaagcgttcgctagtatt

SEQ ID NO: 804605 - DNA, 19 bp, Mus musculus
  siRNA target sequence for AA408112 (NM_178873.2,1076-1094).
cgttcgctagtatttcctt

SEQ ID NO: 804606 - DNA, 19 bp, Mus musculus
  siRNA target sequence for AA408112 (NM_178873.2,1162-1180).
cagagagagccctttatga

SEQ ID NO: 804607 - DNA, 19 bp, Mus musculus
  siRNA target sequence for AA408112 (NM_178873.2,1188-1206).
gaagccttcagaaaacctt

SEQ ID NO: 804608 - DNA, 19 bp, Mus musculus
  siRNA target sequence for AA408112 (NM_178873.2,1203-1221).
ccttgccgacgaagcattt

SEQ ID NO: 804609 - DNA, 19 bp, Mus musculus
  siRNA target sequence for AA408112 (NM_178873.2,1208-1226).
ccgacgaagcatttctaga

SEQ ID NO: 804610 - DNA, 19 bp, Mus musculus
  siRNA target sequence for AA408112 (NM_178873.2,1212-1230).
cgaagcatttctagaaaaa

SEQ ID NO: 804611 - DNA, 19 bp, Mus musculus
  siRNA target sequence for AA408112 (NM_178873.2,1418-1436).
gagtcaaatggcttagctt

SEQ ID NO: 804612 - DNA, 19 bp, Mus musculus
  siRNA target sequence for AA408112 (NM_178873.2,1439-1457).
ctgagatcgtggaggaatt

SEQ ID NO: 804613 - DNA, 19 bp, Mus musculus
  siRNA target sequence for AA408112 (NM_178873.2,1488-1506).
gcgctatgaagctcagaat

SEQ ID NO: 804614 - DNA, 19 bp, Mus musculus
  siRNA target sequence for AA408112 (NM_178873.2,1491-1509).
ctatgaagctcagaatcta

SEQ ID NO: 804615 - DNA, 19 bp, Mus musculus
  siRNA target sequence for AA408112 (NM_178873.2,1673-1691).
cacagctggggatcaacat

SEQ ID NO: 804616 - DNA, 19 bp, Mus musculus
  siRNA target sequence for AA408112 (NM_178873.2,1678-1696).
ctggggatcaacatgcttt

SEQ ID NO: 804617 - DNA, 19 bp, Mus musculus
  siRNA target sequence for AA408112 (NM_178873.2,1719-1737).
ctttgtacacggagatcta

SEQ ID NO: 804618 - DNA, 19 bp, Mus musculus
  siRNA target sequence for AA408112 (NM_178873.2,1903-1921).
gcttctgacctgaggaatt

SEQ ID NO: 804619 - DNA, 19 bp, Mus musculus
  siRNA target sequence for AA408112 (NM_178873.2,1904-1922).
cttctgacctgaggaattt

SEQ ID NO: 804620 - DNA, 19 bp, Mus musculus
  siRNA target sequence for AA408112 (NM_178873.2,2111-2129).
gtgtctttaagctactgat

SEQ ID NO: 804621 - DNA, 19 bp, Mus musculus
  siRNA target sequence for AA408112 (NM_178873.2,2125-2143).
ctgatgacccataaggtaa

SEQ ID NO: 804622 - DNA, 19 bp, Mus musculus
  siRNA target sequence for 1110063G11Rik (NM_178874.2,283-301).
gaagcaagcctcctgattt

SEQ ID NO: 804623 - DNA, 19 bp, Mus musculus
  siRNA target sequence for 1110063G11Rik (NM_178874.2,286-304).
gcaagcctcctgatttaaa

SEQ ID NO: 804624 - DNA, 19 bp, Mus musculus
  siRNA target sequence for 1110063G11Rik (NM_178874.2,526-544).
cccgacctactgctttcaa

SEQ ID NO: 804625 - DNA, 19 bp, Mus musculus
  siRNA target sequence for 1110063G11Rik (NM_178874.2,538-556).
ctttcaaccgggtgttaca

SEQ ID NO: 804626 - DNA, 19 bp, Mus musculus
  siRNA target sequence for 1110063G11Rik (NM_178874.2,928-946).
cggacccccagcgaactaa

SEQ ID NO: 804627 - DNA, 19 bp, Mus musculus
  siRNA target sequence for 1110063G11Rik (NM_178874.2,957-975).
gaacacctgcaccaaaaga

SEQ ID NO: 804628 - DNA, 19 bp, Mus musculus
  siRNA target sequence for 1110063G11Rik (NM_178874.2,960-978).
cacctgcaccaaaagatct

SEQ ID NO: 804629 - DNA, 19 bp, Mus musculus
  siRNA target sequence for 1110063G11Rik (NM_178874.2,1130-1148).
cgcccagctgcacaaaaaa

SEQ ID NO: 804630 - DNA, 19 bp, Mus musculus
  siRNA target sequence for 1110063G11Rik (NM_178874.2,1259-1277).
catgcgtgccggcattagt

SEQ ID NO: 804631 - DNA, 19 bp, Mus musculus
  siRNA target sequence for 1110063G11Rik (NM_178874.2,1302-1320).
ggtgtcaagggcagtcttt

SEQ ID NO: 804632 - DNA, 19 bp, Mus musculus
  siRNA target sequence for 1110063G11Rik (NM_178874.2,1378-1396).
gcctcattcgcaacaagtt

SEQ ID NO: 804633 - DNA, 19 bp, Mus musculus
  siRNA target sequence for 1110063G11Rik (NM_178874.2,1599-1617).
ccgagatccaacactcttt

SEQ ID NO: 804634 - DNA, 19 bp, Mus musculus
  siRNA target sequence for 1110063G11Rik (NM_178874.2,1600-1618).
cgagatccaacactcttta

SEQ ID NO: 804635 - DNA, 19 bp, Mus musculus
  siRNA target sequence for 1110063G11Rik (NM_178874.2,1601-1619).
gagatccaacactctttat

SEQ ID NO: 804636 - DNA, 19 bp, Mus musculus
  siRNA target sequence for 1110063G11Rik (NM_178874.2,1761-1779).
gagcgctacaggtatgaga

SEQ ID NO: 804637 - DNA, 19 bp, Mus musculus
  siRNA target sequence for 1110063G11Rik (NM_178874.2,1812-1830).
cttcaccagaatgaaatga

SEQ ID NO: 804638 - DNA, 19 bp, Mus musculus
  siRNA target sequence for C76746 (NM_178881.2,2119-2137).
gcttttctcagttatgaat

SEQ ID NO: 804639 - DNA, 19 bp, Mus musculus
  siRNA target sequence for C76746 (NM_178881.2,2129-2147).
gttatgaattgggattatt

SEQ ID NO: 804640 - DNA, 19 bp, Mus musculus
  siRNA target sequence for C76746 (NM_178881.2,2262-2280).
gcagaagacaactcttata

SEQ ID NO: 804641 - DNA, 19 bp, Mus musculus
  siRNA target sequence for C76746 (NM_178881.2,2263-2281).
cagaagacaactcttatat

SEQ ID NO: 804642 - DNA, 19 bp, Mus musculus
  siRNA target sequence for AI467484 (NM_178883.3,178-196).
gtgaaaaagcccttctaga

SEQ ID NO: 804643 - DNA, 19 bp, Mus musculus
  siRNA target sequence for AI467484 (NM_178883.3,384-402).
gaaccaggacttgagaatt

SEQ ID NO: 804644 - DNA, 19 bp, Mus musculus
  siRNA target sequence for AI467484 (NM_178883.3,436-454).
ctccaaagccagattgcaa

SEQ ID NO: 804645 - DNA, 19 bp, Mus musculus
  siRNA target sequence for AI467484 (NM_178883.3,496-514).
gggaagtcctccaacaaga

SEQ ID NO: 804646 - DNA, 19 bp, Mus musculus
  siRNA target sequence for AI467484 (NM_178883.3,564-582).
caagccattgcggaaagat

SEQ ID NO: 804647 - DNA, 19 bp, Mus musculus
  siRNA target sequence for AI467484 (NM_178883.3,567-585).
gccattgcggaaagatcta

SEQ ID NO: 804648 - DNA, 19 bp, Mus musculus
  siRNA target sequence for AI467484 (NM_178883.3,573-591).
gcggaaagatctaagaaga

SEQ ID NO: 804649 - DNA, 19 bp, Mus musculus
  siRNA target sequence for AI467484 (NM_178883.3,598-616).
cagagaccataaaactaaa

SEQ ID NO: 804650 - DNA, 19 bp, Mus musculus
  siRNA target sequence for AI467484 (NM_178883.3,650-668).
catggtgtcagctgacatt

SEQ ID NO: 804651 - DNA, 19 bp, Mus musculus
  siRNA target sequence for AI467484 (NM_178883.3,670-688).
gcatcctcaggaacagaat

SEQ ID NO: 804652 - DNA, 19 bp, Mus musculus
  siRNA target sequence for AI467484 (NM_178883.3,697-715).
ccagcctggagtattccta

SEQ ID NO: 804653 - DNA, 19 bp, Mus musculus
  siRNA target sequence for AI467484 (NM_178883.3,716-734).
cgcacggaagcgctttgat

SEQ ID NO: 804654 - DNA, 19 bp, Mus musculus
  siRNA target sequence for AI467484 (NM_178883.3,717-735).
gcacggaagcgctttgata

SEQ ID NO: 804655 - DNA, 19 bp, Mus musculus
  siRNA target sequence for AI467484 (NM_178883.3,757-775).
cagcaaagctggatttaca

SEQ ID NO: 804656 - DNA, 19 bp, Mus musculus
  siRNA target sequence for AI467484 (NM_178883.3,1004-1022).
cgagagtgtgtcttcagaa

SEQ ID NO: 804657 - DNA, 19 bp, Mus musculus
  siRNA target sequence for AI467484 (NM_178883.3,1096-1114).
gtagctctccccatagact

SEQ ID NO: 804658 - DNA, 19 bp, Mus musculus
  siRNA target sequence for AW822216 (NM_178884.2,675-693).
cgcactgtggccaatgtga

SEQ ID NO: 804659 - DNA, 19 bp, Mus musculus
  siRNA target sequence for AW822216 (NM_178884.2,982-1000).
ccgtaatggttgagatgtt

SEQ ID NO: 804660 - DNA, 19 bp, Mus musculus
  siRNA target sequence for AW822216 (NM_178884.2,1168-1186).
ccaccgagggtgactatca

SEQ ID NO: 804661 - DNA, 19 bp, Mus musculus
  siRNA target sequence for AW822216 (NM_178884.2,1171-1189).
ccgagggtgactatcactt

SEQ ID NO: 804662 - DNA, 19 bp, Mus musculus
  siRNA target sequence for AW822216 (NM_178884.2,1222-1240).
gtccccatgtcgtgttcaa

SEQ ID NO: 804663 - DNA, 19 bp, Mus musculus
  siRNA target sequence for AW822216 (NM_178884.2,1286-1304).
ggaagacgtgcaggtatat

SEQ ID NO: 804664 - DNA, 19 bp, Mus musculus
  siRNA target sequence for AW822216 (NM_178884.2,1355-1373).
ctcttggttccttaatgga

SEQ ID NO: 804665 - DNA, 19 bp, Mus musculus
  siRNA target sequence for AW822216 (NM_178884.2,1539-1557).
gccctcactatccaagaaa

SEQ ID NO: 804666 - DNA, 19 bp, Mus musculus
  siRNA target sequence for AW822216 (NM_178884.2,1696-1714).
gcgagtcgctcatagtgaa

SEQ ID NO: 804667 - DNA, 19 bp, Mus musculus
  siRNA target sequence for AW822216 (NM_178884.2,1916-1934).
ccgagaggacacaactgta

SEQ ID NO: 804668 - DNA, 19 bp, Mus musculus
  siRNA target sequence for AW822216 (NM_178884.2,1965-1983).
gagagtgacatcatcgtat

SEQ ID NO: 804669 - DNA, 19 bp, Mus musculus
  siRNA target sequence for AW822216 (NM_178884.2,1967-1985).
gagtgacatcatcgtatta

SEQ ID NO: 804670 - DNA, 19 bp, Mus musculus
  siRNA target sequence for AW822216 (NM_178884.2,1969-1987).
gtgacatcatcgtattaga

SEQ ID NO: 804671 - DNA, 19 bp, Mus musculus
  siRNA target sequence for AW822216 (NM_178884.2,1973-1991).
catcatcgtattagaaaat

SEQ ID NO: 804672 - DNA, 19 bp, Mus musculus
  siRNA target sequence for AW822216 (NM_178884.2,1976-1994).
catcgtattagaaaataaa

SEQ ID NO: 804673 - DNA, 19 bp, Mus musculus
  siRNA target sequence for AW822216 (NM_178884.2,2073-2091).
cgtgcctacttcacagtta

SEQ ID NO: 804674 - DNA, 19 bp, Mus musculus
  siRNA target sequence for AW822216 (NM_178884.2,2077-2095).
cctacttcacagttaccat

SEQ ID NO: 804675 - DNA, 19 bp, Mus musculus
  siRNA target sequence for AW822216 (NM_178884.2,2204-2222).
ggtgcgctggaccaaagat

SEQ ID NO: 804676 - DNA, 19 bp, Mus musculus
  siRNA target sequence for AW822216 (NM_178884.2,2321-2339).
gtacctgtgtgaaatccat

SEQ ID NO: 804677 - DNA, 19 bp, Mus musculus
  siRNA target sequence for AW822216 (NM_178884.2,2376-2394).
ccccctgtgcggatcatat

SEQ ID NO: 804678 - DNA, 19 bp, Mus musculus
  siRNA target sequence for AW822216 (NM_178884.2,2377-2395).
cccctgtgcggatcatata

SEQ ID NO: 804679 - DNA, 19 bp, Mus musculus
  siRNA target sequence for AW822216 (NM_178884.2,2413-2431).
ccttacacgccgtgagttt

SEQ ID NO: 804680 - DNA, 19 bp, Mus musculus
  siRNA target sequence for AW822216 (NM_178884.2,2418-2436).
cacgccgtgagtttggaat

SEQ ID NO: 804681 - DNA, 19 bp, Mus musculus
  siRNA target sequence for AW822216 (NM_178884.2,2644-2662).
cagctccaccagaaaggat

SEQ ID NO: 804682 - DNA, 19 bp, Mus musculus
  siRNA target sequence for AW822216 (NM_178884.2,2677-2695).
cccgatccctggatttgca

SEQ ID NO: 804683 - DNA, 19 bp, Mus musculus
  siRNA target sequence for AW822216 (NM_178884.2,3016-3034).
gagcaagcgcacaagtgtt

SEQ ID NO: 804684 - DNA, 19 bp, Mus musculus
  siRNA target sequence for AI448887 (NM_178887.2,1214-1232).
ccactacgggagttttggt

SEQ ID NO: 804685 - DNA, 19 bp, Mus musculus
  siRNA target sequence for AI448887 (NM_178887.2,1360-1378).
gcgaccactcggagaacaa

SEQ ID NO: 804686 - DNA, 19 bp, Mus musculus
  siRNA target sequence for AI448887 (NM_178887.2,1362-1380).
gaccactcggagaacaact

SEQ ID NO: 804687 - DNA, 19 bp, Mus musculus
  siRNA target sequence for AI448887 (NM_178887.2,1499-1517).
gacgggatggcagtattca

SEQ ID NO: 804688 - DNA, 19 bp, Mus musculus
  siRNA target sequence for AI448887 (NM_178887.2,1509-1527).
cagtattcactcaagttct

SEQ ID NO: 804689 - DNA, 19 bp, Mus musculus
  siRNA target sequence for AW125441 (NM_178889.2,1270-1288).
cactggtggaagatttaga

SEQ ID NO: 804690 - DNA, 19 bp, Mus musculus
  siRNA target sequence for AW125441 (NM_178889.2,1306-1324).
ctggacattcggatttcca

SEQ ID NO: 804691 - DNA, 19 bp, Mus musculus
  siRNA target sequence for AW125441 (NM_178889.2,1308-1326).
ggacattcggatttccatt

SEQ ID NO: 804692 - DNA, 19 bp, Mus musculus
  siRNA target sequence for AW125441 (NM_178889.2,1309-1327).
gacattcggatttccattt

SEQ ID NO: 804693 - DNA, 19 bp, Mus musculus
  siRNA target sequence for AW125441 (NM_178889.2,1315-1333).
cggatttccatttcctaaa

SEQ ID NO: 804694 - DNA, 19 bp, Mus musculus
  siRNA target sequence for AW125441 (NM_178889.2,1474-1492).
gggtcactgggtatttgat

SEQ ID NO: 804695 - DNA, 19 bp, Mus musculus
  siRNA target sequence for AW125441 (NM_178889.2,1522-1540).
ctacaaagagactagaaca

SEQ ID NO: 804696 - DNA, 19 bp, Mus musculus
  siRNA target sequence for AW125441 (NM_178889.2,1553-1571).
ctcagtcagactgaatttt

SEQ ID NO: 804697 - DNA, 19 bp, Mus musculus
  siRNA target sequence for AW125441 (NM_178889.2,1557-1575).
gtcagactgaattttacga

SEQ ID NO: 804698 - DNA, 19 bp, Mus musculus
  siRNA target sequence for AW125441 (NM_178889.2,1623-1641).
ctgggaggcttcgtgaata

SEQ ID NO: 804699 - DNA, 19 bp, Mus musculus
  siRNA target sequence for AW125441 (NM_178889.2,1627-1645).
gaggcttcgtgaatatggt

SEQ ID NO: 804700 - DNA, 19 bp, Mus musculus
  siRNA target sequence for AW125441 (NM_178889.2,1629-1647).
ggcttcgtgaatatggttt

SEQ ID NO: 804701 - DNA, 19 bp, Mus musculus
  siRNA target sequence for AW125441 (NM_178889.2,1768-1786).
gagtgcccaggtcatttca

SEQ ID NO: 804702 - DNA, 19 bp, Mus musculus
  siRNA target sequence for AW125441 (NM_178889.2,2008-2026).
gggctttgggattaggttt

SEQ ID NO: 804703 - DNA, 19 bp, Mus musculus
  siRNA target sequence for AW539457 (NM_178890.2,611-629).
gcttgtgcgggatgtacaa

SEQ ID NO: 804704 - DNA, 19 bp, Mus musculus
  siRNA target sequence for AW539457 (NM_178890.2,612-630).
cttgtgcgggatgtacaaa

SEQ ID NO: 804705 - DNA, 19 bp, Mus musculus
  siRNA target sequence for AW539457 (NM_178890.2,617-635).
gcgggatgtacaaaggaat

SEQ ID NO: 804706 - DNA, 19 bp, Mus musculus
  siRNA target sequence for AW539457 (NM_178890.2,631-649).
ggaatgaatggtattttat

SEQ ID NO: 804707 - DNA, 19 bp, Mus musculus
  siRNA target sequence for AW124876 (NM_178891.2,222-240).
cactatggcgtggatatga

SEQ ID NO: 804708 - DNA, 19 bp, Mus musculus
  siRNA target sequence for AW124876 (NM_178891.2,408-426).
cgctgcagctgctatggtt

SEQ ID NO: 804709 - DNA, 19 bp, Mus musculus
  siRNA target sequence for AW124876 (NM_178891.2,540-558).
caggcgctcctctacttga

SEQ ID NO: 804710 - DNA, 19 bp, Mus musculus
  siRNA target sequence for AW124876 (NM_178891.2,567-585).
gtgccggtggaacaagata

SEQ ID NO: 804711 - DNA, 19 bp, Mus musculus
  siRNA target sequence for AW124876 (NM_178891.2,576-594).
gaacaagatacggacattt

SEQ ID NO: 804712 - DNA, 19 bp, Mus musculus
  siRNA target sequence for AW124876 (NM_178891.2,634-652).
ggcgtctgcgcatacttct

SEQ ID NO: 804713 - DNA, 19 bp, Mus musculus
  siRNA target sequence for AI836376 (NM_178896.2,141-159).
ctggcaagcattcataaga

SEQ ID NO: 804714 - DNA, 19 bp, Mus musculus
  siRNA target sequence for AI836376 (NM_178896.2,144-162).
gcaagcattcataagatct

SEQ ID NO: 804715 - DNA, 19 bp, Mus musculus
  siRNA target sequence for AI836376 (NM_178896.2,145-163).
caagcattcataagatcta

SEQ ID NO: 804716 - DNA, 19 bp, Mus musculus
  siRNA target sequence for AI836376 (NM_178896.2,169-187).
cccttaacaagctgaatct

SEQ ID NO: 804717 - DNA, 19 bp, Mus musculus
  siRNA target sequence for AI836376 (NM_178896.2,228-246).
ctgcgctcttgcagttctt

SEQ ID NO: 804718 - DNA, 19 bp, Mus musculus
  siRNA target sequence for AI836376 (NM_178896.2,244-262).
cttcggactgctttagcaa

SEQ ID NO: 804719 - DNA, 19 bp, Mus musculus
  siRNA target sequence for AI836376 (NM_178896.2,294-312).
gcctctggagacgacttat

SEQ ID NO: 804720 - DNA, 19 bp, Mus musculus
  siRNA target sequence for AI836376 (NM_178896.2,303-321).
gacgacttatctgcaaaaa

SEQ ID NO: 804721 - DNA, 19 bp, Mus musculus
  siRNA target sequence for AI836376 (NM_178896.2,330-348).
catgacagcatgtatagga

SEQ ID NO: 804722 - DNA, 19 bp, Mus musculus
  siRNA target sequence for AI836376 (NM_178896.2,333-351).
gacagcatgtataggaaat

SEQ ID NO: 804723 - DNA, 19 bp, Mus musculus
  siRNA target sequence for AI836376 (NM_178896.2,354-372).
gagtcaactagaataaaga

SEQ ID NO: 804724 - DNA, 19 bp, Mus musculus
  siRNA target sequence for AI836376 (NM_178896.2,489-507).
gaaccagaaaacgtagtta

SEQ ID NO: 804725 - DNA, 19 bp, Mus musculus
  siRNA target sequence for AI836376 (NM_178896.2,509-527).
gcttgtcctagcttggaaa

SEQ ID NO: 804726 - DNA, 19 bp, Mus musculus
  siRNA target sequence for AI836376 (NM_178896.2,566-584).
gtggctgaaaggaatgact

SEQ ID NO: 804727 - DNA, 19 bp, Mus musculus
  siRNA target sequence for AI836376 (NM_178896.2,581-599).
gacttccctacaatgtgat

SEQ ID NO: 804728 - DNA, 19 bp, Mus musculus
  siRNA target sequence for AI836376 (NM_178896.2,626-644).
ggattacttaagatcatta

SEQ ID NO: 804729 - DNA, 19 bp, Mus musculus
  siRNA target sequence for AI836376 (NM_178896.2,662-680).
ctttaagctcatttacaga

SEQ ID NO: 804730 - DNA, 19 bp, Mus musculus
  siRNA target sequence for AI836376 (NM_178896.2,677-695).
cagatacgcgtttgacttt

SEQ ID NO: 804731 - DNA, 19 bp, Mus musculus
  siRNA target sequence for AI836376 (NM_178896.2,710-728).
ccagcgcagcctagacata

SEQ ID NO: 804732 - DNA, 19 bp, Mus musculus
  siRNA target sequence for AI836376 (NM_178896.2,711-729).
cagcgcagcctagacataa

SEQ ID NO: 804733 - DNA, 19 bp, Mus musculus
  siRNA target sequence for AI836376 (NM_178896.2,714-732).
cgcagcctagacataaaca

SEQ ID NO: 804734 - DNA, 19 bp, Mus musculus
  siRNA target sequence for AI836376 (NM_178896.2,746-764).
gttgggactgttattagga

SEQ ID NO: 804735 - DNA, 19 bp, Mus musculus
  siRNA target sequence for AI836376 (NM_178896.2,750-768).
ggactgttattaggaaaaa

SEQ ID NO: 804736 - DNA, 19 bp, Mus musculus
  siRNA target sequence for AI836376 (NM_178896.2,753-771).
ctgttattaggaaaaatct

SEQ ID NO: 804737 - DNA, 19 bp, Mus musculus
  siRNA target sequence for AI836376 (NM_178896.2,857-875).
gttcagcagaacgattagt

SEQ ID NO: 804738 - DNA, 19 bp, Mus musculus
  siRNA target sequence for AI836376 (NM_178896.2,903-921).
ggagcatggccagttttgt

SEQ ID NO: 804739 - DNA, 19 bp, Mus musculus
  siRNA target sequence for AI836376 (NM_178896.2,904-922).
gagcatggccagttttgtt

SEQ ID NO: 804740 - DNA, 19 bp, Mus musculus
  siRNA target sequence for AI836376 (NM_178896.2,926-944).
cgaatttgtggaatggtat

SEQ ID NO: 804741 - DNA, 19 bp, Mus musculus
  siRNA target sequence for AI836376 (NM_178896.2,933-951).
gtggaatggtataaagaca

SEQ ID NO: 804742 - DNA, 19 bp, Mus musculus
  siRNA target sequence for AI894139 (NM_178898.2,926-944).
ggacctggcaaggaagatt

SEQ ID NO: 804743 - DNA, 19 bp, Mus musculus
  siRNA target sequence for AI894139 (NM_178898.2,1238-1256).
gtccaccagtcaacactta

SEQ ID NO: 804744 - DNA, 19 bp, Mus musculus
  siRNA target sequence for AI894139 (NM_178898.2,1447-1465).
gggtgagaagccatttcca

SEQ ID NO: 804745 - DNA, 19 bp, Mus musculus
  siRNA target sequence for AI894139 (NM_178898.2,1616-1634).
caggagaagcgctttagct

SEQ ID NO: 804746 - DNA, 19 bp, Mus musculus
  siRNA target sequence for AI894139 (NM_178898.2,1702-1720).
cttggcatcctctgcttat

SEQ ID NO: 804747 - DNA, 19 bp, Mus musculus
  siRNA target sequence for AI894139 (NM_178898.2,1732-1750).
gaggagctcaccaagtcat

SEQ ID NO: 804748 - DNA, 19 bp, Mus musculus
  siRNA target sequence for AI894139 (NM_178898.2,1776-1794).
gcgcagccaggggaaagtt

SEQ ID NO: 804749 - DNA, 19 bp, Mus musculus
  siRNA target sequence for AI894139 (NM_178898.2,1809-1827).
ctgtctcacccatatccaa

SEQ ID NO: 804750 - DNA, 19 bp, Mus musculus
  siRNA target sequence for AI894139 (NM_178898.2,1846-1864).
ggaccacaaggcatatggt

SEQ ID NO: 804751 - DNA, 19 bp, Mus musculus
  siRNA target sequence for AI894139 (NM_178898.2,1904-1922).
gtggggtctctgcatagtt

SEQ ID NO: 804752 - DNA, 19 bp, Mus musculus
  siRNA target sequence for AI894139 (NM_178898.2,1906-1924).
ggggtctctgcatagttgt

SEQ ID NO: 804753 - DNA, 19 bp, Mus musculus
  siRNA target sequence for AI987662 (NM_178899.3,65-83).
gggctctctctttgcaaaa

SEQ ID NO: 804754 - DNA, 19 bp, Mus musculus
  siRNA target sequence for AI987662 (NM_178899.3,67-85).
gctctctctttgcaaaata

SEQ ID NO: 804755 - DNA, 19 bp, Mus musculus
  siRNA target sequence for AI987662 (NM_178899.3,127-145).
gaccgtgccgtcatacact

SEQ ID NO: 804756 - DNA, 19 bp, Mus musculus
  siRNA target sequence for AI987662 (NM_178899.3,207-225).
catctgacatccagatcat

SEQ ID NO: 804757 - DNA, 19 bp, Mus musculus
  siRNA target sequence for AI987662 (NM_178899.3,262-280).
cttgctaggctccgttaat

SEQ ID NO: 804758 - DNA, 19 bp, Mus musculus
  siRNA target sequence for AI987662 (NM_178899.3,266-284).
ctaggctccgttaataagt

SEQ ID NO: 804759 - DNA, 19 bp, Mus musculus
  siRNA target sequence for AI987662 (NM_178899.3,369-387).
ccgatgagggcaattacat

SEQ ID NO: 804760 - DNA, 19 bp, Mus musculus
  siRNA target sequence for AI987662 (NM_178899.3,506-524).
gagtatgtgggcaacatta

SEQ ID NO: 804761 - DNA, 19 bp, Mus musculus
  siRNA target sequence for AI987662 (NM_178899.3,546-564).
gaggtaccaggctggttta

SEQ ID NO: 804762 - DNA, 19 bp, Mus musculus
  siRNA target sequence for AI987662 (NM_178899.3,549-567).
gtaccaggctggtttacca

SEQ ID NO: 804763 - DNA, 19 bp, Mus musculus
  siRNA target sequence for AI987662 (NM_178899.3,560-578).
gtttaccagtggcgaaaaa

SEQ ID NO: 804764 - DNA, 19 bp, Mus musculus
  siRNA target sequence for AI987662 (NM_178899.3,628-646).
caacaccctttggattgtt

SEQ ID NO: 804765 - DNA, 19 bp, Mus musculus
  siRNA target sequence for AI987662 (NM_178899.3,706-724).
gatggaaagtgatatcatt

SEQ ID NO: 804766 - DNA, 19 bp, Mus musculus
  siRNA target sequence for AI987662 (NM_178899.3,721-739).
cattatgcccaccatatat

SEQ ID NO: 804767 - DNA, 19 bp, Mus musculus
  siRNA target sequence for AI987662 (NM_178899.3,727-745).
gcccaccatatattatgga

SEQ ID NO: 804768 - DNA, 19 bp, Mus musculus
  siRNA target sequence for AI987662 (NM_178899.3,733-751).
catatattatggaccttat

SEQ ID NO: 804769 - DNA, 19 bp, Mus musculus
  siRNA target sequence for AI987662 (NM_178899.3,747-765).
cttatggacttcaggttaa

SEQ ID NO: 804770 - DNA, 19 bp, Mus musculus
  siRNA target sequence for AI987662 (NM_178899.3,768-786).
ctgataaagggctaaaagt

SEQ ID NO: 804771 - DNA, 19 bp, Mus musculus
  siRNA target sequence for AI987662 (NM_178899.3,830-848).
gactgttcagctgattctt

SEQ ID NO: 804772 - DNA, 19 bp, Mus musculus
  siRNA target sequence for AI987662 (NM_178899.3,871-889).
gatccaaagatctgacaat

SEQ ID NO: 804773 - DNA, 19 bp, Mus musculus
  siRNA target sequence for AI987662 (NM_178899.3,946-964).
ccagaagacagctgactat

SEQ ID NO: 804774 - DNA, 19 bp, Mus musculus
  siRNA target sequence for AI987662 (NM_178899.3,991-1009).
cggaagacgcgatgaaact

SEQ ID NO: 804775 - DNA, 19 bp, Mus musculus
  siRNA target sequence for AI987662 (NM_178899.3,1000-1018).
cgatgaaactcgattcaca

SEQ ID NO: 804776 - DNA, 19 bp, Mus musculus
  siRNA target sequence for AI987662 (NM_178899.3,1008-1026).
ctcgattcacagtcatcat

SEQ ID NO: 804777 - DNA, 19 bp, Mus musculus
  siRNA target sequence for AI987662 (NM_178899.3,1010-1028).
cgattcacagtcatcataa

SEQ ID NO: 804778 - DNA, 19 bp, Mus musculus
  siRNA target sequence for AI987662 (NM_178899.3,1086-1104).
gtataactggaatatcact

SEQ ID NO: 804779 - DNA, 19 bp, Mus musculus
  siRNA target sequence for AI987662 (NM_178899.3,1095-1113).
gaatatcactgtttttgat

SEQ ID NO: 804780 - DNA, 19 bp, Mus musculus
  siRNA target sequence for AI987662 (NM_178899.3,1184-1202).
ggcagaccagagtcagaat

SEQ ID NO: 804781 - DNA, 19 bp, Mus musculus
  siRNA target sequence for AI987662 (NM_178899.3,1185-1203).
gcagaccagagtcagaata

SEQ ID NO: 804782 - DNA, 19 bp, Mus musculus
  siRNA target sequence for AI987662 (NM_178899.3,1253-1271).
gggatctacgagtttgtga

SEQ ID NO: 804783 - DNA, 19 bp, Mus musculus
  siRNA target sequence for AI987662 (NM_178899.3,1258-1276).
ctacgagtttgtgactttt

SEQ ID NO: 804784 - DNA, 19 bp, Mus musculus
  siRNA target sequence for AI987662 (NM_178899.3,1289-1307).
ggtgtttccaggatgtcaa

SEQ ID NO: 804785 - DNA, 19 bp, Mus musculus
  siRNA target sequence for AI987662 (NM_178899.3,1331-1349).
ggtgtaacagggcaagata

SEQ ID NO: 804786 - DNA, 19 bp, Mus musculus
  siRNA target sequence for AI987662 (NM_178899.3,1332-1350).
gtgtaacagggcaagatat

SEQ ID NO: 804787 - DNA, 19 bp, Mus musculus
  siRNA target sequence for AI987662 (NM_178899.3,1346-1364).
gatattcacggaacaattt

SEQ ID NO: 804788 - DNA, 19 bp, Mus musculus
  siRNA target sequence for AI467606 (NM_178901.2,189-207).
cagcagtgtgggtagtaat

SEQ ID NO: 804789 - DNA, 19 bp, Mus musculus
  siRNA target sequence for AI467606 (NM_178901.2,259-277).
cttcttcatcataactact

SEQ ID NO: 804790 - DNA, 19 bp, Mus musculus
  siRNA target sequence for AI593442 (NM_178906.2,566-584).
ctacgctggtgctgattgt

SEQ ID NO: 804791 - DNA, 19 bp, Mus musculus
  siRNA target sequence for AI593442 (NM_178906.2,672-690).
gagggctcaggaagaatat

SEQ ID NO: 804792 - DNA, 19 bp, Mus musculus
  siRNA target sequence for AI593442 (NM_178906.2,674-692).
gggctcaggaagaatatga

SEQ ID NO: 804793 - DNA, 19 bp, Mus musculus
  siRNA target sequence for AI593442 (NM_178906.2,685-703).
gaatatgagcgagatcatt

SEQ ID NO: 804794 - DNA, 19 bp, Mus musculus
  siRNA target sequence for AI593442 (NM_178906.2,751-769).
ctccaacccatggaaaaga

SEQ ID NO: 804795 - DNA, 19 bp, Mus musculus
  siRNA target sequence for AI593442 (NM_178906.2,813-831).
ccctccaatgctacttctt

SEQ ID NO: 804796 - DNA, 19 bp, Mus musculus
  siRNA target sequence for AI593442 (NM_178906.2,815-833).
ctccaatgctacttcttct

SEQ ID NO: 804797 - DNA, 19 bp, Mus musculus
  siRNA target sequence for AI593442 (NM_178906.2,954-972).
ggcgagggccttttgcaaa

SEQ ID NO: 804798 - DNA, 19 bp, Mus musculus
  siRNA target sequence for BB146404 (NM_178908.2,89-107).
gcctttcagagcatcttaa

SEQ ID NO: 804799 - DNA, 19 bp, Mus musculus
  siRNA target sequence for BB146404 (NM_178908.2,205-223).
cccctgcagcgttgagaat

SEQ ID NO: 804800 - DNA, 19 bp, Mus musculus
  siRNA target sequence for BB146404 (NM_178908.2,206-224).
ccctgcagcgttgagaata

SEQ ID NO: 804801 - DNA, 19 bp, Mus musculus
  siRNA target sequence for BB146404 (NM_178908.2,208-226).
ctgcagcgttgagaatact

SEQ ID NO: 804802 - DNA, 19 bp, Mus musculus
  siRNA target sequence for BB146404 (NM_178908.2,228-246).
cctatgggctggtttttct

SEQ ID NO: 804803 - DNA, 19 bp, Mus musculus
  siRNA target sequence for BB146404 (NM_178908.2,321-339).
gctgtatgaacccaaaaaa

SEQ ID NO: 804804 - DNA, 19 bp, Mus musculus
  siRNA target sequence for BB146404 (NM_178908.2,322-340).
ctgtatgaacccaaaaaaa

SEQ ID NO: 804805 - DNA, 19 bp, Mus musculus
  siRNA target sequence for BB146404 (NM_178908.2,324-342).
gtatgaacccaaaaaaaat

SEQ ID NO: 804806 - DNA, 19 bp, Mus musculus
  siRNA target sequence for BB146404 (NM_178908.2,439-457).
gcttaatgggacgttttat

SEQ ID NO: 804807 - DNA, 19 bp, Mus musculus
  siRNA target sequence for BB146404 (NM_178908.2,464-482).
gctatgagcgggacaagaa

SEQ ID NO: 804808 - DNA, 19 bp, Mus musculus
  siRNA target sequence for BB146404 (NM_178908.2,491-509).
ctcctggagatgatttgca

SEQ ID NO: 804809 - DNA, 19 bp, Mus musculus
  siRNA target sequence for BB146404 (NM_178908.2,626-644).
ctaggatggtgcctgattt

SEQ ID NO: 804810 - DNA, 19 bp, Mus musculus
  siRNA target sequence for BB146404 (NM_178908.2,629-647).
ggatggtgcctgatttgtt

SEQ ID NO: 804811 - DNA, 19 bp, Mus musculus
  siRNA target sequence for BB146404 (NM_178908.2,663-681).
ccctgctgaccacttgtta

SEQ ID NO: 804812 - DNA, 19 bp, Mus musculus
  siRNA target sequence for BB146404 (NM_178908.2,684-702).
cacgctgcagatctaaagt

SEQ ID NO: 804813 - DNA, 19 bp, Mus musculus
  siRNA target sequence for BB146404 (NM_178908.2,686-704).
cgctgcagatctaaagtca

SEQ ID NO: 804814 - DNA, 19 bp, Mus musculus
  siRNA target sequence for BB146404 (NM_178908.2,706-724).
ctatctgcagctgagtttt

SEQ ID NO: 804815 - DNA, 19 bp, Mus musculus
  siRNA target sequence for BB146404 (NM_178908.2,773-791).
ctggaatgtgctaacaagt

SEQ ID NO: 804816 - DNA, 19 bp, Mus musculus
  siRNA target sequence for BB146404 (NM_178908.2,775-793).
ggaatgtgctaacaagtta

SEQ ID NO: 804817 - DNA, 19 bp, Mus musculus
  siRNA target sequence for BB146404 (NM_178908.2,801-819).
ggaacctcaaatgcttttt

SEQ ID NO: 804818 - DNA, 19 bp, Mus musculus
  siRNA target sequence for BB146404 (NM_178908.2,925-943).
ccacaaagtggtagatgat

SEQ ID NO: 804819 - DNA, 19 bp, Mus musculus
  siRNA target sequence for BB146404 (NM_178908.2,934-952).
ggtagatgatggtatggaa

SEQ ID NO: 804820 - DNA, 19 bp, Mus musculus
  siRNA target sequence for AI661438 (NM_178914.3,180-198).
cagccctccatgcttgttt

SEQ ID NO: 804821 - DNA, 19 bp, Mus musculus
  siRNA target sequence for AI661438 (NM_178914.3,283-301).
cacatggctattcactata

SEQ ID NO: 804822 - DNA, 19 bp, Mus musculus
  siRNA target sequence for AI661438 (NM_178914.3,285-303).
catggctattcactataat

SEQ ID NO: 804823 - DNA, 19 bp, Mus musculus
  siRNA target sequence for AI661438 (NM_178914.3,333-351).
ctgctcaattccagtaagt

SEQ ID NO: 804824 - DNA, 19 bp, Mus musculus
  siRNA target sequence for AI661438 (NM_178914.3,352-370).
gtgaatactagcatcaaat

SEQ ID NO: 804825 - DNA, 19 bp, Mus musculus
  siRNA target sequence for AI661438 (NM_178914.3,354-372).
gaatactagcatcaaatat

SEQ ID NO: 804826 - DNA, 19 bp, Mus musculus
  siRNA target sequence for AI661438 (NM_178914.3,406-424).
gagttggcacggtgtgaaa

SEQ ID NO: 804827 - DNA, 19 bp, Mus musculus
  siRNA target sequence for AI661438 (NM_178914.3,415-433).
cggtgtgaaaaggagttta

SEQ ID NO: 804828 - DNA, 19 bp, Mus musculus
  siRNA target sequence for AI661438 (NM_178914.3,416-434).
ggtgtgaaaaggagtttaa

SEQ ID NO: 804829 - DNA, 19 bp, Mus musculus
  siRNA target sequence for AI661438 (NM_178914.3,558-576).
cccatcattttcaaagtca

SEQ ID NO: 804830 - DNA, 19 bp, Mus musculus
  siRNA target sequence for AI661438 (NM_178914.3,795-813).
caagcagtcgccattcact

SEQ ID NO: 804831 - DNA, 19 bp, Mus musculus
  siRNA target sequence for AI661438 (NM_178914.3,810-828).
cactccacgaactttaaaa

SEQ ID NO: 804832 - DNA, 19 bp, Mus musculus
  siRNA target sequence for AI661438 (NM_178914.3,815-833).
cacgaactttaaaaacaga

SEQ ID NO: 804833 - DNA, 19 bp, Mus musculus
  siRNA target sequence for AI661438 (NM_178914.3,914-932).
ctgaaacccaaactgaatt

SEQ ID NO: 804834 - DNA, 19 bp, Mus musculus
  siRNA target sequence for AI661438 (NM_178914.3,926-944).
ctgaattaagcagctttaa

SEQ ID NO: 804835 - DNA, 19 bp, Mus musculus
  siRNA target sequence for AI661438 (NM_178914.3,928-946).
gaattaagcagctttaact

SEQ ID NO: 804836 - DNA, 19 bp, Mus musculus
  siRNA target sequence for AI661438 (NM_178914.3,981-999).
ggactcagaagtgaacata

SEQ ID NO: 804837 - DNA, 19 bp, Mus musculus
  siRNA target sequence for AI661438 (NM_178914.3,986-1004).
cagaagtgaacataaacca

SEQ ID NO: 804838 - DNA, 19 bp, Mus musculus
  siRNA target sequence for AI661438 (NM_178914.3,1056-1074).
ctcacaaggacaaaactta

SEQ ID NO: 804839 - DNA, 19 bp, Mus musculus
  siRNA target sequence for AI661438 (NM_178914.3,1060-1078).
caaggacaaaacttagcat

SEQ ID NO: 804840 - DNA, 19 bp, Mus musculus
  siRNA target sequence for AI661438 (NM_178914.3,1076-1094).
catgggacagtattcaaga

SEQ ID NO: 804841 - DNA, 19 bp, Mus musculus
  siRNA target sequence for AI661438 (NM_178914.3,1213-1231).
gtgacggatgaaatcttga

SEQ ID NO: 804842 - DNA, 19 bp, Mus musculus
  siRNA target sequence for AI661438 (NM_178914.3,1215-1233).
gacggatgaaatcttgaaa

SEQ ID NO: 804843 - DNA, 19 bp, Mus musculus
  siRNA target sequence for AI661438 (NM_178914.3,1217-1235).
cggatgaaatcttgaaact

SEQ ID NO: 804844 - DNA, 19 bp, Mus musculus
  siRNA target sequence for AI661438 (NM_178914.3,1230-1248).
gaaacttggtttattttct

SEQ ID NO: 804845 - DNA, 19 bp, Mus musculus
  siRNA target sequence for AI661438 (NM_178914.3,1265-1283).
gactgtttgagcgacatat

SEQ ID NO: 804846 - DNA, 19 bp, Mus musculus
  siRNA target sequence for AI661438 (NM_178914.3,1267-1285).
ctgtttgagcgacatataa

SEQ ID NO: 804847 - DNA, 19 bp, Mus musculus
  siRNA target sequence for AI661438 (NM_178914.3,1275-1293).
gcgacatataaagaaaaat

SEQ ID NO: 804848 - DNA, 19 bp, Mus musculus
  siRNA target sequence for AI661438 (NM_178914.3,1397-1415).
gaatgttgaatcaacttca

SEQ ID NO: 804849 - DNA, 19 bp, Mus musculus
  siRNA target sequence for AI661438 (NM_178914.3,1425-1443).
ggctctgatttcaagagaa

SEQ ID NO: 804850 - DNA, 19 bp, Mus musculus
  siRNA target sequence for AI661438 (NM_178914.3,1529-1547).
cgaaggacgaaaacaagat

SEQ ID NO: 804851 - DNA, 19 bp, Mus musculus
  siRNA target sequence for AI661438 (NM_178914.3,1534-1552).
gacgaaaacaagatgttct

SEQ ID NO: 804852 - DNA, 19 bp, Mus musculus
  siRNA target sequence for AI661438 (NM_178914.3,1593-1611).
gcattcagagggtgttata

SEQ ID NO: 804853 - DNA, 19 bp, Mus musculus
  siRNA target sequence for AI661438 (NM_178914.3,1594-1612).
cattcagagggtgttataa

SEQ ID NO: 804854 - DNA, 19 bp, Mus musculus
  siRNA target sequence for AI661438 (NM_178914.3,1620-1638).
ggtcaatgacgaaacagat

SEQ ID NO: 804855 - DNA, 19 bp, Mus musculus
  siRNA target sequence for AI661438 (NM_178914.3,1621-1639).
gtcaatgacgaaacagata

SEQ ID NO: 804856 - DNA, 19 bp, Mus musculus
  siRNA target sequence for AI661438 (NM_178914.3,1623-1641).
caatgacgaaacagataat

SEQ ID NO: 804857 - DNA, 19 bp, Mus musculus
  siRNA target sequence for AI661438 (NM_178914.3,1812-1830).
caatggtggcagtaatcat

SEQ ID NO: 804858 - DNA, 19 bp, Mus musculus
  siRNA target sequence for AI661438 (NM_178914.3,1823-1841).
gtaatcatggtaaggaatt

SEQ ID NO: 804859 - DNA, 19 bp, Mus musculus
  siRNA target sequence for AI839735 (NM_178915.2,151-169).
gcgcagtgcgtctgttact

SEQ ID NO: 804860 - DNA, 19 bp, Mus musculus
  siRNA target sequence for AI839735 (NM_178915.2,152-170).
cgcagtgcgtctgttactt

SEQ ID NO: 804861 - DNA, 19 bp, Mus musculus
  siRNA target sequence for AI839735 (NM_178915.2,233-251).
gtggccgctgcctactctt

SEQ ID NO: 804862 - DNA, 19 bp, Mus musculus
  siRNA target sequence for AI839735 (NM_178915.2,235-253).
ggccgctgcctactcttta

SEQ ID NO: 804863 - DNA, 19 bp, Mus musculus
  siRNA target sequence for AI839735 (NM_178915.2,392-410).
catggcgcacgctcttctt

SEQ ID NO: 804864 - DNA, 19 bp, Mus musculus
  siRNA target sequence for AI450344 (NM_178917.2,408-426).
gtacggtggacggaatcaa

SEQ ID NO: 804865 - DNA, 19 bp, Mus musculus
  siRNA target sequence for AI450344 (NM_178917.2,508-526).
ggcacgaaagagatgatga

SEQ ID NO: 804866 - DNA, 19 bp, Mus musculus
  siRNA target sequence for AI450344 (NM_178917.2,509-527).
gcacgaaagagatgatgat

SEQ ID NO: 804867 - DNA, 19 bp, Mus musculus
  siRNA target sequence for AI450344 (NM_178917.2,510-528).
cacgaaagagatgatgata

SEQ ID NO: 804868 - DNA, 19 bp, Mus musculus
  siRNA target sequence for AI450344 (NM_178917.2,512-530).
cgaaagagatgatgataat

SEQ ID NO: 804869 - DNA, 19 bp, Mus musculus
  siRNA target sequence for AI450344 (NM_178917.2,561-579).
ggaaggcatgaatatgcat

SEQ ID NO: 804870 - DNA, 19 bp, Mus musculus
  siRNA target sequence for AI450344 (NM_178917.2,649-667).
gggtgaaagccgaattgca

SEQ ID NO: 804871 - DNA, 19 bp, Mus musculus
  siRNA target sequence for AI450344 (NM_178917.2,650-668).
ggtgaaagccgaattgcat

SEQ ID NO: 804872 - DNA, 19 bp, Mus musculus
  siRNA target sequence for AI450344 (NM_178917.2,651-669).
gtgaaagccgaattgcata

SEQ ID NO: 804873 - DNA, 19 bp, Mus musculus
  siRNA target sequence for AI450344 (NM_178917.2,673-691).
cttggcttctaccagtaaa

SEQ ID NO: 804874 - DNA, 19 bp, Mus musculus
  siRNA target sequence for AI450344 (NM_178917.2,676-694).
ggcttctaccagtaaaatt

SEQ ID NO: 804875 - DNA, 19 bp, Mus musculus
  siRNA target sequence for AI450344 (NM_178917.2,677-695).
gcttctaccagtaaaatta

SEQ ID NO: 804876 - DNA, 19 bp, Mus musculus
  siRNA target sequence for AI450344 (NM_178917.2,711-729).
gtctttgagcacatagata

SEQ ID NO: 804877 - DNA, 19 bp, Mus musculus
  siRNA target sequence for AI450344 (NM_178917.2,754-772).
cccaagcaggcacaaaaga

SEQ ID NO: 804878 - DNA, 19 bp, Mus musculus
  siRNA target sequence for AI450344 (NM_178917.2,800-818).
ctcaggccccatatcctta

SEQ ID NO: 804879 - DNA, 19 bp, Mus musculus
  siRNA target sequence for AI450344 (NM_178917.2,814-832).
ccttaagtgccaagattga

SEQ ID NO: 804880 - DNA, 19 bp, Mus musculus
  siRNA target sequence for AI450344 (NM_178917.2,815-833).
cttaagtgccaagattgaa

SEQ ID NO: 804881 - DNA, 19 bp, Mus musculus
  siRNA target sequence for AI450344 (NM_178917.2,842-860).
ctacaccccaggtgaatca

SEQ ID NO: 804882 - DNA, 19 bp, Mus musculus
  siRNA target sequence for AI450344 (NM_178917.2,852-870).
ggtgaatcaatccagatat

SEQ ID NO: 804883 - DNA, 19 bp, Mus musculus
  siRNA target sequence for AI450344 (NM_178917.2,853-871).
gtgaatcaatccagatatt

SEQ ID NO: 804884 - DNA, 19 bp, Mus musculus
  siRNA target sequence for AI450344 (NM_178917.2,887-905).
ctgctcttcccgaatggta

SEQ ID NO: 804885 - DNA, 19 bp, Mus musculus
  siRNA target sequence for AI450344 (NM_178917.2,986-1004).
cttacgtggcgagtcttta

SEQ ID NO: 804886 - DNA, 19 bp, Mus musculus
  siRNA target sequence for AI450344 (NM_178917.2,990-1008).
cgtggcgagtctttatcct

SEQ ID NO: 804887 - DNA, 19 bp, Mus musculus
  siRNA target sequence for AI450344 (NM_178917.2,1066-1084).
ccatcctcgactgtagtat

SEQ ID NO: 804888 - DNA, 19 bp, Mus musculus
  siRNA target sequence for AI450344 (NM_178917.2,1081-1099).
gtataatccgagtggaata

SEQ ID NO: 804889 - DNA, 19 bp, Mus musculus
  siRNA target sequence for AI450344 (NM_178917.2,1109-1127).
ggtgtacgtggatattcct

SEQ ID NO: 804890 - DNA, 19 bp, Mus musculus
  siRNA target sequence for AI450344 (NM_178917.2,1126-1144).
ctggggccatggatttgct

SEQ ID NO: 804891 - DNA, 19 bp, Mus musculus
  siRNA target sequence for AI450344 (NM_178917.2,1176-1194).
cctctgcacccgtttggta

SEQ ID NO: 804892 - DNA, 19 bp, Mus musculus
  siRNA target sequence for AI450344 (NM_178917.2,1216-1234).
gtcagtgtagcatgagtat

SEQ ID NO: 804893 - DNA, 19 bp, Mus musculus
  siRNA target sequence for AI450344 (NM_178917.2,1218-1236).
cagtgtagcatgagtatga

SEQ ID NO: 804894 - DNA, 19 bp, Mus musculus
  siRNA target sequence for AI450344 (NM_178917.2,1281-1299).
gttcgaattgcgtgtatct

SEQ ID NO: 804895 - DNA, 19 bp, Mus musculus
  siRNA target sequence for AW544865 (NM_178918.2,216-234).
cctgtagcgattcaaacat

SEQ ID NO: 804896 - DNA, 19 bp, Mus musculus
  siRNA target sequence for AW544865 (NM_178918.2,217-235).
ctgtagcgattcaaacata

SEQ ID NO: 804897 - DNA, 19 bp, Mus musculus
  siRNA target sequence for AW544865 (NM_178918.2,238-256).
ctgtacttggtgagaagat

SEQ ID NO: 804898 - DNA, 19 bp, Mus musculus
  siRNA target sequence for AW544865 (NM_178918.2,240-258).
gtacttggtgagaagatca

SEQ ID NO: 804899 - DNA, 19 bp, Mus musculus
  siRNA target sequence for AW544865 (NM_178918.2,270-288).
ctgtactggaacaactata

SEQ ID NO: 804900 - DNA, 19 bp, Mus musculus
  siRNA target sequence for AW544865 (NM_178918.2,319-337).
cagtgtccaaagtagactt

SEQ ID NO: 804901 - DNA, 19 bp, Mus musculus
  siRNA target sequence for AW544865 (NM_178918.2,343-361).
ctcagcttccatataacta

SEQ ID NO: 804902 - DNA, 19 bp, Mus musculus
  siRNA target sequence for AW544865 (NM_178918.2,408-426).
caagagcctgtaaaaacct

SEQ ID NO: 804903 - DNA, 19 bp, Mus musculus
  siRNA target sequence for AW544865 (NM_178918.2,496-514).
gtgaagatggtgtagttca

SEQ ID NO: 804904 - DNA, 19 bp, Mus musculus
  siRNA target sequence for AW544865 (NM_178918.2,507-525).
gtagttcaactttttgata

SEQ ID NO: 804905 - DNA, 19 bp, Mus musculus
  siRNA target sequence for AW544865 (NM_178918.2,551-569).
gtttgaaggccacacaaaa

SEQ ID NO: 804906 - DNA, 19 bp, Mus musculus
  siRNA target sequence for AW544865 (NM_178918.2,563-581).
cacaaaagcagttcataca

SEQ ID NO: 804907 - DNA, 19 bp, Mus musculus
  siRNA target sequence for AW544865 (NM_178918.2,565-583).
caaaagcagttcatacagt

SEQ ID NO: 804908 - DNA, 19 bp, Mus musculus
  siRNA target sequence for AW544865 (NM_178918.2,571-589).
cagttcatacagtagattt

SEQ ID NO: 804909 - DNA, 19 bp, Mus musculus
  siRNA target sequence for AW544865 (NM_178918.2,621-639).
gctgatgactatactgtta

SEQ ID NO: 804910 - DNA, 19 bp, Mus musculus
  siRNA target sequence for AW544865 (NM_178918.2,622-640).
ctgatgactatactgttaa

SEQ ID NO: 804911 - DNA, 19 bp, Mus musculus
  siRNA target sequence for AW544865 (NM_178918.2,624-642).
gatgactatactgttaaat

SEQ ID NO: 804912 - DNA, 19 bp, Mus musculus
  siRNA target sequence for AW544865 (NM_178918.2,672-690).
ctgacattcaaagaacatt

SEQ ID NO: 804913 - DNA, 19 bp, Mus musculus
  siRNA target sequence for AW544865 (NM_178918.2,725-743).
gaacccagacctttttgta

SEQ ID NO: 804914 - DNA, 19 bp, Mus musculus
  siRNA target sequence for AW544865 (NM_178918.2,728-746).
cccagacctttttgtaaca

SEQ ID NO: 804915 - DNA, 19 bp, Mus musculus
  siRNA target sequence for AW544865 (NM_178918.2,748-766).
gatcatacgatcatactgt

SEQ ID NO: 804916 - DNA, 19 bp, Mus musculus
  siRNA target sequence for AW544865 (NM_178918.2,756-774).
gatcatactgtgaagatat

SEQ ID NO: 804917 - DNA, 19 bp, Mus musculus
  siRNA target sequence for AW544865 (NM_178918.2,777-795).
gatgctcggacaaataaga

SEQ ID NO: 804918 - DNA, 19 bp, Mus musculus
  siRNA target sequence for AW544865 (NM_178918.2,781-799).
ctcggacaaataagaatgt

SEQ ID NO: 804919 - DNA, 19 bp, Mus musculus
  siRNA target sequence for AW544865 (NM_178918.2,870-888).
gcaggaggccgctatgtta

SEQ ID NO: 804920 - DNA, 19 bp, Mus musculus
  siRNA target sequence for AW544865 (NM_178918.2,871-889).
caggaggccgctatgttaa

SEQ ID NO: 804921 - DNA, 19 bp, Mus musculus
  siRNA target sequence for AW544865 (NM_178918.2,874-892).
gaggccgctatgttaaagt

SEQ ID NO: 804922 - DNA, 19 bp, Mus musculus
  siRNA target sequence for AW544865 (NM_178918.2,876-894).
ggccgctatgttaaagtct

SEQ ID NO: 804923 - DNA, 19 bp, Mus musculus
  siRNA target sequence for AW544865 (NM_178918.2,917-935).
gctgcttgtgtctttgaaa

SEQ ID NO: 804924 - DNA, 19 bp, Mus musculus
  siRNA target sequence for AW544865 (NM_178918.2,995-1013).
cggctcactggataggaaa

SEQ ID NO: 804925 - DNA, 19 bp, Mus musculus
  siRNA target sequence for AW544865 (NM_178918.2,1027-1045).
gcaccacctcctacaaagt

SEQ ID NO: 804926 - DNA, 19 bp, Mus musculus
  siRNA target sequence for AW544865 (NM_178918.2,1044-1062).
gtcgtccacagctttgact

SEQ ID NO: 804927 - DNA, 19 bp, Mus musculus
  siRNA target sequence for AW544865 (NM_178918.2,1059-1077).
gactacgcagcttcaatct

SEQ ID NO: 804928 - DNA, 19 bp, Mus musculus
  siRNA target sequence for AW544865 (NM_178918.2,1085-1103).
ggcactctctcatcaagat

SEQ ID NO: 804929 - DNA, 19 bp, Mus musculus
  siRNA target sequence for AW544865 (NM_178918.2,1130-1148).
cggaatactgagtgttaaa

SEQ ID NO: 804930 - DNA, 19 bp, Mus musculus
  siRNA target sequence for AW544865 (NM_178918.2,1190-1208).
gaggaggcctgcatatcga

SEQ ID NO: 804931 - DNA, 19 bp, Mus musculus
  siRNA target sequence for AW544865 (NM_178918.2,1196-1214).
gcctgcatatcgaaccttt

SEQ ID NO: 804932 - DNA, 19 bp, Mus musculus
  siRNA target sequence for AW544865 (NM_178918.2,1198-1216).
ctgcatatcgaacctttat

SEQ ID NO: 804933 - DNA, 19 bp, Mus musculus
  siRNA target sequence for AW544865 (NM_178918.2,1200-1218).
gcatatcgaacctttatta

SEQ ID NO: 804934 - DNA, 19 bp, Mus musculus
  siRNA target sequence for AW544865 (NM_178918.2,1201-1219).
catatcgaacctttattaa

SEQ ID NO: 804935 - DNA, 19 bp, Mus musculus
  siRNA target sequence for AW544865 (NM_178918.2,1206-1224).
cgaacctttattaaaggaa

SEQ ID NO: 804936 - DNA, 19 bp, Mus musculus
  siRNA target sequence for AW544865 (NM_178918.2,1207-1225).
gaacctttattaaaggaaa

SEQ ID NO: 804937 - DNA, 19 bp, Mus musculus
  siRNA target sequence for AW544865 (NM_178918.2,1343-1361).
ggagcctaaatgtgtgata

SEQ ID NO: 804938 - DNA, 19 bp, Mus musculus
  siRNA target sequence for AW544865 (NM_178918.2,1344-1362).
gagcctaaatgtgtgataa

SEQ ID NO: 804939 - DNA, 19 bp, Mus musculus
  siRNA target sequence for AW544865 (NM_178918.2,1452-1470).
gttacccgggtccttaact

SEQ ID NO: 804940 - DNA, 19 bp, Mus musculus
  siRNA target sequence for AW544865 (NM_178918.2,1456-1474).
cccgggtccttaacttttt

SEQ ID NO: 804941 - DNA, 19 bp, Mus musculus
  siRNA target sequence for AW544865 (NM_178918.2,1458-1476).
cgggtccttaactttttga

SEQ ID NO: 804942 - DNA, 19 bp, Mus musculus
  siRNA target sequence for AW544865 (NM_178918.2,1459-1477).
gggtccttaactttttgat

SEQ ID NO: 804943 - DNA, 19 bp, Mus musculus
  siRNA target sequence for AW544865 (NM_178918.2,1495-1513).
cgaggttcgcccctgtttt

SEQ ID NO: 804944 - DNA, 19 bp, Mus musculus
  siRNA target sequence for AW544865 (NM_178918.2,1505-1523).
ccctgttttgattaatgca

SEQ ID NO: 804945 - DNA, 19 bp, Mus musculus
  siRNA target sequence for AW544865 (NM_178918.2,1524-1542).
gctgagatcatcatcgata

SEQ ID NO: 804946 - DNA, 19 bp, Mus musculus
  siRNA target sequence for AW544865 (NM_178918.2,1525-1543).
ctgagatcatcatcgatat

SEQ ID NO: 804947 - DNA, 19 bp, Mus musculus
  siRNA target sequence for AW544865 (NM_178918.2,1527-1545).
gagatcatcatcgatatat

SEQ ID NO: 804948 - DNA, 19 bp, Mus musculus
  siRNA target sequence for AW544865 (NM_178918.2,1532-1550).
catcatcgatatatattta

SEQ ID NO: 804949 - DNA, 19 bp, Mus musculus
  siRNA target sequence for AW544865 (NM_178918.2,1535-1553).
catcgatatatatttacct

SEQ ID NO: 804950 - DNA, 19 bp, Mus musculus
  siRNA target sequence for AW544865 (NM_178918.2,1556-1574).
gattggccagtcatcagta

SEQ ID NO: 804951 - DNA, 19 bp, Mus musculus
  siRNA target sequence for AW544865 (NM_178918.2,1653-1671).
gggatgatggacatgctat

SEQ ID NO: 804952 - DNA, 19 bp, Mus musculus
  siRNA target sequence for AW544865 (NM_178918.2,1654-1672).
ggatgatggacatgctatt

SEQ ID NO: 804953 - DNA, 19 bp, Mus musculus
  siRNA target sequence for AW544865 (NM_178918.2,1655-1673).
gatgatggacatgctattt

SEQ ID NO: 804954 - DNA, 19 bp, Mus musculus
  siRNA target sequence for AI451006 (NM_178919.2,153-171).
ccttcctgctcgaagaaca

SEQ ID NO: 804955 - DNA, 19 bp, Mus musculus
  siRNA target sequence for AI451006 (NM_178919.2,257-275).
ctgcccaaggtctggattt

SEQ ID NO: 804956 - DNA, 19 bp, Mus musculus
  siRNA target sequence for AI451006 (NM_178919.2,262-280).
caaggtctggatttactga

SEQ ID NO: 804957 - DNA, 19 bp, Mus musculus
  siRNA target sequence for AI451006 (NM_178919.2,387-405).
gggccaagtgttcctttat

SEQ ID NO: 804958 - DNA, 19 bp, Mus musculus
  siRNA target sequence for AI451006 (NM_178919.2,432-450).
gactggcttcctagctata

SEQ ID NO: 804959 - DNA, 19 bp, Mus musculus
  siRNA target sequence for AI451006 (NM_178919.2,470-488).
ggccttccaaacacaagat

SEQ ID NO: 804960 - DNA, 19 bp, Mus musculus
  siRNA target sequence for AI451006 (NM_178919.2,575-593).
cctctggtgtggtcaagtt

SEQ ID NO: 804961 - DNA, 19 bp, Mus musculus
  siRNA target sequence for AI451006 (NM_178919.2,801-819).
cgctcaggcattattgcaa

SEQ ID NO: 804962 - DNA, 19 bp, Mus musculus
  siRNA target sequence for AI451006 (NM_178919.2,817-835).
caagtcctgattatcatca

SEQ ID NO: 804963 - DNA, 19 bp, Mus musculus
  siRNA target sequence for AI451006 (NM_178919.2,836-854).
ctggcaactacaatttctt

SEQ ID NO: 804964 - DNA, 19 bp, Mus musculus
  siRNA target sequence for AI451006 (NM_178919.2,839-857).
gcaactacaatttcttcaa

SEQ ID NO: 804965 - DNA, 19 bp, Mus musculus
  siRNA target sequence for AI451006 (NM_178919.2,1020-1038).
cggcactgtctactacttt

SEQ ID NO: 804966 - DNA, 19 bp, Mus musculus
  siRNA target sequence for AI451006 (NM_178919.2,1063-1081).
cacatcatcctctcgaaaa

SEQ ID NO: 804967 - DNA, 19 bp, Mus musculus
  siRNA target sequence for AI451006 (NM_178919.2,1085-1103).
ccttcaccttccatcagtt

SEQ ID NO: 804968 - DNA, 19 bp, Mus musculus
  siRNA target sequence for AI451006 (NM_178919.2,1163-1181).
cctgggagttgcttgttgt

SEQ ID NO: 804969 - DNA, 19 bp, Mus musculus
  siRNA target sequence for AI451006 (NM_178919.2,1369-1387).
ctacagctggccaactctt

SEQ ID NO: 804970 - DNA, 19 bp, Mus musculus
  siRNA target sequence for AI451006 (NM_178919.2,1462-1480).
cattggacagagatcgaat

SEQ ID NO: 804971 - DNA, 19 bp, Mus musculus
  siRNA target sequence for AI451006 (NM_178919.2,1466-1484).
ggacagagatcgaattcat

SEQ ID NO: 804972 - DNA, 19 bp, Mus musculus
  siRNA target sequence for AI451006 (NM_178919.2,1469-1487).
cagagatcgaattcatgta

SEQ ID NO: 804973 - DNA, 19 bp, Mus musculus
  siRNA target sequence for AI451006 (NM_178919.2,1471-1489).
gagatcgaattcatgtaca

SEQ ID NO: 804974 - DNA, 19 bp, Mus musculus
  siRNA target sequence for AI451006 (NM_178919.2,1473-1491).
gatcgaattcatgtacaaa

SEQ ID NO: 804975 - DNA, 19 bp, Mus musculus
  siRNA target sequence for AI451006 (NM_178919.2,1708-1726).
gcccagcgctataagtact

SEQ ID NO: 804976 - DNA, 19 bp, Mus musculus
  siRNA target sequence for AI451006 (NM_178919.2,2031-2049).
gactagagaggaaaaacgt

SEQ ID NO: 804977 - DNA, 19 bp, Mus musculus
  siRNA target sequence for AI451006 (NM_178919.2,2053-2071).
caaacctccaagaaggatt

SEQ ID NO: 804978 - DNA, 19 bp, Mus musculus
  siRNA target sequence for AI987712 (NM_178921.2,312-330).
ctgtttcactctttaaagt

SEQ ID NO: 804979 - DNA, 19 bp, Mus musculus
  siRNA target sequence for AI987712 (NM_178921.2,339-357).
ccatttgtctctacatact

SEQ ID NO: 804980 - DNA, 19 bp, Mus musculus
  siRNA target sequence for AI987712 (NM_178921.2,345-363).
gtctctacatactgaacat

SEQ ID NO: 804981 - DNA, 19 bp, Mus musculus
  siRNA target sequence for AI987712 (NM_178921.2,393-411).
gtcagactctaggatcata

SEQ ID NO: 804982 - DNA, 19 bp, Mus musculus
  siRNA target sequence for AI987712 (NM_178921.2,397-415).
gactctaggatcatatggt

SEQ ID NO: 804983 - DNA, 19 bp, Mus musculus
  siRNA target sequence for AI987712 (NM_178921.2,421-439).
gggtgctgaggtaagatat

SEQ ID NO: 804984 - DNA, 19 bp, Mus musculus
  siRNA target sequence for AI987712 (NM_178921.2,435-453).
gatatagcgctaagaaaga

SEQ ID NO: 804985 - DNA, 19 bp, Mus musculus
  siRNA target sequence for AI987712 (NM_178921.2,461-479).
gatgagacacaagtcttta

SEQ ID NO: 804986 - DNA, 19 bp, Mus musculus
  siRNA target sequence for AI987712 (NM_178921.2,555-573).
catcctgtttaatgaataa

SEQ ID NO: 804987 - DNA, 19 bp, Mus musculus
  siRNA target sequence for AI987712 (NM_178921.2,574-592).
ccattgcccatatagatta

SEQ ID NO: 804988 - DNA, 19 bp, Mus musculus
  siRNA target sequence for AI987712 (NM_178921.2,582-600).
catatagattaaagaatct

SEQ ID NO: 804989 - DNA, 19 bp, Mus musculus
  siRNA target sequence for AA517739 (NM_178923.2,480-498).
caggagctcttctcactta

SEQ ID NO: 804990 - DNA, 19 bp, Mus musculus
  siRNA target sequence for AA517739 (NM_178923.2,485-503).
gctcttctcacttatggat

SEQ ID NO: 804991 - DNA, 19 bp, Mus musculus
  siRNA target sequence for AA517739 (NM_178923.2,486-504).
ctcttctcacttatggata

SEQ ID NO: 804992 - DNA, 19 bp, Mus musculus
  siRNA target sequence for AA517739 (NM_178923.2,523-541).
gagccaagatgattctcat

SEQ ID NO: 804993 - DNA, 19 bp, Mus musculus
  siRNA target sequence for AA517739 (NM_178923.2,530-548).
gatgattctcattactaaa

SEQ ID NO: 804994 - DNA, 19 bp, Mus musculus
  siRNA target sequence for AA517739 (NM_178923.2,578-596).
gcacgttgttcaaatagta

SEQ ID NO: 804995 - DNA, 19 bp, Mus musculus
  siRNA target sequence for AA517739 (NM_178923.2,678-696).
caccagtttggaactgata

SEQ ID NO: 804996 - DNA, 19 bp, Mus musculus
  siRNA target sequence for AA517739 (NM_178923.2,683-701).
gtttggaactgataaagat

SEQ ID NO: 804997 - DNA, 19 bp, Mus musculus
  siRNA target sequence for AA517739 (NM_178923.2,702-720).
gtttttgggccaagattct

SEQ ID NO: 804998 - DNA, 19 bp, Mus musculus
  siRNA target sequence for AA517739 (NM_178923.2,735-753).
gctacattccagtatttat

SEQ ID NO: 804999 - DNA, 19 bp, Mus musculus
  siRNA target sequence for AA517739 (NM_178923.2,736-754).
ctacattccagtatttata

SEQ ID NO: 805000 - DNA, 19 bp, Mus musculus
  siRNA target sequence for AA517739 (NM_178923.2,762-780).
ccatctgaagataagagta

SEQ ID NO: 805001 - DNA, 19 bp, Mus musculus
  siRNA target sequence for AA517739 (NM_178923.2,763-781).
catctgaagataagagtaa

SEQ ID NO: 805002 - DNA, 19 bp, Mus musculus
  siRNA target sequence for AA517739 (NM_178923.2,786-804).
gttcgtgtgctaaatcttt

SEQ ID NO: 805003 - DNA, 19 bp, Mus musculus
  siRNA target sequence for AA517739 (NM_178923.2,816-834).
ggagtgttcaaaattgaaa

SEQ ID NO: 805004 - DNA, 19 bp, Mus musculus
  siRNA target sequence for AA517739 (NM_178923.2,817-835).
gagtgttcaaaattgaaat

SEQ ID NO: 805005 - DNA, 19 bp, Mus musculus
  siRNA target sequence for AA517739 (NM_178923.2,877-895).
ctgctccagtagcagaaaa

SEQ ID NO: 805006 - DNA, 19 bp, Mus musculus
  siRNA target sequence for AA517739 (NM_178923.2,882-900).
ccagtagcagaaaatgtca

SEQ ID NO: 805007 - DNA, 19 bp, Mus musculus
  siRNA target sequence for Upk1b (NM_178924.2,120-138).
gatttttggacacgtaatt

SEQ ID NO: 805008 - DNA, 19 bp, Mus musculus
  siRNA target sequence for Upk1b (NM_178924.2,128-146).
gacacgtaattgttggtat

SEQ ID NO: 805009 - DNA, 19 bp, Mus musculus
  siRNA target sequence for Upk1b (NM_178924.2,132-150).
cgtaattgttggtatgtgt

SEQ ID NO: 805010 - DNA, 19 bp, Mus musculus
  siRNA target sequence for Upk1b (NM_178924.2,158-176).
ccctgacagcagagtgtat

SEQ ID NO: 805011 - DNA, 19 bp, Mus musculus
  siRNA target sequence for Upk1b (NM_178924.2,160-178).
ctgacagcagagtgtatct

SEQ ID NO: 805012 - DNA, 19 bp, Mus musculus
  siRNA target sequence for Upk1b (NM_178924.2,167-185).
cagagtgtatcttctttgt

SEQ ID NO: 805013 - DNA, 19 bp, Mus musculus
  siRNA target sequence for Upk1b (NM_178924.2,169-187).
gagtgtatcttctttgtat

SEQ ID NO: 805014 - DNA, 19 bp, Mus musculus
  siRNA target sequence for Upk1b (NM_178924.2,220-238).
gccaccaacaatgatgata

SEQ ID NO: 805015 - DNA, 19 bp, Mus musculus
  siRNA target sequence for Upk1b (NM_178924.2,221-239).
ccaccaacaatgatgatat

SEQ ID NO: 805016 - DNA, 19 bp, Mus musculus
  siRNA target sequence for Upk1b (NM_178924.2,291-309).
gtccgttctagccatagta

SEQ ID NO: 805017 - DNA, 19 bp, Mus musculus
  siRNA target sequence for Upk1b (NM_178924.2,298-316).
ctagccatagtaggaatta

SEQ ID NO: 805018 - DNA, 19 bp, Mus musculus
  siRNA target sequence for Upk1b (NM_178924.2,301-319).
gccatagtaggaattatga

SEQ ID NO: 805019 - DNA, 19 bp, Mus musculus
  siRNA target sequence for Upk1b (NM_178924.2,302-320).
ccatagtaggaattatgaa

SEQ ID NO: 805020 - DNA, 19 bp, Mus musculus
  siRNA target sequence for Upk1b (NM_178924.2,337-355).
ctcttggcgtacttcatca

SEQ ID NO: 805021 - DNA, 19 bp, Mus musculus
  siRNA target sequence for Upk1b (NM_178924.2,403-421).
gcaacacaacgcgactttt

SEQ ID NO: 805022 - DNA, 19 bp, Mus musculus
  siRNA target sequence for Upk1b (NM_178924.2,404-422).
caacacaacgcgacttttt

SEQ ID NO: 805023 - DNA, 19 bp, Mus musculus
  siRNA target sequence for Upk1b (NM_178924.2,409-427).
caacgcgactttttcacaa

SEQ ID NO: 805024 - DNA, 19 bp, Mus musculus
  siRNA target sequence for Upk1b (NM_178924.2,447-465).
gatgctgatgaggtatcaa

SEQ ID NO: 805025 - DNA, 19 bp, Mus musculus
  siRNA target sequence for Upk1b (NM_178924.2,451-469).
ctgatgaggtatcaaaaca

SEQ ID NO: 805026 - DNA, 19 bp, Mus musculus
  siRNA target sequence for Upk1b (NM_178924.2,468-486).
caacagtcccccaaccaat

SEQ ID NO: 805027 - DNA, 19 bp, Mus musculus
  siRNA target sequence for Upk1b (NM_178924.2,482-500).
ccaatgacgacgaatggaa

SEQ ID NO: 805028 - DNA, 19 bp, Mus musculus
  siRNA target sequence for Upk1b (NM_178924.2,595-613).
gccttccgggtggagaata

SEQ ID NO: 805029 - DNA, 19 bp, Mus musculus
  siRNA target sequence for Upk1b (NM_178924.2,600-618).
ccgggtggagaataacgat

SEQ ID NO: 805030 - DNA, 19 bp, Mus musculus
  siRNA target sequence for Upk1b (NM_178924.2,647-665).
gcgtcatggacaagcttaa

SEQ ID NO: 805031 - DNA, 19 bp, Mus musculus
  siRNA target sequence for Upk1b (NM_178924.2,648-666).
cgtcatggacaagcttaaa

SEQ ID NO: 805032 - DNA, 19 bp, Mus musculus
  siRNA target sequence for Upk1b (NM_178924.2,694-712).
cttggagtgcctggttatt

SEQ ID NO: 805033 - DNA, 19 bp, Mus musculus
  siRNA target sequence for Upk1b (NM_178924.2,698-716).
gagtgcctggttattacca

SEQ ID NO: 805034 - DNA, 19 bp, Mus musculus
  siRNA target sequence for Upk1b (NM_178924.2,717-735).
cagtcagggctgctatgaa

SEQ ID NO: 805035 - DNA, 19 bp, Mus musculus
  siRNA target sequence for Upk1b (NM_178924.2,719-737).
gtcagggctgctatgaact

SEQ ID NO: 805036 - DNA, 19 bp, Mus musculus
  siRNA target sequence for AU022521 (NM_178925.2,82-100).
gactcggctgaaagcaaaa

SEQ ID NO: 805037 - DNA, 19 bp, Mus musculus
  siRNA target sequence for AU022521 (NM_178925.2,137-155).
gtgttggatcagtttgaca

SEQ ID NO: 805038 - DNA, 19 bp, Mus musculus
  siRNA target sequence for AU022521 (NM_178925.2,143-161).
gatcagtttgacaaacagt

SEQ ID NO: 805039 - DNA, 19 bp, Mus musculus
  siRNA target sequence for AU022521 (NM_178925.2,178-196).
ggattcctggagtacagta

SEQ ID NO: 805040 - DNA, 19 bp, Mus musculus
  siRNA target sequence for AU022521 (NM_178925.2,241-259).
cttcaaccgattcaattat

SEQ ID NO: 805041 - DNA, 19 bp, Mus musculus
  siRNA target sequence for AU022521 (NM_178925.2,284-302).
catctgaggggctatcaca

SEQ ID NO: 805042 - DNA, 19 bp, Mus musculus
  siRNA target sequence for AU022521 (NM_178925.2,318-336).
ctttaccacattatcctaa

SEQ ID NO: 805043 - DNA, 19 bp, Mus musculus
  siRNA target sequence for AU022521 (NM_178925.2,324-342).
cacattatcctaaatcaat

SEQ ID NO: 805044 - DNA, 19 bp, Mus musculus
  siRNA target sequence for AU022521 (NM_178925.2,421-439).
ccttaatgctgcttctctt

SEQ ID NO: 805045 - DNA, 19 bp, Mus musculus
  siRNA target sequence for AU022521 (NM_178925.2,523-541).
gctgcaatgtgcttatcca

SEQ ID NO: 805046 - DNA, 19 bp, Mus musculus
  siRNA target sequence for AU022521 (NM_178925.2,587-605).
ctgagacagacgttggaat

SEQ ID NO: 805047 - DNA, 19 bp, Mus musculus
  siRNA target sequence for AU022521 (NM_178925.2,591-609).
gacagacgttggaatcttt

SEQ ID NO: 805048 - DNA, 19 bp, Mus musculus
  siRNA target sequence for AU022521 (NM_178925.2,613-631).
cccacagcctttgataaat

SEQ ID NO: 805049 - DNA, 19 bp, Mus musculus
  siRNA target sequence for AU022521 (NM_178925.2,617-635).
cagcctttgataaatgtaa

SEQ ID NO: 805050 - DNA, 19 bp, Mus musculus
  siRNA target sequence for AU022521 (NM_178925.2,619-637).
gcctttgataaatgtaatt

SEQ ID NO: 805051 - DNA, 19 bp, Mus musculus
  siRNA target sequence for AU022521 (NM_178925.2,632-650).
gtaattaaagtgtctgaat

SEQ ID NO: 805052 - DNA, 19 bp, Mus musculus
  siRNA target sequence for AU022521 (NM_178925.2,687-705).
catttgacaaggtgttagt

SEQ ID NO: 805053 - DNA, 19 bp, Mus musculus
  siRNA target sequence for AU022521 (NM_178925.2,704-722).
gttgacgctccatgttcaa

SEQ ID NO: 805054 - DNA, 19 bp, Mus musculus
  siRNA target sequence for AU022521 (NM_178925.2,742-760).
ctcgtcggactctcagaaa

SEQ ID NO: 805055 - DNA, 19 bp, Mus musculus
  siRNA target sequence for AU022521 (NM_178925.2,764-782).
gcctataggatccatcaaa

SEQ ID NO: 805056 - DNA, 19 bp, Mus musculus
  siRNA target sequence for AU022521 (NM_178925.2,795-813).
ctgtcctacaggtagaact

SEQ ID NO: 805057 - DNA, 19 bp, Mus musculus
  siRNA target sequence for AU022521 (NM_178925.2,812-830).
ctcgtaaggtctgcaatta

SEQ ID NO: 805058 - DNA, 19 bp, Mus musculus
  siRNA target sequence for AU022521 (NM_178925.2,814-832).
cgtaaggtctgcaattaaa

SEQ ID NO: 805059 - DNA, 19 bp, Mus musculus
  siRNA target sequence for AU022521 (NM_178925.2,848-866).
gggctcctcgtgtactcta

SEQ ID NO: 805060 - DNA, 19 bp, Mus musculus
  siRNA target sequence for AU022521 (NM_178925.2,851-869).
ctcctcgtgtactctacat

SEQ ID NO: 805061 - DNA, 19 bp, Mus musculus
  siRNA target sequence for AU022521 (NM_178925.2,944-962).
gatattagtgggatagcaa

SEQ ID NO: 805062 - DNA, 19 bp, Mus musculus
  siRNA target sequence for AU022521 (NM_178925.2,1054-1072).
gtatatagccaaactgaaa

SEQ ID NO: 805063 - DNA, 19 bp, Mus musculus
  siRNA target sequence for AU022521 (NM_178925.2,1067-1085).
ctgaaaaaagggatgagta

SEQ ID NO: 805064 - DNA, 19 bp, Mus musculus
  siRNA target sequence for AU022521 (NM_178925.2,1095-1113).
ggcaaggcgaattttgtaa

SEQ ID NO: 805065 - DNA, 19 bp, Mus musculus
  siRNA target sequence for AI662250 (NM_178926.2,209-227).
gccaaggaccgggagatat

SEQ ID NO: 805066 - DNA, 19 bp, Mus musculus
  siRNA target sequence for AI662250 (NM_178926.2,211-229).
caaggaccgggagatatct

SEQ ID NO: 805067 - DNA, 19 bp, Mus musculus
  siRNA target sequence for AI662250 (NM_178926.2,468-486).
cacccctgggcaacaacat

SEQ ID NO: 805068 - DNA, 19 bp, Mus musculus
  siRNA target sequence for AV344025 (NM_178927.2,1421-1439).
gtaaagaacagaacttgta

SEQ ID NO: 805069 - DNA, 19 bp, Mus musculus
  siRNA target sequence for AV344025 (NM_178927.2,1453-1471).
cagagtgtaagggatctat

SEQ ID NO: 805070 - DNA, 19 bp, Mus musculus
  siRNA target sequence for AV344025 (NM_178927.2,1455-1473).
gagtgtaagggatctatca

SEQ ID NO: 805071 - DNA, 19 bp, Mus musculus
  siRNA target sequence for AV344025 (NM_178927.2,1472-1490).
cacgagggagcttcaaaga

SEQ ID NO: 805072 - DNA, 19 bp, Mus musculus
  siRNA target sequence for AV344025 (NM_178927.2,1475-1493).
gagggagcttcaaagacaa

SEQ ID NO: 805073 - DNA, 19 bp, Mus musculus
  siRNA target sequence for AI173486 (NM_178928.3,85-103).
gggtgctggaacagctaat

SEQ ID NO: 805074 - DNA, 19 bp, Mus musculus
  siRNA target sequence for AI173486 (NM_178928.3,283-301).
ctctctttgaagaattcga

SEQ ID NO: 805075 - DNA, 19 bp, Mus musculus
  siRNA target sequence for AI173486 (NM_178928.3,477-495).
ggcaagtcccccgagtata

SEQ ID NO: 805076 - DNA, 19 bp, Mus musculus
  siRNA target sequence for AI173486 (NM_178928.3,478-496).
gcaagtcccccgagtatat

SEQ ID NO: 805077 - DNA, 19 bp, Mus musculus
  siRNA target sequence for AI173486 (NM_178928.3,491-509).
gtatatcagctctcacaat

SEQ ID NO: 805078 - DNA, 19 bp, Mus musculus
  siRNA target sequence for AI173486 (NM_178928.3,529-547).
cgattgtggacggttacta

SEQ ID NO: 805079 - DNA, 19 bp, Mus musculus
  siRNA target sequence for AI173486 (NM_178928.3,628-646).
gtagctcctatgaatccta

SEQ ID NO: 805080 - DNA, 19 bp, Mus musculus
  siRNA target sequence for AI173486 (NM_178928.3,869-887).
cgtctgcactgtcatctat

SEQ ID NO: 805081 - DNA, 19 bp, Mus musculus
  siRNA target sequence for AI173486 (NM_178928.3,1293-1311).
gaggacctgcagacattct

SEQ ID NO: 805082 - DNA, 19 bp, Mus musculus
  siRNA target sequence for AI173486 (NM_178928.3,1346-1364).
gaatgtgctggtaaaccaa

SEQ ID NO: 805083 - DNA, 19 bp, Mus musculus
  siRNA target sequence for AI173486 (NM_178928.3,1391-1409).
caggtgcaacactctctat

SEQ ID NO: 805084 - DNA, 19 bp, Mus musculus
  siRNA target sequence for AI173486 (NM_178928.3,1393-1411).
ggtgcaacactctctattt

SEQ ID NO: 805085 - DNA, 19 bp, Mus musculus
  siRNA target sequence for AI173486 (NM_178928.3,1402-1420).
ctctctatttccacaaaga

SEQ ID NO: 805086 - DNA, 19 bp, Mus musculus
  siRNA target sequence for AI173486 (NM_178928.3,1431-1449).
ctgcacacccacgtgaatt

SEQ ID NO: 805087 - DNA, 19 bp, Mus musculus
  siRNA target sequence for AI173486 (NM_178928.3,1434-1452).
cacacccacgtgaattcca

SEQ ID NO: 805088 - DNA, 19 bp, Mus musculus
  siRNA target sequence for AI173486 (NM_178928.3,1436-1454).
cacccacgtgaattccata

SEQ ID NO: 805089 - DNA, 19 bp, Mus musculus
  siRNA target sequence for AI173486 (NM_178928.3,1623-1641).
gaggcactgcactatgact

SEQ ID NO: 805090 - DNA, 19 bp, Mus musculus
  siRNA target sequence for AI173486 (NM_178928.3,1644-1662).
gtcgacgtggagaccttaa

SEQ ID NO: 805091 - DNA, 19 bp, Mus musculus
  siRNA target sequence for AI173486 (NM_178928.3,1647-1665).
gacgtggagaccttaacca

SEQ ID NO: 805092 - DNA, 19 bp, Mus musculus
  siRNA target sequence for AI173486 (NM_178928.3,1848-1866).
gacccgcaggtcaaagtca

SEQ ID NO: 805093 - DNA, 19 bp, Mus musculus
  siRNA target sequence for AI173486 (NM_178928.3,1874-1892).
cgcctccagtgccaatcaa

SEQ ID NO: 805094 - DNA, 19 bp, Mus musculus
  siRNA target sequence for AI173486 (NM_178928.3,1875-1893).
gcctccagtgccaatcaat

SEQ ID NO: 805095 - DNA, 19 bp, Mus musculus
  siRNA target sequence for AI173486 (NM_178928.3,1876-1894).
cctccagtgccaatcaata

SEQ ID NO: 805096 - DNA, 19 bp, Mus musculus
  siRNA target sequence for AI173486 (NM_178928.3,1882-1900).
gtgccaatcaatacaagta

SEQ ID NO: 805097 - DNA, 19 bp, Mus musculus
  siRNA target sequence for AI173486 (NM_178928.3,1929-1947).
cgaaggtacctggtagaaa

SEQ ID NO: 805098 - DNA, 19 bp, Mus musculus
  siRNA target sequence for AI173486 (NM_178928.3,1997-2015).
cttgcgacaggagaagaaa

SEQ ID NO: 805099 - DNA, 19 bp, Mus musculus
  siRNA target sequence for AI842353 (NM_178929.2,132-150).
cagggcttccagctaacta

SEQ ID NO: 805100 - DNA, 19 bp, Mus musculus
  siRNA target sequence for AI842353 (NM_178929.2,172-190).
gtccttgctactaccatta

SEQ ID NO: 805101 - DNA, 19 bp, Mus musculus
  siRNA target sequence for AI842353 (NM_178929.2,659-677).
ctgtcgcagcctcacaata

SEQ ID NO: 805102 - DNA, 19 bp, Mus musculus
  siRNA target sequence for AI842353 (NM_178929.2,661-679).
gtcgcagcctcacaatatt

SEQ ID NO: 805103 - DNA, 19 bp, Mus musculus
  siRNA target sequence for AI842353 (NM_178929.2,690-708).
ccggacaggatgtgatctt

SEQ ID NO: 805104 - DNA, 19 bp, Mus musculus
  siRNA target sequence for AI842353 (NM_178929.2,731-749).
cccatggcctcgattgagt

SEQ ID NO: 805105 - DNA, 19 bp, Mus musculus
  siRNA target sequence for AI842353 (NM_178929.2,782-800).
ggggatgaccctcatatct

SEQ ID NO: 805106 - DNA, 19 bp, Mus musculus
  siRNA target sequence for AI842353 (NM_178929.2,784-802).
ggatgaccctcatatctct

SEQ ID NO: 805107 - DNA, 19 bp, Mus musculus
  siRNA target sequence for AI842353 (NM_178929.2,814-832).
gggtggacctcagaagttt

SEQ ID NO: 805108 - DNA, 19 bp, Mus musculus
  siRNA target sequence for AI842353 (NM_178929.2,846-864).
ggctacagattcaagcttt

SEQ ID NO: 805109 - DNA, 19 bp, Mus musculus
  siRNA target sequence for AI842353 (NM_178929.2,986-1004).
ctgcaatcacggagtttgt

SEQ ID NO: 805110 - DNA, 19 bp, Mus musculus
  siRNA target sequence for AI842353 (NM_178929.2,988-1006).
gcaatcacggagtttgttt

SEQ ID NO: 805111 - DNA, 19 bp, Mus musculus
  siRNA target sequence for AI842353 (NM_178929.2,1037-1055).
gagttgggcgattactact

SEQ ID NO: 805112 - DNA, 19 bp, Mus musculus
  siRNA target sequence for Ostb (NM_178933.2,145-163).
gatgcggctccttggaatt

SEQ ID NO: 805113 - DNA, 19 bp, Mus musculus
  siRNA target sequence for Ostb (NM_178933.2,148-166).
gcggctccttggaattatt

SEQ ID NO: 805114 - DNA, 19 bp, Mus musculus
  siRNA target sequence for Ostb (NM_178933.2,228-246).
cctggcaaacagaaatcga

SEQ ID NO: 805115 - DNA, 19 bp, Mus musculus
  siRNA target sequence for Ostb (NM_178933.2,331-349).
ctaagagagacattgatct

SEQ ID NO: 805116 - DNA, 19 bp, Mus musculus
  siRNA target sequence for C730036B01Rik (NM_178936.2,307-325).
gcggtcatctgcactgttt

SEQ ID NO: 805117 - DNA, 19 bp, Mus musculus
  siRNA target sequence for C730036B01Rik (NM_178936.2,388-406).
gtttcttcaggttataaca

SEQ ID NO: 805118 - DNA, 19 bp, Mus musculus
  siRNA target sequence for C730036B01Rik (NM_178936.2,398-416).
gttataacagtcttagcat

SEQ ID NO: 805119 - DNA, 19 bp, Mus musculus
  siRNA target sequence for C730036B01Rik (NM_178936.2,407-425).
gtcttagcatcgacaagaa

SEQ ID NO: 805120 - DNA, 19 bp, Mus musculus
  siRNA target sequence for C730036B01Rik (NM_178936.2,409-427).
cttagcatcgacaagaaga

SEQ ID NO: 805121 - DNA, 19 bp, Mus musculus
  siRNA target sequence for C730036B01Rik (NM_178936.2,452-470).
ccacgtgccactctttgtt

SEQ ID NO: 805122 - DNA, 19 bp, Mus musculus
  siRNA target sequence for C730036B01Rik (NM_178936.2,453-471).
cacgtgccactctttgtta

SEQ ID NO: 805123 - DNA, 19 bp, Mus musculus
  siRNA target sequence for C730036B01Rik (NM_178936.2,455-473).
cgtgccactctttgttagt

SEQ ID NO: 805124 - DNA, 19 bp, Mus musculus
  siRNA target sequence for C730036B01Rik (NM_178936.2,501-519).
cttcgatgaggccactata

SEQ ID NO: 805125 - DNA, 19 bp, Mus musculus
  siRNA target sequence for C730036B01Rik (NM_178936.2,504-522).
cgatgaggccactataact

SEQ ID NO: 805126 - DNA, 19 bp, Mus musculus
  siRNA target sequence for C730036B01Rik (NM_178936.2,531-549).
ctggggtgatccaacgtat

SEQ ID NO: 805127 - DNA, 19 bp, Mus musculus
  siRNA target sequence for C730036B01Rik (NM_178936.2,535-553).
ggtgatccaacgtatgtga

SEQ ID NO: 805128 - DNA, 19 bp, Mus musculus
  siRNA target sequence for C730036B01Rik (NM_178936.2,536-554).
gtgatccaacgtatgtgaa

SEQ ID NO: 805129 - DNA, 19 bp, Mus musculus
  siRNA target sequence for C730036B01Rik (NM_178936.2,541-559).
ccaacgtatgtgaacataa

SEQ ID NO: 805130 - DNA, 19 bp, Mus musculus
  siRNA target sequence for C730036B01Rik (NM_178936.2,542-560).
caacgtatgtgaacataaa

SEQ ID NO: 805131 - DNA, 19 bp, Mus musculus
  siRNA target sequence for C730036B01Rik (NM_178936.2,575-593).
caggctacctcatttctga

SEQ ID NO: 805132 - DNA, 19 bp, Mus musculus
  siRNA target sequence for C730036B01Rik (NM_178936.2,578-596).
gctacctcatttctgattt

SEQ ID NO: 805133 - DNA, 19 bp, Mus musculus
  siRNA target sequence for C730036B01Rik (NM_178936.2,579-597).
ctacctcatttctgattta

SEQ ID NO: 805134 - DNA, 19 bp, Mus musculus
  siRNA target sequence for C730036B01Rik (NM_178936.2,622-640).
gtgatcggcgacaaatttt

SEQ ID NO: 805135 - DNA, 19 bp, Mus musculus
  siRNA target sequence for C730036B01Rik (NM_178936.2,624-642).
gatcggcgacaaatttttt

SEQ ID NO: 805136 - DNA, 19 bp, Mus musculus
  siRNA target sequence for C730036B01Rik (NM_178936.2,629-647).
gcgacaaattttttataat

SEQ ID NO: 805137 - DNA, 19 bp, Mus musculus
  siRNA target sequence for C730036B01Rik (NM_178936.2,651-669).
ccattgcgcaggactaact

SEQ ID NO: 805138 - DNA, 19 bp, Mus musculus
  siRNA target sequence for C730036B01Rik (NM_178936.2,659-677).
caggactaactgcatacta

SEQ ID NO: 805139 - DNA, 19 bp, Mus musculus
  siRNA target sequence for C730036B01Rik (NM_178936.2,661-679).
ggactaactgcatactact

SEQ ID NO: 805140 - DNA, 19 bp, Mus musculus
  siRNA target sequence for C730036B01Rik (NM_178936.2,662-680).
gactaactgcatactactt

SEQ ID NO: 805141 - DNA, 19 bp, Mus musculus
  siRNA target sequence for C730036B01Rik (NM_178936.2,670-688).
gcatactactttgtattga

SEQ ID NO: 805142 - DNA, 19 bp, Mus musculus
  siRNA target sequence for C730036B01Rik (NM_178936.2,740-758).
ccagcccctttgtaaacca

SEQ ID NO: 805143 - DNA, 19 bp, Mus musculus
  siRNA target sequence for C730036B01Rik (NM_178936.2,777-795).
cctgaagtaccccaagttt

SEQ ID NO: 805144 - DNA, 19 bp, Mus musculus
  siRNA target sequence for C730036B01Rik (NM_178936.2,778-796).
ctgaagtaccccaagtttt

SEQ ID NO: 805145 - DNA, 19 bp, Mus musculus
  siRNA target sequence for C730036B01Rik (NM_178936.2,783-801).
gtaccccaagttttccaaa

SEQ ID NO: 805146 - DNA, 19 bp, Mus musculus
  siRNA target sequence for C730036B01Rik (NM_178936.2,808-826).
gtcatcaatggaattctta

SEQ ID NO: 805147 - DNA, 19 bp, Mus musculus
  siRNA target sequence for C730036B01Rik (NM_178936.2,846-864).
cgtgcggatcatttcgata

SEQ ID NO: 805148 - DNA, 19 bp, Mus musculus
  siRNA target sequence for C730036B01Rik (NM_178936.2,860-878).
cgatacctccgatgtattt

SEQ ID NO: 805149 - DNA, 19 bp, Mus musculus
  siRNA target sequence for C730036B01Rik (NM_178936.2,888-906).
ctccgtgtacggaacagaa

SEQ ID NO: 805150 - DNA, 19 bp, Mus musculus
  siRNA target sequence for C730036B01Rik (NM_178936.2,897-915).
cggaacagaaccctacata

SEQ ID NO: 805151 - DNA, 19 bp, Mus musculus
  siRNA target sequence for C730036B01Rik (NM_178936.2,912-930).
cataaggttcggatttgta

SEQ ID NO: 805152 - DNA, 19 bp, Mus musculus
  siRNA target sequence for C730036B01Rik (NM_178936.2,917-935).
ggttcggatttgtaatcca

SEQ ID NO: 805153 - DNA, 19 bp, Mus musculus
  siRNA target sequence for C730036B01Rik (NM_178936.2,944-962).
ggatcgttacttgtgttat

SEQ ID NO: 805154 - DNA, 19 bp, Mus musculus
  siRNA target sequence for C730036B01Rik (NM_178936.2,945-963).
gatcgttacttgtgttatt

SEQ ID NO: 805155 - DNA, 19 bp, Mus musculus
  siRNA target sequence for C730036B01Rik (NM_178936.2,967-985).
gacgtgatgaatatcatgt

SEQ ID NO: 805156 - DNA, 19 bp, Mus musculus
  siRNA target sequence for C730036B01Rik (NM_178936.2,999-1017).
cacgaaaggatgcatcaaa

SEQ ID NO: 805157 - DNA, 19 bp, Mus musculus
  siRNA target sequence for C730036B01Rik (NM_178936.2,1046-1064).
ccaaggatagccttcagaa

SEQ ID NO: 805158 - DNA, 19 bp, Mus musculus
  siRNA target sequence for 1110004D19Rik (NM_178939.1,95-113).
ggtacctggtcgaagtaga

SEQ ID NO: 805159 - DNA, 19 bp, Mus musculus
  siRNA target sequence for 1110004D19Rik (NM_178939.1,138-156).
ggacaagcggcagattgta

SEQ ID NO: 805160 - DNA, 19 bp, Mus musculus
  siRNA target sequence for 1110004D19Rik (NM_178939.1,271-289).
caccctaagacgaaggaaa

SEQ ID NO: 805161 - DNA, 19 bp, Mus musculus
  siRNA target sequence for 1110004D19Rik (NM_178939.1,333-351).
gctgcggagtcaacttaaa

SEQ ID NO: 805162 - DNA, 19 bp, Mus musculus
  siRNA target sequence for 1110004D19Rik (NM_178939.1,337-355).
cggagtcaacttaaagtga

SEQ ID NO: 805163 - DNA, 19 bp, Mus musculus
  siRNA target sequence for 1110004D19Rik (NM_178939.1,343-361).
caacttaaagtgaaagtta

SEQ ID NO: 805164 - DNA, 19 bp, Mus musculus
  siRNA target sequence for 1110004D19Rik (NM_178939.1,388-406).
ccggagctgaaaggtttta

SEQ ID NO: 805165 - DNA, 19 bp, Mus musculus
  siRNA target sequence for 1110004D19Rik (NM_178939.1,420-438).
cagcccggatgaggttaaa

SEQ ID NO: 805166 - DNA, 19 bp, Mus musculus
  siRNA target sequence for 2700029E10Rik (NM_180588.1,133-151).
ctgtatcctgcgtatgctt

SEQ ID NO: 805167 - DNA, 19 bp, Mus musculus
  siRNA target sequence for 2700029E10Rik (NM_180588.1,174-192).
gaacattcgagaatatgta

SEQ ID NO: 805168 - DNA, 19 bp, Mus musculus
  siRNA target sequence for 2700029E10Rik (NM_180588.1,263-281).
cctggttcccgttttatta

SEQ ID NO: 805169 - DNA, 19 bp, Mus musculus
  siRNA target sequence for 2700029E10Rik (NM_180588.1,266-284).
ggttcccgttttattacga

SEQ ID NO: 805170 - DNA, 19 bp, Mus musculus
  siRNA target sequence for 2700029E10Rik (NM_180588.1,272-290).
cgttttattacgagttcaa

SEQ ID NO: 805171 - DNA, 19 bp, Mus musculus
  siRNA target sequence for 2700029E10Rik (NM_180588.1,338-356).
gcctgctttaccgaaagtt

SEQ ID NO: 805172 - DNA, 19 bp, Mus musculus
  siRNA target sequence for 2700029E10Rik (NM_180588.1,339-357).
cctgctttaccgaaagttt

SEQ ID NO: 805173 - DNA, 19 bp, Mus musculus
  siRNA target sequence for 2700029E10Rik (NM_180588.1,368-386).
ccctatcccgccatgagaa

SEQ ID NO: 805174 - DNA, 19 bp, Mus musculus
  siRNA target sequence for 2700029E10Rik (NM_180588.1,520-538).
ggaaggctgcggagtttct

SEQ ID NO: 805175 - DNA, 19 bp, Mus musculus
  siRNA target sequence for 2700029E10Rik (NM_180588.1,524-542).
ggctgcggagtttctctat

SEQ ID NO: 805176 - DNA, 19 bp, Mus musculus
  siRNA target sequence for 2700029E10Rik (NM_180588.1,528-546).
gcggagtttctctatgcaa

SEQ ID NO: 805177 - DNA, 19 bp, Mus musculus
  siRNA target sequence for 2700029E10Rik (NM_180588.1,622-640).
cgtagaccccctattggat

SEQ ID NO: 805178 - DNA, 19 bp, Mus musculus
  siRNA target sequence for 2700029E10Rik (NM_180588.1,623-641).
gtagaccccctattggata

SEQ ID NO: 805179 - DNA, 19 bp, Mus musculus
  siRNA target sequence for 2700029E10Rik (NM_180588.1,683-701).
gttggtcagacaatgagat

SEQ ID NO: 805180 - DNA, 19 bp, Mus musculus
  siRNA target sequence for Gars (NM_180678.2,218-236).
gactttgtacggaagttaa

SEQ ID NO: 805181 - DNA, 19 bp, Mus musculus
  siRNA target sequence for Gars (NM_180678.2,220-238).
ctttgtacggaagttaaaa

SEQ ID NO: 805182 - DNA, 19 bp, Mus musculus
  siRNA target sequence for Gars (NM_180678.2,343-361).
catcgtagatagagcaaaa

SEQ ID NO: 805183 - DNA, 19 bp, Mus musculus
  siRNA target sequence for Gars (NM_180678.2,372-390).
cgttgaagaggaggttttt

SEQ ID NO: 805184 - DNA, 19 bp, Mus musculus
  siRNA target sequence for Gars (NM_180678.2,395-413).
gatcaggcttttgctattt

SEQ ID NO: 805185 - DNA, 19 bp, Mus musculus
  siRNA target sequence for Gars (NM_180678.2,400-418).
ggcttttgctatttatgga

SEQ ID NO: 805186 - DNA, 19 bp, Mus musculus
  siRNA target sequence for Gars (NM_180678.2,417-435).
gaggtgtcagtggattgta

SEQ ID NO: 805187 - DNA, 19 bp, Mus musculus
  siRNA target sequence for Gars (NM_180678.2,456-474).
gtgctttgaagaacaatat

SEQ ID NO: 805188 - DNA, 19 bp, Mus musculus
  siRNA target sequence for Gars (NM_180678.2,541-559).
cacccctgagccagtttta

SEQ ID NO: 805189 - DNA, 19 bp, Mus musculus
  siRNA target sequence for Gars (NM_180678.2,564-582).
cctctggccacgtagacaa

SEQ ID NO: 805190 - DNA, 19 bp, Mus musculus
  siRNA target sequence for Gars (NM_180678.2,565-583).
ctctggccacgtagacaaa

SEQ ID NO: 805191 - DNA, 19 bp, Mus musculus
  siRNA target sequence for Gars (NM_180678.2,567-585).
ctggccacgtagacaaatt

SEQ ID NO: 805192 - DNA, 19 bp, Mus musculus
  siRNA target sequence for Gars (NM_180678.2,630-648).
gagcagaccacctgttgaa

SEQ ID NO: 805193 - DNA, 19 bp, Mus musculus
  siRNA target sequence for Gars (NM_180678.2,650-668).
gctcatttacagaaactga

SEQ ID NO: 805194 - DNA, 19 bp, Mus musculus
  siRNA target sequence for Gars (NM_180678.2,651-669).
ctcatttacagaaactgat

SEQ ID NO: 805195 - DNA, 19 bp, Mus musculus
  siRNA target sequence for Gars (NM_180678.2,752-770).
cttgcggatctttttgtga

SEQ ID NO: 805196 - DNA, 19 bp, Mus musculus
  siRNA target sequence for Gars (NM_180678.2,756-774).
cggatctttttgtgaacta

SEQ ID NO: 805197 - DNA, 19 bp, Mus musculus
  siRNA target sequence for Gars (NM_180678.2,758-776).
gatctttttgtgaactata

SEQ ID NO: 805198 - DNA, 19 bp, Mus musculus
  siRNA target sequence for Gars (NM_180678.2,808-826).
gtcccctccggtacctttt

SEQ ID NO: 805199 - DNA, 19 bp, Mus musculus
  siRNA target sequence for Gars (NM_180678.2,810-828).
cccctccggtaccttttaa

SEQ ID NO: 805200 - DNA, 19 bp, Mus musculus
  siRNA target sequence for Gars (NM_180678.2,812-830).
cctccggtaccttttaact

SEQ ID NO: 805201 - DNA, 19 bp, Mus musculus
  siRNA target sequence for Gars (NM_180678.2,813-831).
ctccggtaccttttaactt

SEQ ID NO: 805202 - DNA, 19 bp, Mus musculus
  siRNA target sequence for Gars (NM_180678.2,815-833).
ccggtaccttttaacttaa

SEQ ID NO: 805203 - DNA, 19 bp, Mus musculus
  siRNA target sequence for Gars (NM_180678.2,816-834).
cggtaccttttaacttaat

SEQ ID NO: 805204 - DNA, 19 bp, Mus musculus
  siRNA target sequence for Gars (NM_180678.2,847-865).
cattgggcctggaggaaat

SEQ ID NO: 805205 - DNA, 19 bp, Mus musculus
  siRNA target sequence for Gars (NM_180678.2,896-914).
cagggaattttcctgaatt

SEQ ID NO: 805206 - DNA, 19 bp, Mus musculus
  siRNA target sequence for Gars (NM_180678.2,956-974).
gctgctgcccagattggaa

SEQ ID NO: 805207 - DNA, 19 bp, Mus musculus
  siRNA target sequence for Gars (NM_180678.2,1015-1033).
ccgagtcagggagtttaca

SEQ ID NO: 805208 - DNA, 19 bp, Mus musculus
  siRNA target sequence for Gars (NM_180678.2,1016-1034).
cgagtcagggagtttacaa

SEQ ID NO: 805209 - DNA, 19 bp, Mus musculus
  siRNA target sequence for Gars (NM_180678.2,1017-1035).
gagtcagggagtttacaat

SEQ ID NO: 805210 - DNA, 19 bp, Mus musculus
  siRNA target sequence for Gars (NM_180678.2,1038-1056).
cagagattgagcactttgt

SEQ ID NO: 805211 - DNA, 19 bp, Mus musculus
  siRNA target sequence for Gars (NM_180678.2,1042-1060).
gattgagcactttgtagat

SEQ ID NO: 805212 - DNA, 19 bp, Mus musculus
  siRNA target sequence for Gars (NM_180678.2,1096-1114).
ggccgacctctgcctttat

SEQ ID NO: 805213 - DNA, 19 bp, Mus musculus
  siRNA target sequence for Gars (NM_180678.2,1097-1115).
gccgacctctgcctttatt

SEQ ID NO: 805214 - DNA, 19 bp, Mus musculus
  siRNA target sequence for Gars (NM_180678.2,1181-1199).
gaacagggtgtgattaaca

SEQ ID NO: 805215 - DNA, 19 bp, Mus musculus
  siRNA target sequence for Gars (NM_180678.2,1184-1202).
cagggtgtgattaacaact

SEQ ID NO: 805216 - DNA, 19 bp, Mus musculus
  siRNA target sequence for Gars (NM_180678.2,1203-1221).
cagtattaggctattttat

SEQ ID NO: 805217 - DNA, 19 bp, Mus musculus
  siRNA target sequence for Gars (NM_180678.2,1240-1258).
cctcacgaaggttggaata

SEQ ID NO: 805218 - DNA, 19 bp, Mus musculus
  siRNA target sequence for Gars (NM_180678.2,1241-1259).
ctcacgaaggttggaatat

SEQ ID NO: 805219 - DNA, 19 bp, Mus musculus
  siRNA target sequence for Gars (NM_180678.2,1275-1293).
gcttccggcagcatatgga

SEQ ID NO: 805220 - DNA, 19 bp, Mus musculus
  siRNA target sequence for Gars (NM_180678.2,1294-1312).
gaatgagatggcccattat

SEQ ID NO: 805221 - DNA, 19 bp, Mus musculus
  siRNA target sequence for Gars (NM_180678.2,1328-1346).
gatgccgagtccaaaacgt

SEQ ID NO: 805222 - DNA, 19 bp, Mus musculus
  siRNA target sequence for Gars (NM_180678.2,1347-1365).
cctatggctggattgagat

SEQ ID NO: 805223 - DNA, 19 bp, Mus musculus
  siRNA target sequence for Gars (NM_180678.2,1417-1435).
caccaaagttccactagta

SEQ ID NO: 805224 - DNA, 19 bp, Mus musculus
  siRNA target sequence for Gars (NM_180678.2,1464-1482).
cagttaacgttgtacagtt

SEQ ID NO: 805225 - DNA, 19 bp, Mus musculus
  siRNA target sequence for Gars (NM_180678.2,1502-1520).
gtgggcaaggcgtacaaga

SEQ ID NO: 805226 - DNA, 19 bp, Mus musculus
  siRNA target sequence for Gars (NM_180678.2,1512-1530).
cgtacaagaaggatgcaaa

SEQ ID NO: 805227 - DNA, 19 bp, Mus musculus
  siRNA target sequence for Gars (NM_180678.2,1555-1573).
ctgtgatgagtgctacatt

SEQ ID NO: 805228 - DNA, 19 bp, Mus musculus
  siRNA target sequence for Gars (NM_180678.2,1604-1622).
ggggaattcactattgaaa

SEQ ID NO: 805229 - DNA, 19 bp, Mus musculus
  siRNA target sequence for Gars (NM_180678.2,1606-1624).
ggaattcactattgaaact

SEQ ID NO: 805230 - DNA, 19 bp, Mus musculus
  siRNA target sequence for Gars (NM_180678.2,1697-1715).
gaagttgttccgagtgtaa

SEQ ID NO: 805231 - DNA, 19 bp, Mus musculus
  siRNA target sequence for Gars (NM_180678.2,1731-1749).
gcttgggcaggatcatgta

SEQ ID NO: 805232 - DNA, 19 bp, Mus musculus
  siRNA target sequence for Gars (NM_180678.2,1736-1754).
ggcaggatcatgtatacca

SEQ ID NO: 805233 - DNA, 19 bp, Mus musculus
  siRNA target sequence for Gars (NM_180678.2,1737-1755).
gcaggatcatgtataccat

SEQ ID NO: 805234 - DNA, 19 bp, Mus musculus
  siRNA target sequence for Gars (NM_180678.2,1738-1756).
caggatcatgtataccata

SEQ ID NO: 805235 - DNA, 19 bp, Mus musculus
  siRNA target sequence for Gars (NM_180678.2,1790-1808).
gaacagagaacgttcttca

SEQ ID NO: 805236 - DNA, 19 bp, Mus musculus
  siRNA target sequence for Gars (NM_180678.2,1818-1836).
ctgtggttgctccattcaa

SEQ ID NO: 805237 - DNA, 19 bp, Mus musculus
  siRNA target sequence for Gars (NM_180678.2,1820-1838).
gtggttgctccattcaaat

SEQ ID NO: 805238 - DNA, 19 bp, Mus musculus
  siRNA target sequence for Gars (NM_180678.2,1911-1929).
ggaacggcgtgtctcataa

SEQ ID NO: 805239 - DNA, 19 bp, Mus musculus
  siRNA target sequence for Gars (NM_180678.2,1912-1930).
gaacggcgtgtctcataaa

SEQ ID NO: 805240 - DNA, 19 bp, Mus musculus
  siRNA target sequence for Gars (NM_180678.2,1939-1957).
ctcctctgggtctattgga

SEQ ID NO: 805241 - DNA, 19 bp, Mus musculus
  siRNA target sequence for Gars (NM_180678.2,1988-2006).
gtggctttcggcatcacta

SEQ ID NO: 805242 - DNA, 19 bp, Mus musculus
  siRNA target sequence for Gars (NM_180678.2,1990-2008).
ggctttcggcatcactatt

SEQ ID NO: 805243 - DNA, 19 bp, Mus musculus
  siRNA target sequence for Gars (NM_180678.2,1992-2010).
ctttcggcatcactattga

SEQ ID NO: 805244 - DNA, 19 bp, Mus musculus
  siRNA target sequence for Gars (NM_180678.2,1996-2014).
cggcatcactattgacttt

SEQ ID NO: 805245 - DNA, 19 bp, Mus musculus
  siRNA target sequence for Gars (NM_180678.2,1998-2016).
gcatcactattgactttga

SEQ ID NO: 805246 - DNA, 19 bp, Mus musculus
  siRNA target sequence for Gars (NM_180678.2,1999-2017).
catcactattgactttgat

SEQ ID NO: 805247 - DNA, 19 bp, Mus musculus
  siRNA target sequence for Gars (NM_180678.2,2120-2138).
gccaacggcaacattacct

SEQ ID NO: 805248 - DNA, 19 bp, Mus musculus
  siRNA target sequence for Gars (NM_180678.2,2152-2170).
ggccaggtacccactcttt

SEQ ID NO: 805249 - DNA, 19 bp, Mus musculus
  siRNA target sequence for Atpaf1 (NM_181040.2,394-412).
gtggggcactccaaacaaa

SEQ ID NO: 805250 - DNA, 19 bp, Mus musculus
  siRNA target sequence for Atpaf1 (NM_181040.2,396-414).
ggggcactccaaacaaagt

SEQ ID NO: 805251 - DNA, 19 bp, Mus musculus
  siRNA target sequence for Atpaf1 (NM_181040.2,398-416).
ggcactccaaacaaagtga

SEQ ID NO: 805252 - DNA, 19 bp, Mus musculus
  siRNA target sequence for Atpaf1 (NM_181040.2,413-431).
gtgattttatcaagtgtat

SEQ ID NO: 805253 - DNA, 19 bp, Mus musculus
  siRNA target sequence for Atpaf1 (NM_181040.2,494-512).
ctctcagttcagtcttcaa

SEQ ID NO: 805254 - DNA, 19 bp, Mus musculus
  siRNA target sequence for Atpaf1 (NM_181040.2,589-607).
gtctacgcagttattccta

SEQ ID NO: 805255 - DNA, 19 bp, Mus musculus
  siRNA target sequence for Atpaf1 (NM_181040.2,671-689).
caagaagggatggttatga

SEQ ID NO: 805256 - DNA, 19 bp, Mus musculus
  siRNA target sequence for Atpaf1 (NM_181040.2,674-692).
gaagggatggttatgagtt

SEQ ID NO: 805257 - DNA, 19 bp, Mus musculus
  siRNA target sequence for Atpaf1 (NM_181040.2,677-695).
gggatggttatgagttctt

SEQ ID NO: 805258 - DNA, 19 bp, Mus musculus
  siRNA target sequence for Atpaf1 (NM_181040.2,724-742).
cacttcactgcacttataa

SEQ ID NO: 805259 - DNA, 19 bp, Mus musculus
  siRNA target sequence for Atpaf1 (NM_181040.2,769-787).
gccagccagctgattttat

SEQ ID NO: 805260 - DNA, 19 bp, Mus musculus
  siRNA target sequence for Atpaf1 (NM_181040.2,770-788).
ccagccagctgattttata

SEQ ID NO: 805261 - DNA, 19 bp, Mus musculus
  siRNA target sequence for Atpaf1 (NM_181040.2,775-793).
cagctgattttatatcact

SEQ ID NO: 805262 - DNA, 19 bp, Mus musculus
  siRNA target sequence for A130010J15Rik (NM_181048.2,368-386).
gaagccagctgtactctat

SEQ ID NO: 805263 - DNA, 19 bp, Mus musculus
  siRNA target sequence for A130010J15Rik (NM_181048.2,391-409).
gcaactctgcaggagtatt

SEQ ID NO: 805264 - DNA, 19 bp, Mus musculus
  siRNA target sequence for A130010J15Rik (NM_181048.2,405-423).
gtattggcgctccaaagtt

SEQ ID NO: 805265 - DNA, 19 bp, Mus musculus
  siRNA target sequence for A130010J15Rik (NM_181048.2,421-439).
gttatctggaggaactaca

SEQ ID NO: 805266 - DNA, 19 bp, Mus musculus
  siRNA target sequence for A130010J15Rik (NM_181048.2,463-481).
gacttcacattcttgagat

SEQ ID NO: 805267 - DNA, 19 bp, Mus musculus
  siRNA target sequence for A130010J15Rik (NM_181048.2,611-629).
gctcccggacttgaaatct

SEQ ID NO: 805268 - DNA, 19 bp, Mus musculus
  siRNA target sequence for A130010J15Rik (NM_181048.2,641-659).
cgtcatcacacgttttcga

SEQ ID NO: 805269 - DNA, 19 bp, Mus musculus
  siRNA target sequence for A130010J15Rik (NM_181048.2,651-669).
cgttttcgaggacttaaga

SEQ ID NO: 805270 - DNA, 19 bp, Mus musculus
  siRNA target sequence for A130010J15Rik (NM_181048.2,652-670).
gttttcgaggacttaagaa

SEQ ID NO: 805271 - DNA, 19 bp, Mus musculus
  siRNA target sequence for A130010J15Rik (NM_181048.2,848-866).
gcctggtcaaccatcaatt

SEQ ID NO: 805272 - DNA, 19 bp, Mus musculus
  siRNA target sequence for A130010J15Rik (NM_181048.2,850-868).
ctggtcaaccatcaattct

SEQ ID NO: 805273 - DNA, 19 bp, Mus musculus
  siRNA target sequence for A130010J15Rik (NM_181048.2,869-887).
gctgtactcctttagtgtt

SEQ ID NO: 805274 - DNA, 19 bp, Mus musculus
  siRNA target sequence for A130010J15Rik (NM_181048.2,939-957).
gaactcagaacccgattta

SEQ ID NO: 805275 - DNA, 19 bp, Mus musculus
  siRNA target sequence for A130010J15Rik (NM_181048.2,950-968).
ccgatttagggctcagaat

SEQ ID NO: 805276 - DNA, 19 bp, Mus musculus
  siRNA target sequence for 5730590C14Rik (NM_181071.2,48-66).
cttactggtgggaagtcaa

SEQ ID NO: 805277 - DNA, 19 bp, Mus musculus
  siRNA target sequence for 5730590C14Rik (NM_181071.2,291-309).
ctcacacatcagtctatca

SEQ ID NO: 805278 - DNA, 19 bp, Mus musculus
  siRNA target sequence for 9130023P14Rik (NM_181072.2,366-384).
ggcgcctaccggtaccatt

SEQ ID NO: 805279 - DNA, 19 bp, Mus musculus
  siRNA target sequence for 9130023P14Rik (NM_181072.2,485-503).
ggacgactatatttttaca

SEQ ID NO: 805280 - DNA, 19 bp, Mus musculus
  siRNA target sequence for 9130023P14Rik (NM_181072.2,486-504).
gacgactatatttttacat

SEQ ID NO: 805281 - DNA, 19 bp, Mus musculus
  siRNA target sequence for 9130023P14Rik (NM_181072.2,528-546).
gtcaacccattcaagcaaa

SEQ ID NO: 805282 - DNA, 19 bp, Mus musculus
  siRNA target sequence for 9130023P14Rik (NM_181072.2,561-579).
gaaaaagaagtcgaaatgt

SEQ ID NO: 805283 - DNA, 19 bp, Mus musculus
  siRNA target sequence for 9130023P14Rik (NM_181072.2,586-604).
gagcggcacagtatgagaa

SEQ ID NO: 805284 - DNA, 19 bp, Mus musculus
  siRNA target sequence for 9130023P14Rik (NM_181072.2,617-635).
ctatgcccttgctgatagt

SEQ ID NO: 805285 - DNA, 19 bp, Mus musculus
  siRNA target sequence for 9130023P14Rik (NM_181072.2,621-639).
gcccttgctgatagtatgt

SEQ ID NO: 805286 - DNA, 19 bp, Mus musculus
  siRNA target sequence for 9130023P14Rik (NM_181072.2,628-646).
ctgatagtatgtacagaaa

SEQ ID NO: 805287 - DNA, 19 bp, Mus musculus
  siRNA target sequence for 9130023P14Rik (NM_181072.2,763-781).
ccaaggtccagcatgtgaa

SEQ ID NO: 805288 - DNA, 19 bp, Mus musculus
  siRNA target sequence for 9130023P14Rik (NM_181072.2,1045-1063).
gcatggactactattacta

SEQ ID NO: 805289 - DNA, 19 bp, Mus musculus
  siRNA target sequence for 9130023P14Rik (NM_181072.2,1126-1144).
ccctgcacgccatgaatgt

SEQ ID NO: 805290 - DNA, 19 bp, Mus musculus
  siRNA target sequence for 9130023P14Rik (NM_181072.2,1130-1148).
gcacgccatgaatgtgatt

SEQ ID NO: 805291 - DNA, 19 bp, Mus musculus
  siRNA target sequence for 9130023P14Rik (NM_181072.2,1135-1153).
ccatgaatgtgattggaat

SEQ ID NO: 805292 - DNA, 19 bp, Mus musculus
  siRNA target sequence for 9130023P14Rik (NM_181072.2,1278-1296).
gcgtatctgctgggtataa

SEQ ID NO: 805293 - DNA, 19 bp, Mus musculus
  siRNA target sequence for 9130023P14Rik (NM_181072.2,1279-1297).
cgtatctgctgggtataaa

SEQ ID NO: 805294 - DNA, 19 bp, Mus musculus
  siRNA target sequence for 9130023P14Rik (NM_181072.2,1299-1317).
caagaccggttaaaagaga

SEQ ID NO: 805295 - DNA, 19 bp, Mus musculus
  siRNA target sequence for 9130023P14Rik (NM_181072.2,1327-1345).
gccgccagatggacagtaa

SEQ ID NO: 805296 - DNA, 19 bp, Mus musculus
  siRNA target sequence for 9130023P14Rik (NM_181072.2,1329-1347).
cgccagatggacagtaagt

SEQ ID NO: 805297 - DNA, 19 bp, Mus musculus
  siRNA target sequence for 9130023P14Rik (NM_181072.2,1427-1445).
cctgcacgcacgagtcttt

SEQ ID NO: 805298 - DNA, 19 bp, Mus musculus
  siRNA target sequence for 9130023P14Rik (NM_181072.2,1430-1448).
gcacgcacgagtctttgat

SEQ ID NO: 805299 - DNA, 19 bp, Mus musculus
  siRNA target sequence for 9130023P14Rik (NM_181072.2,1431-1449).
cacgcacgagtctttgatt

SEQ ID NO: 805300 - DNA, 19 bp, Mus musculus
  siRNA target sequence for 9130023P14Rik (NM_181072.2,1451-1469).
cttggtagattctatcaat

SEQ ID NO: 805301 - DNA, 19 bp, Mus musculus
  siRNA target sequence for 9130023P14Rik (NM_181072.2,1487-1505).
ccacgaggagtacaacatt

SEQ ID NO: 805302 - DNA, 19 bp, Mus musculus
  siRNA target sequence for 9130023P14Rik (NM_181072.2,1568-1586).
caatttcgttaacgaaaaa

SEQ ID NO: 805303 - DNA, 19 bp, Mus musculus
  siRNA target sequence for 9130023P14Rik (NM_181072.2,1654-1672).
gatggacacccattgaata

SEQ ID NO: 805304 - DNA, 19 bp, Mus musculus
  siRNA target sequence for 9130023P14Rik (NM_181072.2,1662-1680).
cccattgaatatttcaata

SEQ ID NO: 805305 - DNA, 19 bp, Mus musculus
  siRNA target sequence for 9130023P14Rik (NM_181072.2,1869-1887).
cactacgctgggaaggttt

SEQ ID NO: 805306 - DNA, 19 bp, Mus musculus
  siRNA target sequence for 9130023P14Rik (NM_181072.2,1874-1892).
cgctgggaaggtttcctat

SEQ ID NO: 805307 - DNA, 19 bp, Mus musculus
  siRNA target sequence for 9130023P14Rik (NM_181072.2,1960-1978).
gcagtgagctgccttttat

SEQ ID NO: 805308 - DNA, 19 bp, Mus musculus
  siRNA target sequence for 9130023P14Rik (NM_181072.2,2069-2087).
ggtgagcaccctgatgaaa

SEQ ID NO: 805309 - DNA, 19 bp, Mus musculus
  siRNA target sequence for 9130023P14Rik (NM_181072.2,2070-2088).
gtgagcaccctgatgaaat

SEQ ID NO: 805310 - DNA, 19 bp, Mus musculus
  siRNA target sequence for 9130023P14Rik (NM_181072.2,2174-2192).
ggagtacctgggtctcaaa

SEQ ID NO: 805311 - DNA, 19 bp, Mus musculus
  siRNA target sequence for 9130023P14Rik (NM_181072.2,2207-2225).
gagaagagctggttatgct

SEQ ID NO: 805312 - DNA, 19 bp, Mus musculus
  siRNA target sequence for 9130023P14Rik (NM_181072.2,2209-2227).
gaagagctggttatgctta

SEQ ID NO: 805313 - DNA, 19 bp, Mus musculus
  siRNA target sequence for 4930471K13Rik (NM_181074.2,92-110).
gctggcagggggtatgaga

SEQ ID NO: 805314 - DNA, 19 bp, Mus musculus
  siRNA target sequence for 4930471K13Rik (NM_181074.2,306-324).
ggcaaaaaccgcatcaaga

SEQ ID NO: 805315 - DNA, 19 bp, Mus musculus
  siRNA target sequence for 4930471K13Rik (NM_181074.2,454-472).
gcaaccgcctgaagcttat

SEQ ID NO: 805316 - DNA, 19 bp, Mus musculus
  siRNA target sequence for 4930471K13Rik (NM_181074.2,659-677).
gacgctggagaaatgcaat

SEQ ID NO: 805317 - DNA, 19 bp, Mus musculus
  siRNA target sequence for 4930471K13Rik (NM_181074.2,735-753).
ctacgacatctcaacatca

SEQ ID NO: 805318 - DNA, 19 bp, Mus musculus
  siRNA target sequence for 4930471K13Rik (NM_181074.2,781-799).
ggctgtaccgacttaaggt

SEQ ID NO: 805319 - DNA, 19 bp, Mus musculus
  siRNA target sequence for 4930471K13Rik (NM_181074.2,789-807).
cgacttaaggtcttagaga

SEQ ID NO: 805320 - DNA, 19 bp, Mus musculus
  siRNA target sequence for 4930471K13Rik (NM_181074.2,790-808).
gacttaaggtcttagagat

SEQ ID NO: 805321 - DNA, 19 bp, Mus musculus
  siRNA target sequence for 4930471K13Rik (NM_181074.2,936-954).
ctccgtttcctcaaccttt

SEQ ID NO: 805322 - DNA, 19 bp, Mus musculus
  siRNA target sequence for 4930471K13Rik (NM_181074.2,1060-1078).
cctttcgtgggctcaacta

SEQ ID NO: 805323 - DNA, 19 bp, Mus musculus
  siRNA target sequence for 4930471K13Rik (NM_181074.2,1389-1407).
cacacggtgcagtttgtat

SEQ ID NO: 805324 - DNA, 19 bp, Mus musculus
  siRNA target sequence for 4930471K13Rik (NM_181074.2,1728-1746).
gacatcaagacgctcatta

SEQ ID NO: 805325 - DNA, 19 bp, Mus musculus
  siRNA target sequence for 4930471K13Rik (NM_181074.2,1831-1849).
gcaacacaaagcacaacat

SEQ ID NO: 805326 - DNA, 19 bp, Mus musculus
  siRNA target sequence for 4930471K13Rik (NM_181074.2,1837-1855).
caaagcacaacatcgaaat

SEQ ID NO: 805327 - DNA, 19 bp, Mus musculus
  siRNA target sequence for 4930471K13Rik (NM_181074.2,1842-1860).
cacaacatcgaaattgagt

SEQ ID NO: 805328 - DNA, 19 bp, Mus musculus
  siRNA target sequence for 4930471K13Rik (NM_181074.2,1844-1862).
caacatcgaaattgagtat

SEQ ID NO: 805329 - DNA, 19 bp, Mus musculus
  siRNA target sequence for 4930471K13Rik (NM_181074.2,1899-1917).
gatgcaccccgcaagttca

SEQ ID NO: 805330 - DNA, 19 bp, Mus musculus
  siRNA target sequence for 4930471K13Rik (NM_181074.2,1902-1920).
gcaccccgcaagttcaaca

SEQ ID NO: 805331 - DNA, 19 bp, Mus musculus
  siRNA target sequence for 4930471K13Rik (NM_181074.2,1903-1921).
caccccgcaagttcaacat

SEQ ID NO: 805332 - DNA, 19 bp, Mus musculus
  siRNA target sequence for 2610524H06Rik (NM_181075.2,138-156).
gagcctggatttatcgaat

SEQ ID NO: 805333 - DNA, 19 bp, Mus musculus
  siRNA target sequence for 2610524H06Rik (NM_181075.2,140-158).
gcctggatttatcgaatta

SEQ ID NO: 805334 - DNA, 19 bp, Mus musculus
  siRNA target sequence for 2610524H06Rik (NM_181075.2,141-159).
cctggatttatcgaattat

SEQ ID NO: 805335 - DNA, 19 bp, Mus musculus
  siRNA target sequence for 2610524H06Rik (NM_181075.2,216-234).
gatccagaagcttaatcga

SEQ ID NO: 805336 - DNA, 19 bp, Mus musculus
  siRNA target sequence for Tas2r139 (NM_181275.1,4-22).
gctcaacccagcaactact

SEQ ID NO: 805337 - DNA, 19 bp, Mus musculus
  siRNA target sequence for Tas2r139 (NM_181275.1,12-30).
cagcaactactggaaacaa

SEQ ID NO: 805338 - DNA, 19 bp, Mus musculus
  siRNA target sequence for Tas2r139 (NM_181275.1,14-32).
gcaactactggaaacaaga

SEQ ID NO: 805339 - DNA, 19 bp, Mus musculus
  siRNA target sequence for Tas2r139 (NM_181275.1,45-63).
gtctattttgatgttaaca

SEQ ID NO: 805340 - DNA, 19 bp, Mus musculus
  siRNA target sequence for Tas2r139 (NM_181275.1,47-65).
ctattttgatgttaacact

SEQ ID NO: 805341 - DNA, 19 bp, Mus musculus
  siRNA target sequence for Tas2r139 (NM_181275.1,125-143).
cagtctcatgggttcagaa

SEQ ID NO: 805342 - DNA, 19 bp, Mus musculus
  siRNA target sequence for Tas2r139 (NM_181275.1,172-190).
ctgcttcttctgagtgtat

SEQ ID NO: 805343 - DNA, 19 bp, Mus musculus
  siRNA target sequence for Tas2r139 (NM_181275.1,194-212).
gaataggcctccaaagcat

SEQ ID NO: 805344 - DNA, 19 bp, Mus musculus
  siRNA target sequence for Tas2r139 (NM_181275.1,223-241).
gaaattacctcctccatat

SEQ ID NO: 805345 - DNA, 19 bp, Mus musculus
  siRNA target sequence for Tas2r139 (NM_181275.1,236-254).
ccatattcaacgttgcttt

SEQ ID NO: 805346 - DNA, 19 bp, Mus musculus
  siRNA target sequence for Tas2r139 (NM_181275.1,237-255).
catattcaacgttgctttt

SEQ ID NO: 805347 - DNA, 19 bp, Mus musculus
  siRNA target sequence for Tas2r139 (NM_181275.1,275-293).
gagtctcaaatgtaagttt

SEQ ID NO: 805348 - DNA, 19 bp, Mus musculus
  siRNA target sequence for Tas2r139 (NM_181275.1,371-389).
cttaccccctgttcttcaa

SEQ ID NO: 805349 - DNA, 19 bp, Mus musculus
  siRNA target sequence for Tas2r139 (NM_181275.1,375-393).
ccccctgttcttcaaacta

SEQ ID NO: 805350 - DNA, 19 bp, Mus musculus
  siRNA target sequence for Tas2r139 (NM_181275.1,376-394).
cccctgttcttcaaactaa

SEQ ID NO: 805351 - DNA, 19 bp, Mus musculus
  siRNA target sequence for Tas2r139 (NM_181275.1,377-395).
ccctgttcttcaaactaaa

SEQ ID NO: 805352 - DNA, 19 bp, Mus musculus
  siRNA target sequence for Tas2r139 (NM_181275.1,531-549).
cacaatgaaactttacgtt

SEQ ID NO: 805353 - DNA, 19 bp, Mus musculus
  siRNA target sequence for Tas2r139 (NM_181275.1,618-636).
cgtcgcaacagctactctt

SEQ ID NO: 805354 - DNA, 19 bp, Mus musculus
  siRNA target sequence for Tas2r139 (NM_181275.1,628-646).
gctactcttctgatttttt

SEQ ID NO: 805355 - DNA, 19 bp, Mus musculus
  siRNA target sequence for Tas2r139 (NM_181275.1,658-676).
cacaccctgaacatgagaa

SEQ ID NO: 805356 - DNA, 19 bp, Mus musculus
  siRNA target sequence for Tas2r139 (NM_181275.1,729-747).
caaagaaactagctgtttt

SEQ ID NO: 805357 - DNA, 19 bp, Mus musculus
  siRNA target sequence for Tas2r139 (NM_181275.1,822-840).
gagtattgtgatcagaatt

SEQ ID NO: 805358 - DNA, 19 bp, Mus musculus
  siRNA target sequence for Tas2r139 (NM_181275.1,860-878).
ctggccattcagttttact

SEQ ID NO: 805359 - DNA, 19 bp, Mus musculus
  siRNA target sequence for Tas2r139 (NM_181275.1,862-880).
ggccattcagttttactaa

SEQ ID NO: 805360 - DNA, 19 bp, Mus musculus
  siRNA target sequence for Tas2r139 (NM_181275.1,864-882).
ccattcagttttactaatt

SEQ ID NO: 805361 - DNA, 19 bp, Mus musculus
  siRNA target sequence for Tas2r136 (NM_181276.1,81-99).
ggtaagcattgcatccatt

SEQ ID NO: 805362 - DNA, 19 bp, Mus musculus
  siRNA target sequence for Tas2r136 (NM_181276.1,86-104).
gcattgcatccattgcaat

SEQ ID NO: 805363 - DNA, 19 bp, Mus musculus
  siRNA target sequence for Tas2r136 (NM_181276.1,326-344).
ggatagtaaccaaccattt

SEQ ID NO: 805364 - DNA, 19 bp, Mus musculus
  siRNA target sequence for Tas2r136 (NM_181276.1,327-345).
gatagtaaccaaccatttt

SEQ ID NO: 805365 - DNA, 19 bp, Mus musculus
  siRNA target sequence for Tas2r136 (NM_181276.1,331-349).
gtaaccaaccattttaata

SEQ ID NO: 805366 - DNA, 19 bp, Mus musculus
  siRNA target sequence for Tas2r136 (NM_181276.1,350-368).
catggcttgcaaatatact

SEQ ID NO: 805367 - DNA, 19 bp, Mus musculus
  siRNA target sequence for Tas2r136 (NM_181276.1,463-481).
ccatgttttgtgcttttat

SEQ ID NO: 805368 - DNA, 19 bp, Mus musculus
  siRNA target sequence for Tas2r136 (NM_181276.1,490-508).
cttataatggtaaccatat

SEQ ID NO: 805369 - DNA, 19 bp, Mus musculus
  siRNA target sequence for Tas2r136 (NM_181276.1,566-584).
cttatttcacgaaccttat

SEQ ID NO: 805370 - DNA, 19 bp, Mus musculus
  siRNA target sequence for Tas2r136 (NM_181276.1,580-598).
cttatagctatgactttca

SEQ ID NO: 805371 - DNA, 19 bp, Mus musculus
  siRNA target sequence for Tas2r136 (NM_181276.1,597-615).
cactctaggcagtttagtt

SEQ ID NO: 805372 - DNA, 19 bp, Mus musculus
  siRNA target sequence for Tas2r136 (NM_181276.1,678-696).
gacaatgaggctttatgga

SEQ ID NO: 805373 - DNA, 19 bp, Mus musculus
  siRNA target sequence for Tas2r136 (NM_181276.1,722-740).
caacccacattaaggtttt

SEQ ID NO: 805374 - DNA, 19 bp, Mus musculus
  siRNA target sequence for Tas2r136 (NM_181276.1,725-743).
cccacattaaggttttgca

SEQ ID NO: 805375 - DNA, 19 bp, Mus musculus
  siRNA target sequence for Tas2r136 (NM_181276.1,726-744).
ccacattaaggttttgcaa

SEQ ID NO: 805376 - DNA, 19 bp, Mus musculus
  siRNA target sequence for Tas2r136 (NM_181276.1,750-768).
gatctcatttctgttgtta

SEQ ID NO: 805377 - DNA, 19 bp, Mus musculus
  siRNA target sequence for Tas2r136 (NM_181276.1,786-804).
gttgctaatcatatcagat

SEQ ID NO: 805378 - DNA, 19 bp, Mus musculus
  siRNA target sequence for Tas2r136 (NM_181276.1,790-808).
ctaatcatatcagattaca

SEQ ID NO: 805379 - DNA, 19 bp, Mus musculus
  siRNA target sequence for Tas2r136 (NM_181276.1,829-847).
gaaccaatccacctgattt

SEQ ID NO: 805380 - DNA, 19 bp, Mus musculus
  siRNA target sequence for Tas2r136 (NM_181276.1,840-858).
cctgatttgccaggttatt

SEQ ID NO: 805381 - DNA, 19 bp, Mus musculus
  siRNA target sequence for Tas2r136 (NM_181276.1,843-861).
gatttgccaggttattgga

SEQ ID NO: 805382 - DNA, 19 bp, Mus musculus
  siRNA target sequence for Tas2r136 (NM_181276.1,852-870).
ggttattggaaccttgtat

SEQ ID NO: 805383 - DNA, 19 bp, Mus musculus
  siRNA target sequence for Tas2r136 (NM_181276.1,956-974).
ggttctggctgaaagaaaa

SEQ ID NO: 805384 - DNA, 19 bp, Mus musculus
  siRNA target sequence for B230219D22Rik (NM_181278.2,236-254).
ccccgttgccggcagtaat

SEQ ID NO: 805385 - DNA, 19 bp, Mus musculus
  siRNA target sequence for B230219D22Rik (NM_181278.2,239-257).
cgttgccggcagtaatcca

SEQ ID NO: 805386 - DNA, 19 bp, Mus musculus
  siRNA target sequence for B230219D22Rik (NM_181278.2,278-296).
gccttcctgcctcaatgaa

SEQ ID NO: 805387 - DNA, 19 bp, Mus musculus
  siRNA target sequence for B230219D22Rik (NM_181278.2,389-407).
gaggcaagacccattaaat

SEQ ID NO: 805388 - DNA, 19 bp, Mus musculus
  siRNA target sequence for B230219D22Rik (NM_181278.2,391-409).
ggcaagacccattaaatga

SEQ ID NO: 805389 - DNA, 19 bp, Mus musculus
  siRNA target sequence for B230219D22Rik (NM_181278.2,430-448).
gtggcagaaacatagagat

SEQ ID NO: 805390 - DNA, 19 bp, Mus musculus
  siRNA target sequence for B230219D22Rik (NM_181278.2,644-662).
gagacctccaggtagcatt

SEQ ID NO: 805391 - DNA, 19 bp, Mus musculus
  siRNA target sequence for B230219D22Rik (NM_181278.2,646-664).
gacctccaggtagcattaa

SEQ ID NO: 805392 - DNA, 19 bp, Mus musculus
  siRNA target sequence for B230219D22Rik (NM_181278.2,717-735).
ccttaccctatgatgcata

SEQ ID NO: 805393 - DNA, 19 bp, Mus musculus
  siRNA target sequence for B230219D22Rik (NM_181278.2,722-740).
ccctatgatgcatagtaga

SEQ ID NO: 805394 - DNA, 19 bp, Mus musculus
  siRNA target sequence for E130103I17Rik (NM_181316.3,462-480).
gtgggaacggccacgataa

SEQ ID NO: 805395 - DNA, 19 bp, Mus musculus
  siRNA target sequence for E130103I17Rik (NM_181316.3,464-482).
gggaacggccacgataaaa

SEQ ID NO: 805396 - DNA, 19 bp, Mus musculus
  siRNA target sequence for E130103I17Rik (NM_181316.3,465-483).
ggaacggccacgataaaat

SEQ ID NO: 805397 - DNA, 19 bp, Mus musculus
  siRNA target sequence for E130103I17Rik (NM_181316.3,469-487).
cggccacgataaaatcatt

SEQ ID NO: 805398 - DNA, 19 bp, Mus musculus
  siRNA target sequence for E130103I17Rik (NM_181316.3,471-489).
gccacgataaaatcattgt

SEQ ID NO: 805399 - DNA, 19 bp, Mus musculus
  siRNA target sequence for E130103I17Rik (NM_181316.3,502-520).
gggctacctgagaatcttt

SEQ ID NO: 805400 - DNA, 19 bp, Mus musculus
  siRNA target sequence for E130103I17Rik (NM_181316.3,503-521).
ggctacctgagaatcttta

SEQ ID NO: 805401 - DNA, 19 bp, Mus musculus
  siRNA target sequence for E130103I17Rik (NM_181316.3,549-567).
ggcctcaggctgaagattt

SEQ ID NO: 805402 - DNA, 19 bp, Mus musculus
  siRNA target sequence for E130103I17Rik (NM_181316.3,550-568).
gcctcaggctgaagattta

SEQ ID NO: 805403 - DNA, 19 bp, Mus musculus
  siRNA target sequence for E130103I17Rik (NM_181316.3,552-570).
ctcaggctgaagatttact

SEQ ID NO: 805404 - DNA, 19 bp, Mus musculus
  siRNA target sequence for E130103I17Rik (NM_181316.3,556-574).
ggctgaagatttacttcta

SEQ ID NO: 805405 - DNA, 19 bp, Mus musculus
  siRNA target sequence for E130103I17Rik (NM_181316.3,608-626).
gaagtcgggaagtttgtct

SEQ ID NO: 805406 - DNA, 19 bp, Mus musculus
  siRNA target sequence for E130103I17Rik (NM_181316.3,707-725).
gtggaacatggaaaccaat

SEQ ID NO: 805407 - DNA, 19 bp, Mus musculus
  siRNA target sequence for E130103I17Rik (NM_181316.3,709-727).
ggaacatggaaaccaatat

SEQ ID NO: 805408 - DNA, 19 bp, Mus musculus
  siRNA target sequence for E130103I17Rik (NM_181316.3,713-731).
catggaaaccaatatcaga

SEQ ID NO: 805409 - DNA, 19 bp, Mus musculus
  siRNA target sequence for E130103I17Rik (NM_181316.3,721-739).
ccaatatcagataaaacta

SEQ ID NO: 805410 - DNA, 19 bp, Mus musculus
  siRNA target sequence for E130103I17Rik (NM_181316.3,758-776).
cagaggacggcctgcaata

SEQ ID NO: 805411 - DNA, 19 bp, Mus musculus
  siRNA target sequence for E130103I17Rik (NM_181316.3,800-818).
gtaaaaggtcgggatttaa

SEQ ID NO: 805412 - DNA, 19 bp, Mus musculus
  siRNA target sequence for E130103I17Rik (NM_181316.3,806-824).
ggtcgggatttaatttgta

SEQ ID NO: 805413 - DNA, 19 bp, Mus musculus
  siRNA target sequence for E130103I17Rik (NM_181316.3,807-825).
gtcgggatttaatttgtat

SEQ ID NO: 805414 - DNA, 19 bp, Mus musculus
  siRNA target sequence for E130103I17Rik (NM_181316.3,880-898).
gaggtttctccctggtttt

SEQ ID NO: 805415 - DNA, 19 bp, Mus musculus
  siRNA target sequence for E130103I17Rik (NM_181316.3,924-942).
gtccccgcacggattcctt

SEQ ID NO: 805416 - DNA, 19 bp, Mus musculus
  siRNA target sequence for E130103I17Rik (NM_181316.3,928-946).
ccgcacggattccttcata

SEQ ID NO: 805417 - DNA, 19 bp, Mus musculus
  siRNA target sequence for E130103I17Rik (NM_181316.3,960-978).
gcagacaagtggaaagtta

SEQ ID NO: 805418 - DNA, 19 bp, Mus musculus
  siRNA target sequence for E130103I17Rik (NM_181316.3,965-983).
caagtggaaagttacaagt

SEQ ID NO: 805419 - DNA, 19 bp, Mus musculus
  siRNA target sequence for E130103I17Rik (NM_181316.3,1050-1068).
ctggaaagcggctagttgt

SEQ ID NO: 805420 - DNA, 19 bp, Mus musculus
  siRNA target sequence for E130103I17Rik (NM_181316.3,1091-1109).
gagcaagcccttgatatct

SEQ ID NO: 805421 - DNA, 19 bp, Mus musculus
  siRNA target sequence for E130103I17Rik (NM_181316.3,1181-1199).
gataatgggcagattcgat

SEQ ID NO: 805422 - DNA, 19 bp, Mus musculus
  siRNA target sequence for E130103I17Rik (NM_181316.3,1187-1205).
gggcagattcgattcatga

SEQ ID NO: 805423 - DNA, 19 bp, Mus musculus
  siRNA target sequence for E130103I17Rik (NM_181316.3,1190-1208).
cagattcgattcatgaaga

SEQ ID NO: 805424 - DNA, 19 bp, Mus musculus
  siRNA target sequence for E130103I17Rik (NM_181316.3,1214-1232).
ggttataaccccagttgtt

SEQ ID NO: 805425 - DNA, 19 bp, Mus musculus
  siRNA target sequence for E130103I17Rik (NM_181316.3,1215-1233).
gttataaccccagttgttt

SEQ ID NO: 805426 - DNA, 19 bp, Mus musculus
  siRNA target sequence for E130103I17Rik (NM_181316.3,1235-1253).
ctaccgtactgctcagttt

SEQ ID NO: 805427 - DNA, 19 bp, Mus musculus
  siRNA target sequence for E130103I17Rik (NM_181316.3,1239-1257).
cgtactgctcagtttctga

SEQ ID NO: 805428 - DNA, 19 bp, Mus musculus
  siRNA target sequence for E130103I17Rik (NM_181316.3,1250-1268).
gtttctgaaggtacaataa

SEQ ID NO: 805429 - DNA, 19 bp, Mus musculus
  siRNA target sequence for E130103I17Rik (NM_181316.3,1459-1477).
gttccaggctccaaaagtt

SEQ ID NO: 805430 - DNA, 19 bp, Mus musculus
  siRNA target sequence for E130103I17Rik (NM_181316.3,1462-1480).
ccaggctccaaaagttgaa

SEQ ID NO: 805431 - DNA, 19 bp, Mus musculus
  siRNA target sequence for E130103I17Rik (NM_181316.3,1465-1483).
ggctccaaaagttgaatca

SEQ ID NO: 805432 - DNA, 19 bp, Mus musculus
  siRNA target sequence for E130103I17Rik (NM_181316.3,1466-1484).
gctccaaaagttgaatcaa

SEQ ID NO: 805433 - DNA, 19 bp, Mus musculus
  siRNA target sequence for E130103I17Rik (NM_181316.3,1485-1503).
gagagctcaactatgatga

SEQ ID NO: 805434 - DNA, 19 bp, Mus musculus
  siRNA target sequence for E130103I17Rik (NM_181316.3,1614-1632).
cttctaccctggattctgt

SEQ ID NO: 805435 - DNA, 19 bp, Mus musculus
  siRNA target sequence for E130103I17Rik (NM_181316.3,1674-1692).
cgtccatcacagtgaagat

SEQ ID NO: 805436 - DNA, 19 bp, Mus musculus
  siRNA target sequence for E130103I17Rik (NM_181316.3,1809-1827).
gttcagtagcgttttctgt

SEQ ID NO: 805437 - DNA, 19 bp, Mus musculus
  siRNA target sequence for E130103I17Rik (NM_181316.3,1851-1869).
catccgagttagaaggaaa

SEQ ID NO: 805438 - DNA, 19 bp, Mus musculus
  siRNA target sequence for E130103I17Rik (NM_181316.3,1855-1873).
cgagttagaaggaaatgct

SEQ ID NO: 805439 - DNA, 19 bp, Mus musculus
  siRNA target sequence for E130103I17Rik (NM_181316.3,1905-1923).
ctcgggttgtccaatgtaa

SEQ ID NO: 805440 - DNA, 19 bp, Mus musculus
  siRNA target sequence for E130103I17Rik (NM_181316.3,1908-1926).
gggttgtccaatgtaaatt

SEQ ID NO: 805441 - DNA, 19 bp, Mus musculus
  siRNA target sequence for E130103I17Rik (NM_181316.3,1909-1927).
ggttgtccaatgtaaattt

SEQ ID NO: 805442 - DNA, 19 bp, Mus musculus
  siRNA target sequence for E130103I17Rik (NM_181316.3,1976-1994).
gcaagccacaaactaacta

SEQ ID NO: 805443 - DNA, 19 bp, Mus musculus
  siRNA target sequence for E130103I17Rik (NM_181316.3,1977-1995).
caagccacaaactaactat

SEQ ID NO: 805444 - DNA, 19 bp, Mus musculus
  siRNA target sequence for E130103I17Rik (NM_181316.3,1980-1998).
gccacaaactaactataga

SEQ ID NO: 805445 - DNA, 19 bp, Mus musculus
  siRNA target sequence for E130103I17Rik (NM_181316.3,2055-2073).
cagatgacgaccaagtgaa

SEQ ID NO: 805446 - DNA, 19 bp, Mus musculus
  siRNA target sequence for E130103I17Rik (NM_181316.3,2101-2119).
cgctcgagtgactcttctt

SEQ ID NO: 805447 - DNA, 19 bp, Mus musculus
  siRNA target sequence for E130103I17Rik (NM_181316.3,2124-2142).
ccagaacatcccaacgata

SEQ ID NO: 805448 - DNA, 19 bp, Mus musculus
  siRNA target sequence for E130103I17Rik (NM_181316.3,2135-2153).
caacgataccgcattcaga

SEQ ID NO: 805449 - DNA, 19 bp, Mus musculus
  siRNA target sequence for E130103I17Rik (NM_181316.3,2152-2170).
gagcgaacagtttgaagat

SEQ ID NO: 805450 - DNA, 19 bp, Mus musculus
  siRNA target sequence for E130103I17Rik (NM_181316.3,2154-2172).
gcgaacagtttgaagatct

SEQ ID NO: 805451 - DNA, 19 bp, Mus musculus
  siRNA target sequence for E130103I17Rik (NM_181316.3,2200-2218).
ccgccttcaggaacatttt

SEQ ID NO: 805452 - DNA, 19 bp, Mus musculus
  siRNA target sequence for E130103I17Rik (NM_181316.3,2202-2220).
gccttcaggaacattttga

SEQ ID NO: 805453 - DNA, 19 bp, Mus musculus
  siRNA target sequence for E130103I17Rik (NM_181316.3,2237-2255).
gacttttcgtgttcttttt

SEQ ID NO: 805454 - DNA, 19 bp, Mus musculus
  siRNA target sequence for E130103I17Rik (NM_181316.3,2285-2303).
gagttgattgatcatcatt

SEQ ID NO: 805455 - DNA, 19 bp, Mus musculus
  siRNA target sequence for E130103I17Rik (NM_181316.3,2306-2324).
gagctgcggataaatggta

SEQ ID NO: 805456 - DNA, 19 bp, Mus musculus
  siRNA target sequence for E130103I17Rik (NM_181316.3,2309-2327).
ctgcggataaatggtaaaa

SEQ ID NO: 805457 - DNA, 19 bp, Mus musculus
  siRNA target sequence for E130103I17Rik (NM_181316.3,2311-2329).
gcggataaatggtaaaaaa

SEQ ID NO: 805458 - DNA, 19 bp, Mus musculus
  siRNA target sequence for E130103I17Rik (NM_181316.3,2312-2330).
cggataaatggtaaaaaat

SEQ ID NO: 805459 - DNA, 19 bp, Mus musculus
  siRNA target sequence for E130103I17Rik (NM_181316.3,2378-2396).
cgtcggcttctgacaagat

SEQ ID NO: 805460 - DNA, 19 bp, Mus musculus
  siRNA target sequence for E130103I17Rik (NM_181316.3,2379-2397).
gtcggcttctgacaagatt

SEQ ID NO: 805461 - DNA, 19 bp, Mus musculus
  siRNA target sequence for E130103I17Rik (NM_181316.3,2670-2688).
ccattgcctaccttttgaa

SEQ ID NO: 805462 - DNA, 19 bp, Mus musculus
  siRNA target sequence for E130103I17Rik (NM_181316.3,2671-2689).
cattgcctaccttttgaaa

SEQ ID NO: 805463 - DNA, 19 bp, Mus musculus
  siRNA target sequence for E130103I17Rik (NM_181316.3,2731-2749).
cagcagccaactgaacata

SEQ ID NO: 805464 - DNA, 19 bp, Mus musculus
  siRNA target sequence for E130103I17Rik (NM_181316.3,2922-2940).
ccacagagctgtttaccaa

SEQ ID NO: 805465 - DNA, 19 bp, Mus musculus
  siRNA target sequence for E130103I17Rik (NM_181316.3,2987-3005).
cgccaaggagttttggaat

SEQ ID NO: 805466 - DNA, 19 bp, Mus musculus
  siRNA target sequence for C130090K23Rik (NM_181323.2,539-557).
ggctccaaatgctaagctt

SEQ ID NO: 805467 - DNA, 19 bp, Mus musculus
  siRNA target sequence for C130090K23Rik (NM_181323.2,1967-1985).
ggctattgcagtgtcaaaa

SEQ ID NO: 805468 - DNA, 19 bp, Mus musculus
  siRNA target sequence for C130090K23Rik (NM_181323.2,1969-1987).
ctattgcagtgtcaaaact

SEQ ID NO: 805469 - DNA, 19 bp, Mus musculus
  siRNA target sequence for C130090K23Rik (NM_181323.2,2037-2055).
gagcccggttccagagatt

SEQ ID NO: 805470 - DNA, 19 bp, Mus musculus
  siRNA target sequence for C130090K23Rik (NM_181323.2,2040-2058).
cccggttccagagattaca

SEQ ID NO: 805471 - DNA, 19 bp, Mus musculus
  siRNA target sequence for C130090K23Rik (NM_181323.2,2041-2059).
ccggttccagagattacat

SEQ ID NO: 805472 - DNA, 19 bp, Mus musculus
  siRNA target sequence for C130090K23Rik (NM_181323.2,2042-2060).
cggttccagagattacata

SEQ ID NO: 805473 - DNA, 19 bp, Mus musculus
  siRNA target sequence for C030003J19Rik (NM_181328.2,246-264).
gggacacccttttgacata

SEQ ID NO: 805474 - DNA, 19 bp, Mus musculus
  siRNA target sequence for C030003J19Rik (NM_181328.2,374-392).
gcctgggctcgccactaat

SEQ ID NO: 805475 - DNA, 19 bp, Mus musculus
  siRNA target sequence for C030003J19Rik (NM_181328.2,393-411).
gggactcaccttcatcaat

SEQ ID NO: 805476 - DNA, 19 bp, Mus musculus
  siRNA target sequence for C030003J19Rik (NM_181328.2,456-474).
ccaagactcaccactcaat

SEQ ID NO: 805477 - DNA, 19 bp, Mus musculus
  siRNA target sequence for C030003J19Rik (NM_181328.2,460-478).
gactcaccactcaatcagt

SEQ ID NO: 805478 - DNA, 19 bp, Mus musculus
  siRNA target sequence for C030003J19Rik (NM_181328.2,669-687).
gcgggagacgccaagcttt

SEQ ID NO: 805479 - DNA, 19 bp, Mus musculus
  siRNA target sequence for C030003J19Rik (NM_181328.2,696-714).
cttcctcacctatgatgta

SEQ ID NO: 805480 - DNA, 19 bp, Mus musculus
  siRNA target sequence for C030003J19Rik (NM_181328.2,700-718).
ctcacctatgatgtaatga

SEQ ID NO: 805481 - DNA, 19 bp, Mus musculus
  siRNA target sequence for C030003J19Rik (NM_181328.2,781-799).
ggcacgtcggggatcacat

SEQ ID NO: 805482 - DNA, 19 bp, Mus musculus
  siRNA target sequence for C030003J19Rik (NM_181328.2,817-835).
cccatggacgtggttaagt

SEQ ID NO: 805483 - DNA, 19 bp, Mus musculus
  siRNA target sequence for C1rl (NM_181344.2,102-120).
cccagagccatatctcaaa

SEQ ID NO: 805484 - DNA, 19 bp, Mus musculus
  siRNA target sequence for C1rl (NM_181344.2,217-235).
ggcgactctgtcacaattt

SEQ ID NO: 805485 - DNA, 19 bp, Mus musculus
  siRNA target sequence for C1rl (NM_181344.2,219-237).
cgactctgtcacaatttca

SEQ ID NO: 805486 - DNA, 19 bp, Mus musculus
  siRNA target sequence for C1rl (NM_181344.2,222-240).
ctctgtcacaatttcaact

SEQ ID NO: 805487 - DNA, 19 bp, Mus musculus
  siRNA target sequence for C1rl (NM_181344.2,299-317).
ctggtcacagggagtttgt

SEQ ID NO: 805488 - DNA, 19 bp, Mus musculus
  siRNA target sequence for C1rl (NM_181344.2,301-319).
ggtcacagggagtttgtat

SEQ ID NO: 805489 - DNA, 19 bp, Mus musculus
  siRNA target sequence for C1rl (NM_181344.2,487-505).
cactgccaagatccttatt

SEQ ID NO: 805490 - DNA, 19 bp, Mus musculus
  siRNA target sequence for C1rl (NM_181344.2,489-507).
ctgccaagatccttattat

SEQ ID NO: 805491 - DNA, 19 bp, Mus musculus
  siRNA target sequence for C1rl (NM_181344.2,514-532).
gaccagacagggacactta

SEQ ID NO: 805492 - DNA, 19 bp, Mus musculus
  siRNA target sequence for C1rl (NM_181344.2,647-665).
gttcttcccgagctaaact

SEQ ID NO: 805493 - DNA, 19 bp, Mus musculus
  siRNA target sequence for C1rl (NM_181344.2,898-916).
catgagtcccacaacttca

SEQ ID NO: 805494 - DNA, 19 bp, Mus musculus
  siRNA target sequence for C1rl (NM_181344.2,1045-1063).
gtggagatgggctggttaa

SEQ ID NO: 805495 - DNA, 19 bp, Mus musculus
  siRNA target sequence for C1rl (NM_181344.2,1047-1065).
ggagatgggctggttaaca

SEQ ID NO: 805496 - DNA, 19 bp, Mus musculus
  siRNA target sequence for C1rl (NM_181344.2,1050-1068).
gatgggctggttaacaaca

SEQ ID NO: 805497 - DNA, 19 bp, Mus musculus
  siRNA target sequence for C1rl (NM_181344.2,1055-1073).
gctggttaacaacaaagtt

SEQ ID NO: 805498 - DNA, 19 bp, Mus musculus
  siRNA target sequence for C1rl (NM_181344.2,1147-1165).
gtgttttctgacaatatgt

SEQ ID NO: 805499 - DNA, 19 bp, Mus musculus
  siRNA target sequence for C1rl (NM_181344.2,1326-1344).
cagctacatggattggatt

SEQ ID NO: 805500 - DNA, 19 bp, Mus musculus
  siRNA target sequence for C1rl (NM_181344.2,1328-1346).
gctacatggattggattaa

SEQ ID NO: 805501 - DNA, 19 bp, Mus musculus
  siRNA target sequence for A230083H22Rik (NM_181348.2,204-222).
gcccgaacctcccaattct

SEQ ID NO: 805502 - DNA, 19 bp, Mus musculus
  siRNA target sequence for A230083H22Rik (NM_181348.2,215-233).
ccaattctctggatctcaa

SEQ ID NO: 805503 - DNA, 19 bp, Mus musculus
  siRNA target sequence for A230083H22Rik (NM_181348.2,216-234).
caattctctggatctcaat

SEQ ID NO: 805504 - DNA, 19 bp, Mus musculus
  siRNA target sequence for A230083H22Rik (NM_181348.2,239-257).
gtcaccctagaagaatcaa

SEQ ID NO: 805505 - DNA, 19 bp, Mus musculus
  siRNA target sequence for A230083H22Rik (NM_181348.2,374-392).
ctgatgaagcagactcttt

SEQ ID NO: 805506 - DNA, 19 bp, Mus musculus
  siRNA target sequence for A230083H22Rik (NM_181348.2,448-466).
gagtctattccagaatata

SEQ ID NO: 805507 - DNA, 19 bp, Mus musculus
  siRNA target sequence for A230083H22Rik (NM_181348.2,556-574).
ccctacaggagagtcattt

SEQ ID NO: 805508 - DNA, 19 bp, Mus musculus
  siRNA target sequence for A230083H22Rik (NM_181348.2,558-576).
ctacaggagagtcatttct

SEQ ID NO: 805509 - DNA, 19 bp, Mus musculus
  siRNA target sequence for A230083H22Rik (NM_181348.2,588-606).
ctatggggacggtctgaat

SEQ ID NO: 805510 - DNA, 19 bp, Mus musculus
  siRNA target sequence for A230083H22Rik (NM_181348.2,597-615).
cggtctgaatgccatcatt

SEQ ID NO: 805511 - DNA, 19 bp, Mus musculus
  siRNA target sequence for A230083H22Rik (NM_181348.2,652-670).
gcggattaccactatgtca

SEQ ID NO: 805512 - DNA, 19 bp, Mus musculus
  siRNA target sequence for A230083H22Rik (NM_181348.2,653-671).
cggattaccactatgtcat

SEQ ID NO: 805513 - DNA, 19 bp, Mus musculus
  siRNA target sequence for A230083H22Rik (NM_181348.2,775-793).
ggactaggttggatgaaga

SEQ ID NO: 805514 - DNA, 19 bp, Mus musculus
  siRNA target sequence for A230083H22Rik (NM_181348.2,813-831).
cagacggttgcgcaagaat

SEQ ID NO: 805515 - DNA, 19 bp, Mus musculus
  siRNA target sequence for A230083H22Rik (NM_181348.2,815-833).
gacggttgcgcaagaattt

SEQ ID NO: 805516 - DNA, 19 bp, Mus musculus
  siRNA target sequence for A230083H22Rik (NM_181348.2,817-835).
cggttgcgcaagaatttga

SEQ ID NO: 805517 - DNA, 19 bp, Mus musculus
  siRNA target sequence for A230083H22Rik (NM_181348.2,818-836).
ggttgcgcaagaatttgaa

SEQ ID NO: 805518 - DNA, 19 bp, Mus musculus
  siRNA target sequence for A230083H22Rik (NM_181348.2,864-882).
gttcatcaggacaatctta

SEQ ID NO: 805519 - DNA, 19 bp, Mus musculus
  siRNA target sequence for A230083H22Rik (NM_181348.2,886-904).
gtgactcggccttttataa

SEQ ID NO: 805520 - DNA, 19 bp, Mus musculus
  siRNA target sequence for A230083H22Rik (NM_181348.2,989-1007).
cagagagcatcatcaaact

SEQ ID NO: 805521 - DNA, 19 bp, Mus musculus
  siRNA target sequence for 1110028G01Rik (NM_181390.1,90-108).
gaaggccccatcaagaaga

SEQ ID NO: 805522 - DNA, 19 bp, Mus musculus
  siRNA target sequence for 1110028G01Rik (NM_181390.1,259-277).
gcaccgagacagtctttga

SEQ ID NO: 805523 - DNA, 19 bp, Mus musculus
  siRNA target sequence for 1810049H20Rik (NM_181391.1,423-441).
cttgcttgtcggaatctga

SEQ ID NO: 805524 - DNA, 19 bp, Mus musculus
  siRNA target sequence for 1810049H20Rik (NM_181391.1,456-474).
gcatggatgaaaataacta

SEQ ID NO: 805525 - DNA, 19 bp, Mus musculus
  siRNA target sequence for 1810049H20Rik (NM_181391.1,457-475).
catggatgaaaataactat

SEQ ID NO: 805526 - DNA, 19 bp, Mus musculus
  siRNA target sequence for D17Wsu155e (NM_181392.1,185-203).
catcattcaggacattgat

SEQ ID NO: 805527 - DNA, 19 bp, Mus musculus
  siRNA target sequence for D17Wsu155e (NM_181392.1,269-287).
ggaccagaatgccttttct

SEQ ID NO: 805528 - DNA, 19 bp, Mus musculus
  siRNA target sequence for 2310015N21Rik (NM_181397.1,331-349).
gcggcctgggaacatttat

SEQ ID NO: 805529 - DNA, 19 bp, Mus musculus
  siRNA target sequence for 2310015N21Rik (NM_181397.1,332-350).
cggcctgggaacatttatt

SEQ ID NO: 805530 - DNA, 19 bp, Mus musculus
  siRNA target sequence for 2310015N21Rik (NM_181397.1,394-412).
ctatgagtactgctttcta

SEQ ID NO: 805531 - DNA, 19 bp, Mus musculus
  siRNA target sequence for 2310015N21Rik (NM_181397.1,744-762).
ccagtcagggcttgaagtt

SEQ ID NO: 805532 - DNA, 19 bp, Mus musculus
  siRNA target sequence for 2310015N21Rik (NM_181397.1,745-763).
cagtcagggcttgaagttt

SEQ ID NO: 805533 - DNA, 19 bp, Mus musculus
  siRNA target sequence for 2310015N21Rik (NM_181397.1,1009-1027).
ctctccctcggcagagaat

SEQ ID NO: 805534 - DNA, 19 bp, Mus musculus
  siRNA target sequence for 2310015N21Rik (NM_181397.1,1242-1260).
ccagctggctggaacacat

SEQ ID NO: 805535 - DNA, 19 bp, Mus musculus
  siRNA target sequence for 2310015N21Rik (NM_181397.1,1338-1356).
gcctgacagatggagtatt

SEQ ID NO: 805536 - DNA, 19 bp, Mus musculus
  siRNA target sequence for 2310015N21Rik (NM_181397.1,1340-1358).
ctgacagatggagtattca

SEQ ID NO: 805537 - DNA, 19 bp, Mus musculus
  siRNA target sequence for 2310015N21Rik (NM_181397.1,1370-1388).
gtttccacagaagataaca

SEQ ID NO: 805538 - DNA, 19 bp, Mus musculus
  siRNA target sequence for 2310015N21Rik (NM_181397.1,1399-1417).
gggctatgacgctattgtt

SEQ ID NO: 805539 - DNA, 19 bp, Mus musculus
  siRNA target sequence for 2310015N21Rik (NM_181397.1,1401-1419).
gctatgacgctattgttgt

SEQ ID NO: 805540 - DNA, 19 bp, Mus musculus
  siRNA target sequence for 2310015N21Rik (NM_181397.1,1409-1427).
gctattgttgtggaacaat

SEQ ID NO: 805541 - DNA, 19 bp, Mus musculus
  siRNA target sequence for 2310015N21Rik (NM_181397.1,1563-1581).
ccaagcagattgtgtttct

SEQ ID NO: 805542 - DNA, 19 bp, Mus musculus
  siRNA target sequence for 2310015N21Rik (NM_181397.1,1660-1678).
cggcaggcagacaaggaaa

SEQ ID NO: 805543 - DNA, 19 bp, Mus musculus
  siRNA target sequence for C030032C09Rik (NM_181398.2,371-389).
gacaatggctggaaagcat

SEQ ID NO: 805544 - DNA, 19 bp, Mus musculus
  siRNA target sequence for C030032C09Rik (NM_181398.2,480-498).
gttggaaattggaatcctt

SEQ ID NO: 805545 - DNA, 19 bp, Mus musculus
  siRNA target sequence for C030032C09Rik (NM_181398.2,484-502).
gaaattggaatccttaact

SEQ ID NO: 805546 - DNA, 19 bp, Mus musculus
  siRNA target sequence for C030032C09Rik (NM_181398.2,506-524).
gccacagacagagaattct

SEQ ID NO: 805547 - DNA, 19 bp, Mus musculus
  siRNA target sequence for C030032C09Rik (NM_181398.2,507-525).
ccacagacagagaattcta

SEQ ID NO: 805548 - DNA, 19 bp, Mus musculus
  siRNA target sequence for C030032C09Rik (NM_181398.2,530-548).
cgatccagctccttccaaa

SEQ ID NO: 805549 - DNA, 19 bp, Mus musculus
  siRNA target sequence for C030032C09Rik (NM_181398.2,593-611).
ccgagtggctggattccat

SEQ ID NO: 805550 - DNA, 19 bp, Mus musculus
  siRNA target sequence for C030032C09Rik (NM_181398.2,594-612).
cgagtggctggattccatt

SEQ ID NO: 805551 - DNA, 19 bp, Mus musculus
  siRNA target sequence for C030032C09Rik (NM_181398.2,659-677).
ccatggacctgttgaaaaa

SEQ ID NO: 805552 - DNA, 19 bp, Mus musculus
  siRNA target sequence for C030032C09Rik (NM_181398.2,683-701).
gggagcttgagcttattaa

SEQ ID NO: 805553 - DNA, 19 bp, Mus musculus
  siRNA target sequence for C030032C09Rik (NM_181398.2,837-855).
caccttgcgacctcctaat

SEQ ID NO: 805554 - DNA, 19 bp, Mus musculus
  siRNA target sequence for C030032C09Rik (NM_181398.2,915-933).
ccagtcatgtgactacaaa

SEQ ID NO: 805555 - DNA, 19 bp, Mus musculus
  siRNA target sequence for C030032C09Rik (NM_181398.2,935-953).
ccttttatttaggttctat

SEQ ID NO: 805556 - DNA, 19 bp, Mus musculus
  siRNA target sequence for C030032C09Rik (NM_181398.2,1062-1080).
cctttccgtctcatataaa

SEQ ID NO: 805557 - DNA, 19 bp, Mus musculus
  siRNA target sequence for C030032C09Rik (NM_181398.2,1095-1113).
cgatgcggcaaataagaat

SEQ ID NO: 805558 - DNA, 19 bp, Mus musculus
  siRNA target sequence for C030032C09Rik (NM_181398.2,1099-1117).
gcggcaaataagaatataa

SEQ ID NO: 805559 - DNA, 19 bp, Mus musculus
  siRNA target sequence for C030032C09Rik (NM_181398.2,1120-1138).
gccgaacatgaaattcgta

SEQ ID NO: 805560 - DNA, 19 bp, Mus musculus
  siRNA target sequence for C030032C09Rik (NM_181398.2,1121-1139).
ccgaacatgaaattcgtaa

SEQ ID NO: 805561 - DNA, 19 bp, Mus musculus
  siRNA target sequence for C030032C09Rik (NM_181398.2,1122-1140).
cgaacatgaaattcgtaat

SEQ ID NO: 805562 - DNA, 19 bp, Mus musculus
  siRNA target sequence for C030032C09Rik (NM_181398.2,1123-1141).
gaacatgaaattcgtaata

SEQ ID NO: 805563 - DNA, 19 bp, Mus musculus
  siRNA target sequence for C030032C09Rik (NM_181398.2,1126-1144).
catgaaattcgtaatatct

SEQ ID NO: 805564 - DNA, 19 bp, Mus musculus
  siRNA target sequence for C030032C09Rik (NM_181398.2,1163-1181).
cagaagacctctcaacatt

SEQ ID NO: 805565 - DNA, 19 bp, Mus musculus
  siRNA target sequence for C030032C09Rik (NM_181398.2,1216-1234).
cactactgtcacgtgttta

SEQ ID NO: 805566 - DNA, 19 bp, Mus musculus
  siRNA target sequence for C030032C09Rik (NM_181398.2,1218-1236).
ctactgtcacgtgtttact

SEQ ID NO: 805567 - DNA, 19 bp, Mus musculus
  siRNA target sequence for C030032C09Rik (NM_181398.2,1340-1358).
ccacactcccagaaagctt

SEQ ID NO: 805568 - DNA, 19 bp, Mus musculus
  siRNA target sequence for C030032C09Rik (NM_181398.2,1385-1403).
caaagccccgagttagcat

SEQ ID NO: 805569 - DNA, 19 bp, Mus musculus
  siRNA target sequence for C030032C09Rik (NM_181398.2,1483-1501).
gccaagaggggcattaata

SEQ ID NO: 805570 - DNA, 19 bp, Mus musculus
  siRNA target sequence for AI316785 (NM_181399.2,143-161).
ggatgtagcactcaaactt

SEQ ID NO: 805571 - DNA, 19 bp, Mus musculus
  siRNA target sequence for AI316785 (NM_181399.2,172-190).
gagctgaaatagttgctaa

SEQ ID NO: 805572 - DNA, 19 bp, Mus musculus
  siRNA target sequence for AI316785 (NM_181399.2,174-192).
gctgaaatagttgctaaat

SEQ ID NO: 805573 - DNA, 19 bp, Mus musculus
  siRNA target sequence for AI316785 (NM_181399.2,175-193).
ctgaaatagttgctaaata

SEQ ID NO: 805574 - DNA, 19 bp, Mus musculus
  siRNA target sequence for AI316785 (NM_181399.2,262-280).
ccgatagatttggcttttt

SEQ ID NO: 805575 - DNA, 19 bp, Mus musculus
  siRNA target sequence for AI316785 (NM_181399.2,287-305).
ggaggagctcccataccat

SEQ ID NO: 805576 - DNA, 19 bp, Mus musculus
  siRNA target sequence for AI316785 (NM_181399.2,288-306).
gaggagctcccataccata

SEQ ID NO: 805577 - DNA, 19 bp, Mus musculus
  siRNA target sequence for AI316785 (NM_181399.2,290-308).
ggagctcccataccataat

SEQ ID NO: 805578 - DNA, 19 bp, Mus musculus
  siRNA target sequence for AI316785 (NM_181399.2,322-340).
ggcaaaagcaactggaaat

SEQ ID NO: 805579 - DNA, 19 bp, Mus musculus
  siRNA target sequence for AI316785 (NM_181399.2,401-419).
gaagtttcatcgacgaatt

SEQ ID NO: 805580 - DNA, 19 bp, Mus musculus
  siRNA target sequence for AI316785 (NM_181399.2,411-429).
cgacgaatttacaaaggaa

SEQ ID NO: 805581 - DNA, 19 bp, Mus musculus
  siRNA target sequence for AI316785 (NM_181399.2,457-475).
gggctcttcttcttgagat

SEQ ID NO: 805582 - DNA, 19 bp, Mus musculus
  siRNA target sequence for AI316785 (NM_181399.2,465-483).
cttcttgagatccctaaaa

SEQ ID NO: 805583 - DNA, 19 bp, Mus musculus
  siRNA target sequence for AI316785 (NM_181399.2,492-510).
gaaacaagagacctttata

SEQ ID NO: 805584 - DNA, 19 bp, Mus musculus
  siRNA target sequence for AI316785 (NM_181399.2,496-514).
caagagacctttatagtaa

SEQ ID NO: 805585 - DNA, 19 bp, Mus musculus
  siRNA target sequence for AI316785 (NM_181399.2,524-542).
cagagcacggggttgttca

SEQ ID NO: 805586 - DNA, 19 bp, Mus musculus
  siRNA target sequence for AI316785 (NM_181399.2,544-562).
ctgatatcagacaaataga

SEQ ID NO: 805587 - DNA, 19 bp, Mus musculus
  siRNA target sequence for AI316785 (NM_181399.2,567-585).
gacgtgaaccgcacattca

SEQ ID NO: 805588 - DNA, 19 bp, Mus musculus
  siRNA target sequence for AI316785 (NM_181399.2,577-595).
gcacattcagggaccatat

SEQ ID NO: 805589 - DNA, 19 bp, Mus musculus
  siRNA target sequence for AI316785 (NM_181399.2,578-596).
cacattcagggaccatatt

SEQ ID NO: 805590 - DNA, 19 bp, Mus musculus
  siRNA target sequence for AI316785 (NM_181399.2,587-605).
ggaccatattatgtttaga

SEQ ID NO: 805591 - DNA, 19 bp, Mus musculus
  siRNA target sequence for AI316785 (NM_181399.2,608-626).
cagatacggtgttaagcaa

SEQ ID NO: 805592 - DNA, 19 bp, Mus musculus
  siRNA target sequence for AI316785 (NM_181399.2,618-636).
gttaagcaacagtccttat

SEQ ID NO: 805593 - DNA, 19 bp, Mus musculus
  siRNA target sequence for AI316785 (NM_181399.2,642-660).
gttctcgctgcttattcta

SEQ ID NO: 805594 - DNA, 19 bp, Mus musculus
  siRNA target sequence for AI316785 (NM_181399.2,645-663).
ctcgctgcttattctatct

SEQ ID NO: 805595 - DNA, 19 bp, Mus musculus
  siRNA target sequence for AI316785 (NM_181399.2,647-665).
cgctgcttattctatctat

SEQ ID NO: 805596 - DNA, 19 bp, Mus musculus
  siRNA target sequence for AI316785 (NM_181399.2,651-669).
gcttattctatctataata

SEQ ID NO: 805597 - DNA, 19 bp, Mus musculus
  siRNA target sequence for AI316785 (NM_181399.2,706-724).
cggccttgctcctcatgta

SEQ ID NO: 805598 - DNA, 19 bp, Mus musculus
  siRNA target sequence for AI316785 (NM_181399.2,782-800).
cgcaatgcacggttttttt

SEQ ID NO: 805599 - DNA, 19 bp, Mus musculus
  siRNA target sequence for AI316785 (NM_181399.2,784-802).
caatgcacggtttttttgt

SEQ ID NO: 805600 - DNA, 19 bp, Mus musculus
  siRNA target sequence for AI316785 (NM_181399.2,814-832).
ctaaactcttgagatttca

SEQ ID NO: 805601 - DNA, 19 bp, Mus musculus
  siRNA target sequence for AI316785 (NM_181399.2,824-842).
gagatttcaagaacatcat

SEQ ID NO: 805602 - DNA, 19 bp, Mus musculus
  siRNA target sequence for AI316785 (NM_181399.2,881-899).
gcacttggattctcaagaa

SEQ ID NO: 805603 - DNA, 19 bp, Mus musculus
  siRNA target sequence for AI316785 (NM_181399.2,897-915).
gaaatctacacaagttttt

SEQ ID NO: 805604 - DNA, 19 bp, Mus musculus
  siRNA target sequence for AI316785 (NM_181399.2,919-937).
caatgaaatggttttttca

SEQ ID NO: 805605 - DNA, 19 bp, Mus musculus
  siRNA target sequence for AI316785 (NM_181399.2,974-992).
caggatatgggacatctat

SEQ ID NO: 805606 - DNA, 19 bp, Mus musculus
  siRNA target sequence for AI316785 (NM_181399.2,1020-1038).
gctatgtcttacacaatct

SEQ ID NO: 805607 - DNA, 19 bp, Mus musculus
  siRNA target sequence for AI316785 (NM_181399.2,1021-1039).
ctatgtcttacacaatctt

SEQ ID NO: 805608 - DNA, 19 bp, Mus musculus
  siRNA target sequence for AI316785 (NM_181399.2,1025-1043).
gtcttacacaatcttgaaa

SEQ ID NO: 805609 - DNA, 19 bp, Mus musculus
  siRNA target sequence for AI316785 (NM_181399.2,1027-1045).
cttacacaatcttgaaact

SEQ ID NO: 805610 - DNA, 19 bp, Mus musculus
  siRNA target sequence for AI316785 (NM_181399.2,1033-1051).
caatcttgaaactacacaa

SEQ ID NO: 805611 - DNA, 19 bp, Mus musculus
  siRNA target sequence for AI316785 (NM_181399.2,1101-1119).
gagactctcgccaaggatt

SEQ ID NO: 805612 - DNA, 19 bp, Mus musculus
  siRNA target sequence for AI316785 (NM_181399.2,1103-1121).
gactctcgccaaggatttt

SEQ ID NO: 805613 - DNA, 19 bp, Mus musculus
  siRNA target sequence for AI316785 (NM_181399.2,1107-1125).
ctcgccaaggattttttct

SEQ ID NO: 805614 - DNA, 19 bp, Mus musculus
  siRNA target sequence for AI316785 (NM_181399.2,1127-1145).
cgaggatgattttgtaata

SEQ ID NO: 805615 - DNA, 19 bp, Mus musculus
  siRNA target sequence for AI316785 (NM_181399.2,1146-1164).
gagcaacttcaagtttcta

SEQ ID NO: 805616 - DNA, 19 bp, Mus musculus
  siRNA target sequence for AI316785 (NM_181399.2,1252-1270).
ctgagtctgcttgtgttaa

SEQ ID NO: 805617 - DNA, 19 bp, Mus musculus
  siRNA target sequence for AI316785 (NM_181399.2,1258-1276).
ctgcttgtgttaatcactt

SEQ ID NO: 805618 - DNA, 19 bp, Mus musculus
  siRNA target sequence for AI316785 (NM_181399.2,1274-1292).
cttgagcaacggacaaaga

SEQ ID NO: 805619 - DNA, 19 bp, Mus musculus
  siRNA target sequence for AI316785 (NM_181399.2,1427-1445).
cgtggatgaggggagtaaa

SEQ ID NO: 805620 - DNA, 19 bp, Mus musculus
  siRNA target sequence for AI316785 (NM_181399.2,1501-1519).
gttccagacactataacca

SEQ ID NO: 805621 - DNA, 19 bp, Mus musculus
  siRNA target sequence for AI316785 (NM_181399.2,1521-1539).
gcagctgctaaccaaaata

SEQ ID NO: 805622 - DNA, 19 bp, Mus musculus
  siRNA target sequence for AI316785 (NM_181399.2,1525-1543).
ctgctaaccaaaatagcaa

SEQ ID NO: 805623 - DNA, 19 bp, Mus musculus
  siRNA target sequence for AI316785 (NM_181399.2,1532-1550).
ccaaaatagcaatgcaatt

SEQ ID NO: 805624 - DNA, 19 bp, Mus musculus
  siRNA target sequence for AI316785 (NM_181399.2,1533-1551).
caaaatagcaatgcaattt

SEQ ID NO: 805625 - DNA, 19 bp, Mus musculus
  siRNA target sequence for AI316785 (NM_181399.2,1601-1619).
ctcagctattgaaagaact

SEQ ID NO: 805626 - DNA, 19 bp, Mus musculus
  siRNA target sequence for AI316785 (NM_181399.2,1630-1648).
ccgtcgaaggcaaaagtca

SEQ ID NO: 805627 - DNA, 19 bp, Mus musculus
  siRNA target sequence for AI316785 (NM_181399.2,1759-1777).
ctaacgcttcccagtatga

SEQ ID NO: 805628 - DNA, 19 bp, Mus musculus
  siRNA target sequence for AI316785 (NM_181399.2,1885-1903).
caaaagtacccaacaagtt

SEQ ID NO: 805629 - DNA, 19 bp, Mus musculus
  siRNA target sequence for AI316785 (NM_181399.2,1890-1908).
gtacccaacaagtttacgt

SEQ ID NO: 805630 - DNA, 19 bp, Mus musculus
  siRNA target sequence for AI316785 (NM_181399.2,1893-1911).
cccaacaagtttacgttta

SEQ ID NO: 805631 - DNA, 19 bp, Mus musculus
  siRNA target sequence for AI316785 (NM_181399.2,1894-1912).
ccaacaagtttacgtttaa

SEQ ID NO: 805632 - DNA, 19 bp, Mus musculus
  siRNA target sequence for AI316785 (NM_181399.2,1895-1913).
caacaagtttacgtttaaa

SEQ ID NO: 805633 - DNA, 19 bp, Mus musculus
  siRNA target sequence for AI316785 (NM_181399.2,1999-2017).
cccctgtctaccatggaaa

SEQ ID NO: 805634 - DNA, 19 bp, Mus musculus
  siRNA target sequence for AI316785 (NM_181399.2,2038-2056).
ctgctcacagtggttttgt

SEQ ID NO: 805635 - DNA, 19 bp, Mus musculus
  siRNA target sequence for AI316785 (NM_181399.2,2040-2058).
gctcacagtggttttgtgt

SEQ ID NO: 805636 - DNA, 19 bp, Mus musculus
  siRNA target sequence for AI316785 (NM_181399.2,2071-2089).
gccccaggcctcaaattaa

SEQ ID NO: 805637 - DNA, 19 bp, Mus musculus
  siRNA target sequence for AI316785 (NM_181399.2,2103-2121).
ccttacggttcctctcttt

SEQ ID NO: 805638 - DNA, 19 bp, Mus musculus
  siRNA target sequence for AI316785 (NM_181399.2,2108-2126).
cggttcctctctttcagtt

SEQ ID NO: 805639 - DNA, 19 bp, Mus musculus
  siRNA target sequence for 1810073M12Rik (NM_181400.2,295-313).
gaaggaaagtggagtcata

SEQ ID NO: 805640 - DNA, 19 bp, Mus musculus
  siRNA target sequence for 1810073M12Rik (NM_181400.2,298-316).
ggaaagtggagtcataaat

SEQ ID NO: 805641 - DNA, 19 bp, Mus musculus
  siRNA target sequence for 1810073M12Rik (NM_181400.2,388-406).
gttcattcagcctctagaa

SEQ ID NO: 805642 - DNA, 19 bp, Mus musculus
  siRNA target sequence for 1810073M12Rik (NM_181400.2,391-409).
cattcagcctctagaatgt

SEQ ID NO: 805643 - DNA, 19 bp, Mus musculus
  siRNA target sequence for 1810073M12Rik (NM_181400.2,432-450).
ggtttcgttatattatcct

SEQ ID NO: 805644 - DNA, 19 bp, Mus musculus
  siRNA target sequence for 1810073M12Rik (NM_181400.2,460-478).
gtttctagaagctttgtgt

SEQ ID NO: 805645 - DNA, 19 bp, Mus musculus
  siRNA target sequence for 1810073M12Rik (NM_181400.2,508-526).
gccccagcatttggaattt

SEQ ID NO: 805646 - DNA, 19 bp, Mus musculus
  siRNA target sequence for 1810073M12Rik (NM_181400.2,509-527).
ccccagcatttggaattta

SEQ ID NO: 805647 - DNA, 19 bp, Mus musculus
  siRNA target sequence for 1810073M12Rik (NM_181400.2,573-591).
gcccttctaaagacgatta

SEQ ID NO: 805648 - DNA, 19 bp, Mus musculus
  siRNA target sequence for 1810073M12Rik (NM_181400.2,628-646).
gaccaatcacgctgagttt

SEQ ID NO: 805649 - DNA, 19 bp, Mus musculus
  siRNA target sequence for 1810073M12Rik (NM_181400.2,630-648).
ccaatcacgctgagtttaa

SEQ ID NO: 805650 - DNA, 19 bp, Mus musculus
  siRNA target sequence for 1810073M12Rik (NM_181400.2,672-690).
gagttcactgctttgaaga

SEQ ID NO: 805651 - DNA, 19 bp, Mus musculus
  siRNA target sequence for 1810073M12Rik (NM_181400.2,723-741).
ctgacaggaagctaagtga

SEQ ID NO: 805652 - DNA, 19 bp, Mus musculus
  siRNA target sequence for 1810073M12Rik (NM_181400.2,740-758).
gaggctggttttaaagcaa

SEQ ID NO: 805653 - DNA, 19 bp, Mus musculus
  siRNA target sequence for 1810073M12Rik (NM_181400.2,744-762).
ctggttttaaagcaagtaa

SEQ ID NO: 805654 - DNA, 19 bp, Mus musculus
  siRNA target sequence for 1810073M12Rik (NM_181400.2,759-777).
gtaacaatcgcttattcca

SEQ ID NO: 805655 - DNA, 19 bp, Mus musculus
  siRNA target sequence for 1810073M12Rik (NM_181400.2,787-805).
gaagggcctactttatgaa

SEQ ID NO: 805656 - DNA, 19 bp, Mus musculus
  siRNA target sequence for 1810073M12Rik (NM_181400.2,807-825).
gctgcgtagaattttgtca

SEQ ID NO: 805657 - DNA, 19 bp, Mus musculus
  siRNA target sequence for 1810073M12Rik (NM_181400.2,869-887).
cttggcatcgacctgttat

SEQ ID NO: 805658 - DNA, 19 bp, Mus musculus
  siRNA target sequence for 1810073M12Rik (NM_181400.2,895-913).
cggttgtgacgatttagat

SEQ ID NO: 805659 - DNA, 19 bp, Mus musculus
  siRNA target sequence for 1810073M12Rik (NM_181400.2,902-920).
gacgatttagatctaagtt

SEQ ID NO: 805660 - DNA, 19 bp, Mus musculus
  siRNA target sequence for 1810073M12Rik (NM_181400.2,904-922).
cgatttagatctaagttta

SEQ ID NO: 805661 - DNA, 19 bp, Mus musculus
  siRNA target sequence for 1810073M12Rik (NM_181400.2,911-929).
gatctaagtttattgtctt

SEQ ID NO: 805662 - DNA, 19 bp, Mus musculus
  siRNA target sequence for 1810073M12Rik (NM_181400.2,1023-1041).
ctgcatatgctgatctgtt

SEQ ID NO: 805663 - DNA, 19 bp, Mus musculus
  siRNA target sequence for 1810073M12Rik (NM_181400.2,1046-1064).
cctcttatcagcaaactgt

SEQ ID NO: 805664 - DNA, 19 bp, Mus musculus
  siRNA target sequence for 1810073M12Rik (NM_181400.2,1148-1166).
ctcacatgtgggttaacca

SEQ ID NO: 805665 - DNA, 19 bp, Mus musculus
  siRNA target sequence for 1810073M12Rik (NM_181400.2,1157-1175).
gggttaaccagtcatgata

SEQ ID NO: 805666 - DNA, 19 bp, Mus musculus
  siRNA target sequence for 1810073M12Rik (NM_181400.2,1158-1176).
ggttaaccagtcatgataa

SEQ ID NO: 805667 - DNA, 19 bp, Mus musculus
  siRNA target sequence for 1810073M12Rik (NM_181400.2,1414-1432).
gaacccagttccagctaaa

SEQ ID NO: 805668 - DNA, 19 bp, Mus musculus
  siRNA target sequence for 1810073M12Rik (NM_181400.2,1451-1469).
cgagattccactgaacaat

SEQ ID NO: 805669 - DNA, 19 bp, Mus musculus
  siRNA target sequence for 1810073M12Rik (NM_181400.2,1589-1607).
gatcagcagcagaatctta

SEQ ID NO: 805670 - DNA, 19 bp, Mus musculus
  siRNA target sequence for 1810073M12Rik (NM_181400.2,1597-1615).
gcagaatcttactgaacaa

SEQ ID NO: 805671 - DNA, 19 bp, Mus musculus
  siRNA target sequence for 1810073M12Rik (NM_181400.2,1604-1622).
cttactgaacaattcctta

SEQ ID NO: 805672 - DNA, 19 bp, Mus musculus
  siRNA target sequence for 1810073M12Rik (NM_181400.2,1619-1637).
cttaataggtctattcaga

SEQ ID NO: 805673 - DNA, 19 bp, Mus musculus
  siRNA target sequence for 1810073M12Rik (NM_181400.2,1636-1654).
gaagcttggcgaattaaat

SEQ ID NO: 805674 - DNA, 19 bp, Mus musculus
  siRNA target sequence for 1810073M12Rik (NM_181400.2,1639-1657).
gcttggcgaattaaatatt

SEQ ID NO: 805675 - DNA, 19 bp, Mus musculus
  siRNA target sequence for 1810073M12Rik (NM_181400.2,1769-1787).
gattccagtcagaggttaa

SEQ ID NO: 805676 - DNA, 19 bp, Mus musculus
  siRNA target sequence for 1810073M12Rik (NM_181400.2,1776-1794).
gtcagaggttaatacatga

SEQ ID NO: 805677 - DNA, 19 bp, Mus musculus
  siRNA target sequence for 1810073M12Rik (NM_181400.2,1778-1796).
cagaggttaatacatgata

SEQ ID NO: 805678 - DNA, 19 bp, Mus musculus
  siRNA target sequence for 1810073M12Rik (NM_181400.2,1810-1828).
cacaagcactcctcgtaat

SEQ ID NO: 805679 - DNA, 19 bp, Mus musculus
  siRNA target sequence for 1810073M12Rik (NM_181400.2,1830-1848).
ctggatcaacgaatcacat

SEQ ID NO: 805680 - DNA, 19 bp, Mus musculus
  siRNA target sequence for 1810073M12Rik (NM_181400.2,1839-1857).
cgaatcacatcccttttca

SEQ ID NO: 805681 - DNA, 19 bp, Mus musculus
  siRNA target sequence for 1810073M12Rik (NM_181400.2,1882-1900).
gaactcatcagaacattct

SEQ ID NO: 805682 - DNA, 19 bp, Mus musculus
  siRNA target sequence for 1810073M12Rik (NM_181400.2,1989-2007).
gtattaataccctagaaga

SEQ ID NO: 805683 - DNA, 19 bp, Mus musculus
  siRNA target sequence for 1810073M12Rik (NM_181400.2,2036-2054).
catccaagtggtagtttat

SEQ ID NO: 805684 - DNA, 19 bp, Mus musculus
  siRNA target sequence for 1810073M12Rik (NM_181400.2,2057-2075).
gctgttggttcaaattcaa

SEQ ID NO: 805685 - DNA, 19 bp, Mus musculus
  siRNA target sequence for 1810073M12Rik (NM_181400.2,2064-2082).
gttcaaattcaaaaactct

SEQ ID NO: 805686 - DNA, 19 bp, Mus musculus
  siRNA target sequence for 1810073M12Rik (NM_181400.2,2118-2136).
gtgcacacgacaatcctaa

SEQ ID NO: 805687 - DNA, 19 bp, Mus musculus
  siRNA target sequence for 1810073M12Rik (NM_181400.2,2138-2156).
cagccagtggtgcgattta

SEQ ID NO: 805688 - DNA, 19 bp, Mus musculus
  siRNA target sequence for 1810073M12Rik (NM_181400.2,2140-2158).
gccagtggtgcgatttaaa

SEQ ID NO: 805689 - DNA, 19 bp, Mus musculus
  siRNA target sequence for 1810073M12Rik (NM_181400.2,2141-2159).
ccagtggtgcgatttaaaa

SEQ ID NO: 805690 - DNA, 19 bp, Mus musculus
  siRNA target sequence for 1810073M12Rik (NM_181400.2,2144-2162).
gtggtgcgatttaaaagaa

SEQ ID NO: 805691 - DNA, 19 bp, Mus musculus
  siRNA target sequence for 1810073M12Rik (NM_181400.2,2202-2220).
gtccgtgtggacagttgtt

SEQ ID NO: 805692 - DNA, 19 bp, Mus musculus
  siRNA target sequence for 1810073M12Rik (NM_181400.2,2291-2309).
ccagatctggaatttagca

SEQ ID NO: 805693 - DNA, 19 bp, Mus musculus
  siRNA target sequence for 1810073M12Rik (NM_181400.2,2292-2310).
cagatctggaatttagcat

SEQ ID NO: 805694 - DNA, 19 bp, Mus musculus
  siRNA target sequence for 1810073M12Rik (NM_181400.2,2311-2329).
gcatgatgggacaattcga

SEQ ID NO: 805695 - DNA, 19 bp, Mus musculus
  siRNA target sequence for 1810073M12Rik (NM_181400.2,2354-2372).
gaaagtggtggagctattt

SEQ ID NO: 805696 - DNA, 19 bp, Mus musculus
  siRNA target sequence for 1810073M12Rik (NM_181400.2,2360-2378).
ggtggagctattttaataa

SEQ ID NO: 805697 - DNA, 19 bp, Mus musculus
  siRNA target sequence for 1810073M12Rik (NM_181400.2,2384-2402).
ggagcaggagattgtaaca

SEQ ID NO: 805698 - DNA, 19 bp, Mus musculus
  siRNA target sequence for 1810073M12Rik (NM_181400.2,2385-2403).
gagcaggagattgtaacat

SEQ ID NO: 805699 - DNA, 19 bp, Mus musculus
  siRNA target sequence for 1810073M12Rik (NM_181400.2,2387-2405).
gcaggagattgtaacattt

SEQ ID NO: 805700 - DNA, 19 bp, Mus musculus
  siRNA target sequence for 1810073M12Rik (NM_181400.2,2388-2406).
caggagattgtaacattta

SEQ ID NO: 805701 - DNA, 19 bp, Mus musculus
  siRNA target sequence for 1810073M12Rik (NM_181400.2,2390-2408).
ggagattgtaacatttata

SEQ ID NO: 805702 - DNA, 19 bp, Mus musculus
  siRNA target sequence for 1810073M12Rik (NM_181400.2,2393-2411).
gattgtaacatttatacaa

SEQ ID NO: 805703 - DNA, 19 bp, Mus musculus
  siRNA target sequence for 1810073M12Rik (NM_181400.2,2431-2449).
gggtcttcatgctttgagt

SEQ ID NO: 805704 - DNA, 19 bp, Mus musculus
  siRNA target sequence for 1810073M12Rik (NM_181400.2,2460-2478).
ggcacattttagcacttta

SEQ ID NO: 805705 - DNA, 19 bp, Mus musculus
  siRNA target sequence for 1810073M12Rik (NM_181400.2,2502-2520).
cgtctggttcccaggataa

SEQ ID NO: 805706 - DNA, 19 bp, Mus musculus
  siRNA target sequence for 1810073M12Rik (NM_181400.2,2512-2530).
ccaggataagactgttaga

SEQ ID NO: 805707 - DNA, 19 bp, Mus musculus
  siRNA target sequence for 1810073M12Rik (NM_181400.2,2513-2531).
caggataagactgttagat

SEQ ID NO: 805708 - DNA, 19 bp, Mus musculus
  siRNA target sequence for 1810073M12Rik (NM_181400.2,2561-2579).
cgtgtggttggcacaacat

SEQ ID NO: 805709 - DNA, 19 bp, Mus musculus
  siRNA target sequence for 1810073M12Rik (NM_181400.2,2562-2580).
gtgtggttggcacaacatt

SEQ ID NO: 805710 - DNA, 19 bp, Mus musculus
  siRNA target sequence for 1810073M12Rik (NM_181400.2,2620-2638).
ccccagtggccgtctctta

SEQ ID NO: 805711 - DNA, 19 bp, Mus musculus
  siRNA target sequence for 1810073M12Rik (NM_181400.2,2764-2782).
gctgacaggctcttacgat

SEQ ID NO: 805712 - DNA, 19 bp, Mus musculus
  siRNA target sequence for 1810073M12Rik (NM_181400.2,2765-2783).
ctgacaggctcttacgata

SEQ ID NO: 805713 - DNA, 19 bp, Mus musculus
  siRNA target sequence for 1810073M12Rik (NM_181400.2,2771-2789).
ggctcttacgatatgaaaa

SEQ ID NO: 805714 - DNA, 19 bp, Mus musculus
  siRNA target sequence for 1810073M12Rik (NM_181400.2,2772-2790).
gctcttacgatatgaaaat

SEQ ID NO: 805715 - DNA, 19 bp, Mus musculus
  siRNA target sequence for 5330431N24Rik (NM_181402.2,243-261).
gagttctttcccaagaaga

SEQ ID NO: 805716 - DNA, 19 bp, Mus musculus
  siRNA target sequence for 5330431N24Rik (NM_181402.2,351-369).
ccggataccaacattcaat

SEQ ID NO: 805717 - DNA, 19 bp, Mus musculus
  siRNA target sequence for 5330431N24Rik (NM_181402.2,353-371).
ggataccaacattcaatgt

SEQ ID NO: 805718 - DNA, 19 bp, Mus musculus
  siRNA target sequence for 5330431N24Rik (NM_181402.2,354-372).
gataccaacattcaatgtt

SEQ ID NO: 805719 - DNA, 19 bp, Mus musculus
  siRNA target sequence for 5330431N24Rik (NM_181402.2,379-397).
gcagtgaagatatcgaaaa

SEQ ID NO: 805720 - DNA, 19 bp, Mus musculus
  siRNA target sequence for 5330431N24Rik (NM_181402.2,393-411).
gaaaaaagcttcaaaacaa

SEQ ID NO: 805721 - DNA, 19 bp, Mus musculus
  siRNA target sequence for 5330431N24Rik (NM_181402.2,442-460).
ccaaattcagctacaagat

SEQ ID NO: 805722 - DNA, 19 bp, Mus musculus
  siRNA target sequence for 5330431N24Rik (NM_181402.2,498-516).
gggaaacagcgcctaataa

SEQ ID NO: 805723 - DNA, 19 bp, Mus musculus
  siRNA target sequence for 5330431N24Rik (NM_181402.2,499-517).
ggaaacagcgcctaataaa

SEQ ID NO: 805724 - DNA, 19 bp, Mus musculus
  siRNA target sequence for 5330431N24Rik (NM_181402.2,638-656).
ccagacgcacgagtataat

SEQ ID NO: 805725 - DNA, 19 bp, Mus musculus
  siRNA target sequence for 5330431N24Rik (NM_181402.2,641-659).
gacgcacgagtataatgaa

SEQ ID NO: 805726 - DNA, 19 bp, Mus musculus
  siRNA target sequence for 5330431N24Rik (NM_181402.2,643-661).
cgcacgagtataatgaagt

SEQ ID NO: 805727 - DNA, 19 bp, Mus musculus
  siRNA target sequence for 5330431N24Rik (NM_181402.2,686-704).
ggatcggaaccgaattaaa

SEQ ID NO: 805728 - DNA, 19 bp, Mus musculus
  siRNA target sequence for 5330431N24Rik (NM_181402.2,687-705).
gatcggaaccgaattaaaa

SEQ ID NO: 805729 - DNA, 19 bp, Mus musculus
  siRNA target sequence for 5330431N24Rik (NM_181402.2,691-709).
ggaaccgaattaaaaggat

SEQ ID NO: 805730 - DNA, 19 bp, Mus musculus
  siRNA target sequence for 5330431N24Rik (NM_181402.2,695-713).
ccgaattaaaaggattcaa

SEQ ID NO: 805731 - DNA, 19 bp, Mus musculus
  siRNA target sequence for 5330431N24Rik (NM_181402.2,696-714).
cgaattaaaaggattcaaa

SEQ ID NO: 805732 - DNA, 19 bp, Mus musculus
  siRNA target sequence for 5330431N24Rik (NM_181402.2,759-777).
gctcagctcaagaaaaaga

SEQ ID NO: 805733 - DNA, 19 bp, Mus musculus
  siRNA target sequence for 5330431N24Rik (NM_181402.2,778-796).
gaggtgtcccccagatcaa

SEQ ID NO: 805734 - DNA, 19 bp, Mus musculus
  siRNA target sequence for 5330431N24Rik (NM_181402.2,826-844).
gtgaatttgtggaagcaat

SEQ ID NO: 805735 - DNA, 19 bp, Mus musculus
  siRNA target sequence for 5330431N24Rik (NM_181402.2,884-902).
cggggctgtctttggaaaa

SEQ ID NO: 805736 - DNA, 19 bp, Mus musculus
  siRNA target sequence for 5330431N24Rik (NM_181402.2,937-955).
gtcgtttctgcaaagatga

SEQ ID NO: 805737 - DNA, 19 bp, Mus musculus
  siRNA target sequence for 5330431N24Rik (NM_181402.2,968-986).
gaacacattccagattcat

SEQ ID NO: 805738 - DNA, 19 bp, Mus musculus
  siRNA target sequence for 5330431N24Rik (NM_181402.2,1021-1039).
cctataaatccatgtttct

SEQ ID NO: 805739 - DNA, 19 bp, Mus musculus
  siRNA target sequence for 5330431N24Rik (NM_181402.2,1022-1040).
ctataaatccatgtttctt

SEQ ID NO: 805740 - DNA, 19 bp, Mus musculus
  siRNA target sequence for 5330431N24Rik (NM_181402.2,1045-1063).
gagtgctaattggtgatta

SEQ ID NO: 805741 - DNA, 19 bp, Mus musculus
  siRNA target sequence for 5330431N24Rik (NM_181402.2,1047-1065).
gtgctaattggtgattaca

SEQ ID NO: 805742 - DNA, 19 bp, Mus musculus
  siRNA target sequence for 5330431N24Rik (NM_181402.2,1049-1067).
gctaattggtgattacata

SEQ ID NO: 805743 - DNA, 19 bp, Mus musculus
  siRNA target sequence for 5330431N24Rik (NM_181402.2,1071-1089).
ggagactcgaaatacatga

SEQ ID NO: 805744 - DNA, 19 bp, Mus musculus
  siRNA target sequence for 5330431N24Rik (NM_181402.2,1104-1122).
gacgggagctatgtgaatt

SEQ ID NO: 805745 - DNA, 19 bp, Mus musculus
  siRNA target sequence for 5330431N24Rik (NM_181402.2,1107-1125).
gggagctatgtgaatttgt

SEQ ID NO: 805746 - DNA, 19 bp, Mus musculus
  siRNA target sequence for 5330431N24Rik (NM_181402.2,1109-1127).
gagctatgtgaatttgtat

SEQ ID NO: 805747 - DNA, 19 bp, Mus musculus
  siRNA target sequence for 5730409F24Rik (NM_181403.2,427-445).
gccaagctggagaaatttt

SEQ ID NO: 805748 - DNA, 19 bp, Mus musculus
  siRNA target sequence for 5730409F24Rik (NM_181403.2,484-502).
cagatcgaaggcatgaaga

SEQ ID NO: 805749 - DNA, 19 bp, Mus musculus
  siRNA target sequence for 5730409F24Rik (NM_181403.2,544-562).
ggtgaggtgccgttggaaa

SEQ ID NO: 805750 - DNA, 19 bp, Mus musculus
  siRNA target sequence for 5730409F24Rik (NM_181403.2,554-572).
cgttggaaacgttcttaga

SEQ ID NO: 805751 - DNA, 19 bp, Mus musculus
  siRNA target sequence for 5730409F24Rik (NM_181403.2,608-626).
gtcgagtccgcgtagagaa

SEQ ID NO: 805752 - DNA, 19 bp, Mus musculus
  siRNA target sequence for 5730409F24Rik (NM_181403.2,967-985).
ccccagcctggctatccta

SEQ ID NO: 805753 - DNA, 19 bp, Mus musculus
  siRNA target sequence for 5730409F24Rik (NM_181403.2,982-1000).
cctacggctccaactagta

SEQ ID NO: 805754 - DNA, 19 bp, Mus musculus
  siRNA target sequence for 5730409F24Rik (NM_181403.2,1071-1089).
cctcccgtcaggaaacaaa

SEQ ID NO: 805755 - DNA, 19 bp, Mus musculus
  siRNA target sequence for 5730409F24Rik (NM_181403.2,1209-1227).
gcctgcctggcctaggtat

SEQ ID NO: 805756 - DNA, 19 bp, Mus musculus
  siRNA target sequence for 5730409F24Rik (NM_181403.2,1210-1228).
cctgcctggcctaggtatt

SEQ ID NO: 805757 - DNA, 19 bp, Mus musculus
  siRNA target sequence for D330024H06Rik (NM_181404.3,487-505).
gtcgggtgtgggacagata

SEQ ID NO: 805758 - DNA, 19 bp, Mus musculus
  siRNA target sequence for D330024H06Rik (NM_181404.3,489-507).
cgggtgtgggacagataaa

SEQ ID NO: 805759 - DNA, 19 bp, Mus musculus
  siRNA target sequence for D330024H06Rik (NM_181404.3,490-508).
gggtgtgggacagataaat

SEQ ID NO: 805760 - DNA, 19 bp, Mus musculus
  siRNA target sequence for D330024H06Rik (NM_181404.3,491-509).
ggtgtgggacagataaata

SEQ ID NO: 805761 - DNA, 19 bp, Mus musculus
  siRNA target sequence for D330024H06Rik (NM_181404.3,520-538).
ctatctagttggtctcaaa

SEQ ID NO: 805762 - DNA, 19 bp, Mus musculus
  siRNA target sequence for D330024H06Rik (NM_181404.3,678-696).
ctggcttggatcactacat

SEQ ID NO: 805763 - DNA, 19 bp, Mus musculus
  siRNA target sequence for D330024H06Rik (NM_181404.3,732-750).
cgttgctggctgagaacta

SEQ ID NO: 805764 - DNA, 19 bp, Mus musculus
  siRNA target sequence for D330024H06Rik (NM_181404.3,820-838).
caccctgtcgtccatcaat

SEQ ID NO: 805765 - DNA, 19 bp, Mus musculus
  siRNA target sequence for D330024H06Rik (NM_181404.3,831-849).
ccatcaattccgtcatgaa

SEQ ID NO: 805766 - DNA, 19 bp, Mus musculus
  siRNA target sequence for D330024H06Rik (NM_181404.3,893-911).
gccagtctgggtaaaacta

SEQ ID NO: 805767 - DNA, 19 bp, Mus musculus
  siRNA target sequence for D330024H06Rik (NM_181404.3,901-919).
gggtaaaactacaggaaat

SEQ ID NO: 805768 - DNA, 19 bp, Mus musculus
  siRNA target sequence for D330024H06Rik (NM_181404.3,953-971).
cggtcaggaggactgttaa

SEQ ID NO: 805769 - DNA, 19 bp, Mus musculus
  siRNA target sequence for D330024H06Rik (NM_181404.3,954-972).
ggtcaggaggactgttaaa

SEQ ID NO: 805770 - DNA, 19 bp, Mus musculus
  siRNA target sequence for D330024H06Rik (NM_181404.3,1097-1115).
gccactggcctctacgtat

SEQ ID NO: 805771 - DNA, 19 bp, Mus musculus
  siRNA target sequence for D330024H06Rik (NM_181404.3,1105-1123).
cctctacgtatgtccaaat

SEQ ID NO: 805772 - DNA, 19 bp, Mus musculus
  siRNA target sequence for D330024H06Rik (NM_181404.3,1106-1124).
ctctacgtatgtccaaata

SEQ ID NO: 805773 - DNA, 19 bp, Mus musculus
  siRNA target sequence for D330024H06Rik (NM_181404.3,1108-1126).
ctacgtatgtccaaataat

SEQ ID NO: 805774 - DNA, 19 bp, Mus musculus
  siRNA target sequence for D330024H06Rik (NM_181404.3,1111-1129).
cgtatgtccaaataatgaa

SEQ ID NO: 805775 - DNA, 19 bp, Mus musculus
  siRNA target sequence for D330024H06Rik (NM_181404.3,1153-1171).
gaaaagtgatgggaataaa

SEQ ID NO: 805776 - DNA, 19 bp, Mus musculus
  siRNA target sequence for D330024H06Rik (NM_181404.3,1160-1178).
gatgggaataaagattcaa

SEQ ID NO: 805777 - DNA, 19 bp, Mus musculus
  siRNA target sequence for D330024H06Rik (NM_181404.3,1219-1237).
cgggtatgaactaagtgaa

SEQ ID NO: 805778 - DNA, 19 bp, Mus musculus
  siRNA target sequence for D330024H06Rik (NM_181404.3,1220-1238).
gggtatgaactaagtgaaa

SEQ ID NO: 805779 - DNA, 19 bp, Mus musculus
  siRNA target sequence for D330024H06Rik (NM_181404.3,1221-1239).
ggtatgaactaagtgaaaa

SEQ ID NO: 805780 - DNA, 19 bp, Mus musculus
  siRNA target sequence for D330024H06Rik (NM_181404.3,1229-1247).
ctaagtgaaaagatgttgt

SEQ ID NO: 805781 - DNA, 19 bp, Mus musculus
  siRNA target sequence for D330024H06Rik (NM_181404.3,1248-1266).
cagcctgcaacttactgaa

SEQ ID NO: 805782 - DNA, 19 bp, Mus musculus
  siRNA target sequence for D330024H06Rik (NM_181404.3,1250-1268).
gcctgcaacttactgaaat

SEQ ID NO: 805783 - DNA, 19 bp, Mus musculus
  siRNA target sequence for D330024H06Rik (NM_181404.3,1251-1269).
cctgcaacttactgaaata

SEQ ID NO: 805784 - DNA, 19 bp, Mus musculus
  siRNA target sequence for D330024H06Rik (NM_181404.3,1289-1307).
gctttggccagcaaagata

SEQ ID NO: 805785 - DNA, 19 bp, Mus musculus
  siRNA target sequence for D330024H06Rik (NM_181404.3,1290-1308).
ctttggccagcaaagatat

SEQ ID NO: 805786 - DNA, 19 bp, Mus musculus
  siRNA target sequence for D330024H06Rik (NM_181404.3,1326-1344).
ccctccagcacgattggtt

SEQ ID NO: 805787 - DNA, 19 bp, Mus musculus
  siRNA target sequence for D330024H06Rik (NM_181404.3,1377-1395).
ccatggtgggcgactacat

SEQ ID NO: 805788 - DNA, 19 bp, Mus musculus
  siRNA target sequence for D330024H06Rik (NM_181404.3,1424-1442).
gtgctccggtacatcatca

SEQ ID NO: 805789 - DNA, 19 bp, Mus musculus
  siRNA target sequence for D330024H06Rik (NM_181404.3,1427-1445).
ctccggtacatcatcaaca

SEQ ID NO: 805790 - DNA, 19 bp, Mus musculus
  siRNA target sequence for D330024H06Rik (NM_181404.3,1808-1826).
gggcatgtggagattgtga

SEQ ID NO: 805791 - DNA, 19 bp, Mus musculus
  siRNA target sequence for D330024H06Rik (NM_181404.3,1857-1875).
gccacctggaagacaatga

SEQ ID NO: 805792 - DNA, 19 bp, Mus musculus
  siRNA target sequence for D330024H06Rik (NM_181404.3,1979-1997).
ccgaggcttggcagaaaga

SEQ ID NO: 805793 - DNA, 19 bp, Mus musculus
  siRNA target sequence for D330024H06Rik (NM_181404.3,2010-2028).
ccactcaccgaggttcttt

SEQ ID NO: 805794 - DNA, 19 bp, Mus musculus
  siRNA target sequence for D330024H06Rik (NM_181404.3,2011-2029).
cactcaccgaggttctttt

SEQ ID NO: 805795 - DNA, 19 bp, Mus musculus
  siRNA target sequence for 9130023F12Rik (NM_181411.2,215-233).
gagccagacatcattcgaa

SEQ ID NO: 805796 - DNA, 19 bp, Mus musculus
  siRNA target sequence for 9130023F12Rik (NM_181411.2,389-407).
gtaccttcaaaccacttta

SEQ ID NO: 805797 - DNA, 19 bp, Mus musculus
  siRNA target sequence for 9130023F12Rik (NM_181411.2,400-418).
ccactttatgccaattcat

SEQ ID NO: 805798 - DNA, 19 bp, Mus musculus
  siRNA target sequence for 9130023F12Rik (NM_181411.2,409-427).
gccaattcatgaatattca

SEQ ID NO: 805799 - DNA, 19 bp, Mus musculus
  siRNA target sequence for 9130023F12Rik (NM_181411.2,437-455).
gatagccttacaagcttta

SEQ ID NO: 805800 - DNA, 19 bp, Mus musculus
  siRNA target sequence for 9130023F12Rik (NM_181411.2,457-475).
gtctgttcagaatggtaat

SEQ ID NO: 805801 - DNA, 19 bp, Mus musculus
  siRNA target sequence for 9130023F12Rik (NM_181411.2,459-477).
ctgttcagaatggtaatga

SEQ ID NO: 805802 - DNA, 19 bp, Mus musculus
  siRNA target sequence for 9130023F12Rik (NM_181411.2,466-484).
gaatggtaatgataaggat

SEQ ID NO: 805803 - DNA, 19 bp, Mus musculus
  siRNA target sequence for 9130023F12Rik (NM_181411.2,470-488).
ggtaatgataaggatatca

SEQ ID NO: 805804 - DNA, 19 bp, Mus musculus
  siRNA target sequence for 9130023F12Rik (NM_181411.2,516-534).
gtcaatctgatgttgtact

SEQ ID NO: 805805 - DNA, 19 bp, Mus musculus
  siRNA target sequence for 9130023F12Rik (NM_181411.2,518-536).
caatctgatgttgtacttt

SEQ ID NO: 805806 - DNA, 19 bp, Mus musculus
  siRNA target sequence for 9130023F12Rik (NM_181411.2,537-555).
ctaccaccagcaaagaaat

SEQ ID NO: 805807 - DNA, 19 bp, Mus musculus
  siRNA target sequence for 9130023F12Rik (NM_181411.2,644-662).
gggcaactcagaagtttct

SEQ ID NO: 805808 - DNA, 19 bp, Mus musculus
  siRNA target sequence for 9130023F12Rik (NM_181411.2,671-689).
gattttagaactgataaga

SEQ ID NO: 805809 - DNA, 19 bp, Mus musculus
  siRNA target sequence for 9130023F12Rik (NM_181411.2,812-830).
gacaatgtggcagattcaa

SEQ ID NO: 805810 - DNA, 19 bp, Mus musculus
  siRNA target sequence for 9130023F12Rik (NM_181411.2,855-873).
gtggcaccgagtgcatttt

SEQ ID NO: 805811 - DNA, 19 bp, Mus musculus
  siRNA target sequence for 9130023F12Rik (NM_181411.2,894-912).
ctacggaatttgcagattt

SEQ ID NO: 805812 - DNA, 19 bp, Mus musculus
  siRNA target sequence for 9130023F12Rik (NM_181411.2,1013-1031).
cccagagtcaaggaactaa

SEQ ID NO: 805813 - DNA, 19 bp, Mus musculus
  siRNA target sequence for 9130023F12Rik (NM_181411.2,1014-1032).
ccagagtcaaggaactaaa

SEQ ID NO: 805814 - DNA, 19 bp, Mus musculus
  siRNA target sequence for 9130023F12Rik (NM_181411.2,1024-1042).
ggaactaaactgtgtgaaa

SEQ ID NO: 805815 - DNA, 19 bp, Mus musculus
  siRNA target sequence for 9130023F12Rik (NM_181411.2,1070-1088).
gatacggggaacactgaaa

SEQ ID NO: 805816 - DNA, 19 bp, Mus musculus
  siRNA target sequence for 9130023F12Rik (NM_181411.2,1097-1115).
caggtctgcgtctcagaaa

SEQ ID NO: 805817 - DNA, 19 bp, Mus musculus
  siRNA target sequence for 9130023F12Rik (NM_181411.2,1167-1185).
cactgcaacaggatgagtt

SEQ ID NO: 805818 - DNA, 19 bp, Mus musculus
  siRNA target sequence for 9130023F12Rik (NM_181411.2,1228-1246).
ctcaagtgaaaattcagaa

SEQ ID NO: 805819 - DNA, 19 bp, Mus musculus
  siRNA target sequence for 9130023F12Rik (NM_181411.2,1254-1272).
caaaggagcggtgtaaaat

SEQ ID NO: 805820 - DNA, 19 bp, Mus musculus
  siRNA target sequence for 9130023F12Rik (NM_181411.2,1332-1350).
cttcagacgttaatgaaat

SEQ ID NO: 805821 - DNA, 19 bp, Mus musculus
  siRNA target sequence for 9130023F12Rik (NM_181411.2,1409-1427).
cccacaggacaaaatgctt

SEQ ID NO: 805822 - DNA, 19 bp, Mus musculus
  siRNA target sequence for 9130023F12Rik (NM_181411.2,1410-1428).
ccacaggacaaaatgcttt

SEQ ID NO: 805823 - DNA, 19 bp, Mus musculus
  siRNA target sequence for 9130023F12Rik (NM_181411.2,1418-1436).
caaaatgctttggatgatt

SEQ ID NO: 805824 - DNA, 19 bp, Mus musculus
  siRNA target sequence for 9130023F12Rik (NM_181411.2,1480-1498).
gacttgtcatgataccaat

SEQ ID NO: 805825 - DNA, 19 bp, Mus musculus
  siRNA target sequence for 9130023F12Rik (NM_181411.2,1537-1555).
cactccaccctttgttact

SEQ ID NO: 805826 - DNA, 19 bp, Mus musculus
  siRNA target sequence for 9130023F12Rik (NM_181411.2,1541-1559).
ccaccctttgttactagta

SEQ ID NO: 805827 - DNA, 19 bp, Mus musculus
  siRNA target sequence for 9130023F12Rik (NM_181411.2,1550-1568).
gttactagtactcaagatt

SEQ ID NO: 805828 - DNA, 19 bp, Mus musculus
  siRNA target sequence for 9130023F12Rik (NM_181411.2,1569-1587).
caatgagtgacgtcacttt

SEQ ID NO: 805829 - DNA, 19 bp, Mus musculus
  siRNA target sequence for 9130023F12Rik (NM_181411.2,1575-1593).
gtgacgtcacttttgaaga

SEQ ID NO: 805830 - DNA, 19 bp, Mus musculus
  siRNA target sequence for 9130023F12Rik (NM_181411.2,1620-1638).
gtgaaccaggtgatgattt

SEQ ID NO: 805831 - DNA, 19 bp, Mus musculus
  siRNA target sequence for 9130023F12Rik (NM_181411.2,1780-1798).
ctcaaaactgaaaaatggt

SEQ ID NO: 805832 - DNA, 19 bp, Mus musculus
  siRNA target sequence for 9130023F12Rik (NM_181411.2,1806-1824).
gtgaatttggagattttga

SEQ ID NO: 805833 - DNA, 19 bp, Mus musculus
  siRNA target sequence for 9130023F12Rik (NM_181411.2,1895-1913).
cctagccaagctgtagatt

SEQ ID NO: 805834 - DNA, 19 bp, Mus musculus
  siRNA target sequence for 9130023F12Rik (NM_181411.2,1900-1918).
ccaagctgtagattggaat

SEQ ID NO: 805835 - DNA, 19 bp, Mus musculus
  siRNA target sequence for 9130023F12Rik (NM_181411.2,1978-1996).
gactgagtctcatcatcta

SEQ ID NO: 805836 - DNA, 19 bp, Mus musculus
  siRNA target sequence for 9130023F12Rik (NM_181411.2,1980-1998).
ctgagtctcatcatctaaa

SEQ ID NO: 805837 - DNA, 19 bp, Mus musculus
  siRNA target sequence for 9130023F12Rik (NM_181411.2,2040-2058).
ctctgggaacccctaagat

SEQ ID NO: 805838 - DNA, 19 bp, Mus musculus
  siRNA target sequence for 9130023F12Rik (NM_181411.2,2051-2069).
cctaagatgcacagtgttt

SEQ ID NO: 805839 - DNA, 19 bp, Mus musculus
  siRNA target sequence for 9130023F12Rik (NM_181411.2,2056-2074).
gatgcacagtgtttcttca

SEQ ID NO: 805840 - DNA, 19 bp, Mus musculus
  siRNA target sequence for 9130023F12Rik (NM_181411.2,2151-2169).
ggttggagagaattttcga

SEQ ID NO: 805841 - DNA, 19 bp, Mus musculus
  siRNA target sequence for 9130023F12Rik (NM_181411.2,2245-2263).
cagctcgccagcaaaaaca

SEQ ID NO: 805842 - DNA, 19 bp, Mus musculus
  siRNA target sequence for 9130023F12Rik (NM_181411.2,2248-2266).
ctcgccagcaaaaacaaga

SEQ ID NO: 805843 - DNA, 19 bp, Mus musculus
  siRNA target sequence for 9130023F12Rik (NM_181411.2,2348-2366).
cagtggggtggctcacata

SEQ ID NO: 805844 - DNA, 19 bp, Mus musculus
  siRNA target sequence for 9130023F12Rik (NM_181411.2,2394-2412).
gaatagacactcgaaacat

SEQ ID NO: 805845 - DNA, 19 bp, Mus musculus
  siRNA target sequence for 9130023F12Rik (NM_181411.2,2399-2417).
gacactcgaaacattctat

SEQ ID NO: 805846 - DNA, 19 bp, Mus musculus
  siRNA target sequence for 9130023F12Rik (NM_181411.2,2483-2501).
cccaccaaggaaccattaa

SEQ ID NO: 805847 - DNA, 19 bp, Mus musculus
  siRNA target sequence for 9130023F12Rik (NM_181411.2,2484-2502).
ccaccaaggaaccattaaa

SEQ ID NO: 805848 - DNA, 19 bp, Mus musculus
  siRNA target sequence for 9130023F12Rik (NM_181411.2,2485-2503).
caccaaggaaccattaaaa

SEQ ID NO: 805849 - DNA, 19 bp, Mus musculus
  siRNA target sequence for 9130023F12Rik (NM_181411.2,2537-2555).
ggtcagacaaccgttatga

SEQ ID NO: 805850 - DNA, 19 bp, Mus musculus
  siRNA target sequence for 9130023F12Rik (NM_181411.2,2547-2565).
ccgttatgacaccagaaat

SEQ ID NO: 805851 - DNA, 19 bp, Mus musculus
  siRNA target sequence for 9130023F12Rik (NM_181411.2,2548-2566).
cgttatgacaccagaaata

SEQ ID NO: 805852 - DNA, 19 bp, Mus musculus
  siRNA target sequence for 9130023F12Rik (NM_181411.2,2561-2579).
gaaataaacacgtgtacat

SEQ ID NO: 805853 - DNA, 19 bp, Mus musculus
  siRNA target sequence for 9130023F12Rik (NM_181411.2,2571-2589).
cgtgtacatctgatccatt

SEQ ID NO: 805854 - DNA, 19 bp, Mus musculus
  siRNA target sequence for 9130023F12Rik (NM_181411.2,2625-2643).
gtagcagtggccttactaa

SEQ ID NO: 805855 - DNA, 19 bp, Mus musculus
  siRNA target sequence for 9130023F12Rik (NM_181411.2,2634-2652).
gccttactaaccctttaga

SEQ ID NO: 805856 - DNA, 19 bp, Mus musculus
  siRNA target sequence for 9130023F12Rik (NM_181411.2,2635-2653).
ccttactaaccctttagat

SEQ ID NO: 805857 - DNA, 19 bp, Mus musculus
  siRNA target sequence for 9130023F12Rik (NM_181411.2,2655-2673).
gtgtggatccagagttgta

SEQ ID NO: 805858 - DNA, 19 bp, Mus musculus
  siRNA target sequence for 9130023F12Rik (NM_181411.2,2663-2681).
ccagagttgtatgagttaa

SEQ ID NO: 805859 - DNA, 19 bp, Mus musculus
  siRNA target sequence for 9130023F12Rik (NM_181411.2,2769-2787).
cgtcaaccaggaaaccaaa

SEQ ID NO: 805860 - DNA, 19 bp, Mus musculus
  siRNA target sequence for 9130023F12Rik (NM_181411.2,2770-2788).
gtcaaccaggaaaccaaaa

SEQ ID NO: 805861 - DNA, 19 bp, Mus musculus
  siRNA target sequence for Anks1 (NM_181413.2,529-547).
ccagagtcaacgaacagaa

SEQ ID NO: 805862 - DNA, 19 bp, Mus musculus
  siRNA target sequence for Anks1 (NM_181413.2,530-548).
cagagtcaacgaacagaat

SEQ ID NO: 805863 - DNA, 19 bp, Mus musculus
  siRNA target sequence for Anks1 (NM_181413.2,582-600).
ccctttgacccttatatca

SEQ ID NO: 805864 - DNA, 19 bp, Mus musculus
  siRNA target sequence for Anks1 (NM_181413.2,583-601).
cctttgacccttatatcaa

SEQ ID NO: 805865 - DNA, 19 bp, Mus musculus
  siRNA target sequence for Anks1 (NM_181413.2,700-718).
ccatgcgcaacaacaagtt

SEQ ID NO: 805866 - DNA, 19 bp, Mus musculus
  siRNA target sequence for Anks1 (NM_181413.2,701-719).
catgcgcaacaacaagttt

SEQ ID NO: 805867 - DNA, 19 bp, Mus musculus
  siRNA target sequence for Anks1 (NM_181413.2,704-722).
gcgcaacaacaagtttgaa

SEQ ID NO: 805868 - DNA, 19 bp, Mus musculus
  siRNA target sequence for Anks1 (NM_181413.2,830-848).
gcacttggcagcaaggaat

SEQ ID NO: 805869 - DNA, 19 bp, Mus musculus
  siRNA target sequence for Anks1 (NM_181413.2,886-904).
gcatggatagcaactatca

SEQ ID NO: 805870 - DNA, 19 bp, Mus musculus
  siRNA target sequence for Anks1 (NM_181413.2,952-970).
ccgatgtggtgcaaatcct

SEQ ID NO: 805871 - DNA, 19 bp, Mus musculus
  siRNA target sequence for Anks1 (NM_181413.2,975-993).
gctgcaggaatcgatgtta

SEQ ID NO: 805872 - DNA, 19 bp, Mus musculus
  siRNA target sequence for Anks1 (NM_181413.2,978-996).
gcaggaatcgatgttaaca

SEQ ID NO: 805873 - DNA, 19 bp, Mus musculus
  siRNA target sequence for Anks1 (NM_181413.2,981-999).
ggaatcgatgttaacataa

SEQ ID NO: 805874 - DNA, 19 bp, Mus musculus
  siRNA target sequence for Anks1 (NM_181413.2,982-1000).
gaatcgatgttaacataaa

SEQ ID NO: 805875 - DNA, 19 bp, Mus musculus
  siRNA target sequence for Anks1 (NM_181413.2,1083-1101).
gatcacatgaccggaaaaa

SEQ ID NO: 805876 - DNA, 19 bp, Mus musculus
  siRNA target sequence for Anks1 (NM_181413.2,1086-1104).
cacatgaccggaaaaagaa

SEQ ID NO: 805877 - DNA, 19 bp, Mus musculus
  siRNA target sequence for Anks1 (NM_181413.2,1212-1230).
ctgatccttcattttgaca

SEQ ID NO: 805878 - DNA, 19 bp, Mus musculus
  siRNA target sequence for Anks1 (NM_181413.2,1252-1270).
cctacgaggcactgtacaa

SEQ ID NO: 805879 - DNA, 19 bp, Mus musculus
  siRNA target sequence for Anks1 (NM_181413.2,1431-1449).
gaagaacgcgtagataaga

SEQ ID NO: 805880 - DNA, 19 bp, Mus musculus
  siRNA target sequence for Anks1 (NM_181413.2,1434-1452).
gaacgcgtagataagaagt

SEQ ID NO: 805881 - DNA, 19 bp, Mus musculus
  siRNA target sequence for Anks1 (NM_181413.2,1437-1455).
cgcgtagataagaagtatt

SEQ ID NO: 805882 - DNA, 19 bp, Mus musculus
  siRNA target sequence for Anks1 (NM_181413.2,1438-1456).
gcgtagataagaagtattt

SEQ ID NO: 805883 - DNA, 19 bp, Mus musculus
  siRNA target sequence for Anks1 (NM_181413.2,1903-1921).
gaacatacctcgatgcatt

SEQ ID NO: 805884 - DNA, 19 bp, Mus musculus
  siRNA target sequence for Anks1 (NM_181413.2,2030-2048).
ccgcagtttgtctaagtct

SEQ ID NO: 805885 - DNA, 19 bp, Mus musculus
  siRNA target sequence for Anks1 (NM_181413.2,2164-2182).
cctcagagtgggatgagat

SEQ ID NO: 805886 - DNA, 19 bp, Mus musculus
  siRNA target sequence for Anks1 (NM_181413.2,2165-2183).
ctcagagtgggatgagatt

SEQ ID NO: 805887 - DNA, 19 bp, Mus musculus
  siRNA target sequence for Anks1 (NM_181413.2,2345-2363).
ccgcttcctggggtctaat

SEQ ID NO: 805888 - DNA, 19 bp, Mus musculus
  siRNA target sequence for Anks1 (NM_181413.2,2629-2647).
gccaccgcaagcgcattat

SEQ ID NO: 805889 - DNA, 19 bp, Mus musculus
  siRNA target sequence for Anks1 (NM_181413.2,2685-2703).
cagaagcctccaaggtttt

SEQ ID NO: 805890 - DNA, 19 bp, Mus musculus
  siRNA target sequence for Anks1 (NM_181413.2,2745-2763).
ccgctgagccagaatgatt

SEQ ID NO: 805891 - DNA, 19 bp, Mus musculus
  siRNA target sequence for Anks1 (NM_181413.2,2967-2985).
gaaaagctcatctttgagt

SEQ ID NO: 805892 - DNA, 19 bp, Mus musculus
  siRNA target sequence for Anks1 (NM_181413.2,2989-3007).
gcggttatgaggccaatta

SEQ ID NO: 805893 - DNA, 19 bp, Mus musculus
  siRNA target sequence for Anks1 (NM_181413.2,2990-3008).
cggttatgaggccaattat

SEQ ID NO: 805894 - DNA, 19 bp, Mus musculus
  siRNA target sequence for Anks1 (NM_181413.2,2992-3010).
gttatgaggccaattatct

SEQ ID NO: 805895 - DNA, 19 bp, Mus musculus
  siRNA target sequence for Anks1 (NM_181413.2,3011-3029).
gggttccatgctgatcaaa

SEQ ID NO: 805896 - DNA, 19 bp, Mus musculus
  siRNA target sequence for Anks1 (NM_181413.2,3016-3034).
ccatgctgatcaaagatct

SEQ ID NO: 805897 - DNA, 19 bp, Mus musculus
  siRNA target sequence for Anks1 (NM_181413.2,3116-3134).
cctgtccatcacgtacaaa

SEQ ID NO: 805898 - DNA, 19 bp, Mus musculus
  siRNA target sequence for Anks1 (NM_181413.2,3127-3145).
cgtacaaaggtgtcaagtt

SEQ ID NO: 805899 - DNA, 19 bp, Mus musculus
  siRNA target sequence for Anks1 (NM_181413.2,3179-3197).
gcacgagatccggaacatt

SEQ ID NO: 805900 - DNA, 19 bp, Mus musculus
  siRNA target sequence for Anks1 (NM_181413.2,3180-3198).
cacgagatccggaacattt

SEQ ID NO: 805901 - DNA, 19 bp, Mus musculus
  siRNA target sequence for Anks1 (NM_181413.2,3183-3201).
gagatccggaacatttcct

SEQ ID NO: 805902 - DNA, 19 bp, Mus musculus
  siRNA target sequence for Anks1 (NM_181413.2,3270-3288).
cactactgccacgttttca

SEQ ID NO: 805903 - DNA, 19 bp, Mus musculus
  siRNA target sequence for Anks1 (NM_181413.2,3398-3416).
ctctgcagcttcgatgatt

SEQ ID NO: 805904 - DNA, 19 bp, Mus musculus
  siRNA target sequence for Anks1 (NM_181413.2,3402-3420).
gcagcttcgatgattgaga

SEQ ID NO: 805905 - DNA, 19 bp, Mus musculus
  siRNA target sequence for Anks1 (NM_181413.2,3406-3424).
cttcgatgattgagacaaa

SEQ ID NO: 805906 - DNA, 19 bp, Mus musculus
  siRNA target sequence for Anks1 (NM_181413.2,3503-3521).
cccgtcccacgctagtgtt

SEQ ID NO: 805907 - DNA, 19 bp, Mus musculus
  siRNA target sequence for Anks1 (NM_181413.2,3504-3522).
ccgtcccacgctagtgttt

SEQ ID NO: 805908 - DNA, 19 bp, Mus musculus
  siRNA target sequence for AW555641 (NM_181415.2,458-476).
ctggtggacgacctctata

SEQ ID NO: 805909 - DNA, 19 bp, Mus musculus
  siRNA target sequence for AW555641 (NM_181415.2,461-479).
gtggacgacctctataagt

SEQ ID NO: 805910 - DNA, 19 bp, Mus musculus
  siRNA target sequence for AW555641 (NM_181415.2,520-538).
cattgcctaaaccaaatct

SEQ ID NO: 805911 - DNA, 19 bp, Mus musculus
  siRNA target sequence for AW555641 (NM_181415.2,576-594).
gtcatcaatgggtcaatgt

SEQ ID NO: 805912 - DNA, 19 bp, Mus musculus
  siRNA target sequence for AW555641 (NM_181415.2,578-596).
catcaatgggtcaatgtat

SEQ ID NO: 805913 - DNA, 19 bp, Mus musculus
  siRNA target sequence for AW555641 (NM_181415.2,581-599).
caatgggtcaatgtatata

SEQ ID NO: 805914 - DNA, 19 bp, Mus musculus
  siRNA target sequence for AW555641 (NM_181415.2,616-634).
gtgtactccttaatgatat

SEQ ID NO: 805915 - DNA, 19 bp, Mus musculus
  siRNA target sequence for AW555641 (NM_181415.2,639-657).
gtgtataaacccccaaatt

SEQ ID NO: 805916 - DNA, 19 bp, Mus musculus
  siRNA target sequence for AW555641 (NM_181415.2,648-666).
cccccaaattgcaaagctt

SEQ ID NO: 805917 - DNA, 19 bp, Mus musculus
  siRNA target sequence for AW555641 (NM_181415.2,649-667).
ccccaaattgcaaagcttt

SEQ ID NO: 805918 - DNA, 19 bp, Mus musculus
  siRNA target sequence for AW555641 (NM_181415.2,664-682).
ctttccgagatgaagaact

SEQ ID NO: 805919 - DNA, 19 bp, Mus musculus
  siRNA target sequence for AW555641 (NM_181415.2,692-710).
cgctggtccagggataaaa

SEQ ID NO: 805920 - DNA, 19 bp, Mus musculus
  siRNA target sequence for AW555641 (NM_181415.2,798-816).
gctacagatgacagatgtt

SEQ ID NO: 805921 - DNA, 19 bp, Mus musculus
  siRNA target sequence for AW555641 (NM_181415.2,866-884).
gtggtgtgacgacaagaaa

SEQ ID NO: 805922 - DNA, 19 bp, Mus musculus
  siRNA target sequence for AW555641 (NM_181415.2,871-889).
gtgacgacaagaaatgcat

SEQ ID NO: 805923 - DNA, 19 bp, Mus musculus
  siRNA target sequence for AW555641 (NM_181415.2,910-928).
gcacgtctgtcagaaacta

SEQ ID NO: 805924 - DNA, 19 bp, Mus musculus
  siRNA target sequence for AW555641 (NM_181415.2,918-936).
gtcagaaactacactaaat

SEQ ID NO: 805925 - DNA, 19 bp, Mus musculus
  siRNA target sequence for AW555641 (NM_181415.2,920-938).
cagaaactacactaaatgt

SEQ ID NO: 805926 - DNA, 19 bp, Mus musculus
  siRNA target sequence for AW555641 (NM_181415.2,926-944).
ctacactaaatgtcatata

SEQ ID NO: 805927 - DNA, 19 bp, Mus musculus
  siRNA target sequence for AW555641 (NM_181415.2,954-972).
cagatttgtaacaaactta

SEQ ID NO: 805928 - DNA, 19 bp, Mus musculus
  siRNA target sequence for AW555641 (NM_181415.2,956-974).
gatttgtaacaaacttaca

SEQ ID NO: 805929 - DNA, 19 bp, Mus musculus
  siRNA target sequence for AW555641 (NM_181415.2,985-1003).
gctgttcactcaacttgaa

SEQ ID NO: 805930 - DNA, 19 bp, Mus musculus
  siRNA target sequence for AW555641 (NM_181415.2,1060-1078).
gagaaggctggaatcatgt

SEQ ID NO: 805931 - DNA, 19 bp, Mus musculus
  siRNA target sequence for AW555641 (NM_181415.2,1081-1099).
gggacgcttgtcttcgaat

SEQ ID NO: 805932 - DNA, 19 bp, Mus musculus
  siRNA target sequence for AW555641 (NM_181415.2,1085-1103).
cgcttgtcttcgaatcaat

SEQ ID NO: 805933 - DNA, 19 bp, Mus musculus
  siRNA target sequence for AW555641 (NM_181415.2,1086-1104).
gcttgtcttcgaatcaatt

SEQ ID NO: 805934 - DNA, 19 bp, Mus musculus
  siRNA target sequence for AW555641 (NM_181415.2,1122-1140).
gataatgccaaactttatt

SEQ ID NO: 805935 - DNA, 19 bp, Mus musculus
  siRNA target sequence for AW555641 (NM_181415.2,1128-1146).
gccaaactttattgctata

SEQ ID NO: 805936 - DNA, 19 bp, Mus musculus
  siRNA target sequence for AW555641 (NM_181415.2,1245-1263).
gtaggcctacgcaagatca

SEQ ID NO: 805937 - DNA, 19 bp, Mus musculus
  siRNA target sequence for AW555641 (NM_181415.2,1250-1268).
cctacgcaagatcaacata

SEQ ID NO: 805938 - DNA, 19 bp, Mus musculus
  siRNA target sequence for AW555641 (NM_181415.2,1251-1269).
ctacgcaagatcaacatat

SEQ ID NO: 805939 - DNA, 19 bp, Mus musculus
  siRNA target sequence for AW555641 (NM_181415.2,1254-1272).
cgcaagatcaacatatcct

SEQ ID NO: 805940 - DNA, 19 bp, Mus musculus
  siRNA target sequence for AW555641 (NM_181415.2,1255-1273).
gcaagatcaacatatccta

SEQ ID NO: 805941 - DNA, 19 bp, Mus musculus
  siRNA target sequence for AW555641 (NM_181415.2,1292-1310).
gtctcctttcacaaataca

SEQ ID NO: 805942 - DNA, 19 bp, Mus musculus
  siRNA target sequence for AW555641 (NM_181415.2,1377-1395).
gtggcagggttaaaagcaa

SEQ ID NO: 805943 - DNA, 19 bp, Mus musculus
  siRNA target sequence for AW555641 (NM_181415.2,1416-1434).
gatggactcgtttgtgaaa

SEQ ID NO: 805944 - DNA, 19 bp, Mus musculus
  siRNA target sequence for AW555641 (NM_181415.2,1438-1456).
ctgtagtaagcccaaatca

SEQ ID NO: 805945 - DNA, 19 bp, Mus musculus
  siRNA target sequence for AW555641 (NM_181415.2,1440-1458).
gtagtaagcccaaatcaga

SEQ ID NO: 805946 - DNA, 19 bp, Mus musculus
  siRNA target sequence for AW555641 (NM_181415.2,1621-1639).
ccacctgctcgcctcaaaa

SEQ ID NO: 805947 - DNA, 19 bp, Mus musculus
  siRNA target sequence for AW555641 (NM_181415.2,1622-1640).
cacctgctcgcctcaaaat

SEQ ID NO: 805948 - DNA, 19 bp, Mus musculus
  siRNA target sequence for AW555641 (NM_181415.2,1625-1643).
ctgctcgcctcaaaattgt

SEQ ID NO: 805949 - DNA, 19 bp, Mus musculus
  siRNA target sequence for AW555641 (NM_181415.2,1693-1711).
ggtgcaacgatcctagtaa

SEQ ID NO: 805950 - DNA, 19 bp, Mus musculus
  siRNA target sequence for AW555641 (NM_181415.2,1697-1715).
caacgatcctagtaacaca

SEQ ID NO: 805951 - DNA, 19 bp, Mus musculus
  siRNA target sequence for 6530401L14Rik (NM_181416.2,573-591).
gagctgtctatggcattaa

SEQ ID NO: 805952 - DNA, 19 bp, Mus musculus
  siRNA target sequence for 6530401L14Rik (NM_181416.2,616-634).
cgatcgcaggagacatgaa

SEQ ID NO: 805953 - DNA, 19 bp, Mus musculus
  siRNA target sequence for 6530401L14Rik (NM_181416.2,617-635).
gatcgcaggagacatgaaa

SEQ ID NO: 805954 - DNA, 19 bp, Mus musculus
  siRNA target sequence for 6530401L14Rik (NM_181416.2,636-654).
ctgcagctacggaaataaa

SEQ ID NO: 805955 - DNA, 19 bp, Mus musculus
  siRNA target sequence for 6530401L14Rik (NM_181416.2,669-687).
gagtaccctttaattcctt

SEQ ID NO: 805956 - DNA, 19 bp, Mus musculus
  siRNA target sequence for 6530401L14Rik (NM_181416.2,737-755).
gatgcgtgcgcatctttaa

SEQ ID NO: 805957 - DNA, 19 bp, Mus musculus
  siRNA target sequence for 6530401L14Rik (NM_181416.2,741-759).
cgtgcgcatctttaaaaga

SEQ ID NO: 805958 - DNA, 19 bp, Mus musculus
  siRNA target sequence for 6530401L14Rik (NM_181416.2,750-768).
ctttaaaagagcatattca

SEQ ID NO: 805959 - DNA, 19 bp, Mus musculus
  siRNA target sequence for 6530401L14Rik (NM_181416.2,771-789).
cagaagggctttttaggaa

SEQ ID NO: 805960 - DNA, 19 bp, Mus musculus
  siRNA target sequence for 6530401L14Rik (NM_181416.2,787-805).
gaagtcggggtctgttgtt

SEQ ID NO: 805961 - DNA, 19 bp, Mus musculus
  siRNA target sequence for 6530401L14Rik (NM_181416.2,795-813).
ggtctgttgttcgtctaaa

SEQ ID NO: 805962 - DNA, 19 bp, Mus musculus
  siRNA target sequence for 6530401L14Rik (NM_181416.2,806-824).
cgtctaaaggcactaaaga

SEQ ID NO: 805963 - DNA, 19 bp, Mus musculus
  siRNA target sequence for 6530401L14Rik (NM_181416.2,935-953).
ctgcatgaagcacttttca

SEQ ID NO: 805964 - DNA, 19 bp, Mus musculus
  siRNA target sequence for 6530401L14Rik (NM_181416.2,1017-1035).
caaaccctacagttgatat

SEQ ID NO: 805965 - DNA, 19 bp, Mus musculus
  siRNA target sequence for 6530401L14Rik (NM_181416.2,1021-1039).
ccctacagttgatatatta

SEQ ID NO: 805966 - DNA, 19 bp, Mus musculus
  siRNA target sequence for 6530401L14Rik (NM_181416.2,1022-1040).
cctacagttgatatattaa

SEQ ID NO: 805967 - DNA, 19 bp, Mus musculus
  siRNA target sequence for 6530401L14Rik (NM_181416.2,1073-1091).
cttagggcaagtgagaata

SEQ ID NO: 805968 - DNA, 19 bp, Mus musculus
  siRNA target sequence for 6530401L14Rik (NM_181416.2,1077-1095).
gggcaagtgagaataaaat

SEQ ID NO: 805969 - DNA, 19 bp, Mus musculus
  siRNA target sequence for 6530401L14Rik (NM_181416.2,1104-1122).
gcaatcttgcagtaatatt

SEQ ID NO: 805970 - DNA, 19 bp, Mus musculus
  siRNA target sequence for 6530401L14Rik (NM_181416.2,1105-1123).
caatcttgcagtaatattt

SEQ ID NO: 805971 - DNA, 19 bp, Mus musculus
  siRNA target sequence for 6530401L14Rik (NM_181416.2,1200-1218).
cagcagtagtgcagacttt

SEQ ID NO: 805972 - DNA, 19 bp, Mus musculus
  siRNA target sequence for 6530401L14Rik (NM_181416.2,1202-1220).
gcagtagtgcagactttta

SEQ ID NO: 805973 - DNA, 19 bp, Mus musculus
  siRNA target sequence for 6530401L14Rik (NM_181416.2,1203-1221).
cagtagtgcagacttttat

SEQ ID NO: 805974 - DNA, 19 bp, Mus musculus
  siRNA target sequence for 6530401L14Rik (NM_181416.2,1241-1259).
ggacgagtgccagatttta

SEQ ID NO: 805975 - DNA, 19 bp, Mus musculus
  siRNA target sequence for 6530401L14Rik (NM_181416.2,1242-1260).
gacgagtgccagattttat

SEQ ID NO: 805976 - DNA, 19 bp, Mus musculus
  siRNA target sequence for 6530401L14Rik (NM_181416.2,1253-1271).
gattttatcctggaaaaga

SEQ ID NO: 805977 - DNA, 19 bp, Mus musculus
  siRNA target sequence for 6530401L14Rik (NM_181416.2,1346-1364).
cctggtgaatgtaagagaa

SEQ ID NO: 805978 - DNA, 19 bp, Mus musculus
  siRNA target sequence for 6530401L14Rik (NM_181416.2,1347-1365).
ctggtgaatgtaagagaaa

SEQ ID NO: 805979 - DNA, 19 bp, Mus musculus
  siRNA target sequence for 6530401L14Rik (NM_181416.2,1397-1415).
ggagccctaaataaactta

SEQ ID NO: 805980 - DNA, 19 bp, Mus musculus
  siRNA target sequence for 6530401L14Rik (NM_181416.2,1398-1416).
gagccctaaataaacttaa

SEQ ID NO: 805981 - DNA, 19 bp, Mus musculus
  siRNA target sequence for 6530401L14Rik (NM_181416.2,1400-1418).
gccctaaataaacttaaat

SEQ ID NO: 805982 - DNA, 19 bp, Mus musculus
  siRNA target sequence for 6530401L14Rik (NM_181416.2,1403-1421).
ctaaataaacttaaatcta

SEQ ID NO: 805983 - DNA, 19 bp, Mus musculus
  siRNA target sequence for 6530401L14Rik (NM_181416.2,1432-1450).
ctctattacacctcaacaa

SEQ ID NO: 805984 - DNA, 19 bp, Mus musculus
  siRNA target sequence for 6530401L14Rik (NM_181416.2,1468-1486).
ctctgcatcaccattgatt

SEQ ID NO: 805985 - DNA, 19 bp, Mus musculus
  siRNA target sequence for 6530401L14Rik (NM_181416.2,1472-1490).
gcatcaccattgattctca

SEQ ID NO: 805986 - DNA, 19 bp, Mus musculus
  siRNA target sequence for 6530401L14Rik (NM_181416.2,1494-1512).
cgagtgttaagcgtaaact

SEQ ID NO: 805987 - DNA, 19 bp, Mus musculus
  siRNA target sequence for 6530401L14Rik (NM_181416.2,1529-1547).
catgctttctcgagtaaga

SEQ ID NO: 805988 - DNA, 19 bp, Mus musculus
  siRNA target sequence for 6530401L14Rik (NM_181416.2,1532-1550).
gctttctcgagtaagaaaa

SEQ ID NO: 805989 - DNA, 19 bp, Mus musculus
  siRNA target sequence for 6530401L14Rik (NM_181416.2,1583-1601).
ctgttgccaagtcatttct

SEQ ID NO: 805990 - DNA, 19 bp, Mus musculus
  siRNA target sequence for 6530401L14Rik (NM_181416.2,1609-1627).
caattctacaccagtatca

SEQ ID NO: 805991 - DNA, 19 bp, Mus musculus
  siRNA target sequence for 6530401L14Rik (NM_181416.2,1617-1635).
caccagtatcagttcactt

SEQ ID NO: 805992 - DNA, 19 bp, Mus musculus
  siRNA target sequence for 6530401L14Rik (NM_181416.2,1620-1638).
cagtatcagttcacttaga

SEQ ID NO: 805993 - DNA, 19 bp, Mus musculus
  siRNA target sequence for 6530401L14Rik (NM_181416.2,1622-1640).
gtatcagttcacttagata

SEQ ID NO: 805994 - DNA, 19 bp, Mus musculus
  siRNA target sequence for 6530401L14Rik (NM_181416.2,1696-1714).
ccacttggtcagtacagaa

SEQ ID NO: 805995 - DNA, 19 bp, Mus musculus
  siRNA target sequence for 6530401L14Rik (NM_181416.2,1697-1715).
cacttggtcagtacagaat

SEQ ID NO: 805996 - DNA, 19 bp, Mus musculus
  siRNA target sequence for 6530401L14Rik (NM_181416.2,1699-1717).
cttggtcagtacagaatta

SEQ ID NO: 805997 - DNA, 19 bp, Mus musculus
  siRNA target sequence for 6530401L14Rik (NM_181416.2,1710-1728).
cagaattaaggcgaagtaa

SEQ ID NO: 805998 - DNA, 19 bp, Mus musculus
  siRNA target sequence for 6530401L14Rik (NM_181416.2,1712-1730).
gaattaaggcgaagtaaaa

SEQ ID NO: 805999 - DNA, 19 bp, Mus musculus
  siRNA target sequence for 6530401L14Rik (NM_181416.2,1731-1749).
ggattgccagcaaaaaagt

SEQ ID NO: 806000 - DNA, 19 bp, Mus musculus
  siRNA target sequence for 6530401L14Rik (NM_181416.2,1788-1806).
ccaaagtcagtcgtaaaga

SEQ ID NO: 806001 - DNA, 19 bp, Mus musculus
  siRNA target sequence for 6530401L14Rik (NM_181416.2,1793-1811).
gtcagtcgtaaagaaaaga

SEQ ID NO: 806002 - DNA, 19 bp, Mus musculus
  siRNA target sequence for 6530401L14Rik (NM_181416.2,1818-1836).
gatctctccgtctgaaatt

SEQ ID NO: 806003 - DNA, 19 bp, Mus musculus
  siRNA target sequence for 6530401L14Rik (NM_181416.2,1905-1923).
gactagcgaatcagcaaaa

SEQ ID NO: 806004 - DNA, 19 bp, Mus musculus
  siRNA target sequence for 6530401L14Rik (NM_181416.2,1910-1928).
gcgaatcagcaaaatctaa

SEQ ID NO: 806005 - DNA, 19 bp, Mus musculus
  siRNA target sequence for 6530401L14Rik (NM_181416.2,1911-1929).
cgaatcagcaaaatctaaa

SEQ ID NO: 806006 - DNA, 19 bp, Mus musculus
  siRNA target sequence for 6530401L14Rik (NM_181416.2,1960-1978).
gctttttagcccagatatt

SEQ ID NO: 806007 - DNA, 19 bp, Mus musculus
  siRNA target sequence for 6530401L14Rik (NM_181416.2,2032-2050).
cttgttaactccagatcaa

SEQ ID NO: 806008 - DNA, 19 bp, Mus musculus
  siRNA target sequence for 6530401L14Rik (NM_181416.2,2150-2168).
gaggtgaagagcttttctt

SEQ ID NO: 806009 - DNA, 19 bp, Mus musculus
  siRNA target sequence for 6530401L14Rik (NM_181416.2,2170-2188).
ggagcccgacattactgtt

SEQ ID NO: 806010 - DNA, 19 bp, Mus musculus
  siRNA target sequence for 6530401L14Rik (NM_181416.2,2173-2191).
gcccgacattactgttgaa

SEQ ID NO: 806011 - DNA, 19 bp, Mus musculus
  siRNA target sequence for 6530401L14Rik (NM_181416.2,2174-2192).
cccgacattactgttgaaa

SEQ ID NO: 806012 - DNA, 19 bp, Mus musculus
  siRNA target sequence for 6530401L14Rik (NM_181416.2,2175-2193).
ccgacattactgttgaaaa

SEQ ID NO: 806013 - DNA, 19 bp, Mus musculus
  siRNA target sequence for 6530401L14Rik (NM_181416.2,2176-2194).
cgacattactgttgaaaaa

SEQ ID NO: 806014 - DNA, 19 bp, Mus musculus
  siRNA target sequence for 6530401L14Rik (NM_181416.2,2179-2197).
cattactgttgaaaaatca

SEQ ID NO: 806015 - DNA, 19 bp, Mus musculus
  siRNA target sequence for 6530401L14Rik (NM_181416.2,2292-2310).
ccgagaccttgcagaagat

SEQ ID NO: 806016 - DNA, 19 bp, Mus musculus
  siRNA target sequence for 6530401L14Rik (NM_181416.2,2299-2317).
cttgcagaagattcagaaa

SEQ ID NO: 806017 - DNA, 19 bp, Mus musculus
  siRNA target sequence for 6530401L14Rik (NM_181416.2,2326-2344).
cgaatctgggagtgatctt

SEQ ID NO: 806018 - DNA, 19 bp, Mus musculus
  siRNA target sequence for 6530401L14Rik (NM_181416.2,2331-2349).
ctgggagtgatcttcatat

SEQ ID NO: 806019 - DNA, 19 bp, Mus musculus
  siRNA target sequence for 6530401L14Rik (NM_181416.2,2334-2352).
ggagtgatcttcatatggt

SEQ ID NO: 806020 - DNA, 19 bp, Mus musculus
  siRNA target sequence for 6530401L14Rik (NM_181416.2,2339-2357).
gatcttcatatggtgataa

SEQ ID NO: 806021 - DNA, 19 bp, Mus musculus
  siRNA target sequence for 6530401L14Rik (NM_181416.2,2360-2378).
catgagcagtcatcagtaa

SEQ ID NO: 806022 - DNA, 19 bp, Mus musculus
  siRNA target sequence for 6530401L14Rik (NM_181416.2,2363-2381).
gagcagtcatcagtaacaa

SEQ ID NO: 806023 - DNA, 19 bp, Mus musculus
  siRNA target sequence for 6530401L14Rik (NM_181416.2,2379-2397).
caaatacgggggaagaagt

SEQ ID NO: 806024 - DNA, 19 bp, Mus musculus
  siRNA target sequence for 6530401L14Rik (NM_181416.2,2387-2405).
ggggaagaagtggaattca

SEQ ID NO: 806025 - DNA, 19 bp, Mus musculus
  siRNA target sequence for 6530401L14Rik (NM_181416.2,2469-2487).
gtccttcagaacggaattt

SEQ ID NO: 806026 - DNA, 19 bp, Mus musculus
  siRNA target sequence for 6530401L14Rik (NM_181416.2,2471-2489).
ccttcagaacggaatttct

SEQ ID NO: 806027 - DNA, 19 bp, Mus musculus
  siRNA target sequence for 6530401L14Rik (NM_181416.2,2525-2543).
gatgaggaatgttactcaa

SEQ ID NO: 806028 - DNA, 19 bp, Mus musculus
  siRNA target sequence for 6530401L14Rik (NM_181416.2,2535-2553).
gttactcaactcagatgaa

SEQ ID NO: 806029 - DNA, 19 bp, Mus musculus
  siRNA target sequence for 6530401L14Rik (NM_181416.2,2673-2691).
catcacgggggaatgagaa

SEQ ID NO: 806030 - DNA, 19 bp, Mus musculus
  siRNA target sequence for 6530401L14Rik (NM_181416.2,2748-2766).
gtgtggcggtcctttcgaa

SEQ ID NO: 806031 - DNA, 19 bp, Mus musculus
  siRNA target sequence for 6530401L14Rik (NM_181416.2,2857-2875).
gaaggtttctgatcacata

SEQ ID NO: 806032 - DNA, 19 bp, Mus musculus
  siRNA target sequence for 6530401L14Rik (NM_181416.2,2876-2894).
cagtggtttaataaacttt

SEQ ID NO: 806033 - DNA, 19 bp, Mus musculus
  siRNA target sequence for 6530401L14Rik (NM_181416.2,2880-2898).
ggtttaataaactttctct

SEQ ID NO: 806034 - DNA, 19 bp, Mus musculus
  siRNA target sequence for 6530401L14Rik (NM_181416.2,2881-2899).
gtttaataaactttctcta

SEQ ID NO: 806035 - DNA, 19 bp, Mus musculus
  siRNA target sequence for 6530401L14Rik (NM_181416.2,2923-2941).
gaagtcacctcttaaattt

SEQ ID NO: 806036 - DNA, 19 bp, Mus musculus
  siRNA target sequence for 6530401L14Rik (NM_181416.2,2957-2975).
cgtcagtccgtcagaagaa

SEQ ID NO: 806037 - DNA, 19 bp, Mus musculus
  siRNA target sequence for 6530401L14Rik (NM_181416.2,2958-2976).
gtcagtccgtcagaagaat

SEQ ID NO: 806038 - DNA, 19 bp, Mus musculus
  siRNA target sequence for 6530401L14Rik (NM_181416.2,2960-2978).
cagtccgtcagaagaatta

SEQ ID NO: 806039 - DNA, 19 bp, Mus musculus
  siRNA target sequence for 6530401L14Rik (NM_181416.2,2965-2983).
cgtcagaagaattaattct

SEQ ID NO: 806040 - DNA, 19 bp, Mus musculus
  siRNA target sequence for 6530401L14Rik (NM_181416.2,3045-3063).
ctcctctcgttaaatcagt

SEQ ID NO: 806041 - DNA, 19 bp, Mus musculus
  siRNA target sequence for 6530401L14Rik (NM_181416.2,3140-3158).
ctcgaagcacagaagtcta

SEQ ID NO: 806042 - DNA, 19 bp, Mus musculus
  siRNA target sequence for 6530401L14Rik (NM_181416.2,3149-3167).
cagaagtctacgtcttgta

SEQ ID NO: 806043 - DNA, 19 bp, Mus musculus
  siRNA target sequence for 6530401L14Rik (NM_181416.2,3151-3169).
gaagtctacgtcttgtaat

SEQ ID NO: 806044 - DNA, 19 bp, Mus musculus
  siRNA target sequence for 6530401L14Rik (NM_181416.2,3154-3172).
gtctacgtcttgtaataaa

SEQ ID NO: 806045 - DNA, 19 bp, Mus musculus
  siRNA target sequence for 6530401L14Rik (NM_181416.2,3160-3178).
gtcttgtaataaatcaagt

SEQ ID NO: 806046 - DNA, 19 bp, Mus musculus
  siRNA target sequence for 6530401L14Rik (NM_181416.2,3177-3195).
gtgttgagttaacttctaa

SEQ ID NO: 806047 - DNA, 19 bp, Mus musculus
  siRNA target sequence for 6530401L14Rik (NM_181416.2,3179-3197).
gttgagttaacttctaaat

SEQ ID NO: 806048 - DNA, 19 bp, Mus musculus
  siRNA target sequence for 6530401L14Rik (NM_181416.2,3242-3260).
cttgggactcccagacttt

SEQ ID NO: 806049 - DNA, 19 bp, Mus musculus
  siRNA target sequence for 6530401L14Rik (NM_181416.2,3245-3263).
gggactcccagactttgta

SEQ ID NO: 806050 - DNA, 19 bp, Mus musculus
  siRNA target sequence for 6530401L14Rik (NM_181416.2,3246-3264).
ggactcccagactttgtaa

SEQ ID NO: 806051 - DNA, 19 bp, Mus musculus
  siRNA target sequence for 6530401L14Rik (NM_181416.2,3265-3283).
gcaggagaacaaatctaat

SEQ ID NO: 806052 - DNA, 19 bp, Mus musculus
  siRNA target sequence for 6530401L14Rik (NM_181416.2,3315-3333).
cgaatcatgagagattaaa

SEQ ID NO: 806053 - DNA, 19 bp, Mus musculus
  siRNA target sequence for 6530401L14Rik (NM_181416.2,3418-3436).
gtacaaagggtctcctaaa

SEQ ID NO: 806054 - DNA, 19 bp, Mus musculus
  siRNA target sequence for 6530401L14Rik (NM_181416.2,3426-3444).
ggtctcctaaaaatcctat

SEQ ID NO: 806055 - DNA, 19 bp, Mus musculus
  siRNA target sequence for 6530401L14Rik (NM_181416.2,3427-3445).
gtctcctaaaaatcctatt

SEQ ID NO: 806056 - DNA, 19 bp, Mus musculus
  siRNA target sequence for 2210404N08Rik (NM_181418.2,325-343).
gatcaaggagggttgtgat

SEQ ID NO: 806057 - DNA, 19 bp, Mus musculus
  siRNA target sequence for 2210404N08Rik (NM_181418.2,347-365).
ggatcccatgcggttctat

SEQ ID NO: 806058 - DNA, 19 bp, Mus musculus
  siRNA target sequence for 2210404N08Rik (NM_181418.2,351-369).
cccatgcggttctatcctt

SEQ ID NO: 806059 - DNA, 19 bp, Mus musculus
  siRNA target sequence for 2210404N08Rik (NM_181418.2,496-514).
ctcccttgaggcagttgta

SEQ ID NO: 806060 - DNA, 19 bp, Mus musculus
  siRNA target sequence for 2210404N08Rik (NM_181418.2,525-543).
gccaccactcgctaagctt

SEQ ID NO: 806061 - DNA, 19 bp, Mus musculus
  siRNA target sequence for 2210404N08Rik (NM_181418.2,526-544).
ccaccactcgctaagcttt

SEQ ID NO: 806062 - DNA, 19 bp, Mus musculus
  siRNA target sequence for 2210404N08Rik (NM_181418.2,635-653).
gctgctcgcctcatagaga

SEQ ID NO: 806063 - DNA, 19 bp, Mus musculus
  siRNA target sequence for 2210404N08Rik (NM_181418.2,1142-1160).
cgcctggctctgcagtata

SEQ ID NO: 806064 - DNA, 19 bp, Mus musculus
  siRNA target sequence for 2210404N08Rik (NM_181418.2,1600-1618).
gaggctgcagctaacacaa

SEQ ID NO: 806065 - DNA, 19 bp, Mus musculus
  siRNA target sequence for 2210404N08Rik (NM_181418.2,1826-1844).
ggtcagatgggcaaagtgt

SEQ ID NO: 806066 - DNA, 19 bp, Mus musculus
  siRNA target sequence for Gtpbp5 (NM_181424.2,444-462).
ctagccaccttcttctaca

SEQ ID NO: 806067 - DNA, 19 bp, Mus musculus
  siRNA target sequence for Gtpbp5 (NM_181424.2,675-693).
gaaatggtggacacatcat

SEQ ID NO: 806068 - DNA, 19 bp, Mus musculus
  siRNA target sequence for Gtpbp5 (NM_181424.2,729-747).
cagtcttatcccagtatca

SEQ ID NO: 806069 - DNA, 19 bp, Mus musculus
  siRNA target sequence for Gtpbp5 (NM_181424.2,764-782).
gacggtggcagtaaaaact

SEQ ID NO: 806070 - DNA, 19 bp, Mus musculus
  siRNA target sequence for Gtpbp5 (NM_181424.2,946-964).
caaccgtgcccctgtaact

SEQ ID NO: 806071 - DNA, 19 bp, Mus musculus
  siRNA target sequence for Gtpbp5 (NM_181424.2,1022-1040).
gctcacgctgggatggtat

SEQ ID NO: 806072 - DNA, 19 bp, Mus musculus
  siRNA target sequence for 2610020N02Rik (NM_181470.2,162-180).
gagccagcgagatccttta

SEQ ID NO: 806073 - DNA, 19 bp, Mus musculus
  siRNA target sequence for 2610020N02Rik (NM_181470.2,175-193).
cctttagccgcagatgaaa

SEQ ID NO: 806074 - DNA, 19 bp, Mus musculus
  siRNA target sequence for 2610020N02Rik (NM_181470.2,207-225).
ggttctcttgcctacacaa

SEQ ID NO: 806075 - DNA, 19 bp, Mus musculus
  siRNA target sequence for 2610020N02Rik (NM_181470.2,218-236).
ctacacaaaaggtcaatga

SEQ ID NO: 806076 - DNA, 19 bp, Mus musculus
  siRNA target sequence for 2610020N02Rik (NM_181470.2,260-278).
ggaagtacggcgtgttctt

SEQ ID NO: 806077 - DNA, 19 bp, Mus musculus
  siRNA target sequence for 2610020N02Rik (NM_181470.2,273-291).
gttcttcgacgacgattat

SEQ ID NO: 806078 - DNA, 19 bp, Mus musculus
  siRNA target sequence for 2610020N02Rik (NM_181470.2,280-298).
gacgacgattatgattact

SEQ ID NO: 806079 - DNA, 19 bp, Mus musculus
  siRNA target sequence for 2610020N02Rik (NM_181470.2,485-503).
caggacctcgactggattt

SEQ ID NO: 806080 - DNA, 19 bp, Mus musculus
  siRNA target sequence for 2610020N02Rik (NM_181470.2,488-506).
gacctcgactggattttga

SEQ ID NO: 806081 - DNA, 19 bp, Mus musculus
  siRNA target sequence for 2610020N02Rik (NM_181470.2,516-534).
cgttgcagctcttgatgat

SEQ ID NO: 806082 - DNA, 19 bp, Mus musculus
  siRNA target sequence for 2610020N02Rik (NM_181470.2,520-538).
gcagctcttgatgatgatt

SEQ ID NO: 806083 - DNA, 19 bp, Mus musculus
  siRNA target sequence for 2610020N02Rik (NM_181470.2,742-760).
ccgcaggaagccatgaaaa

SEQ ID NO: 806084 - DNA, 19 bp, Mus musculus
  siRNA target sequence for 2610020N02Rik (NM_181470.2,859-877).
gagaggtttgagaagtttt

SEQ ID NO: 806085 - DNA, 19 bp, Mus musculus
  siRNA target sequence for 2610020N02Rik (NM_181470.2,861-879).
gaggtttgagaagttttat

SEQ ID NO: 806086 - DNA, 19 bp, Mus musculus
  siRNA target sequence for 2610020N02Rik (NM_181470.2,883-901).
cagtatgatgatgttgaaa

SEQ ID NO: 806087 - DNA, 19 bp, Mus musculus
  siRNA target sequence for 2610020N02Rik (NM_181470.2,967-985).
gttttgaatgactactaca

SEQ ID NO: 806088 - DNA, 19 bp, Mus musculus
  siRNA target sequence for 2610020N02Rik (NM_181470.2,995-1013).
cagagaattgtgtaaaatt

SEQ ID NO: 806089 - DNA, 19 bp, Mus musculus
  siRNA target sequence for 2610020N02Rik (NM_181470.2,997-1015).
gagaattgtgtaaaattga

SEQ ID NO: 806090 - DNA, 19 bp, Mus musculus
  siRNA target sequence for 2610020N02Rik (NM_181470.2,999-1017).
gaattgtgtaaaattgagt

SEQ ID NO: 806091 - DNA, 19 bp, Mus musculus
  siRNA target sequence for 2610020N02Rik (NM_181470.2,1049-1067).
caacaaatgagcttgatga

SEQ ID NO: 806092 - DNA, 19 bp, Mus musculus
  siRNA target sequence for 2610020N02Rik (NM_181470.2,1119-1137).
gtgggattgtgaatccatt

SEQ ID NO: 806093 - DNA, 19 bp, Mus musculus
  siRNA target sequence for 2610020N02Rik (NM_181470.2,1165-1183).
cacccacagctcatcaaat

SEQ ID NO: 806094 - DNA, 19 bp, Mus musculus
  siRNA target sequence for 2610020N02Rik (NM_181470.2,1167-1185).
cccacagctcatcaaatat

SEQ ID NO: 806095 - DNA, 19 bp, Mus musculus
  siRNA target sequence for 2610020N02Rik (NM_181470.2,1169-1187).
cacagctcatcaaatatga

SEQ ID NO: 806096 - DNA, 19 bp, Mus musculus
  siRNA target sequence for 2610020N02Rik (NM_181470.2,1190-1208).
caaagcccaaacaaatcca

SEQ ID NO: 806097 - DNA, 19 bp, Mus musculus
  siRNA target sequence for 2610020N02Rik (NM_181470.2,1215-1233).
gtctaagaccggaatacct

SEQ ID NO: 806098 - DNA, 19 bp, Mus musculus
  siRNA target sequence for 2610020N02Rik (NM_181470.2,1221-1239).
gaccggaatacctctcaat

SEQ ID NO: 806099 - DNA, 19 bp, Mus musculus
  siRNA target sequence for 2610020N02Rik (NM_181470.2,1223-1241).
ccggaatacctctcaatgt

SEQ ID NO: 806100 - DNA, 19 bp, Mus musculus
  siRNA target sequence for 2610020N02Rik (NM_181470.2,1225-1243).
ggaatacctctcaatgtct

SEQ ID NO: 806101 - DNA, 19 bp, Mus musculus
  siRNA target sequence for 2610020N02Rik (NM_181470.2,1226-1244).
gaatacctctcaatgtctt

SEQ ID NO: 806102 - DNA, 19 bp, Mus musculus
  siRNA target sequence for 2610020N02Rik (NM_181470.2,1236-1254).
caatgtcttacctaagaaa

SEQ ID NO: 806103 - DNA, 19 bp, Mus musculus
  siRNA target sequence for 2610020N02Rik (NM_181470.2,1276-1294).
gaacggatgcagatgatca

SEQ ID NO: 806104 - DNA, 19 bp, Mus musculus
  siRNA target sequence for 2610020N02Rik (NM_181470.2,1320-1338).
cacccagcctcgttccaaa

SEQ ID NO: 806105 - DNA, 19 bp, Mus musculus
  siRNA target sequence for 2610020N02Rik (NM_181470.2,1323-1341).
ccagcctcgttccaaagat

SEQ ID NO: 806106 - DNA, 19 bp, Mus musculus
  siRNA target sequence for 2610020N02Rik (NM_181470.2,1364-1382).
ccaggaagcaagccataaa

SEQ ID NO: 806107 - DNA, 19 bp, Mus musculus
  siRNA target sequence for 2610020N02Rik (NM_181470.2,1389-1407).
gcggaaggaacgaagagtt

SEQ ID NO: 806108 - DNA, 19 bp, Mus musculus
  siRNA target sequence for 2610020N02Rik (NM_181470.2,1417-1435).
gctaacaagctagcattta

SEQ ID NO: 806109 - DNA, 19 bp, Mus musculus
  siRNA target sequence for 2610020N02Rik (NM_181470.2,1418-1436).
ctaacaagctagcatttaa

SEQ ID NO: 806110 - DNA, 19 bp, Mus musculus
  siRNA target sequence for 2610020N02Rik (NM_181470.2,1462-1480).
gagctactgaacttgaaga

SEQ ID NO: 806111 - DNA, 19 bp, Mus musculus
  siRNA target sequence for 2610020N02Rik (NM_181470.2,1465-1483).
ctactgaacttgaagaaaa

SEQ ID NO: 806112 - DNA, 19 bp, Mus musculus
  siRNA target sequence for Tm6sf2 (NM_181540.2,120-138).
cagtgtcctacctactcaa

SEQ ID NO: 806113 - DNA, 19 bp, Mus musculus
  siRNA target sequence for Tm6sf2 (NM_181540.2,126-144).
cctacctactcaatcaagt

SEQ ID NO: 806114 - DNA, 19 bp, Mus musculus
  siRNA target sequence for Tm6sf2 (NM_181540.2,127-145).
ctacctactcaatcaagtt

SEQ ID NO: 806115 - DNA, 19 bp, Mus musculus
  siRNA target sequence for Tm6sf2 (NM_181540.2,203-221).
ctcttcctggcagtctata

SEQ ID NO: 806116 - DNA, 19 bp, Mus musculus
  siRNA target sequence for Tm6sf2 (NM_181540.2,213-231).
cagtctatagcctatctca

SEQ ID NO: 806117 - DNA, 19 bp, Mus musculus
  siRNA target sequence for Tm6sf2 (NM_181540.2,241-259).
cacctacgaccctctctat

SEQ ID NO: 806118 - DNA, 19 bp, Mus musculus
  siRNA target sequence for Tm6sf2 (NM_181540.2,304-322).
cattgcactccaagaagat

SEQ ID NO: 806119 - DNA, 19 bp, Mus musculus
  siRNA target sequence for Tm6sf2 (NM_181540.2,381-399).
cagcacatggcatcttcat

SEQ ID NO: 806120 - DNA, 19 bp, Mus musculus
  siRNA target sequence for Tm6sf2 (NM_181540.2,383-401).
gcacatggcatcttcatct

SEQ ID NO: 806121 - DNA, 19 bp, Mus musculus
  siRNA target sequence for Tm6sf2 (NM_181540.2,422-440).
cactacctgctctatctga

SEQ ID NO: 806122 - DNA, 19 bp, Mus musculus
  siRNA target sequence for Tm6sf2 (NM_181540.2,449-467).
ggtgccatccgcaaaagga

SEQ ID NO: 806123 - DNA, 19 bp, Mus musculus
  siRNA target sequence for Tm6sf2 (NM_181540.2,450-468).
gtgccatccgcaaaaggaa

SEQ ID NO: 806124 - DNA, 19 bp, Mus musculus
  siRNA target sequence for Tm6sf2 (NM_181540.2,535-553).
gggaaacatccttggtaaa

SEQ ID NO: 806125 - DNA, 19 bp, Mus musculus
  siRNA target sequence for Tm6sf2 (NM_181540.2,536-554).
ggaaacatccttggtaaat

SEQ ID NO: 806126 - DNA, 19 bp, Mus musculus
  siRNA target sequence for Tm6sf2 (NM_181540.2,541-559).
catccttggtaaatacagt

SEQ ID NO: 806127 - DNA, 19 bp, Mus musculus
  siRNA target sequence for Tm6sf2 (NM_181540.2,618-636).
ccggtgtgaggatcttcaa

SEQ ID NO: 806128 - DNA, 19 bp, Mus musculus
  siRNA target sequence for Tm6sf2 (NM_181540.2,721-739).
catagtatacctcatcttt

SEQ ID NO: 806129 - DNA, 19 bp, Mus musculus
  siRNA target sequence for Tm6sf2 (NM_181540.2,762-780).
ggggtctggtggtacttga

SEQ ID NO: 806130 - DNA, 19 bp, Mus musculus
  siRNA target sequence for Tm6sf2 (NM_181540.2,794-812).
gcctgcttcatctatattt

SEQ ID NO: 806131 - DNA, 19 bp, Mus musculus
  siRNA target sequence for Tm6sf2 (NM_181540.2,798-816).
gcttcatctatatttacca

SEQ ID NO: 806132 - DNA, 19 bp, Mus musculus
  siRNA target sequence for Tm6sf2 (NM_181540.2,799-817).
cttcatctatatttaccaa

SEQ ID NO: 806133 - DNA, 19 bp, Mus musculus
  siRNA target sequence for Tm6sf2 (NM_181540.2,944-962).
ccggactgggccttggtat

SEQ ID NO: 806134 - DNA, 19 bp, Mus musculus
  siRNA target sequence for Tm6sf2 (NM_181540.2,945-963).
cggactgggccttggtatt

SEQ ID NO: 806135 - DNA, 19 bp, Mus musculus
  siRNA target sequence for Tm6sf2 (NM_181540.2,949-967).
ctgggccttggtatttgct

SEQ ID NO: 806136 - DNA, 19 bp, Mus musculus
  siRNA target sequence for Tm6sf2 (NM_181540.2,1051-1069).
cacctgggctaccttcttt

SEQ ID NO: 806137 - DNA, 19 bp, Mus musculus
  siRNA target sequence for Pkd1l3 (NM_181544.1,36-54).
cattagaatcggtgtcatt

SEQ ID NO: 806138 - DNA, 19 bp, Mus musculus
  siRNA target sequence for Pkd1l3 (NM_181544.1,47-65).
gtgtcattctgggtgatat

SEQ ID NO: 806139 - DNA, 19 bp, Mus musculus
  siRNA target sequence for Pkd1l3 (NM_181544.1,204-222).
caagcttcggggtttccta

SEQ ID NO: 806140 - DNA, 19 bp, Mus musculus
  siRNA target sequence for Pkd1l3 (NM_181544.1,207-225).
gcttcggggtttcctaaaa

SEQ ID NO: 806141 - DNA, 19 bp, Mus musculus
  siRNA target sequence for Pkd1l3 (NM_181544.1,208-226).
cttcggggtttcctaaaaa

SEQ ID NO: 806142 - DNA, 19 bp, Mus musculus
  siRNA target sequence for Pkd1l3 (NM_181544.1,211-229).
cggggtttcctaaaaagct

SEQ ID NO: 806143 - DNA, 19 bp, Mus musculus
  siRNA target sequence for Pkd1l3 (NM_181544.1,281-299).
gatcgcatccagggataaa

SEQ ID NO: 806144 - DNA, 19 bp, Mus musculus
  siRNA target sequence for Pkd1l3 (NM_181544.1,284-302).
cgcatccagggataaatca

SEQ ID NO: 806145 - DNA, 19 bp, Mus musculus
  siRNA target sequence for Pkd1l3 (NM_181544.1,310-328).
ggtgatgacgtcttaagga

SEQ ID NO: 806146 - DNA, 19 bp, Mus musculus
  siRNA target sequence for Pkd1l3 (NM_181544.1,311-329).
gtgatgacgtcttaaggaa

SEQ ID NO: 806147 - DNA, 19 bp, Mus musculus
  siRNA target sequence for Pkd1l3 (NM_181544.1,353-371).
ccgtggtcacacactctaa

SEQ ID NO: 806148 - DNA, 19 bp, Mus musculus
  siRNA target sequence for Pkd1l3 (NM_181544.1,354-372).
cgtggtcacacactctaat

SEQ ID NO: 806149 - DNA, 19 bp, Mus musculus
  siRNA target sequence for Pkd1l3 (NM_181544.1,357-375).
ggtcacacactctaatgct

SEQ ID NO: 806150 - DNA, 19 bp, Mus musculus
  siRNA target sequence for Pkd1l3 (NM_181544.1,398-416).
gcatagagaagcatcattt

SEQ ID NO: 806151 - DNA, 19 bp, Mus musculus
  siRNA target sequence for Pkd1l3 (NM_181544.1,441-459).
ccctcaaggtgcaagcatt

SEQ ID NO: 806152 - DNA, 19 bp, Mus musculus
  siRNA target sequence for Pkd1l3 (NM_181544.1,455-473).
gcatttggagaaatgagtt

SEQ ID NO: 806153 - DNA, 19 bp, Mus musculus
  siRNA target sequence for Pkd1l3 (NM_181544.1,573-591).
cgctcctcctgagcttttt

SEQ ID NO: 806154 - DNA, 19 bp, Mus musculus
  siRNA target sequence for Pkd1l3 (NM_181544.1,583-601).
gagctttttgagacattgt

SEQ ID NO: 806155 - DNA, 19 bp, Mus musculus
  siRNA target sequence for Pkd1l3 (NM_181544.1,1811-1829).
catggcctgttataacaga

SEQ ID NO: 806156 - DNA, 19 bp, Mus musculus
  siRNA target sequence for Pkd1l3 (NM_181544.1,1836-1854).
caggcctgaatccacaata

SEQ ID NO: 806157 - DNA, 19 bp, Mus musculus
  siRNA target sequence for Pkd1l3 (NM_181544.1,1839-1857).
gcctgaatccacaatacct

SEQ ID NO: 806158 - DNA, 19 bp, Mus musculus
  siRNA target sequence for Pkd1l3 (NM_181544.1,1982-2000).
gggaacgggtcccaacaat

SEQ ID NO: 806159 - DNA, 19 bp, Mus musculus
  siRNA target sequence for Pkd1l3 (NM_181544.1,1983-2001).
ggaacgggtcccaacaatt

SEQ ID NO: 806160 - DNA, 19 bp, Mus musculus
  siRNA target sequence for Pkd1l3 (NM_181544.1,2205-2223).
gcctcttggacgtctaaca

SEQ ID NO: 806161 - DNA, 19 bp, Mus musculus
  siRNA target sequence for Pkd1l3 (NM_181544.1,2206-2224).
cctcttggacgtctaacaa

SEQ ID NO: 806162 - DNA, 19 bp, Mus musculus
  siRNA target sequence for Pkd1l3 (NM_181544.1,2209-2227).
cttggacgtctaacaacaa

SEQ ID NO: 806163 - DNA, 19 bp, Mus musculus
  siRNA target sequence for Pkd1l3 (NM_181544.1,2375-2393).
cctctgctactctgatgtt

SEQ ID NO: 806164 - DNA, 19 bp, Mus musculus
  siRNA target sequence for Pkd1l3 (NM_181544.1,2388-2406).
gatgttgagcagccaaaat

SEQ ID NO: 806165 - DNA, 19 bp, Mus musculus
  siRNA target sequence for Pkd1l3 (NM_181544.1,2419-2437).
cccctgagcacctacactt

SEQ ID NO: 806166 - DNA, 19 bp, Mus musculus
  siRNA target sequence for Pkd1l3 (NM_181544.1,2420-2438).
ccctgagcacctacacttt

SEQ ID NO: 806167 - DNA, 19 bp, Mus musculus
  siRNA target sequence for Pkd1l3 (NM_181544.1,2510-2528).
caggcgtgaaccttcaagt

SEQ ID NO: 806168 - DNA, 19 bp, Mus musculus
  siRNA target sequence for Pkd1l3 (NM_181544.1,2571-2589).
gaacattgttggaagcatt

SEQ ID NO: 806169 - DNA, 19 bp, Mus musculus
  siRNA target sequence for Pkd1l3 (NM_181544.1,2602-2620).
ctgagctctgcttatcagt

SEQ ID NO: 806170 - DNA, 19 bp, Mus musculus
  siRNA target sequence for Pkd1l3 (NM_181544.1,2625-2643).
cagagtccacgacttaata

SEQ ID NO: 806171 - DNA, 19 bp, Mus musculus
  siRNA target sequence for Pkd1l3 (NM_181544.1,2627-2645).
gagtccacgacttaataga

SEQ ID NO: 806172 - DNA, 19 bp, Mus musculus
  siRNA target sequence for Pkd1l3 (NM_181544.1,2631-2649).
ccacgacttaatagaagat

SEQ ID NO: 806173 - DNA, 19 bp, Mus musculus
  siRNA target sequence for Pkd1l3 (NM_181544.1,2632-2650).
cacgacttaatagaagata

SEQ ID NO: 806174 - DNA, 19 bp, Mus musculus
  siRNA target sequence for Pkd1l3 (NM_181544.1,2711-2729).
gtacagaccatttcacaat

SEQ ID NO: 806175 - DNA, 19 bp, Mus musculus
  siRNA target sequence for Pkd1l3 (NM_181544.1,2769-2787).
gaccatcgagcctgaaagt

SEQ ID NO: 806176 - DNA, 19 bp, Mus musculus
  siRNA target sequence for Pkd1l3 (NM_181544.1,2780-2798).
ctgaaagtcccctcctaat

SEQ ID NO: 806177 - DNA, 19 bp, Mus musculus
  siRNA target sequence for Pkd1l3 (NM_181544.1,2782-2800).
gaaagtcccctcctaatga

SEQ ID NO: 806178 - DNA, 19 bp, Mus musculus
  siRNA target sequence for Pkd1l3 (NM_181544.1,2833-2851).
cacactcacttctatctca

SEQ ID NO: 806179 - DNA, 19 bp, Mus musculus
  siRNA target sequence for Pkd1l3 (NM_181544.1,3167-3185).
ggacggtggatgtagaaaa

SEQ ID NO: 806180 - DNA, 19 bp, Mus musculus
  siRNA target sequence for Pkd1l3 (NM_181544.1,3245-3263).
gcctcctaggattctatat

SEQ ID NO: 806181 - DNA, 19 bp, Mus musculus
  siRNA target sequence for Pkd1l3 (NM_181544.1,3276-3294).
gtgggcttccagaaaggat

SEQ ID NO: 806182 - DNA, 19 bp, Mus musculus
  siRNA target sequence for Pkd1l3 (NM_181544.1,3287-3305).
gaaaggatcgagaagatat

SEQ ID NO: 806183 - DNA, 19 bp, Mus musculus
  siRNA target sequence for Pkd1l3 (NM_181544.1,3353-3371).
catcccactaccttatcca

SEQ ID NO: 806184 - DNA, 19 bp, Mus musculus
  siRNA target sequence for Pkd1l3 (NM_181544.1,3414-3432).
ggtcgttatcactctctat

SEQ ID NO: 806185 - DNA, 19 bp, Mus musculus
  siRNA target sequence for Pkd1l3 (NM_181544.1,3493-3511).
cgtggagcactggatgttt

SEQ ID NO: 806186 - DNA, 19 bp, Mus musculus
  siRNA target sequence for Pkd1l3 (NM_181544.1,3579-3597).
cgacagcccttcttggtat

SEQ ID NO: 806187 - DNA, 19 bp, Mus musculus
  siRNA target sequence for Pkd1l3 (NM_181544.1,3643-3661).
catttccagtgcaattgtt

SEQ ID NO: 806188 - DNA, 19 bp, Mus musculus
  siRNA target sequence for Pkd1l3 (NM_181544.1,3747-3765).
gttctcctccacaatcgta

SEQ ID NO: 806189 - DNA, 19 bp, Mus musculus
  siRNA target sequence for Pkd1l3 (NM_181544.1,3752-3770).
cctccacaatcgtagaaaa

SEQ ID NO: 806190 - DNA, 19 bp, Mus musculus
  siRNA target sequence for Pkd1l3 (NM_181544.1,3755-3773).
ccacaatcgtagaaaagtt

SEQ ID NO: 806191 - DNA, 19 bp, Mus musculus
  siRNA target sequence for Pkd1l3 (NM_181544.1,3811-3829).
catccctggaaccagttta

SEQ ID NO: 806192 - DNA, 19 bp, Mus musculus
  siRNA target sequence for Pkd1l3 (NM_181544.1,3872-3890).
gtgacatggtcatcaatat

SEQ ID NO: 806193 - DNA, 19 bp, Mus musculus
  siRNA target sequence for Pkd1l3 (NM_181544.1,3880-3898).
gtcatcaatattatgttct

SEQ ID NO: 806194 - DNA, 19 bp, Mus musculus
  siRNA target sequence for Pkd1l3 (NM_181544.1,3924-3942).
gaggggcaccgaacaacta

SEQ ID NO: 806195 - DNA, 19 bp, Mus musculus
  siRNA target sequence for Pkd1l3 (NM_181544.1,4134-4152).
ggtcaaggaattaaaggaa

SEQ ID NO: 806196 - DNA, 19 bp, Mus musculus
  siRNA target sequence for Pkd1l3 (NM_181544.1,4164-4182).
cctgctcaggagaaataca

SEQ ID NO: 806197 - DNA, 19 bp, Mus musculus
  siRNA target sequence for Pkd1l3 (NM_181544.1,4212-4230).
gtgcagttcttgtgacatt

SEQ ID NO: 806198 - DNA, 19 bp, Mus musculus
  siRNA target sequence for Pkd1l3 (NM_181544.1,4214-4232).
gcagttcttgtgacattaa

SEQ ID NO: 806199 - DNA, 19 bp, Mus musculus
  siRNA target sequence for Pkd1l3 (NM_181544.1,4233-4251).
caagctggcgaagctttta

SEQ ID NO: 806200 - DNA, 19 bp, Mus musculus
  siRNA target sequence for Pkd1l3 (NM_181544.1,4246-4264).
cttttatccggcctcattt

SEQ ID NO: 806201 - DNA, 19 bp, Mus musculus
  siRNA target sequence for Pkd1l3 (NM_181544.1,4257-4275).
cctcatttactgtcactta

SEQ ID NO: 806202 - DNA, 19 bp, Mus musculus
  siRNA target sequence for Pkd1l3 (NM_181544.1,4374-4392).
gagactgaaagcgcattta

SEQ ID NO: 806203 - DNA, 19 bp, Mus musculus
  siRNA target sequence for Pkd1l3 (NM_181544.1,4376-4394).
gactgaaagcgcatttaga

SEQ ID NO: 806204 - DNA, 19 bp, Mus musculus
  siRNA target sequence for Pkd1l3 (NM_181544.1,4441-4459).
gcagtcagccaacttcaaa

SEQ ID NO: 806205 - DNA, 19 bp, Mus musculus
  siRNA target sequence for Pkd1l3 (NM_181544.1,4442-4460).
cagtcagccaacttcaaaa

SEQ ID NO: 806206 - DNA, 19 bp, Mus musculus
  siRNA target sequence for Pkd1l3 (NM_181544.1,4553-4571).
ggaagaagcccatgtcatt

SEQ ID NO: 806207 - DNA, 19 bp, Mus musculus
  siRNA target sequence for Pkd1l3 (NM_181544.1,4554-4572).
gaagaagcccatgtcattt

SEQ ID NO: 806208 - DNA, 19 bp, Mus musculus
  siRNA target sequence for Pkd1l3 (NM_181544.1,4629-4647).
ggcctcggccttttttata

SEQ ID NO: 806209 - DNA, 19 bp, Mus musculus
  siRNA target sequence for Pkd1l3 (NM_181544.1,4683-4701).
caccagctgggttatttca

SEQ ID NO: 806210 - DNA, 19 bp, Mus musculus
  siRNA target sequence for Pkd1l3 (NM_181544.1,4688-4706).
gctgggttatttcaatgat

SEQ ID NO: 806211 - DNA, 19 bp, Mus musculus
  siRNA target sequence for Pkd1l3 (NM_181544.1,4704-4722).
gatgctgtcggtactacaa

SEQ ID NO: 806212 - DNA, 19 bp, Mus musculus
  siRNA target sequence for Pkd1l3 (NM_181544.1,4712-4730).
cggtactacaagacatctt

SEQ ID NO: 806213 - DNA, 19 bp, Mus musculus
  siRNA target sequence for Pkd1l3 (NM_181544.1,4789-4807).
cacatgccgtggcttaaca

SEQ ID NO: 806214 - DNA, 19 bp, Mus musculus
  siRNA target sequence for Pkd1l3 (NM_181544.1,4791-4809).
catgccgtggcttaacaaa

SEQ ID NO: 806215 - DNA, 19 bp, Mus musculus
  siRNA target sequence for Pkd1l3 (NM_181544.1,4795-4813).
ccgtggcttaacaaagaca

SEQ ID NO: 806216 - DNA, 19 bp, Mus musculus
  siRNA target sequence for Pkd1l3 (NM_181544.1,4796-4814).
cgtggcttaacaaagacaa

SEQ ID NO: 806217 - DNA, 19 bp, Mus musculus
  siRNA target sequence for Pkd1l3 (NM_181544.1,4976-4994).
gtggtactctggtgcaaat

SEQ ID NO: 806218 - DNA, 19 bp, Mus musculus
  siRNA target sequence for Pkd1l3 (NM_181544.1,5011-5029).
ctgatgactaccgtctatt

SEQ ID NO: 806219 - DNA, 19 bp, Mus musculus
  siRNA target sequence for Pkd1l3 (NM_181544.1,5013-5031).
gatgactaccgtctattct

SEQ ID NO: 806220 - DNA, 19 bp, Mus musculus
  siRNA target sequence for Pkd1l3 (NM_181544.1,5079-5097).
gttttctcaccgtttctca

SEQ ID NO: 806221 - DNA, 19 bp, Mus musculus
  siRNA target sequence for Pkd1l3 (NM_181544.1,5154-5172).
cctatatggggattacaga

SEQ ID NO: 806222 - DNA, 19 bp, Mus musculus
  siRNA target sequence for Pkd1l3 (NM_181544.1,5161-5179).
ggggattacagaggattta

SEQ ID NO: 806223 - DNA, 19 bp, Mus musculus
  siRNA target sequence for Pkd1l3 (NM_181544.1,5164-5182).
gattacagaggatttatta

SEQ ID NO: 806224 - DNA, 19 bp, Mus musculus
  siRNA target sequence for Pkd1l3 (NM_181544.1,5223-5241).
ccagactcgcattcctaat

SEQ ID NO: 806225 - DNA, 19 bp, Mus musculus
  siRNA target sequence for Pkd1l3 (NM_181544.1,5228-5246).
ctcgcattcctaatgacat

SEQ ID NO: 806226 - DNA, 19 bp, Mus musculus
  siRNA target sequence for Pkd1l3 (NM_181544.1,5230-5248).
cgcattcctaatgacatat

SEQ ID NO: 806227 - DNA, 19 bp, Mus musculus
  siRNA target sequence for Pkd1l3 (NM_181544.1,5257-5275).
ggatctctccacaagcaaa

SEQ ID NO: 806228 - DNA, 19 bp, Mus musculus
  siRNA target sequence for Pkd1l3 (NM_181544.1,5413-5431).
ggggagctagccacttact

SEQ ID NO: 806229 - DNA, 19 bp, Mus musculus
  siRNA target sequence for Pkd1l3 (NM_181544.1,5415-5433).
ggagctagccacttactca

SEQ ID NO: 806230 - DNA, 19 bp, Mus musculus
  siRNA target sequence for Pkd1l3 (NM_181544.1,5430-5448).
ctcaggaggaggctatgtt

SEQ ID NO: 806231 - DNA, 19 bp, Mus musculus
  siRNA target sequence for Pkd1l3 (NM_181544.1,5514-5532).
gctggaccactgcacaaaa

SEQ ID NO: 806232 - DNA, 19 bp, Mus musculus
  siRNA target sequence for Pkd1l3 (NM_181544.1,5550-5568).
cacggtcttcaatgctaat

SEQ ID NO: 806233 - DNA, 19 bp, Mus musculus
  siRNA target sequence for Pkd1l3 (NM_181544.1,5552-5570).
cggtcttcaatgctaatgt

SEQ ID NO: 806234 - DNA, 19 bp, Mus musculus
  siRNA target sequence for Pkd1l3 (NM_181544.1,5554-5572).
gtcttcaatgctaatgtga

SEQ ID NO: 806235 - DNA, 19 bp, Mus musculus
  siRNA target sequence for Pkd1l3 (NM_181544.1,5582-5600).
gtgcggtgaccctcatctt

SEQ ID NO: 806236 - DNA, 19 bp, Mus musculus
  siRNA target sequence for Pkd1l3 (NM_181544.1,5635-5653).
ctgcaactggacagtttaa

SEQ ID NO: 806237 - DNA, 19 bp, Mus musculus
  siRNA target sequence for Pkd1l3 (NM_181544.1,5712-5730).
ccttctcgtctgttactat

SEQ ID NO: 806238 - DNA, 19 bp, Mus musculus
  siRNA target sequence for Pkd1l3 (NM_181544.1,5770-5788).
gcgttcttcactaggaaaa

SEQ ID NO: 806239 - DNA, 19 bp, Mus musculus
  siRNA target sequence for Pkd1l3 (NM_181544.1,5858-5876).
ctctacttcacaaaaagat

SEQ ID NO: 806240 - DNA, 19 bp, Mus musculus
  siRNA target sequence for Pkd1l3 (NM_181544.1,5896-5914).
cgggacaggttcatcagtt

SEQ ID NO: 806241 - DNA, 19 bp, Mus musculus
  siRNA target sequence for Pkd1l3 (NM_181544.1,5897-5915).
gggacaggttcatcagttt

SEQ ID NO: 806242 - DNA, 19 bp, Mus musculus
  siRNA target sequence for Pkd1l3 (NM_181544.1,6057-6075).
cgaggtgctgggctttata

SEQ ID NO: 806243 - DNA, 19 bp, Mus musculus
  siRNA target sequence for Pkd1l3 (NM_181544.1,6061-6079).
gtgctgggctttatactga

SEQ ID NO: 806244 - DNA, 19 bp, Mus musculus
  siRNA target sequence for Pkd1l3 (NM_181544.1,6101-6119).
gctatgccatgactttcaa

SEQ ID NO: 806245 - DNA, 19 bp, Mus musculus
  siRNA target sequence for Pkd1l3 (NM_181544.1,6207-6225).
gcacaaggaggttattgct

SEQ ID NO: 806246 - DNA, 19 bp, Mus musculus
  siRNA target sequence for Pkd1l3 (NM_181544.1,6273-6291).
gatgggacttgtgatcatt

SEQ ID NO: 806247 - DNA, 19 bp, Mus musculus
  siRNA target sequence for Pkd1l3 (NM_181544.1,6355-6373).
gctacactgacagatatgt

SEQ ID NO: 806248 - DNA, 19 bp, Mus musculus
  siRNA target sequence for Slfn8 (NM_181545.2,426-444).
gactatcggagaagaagat

SEQ ID NO: 806249 - DNA, 19 bp, Mus musculus
  siRNA target sequence for Slfn8 (NM_181545.2,814-832).
gataagaaggcatgtatca

SEQ ID NO: 806250 - DNA, 19 bp, Mus musculus
  siRNA target sequence for Slfn8 (NM_181545.2,1011-1029).
cgtccaagcatatatgaaa

SEQ ID NO: 806251 - DNA, 19 bp, Mus musculus
  siRNA target sequence for Slfn8 (NM_181545.2,2271-2289).
cttcatccgggcaaaaaga

SEQ ID NO: 806252 - DNA, 19 bp, Mus musculus
  siRNA target sequence for Slfn8 (NM_181545.2,2424-2442).
ctctcgaagagtgaaaagt

SEQ ID NO: 806253 - DNA, 19 bp, Mus musculus
  siRNA target sequence for Slfn8 (NM_181545.2,2632-2650).
ccccgacagtccctaaaca

SEQ ID NO: 806254 - DNA, 19 bp, Mus musculus
  siRNA target sequence for Slfn8 (NM_181545.2,2633-2651).
cccgacagtccctaaacat

SEQ ID NO: 806255 - DNA, 19 bp, Mus musculus
  siRNA target sequence for Slfn8 (NM_181545.2,2634-2652).
ccgacagtccctaaacatt

SEQ ID NO: 806256 - DNA, 19 bp, Mus musculus
  siRNA target sequence for Slfn8 (NM_181545.2,2636-2654).
gacagtccctaaacattgt

SEQ ID NO: 806257 - DNA, 19 bp, Mus musculus
  siRNA target sequence for Slfn8 (NM_181545.2,2678-2696).
gtgtatcaggcaacattaa

SEQ ID NO: 806258 - DNA, 19 bp, Mus musculus
  siRNA target sequence for Slfn8 (NM_181545.2,2680-2698).
gtatcaggcaacattaaaa

SEQ ID NO: 806259 - DNA, 19 bp, Mus musculus
  siRNA target sequence for Slfn8 (NM_181545.2,2715-2733).
ggaagacatggtaatctat

SEQ ID NO: 806260 - DNA, 19 bp, Mus musculus
  siRNA target sequence for Slfn8 (NM_181545.2,2831-2849).
ctatgttcctcggagaaat

SEQ ID NO: 806261 - DNA, 19 bp, Mus musculus
  siRNA target sequence for Slfn8 (NM_181545.2,2881-2899).
cacgcgtatctctgtgatt

SEQ ID NO: 806262 - DNA, 19 bp, Mus musculus
  siRNA target sequence for Slfn8 (NM_181545.2,2883-2901).
cgcgtatctctgtgattct

SEQ ID NO: 806263 - DNA, 19 bp, Mus musculus
  siRNA target sequence for Slfn8 (NM_181545.2,2885-2903).
cgtatctctgtgattctaa

SEQ ID NO: 806264 - DNA, 19 bp, Mus musculus
  siRNA target sequence for Syt14 (NM_181546.2,89-107).
cctgtggagtacatgaact

SEQ ID NO: 806265 - DNA, 19 bp, Mus musculus
  siRNA target sequence for Syt14 (NM_181546.2,94-112).
ggagtacatgaacttatct

SEQ ID NO: 806266 - DNA, 19 bp, Mus musculus
  siRNA target sequence for Syt14 (NM_181546.2,100-118).
catgaacttatctgtatta

SEQ ID NO: 806267 - DNA, 19 bp, Mus musculus
  siRNA target sequence for Syt14 (NM_181546.2,161-179).
gggtgtttattgtcttgat

SEQ ID NO: 806268 - DNA, 19 bp, Mus musculus
  siRNA target sequence for Syt14 (NM_181546.2,244-262).
cttggttcaggatacaata

SEQ ID NO: 806269 - DNA, 19 bp, Mus musculus
  siRNA target sequence for Syt14 (NM_181546.2,258-276).
caatacacggacgaattca

SEQ ID NO: 806270 - DNA, 19 bp, Mus musculus
  siRNA target sequence for Syt14 (NM_181546.2,266-284).
ggacgaattcacaagataa

SEQ ID NO: 806271 - DNA, 19 bp, Mus musculus
  siRNA target sequence for Syt14 (NM_181546.2,267-285).
gacgaattcacaagataaa

SEQ ID NO: 806272 - DNA, 19 bp, Mus musculus
  siRNA target sequence for Syt14 (NM_181546.2,269-287).
cgaattcacaagataaaat

SEQ ID NO: 806273 - DNA, 19 bp, Mus musculus
  siRNA target sequence for Syt14 (NM_181546.2,275-293).
cacaagataaaatgtataa

SEQ ID NO: 806274 - DNA, 19 bp, Mus musculus
  siRNA target sequence for Syt14 (NM_181546.2,320-338).
gttcatcctctgaaagtga

SEQ ID NO: 806275 - DNA, 19 bp, Mus musculus
  siRNA target sequence for Syt14 (NM_181546.2,502-520).
gacggaaactgcattcaga

SEQ ID NO: 806276 - DNA, 19 bp, Mus musculus
  siRNA target sequence for Syt14 (NM_181546.2,618-636).
ggatgccaagtgtgagatt

SEQ ID NO: 806277 - DNA, 19 bp, Mus musculus
  siRNA target sequence for Syt14 (NM_181546.2,703-721).
gaggccgagagctatcaca

SEQ ID NO: 806278 - DNA, 19 bp, Mus musculus
  siRNA target sequence for Syt14 (NM_181546.2,707-725).
ccgagagctatcacaataa

SEQ ID NO: 806279 - DNA, 19 bp, Mus musculus
  siRNA target sequence for Syt14 (NM_181546.2,708-726).
cgagagctatcacaataaa

SEQ ID NO: 806280 - DNA, 19 bp, Mus musculus
  siRNA target sequence for Syt14 (NM_181546.2,713-731).
gctatcacaataaaggata

SEQ ID NO: 806281 - DNA, 19 bp, Mus musculus
  siRNA target sequence for Syt14 (NM_181546.2,714-732).
ctatcacaataaaggatat

SEQ ID NO: 806282 - DNA, 19 bp, Mus musculus
  siRNA target sequence for Syt14 (NM_181546.2,807-825).
gcttcctaaaccttttgat

SEQ ID NO: 806283 - DNA, 19 bp, Mus musculus
  siRNA target sequence for Syt14 (NM_181546.2,960-978).
ggtacaccttgttcttcta

SEQ ID NO: 806284 - DNA, 19 bp, Mus musculus
  siRNA target sequence for Syt14 (NM_181546.2,1030-1048).
gtcttcacagaaacattca

SEQ ID NO: 806285 - DNA, 19 bp, Mus musculus
  siRNA target sequence for Syt14 (NM_181546.2,1059-1077).
cgttgaatccgagatgatt

SEQ ID NO: 806286 - DNA, 19 bp, Mus musculus
  siRNA target sequence for Syt14 (NM_181546.2,1063-1081).
gaatccgagatgattggaa

SEQ ID NO: 806287 - DNA, 19 bp, Mus musculus
  siRNA target sequence for Syt14 (NM_181546.2,1079-1097).
gaaactatgcagttaggtt

SEQ ID NO: 806288 - DNA, 19 bp, Mus musculus
  siRNA target sequence for Syt14 (NM_181546.2,1083-1101).
ctatgcagttaggtttaga

SEQ ID NO: 806289 - DNA, 19 bp, Mus musculus
  siRNA target sequence for Syt14 (NM_181546.2,1108-1126).
ggtgtccatcgcatgaaga

SEQ ID NO: 806290 - DNA, 19 bp, Mus musculus
  siRNA target sequence for Syt14 (NM_181546.2,1109-1127).
gtgtccatcgcatgaagaa

SEQ ID NO: 806291 - DNA, 19 bp, Mus musculus
  siRNA target sequence for Syt14 (NM_181546.2,1113-1131).
ccatcgcatgaagaaagaa

SEQ ID NO: 806292 - DNA, 19 bp, Mus musculus
  siRNA target sequence for Syt14 (NM_181546.2,1114-1132).
catcgcatgaagaaagaaa

SEQ ID NO: 806293 - DNA, 19 bp, Mus musculus
  siRNA target sequence for Syt14 (NM_181546.2,1281-1299).
ctcctgtcagtctcttcaa

SEQ ID NO: 806294 - DNA, 19 bp, Mus musculus
  siRNA target sequence for Syt14 (NM_181546.2,1342-1360).
gccaccactggaagactat

SEQ ID NO: 806295 - DNA, 19 bp, Mus musculus
  siRNA target sequence for Syt14 (NM_181546.2,1409-1427).
gaccacccaatacatatgt

SEQ ID NO: 806296 - DNA, 19 bp, Mus musculus
  siRNA target sequence for Syt14 (NM_181546.2,1411-1429).
ccacccaatacatatgtta

SEQ ID NO: 806297 - DNA, 19 bp, Mus musculus
  siRNA target sequence for Syt14 (NM_181546.2,1412-1430).
cacccaatacatatgttaa

SEQ ID NO: 806298 - DNA, 19 bp, Mus musculus
  siRNA target sequence for Syt14 (NM_181546.2,1415-1433).
ccaatacatatgttaagtt

SEQ ID NO: 806299 - DNA, 19 bp, Mus musculus
  siRNA target sequence for Syt14 (NM_181546.2,1416-1434).
caatacatatgttaagtta

SEQ ID NO: 806300 - DNA, 19 bp, Mus musculus
  siRNA target sequence for Syt14 (NM_181546.2,1421-1439).
catatgttaagttaacact

SEQ ID NO: 806301 - DNA, 19 bp, Mus musculus
  siRNA target sequence for Syt14 (NM_181546.2,1453-1471).
ggccaagagatgtccaaat

SEQ ID NO: 806302 - DNA, 19 bp, Mus musculus
  siRNA target sequence for Syt14 (NM_181546.2,1504-1522).
ccggtgtacaaggaaactt

SEQ ID NO: 806303 - DNA, 19 bp, Mus musculus
  siRNA target sequence for Syt14 (NM_181546.2,1505-1523).
cggtgtacaaggaaacttt

SEQ ID NO: 806304 - DNA, 19 bp, Mus musculus
  siRNA target sequence for Syt14 (NM_181546.2,1509-1527).
gtacaaggaaacttttgtt

SEQ ID NO: 806305 - DNA, 19 bp, Mus musculus
  siRNA target sequence for Syt14 (NM_181546.2,1553-1571).
ctgacgtgactctgatact

SEQ ID NO: 806306 - DNA, 19 bp, Mus musculus
  siRNA target sequence for Syt14 (NM_181546.2,1606-1624).
gagatgataggctggattt

SEQ ID NO: 806307 - DNA, 19 bp, Mus musculus
  siRNA target sequence for Syt14 (NM_181546.2,1611-1629).
gataggctggatttcctta

SEQ ID NO: 806308 - DNA, 19 bp, Mus musculus
  siRNA target sequence for Syt14 (NM_181546.2,1661-1679).
gacactggactgcaatgaa

SEQ ID NO: 806309 - DNA, 19 bp, Mus musculus
  siRNA target sequence for LOC329416 (NM_181547.2,127-145).
caagcagatcacatctgtt

SEQ ID NO: 806310 - DNA, 19 bp, Mus musculus
  siRNA target sequence for LOC329416 (NM_181547.2,158-176).
gccaacctggagattagct

SEQ ID NO: 806311 - DNA, 19 bp, Mus musculus
  siRNA target sequence for LOC329416 (NM_181547.2,218-236).
gcactacagagcacaaaga

SEQ ID NO: 806312 - DNA, 19 bp, Mus musculus
  siRNA target sequence for LOC329416 (NM_181547.2,376-394).
gagaaagtcgcttgataat

SEQ ID NO: 806313 - DNA, 19 bp, Mus musculus
  siRNA target sequence for LOC329416 (NM_181547.2,406-424).
gacagcaaatcttgttatt

SEQ ID NO: 806314 - DNA, 19 bp, Mus musculus
  siRNA target sequence for LOC329416 (NM_181547.2,489-507).
cacttttccaccttgtaga

SEQ ID NO: 806315 - DNA, 19 bp, Mus musculus
  siRNA target sequence for LOC329416 (NM_181547.2,503-521).
gtagaaagctccaagcaat

SEQ ID NO: 806316 - DNA, 19 bp, Mus musculus
  siRNA target sequence for LOC329416 (NM_181547.2,556-574).
caaactgaaaaaatcaact

SEQ ID NO: 806317 - DNA, 19 bp, Mus musculus
  siRNA target sequence for LOC329416 (NM_181547.2,593-611).
gatgaaagttactaccaaa

SEQ ID NO: 806318 - DNA, 19 bp, Mus musculus
  siRNA target sequence for LOC329416 (NM_181547.2,699-717).
gaattcaacttttatgcaa

SEQ ID NO: 806319 - DNA, 19 bp, Mus musculus
  siRNA target sequence for LOC329416 (NM_181547.2,707-725).
cttttatgcaataacttaa

SEQ ID NO: 806320 - DNA, 19 bp, Mus musculus
  siRNA target sequence for LOC329416 (NM_181547.2,727-745).
ccagtacagccaacatatt

SEQ ID NO: 806321 - DNA, 19 bp, Mus musculus
  siRNA target sequence for LOC329416 (NM_181547.2,728-746).
cagtacagccaacatattt

SEQ ID NO: 806322 - DNA, 19 bp, Mus musculus
  siRNA target sequence for LOC329416 (NM_181547.2,733-751).
cagccaacatatttctctt

SEQ ID NO: 806323 - DNA, 19 bp, Mus musculus
  siRNA target sequence for LOC329416 (NM_181547.2,735-753).
gccaacatatttctctttt

SEQ ID NO: 806324 - DNA, 19 bp, Mus musculus
  siRNA target sequence for LOC329416 (NM_181547.2,846-864).
ctgcaatcctgtctataga

SEQ ID NO: 806325 - DNA, 19 bp, Mus musculus
  siRNA target sequence for LOC329416 (NM_181547.2,929-947).
gagcgacggaagtctttat

SEQ ID NO: 806326 - DNA, 19 bp, Mus musculus
  siRNA target sequence for LOC329416 (NM_181547.2,931-949).
gcgacggaagtctttatta

SEQ ID NO: 806327 - DNA, 19 bp, Mus musculus
  siRNA target sequence for LOC329416 (NM_181547.2,932-950).
cgacggaagtctttattaa

SEQ ID NO: 806328 - DNA, 19 bp, Mus musculus
  siRNA target sequence for LOC329416 (NM_181547.2,933-951).
gacggaagtctttattaaa

SEQ ID NO: 806329 - DNA, 19 bp, Mus musculus
  siRNA target sequence for LOC329416 (NM_181547.2,1105-1123).
gaaactagaccttttgcaa

SEQ ID NO: 806330 - DNA, 19 bp, Mus musculus
  siRNA target sequence for LOC329416 (NM_181547.2,1120-1138).
gcaagcgaactcctacaaa

SEQ ID NO: 806331 - DNA, 19 bp, Mus musculus
  siRNA target sequence for LOC329416 (NM_181547.2,1191-1209).
gtagcacctgcattttcaa

SEQ ID NO: 806332 - DNA, 19 bp, Mus musculus
  siRNA target sequence for LOC329416 (NM_181547.2,1217-1235).
gaaaaggagcactctcata

SEQ ID NO: 806333 - DNA, 19 bp, Mus musculus
  siRNA target sequence for LOC329416 (NM_181547.2,1222-1240).
ggagcactctcatacttat

SEQ ID NO: 806334 - DNA, 19 bp, Mus musculus
  siRNA target sequence for LOC329416 (NM_181547.2,1256-1274).
cctcttttgacgaagagat

SEQ ID NO: 806335 - DNA, 19 bp, Mus musculus
  siRNA target sequence for LOC329416 (NM_181547.2,1356-1374).
ccagcaagcatctttgcaa

SEQ ID NO: 806336 - DNA, 19 bp, Mus musculus
  siRNA target sequence for LOC329416 (NM_181547.2,1357-1375).
cagcaagcatctttgcaaa

SEQ ID NO: 806337 - DNA, 19 bp, Mus musculus
  siRNA target sequence for LOC329416 (NM_181547.2,1367-1385).
ctttgcaaagccttatata

SEQ ID NO: 806338 - DNA, 19 bp, Mus musculus
  siRNA target sequence for LOC329416 (NM_181547.2,1390-1408).
ccaagccaggcaagatgat

SEQ ID NO: 806339 - DNA, 19 bp, Mus musculus
  siRNA target sequence for LOC329416 (NM_181547.2,1398-1416).
ggcaagatgatgagttgaa

SEQ ID NO: 806340 - DNA, 19 bp, Mus musculus
  siRNA target sequence for LOC329416 (NM_181547.2,1411-1429).
gttgaatttggaaaaagga

SEQ ID NO: 806341 - DNA, 19 bp, Mus musculus
  siRNA target sequence for LOC329416 (NM_181547.2,1467-1485).
ggtggttcggctctttaaa

SEQ ID NO: 806342 - DNA, 19 bp, Mus musculus
  siRNA target sequence for LOC329416 (NM_181547.2,1468-1486).
gtggttcggctctttaaaa

SEQ ID NO: 806343 - DNA, 19 bp, Mus musculus
  siRNA target sequence for Eras (NM_181548.2,287-305).
ggcagctacccgagtacaa

SEQ ID NO: 806344 - DNA, 19 bp, Mus musculus
  siRNA target sequence for Eras (NM_181548.2,384-402).
ccatgaccccactatccaa

SEQ ID NO: 806345 - DNA, 19 bp, Mus musculus
  siRNA target sequence for Eras (NM_181548.2,432-450).
caacggaggctacattcta

SEQ ID NO: 806346 - DNA, 19 bp, Mus musculus
  siRNA target sequence for Eras (NM_181548.2,435-453).
cggaggctacattctaaat

SEQ ID NO: 806347 - DNA, 19 bp, Mus musculus
  siRNA target sequence for Eras (NM_181548.2,448-466).
ctaaatgttctggatacat

SEQ ID NO: 806348 - DNA, 19 bp, Mus musculus
  siRNA target sequence for Eras (NM_181548.2,677-695).
ccctccttgctcacaagtt

SEQ ID NO: 806349 - DNA, 19 bp, Mus musculus
  siRNA target sequence for Eras (NM_181548.2,796-814).
gccgaatcaagcaagaaga

SEQ ID NO: 806350 - DNA, 19 bp, Mus musculus
  siRNA target sequence for LOC353287 (NM_181549.2,424-442).
ggaaggagagtttcttaat

SEQ ID NO: 806351 - DNA, 19 bp, Mus musculus
  siRNA target sequence for LOC353287 (NM_181549.2,846-864).
ggaggcaactgggatataa

SEQ ID NO: 806352 - DNA, 19 bp, Mus musculus
  siRNA target sequence for LOC353287 (NM_181549.2,847-865).
gaggcaactgggatataaa

SEQ ID NO: 806353 - DNA, 19 bp, Mus musculus
  siRNA target sequence for LOC353287 (NM_181549.2,991-1009).
gcatgagctgccgaaatct

SEQ ID NO: 806354 - DNA, 19 bp, Mus musculus
  siRNA target sequence for LOC353287 (NM_181549.2,1008-1026).
ctcggacatctcaacatta

SEQ ID NO: 806355 - DNA, 19 bp, Mus musculus
  siRNA target sequence for LOC353287 (NM_181549.2,1011-1029).
ggacatctcaacattagca

SEQ ID NO: 806356 - DNA, 19 bp, Mus musculus
  siRNA target sequence for LOC353287 (NM_181549.2,1103-1121).
cggccaattccggaaagaa

SEQ ID NO: 806357 - DNA, 19 bp, Mus musculus
  siRNA target sequence for LOC353287 (NM_181549.2,1119-1137).
gaagaatgttcctgtatct

SEQ ID NO: 806358 - DNA, 19 bp, Mus musculus
  siRNA target sequence for LOC353287 (NM_181549.2,1549-1567).
ggaatgaccaacgttgtaa

SEQ ID NO: 806359 - DNA, 19 bp, Mus musculus
  siRNA target sequence for LOC353287 (NM_181549.2,1550-1568).
gaatgaccaacgttgtaaa

SEQ ID NO: 806360 - DNA, 19 bp, Mus musculus
  siRNA target sequence for Dsg4 (NM_181564.2,142-160).
ggcttctcttcagaaatat

SEQ ID NO: 806361 - DNA, 19 bp, Mus musculus
  siRNA target sequence for Dsg4 (NM_181564.2,185-203).
ggtactgggagtaaacagt

SEQ ID NO: 806362 - DNA, 19 bp, Mus musculus
  siRNA target sequence for Dsg4 (NM_181564.2,189-207).
ctgggagtaaacagtgaat

SEQ ID NO: 806363 - DNA, 19 bp, Mus musculus
  siRNA target sequence for Dsg4 (NM_181564.2,192-210).
ggagtaaacagtgaattta

SEQ ID NO: 806364 - DNA, 19 bp, Mus musculus
  siRNA target sequence for Dsg4 (NM_181564.2,212-230).
cgttgaggtaaaagaatta

SEQ ID NO: 806365 - DNA, 19 bp, Mus musculus
  siRNA target sequence for Dsg4 (NM_181564.2,278-296).
gcgggagtggatcaagttt

SEQ ID NO: 806366 - DNA, 19 bp, Mus musculus
  siRNA target sequence for Dsg4 (NM_181564.2,335-353).
gaatccaattgccagaatt

SEQ ID NO: 806367 - DNA, 19 bp, Mus musculus
  siRNA target sequence for Dsg4 (NM_181564.2,380-398).
gataacctatcgaatctct

SEQ ID NO: 806368 - DNA, 19 bp, Mus musculus
  siRNA target sequence for Dsg4 (NM_181564.2,395-413).
ctctggagcggggattgat

SEQ ID NO: 806369 - DNA, 19 bp, Mus musculus
  siRNA target sequence for Dsg4 (NM_181564.2,447-465).
cggactggagaaatcaata

SEQ ID NO: 806370 - DNA, 19 bp, Mus musculus
  siRNA target sequence for Dsg4 (NM_181564.2,449-467).
gactggagaaatcaatatt

SEQ ID NO: 806371 - DNA, 19 bp, Mus musculus
  siRNA target sequence for Dsg4 (NM_181564.2,495-513).
ccactgttcctgatccatt

SEQ ID NO: 806372 - DNA, 19 bp, Mus musculus
  siRNA target sequence for Dsg4 (NM_181564.2,596-614).
cccagtcttcactcagaat

SEQ ID NO: 806373 - DNA, 19 bp, Mus musculus
  siRNA target sequence for Dsg4 (NM_181564.2,654-672).
gcactggtggtaaagttaa

SEQ ID NO: 806374 - DNA, 19 bp, Mus musculus
  siRNA target sequence for Dsg4 (NM_181564.2,690-708).
gaagacaatcacttgaatt

SEQ ID NO: 806375 - DNA, 19 bp, Mus musculus
  siRNA target sequence for Dsg4 (NM_181564.2,744-762).
gctggtgcacccatgttca

SEQ ID NO: 806376 - DNA, 19 bp, Mus musculus
  siRNA target sequence for Dsg4 (NM_181564.2,786-804).
gtccgcacgatgtccaatt

SEQ ID NO: 806377 - DNA, 19 bp, Mus musculus
  siRNA target sequence for Dsg4 (NM_181564.2,791-809).
cacgatgtccaatttcctt

SEQ ID NO: 806378 - DNA, 19 bp, Mus musculus
  siRNA target sequence for Dsg4 (NM_181564.2,814-832).
gagagcaacacagtatgta

SEQ ID NO: 806379 - DNA, 19 bp, Mus musculus
  siRNA target sequence for Dsg4 (NM_181564.2,816-834).
gagcaacacagtatgtaca

SEQ ID NO: 806380 - DNA, 19 bp, Mus musculus
  siRNA target sequence for Dsg4 (NM_181564.2,818-836).
gcaacacagtatgtacaat

SEQ ID NO: 806381 - DNA, 19 bp, Mus musculus
  siRNA target sequence for Dsg4 (NM_181564.2,941-959).
ggagaagacctcatactca

SEQ ID NO: 806382 - DNA, 19 bp, Mus musculus
  siRNA target sequence for Dsg4 (NM_181564.2,952-970).
catactcagcaagtattga

SEQ ID NO: 806383 - DNA, 19 bp, Mus musculus
  siRNA target sequence for Dsg4 (NM_181564.2,1173-1191).
ctcagcattggagttagaa

SEQ ID NO: 806384 - DNA, 19 bp, Mus musculus
  siRNA target sequence for Dsg4 (NM_181564.2,1178-1196).
cattggagttagaaaccaa

SEQ ID NO: 806385 - DNA, 19 bp, Mus musculus
  siRNA target sequence for Dsg4 (NM_181564.2,1209-1227).
cactcagtagcatctcaat

SEQ ID NO: 806386 - DNA, 19 bp, Mus musculus
  siRNA target sequence for Dsg4 (NM_181564.2,1215-1233).
gtagcatctcaattccaaa

SEQ ID NO: 806387 - DNA, 19 bp, Mus musculus
  siRNA target sequence for Dsg4 (NM_181564.2,1219-1237).
catctcaattccaaatgca

SEQ ID NO: 806388 - DNA, 19 bp, Mus musculus
  siRNA target sequence for Dsg4 (NM_181564.2,1248-1266).
gtgagaatccaggttgtta

SEQ ID NO: 806389 - DNA, 19 bp, Mus musculus
  siRNA target sequence for Dsg4 (NM_181564.2,1252-1270).
gaatccaggttgttaacgt

SEQ ID NO: 806390 - DNA, 19 bp, Mus musculus
  siRNA target sequence for Dsg4 (NM_181564.2,1272-1290).
cgggaaggaccgaccttta

SEQ ID NO: 806391 - DNA, 19 bp, Mus musculus
  siRNA target sequence for Dsg4 (NM_181564.2,1291-1309).
gcccaagttccatgacatt

SEQ ID NO: 806392 - DNA, 19 bp, Mus musculus
  siRNA target sequence for Dsg4 (NM_181564.2,1292-1310).
cccaagttccatgacattt

SEQ ID NO: 806393 - DNA, 19 bp, Mus musculus
  siRNA target sequence for Dsg4 (NM_181564.2,1293-1311).
ccaagttccatgacattta

SEQ ID NO: 806394 - DNA, 19 bp, Mus musculus
  siRNA target sequence for Dsg4 (NM_181564.2,1297-1315).
gttccatgacatttagtct

SEQ ID NO: 806395 - DNA, 19 bp, Mus musculus
  siRNA target sequence for Dsg4 (NM_181564.2,1330-1348).
gaggagcctccttaatgaa

SEQ ID NO: 806396 - DNA, 19 bp, Mus musculus
  siRNA target sequence for Dsg4 (NM_181564.2,1332-1350).
ggagcctccttaatgaact

SEQ ID NO: 806397 - DNA, 19 bp, Mus musculus
  siRNA target sequence for Dsg4 (NM_181564.2,1333-1351).
gagcctccttaatgaacta

SEQ ID NO: 806398 - DNA, 19 bp, Mus musculus
  siRNA target sequence for Dsg4 (NM_181564.2,1336-1354).
cctccttaatgaactatgt

SEQ ID NO: 806399 - DNA, 19 bp, Mus musculus
  siRNA target sequence for Dsg4 (NM_181564.2,1436-1454).
cagctggttaaaagttgat

SEQ ID NO: 806400 - DNA, 19 bp, Mus musculus
  siRNA target sequence for Dsg4 (NM_181564.2,1459-1477).
ggactggtgagatacagtt

SEQ ID NO: 806401 - DNA, 19 bp, Mus musculus
  siRNA target sequence for Dsg4 (NM_181564.2,1460-1478).
gactggtgagatacagttt

SEQ ID NO: 806402 - DNA, 19 bp, Mus musculus
  siRNA target sequence for Dsg4 (NM_181564.2,1491-1509).
gacatgaagtcaaaatata

SEQ ID NO: 806403 - DNA, 19 bp, Mus musculus
  siRNA target sequence for Dsg4 (NM_181564.2,1569-1587).
gctacaggaaccatatgca

SEQ ID NO: 806404 - DNA, 19 bp, Mus musculus
  siRNA target sequence for Dsg4 (NM_181564.2,1575-1593).
ggaaccatatgcattgaga

SEQ ID NO: 806405 - DNA, 19 bp, Mus musculus
  siRNA target sequence for Dsg4 (NM_181564.2,1576-1594).
gaaccatatgcattgagat

SEQ ID NO: 806406 - DNA, 19 bp, Mus musculus
  siRNA target sequence for Dsg4 (NM_181564.2,1608-1626).
gattactgtcccgtcattt

SEQ ID NO: 806407 - DNA, 19 bp, Mus musculus
  siRNA target sequence for Dsg4 (NM_181564.2,1673-1691).
ctatgtcaacgatcattct

SEQ ID NO: 806408 - DNA, 19 bp, Mus musculus
  siRNA target sequence for Dsg4 (NM_181564.2,1694-1712).
cgggtctccctttaccttt

SEQ ID NO: 806409 - DNA, 19 bp, Mus musculus
  siRNA target sequence for Dsg4 (NM_181564.2,1697-1715).
gtctccctttaccttttgt

SEQ ID NO: 806410 - DNA, 19 bp, Mus musculus
  siRNA target sequence for Dsg4 (NM_181564.2,1731-1749).
ccagacatagctaatatat

SEQ ID NO: 806411 - DNA, 19 bp, Mus musculus
  siRNA target sequence for Dsg4 (NM_181564.2,1740-1758).
gctaatatatgggatatca

SEQ ID NO: 806412 - DNA, 19 bp, Mus musculus
  siRNA target sequence for Dsg4 (NM_181564.2,1751-1769).
ggatatcaggtccatcaat

SEQ ID NO: 806413 - DNA, 19 bp, Mus musculus
  siRNA target sequence for Dsg4 (NM_181564.2,1770-1788).
ggaacctctgcaatcctta

SEQ ID NO: 806414 - DNA, 19 bp, Mus musculus
  siRNA target sequence for Dsg4 (NM_181564.2,1775-1793).
ctctgcaatccttatgact

SEQ ID NO: 806415 - DNA, 19 bp, Mus musculus
  siRNA target sequence for Dsg4 (NM_181564.2,1790-1808).
gactgagcagactttgtct

SEQ ID NO: 806416 - DNA, 19 bp, Mus musculus
  siRNA target sequence for Dsg4 (NM_181564.2,1807-1825).
ctccaggaccctaccaaat

SEQ ID NO: 806417 - DNA, 19 bp, Mus musculus
  siRNA target sequence for Dsg4 (NM_181564.2,1848-1866).
cacaaccgagcatgtgaat

SEQ ID NO: 806418 - DNA, 19 bp, Mus musculus
  siRNA target sequence for Dsg4 (NM_181564.2,1964-1982).
ggtgactgatgacatgtat

SEQ ID NO: 806419 - DNA, 19 bp, Mus musculus
  siRNA target sequence for Dsg4 (NM_181564.2,2072-2090).
gctcttgtcacccctttta

SEQ ID NO: 806420 - DNA, 19 bp, Mus musculus
  siRNA target sequence for Dsg4 (NM_181564.2,2211-2229).
gacagggatgtatcaaata

SEQ ID NO: 806421 - DNA, 19 bp, Mus musculus
  siRNA target sequence for Dsg4 (NM_181564.2,2213-2231).
cagggatgtatcaaatatt

SEQ ID NO: 806422 - DNA, 19 bp, Mus musculus
  siRNA target sequence for Dsg4 (NM_181564.2,2238-2256).
cccatgacagcctctaata

SEQ ID NO: 806423 - DNA, 19 bp, Mus musculus
  siRNA target sequence for Dsg4 (NM_181564.2,2258-2276).
ccaagatcgcattgattca

SEQ ID NO: 806424 - DNA, 19 bp, Mus musculus
  siRNA target sequence for Dsg4 (NM_181564.2,2259-2277).
caagatcgcattgattcat

SEQ ID NO: 806425 - DNA, 19 bp, Mus musculus
  siRNA target sequence for Dsg4 (NM_181564.2,2265-2283).
cgcattgattcatctgaaa

SEQ ID NO: 806426 - DNA, 19 bp, Mus musculus
  siRNA target sequence for Dsg4 (NM_181564.2,2404-2422).
ggaagaggagttcaactat

SEQ ID NO: 806427 - DNA, 19 bp, Mus musculus
  siRNA target sequence for Dsg4 (NM_181564.2,2405-2423).
gaagaggagttcaactata

SEQ ID NO: 806428 - DNA, 19 bp, Mus musculus
  siRNA target sequence for Dsg4 (NM_181564.2,2425-2443).
ggactcttcgggaatacca

SEQ ID NO: 806429 - DNA, 19 bp, Mus musculus
  siRNA target sequence for Dsg4 (NM_181564.2,2426-2444).
gactcttcgggaataccaa

SEQ ID NO: 806430 - DNA, 19 bp, Mus musculus
  siRNA target sequence for Dsg4 (NM_181564.2,2485-2503).
ccgagaaagcgtatgcata

SEQ ID NO: 806431 - DNA, 19 bp, Mus musculus
  siRNA target sequence for Dsg4 (NM_181564.2,2486-2504).
cgagaaagcgtatgcatat

SEQ ID NO: 806432 - DNA, 19 bp, Mus musculus
  siRNA target sequence for Dsg4 (NM_181564.2,2489-2507).
gaaagcgtatgcatatgca

SEQ ID NO: 806433 - DNA, 19 bp, Mus musculus
  siRNA target sequence for Dsg4 (NM_181564.2,2539-2557).
gcctgctcatttatgatca

SEQ ID NO: 806434 - DNA, 19 bp, Mus musculus
  siRNA target sequence for Dsg4 (NM_181564.2,2599-2617).
gttggattgtggatgactt

SEQ ID NO: 806435 - DNA, 19 bp, Mus musculus
  siRNA target sequence for Dsg4 (NM_181564.2,2615-2633).
cttagacgaaagctacata

SEQ ID NO: 806436 - DNA, 19 bp, Mus musculus
  siRNA target sequence for Dsg4 (NM_181564.2,2672-2690).
ctgcttggacacagagatt

SEQ ID NO: 806437 - DNA, 19 bp, Mus musculus
  siRNA target sequence for Dsg4 (NM_181564.2,2674-2692).
gcttggacacagagattga

SEQ ID NO: 806438 - DNA, 19 bp, Mus musculus
  siRNA target sequence for Dsg4 (NM_181564.2,2706-2724).
caccaggcctgtataccaa

SEQ ID NO: 806439 - DNA, 19 bp, Mus musculus
  siRNA target sequence for Dsg4 (NM_181564.2,2740-2758).
ctctgctggggcctaatta

SEQ ID NO: 806440 - DNA, 19 bp, Mus musculus
  siRNA target sequence for Dsg4 (NM_181564.2,2742-2760).
ctgctggggcctaattact

SEQ ID NO: 806441 - DNA, 19 bp, Mus musculus
  siRNA target sequence for Dsg4 (NM_181564.2,2744-2762).
gctggggcctaattacttt

SEQ ID NO: 806442 - DNA, 19 bp, Mus musculus
  siRNA target sequence for Dsg4 (NM_181564.2,2748-2766).
gggcctaattactttgtca

SEQ ID NO: 806443 - DNA, 19 bp, Mus musculus
  siRNA target sequence for Dsg4 (NM_181564.2,2752-2770).
ctaattactttgtcaatga

SEQ ID NO: 806444 - DNA, 19 bp, Mus musculus
  siRNA target sequence for Dsg4 (NM_181564.2,2785-2803).
ctctctcagaggctgaatt

SEQ ID NO: 806445 - DNA, 19 bp, Mus musculus
  siRNA target sequence for Dsg4 (NM_181564.2,2825-2843).
ctctgaacccatgattcat

SEQ ID NO: 806446 - DNA, 19 bp, Mus musculus
  siRNA target sequence for Dsg4 (NM_181564.2,2837-2855).
gattcatggggacatcata

SEQ ID NO: 806447 - DNA, 19 bp, Mus musculus
  siRNA target sequence for Dsg4 (NM_181564.2,2841-2859).
catggggacatcatagtga

SEQ ID NO: 806448 - DNA, 19 bp, Mus musculus
  siRNA target sequence for Dsg4 (NM_181564.2,2856-2874).
gtgactgagacctacacta

SEQ ID NO: 806449 - DNA, 19 bp, Mus musculus
  siRNA target sequence for Dsg4 (NM_181564.2,2892-2910).
caacccacaacgattgtct

SEQ ID NO: 806450 - DNA, 19 bp, Mus musculus
  siRNA target sequence for Dsg4 (NM_181564.2,2959-2977).
cacctgtctacgatgttca

SEQ ID NO: 806451 - DNA, 19 bp, Mus musculus
  siRNA target sequence for Dsg4 (NM_181564.2,2969-2987).
cgatgttcaagggaacatt

SEQ ID NO: 806452 - DNA, 19 bp, Mus musculus
  siRNA target sequence for Dsg4 (NM_181564.2,3002-3020).
gatagccaacacacacaat

SEQ ID NO: 806453 - DNA, 19 bp, Mus musculus
  siRNA target sequence for Dsg4 (NM_181564.2,3006-3024).
gccaacacacacaatgtat

SEQ ID NO: 806454 - DNA, 19 bp, Mus musculus
  siRNA target sequence for Dsg4 (NM_181564.2,3044-3062).
ggctagccctggtatacct

SEQ ID NO: 806455 - DNA, 19 bp, Mus musculus
  siRNA target sequence for Dsg4 (NM_181564.2,3068-3086).
gggcaacagtaacattagt

SEQ ID NO: 806456 - DNA, 19 bp, Mus musculus
  siRNA target sequence for Dsg4 (NM_181564.2,3070-3088).
gcaacagtaacattagtga

SEQ ID NO: 806457 - DNA, 19 bp, Mus musculus
  siRNA target sequence for Dsg4 (NM_181564.2,3071-3089).
caacagtaacattagtgat

SEQ ID NO: 806458 - DNA, 19 bp, Mus musculus
  siRNA target sequence for Dsg4 (NM_181564.2,3216-3234).
caccgagtaaccagataca

SEQ ID NO: 806459 - DNA, 19 bp, Mus musculus
  siRNA target sequence for Mare (NM_181569.1,120-138).
cgggcagcaggggcaataa

SEQ ID NO: 806460 - DNA, 19 bp, Mus musculus
  siRNA target sequence for Mare (NM_181569.1,261-279).
ccaggttctcggatgttat

SEQ ID NO: 806461 - DNA, 19 bp, Mus musculus
  siRNA target sequence for Mare (NM_181569.1,264-282).
ggttctcggatgttattct

SEQ ID NO: 806462 - DNA, 19 bp, Mus musculus
  siRNA target sequence for Mare (NM_181569.1,308-326).
gaaatgtgcggccaaaaat

SEQ ID NO: 806463 - DNA, 19 bp, Mus musculus
  siRNA target sequence for Mare (NM_181569.1,315-333).
gcggccaaaaatttgaact

SEQ ID NO: 806464 - DNA, 19 bp, Mus musculus
  siRNA target sequence for Mare (NM_181569.1,435-453).
ccatgattctttttaacgt

SEQ ID NO: 806465 - DNA, 19 bp, Mus musculus
  siRNA target sequence for Mare (NM_181569.1,477-495).
ctgatccatcagtgataaa

SEQ ID NO: 806466 - DNA, 19 bp, Mus musculus
  siRNA target sequence for Mare (NM_181569.1,676-694).
ggctcgggacctcaaagaa

SEQ ID NO: 806467 - DNA, 19 bp, Mus musculus
  siRNA target sequence for Mare (NM_181569.1,686-704).
ctcaaagaagcttatgaca

SEQ ID NO: 806468 - DNA, 19 bp, Mus musculus
  siRNA target sequence for Mare (NM_181569.1,720-738).
gtgtggtacggcttcacat

SEQ ID NO: 806469 - DNA, 19 bp, Mus musculus
  siRNA target sequence for Mare (NM_181569.1,722-740).
gtggtacggcttcacatta

SEQ ID NO: 806470 - DNA, 19 bp, Mus musculus
  siRNA target sequence for Mare (NM_181569.1,725-743).
gtacggcttcacattaaca

SEQ ID NO: 806471 - DNA, 19 bp, Mus musculus
  siRNA target sequence for Mare (NM_181569.1,781-799).
ccactatgcagcttcaagt

SEQ ID NO: 806472 - DNA, 19 bp, Mus musculus
  siRNA target sequence for Mare (NM_181569.1,918-936).
ctctggtgcgggtgatcaa

SEQ ID NO: 806473 - DNA, 19 bp, Mus musculus
  siRNA target sequence for Mare (NM_181569.1,1062-1080).
gtgagaacaacgtctatgt

SEQ ID NO: 806474 - DNA, 19 bp, Mus musculus
  siRNA target sequence for Mare (NM_181569.1,1064-1082).
gagaacaacgtctatgtca

SEQ ID NO: 806475 - DNA, 19 bp, Mus musculus
  siRNA target sequence for Mare (NM_181569.1,1113-1131).
ccccgctagctgaacagtt

SEQ ID NO: 806476 - DNA, 19 bp, Mus musculus
  siRNA target sequence for Mare (NM_181569.1,1658-1676).
gagatcatgtacaatgaga

SEQ ID NO: 806477 - DNA, 19 bp, Mus musculus
  siRNA target sequence for Mare (NM_181569.1,1740-1758).
cccatgaggaccctgttat

SEQ ID NO: 806478 - DNA, 19 bp, Mus musculus
  siRNA target sequence for Mare (NM_181569.1,1741-1759).
ccatgaggaccctgttatt

SEQ ID NO: 806479 - DNA, 19 bp, Mus musculus
  siRNA target sequence for E030025D05Rik (NM_181577.2,829-847).
ccacgggcgtggatgatct

SEQ ID NO: 806480 - DNA, 19 bp, Mus musculus
  siRNA target sequence for E030025D05Rik (NM_181577.2,830-848).
cacgggcgtggatgatcta

SEQ ID NO: 806481 - DNA, 19 bp, Mus musculus
  siRNA target sequence for E030025D05Rik (NM_181577.2,833-851).
gggcgtggatgatctatct

SEQ ID NO: 806482 - DNA, 19 bp, Mus musculus
  siRNA target sequence for E030025D05Rik (NM_181577.2,834-852).
ggcgtggatgatctatcta

SEQ ID NO: 806483 - DNA, 19 bp, Mus musculus
  siRNA target sequence for E030025D05Rik (NM_181577.2,835-853).
gcgtggatgatctatctaa

SEQ ID NO: 806484 - DNA, 19 bp, Mus musculus
  siRNA target sequence for E030025D05Rik (NM_181577.2,836-854).
cgtggatgatctatctaaa

SEQ ID NO: 806485 - DNA, 19 bp, Mus musculus
  siRNA target sequence for E030025D05Rik (NM_181577.2,1005-1023).
cgagggctcaaggatatta

SEQ ID NO: 806486 - DNA, 19 bp, Mus musculus
  siRNA target sequence for E030025D05Rik (NM_181577.2,1009-1027).
ggctcaaggatattaacca

SEQ ID NO: 806487 - DNA, 19 bp, Mus musculus
  siRNA target sequence for E030025D05Rik (NM_181577.2,1385-1403).
cactggcagtactgatagt

SEQ ID NO: 806488 - DNA, 19 bp, Mus musculus
  siRNA target sequence for E030025D05Rik (NM_181577.2,1496-1514).
gagcactagccctgaacat

SEQ ID NO: 806489 - DNA, 19 bp, Mus musculus
  siRNA target sequence for E030025D05Rik (NM_181577.2,1501-1519).
ctagccctgaacatctaca

SEQ ID NO: 806490 - DNA, 19 bp, Mus musculus
  siRNA target sequence for E030025D05Rik (NM_181577.2,1810-1828).
caagcccagagcatctcaa

SEQ ID NO: 806491 - DNA, 19 bp, Mus musculus
  siRNA target sequence for E030025D05Rik (NM_181577.2,1843-1861).
ccagccctgatcacaaaca

SEQ ID NO: 806492 - DNA, 19 bp, Mus musculus
  siRNA target sequence for E030025D05Rik (NM_181577.2,1844-1862).
cagccctgatcacaaacat

SEQ ID NO: 806493 - DNA, 19 bp, Mus musculus
  siRNA target sequence for E030025D05Rik (NM_181577.2,1917-1935).
cctgctcaagaggattcat

SEQ ID NO: 806494 - DNA, 19 bp, Mus musculus
  siRNA target sequence for E030025D05Rik (NM_181577.2,1920-1938).
gctcaagaggattcatcat

SEQ ID NO: 806495 - DNA, 19 bp, Mus musculus
  siRNA target sequence for E030025D05Rik (NM_181577.2,2044-2062).
cccagggttcttttaggtt

SEQ ID NO: 806496 - DNA, 19 bp, Mus musculus
  siRNA target sequence for E030025D05Rik (NM_181577.2,2049-2067).
ggttcttttaggttgtcat

SEQ ID NO: 806497 - DNA, 19 bp, Mus musculus
  siRNA target sequence for E030025D05Rik (NM_181577.2,2153-2171).
ggtacattctcttaaggtt

SEQ ID NO: 806498 - DNA, 19 bp, Mus musculus
  siRNA target sequence for E030025D05Rik (NM_181577.2,2209-2227).
ctggaattaggcaacattt

SEQ ID NO: 806499 - DNA, 19 bp, Mus musculus
  siRNA target sequence for E030025D05Rik (NM_181577.2,2211-2229).
ggaattaggcaacatttgt

SEQ ID NO: 806500 - DNA, 19 bp, Mus musculus
  siRNA target sequence for Sirt6 (NM_181586.2,74-92).
gcgggctgcccgagatctt

SEQ ID NO: 806501 - DNA, 19 bp, Mus musculus
  siRNA target sequence for Sirt6 (NM_181586.2,152-170).
cctccagcgtggttttcca

SEQ ID NO: 806502 - DNA, 19 bp, Mus musculus
  siRNA target sequence for Sirt6 (NM_181586.2,414-432).
gctgcacggaaacatgttt

SEQ ID NO: 806503 - DNA, 19 bp, Mus musculus
  siRNA target sequence for Sirt6 (NM_181586.2,439-457).
gaatgtcccaagtgtaaga

SEQ ID NO: 806504 - DNA, 19 bp, Mus musculus
  siRNA target sequence for Sirt6 (NM_181586.2,719-737).
gaggccgtctggtcattgt

SEQ ID NO: 806505 - DNA, 19 bp, Mus musculus
  siRNA target sequence for Sirt6 (NM_181586.2,721-739).
ggccgtctggtcattgtca

SEQ ID NO: 806506 - DNA, 19 bp, Mus musculus
  siRNA target sequence for Sirt6 (NM_181586.2,722-740).
gccgtctggtcattgtcaa

SEQ ID NO: 806507 - DNA, 19 bp, Mus musculus
  siRNA target sequence for Sirt6 (NM_181586.2,854-872).
gaccctgcgtgctagacaa

SEQ ID NO: 806508 - DNA, 19 bp, Mus musculus
  siRNA target sequence for Sirt6 (NM_181586.2,935-953).
gtgcagtgcatgtttcgta

SEQ ID NO: 806509 - DNA, 19 bp, Mus musculus
  siRNA target sequence for Sirt6 (NM_181586.2,937-955).
gcagtgcatgtttcgtata

SEQ ID NO: 806510 - DNA, 19 bp, Mus musculus
  siRNA target sequence for Sirt6 (NM_181586.2,938-956).
cagtgcatgtttcgtataa

SEQ ID NO: 806511 - DNA, 19 bp, Mus musculus
  siRNA target sequence for Sirt6 (NM_181586.2,940-958).
gtgcatgtttcgtataagt

SEQ ID NO: 806512 - DNA, 19 bp, Mus musculus
  siRNA target sequence for 2610318C08Rik (NM_181589.2,94-112).
cagccaagggaaagctaaa

SEQ ID NO: 806513 - DNA, 19 bp, Mus musculus
  siRNA target sequence for 2610318C08Rik (NM_181589.2,118-136).
ccaacgccaagccttatct

SEQ ID NO: 806514 - DNA, 19 bp, Mus musculus
  siRNA target sequence for 2610318C08Rik (NM_181589.2,122-140).
cgccaagccttatctaaaa

SEQ ID NO: 806515 - DNA, 19 bp, Mus musculus
  siRNA target sequence for 2610318C08Rik (NM_181589.2,184-202).
ctggacctaaaaaagatgt

SEQ ID NO: 806516 - DNA, 19 bp, Mus musculus
  siRNA target sequence for 2610318C08Rik (NM_181589.2,198-216).
gatgtttccaatcatgttt

SEQ ID NO: 806517 - DNA, 19 bp, Mus musculus
  siRNA target sequence for 2610318C08Rik (NM_181589.2,210-228).
catgttttgcctagcaaaa

SEQ ID NO: 806518 - DNA, 19 bp, Mus musculus
  siRNA target sequence for 2610318C08Rik (NM_181589.2,232-250).
caagacccatcaacattaa

SEQ ID NO: 806519 - DNA, 19 bp, Mus musculus
  siRNA target sequence for 2610318C08Rik (NM_181589.2,235-253).
gacccatcaacattaaatt

SEQ ID NO: 806520 - DNA, 19 bp, Mus musculus
  siRNA target sequence for 2610318C08Rik (NM_181589.2,238-256).
ccatcaacattaaattcca

SEQ ID NO: 806521 - DNA, 19 bp, Mus musculus
  siRNA target sequence for 2610318C08Rik (NM_181589.2,296-314).
gtcgaagccaccaaaactt

SEQ ID NO: 806522 - DNA, 19 bp, Mus musculus
  siRNA target sequence for 2610318C08Rik (NM_181589.2,324-342).
ggactcacgtcaagatgtt

SEQ ID NO: 806523 - DNA, 19 bp, Mus musculus
  siRNA target sequence for 2610318C08Rik (NM_181589.2,325-343).
gactcacgtcaagatgttt

SEQ ID NO: 806524 - DNA, 19 bp, Mus musculus
  siRNA target sequence for 2610318C08Rik (NM_181589.2,390-408).
cctagagcagtgtcattca

SEQ ID NO: 806525 - DNA, 19 bp, Mus musculus
  siRNA target sequence for 2610318C08Rik (NM_181589.2,441-459).
cctgatatacaggaactaa

SEQ ID NO: 806526 - DNA, 19 bp, Mus musculus
  siRNA target sequence for 2610318C08Rik (NM_181589.2,502-520).
gtacacatcccgagactaa

SEQ ID NO: 806527 - DNA, 19 bp, Mus musculus
  siRNA target sequence for 2610318C08Rik (NM_181589.2,612-630).
gatcctgagttacattcta

SEQ ID NO: 806528 - DNA, 19 bp, Mus musculus
  siRNA target sequence for 2610318C08Rik (NM_181589.2,615-633).
cctgagttacattctataa

SEQ ID NO: 806529 - DNA, 19 bp, Mus musculus
  siRNA target sequence for 2610318C08Rik (NM_181589.2,639-657).
ccaaatactggctcttcta

SEQ ID NO: 806530 - DNA, 19 bp, Mus musculus
  siRNA target sequence for 2610318C08Rik (NM_181589.2,673-691).
gtctggctcctaaacagat

SEQ ID NO: 806531 - DNA, 19 bp, Mus musculus
  siRNA target sequence for 2610318C08Rik (NM_181589.2,678-696).
gctcctaaacagatcttga

SEQ ID NO: 806532 - DNA, 19 bp, Mus musculus
  siRNA target sequence for 2610318C08Rik (NM_181589.2,689-707).
gatcttgagcaaaagttca

SEQ ID NO: 806533 - DNA, 19 bp, Mus musculus
  siRNA target sequence for 2610318C08Rik (NM_181589.2,733-751).
gagctaacaaacagttcat

SEQ ID NO: 806534 - DNA, 19 bp, Mus musculus
  siRNA target sequence for 2610318C08Rik (NM_181589.2,798-816).
cctacagttgcagattcta

SEQ ID NO: 806535 - DNA, 19 bp, Mus musculus
  siRNA target sequence for 2610318C08Rik (NM_181589.2,840-858).
caaacagctccctctcatt

SEQ ID NO: 806536 - DNA, 19 bp, Mus musculus
  siRNA target sequence for 2610318C08Rik (NM_181589.2,859-877).
ccgttccagcccataataa

SEQ ID NO: 806537 - DNA, 19 bp, Mus musculus
  siRNA target sequence for 2610318C08Rik (NM_181589.2,925-943).
cggttaacagggttagata

SEQ ID NO: 806538 - DNA, 19 bp, Mus musculus
  siRNA target sequence for 2610318C08Rik (NM_181589.2,935-953).
ggttagatacggaaaacca

SEQ ID NO: 806539 - DNA, 19 bp, Mus musculus
  siRNA target sequence for 2610318C08Rik (NM_181589.2,940-958).
gatacggaaaaccaaatga

SEQ ID NO: 806540 - DNA, 19 bp, Mus musculus
  siRNA target sequence for 2610318C08Rik (NM_181589.2,971-989).
gtcatgccctgctactgaa

SEQ ID NO: 806541 - DNA, 19 bp, Mus musculus
  siRNA target sequence for 2610318C08Rik (NM_181589.2,976-994).
gccctgctactgaacagaa

SEQ ID NO: 806542 - DNA, 19 bp, Mus musculus
  siRNA target sequence for 2610318C08Rik (NM_181589.2,979-997).
ctgctactgaacagaaagt

SEQ ID NO: 806543 - DNA, 19 bp, Mus musculus
  siRNA target sequence for 2610318C08Rik (NM_181589.2,982-1000).
ctactgaacagaaagtaaa

SEQ ID NO: 806544 - DNA, 19 bp, Mus musculus
  siRNA target sequence for 2610318C08Rik (NM_181589.2,1111-1129).
cgtcatgcgttctgcaaaa

SEQ ID NO: 806545 - DNA, 19 bp, Mus musculus
  siRNA target sequence for 2610318C08Rik (NM_181589.2,1153-1171).
ctaatttgacagctagaaa

SEQ ID NO: 806546 - DNA, 19 bp, Mus musculus
  siRNA target sequence for 2610318C08Rik (NM_181589.2,1165-1183).
ctagaaactttaattcagt

SEQ ID NO: 806547 - DNA, 19 bp, Mus musculus
  siRNA target sequence for 2610318C08Rik (NM_181589.2,1188-1206).
ccaagcacgcctaacatga

SEQ ID NO: 806548 - DNA, 19 bp, Mus musculus
  siRNA target sequence for 2610318C08Rik (NM_181589.2,1219-1237).
cacttaacaataagtacaa

SEQ ID NO: 806549 - DNA, 19 bp, Mus musculus
  siRNA target sequence for 2610318C08Rik (NM_181589.2,1382-1400).
gactcacccacatggtaaa

SEQ ID NO: 806550 - DNA, 19 bp, Mus musculus
  siRNA target sequence for 2610318C08Rik (NM_181589.2,1411-1429).
gagaggatcggagaaaaca

SEQ ID NO: 806551 - DNA, 19 bp, Mus musculus
  siRNA target sequence for 2610318C08Rik (NM_181589.2,1450-1468).
ccaaagggaaaacctataa

SEQ ID NO: 806552 - DNA, 19 bp, Mus musculus
  siRNA target sequence for 2610318C08Rik (NM_181589.2,1470-1488).
cgacctcccatgaaattta

SEQ ID NO: 806553 - DNA, 19 bp, Mus musculus
  siRNA target sequence for 2610318C08Rik (NM_181589.2,1471-1489).
gacctcccatgaaatttaa

SEQ ID NO: 806554 - DNA, 19 bp, Mus musculus
  siRNA target sequence for 2610318C08Rik (NM_181589.2,1531-1549).
ggaagagcattgaaagaga

SEQ ID NO: 806555 - DNA, 19 bp, Mus musculus
  siRNA target sequence for 2610318C08Rik (NM_181589.2,1612-1630).
gtctgaggctcattgaaga

SEQ ID NO: 806556 - DNA, 19 bp, Mus musculus
  siRNA target sequence for 2610318C08Rik (NM_181589.2,1631-1649).
gggtgtacttcctaatgaa

SEQ ID NO: 806557 - DNA, 19 bp, Mus musculus
  siRNA target sequence for 2610318C08Rik (NM_181589.2,1632-1650).
ggtgtacttcctaatgaaa

SEQ ID NO: 806558 - DNA, 19 bp, Mus musculus
  siRNA target sequence for 2610318C08Rik (NM_181589.2,1633-1651).
gtgtacttcctaatgaaat

SEQ ID NO: 806559 - DNA, 19 bp, Mus musculus
  siRNA target sequence for 2610318C08Rik (NM_181589.2,1647-1665).
gaaatattcaccatagtat

SEQ ID NO: 806560 - DNA, 19 bp, Mus musculus
  siRNA target sequence for 2610318C08Rik (NM_181589.2,1658-1676).
catagtatccagtattcct

SEQ ID NO: 806561 - DNA, 19 bp, Mus musculus
  siRNA target sequence for 2610318C08Rik (NM_181589.2,1669-1687).
gtattcctgaggctgaaaa

SEQ ID NO: 806562 - DNA, 19 bp, Mus musculus
  siRNA target sequence for 2610318C08Rik (NM_181589.2,1736-1754).
cacctttgatgctattgga

SEQ ID NO: 806563 - DNA, 19 bp, Mus musculus
  siRNA target sequence for 2610318C08Rik (NM_181589.2,1869-1887).
gctgctggaactaatacca

SEQ ID NO: 806564 - DNA, 19 bp, Mus musculus
  siRNA target sequence for 2610318C08Rik (NM_181589.2,1922-1940).
gcagccttgcccatctcta

SEQ ID NO: 806565 - DNA, 19 bp, Mus musculus
  siRNA target sequence for 2610318C08Rik (NM_181589.2,1923-1941).
cagccttgcccatctctaa

SEQ ID NO: 806566 - DNA, 19 bp, Mus musculus
  siRNA target sequence for 2610318C08Rik (NM_181589.2,1925-1943).
gccttgcccatctctaaca

SEQ ID NO: 806567 - DNA, 19 bp, Mus musculus
  siRNA target sequence for 2610318C08Rik (NM_181589.2,1927-1945).
cttgcccatctctaacaga

SEQ ID NO: 806568 - DNA, 19 bp, Mus musculus
  siRNA target sequence for 2610318C08Rik (NM_181589.2,1972-1990).
cgcggatacctgtttcaga

SEQ ID NO: 806569 - DNA, 19 bp, Mus musculus
  siRNA target sequence for 2610318C08Rik (NM_181589.2,1993-2011).
gggataaccatggtatcaa

SEQ ID NO: 806570 - DNA, 19 bp, Mus musculus
  siRNA target sequence for 2610318C08Rik (NM_181589.2,1994-2012).
ggataaccatggtatcaaa

SEQ ID NO: 806571 - DNA, 19 bp, Mus musculus
  siRNA target sequence for 2610318C08Rik (NM_181589.2,2022-2040).
gctccgatccctagaatat

SEQ ID NO: 806572 - DNA, 19 bp, Mus musculus
  siRNA target sequence for 2610318C08Rik (NM_181589.2,2116-2134).
ctcgctacccagaaatgct

SEQ ID NO: 806573 - DNA, 19 bp, Mus musculus
  siRNA target sequence for 2610318C08Rik (NM_181589.2,2197-2215).
gtttcatcttccgtgaaaa

SEQ ID NO: 806574 - DNA, 19 bp, Mus musculus
  siRNA target sequence for 2610318C08Rik (NM_181589.2,2238-2256).
ggctttgaagtccttgaat

SEQ ID NO: 806575 - DNA, 19 bp, Mus musculus
  siRNA target sequence for 2810403P18Rik (NM_181590.2,186-204).
gggtggacttcaagttcta

SEQ ID NO: 806576 - DNA, 19 bp, Mus musculus
  siRNA target sequence for 2810403P18Rik (NM_181590.2,211-229).
gccgtactttctgagatta

SEQ ID NO: 806577 - DNA, 19 bp, Mus musculus
  siRNA target sequence for 2810403P18Rik (NM_181590.2,212-230).
ccgtactttctgagattaa

SEQ ID NO: 806578 - DNA, 19 bp, Mus musculus
  siRNA target sequence for 2810403P18Rik (NM_181590.2,214-232).
gtactttctgagattaact

SEQ ID NO: 806579 - DNA, 19 bp, Mus musculus
  siRNA target sequence for 2810403P18Rik (NM_181590.2,290-308).
ggaatttttaccattcgat

SEQ ID NO: 806580 - DNA, 19 bp, Mus musculus
  siRNA target sequence for 2810403P18Rik (NM_181590.2,291-309).
gaatttttaccattcgatt

SEQ ID NO: 806581 - DNA, 19 bp, Mus musculus
  siRNA target sequence for 2810403P18Rik (NM_181590.2,321-339).
ctcctggccaacattttga

SEQ ID NO: 806582 - DNA, 19 bp, Mus musculus
  siRNA target sequence for 2810403P18Rik (NM_181590.2,475-493).
cgagcagactccctatgaa

SEQ ID NO: 806583 - DNA, 19 bp, Mus musculus
  siRNA target sequence for 2810403P18Rik (NM_181590.2,491-509).
gaagaggtctcagaaagta

SEQ ID NO: 806584 - DNA, 19 bp, Mus musculus
  siRNA target sequence for 2810403P18Rik (NM_181590.2,514-532).
gcaatcacagtgtcactat

SEQ ID NO: 806585 - DNA, 19 bp, Mus musculus
  siRNA target sequence for 2810403P18Rik (NM_181590.2,519-537).
cacagtgtcactatggatt

SEQ ID NO: 806586 - DNA, 19 bp, Mus musculus
  siRNA target sequence for 2810403P18Rik (NM_181590.2,580-598).
gctgagtgaggttatcgat

SEQ ID NO: 806587 - DNA, 19 bp, Mus musculus
  siRNA target sequence for 2810403P18Rik (NM_181590.2,583-601).
gagtgaggttatcgatatt

SEQ ID NO: 806588 - DNA, 19 bp, Mus musculus
  siRNA target sequence for 2810403P18Rik (NM_181590.2,585-603).
gtgaggttatcgatattaa

SEQ ID NO: 806589 - DNA, 19 bp, Mus musculus
  siRNA target sequence for 2810403P18Rik (NM_181590.2,654-672).
ctgagttggccaaatttga

SEQ ID NO: 806590 - DNA, 19 bp, Mus musculus
  siRNA target sequence for 2810403P18Rik (NM_181590.2,710-728).
gcagttgagcagattttga

SEQ ID NO: 806591 - DNA, 19 bp, Mus musculus
  siRNA target sequence for 2810403P18Rik (NM_181590.2,711-729).
cagttgagcagattttgaa

SEQ ID NO: 806592 - DNA, 19 bp, Mus musculus
  siRNA target sequence for 2810403P18Rik (NM_181590.2,733-751).
cagtccttggtggaatgat

SEQ ID NO: 806593 - DNA, 19 bp, Mus musculus
  siRNA target sequence for 2810403P18Rik (NM_181590.2,799-817).
ggactctgctgcattaggt

SEQ ID NO: 806594 - DNA, 19 bp, Mus musculus
  siRNA target sequence for 2810403P18Rik (NM_181590.2,800-818).
gactctgctgcattaggta

SEQ ID NO: 806595 - DNA, 19 bp, Mus musculus
  siRNA target sequence for 2810403P18Rik (NM_181590.2,815-833).
ggtaagagtgcagttttaa

SEQ ID NO: 806596 - DNA, 19 bp, Mus musculus
  siRNA target sequence for 2810403P18Rik (NM_181590.2,842-860).
ctggatgttcacaaagtct

SEQ ID NO: 806597 - DNA, 19 bp, Mus musculus
  siRNA target sequence for 2810403P18Rik (NM_181590.2,955-973).
cctaaccgaagccttgaaa

SEQ ID NO: 806598 - DNA, 19 bp, Mus musculus
  siRNA target sequence for 2810403P18Rik (NM_181590.2,993-1011).
cccagctggggttagagtt

SEQ ID NO: 806599 - DNA, 19 bp, Mus musculus
  siRNA target sequence for Itpkc (NM_181593.2,535-553).
gctttcgaactgatcttca

SEQ ID NO: 806600 - DNA, 19 bp, Mus musculus
  siRNA target sequence for Itpkc (NM_181593.2,566-584).
ccagtctcggccaaagaga

SEQ ID NO: 806601 - DNA, 19 bp, Mus musculus
  siRNA target sequence for Itpkc (NM_181593.2,598-616).
cccaaccagggtttgatga

SEQ ID NO: 806602 - DNA, 19 bp, Mus musculus
  siRNA target sequence for Itpkc (NM_181593.2,630-648).
ctggacagatccgatatgt

SEQ ID NO: 806603 - DNA, 19 bp, Mus musculus
  siRNA target sequence for Itpkc (NM_181593.2,677-695).
gcccagggttgataacctt

SEQ ID NO: 806604 - DNA, 19 bp, Mus musculus
  siRNA target sequence for Itpkc (NM_181593.2,678-696).
cccagggttgataacctta

SEQ ID NO: 806605 - DNA, 19 bp, Mus musculus
  siRNA target sequence for Itpkc (NM_181593.2,740-758).
cctctcaccagaatcaagt

SEQ ID NO: 806606 - DNA, 19 bp, Mus musculus
  siRNA target sequence for Itpkc (NM_181593.2,1742-1760).
gctgggcttccggattgaa

SEQ ID NO: 806607 - DNA, 19 bp, Mus musculus
  siRNA target sequence for BC022641 (NM_181594.2,137-155).
gcgcgagcatcgacattga

SEQ ID NO: 806608 - DNA, 19 bp, Mus musculus
  siRNA target sequence for BC022641 (NM_181594.2,169-187).
catctgcgggacatactca

SEQ ID NO: 806609 - DNA, 19 bp, Mus musculus
  siRNA target sequence for BC022641 (NM_181594.2,231-249).
gccatccagtgcctacaat

SEQ ID NO: 806610 - DNA, 19 bp, Mus musculus
  siRNA target sequence for BC022641 (NM_181594.2,329-347).
ccatgccacccattaacct

SEQ ID NO: 806611 - DNA, 19 bp, Mus musculus
  siRNA target sequence for BC022641 (NM_181594.2,338-356).
ccattaacctgcaggaaaa

SEQ ID NO: 806612 - DNA, 19 bp, Mus musculus
  siRNA target sequence for BC022641 (NM_181594.2,470-488).
gcaacaaggtgaaaatcca

SEQ ID NO: 806613 - DNA, 19 bp, Mus musculus
  siRNA target sequence for BC022641 (NM_181594.2,486-504).
ccagcctgtcgccaagtat

SEQ ID NO: 806614 - DNA, 19 bp, Mus musculus
  siRNA target sequence for BC022641 (NM_181594.2,510-528).
ggagcagaaatactactat

SEQ ID NO: 806615 - DNA, 19 bp, Mus musculus
  siRNA target sequence for BC022641 (NM_181594.2,570-588).
cattagggctgccaacaat

SEQ ID NO: 806616 - DNA, 19 bp, Mus musculus
  siRNA target sequence for BC022641 (NM_181594.2,631-649).
cggaccctgctcaaaggtt

SEQ ID NO: 806617 - DNA, 19 bp, Mus musculus
  siRNA target sequence for BC022641 (NM_181594.2,632-650).
ggaccctgctcaaaggttt

SEQ ID NO: 806618 - DNA, 19 bp, Mus musculus
  siRNA target sequence for BC022641 (NM_181594.2,636-654).
cctgctcaaaggtttcaca

SEQ ID NO: 806619 - DNA, 19 bp, Mus musculus
  siRNA target sequence for BC022641 (NM_181594.2,663-681).
ggctgatcttgcttttgca

SEQ ID NO: 806620 - DNA, 19 bp, Mus musculus
  siRNA target sequence for BC022641 (NM_181594.2,718-736).
gctggcaatctttttgtgt

SEQ ID NO: 806621 - DNA, 19 bp, Mus musculus
  siRNA target sequence for BC022641 (NM_181594.2,735-753).
gtggcgcttggctcttgtt

SEQ ID NO: 806622 - DNA, 19 bp, Mus musculus
  siRNA target sequence for BC022641 (NM_181594.2,817-835).
cacttccgaaggatcatct

SEQ ID NO: 806623 - DNA, 19 bp, Mus musculus
  siRNA target sequence for BC022641 (NM_181594.2,1089-1107).
caagttctggcagatctat

SEQ ID NO: 806624 - DNA, 19 bp, Mus musculus
  siRNA target sequence for BC022641 (NM_181594.2,1092-1110).
gttctggcagatctatatt

SEQ ID NO: 806625 - DNA, 19 bp, Mus musculus
  siRNA target sequence for BC022641 (NM_181594.2,1368-1386).
ggacctctcagcagagtat

SEQ ID NO: 806626 - DNA, 19 bp, Mus musculus
  siRNA target sequence for BC022641 (NM_181594.2,1374-1392).
ctcagcagagtatttgatt

SEQ ID NO: 806627 - DNA, 19 bp, Mus musculus
  siRNA target sequence for BC022641 (NM_181594.2,1376-1394).
cagcagagtatttgattct

SEQ ID NO: 806628 - DNA, 19 bp, Mus musculus
  siRNA target sequence for BC022641 (NM_181594.2,1383-1401).
gtatttgattcttagtgat

SEQ ID NO: 806629 - DNA, 19 bp, Mus musculus
  siRNA target sequence for BC022641 (NM_181594.2,1408-1426).
cgaaaggtcctctatgtga

SEQ ID NO: 806630 - DNA, 19 bp, Mus musculus
  siRNA target sequence for BC022641 (NM_181594.2,1459-1477).
gcgtgctttagttctatct

SEQ ID NO: 806631 - DNA, 19 bp, Mus musculus
  siRNA target sequence for BC022641 (NM_181594.2,1625-1643).
ccgcagctggtgtgcttat

SEQ ID NO: 806632 - DNA, 19 bp, Mus musculus
  siRNA target sequence for BC022641 (NM_181594.2,1628-1646).
cagctggtgtgcttatcaa

SEQ ID NO: 806633 - DNA, 19 bp, Mus musculus
  siRNA target sequence for BC022641 (NM_181594.2,1662-1680).
cactaaggcactacaagat

SEQ ID NO: 806634 - DNA, 19 bp, Mus musculus
  siRNA target sequence for BC022641 (NM_181594.2,1664-1682).
ctaaggcactacaagatgt

SEQ ID NO: 806635 - DNA, 19 bp, Mus musculus
  siRNA target sequence for BC022641 (NM_181594.2,1744-1762).
gcccacgaggacttcacat

SEQ ID NO: 806636 - DNA, 19 bp, Mus musculus
  siRNA target sequence for BC022641 (NM_181594.2,1745-1763).
cccacgaggacttcacatt

SEQ ID NO: 806637 - DNA, 19 bp, Mus musculus
  siRNA target sequence for BC022641 (NM_181594.2,1885-1903).
gagaccaagcccaagttga

SEQ ID NO: 806638 - DNA, 19 bp, Mus musculus
  siRNA target sequence for BC022641 (NM_181594.2,2195-2213).
caggcccagctgacaagtt

SEQ ID NO: 806639 - DNA, 19 bp, Mus musculus
  siRNA target sequence for BC022641 (NM_181594.2,2199-2217).
cccagctgacaagttgatt

SEQ ID NO: 806640 - DNA, 19 bp, Mus musculus
  siRNA target sequence for BC022641 (NM_181594.2,2203-2221).
gctgacaagttgatttcca

SEQ ID NO: 806641 - DNA, 19 bp, Mus musculus
  siRNA target sequence for BC022641 (NM_181594.2,2318-2336).
cccgttctcctgatgtgat

SEQ ID NO: 806642 - DNA, 19 bp, Mus musculus
  siRNA target sequence for BC022641 (NM_181594.2,2542-2560).
gatggggataggcatagta

SEQ ID NO: 806643 - DNA, 19 bp, Mus musculus
  siRNA target sequence for BC022641 (NM_181594.2,2622-2640).
gcctacggcacctgacatt

SEQ ID NO: 806644 - DNA, 19 bp, Mus musculus
  siRNA target sequence for BC022641 (NM_181594.2,2623-2641).
cctacggcacctgacatta

SEQ ID NO: 806645 - DNA, 19 bp, Mus musculus
  siRNA target sequence for BC022641 (NM_181594.2,2664-2682).
gacagaaaggccaccttat

SEQ ID NO: 806646 - DNA, 19 bp, Mus musculus
  siRNA target sequence for BC022641 (NM_181594.2,2770-2788).
ggaggttttggcagcaaaa

SEQ ID NO: 806647 - DNA, 19 bp, Mus musculus
  siRNA target sequence for BC022641 (NM_181594.2,2771-2789).
gaggttttggcagcaaaat

SEQ ID NO: 806648 - DNA, 19 bp, Mus musculus
  siRNA target sequence for BC022641 (NM_181594.2,3214-3232).
cgcagcgtaagggatgaaa

SEQ ID NO: 806649 - DNA, 19 bp, Mus musculus
  siRNA target sequence for BC022641 (NM_181594.2,3215-3233).
gcagcgtaagggatgaaat

SEQ ID NO: 806650 - DNA, 19 bp, Mus musculus
  siRNA target sequence for BC022641 (NM_181594.2,3220-3238).
gtaagggatgaaatcaaga

SEQ ID NO: 806651 - DNA, 19 bp, Mus musculus
  siRNA target sequence for BC022641 (NM_181594.2,3273-3291).
gcctgttgcaggtcaacta

SEQ ID NO: 806652 - DNA, 19 bp, Mus musculus
  siRNA target sequence for BC022641 (NM_181594.2,3329-3347).
gcagcatgaaagagaatat

SEQ ID NO: 806653 - DNA, 19 bp, Mus musculus
  siRNA target sequence for BC022641 (NM_181594.2,3358-3376).
ctcaagtccaagaacttaa

SEQ ID NO: 806654 - DNA, 19 bp, Mus musculus
  siRNA target sequence for BC022641 (NM_181594.2,3360-3378).
caagtccaagaacttaaca

SEQ ID NO: 806655 - DNA, 19 bp, Mus musculus
  siRNA target sequence for BC022641 (NM_181594.2,3363-3381).
gtccaagaacttaacagat

SEQ ID NO: 806656 - DNA, 19 bp, Mus musculus
  siRNA target sequence for BC022641 (NM_181594.2,3487-3505).
gctatgttccagcaaatca

SEQ ID NO: 806657 - DNA, 19 bp, Mus musculus
  siRNA target sequence for BC022641 (NM_181594.2,3488-3506).
ctatgttccagcaaatcaa

SEQ ID NO: 806658 - DNA, 19 bp, Mus musculus
  siRNA target sequence for BC022641 (NM_181594.2,3499-3517).
caaatcaatgacagcttta

SEQ ID NO: 806659 - DNA, 19 bp, Mus musculus
  siRNA target sequence for BC022641 (NM_181594.2,3722-3740).
gcttgcaggagtcaatctt

SEQ ID NO: 806660 - DNA, 19 bp, Mus musculus
  siRNA target sequence for BC022641 (NM_181594.2,3723-3741).
cttgcaggagtcaatctta

SEQ ID NO: 806661 - DNA, 19 bp, Mus musculus
  siRNA target sequence for BC022641 (NM_181594.2,3732-3750).
gtcaatcttagcacaagta

SEQ ID NO: 806662 - DNA, 19 bp, Mus musculus
  siRNA target sequence for BC022641 (NM_181594.2,3734-3752).
caatcttagcacaagtaca

SEQ ID NO: 806663 - DNA, 19 bp, Mus musculus
  siRNA target sequence for BC022641 (NM_181594.2,3745-3763).
caagtacagcgcattgtca

SEQ ID NO: 806664 - DNA, 19 bp, Mus musculus
  siRNA target sequence for BC022641 (NM_181594.2,4223-4241).
cacacaactcacttagcaa

SEQ ID NO: 806665 - DNA, 19 bp, Mus musculus
  siRNA target sequence for BC022641 (NM_181594.2,4253-4271).
gcctcagcctaatgttaca

SEQ ID NO: 806666 - DNA, 19 bp, Mus musculus
  siRNA target sequence for Ppp1r9a (NM_181595.2,434-452).
ggcactgaaaagtactttt

SEQ ID NO: 806667 - DNA, 19 bp, Mus musculus
  siRNA target sequence for Ppp1r9a (NM_181595.2,528-546).
ggctccaatgtcaacagaa

SEQ ID NO: 806668 - DNA, 19 bp, Mus musculus
  siRNA target sequence for Ppp1r9a (NM_181595.2,532-550).
ccaatgtcaacagaattaa

SEQ ID NO: 806669 - DNA, 19 bp, Mus musculus
  siRNA target sequence for Ppp1r9a (NM_181595.2,584-602).
cgagaatgctgctatcatt

SEQ ID NO: 806670 - DNA, 19 bp, Mus musculus
  siRNA target sequence for Ppp1r9a (NM_181595.2,631-649).
cgtcccctcagagaagaat

SEQ ID NO: 806671 - DNA, 19 bp, Mus musculus
  siRNA target sequence for Ppp1r9a (NM_181595.2,703-721).
cctctgtctctgaacgaat

SEQ ID NO: 806672 - DNA, 19 bp, Mus musculus
  siRNA target sequence for Ppp1r9a (NM_181595.2,708-726).
gtctctgaacgaatcagta

SEQ ID NO: 806673 - DNA, 19 bp, Mus musculus
  siRNA target sequence for Ppp1r9a (NM_181595.2,717-735).
cgaatcagtagatttgaca

SEQ ID NO: 806674 - DNA, 19 bp, Mus musculus
  siRNA target sequence for Ppp1r9a (NM_181595.2,740-758).
gcatgatggcccttcgtat

SEQ ID NO: 806675 - DNA, 19 bp, Mus musculus
  siRNA target sequence for Ppp1r9a (NM_181595.2,744-762).
gatggcccttcgtatgcta

SEQ ID NO: 806676 - DNA, 19 bp, Mus musculus
  siRNA target sequence for Ppp1r9a (NM_181595.2,769-787).
cggagactcgaaagatgtt

SEQ ID NO: 806677 - DNA, 19 bp, Mus musculus
  siRNA target sequence for Ppp1r9a (NM_181595.2,770-788).
ggagactcgaaagatgttt

SEQ ID NO: 806678 - DNA, 19 bp, Mus musculus
  siRNA target sequence for Ppp1r9a (NM_181595.2,1044-1062).
gggcactaccccctcaatt

SEQ ID NO: 806679 - DNA, 19 bp, Mus musculus
  siRNA target sequence for Ppp1r9a (NM_181595.2,1045-1063).
ggcactaccccctcaattt

SEQ ID NO: 806680 - DNA, 19 bp, Mus musculus
  siRNA target sequence for Ppp1r9a (NM_181595.2,1046-1064).
gcactaccccctcaattta

SEQ ID NO: 806681 - DNA, 19 bp, Mus musculus
  siRNA target sequence for Ppp1r9a (NM_181595.2,1049-1067).
ctaccccctcaatttacca

SEQ ID NO: 806682 - DNA, 19 bp, Mus musculus
  siRNA target sequence for Ppp1r9a (NM_181595.2,1055-1073).
cctcaatttaccatctgtt

SEQ ID NO: 806683 - DNA, 19 bp, Mus musculus
  siRNA target sequence for Ppp1r9a (NM_181595.2,1056-1074).
ctcaatttaccatctgtta

SEQ ID NO: 806684 - DNA, 19 bp, Mus musculus
  siRNA target sequence for Ppp1r9a (NM_181595.2,1098-1116).
ggccgtctcaaggattcta

SEQ ID NO: 806685 - DNA, 19 bp, Mus musculus
  siRNA target sequence for Ppp1r9a (NM_181595.2,1099-1117).
gccgtctcaaggattctaa

SEQ ID NO: 806686 - DNA, 19 bp, Mus musculus
  siRNA target sequence for Ppp1r9a (NM_181595.2,1100-1118).
ccgtctcaaggattctaat

SEQ ID NO: 806687 - DNA, 19 bp, Mus musculus
  siRNA target sequence for Ppp1r9a (NM_181595.2,1136-1154).
caaacaagatactgataca

SEQ ID NO: 806688 - DNA, 19 bp, Mus musculus
  siRNA target sequence for Ppp1r9a (NM_181595.2,1202-1220).
gaaaggtacctctttagct

SEQ ID NO: 806689 - DNA, 19 bp, Mus musculus
  siRNA target sequence for Ppp1r9a (NM_181595.2,1207-1225).
gtacctctttagcttcatt

SEQ ID NO: 806690 - DNA, 19 bp, Mus musculus
  siRNA target sequence for Ppp1r9a (NM_181595.2,1287-1305).
gctctggacagcactgata

SEQ ID NO: 806691 - DNA, 19 bp, Mus musculus
  siRNA target sequence for Ppp1r9a (NM_181595.2,1341-1359).
gcaatgccaaagtctcata

SEQ ID NO: 806692 - DNA, 19 bp, Mus musculus
  siRNA target sequence for Ppp1r9a (NM_181595.2,1342-1360).
caatgccaaagtctcatat

SEQ ID NO: 806693 - DNA, 19 bp, Mus musculus
  siRNA target sequence for Ppp1r9a (NM_181595.2,1346-1364).
gccaaagtctcatatcctt

SEQ ID NO: 806694 - DNA, 19 bp, Mus musculus
  siRNA target sequence for Ppp1r9a (NM_181595.2,1372-1390).
ggaacgagccgttagaaga

SEQ ID NO: 806695 - DNA, 19 bp, Mus musculus
  siRNA target sequence for Ppp1r9a (NM_181595.2,1373-1391).
gaacgagccgttagaagat

SEQ ID NO: 806696 - DNA, 19 bp, Mus musculus
  siRNA target sequence for Ppp1r9a (NM_181595.2,1500-1518).
gtacctgaagactcaaaca

SEQ ID NO: 806697 - DNA, 19 bp, Mus musculus
  siRNA target sequence for Ppp1r9a (NM_181595.2,1503-1521).
cctgaagactcaaacagtt

SEQ ID NO: 806698 - DNA, 19 bp, Mus musculus
  siRNA target sequence for Ppp1r9a (NM_181595.2,1504-1522).
ctgaagactcaaacagttt

SEQ ID NO: 806699 - DNA, 19 bp, Mus musculus
  siRNA target sequence for Ppp1r9a (NM_181595.2,1524-1542).
gagagttcccacgtataca

SEQ ID NO: 806700 - DNA, 19 bp, Mus musculus
  siRNA target sequence for Ppp1r9a (NM_181595.2,1569-1587).
gtgagatccaggtataact

SEQ ID NO: 806701 - DNA, 19 bp, Mus musculus
  siRNA target sequence for Ppp1r9a (NM_181595.2,1571-1589).
gagatccaggtataactca

SEQ ID NO: 806702 - DNA, 19 bp, Mus musculus
  siRNA target sequence for Ppp1r9a (NM_181595.2,1603-1621).
caggcacggagcaagatga

SEQ ID NO: 806703 - DNA, 19 bp, Mus musculus
  siRNA target sequence for Ppp1r9a (NM_181595.2,1653-1671).
cagcctgatatggaatact

SEQ ID NO: 806704 - DNA, 19 bp, Mus musculus
  siRNA target sequence for Ppp1r9a (NM_181595.2,1664-1682).
ggaatactcggagatagtt

SEQ ID NO: 806705 - DNA, 19 bp, Mus musculus
  siRNA target sequence for Ppp1r9a (NM_181595.2,1732-1750).
gttgtgctccgattaaggt

SEQ ID NO: 806706 - DNA, 19 bp, Mus musculus
  siRNA target sequence for Ppp1r9a (NM_181595.2,1735-1753).
gtgctccgattaaggtttt

SEQ ID NO: 806707 - DNA, 19 bp, Mus musculus
  siRNA target sequence for Ppp1r9a (NM_181595.2,1740-1758).
ccgattaaggttttcaaca

SEQ ID NO: 806708 - DNA, 19 bp, Mus musculus
  siRNA target sequence for Ppp1r9a (NM_181595.2,1829-1847).
gcttgaaaagcgagtagaa

SEQ ID NO: 806709 - DNA, 19 bp, Mus musculus
  siRNA target sequence for Ppp1r9a (NM_181595.2,1830-1848).
cttgaaaagcgagtagaaa

SEQ ID NO: 806710 - DNA, 19 bp, Mus musculus
  siRNA target sequence for Ppp1r9a (NM_181595.2,1892-1910).
gctgggcataagcatcatt

SEQ ID NO: 806711 - DNA, 19 bp, Mus musculus
  siRNA target sequence for Ppp1r9a (NM_181595.2,1999-2017).
gcaggattcaagtcaatga

SEQ ID NO: 806712 - DNA, 19 bp, Mus musculus
  siRNA target sequence for Ppp1r9a (NM_181595.2,2054-2072).
ggtcacacagaattttgct

SEQ ID NO: 806713 - DNA, 19 bp, Mus musculus
  siRNA target sequence for Ppp1r9a (NM_181595.2,2077-2095).
ccgttctgcggaataccaa

SEQ ID NO: 806714 - DNA, 19 bp, Mus musculus
  siRNA target sequence for Ppp1r9a (NM_181595.2,2096-2114).
gggcaacgtcagattcgtt

SEQ ID NO: 806715 - DNA, 19 bp, Mus musculus
  siRNA target sequence for Ppp1r9a (NM_181595.2,2097-2115).
ggcaacgtcagattcgtta

SEQ ID NO: 806716 - DNA, 19 bp, Mus musculus
  siRNA target sequence for Ppp1r9a (NM_181595.2,2098-2116).
gcaacgtcagattcgttat

SEQ ID NO: 806717 - DNA, 19 bp, Mus musculus
  siRNA target sequence for Ppp1r9a (NM_181595.2,2099-2117).
caacgtcagattcgttatt

SEQ ID NO: 806718 - DNA, 19 bp, Mus musculus
  siRNA target sequence for Ppp1r9a (NM_181595.2,2102-2120).
cgtcagattcgttattgga

SEQ ID NO: 806719 - DNA, 19 bp, Mus musculus
  siRNA target sequence for Ppp1r9a (NM_181595.2,2111-2129).
cgttattggacgagaaaaa

SEQ ID NO: 806720 - DNA, 19 bp, Mus musculus
  siRNA target sequence for Ppp1r9a (NM_181595.2,2145-2163).
gaggttgcccagttgatca

SEQ ID NO: 806721 - DNA, 19 bp, Mus musculus
  siRNA target sequence for Ppp1r9a (NM_181595.2,2198-2216).
gcttctggagcgtcactat

SEQ ID NO: 806722 - DNA, 19 bp, Mus musculus
  siRNA target sequence for Ppp1r9a (NM_181595.2,2237-2255).
cgatgagactggagagtat

SEQ ID NO: 806723 - DNA, 19 bp, Mus musculus
  siRNA target sequence for Ppp1r9a (NM_181595.2,2334-2352).
gagaacgaggacatgtttt

SEQ ID NO: 806724 - DNA, 19 bp, Mus musculus
  siRNA target sequence for Ppp1r9a (NM_181595.2,2424-2442).
gaagcagagattcaaaaat

SEQ ID NO: 806725 - DNA, 19 bp, Mus musculus
  siRNA target sequence for Ppp1r9a (NM_181595.2,2457-2475).
caagcagccgaaaatgaga

SEQ ID NO: 806726 - DNA, 19 bp, Mus musculus
  siRNA target sequence for Ppp1r9a (NM_181595.2,2498-2516).
gaaccaactgcaacagaat

SEQ ID NO: 806727 - DNA, 19 bp, Mus musculus
  siRNA target sequence for Ppp1r9a (NM_181595.2,2560-2578).
ggatcgaggctcagacatt

SEQ ID NO: 806728 - DNA, 19 bp, Mus musculus
  siRNA target sequence for Ppp1r9a (NM_181595.2,2561-2579).
gatcgaggctcagacatta

SEQ ID NO: 806729 - DNA, 19 bp, Mus musculus
  siRNA target sequence for Ppp1r9a (NM_181595.2,2564-2582).
cgaggctcagacattatgt

SEQ ID NO: 806730 - DNA, 19 bp, Mus musculus
  siRNA target sequence for Ppp1r9a (NM_181595.2,2567-2585).
ggctcagacattatgtcat

SEQ ID NO: 806731 - DNA, 19 bp, Mus musculus
  siRNA target sequence for Ppp1r9a (NM_181595.2,2568-2586).
gctcagacattatgtcata

SEQ ID NO: 806732 - DNA, 19 bp, Mus musculus
  siRNA target sequence for Ppp1r9a (NM_181595.2,2587-2605).
cggtgaatgagcatctcaa

SEQ ID NO: 806733 - DNA, 19 bp, Mus musculus
  siRNA target sequence for Ppp1r9a (NM_181595.2,2588-2606).
ggtgaatgagcatctcaaa

SEQ ID NO: 806734 - DNA, 19 bp, Mus musculus
  siRNA target sequence for Ppp1r9a (NM_181595.2,2685-2703).
gagctcgatttcatcaaga

SEQ ID NO: 806735 - DNA, 19 bp, Mus musculus
  siRNA target sequence for Ppp1r9a (NM_181595.2,2768-2786).
cctgcaagttcggattaga

SEQ ID NO: 806736 - DNA, 19 bp, Mus musculus
  siRNA target sequence for Ppp1r9a (NM_181595.2,2771-2789).
gcaagttcggattagagat

SEQ ID NO: 806737 - DNA, 19 bp, Mus musculus
  siRNA target sequence for Ppp1r9a (NM_181595.2,2799-2817).
gaggtgttcagactactaa

SEQ ID NO: 806738 - DNA, 19 bp, Mus musculus
  siRNA target sequence for Ppp1r9a (NM_181595.2,2826-2844).
gggacccaggttaacaaca

SEQ ID NO: 806739 - DNA, 19 bp, Mus musculus
  siRNA target sequence for Ppp1r9a (NM_181595.2,2827-2845).
ggacccaggttaacaacaa

SEQ ID NO: 806740 - DNA, 19 bp, Mus musculus
  siRNA target sequence for Ppp1r9a (NM_181595.2,2893-2911).
gagacactatggagaatgt

SEQ ID NO: 806741 - DNA, 19 bp, Mus musculus
  siRNA target sequence for Ppp1r9a (NM_181595.2,2982-3000).
cgcctggattcgaaagcat

SEQ ID NO: 806742 - DNA, 19 bp, Mus musculus
  siRNA target sequence for Ppp1r9a (NM_181595.2,3049-3067).
caaggacacggctctatga

SEQ ID NO: 806743 - DNA, 19 bp, Mus musculus
  siRNA target sequence for Ppp1r9a (NM_181595.2,3068-3086).
cagcgtcagctcaactgat

SEQ ID NO: 806744 - DNA, 19 bp, Mus musculus
  siRNA target sequence for Ppp1r9a (NM_181595.2,3223-3241).
cggatgagagcctggatat

SEQ ID NO: 806745 - DNA, 19 bp, Mus musculus
  siRNA target sequence for Ppp1r9a (NM_181595.2,3225-3243).
gatgagagcctggatatga

SEQ ID NO: 806746 - DNA, 19 bp, Mus musculus
  siRNA target sequence for Ppp1r9a (NM_181595.2,3327-3345).
caggtgtcccactggttaa

SEQ ID NO: 806747 - DNA, 19 bp, Mus musculus
  siRNA target sequence for Ppp1r9a (NM_181595.2,3330-3348).
gtgtcccactggttaatga

SEQ ID NO: 806748 - DNA, 19 bp, Mus musculus
  siRNA target sequence for Ppp1r9a (NM_181595.2,3363-3381).
cagtacgtgcctgaattca

SEQ ID NO: 806749 - DNA, 19 bp, Mus musculus
  siRNA target sequence for Ppp1r9a (NM_181595.2,3438-3456).
gctcttggaatgacatcat

SEQ ID NO: 806750 - DNA, 19 bp, Mus musculus
  siRNA target sequence for Retnlg (NM_181596.2,112-130).
gaggggaccttagaatcta

SEQ ID NO: 806751 - DNA, 19 bp, Mus musculus
  siRNA target sequence for Retnlg (NM_181596.2,114-132).
ggggaccttagaatctatt

SEQ ID NO: 806752 - DNA, 19 bp, Mus musculus
  siRNA target sequence for Retnlg (NM_181596.2,116-134).
ggaccttagaatctattgt

SEQ ID NO: 806753 - DNA, 19 bp, Mus musculus
  siRNA target sequence for Retnlg (NM_181596.2,195-213).
gactttctcctgtactagt

SEQ ID NO: 806754 - DNA, 19 bp, Mus musculus
  siRNA target sequence for Retnlg (NM_181596.2,240-258).
ctgtccttctggaatgact

SEQ ID NO: 806755 - DNA, 19 bp, Mus musculus
  siRNA target sequence for Crip3 (NM_181664.1,604-622).
gtggacataagatccaaat

SEQ ID NO: 806756 - DNA, 19 bp, Mus musculus
  siRNA target sequence for Dsg1c (NM_181680.1,459-477).
ccccctttttcattatcta

SEQ ID NO: 806757 - DNA, 19 bp, Mus musculus
  siRNA target sequence for Dsg1c (NM_181680.1,461-479).
ccctttttcattatctatt

SEQ ID NO: 806758 - DNA, 19 bp, Mus musculus
  siRNA target sequence for Dsg1c (NM_181680.1,1199-1217).
ctcacagtaactttgatca

SEQ ID NO: 806759 - DNA, 19 bp, Mus musculus
  siRNA target sequence for Dsg1c (NM_181680.1,1224-1242).
ctgtgttaaatgttgtcaa

SEQ ID NO: 806760 - DNA, 19 bp, Mus musculus
  siRNA target sequence for Dsg1c (NM_181680.1,1343-1361).
ggtcaagctacaaacaagt

SEQ ID NO: 806761 - DNA, 19 bp, Mus musculus
  siRNA target sequence for Dsg1c (NM_181680.1,1344-1362).
gtcaagctacaaacaagtt

SEQ ID NO: 806762 - DNA, 19 bp, Mus musculus
  siRNA target sequence for Dsg1c (NM_181680.1,1346-1364).
caagctacaaacaagttca

SEQ ID NO: 806763 - DNA, 19 bp, Mus musculus
  siRNA target sequence for Dsg1c (NM_181680.1,1418-1436).
gttgactcaggcataataa

SEQ ID NO: 806764 - DNA, 19 bp, Mus musculus
  siRNA target sequence for Dsg1c (NM_181680.1,1423-1441).
ctcaggcataataacttta

SEQ ID NO: 806765 - DNA, 19 bp, Mus musculus
  siRNA target sequence for Dsg1c (NM_181680.1,1468-1486).
cgaaaggcttaataagaga

SEQ ID NO: 806766 - DNA, 19 bp, Mus musculus
  siRNA target sequence for Dsg1c (NM_181680.1,1624-1642).
cactccaaacgtagacaat

SEQ ID NO: 806767 - DNA, 19 bp, Mus musculus
  siRNA target sequence for Dsg1c (NM_181680.1,1626-1644).
ctccaaacgtagacaatgt

SEQ ID NO: 806768 - DNA, 19 bp, Mus musculus
  siRNA target sequence for Dsg1c (NM_181680.1,1629-1647).
caaacgtagacaatgttca

SEQ ID NO: 806769 - DNA, 19 bp, Mus musculus
  siRNA target sequence for BC005764 (NM_181681.1,587-605).
cactcctgccttgctttta

SEQ ID NO: 806770 - DNA, 19 bp, Mus musculus
  siRNA target sequence for BC005764 (NM_181681.1,787-805).
gcacctgcggcctcaatca

SEQ ID NO: 806771 - DNA, 19 bp, Mus musculus
  siRNA target sequence for BC005764 (NM_181681.1,788-806).
cacctgcggcctcaatcat

SEQ ID NO: 806772 - DNA, 19 bp, Mus musculus
  siRNA target sequence for BC005764 (NM_181681.1,1025-1043).
cggtctgcaaacccaatta

SEQ ID NO: 806773 - DNA, 19 bp, Mus musculus
  siRNA target sequence for BC005764 (NM_181681.1,1180-1198).
gtctacgtgtcgatgtact

SEQ ID NO: 806774 - DNA, 19 bp, Mus musculus
  siRNA target sequence for BC005764 (NM_181681.1,1320-1338).
cgtctacgctggctttctt

SEQ ID NO: 806775 - DNA, 19 bp, Mus musculus
  siRNA target sequence for BC005764 (NM_181681.1,1321-1339).
gtctacgctggctttctta

SEQ ID NO: 806776 - DNA, 19 bp, Mus musculus
  siRNA target sequence for BC005764 (NM_181681.1,1394-1412).
caccacctgcagaaaaggt

SEQ ID NO: 806777 - DNA, 19 bp, Mus musculus
  siRNA target sequence for BC005764 (NM_181681.1,1463-1481).
gccatgagtccatgtatca

SEQ ID NO: 806778 - DNA, 19 bp, Mus musculus
  siRNA target sequence for BC005764 (NM_181681.1,1472-1490).
ccatgtatcagcagaataa

SEQ ID NO: 806779 - DNA, 19 bp, Mus musculus
  siRNA target sequence for BC005764 (NM_181681.1,1476-1494).
gtatcagcagaataagtct

SEQ ID NO: 806780 - DNA, 19 bp, Mus musculus
  siRNA target sequence for BC005764 (NM_181681.1,1549-1567).
gtggctcgagagaagacat

SEQ ID NO: 806781 - DNA, 19 bp, Mus musculus
  siRNA target sequence for BC005764 (NM_181681.1,1739-1757).
cccgttccaggcagcttat

SEQ ID NO: 806782 - DNA, 19 bp, Mus musculus
  siRNA target sequence for BC005764 (NM_181681.1,1758-1776).
cggtgagtggaagcaaaaa

SEQ ID NO: 806783 - DNA, 19 bp, Mus musculus
  siRNA target sequence for BC005764 (NM_181681.1,2278-2296).
gactctgccagcattgtta

SEQ ID NO: 806784 - DNA, 19 bp, Mus musculus
  siRNA target sequence for BC005764 (NM_181681.1,2286-2304).
cagcattgttacaatcgat

SEQ ID NO: 806785 - DNA, 19 bp, Mus musculus
  siRNA target sequence for BC005764 (NM_181681.1,2358-2376).
ggagtggaaggctaaagta

SEQ ID NO: 806786 - DNA, 19 bp, Mus musculus
  siRNA target sequence for BC005764 (NM_181681.1,2410-2428).
ctggcacgcggcttcagaa

SEQ ID NO: 806787 - DNA, 19 bp, Mus musculus
  siRNA target sequence for Dsg1b (NM_181682.1,1701-1719).
gaggcagtggagttaacaa

SEQ ID NO: 806788 - DNA, 19 bp, Mus musculus
  siRNA target sequence for Dsg1b (NM_181682.1,1754-1772).
gaacccgagccctttgaca

SEQ ID NO: 806789 - DNA, 19 bp, Mus musculus
  siRNA target sequence for Defb37 (NM_181683.1,202-220).
ctgcccacgccttcataat

SEQ ID NO: 806790 - DNA, 19 bp, Mus musculus
  siRNA target sequence for Defb37 (NM_181683.1,204-222).
gcccacgccttcataatgt

SEQ ID NO: 806791 - DNA, 19 bp, Mus musculus
  siRNA target sequence for Defb37 (NM_181683.1,205-223).
cccacgccttcataatgta

SEQ ID NO: 806792 - DNA, 19 bp, Mus musculus
  siRNA target sequence for Art3 (NM_181728.1,36-54).
gctggcagccgcagttcta

SEQ ID NO: 806793 - DNA, 19 bp, Mus musculus
  siRNA target sequence for Art3 (NM_181728.1,37-55).
ctggcagccgcagttctaa

SEQ ID NO: 806794 - DNA, 19 bp, Mus musculus
  siRNA target sequence for Art3 (NM_181728.1,41-59).
cagccgcagttctaatgga

SEQ ID NO: 806795 - DNA, 19 bp, Mus musculus
  siRNA target sequence for Art3 (NM_181728.1,104-122).
cgtttgacgacgaatacct

SEQ ID NO: 806796 - DNA, 19 bp, Mus musculus
  siRNA target sequence for Art3 (NM_181728.1,135-153).
cagaatggaatcgaagtat

SEQ ID NO: 806797 - DNA, 19 bp, Mus musculus
  siRNA target sequence for Art3 (NM_181728.1,137-155).
gaatggaatcgaagtatat

SEQ ID NO: 806798 - DNA, 19 bp, Mus musculus
  siRNA target sequence for Art3 (NM_181728.1,374-392).
cccgaagacggtacatcta

SEQ ID NO: 806799 - DNA, 19 bp, Mus musculus
  siRNA target sequence for Art3 (NM_181728.1,375-393).
ccgaagacggtacatctat

SEQ ID NO: 806800 - DNA, 19 bp, Mus musculus
  siRNA target sequence for Art3 (NM_181728.1,376-394).
cgaagacggtacatctata

SEQ ID NO: 806801 - DNA, 19 bp, Mus musculus
  siRNA target sequence for Art3 (NM_181728.1,377-395).
gaagacggtacatctataa

SEQ ID NO: 806802 - DNA, 19 bp, Mus musculus
  siRNA target sequence for Art3 (NM_181728.1,380-398).
gacggtacatctataactt

SEQ ID NO: 806803 - DNA, 19 bp, Mus musculus
  siRNA target sequence for Art3 (NM_181728.1,399-417).
cccgttcaaggcttttcat

SEQ ID NO: 806804 - DNA, 19 bp, Mus musculus
  siRNA target sequence for Art3 (NM_181728.1,451-469).
cgaccttgcgagaaaagtt

SEQ ID NO: 806805 - DNA, 19 bp, Mus musculus
  siRNA target sequence for Art3 (NM_181728.1,454-472).
ccttgcgagaaaagttaca

SEQ ID NO: 806806 - DNA, 19 bp, Mus musculus
  siRNA target sequence for Art3 (NM_181728.1,455-473).
cttgcgagaaaagttacaa

SEQ ID NO: 806807 - DNA, 19 bp, Mus musculus
  siRNA target sequence for Art3 (NM_181728.1,512-530).
cattcggagagcaaaacca

SEQ ID NO: 806808 - DNA, 19 bp, Mus musculus
  siRNA target sequence for Art3 (NM_181728.1,546-564).
cttcacgttggcgtattca

SEQ ID NO: 806809 - DNA, 19 bp, Mus musculus
  siRNA target sequence for Art3 (NM_181728.1,624-642).
cgccgtgggaaagtttctt

SEQ ID NO: 806810 - DNA, 19 bp, Mus musculus
  siRNA target sequence for Art3 (NM_181728.1,626-644).
ccgtgggaaagtttcttaa

SEQ ID NO: 806811 - DNA, 19 bp, Mus musculus
  siRNA target sequence for Art3 (NM_181728.1,652-670).
gacgacagcgttgttttaa

SEQ ID NO: 806812 - DNA, 19 bp, Mus musculus
  siRNA target sequence for Art3 (NM_181728.1,654-672).
cgacagcgttgttttaata

SEQ ID NO: 806813 - DNA, 19 bp, Mus musculus
  siRNA target sequence for Art3 (NM_181728.1,657-675).
cagcgttgttttaatacct

SEQ ID NO: 806814 - DNA, 19 bp, Mus musculus
  siRNA target sequence for Art3 (NM_181728.1,771-789).
cctcgggggtctgaaaaca

SEQ ID NO: 806815 - DNA, 19 bp, Mus musculus
  siRNA target sequence for Art3 (NM_181728.1,774-792).
cgggggtctgaaaacagaa

SEQ ID NO: 806816 - DNA, 19 bp, Mus musculus
  siRNA target sequence for Art3 (NM_181728.1,797-815).
gtatcgcgaacgcagaata

SEQ ID NO: 806817 - DNA, 19 bp, Mus musculus
  siRNA target sequence for Art3 (NM_181728.1,801-819).
cgcgaacgcagaatatatt

SEQ ID NO: 806818 - DNA, 19 bp, Mus musculus
  siRNA target sequence for Art3 (NM_181728.1,803-821).
cgaacgcagaatatattga

SEQ ID NO: 806819 - DNA, 19 bp, Mus musculus
  siRNA target sequence for Art3 (NM_181728.1,849-867).
gtacacacttctacaaaca

SEQ ID NO: 806820 - DNA, 19 bp, Mus musculus
  siRNA target sequence for Art3 (NM_181728.1,870-888).
ccagatatggacaatcaga

SEQ ID NO: 806821 - DNA, 19 bp, Mus musculus
  siRNA target sequence for Art3 (NM_181728.1,871-889).
cagatatggacaatcagaa

SEQ ID NO: 806822 - DNA, 19 bp, Mus musculus
  siRNA target sequence for Art3 (NM_181728.1,966-984).
cctctcctgccggatgaaa

SEQ ID NO: 806823 - DNA, 19 bp, Mus musculus
  siRNA target sequence for Art3 (NM_181728.1,967-985).
ctctcctgccggatgaaaa

SEQ ID NO: 806824 - DNA, 19 bp, Mus musculus
  siRNA target sequence for Art3 (NM_181728.1,1059-1077).
gtcatggcatccaccattt

SEQ ID NO: 806825 - DNA, 19 bp, Mus musculus
  siRNA target sequence for Art3 (NM_181728.1,1061-1079).
catggcatccaccatttta

SEQ ID NO: 806826 - DNA, 19 bp, Mus musculus
  siRNA target sequence for Muc6 (NM_181729.1,51-69).
caggggacccctaatcgat

SEQ ID NO: 806827 - DNA, 19 bp, Mus musculus
  siRNA target sequence for Muc6 (NM_181729.1,101-119).
ccgacactgaggataacct

SEQ ID NO: 806828 - DNA, 19 bp, Mus musculus
  siRNA target sequence for Muc6 (NM_181729.1,176-194).
cctttgacggccatgagta

SEQ ID NO: 806829 - DNA, 19 bp, Mus musculus
  siRNA target sequence for Muc6 (NM_181729.1,181-199).
gacggccatgagtataatt

SEQ ID NO: 806830 - DNA, 19 bp, Mus musculus
  siRNA target sequence for Muc6 (NM_181729.1,205-223).
gggatgtgcaattatatct

SEQ ID NO: 806831 - DNA, 19 bp, Mus musculus
  siRNA target sequence for Muc6 (NM_181729.1,206-224).
ggatgtgcaattatatctt

SEQ ID NO: 806832 - DNA, 19 bp, Mus musculus
  siRNA target sequence for Muc6 (NM_181729.1,207-225).
gatgtgcaattatatcttt

SEQ ID NO: 806833 - DNA, 19 bp, Mus musculus
  siRNA target sequence for Muc6 (NM_181729.1,280-298).
gatatggaggggaatatct

SEQ ID NO: 806834 - DNA, 19 bp, Mus musculus
  siRNA target sequence for Muc6 (NM_181729.1,478-496).
ggtccagacgcccatctta

SEQ ID NO: 806835 - DNA, 19 bp, Mus musculus
  siRNA target sequence for Muc6 (NM_181729.1,536-554).
cattgaagcaagagtctaa

SEQ ID NO: 806836 - DNA, 19 bp, Mus musculus
  siRNA target sequence for Muc6 (NM_181729.1,573-591).
ggggagctccttatgcatt

SEQ ID NO: 806837 - DNA, 19 bp, Mus musculus
  siRNA target sequence for Muc6 (NM_181729.1,592-610).
cccacggagaccaacagta

SEQ ID NO: 806838 - DNA, 19 bp, Mus musculus
  siRNA target sequence for Muc6 (NM_181729.1,668-686).
ggaacttcgatggaaagat

SEQ ID NO: 806839 - DNA, 19 bp, Mus musculus
  siRNA target sequence for Muc6 (NM_181729.1,702-720).
gagtgaggacggcaaactt

SEQ ID NO: 806840 - DNA, 19 bp, Mus musculus
  siRNA target sequence for Muc6 (NM_181729.1,704-722).
gtgaggacggcaaactttt

SEQ ID NO: 806841 - DNA, 19 bp, Mus musculus
  siRNA target sequence for Muc6 (NM_181729.1,718-736).
cttttggaagcccataagt

SEQ ID NO: 806842 - DNA, 19 bp, Mus musculus
  siRNA target sequence for Muc6 (NM_181729.1,724-742).
gaagcccataagtatgcta

SEQ ID NO: 806843 - DNA, 19 bp, Mus musculus
  siRNA target sequence for Muc6 (NM_181729.1,860-878).
ctgggtgtgacgtaccaaa

SEQ ID NO: 806844 - DNA, 19 bp, Mus musculus
  siRNA target sequence for Muc6 (NM_181729.1,1072-1090).
ggtgaggtctgcatcaaga

SEQ ID NO: 806845 - DNA, 19 bp, Mus musculus
  siRNA target sequence for Muc6 (NM_181729.1,1152-1170).
cggtacactgcttgatgat

SEQ ID NO: 806846 - DNA, 19 bp, Mus musculus
  siRNA target sequence for Muc6 (NM_181729.1,1153-1171).
ggtacactgcttgatgata

SEQ ID NO: 806847 - DNA, 19 bp, Mus musculus
  siRNA target sequence for Muc6 (NM_181729.1,1154-1172).
gtacactgcttgatgatat

SEQ ID NO: 806848 - DNA, 19 bp, Mus musculus
  siRNA target sequence for Muc6 (NM_181729.1,1215-1233).
catgctcaatggtatggtt

SEQ ID NO: 806849 - DNA, 19 bp, Mus musculus
  siRNA target sequence for Muc6 (NM_181729.1,1384-1402).
cacggcacctgcacctata

SEQ ID NO: 806850 - DNA, 19 bp, Mus musculus
  siRNA target sequence for Muc6 (NM_181729.1,1386-1404).
cggcacctgcacctatact

SEQ ID NO: 806851 - DNA, 19 bp, Mus musculus
  siRNA target sequence for Muc6 (NM_181729.1,1388-1406).
gcacctgcacctatactct

SEQ ID NO: 806852 - DNA, 19 bp, Mus musculus
  siRNA target sequence for Muc6 (NM_181729.1,1389-1407).
cacctgcacctatactctt

SEQ ID NO: 806853 - DNA, 19 bp, Mus musculus
  siRNA target sequence for Muc6 (NM_181729.1,1437-1455).
caccctcatggctgtgtat

SEQ ID NO: 806854 - DNA, 19 bp, Mus musculus
  siRNA target sequence for Muc6 (NM_181729.1,1487-1505).
ccctagtggccatcatgta

SEQ ID NO: 806855 - DNA, 19 bp, Mus musculus
  siRNA target sequence for Muc6 (NM_181729.1,1488-1506).
cctagtggccatcatgtat

SEQ ID NO: 806856 - DNA, 19 bp, Mus musculus
  siRNA target sequence for Muc6 (NM_181729.1,1492-1510).
gtggccatcatgtatctgt

SEQ ID NO: 806857 - DNA, 19 bp, Mus musculus
  siRNA target sequence for Muc6 (NM_181729.1,1511-1529).
ccaagaaggacaaaattgt

SEQ ID NO: 806858 - DNA, 19 bp, Mus musculus
  siRNA target sequence for Muc6 (NM_181729.1,1643-1661).
ccttcgggctggaacttgt

SEQ ID NO: 806859 - DNA, 19 bp, Mus musculus
  siRNA target sequence for Muc6 (NM_181729.1,1678-1696).
gtcttccaggtgtacatta

SEQ ID NO: 806860 - DNA, 19 bp, Mus musculus
  siRNA target sequence for Muc6 (NM_181729.1,1727-1745).
gagggctctgcggcaattt

SEQ ID NO: 806861 - DNA, 19 bp, Mus musculus
  siRNA target sequence for Muc6 (NM_181729.1,1729-1747).
gggctctgcggcaatttca

SEQ ID NO: 806862 - DNA, 19 bp, Mus musculus
  siRNA target sequence for Muc6 (NM_181729.1,1730-1748).
ggctctgcggcaatttcaa

SEQ ID NO: 806863 - DNA, 19 bp, Mus musculus
  siRNA target sequence for Muc6 (NM_181729.1,1772-1790).
caaccagcatgggtattga

SEQ ID NO: 806864 - DNA, 19 bp, Mus musculus
  siRNA target sequence for Muc6 (NM_181729.1,1775-1793).
ccagcatgggtattgatga

SEQ ID NO: 806865 - DNA, 19 bp, Mus musculus
  siRNA target sequence for Muc6 (NM_181729.1,1913-1931).
gttccatgctcctgaagaa

SEQ ID NO: 806866 - DNA, 19 bp, Mus musculus
  siRNA target sequence for Muc6 (NM_181729.1,2139-2157).
ccgcacgttcagctatgat

SEQ ID NO: 806867 - DNA, 19 bp, Mus musculus
  siRNA target sequence for Muc6 (NM_181729.1,2140-2158).
cgcacgttcagctatgata

SEQ ID NO: 806868 - DNA, 19 bp, Mus musculus
  siRNA target sequence for Muc6 (NM_181729.1,2249-2267).
ctgagggcacctacttgaa

SEQ ID NO: 806869 - DNA, 19 bp, Mus musculus
  siRNA target sequence for Muc6 (NM_181729.1,2265-2283).
gaaccacaaggcagaatgt

SEQ ID NO: 806870 - DNA, 19 bp, Mus musculus
  siRNA target sequence for Muc6 (NM_181729.1,2352-2370).
gatcaacggggtcatatgt

SEQ ID NO: 806871 - DNA, 19 bp, Mus musculus
  siRNA target sequence for Muc6 (NM_181729.1,2364-2382).
catatgtcactgcatcaat

SEQ ID NO: 806872 - DNA, 19 bp, Mus musculus
  siRNA target sequence for Muc6 (NM_181729.1,2399-2417).
cacggcaagcggagatgtt

SEQ ID NO: 806873 - DNA, 19 bp, Mus musculus
  siRNA target sequence for Muc6 (NM_181729.1,2402-2420).
ggcaagcggagatgttctt

SEQ ID NO: 806874 - DNA, 19 bp, Mus musculus
  siRNA target sequence for Muc6 (NM_181729.1,2407-2425).
gcggagatgttctttgcat

SEQ ID NO: 806875 - DNA, 19 bp, Mus musculus
  siRNA target sequence for Muc6 (NM_181729.1,2640-2658).
gtcctaccctggtggtttt

SEQ ID NO: 806876 - DNA, 19 bp, Mus musculus
  siRNA target sequence for Muc6 (NM_181729.1,2642-2660).
cctaccctggtggttttga

SEQ ID NO: 806877 - DNA, 19 bp, Mus musculus
  siRNA target sequence for Muc6 (NM_181729.1,2665-2683).
cacacagactgtaagacat

SEQ ID NO: 806878 - DNA, 19 bp, Mus musculus
  siRNA target sequence for Muc6 (NM_181729.1,2712-2730).
ccagcttagcacacaatgt

SEQ ID NO: 806879 - DNA, 19 bp, Mus musculus
  siRNA target sequence for Muc6 (NM_181729.1,2752-2770).
ggcgaaggccacatcataa

SEQ ID NO: 806880 - DNA, 19 bp, Mus musculus
  siRNA target sequence for Muc6 (NM_181729.1,2754-2772).
cgaaggccacatcataact

SEQ ID NO: 806881 - DNA, 19 bp, Mus musculus
  siRNA target sequence for Muc6 (NM_181729.1,2760-2778).
ccacatcataacttttgat

SEQ ID NO: 806882 - DNA, 19 bp, Mus musculus
  siRNA target sequence for Muc6 (NM_181729.1,2776-2794).
gatggacaacgctttgtgt

SEQ ID NO: 806883 - DNA, 19 bp, Mus musculus
  siRNA target sequence for Muc6 (NM_181729.1,2797-2815).
gacggcgactgcgaataca

SEQ ID NO: 806884 - DNA, 19 bp, Mus musculus
  siRNA target sequence for Muc6 (NM_181729.1,2909-2927).
gctccagagccatcaagat

SEQ ID NO: 806885 - DNA, 19 bp, Mus musculus
  siRNA target sequence for Muc6 (NM_181729.1,3177-3195).
cgaaacacgtagcaagtat

SEQ ID NO: 806886 - DNA, 19 bp, Mus musculus
  siRNA target sequence for Muc6 (NM_181729.1,3192-3210).
gtatgtggcgtccaatgaa

SEQ ID NO: 806887 - DNA, 19 bp, Mus musculus
  siRNA target sequence for Muc6 (NM_181729.1,3274-3292).
ccctgcagcttgaatacct

SEQ ID NO: 806888 - DNA, 19 bp, Mus musculus
  siRNA target sequence for Muc6 (NM_181729.1,3305-3323).
gggccgagcgtaaatgcaa

SEQ ID NO: 806889 - DNA, 19 bp, Mus musculus
  siRNA target sequence for Muc6 (NM_181729.1,3309-3327).
cgagcgtaaatgcaacatt

SEQ ID NO: 806890 - DNA, 19 bp, Mus musculus
  siRNA target sequence for Muc6 (NM_181729.1,3310-3328).
gagcgtaaatgcaacatta

SEQ ID NO: 806891 - DNA, 19 bp, Mus musculus
  siRNA target sequence for Muc6 (NM_181729.1,3313-3331).
cgtaaatgcaacattatca

SEQ ID NO: 806892 - DNA, 19 bp, Mus musculus
  siRNA target sequence for Muc6 (NM_181729.1,3511-3529).
gacttctgccccatctact

SEQ ID NO: 806893 - DNA, 19 bp, Mus musculus
  siRNA target sequence for Muc6 (NM_181729.1,3549-3567).
cacattggtgggtgagaat

SEQ ID NO: 806894 - DNA, 19 bp, Mus musculus
  siRNA target sequence for Muc6 (NM_181729.1,3885-3903).
ctccactgaggaactaaca

SEQ ID NO: 806895 - DNA, 19 bp, Mus musculus
  siRNA target sequence for Muc6 (NM_181729.1,4086-4104).
gaccacagctgagttaaca

SEQ ID NO: 806896 - DNA, 19 bp, Mus musculus
  siRNA target sequence for Muc6 (NM_181729.1,4163-4181).
ggacaccgacatctaagat

SEQ ID NO: 806897 - DNA, 19 bp, Mus musculus
  siRNA target sequence for Muc6 (NM_181729.1,4164-4182).
gacaccgacatctaagatt

SEQ ID NO: 806898 - DNA, 19 bp, Mus musculus
  siRNA target sequence for Muc6 (NM_181729.1,4233-4251).
ccaatctactaccatgttt

SEQ ID NO: 806899 - DNA, 19 bp, Mus musculus
  siRNA target sequence for Muc6 (NM_181729.1,4264-4282).
gtccaggaagcagaaataa

SEQ ID NO: 806900 - DNA, 19 bp, Mus musculus
  siRNA target sequence for Muc6 (NM_181729.1,4294-4312).
gcgccgagtacttatacaa

SEQ ID NO: 806901 - DNA, 19 bp, Mus musculus
  siRNA target sequence for Muc6 (NM_181729.1,4310-4328).
caaccaacgacataactaa

SEQ ID NO: 806902 - DNA, 19 bp, Mus musculus
  siRNA target sequence for Muc6 (NM_181729.1,4677-4695).
gggacttaacactcaatca

SEQ ID NO: 806903 - DNA, 19 bp, Mus musculus
  siRNA target sequence for Muc6 (NM_181729.1,4678-4696).
ggacttaacactcaatcaa

SEQ ID NO: 806904 - DNA, 19 bp, Mus musculus
  siRNA target sequence for Muc6 (NM_181729.1,6962-6980).
ctcctcagacctctttagt

SEQ ID NO: 806905 - DNA, 19 bp, Mus musculus
  siRNA target sequence for Muc6 (NM_181729.1,7016-7034).
caccaactgacgagataca

SEQ ID NO: 806906 - DNA, 19 bp, Mus musculus
  siRNA target sequence for Muc6 (NM_181729.1,7018-7036).
ccaactgacgagatacaca

SEQ ID NO: 806907 - DNA, 19 bp, Mus musculus
  siRNA target sequence for Muc6 (NM_181729.1,7058-7076).
cagtctcctcagtttccat

SEQ ID NO: 806908 - DNA, 19 bp, Mus musculus
  siRNA target sequence for Muc6 (NM_181729.1,7082-7100).
ggccagtgagcactatact

SEQ ID NO: 806909 - DNA, 19 bp, Mus musculus
  siRNA target sequence for Muc6 (NM_181729.1,7087-7105).
gtgagcactatacttcaaa

SEQ ID NO: 806910 - DNA, 19 bp, Mus musculus
  siRNA target sequence for Muc6 (NM_181729.1,7174-7192).
gaagctcaaggctctttct

SEQ ID NO: 806911 - DNA, 19 bp, Mus musculus
  siRNA target sequence for Muc6 (NM_181729.1,7262-7280).
gtcctgtaatcacttcaat

SEQ ID NO: 806912 - DNA, 19 bp, Mus musculus
  siRNA target sequence for Muc6 (NM_181729.1,7264-7282).
cctgtaatcacttcaatca

SEQ ID NO: 806913 - DNA, 19 bp, Mus musculus
  siRNA target sequence for Muc6 (NM_181729.1,7357-7375).
cacagcacacaccctatat

SEQ ID NO: 806914 - DNA, 19 bp, Mus musculus
  siRNA target sequence for Muc6 (NM_181729.1,7429-7447).
ccgatgaagaccacgatta

SEQ ID NO: 806915 - DNA, 19 bp, Mus musculus
  siRNA target sequence for Muc6 (NM_181729.1,7542-7560).
cccaaccaatccacattca

SEQ ID NO: 806916 - DNA, 19 bp, Mus musculus
  siRNA target sequence for Muc6 (NM_181729.1,7637-7655).
caccagtatccgacattaa

SEQ ID NO: 806917 - DNA, 19 bp, Mus musculus
  siRNA target sequence for Muc6 (NM_181729.1,7639-7657).
ccagtatccgacattaaca

SEQ ID NO: 806918 - DNA, 19 bp, Mus musculus
  siRNA target sequence for Muc6 (NM_181729.1,7750-7768).
ctcacacctgcttcaagat

SEQ ID NO: 806919 - DNA, 19 bp, Mus musculus
  siRNA target sequence for Muc6 (NM_181729.1,7885-7903).
gcctcaactgttatttcct

SEQ ID NO: 806920 - DNA, 19 bp, Mus musculus
  siRNA target sequence for Muc6 (NM_181729.1,7995-8013).
cgtgcccacattttcttca

SEQ ID NO: 806921 - DNA, 19 bp, Mus musculus
  siRNA target sequence for Muc6 (NM_181729.1,8378-8396).
cctctgtcagtttcaataa

SEQ ID NO: 806922 - DNA, 19 bp, Mus musculus
  siRNA target sequence for Muc6 (NM_181729.1,8381-8399).
ctgtcagtttcaataagga

SEQ ID NO: 806923 - DNA, 19 bp, Mus musculus
  siRNA target sequence for Muc6 (NM_181729.1,8507-8525).
cactcaccctccaagtgtt

SEQ ID NO: 806924 - DNA, 19 bp, Mus musculus
  siRNA target sequence for Rpo1-3 (NM_181730.2,132-150).
gccatagaggaattgctaa

SEQ ID NO: 806925 - DNA, 19 bp, Mus musculus
  siRNA target sequence for Rpo1-3 (NM_181730.2,156-174).
gcaaagcgtgggaaaacca

SEQ ID NO: 806926 - DNA, 19 bp, Mus musculus
  siRNA target sequence for Rpo1-3 (NM_181730.2,192-210).
ccgatgggctggatgaagt

SEQ ID NO: 806927 - DNA, 19 bp, Mus musculus
  siRNA target sequence for Rpo1-3 (NM_181730.2,213-231).
cctcttgctggtacaaata

SEQ ID NO: 806928 - DNA, 19 bp, Mus musculus
  siRNA target sequence for Rpo1-3 (NM_181730.2,219-237).
gctggtacaaataaaagat

SEQ ID NO: 806929 - DNA, 19 bp, Mus musculus
  siRNA target sequence for Rpo1-3 (NM_181730.2,262-280).
cactgccctcccataaaga

SEQ ID NO: 806930 - DNA, 19 bp, Mus musculus
  siRNA target sequence for Rpo1-3 (NM_181730.2,279-297).
gagcaagaccatgaacaaa

SEQ ID NO: 806931 - DNA, 19 bp, Mus musculus
  siRNA target sequence for 2610208M17Rik (NM_181732.2,1093-1111).
gaaagaagatacttacgtt

SEQ ID NO: 806932 - DNA, 19 bp, Mus musculus
  siRNA target sequence for 2610208M17Rik (NM_181732.2,1100-1118).
gatacttacgttcacttta

SEQ ID NO: 806933 - DNA, 19 bp, Mus musculus
  siRNA target sequence for 2610208M17Rik (NM_181732.2,1142-1160).
cacgttgaaaggttaacca

SEQ ID NO: 806934 - DNA, 19 bp, Mus musculus
  siRNA target sequence for 2610208M17Rik (NM_181732.2,1144-1162).
cgttgaaaggttaaccaaa

SEQ ID NO: 806935 - DNA, 19 bp, Mus musculus
  siRNA target sequence for 2610208M17Rik (NM_181732.2,1158-1176).
ccaaaggtgcggccatttt

SEQ ID NO: 806936 - DNA, 19 bp, Mus musculus
  siRNA target sequence for Gpr120 (NM_181748.1,93-111).
caccctggaccaagtcaat

SEQ ID NO: 806937 - DNA, 19 bp, Mus musculus
  siRNA target sequence for Gpr120 (NM_181748.1,183-201).
cgttctggggctcatcttt

SEQ ID NO: 806938 - DNA, 19 bp, Mus musculus
  siRNA target sequence for Gpr120 (NM_181748.1,515-533).
cggcactgctggctttcat

SEQ ID NO: 806939 - DNA, 19 bp, Mus musculus
  siRNA target sequence for Gpr120 (NM_181748.1,622-640).
ccgatttgcacattggatt

SEQ ID NO: 806940 - DNA, 19 bp, Mus musculus
  siRNA target sequence for Gpr120 (NM_181748.1,644-662).
ccaaccgcataggagaaat

SEQ ID NO: 806941 - DNA, 19 bp, Mus musculus
  siRNA target sequence for Gpr120 (NM_181748.1,648-666).
ccgcataggagaaatctca

SEQ ID NO: 806942 - DNA, 19 bp, Mus musculus
  siRNA target sequence for Gpr120 (NM_181748.1,649-667).
cgcataggagaaatctcat

SEQ ID NO: 806943 - DNA, 19 bp, Mus musculus
  siRNA target sequence for Gpr120 (NM_181748.1,704-722).
cgggactggtcattgtgat

SEQ ID NO: 806944 - DNA, 19 bp, Mus musculus
  siRNA target sequence for Gpr120 (NM_181748.1,712-730).
gtcattgtgatcagttact

SEQ ID NO: 806945 - DNA, 19 bp, Mus musculus
  siRNA target sequence for Gpr120 (NM_181748.1,720-738).
gatcagttactccaaaatt

SEQ ID NO: 806946 - DNA, 19 bp, Mus musculus
  siRNA target sequence for Gpr120 (NM_181748.1,725-743).
gttactccaaaattttaca

SEQ ID NO: 806947 - DNA, 19 bp, Mus musculus
  siRNA target sequence for Gpr120 (NM_181748.1,901-919).
ctcctcatcttgatccaaa

SEQ ID NO: 806948 - DNA, 19 bp, Mus musculus
  siRNA target sequence for Gpr120 (NM_181748.1,904-922).
ctcatcttgatccaaaact

SEQ ID NO: 806949 - DNA, 19 bp, Mus musculus
  siRNA target sequence for Gpr120 (NM_181748.1,1029-1047).
gaacgaatggaggaagatt

SEQ ID NO: 806950 - DNA, 19 bp, Mus musculus
  siRNA target sequence for Gpr120 (NM_181748.1,1071-1089).
gaagggagccatttttaca

SEQ ID NO: 806951 - DNA, 19 bp, Mus musculus
  siRNA target sequence for Gpr120 (NM_181748.1,1097-1115).
ctgtcaggcgaaatgactt

SEQ ID NO: 806952 - DNA, 19 bp, Mus musculus
  siRNA target sequence for Gpr120 (NM_181748.1,1105-1123).
cgaaatgacttgtctgtta

SEQ ID NO: 806953 - DNA, 19 bp, Mus musculus
  siRNA target sequence for Gpr142 (NM_181749.1,122-140).
ctacagtcaatggtagtaa

SEQ ID NO: 806954 - DNA, 19 bp, Mus musculus
  siRNA target sequence for Gpr142 (NM_181749.1,206-224).
gtatcatacctgtcatcta

SEQ ID NO: 806955 - DNA, 19 bp, Mus musculus
  siRNA target sequence for Gpr142 (NM_181749.1,288-306).
gaaaccctcctatcactat

SEQ ID NO: 806956 - DNA, 19 bp, Mus musculus
  siRNA target sequence for Gpr142 (NM_181749.1,312-330).
ggcactcacggcttcagat

SEQ ID NO: 806957 - DNA, 19 bp, Mus musculus
  siRNA target sequence for Gpr142 (NM_181749.1,313-331).
gcactcacggcttcagata

SEQ ID NO: 806958 - DNA, 19 bp, Mus musculus
  siRNA target sequence for Gpr142 (NM_181749.1,543-561).
gacccaccgcgctattgct

SEQ ID NO: 806959 - DNA, 19 bp, Mus musculus
  siRNA target sequence for Gpr142 (NM_181749.1,638-656).
ctagcactatggacaaact

SEQ ID NO: 806960 - DNA, 19 bp, Mus musculus
  siRNA target sequence for Gpr142 (NM_181749.1,825-843).
cctctgggcaccacgtatt

SEQ ID NO: 806961 - DNA, 19 bp, Mus musculus
  siRNA target sequence for Gpr142 (NM_181749.1,826-844).
ctctgggcaccacgtatta

SEQ ID NO: 806962 - DNA, 19 bp, Mus musculus
  siRNA target sequence for Gpr142 (NM_181749.1,828-846).
ctgggcaccacgtattatt

SEQ ID NO: 806963 - DNA, 19 bp, Mus musculus
  siRNA target sequence for Gpr142 (NM_181749.1,830-848).
gggcaccacgtattattgt

SEQ ID NO: 806964 - DNA, 19 bp, Mus musculus
  siRNA target sequence for Gpr142 (NM_181749.1,833-851).
caccacgtattattgtcat

SEQ ID NO: 806965 - DNA, 19 bp, Mus musculus
  siRNA target sequence for Gpr142 (NM_181749.1,955-973).
ggcctctattgcttcatca

SEQ ID NO: 806966 - DNA, 19 bp, Mus musculus
  siRNA target sequence for Gpr142 (NM_181749.1,1023-1041).
ggcttgcgccttaaagtca

SEQ ID NO: 806967 - DNA, 19 bp, Mus musculus
  siRNA target sequence for Gpr119 (NM_181751.1,39-57).
cctaaccatcctcatcatt

SEQ ID NO: 806968 - DNA, 19 bp, Mus musculus
  siRNA target sequence for Gpr119 (NM_181751.1,82-100).
gctatgctgctatcaatct

SEQ ID NO: 806969 - DNA, 19 bp, Mus musculus
  siRNA target sequence for Gpr119 (NM_181751.1,83-101).
ctatgctgctatcaatcta

SEQ ID NO: 806970 - DNA, 19 bp, Mus musculus
  siRNA target sequence for Gpr119 (NM_181751.1,144-162).
cgtggctgataccttgatt

SEQ ID NO: 806971 - DNA, 19 bp, Mus musculus
  siRNA target sequence for Gpr119 (NM_181751.1,159-177).
gattggcgtggctatttct

SEQ ID NO: 806972 - DNA, 19 bp, Mus musculus
  siRNA target sequence for Gpr119 (NM_181751.1,168-186).
ggctatttctggtctagtt

SEQ ID NO: 806973 - DNA, 19 bp, Mus musculus
  siRNA target sequence for Gpr119 (NM_181751.1,238-256).
cttcggatggcatttgtca

SEQ ID NO: 806974 - DNA, 19 bp, Mus musculus
  siRNA target sequence for Gpr119 (NM_181751.1,308-326).
gataccttgccattaagca

SEQ ID NO: 806975 - DNA, 19 bp, Mus musculus
  siRNA target sequence for Gpr119 (NM_181751.1,334-352).
cgttacttccagatcatga

SEQ ID NO: 806976 - DNA, 19 bp, Mus musculus
  siRNA target sequence for Gpr119 (NM_181751.1,382-400).
ggactgtggttggtatctt

SEQ ID NO: 806977 - DNA, 19 bp, Mus musculus
  siRNA target sequence for Gpr119 (NM_181751.1,387-405).
gtggttggtatcttacctt

SEQ ID NO: 806978 - DNA, 19 bp, Mus musculus
  siRNA target sequence for Gpr119 (NM_181751.1,389-407).
ggttggtatcttaccttat

SEQ ID NO: 806979 - DNA, 19 bp, Mus musculus
  siRNA target sequence for Gpr119 (NM_181751.1,418-436).
ccactcggagtctccatat

SEQ ID NO: 806980 - DNA, 19 bp, Mus musculus
  siRNA target sequence for Gpr119 (NM_181751.1,419-437).
cactcggagtctccatatt

SEQ ID NO: 806981 - DNA, 19 bp, Mus musculus
  siRNA target sequence for Gpr119 (NM_181751.1,641-659).
ccccacggtctgtcaatga

SEQ ID NO: 806982 - DNA, 19 bp, Mus musculus
  siRNA target sequence for Gpr119 (NM_181751.1,643-661).
ccacggtctgtcaatgact

SEQ ID NO: 806983 - DNA, 19 bp, Mus musculus
  siRNA target sequence for Gpr119 (NM_181751.1,644-662).
cacggtctgtcaatgactt

SEQ ID NO: 806984 - DNA, 19 bp, Mus musculus
  siRNA target sequence for Gpr119 (NM_181751.1,647-665).
ggtctgtcaatgacttcaa

SEQ ID NO: 806985 - DNA, 19 bp, Mus musculus
  siRNA target sequence for Gpr119 (NM_181751.1,663-681).
caaggctgttcgtactata

SEQ ID NO: 806986 - DNA, 19 bp, Mus musculus
  siRNA target sequence for Gpr119 (NM_181751.1,666-684).
ggctgttcgtactatagct

SEQ ID NO: 806987 - DNA, 19 bp, Mus musculus
  siRNA target sequence for Gpr119 (NM_181751.1,673-691).
cgtactatagctgttctta

SEQ ID NO: 806988 - DNA, 19 bp, Mus musculus
  siRNA target sequence for Gpr119 (NM_181751.1,674-692).
gtactatagctgttcttat

SEQ ID NO: 806989 - DNA, 19 bp, Mus musculus
  siRNA target sequence for Gpr119 (NM_181751.1,710-728).
cctggtctccctttctcat

SEQ ID NO: 806990 - DNA, 19 bp, Mus musculus
  siRNA target sequence for Gpr119 (NM_181751.1,745-763).
gtggcctgccacaaatgct

SEQ ID NO: 806991 - DNA, 19 bp, Mus musculus
  siRNA target sequence for Gpr119 (NM_181751.1,956-974).
gagaaagcgcctatcacat

SEQ ID NO: 806992 - DNA, 19 bp, Mus musculus
  siRNA target sequence for Gpr119 (NM_181751.1,965-983).
cctatcacatcgtcactat

SEQ ID NO: 806993 - DNA, 19 bp, Mus musculus
  siRNA target sequence for Gpr135 (NM_181752.1,127-145).
gtaacgctgggaaaccaaa

SEQ ID NO: 806994 - DNA, 19 bp, Mus musculus
  siRNA target sequence for Gpr135 (NM_181752.1,754-772).
cccttcctactgatgtgtt

SEQ ID NO: 806995 - DNA, 19 bp, Mus musculus
  siRNA target sequence for Gpr135 (NM_181752.1,884-902).
ccgtgctcatcatgattat

SEQ ID NO: 806996 - DNA, 19 bp, Mus musculus
  siRNA target sequence for Gpr135 (NM_181752.1,980-998).
ctccctcgctgctcaatgt

SEQ ID NO: 806997 - DNA, 19 bp, Mus musculus
  siRNA target sequence for Gpr135 (NM_181752.1,1019-1037).
gggccaatggggctatcaa

SEQ ID NO: 806998 - DNA, 19 bp, Mus musculus
  siRNA target sequence for Gpr135 (NM_181752.1,1030-1048).
gctatcaacccggtcatat

SEQ ID NO: 806999 - DNA, 19 bp, Mus musculus
  siRNA target sequence for Gpr135 (NM_181752.1,1099-1117).
gaagggtacaggactagaa

SEQ ID NO: 807000 - DNA, 19 bp, Mus musculus
  siRNA target sequence for Gpr135 (NM_181752.1,1102-1120).
gggtacaggactagaaaca

SEQ ID NO: 807001 - DNA, 19 bp, Mus musculus
  siRNA target sequence for Gpr135 (NM_181752.1,1103-1121).
ggtacaggactagaaacat

SEQ ID NO: 807002 - DNA, 19 bp, Mus musculus
  siRNA target sequence for Gpr135 (NM_181752.1,1136-1154).
ctagccaaggcctaggttt

SEQ ID NO: 807003 - DNA, 19 bp, Mus musculus
  siRNA target sequence for Gpr135 (NM_181752.1,1166-1184).
gtcgcaatcgccttcgaaa

SEQ ID NO: 807004 - DNA, 19 bp, Mus musculus
  siRNA target sequence for Gpr135 (NM_181752.1,1260-1278).
ggtcatgtgggctcgaaaa

SEQ ID NO: 807005 - DNA, 19 bp, Mus musculus
  siRNA target sequence for Gpr135 (NM_181752.1,1261-1279).
gtcatgtgggctcgaaaaa

SEQ ID NO: 807006 - DNA, 19 bp, Mus musculus
  siRNA target sequence for Gpr135 (NM_181752.1,1263-1281).
catgtgggctcgaaaaaat

SEQ ID NO: 807007 - DNA, 19 bp, Mus musculus
  siRNA target sequence for Gpr135 (NM_181752.1,1266-1284).
gtgggctcgaaaaaatcca

SEQ ID NO: 807008 - DNA, 19 bp, Mus musculus
  siRNA target sequence for Gpr135 (NM_181752.1,1306-1324).
ggtccaccggactcagtta

SEQ ID NO: 807009 - DNA, 19 bp, Mus musculus
  siRNA target sequence for Gpr135 (NM_181752.1,1307-1325).
gtccaccggactcagttat

SEQ ID NO: 807010 - DNA, 19 bp, Mus musculus
  siRNA target sequence for Gpr135 (NM_181752.1,1330-1348).
gtcggcaaactgcataatt

SEQ ID NO: 807011 - DNA, 19 bp, Mus musculus
  siRNA target sequence for Gpr135 (NM_181752.1,1334-1352).
gcaaactgcataattctga

SEQ ID NO: 807012 - DNA, 19 bp, Mus musculus
  siRNA target sequence for Gpr135 (NM_181752.1,1335-1353).
caaactgcataattctgaa

SEQ ID NO: 807013 - DNA, 19 bp, Mus musculus
  siRNA target sequence for Opn5 (NM_181753.2,63-81).
gacgaggacccttttgctt

SEQ ID NO: 807014 - DNA, 19 bp, Mus musculus
  siRNA target sequence for Opn5 (NM_181753.2,68-86).
ggacccttttgcttccaaa

SEQ ID NO: 807015 - DNA, 19 bp, Mus musculus
  siRNA target sequence for Opn5 (NM_181753.2,108-126).
gtggctggcttttacctaa

SEQ ID NO: 807016 - DNA, 19 bp, Mus musculus
  siRNA target sequence for Opn5 (NM_181753.2,111-129).
gctggcttttacctaacaa

SEQ ID NO: 807017 - DNA, 19 bp, Mus musculus
  siRNA target sequence for Opn5 (NM_181753.2,115-133).
gcttttacctaacaataat

SEQ ID NO: 807018 - DNA, 19 bp, Mus musculus
  siRNA target sequence for Opn5 (NM_181753.2,137-155).
gattctctctacatttgga

SEQ ID NO: 807019 - DNA, 19 bp, Mus musculus
  siRNA target sequence for Opn5 (NM_181753.2,178-196).
cttctagacgcaagaagaa

SEQ ID NO: 807020 - DNA, 19 bp, Mus musculus
  siRNA target sequence for Opn5 (NM_181753.2,204-222).
cctgcggaaataatgacta

SEQ ID NO: 807021 - DNA, 19 bp, Mus musculus
  siRNA target sequence for Opn5 (NM_181753.2,210-228).
gaaataatgactatcaatt

SEQ ID NO: 807022 - DNA, 19 bp, Mus musculus
  siRNA target sequence for Opn5 (NM_181753.2,333-351).
ggctgggctggatttttct

SEQ ID NO: 807023 - DNA, 19 bp, Mus musculus
  siRNA target sequence for Opn5 (NM_181753.2,354-372).
ggctgtggaagcctgatta

SEQ ID NO: 807024 - DNA, 19 bp, Mus musculus
  siRNA target sequence for Opn5 (NM_181753.2,388-406).
gcctggaccgctatctgaa

SEQ ID NO: 807025 - DNA, 19 bp, Mus musculus
  siRNA target sequence for Opn5 (NM_181753.2,393-411).
gaccgctatctgaagatct

SEQ ID NO: 807026 - DNA, 19 bp, Mus musculus
  siRNA target sequence for Opn5 (NM_181753.2,396-414).
cgctatctgaagatctgtt

SEQ ID NO: 807027 - DNA, 19 bp, Mus musculus
  siRNA target sequence for Opn5 (NM_181753.2,397-415).
gctatctgaagatctgtta

SEQ ID NO: 807028 - DNA, 19 bp, Mus musculus
  siRNA target sequence for Opn5 (NM_181753.2,402-420).
ctgaagatctgttatctgt

SEQ ID NO: 807029 - DNA, 19 bp, Mus musculus
  siRNA target sequence for Opn5 (NM_181753.2,468-486).
gtcatctgggcttatgctt

SEQ ID NO: 807030 - DNA, 19 bp, Mus musculus
  siRNA target sequence for Opn5 (NM_181753.2,632-650).
gctgccaacggctgtgatt

SEQ ID NO: 807031 - DNA, 19 bp, Mus musculus
  siRNA target sequence for Opn5 (NM_181753.2,636-654).
ccaacggctgtgattgttt

SEQ ID NO: 807032 - DNA, 19 bp, Mus musculus
  siRNA target sequence for Opn5 (NM_181753.2,637-655).
caacggctgtgattgtttt

SEQ ID NO: 807033 - DNA, 19 bp, Mus musculus
  siRNA target sequence for Opn5 (NM_181753.2,647-665).
gattgttttctcatatgct

SEQ ID NO: 807034 - DNA, 19 bp, Mus musculus
  siRNA target sequence for Opn5 (NM_181753.2,725-743).
ccatagcagccatgtactt

SEQ ID NO: 807035 - DNA, 19 bp, Mus musculus
  siRNA target sequence for Opn5 (NM_181753.2,878-896).
cacactccttgcaaaatca

SEQ ID NO: 807036 - DNA, 19 bp, Mus musculus
  siRNA target sequence for Opn5 (NM_181753.2,897-915).
gcagcgatgtacaatccaa

SEQ ID NO: 807037 - DNA, 19 bp, Mus musculus
  siRNA target sequence for Opn5 (NM_181753.2,898-916).
cagcgatgtacaatccaat

SEQ ID NO: 807038 - DNA, 19 bp, Mus musculus
  siRNA target sequence for Opn5 (NM_181753.2,901-919).
cgatgtacaatccaatcat

SEQ ID NO: 807039 - DNA, 19 bp, Mus musculus
  siRNA target sequence for Opn5 (NM_181753.2,926-944).
ggtcattgattacagattt

SEQ ID NO: 807040 - DNA, 19 bp, Mus musculus
  siRNA target sequence for Opn5 (NM_181753.2,973-991).
gaacgaagaagaaatcttt

SEQ ID NO: 807041 - DNA, 19 bp, Mus musculus
  siRNA target sequence for Opn5 (NM_181753.2,998-1016).
ctttaggctgcatactgta

SEQ ID NO: 807042 - DNA, 19 bp, Mus musculus
  siRNA target sequence for Opn5 (NM_181753.2,1059-1077).
gagagcagttccagattta

SEQ ID NO: 807043 - DNA, 19 bp, Mus musculus
  siRNA target sequence for Opn5 (NM_181753.2,1061-1079).
gagcagttccagatttact

SEQ ID NO: 807044 - DNA, 19 bp, Mus musculus
  siRNA target sequence for Gpr141 (NM_181754.1,46-64).
ctggcacaccacttaacat

SEQ ID NO: 807045 - DNA, 19 bp, Mus musculus
  siRNA target sequence for Gpr141 (NM_181754.1,52-70).
caccacttaacatcgattt

SEQ ID NO: 807046 - DNA, 19 bp, Mus musculus
  siRNA target sequence for Gpr141 (NM_181754.1,55-73).
cacttaacatcgatttact

SEQ ID NO: 807047 - DNA, 19 bp, Mus musculus
  siRNA target sequence for Gpr141 (NM_181754.1,152-170).
ccaccatggctgtcatcaa

SEQ ID NO: 807048 - DNA, 19 bp, Mus musculus
  siRNA target sequence for Gpr141 (NM_181754.1,215-233).
gcttggcatacctcatcaa

SEQ ID NO: 807049 - DNA, 19 bp, Mus musculus
  siRNA target sequence for Gpr141 (NM_181754.1,236-254).
ggacttggacgtttggatt

SEQ ID NO: 807050 - DNA, 19 bp, Mus musculus
  siRNA target sequence for Gpr141 (NM_181754.1,312-330).
cttctacgtggtgatacta

SEQ ID NO: 807051 - DNA, 19 bp, Mus musculus
  siRNA target sequence for Gpr141 (NM_181754.1,322-340).
gtgatactagtcatcagat

SEQ ID NO: 807052 - DNA, 19 bp, Mus musculus
  siRNA target sequence for Gpr141 (NM_181754.1,351-369).
cttcaagcgtagagacaaa

SEQ ID NO: 807053 - DNA, 19 bp, Mus musculus
  siRNA target sequence for Gpr141 (NM_181754.1,354-372).
caagcgtagagacaaagta

SEQ ID NO: 807054 - DNA, 19 bp, Mus musculus
  siRNA target sequence for Gpr141 (NM_181754.1,357-375).
gcgtagagacaaagtagaa

SEQ ID NO: 807055 - DNA, 19 bp, Mus musculus
  siRNA target sequence for Gpr141 (NM_181754.1,358-376).
cgtagagacaaagtagaat

SEQ ID NO: 807056 - DNA, 19 bp, Mus musculus
  siRNA target sequence for Gpr141 (NM_181754.1,366-384).
caaagtagaattctataga

SEQ ID NO: 807057 - DNA, 19 bp, Mus musculus
  siRNA target sequence for Gpr141 (NM_181754.1,497-515).
gctttagattccataaaga

SEQ ID NO: 807058 - DNA, 19 bp, Mus musculus
  siRNA target sequence for Gpr141 (NM_181754.1,526-544).
gattctgtgcgagttatca

SEQ ID NO: 807059 - DNA, 19 bp, Mus musculus
  siRNA target sequence for Gpr141 (NM_181754.1,530-548).
ctgtgcgagttatcaacta

SEQ ID NO: 807060 - DNA, 19 bp, Mus musculus
  siRNA target sequence for Gpr141 (NM_181754.1,532-550).
gtgcgagttatcaactata

SEQ ID NO: 807061 - DNA, 19 bp, Mus musculus
  siRNA target sequence for Gpr141 (NM_181754.1,543-561).
caactatatgatagtcatt

SEQ ID NO: 807062 - DNA, 19 bp, Mus musculus
  siRNA target sequence for Gpr141 (NM_181754.1,546-564).
ctatatgatagtcattgtt

SEQ ID NO: 807063 - DNA, 19 bp, Mus musculus
  siRNA target sequence for Gpr141 (NM_181754.1,567-585).
catagctgttgcgttgatt

SEQ ID NO: 807064 - DNA, 19 bp, Mus musculus
  siRNA target sequence for Gpr141 (NM_181754.1,571-589).
gctgttgcgttgattctct

SEQ ID NO: 807065 - DNA, 19 bp, Mus musculus
  siRNA target sequence for Gpr141 (NM_181754.1,592-610).
ggtttccaggtcttcatca

SEQ ID NO: 807066 - DNA, 19 bp, Mus musculus
  siRNA target sequence for Gpr141 (NM_181754.1,630-648).
gtttcgccactccttacta

SEQ ID NO: 807067 - DNA, 19 bp, Mus musculus
  siRNA target sequence for Gpr141 (NM_181754.1,784-802).
gttgcattttacaatgaaa

SEQ ID NO: 807068 - DNA, 19 bp, Mus musculus
  siRNA target sequence for Gpr141 (NM_181754.1,820-838).
gccatcagctgctgtgatt

SEQ ID NO: 807069 - DNA, 19 bp, Mus musculus
  siRNA target sequence for Gpr141 (NM_181754.1,821-839).
ccatcagctgctgtgattt

SEQ ID NO: 807070 - DNA, 19 bp, Mus musculus
  siRNA target sequence for Gpr141 (NM_181754.1,863-881).
gccattgggttaagcaaaa

SEQ ID NO: 807071 - DNA, 19 bp, Mus musculus
  siRNA target sequence for Gpr141 (NM_181754.1,869-887).
gggttaagcaaaagattgt

SEQ ID NO: 807072 - DNA, 19 bp, Mus musculus
  siRNA target sequence for 5430424K18Rik (NM_181815.1,1003-1021).
ctgggaagcttaatgaagt

SEQ ID NO: 807073 - DNA, 19 bp, Mus musculus
  siRNA target sequence for 5430424K18Rik (NM_181815.1,1077-1095).
cgagagatgcgcttagaaa

SEQ ID NO: 807074 - DNA, 19 bp, Mus musculus
  siRNA target sequence for 5430424K18Rik (NM_181815.1,1103-1121).
ggtggaaagacgtcatgat

SEQ ID NO: 807075 - DNA, 19 bp, Mus musculus
  siRNA target sequence for 5430424K18Rik (NM_181815.1,1187-1205).
gaatgaggacgtaataaaa

SEQ ID NO: 807076 - DNA, 19 bp, Mus musculus
  siRNA target sequence for 5430424K18Rik (NM_181815.1,1266-1284).
cgcaggctgctgagtcaat

SEQ ID NO: 807077 - DNA, 19 bp, Mus musculus
  siRNA target sequence for 5430424K18Rik (NM_181815.1,1271-1289).
gctgctgagtcaatctgaa

SEQ ID NO: 807078 - DNA, 19 bp, Mus musculus
  siRNA target sequence for 5430424K18Rik (NM_181815.1,1272-1290).
ctgctgagtcaatctgaaa

SEQ ID NO: 807079 - DNA, 19 bp, Mus musculus
  siRNA target sequence for 5430424K18Rik (NM_181815.1,1277-1295).
gagtcaatctgaaagcaat

SEQ ID NO: 807080 - DNA, 19 bp, Mus musculus
  siRNA target sequence for 5430424K18Rik (NM_181815.1,1323-1341).
gagctgcgtacacaactta

SEQ ID NO: 807081 - DNA, 19 bp, Mus musculus
  siRNA target sequence for 5430424K18Rik (NM_181815.1,1328-1346).
gcgtacacaacttatcaaa

SEQ ID NO: 807082 - DNA, 19 bp, Mus musculus
  siRNA target sequence for 5430424K18Rik (NM_181815.1,1363-1381).
ggggtttgcagcatcaagt

SEQ ID NO: 807083 - DNA, 19 bp, Mus musculus
  siRNA target sequence for 5430424K18Rik (NM_181815.1,1374-1392).
catcaagtaccttgcattt

SEQ ID NO: 807084 - DNA, 19 bp, Mus musculus
  siRNA target sequence for 5430424K18Rik (NM_181815.1,1387-1405).
gcatttccaagcaaccatt

SEQ ID NO: 807085 - DNA, 19 bp, Mus musculus
  siRNA target sequence for 5430424K18Rik (NM_181815.1,1425-1443).
ggggatgaccggaggttta

SEQ ID NO: 807086 - DNA, 19 bp, Mus musculus
  siRNA target sequence for 5430424K18Rik (NM_181815.1,1500-1518).
gtgcagctgaacttcaact

SEQ ID NO: 807087 - DNA, 19 bp, Mus musculus
  siRNA target sequence for 5430424K18Rik (NM_181815.1,1519-1537).
ccatggcttcggagttaga

SEQ ID NO: 807088 - DNA, 19 bp, Mus musculus
  siRNA target sequence for 4933401K09Rik (NM_181816.1,84-102).
ggaagatgcgggctttaga

SEQ ID NO: 807089 - DNA, 19 bp, Mus musculus
  siRNA target sequence for 4933401K09Rik (NM_181816.1,199-217).
cagcctagagaaatgtaat

SEQ ID NO: 807090 - DNA, 19 bp, Mus musculus
  siRNA target sequence for 4933401K09Rik (NM_181816.1,202-220).
cctagagaaatgtaatcta

SEQ ID NO: 807091 - DNA, 19 bp, Mus musculus
  siRNA target sequence for 4933401K09Rik (NM_181816.1,206-224).
gagaaatgtaatctagtaa

SEQ ID NO: 807092 - DNA, 19 bp, Mus musculus
  siRNA target sequence for 4933401K09Rik (NM_181816.1,273-291).
ctaagctaaccagtaactt

SEQ ID NO: 807093 - DNA, 19 bp, Mus musculus
  siRNA target sequence for 4933401K09Rik (NM_181816.1,278-296).
ctaaccagtaacttcgaaa

SEQ ID NO: 807094 - DNA, 19 bp, Mus musculus
  siRNA target sequence for 4933401K09Rik (NM_181816.1,299-317).
ctgagattacaccaaatga

SEQ ID NO: 807095 - DNA, 19 bp, Mus musculus
  siRNA target sequence for 4933401K09Rik (NM_181816.1,379-397).
cagtctgaaccagaaacta

SEQ ID NO: 807096 - DNA, 19 bp, Mus musculus
  siRNA target sequence for 4933401K09Rik (NM_181816.1,537-555).
ctcagctaaacgggaaaaa

SEQ ID NO: 807097 - DNA, 19 bp, Mus musculus
  siRNA target sequence for 4933401K09Rik (NM_181816.1,618-636).
gtgaagccactcaaagaga

SEQ ID NO: 807098 - DNA, 19 bp, Mus musculus
  siRNA target sequence for 4933401K09Rik (NM_181816.1,633-651).
gagatgagttcattatcga

SEQ ID NO: 807099 - DNA, 19 bp, Mus musculus
  siRNA target sequence for 4933401K09Rik (NM_181816.1,640-658).
gttcattatcgagaagtta

SEQ ID NO: 807100 - DNA, 19 bp, Mus musculus
  siRNA target sequence for 4933401K09Rik (NM_181816.1,681-699).
cgctgagcaggaacaagtt

SEQ ID NO: 807101 - DNA, 19 bp, Mus musculus
  siRNA target sequence for 4933401K09Rik (NM_181816.1,682-700).
gctgagcaggaacaagtta

SEQ ID NO: 807102 - DNA, 19 bp, Mus musculus
  siRNA target sequence for 4933401K09Rik (NM_181816.1,685-703).
gagcaggaacaagttacaa

SEQ ID NO: 807103 - DNA, 19 bp, Mus musculus
  siRNA target sequence for 4933401K09Rik (NM_181816.1,688-706).
caggaacaagttacaagat

SEQ ID NO: 807104 - DNA, 19 bp, Mus musculus
  siRNA target sequence for 4933401K09Rik (NM_181816.1,690-708).
ggaacaagttacaagatga

SEQ ID NO: 807105 - DNA, 19 bp, Mus musculus
  siRNA target sequence for 4933401K09Rik (NM_181816.1,806-824).
gacgatctcctgaggatta

SEQ ID NO: 807106 - DNA, 19 bp, Mus musculus
  siRNA target sequence for 4933401K09Rik (NM_181816.1,808-826).
cgatctcctgaggattata

SEQ ID NO: 807107 - DNA, 19 bp, Mus musculus
  siRNA target sequence for 4933401K09Rik (NM_181816.1,837-855).
gactgcacttgcatagaga

SEQ ID NO: 807108 - DNA, 19 bp, Mus musculus
  siRNA target sequence for 4933401K09Rik (NM_181816.1,878-896).
cagactgctcaagataaca

SEQ ID NO: 807109 - DNA, 19 bp, Mus musculus
  siRNA target sequence for 4933401K09Rik (NM_181816.1,884-902).
gctcaagataacaggaaaa

SEQ ID NO: 807110 - DNA, 19 bp, Mus musculus
  siRNA target sequence for 4933401K09Rik (NM_181816.1,951-969).
ggaaggagttgtttccaat

SEQ ID NO: 807111 - DNA, 19 bp, Mus musculus
  siRNA target sequence for 4933401K09Rik (NM_181816.1,973-991).
ctcagatcaacccaatcat

SEQ ID NO: 807112 - DNA, 19 bp, Mus musculus
  siRNA target sequence for 4933401K09Rik (NM_181816.1,975-993).
cagatcaacccaatcatga

SEQ ID NO: 807113 - DNA, 19 bp, Mus musculus
  siRNA target sequence for 4933401K09Rik (NM_181816.1,983-1001).
cccaatcatgaaaaggaat

SEQ ID NO: 807114 - DNA, 19 bp, Mus musculus
  siRNA target sequence for 4933401K09Rik (NM_181816.1,1102-1120).
gaaggaggtcactatagca

SEQ ID NO: 807115 - DNA, 19 bp, Mus musculus
  siRNA target sequence for 4933401K09Rik (NM_181816.1,1113-1131).
ctatagcaactgtcatgaa

SEQ ID NO: 807116 - DNA, 19 bp, Mus musculus
  siRNA target sequence for 4933401K09Rik (NM_181816.1,1152-1170).
gacagctaaagatagaatt

SEQ ID NO: 807117 - DNA, 19 bp, Mus musculus
  siRNA target sequence for 4933401K09Rik (NM_181816.1,1202-1220).
caggtttcagatagaagat

SEQ ID NO: 807118 - DNA, 19 bp, Mus musculus
  siRNA target sequence for 4933401K09Rik (NM_181816.1,1205-1223).
gtttcagatagaagataca

SEQ ID NO: 807119 - DNA, 19 bp, Mus musculus
  siRNA target sequence for 4933401K09Rik (NM_181816.1,1255-1273).
gggaatgatgggcgattta

SEQ ID NO: 807120 - DNA, 19 bp, Mus musculus
  siRNA target sequence for 4933401K09Rik (NM_181816.1,1295-1313).
gtggacttaagtaacaaga

SEQ ID NO: 807121 - DNA, 19 bp, Mus musculus
  siRNA target sequence for 4933401K09Rik (NM_181816.1,1305-1323).
gtaacaagaagcattcaca

SEQ ID NO: 807122 - DNA, 19 bp, Mus musculus
  siRNA target sequence for 4933401K09Rik (NM_181816.1,1322-1340).
cagtgcacatcaattaaca

SEQ ID NO: 807123 - DNA, 19 bp, Mus musculus
  siRNA target sequence for 4933401K09Rik (NM_181816.1,1332-1350).
caattaacaagcttgaata

SEQ ID NO: 807124 - DNA, 19 bp, Mus musculus
  siRNA target sequence for 4933401K09Rik (NM_181816.1,1403-1421).
gcagcgtggcccaatcaga

SEQ ID NO: 807125 - DNA, 19 bp, Mus musculus
  siRNA target sequence for 4933401K09Rik (NM_181816.1,1499-1517).
gactgcgagctgaacagaa

SEQ ID NO: 807126 - DNA, 19 bp, Mus musculus
  siRNA target sequence for 4933401K09Rik (NM_181816.1,1567-1585).
cccattggttggtgacaat

SEQ ID NO: 807127 - DNA, 19 bp, Mus musculus
  siRNA target sequence for 4933401K09Rik (NM_181816.1,1596-1614).
ctctgtctccaccagatat

SEQ ID NO: 807128 - DNA, 19 bp, Mus musculus
  siRNA target sequence for 4933401K09Rik (NM_181816.1,1725-1743).
ccgagttcacgcttaacaa

SEQ ID NO: 807129 - DNA, 19 bp, Mus musculus
  siRNA target sequence for 4933401K09Rik (NM_181816.1,1726-1744).
cgagttcacgcttaacaaa

SEQ ID NO: 807130 - DNA, 19 bp, Mus musculus
  siRNA target sequence for 4933401K09Rik (NM_181816.1,1727-1745).
gagttcacgcttaacaaat

SEQ ID NO: 807131 - DNA, 19 bp, Mus musculus
  siRNA target sequence for Gpr100 (NM_181817.1,134-152).
cctatggacttgtaggtat

SEQ ID NO: 807132 - DNA, 19 bp, Mus musculus
  siRNA target sequence for Gpr100 (NM_181817.1,183-201).
gtgggttctaggtaactgt

SEQ ID NO: 807133 - DNA, 19 bp, Mus musculus
  siRNA target sequence for Gpr100 (NM_181817.1,379-397).
gccagcaccttcctaatca

SEQ ID NO: 807134 - DNA, 19 bp, Mus musculus
  siRNA target sequence for Gpr100 (NM_181817.1,518-536).
ctgtgcccacagcaatctt

SEQ ID NO: 807135 - DNA, 19 bp, Mus musculus
  siRNA target sequence for Gpr100 (NM_181817.1,642-660).
cgtgcccttgggagtcatt

SEQ ID NO: 807136 - DNA, 19 bp, Mus musculus
  siRNA target sequence for Gpr100 (NM_181817.1,691-709).
ctagagcggcagcaaagat

SEQ ID NO: 807137 - DNA, 19 bp, Mus musculus
  siRNA target sequence for AY100450 (NM_181819.1,3-21).
gtgtgccccagggtatcat

SEQ ID NO: 807138 - DNA, 19 bp, Mus musculus
  siRNA target sequence for AY100450 (NM_181819.1,19-37).
catcggttctggtttcact

SEQ ID NO: 807139 - DNA, 19 bp, Mus musculus
  siRNA target sequence for AY100450 (NM_181819.1,196-214).
gaatgtgagacctatgaga

SEQ ID NO: 807140 - DNA, 19 bp, Mus musculus
  siRNA target sequence for AY100450 (NM_181819.1,367-385).
ggccagcccgtgtgtaagt

SEQ ID NO: 807141 - DNA, 19 bp, Mus musculus
  siRNA target sequence for AY100450 (NM_181819.1,502-520).
gtcacctgtcgttatcact

SEQ ID NO: 807142 - DNA, 19 bp, Mus musculus
  siRNA target sequence for AY100450 (NM_181819.1,1024-1042).
gacgcccaggctaacaact

SEQ ID NO: 807143 - DNA, 19 bp, Mus musculus
  siRNA target sequence for AY100450 (NM_181819.1,1063-1081).
cactgccaccacaatctca

SEQ ID NO: 807144 - DNA, 19 bp, Mus musculus
  siRNA target sequence for AY100450 (NM_181819.1,1155-1173).
cctgcaagggccttgcaaa

SEQ ID NO: 807145 - DNA, 19 bp, Mus musculus
  siRNA target sequence for AY100450 (NM_181819.1,1163-1181).
ggccttgcaaagcttatgt

SEQ ID NO: 807146 - DNA, 19 bp, Mus musculus
  siRNA target sequence for AY100450 (NM_181819.1,1243-1261).
gagggcaacggtaacaact

SEQ ID NO: 807147 - DNA, 19 bp, Mus musculus
  siRNA target sequence for AY100450 (NM_181819.1,1361-1379).
gtcggagtgactttgtcat

SEQ ID NO: 807148 - DNA, 19 bp, Mus musculus
  siRNA target sequence for AY100450 (NM_181819.1,1437-1455).
cgtggatgaggtcttaaaa

SEQ ID NO: 807149 - DNA, 19 bp, Mus musculus
  siRNA target sequence for AY100450 (NM_181819.1,1553-1571).
gtgagacaccactcatcat

SEQ ID NO: 807150 - DNA, 19 bp, Mus musculus
  siRNA target sequence for AY100450 (NM_181819.1,1602-1620).
gctgagacccgatagcttt

SEQ ID NO: 807151 - DNA, 19 bp, Mus musculus
  siRNA target sequence for AY100450 (NM_181819.1,1696-1714).
gacttcctgggcttgcaat

SEQ ID NO: 807152 - DNA, 19 bp, Mus musculus
  siRNA target sequence for Tmc4 (NM_181820.1,378-396).
cccggaccaagggaaaaat

SEQ ID NO: 807153 - DNA, 19 bp, Mus musculus
  siRNA target sequence for Tmc4 (NM_181820.1,380-398).
cggaccaagggaaaaatga

SEQ ID NO: 807154 - DNA, 19 bp, Mus musculus
  siRNA target sequence for Tmc4 (NM_181820.1,397-415).
gaaagaaggctttcaaact

SEQ ID NO: 807155 - DNA, 19 bp, Mus musculus
  siRNA target sequence for Tmc4 (NM_181820.1,426-444).
gggcatggacgctgaagaa

SEQ ID NO: 807156 - DNA, 19 bp, Mus musculus
  siRNA target sequence for Tmc4 (NM_181820.1,427-445).
ggcatggacgctgaagaaa

SEQ ID NO: 807157 - DNA, 19 bp, Mus musculus
  siRNA target sequence for Tmc4 (NM_181820.1,428-446).
gcatggacgctgaagaaaa

SEQ ID NO: 807158 - DNA, 19 bp, Mus musculus
  siRNA target sequence for Tmc4 (NM_181820.1,521-539).
gcatctgtcattgaaatct

SEQ ID NO: 807159 - DNA, 19 bp, Mus musculus
  siRNA target sequence for Tmc4 (NM_181820.1,676-694).
ctctggagagggttacctt

SEQ ID NO: 807160 - DNA, 19 bp, Mus musculus
  siRNA target sequence for Tmc4 (NM_181820.1,835-853).
gttggcggagtcagacatt

SEQ ID NO: 807161 - DNA, 19 bp, Mus musculus
  siRNA target sequence for Tmc4 (NM_181820.1,839-857).
gcggagtcagacattctga

SEQ ID NO: 807162 - DNA, 19 bp, Mus musculus
  siRNA target sequence for Tmc4 (NM_181820.1,922-940).
gctgcgccagcgcatcatt

SEQ ID NO: 807163 - DNA, 19 bp, Mus musculus
  siRNA target sequence for Tmc4 (NM_181820.1,923-941).
ctgcgccagcgcatcattt

SEQ ID NO: 807164 - DNA, 19 bp, Mus musculus
  siRNA target sequence for Tmc4 (NM_181820.1,928-946).
ccagcgcatcattttgtat

SEQ ID NO: 807165 - DNA, 19 bp, Mus musculus
  siRNA target sequence for Tmc4 (NM_181820.1,931-949).
gcgcatcattttgtatgaa

SEQ ID NO: 807166 - DNA, 19 bp, Mus musculus
  siRNA target sequence for Tmc4 (NM_181820.1,1139-1157).
cgacagaccccactattca

SEQ ID NO: 807167 - DNA, 19 bp, Mus musculus
  siRNA target sequence for Tmc4 (NM_181820.1,1140-1158).
gacagaccccactattcaa

SEQ ID NO: 807168 - DNA, 19 bp, Mus musculus
  siRNA target sequence for Tmc4 (NM_181820.1,1156-1174).
caagcttctggtggattat

SEQ ID NO: 807169 - DNA, 19 bp, Mus musculus
  siRNA target sequence for Tmc4 (NM_181820.1,1260-1278).
gccgacagatcgtcttgat

SEQ ID NO: 807170 - DNA, 19 bp, Mus musculus
  siRNA target sequence for Tmc4 (NM_181820.1,1381-1399).
caaggcctgcggctataat

SEQ ID NO: 807171 - DNA, 19 bp, Mus musculus
  siRNA target sequence for Tmc4 (NM_181820.1,1390-1408).
cggctataattacaaagaa

SEQ ID NO: 807172 - DNA, 19 bp, Mus musculus
  siRNA target sequence for Tmc4 (NM_181820.1,1392-1410).
gctataattacaaagaaat

SEQ ID NO: 807173 - DNA, 19 bp, Mus musculus
  siRNA target sequence for Tmc4 (NM_181820.1,1430-1448).
ctgggccaggagatgtaca

SEQ ID NO: 807174 - DNA, 19 bp, Mus musculus
  siRNA target sequence for Tmc4 (NM_181820.1,1438-1456).
ggagatgtacaaacttgta

SEQ ID NO: 807175 - DNA, 19 bp, Mus musculus
  siRNA target sequence for Tmc4 (NM_181820.1,1641-1659).
ctttactgcctttgatcaa

SEQ ID NO: 807176 - DNA, 19 bp, Mus musculus
  siRNA target sequence for Tmc4 (NM_181820.1,1665-1683).
ctaagttcctcatactgtt

SEQ ID NO: 807177 - DNA, 19 bp, Mus musculus
  siRNA target sequence for Tmc4 (NM_181820.1,1825-1843).
cctgatcccaccttcgaaa

SEQ ID NO: 807178 - DNA, 19 bp, Mus musculus
  siRNA target sequence for Tmc4 (NM_181820.1,1920-1938).
cccagaattttctctactt

SEQ ID NO: 807179 - DNA, 19 bp, Mus musculus
  siRNA target sequence for Tmc4 (NM_181820.1,1921-1939).
ccagaattttctctacttt

SEQ ID NO: 807180 - DNA, 19 bp, Mus musculus
  siRNA target sequence for Tmc4 (NM_181820.1,1944-1962).
gaacccaagcttttactgt

SEQ ID NO: 807181 - DNA, 19 bp, Mus musculus
  siRNA target sequence for Tmc4 (NM_181820.1,2059-2077).
gacggaagtgcagaataaa

SEQ ID NO: 807182 - DNA, 19 bp, Mus musculus
  siRNA target sequence for Optn (NM_181848.3,104-122).
ggaaatggaccctccaata

SEQ ID NO: 807183 - DNA, 19 bp, Mus musculus
  siRNA target sequence for Optn (NM_181848.3,105-123).
gaaatggaccctccaatat

SEQ ID NO: 807184 - DNA, 19 bp, Mus musculus
  siRNA target sequence for Optn (NM_181848.3,213-231).
ccatgaagctaaataatca

SEQ ID NO: 807185 - DNA, 19 bp, Mus musculus
  siRNA target sequence for Optn (NM_181848.3,214-232).
catgaagctaaataatcaa

SEQ ID NO: 807186 - DNA, 19 bp, Mus musculus
  siRNA target sequence for Optn (NM_181848.3,234-252).
ctatgaaagggcgatttga

SEQ ID NO: 807187 - DNA, 19 bp, Mus musculus
  siRNA target sequence for Optn (NM_181848.3,287-305).
gagcgcctgttgtttgaga

SEQ ID NO: 807188 - DNA, 19 bp, Mus musculus
  siRNA target sequence for Optn (NM_181848.3,337-355).
ggccctgactcatgaaaat

SEQ ID NO: 807189 - DNA, 19 bp, Mus musculus
  siRNA target sequence for Optn (NM_181848.3,723-741).
ggagttgtgcggagtttga

SEQ ID NO: 807190 - DNA, 19 bp, Mus musculus
  siRNA target sequence for Optn (NM_181848.3,724-742).
gagttgtgcggagtttgaa

SEQ ID NO: 807191 - DNA, 19 bp, Mus musculus
  siRNA target sequence for Optn (NM_181848.3,726-744).
gttgtgcggagtttgaaga

SEQ ID NO: 807192 - DNA, 19 bp, Mus musculus
  siRNA target sequence for Optn (NM_181848.3,939-957).
gaagcgaagtggaaacact

SEQ ID NO: 807193 - DNA, 19 bp, Mus musculus
  siRNA target sequence for Optn (NM_181848.3,965-983).
caagtgacctctctgttta

SEQ ID NO: 807194 - DNA, 19 bp, Mus musculus
  siRNA target sequence for Optn (NM_181848.3,1083-1101).
caccatcagagctgaatga

SEQ ID NO: 807195 - DNA, 19 bp, Mus musculus
  siRNA target sequence for Optn (NM_181848.3,1112-1130).
ctcgtttacagtaacaaga

SEQ ID NO: 807196 - DNA, 19 bp, Mus musculus
  siRNA target sequence for Optn (NM_181848.3,1264-1282).
gaaaacaattgaagaacta

SEQ ID NO: 807197 - DNA, 19 bp, Mus musculus
  siRNA target sequence for Optn (NM_181848.3,1269-1287).
caattgaagaactaaccaa

SEQ ID NO: 807198 - DNA, 19 bp, Mus musculus
  siRNA target sequence for Optn (NM_181848.3,1530-1548).
ccttgcagctcgcgatttt

SEQ ID NO: 807199 - DNA, 19 bp, Mus musculus
  siRNA target sequence for Optn (NM_181848.3,1541-1559).
gcgattttgctgaaagaga

SEQ ID NO: 807200 - DNA, 19 bp, Mus musculus
  siRNA target sequence for Optn (NM_181848.3,1542-1560).
cgattttgctgaaagagaa

SEQ ID NO: 807201 - DNA, 19 bp, Mus musculus
  siRNA target sequence for Optn (NM_181848.3,1645-1663).
gcagacttacctgtttcaa

SEQ ID NO: 807202 - DNA, 19 bp, Mus musculus
  siRNA target sequence for Optn (NM_181848.3,1646-1664).
cagacttacctgtttcaaa

SEQ ID NO: 807203 - DNA, 19 bp, Mus musculus
  siRNA target sequence for Optn (NM_181848.3,1706-1724).
cgcagtattccgattcact

SEQ ID NO: 807204 - DNA, 19 bp, Mus musculus
  siRNA target sequence for Optn (NM_181848.3,1764-1782).
cgcttcagatccatgtgat

SEQ ID NO: 807205 - DNA, 19 bp, Mus musculus
  siRNA target sequence for Optn (NM_181848.3,1778-1796).
gtgatggactgcatcattt

SEQ ID NO: 807206 - DNA, 19 bp, Mus musculus
  siRNA target sequence for Fgb (NM_181849.1,314-332).
gtgtcctacgggatgtaca

SEQ ID NO: 807207 - DNA, 19 bp, Mus musculus
  siRNA target sequence for Fgb (NM_181849.1,316-334).
gtcctacgggatgtacatt

SEQ ID NO: 807208 - DNA, 19 bp, Mus musculus
  siRNA target sequence for Fgb (NM_181849.1,328-346).
gtacattgcaacaaacgtt

SEQ ID NO: 807209 - DNA, 19 bp, Mus musculus
  siRNA target sequence for Fgb (NM_181849.1,361-379).
ggccaatcaagagtagtat

SEQ ID NO: 807210 - DNA, 19 bp, Mus musculus
  siRNA target sequence for Fgb (NM_181849.1,362-380).
gccaatcaagagtagtatt

SEQ ID NO: 807211 - DNA, 19 bp, Mus musculus
  siRNA target sequence for Fgb (NM_181849.1,474-492).
caagctcaagttaaagaga

SEQ ID NO: 807212 - DNA, 19 bp, Mus musculus
  siRNA target sequence for Fgb (NM_181849.1,478-496).
ctcaagttaaagagaatga

SEQ ID NO: 807213 - DNA, 19 bp, Mus musculus
  siRNA target sequence for Fgb (NM_181849.1,608-626).
ggacctgagaagcaaaata

SEQ ID NO: 807214 - DNA, 19 bp, Mus musculus
  siRNA target sequence for Fgb (NM_181849.1,619-637).
gcaaaatacaaaaattaga

SEQ ID NO: 807215 - DNA, 19 bp, Mus musculus
  siRNA target sequence for Fgb (NM_181849.1,640-658).
ctgacatctcagctcaaat

SEQ ID NO: 807216 - DNA, 19 bp, Mus musculus
  siRNA target sequence for Fgb (NM_181849.1,744-762).
ggtgagacatccgaaatgt

SEQ ID NO: 807217 - DNA, 19 bp, Mus musculus
  siRNA target sequence for Fgb (NM_181849.1,745-763).
gtgagacatccgaaatgta

SEQ ID NO: 807218 - DNA, 19 bp, Mus musculus
  siRNA target sequence for Fgb (NM_181849.1,801-819).
gtatactgtgacatgaaaa

SEQ ID NO: 807219 - DNA, 19 bp, Mus musculus
  siRNA target sequence for Fgb (NM_181849.1,867-885).
gtcgactttggcaggaaat

SEQ ID NO: 807220 - DNA, 19 bp, Mus musculus
  siRNA target sequence for Fgb (NM_181849.1,887-905).
ggacccatacaaaaaagga

SEQ ID NO: 807221 - DNA, 19 bp, Mus musculus
  siRNA target sequence for Fgb (NM_181849.1,927-945).
gaagacgcgaagaagtact

SEQ ID NO: 807222 - DNA, 19 bp, Mus musculus
  siRNA target sequence for Fgb (NM_181849.1,967-985).
ggcttggcaatgataagat

SEQ ID NO: 807223 - DNA, 19 bp, Mus musculus
  siRNA target sequence for Fgb (NM_181849.1,968-986).
gcttggcaatgataagatt

SEQ ID NO: 807224 - DNA, 19 bp, Mus musculus
  siRNA target sequence for Fgb (NM_181849.1,1010-1028).
cacagaacttctcattgaa

SEQ ID NO: 807225 - DNA, 19 bp, Mus musculus
  siRNA target sequence for Fgb (NM_181849.1,1052-1070).
ggtgaaggcacattatgga

SEQ ID NO: 807226 - DNA, 19 bp, Mus musculus
  siRNA target sequence for Fgb (NM_181849.1,1088-1106).
cgaggccagcaaataccaa

SEQ ID NO: 807227 - DNA, 19 bp, Mus musculus
  siRNA target sequence for Fgb (NM_181849.1,1107-1125).
gtctcagtgaacaaataca

SEQ ID NO: 807228 - DNA, 19 bp, Mus musculus
  siRNA target sequence for Fgb (NM_181849.1,1197-1215).
cacaacggcatgttcttca

SEQ ID NO: 807229 - DNA, 19 bp, Mus musculus
  siRNA target sequence for Fgb (NM_181849.1,1389-1407).
ggtgtggtgtggatgaact

SEQ ID NO: 807230 - DNA, 19 bp, Mus musculus
  siRNA target sequence for Fgb (NM_181849.1,1413-1431).
ggatcgtggtactcaatga

SEQ ID NO: 807231 - DNA, 19 bp, Mus musculus
  siRNA target sequence for D8Ertd457e (NM_181854.1,197-215).
gcaccgattatgagaatgt

SEQ ID NO: 807232 - DNA, 19 bp, Mus musculus
  siRNA target sequence for D8Ertd457e (NM_181854.1,272-290).
gcctgggcaagctcatctt

SEQ ID NO: 807233 - DNA, 19 bp, Mus musculus
  siRNA target sequence for D8Ertd457e (NM_181854.1,278-296).
gcaagctcatcttttacca

SEQ ID NO: 807234 - DNA, 19 bp, Mus musculus
  siRNA target sequence for D8Ertd457e (NM_181854.1,348-366).
gtacgccaatgtgtactat

SEQ ID NO: 807235 - DNA, 19 bp, Mus musculus
  siRNA target sequence for D8Ertd457e (NM_181854.1,352-370).
gccaatgtgtactatcaca

SEQ ID NO: 807236 - DNA, 19 bp, Mus musculus
  siRNA target sequence for D8Ertd457e (NM_181854.1,353-371).
ccaatgtgtactatcacat

SEQ ID NO: 807237 - DNA, 19 bp, Mus musculus
  siRNA target sequence for D8Ertd457e (NM_181854.1,780-798).
cccaaagcactcttccttt

SEQ ID NO: 807238 - DNA, 19 bp, Mus musculus
  siRNA target sequence for D8Ertd457e (NM_181854.1,1109-1127).
ctaaacctgttcaacctat

SEQ ID NO: 807239 - DNA, 19 bp, Mus musculus
  siRNA target sequence for D8Ertd457e (NM_181854.1,1132-1150).
cctggaccttggaaaccaa

SEQ ID NO: 807240 - DNA, 19 bp, Mus musculus
  siRNA target sequence for D8Ertd457e (NM_181854.1,1427-1445).
gctcaccagacctttggaa

SEQ ID NO: 807241 - DNA, 19 bp, Mus musculus
  siRNA target sequence for D8Ertd457e (NM_181854.1,1453-1471).
cctgaccagcggaaaactt

SEQ ID NO: 807242 - DNA, 19 bp, Mus musculus
  siRNA target sequence for D8Ertd457e (NM_181854.1,1495-1513).
gagccccagaaaagttctt

SEQ ID NO: 807243 - DNA, 19 bp, Mus musculus
  siRNA target sequence for D8Ertd457e (NM_181854.1,1627-1645).
gtagcgtcagacatatgga

SEQ ID NO: 807244 - DNA, 19 bp, Mus musculus
  siRNA target sequence for D8Ertd457e (NM_181854.1,1733-1751).
cacggaaacgcgcactttt

SEQ ID NO: 807245 - DNA, 19 bp, Mus musculus
  siRNA target sequence for D8Ertd457e (NM_181854.1,1761-1779).
ccggaagcacgtgtttcta

SEQ ID NO: 807246 - DNA, 19 bp, Mus musculus
  siRNA target sequence for D8Ertd457e (NM_181854.1,1770-1788).
cgtgtttctacctgaactt

SEQ ID NO: 807247 - DNA, 19 bp, Mus musculus
  siRNA target sequence for D8Ertd457e (NM_181854.1,1830-1848).
gcttagtgaggagatacaa

SEQ ID NO: 807248 - DNA, 19 bp, Mus musculus
  siRNA target sequence for D8Ertd457e (NM_181854.1,1903-1921).
gccacccccaagaaactgt

SEQ ID NO: 807249 - DNA, 19 bp, Mus musculus
  siRNA target sequence for D8Ertd457e (NM_181854.1,1907-1925).
cccccaagaaactgttaga

SEQ ID NO: 807250 - DNA, 19 bp, Mus musculus
  siRNA target sequence for D8Ertd457e (NM_181854.1,1987-2005).
gagctcagtagcagtgaat

SEQ ID NO: 807251 - DNA, 19 bp, Mus musculus
  siRNA target sequence for D8Ertd457e (NM_181854.1,2070-2088).
ggtggatgtggaatcgatt

SEQ ID NO: 807252 - DNA, 19 bp, Mus musculus
  siRNA target sequence for D8Ertd457e (NM_181854.1,2074-2092).
gatgtggaatcgattgatt

SEQ ID NO: 807253 - DNA, 19 bp, Mus musculus
  siRNA target sequence for D8Ertd457e (NM_181854.1,2080-2098).
gaatcgattgattttagca

SEQ ID NO: 807254 - DNA, 19 bp, Mus musculus
  siRNA target sequence for D8Ertd457e (NM_181854.1,2209-2227).
cgtgggaaagggaaatact

SEQ ID NO: 807255 - DNA, 19 bp, Mus musculus
  siRNA target sequence for D8Ertd457e (NM_181854.1,2210-2228).
gtgggaaagggaaatacta

SEQ ID NO: 807256 - DNA, 19 bp, Mus musculus
  siRNA target sequence for D8Ertd457e (NM_181854.1,2212-2230).
gggaaagggaaatactact

SEQ ID NO: 807257 - DNA, 19 bp, Mus musculus
  siRNA target sequence for D8Ertd457e (NM_181854.1,2219-2237).
ggaaatactactgcaaaat

SEQ ID NO: 807258 - DNA, 19 bp, Mus musculus
  siRNA target sequence for D8Ertd457e (NM_181854.1,2269-2287).
gtcttgcaccacttggtta

SEQ ID NO: 807259 - DNA, 19 bp, Mus musculus
  siRNA target sequence for D8Ertd457e (NM_181854.1,2295-2313).
caatgtccacagtccatat

SEQ ID NO: 807260 - DNA, 19 bp, Mus musculus
  siRNA target sequence for D8Ertd457e (NM_181854.1,2308-2326).
ccatataagtgcacaattt

SEQ ID NO: 807261 - DNA, 19 bp, Mus musculus
  siRNA target sequence for D8Ertd457e (NM_181854.1,2316-2334).
gtgcacaatttgtggaaaa

SEQ ID NO: 807262 - DNA, 19 bp, Mus musculus
  siRNA target sequence for D8Ertd457e (NM_181854.1,2341-2359).
cttttggagtctcttctta

SEQ ID NO: 807263 - DNA, 19 bp, Mus musculus
  siRNA target sequence for D8Ertd457e (NM_181854.1,2375-2393).
cccacgggcagagtttact

SEQ ID NO: 807264 - DNA, 19 bp, Mus musculus
  siRNA target sequence for D8Ertd457e (NM_181854.1,2376-2394).
ccacgggcagagtttactt

SEQ ID NO: 807265 - DNA, 19 bp, Mus musculus
  siRNA target sequence for D8Ertd457e (NM_181854.1,2377-2395).
cacgggcagagtttactta

SEQ ID NO: 807266 - DNA, 19 bp, Mus musculus
  siRNA target sequence for D8Ertd457e (NM_181854.1,2379-2397).
cgggcagagtttacttaaa

SEQ ID NO: 807267 - DNA, 19 bp, Mus musculus
  siRNA target sequence for D8Ertd457e (NM_181854.1,2380-2398).
gggcagagtttacttaaat

SEQ ID NO: 807268 - DNA, 19 bp, Mus musculus
  siRNA target sequence for D8Ertd457e (NM_181854.1,2382-2400).
gcagagtttacttaaatgt

SEQ ID NO: 807269 - DNA, 19 bp, Mus musculus
  siRNA target sequence for D8Ertd457e (NM_181854.1,2399-2417).
gtccacgctgtaattttga

SEQ ID NO: 807270 - DNA, 19 bp, Mus musculus
  siRNA target sequence for D8Ertd457e (NM_181854.1,2401-2419).
ccacgctgtaattttgaat

SEQ ID NO: 807271 - DNA, 19 bp, Mus musculus
  siRNA target sequence for D8Ertd457e (NM_181854.1,2404-2422).
cgctgtaattttgaatcaa

SEQ ID NO: 807272 - DNA, 19 bp, Mus musculus
  siRNA target sequence for D8Ertd457e (NM_181854.1,2457-2475).
ctgtcagagccggcataat

SEQ ID NO: 807273 - DNA, 19 bp, Mus musculus
  siRNA target sequence for D8Ertd457e (NM_181854.1,2459-2477).
gtcagagccggcataatga

SEQ ID NO: 807274 - DNA, 19 bp, Mus musculus
  siRNA target sequence for Magea9 (NM_181855.1,144-162).
gcctgctggtggaatacca

SEQ ID NO: 807275 - DNA, 19 bp, Mus musculus
  siRNA target sequence for Magea9 (NM_181855.1,148-166).
gctggtggaataccaaatt

SEQ ID NO: 807276 - DNA, 19 bp, Mus musculus
  siRNA target sequence for Magea9 (NM_181855.1,149-167).
ctggtggaataccaaatta

SEQ ID NO: 807277 - DNA, 19 bp, Mus musculus
  siRNA target sequence for Magea9 (NM_181855.1,189-207).
cttatctcctcccattgtt

SEQ ID NO: 807278 - DNA, 19 bp, Mus musculus
  siRNA target sequence for Magea9 (NM_181855.1,277-295).
gtattgcagcacgcattaa

SEQ ID NO: 807279 - DNA, 19 bp, Mus musculus
  siRNA target sequence for Magea9 (NM_181855.1,282-300).
gcagcacgcattaaattca

SEQ ID NO: 807280 - DNA, 19 bp, Mus musculus
  siRNA target sequence for Magea9 (NM_181855.1,283-301).
cagcacgcattaaattcaa

SEQ ID NO: 807281 - DNA, 19 bp, Mus musculus
  siRNA target sequence for Magea9 (NM_181855.1,299-317).
caaaggcaattgatatggt

SEQ ID NO: 807282 - DNA, 19 bp, Mus musculus
  siRNA target sequence for Magea9 (NM_181855.1,391-409).
gatgatgagcagtattaca

SEQ ID NO: 807283 - DNA, 19 bp, Mus musculus
  siRNA target sequence for Magea9 (NM_181855.1,394-412).
gatgagcagtattacaata

SEQ ID NO: 807284 - DNA, 19 bp, Mus musculus
  siRNA target sequence for Magea9 (NM_181855.1,408-426).
caataggatctttaatcaa

SEQ ID NO: 807285 - DNA, 19 bp, Mus musculus
  siRNA target sequence for Magea9 (NM_181855.1,455-473).
gcattgatgtgatagaagt

SEQ ID NO: 807286 - DNA, 19 bp, Mus musculus
  siRNA target sequence for Magea9 (NM_181855.1,555-573).
gacaggcctcctaataatt

SEQ ID NO: 807287 - DNA, 19 bp, Mus musculus
  siRNA target sequence for Magea9 (NM_181855.1,605-623).
gtgtccgtgaggatatgat

SEQ ID NO: 807288 - DNA, 19 bp, Mus musculus
  siRNA target sequence for Magea9 (NM_181855.1,621-639).
gatctggcgagcactgaat

SEQ ID NO: 807289 - DNA, 19 bp, Mus musculus
  siRNA target sequence for Magea9 (NM_181855.1,680-698).
gaaatgccaagaagctttt

SEQ ID NO: 807290 - DNA, 19 bp, Mus musculus
  siRNA target sequence for Ever2 (NM_181856.1,556-574).
gacattccaaggtttcaca

SEQ ID NO: 807291 - DNA, 19 bp, Mus musculus
  siRNA target sequence for Ever2 (NM_181856.1,571-589).
cacaacccactttggaata

SEQ ID NO: 807292 - DNA, 19 bp, Mus musculus
  siRNA target sequence for Ever2 (NM_181856.1,596-614).
cgggcagagccttcaacaa

SEQ ID NO: 807293 - DNA, 19 bp, Mus musculus
  siRNA target sequence for Ever2 (NM_181856.1,794-812).
ccctcagcgccaaagtgtt

SEQ ID NO: 807294 - DNA, 19 bp, Mus musculus
  siRNA target sequence for Ever2 (NM_181856.1,844-862).
gaagccgccaccatcaaga

SEQ ID NO: 807295 - DNA, 19 bp, Mus musculus
  siRNA target sequence for Ever2 (NM_181856.1,854-872).
ccatcaagaagcacgaaat

SEQ ID NO: 807296 - DNA, 19 bp, Mus musculus
  siRNA target sequence for Ever2 (NM_181856.1,864-882).
gcacgaaatcagcaatgaa

SEQ ID NO: 807297 - DNA, 19 bp, Mus musculus
  siRNA target sequence for Ever2 (NM_181856.1,912-930).
cgtggagctggctcaacaa

SEQ ID NO: 807298 - DNA, 19 bp, Mus musculus
  siRNA target sequence for Ever2 (NM_181856.1,1219-1237).
gccagcttgggcatgttct

SEQ ID NO: 807299 - DNA, 19 bp, Mus musculus
  siRNA target sequence for Ever2 (NM_181856.1,1337-1355).
cggtgggcgaagaattata

SEQ ID NO: 807300 - DNA, 19 bp, Mus musculus
  siRNA target sequence for Ever2 (NM_181856.1,1338-1356).
ggtgggcgaagaattatat

SEQ ID NO: 807301 - DNA, 19 bp, Mus musculus
  siRNA target sequence for Ever2 (NM_181856.1,1339-1357).
gtgggcgaagaattatata

SEQ ID NO: 807302 - DNA, 19 bp, Mus musculus
  siRNA target sequence for Ever2 (NM_181856.1,1342-1360).
ggcgaagaattatataagt

SEQ ID NO: 807303 - DNA, 19 bp, Mus musculus
  siRNA target sequence for Ever2 (NM_181856.1,1343-1361).
gcgaagaattatataagtt

SEQ ID NO: 807304 - DNA, 19 bp, Mus musculus
  siRNA target sequence for Ever2 (NM_181856.1,1550-1568).
ccctgctgccactactcaa

SEQ ID NO: 807305 - DNA, 19 bp, Mus musculus
  siRNA target sequence for Cd59b (NM_181858.1,285-303).
ggaaactttcggattgtaa

SEQ ID NO: 807306 - DNA, 19 bp, Mus musculus
  siRNA target sequence for Cd59b (NM_181858.1,290-308).
ctttcggattgtaattcca

SEQ ID NO: 807307 - DNA, 19 bp, Mus musculus
  siRNA target sequence for Cd59b (NM_181858.1,295-313).
ggattgtaattccaactat

SEQ ID NO: 807308 - DNA, 19 bp, Mus musculus
  siRNA target sequence for Cd59b (NM_181858.1,296-314).
gattgtaattccaactata

SEQ ID NO: 807309 - DNA, 19 bp, Mus musculus
  siRNA target sequence for Cd59b (NM_181858.1,329-347).
gacgtggcaggcatacaaa

SEQ ID NO: 807310 - DNA, 19 bp, Mus musculus
  siRNA target sequence for Cd59b (NM_181858.1,359-377).
cagtgggacttgtgtaaca

SEQ ID NO: 807311 - DNA, 19 bp, Mus musculus
  siRNA target sequence for Cd59b (NM_181858.1,361-379).
gtgggacttgtgtaacaaa

SEQ ID NO: 807312 - DNA, 19 bp, Mus musculus
  siRNA target sequence for Cd59b (NM_181858.1,400-418).
gccaaacaacgcagaaact

SEQ ID NO: 807313 - DNA, 19 bp, Mus musculus
  siRNA target sequence for Cd59b (NM_181858.1,401-419).
ccaaacaacgcagaaactt

SEQ ID NO: 807314 - DNA, 19 bp, Mus musculus
  siRNA target sequence for Cd59b (NM_181858.1,410-428).
gcagaaacttcctcattga

SEQ ID NO: 807315 - DNA, 19 bp, Mus musculus
  siRNA target sequence for Cd59b (NM_181858.1,464-482).
gccattttgaagttttgct

SEQ ID NO: 807316 - DNA, 19 bp, Mus musculus
  siRNA target sequence for Gt4-1 (NM_181860.1,241-259).
ctctgaacgaacggaaaaa

SEQ ID NO: 807317 - DNA, 19 bp, Mus musculus
  siRNA target sequence for Gt4-1 (NM_181860.1,245-263).
gaacgaacggaaaaatgga

SEQ ID NO: 807318 - DNA, 19 bp, Mus musculus
  siRNA target sequence for Gt4-1 (NM_181860.1,319-337).
gcacaggacataataagaa

SEQ ID NO: 807319 - DNA, 19 bp, Mus musculus
  siRNA target sequence for Gt4-1 (NM_181860.1,320-338).
cacaggacataataagaaa

SEQ ID NO: 807320 - DNA, 19 bp, Mus musculus
  siRNA target sequence for Scdr9 (NM_181989.1,337-355).
gaacgttgccggtgagata

SEQ ID NO: 807321 - DNA, 19 bp, Mus musculus
  siRNA target sequence for Scdr9 (NM_181989.1,347-365).
ggtgagatagtgctcataa

SEQ ID NO: 807322 - DNA, 19 bp, Mus musculus
  siRNA target sequence for Scdr9 (NM_181989.1,525-543).
gcagccggagggaagaagt

SEQ ID NO: 807323 - DNA, 19 bp, Mus musculus
  siRNA target sequence for Scdr9 (NM_181989.1,528-546).
gccggagggaagaagtgta

SEQ ID NO: 807324 - DNA, 19 bp, Mus musculus
  siRNA target sequence for Scdr9 (NM_181989.1,553-571).
ggctgaccaggttaagaaa

SEQ ID NO: 807325 - DNA, 19 bp, Mus musculus
  siRNA target sequence for Scdr9 (NM_181989.1,559-577).
ccaggttaagaaagaagtt

SEQ ID NO: 807326 - DNA, 19 bp, Mus musculus
  siRNA target sequence for Scdr9 (NM_181989.1,598-616).
caacaatgccggcattgta

SEQ ID NO: 807327 - DNA, 19 bp, Mus musculus
  siRNA target sequence for Scdr9 (NM_181989.1,601-619).
caatgccggcattgtaaca

SEQ ID NO: 807328 - DNA, 19 bp, Mus musculus
  siRNA target sequence for Scdr9 (NM_181989.1,730-748).
caaccacggccatttggtt

SEQ ID NO: 807329 - DNA, 19 bp, Mus musculus
  siRNA target sequence for Scdr9 (NM_181989.1,756-774).
caagttcagctggattaat

SEQ ID NO: 807330 - DNA, 19 bp, Mus musculus
  siRNA target sequence for Scdr9 (NM_181989.1,792-810).
cagactattgtgcaagtaa

SEQ ID NO: 807331 - DNA, 19 bp, Mus musculus
  siRNA target sequence for Scdr9 (NM_181989.1,794-812).
gactattgtgcaagtaaat

SEQ ID NO: 807332 - DNA, 19 bp, Mus musculus
  siRNA target sequence for Scdr9 (NM_181989.1,820-838).
ccttggatttgcagaatct

SEQ ID NO: 807333 - DNA, 19 bp, Mus musculus
  siRNA target sequence for Scdr9 (NM_181989.1,821-839).
cttggatttgcagaatcta

SEQ ID NO: 807334 - DNA, 19 bp, Mus musculus
  siRNA target sequence for Scdr9 (NM_181989.1,837-855).
ctatgtttatcgaaacact

SEQ ID NO: 807335 - DNA, 19 bp, Mus musculus
  siRNA target sequence for Scdr9 (NM_181989.1,847-865).
cgaaacacttgccaagaaa

SEQ ID NO: 807336 - DNA, 19 bp, Mus musculus
  siRNA target sequence for Scdr9 (NM_181989.1,862-880).
gaaacaatgggggatcaaa

SEQ ID NO: 807337 - DNA, 19 bp, Mus musculus
  siRNA target sequence for Scdr9 (NM_181989.1,866-884).
caatgggggatcaaaacga

SEQ ID NO: 807338 - DNA, 19 bp, Mus musculus
  siRNA target sequence for Scdr9 (NM_181989.1,885-903).
caattgtgtgcccattctt

SEQ ID NO: 807339 - DNA, 19 bp, Mus musculus
  siRNA target sequence for Scdr9 (NM_181989.1,895-913).
cccattctttataaaaact

SEQ ID NO: 807340 - DNA, 19 bp, Mus musculus
  siRNA target sequence for Scdr9 (NM_181989.1,923-941).
gaaggttgcactactaagt

SEQ ID NO: 807341 - DNA, 19 bp, Mus musculus
  siRNA target sequence for Scdr9 (NM_181989.1,945-963).
ctactctgttaccaattct

SEQ ID NO: 807342 - DNA, 19 bp, Mus musculus
  siRNA target sequence for Scdr9 (NM_181989.1,969-987).
cagaatatgcagttaggaa

SEQ ID NO: 807343 - DNA, 19 bp, Mus musculus
  siRNA target sequence for Scdr9 (NM_181989.1,1021-1039).
cttgtatatgcccaagttt

SEQ ID NO: 807344 - DNA, 19 bp, Mus musculus
  siRNA target sequence for Scdr9 (NM_181989.1,1072-1090).
gccaatcaagacaggaata

SEQ ID NO: 807345 - DNA, 19 bp, Mus musculus
  siRNA target sequence for Scdr9 (NM_181989.1,1074-1092).
caatcaagacaggaatact

SEQ ID NO: 807346 - DNA, 19 bp, Mus musculus
  siRNA target sequence for Scdr9 (NM_181989.1,1081-1099).
gacaggaatacttatagct

SEQ ID NO: 807347 - DNA, 19 bp, Mus musculus
  siRNA target sequence for Scdr9 (NM_181989.1,1106-1124).
ctgggagtctttcatatga

SEQ ID NO: 807348 - DNA, 19 bp, Mus musculus
  siRNA target sequence for Scdr9 (NM_181989.1,1108-1126).
gggagtctttcatatgaca

SEQ ID NO: 807349 - DNA, 19 bp, Mus musculus
  siRNA target sequence for Cklfsf1 (NM_181990.1,413-431).
gagtccagacgcttaactt

SEQ ID NO: 807350 - DNA, 19 bp, Mus musculus
  siRNA target sequence for Cklfsf1 (NM_181990.1,415-433).
gtccagacgcttaacttta

SEQ ID NO: 807351 - DNA, 19 bp, Mus musculus
  siRNA target sequence for Cklfsf1 (NM_181990.1,418-436).
cagacgcttaactttacga

SEQ ID NO: 807352 - DNA, 19 bp, Mus musculus
  siRNA target sequence for Cklfsf1 (NM_181990.1,456-474).
cctcaccttcggattcaca

SEQ ID NO: 807353 - DNA, 19 bp, Mus musculus
  siRNA target sequence for Cklfsf1 (NM_181990.1,733-751).
gcagcgaccttcagtacaa

SEQ ID NO: 807354 - DNA, 19 bp, Mus musculus
  siRNA target sequence for Cklfsf1 (NM_181990.1,876-894).
cagtacgtgccgtaccatt

SEQ ID NO: 807355 - DNA, 19 bp, Mus musculus
  siRNA target sequence for Cklfsf1 (NM_181990.1,998-1016).
ctggtccaagggtctaaga

SEQ ID NO: 807356 - DNA, 19 bp, Mus musculus
  siRNA target sequence for Cklfsf1 (NM_181990.1,1001-1019).
gtccaagggtctaagaaaa

SEQ ID NO: 807357 - DNA, 19 bp, Mus musculus
  siRNA target sequence for Cklfsf1 (NM_181990.1,1003-1021).
ccaagggtctaagaaaatt

SEQ ID NO: 807358 - DNA, 19 bp, Mus musculus
  siRNA target sequence for Cklfsf1 (NM_181990.1,1057-1075).
ccaggacaagcgctcaaaa

SEQ ID NO: 807359 - DNA, 19 bp, Mus musculus
  siRNA target sequence for Cklfsf1 (NM_181990.1,1058-1076).
caggacaagcgctcaaaaa

SEQ ID NO: 807360 - DNA, 19 bp, Mus musculus
  siRNA target sequence for Cklfsf1 (NM_181990.1,1060-1078).
ggacaagcgctcaaaaaga

SEQ ID NO: 807361 - DNA, 19 bp, Mus musculus
  siRNA target sequence for Cklfsf1 (NM_181990.1,1061-1079).
gacaagcgctcaaaaagat

SEQ ID NO: 807362 - DNA, 19 bp, Mus musculus
  siRNA target sequence for MGC62438 (NM_182636.1,743-761).
gggtcatcttgtcttgaat

SEQ ID NO: 807363 - DNA, 19 bp, Mus musculus
  siRNA target sequence for MGC62438 (NM_182636.1,1292-1310).
cttgagttcagcagaatat

SEQ ID NO: 807364 - DNA, 19 bp, Mus musculus
  siRNA target sequence for MGC62438 (NM_182636.1,1389-1407).
ctgcagcgacggttccata

SEQ ID NO: 807365 - DNA, 19 bp, Mus musculus
  siRNA target sequence for MGC62438 (NM_182636.1,1399-1417).
ggttccataaggacatctt

SEQ ID NO: 807366 - DNA, 19 bp, Mus musculus
  siRNA target sequence for MGC62438 (NM_182636.1,1592-1610).
catatttgggacattggta

SEQ ID NO: 807367 - DNA, 19 bp, Mus musculus
  siRNA target sequence for Ggn (NM_182694.1,870-888).
cggtggtggcggactgttt

SEQ ID NO: 807368 - DNA, 19 bp, Mus musculus
  siRNA target sequence for Ggn (NM_182694.1,1115-1133).
ccaccttcccaggttcaaa

SEQ ID NO: 807369 - DNA, 19 bp, Mus musculus
  siRNA target sequence for Ggn (NM_182694.1,1325-1343).
caccacccatgttcatctt

SEQ ID NO: 807370 - DNA, 19 bp, Mus musculus
  siRNA target sequence for MOR256-20 (NM_182714.1,915-933).
ggatggggactccaaaaat

SEQ ID NO: 807371 - DNA, 19 bp, Mus musculus
  siRNA target sequence for MOR256-20 (NM_182714.1,916-934).
gatggggactccaaaaata

SEQ ID NO: 807372 - DNA, 19 bp, Mus musculus
  siRNA target sequence for Nfasc (NM_182716.2,452-470).
gtggaccctcgagataaca

SEQ ID NO: 807373 - DNA, 19 bp, Mus musculus
  siRNA target sequence for Nfasc (NM_182716.2,462-480).
gagataacatcctgattga

SEQ ID NO: 807374 - DNA, 19 bp, Mus musculus
  siRNA target sequence for Nfasc (NM_182716.2,469-487).
catcctgattgaatgtgaa

SEQ ID NO: 807375 - DNA, 19 bp, Mus musculus
  siRNA target sequence for Nfasc (NM_182716.2,648-666).
gctttgcccggaacaaatt

SEQ ID NO: 807376 - DNA, 19 bp, Mus musculus
  siRNA target sequence for Nfasc (NM_182716.2,718-736).
gtggcccaaggaaaaccta

SEQ ID NO: 807377 - DNA, 19 bp, Mus musculus
  siRNA target sequence for Nfasc (NM_182716.2,800-818).
ccgtcccccgtcatcttct

SEQ ID NO: 807378 - DNA, 19 bp, Mus musculus
  siRNA target sequence for Nfasc (NM_182716.2,1020-1038).
gaacgcccagcttcatgta

SEQ ID NO: 807379 - DNA, 19 bp, Mus musculus
  siRNA target sequence for Nfasc (NM_182716.2,1115-1133).
ccaacaccagacattgcat

SEQ ID NO: 807380 - DNA, 19 bp, Mus musculus
  siRNA target sequence for Nfasc (NM_182716.2,1124-1142).
gacattgcatggtacaaga

SEQ ID NO: 807381 - DNA, 19 bp, Mus musculus
  siRNA target sequence for Nfasc (NM_182716.2,1146-1164).
gtggggacctcccatctaa

SEQ ID NO: 807382 - DNA, 19 bp, Mus musculus
  siRNA target sequence for Nfasc (NM_182716.2,1149-1167).
gggacctcccatctaacaa

SEQ ID NO: 807383 - DNA, 19 bp, Mus musculus
  siRNA target sequence for Nfasc (NM_182716.2,1168-1186).
ggccaagttcgagaacttt

SEQ ID NO: 807384 - DNA, 19 bp, Mus musculus
  siRNA target sequence for Nfasc (NM_182716.2,1169-1187).
gccaagttcgagaacttta

SEQ ID NO: 807385 - DNA, 19 bp, Mus musculus
  siRNA target sequence for Nfasc (NM_182716.2,1170-1188).
ccaagttcgagaactttaa

SEQ ID NO: 807386 - DNA, 19 bp, Mus musculus
  siRNA target sequence for Nfasc (NM_182716.2,1223-1241).
gactctggggagtatttct

SEQ ID NO: 807387 - DNA, 19 bp, Mus musculus
  siRNA target sequence for Nfasc (NM_182716.2,1278-1296).
cgatctcggtgagagtaaa

SEQ ID NO: 807388 - DNA, 19 bp, Mus musculus
  siRNA target sequence for Nfasc (NM_182716.2,1503-1521).
gggcagtgtaccaatgtaa

SEQ ID NO: 807389 - DNA, 19 bp, Mus musculus
  siRNA target sequence for Nfasc (NM_182716.2,1504-1522).
ggcagtgtaccaatgtaat

SEQ ID NO: 807390 - DNA, 19 bp, Mus musculus
  siRNA target sequence for Nfasc (NM_182716.2,1508-1526).
gtgtaccaatgtaatacat

SEQ ID NO: 807391 - DNA, 19 bp, Mus musculus
  siRNA target sequence for Nfasc (NM_182716.2,1518-1536).
gtaatacatccaatgaaca

SEQ ID NO: 807392 - DNA, 19 bp, Mus musculus
  siRNA target sequence for Nfasc (NM_182716.2,1557-1575).
ccttcgtcagcgtgttaga

SEQ ID NO: 807393 - DNA, 19 bp, Mus musculus
  siRNA target sequence for Nfasc (NM_182716.2,1558-1576).
cttcgtcagcgtgttagat

SEQ ID NO: 807394 - DNA, 19 bp, Mus musculus
  siRNA target sequence for Nfasc (NM_182716.2,1642-1660).
gctggactgtccgttcttt

SEQ ID NO: 807395 - DNA, 19 bp, Mus musculus
  siRNA target sequence for Nfasc (NM_182716.2,1672-1690).
cccaacactccgatggttt

SEQ ID NO: 807396 - DNA, 19 bp, Mus musculus
  siRNA target sequence for Nfasc (NM_182716.2,1673-1691).
ccaacactccgatggttta

SEQ ID NO: 807397 - DNA, 19 bp, Mus musculus
  siRNA target sequence for Nfasc (NM_182716.2,1674-1692).
caacactccgatggtttaa

SEQ ID NO: 807398 - DNA, 19 bp, Mus musculus
  siRNA target sequence for Nfasc (NM_182716.2,1738-1756).
cgaaaacggcagtctagaa

SEQ ID NO: 807399 - DNA, 19 bp, Mus musculus
  siRNA target sequence for Nfasc (NM_182716.2,1739-1757).
gaaaacggcagtctagaaa

SEQ ID NO: 807400 - DNA, 19 bp, Mus musculus
  siRNA target sequence for Nfasc (NM_182716.2,1749-1767).
gtctagaaatcaagatgat

SEQ ID NO: 807401 - DNA, 19 bp, Mus musculus
  siRNA target sequence for Nfasc (NM_182716.2,1818-1836).
gcaaagccgaaaatcaagt

SEQ ID NO: 807402 - DNA, 19 bp, Mus musculus
  siRNA target sequence for Nfasc (NM_182716.2,1853-1871).
gaccccaccaggatctaca

SEQ ID NO: 807403 - DNA, 19 bp, Mus musculus
  siRNA target sequence for Nfasc (NM_182716.2,1918-1936).
ggagtgccgcgtgaaacat

SEQ ID NO: 807404 - DNA, 19 bp, Mus musculus
  siRNA target sequence for Nfasc (NM_182716.2,1975-1993).
cgatgagccactctacatt

SEQ ID NO: 807405 - DNA, 19 bp, Mus musculus
  siRNA target sequence for Nfasc (NM_182716.2,1979-1997).
gagccactctacattggaa

SEQ ID NO: 807406 - DNA, 19 bp, Mus musculus
  siRNA target sequence for Nfasc (NM_182716.2,2254-2272).
caacaacagccctatcaca

SEQ ID NO: 807407 - DNA, 19 bp, Mus musculus
  siRNA target sequence for Nfasc (NM_182716.2,2271-2289).
cagactacgtcgttcagtt

SEQ ID NO: 807408 - DNA, 19 bp, Mus musculus
  siRNA target sequence for Nfasc (NM_182716.2,2275-2293).
ctacgtcgttcagtttgaa

SEQ ID NO: 807409 - DNA, 19 bp, Mus musculus
  siRNA target sequence for Nfasc (NM_182716.2,2465-2483).
ggggcaccccctgaatcta

SEQ ID NO: 807410 - DNA, 19 bp, Mus musculus
  siRNA target sequence for Nfasc (NM_182716.2,2466-2484).
gggcaccccctgaatctaa

SEQ ID NO: 807411 - DNA, 19 bp, Mus musculus
  siRNA target sequence for Nfasc (NM_182716.2,2467-2485).
ggcaccccctgaatctaat

SEQ ID NO: 807412 - DNA, 19 bp, Mus musculus
  siRNA target sequence for Nfasc (NM_182716.2,2501-2519).
ggcgaagggacaagaaaga

SEQ ID NO: 807413 - DNA, 19 bp, Mus musculus
  siRNA target sequence for Nfasc (NM_182716.2,2533-2551).
cacgtggacgcctatgaat

SEQ ID NO: 807414 - DNA, 19 bp, Mus musculus
  siRNA target sequence for Nfasc (NM_182716.2,2571-2589).
ccaacctacgctacattgt

SEQ ID NO: 807415 - DNA, 19 bp, Mus musculus
  siRNA target sequence for Nfasc (NM_182716.2,2696-2714).
gtccaggctgaaaatgact

SEQ ID NO: 807416 - DNA, 19 bp, Mus musculus
  siRNA target sequence for Nfasc (NM_182716.2,2747-2765).
gggtactccggagaagatt

SEQ ID NO: 807417 - DNA, 19 bp, Mus musculus
  siRNA target sequence for Nfasc (NM_182716.2,2749-2767).
gtactccggagaagattta

SEQ ID NO: 807418 - DNA, 19 bp, Mus musculus
  siRNA target sequence for Nfasc (NM_182716.2,2875-2893).
cagatacgtgccctttaat

SEQ ID NO: 807419 - DNA, 19 bp, Mus musculus
  siRNA target sequence for Nfasc (NM_182716.2,2933-2951).
cccaatcagaccaagttct

SEQ ID NO: 807420 - DNA, 19 bp, Mus musculus
  siRNA target sequence for Nfasc (NM_182716.2,3118-3136).
ccttgtgagcagtactgat

SEQ ID NO: 807421 - DNA, 19 bp, Mus musculus
  siRNA target sequence for Nfasc (NM_182716.2,3157-3175).
cagtgaagccacaacagtt

SEQ ID NO: 807422 - DNA, 19 bp, Mus musculus
  siRNA target sequence for Nfasc (NM_182716.2,3286-3304).
cactgctgggactaagatt

SEQ ID NO: 807423 - DNA, 19 bp, Mus musculus
  siRNA target sequence for Nfasc (NM_182716.2,3317-3335).
cccgacgagcagtccattt

SEQ ID NO: 807424 - DNA, 19 bp, Mus musculus
  siRNA target sequence for Nfasc (NM_182716.2,3320-3338).
gacgagcagtccatttgga

SEQ ID NO: 807425 - DNA, 19 bp, Mus musculus
  siRNA target sequence for Nfasc (NM_182716.2,3347-3365).
gtgctccccaacagtaaat

SEQ ID NO: 807426 - DNA, 19 bp, Mus musculus
  siRNA target sequence for Nfasc (NM_182716.2,3427-3445).
cgacagcaaccatacgaaa

SEQ ID NO: 807427 - DNA, 19 bp, Mus musculus
  siRNA target sequence for Nfasc (NM_182716.2,3433-3451).
caaccatacgaaaaaaact

SEQ ID NO: 807428 - DNA, 19 bp, Mus musculus
  siRNA target sequence for Nfasc (NM_182716.2,3579-3597).
gtacagcttacaccaataa

SEQ ID NO: 807429 - DNA, 19 bp, Mus musculus
  siRNA target sequence for Nfasc (NM_182716.2,3582-3600).
cagcttacaccaataacca

SEQ ID NO: 807430 - DNA, 19 bp, Mus musculus
  siRNA target sequence for Nfasc (NM_182716.2,3888-3906).
gcgagggccagttcaatga

SEQ ID NO: 807431 - DNA, 19 bp, Mus musculus
  siRNA target sequence for Nfasc (NM_182716.2,3924-3942).
gccagtacactgtcaaaaa

SEQ ID NO: 807432 - DNA, 19 bp, Mus musculus
  siRNA target sequence for 1700028K03Rik (NM_182745.1,153-171).
cagtggacaaccaccatta

SEQ ID NO: 807433 - DNA, 19 bp, Mus musculus
  siRNA target sequence for 1700028K03Rik (NM_182745.1,155-173).
gtggacaaccaccattatt

SEQ ID NO: 807434 - DNA, 19 bp, Mus musculus
  siRNA target sequence for 1700028K03Rik (NM_182745.1,227-245).
ccacaaggttcggtattct

SEQ ID NO: 807435 - DNA, 19 bp, Mus musculus
  siRNA target sequence for 1700028K03Rik (NM_182745.1,230-248).
caaggttcggtattctgat

SEQ ID NO: 807436 - DNA, 19 bp, Mus musculus
  siRNA target sequence for 1700028K03Rik (NM_182745.1,233-251).
ggttcggtattctgataca

SEQ ID NO: 807437 - DNA, 19 bp, Mus musculus
  siRNA target sequence for 1700028K03Rik (NM_182745.1,254-272).
ggaaagtggatcgattgta

SEQ ID NO: 807438 - DNA, 19 bp, Mus musculus
  siRNA target sequence for 1700028K03Rik (NM_182745.1,255-273).
gaaagtggatcgattgtat

SEQ ID NO: 807439 - DNA, 19 bp, Mus musculus
  siRNA target sequence for 1700028K03Rik (NM_182745.1,262-280).
gatcgattgtattttctct

SEQ ID NO: 807440 - DNA, 19 bp, Mus musculus
  siRNA target sequence for 1700028K03Rik (NM_182745.1,283-301).
ctggagttgcattcttgtt

SEQ ID NO: 807441 - DNA, 19 bp, Mus musculus
  siRNA target sequence for 1700028K03Rik (NM_182745.1,285-303).
ggagttgcattcttgttga

SEQ ID NO: 807442 - DNA, 19 bp, Mus musculus
  siRNA target sequence for 1700028K03Rik (NM_182745.1,286-304).
gagttgcattcttgttgat

SEQ ID NO: 807443 - DNA, 19 bp, Mus musculus
  siRNA target sequence for 1700028K03Rik (NM_182745.1,306-324).
gatgctaaggagtgtatga

SEQ ID NO: 807444 - DNA, 19 bp, Mus musculus
  siRNA target sequence for 1700028K03Rik (NM_182745.1,309-327).
gctaaggagtgtatgacat

SEQ ID NO: 807445 - DNA, 19 bp, Mus musculus
  siRNA target sequence for 1700028K03Rik (NM_182745.1,325-343).
catcggctgaggaaatatt

SEQ ID NO: 807446 - DNA, 19 bp, Mus musculus
  siRNA target sequence for 1700028K03Rik (NM_182745.1,454-472).
ggttcttgggcagtaactt

SEQ ID NO: 807447 - DNA, 19 bp, Mus musculus
  siRNA target sequence for 1700028K03Rik (NM_182745.1,455-473).
gttcttgggcagtaactta

SEQ ID NO: 807448 - DNA, 19 bp, Mus musculus
  siRNA target sequence for 1700028K03Rik (NM_182745.1,461-479).
gggcagtaacttacgaata

SEQ ID NO: 807449 - DNA, 19 bp, Mus musculus
  siRNA target sequence for 1700028K03Rik (NM_182745.1,464-482).
cagtaacttacgaatactt

SEQ ID NO: 807450 - DNA, 19 bp, Mus musculus
  siRNA target sequence for 1700028K03Rik (NM_182745.1,580-598).
caactaaagcgtacatcat

SEQ ID NO: 807451 - DNA, 19 bp, Mus musculus
  siRNA target sequence for 1700028K03Rik (NM_182745.1,583-601).
ctaaagcgtacatcataga

SEQ ID NO: 807452 - DNA, 19 bp, Mus musculus
  siRNA target sequence for 1700028K03Rik (NM_182745.1,641-659).
gagtagtgactcagttagt

SEQ ID NO: 807453 - DNA, 19 bp, Mus musculus
  siRNA target sequence for MGC29254 (NM_182783.1,614-632).
ggactcacgcgcatgaaca

SEQ ID NO: 807454 - DNA, 19 bp, Mus musculus
  siRNA target sequence for D6Ertd349e (NM_182784.1,1241-1259).
cacccacgggctgtacttt

SEQ ID NO: 807455 - DNA, 19 bp, Mus musculus
  siRNA target sequence for D6Ertd349e (NM_182784.1,1247-1265).
cgggctgtactttacagtt

SEQ ID NO: 807456 - DNA, 19 bp, Mus musculus
  siRNA target sequence for D6Ertd349e (NM_182784.1,1250-1268).
gctgtactttacagtttca

SEQ ID NO: 807457 - DNA, 19 bp, Mus musculus
  siRNA target sequence for D6Ertd349e (NM_182784.1,1344-1362).
gcgcggaggccctttcaga

SEQ ID NO: 807458 - DNA, 19 bp, Mus musculus
  siRNA target sequence for D6Ertd349e (NM_182784.1,1345-1363).
cgcggaggccctttcagat

SEQ ID NO: 807459 - DNA, 19 bp, Mus musculus
  siRNA target sequence for D6Ertd349e (NM_182784.1,1346-1364).
gcggaggccctttcagatt

SEQ ID NO: 807460 - DNA, 19 bp, Mus musculus
  siRNA target sequence for D6Ertd349e (NM_182784.1,1683-1701).
gaactgatcaccatagtgt

SEQ ID NO: 807461 - DNA, 19 bp, Mus musculus
  siRNA target sequence for D6Ertd349e (NM_182784.1,1745-1763).
gccccgagttccttgctta

SEQ ID NO: 807462 - DNA, 19 bp, Mus musculus
  siRNA target sequence for D6Ertd349e (NM_182784.1,1746-1764).
ccccgagttccttgcttat

SEQ ID NO: 807463 - DNA, 19 bp, Mus musculus
  siRNA target sequence for MGC58778 (NM_182785.1,399-417).
gccgtgtccttgcataact

SEQ ID NO: 807464 - DNA, 19 bp, Mus musculus
  siRNA target sequence for MGC58778 (NM_182785.1,466-484).
gcgaggagaccgtagtgtt

SEQ ID NO: 807465 - DNA, 19 bp, Mus musculus
  siRNA target sequence for MGC58778 (NM_182785.1,502-520).
gtaagggagtcctgagttt

SEQ ID NO: 807466 - DNA, 19 bp, Mus musculus
  siRNA target sequence for MGC58778 (NM_182785.1,752-770).
ctttgtcaccacagagaat

SEQ ID NO: 807467 - DNA, 19 bp, Mus musculus
  siRNA target sequence for MGC58778 (NM_182785.1,780-798).
gctgcttcctcatgttaca

SEQ ID NO: 807468 - DNA, 19 bp, Mus musculus
  siRNA target sequence for MGC58778 (NM_182785.1,793-811).
gttacagttccaccttaaa

SEQ ID NO: 807469 - DNA, 19 bp, Mus musculus
  siRNA target sequence for MGC58778 (NM_182785.1,816-834).
caagcagggaatctcaata

SEQ ID NO: 807470 - DNA, 19 bp, Mus musculus
  siRNA target sequence for MGC58778 (NM_182785.1,866-884).
ctcacacaagcttttagca

SEQ ID NO: 807471 - DNA, 19 bp, Mus musculus
  siRNA target sequence for MGC58778 (NM_182785.1,921-939).
gtcatcaatgtcctagata

SEQ ID NO: 807472 - DNA, 19 bp, Mus musculus
  siRNA target sequence for MGC58778 (NM_182785.1,980-998).
ctcttggagtgttctctta

SEQ ID NO: 807473 - DNA, 19 bp, Mus musculus
  siRNA target sequence for MGC58778 (NM_182785.1,1005-1023).
cttatactcctcagagatt

SEQ ID NO: 807474 - DNA, 19 bp, Mus musculus
  siRNA target sequence for AI851790 (NM_182807.1,381-399).
cttgcagaaagcaacacaa

SEQ ID NO: 807475 - DNA, 19 bp, Mus musculus
  siRNA target sequence for AI851790 (NM_182807.1,453-471).
cagcgccaaccatcacaaa

SEQ ID NO: 807476 - DNA, 19 bp, Mus musculus
  siRNA target sequence for AI851790 (NM_182807.1,466-484).
cacaaagctcaccatgtta

SEQ ID NO: 807477 - DNA, 19 bp, Mus musculus
  siRNA target sequence for C630007B19Rik (NM_182808.1,265-283).
gccctgtacttgtggataa

SEQ ID NO: 807478 - DNA, 19 bp, Mus musculus
  siRNA target sequence for C630007B19Rik (NM_182808.1,359-377).
gagggacctgtgaagtgat

SEQ ID NO: 807479 - DNA, 19 bp, Mus musculus
  siRNA target sequence for C630007B19Rik (NM_182808.1,411-429).
cgaggagcggtcacaaaca

SEQ ID NO: 807480 - DNA, 19 bp, Mus musculus
  siRNA target sequence for C630007B19Rik (NM_182808.1,561-579).
gacactccctgacaattct

SEQ ID NO: 807481 - DNA, 19 bp, Mus musculus
  siRNA target sequence for C630007B19Rik (NM_182808.1,590-608).
gtgctacaggcaacaagat

SEQ ID NO: 807482 - DNA, 19 bp, Mus musculus
  siRNA target sequence for C630007B19Rik (NM_182808.1,598-616).
ggcaacaagattaagacta

SEQ ID NO: 807483 - DNA, 19 bp, Mus musculus
  siRNA target sequence for 2900041A09Rik (NM_182839.1,285-303).
cgtgatcgatgggaagaat

SEQ ID NO: 807484 - DNA, 19 bp, Mus musculus
  siRNA target sequence for 2900041A09Rik (NM_182839.1,314-332).
ctgacgtggacattgtctt

SEQ ID NO: 807485 - DNA, 19 bp, Mus musculus
  siRNA target sequence for 2900041A09Rik (NM_182839.1,632-650).
gctatgtgcctggttacaa

SEQ ID NO: 807486 - DNA, 19 bp, Mus musculus
  siRNA target sequence for Emilin5 (NM_182840.1,355-373).
gacctgcgtcctacaagaa

SEQ ID NO: 807487 - DNA, 19 bp, Mus musculus
  siRNA target sequence for Emilin5 (NM_182840.1,460-478).
cagacccagatacaagatt

SEQ ID NO: 807488 - DNA, 19 bp, Mus musculus
  siRNA target sequence for Emilin5 (NM_182840.1,709-727).
gcgcctgtcgcaagcatat

SEQ ID NO: 807489 - DNA, 19 bp, Mus musculus
  siRNA target sequence for Emilin5 (NM_182840.1,730-748).
caccctgagtggattggta

SEQ ID NO: 807490 - DNA, 19 bp, Mus musculus
  siRNA target sequence for Emilin5 (NM_182840.1,755-773).
cacgagaatcccaatagga

SEQ ID NO: 807491 - DNA, 19 bp, Mus musculus
  siRNA target sequence for Emilin5 (NM_182840.1,1290-1308).
gcagccaactggctttgat

SEQ ID NO: 807492 - DNA, 19 bp, Mus musculus
  siRNA target sequence for Emilin5 (NM_182840.1,1655-1673).
ctagcagtactggaacaaa

SEQ ID NO: 807493 - DNA, 19 bp, Mus musculus
  siRNA target sequence for Emilin5 (NM_182840.1,1881-1899).
gggagatcactctcttgaa

SEQ ID NO: 807494 - DNA, 19 bp, Mus musculus
  siRNA target sequence for LOC231503 (NM_182841.1,387-405).
ctacctctcgtgtttactt

SEQ ID NO: 807495 - DNA, 19 bp, Mus musculus
  siRNA target sequence for LOC231503 (NM_182841.1,425-443).
gtggatagtgtactttata

SEQ ID NO: 807496 - DNA, 19 bp, Mus musculus
  siRNA target sequence for LOC231503 (NM_182841.1,499-517).
cgaagcatgctccatacat

SEQ ID NO: 807497 - DNA, 19 bp, Mus musculus
  siRNA target sequence for LOC231503 (NM_182841.1,504-522).
catgctccatacatcagtt

SEQ ID NO: 807498 - DNA, 19 bp, Mus musculus
  siRNA target sequence for LOC231503 (NM_182841.1,550-568).
gtgtgttcagtcaagtaat

SEQ ID NO: 807499 - DNA, 19 bp, Mus musculus
  siRNA target sequence for LOC231503 (NM_182841.1,552-570).
gtgttcagtcaagtaatga

SEQ ID NO: 807500 - DNA, 19 bp, Mus musculus
  siRNA target sequence for LOC231503 (NM_182841.1,617-635).
ccagctaaaaccaaaggtt

SEQ ID NO: 807501 - DNA, 19 bp, Mus musculus
  siRNA target sequence for LOC231503 (NM_182841.1,620-638).
gctaaaaccaaaggtttta

SEQ ID NO: 807502 - DNA, 19 bp, Mus musculus
  siRNA target sequence for LOC231503 (NM_182841.1,621-639).
ctaaaaccaaaggttttaa

SEQ ID NO: 807503 - DNA, 19 bp, Mus musculus
  siRNA target sequence for LOC231503 (NM_182841.1,691-709).
gaatgaccttacttggtaa

SEQ ID NO: 807504 - DNA, 19 bp, Mus musculus
  siRNA target sequence for LOC231503 (NM_182841.1,697-715).
ccttacttggtaatttcca

SEQ ID NO: 807505 - DNA, 19 bp, Mus musculus
  siRNA target sequence for LOC231503 (NM_182841.1,794-812).
ggccgcactgacactcaaa

SEQ ID NO: 807506 - DNA, 19 bp, Mus musculus
  siRNA target sequence for LOC231503 (NM_182841.1,879-897).
ctctgcgtagtcctgtatt

SEQ ID NO: 807507 - DNA, 19 bp, Mus musculus
  siRNA target sequence for LOC231503 (NM_182841.1,883-901).
gcgtagtcctgtatttcat

SEQ ID NO: 807508 - DNA, 19 bp, Mus musculus
  siRNA target sequence for LOC231503 (NM_182841.1,999-1017).
cggcactaccgctatgaga

SEQ ID NO: 807509 - DNA, 19 bp, Mus musculus
  siRNA target sequence for LOC231503 (NM_182841.1,1000-1018).
ggcactaccgctatgagat

SEQ ID NO: 807510 - DNA, 19 bp, Mus musculus
  siRNA target sequence for LOC231503 (NM_182841.1,1001-1019).
gcactaccgctatgagatt

SEQ ID NO: 807511 - DNA, 19 bp, Mus musculus
  siRNA target sequence for LOC231503 (NM_182841.1,1024-1042).
gctccgagtaccaagagaa

SEQ ID NO: 807512 - DNA, 19 bp, Mus musculus
  siRNA target sequence for LOC231503 (NM_182841.1,1027-1045).
ccgagtaccaagagaactt

SEQ ID NO: 807513 - DNA, 19 bp, Mus musculus
  siRNA target sequence for LOC231503 (NM_182841.1,1071-1089).
gaagcttctgaatatcaga

SEQ ID NO: 807514 - DNA, 19 bp, Mus musculus
  siRNA target sequence for D130060H24Rik (NM_182927.2,292-310).
cggcttcgggaccagaaaa

SEQ ID NO: 807515 - DNA, 19 bp, Mus musculus
  siRNA target sequence for D130060H24Rik (NM_182927.2,295-313).
cttcgggaccagaaaacca

SEQ ID NO: 807516 - DNA, 19 bp, Mus musculus
  siRNA target sequence for D130060H24Rik (NM_182927.2,419-437).
ctgcagaagcggatgagtt

SEQ ID NO: 807517 - DNA, 19 bp, Mus musculus
  siRNA target sequence for Imdn (NM_182928.1,113-131).
gagagcccccagctaagat

SEQ ID NO: 807518 - DNA, 19 bp, Mus musculus
  siRNA target sequence for Imdn (NM_182928.1,118-136).
cccccagctaagattcctt

SEQ ID NO: 807519 - DNA, 19 bp, Mus musculus
  siRNA target sequence for Rims3 (NM_182929.1,328-346).
gggagcaccaacagtaaca

SEQ ID NO: 807520 - DNA, 19 bp, Mus musculus
  siRNA target sequence for Rims3 (NM_182929.1,347-365).
gctccgagggcacgtttat

SEQ ID NO: 807521 - DNA, 19 bp, Mus musculus
  siRNA target sequence for Rims3 (NM_182929.1,348-366).
ctccgagggcacgtttatt

SEQ ID NO: 807522 - DNA, 19 bp, Mus musculus
  siRNA target sequence for Rims3 (NM_182929.1,350-368).
ccgagggcacgtttatttt

SEQ ID NO: 807523 - DNA, 19 bp, Mus musculus
  siRNA target sequence for Rims3 (NM_182929.1,597-615).
ggagaacggggcatgtgta

SEQ ID NO: 807524 - DNA, 19 bp, Mus musculus
  siRNA target sequence for Rims3 (NM_182929.1,606-624).
ggcatgtgtagccaagaaa

SEQ ID NO: 807525 - DNA, 19 bp, Mus musculus
  siRNA target sequence for Rims3 (NM_182929.1,633-651).
ggtggccaagaaaacatgt

SEQ ID NO: 807526 - DNA, 19 bp, Mus musculus
  siRNA target sequence for Pepp3 (NM_182930.1,156-174).
cgttctgctaccatcaaca

SEQ ID NO: 807527 - DNA, 19 bp, Mus musculus
  siRNA target sequence for Pepp3 (NM_182930.1,298-316).
ccaatgcacctgttaccaa

SEQ ID NO: 807528 - DNA, 19 bp, Mus musculus
  siRNA target sequence for Pepp3 (NM_182930.1,349-367).
gggtgaagcagtggaataa

SEQ ID NO: 807529 - DNA, 19 bp, Mus musculus
  siRNA target sequence for Pepp3 (NM_182930.1,384-402).
gtggatcgctgcctctttt

SEQ ID NO: 807530 - DNA, 19 bp, Mus musculus
  siRNA target sequence for Pepp3 (NM_182930.1,387-405).
gatcgctgcctcttttact

SEQ ID NO: 807531 - DNA, 19 bp, Mus musculus
  siRNA target sequence for Pepp3 (NM_182930.1,394-412).
gcctcttttactacaaaga

SEQ ID NO: 807532 - DNA, 19 bp, Mus musculus
  siRNA target sequence for Pepp3 (NM_182930.1,395-413).
cctcttttactacaaagat

SEQ ID NO: 807533 - DNA, 19 bp, Mus musculus
  siRNA target sequence for Pepp3 (NM_182930.1,493-511).
gtcggaagcacacgtttaa

SEQ ID NO: 807534 - DNA, 19 bp, Mus musculus
  siRNA target sequence for Pepp3 (NM_182930.1,805-823).
ggcctgaagtcaagaaaga

SEQ ID NO: 807535 - DNA, 19 bp, Mus musculus
  siRNA target sequence for Pepp3 (NM_182930.1,936-954).
cccaatggctggcagtata

SEQ ID NO: 807536 - DNA, 19 bp, Mus musculus
  siRNA target sequence for Pepp3 (NM_182930.1,1035-1053).
cgtactgaccctgacaaaa

SEQ ID NO: 807537 - DNA, 19 bp, Mus musculus
  siRNA target sequence for Pepp3 (NM_182930.1,1036-1054).
gtactgaccctgacaaaat

SEQ ID NO: 807538 - DNA, 19 bp, Mus musculus
  siRNA target sequence for Pepp3 (NM_182930.1,1059-1077).
cagcgcaaaagctctatga

SEQ ID NO: 807539 - DNA, 19 bp, Mus musculus
  siRNA target sequence for Pepp3 (NM_182930.1,1167-1185).
cgggtccctgactattaca

SEQ ID NO: 807540 - DNA, 19 bp, Mus musculus
  siRNA target sequence for Pepp3 (NM_182930.1,1169-1187).
ggtccctgactattacaat

SEQ ID NO: 807541 - DNA, 19 bp, Mus musculus
  siRNA target sequence for Pepp3 (NM_182930.1,1198-1216).
cccagtatcctgatgatta

SEQ ID NO: 807542 - DNA, 19 bp, Mus musculus
  siRNA target sequence for Pepp3 (NM_182930.1,1262-1280).
gccagcctacgataggatt

SEQ ID NO: 807543 - DNA, 19 bp, Mus musculus
  siRNA target sequence for Pepp3 (NM_182930.1,1336-1354).
ccacttaccagcttcatga

SEQ ID NO: 807544 - DNA, 19 bp, Mus musculus
  siRNA target sequence for Pepp3 (NM_182930.1,1417-1435).
gacagccagtcttttatga

SEQ ID NO: 807545 - DNA, 19 bp, Mus musculus
  siRNA target sequence for Pepp3 (NM_182930.1,1588-1606).
cacgcagtgaggacatcta

SEQ ID NO: 807546 - DNA, 19 bp, Mus musculus
  siRNA target sequence for Pepp3 (NM_182930.1,1626-1644).
gtgatgaggcgatctatca

SEQ ID NO: 807547 - DNA, 19 bp, Mus musculus
  siRNA target sequence for Pepp3 (NM_182930.1,1648-1666).
ccccaaagtatgattacct

SEQ ID NO: 807548 - DNA, 19 bp, Mus musculus
  siRNA target sequence for Pepp3 (NM_182930.1,1722-1740).
cccacggtccacgataaga

SEQ ID NO: 807549 - DNA, 19 bp, Mus musculus
  siRNA target sequence for Pepp3 (NM_182930.1,1739-1757).
gatggatgaactgttagat

SEQ ID NO: 807550 - DNA, 19 bp, Mus musculus
  siRNA target sequence for Pepp3 (NM_182930.1,1742-1760).
ggatgaactgttagatctt

SEQ ID NO: 807551 - DNA, 19 bp, Mus musculus
  siRNA target sequence for Pepp3 (NM_182930.1,1771-1789).
gaaacctagagtatttgga

SEQ ID NO: 807552 - DNA, 19 bp, Mus musculus
  siRNA target sequence for Pepp3 (NM_182930.1,1852-1870).
ctcccagggcccacctttt

SEQ ID NO: 807553 - DNA, 19 bp, Mus musculus
  siRNA target sequence for Pepp3 (NM_182930.1,1855-1873).
ccagggcccaccttttcat

SEQ ID NO: 807554 - DNA, 19 bp, Mus musculus
  siRNA target sequence for Pepp3 (NM_182930.1,2191-2209).
gtacagtggtgtatgagaa

SEQ ID NO: 807555 - DNA, 19 bp, Mus musculus
  siRNA target sequence for Pepp3 (NM_182930.1,2283-2301).
ctcaatcggcaaatccaaa

SEQ ID NO: 807556 - DNA, 19 bp, Mus musculus
  siRNA target sequence for Pepp3 (NM_182930.1,2460-2478).
cccctgagccccttttcaa

SEQ ID NO: 807557 - DNA, 19 bp, Mus musculus
  siRNA target sequence for Pepp3 (NM_182930.1,2461-2479).
ccctgagccccttttcaat

SEQ ID NO: 807558 - DNA, 19 bp, Mus musculus
  siRNA target sequence for Pepp3 (NM_182930.1,2726-2744).
cctgggtacccctagagat

SEQ ID NO: 807559 - DNA, 19 bp, Mus musculus
  siRNA target sequence for Pepp3 (NM_182930.1,2727-2745).
ctgggtacccctagagata

SEQ ID NO: 807560 - DNA, 19 bp, Mus musculus
  siRNA target sequence for Pepp3 (NM_182930.1,2730-2748).
ggtacccctagagatatca

SEQ ID NO: 807561 - DNA, 19 bp, Mus musculus
  siRNA target sequence for Pepp3 (NM_182930.1,2731-2749).
gtacccctagagatatcaa

SEQ ID NO: 807562 - DNA, 19 bp, Mus musculus
  siRNA target sequence for Pepp3 (NM_182930.1,2789-2807).
ggcagctctcaacaaagtt

SEQ ID NO: 807563 - DNA, 19 bp, Mus musculus
  siRNA target sequence for Pepp3 (NM_182930.1,2814-2832).
gtaccccctcggaccaaat

SEQ ID NO: 807564 - DNA, 19 bp, Mus musculus
  siRNA target sequence for Pepp3 (NM_182930.1,2943-2961).
ggagagggcaaggtgaaaa

SEQ ID NO: 807565 - DNA, 19 bp, Mus musculus
  siRNA target sequence for Pepp3 (NM_182930.1,2944-2962).
gagagggcaaggtgaaaat

SEQ ID NO: 807566 - DNA, 19 bp, Mus musculus
  siRNA target sequence for Pepp3 (NM_182930.1,3004-3022).
gcggttccatgaaggaaaa

SEQ ID NO: 807567 - DNA, 19 bp, Mus musculus
  siRNA target sequence for Pepp3 (NM_182930.1,3101-3119).
ccgcagcatccatgaagta

SEQ ID NO: 807568 - DNA, 19 bp, Mus musculus
  siRNA target sequence for Pepp3 (NM_182930.1,3103-3121).
gcagcatccatgaagtaga

SEQ ID NO: 807569 - DNA, 19 bp, Mus musculus
  siRNA target sequence for Pepp3 (NM_182930.1,3162-3180).
ggtggtcaggcatatgaga

SEQ ID NO: 807570 - DNA, 19 bp, Mus musculus
  siRNA target sequence for Pepp3 (NM_182930.1,3281-3299).
catccctgaacggtacatt

SEQ ID NO: 807571 - DNA, 19 bp, Mus musculus
  siRNA target sequence for Pepp3 (NM_182930.1,3471-3489).
gagaagcggattgaaatct

SEQ ID NO: 807572 - DNA, 19 bp, Mus musculus
  siRNA target sequence for Pepp3 (NM_182930.1,3625-3643).
ccgacagcagccataccat

SEQ ID NO: 807573 - DNA, 19 bp, Mus musculus
  siRNA target sequence for 5330410G16Rik (NM_182991.1,208-226).
cctcagagtccccgaataa

SEQ ID NO: 807574 - DNA, 19 bp, Mus musculus
  siRNA target sequence for 5330410G16Rik (NM_182991.1,211-229).
cagagtccccgaataacaa

SEQ ID NO: 807575 - DNA, 19 bp, Mus musculus
  siRNA target sequence for 5330410G16Rik (NM_182991.1,471-489).
cttcggtacctgttttcca

SEQ ID NO: 807576 - DNA, 19 bp, Mus musculus
  siRNA target sequence for 5330410G16Rik (NM_182991.1,819-837).
cctcgatgggtcctattct

SEQ ID NO: 807577 - DNA, 19 bp, Mus musculus
  siRNA target sequence for 5330410G16Rik (NM_182991.1,1012-1030).
gcacacctccttacaagtt

SEQ ID NO: 807578 - DNA, 19 bp, Mus musculus
  siRNA target sequence for 5330410G16Rik (NM_182991.1,1015-1033).
cacctccttacaagttgaa

SEQ ID NO: 807579 - DNA, 19 bp, Mus musculus
  siRNA target sequence for 1110056A04Rik (NM_182992.1,83-101).
cgctacaggaacgcttttt

SEQ ID NO: 807580 - DNA, 19 bp, Mus musculus
  siRNA target sequence for 1110056A04Rik (NM_182992.1,95-113).
gctttttccgaccacattt

SEQ ID NO: 807581 - DNA, 19 bp, Mus musculus
  siRNA target sequence for 1110056A04Rik (NM_182992.1,233-251).
ccgacgcctcccacaagat

SEQ ID NO: 807582 - DNA, 19 bp, Mus musculus
  siRNA target sequence for 1110056A04Rik (NM_182992.1,345-363).
cgggcagaattcctttagt

SEQ ID NO: 807583 - DNA, 19 bp, Mus musculus
  siRNA target sequence for 1110056A04Rik (NM_182992.1,347-365).
ggcagaattcctttagtct

SEQ ID NO: 807584 - DNA, 19 bp, Mus musculus
  siRNA target sequence for 1110056A04Rik (NM_182992.1,517-535).
gagaccatcccgttcacta

SEQ ID NO: 807585 - DNA, 19 bp, Mus musculus
  siRNA target sequence for 1110056A04Rik (NM_182992.1,549-567).
catgcaccaggatacaaca

SEQ ID NO: 807586 - DNA, 19 bp, Mus musculus
  siRNA target sequence for 1110056A04Rik (NM_182992.1,559-577).
gatacaacaggctatgtct

SEQ ID NO: 807587 - DNA, 19 bp, Mus musculus
  siRNA target sequence for 1110056A04Rik (NM_182992.1,660-678).
cacagctaggttggatata

SEQ ID NO: 807588 - DNA, 19 bp, Mus musculus
  siRNA target sequence for 1110056A04Rik (NM_182992.1,662-680).
cagctaggttggatatata

SEQ ID NO: 807589 - DNA, 19 bp, Mus musculus
  siRNA target sequence for 1110056A04Rik (NM_182992.1,755-773).
gcaaaggcctcgacatctt

SEQ ID NO: 807590 - DNA, 19 bp, Mus musculus
  siRNA target sequence for 1110056A04Rik (NM_182992.1,756-774).
caaaggcctcgacatcttt

SEQ ID NO: 807591 - DNA, 19 bp, Mus musculus
  siRNA target sequence for 1110056A04Rik (NM_182992.1,793-811).
gaaagcacgatgctgtatt

SEQ ID NO: 807592 - DNA, 19 bp, Mus musculus
  siRNA target sequence for 2900052E22Rik (NM_182993.1,515-533).
catggcatctggagcaaat

SEQ ID NO: 807593 - DNA, 19 bp, Mus musculus
  siRNA target sequence for 2900052E22Rik (NM_182993.1,668-686).
ggcagcttcgggatctttt

SEQ ID NO: 807594 - DNA, 19 bp, Mus musculus
  siRNA target sequence for 2900052E22Rik (NM_182993.1,799-817).
gaaccctgttacgaagttt

SEQ ID NO: 807595 - DNA, 19 bp, Mus musculus
  siRNA target sequence for 2900052E22Rik (NM_182993.1,978-996).
cgctgcctcaccttgtcat

SEQ ID NO: 807596 - DNA, 19 bp, Mus musculus
  siRNA target sequence for 2900052E22Rik (NM_182993.1,1019-1037).
ggccagatcgctgactttt

SEQ ID NO: 807597 - DNA, 19 bp, Mus musculus
  siRNA target sequence for 2900052E22Rik (NM_182993.1,1040-1058).
cgcagtcgtcacataatgt

SEQ ID NO: 807598 - DNA, 19 bp, Mus musculus
  siRNA target sequence for 2900052E22Rik (NM_182993.1,1384-1402).
cggcggtgtcatcttctat

SEQ ID NO: 807599 - DNA, 19 bp, Mus musculus
  siRNA target sequence for 2900052E22Rik (NM_182993.1,1494-1512).
ctggcagtgacgaaagtga

SEQ ID NO: 807600 - DNA, 19 bp, Mus musculus
  siRNA target sequence for 2900052E22Rik (NM_182993.1,1497-1515).
gcagtgacgaaagtgaaat

SEQ ID NO: 807601 - DNA, 19 bp, Mus musculus
  siRNA target sequence for 2810410P22Rik (NM_182994.1,279-297).
caccaggagcacaaagtta

SEQ ID NO: 807602 - DNA, 19 bp, Mus musculus
  siRNA target sequence for 2810410P22Rik (NM_182994.1,399-417).
gagattgtggttaataata

SEQ ID NO: 807603 - DNA, 19 bp, Mus musculus
  siRNA target sequence for 2810410P22Rik (NM_182994.1,467-485).
ctggaacacgtactatact

SEQ ID NO: 807604 - DNA, 19 bp, Mus musculus
  siRNA target sequence for 2810410P22Rik (NM_182994.1,473-491).
cacgtactatactaacaca

SEQ ID NO: 807605 - DNA, 19 bp, Mus musculus
  siRNA target sequence for 2810410P22Rik (NM_182994.1,479-497).
ctatactaacacagagttt

SEQ ID NO: 807606 - DNA, 19 bp, Mus musculus
  siRNA target sequence for 2810410P22Rik (NM_182994.1,484-502).
ctaacacagagtttgtaat

SEQ ID NO: 807607 - DNA, 19 bp, Mus musculus
  siRNA target sequence for 2810410P22Rik (NM_182994.1,528-546).
gaaagaatttcggtaacta

SEQ ID NO: 807608 - DNA, 19 bp, Mus musculus
  siRNA target sequence for 2810410P22Rik (NM_182994.1,544-562).
ctagagaagagctctacaa

SEQ ID NO: 807609 - DNA, 19 bp, Mus musculus
  siRNA target sequence for 2810410P22Rik (NM_182994.1,575-593).
cgaggacctaagaaaagct

SEQ ID NO: 807610 - DNA, 19 bp, Mus musculus
  siRNA target sequence for 2810410P22Rik (NM_182994.1,594-612).
gggttgctgatttttgcta

SEQ ID NO: 807611 - DNA, 19 bp, Mus musculus
  siRNA target sequence for 2810410P22Rik (NM_182994.1,645-663).
gcagaaatctcccagtttt

SEQ ID NO: 807612 - DNA, 19 bp, Mus musculus
  siRNA target sequence for 2810410P22Rik (NM_182994.1,741-759).
ggacttgaatggatgatgt

SEQ ID NO: 807613 - DNA, 19 bp, Mus musculus
  siRNA target sequence for 6330503K22Rik (NM_182995.1,375-393).
ccgctcaggcagaaagtgt

SEQ ID NO: 807614 - DNA, 19 bp, Mus musculus
  siRNA target sequence for 6330503K22Rik (NM_182995.1,544-562).
ggagattcttgaaaatgtt

SEQ ID NO: 807615 - DNA, 19 bp, Mus musculus
  siRNA target sequence for 6330503K22Rik (NM_182995.1,575-593).
gcaccaaatgccagtgatt

SEQ ID NO: 807616 - DNA, 19 bp, Mus musculus
  siRNA target sequence for 6330503K22Rik (NM_182995.1,596-614).
gatcagtgggcaacagaaa

SEQ ID NO: 807617 - DNA, 19 bp, Mus musculus
  siRNA target sequence for 6330503K22Rik (NM_182995.1,601-619).
gtgggcaacagaaaccatt

SEQ ID NO: 807618 - DNA, 19 bp, Mus musculus
  siRNA target sequence for 6330503K22Rik (NM_182995.1,603-621).
gggcaacagaaaccattta

SEQ ID NO: 807619 - DNA, 19 bp, Mus musculus
  siRNA target sequence for 6330503K22Rik (NM_182995.1,609-627).
cagaaaccatttactctaa

SEQ ID NO: 807620 - DNA, 19 bp, Mus musculus
  siRNA target sequence for 6330503K22Rik (NM_182995.1,683-701).
cccaccgaacactgtactt

SEQ ID NO: 807621 - DNA, 19 bp, Mus musculus
  siRNA target sequence for 6330503K22Rik (NM_182995.1,725-743).
ggacttttgcctgtgaata

SEQ ID NO: 807622 - DNA, 19 bp, Mus musculus
  siRNA target sequence for 6330503K22Rik (NM_182995.1,883-901).
ggagaccatcatttctgat

SEQ ID NO: 807623 - DNA, 19 bp, Mus musculus
  siRNA target sequence for 6330503K22Rik (NM_182995.1,946-964).
cactccagatccctacata

SEQ ID NO: 807624 - DNA, 19 bp, Mus musculus
  siRNA target sequence for 6330503K22Rik (NM_182995.1,950-968).
ccagatccctacataatga

SEQ ID NO: 807625 - DNA, 19 bp, Mus musculus
  siRNA target sequence for 6330503K22Rik (NM_182995.1,961-979).
cataatgagccttcagaat

SEQ ID NO: 807626 - DNA, 19 bp, Mus musculus
  siRNA target sequence for 6330503K22Rik (NM_182995.1,1031-1049).
ctgagaaatagtttaaaga

SEQ ID NO: 807627 - DNA, 19 bp, Mus musculus
  siRNA target sequence for 6330503K22Rik (NM_182995.1,1166-1184).
gacaaaccaagccttaata

SEQ ID NO: 807628 - DNA, 19 bp, Mus musculus
  siRNA target sequence for 6330503K22Rik (NM_182995.1,1172-1190).
ccaagccttaataagtcaa

SEQ ID NO: 807629 - DNA, 19 bp, Mus musculus
  siRNA target sequence for 6330503K22Rik (NM_182995.1,1173-1191).
caagccttaataagtcaaa

SEQ ID NO: 807630 - DNA, 19 bp, Mus musculus
  siRNA target sequence for 6330503K22Rik (NM_182995.1,1176-1194).
gccttaataagtcaaatgt

SEQ ID NO: 807631 - DNA, 19 bp, Mus musculus
  siRNA target sequence for 6330503K22Rik (NM_182995.1,1177-1195).
ccttaataagtcaaatgtt

SEQ ID NO: 807632 - DNA, 19 bp, Mus musculus
  siRNA target sequence for 6330503K22Rik (NM_182995.1,1229-1247).
ggcacggcaggcttagcta

SEQ ID NO: 807633 - DNA, 19 bp, Mus musculus
  siRNA target sequence for 6330503K22Rik (NM_182995.1,1234-1252).
ggcaggcttagctagcttt

SEQ ID NO: 807634 - DNA, 19 bp, Mus musculus
  siRNA target sequence for 6330503K22Rik (NM_182995.1,1235-1253).
gcaggcttagctagctttt

SEQ ID NO: 807635 - DNA, 19 bp, Mus musculus
  siRNA target sequence for 6330503K22Rik (NM_182995.1,1302-1320).
ccggatcagattttacagt

SEQ ID NO: 807636 - DNA, 19 bp, Mus musculus
  siRNA target sequence for 6330503K22Rik (NM_182995.1,1303-1321).
cggatcagattttacagtt

SEQ ID NO: 807637 - DNA, 19 bp, Mus musculus
  siRNA target sequence for 6330503K22Rik (NM_182995.1,1305-1323).
gatcagattttacagttat

SEQ ID NO: 807638 - DNA, 19 bp, Mus musculus
  siRNA target sequence for 6330503K22Rik (NM_182995.1,1446-1464).
gtcagatccttataaacaa

SEQ ID NO: 807639 - DNA, 19 bp, Mus musculus
  siRNA target sequence for 6330503K22Rik (NM_182995.1,1486-1504).
gagcccaaaggggaaagaa

SEQ ID NO: 807640 - DNA, 19 bp, Mus musculus
  siRNA target sequence for 6330503K22Rik (NM_182995.1,1533-1551).
ctgctgagacaacaaatga

SEQ ID NO: 807641 - DNA, 19 bp, Mus musculus
  siRNA target sequence for 6330503K22Rik (NM_182995.1,1545-1563).
caaatgagtctgaaactgt

SEQ ID NO: 807642 - DNA, 19 bp, Mus musculus
  siRNA target sequence for 6330503K22Rik (NM_182995.1,1565-1583).
ccaaaatcaccgactgatt

SEQ ID NO: 807643 - DNA, 19 bp, Mus musculus
  siRNA target sequence for 6330503K22Rik (NM_182995.1,1566-1584).
caaaatcaccgactgattt

SEQ ID NO: 807644 - DNA, 19 bp, Mus musculus
  siRNA target sequence for 6330503K22Rik (NM_182995.1,1585-1603).
gacaggggtttgttcaagt

SEQ ID NO: 807645 - DNA, 19 bp, Mus musculus
  siRNA target sequence for 6330503K22Rik (NM_182995.1,1587-1605).
caggggtttgttcaagtaa

SEQ ID NO: 807646 - DNA, 19 bp, Mus musculus
  siRNA target sequence for 6330503K22Rik (NM_182995.1,1590-1608).
gggtttgttcaagtaatgt

SEQ ID NO: 807647 - DNA, 19 bp, Mus musculus
  siRNA target sequence for 6330503K22Rik (NM_182995.1,1591-1609).
ggtttgttcaagtaatgtt

SEQ ID NO: 807648 - DNA, 19 bp, Mus musculus
  siRNA target sequence for 6330503K22Rik (NM_182995.1,1678-1696).
ggctttaggagctcactta

SEQ ID NO: 807649 - DNA, 19 bp, Mus musculus
  siRNA target sequence for 6330503K22Rik (NM_182995.1,1869-1887).
cagccagtctgctagcaaa

SEQ ID NO: 807650 - DNA, 19 bp, Mus musculus
  siRNA target sequence for 6330503K22Rik (NM_182995.1,1872-1890).
ccagtctgctagcaaagaa

SEQ ID NO: 807651 - DNA, 19 bp, Mus musculus
  siRNA target sequence for 6330503K22Rik (NM_182995.1,1888-1906).
gaactcctgcaacttacaa

SEQ ID NO: 807652 - DNA, 19 bp, Mus musculus
  siRNA target sequence for 6330503K22Rik (NM_182995.1,1893-1911).
cctgcaacttacaaatgga

SEQ ID NO: 807653 - DNA, 19 bp, Mus musculus
  siRNA target sequence for 6330503K22Rik (NM_182995.1,1904-1922).
caaatggaactgaataaat

SEQ ID NO: 807654 - DNA, 19 bp, Mus musculus
  siRNA target sequence for 6330503K22Rik (NM_182995.1,1937-1955).
cacccatctcccttactta

SEQ ID NO: 807655 - DNA, 19 bp, Mus musculus
  siRNA target sequence for 6330503K22Rik (NM_182995.1,2007-2025).
gaaacgagcagtttgtaga

SEQ ID NO: 807656 - DNA, 19 bp, Mus musculus
  siRNA target sequence for 6330503K22Rik (NM_182995.1,2014-2032).
gcagtttgtagataacagt

SEQ ID NO: 807657 - DNA, 19 bp, Mus musculus
  siRNA target sequence for 6330503K22Rik (NM_182995.1,2015-2033).
cagtttgtagataacagtt

SEQ ID NO: 807658 - DNA, 19 bp, Mus musculus
  siRNA target sequence for 6330503K22Rik (NM_182995.1,2047-2065).
gcggagacttgatttagat

SEQ ID NO: 807659 - DNA, 19 bp, Mus musculus
  siRNA target sequence for 6330503K22Rik (NM_182995.1,2052-2070).
gacttgatttagatgttga

SEQ ID NO: 807660 - DNA, 19 bp, Mus musculus
  siRNA target sequence for 6330503K22Rik (NM_182995.1,2054-2072).
cttgatttagatgttgata

SEQ ID NO: 807661 - DNA, 19 bp, Mus musculus
  siRNA target sequence for 6330503K22Rik (NM_182995.1,2063-2081).
gatgttgatagtttacaaa

SEQ ID NO: 807662 - DNA, 19 bp, Mus musculus
  siRNA target sequence for 6330503K22Rik (NM_182995.1,2132-2150).
gaccgtctgctggaaagaa

SEQ ID NO: 807663 - DNA, 19 bp, Mus musculus
  siRNA target sequence for 6330503K22Rik (NM_182995.1,2168-2186).
gtccacattaacaagaata

SEQ ID NO: 807664 - DNA, 19 bp, Mus musculus
  siRNA target sequence for 6330503K22Rik (NM_182995.1,2213-2231).
ggccaggaactactgaaaa

SEQ ID NO: 807665 - DNA, 19 bp, Mus musculus
  siRNA target sequence for 6330503K22Rik (NM_182995.1,2329-2347).
gcaactgcaaaaggaaata

SEQ ID NO: 807666 - DNA, 19 bp, Mus musculus
  siRNA target sequence for 6330503K22Rik (NM_182995.1,2390-2408).
gacgtctctgacttgaaca

SEQ ID NO: 807667 - DNA, 19 bp, Mus musculus
  siRNA target sequence for 6330503K22Rik (NM_182995.1,2439-2457).
ctgctttgctagaaaccat

SEQ ID NO: 807668 - DNA, 19 bp, Mus musculus
  siRNA target sequence for 6330503K22Rik (NM_182995.1,2494-2512).
ctctggcttcataacttct

SEQ ID NO: 807669 - DNA, 19 bp, Mus musculus
  siRNA target sequence for 6330503K22Rik (NM_182995.1,2625-2643).
ctaaatggtctcaggtttt

SEQ ID NO: 807670 - DNA, 19 bp, Mus musculus
  siRNA target sequence for 6330503K22Rik (NM_182995.1,2648-2666).
ccagaaatacacgcaaaat

SEQ ID NO: 807671 - DNA, 19 bp, Mus musculus
  siRNA target sequence for 6330503K22Rik (NM_182995.1,2683-2701).
cgtggcaaaagggtttctt

SEQ ID NO: 807672 - DNA, 19 bp, Mus musculus
  siRNA target sequence for 6330503K22Rik (NM_182995.1,2684-2702).
gtggcaaaagggtttctta

SEQ ID NO: 807673 - DNA, 19 bp, Mus musculus
  siRNA target sequence for 6330503K22Rik (NM_182995.1,2694-2712).
ggtttcttactcgtaaact

SEQ ID NO: 807674 - DNA, 19 bp, Mus musculus
  siRNA target sequence for 6330503K22Rik (NM_182995.1,2734-2752).
gcagcttcgacaaactgta

SEQ ID NO: 807675 - DNA, 19 bp, Mus musculus
  siRNA target sequence for 6330503K22Rik (NM_182995.1,2737-2755).
gcttcgacaaactgtaaaa

SEQ ID NO: 807676 - DNA, 19 bp, Mus musculus
  siRNA target sequence for 6330503K22Rik (NM_182995.1,2741-2759).
cgacaaactgtaaaagaca

SEQ ID NO: 807677 - DNA, 19 bp, Mus musculus
  siRNA target sequence for 6330503K22Rik (NM_182995.1,2833-2851).
ccttcaggaacgagtgtta

SEQ ID NO: 807678 - DNA, 19 bp, Mus musculus
  siRNA target sequence for 6330503K22Rik (NM_182995.1,2865-2883).
ctgctctgtatggtattca

SEQ ID NO: 807679 - DNA, 19 bp, Mus musculus
  siRNA target sequence for 6330503K22Rik (NM_182995.1,2876-2894).
ggtattcatgacatcttct

SEQ ID NO: 807680 - DNA, 19 bp, Mus musculus
  siRNA target sequence for 6330503K22Rik (NM_182995.1,2877-2895).
gtattcatgacatcttctt

SEQ ID NO: 807681 - DNA, 19 bp, Mus musculus
  siRNA target sequence for 6330503K22Rik (NM_182995.1,2882-2900).
catgacatcttcttcgtaa

SEQ ID NO: 807682 - DNA, 19 bp, Mus musculus
  siRNA target sequence for 6330503K22Rik (NM_182995.1,2887-2905).
catcttcttcgtaatggat

SEQ ID NO: 807683 - DNA, 19 bp, Mus musculus
  siRNA target sequence for 6330503K22Rik (NM_182995.1,2920-2938).
gtcaatcctccatcatgat

SEQ ID NO: 807684 - DNA, 19 bp, Mus musculus
  siRNA target sequence for 6330503K22Rik (NM_182995.1,2940-2958).
gagaagcccgcaaagagaa

SEQ ID NO: 807685 - DNA, 19 bp, Mus musculus
  siRNA target sequence for 6330503K22Rik (NM_182995.1,2960-2978).
ctgctccggcaaatggata

SEQ ID NO: 807686 - DNA, 19 bp, Mus musculus
  siRNA target sequence for 6330503K22Rik (NM_182995.1,2963-2981).
ctccggcaaatggataaga

SEQ ID NO: 807687 - DNA, 19 bp, Mus musculus
  siRNA target sequence for 6330503K22Rik (NM_182995.1,2966-2984).
cggcaaatggataagatga

SEQ ID NO: 807688 - DNA, 19 bp, Mus musculus
  siRNA target sequence for 6330503K22Rik (NM_182995.1,2968-2986).
gcaaatggataagatgaaa

SEQ ID NO: 807689 - DNA, 19 bp, Mus musculus
  siRNA target sequence for 6330503K22Rik (NM_182995.1,2991-3009).
cacgagtggcgctttcagt

SEQ ID NO: 807690 - DNA, 19 bp, Mus musculus
  siRNA target sequence for 6330503K22Rik (NM_182995.1,3056-3074).
gagatgggaatgccaaata

SEQ ID NO: 807691 - DNA, 19 bp, Mus musculus
  siRNA target sequence for 6330503K22Rik (NM_182995.1,3134-3152).
cagaatgcacccgttcata

SEQ ID NO: 807692 - DNA, 19 bp, Mus musculus
  siRNA target sequence for 6330503K22Rik (NM_182995.1,3143-3161).
cccgttcataggctactta

SEQ ID NO: 807693 - DNA, 19 bp, Mus musculus
  siRNA target sequence for 6330503K22Rik (NM_182995.1,3145-3163).
cgttcataggctacttagt

SEQ ID NO: 807694 - DNA, 19 bp, Mus musculus
  siRNA target sequence for 6330503K22Rik (NM_182995.1,3146-3164).
gttcataggctacttagta

SEQ ID NO: 807695 - DNA, 19 bp, Mus musculus
  siRNA target sequence for 6330503K22Rik (NM_182995.1,3167-3185).
caaggaacccctaagactt

SEQ ID NO: 807696 - DNA, 19 bp, Mus musculus
  siRNA target sequence for 6330503K22Rik (NM_182995.1,3190-3208).
gaagggggttgtgcaaaat

SEQ ID NO: 807697 - DNA, 19 bp, Mus musculus
  siRNA target sequence for 6330503K22Rik (NM_182995.1,3193-3211).
gggggttgtgcaaaataga

SEQ ID NO: 807698 - DNA, 19 bp, Mus musculus
  siRNA target sequence for 6330503K22Rik (NM_182995.1,3195-3213).
gggttgtgcaaaatagaca

SEQ ID NO: 807699 - DNA, 19 bp, Mus musculus
  siRNA target sequence for 6330503K22Rik (NM_182995.1,3257-3275).
ggagcatatgcaggaaaaa

SEQ ID NO: 807700 - DNA, 19 bp, Mus musculus
  siRNA target sequence for 6330503K22Rik (NM_182995.1,3289-3307).
gccaaatgttgcgacaatt

SEQ ID NO: 807701 - DNA, 19 bp, Mus musculus
  siRNA target sequence for 6330503K22Rik (NM_182995.1,3290-3308).
ccaaatgttgcgacaattt

SEQ ID NO: 807702 - DNA, 19 bp, Mus musculus
  siRNA target sequence for AI839920 (NM_182996.2,394-412).
ctgttggaccggtacactt

SEQ ID NO: 807703 - DNA, 19 bp, Mus musculus
  siRNA target sequence for AI839920 (NM_182996.2,399-417).
ggaccggtacacttcttca

SEQ ID NO: 807704 - DNA, 19 bp, Mus musculus
  siRNA target sequence for AI839920 (NM_182996.2,541-559).
ggtgaaggagagcttgtat

SEQ ID NO: 807705 - DNA, 19 bp, Mus musculus
  siRNA target sequence for AI839920 (NM_182996.2,611-629).
caccttcagatgtacctaa

SEQ ID NO: 807706 - DNA, 19 bp, Mus musculus
  siRNA target sequence for AI839920 (NM_182996.2,695-713).
cccaaggtttggaatgtga

SEQ ID NO: 807707 - DNA, 19 bp, Mus musculus
  siRNA target sequence for AI839920 (NM_182996.2,717-735).
gcgagaaaggactcaagaa

SEQ ID NO: 807708 - DNA, 19 bp, Mus musculus
  siRNA target sequence for AI839920 (NM_182996.2,718-736).
cgagaaaggactcaagaaa

SEQ ID NO: 807709 - DNA, 19 bp, Mus musculus
  siRNA target sequence for AI839920 (NM_182996.2,741-759).
gctgtccaggagagtagat

SEQ ID NO: 807710 - DNA, 19 bp, Mus musculus
  siRNA target sequence for AI839920 (NM_182996.2,744-762).
gtccaggagagtagattct

SEQ ID NO: 807711 - DNA, 19 bp, Mus musculus
  siRNA target sequence for Prkab2 (NM_182997.1,110-128).
gcaacccatcgctacaaga

SEQ ID NO: 807712 - DNA, 19 bp, Mus musculus
  siRNA target sequence for Prkab2 (NM_182997.1,111-129).
caacccatcgctacaagaa

SEQ ID NO: 807713 - DNA, 19 bp, Mus musculus
  siRNA target sequence for Prkab2 (NM_182997.1,137-155).
gtcaccacgctgctgtata

SEQ ID NO: 807714 - DNA, 19 bp, Mus musculus
  siRNA target sequence for Rnf20 (NM_182999.1,352-370).
gggaccaccgtggaaacaa

SEQ ID NO: 807715 - DNA, 19 bp, Mus musculus
  siRNA target sequence for Rnf20 (NM_182999.1,353-371).
ggaccaccgtggaaacaat

SEQ ID NO: 807716 - DNA, 19 bp, Mus musculus
  siRNA target sequence for Rnf20 (NM_182999.1,354-372).
gaccaccgtggaaacaatt

SEQ ID NO: 807717 - DNA, 19 bp, Mus musculus
  siRNA target sequence for Rnf20 (NM_182999.1,356-374).
ccaccgtggaaacaattaa

SEQ ID NO: 807718 - DNA, 19 bp, Mus musculus
  siRNA target sequence for Rnf20 (NM_182999.1,360-378).
cgtggaaacaattaagtta

SEQ ID NO: 807719 - DNA, 19 bp, Mus musculus
  siRNA target sequence for Rnf20 (NM_182999.1,397-415).
gaggaattagacattcgaa

SEQ ID NO: 807720 - DNA, 19 bp, Mus musculus
  siRNA target sequence for Rnf20 (NM_182999.1,434-452).
gtaagctagcagaaatgct

SEQ ID NO: 807721 - DNA, 19 bp, Mus musculus
  siRNA target sequence for Rnf20 (NM_182999.1,480-498).
gcttcgggaacacattgaa

SEQ ID NO: 807722 - DNA, 19 bp, Mus musculus
  siRNA target sequence for Rnf20 (NM_182999.1,551-569).
ggtactggagccagtttga

SEQ ID NO: 807723 - DNA, 19 bp, Mus musculus
  siRNA target sequence for Rnf20 (NM_182999.1,557-575).
ggagccagtttgatgaaaa

SEQ ID NO: 807724 - DNA, 19 bp, Mus musculus
  siRNA target sequence for Rnf20 (NM_182999.1,576-594).
catccgcatcatccttaaa

SEQ ID NO: 807725 - DNA, 19 bp, Mus musculus
  siRNA target sequence for Rnf20 (NM_182999.1,579-597).
ccgcatcatccttaaacgt

SEQ ID NO: 807726 - DNA, 19 bp, Mus musculus
  siRNA target sequence for Rnf20 (NM_182999.1,580-598).
cgcatcatccttaaacgtt

SEQ ID NO: 807727 - DNA, 19 bp, Mus musculus
  siRNA target sequence for Rnf20 (NM_182999.1,581-599).
gcatcatccttaaacgtta

SEQ ID NO: 807728 - DNA, 19 bp, Mus musculus
  siRNA target sequence for Rnf20 (NM_182999.1,582-600).
catcatccttaaacgttat

SEQ ID NO: 807729 - DNA, 19 bp, Mus musculus
  siRNA target sequence for Rnf20 (NM_182999.1,585-603).
catccttaaacgttatgat

SEQ ID NO: 807730 - DNA, 19 bp, Mus musculus
  siRNA target sequence for Rnf20 (NM_182999.1,721-739).
caagagccagctttctctt

SEQ ID NO: 807731 - DNA, 19 bp, Mus musculus
  siRNA target sequence for Rnf20 (NM_182999.1,758-776).
gcagttccagtgaagagat

SEQ ID NO: 807732 - DNA, 19 bp, Mus musculus
  siRNA target sequence for Rnf20 (NM_182999.1,856-874).
gaaaaagtggatctcttat

SEQ ID NO: 807733 - DNA, 19 bp, Mus musculus
  siRNA target sequence for Rnf20 (NM_182999.1,890-908).
gtggagataacctgatagt

SEQ ID NO: 807734 - DNA, 19 bp, Mus musculus
  siRNA target sequence for Rnf20 (NM_182999.1,1007-1025).
ctcaggagttctgtaagtt

SEQ ID NO: 807735 - DNA, 19 bp, Mus musculus
  siRNA target sequence for Rnf20 (NM_182999.1,1019-1037).
gtaagttgcagggtaaagt

SEQ ID NO: 807736 - DNA, 19 bp, Mus musculus
  siRNA target sequence for Rnf20 (NM_182999.1,1089-1107).
gcagtgggatattgacaaa

SEQ ID NO: 807737 - DNA, 19 bp, Mus musculus
  siRNA target sequence for Rnf20 (NM_182999.1,1096-1114).
gatattgacaaaattcgaa

SEQ ID NO: 807738 - DNA, 19 bp, Mus musculus
  siRNA target sequence for Rnf20 (NM_182999.1,1150-1168).
gtcctagagcgggtgaatt

SEQ ID NO: 807739 - DNA, 19 bp, Mus musculus
  siRNA target sequence for Rnf20 (NM_182999.1,1152-1170).
cctagagcgggtgaattca

SEQ ID NO: 807740 - DNA, 19 bp, Mus musculus
  siRNA target sequence for Rnf20 (NM_182999.1,1153-1171).
ctagagcgggtgaattcaa

SEQ ID NO: 807741 - DNA, 19 bp, Mus musculus
  siRNA target sequence for Rnf20 (NM_182999.1,1232-1250).
cccggaagtttgaggaaat

SEQ ID NO: 807742 - DNA, 19 bp, Mus musculus
  siRNA target sequence for Rnf20 (NM_182999.1,1234-1252).
cggaagtttgaggaaatga

SEQ ID NO: 807743 - DNA, 19 bp, Mus musculus
  siRNA target sequence for Rnf20 (NM_182999.1,1236-1254).
gaagtttgaggaaatgaat

SEQ ID NO: 807744 - DNA, 19 bp, Mus musculus
  siRNA target sequence for Rnf20 (NM_182999.1,1261-1279).
cttgaggagaacaaagagt

SEQ ID NO: 807745 - DNA, 19 bp, Mus musculus
  siRNA target sequence for Rnf20 (NM_182999.1,1308-1326).
gaagcttcgtcaagacttt

SEQ ID NO: 807746 - DNA, 19 bp, Mus musculus
  siRNA target sequence for Rnf20 (NM_182999.1,1518-1536).
gcgccaggttgaactcatt

SEQ ID NO: 807747 - DNA, 19 bp, Mus musculus
  siRNA target sequence for Rnf20 (NM_182999.1,1546-1564).
gaggttagtctgcataaga

SEQ ID NO: 807748 - DNA, 19 bp, Mus musculus
  siRNA target sequence for Rnf20 (NM_182999.1,1624-1642).
gagatgttgaggatagagt

SEQ ID NO: 807749 - DNA, 19 bp, Mus musculus
  siRNA target sequence for Rnf20 (NM_182999.1,1650-1668).
gacccttgctgccaatgaa

SEQ ID NO: 807750 - DNA, 19 bp, Mus musculus
  siRNA target sequence for Rnf20 (NM_182999.1,1740-1758).
gggtgaagtcctaaggtat

SEQ ID NO: 807751 - DNA, 19 bp, Mus musculus
  siRNA target sequence for Rnf20 (NM_182999.1,1741-1759).
ggtgaagtcctaaggtata

SEQ ID NO: 807752 - DNA, 19 bp, Mus musculus
  siRNA target sequence for Rnf20 (NM_182999.1,1742-1760).
gtgaagtcctaaggtataa

SEQ ID NO: 807753 - DNA, 19 bp, Mus musculus
  siRNA target sequence for Rnf20 (NM_182999.1,1827-1845).
gcagtctcagtctagtact

SEQ ID NO: 807754 - DNA, 19 bp, Mus musculus
  siRNA target sequence for Rnf20 (NM_182999.1,1888-1906).
gaagacctagccactcatt

SEQ ID NO: 807755 - DNA, 19 bp, Mus musculus
  siRNA target sequence for Rnf20 (NM_182999.1,1944-1962).
gtccaaacgggatgaagaa

SEQ ID NO: 807756 - DNA, 19 bp, Mus musculus
  siRNA target sequence for Rnf20 (NM_182999.1,2070-2088).
gagagattctgttaaggat

SEQ ID NO: 807757 - DNA, 19 bp, Mus musculus
  siRNA target sequence for Rnf20 (NM_182999.1,2555-2573).
cagagcgaatcaagtctaa

SEQ ID NO: 807758 - DNA, 19 bp, Mus musculus
  siRNA target sequence for Rnf20 (NM_182999.1,2560-2578).
cgaatcaagtctaatcaga

SEQ ID NO: 807759 - DNA, 19 bp, Mus musculus
  siRNA target sequence for Rnf20 (NM_182999.1,2561-2579).
gaatcaagtctaatcagat

SEQ ID NO: 807760 - DNA, 19 bp, Mus musculus
  siRNA target sequence for Rnf20 (NM_182999.1,2570-2588).
ctaatcagatccataagtt

SEQ ID NO: 807761 - DNA, 19 bp, Mus musculus
  siRNA target sequence for Rnf20 (NM_182999.1,2575-2593).
cagatccataagttgctta

SEQ ID NO: 807762 - DNA, 19 bp, Mus musculus
  siRNA target sequence for Rnf20 (NM_182999.1,2577-2595).
gatccataagttgcttaaa

SEQ ID NO: 807763 - DNA, 19 bp, Mus musculus
  siRNA target sequence for Rnf20 (NM_182999.1,2650-2668).
gcccagttacaggtagtaa

SEQ ID NO: 807764 - DNA, 19 bp, Mus musculus
  siRNA target sequence for Rnf20 (NM_182999.1,2652-2670).
ccagttacaggtagtaaga

SEQ ID NO: 807765 - DNA, 19 bp, Mus musculus
  siRNA target sequence for Rnf20 (NM_182999.1,2653-2671).
cagttacaggtagtaagaa

SEQ ID NO: 807766 - DNA, 19 bp, Mus musculus
  siRNA target sequence for Rnf20 (NM_182999.1,2689-2707).
cacctacttcagagtaaca

SEQ ID NO: 807767 - DNA, 19 bp, Mus musculus
  siRNA target sequence for Rnf20 (NM_182999.1,2741-2759).
ctcaagccttggagatgaa

SEQ ID NO: 807768 - DNA, 19 bp, Mus musculus
  siRNA target sequence for Rnf20 (NM_182999.1,3032-3050).
gctgtaacatgcgtaaaaa

SEQ ID NO: 807769 - DNA, 19 bp, Mus musculus
  siRNA target sequence for Rnf20 (NM_182999.1,3148-3166).
gcttttggtgccaatgatt

SEQ ID NO: 807770 - DNA, 19 bp, Mus musculus
  siRNA target sequence for Accn3 (NM_183000.1,332-350).
gctgcacgatgcatggttt

SEQ ID NO: 807771 - DNA, 19 bp, Mus musculus
  siRNA target sequence for Accn3 (NM_183000.1,466-484).
ggggagttccaccataaga

SEQ ID NO: 807772 - DNA, 19 bp, Mus musculus
  siRNA target sequence for Accn3 (NM_183000.1,526-544).
gctgtcactttgtgtaaca

SEQ ID NO: 807773 - DNA, 19 bp, Mus musculus
  siRNA target sequence for Accn3 (NM_183000.1,527-545).
ctgtcactttgtgtaacat

SEQ ID NO: 807774 - DNA, 19 bp, Mus musculus
  siRNA target sequence for Accn3 (NM_183000.1,565-583).
cgcctcacacccaatgact

SEQ ID NO: 807775 - DNA, 19 bp, Mus musculus
  siRNA target sequence for Accn3 (NM_183000.1,678-696).
catgcccagtccgactttt

SEQ ID NO: 807776 - DNA, 19 bp, Mus musculus
  siRNA target sequence for Accn3 (NM_183000.1,682-700).
cccagtccgacttttgaca

SEQ ID NO: 807777 - DNA, 19 bp, Mus musculus
  siRNA target sequence for Accn3 (NM_183000.1,683-701).
ccagtccgacttttgacat

SEQ ID NO: 807778 - DNA, 19 bp, Mus musculus
  siRNA target sequence for Accn3 (NM_183000.1,773-791).
cctgtggacctgagaactt

SEQ ID NO: 807779 - DNA, 19 bp, Mus musculus
  siRNA target sequence for Accn3 (NM_183000.1,806-824).
ctcgaatggggcaatgcta

SEQ ID NO: 807780 - DNA, 19 bp, Mus musculus
  siRNA target sequence for 9630042L18 (NM_183014.1,394-412).
cctactcctaccatctagt

SEQ ID NO: 807781 - DNA, 19 bp, Mus musculus
  siRNA target sequence for 9630042L18 (NM_183014.1,395-413).
ctactcctaccatctagtt

SEQ ID NO: 807782 - DNA, 19 bp, Mus musculus
  siRNA target sequence for 9630042L18 (NM_183014.1,408-426).
ctagttttcgggaatcagt

SEQ ID NO: 807783 - DNA, 19 bp, Mus musculus
  siRNA target sequence for 9630042L18 (NM_183014.1,509-527).
gtgacactggaaaattata

SEQ ID NO: 807784 - DNA, 19 bp, Mus musculus
  siRNA target sequence for 9630042L18 (NM_183014.1,554-572).
gtttccaaacctgatatga

SEQ ID NO: 807785 - DNA, 19 bp, Mus musculus
  siRNA target sequence for 9630042L18 (NM_183014.1,672-690).
catccctagaacttgacat

SEQ ID NO: 807786 - DNA, 19 bp, Mus musculus
  siRNA target sequence for 9630042L18 (NM_183014.1,738-756).
gggatgatgggagtttaga

SEQ ID NO: 807787 - DNA, 19 bp, Mus musculus
  siRNA target sequence for 9630042L18 (NM_183014.1,757-775).
gaagcttcaagcaaaccaa

SEQ ID NO: 807788 - DNA, 19 bp, Mus musculus
  siRNA target sequence for 9630042L18 (NM_183014.1,785-803).
ccaagggaagtccaaataa

SEQ ID NO: 807789 - DNA, 19 bp, Mus musculus
  siRNA target sequence for 9630042L18 (NM_183014.1,842-860).
gtgagctcaagcttcataa

SEQ ID NO: 807790 - DNA, 19 bp, Mus musculus
  siRNA target sequence for 9630042L18 (NM_183014.1,844-862).
gagctcaagcttcataaca

SEQ ID NO: 807791 - DNA, 19 bp, Mus musculus
  siRNA target sequence for 9630042L18 (NM_183014.1,880-898).
cgatcagccttccactaaa

SEQ ID NO: 807792 - DNA, 19 bp, Mus musculus
  siRNA target sequence for 9630042L18 (NM_183014.1,881-899).
gatcagccttccactaaaa

SEQ ID NO: 807793 - DNA, 19 bp, Mus musculus
  siRNA target sequence for 9630042L18 (NM_183014.1,884-902).
cagccttccactaaaacaa

SEQ ID NO: 807794 - DNA, 19 bp, Mus musculus
  siRNA target sequence for 9630042L18 (NM_183014.1,913-931).
gaattcccacccagttaaa

SEQ ID NO: 807795 - DNA, 19 bp, Mus musculus
  siRNA target sequence for 9630042L18 (NM_183014.1,918-936).
cccacccagttaaaaagga

SEQ ID NO: 807796 - DNA, 19 bp, Mus musculus
  siRNA target sequence for 9630042L18 (NM_183014.1,1062-1080).
gaagtgaaaaccttataaa

SEQ ID NO: 807797 - DNA, 19 bp, Mus musculus
  siRNA target sequence for 9630042L18 (NM_183014.1,1065-1083).
gtgaaaaccttataaacca

SEQ ID NO: 807798 - DNA, 19 bp, Mus musculus
  siRNA target sequence for 9630042L18 (NM_183014.1,1311-1329).
gccagagaggtcactttat

SEQ ID NO: 807799 - DNA, 19 bp, Mus musculus
  siRNA target sequence for 9630042L18 (NM_183014.1,1477-1495).
caacggcccatcaacgttt

SEQ ID NO: 807800 - DNA, 19 bp, Mus musculus
  siRNA target sequence for 9630042L18 (NM_183014.1,1491-1509).
cgtttatccgtcaccatat

SEQ ID NO: 807801 - DNA, 19 bp, Mus musculus
  siRNA target sequence for 9630042L18 (NM_183014.1,1498-1516).
ccgtcaccatatgattcat

SEQ ID NO: 807802 - DNA, 19 bp, Mus musculus
  siRNA target sequence for 9630042L18 (NM_183014.1,1499-1517).
cgtcaccatatgattcata

SEQ ID NO: 807803 - DNA, 19 bp, Mus musculus
  siRNA target sequence for 9630042L18 (NM_183014.1,1809-1827).
ctttcagctatctgtcaaa

SEQ ID NO: 807804 - DNA, 19 bp, Mus musculus
  siRNA target sequence for 9630042L18 (NM_183014.1,1816-1834).
ctatctgtcaaaccttaat

SEQ ID NO: 807805 - DNA, 19 bp, Mus musculus
  siRNA target sequence for 9630042L18 (NM_183014.1,1892-1910).
gcctttattcggagttcat

SEQ ID NO: 807806 - DNA, 19 bp, Mus musculus
  siRNA target sequence for 9630042L18 (NM_183014.1,1894-1912).
ctttattcggagttcatct

SEQ ID NO: 807807 - DNA, 19 bp, Mus musculus
  siRNA target sequence for 9630042L18 (NM_183014.1,1902-1920).
ggagttcatctcttgctaa

SEQ ID NO: 807808 - DNA, 19 bp, Mus musculus
  siRNA target sequence for 9630042L18 (NM_183014.1,2057-2075).
cgagccttcaaccagaaaa

SEQ ID NO: 807809 - DNA, 19 bp, Mus musculus
  siRNA target sequence for 9630042L18 (NM_183014.1,2163-2181).
ctcttgctcaacatcaaaa

SEQ ID NO: 807810 - DNA, 19 bp, Mus musculus
  siRNA target sequence for 9630042L18 (NM_183014.1,2326-2344).
cgtgcacctgactgaacat

SEQ ID NO: 807811 - DNA, 19 bp, Mus musculus
  siRNA target sequence for 9630042L18 (NM_183014.1,2379-2397).
ctgagtgcccacagacttt

SEQ ID NO: 807812 - DNA, 19 bp, Mus musculus
  siRNA target sequence for Cdc42bpb (NM_183016.1,185-203).
gtgctggtgtgcctttaca

SEQ ID NO: 807813 - DNA, 19 bp, Mus musculus
  siRNA target sequence for Cdc42bpb (NM_183016.1,351-369).
gtgaggttgctgttgtcaa

SEQ ID NO: 807814 - DNA, 19 bp, Mus musculus
  siRNA target sequence for Cdc42bpb (NM_183016.1,376-394).
gaacactgaacgaatttat

SEQ ID NO: 807815 - DNA, 19 bp, Mus musculus
  siRNA target sequence for Cdc42bpb (NM_183016.1,379-397).
cactgaacgaatttatgca

SEQ ID NO: 807816 - DNA, 19 bp, Mus musculus
  siRNA target sequence for Cdc42bpb (NM_183016.1,381-399).
ctgaacgaatttatgcaat

SEQ ID NO: 807817 - DNA, 19 bp, Mus musculus
  siRNA target sequence for Cdc42bpb (NM_183016.1,541-559).
ggtcatggattactatgta

SEQ ID NO: 807818 - DNA, 19 bp, Mus musculus
  siRNA target sequence for Cdc42bpb (NM_183016.1,572-590).
ctgaccctgctgagtaagt

SEQ ID NO: 807819 - DNA, 19 bp, Mus musculus
  siRNA target sequence for Cdc42bpb (NM_183016.1,574-592).
gaccctgctgagtaagttt

SEQ ID NO: 807820 - DNA, 19 bp, Mus musculus
  siRNA target sequence for Cdc42bpb (NM_183016.1,576-594).
ccctgctgagtaagtttga

SEQ ID NO: 807821 - DNA, 19 bp, Mus musculus
  siRNA target sequence for Cdc42bpb (NM_183016.1,611-629).
gacatggcgaggttctaca

SEQ ID NO: 807822 - DNA, 19 bp, Mus musculus
  siRNA target sequence for Cdc42bpb (NM_183016.1,613-631).
catggcgaggttctacatt

SEQ ID NO: 807823 - DNA, 19 bp, Mus musculus
  siRNA target sequence for Cdc42bpb (NM_183016.1,746-764).
ggctcgtgcttgaagatga

SEQ ID NO: 807824 - DNA, 19 bp, Mus musculus
  siRNA target sequence for Cdc42bpb (NM_183016.1,747-765).
gctcgtgcttgaagatgaa

SEQ ID NO: 807825 - DNA, 19 bp, Mus musculus
  siRNA target sequence for Cdc42bpb (NM_183016.1,886-904).
gctgggcgtctgcatgtat

SEQ ID NO: 807826 - DNA, 19 bp, Mus musculus
  siRNA target sequence for Cdc42bpb (NM_183016.1,950-968).
gagacatacgggaagatca

SEQ ID NO: 807827 - DNA, 19 bp, Mus musculus
  siRNA target sequence for Cdc42bpb (NM_183016.1,1034-1052).
cttatccagagactaatat

SEQ ID NO: 807828 - DNA, 19 bp, Mus musculus
  siRNA target sequence for Cdc42bpb (NM_183016.1,1118-1136).
ggtctgaattgggagaata

SEQ ID NO: 807829 - DNA, 19 bp, Mus musculus
  siRNA target sequence for Cdc42bpb (NM_183016.1,1123-1141).
gaattgggagaatatacga

SEQ ID NO: 807830 - DNA, 19 bp, Mus musculus
  siRNA target sequence for Cdc42bpb (NM_183016.1,1129-1147).
ggagaatatacgaaacctt

SEQ ID NO: 807831 - DNA, 19 bp, Mus musculus
  siRNA target sequence for Cdc42bpb (NM_183016.1,1276-1294).
gcccttcatcggtttcaca

SEQ ID NO: 807832 - DNA, 19 bp, Mus musculus
  siRNA target sequence for Cdc42bpb (NM_183016.1,1277-1295).
cccttcatcggtttcacat

SEQ ID NO: 807833 - DNA, 19 bp, Mus musculus
  siRNA target sequence for Cdc42bpb (NM_183016.1,1278-1296).
ccttcatcggtttcacatt

SEQ ID NO: 807834 - DNA, 19 bp, Mus musculus
  siRNA target sequence for Cdc42bpb (NM_183016.1,1302-1320).
cggaaagctgcttttctga

SEQ ID NO: 807835 - DNA, 19 bp, Mus musculus
  siRNA target sequence for Cdc42bpb (NM_183016.1,1568-1586).
cttgaacgcatgaagagta

SEQ ID NO: 807836 - DNA, 19 bp, Mus musculus
  siRNA target sequence for Cdc42bpb (NM_183016.1,1741-1759).
ggcttcagagcgattgaaa

SEQ ID NO: 807837 - DNA, 19 bp, Mus musculus
  siRNA target sequence for Cdc42bpb (NM_183016.1,1742-1760).
gcttcagagcgattgaaat

SEQ ID NO: 807838 - DNA, 19 bp, Mus musculus
  siRNA target sequence for Cdc42bpb (NM_183016.1,2033-2051).
cacagcgagagcttctgta

SEQ ID NO: 807839 - DNA, 19 bp, Mus musculus
  siRNA target sequence for Cdc42bpb (NM_183016.1,2074-2092).
ggccctcaaggtaaagcaa

SEQ ID NO: 807840 - DNA, 19 bp, Mus musculus
  siRNA target sequence for Cdc42bpb (NM_183016.1,2129-2147).
caggagatctccaaaatca

SEQ ID NO: 807841 - DNA, 19 bp, Mus musculus
  siRNA target sequence for Cdc42bpb (NM_183016.1,2355-2373).
gcaccgtgaaggacaagta

SEQ ID NO: 807842 - DNA, 19 bp, Mus musculus
  siRNA target sequence for Cdc42bpb (NM_183016.1,2388-2406).
ccatgctgttcgatgagaa

SEQ ID NO: 807843 - DNA, 19 bp, Mus musculus
  siRNA target sequence for Cdc42bpb (NM_183016.1,2393-2411).
ctgttcgatgagaacaaga

SEQ ID NO: 807844 - DNA, 19 bp, Mus musculus
  siRNA target sequence for Cdc42bpb (NM_183016.1,2413-2431).
gttaacagcagaaaacgaa

SEQ ID NO: 807845 - DNA, 19 bp, Mus musculus
  siRNA target sequence for Cdc42bpb (NM_183016.1,2423-2441).
gaaaacgaaaagctttgtt

SEQ ID NO: 807846 - DNA, 19 bp, Mus musculus
  siRNA target sequence for Cdc42bpb (NM_183016.1,2428-2446).
cgaaaagctttgttccttt

SEQ ID NO: 807847 - DNA, 19 bp, Mus musculus
  siRNA target sequence for Cdc42bpb (NM_183016.1,2627-2645).
gagaccttgcgaagttcta

SEQ ID NO: 807848 - DNA, 19 bp, Mus musculus
  siRNA target sequence for Cdc42bpb (NM_183016.1,2629-2647).
gaccttgcgaagttctagt

SEQ ID NO: 807849 - DNA, 19 bp, Mus musculus
  siRNA target sequence for Cdc42bpb (NM_183016.1,2825-2843).
gaatcggaagcgaaaaaca

SEQ ID NO: 807850 - DNA, 19 bp, Mus musculus
  siRNA target sequence for Cdc42bpb (NM_183016.1,2834-2852).
gcgaaaaacagggaattgt

SEQ ID NO: 807851 - DNA, 19 bp, Mus musculus
  siRNA target sequence for Cdc42bpb (NM_183016.1,2901-2919).
cggatacagggctcaaact

SEQ ID NO: 807852 - DNA, 19 bp, Mus musculus
  siRNA target sequence for Cdc42bpb (NM_183016.1,2902-2920).
ggatacagggctcaaactt

SEQ ID NO: 807853 - DNA, 19 bp, Mus musculus
  siRNA target sequence for Cdc42bpb (NM_183016.1,2932-2950).
ggattctatctttgagtat

SEQ ID NO: 807854 - DNA, 19 bp, Mus musculus
  siRNA target sequence for Cdc42bpb (NM_183016.1,2933-2951).
gattctatctttgagtatt

SEQ ID NO: 807855 - DNA, 19 bp, Mus musculus
  siRNA target sequence for Cdc42bpb (NM_183016.1,2937-2955).
ctatctttgagtatttcaa

SEQ ID NO: 807856 - DNA, 19 bp, Mus musculus
  siRNA target sequence for Cdc42bpb (NM_183016.1,2961-2979).
ctcctcttgcacatgatct

SEQ ID NO: 807857 - DNA, 19 bp, Mus musculus
  siRNA target sequence for Cdc42bpb (NM_183016.1,2969-2987).
gcacatgatctgactttta

SEQ ID NO: 807858 - DNA, 19 bp, Mus musculus
  siRNA target sequence for Cdc42bpb (NM_183016.1,2972-2990).
catgatctgacttttagaa

SEQ ID NO: 807859 - DNA, 19 bp, Mus musculus
  siRNA target sequence for Cdc42bpb (NM_183016.1,3409-3427).
gcccacaggcgtgaagaaa

SEQ ID NO: 807860 - DNA, 19 bp, Mus musculus
  siRNA target sequence for Cdc42bpb (NM_183016.1,3566-3584).
gtcctggcctcagatgtta

SEQ ID NO: 807861 - DNA, 19 bp, Mus musculus
  siRNA target sequence for Cdc42bpb (NM_183016.1,3571-3589).
ggcctcagatgttatccat

SEQ ID NO: 807862 - DNA, 19 bp, Mus musculus
  siRNA target sequence for Cdc42bpb (NM_183016.1,3599-3617).
cgagacattccgtgcatat

SEQ ID NO: 807863 - DNA, 19 bp, Mus musculus
  siRNA target sequence for Cdc42bpb (NM_183016.1,3728-3746).
caggccatcttgcataaga

SEQ ID NO: 807864 - DNA, 19 bp, Mus musculus
  siRNA target sequence for Cdc42bpb (NM_183016.1,3795-3813).
gctcgctgccgctcatcaa

SEQ ID NO: 807865 - DNA, 19 bp, Mus musculus
  siRNA target sequence for Cdc42bpb (NM_183016.1,4034-4052).
gaagcgagcaactttgaca

SEQ ID NO: 807866 - DNA, 19 bp, Mus musculus
  siRNA target sequence for Cdc42bpb (NM_183016.1,4038-4056).
cgagcaactttgacatcaa

SEQ ID NO: 807867 - DNA, 19 bp, Mus musculus
  siRNA target sequence for Cdc42bpb (NM_183016.1,4134-4152).
ctgtgaagcgactaatcct

SEQ ID NO: 807868 - DNA, 19 bp, Mus musculus
  siRNA target sequence for Cdc42bpb (NM_183016.1,4136-4154).
gtgaagcgactaatccttt

SEQ ID NO: 807869 - DNA, 19 bp, Mus musculus
  siRNA target sequence for Cdc42bpb (NM_183016.1,4305-4323).
cgcctctcgacctggtaaa

SEQ ID NO: 807870 - DNA, 19 bp, Mus musculus
  siRNA target sequence for Cdc42bpb (NM_183016.1,4306-4324).
gcctctcgacctggtaaat

SEQ ID NO: 807871 - DNA, 19 bp, Mus musculus
  siRNA target sequence for Cdc42bpb (NM_183016.1,4380-4398).
ctgtggagctcaaaagtga

SEQ ID NO: 807872 - DNA, 19 bp, Mus musculus
  siRNA target sequence for Cdc42bpb (NM_183016.1,4487-4505).
gctcctgtcgcctgtagtt

SEQ ID NO: 807873 - DNA, 19 bp, Mus musculus
  siRNA target sequence for Cdc42bpb (NM_183016.1,4588-4606).
cggcctgcggaggataaga

SEQ ID NO: 807874 - DNA, 19 bp, Mus musculus
  siRNA target sequence for Cdc42bpb (NM_183016.1,4655-4673).
cgcctcatctacttcaaaa

SEQ ID NO: 807875 - DNA, 19 bp, Mus musculus
  siRNA target sequence for Cdc42bpb (NM_183016.1,4683-4701).
caggaacaatcctcaatgt

SEQ ID NO: 807876 - DNA, 19 bp, Mus musculus
  siRNA target sequence for Cdc42bpb (NM_183016.1,4746-4764).
ggagcaaacgacgttttgt

SEQ ID NO: 807877 - DNA, 19 bp, Mus musculus
  siRNA target sequence for Cdc42bpb (NM_183016.1,4749-4767).
gcaaacgacgttttgtctt

SEQ ID NO: 807878 - DNA, 19 bp, Mus musculus
  siRNA target sequence for Cdc42bpb (NM_183016.1,4820-4838).
cccgaactgcgatccaaaa

SEQ ID NO: 807879 - DNA, 19 bp, Mus musculus
  siRNA target sequence for Cdc42bpb (NM_183016.1,4821-4839).
ccgaactgcgatccaaaat

SEQ ID NO: 807880 - DNA, 19 bp, Mus musculus
  siRNA target sequence for Cdc42bpb (NM_183016.1,4823-4841).
gaactgcgatccaaaatga

SEQ ID NO: 807881 - DNA, 19 bp, Mus musculus
  siRNA target sequence for Cdc42bpb (NM_183016.1,4826-4844).
ctgcgatccaaaatgatat

SEQ ID NO: 807882 - DNA, 19 bp, Mus musculus
  siRNA target sequence for Cdc42bpb (NM_183016.1,4829-4847).
cgatccaaaatgatatcca

SEQ ID NO: 807883 - DNA, 19 bp, Mus musculus
  siRNA target sequence for Cdc42bpb (NM_183016.1,4830-4848).
gatccaaaatgatatccaa

SEQ ID NO: 807884 - DNA, 19 bp, Mus musculus
  siRNA target sequence for Cdc42bpb (NM_183016.1,5075-5093).
cccgaccaggattttgaca

SEQ ID NO: 807885 - DNA, 19 bp, Mus musculus
  siRNA target sequence for Cdc42bpb (NM_183016.1,5076-5094).
ccgaccaggattttgacaa

SEQ ID NO: 807886 - DNA, 19 bp, Mus musculus
  siRNA target sequence for Cdc42bpb (NM_183016.1,5120-5138).
cactcaactccatccaata

SEQ ID NO: 807887 - DNA, 19 bp, Mus musculus
  siRNA target sequence for D430005B17 (NM_183017.1,165-183).
ggagcacgaggttttcgat

SEQ ID NO: 807888 - DNA, 19 bp, Mus musculus
  siRNA target sequence for D430005B17 (NM_183017.1,559-577).
gtgccagtgtggtacatca

SEQ ID NO: 807889 - DNA, 19 bp, Mus musculus
  siRNA target sequence for D430005B17 (NM_183017.1,629-647).
ctgctcccttcttctacat

SEQ ID NO: 807890 - DNA, 19 bp, Mus musculus
  siRNA target sequence for D430005B17 (NM_183017.1,985-1003).
gctgatgccgacatcttct

SEQ ID NO: 807891 - DNA, 19 bp, Mus musculus
  siRNA target sequence for D430005B17 (NM_183017.1,986-1004).
ctgatgccgacatcttctt

SEQ ID NO: 807892 - DNA, 19 bp, Mus musculus
  siRNA target sequence for D430005B17 (NM_183017.1,1401-1419).
gtttgacatccgctacatt

SEQ ID NO: 807893 - DNA, 19 bp, Mus musculus
  siRNA target sequence for D430005B17 (NM_183017.1,1437-1455).
gaggccgctgaggttgttt

SEQ ID NO: 807894 - DNA, 19 bp, Mus musculus
  siRNA target sequence for D430005B17 (NM_183017.1,1446-1464).
gaggttgtttgcttacgat

SEQ ID NO: 807895 - DNA, 19 bp, Mus musculus
  siRNA target sequence for D430005B17 (NM_183017.1,1452-1470).
gtttgcttacgatgtgttt

SEQ ID NO: 807896 - DNA, 19 bp, Mus musculus
  siRNA target sequence for D430005B17 (NM_183017.1,1528-1546).
catttcaccgtcatgaact

SEQ ID NO: 807897 - DNA, 19 bp, Mus musculus
  siRNA target sequence for D430005B17 (NM_183017.1,1620-1638).
gtttccctggagtgatgtt

SEQ ID NO: 807898 - DNA, 19 bp, Mus musculus
  siRNA target sequence for D430005B17 (NM_183017.1,1851-1869).
ccacccctcattcttcaat

SEQ ID NO: 807899 - DNA, 19 bp, Mus musculus
  siRNA target sequence for D430005B17 (NM_183017.1,1854-1872).
cccctcattcttcaatgat

SEQ ID NO: 807900 - DNA, 19 bp, Mus musculus
  siRNA target sequence for D430005B17 (NM_183017.1,1859-1877).
cattcttcaatgatgtctt

SEQ ID NO: 807901 - DNA, 19 bp, Mus musculus
  siRNA target sequence for C030033M19Rik (NM_183018.1,202-220).
ctcagaaggaaacttaata

SEQ ID NO: 807902 - DNA, 19 bp, Mus musculus
  siRNA target sequence for C030033M19Rik (NM_183018.1,321-339).
ccatgggcgatatccaaat

SEQ ID NO: 807903 - DNA, 19 bp, Mus musculus
  siRNA target sequence for C030033M19Rik (NM_183018.1,386-404).
gcccggagccttacacaaa

SEQ ID NO: 807904 - DNA, 19 bp, Mus musculus
  siRNA target sequence for C030033M19Rik (NM_183018.1,387-405).
cccggagccttacacaaaa

SEQ ID NO: 807905 - DNA, 19 bp, Mus musculus
  siRNA target sequence for C030033M19Rik (NM_183018.1,388-406).
ccggagccttacacaaaaa

SEQ ID NO: 807906 - DNA, 19 bp, Mus musculus
  siRNA target sequence for C030033M19Rik (NM_183018.1,423-441).
cacctgctccctatgtgaa

SEQ ID NO: 807907 - DNA, 19 bp, Mus musculus
  siRNA target sequence for C030033M19Rik (NM_183018.1,426-444).
ctgctccctatgtgaaagt

SEQ ID NO: 807908 - DNA, 19 bp, Mus musculus
  siRNA target sequence for C030033M19Rik (NM_183018.1,429-447).
ctccctatgtgaaagttta

SEQ ID NO: 807909 - DNA, 19 bp, Mus musculus
  siRNA target sequence for C030033M19Rik (NM_183018.1,504-522).
ctctcgatcccttgtatca

SEQ ID NO: 807910 - DNA, 19 bp, Mus musculus
  siRNA target sequence for C030033M19Rik (NM_183018.1,560-578).
gttcttcaggtgattgtct

SEQ ID NO: 807911 - DNA, 19 bp, Mus musculus
  siRNA target sequence for C030033M19Rik (NM_183018.1,590-608).
ggaagaatggaccacaaat

SEQ ID NO: 807912 - DNA, 19 bp, Mus musculus
  siRNA target sequence for C030033M19Rik (NM_183018.1,662-680).
gtgattggatggtataaat

SEQ ID NO: 807913 - DNA, 19 bp, Mus musculus
  siRNA target sequence for 9330140K16Rik (NM_183019.1,521-539).
ggaccagatgcgcacaaat

SEQ ID NO: 807914 - DNA, 19 bp, Mus musculus
  siRNA target sequence for 9330140K16Rik (NM_183019.1,525-543).
cagatgcgcacaaatgtca

SEQ ID NO: 807915 - DNA, 19 bp, Mus musculus
  siRNA target sequence for 9330140K16Rik (NM_183019.1,559-577).
gcactgagcgagactacat

SEQ ID NO: 807916 - DNA, 19 bp, Mus musculus
  siRNA target sequence for 9330140K16Rik (NM_183019.1,621-639).
cgcaaacgggaggatatgt

SEQ ID NO: 807917 - DNA, 19 bp, Mus musculus
  siRNA target sequence for 9330140K16Rik (NM_183019.1,622-640).
gcaaacgggaggatatgtt

SEQ ID NO: 807918 - DNA, 19 bp, Mus musculus
  siRNA target sequence for 9330140K16Rik (NM_183019.1,694-712).
gccaaaaggcatttgtgaa

SEQ ID NO: 807919 - DNA, 19 bp, Mus musculus
  siRNA target sequence for 9330140K16Rik (NM_183019.1,865-883).
gcaagtacgtgtacttctt

SEQ ID NO: 807920 - DNA, 19 bp, Mus musculus
  siRNA target sequence for A2lp (NM_183020.1,323-341).
cggagccgaaagcatctta

SEQ ID NO: 807921 - DNA, 19 bp, Mus musculus
  siRNA target sequence for A2lp (NM_183020.1,430-448).
cacagtcacccgtgtttga

SEQ ID NO: 807922 - DNA, 19 bp, Mus musculus
  siRNA target sequence for A2lp (NM_183020.1,441-459).
gtgtttgaaggtgtctata

SEQ ID NO: 807923 - DNA, 19 bp, Mus musculus
  siRNA target sequence for A2lp (NM_183020.1,447-465).
gaaggtgtctataacaatt

SEQ ID NO: 807924 - DNA, 19 bp, Mus musculus
  siRNA target sequence for A2lp (NM_183020.1,450-468).
ggtgtctataacaattcca

SEQ ID NO: 807925 - DNA, 19 bp, Mus musculus
  siRNA target sequence for A2lp (NM_183020.1,499-517).
gttctacttgtgacgtaaa

SEQ ID NO: 807926 - DNA, 19 bp, Mus musculus
  siRNA target sequence for A2lp (NM_183020.1,502-520).
ctacttgtgacgtaaaggt

SEQ ID NO: 807927 - DNA, 19 bp, Mus musculus
  siRNA target sequence for A2lp (NM_183020.1,508-526).
gtgacgtaaaggtgaaaaa

SEQ ID NO: 807928 - DNA, 19 bp, Mus musculus
  siRNA target sequence for A2lp (NM_183020.1,532-550).
ccacttacgagggcatttt

SEQ ID NO: 807929 - DNA, 19 bp, Mus musculus
  siRNA target sequence for A2lp (NM_183020.1,535-553).
cttacgagggcattttcaa

SEQ ID NO: 807930 - DNA, 19 bp, Mus musculus
  siRNA target sequence for A2lp (NM_183020.1,588-606).
gcggtgcatcggaaagcat

SEQ ID NO: 807931 - DNA, 19 bp, Mus musculus
  siRNA target sequence for A2lp (NM_183020.1,690-708).
cgaaatgttgacttcaatt

SEQ ID NO: 807932 - DNA, 19 bp, Mus musculus
  siRNA target sequence for A2lp (NM_183020.1,691-709).
gaaatgttgacttcaatta

SEQ ID NO: 807933 - DNA, 19 bp, Mus musculus
  siRNA target sequence for A2lp (NM_183020.1,696-714).
gttgacttcaattatgcta

SEQ ID NO: 807934 - DNA, 19 bp, Mus musculus
  siRNA target sequence for A2lp (NM_183020.1,704-722).
caattatgctactaaagat

SEQ ID NO: 807935 - DNA, 19 bp, Mus musculus
  siRNA target sequence for A2lp (NM_183020.1,738-756).
gccattgccatgaactcta

SEQ ID NO: 807936 - DNA, 19 bp, Mus musculus
  siRNA target sequence for A2lp (NM_183020.1,833-851).
ggaatccgatatgtctaat

SEQ ID NO: 807937 - DNA, 19 bp, Mus musculus
  siRNA target sequence for A2lp (NM_183020.1,862-880).
ccaatgagatgttcaaatt

SEQ ID NO: 807938 - DNA, 19 bp, Mus musculus
  siRNA target sequence for A2lp (NM_183020.1,1035-1053).
ctacggattgctatggaaa

SEQ ID NO: 807939 - DNA, 19 bp, Mus musculus
  siRNA target sequence for A2lp (NM_183020.1,1116-1134).
gagagccccagcttggtat

SEQ ID NO: 807940 - DNA, 19 bp, Mus musculus
  siRNA target sequence for A2lp (NM_183020.1,1356-1374).
ggtgccaagaccttatctt

SEQ ID NO: 807941 - DNA, 19 bp, Mus musculus
  siRNA target sequence for A2lp (NM_183020.1,1509-1527).
cctgagcctcccattggtt

SEQ ID NO: 807942 - DNA, 19 bp, Mus musculus
  siRNA target sequence for A2lp (NM_183020.1,1620-1638).
ctgacccctacagatgtaa

SEQ ID NO: 807943 - DNA, 19 bp, Mus musculus
  siRNA target sequence for A2lp (NM_183020.1,1652-1670).
caaggagcccagtaggaat

SEQ ID NO: 807944 - DNA, 19 bp, Mus musculus
  siRNA target sequence for A2lp (NM_183020.1,1719-1737).
cagaatgaacaaaaacgat

SEQ ID NO: 807945 - DNA, 19 bp, Mus musculus
  siRNA target sequence for A2lp (NM_183020.1,1802-1820).
gacgggcctggatccattt

SEQ ID NO: 807946 - DNA, 19 bp, Mus musculus
  siRNA target sequence for A2lp (NM_183020.1,1825-1843).
cccggatcttgaaagaaga

SEQ ID NO: 807947 - DNA, 19 bp, Mus musculus
  siRNA target sequence for A2lp (NM_183020.1,1863-1881).
gaggtggatggtctattga

SEQ ID NO: 807948 - DNA, 19 bp, Mus musculus
  siRNA target sequence for A2lp (NM_183020.1,1865-1883).
ggtggatggtctattgact

SEQ ID NO: 807949 - DNA, 19 bp, Mus musculus
  siRNA target sequence for A2lp (NM_183020.1,1866-1884).
gtggatggtctattgactt

SEQ ID NO: 807950 - DNA, 19 bp, Mus musculus
  siRNA target sequence for A2lp (NM_183020.1,1905-1923).
gtctcctctaagacagaat

SEQ ID NO: 807951 - DNA, 19 bp, Mus musculus
  siRNA target sequence for A2lp (NM_183020.1,2036-2054).
catcaagggggatgagaaa

SEQ ID NO: 807952 - DNA, 19 bp, Mus musculus
  siRNA target sequence for A2lp (NM_183020.1,2057-2075).
ggagggccctgttactgaa

SEQ ID NO: 807953 - DNA, 19 bp, Mus musculus
  siRNA target sequence for A2lp (NM_183020.1,2062-2080).
gccctgttactgaacaagt

SEQ ID NO: 807954 - DNA, 19 bp, Mus musculus
  siRNA target sequence for A2lp (NM_183020.1,2073-2091).
gaacaagtgaagaagtcta

SEQ ID NO: 807955 - DNA, 19 bp, Mus musculus
  siRNA target sequence for A2lp (NM_183020.1,2076-2094).
caagtgaagaagtctactt

SEQ ID NO: 807956 - DNA, 19 bp, Mus musculus
  siRNA target sequence for A2lp (NM_183020.1,2102-2120).
caacgccaaggagttcaat

SEQ ID NO: 807957 - DNA, 19 bp, Mus musculus
  siRNA target sequence for A2lp (NM_183020.1,2111-2129).
ggagttcaatccaacaaaa

SEQ ID NO: 807958 - DNA, 19 bp, Mus musculus
  siRNA target sequence for A2lp (NM_183020.1,2239-2257).
gtccccagtacatctcata

SEQ ID NO: 807959 - DNA, 19 bp, Mus musculus
  siRNA target sequence for A2lp (NM_183020.1,2243-2261).
ccagtacatctcatatata

SEQ ID NO: 807960 - DNA, 19 bp, Mus musculus
  siRNA target sequence for A2lp (NM_183020.1,2292-2310).
gcgcctcagatgtatccat

SEQ ID NO: 807961 - DNA, 19 bp, Mus musculus
  siRNA target sequence for A2lp (NM_183020.1,2293-2311).
cgcctcagatgtatccata

SEQ ID NO: 807962 - DNA, 19 bp, Mus musculus
  siRNA target sequence for A2lp (NM_183020.1,2294-2312).
gcctcagatgtatccatat

SEQ ID NO: 807963 - DNA, 19 bp, Mus musculus
  siRNA target sequence for A2lp (NM_183020.1,2345-2363).
caagtaccggggtgcaaaa

SEQ ID NO: 807964 - DNA, 19 bp, Mus musculus
  siRNA target sequence for A2lp (NM_183020.1,2558-2576).
ggtgttcgcccctatgctt

SEQ ID NO: 807965 - DNA, 19 bp, Mus musculus
  siRNA target sequence for A2lp (NM_183020.1,2565-2583).
gcccctatgcttcaaagta

SEQ ID NO: 807966 - DNA, 19 bp, Mus musculus
  siRNA target sequence for A2lp (NM_183020.1,2942-2960).
ccagccagctgctgtgtat

SEQ ID NO: 807967 - DNA, 19 bp, Mus musculus
  siRNA target sequence for A2lp (NM_183020.1,3197-3215).
cggacacccccaagttcaa

SEQ ID NO: 807968 - DNA, 19 bp, Mus musculus
  siRNA target sequence for A2lp (NM_183020.1,3198-3216).
ggacacccccaagttcaat

SEQ ID NO: 807969 - DNA, 19 bp, Mus musculus
  siRNA target sequence for 6530405K19 (NM_183021.1,297-315).
ccgatggacggcacatcat

SEQ ID NO: 807970 - DNA, 19 bp, Mus musculus
  siRNA target sequence for 6530405K19 (NM_183021.1,299-317).
gatggacggcacatcatct

SEQ ID NO: 807971 - DNA, 19 bp, Mus musculus
  siRNA target sequence for 6530405K19 (NM_183021.1,356-374).
gtgtggtcgctcacctatt

SEQ ID NO: 807972 - DNA, 19 bp, Mus musculus
  siRNA target sequence for 6530405K19 (NM_183021.1,358-376).
gtggtcgctcacctattta

SEQ ID NO: 807973 - DNA, 19 bp, Mus musculus
  siRNA target sequence for 6530405K19 (NM_183021.1,402-420).
gcgttggtccccttcatta

SEQ ID NO: 807974 - DNA, 19 bp, Mus musculus
  siRNA target sequence for 6530405K19 (NM_183021.1,403-421).
cgttggtccccttcattat

SEQ ID NO: 807975 - DNA, 19 bp, Mus musculus
  siRNA target sequence for 6530405K19 (NM_183021.1,407-425).
ggtccccttcattatgata

SEQ ID NO: 807976 - DNA, 19 bp, Mus musculus
  siRNA target sequence for 6530405K19 (NM_183021.1,536-554).
gttacaagcctacattaca

SEQ ID NO: 807977 - DNA, 19 bp, Mus musculus
  siRNA target sequence for 6530405K19 (NM_183021.1,659-677).
ggtaaccagagctgtgtat

SEQ ID NO: 807978 - DNA, 19 bp, Mus musculus
  siRNA target sequence for 6530405K19 (NM_183021.1,660-678).
gtaaccagagctgtgtata

SEQ ID NO: 807979 - DNA, 19 bp, Mus musculus
  siRNA target sequence for 6530405K19 (NM_183021.1,670-688).
ctgtgtatattgatattct

SEQ ID NO: 807980 - DNA, 19 bp, Mus musculus
  siRNA target sequence for 6530405K19 (NM_183021.1,672-690).
gtgtatattgatattctct

SEQ ID NO: 807981 - DNA, 19 bp, Mus musculus
  siRNA target sequence for 6530405K19 (NM_183021.1,886-904).
cgtcgcttgctgaagctaa

SEQ ID NO: 807982 - DNA, 19 bp, Mus musculus
  siRNA target sequence for 6530405K19 (NM_183021.1,1089-1107).
gaccaccccggatgtttct

SEQ ID NO: 807983 - DNA, 19 bp, Mus musculus
  siRNA target sequence for 6530405K19 (NM_183021.1,1108-1126).
gcagggtcctaaagattct

SEQ ID NO: 807984 - DNA, 19 bp, Mus musculus
  siRNA target sequence for 6530405K19 (NM_183021.1,1112-1130).
ggtcctaaagattctctat

SEQ ID NO: 807985 - DNA, 19 bp, Mus musculus
  siRNA target sequence for 6530405K19 (NM_183021.1,1116-1134).
ctaaagattctctatcact

SEQ ID NO: 807986 - DNA, 19 bp, Mus musculus
  siRNA target sequence for 6530405K19 (NM_183021.1,1196-1214).
cctcatgtggagtatggat

SEQ ID NO: 807987 - DNA, 19 bp, Mus musculus
  siRNA target sequence for 6530405K19 (NM_183021.1,1197-1215).
ctcatgtggagtatggata

SEQ ID NO: 807988 - DNA, 19 bp, Mus musculus
  siRNA target sequence for 6530405K19 (NM_183021.1,1202-1220).
gtggagtatggatattgct

SEQ ID NO: 807989 - DNA, 19 bp, Mus musculus
  siRNA target sequence for 6530405K19 (NM_183021.1,1458-1476).
gaactgcagggcacacttt

SEQ ID NO: 807990 - DNA, 19 bp, Mus musculus
  siRNA target sequence for 6530405K19 (NM_183021.1,1479-1497).
ctctggaggtgtgttctta

SEQ ID NO: 807991 - DNA, 19 bp, Mus musculus
  siRNA target sequence for 6530405K19 (NM_183021.1,1831-1849).
ccctgtgtaggcaactctt

SEQ ID NO: 807992 - DNA, 19 bp, Mus musculus
  siRNA target sequence for 6530405K19 (NM_183021.1,1898-1916).
ctgtcacttgcaaaggata

SEQ ID NO: 807993 - DNA, 19 bp, Mus musculus
  siRNA target sequence for 6530405K19 (NM_183021.1,1902-1920).
cacttgcaaaggatagcat

SEQ ID NO: 807994 - DNA, 19 bp, Mus musculus
  siRNA target sequence for Rims4 (NM_183023.1,227-245).
cagagggcaaccttaacta

SEQ ID NO: 807995 - DNA, 19 bp, Mus musculus
  siRNA target sequence for Rims4 (NM_183023.1,543-561).
caaccaggtgcttctgttt

SEQ ID NO: 807996 - DNA, 19 bp, Mus musculus
  siRNA target sequence for A430091O22Rik (NM_183024.1,247-265).
gcggaaaatcctagtgaaa

SEQ ID NO: 807997 - DNA, 19 bp, Mus musculus
  siRNA target sequence for A430091O22Rik (NM_183024.1,288-306).
cccaggaggttcatgagtt

SEQ ID NO: 807998 - DNA, 19 bp, Mus musculus
  siRNA target sequence for A430091O22Rik (NM_183024.1,313-331).
ggactatgagctaaagtat

SEQ ID NO: 807999 - DNA, 19 bp, Mus musculus
  siRNA target sequence for A430091O22Rik (NM_183024.1,314-332).
gactatgagctaaagtatt

SEQ ID NO: 808000 - DNA, 19 bp, Mus musculus
  siRNA target sequence for A430091O22Rik (NM_183024.1,333-351).
gctatgtggacaggaataa

SEQ ID NO: 808001 - DNA, 19 bp, Mus musculus
  siRNA target sequence for A430091O22Rik (NM_183024.1,334-352).
ctatgtggacaggaataaa

SEQ ID NO: 808002 - DNA, 19 bp, Mus musculus
  siRNA target sequence for A430091O22Rik (NM_183024.1,338-356).
gtggacaggaataaacgaa

SEQ ID NO: 808003 - DNA, 19 bp, Mus musculus
  siRNA target sequence for A430091O22Rik (NM_183024.1,354-372).
gaacagcttttgttacctt

SEQ ID NO: 808004 - DNA, 19 bp, Mus musculus
  siRNA target sequence for A430091O22Rik (NM_183024.1,357-375).
cagcttttgttaccttatt

SEQ ID NO: 808005 - DNA, 19 bp, Mus musculus
  siRNA target sequence for A430091O22Rik (NM_183024.1,360-378).
cttttgttaccttattgaa

SEQ ID NO: 808006 - DNA, 19 bp, Mus musculus
  siRNA target sequence for A430091O22Rik (NM_183024.1,389-407).
gcgcagagcgcgattcaga

SEQ ID NO: 808007 - DNA, 19 bp, Mus musculus
  siRNA target sequence for A430091O22Rik (NM_183024.1,397-415).
cgcgattcagaggtttcat

SEQ ID NO: 808008 - DNA, 19 bp, Mus musculus
  siRNA target sequence for A430091O22Rik (NM_183024.1,399-417).
cgattcagaggtttcatca

SEQ ID NO: 808009 - DNA, 19 bp, Mus musculus
  siRNA target sequence for A430091O22Rik (NM_183024.1,498-516).
ccttcaccttagaagagtt

SEQ ID NO: 808010 - DNA, 19 bp, Mus musculus
  siRNA target sequence for A430091O22Rik (NM_183024.1,539-557).
ggcaacatcgagagatgtt

SEQ ID NO: 808011 - DNA, 19 bp, Mus musculus
  siRNA target sequence for A430091O22Rik (NM_183024.1,540-558).
gcaacatcgagagatgttt

SEQ ID NO: 808012 - DNA, 19 bp, Mus musculus
  siRNA target sequence for A430091O22Rik (NM_183024.1,562-580).
ggtctacagtgaagttact

SEQ ID NO: 808013 - DNA, 19 bp, Mus musculus
  siRNA target sequence for A430091O22Rik (NM_183024.1,713-731).
gcctcggagctcatccatt

SEQ ID NO: 808014 - DNA, 19 bp, Mus musculus
  siRNA target sequence for A430091O22Rik (NM_183024.1,719-737).
gagctcatccattctaagt

SEQ ID NO: 808015 - DNA, 19 bp, Mus musculus
  siRNA target sequence for A430091O22Rik (NM_183024.1,736-754).
gtgcctttgtatagataaa

SEQ ID NO: 808016 - DNA, 19 bp, Mus musculus
  siRNA target sequence for A430091O22Rik (NM_183024.1,738-756).
gcctttgtatagataaact

SEQ ID NO: 808017 - DNA, 19 bp, Mus musculus
  siRNA target sequence for A430091O22Rik (NM_183024.1,861-879).
gctttgcggtggttgaata

SEQ ID NO: 808018 - DNA, 19 bp, Mus musculus
  siRNA target sequence for A430091O22Rik (NM_183024.1,862-880).
ctttgcggtggttgaatat

SEQ ID NO: 808019 - DNA, 19 bp, Mus musculus
  siRNA target sequence for A430091O22Rik (NM_183024.1,1020-1038).
cgatgcacagtaatcaaaa

SEQ ID NO: 808020 - DNA, 19 bp, Mus musculus
  siRNA target sequence for A430091O22Rik (NM_183024.1,1055-1073).
cccaatccggtacagatta

SEQ ID NO: 808021 - DNA, 19 bp, Mus musculus
  siRNA target sequence for A430091O22Rik (NM_183024.1,1061-1079).
ccggtacagattatgaaaa

SEQ ID NO: 808022 - DNA, 19 bp, Mus musculus
  siRNA target sequence for A430091O22Rik (NM_183024.1,1090-1108).
ccctgccatgttacaagtt

SEQ ID NO: 808023 - DNA, 19 bp, Mus musculus
  siRNA target sequence for A430091O22Rik (NM_183024.1,1095-1113).
ccatgttacaagttcttct

SEQ ID NO: 808024 - DNA, 19 bp, Mus musculus
  siRNA target sequence for A430091O22Rik (NM_183024.1,1197-1215).
cctccgccatcttacactt

SEQ ID NO: 808025 - DNA, 19 bp, Mus musculus
  siRNA target sequence for A430091O22Rik (NM_183024.1,1202-1220).
gccatcttacacttcagta

SEQ ID NO: 808026 - DNA, 19 bp, Mus musculus
  siRNA target sequence for A430091O22Rik (NM_183024.1,1203-1221).
ccatcttacacttcagtaa

SEQ ID NO: 808027 - DNA, 19 bp, Mus musculus
  siRNA target sequence for A430091O22Rik (NM_183024.1,1234-1252).
ctcagctgtgggtaataca

SEQ ID NO: 808028 - DNA, 19 bp, Mus musculus
  siRNA target sequence for A430091O22Rik (NM_183024.1,1245-1263).
gtaatacatcgtccttaat

SEQ ID NO: 808029 - DNA, 19 bp, Mus musculus
  siRNA target sequence for A430091O22Rik (NM_183024.1,1254-1272).
cgtccttaatccttcagaa

SEQ ID NO: 808030 - DNA, 19 bp, Mus musculus
  siRNA target sequence for A430091O22Rik (NM_183024.1,1287-1305).
ccttgatacagcaacagtt

SEQ ID NO: 808031 - DNA, 19 bp, Mus musculus
  siRNA target sequence for A430091O22Rik (NM_183024.1,1318-1336).
caatgcccacactaacaat

SEQ ID NO: 808032 - DNA, 19 bp, Mus musculus
  siRNA target sequence for A430091O22Rik (NM_183024.1,1435-1453).
cgaagcacacaaaacatct

SEQ ID NO: 808033 - DNA, 19 bp, Mus musculus
  siRNA target sequence for A430091O22Rik (NM_183024.1,1732-1750).
cttgggagaaccaccaaaa

SEQ ID NO: 808034 - DNA, 19 bp, Mus musculus
  siRNA target sequence for A430091O22Rik (NM_183024.1,1751-1769).
gagatccggctcagtaaaa

SEQ ID NO: 808035 - DNA, 19 bp, Mus musculus
  siRNA target sequence for A430091O22Rik (NM_183024.1,1753-1771).
gatccggctcagtaaaaat

SEQ ID NO: 808036 - DNA, 19 bp, Mus musculus
  siRNA target sequence for A430091O22Rik (NM_183024.1,1758-1776).
ggctcagtaaaaatccata

SEQ ID NO: 808037 - DNA, 19 bp, Mus musculus
  siRNA target sequence for A430091O22Rik (NM_183024.1,1759-1777).
gctcagtaaaaatccatat

SEQ ID NO: 808038 - DNA, 19 bp, Mus musculus
  siRNA target sequence for A430091O22Rik (NM_183024.1,1760-1778).
ctcagtaaaaatccatatt

SEQ ID NO: 808039 - DNA, 19 bp, Mus musculus
  siRNA target sequence for A430091O22Rik (NM_183024.1,1810-1828).
cctatccactgcaggtaaa

SEQ ID NO: 808040 - DNA, 19 bp, Mus musculus
  siRNA target sequence for A430091O22Rik (NM_183024.1,1926-1944).
ctccatccatcgaggatta

SEQ ID NO: 808041 - DNA, 19 bp, Mus musculus
  siRNA target sequence for A430091O22Rik (NM_183024.1,1976-1994).
cgaggctcctcctatctca

SEQ ID NO: 808042 - DNA, 19 bp, Mus musculus
  siRNA target sequence for A430091O22Rik (NM_183024.1,1977-1995).
gaggctcctcctatctcat

SEQ ID NO: 808043 - DNA, 19 bp, Mus musculus
  siRNA target sequence for A430091O22Rik (NM_183024.1,2051-2069).
ggagtgagctacacagaaa

SEQ ID NO: 808044 - DNA, 19 bp, Mus musculus
  siRNA target sequence for A430091O22Rik (NM_183024.1,2066-2084).
gaaacctacttgaaaaaga

SEQ ID NO: 808045 - DNA, 19 bp, Mus musculus
  siRNA target sequence for A430033K04 (NM_183025.1,215-233).
gtggctggggcactgttta

SEQ ID NO: 808046 - DNA, 19 bp, Mus musculus
  siRNA target sequence for A430033K04 (NM_183025.1,312-330).
ccaggtgtccgtaaatgga

SEQ ID NO: 808047 - DNA, 19 bp, Mus musculus
  siRNA target sequence for A430033K04 (NM_183025.1,328-346).
ggagtgccccagttgaaaa

SEQ ID NO: 808048 - DNA, 19 bp, Mus musculus
  siRNA target sequence for A430033K04 (NM_183025.1,354-372).
caaagtcaagagaagtatt

SEQ ID NO: 808049 - DNA, 19 bp, Mus musculus
  siRNA target sequence for A430033K04 (NM_183025.1,419-437).
ggttgaagtagaaaacaca

SEQ ID NO: 808050 - DNA, 19 bp, Mus musculus
  siRNA target sequence for A430033K04 (NM_183025.1,420-438).
gttgaagtagaaaacacat

SEQ ID NO: 808051 - DNA, 19 bp, Mus musculus
  siRNA target sequence for A430033K04 (NM_183025.1,436-454).
catacaatgtggactcaaa

SEQ ID NO: 808052 - DNA, 19 bp, Mus musculus
  siRNA target sequence for A430033K04 (NM_183025.1,463-481).
caaatatgactctgaagaa

SEQ ID NO: 808053 - DNA, 19 bp, Mus musculus
  siRNA target sequence for A430033K04 (NM_183025.1,512-530).
gcttgttaatccattgcta

SEQ ID NO: 808054 - DNA, 19 bp, Mus musculus
  siRNA target sequence for A430033K04 (NM_183025.1,579-597).
cctcatgatctgaatagaa

SEQ ID NO: 808055 - DNA, 19 bp, Mus musculus
  siRNA target sequence for A430033K04 (NM_183025.1,609-627).
ctctcatatcccaagcatt

SEQ ID NO: 808056 - DNA, 19 bp, Mus musculus
  siRNA target sequence for A430033K04 (NM_183025.1,635-653).
ccatagcaaggatcagtat

SEQ ID NO: 808057 - DNA, 19 bp, Mus musculus
  siRNA target sequence for A430033K04 (NM_183025.1,636-654).
catagcaaggatcagtatt

SEQ ID NO: 808058 - DNA, 19 bp, Mus musculus
  siRNA target sequence for A430033K04 (NM_183025.1,640-658).
gcaaggatcagtattcaca

SEQ ID NO: 808059 - DNA, 19 bp, Mus musculus
  siRNA target sequence for A430033K04 (NM_183025.1,671-689).
gtactttggaccagatgaa

SEQ ID NO: 808060 - DNA, 19 bp, Mus musculus
  siRNA target sequence for A430033K04 (NM_183025.1,742-760).
cctctaggacatgcaataa

SEQ ID NO: 808061 - DNA, 19 bp, Mus musculus
  siRNA target sequence for A430033K04 (NM_183025.1,745-763).
ctaggacatgcaataacta

SEQ ID NO: 808062 - DNA, 19 bp, Mus musculus
  siRNA target sequence for A430033K04 (NM_183025.1,772-790).
cctttgatgaggtaacaat

SEQ ID NO: 808063 - DNA, 19 bp, Mus musculus
  siRNA target sequence for A430033K04 (NM_183025.1,797-815).
ccaatatatgactcagtta

SEQ ID NO: 808064 - DNA, 19 bp, Mus musculus
  siRNA target sequence for A430033K04 (NM_183025.1,830-848).
gggatggaatatatgtcat

SEQ ID NO: 808065 - DNA, 19 bp, Mus musculus
  siRNA target sequence for A430033K04 (NM_183025.1,831-849).
ggatggaatatatgtcata

SEQ ID NO: 808066 - DNA, 19 bp, Mus musculus
  siRNA target sequence for A430033K04 (NM_183025.1,832-850).
gatggaatatatgtcataa

SEQ ID NO: 808067 - DNA, 19 bp, Mus musculus
  siRNA target sequence for A430033K04 (NM_183025.1,858-876).
cctaacaagaccgaactta

SEQ ID NO: 808068 - DNA, 19 bp, Mus musculus
  siRNA target sequence for A430033K04 (NM_183025.1,905-923).
gaatgatgataaatgtgat

SEQ ID NO: 808069 - DNA, 19 bp, Mus musculus
  siRNA target sequence for A430033K04 (NM_183025.1,933-951).
cctatcattaacaagtcat

SEQ ID NO: 808070 - DNA, 19 bp, Mus musculus
  siRNA target sequence for A430033K04 (NM_183025.1,1071-1089).
gagaaacaagtttacgaat

SEQ ID NO: 808071 - DNA, 19 bp, Mus musculus
  siRNA target sequence for A430033K04 (NM_183025.1,1080-1098).
gtttacgaatgtaaagtat

SEQ ID NO: 808072 - DNA, 19 bp, Mus musculus
  siRNA target sequence for A430033K04 (NM_183025.1,1310-1328).
gagcgctcgcgcagatgaa

SEQ ID NO: 808073 - DNA, 19 bp, Mus musculus
  siRNA target sequence for A430033K04 (NM_183025.1,1431-1449).
gattgtctgaagactttct

SEQ ID NO: 808074 - DNA, 19 bp, Mus musculus
  siRNA target sequence for A430033K04 (NM_183025.1,1534-1552).
gtcacaagtcccacttaat

SEQ ID NO: 808075 - DNA, 19 bp, Mus musculus
  siRNA target sequence for A430033K04 (NM_183025.1,1870-1888).
ctcgtaagtcccaactgat

SEQ ID NO: 808076 - DNA, 19 bp, Mus musculus
  siRNA target sequence for A430033K04 (NM_183025.1,1942-1960).
ggaagactttctatctcaa

SEQ ID NO: 808077 - DNA, 19 bp, Mus musculus
  siRNA target sequence for A430033K04 (NM_183025.1,1983-2001).
gtaatccatcagtctgaaa

SEQ ID NO: 808078 - DNA, 19 bp, Mus musculus
  siRNA target sequence for A430033K04 (NM_183025.1,2054-2072).
cacacgacatcagaagata

SEQ ID NO: 808079 - DNA, 19 bp, Mus musculus
  siRNA target sequence for Ap1s3 (NM_183027.1,524-542).
gccattgaagactctgata

SEQ ID NO: 808080 - DNA, 19 bp, Mus musculus
  siRNA target sequence for Ap1s3 (NM_183027.1,525-543).
ccattgaagactctgatat

SEQ ID NO: 808081 - DNA, 19 bp, Mus musculus
  siRNA target sequence for A030012M09Rik (NM_183028.1,233-251).
ccattgaccgcggagatta

SEQ ID NO: 808082 - DNA, 19 bp, Mus musculus
  siRNA target sequence for A030012M09Rik (NM_183028.1,262-280).
ggctaccgagacaatgctt

SEQ ID NO: 808083 - DNA, 19 bp, Mus musculus
  siRNA target sequence for A030012M09Rik (NM_183028.1,263-281).
gctaccgagacaatgctta

SEQ ID NO: 808084 - DNA, 19 bp, Mus musculus
  siRNA target sequence for A030012M09Rik (NM_183028.1,267-285).
ccgagacaatgcttacaaa

SEQ ID NO: 808085 - DNA, 19 bp, Mus musculus
  siRNA target sequence for A030012M09Rik (NM_183028.1,318-336).
gtcagcaccttgcatttat

SEQ ID NO: 808086 - DNA, 19 bp, Mus musculus
  siRNA target sequence for A030012M09Rik (NM_183028.1,391-409).
ggaagtggaaccggatatt

SEQ ID NO: 808087 - DNA, 19 bp, Mus musculus
  siRNA target sequence for A030012M09Rik (NM_183028.1,392-410).
gaagtggaaccggatattt

SEQ ID NO: 808088 - DNA, 19 bp, Mus musculus
  siRNA target sequence for A030012M09Rik (NM_183028.1,397-415).
ggaaccggatatttaagta

SEQ ID NO: 808089 - DNA, 19 bp, Mus musculus
  siRNA target sequence for A030012M09Rik (NM_183028.1,401-419).
ccggatatttaagtacaat

SEQ ID NO: 808090 - DNA, 19 bp, Mus musculus
  siRNA target sequence for A030012M09Rik (NM_183028.1,413-431).
gtacaatggtgggcttaat

SEQ ID NO: 808091 - DNA, 19 bp, Mus musculus
  siRNA target sequence for A030012M09Rik (NM_183028.1,416-434).
caatggtgggcttaatttt

SEQ ID NO: 808092 - DNA, 19 bp, Mus musculus
  siRNA target sequence for A030012M09Rik (NM_183028.1,660-678).
gaagatcttactcaaagtt

SEQ ID NO: 808093 - DNA, 19 bp, Mus musculus
  siRNA target sequence for A030012M09Rik (NM_183028.1,736-754).
caaaacacttgggaaagta

SEQ ID NO: 808094 - DNA, 19 bp, Mus musculus
  siRNA target sequence for A030012M09Rik (NM_183028.1,773-791).
cctttgcaccactagtaca

SEQ ID NO: 808095 - DNA, 19 bp, Mus musculus
  siRNA target sequence for A030012M09Rik (NM_183028.1,782-800).
cactagtacagcctagtaa

SEQ ID NO: 808096 - DNA, 19 bp, Mus musculus
  siRNA target sequence for A030012M09Rik (NM_183028.1,784-802).
ctagtacagcctagtaaga

SEQ ID NO: 808097 - DNA, 19 bp, Mus musculus
  siRNA target sequence for A030012M09Rik (NM_183028.1,879-897).
cattcgacgtacacttaga

SEQ ID NO: 808098 - DNA, 19 bp, Mus musculus
  siRNA target sequence for A030012M09Rik (NM_183028.1,883-901).
cgacgtacacttagaaact

SEQ ID NO: 808099 - DNA, 19 bp, Mus musculus
  siRNA target sequence for A030012M09Rik (NM_183028.1,970-988).
gttaaacagagaattaata

SEQ ID NO: 808100 - DNA, 19 bp, Mus musculus
  siRNA target sequence for A030012M09Rik (NM_183028.1,978-996).
gagaattaatacttacgta

SEQ ID NO: 808101 - DNA, 19 bp, Mus musculus
  siRNA target sequence for C330012H03Rik (NM_183029.1,148-166).
cgggacaggtcctactcaa

SEQ ID NO: 808102 - DNA, 19 bp, Mus musculus
  siRNA target sequence for C330012H03Rik (NM_183029.1,232-250).
cgggtaaagtggaattgca

SEQ ID NO: 808103 - DNA, 19 bp, Mus musculus
  siRNA target sequence for C330012H03Rik (NM_183029.1,420-438).
gttgtcaacgtcacctata

SEQ ID NO: 808104 - DNA, 19 bp, Mus musculus
  siRNA target sequence for C330012H03Rik (NM_183029.1,423-441).
gtcaacgtcacctatatga

SEQ ID NO: 808105 - DNA, 19 bp, Mus musculus
  siRNA target sequence for C330012H03Rik (NM_183029.1,425-443).
caacgtcacctatatgaca

SEQ ID NO: 808106 - DNA, 19 bp, Mus musculus
  siRNA target sequence for C330012H03Rik (NM_183029.1,453-471).
gcaaagctagctattgaga

SEQ ID NO: 808107 - DNA, 19 bp, Mus musculus
  siRNA target sequence for C330012H03Rik (NM_183029.1,595-613).
ctcaggccagacagattga

SEQ ID NO: 808108 - DNA, 19 bp, Mus musculus
  siRNA target sequence for C330012H03Rik (NM_183029.1,597-615).
caggccagacagattgatt

SEQ ID NO: 808109 - DNA, 19 bp, Mus musculus
  siRNA target sequence for C330012H03Rik (NM_183029.1,712-730).
gggtagacatccacagaaa

SEQ ID NO: 808110 - DNA, 19 bp, Mus musculus
  siRNA target sequence for C330012H03Rik (NM_183029.1,799-817).
gccgcatgattcttgagat

SEQ ID NO: 808111 - DNA, 19 bp, Mus musculus
  siRNA target sequence for C330012H03Rik (NM_183029.1,800-818).
ccgcatgattcttgagatt

SEQ ID NO: 808112 - DNA, 19 bp, Mus musculus
  siRNA target sequence for C330012H03Rik (NM_183029.1,801-819).
cgcatgattcttgagatta

SEQ ID NO: 808113 - DNA, 19 bp, Mus musculus
  siRNA target sequence for C330012H03Rik (NM_183029.1,887-905).
cttcgttggaagactgatt

SEQ ID NO: 808114 - DNA, 19 bp, Mus musculus
  siRNA target sequence for C330012H03Rik (NM_183029.1,946-964).
cagggaccaagataaccat

SEQ ID NO: 808115 - DNA, 19 bp, Mus musculus
  siRNA target sequence for C330012H03Rik (NM_183029.1,1013-1031).
cgtgaggggcaccattgaa

SEQ ID NO: 808116 - DNA, 19 bp, Mus musculus
  siRNA target sequence for C330012H03Rik (NM_183029.1,1143-1161).
gcacttggcatcttttcga

SEQ ID NO: 808117 - DNA, 19 bp, Mus musculus
  siRNA target sequence for C330012H03Rik (NM_183029.1,1370-1388).
gaagggggcacacatcaaa

SEQ ID NO: 808118 - DNA, 19 bp, Mus musculus
  siRNA target sequence for C330012H03Rik (NM_183029.1,1385-1403).
caaacagctcgctcgattt

SEQ ID NO: 808119 - DNA, 19 bp, Mus musculus
  siRNA target sequence for C330012H03Rik (NM_183029.1,1450-1468).
gtgagaggatggtcatcat

SEQ ID NO: 808120 - DNA, 19 bp, Mus musculus
  siRNA target sequence for C330012H03Rik (NM_183029.1,1480-1498).
ctgaagcccagtttaaggt

SEQ ID NO: 808121 - DNA, 19 bp, Mus musculus
  siRNA target sequence for C330012H03Rik (NM_183029.1,1549-1567).
gctcagaggtgtattcatt

SEQ ID NO: 808122 - DNA, 19 bp, Mus musculus
  siRNA target sequence for C330012H03Rik (NM_183029.1,1597-1615).
ggcctggttgcgcatttct

SEQ ID NO: 808123 - DNA, 19 bp, Mus musculus
  siRNA target sequence for C330012H03Rik (NM_183029.1,1599-1617).
cctggttgcgcatttctct

SEQ ID NO: 808124 - DNA, 19 bp, Mus musculus
  siRNA target sequence for Ebi2 (NM_183031.1,105-123).
gtctcatggcaataactgt

SEQ ID NO: 808125 - DNA, 19 bp, Mus musculus
  siRNA target sequence for Ebi2 (NM_183031.1,249-267).
caactcaaccactctctat

SEQ ID NO: 808126 - DNA, 19 bp, Mus musculus
  siRNA target sequence for Ebi2 (NM_183031.1,252-270).
ctcaaccactctctattca

SEQ ID NO: 808127 - DNA, 19 bp, Mus musculus
  siRNA target sequence for Ebi2 (NM_183031.1,315-333).
cactcggatagcctactat

SEQ ID NO: 808128 - DNA, 19 bp, Mus musculus
  siRNA target sequence for Ebi2 (NM_183031.1,382-400).
gctctggtgttctacatca

SEQ ID NO: 808129 - DNA, 19 bp, Mus musculus
  siRNA target sequence for Ebi2 (NM_183031.1,404-422).
cgtacgcaggtgtgaactt

SEQ ID NO: 808130 - DNA, 19 bp, Mus musculus
  siRNA target sequence for Ebi2 (NM_183031.1,466-484).
cctctgcgctacaacaaga

SEQ ID NO: 808131 - DNA, 19 bp, Mus musculus
  siRNA target sequence for Ebi2 (NM_183031.1,467-485).
ctctgcgctacaacaagat

SEQ ID NO: 808132 - DNA, 19 bp, Mus musculus
  siRNA target sequence for Ebi2 (NM_183031.1,469-487).
ctgcgctacaacaagatta

SEQ ID NO: 808133 - DNA, 19 bp, Mus musculus
  siRNA target sequence for Ebi2 (NM_183031.1,471-489).
gcgctacaacaagattaaa

SEQ ID NO: 808134 - DNA, 19 bp, Mus musculus
  siRNA target sequence for Ebi2 (NM_183031.1,472-490).
cgctacaacaagattaaaa

SEQ ID NO: 808135 - DNA, 19 bp, Mus musculus
  siRNA target sequence for Ebi2 (NM_183031.1,480-498).
caagattaaaagaatcgaa

SEQ ID NO: 808136 - DNA, 19 bp, Mus musculus
  siRNA target sequence for Ebi2 (NM_183031.1,602-620).
gcatggagtatccaaactt

SEQ ID NO: 808137 - DNA, 19 bp, Mus musculus
  siRNA target sequence for Ebi2 (NM_183031.1,603-621).
catggagtatccaaacttt

SEQ ID NO: 808138 - DNA, 19 bp, Mus musculus
  siRNA target sequence for Ebi2 (NM_183031.1,672-690).
ctacgtgctgcctatcaca

SEQ ID NO: 808139 - DNA, 19 bp, Mus musculus
  siRNA target sequence for Ebi2 (NM_183031.1,678-696).
gctgcctatcacagtcatt

SEQ ID NO: 808140 - DNA, 19 bp, Mus musculus
  siRNA target sequence for Ebi2 (NM_183031.1,750-768).
cccactcaccgagaaatct

SEQ ID NO: 808141 - DNA, 19 bp, Mus musculus
  siRNA target sequence for Ebi2 (NM_183031.1,785-803).
ctctcaacacaattatcct

SEQ ID NO: 808142 - DNA, 19 bp, Mus musculus
  siRNA target sequence for Ebi2 (NM_183031.1,792-810).
cacaattatcctcatcatt

SEQ ID NO: 808143 - DNA, 19 bp, Mus musculus
  siRNA target sequence for Ebi2 (NM_183031.1,794-812).
caattatcctcatcattgt

SEQ ID NO: 808144 - DNA, 19 bp, Mus musculus
  siRNA target sequence for Ebi2 (NM_183031.1,899-917).
gtggggcgagacattcctt

SEQ ID NO: 808145 - DNA, 19 bp, Mus musculus
  siRNA target sequence for Ebi2 (NM_183031.1,970-988).
gacccgttcatatacttct

SEQ ID NO: 808146 - DNA, 19 bp, Mus musculus
  siRNA target sequence for Ebi2 (NM_183031.1,972-990).
cccgttcatatacttcttt

SEQ ID NO: 808147 - DNA, 19 bp, Mus musculus
  siRNA target sequence for C330029B10Rik (NM_183033.1,279-297).
gaagggcaacctcaagatt

SEQ ID NO: 808148 - DNA, 19 bp, Mus musculus
  siRNA target sequence for C330029B10Rik (NM_183033.1,312-330).
ccggacaggaactctgatt

SEQ ID NO: 808149 - DNA, 19 bp, Mus musculus
  siRNA target sequence for C330029B10Rik (NM_183033.1,544-562).
gtgccgtgctccttctgta

SEQ ID NO: 808150 - DNA, 19 bp, Mus musculus
  siRNA target sequence for C330029B10Rik (NM_183033.1,547-565).
ccgtgctccttctgtaaga

SEQ ID NO: 808151 - DNA, 19 bp, Mus musculus
  siRNA target sequence for C330029B10Rik (NM_183033.1,610-628).
gcccacaagccgttcaagt

SEQ ID NO: 808152 - DNA, 19 bp, Mus musculus
  siRNA target sequence for C330029B10Rik (NM_183033.1,665-683).
ctctgctcagccacataga

SEQ ID NO: 808153 - DNA, 19 bp, Mus musculus
  siRNA target sequence for C330029B10Rik (NM_183033.1,1043-1061).
gcgggaacctgtttacaaa

SEQ ID NO: 808154 - DNA, 19 bp, Mus musculus
  siRNA target sequence for C330029B10Rik (NM_183033.1,1086-1104).
cgccatacaccgtaaagtt

SEQ ID NO: 808155 - DNA, 19 bp, Mus musculus
  siRNA target sequence for C330029B10Rik (NM_183033.1,1088-1106).
ccatacaccgtaaagttga

SEQ ID NO: 808156 - DNA, 19 bp, Mus musculus
  siRNA target sequence for C330029B10Rik (NM_183033.1,1159-1177).
gacactaagcagttcttct

SEQ ID NO: 808157 - DNA, 19 bp, Mus musculus
  siRNA target sequence for C330029B10Rik (NM_183033.1,1163-1181).
ctaagcagttcttcttaca

SEQ ID NO: 808158 - DNA, 19 bp, Mus musculus
  siRNA target sequence for C330029B10Rik (NM_183033.1,1377-1395).
caaagacaagcgtgagtat

SEQ ID NO: 808159 - DNA, 19 bp, Mus musculus
  siRNA target sequence for C330029B10Rik (NM_183033.1,1886-1904).
ccaacggagaccagaatca

SEQ ID NO: 808160 - DNA, 19 bp, Mus musculus
  siRNA target sequence for C330029B10Rik (NM_183033.1,1965-1983).
gccgtctgtgtccatactt

SEQ ID NO: 808161 - DNA, 19 bp, Mus musculus
  siRNA target sequence for C330029B10Rik (NM_183033.1,1967-1985).
cgtctgtgtccatacttga

SEQ ID NO: 808162 - DNA, 19 bp, Mus musculus
  siRNA target sequence for C330029B10Rik (NM_183033.1,2014-2032).
cccgagcagcatagatact

SEQ ID NO: 808163 - DNA, 19 bp, Mus musculus
  siRNA target sequence for C330029B10Rik (NM_183033.1,2016-2034).
cgagcagcatagatactct

SEQ ID NO: 808164 - DNA, 19 bp, Mus musculus
  siRNA target sequence for C330029B10Rik (NM_183033.1,2027-2045).
gatactctctcgacctaaa

SEQ ID NO: 808165 - DNA, 19 bp, Mus musculus
  siRNA target sequence for C330029B10Rik (NM_183033.1,2104-2122).
cctgcgagcatggagataa

SEQ ID NO: 808166 - DNA, 19 bp, Mus musculus
  siRNA target sequence for C330029B10Rik (NM_183033.1,2107-2125).
gcgagcatggagataacta

SEQ ID NO: 808167 - DNA, 19 bp, Mus musculus
  siRNA target sequence for C330029B10Rik (NM_183033.1,2317-2335).
cacccgtgtccttactgta

SEQ ID NO: 808168 - DNA, 19 bp, Mus musculus
  siRNA target sequence for C330029B10Rik (NM_183033.1,2500-2518).
gctcttgggggcaaagagt

SEQ ID NO: 808169 - DNA, 19 bp, Mus musculus
  siRNA target sequence for C330029B10Rik (NM_183033.1,2564-2582).
gtggggcaccaggatcaaa

SEQ ID NO: 808170 - DNA, 19 bp, Mus musculus
  siRNA target sequence for C330029B10Rik (NM_183033.1,2618-2636).
ccgctagcatgcctaagaa

SEQ ID NO: 808171 - DNA, 19 bp, Mus musculus
  siRNA target sequence for C330029B10Rik (NM_183033.1,2619-2637).
cgctagcatgcctaagaat

SEQ ID NO: 808172 - DNA, 19 bp, Mus musculus
  siRNA target sequence for C330029B10Rik (NM_183033.1,2620-2638).
gctagcatgcctaagaata

SEQ ID NO: 808173 - DNA, 19 bp, Mus musculus
  siRNA target sequence for C330029B10Rik (NM_183033.1,2624-2642).
gcatgcctaagaataagga

SEQ ID NO: 808174 - DNA, 19 bp, Mus musculus
  siRNA target sequence for C330029B10Rik (NM_183033.1,2865-2883).
gccctcggccaatagcaaa

SEQ ID NO: 808175 - DNA, 19 bp, Mus musculus
  siRNA target sequence for C330029B10Rik (NM_183033.1,2921-2939).
gctttacccctccgaataa

SEQ ID NO: 808176 - DNA, 19 bp, Mus musculus
  siRNA target sequence for C330029B10Rik (NM_183033.1,3127-3145).
ggtgcgcctcccaccttaa

SEQ ID NO: 808177 - DNA, 19 bp, Mus musculus
  siRNA target sequence for C330029B10Rik (NM_183033.1,3178-3196).
caggagaagcgcttggata

SEQ ID NO: 808178 - DNA, 19 bp, Mus musculus
  siRNA target sequence for C330029B10Rik (NM_183033.1,3193-3211).
gatatcctcagtatcttta

SEQ ID NO: 808179 - DNA, 19 bp, Mus musculus
  siRNA target sequence for C330029B10Rik (NM_183033.1,3318-3336).
ggcccaccagggagacttt

SEQ ID NO: 808180 - DNA, 19 bp, Mus musculus
  siRNA target sequence for C330029B10Rik (NM_183033.1,3423-3441).
cggtccacgagattctgaa

SEQ ID NO: 808181 - DNA, 19 bp, Mus musculus
  siRNA target sequence for C330029B10Rik (NM_183033.1,3455-3473).
ccacggatgcccctaaaca

SEQ ID NO: 808182 - DNA, 19 bp, Mus musculus
  siRNA target sequence for C330029B10Rik (NM_183033.1,3456-3474).
cacggatgcccctaaacaa

SEQ ID NO: 808183 - DNA, 19 bp, Mus musculus
  siRNA target sequence for C330029B10Rik (NM_183033.1,3472-3490).
caagggagagaccatacta

SEQ ID NO: 808184 - DNA, 19 bp, Mus musculus
  siRNA target sequence for BC038943 (NM_183034.1,318-336).
gaggctggcggcaaaagga

SEQ ID NO: 808185 - DNA, 19 bp, Mus musculus
  siRNA target sequence for BC038943 (NM_183034.1,498-516).
ctgatggagtgctatctga

SEQ ID NO: 808186 - DNA, 19 bp, Mus musculus
  siRNA target sequence for BC038943 (NM_183034.1,500-518).
gatggagtgctatctgaaa

SEQ ID NO: 808187 - DNA, 19 bp, Mus musculus
  siRNA target sequence for BC038943 (NM_183034.1,541-559).
ggttgtgcgagtactatca

SEQ ID NO: 808188 - DNA, 19 bp, Mus musculus
  siRNA target sequence for BC038943 (NM_183034.1,608-626).
cttcctgcaaggactaaca

SEQ ID NO: 808189 - DNA, 19 bp, Mus musculus
  siRNA target sequence for BC038943 (NM_183034.1,647-665).
ctacaagtcagccatctta

SEQ ID NO: 808190 - DNA, 19 bp, Mus musculus
  siRNA target sequence for BC038943 (NM_183034.1,736-754).
cctctggtgcagaactaca

SEQ ID NO: 808191 - DNA, 19 bp, Mus musculus
  siRNA target sequence for BC038943 (NM_183034.1,747-765).
gaactacagcggaaagagt

SEQ ID NO: 808192 - DNA, 19 bp, Mus musculus
  siRNA target sequence for BC038943 (NM_183034.1,813-831).
caacactcaggccataaga

SEQ ID NO: 808193 - DNA, 19 bp, Mus musculus
  siRNA target sequence for BC038943 (NM_183034.1,870-888).
ctggacacagccagttcat

SEQ ID NO: 808194 - DNA, 19 bp, Mus musculus
  siRNA target sequence for BC038943 (NM_183034.1,896-914).
gtcctgcagcctaaattct

SEQ ID NO: 808195 - DNA, 19 bp, Mus musculus
  siRNA target sequence for BC038943 (NM_183034.1,966-984).
gaacccatgtcctatgact

SEQ ID NO: 808196 - DNA, 19 bp, Mus musculus
  siRNA target sequence for BC038943 (NM_183034.1,1032-1050).
gaggtgttgtcggaattca

SEQ ID NO: 808197 - DNA, 19 bp, Mus musculus
  siRNA target sequence for BC038943 (NM_183034.1,1052-1070).
caaagcccaggtaaattct

SEQ ID NO: 808198 - DNA, 19 bp, Mus musculus
  siRNA target sequence for BC038943 (NM_183034.1,1160-1178).
gcactttgagggatctgaa

SEQ ID NO: 808199 - DNA, 19 bp, Mus musculus
  siRNA target sequence for BC038943 (NM_183034.1,1182-1200).
ctctttcctgcccacaaat

SEQ ID NO: 808200 - DNA, 19 bp, Mus musculus
  siRNA target sequence for BC038943 (NM_183034.1,1213-1231).
caagtggtggccataagca

SEQ ID NO: 808201 - DNA, 19 bp, Mus musculus
  siRNA target sequence for BC038943 (NM_183034.1,1582-1600).
gttccttgggggcattaga

SEQ ID NO: 808202 - DNA, 19 bp, Mus musculus
  siRNA target sequence for BC038943 (NM_183034.1,1585-1603).
ccttgggggcattagacaa

SEQ ID NO: 808203 - DNA, 19 bp, Mus musculus
  siRNA target sequence for BC038943 (NM_183034.1,1586-1604).
cttgggggcattagacaaa

SEQ ID NO: 808204 - DNA, 19 bp, Mus musculus
  siRNA target sequence for BC038943 (NM_183034.1,1590-1608).
ggggcattagacaaagcat

SEQ ID NO: 808205 - DNA, 19 bp, Mus musculus
  siRNA target sequence for BC038943 (NM_183034.1,1693-1711).
gggtgacacaagaccataa

SEQ ID NO: 808206 - DNA, 19 bp, Mus musculus
  siRNA target sequence for BC038943 (NM_183034.1,1701-1719).
caagaccataaaaacttct

SEQ ID NO: 808207 - DNA, 19 bp, Mus musculus
  siRNA target sequence for BC038943 (NM_183034.1,1845-1863).
gagttccgcctctacttga

SEQ ID NO: 808208 - DNA, 19 bp, Mus musculus
  siRNA target sequence for BC038943 (NM_183034.1,1933-1951).
gtgatggacgttttgagtt

SEQ ID NO: 808209 - DNA, 19 bp, Mus musculus
  siRNA target sequence for BC038943 (NM_183034.1,2058-2076).
gaagatgagtgggtgaata

SEQ ID NO: 808210 - DNA, 19 bp, Mus musculus
  siRNA target sequence for BC038943 (NM_183034.1,2222-2240).
caaagagtcccttttgtat

SEQ ID NO: 808211 - DNA, 19 bp, Mus musculus
  siRNA target sequence for BC038943 (NM_183034.1,2302-2320).
gtttccgagtgagaaacaa

SEQ ID NO: 808212 - DNA, 19 bp, Mus musculus
  siRNA target sequence for BC038943 (NM_183034.1,2307-2325).
cgagtgagaaacaatgaga

SEQ ID NO: 808213 - DNA, 19 bp, Mus musculus
  siRNA target sequence for BC038943 (NM_183034.1,2322-2340).
gagaagatgctaagtgata

SEQ ID NO: 808214 - DNA, 19 bp, Mus musculus
  siRNA target sequence for BC038943 (NM_183034.1,2557-2575).
gtcaggaggtgctgaagtt

SEQ ID NO: 808215 - DNA, 19 bp, Mus musculus
  siRNA target sequence for BC038943 (NM_183034.1,2678-2696).
gatcggcttctcctttgta

SEQ ID NO: 808216 - DNA, 19 bp, Mus musculus
  siRNA target sequence for BC038943 (NM_183034.1,2763-2781).
gtgattccagccagaatca

SEQ ID NO: 808217 - DNA, 19 bp, Mus musculus
  siRNA target sequence for BC038943 (NM_183034.1,2815-2833).
gccggcaggccctgaagtt

SEQ ID NO: 808218 - DNA, 19 bp, Mus musculus
  siRNA target sequence for BC038943 (NM_183034.1,2876-2894).
ggtgaacgcctctctgtat

SEQ ID NO: 808219 - DNA, 19 bp, Mus musculus
  siRNA target sequence for BC038943 (NM_183034.1,3032-3050).
gtctccacacagattcagt

SEQ ID NO: 808220 - DNA, 19 bp, Mus musculus
  siRNA target sequence for Defb38 (NM_183036.1,62-80).
ctattggccctgacacaaa

SEQ ID NO: 808221 - DNA, 19 bp, Mus musculus
  siRNA target sequence for Defb38 (NM_183036.1,140-158).
ctgttggcacctgttataa

SEQ ID NO: 808222 - DNA, 19 bp, Mus musculus
  siRNA target sequence for Defb40 (NM_183039.1,11-29).
cctgctttctactgatgat

SEQ ID NO: 808223 - DNA, 19 bp, Mus musculus
  siRNA target sequence for Defb40 (NM_183039.1,14-32).
gctttctactgatgatctt

SEQ ID NO: 808224 - DNA, 19 bp, Mus musculus
  siRNA target sequence for Defb40 (NM_183039.1,88-106).
ctccaaggaaacaacaact

SEQ ID NO: 808225 - DNA, 19 bp, Mus musculus
  siRNA target sequence for Defb40 (NM_183039.1,117-135).
gaaatgcccatggttttta

SEQ ID NO: 808226 - DNA, 19 bp, Mus musculus
  siRNA target sequence for Defb40 (NM_183039.1,139-157).
caagttagcacctgttata

SEQ ID NO: 808227 - DNA, 19 bp, Mus musculus
  siRNA target sequence for Defb40 (NM_183039.1,177-195).
ccaaaaacgccgttggttt

SEQ ID NO: 808228 - DNA, 19 bp, Mus musculus
  siRNA target sequence for Defb40 (NM_183039.1,186-204).
ccgttggtttgccagaaat

SEQ ID NO: 808229 - DNA, 19 bp, Mus musculus
  siRNA target sequence for Defb40 (NM_183039.1,191-209).
ggtttgccagaaatcatgt

SEQ ID NO: 808230 - DNA, 19 bp, Mus musculus
  siRNA target sequence for 5730507A09Rik (NM_183087.1,708-726).
gggttctggtggctaagtt

SEQ ID NO: 808231 - DNA, 19 bp, Mus musculus
  siRNA target sequence for 5730507A09Rik (NM_183087.1,709-727).
ggttctggtggctaagttt

SEQ ID NO: 808232 - DNA, 19 bp, Mus musculus
  siRNA target sequence for 5730507A09Rik (NM_183087.1,710-728).
gttctggtggctaagtttt

SEQ ID NO: 808233 - DNA, 19 bp, Mus musculus
  siRNA target sequence for 5730507A09Rik (NM_183087.1,770-788).
gtggtgggcaccatacgat

SEQ ID NO: 808234 - DNA, 19 bp, Mus musculus
  siRNA target sequence for 2600005O03Rik (NM_183089.1,613-631).
ctcagttacaagtcctaaa

SEQ ID NO: 808235 - DNA, 19 bp, Mus musculus
  siRNA target sequence for 2600005O03Rik (NM_183089.1,649-667).
gctactggaggattcttga

SEQ ID NO: 808236 - DNA, 19 bp, Mus musculus
  siRNA target sequence for 2600005O03Rik (NM_183089.1,656-674).
gaggattcttgagtttgat

SEQ ID NO: 808237 - DNA, 19 bp, Mus musculus
  siRNA target sequence for 2600005O03Rik (NM_183089.1,668-686).
gtttgattatgagatcaaa

SEQ ID NO: 808238 - DNA, 19 bp, Mus musculus
  siRNA target sequence for 2600005O03Rik (NM_183089.1,720-738).
gaatcctggtctttggata

SEQ ID NO: 808239 - DNA, 19 bp, Mus musculus
  siRNA target sequence for 2600005O03Rik (NM_183089.1,794-812).
gattgaacactgtcttaaa

SEQ ID NO: 808240 - DNA, 19 bp, Mus musculus
  siRNA target sequence for 2600005O03Rik (NM_183089.1,826-844).
gatacgtggacaaagatga

SEQ ID NO: 808241 - DNA, 19 bp, Mus musculus
  siRNA target sequence for 2600005O03Rik (NM_183089.1,855-873).
gaattggacgctgacaaaa

SEQ ID NO: 808242 - DNA, 19 bp, Mus musculus
  siRNA target sequence for 2600005O03Rik (NM_183089.1,861-879).
gacgctgacaaaatatgca

SEQ ID NO: 808243 - DNA, 19 bp, Mus musculus
  siRNA target sequence for 2600005O03Rik (NM_183089.1,1021-1039).
caagaccagaaatcatatt

SEQ ID NO: 808244 - DNA, 19 bp, Mus musculus
  siRNA target sequence for 2600005O03Rik (NM_183089.1,1034-1052).
catatttttgctcaaagta

SEQ ID NO: 808245 - DNA, 19 bp, Mus musculus
  siRNA target sequence for 2600005O03Rik (NM_183089.1,1122-1140).
gaagacatcactccatata

SEQ ID NO: 808246 - DNA, 19 bp, Mus musculus
  siRNA target sequence for 2600005O03Rik (NM_183089.1,1134-1152).
ccatatatccaagatttgt

SEQ ID NO: 808247 - DNA, 19 bp, Mus musculus
  siRNA target sequence for 2600005O03Rik (NM_183089.1,1154-1172).
cggagagaagcaaactata

SEQ ID NO: 808248 - DNA, 19 bp, Mus musculus
  siRNA target sequence for 2600005O03Rik (NM_183089.1,1173-1191).
ggtgcgttgcttactaaat

SEQ ID NO: 808249 - DNA, 19 bp, Mus musculus
  siRNA target sequence for 2600005O03Rik (NM_183089.1,1176-1194).
gcgttgcttactaaatatt

SEQ ID NO: 808250 - DNA, 19 bp, Mus musculus
  siRNA target sequence for 2600005O03Rik (NM_183089.1,1178-1196).
gttgcttactaaatattct

SEQ ID NO: 808251 - DNA, 19 bp, Mus musculus
  siRNA target sequence for 2600005O03Rik (NM_183089.1,1195-1213).
ctcgctcctcaatgcaaaa

SEQ ID NO: 808252 - DNA, 19 bp, Mus musculus
  siRNA target sequence for 2810439M11Rik (NM_183091.1,375-393).
gatgctgtgcacctgaaaa

SEQ ID NO: 808253 - DNA, 19 bp, Mus musculus
  siRNA target sequence for 2810439M11Rik (NM_183091.1,395-413).
cttgtccttatcgtacaat

SEQ ID NO: 808254 - DNA, 19 bp, Mus musculus
  siRNA target sequence for 2810439M11Rik (NM_183091.1,508-526).
gcaactcgggtatcataga

SEQ ID NO: 808255 - DNA, 19 bp, Mus musculus
  siRNA target sequence for 2810439M11Rik (NM_183091.1,752-770).
cctatcaggctgctctatt

SEQ ID NO: 808256 - DNA, 19 bp, Mus musculus
  siRNA target sequence for 1700031F13Rik (NM_183096.2,407-425).
ccacttcccatgactcata

SEQ ID NO: 808257 - DNA, 19 bp, Mus musculus
  siRNA target sequence for 1700031F13Rik (NM_183096.2,410-428).
cttcccatgactcatacaa

SEQ ID NO: 808258 - DNA, 19 bp, Mus musculus
  siRNA target sequence for 1700031F13Rik (NM_183096.2,454-472).
gctaccatgctcttcaaaa

SEQ ID NO: 808259 - DNA, 19 bp, Mus musculus
  siRNA target sequence for 1700031F13Rik (NM_183096.2,455-473).
ctaccatgctcttcaaaaa

SEQ ID NO: 808260 - DNA, 19 bp, Mus musculus
  siRNA target sequence for 1700031F13Rik (NM_183096.2,479-497).
ccaagggcccagttgatca

SEQ ID NO: 808261 - DNA, 19 bp, Mus musculus
  siRNA target sequence for 1700031F13Rik (NM_183096.2,480-498).
caagggcccagttgatcaa

SEQ ID NO: 808262 - DNA, 19 bp, Mus musculus
  siRNA target sequence for 1700031F13Rik (NM_183096.2,483-501).
gggcccagttgatcaaaga

SEQ ID NO: 808263 - DNA, 19 bp, Mus musculus
  siRNA target sequence for 1700031F13Rik (NM_183096.2,487-505).
ccagttgatcaaagagaaa

SEQ ID NO: 808264 - DNA, 19 bp, Mus musculus
  siRNA target sequence for 1700031F13Rik (NM_183096.2,566-584).
gcccacaggaactcataca

SEQ ID NO: 808265 - DNA, 19 bp, Mus musculus
  siRNA target sequence for 1700031F13Rik (NM_183096.2,567-585).
cccacaggaactcatacaa

SEQ ID NO: 808266 - DNA, 19 bp, Mus musculus
  siRNA target sequence for 1700031F13Rik (NM_183096.2,569-587).
cacaggaactcatacaaga

SEQ ID NO: 808267 - DNA, 19 bp, Mus musculus
  siRNA target sequence for 1700031F13Rik (NM_183096.2,730-748).
gccggacaagctagacaat

SEQ ID NO: 808268 - DNA, 19 bp, Mus musculus
  siRNA target sequence for 1700031F13Rik (NM_183096.2,732-750).
cggacaagctagacaattt

SEQ ID NO: 808269 - DNA, 19 bp, Mus musculus
  siRNA target sequence for 1700031F13Rik (NM_183096.2,776-794).
gctgccgagaggaaaggat

SEQ ID NO: 808270 - DNA, 19 bp, Mus musculus
  siRNA target sequence for 1700031F13Rik (NM_183096.2,829-847).
ggcctgttatttcgataat

SEQ ID NO: 808271 - DNA, 19 bp, Mus musculus
  siRNA target sequence for 1700031F13Rik (NM_183096.2,832-850).
ctgttatttcgataattct

SEQ ID NO: 808272 - DNA, 19 bp, Mus musculus
  siRNA target sequence for 1700031F13Rik (NM_183096.2,834-852).
gttatttcgataattctga

SEQ ID NO: 808273 - DNA, 19 bp, Mus musculus
  siRNA target sequence for 1700031F13Rik (NM_183096.2,861-879).
gggtgaggaatcacttcta

SEQ ID NO: 808274 - DNA, 19 bp, Mus musculus
  siRNA target sequence for 1700031F13Rik (NM_183096.2,874-892).
cttctacgaacggtgtttt

SEQ ID NO: 808275 - DNA, 19 bp, Mus musculus
  siRNA target sequence for 1700031F13Rik (NM_183096.2,877-895).
ctacgaacggtgttttaat

SEQ ID NO: 808276 - DNA, 19 bp, Mus musculus
  siRNA target sequence for 1700031F13Rik (NM_183096.2,880-898).
cgaacggtgttttaatatt

SEQ ID NO: 808277 - DNA, 19 bp, Mus musculus
  siRNA target sequence for 1700031F13Rik (NM_183096.2,946-964).
gtcacacatgggacttctt

SEQ ID NO: 808278 - DNA, 19 bp, Mus musculus
  siRNA target sequence for 1700031F13Rik (NM_183096.2,991-1009).
ggctgcagagcactatgaa

SEQ ID NO: 808279 - DNA, 19 bp, Mus musculus
  siRNA target sequence for 1700031F13Rik (NM_183096.2,996-1014).
cagagcactatgaagcatt

SEQ ID NO: 808280 - DNA, 19 bp, Mus musculus
  siRNA target sequence for 1700031F13Rik (NM_183096.2,1000-1018).
gcactatgaagcattccat

SEQ ID NO: 808281 - DNA, 19 bp, Mus musculus
  siRNA target sequence for 1700031F13Rik (NM_183096.2,1053-1071).
cgggccagcttctcaactt

SEQ ID NO: 808282 - DNA, 19 bp, Mus musculus
  siRNA target sequence for 1700031F13Rik (NM_183096.2,1088-1106).
ctcgtgaggacctacagat

SEQ ID NO: 808283 - DNA, 19 bp, Mus musculus
  siRNA target sequence for 1700031F13Rik (NM_183096.2,1145-1163).
caggccatcaaaatcctaa

SEQ ID NO: 808284 - DNA, 19 bp, Mus musculus
  siRNA target sequence for 1700031F13Rik (NM_183096.2,1405-1423).
gaagttcgtgacaattgca

SEQ ID NO: 808285 - DNA, 19 bp, Mus musculus
  siRNA target sequence for 1700031F13Rik (NM_183096.2,1464-1482).
cgatgctcggcgacatcta

SEQ ID NO: 808286 - DNA, 19 bp, Mus musculus
  siRNA target sequence for 1700031F13Rik (NM_183096.2,1468-1486).
gctcggcgacatctacaat

SEQ ID NO: 808287 - DNA, 19 bp, Mus musculus
  siRNA target sequence for 1700031F13Rik (NM_183096.2,1471-1489).
cggcgacatctacaatgaa

SEQ ID NO: 808288 - DNA, 19 bp, Mus musculus
  siRNA target sequence for 1700031F13Rik (NM_183096.2,1472-1490).
ggcgacatctacaatgaaa

SEQ ID NO: 808289 - DNA, 19 bp, Mus musculus
  siRNA target sequence for 1700031F13Rik (NM_183096.2,1473-1491).
gcgacatctacaatgaaaa

SEQ ID NO: 808290 - DNA, 19 bp, Mus musculus
  siRNA target sequence for 1700031F13Rik (NM_183096.2,1541-1559).
gcgatggagctcatgaaaa

SEQ ID NO: 808291 - DNA, 19 bp, Mus musculus
  siRNA target sequence for 1700031F13Rik (NM_183096.2,1563-1581).
cgctcatggatgaaaccaa

SEQ ID NO: 808292 - DNA, 19 bp, Mus musculus
  siRNA target sequence for 1700031F13Rik (NM_183096.2,1564-1582).
gctcatggatgaaaccaaa

SEQ ID NO: 808293 - DNA, 19 bp, Mus musculus
  siRNA target sequence for 1700031F13Rik (NM_183096.2,1599-1617).
ccagagcgcaccagatgat

SEQ ID NO: 808294 - DNA, 19 bp, Mus musculus
  siRNA target sequence for 1700031F13Rik (NM_183096.2,1702-1720).
cgagtacgacccgattcta

SEQ ID NO: 808295 - DNA, 19 bp, Mus musculus
  siRNA target sequence for 1700031F13Rik (NM_183096.2,1736-1754).
gccacagaagataacatat

SEQ ID NO: 808296 - DNA, 19 bp, Mus musculus
  siRNA target sequence for 1700031F13Rik (NM_183096.2,1785-1803).
gaaggtctccagaaaatca

SEQ ID NO: 808297 - DNA, 19 bp, Mus musculus
  siRNA target sequence for 1700067K01Rik (NM_183097.1,430-448).
ggaaggcggatgactttca

SEQ ID NO: 808298 - DNA, 19 bp, Mus musculus
  siRNA target sequence for 1700067K01Rik (NM_183097.1,431-449).
gaaggcggatgactttcaa

SEQ ID NO: 808299 - DNA, 19 bp, Mus musculus
  siRNA target sequence for 1700067K01Rik (NM_183097.1,503-521).
catgcccaccttcttaaca

SEQ ID NO: 808300 - DNA, 19 bp, Mus musculus
  siRNA target sequence for 1700067K01Rik (NM_183097.1,880-898).
cagactcccatgtggatta

SEQ ID NO: 808301 - DNA, 19 bp, Mus musculus
  siRNA target sequence for 1700067K01Rik (NM_183097.1,882-900).
gactcccatgtggattact

SEQ ID NO: 808302 - DNA, 19 bp, Mus musculus
  siRNA target sequence for 1700067K01Rik (NM_183097.1,888-906).
catgtggattactacttct

SEQ ID NO: 808303 - DNA, 19 bp, Mus musculus
  siRNA target sequence for 1700067K01Rik (NM_183097.1,891-909).
gtggattactacttcttgt

SEQ ID NO: 808304 - DNA, 19 bp, Mus musculus
  siRNA target sequence for 1700067K01Rik (NM_183097.1,899-917).
ctacttcttgtgttatcga

SEQ ID NO: 808305 - DNA, 19 bp, Mus musculus
  siRNA target sequence for 1700067K01Rik (NM_183097.1,905-923).
cttgtgttatcgagataca

SEQ ID NO: 808306 - DNA, 19 bp, Mus musculus
  siRNA target sequence for 1700067K01Rik (NM_183097.1,1023-1041).
cttgactcgtggattttgt

SEQ ID NO: 808307 - DNA, 19 bp, Mus musculus
  siRNA target sequence for 1700084P21Rik (NM_183098.1,155-173).
gcctcctcctggaccaaaa

SEQ ID NO: 808308 - DNA, 19 bp, Mus musculus
  siRNA target sequence for 1700084P21Rik (NM_183098.1,168-186).
ccaaaagatcctcttcata

SEQ ID NO: 808309 - DNA, 19 bp, Mus musculus
  siRNA target sequence for 5430414B19Rik (NM_183100.1,230-248).
ggaggaattaccaaatttt

SEQ ID NO: 808310 - DNA, 19 bp, Mus musculus
  siRNA target sequence for 5430414B19Rik (NM_183100.1,231-249).
gaggaattaccaaattttt

SEQ ID NO: 808311 - DNA, 19 bp, Mus musculus
  siRNA target sequence for 5430414B19Rik (NM_183100.1,302-320).
gcacaggatttcagttctt

SEQ ID NO: 808312 - DNA, 19 bp, Mus musculus
  siRNA target sequence for 5430414B19Rik (NM_183100.1,303-321).
cacaggatttcagttctta

SEQ ID NO: 808313 - DNA, 19 bp, Mus musculus
  siRNA target sequence for 1700092C17Rik (NM_183102.1,131-149).
catcgcctcctctgtcata

SEQ ID NO: 808314 - DNA, 19 bp, Mus musculus
  siRNA target sequence for 1700092C17Rik (NM_183102.1,134-152).
cgcctcctctgtcatattt

SEQ ID NO: 808315 - DNA, 19 bp, Mus musculus
  siRNA target sequence for 1700092C17Rik (NM_183102.1,162-180).
gttcgtcattggtttccaa

SEQ ID NO: 808316 - DNA, 19 bp, Mus musculus
  siRNA target sequence for 1700092C17Rik (NM_183102.1,166-184).
gtcattggtttccaattgt

SEQ ID NO: 808317 - DNA, 19 bp, Mus musculus
  siRNA target sequence for 1700092C17Rik (NM_183102.1,177-195).
ccaattgtgctcatcatca

SEQ ID NO: 808318 - DNA, 19 bp, Mus musculus
  siRNA target sequence for 1700092C17Rik (NM_183102.1,178-196).
caattgtgctcatcatcat

SEQ ID NO: 808319 - DNA, 19 bp, Mus musculus
  siRNA target sequence for 1700092C17Rik (NM_183102.1,264-282).
cgtggtctcaaggttaaga

SEQ ID NO: 808320 - DNA, 19 bp, Mus musculus
  siRNA target sequence for 1700092C17Rik (NM_183102.1,283-301).
ctcacgacctggaccaatt

SEQ ID NO: 808321 - DNA, 19 bp, Mus musculus
  siRNA target sequence for 4931429L15Rik (NM_183104.1,1284-1302).
ctttgtggggacaaagaga

SEQ ID NO: 808322 - DNA, 19 bp, Mus musculus
  siRNA target sequence for 4931429L15Rik (NM_183104.1,1299-1317).
gagaactgccaagtttaat

SEQ ID NO: 808323 - DNA, 19 bp, Mus musculus
  siRNA target sequence for 4931429L15Rik (NM_183104.1,1410-1428).
cttccaaggcaggttacaa

SEQ ID NO: 808324 - DNA, 19 bp, Mus musculus
  siRNA target sequence for 4931429L15Rik (NM_183104.1,1548-1566).
catgcccttgttttctgaa

SEQ ID NO: 808325 - DNA, 19 bp, Mus musculus
  siRNA target sequence for 4931429L15Rik (NM_183104.1,1618-1636).
cattctcaactgagtaaga

SEQ ID NO: 808326 - DNA, 19 bp, Mus musculus
  siRNA target sequence for 9130020K17Rik (NM_183106.1,241-259).
ggacctacagggaatacgt

SEQ ID NO: 808327 - DNA, 19 bp, Mus musculus
  siRNA target sequence for 9130020K17Rik (NM_183106.1,252-270).
gaatacgtgtactgaagaa

SEQ ID NO: 808328 - DNA, 19 bp, Mus musculus
  siRNA target sequence for 9130020K17Rik (NM_183106.1,335-353).
gcaacagagtggatcacat

SEQ ID NO: 808329 - DNA, 19 bp, Mus musculus
  siRNA target sequence for 9130020K17Rik (NM_183106.1,418-436).
ggcaagtcaggcagagaat

SEQ ID NO: 808330 - DNA, 19 bp, Mus musculus
  siRNA target sequence for 9130020K17Rik (NM_183106.1,433-451).
gaatggacaacgttaccaa

SEQ ID NO: 808331 - DNA, 19 bp, Mus musculus
  siRNA target sequence for 9130020K17Rik (NM_183106.1,540-558).
ctgatgagtgcctcaaact

SEQ ID NO: 808332 - DNA, 19 bp, Mus musculus
  siRNA target sequence for 9130020K17Rik (NM_183106.1,569-587).
gagctaactgccattgtga

SEQ ID NO: 808333 - DNA, 19 bp, Mus musculus
  siRNA target sequence for 9130020K17Rik (NM_183106.1,600-618).
cagtttcttcaaaaaacat

SEQ ID NO: 808334 - DNA, 19 bp, Mus musculus
  siRNA target sequence for 9130020K17Rik (NM_183106.1,625-643).
cacagaacacatagacttt

SEQ ID NO: 808335 - DNA, 19 bp, Mus musculus
  siRNA target sequence for 9130020K17Rik (NM_183106.1,840-858).
cccgaattgccaaggtttt

SEQ ID NO: 808336 - DNA, 19 bp, Mus musculus
  siRNA target sequence for 9130020K17Rik (NM_183106.1,1069-1087).
ggagatcgcgccacacttt

SEQ ID NO: 808337 - DNA, 19 bp, Mus musculus
  siRNA target sequence for 4930474M22Rik (NM_183107.1,89-107).
cagcggactccactgttta

SEQ ID NO: 808338 - DNA, 19 bp, Mus musculus
  siRNA target sequence for 4930474M22Rik (NM_183107.1,91-109).
gcggactccactgtttaga

SEQ ID NO: 808339 - DNA, 19 bp, Mus musculus
  siRNA target sequence for 4930474M22Rik (NM_183107.1,92-110).
cggactccactgtttagat

SEQ ID NO: 808340 - DNA, 19 bp, Mus musculus
  siRNA target sequence for 4930474M22Rik (NM_183107.1,171-189).
ggctcgcaggcactattgt

SEQ ID NO: 808341 - DNA, 19 bp, Mus musculus
  siRNA target sequence for 4930474M22Rik (NM_183107.1,336-354).
caggaaagtggcaaattct

SEQ ID NO: 808342 - DNA, 19 bp, Mus musculus
  siRNA target sequence for 4930474M22Rik (NM_183107.1,338-356).
ggaaagtggcaaattctct

SEQ ID NO: 808343 - DNA, 19 bp, Mus musculus
  siRNA target sequence for 4930479M11Rik (NM_183108.1,108-126).
cacagactccagatgaact

SEQ ID NO: 808344 - DNA, 19 bp, Mus musculus
  siRNA target sequence for 4930479M11Rik (NM_183108.1,191-209).
gggatattagccatatact

SEQ ID NO: 808345 - DNA, 19 bp, Mus musculus
  siRNA target sequence for 4930479M11Rik (NM_183108.1,254-272).
gacgcctaccggaactcat

SEQ ID NO: 808346 - DNA, 19 bp, Mus musculus
  siRNA target sequence for 4930479M11Rik (NM_183108.1,264-282).
ggaactcatctcgaactat

SEQ ID NO: 808347 - DNA, 19 bp, Mus musculus
  siRNA target sequence for 4930479M11Rik (NM_183108.1,273-291).
ctcgaactatgtggtttaa

SEQ ID NO: 808348 - DNA, 19 bp, Mus musculus
  siRNA target sequence for 4930479M11Rik (NM_183108.1,275-293).
cgaactatgtggtttaata

SEQ ID NO: 808349 - DNA, 19 bp, Mus musculus
  siRNA target sequence for 4930479M11Rik (NM_183108.1,310-328).
ctttgtaggcatcatttat

SEQ ID NO: 808350 - DNA, 19 bp, Mus musculus
  siRNA target sequence for 4930543L23Rik (NM_183110.1,304-322).
cctcacttcttagaaagat

SEQ ID NO: 808351 - DNA, 19 bp, Mus musculus
  siRNA target sequence for 4930543L23Rik (NM_183110.1,320-338).
gatttcgctggctgttgtt

SEQ ID NO: 808352 - DNA, 19 bp, Mus musculus
  siRNA target sequence for 4930543L23Rik (NM_183110.1,590-608).
ccacaacctcactaagtga

SEQ ID NO: 808353 - DNA, 19 bp, Mus musculus
  siRNA target sequence for 4930543L23Rik (NM_183110.1,609-627).
gccttcacagcctgtttgt

SEQ ID NO: 808354 - DNA, 19 bp, Mus musculus
  siRNA target sequence for 4930543L23Rik (NM_183110.1,610-628).
ccttcacagcctgtttgta

SEQ ID NO: 808355 - DNA, 19 bp, Mus musculus
  siRNA target sequence for 4930543L23Rik (NM_183110.1,626-644).
gtatcgccccagaaaggat

SEQ ID NO: 808356 - DNA, 19 bp, Mus musculus
  siRNA target sequence for 4930543L23Rik (NM_183110.1,642-660).
gatgtttggaccaatcaca

SEQ ID NO: 808357 - DNA, 19 bp, Mus musculus
  siRNA target sequence for 4930543L23Rik (NM_183110.1,668-686).
ctatcggcaaccttcgtaa

SEQ ID NO: 808358 - DNA, 19 bp, Mus musculus
  siRNA target sequence for 4930543L23Rik (NM_183110.1,673-691).
ggcaaccttcgtaatgact

SEQ ID NO: 808359 - DNA, 19 bp, Mus musculus
  siRNA target sequence for 1700021K07Rik (NM_183112.1,78-96).
gtctcttccttttttacct

SEQ ID NO: 808360 - DNA, 19 bp, Mus musculus
  siRNA target sequence for 1700021K07Rik (NM_183112.1,294-312).
ccaacatggctgactatta

SEQ ID NO: 808361 - DNA, 19 bp, Mus musculus
  siRNA target sequence for 1700021K07Rik (NM_183112.1,298-316).
catggctgactattactat

SEQ ID NO: 808362 - DNA, 19 bp, Mus musculus
  siRNA target sequence for 1700021K07Rik (NM_183112.1,303-321).
ctgactattactatgatgt

SEQ ID NO: 808363 - DNA, 19 bp, Mus musculus
  siRNA target sequence for 4932414N04Rik (NM_183113.1,1334-1352).
gtacgcggatgctatggat

SEQ ID NO: 808364 - DNA, 19 bp, Mus musculus
  siRNA target sequence for 4932414N04Rik (NM_183113.1,1372-1390).
cactctctgaggattatga

SEQ ID NO: 808365 - DNA, 19 bp, Mus musculus
  siRNA target sequence for 4932414N04Rik (NM_183113.1,1395-1413).
cctgattatgacaatatat

SEQ ID NO: 808366 - DNA, 19 bp, Mus musculus
  siRNA target sequence for 4932414N04Rik (NM_183113.1,1418-1436).
gatagttgaccaacttcaa

SEQ ID NO: 808367 - DNA, 19 bp, Mus musculus
  siRNA target sequence for 4932414N04Rik (NM_183113.1,1427-1445).
ccaacttcaaatgaactat

SEQ ID NO: 808368 - DNA, 19 bp, Mus musculus
  siRNA target sequence for 4932414N04Rik (NM_183113.1,1456-1474).
gaaaaccattggaaatcca

SEQ ID NO: 808369 - DNA, 19 bp, Mus musculus
  siRNA target sequence for 4932414N04Rik (NM_183113.1,1473-1491).
caggatgcggttcattcat

SEQ ID NO: 808370 - DNA, 19 bp, Mus musculus
  siRNA target sequence for 4932414N04Rik (NM_183113.1,1480-1498).
cggttcattcatataaaat

SEQ ID NO: 808371 - DNA, 19 bp, Mus musculus
  siRNA target sequence for 4932414N04Rik (NM_183113.1,1499-1517).
gatagtagagcgtaaccaa

SEQ ID NO: 808372 - DNA, 19 bp, Mus musculus
  siRNA target sequence for 4932414N04Rik (NM_183113.1,1506-1524).
gagcgtaaccaaaatcact

SEQ ID NO: 808373 - DNA, 19 bp, Mus musculus
  siRNA target sequence for 4932414N04Rik (NM_183113.1,1523-1541).
ctcggaattgcttatcgaa

SEQ ID NO: 808374 - DNA, 19 bp, Mus musculus
  siRNA target sequence for 4932414N04Rik (NM_183113.1,1525-1543).
cggaattgcttatcgaaaa

SEQ ID NO: 808375 - DNA, 19 bp, Mus musculus
  siRNA target sequence for 4932414N04Rik (NM_183113.1,1526-1544).
ggaattgcttatcgaaaaa

SEQ ID NO: 808376 - DNA, 19 bp, Mus musculus
  siRNA target sequence for 4932414N04Rik (NM_183113.1,1527-1545).
gaattgcttatcgaaaaaa

SEQ ID NO: 808377 - DNA, 19 bp, Mus musculus
  siRNA target sequence for 4932414N04Rik (NM_183113.1,1699-1717).
ctgatggttggtatgaaga

SEQ ID NO: 808378 - DNA, 19 bp, Mus musculus
  siRNA target sequence for 4932414N04Rik (NM_183113.1,1783-1801).
gccttagagcacaggatat

SEQ ID NO: 808379 - DNA, 19 bp, Mus musculus
  siRNA target sequence for 4932414N04Rik (NM_183113.1,1888-1906).
cgaagggacacctgcaaaa

SEQ ID NO: 808380 - DNA, 19 bp, Mus musculus
  siRNA target sequence for 4932414N04Rik (NM_183113.1,1898-1916).
cctgcaaaaggttgaacat

SEQ ID NO: 808381 - DNA, 19 bp, Mus musculus
  siRNA target sequence for 4932414N04Rik (NM_183113.1,1908-1926).
gttgaacatgaagttttca

SEQ ID NO: 808382 - DNA, 19 bp, Mus musculus
  siRNA target sequence for 4932414N04Rik (NM_183113.1,1928-1946).
gttagtagaaaccatcaaa

SEQ ID NO: 808383 - DNA, 19 bp, Mus musculus
  siRNA target sequence for 4932414N04Rik (NM_183113.1,2037-2055).
cgagatttctttaatgctt

SEQ ID NO: 808384 - DNA, 19 bp, Mus musculus
  siRNA target sequence for 4932414N04Rik (NM_183113.1,2184-2202).
cttcatcagtcacataagt

SEQ ID NO: 808385 - DNA, 19 bp, Mus musculus
  siRNA target sequence for 4932414N04Rik (NM_183113.1,2187-2205).
catcagtcacataagttga

SEQ ID NO: 808386 - DNA, 19 bp, Mus musculus
  siRNA target sequence for 4932414N04Rik (NM_183113.1,2208-2226).
gagactgaatcgaagatga

SEQ ID NO: 808387 - DNA, 19 bp, Mus musculus
  siRNA target sequence for 4932414N04Rik (NM_183113.1,2262-2280).
cacaacactgcattactaa

SEQ ID NO: 808388 - DNA, 19 bp, Mus musculus
  siRNA target sequence for 4932414N04Rik (NM_183113.1,2325-2343).
cgatcgaaaagcctcttta

SEQ ID NO: 808389 - DNA, 19 bp, Mus musculus
  siRNA target sequence for 4932414N04Rik (NM_183113.1,2374-2392).
gcccacagcccgcaaatca

SEQ ID NO: 808390 - DNA, 19 bp, Mus musculus
  siRNA target sequence for 4932414N04Rik (NM_183113.1,2382-2400).
cccgcaaatcagtccataa

SEQ ID NO: 808391 - DNA, 19 bp, Mus musculus
  siRNA target sequence for 4932414N04Rik (NM_183113.1,2383-2401).
ccgcaaatcagtccataat

SEQ ID NO: 808392 - DNA, 19 bp, Mus musculus
  siRNA target sequence for 4932414N04Rik (NM_183113.1,2384-2402).
cgcaaatcagtccataata

SEQ ID NO: 808393 - DNA, 19 bp, Mus musculus
  siRNA target sequence for 4932414N04Rik (NM_183113.1,2416-2434).
cgcctgcggatgacaatga

SEQ ID NO: 808394 - DNA, 19 bp, Mus musculus
  siRNA target sequence for 4932414N04Rik (NM_183113.1,2417-2435).
gcctgcggatgacaatgaa

SEQ ID NO: 808395 - DNA, 19 bp, Mus musculus
  siRNA target sequence for 4932414N04Rik (NM_183113.1,2451-2469).
ctcaccaagtcgattctgt

SEQ ID NO: 808396 - DNA, 19 bp, Mus musculus
  siRNA target sequence for 4932414N04Rik (NM_183113.1,2608-2626).
caaacaccaggcaatttga

SEQ ID NO: 808397 - DNA, 19 bp, Mus musculus
  siRNA target sequence for 4932414N04Rik (NM_183113.1,2630-2648).
gaatactccagttgatgaa

SEQ ID NO: 808398 - DNA, 19 bp, Mus musculus
  siRNA target sequence for 4932414N04Rik (NM_183113.1,2649-2667).
ccacaacatgagataataa

SEQ ID NO: 808399 - DNA, 19 bp, Mus musculus
  siRNA target sequence for 4932414N04Rik (NM_183113.1,2697-2715).
ccagggaaccacaatacct

SEQ ID NO: 808400 - DNA, 19 bp, Mus musculus
  siRNA target sequence for 4932414N04Rik (NM_183113.1,2698-2716).
cagggaaccacaatacctt

SEQ ID NO: 808401 - DNA, 19 bp, Mus musculus
  siRNA target sequence for 4932414N04Rik (NM_183113.1,2706-2724).
cacaataccttgatcataa

SEQ ID NO: 808402 - DNA, 19 bp, Mus musculus
  siRNA target sequence for 4932414N04Rik (NM_183113.1,2727-2745).
ccatgggaatacagatgta

SEQ ID NO: 808403 - DNA, 19 bp, Mus musculus
  siRNA target sequence for 4932414N04Rik (NM_183113.1,2799-2817).
gctgaacccgaacagtata

SEQ ID NO: 808404 - DNA, 19 bp, Mus musculus
  siRNA target sequence for 4932414N04Rik (NM_183113.1,2800-2818).
ctgaacccgaacagtataa

SEQ ID NO: 808405 - DNA, 19 bp, Mus musculus
  siRNA target sequence for 4932414N04Rik (NM_183113.1,2827-2845).
gtctagaatgggtaccaat

SEQ ID NO: 808406 - DNA, 19 bp, Mus musculus
  siRNA target sequence for 4932414N04Rik (NM_183113.1,2846-2864).
cacacgttcaccatctcaa

SEQ ID NO: 808407 - DNA, 19 bp, Mus musculus
  siRNA target sequence for 4932414N04Rik (NM_183113.1,2856-2874).
ccatctcaaggacaactaa

SEQ ID NO: 808408 - DNA, 19 bp, Mus musculus
  siRNA target sequence for 4932414N04Rik (NM_183113.1,2895-2913).
gggcccataagaaagaact

SEQ ID NO: 808409 - DNA, 19 bp, Mus musculus
  siRNA target sequence for 4932414N04Rik (NM_183113.1,2896-2914).
ggcccataagaaagaactt

SEQ ID NO: 808410 - DNA, 19 bp, Mus musculus
  siRNA target sequence for 4932414N04Rik (NM_183113.1,2980-2998).
gatctggacagctctacaa

SEQ ID NO: 808411 - DNA, 19 bp, Mus musculus
  siRNA target sequence for 4932414N04Rik (NM_183113.1,3086-3104).
cccaaacagggtaagagaa

SEQ ID NO: 808412 - DNA, 19 bp, Mus musculus
  siRNA target sequence for 4932414N04Rik (NM_183113.1,3105-3123).
gaaaatcagcaaacttctt

SEQ ID NO: 808413 - DNA, 19 bp, Mus musculus
  siRNA target sequence for 4932414N04Rik (NM_183113.1,3128-3146).
caaagtaggacaccataat

SEQ ID NO: 808414 - DNA, 19 bp, Mus musculus
  siRNA target sequence for 4932414N04Rik (NM_183113.1,3223-3241).
cgtgtaaagcagaaccaaa

SEQ ID NO: 808415 - DNA, 19 bp, Mus musculus
  siRNA target sequence for 4932414N04Rik (NM_183113.1,3254-3272).
gccacatcctgaaaggata

SEQ ID NO: 808416 - DNA, 19 bp, Mus musculus
  siRNA target sequence for 4932414N04Rik (NM_183113.1,3264-3282).
gaaaggatacagatgacaa

SEQ ID NO: 808417 - DNA, 19 bp, Mus musculus
  siRNA target sequence for 4932414N04Rik (NM_183113.1,3273-3291).
cagatgacaagcccattaa

SEQ ID NO: 808418 - DNA, 19 bp, Mus musculus
  siRNA target sequence for 4932414N04Rik (NM_183113.1,3275-3293).
gatgacaagcccattaact

SEQ ID NO: 808419 - DNA, 19 bp, Mus musculus
  siRNA target sequence for 4932414N04Rik (NM_183113.1,3280-3298).
caagcccattaacttatga

SEQ ID NO: 808420 - DNA, 19 bp, Mus musculus
  siRNA target sequence for 4932414N04Rik (NM_183113.1,3425-3443).
gtgctgcaacagtttggaa

SEQ ID NO: 808421 - DNA, 19 bp, Mus musculus
  siRNA target sequence for 4932414N04Rik (NM_183113.1,3441-3459).
gaacacagcagaagtttca

SEQ ID NO: 808422 - DNA, 19 bp, Mus musculus
  siRNA target sequence for 4930566N20Rik (NM_183114.1,293-311).
gatcgtgtctagtatttct

SEQ ID NO: 808423 - DNA, 19 bp, Mus musculus
  siRNA target sequence for 4930566N20Rik (NM_183114.1,343-361).
cttatcacatgtttggaaa

SEQ ID NO: 808424 - DNA, 19 bp, Mus musculus
  siRNA target sequence for 4930566N20Rik (NM_183114.1,348-366).
cacatgtttggaaatcatt

SEQ ID NO: 808425 - DNA, 19 bp, Mus musculus
  siRNA target sequence for 4930566N20Rik (NM_183114.1,426-444).
ctatctagaacgactttaa

SEQ ID NO: 808426 - DNA, 19 bp, Mus musculus
  siRNA target sequence for 5830436D01Rik (NM_183115.1,590-608).
ccttgcagtgggaaatgga

SEQ ID NO: 808427 - DNA, 19 bp, Mus musculus
  siRNA target sequence for 5830436D01Rik (NM_183115.1,607-625).
gaatttgatcaggatagat

SEQ ID NO: 808428 - DNA, 19 bp, Mus musculus
  siRNA target sequence for 5830436D01Rik (NM_183115.1,726-744).
gatgctaaagtctaagaat

SEQ ID NO: 808429 - DNA, 19 bp, Mus musculus
  siRNA target sequence for 5830436D01Rik (NM_183115.1,772-790).
gccctcgccatgcttgata

SEQ ID NO: 808430 - DNA, 19 bp, Mus musculus
  siRNA target sequence for 5830436D01Rik (NM_183115.1,773-791).
ccctcgccatgcttgatat

SEQ ID NO: 808431 - DNA, 19 bp, Mus musculus
  siRNA target sequence for 5830436D01Rik (NM_183115.1,775-793).
ctcgccatgcttgatatca

SEQ ID NO: 808432 - DNA, 19 bp, Mus musculus
  siRNA target sequence for 5830436D01Rik (NM_183115.1,896-914).
cctgttcttgtgccaaaat

SEQ ID NO: 808433 - DNA, 19 bp, Mus musculus
  siRNA target sequence for 5830436D01Rik (NM_183115.1,926-944).
ctcggaaactggttcttca

SEQ ID NO: 808434 - DNA, 19 bp, Mus musculus
  siRNA target sequence for 5830436D01Rik (NM_183115.1,946-964).
ctcagacatgagttggaaa

SEQ ID NO: 808435 - DNA, 19 bp, Mus musculus
  siRNA target sequence for 5830436D01Rik (NM_183115.1,1007-1025).
cattcaggattgcttttga

SEQ ID NO: 808436 - DNA, 19 bp, Mus musculus
  siRNA target sequence for 5830436D01Rik (NM_183115.1,1090-1108).
gcggcaacgtggatcaaca

SEQ ID NO: 808437 - DNA, 19 bp, Mus musculus
  siRNA target sequence for 5830436D01Rik (NM_183115.1,1117-1135).
caggcagacgatgttgaat

SEQ ID NO: 808438 - DNA, 19 bp, Mus musculus
  siRNA target sequence for 9430019C24Rik (NM_183122.1,339-357).
caccactgagctatgctat

SEQ ID NO: 808439 - DNA, 19 bp, Mus musculus
  siRNA target sequence for 9430019C24Rik (NM_183122.1,360-378).
cccttctaccacctttcta

SEQ ID NO: 808440 - DNA, 19 bp, Mus musculus
  siRNA target sequence for 9530002K18Rik (NM_183123.1,227-245).
gcagatgatagaaatacat

SEQ ID NO: 808441 - DNA, 19 bp, Mus musculus
  siRNA target sequence for 9530002K18Rik (NM_183123.1,262-280).
cttctgcatagaaaaagta

SEQ ID NO: 808442 - DNA, 19 bp, Mus musculus
  siRNA target sequence for 9530002K18Rik (NM_183123.1,278-296).
gtagtggaaaaacttaaat

SEQ ID NO: 808443 - DNA, 19 bp, Mus musculus
  siRNA target sequence for 9230102D03Rik (NM_183124.1,118-136).
gaagtcatattgacatcaa

SEQ ID NO: 808444 - DNA, 19 bp, Mus musculus
  siRNA target sequence for 9230102D03Rik (NM_183124.1,162-180).
gtgcgaggaatgtgtaaga

SEQ ID NO: 808445 - DNA, 19 bp, Mus musculus
  siRNA target sequence for 9230102D03Rik (NM_183124.1,189-207).
gatattgatgagtatgatt

SEQ ID NO: 808446 - DNA, 19 bp, Mus musculus
  siRNA target sequence for 9230102D03Rik (NM_183124.1,200-218).
gtatgattatggatactgt

SEQ ID NO: 808447 - DNA, 19 bp, Mus musculus
  siRNA target sequence for 6030498E09Rik (NM_183126.1,104-122).
gagatcccgcttctataca

SEQ ID NO: 808448 - DNA, 19 bp, Mus musculus
  siRNA target sequence for 6030498E09Rik (NM_183126.1,109-127).
cccgcttctatacatctaa

SEQ ID NO: 808449 - DNA, 19 bp, Mus musculus
  siRNA target sequence for 6030498E09Rik (NM_183126.1,110-128).
ccgcttctatacatctaat

SEQ ID NO: 808450 - DNA, 19 bp, Mus musculus
  siRNA target sequence for 6030498E09Rik (NM_183126.1,193-211).
gcctctgtctgtatactat

SEQ ID NO: 808451 - DNA, 19 bp, Mus musculus
  siRNA target sequence for 6030498E09Rik (NM_183126.1,270-288).
ggcttgggcctgggtttaa

SEQ ID NO: 808452 - DNA, 19 bp, Mus musculus
  siRNA target sequence for 6030498E09Rik (NM_183126.1,271-289).
gcttgggcctgggtttaaa

SEQ ID NO: 808453 - DNA, 19 bp, Mus musculus
  siRNA target sequence for 6030498E09Rik (NM_183126.1,395-413).
ccaggtgtcaactgacaat

SEQ ID NO: 808454 - DNA, 19 bp, Mus musculus
  siRNA target sequence for 6030498E09Rik (NM_183126.1,398-416).
ggtgtcaactgacaatgtt

SEQ ID NO: 808455 - DNA, 19 bp, Mus musculus
  siRNA target sequence for 6030498E09Rik (NM_183126.1,429-447).
gattctgtgggatctatca

SEQ ID NO: 808456 - DNA, 19 bp, Mus musculus
  siRNA target sequence for 6030498E09Rik (NM_183126.1,483-501).
gatataagggcaatcagta

SEQ ID NO: 808457 - DNA, 19 bp, Mus musculus
  siRNA target sequence for 6030498E09Rik (NM_183126.1,515-533).
caattgggaggatatacat

SEQ ID NO: 808458 - DNA, 19 bp, Mus musculus
  siRNA target sequence for 6030498E09Rik (NM_183126.1,524-542).
ggatatacatgaaattgct

SEQ ID NO: 808459 - DNA, 19 bp, Mus musculus
  siRNA target sequence for 9230118O15Rik (NM_183127.1,232-250).
gtccagcttcaggagtttt

SEQ ID NO: 808460 - DNA, 19 bp, Mus musculus
  siRNA target sequence for 9230118O15Rik (NM_183127.1,426-444).
ggaggctgcgctctttact

SEQ ID NO: 808461 - DNA, 19 bp, Mus musculus
  siRNA target sequence for 4930451E10Rik (NM_183130.1,109-127).
ccaccggagtcattgcttt

SEQ ID NO: 808462 - DNA, 19 bp, Mus musculus
  siRNA target sequence for 4930451E10Rik (NM_183130.1,144-162).
ggaggcctcacctaagtct

SEQ ID NO: 808463 - DNA, 19 bp, Mus musculus
  siRNA target sequence for 4930451I11Rik (NM_183131.1,103-121).
ccagaccccagcaagttgt

SEQ ID NO: 808464 - DNA, 19 bp, Mus musculus
  siRNA target sequence for 4930451I11Rik (NM_183131.1,104-122).
cagaccccagcaagttgta

SEQ ID NO: 808465 - DNA, 19 bp, Mus musculus
  siRNA target sequence for 4930451I11Rik (NM_183131.1,106-124).
gaccccagcaagttgtaaa

SEQ ID NO: 808466 - DNA, 19 bp, Mus musculus
  siRNA target sequence for 4930451I11Rik (NM_183131.1,108-126).
ccccagcaagttgtaaaca

SEQ ID NO: 808467 - DNA, 19 bp, Mus musculus
  siRNA target sequence for 4930451I11Rik (NM_183131.1,117-135).
gttgtaaacaggcttttct

SEQ ID NO: 808468 - DNA, 19 bp, Mus musculus
  siRNA target sequence for 4930451I11Rik (NM_183131.1,189-207).
ggagagaagcctataacgt

SEQ ID NO: 808469 - DNA, 19 bp, Mus musculus
  siRNA target sequence for 4930451I11Rik (NM_183131.1,190-208).
gagagaagcctataacgtt

SEQ ID NO: 808470 - DNA, 19 bp, Mus musculus
  siRNA target sequence for 4930451I11Rik (NM_183131.1,198-216).
cctataacgttcgttaaga

SEQ ID NO: 808471 - DNA, 19 bp, Mus musculus
  siRNA target sequence for 4930451I11Rik (NM_183131.1,245-263).
catcctggtggggacatta

SEQ ID NO: 808472 - DNA, 19 bp, Mus musculus
  siRNA target sequence for 5330439M10Rik (NM_183132.1,94-112).
gcgccactaggcatttcca

SEQ ID NO: 808473 - DNA, 19 bp, Mus musculus
  siRNA target sequence for 5330439M10Rik (NM_183132.1,126-144).
ggcacagctcccaagacat

SEQ ID NO: 808474 - DNA, 19 bp, Mus musculus
  siRNA target sequence for 2410011O22Rik (NM_183133.1,77-95).
gggacagctgcttggttat

SEQ ID NO: 808475 - DNA, 19 bp, Mus musculus
  siRNA target sequence for 2410011O22Rik (NM_183133.1,113-131).
cagtgacttaggcttcttt

SEQ ID NO: 808476 - DNA, 19 bp, Mus musculus
  siRNA target sequence for 2410011O22Rik (NM_183133.1,190-208).
ggcaggctgtactgaacaa

SEQ ID NO: 808477 - DNA, 19 bp, Mus musculus
  siRNA target sequence for 2410011O22Rik (NM_183133.1,251-269).
gtgggatttcctgaactat

SEQ ID NO: 808478 - DNA, 19 bp, Mus musculus
  siRNA target sequence for 2410011O22Rik (NM_183133.1,253-271).
gggatttcctgaactatca

SEQ ID NO: 808479 - DNA, 19 bp, Mus musculus
  siRNA target sequence for 2410011O22Rik (NM_183133.1,280-298).
ctcgtatccgggatcgtat

SEQ ID NO: 808480 - DNA, 19 bp, Mus musculus
  siRNA target sequence for 2410011O22Rik (NM_183133.1,282-300).
cgtatccgggatcgtataa

SEQ ID NO: 808481 - DNA, 19 bp, Mus musculus
  siRNA target sequence for 2410011O22Rik (NM_183133.1,311-329).
gatcaacatacgtgaattt

SEQ ID NO: 808482 - DNA, 19 bp, Mus musculus
  siRNA target sequence for 2410011O22Rik (NM_183133.1,314-332).
caacatacgtgaatttcca

SEQ ID NO: 808483 - DNA, 19 bp, Mus musculus
  siRNA target sequence for 2410011O22Rik (NM_183133.1,371-389).
gctgctgctcagattcact

SEQ ID NO: 808484 - DNA, 19 bp, Mus musculus
  siRNA target sequence for C630041L24Rik (NM_183136.1,214-232).
gaccggggagcttctacaa

SEQ ID NO: 808485 - DNA, 19 bp, Mus musculus
  siRNA target sequence for C630041L24Rik (NM_183136.1,242-260).
gccttgtgcatcaagaata

SEQ ID NO: 808486 - DNA, 19 bp, Mus musculus
  siRNA target sequence for C630041L24Rik (NM_183136.1,243-261).
ccttgtgcatcaagaatat

SEQ ID NO: 808487 - DNA, 19 bp, Mus musculus
  siRNA target sequence for C630041L24Rik (NM_183136.1,253-271).
caagaatatacagttatgt

SEQ ID NO: 808488 - DNA, 19 bp, Mus musculus
  siRNA target sequence for C630041L24Rik (NM_183136.1,263-281).
cagttatgttggatactta

SEQ ID NO: 808489 - DNA, 19 bp, Mus musculus
  siRNA target sequence for C630041L24Rik (NM_183136.1,292-310).
ggtcagtgagcctatatgt

SEQ ID NO: 808490 - DNA, 19 bp, Mus musculus
  siRNA target sequence for C630041L24Rik (NM_183136.1,347-365).
ctctgctccggaattctga

SEQ ID NO: 808491 - DNA, 19 bp, Mus musculus
  siRNA target sequence for C630041L24Rik (NM_183136.1,383-401).
ctgaacactgataaaagtt

SEQ ID NO: 808492 - DNA, 19 bp, Mus musculus
  siRNA target sequence for 2410002I01Rik (NM_183137.1,57-75).
cgcttgagcttcttgcata

SEQ ID NO: 808493 - DNA, 19 bp, Mus musculus
  siRNA target sequence for 2410002I01Rik (NM_183137.1,97-115).
ggacctcagatgatagcat

SEQ ID NO: 808494 - DNA, 19 bp, Mus musculus
  siRNA target sequence for 2410002I01Rik (NM_183137.1,124-142).
caggctacctgtttgaaga

SEQ ID NO: 808495 - DNA, 19 bp, Mus musculus
  siRNA target sequence for 2410002I01Rik (NM_183137.1,138-156).
gaagagatcgccaagattt

SEQ ID NO: 808496 - DNA, 19 bp, Mus musculus
  siRNA target sequence for 2410002I01Rik (NM_183137.1,354-372).
gatcctcttcacggaaata

SEQ ID NO: 808497 - DNA, 19 bp, Mus musculus
  siRNA target sequence for 2410002I01Rik (NM_183137.1,357-375).
cctcttcacggaaatagct

SEQ ID NO: 808498 - DNA, 19 bp, Mus musculus
  siRNA target sequence for 2410002I01Rik (NM_183137.1,358-376).
ctcttcacggaaatagctt

SEQ ID NO: 808499 - DNA, 19 bp, Mus musculus
  siRNA target sequence for 2410002I01Rik (NM_183137.1,617-635).
gcgtcctggacctgataat

SEQ ID NO: 808500 - DNA, 19 bp, Mus musculus
  siRNA target sequence for 2410002I01Rik (NM_183137.1,621-639).
cctggacctgataatcctt

SEQ ID NO: 808501 - DNA, 19 bp, Mus musculus
  siRNA target sequence for 2410002I01Rik (NM_183137.1,712-730).
ccaaccctgggaatctact

SEQ ID NO: 808502 - DNA, 19 bp, Mus musculus
  siRNA target sequence for 2410002I01Rik (NM_183137.1,813-831).
cctagttcccagaattcct

SEQ ID NO: 808503 - DNA, 19 bp, Mus musculus
  siRNA target sequence for D230004J03 (NM_183138.1,170-188).
cttcaacggctgcaaatat

SEQ ID NO: 808504 - DNA, 19 bp, Mus musculus
  siRNA target sequence for D230004J03 (NM_183138.1,196-214).
gcaagacgccacgaaagtt

SEQ ID NO: 808505 - DNA, 19 bp, Mus musculus
  siRNA target sequence for D230004J03 (NM_183138.1,215-233).
ccgcctcacgggagacaat

SEQ ID NO: 808506 - DNA, 19 bp, Mus musculus
  siRNA target sequence for D230004J03 (NM_183138.1,248-266).
ggtgctccggaatagcttt

SEQ ID NO: 808507 - DNA, 19 bp, Mus musculus
  siRNA target sequence for D230004J03 (NM_183138.1,309-327).
gcaccccaggcctatcaga

SEQ ID NO: 808508 - DNA, 19 bp, Mus musculus
  siRNA target sequence for D230004J03 (NM_183138.1,429-447).
gcccacaaggaccaacata

SEQ ID NO: 808509 - DNA, 19 bp, Mus musculus
  siRNA target sequence for D230004J03 (NM_183138.1,440-458).
ccaacataacctctacaat

SEQ ID NO: 808510 - DNA, 19 bp, Mus musculus
  siRNA target sequence for D230004J03 (NM_183138.1,748-766).
gcacgccagagaagatcaa

SEQ ID NO: 808511 - DNA, 19 bp, Mus musculus
  siRNA target sequence for 6430544H17 (NM_183140.1,895-913).
gtggatggctcaaaggatt

SEQ ID NO: 808512 - DNA, 19 bp, Mus musculus
  siRNA target sequence for 6430544H17 (NM_183140.1,1317-1335).
gccctaccgctgtgacatt

SEQ ID NO: 808513 - DNA, 19 bp, Mus musculus
  siRNA target sequence for 6430544H17 (NM_183140.1,1393-1411).
gagccagccccttacatct

SEQ ID NO: 808514 - DNA, 19 bp, Mus musculus
  siRNA target sequence for 6430544H17 (NM_183140.1,1510-1528).
cggactttcagtgatatct

SEQ ID NO: 808515 - DNA, 19 bp, Mus musculus
  siRNA target sequence for 6430544H17 (NM_183140.1,1518-1536).
cagtgatatctccaacttt

SEQ ID NO: 808516 - DNA, 19 bp, Mus musculus
  siRNA target sequence for 6430544H17 (NM_183140.1,1620-1638).
catccgacaccagaaaaca

SEQ ID NO: 808517 - DNA, 19 bp, Mus musculus
  siRNA target sequence for 6430544H17 (NM_183140.1,1654-1672).
gatgagaaggattttagct

SEQ ID NO: 808518 - DNA, 19 bp, Mus musculus
  siRNA target sequence for 6330514E13 (NM_183141.1,287-305).
gacctgcggctcaatgaaa

SEQ ID NO: 808519 - DNA, 19 bp, Mus musculus
  siRNA target sequence for 6330514E13 (NM_183141.1,290-308).
ctgcggctcaatgaaaaca

SEQ ID NO: 808520 - DNA, 19 bp, Mus musculus
  siRNA target sequence for 6330514E13 (NM_183141.1,311-329).
ctcaaggccgtgctctatt

SEQ ID NO: 808521 - DNA, 19 bp, Mus musculus
  siRNA target sequence for 6330514E13 (NM_183141.1,705-723).
cctggcttgtggtcttcaa

SEQ ID NO: 808522 - DNA, 19 bp, Mus musculus
  siRNA target sequence for 6330514E13 (NM_183141.1,709-727).
gcttgtggtcttcaacaat

SEQ ID NO: 808523 - DNA, 19 bp, Mus musculus
  siRNA target sequence for 6330514E13 (NM_183141.1,724-742).
caatgtcaccaagaactat

SEQ ID NO: 808524 - DNA, 19 bp, Mus musculus
  siRNA target sequence for 6330514E13 (NM_183141.1,922-940).
cgagaactcaggcttcaat

SEQ ID NO: 808525 - DNA, 19 bp, Mus musculus
  siRNA target sequence for 6330514E13 (NM_183141.1,1035-1053).
cggccaccctggttgtcat

SEQ ID NO: 808526 - DNA, 19 bp, Mus musculus
  siRNA target sequence for 6330514E13 (NM_183141.1,1063-1081).
cccttacagcaagatgtat

SEQ ID NO: 808527 - DNA, 19 bp, Mus musculus
  siRNA target sequence for 6330514E13 (NM_183141.1,1065-1083).
cttacagcaagatgtatgt

SEQ ID NO: 808528 - DNA, 19 bp, Mus musculus
  siRNA target sequence for 6330514E13 (NM_183141.1,1082-1100).
gttctggtccagtacaaca

SEQ ID NO: 808529 - DNA, 19 bp, Mus musculus
  siRNA target sequence for 6330514E13 (NM_183141.1,1085-1103).
ctggtccagtacaacaata

SEQ ID NO: 808530 - DNA, 19 bp, Mus musculus
  siRNA target sequence for 6330514E13 (NM_183141.1,1088-1106).
gtccagtacaacaatagct

SEQ ID NO: 808531 - DNA, 19 bp, Mus musculus
  siRNA target sequence for 6330514E13 (NM_183141.1,1396-1414).
gcagaagtccgtcaatgtt

SEQ ID NO: 808532 - DNA, 19 bp, Mus musculus
  siRNA target sequence for 6330514E13 (NM_183141.1,1406-1424).
gtcaatgttaagaagacta

SEQ ID NO: 808533 - DNA, 19 bp, Mus musculus
  siRNA target sequence for 6330514E13 (NM_183141.1,1450-1468).
cgtggatgccggttccata

SEQ ID NO: 808534 - DNA, 19 bp, Mus musculus
  siRNA target sequence for 6330514E13 (NM_183141.1,1505-1523).
ctgcccgtggccagaatgt

SEQ ID NO: 808535 - DNA, 19 bp, Mus musculus
  siRNA target sequence for 6330514E13 (NM_183141.1,1601-1619).
gctaccaaaggcaactata

SEQ ID NO: 808536 - DNA, 19 bp, Mus musculus
  siRNA target sequence for 6330514E13 (NM_183141.1,1605-1623).
ccaaaggcaactatattga

SEQ ID NO: 808537 - DNA, 19 bp, Mus musculus
  siRNA target sequence for 6330514E13 (NM_183141.1,1670-1688).
gagcttccagaaatcgaaa

SEQ ID NO: 808538 - DNA, 19 bp, Mus musculus
  siRNA target sequence for 6330514E13 (NM_183141.1,2095-2113).
gagcgactccaagtacatt

SEQ ID NO: 808539 - DNA, 19 bp, Mus musculus
  siRNA target sequence for 6330514E13 (NM_183141.1,2097-2115).
gcgactccaagtacattga

SEQ ID NO: 808540 - DNA, 19 bp, Mus musculus
  siRNA target sequence for 6330514E13 (NM_183141.1,2253-2271).
gcttccccgctctctacta

SEQ ID NO: 808541 - DNA, 19 bp, Mus musculus
  siRNA target sequence for 6330514E13 (NM_183141.1,2459-2477).
catcgcgaggaggtataca

SEQ ID NO: 808542 - DNA, 19 bp, Mus musculus
  siRNA target sequence for LOC210321 (NM_183143.1,156-174).
gaggtggagttagaaaact

SEQ ID NO: 808543 - DNA, 19 bp, Mus musculus
  siRNA target sequence for LOC210321 (NM_183143.1,192-210).
gacctgttcctgttcaagt

SEQ ID NO: 808544 - DNA, 19 bp, Mus musculus
  siRNA target sequence for LOC210321 (NM_183143.1,260-278).
cggccaaggagagatcata

SEQ ID NO: 808545 - DNA, 19 bp, Mus musculus
  siRNA target sequence for LOC210321 (NM_183143.1,262-280).
gccaaggagagatcataca

SEQ ID NO: 808546 - DNA, 19 bp, Mus musculus
  siRNA target sequence for LOC210321 (NM_183143.1,268-286).
gagagatcatacactttga

SEQ ID NO: 808547 - DNA, 19 bp, Mus musculus
  siRNA target sequence for LOC210321 (NM_183143.1,321-339).
gccgcgtgcgagaagctat

SEQ ID NO: 808548 - DNA, 19 bp, Mus musculus
  siRNA target sequence for LOC212111 (NM_183144.1,429-447).
ccttgcactgccaagaatt

SEQ ID NO: 808549 - DNA, 19 bp, Mus musculus
  siRNA target sequence for LOC212111 (NM_183144.1,510-528).
ccagtgacgcaatgaaaga

SEQ ID NO: 808550 - DNA, 19 bp, Mus musculus
  siRNA target sequence for LOC212111 (NM_183144.1,511-529).
cagtgacgcaatgaaagaa

SEQ ID NO: 808551 - DNA, 19 bp, Mus musculus
  siRNA target sequence for LOC212111 (NM_183144.1,513-531).
gtgacgcaatgaaagaata

SEQ ID NO: 808552 - DNA, 19 bp, Mus musculus
  siRNA target sequence for LOC212111 (NM_183144.1,515-533).
gacgcaatgaaagaataca

SEQ ID NO: 808553 - DNA, 19 bp, Mus musculus
  siRNA target sequence for LOC212111 (NM_183144.1,542-560).
cgtgtctacctggatgaaa

SEQ ID NO: 808554 - DNA, 19 bp, Mus musculus
  siRNA target sequence for LOC212111 (NM_183144.1,814-832).
cgacttggtgaacattcat

SEQ ID NO: 808555 - DNA, 19 bp, Mus musculus
  siRNA target sequence for LOC212111 (NM_183144.1,817-835).
cttggtgaacattcatctt

SEQ ID NO: 808556 - DNA, 19 bp, Mus musculus
  siRNA target sequence for LOC212111 (NM_183144.1,820-838).
ggtgaacattcatcttttt

SEQ ID NO: 808557 - DNA, 19 bp, Mus musculus
  siRNA target sequence for LOC212111 (NM_183144.1,934-952).
cgaccagcgatttgagaaa

SEQ ID NO: 808558 - DNA, 19 bp, Mus musculus
  siRNA target sequence for LOC212111 (NM_183144.1,965-983).
gtcttcggtgatttcaact

SEQ ID NO: 808559 - DNA, 19 bp, Mus musculus
  siRNA target sequence for LOC212111 (NM_183144.1,1048-1066).
cgctgctgataccaatgaa

SEQ ID NO: 808560 - DNA, 19 bp, Mus musculus
  siRNA target sequence for LOC212111 (NM_183144.1,1175-1193).
ggcactgcgctcttggaat

SEQ ID NO: 808561 - DNA, 19 bp, Mus musculus
  siRNA target sequence for LOC212111 (NM_183144.1,1176-1194).
gcactgcgctcttggaatt

SEQ ID NO: 808562 - DNA, 19 bp, Mus musculus
  siRNA target sequence for LOC212111 (NM_183144.1,1179-1197).
ctgcgctcttggaatttga

SEQ ID NO: 808563 - DNA, 19 bp, Mus musculus
  siRNA target sequence for LOC212111 (NM_183144.1,1181-1199).
gcgctcttggaatttgaca

SEQ ID NO: 808564 - DNA, 19 bp, Mus musculus
  siRNA target sequence for LOC212111 (NM_183144.1,1182-1200).
cgctcttggaatttgacaa

SEQ ID NO: 808565 - DNA, 19 bp, Mus musculus
  siRNA target sequence for LOC212111 (NM_183144.1,1286-1304).
ggagaacagtacatgaaca

SEQ ID NO: 808566 - DNA, 19 bp, Mus musculus
  siRNA target sequence for LOC212111 (NM_183144.1,1403-1421).
cacatcgggcctaatgtct

SEQ ID NO: 808567 - DNA, 19 bp, Mus musculus
  siRNA target sequence for C630041J07 (NM_183147.1,538-556).
cgtgcacagcccacgtatt

SEQ ID NO: 808568 - DNA, 19 bp, Mus musculus
  siRNA target sequence for C630041J07 (NM_183147.1,539-557).
gtgcacagcccacgtattt

SEQ ID NO: 808569 - DNA, 19 bp, Mus musculus
  siRNA target sequence for C630041J07 (NM_183147.1,541-559).
gcacagcccacgtatttgt

SEQ ID NO: 808570 - DNA, 19 bp, Mus musculus
  siRNA target sequence for C79267 (NM_183148.1,299-317).
gaagacgtgtccaagatct

SEQ ID NO: 808571 - DNA, 19 bp, Mus musculus
  siRNA target sequence for C79267 (NM_183148.1,385-403).
ggaggtgaatcggttttca

SEQ ID NO: 808572 - DNA, 19 bp, Mus musculus
  siRNA target sequence for C79267 (NM_183148.1,388-406).
ggtgaatcggttttcagat

SEQ ID NO: 808573 - DNA, 19 bp, Mus musculus
  siRNA target sequence for C79267 (NM_183148.1,461-479).
ctgcgggagacctttgatt

SEQ ID NO: 808574 - DNA, 19 bp, Mus musculus
  siRNA target sequence for C79267 (NM_183148.1,463-481).
gcgggagacctttgatttt

SEQ ID NO: 808575 - DNA, 19 bp, Mus musculus
  siRNA target sequence for C79267 (NM_183148.1,533-551).
ctatgggaggattttacca

SEQ ID NO: 808576 - DNA, 19 bp, Mus musculus
  siRNA target sequence for BC023040 (NM_183149.1,273-291).
gctccaacacgagaagaaa

SEQ ID NO: 808577 - DNA, 19 bp, Mus musculus
  siRNA target sequence for BC023040 (NM_183149.1,276-294).
ccaacacgagaagaaatat

SEQ ID NO: 808578 - DNA, 19 bp, Mus musculus
  siRNA target sequence for BC023040 (NM_183149.1,430-448).
ctcttctgctgcaagttgt

SEQ ID NO: 808579 - DNA, 19 bp, Mus musculus
  siRNA target sequence for BC023040 (NM_183149.1,525-543).
gggtgaccctgatgataca

SEQ ID NO: 808580 - DNA, 19 bp, Mus musculus
  siRNA target sequence for BC023040 (NM_183149.1,551-569).
ggggacatccactctgtaa

SEQ ID NO: 808581 - DNA, 19 bp, Mus musculus
  siRNA target sequence for BC023040 (NM_183149.1,553-571).
ggacatccactctgtaagt

SEQ ID NO: 808582 - DNA, 19 bp, Mus musculus
  siRNA target sequence for BC023040 (NM_183149.1,780-798).
cgacctcaaggctcataaa

SEQ ID NO: 808583 - DNA, 19 bp, Mus musculus
  siRNA target sequence for BC023040 (NM_183149.1,781-799).
gacctcaaggctcataaaa

SEQ ID NO: 808584 - DNA, 19 bp, Mus musculus
  siRNA target sequence for BC023040 (NM_183149.1,833-851).
gccagaaccggcagattga

SEQ ID NO: 808585 - DNA, 19 bp, Mus musculus
  siRNA target sequence for BC023040 (NM_183149.1,1206-1224).
caaggaagcctcagcaaat

SEQ ID NO: 808586 - DNA, 19 bp, Mus musculus
  siRNA target sequence for BC023040 (NM_183149.1,1209-1227).
ggaagcctcagcaaatggt

SEQ ID NO: 808587 - DNA, 19 bp, Mus musculus
  siRNA target sequence for BC023040 (NM_183149.1,1804-1822).
ctgttgccccctgatcata

SEQ ID NO: 808588 - DNA, 19 bp, Mus musculus
  siRNA target sequence for BC023040 (NM_183149.1,1883-1901).
cagtaaccatcgttgtcaa

SEQ ID NO: 808589 - DNA, 19 bp, Mus musculus
  siRNA target sequence for BC023040 (NM_183149.1,2246-2264).
caccacaagcctacttagt

SEQ ID NO: 808590 - DNA, 19 bp, Mus musculus
  siRNA target sequence for BC023040 (NM_183149.1,2293-2311).
cagcttatccagtctatca

SEQ ID NO: 808591 - DNA, 19 bp, Mus musculus
  siRNA target sequence for BC023040 (NM_183149.1,2390-2408).
ctgcggctcagtactacaa

SEQ ID NO: 808592 - DNA, 19 bp, Mus musculus
  siRNA target sequence for BC023040 (NM_183149.1,2537-2555).
ctcccaactccagatctaa

SEQ ID NO: 808593 - DNA, 19 bp, Mus musculus
  siRNA target sequence for A430060F13 (NM_183153.1,472-490).
cctacagtcaggttgttca

SEQ ID NO: 808594 - DNA, 19 bp, Mus musculus
  siRNA target sequence for BC002230 (NM_183155.1,518-536).
gagacaggtgctgtttgat

SEQ ID NO: 808595 - DNA, 19 bp, Mus musculus
  siRNA target sequence for BC002230 (NM_183155.1,520-538).
gacaggtgctgtttgatga

SEQ ID NO: 808596 - DNA, 19 bp, Mus musculus
  siRNA target sequence for BC002230 (NM_183155.1,534-552).
gatgacattgggcaatctt

SEQ ID NO: 808597 - DNA, 19 bp, Mus musculus
  siRNA target sequence for BC002230 (NM_183155.1,665-683).
ggacgagagcagcatcttt

SEQ ID NO: 808598 - DNA, 19 bp, Mus musculus
  siRNA target sequence for BC002230 (NM_183155.1,702-720).
gaaaagcccctgacttact

SEQ ID NO: 808599 - DNA, 19 bp, Mus musculus
  siRNA target sequence for BC002230 (NM_183155.1,900-918).
gagattgcaaaggtcattt

SEQ ID NO: 808600 - DNA, 19 bp, Mus musculus
  siRNA target sequence for BC002230 (NM_183155.1,931-949).
ctaaaaagaagcgattgaa

SEQ ID NO: 808601 - DNA, 19 bp, Mus musculus
  siRNA target sequence for BC002230 (NM_183155.1,999-1017).
ccagaaaaccgcaacaact

SEQ ID NO: 808602 - DNA, 19 bp, Mus musculus
  siRNA target sequence for BC002230 (NM_183155.1,1002-1020).
gaaaaccgcaacaacttct

SEQ ID NO: 808603 - DNA, 19 bp, Mus musculus
  siRNA target sequence for BC002230 (NM_183155.1,1049-1067).
gtggttgctcggtaacaca

SEQ ID NO: 808604 - DNA, 19 bp, Mus musculus
  siRNA target sequence for BC002230 (NM_183155.1,1068-1086).
gaggatgccagaaaagtgt

SEQ ID NO: 808605 - DNA, 19 bp, Mus musculus
  siRNA target sequence for BC002230 (NM_183155.1,1209-1227).
ggccgagcggtccacatat

SEQ ID NO: 808606 - DNA, 19 bp, Mus musculus
  siRNA target sequence for BC002230 (NM_183155.1,1210-1228).
gccgagcggtccacatatt

SEQ ID NO: 808607 - DNA, 19 bp, Mus musculus
  siRNA target sequence for BC002230 (NM_183155.1,1211-1229).
ccgagcggtccacatatta

SEQ ID NO: 808608 - DNA, 19 bp, Mus musculus
  siRNA target sequence for BC002230 (NM_183155.1,1212-1230).
cgagcggtccacatattaa

SEQ ID NO: 808609 - DNA, 19 bp, Mus musculus
  siRNA target sequence for BC002230 (NM_183155.1,1393-1411).
gcttggtccgatgctttat

SEQ ID NO: 808610 - DNA, 19 bp, Mus musculus
  siRNA target sequence for BC002230 (NM_183155.1,1484-1502).
gggctctgctcgcttagaa

SEQ ID NO: 808611 - DNA, 19 bp, Mus musculus
  siRNA target sequence for BC002230 (NM_183155.1,1587-1605).
cgattccacatgaacgttt

SEQ ID NO: 808612 - DNA, 19 bp, Mus musculus
  siRNA target sequence for BC002230 (NM_183155.1,1634-1652).
gaccctctccgatgcttta

SEQ ID NO: 808613 - DNA, 19 bp, Mus musculus
  siRNA target sequence for BC002230 (NM_183155.1,1636-1654).
ccctctccgatgctttaaa

SEQ ID NO: 808614 - DNA, 19 bp, Mus musculus
  siRNA target sequence for BC002230 (NM_183155.1,1681-1699).
ggagggcttatgtacagat

SEQ ID NO: 808615 - DNA, 19 bp, Mus musculus
  siRNA target sequence for BC002230 (NM_183155.1,1684-1702).
gggcttatgtacagattca

SEQ ID NO: 808616 - DNA, 19 bp, Mus musculus
  siRNA target sequence for BC002230 (NM_183155.1,1686-1704).
gcttatgtacagattcaga

SEQ ID NO: 808617 - DNA, 19 bp, Mus musculus
  siRNA target sequence for BC002230 (NM_183155.1,1692-1710).
gtacagattcagaataagt

SEQ ID NO: 808618 - DNA, 19 bp, Mus musculus
  siRNA target sequence for BC002230 (NM_183155.1,1736-1754).
gttctttgacacagttact

SEQ ID NO: 808619 - DNA, 19 bp, Mus musculus
  siRNA target sequence for BC002230 (NM_183155.1,1753-1771).
ctaggtctgccaaacattt

SEQ ID NO: 808620 - DNA, 19 bp, Mus musculus
  siRNA target sequence for BC002230 (NM_183155.1,1772-1790).
ggagccttggctatttgca

SEQ ID NO: 808621 - DNA, 19 bp, Mus musculus
  siRNA target sequence for BC002230 (NM_183155.1,1849-1867).
gagaggtccatgcaacaat

SEQ ID NO: 808622 - DNA, 19 bp, Mus musculus
  siRNA target sequence for BC002230 (NM_183155.1,1946-1964).
cctactgtggaggatgtat

SEQ ID NO: 808623 - DNA, 19 bp, Mus musculus
  siRNA target sequence for BC002230 (NM_183155.1,1947-1965).
ctactgtggaggatgtatt

SEQ ID NO: 808624 - DNA, 19 bp, Mus musculus
  siRNA target sequence for BC002230 (NM_183155.1,1954-1972).
ggaggatgtatttgaattt

SEQ ID NO: 808625 - DNA, 19 bp, Mus musculus
  siRNA target sequence for BC002230 (NM_183155.1,1967-1985).
gaattttttggtttcctta

SEQ ID NO: 808626 - DNA, 19 bp, Mus musculus
  siRNA target sequence for BC002230 (NM_183155.1,1999-2017).
gaagcaaaggcgtgttcta

SEQ ID NO: 808627 - DNA, 19 bp, Mus musculus
  siRNA target sequence for BC002230 (NM_183155.1,2002-2020).
gcaaaggcgtgttctacaa

SEQ ID NO: 808628 - DNA, 19 bp, Mus musculus
  siRNA target sequence for BC002230 (NM_183155.1,2041-2059).
gggcaaaggtgctatacat

SEQ ID NO: 808629 - DNA, 19 bp, Mus musculus
  siRNA target sequence for MGC62420 (NM_183157.1,253-271).
ggagtgcttgaccatagaa

SEQ ID NO: 808630 - DNA, 19 bp, Mus musculus
  siRNA target sequence for MGC62420 (NM_183157.1,254-272).
gagtgcttgaccatagaat

SEQ ID NO: 808631 - DNA, 19 bp, Mus musculus
  siRNA target sequence for MGC62420 (NM_183157.1,273-291).
gggtacgagcgaaaaagat

SEQ ID NO: 808632 - DNA, 19 bp, Mus musculus
  siRNA target sequence for MGC62420 (NM_183157.1,333-351).
cggccactatggctacatt

SEQ ID NO: 808633 - DNA, 19 bp, Mus musculus
  siRNA target sequence for MGC62420 (NM_183157.1,335-353).
gccactatggctacattga

SEQ ID NO: 808634 - DNA, 19 bp, Mus musculus
  siRNA target sequence for MGC62420 (NM_183157.1,336-354).
ccactatggctacattgat

SEQ ID NO: 808635 - DNA, 19 bp, Mus musculus
  siRNA target sequence for MGC62420 (NM_183157.1,357-375).
cgagctaccgtgctttcat

SEQ ID NO: 808636 - DNA, 19 bp, Mus musculus
  siRNA target sequence for MGC62420 (NM_183157.1,381-399).
gtacttcagggctgtcatt

SEQ ID NO: 808637 - DNA, 19 bp, Mus musculus
  siRNA target sequence for MGC62420 (NM_183157.1,389-407).
gggctgtcattggtatctt

SEQ ID NO: 808638 - DNA, 19 bp, Mus musculus
  siRNA target sequence for MGC62420 (NM_183157.1,390-408).
ggctgtcattggtatctta

SEQ ID NO: 808639 - DNA, 19 bp, Mus musculus
  siRNA target sequence for MGC62420 (NM_183157.1,425-443).
cctgctgccacattatgct

SEQ ID NO: 808640 - DNA, 19 bp, Mus musculus
  siRNA target sequence for MGC62420 (NM_183157.1,588-606).
cgtaaagaaatgtggttta

SEQ ID NO: 808641 - DNA, 19 bp, Mus musculus
  siRNA target sequence for MGC62420 (NM_183157.1,646-664).
gtcgtggatcccattgtat

SEQ ID NO: 808642 - DNA, 19 bp, Mus musculus
  siRNA target sequence for MGC62420 (NM_183157.1,648-666).
cgtggatcccattgtatca

SEQ ID NO: 808643 - DNA, 19 bp, Mus musculus
  siRNA target sequence for MGC62420 (NM_183157.1,738-756).
ggagaacttgaatccttta

SEQ ID NO: 808644 - DNA, 19 bp, Mus musculus
  siRNA target sequence for MGC62420 (NM_183157.1,741-759).
gaacttgaatcctttagta

SEQ ID NO: 808645 - DNA, 19 bp, Mus musculus
  siRNA target sequence for MGC62420 (NM_183157.1,752-770).
ctttagtagttctgaactt

SEQ ID NO: 808646 - DNA, 19 bp, Mus musculus
  siRNA target sequence for MGC62420 (NM_183157.1,807-825).
cctgatgaacccagaatct

SEQ ID NO: 808647 - DNA, 19 bp, Mus musculus
  siRNA target sequence for MGC62420 (NM_183157.1,903-921).
gaagtctggaaccaatgaa

SEQ ID NO: 808648 - DNA, 19 bp, Mus musculus
  siRNA target sequence for MGC62420 (NM_183157.1,925-943).
gacctgacaatgaaactga

SEQ ID NO: 808649 - DNA, 19 bp, Mus musculus
  siRNA target sequence for MGC62420 (NM_183157.1,942-960).
gacagagatcattttccta

SEQ ID NO: 808650 - DNA, 19 bp, Mus musculus
  siRNA target sequence for MGC62420 (NM_183157.1,1131-1149).
ggggaaacagggtcgattt

SEQ ID NO: 808651 - DNA, 19 bp, Mus musculus
  siRNA target sequence for MGC62420 (NM_183157.1,1132-1150).
gggaaacagggtcgattta

SEQ ID NO: 808652 - DNA, 19 bp, Mus musculus
  siRNA target sequence for MGC62420 (NM_183157.1,1134-1152).
gaaacagggtcgatttaga

SEQ ID NO: 808653 - DNA, 19 bp, Mus musculus
  siRNA target sequence for MGC62420 (NM_183157.1,1140-1158).
gggtcgatttagaggtaat

SEQ ID NO: 808654 - DNA, 19 bp, Mus musculus
  siRNA target sequence for MGC62420 (NM_183157.1,1142-1160).
gtcgatttagaggtaatct

SEQ ID NO: 808655 - DNA, 19 bp, Mus musculus
  siRNA target sequence for MGC62420 (NM_183157.1,1144-1162).
cgatttagaggtaatctgt

SEQ ID NO: 808656 - DNA, 19 bp, Mus musculus
  siRNA target sequence for MGC62420 (NM_183157.1,1209-1227).
ccccaacctccggattgat

SEQ ID NO: 808657 - DNA, 19 bp, Mus musculus
  siRNA target sequence for MGC62420 (NM_183157.1,1215-1233).
cctccggattgatgaagta

SEQ ID NO: 808658 - DNA, 19 bp, Mus musculus
  siRNA target sequence for MGC62420 (NM_183157.1,1241-1259).
cagttcatgtggccaaaat

SEQ ID NO: 808659 - DNA, 19 bp, Mus musculus
  siRNA target sequence for MGC62420 (NM_183157.1,1249-1267).
gtggccaaaattctaactt

SEQ ID NO: 808660 - DNA, 19 bp, Mus musculus
  siRNA target sequence for MGC62420 (NM_183157.1,1305-1323).
gaggaaactggttcgaaat

SEQ ID NO: 808661 - DNA, 19 bp, Mus musculus
  siRNA target sequence for MGC62420 (NM_183157.1,1336-1354).
cacccaggagccaatttta

SEQ ID NO: 808662 - DNA, 19 bp, Mus musculus
  siRNA target sequence for MGC62420 (NM_183157.1,1340-1358).
caggagccaattttatcca

SEQ ID NO: 808663 - DNA, 19 bp, Mus musculus
  siRNA target sequence for MGC62420 (NM_183157.1,1382-1400).
ggttcctgaagtatggaaa

SEQ ID NO: 808664 - DNA, 19 bp, Mus musculus
  siRNA target sequence for MGC62420 (NM_183157.1,1425-1443).
caagttcggcgacattgta

SEQ ID NO: 808665 - DNA, 19 bp, Mus musculus
  siRNA target sequence for MGC62420 (NM_183157.1,1462-1480).
ggagatgtggtcttgttca

SEQ ID NO: 808666 - DNA, 19 bp, Mus musculus
  siRNA target sequence for MGC62420 (NM_183157.1,1540-1558).
caccggaccttcagattca

SEQ ID NO: 808667 - DNA, 19 bp, Mus musculus
  siRNA target sequence for MGC62420 (NM_183157.1,1545-1563).
gaccttcagattcaatgaa

SEQ ID NO: 808668 - DNA, 19 bp, Mus musculus
  siRNA target sequence for MGC62420 (NM_183157.1,1714-1732).
gccattcaggacttcttaa

SEQ ID NO: 808669 - DNA, 19 bp, Mus musculus
  siRNA target sequence for MGC62420 (NM_183157.1,1788-1806).
ccagatcatcgcttcaata

SEQ ID NO: 808670 - DNA, 19 bp, Mus musculus
  siRNA target sequence for MGC62420 (NM_183157.1,1809-1827).
ggttggcaaagatgaaaaa

SEQ ID NO: 808671 - DNA, 19 bp, Mus musculus
  siRNA target sequence for MGC62420 (NM_183157.1,1843-1861).
ccaccccctacaatactaa

SEQ ID NO: 808672 - DNA, 19 bp, Mus musculus
  siRNA target sequence for MGC62420 (NM_183157.1,1908-1926).
cagacctagtgatgacaat

SEQ ID NO: 808673 - DNA, 19 bp, Mus musculus
  siRNA target sequence for 4932407I05 (NM_183159.1,1989-2007).
ggtcactgcggatcactaa

SEQ ID NO: 808674 - DNA, 19 bp, Mus musculus
  siRNA target sequence for 4932407I05 (NM_183159.1,2004-2022).
ctaaggcagcaaaaagctt

SEQ ID NO: 808675 - DNA, 19 bp, Mus musculus
  siRNA target sequence for 4932407I05 (NM_183159.1,2009-2027).
gcagcaaaaagctttccta

SEQ ID NO: 808676 - DNA, 19 bp, Mus musculus
  siRNA target sequence for E030010A14 (NM_183160.1,242-260).
gcacctaccgccaagcaaa

SEQ ID NO: 808677 - DNA, 19 bp, Mus musculus
  siRNA target sequence for E030010A14 (NM_183160.1,243-261).
cacctaccgccaagcaaat

SEQ ID NO: 808678 - DNA, 19 bp, Mus musculus
  siRNA target sequence for E030010A14 (NM_183160.1,245-263).
cctaccgccaagcaaatga

SEQ ID NO: 808679 - DNA, 19 bp, Mus musculus
  siRNA target sequence for E030010A14 (NM_183160.1,246-264).
ctaccgccaagcaaatgaa

SEQ ID NO: 808680 - DNA, 19 bp, Mus musculus
  siRNA target sequence for E030010A14 (NM_183160.1,250-268).
cgccaagcaaatgaaaaca

SEQ ID NO: 808681 - DNA, 19 bp, Mus musculus
  siRNA target sequence for E030010A14 (NM_183160.1,345-363).
cttttaccctccagcttat

SEQ ID NO: 808682 - DNA, 19 bp, Mus musculus
  siRNA target sequence for E030010A14 (NM_183160.1,435-453).
gtatacagagacaaacctt

SEQ ID NO: 808683 - DNA, 19 bp, Mus musculus
  siRNA target sequence for E030010A14 (NM_183160.1,440-458).
cagagacaaaccttgaatt

SEQ ID NO: 808684 - DNA, 19 bp, Mus musculus
  siRNA target sequence for 9130416B15 (NM_183163.1,282-300).
gagccagtccgaagaacat

SEQ ID NO: 808685 - DNA, 19 bp, Mus musculus
  siRNA target sequence for 9130416B15 (NM_183163.1,285-303).
ccagtccgaagaacatact

SEQ ID NO: 808686 - DNA, 19 bp, Mus musculus
  siRNA target sequence for 9130416B15 (NM_183163.1,286-304).
cagtccgaagaacatactt

SEQ ID NO: 808687 - DNA, 19 bp, Mus musculus
  siRNA target sequence for 9130416B15 (NM_183163.1,413-431).
cgaagtcaggacaaaacct

SEQ ID NO: 808688 - DNA, 19 bp, Mus musculus
  siRNA target sequence for 9130416B15 (NM_183163.1,414-432).
gaagtcaggacaaaaccta

SEQ ID NO: 808689 - DNA, 19 bp, Mus musculus
  siRNA target sequence for 4930549O06 (NM_183166.1,339-357).
ccgctcatggtggttcaaa

SEQ ID NO: 808690 - DNA, 19 bp, Mus musculus
  siRNA target sequence for 4930549O06 (NM_183166.1,340-358).
cgctcatggtggttcaaat

SEQ ID NO: 808691 - DNA, 19 bp, Mus musculus
  siRNA target sequence for AI987944 (NM_183167.1,188-206).
gaccataatagtgaacatt

SEQ ID NO: 808692 - DNA, 19 bp, Mus musculus
  siRNA target sequence for AI987944 (NM_183167.1,190-208).
ccataatagtgaacatttt

SEQ ID NO: 808693 - DNA, 19 bp, Mus musculus
  siRNA target sequence for AI987944 (NM_183167.1,300-318).
gcagtcatcctcagaatca

SEQ ID NO: 808694 - DNA, 19 bp, Mus musculus
  siRNA target sequence for AI987944 (NM_183167.1,313-331).
gaatcatgatagaatgcat

SEQ ID NO: 808695 - DNA, 19 bp, Mus musculus
  siRNA target sequence for AI987944 (NM_183167.1,345-363).
gccatgaaggtattcaaca

SEQ ID NO: 808696 - DNA, 19 bp, Mus musculus
  siRNA target sequence for AI987944 (NM_183167.1,417-435).
ccagcaagaaaccttatga

SEQ ID NO: 808697 - DNA, 19 bp, Mus musculus
  siRNA target sequence for AI987944 (NM_183167.1,1037-1055).
cgccatagtcatcttctaa

SEQ ID NO: 808698 - DNA, 19 bp, Mus musculus
  siRNA target sequence for AI987944 (NM_183167.1,1039-1057).
ccatagtcatcttctaatt

SEQ ID NO: 808699 - DNA, 19 bp, Mus musculus
  siRNA target sequence for BC051227 (NM_183170.1,513-531).
ccgagtcacctatatcaat

SEQ ID NO: 808700 - DNA, 19 bp, Mus musculus
  siRNA target sequence for BC051227 (NM_183170.1,539-557).
cactgggctgggacacata

SEQ ID NO: 808701 - DNA, 19 bp, Mus musculus
  siRNA target sequence for Fez1 (NM_183171.1,171-189).
gagtctggatgaagagttt

SEQ ID NO: 808702 - DNA, 19 bp, Mus musculus
  siRNA target sequence for Fez1 (NM_183171.1,286-304).
gagcttgagaatttttctt

SEQ ID NO: 808703 - DNA, 19 bp, Mus musculus
  siRNA target sequence for Fez1 (NM_183171.1,307-325).
gaaataatcagcttcaagt

SEQ ID NO: 808704 - DNA, 19 bp, Mus musculus
  siRNA target sequence for Fez1 (NM_183171.1,333-351).
ggacctcgtgaatgaattt

SEQ ID NO: 808705 - DNA, 19 bp, Mus musculus
  siRNA target sequence for Fez1 (NM_183171.1,336-354).
cctcgtgaatgaatttgat

SEQ ID NO: 808706 - DNA, 19 bp, Mus musculus
  siRNA target sequence for Fez1 (NM_183171.1,367-385).
gtctgctttcggaactaca

SEQ ID NO: 808707 - DNA, 19 bp, Mus musculus
  siRNA target sequence for Fez1 (NM_183171.1,475-493).
gctctgacagacaattaca

SEQ ID NO: 808708 - DNA, 19 bp, Mus musculus
  siRNA target sequence for Fez1 (NM_183171.1,516-534).
gagggacccaaacattgaa

SEQ ID NO: 808709 - DNA, 19 bp, Mus musculus
  siRNA target sequence for Fez1 (NM_183171.1,741-759).
ctcatcccaggcagattca

SEQ ID NO: 808710 - DNA, 19 bp, Mus musculus
  siRNA target sequence for Fez1 (NM_183171.1,743-761).
catcccaggcagattcagt

SEQ ID NO: 808711 - DNA, 19 bp, Mus musculus
  siRNA target sequence for Fez1 (NM_183171.1,1278-1296).
gaaggtgcctactttgcta

SEQ ID NO: 808712 - DNA, 19 bp, Mus musculus
  siRNA target sequence for Fez1 (NM_183171.1,1289-1307).
ctttgctaacggactacat

SEQ ID NO: 808713 - DNA, 19 bp, Mus musculus
  siRNA target sequence for Fez1 (NM_183171.1,1294-1312).
ctaacggactacattttaa

SEQ ID NO: 808714 - DNA, 19 bp, Mus musculus
  siRNA target sequence for Fez1 (NM_183171.1,1298-1316).
cggactacattttaaaagt

SEQ ID NO: 808715 - DNA, 19 bp, Mus musculus
  siRNA target sequence for MGC58970 (NM_183172.1,184-202).
cgggtcctgagggattaca

SEQ ID NO: 808716 - DNA, 19 bp, Mus musculus
  siRNA target sequence for MGC58970 (NM_183172.1,196-214).
gattacagcgacaagcata

SEQ ID NO: 808717 - DNA, 19 bp, Mus musculus
  siRNA target sequence for MGC58970 (NM_183172.1,215-233).
gggctactttcaaatttga

SEQ ID NO: 808718 - DNA, 19 bp, Mus musculus
  siRNA target sequence for MGC58970 (NM_183172.1,216-234).
ggctactttcaaatttgaa

SEQ ID NO: 808719 - DNA, 19 bp, Mus musculus
  siRNA target sequence for MGC58970 (NM_183172.1,328-346).
gaagtactccgcattctct

SEQ ID NO: 808720 - DNA, 19 bp, Mus musculus
  siRNA target sequence for MGC58970 (NM_183172.1,360-378).
gatcttagttcctgtaaca

SEQ ID NO: 808721 - DNA, 19 bp, Mus musculus
  siRNA target sequence for MGC58970 (NM_183172.1,421-439).
cacgagtcagacgattctt

SEQ ID NO: 808722 - DNA, 19 bp, Mus musculus
  siRNA target sequence for MGC58970 (NM_183172.1,450-468).
gtcagagttcccagttatt

SEQ ID NO: 808723 - DNA, 19 bp, Mus musculus
  siRNA target sequence for MGC58970 (NM_183172.1,463-481).
gttattgtggaatcattga

SEQ ID NO: 808724 - DNA, 19 bp, Mus musculus
  siRNA target sequence for MGC58970 (NM_183172.1,476-494).
cattgaagtgtctgtgtaa

SEQ ID NO: 808725 - DNA, 19 bp, Mus musculus
  siRNA target sequence for MGC58970 (NM_183172.1,576-594).
gtgcaaggaccgaaaattt

SEQ ID NO: 808726 - DNA, 19 bp, Mus musculus
  siRNA target sequence for MGC58970 (NM_183172.1,582-600).
ggaccgaaaatttatcaat

SEQ ID NO: 808727 - DNA, 19 bp, Mus musculus
  siRNA target sequence for MGC58970 (NM_183172.1,653-671).
ctgacatcaggtcacaatt

SEQ ID NO: 808728 - DNA, 19 bp, Mus musculus
  siRNA target sequence for MGC58970 (NM_183172.1,695-713).
cgctgctaacccagatctt

SEQ ID NO: 808729 - DNA, 19 bp, Mus musculus
  siRNA target sequence for MGC58970 (NM_183172.1,867-885).
gagcgattctcatcagttt

SEQ ID NO: 808730 - DNA, 19 bp, Mus musculus
  siRNA target sequence for MGC58970 (NM_183172.1,898-916).
gctgtccttcgccattgtt

SEQ ID NO: 808731 - DNA, 19 bp, Mus musculus
  siRNA target sequence for MGC58970 (NM_183172.1,899-917).
ctgtccttcgccattgttt

SEQ ID NO: 808732 - DNA, 19 bp, Mus musculus
  siRNA target sequence for MGC58970 (NM_183172.1,903-921).
ccttcgccattgtttacta

SEQ ID NO: 808733 - DNA, 19 bp, Mus musculus
  siRNA target sequence for MGC58970 (NM_183172.1,904-922).
cttcgccattgtttactaa

SEQ ID NO: 808734 - DNA, 19 bp, Mus musculus
  siRNA target sequence for MGC58970 (NM_183172.1,928-946).
ggtccaactgaagacaaaa

SEQ ID NO: 808735 - DNA, 19 bp, Mus musculus
  siRNA target sequence for MGC58970 (NM_183172.1,948-966).
cgaagagctgcacagtaat

SEQ ID NO: 808736 - DNA, 19 bp, Mus musculus
  siRNA target sequence for MGC58970 (NM_183172.1,962-980).
gtaatgccgtcaacctttt

SEQ ID NO: 808737 - DNA, 19 bp, Mus musculus
  siRNA target sequence for MGC58970 (NM_183172.1,969-987).
cgtcaaccttttaagcaat

SEQ ID NO: 808738 - DNA, 19 bp, Mus musculus
  siRNA target sequence for MGC58970 (NM_183172.1,998-1016).
cttgtttggatgttctcat

SEQ ID NO: 808739 - DNA, 19 bp, Mus musculus
  siRNA target sequence for MGC58970 (NM_183172.1,1050-1068).
ggcagcaactctagatgaa

SEQ ID NO: 808740 - DNA, 19 bp, Mus musculus
  siRNA target sequence for MGC58970 (NM_183172.1,1122-1140).
ggtatacaatggcatgaat

SEQ ID NO: 808741 - DNA, 19 bp, Mus musculus
  siRNA target sequence for MGC58970 (NM_183172.1,1143-1161).
ggaggccattcacgtttta

SEQ ID NO: 808742 - DNA, 19 bp, Mus musculus
  siRNA target sequence for MGC58970 (NM_183172.1,1147-1165).
gccattcacgttttactca

SEQ ID NO: 808743 - DNA, 19 bp, Mus musculus
  siRNA target sequence for MGC58970 (NM_183172.1,1148-1166).
ccattcacgttttactcaa

SEQ ID NO: 808744 - DNA, 19 bp, Mus musculus
  siRNA target sequence for MGC58970 (NM_183172.1,1149-1167).
cattcacgttttactcaat

SEQ ID NO: 808745 - DNA, 19 bp, Mus musculus
  siRNA target sequence for MGC58970 (NM_183172.1,1186-1204).
gataagggaagcagctata

SEQ ID NO: 808746 - DNA, 19 bp, Mus musculus
  siRNA target sequence for MGC58970 (NM_183172.1,1200-1218).
ctatagagagggtctaact

SEQ ID NO: 808747 - DNA, 19 bp, Mus musculus
  siRNA target sequence for MGC58970 (NM_183172.1,1219-1237).
ccagttctcagcttattaa

SEQ ID NO: 808748 - DNA, 19 bp, Mus musculus
  siRNA target sequence for MGC58970 (NM_183172.1,1255-1273).
catcggaacatccgaaaat

SEQ ID NO: 808749 - DNA, 19 bp, Mus musculus
  siRNA target sequence for MGC58970 (NM_183172.1,1259-1277).
ggaacatccgaaaatttct

SEQ ID NO: 808750 - DNA, 19 bp, Mus musculus
  siRNA target sequence for MGC58970 (NM_183172.1,1263-1281).
catccgaaaatttctcaaa

SEQ ID NO: 808751 - DNA, 19 bp, Mus musculus
  siRNA target sequence for MGC58970 (NM_183172.1,1302-1320).
gagagatgtgacaaatcga

SEQ ID NO: 808752 - DNA, 19 bp, Mus musculus
  siRNA target sequence for MGC58970 (NM_183172.1,1329-1347).
cggctcaaccgtgagaaat

SEQ ID NO: 808753 - DNA, 19 bp, Mus musculus
  siRNA target sequence for MGC58970 (NM_183172.1,1330-1348).
ggctcaaccgtgagaaata

SEQ ID NO: 808754 - DNA, 19 bp, Mus musculus
  siRNA target sequence for MGC58970 (NM_183172.1,1331-1349).
gctcaaccgtgagaaataa

SEQ ID NO: 808755 - DNA, 19 bp, Mus musculus
  siRNA target sequence for MGC58970 (NM_183172.1,1334-1352).
caaccgtgagaaataagct

SEQ ID NO: 808756 - DNA, 19 bp, Mus musculus
  siRNA target sequence for MGC58970 (NM_183172.1,1435-1453).
gatagcctgctgaaataca

SEQ ID NO: 808757 - DNA, 19 bp, Mus musculus
  siRNA target sequence for MGC58970 (NM_183172.1,1507-1525).
ggaagaggagataattggt

SEQ ID NO: 808758 - DNA, 19 bp, Mus musculus
  siRNA target sequence for MGC58970 (NM_183172.1,1544-1562).
cggacactgaagaatacaa

SEQ ID NO: 808759 - DNA, 19 bp, Mus musculus
  siRNA target sequence for MGC58970 (NM_183172.1,1566-1584).
cgcaaaaccaaacattaat

SEQ ID NO: 808760 - DNA, 19 bp, Mus musculus
  siRNA target sequence for MGC58970 (NM_183172.1,1568-1586).
caaaaccaaacattaatct

SEQ ID NO: 808761 - DNA, 19 bp, Mus musculus
  siRNA target sequence for MGC58970 (NM_183172.1,1573-1591).
ccaaacattaatcttatca

SEQ ID NO: 808762 - DNA, 19 bp, Mus musculus
  siRNA target sequence for MGC58970 (NM_183172.1,1595-1613).
gtcatttagaggaaccaat

SEQ ID NO: 808763 - DNA, 19 bp, Mus musculus
  siRNA target sequence for MGC58970 (NM_183172.1,1610-1628).
caatgccaaaccctataga

SEQ ID NO: 808764 - DNA, 19 bp, Mus musculus
  siRNA target sequence for MGC58970 (NM_183172.1,1614-1632).
gccaaaccctatagatgaa

SEQ ID NO: 808765 - DNA, 19 bp, Mus musculus
  siRNA target sequence for MGC58970 (NM_183172.1,1615-1633).
ccaaaccctatagatgaaa

SEQ ID NO: 808766 - DNA, 19 bp, Mus musculus
  siRNA target sequence for MGC58970 (NM_183172.1,1616-1634).
caaaccctatagatgaaat

SEQ ID NO: 808767 - DNA, 19 bp, Mus musculus
  siRNA target sequence for MGC58970 (NM_183172.1,1620-1638).
ccctatagatgaaatgaca

SEQ ID NO: 808768 - DNA, 19 bp, Mus musculus
  siRNA target sequence for MGC58970 (NM_183172.1,1661-1679).
ccatgaaacttgtcaacat

SEQ ID NO: 808769 - DNA, 19 bp, Mus musculus
  siRNA target sequence for MGC58970 (NM_183172.1,1674-1692).
caacatgcttgataaactt

SEQ ID NO: 808770 - DNA, 19 bp, Mus musculus
  siRNA target sequence for MGC58970 (NM_183172.1,1699-1717).
gaggagttgcttaaaccaa

SEQ ID NO: 808771 - DNA, 19 bp, Mus musculus
  siRNA target sequence for A830006N08 (NM_183173.1,1187-1205).
gccaagcgcgacttcatgt

SEQ ID NO: 808772 - DNA, 19 bp, Mus musculus
  siRNA target sequence for A830006N08 (NM_183173.1,1493-1511).
cctggcctgcgatctatga

SEQ ID NO: 808773 - DNA, 19 bp, Mus musculus
  siRNA target sequence for A830006N08 (NM_183173.1,1614-1632).
gcgtcctggccgatgactt

SEQ ID NO: 808774 - DNA, 19 bp, Mus musculus
  siRNA target sequence for A830006N08 (NM_183173.1,1649-1667).
gctcgtggcttgaagaagt

SEQ ID NO: 808775 - DNA, 19 bp, Mus musculus
  siRNA target sequence for A830006N08 (NM_183173.1,1652-1670).
cgtggcttgaagaagtcaa

SEQ ID NO: 808776 - DNA, 19 bp, Mus musculus
  siRNA target sequence for A830006N08 (NM_183173.1,1700-1718).
cccatggctccccgaaaaa

SEQ ID NO: 808777 - DNA, 19 bp, Mus musculus
  siRNA target sequence for A830006N08 (NM_183173.1,1744-1762).
gtccttcaccgaaatctct

SEQ ID NO: 808778 - DNA, 19 bp, Mus musculus
  siRNA target sequence for A830006N08 (NM_183173.1,1779-1797).
gacctttagctggtttagt

SEQ ID NO: 808779 - DNA, 19 bp, Mus musculus
  siRNA target sequence for 9130217G22 (NM_183175.1,361-379).
gactcacggtgatcagtaa

SEQ ID NO: 808780 - DNA, 19 bp, Mus musculus
  siRNA target sequence for 9130217G22 (NM_183175.1,363-381).
ctcacggtgatcagtaagt

SEQ ID NO: 808781 - DNA, 19 bp, Mus musculus
  siRNA target sequence for 9130217G22 (NM_183175.1,388-406).
ccccagatgcacccattaa

SEQ ID NO: 808782 - DNA, 19 bp, Mus musculus
  siRNA target sequence for 9130217G22 (NM_183175.1,390-408).
ccagatgcacccattaaat

SEQ ID NO: 808783 - DNA, 19 bp, Mus musculus
  siRNA target sequence for 9130217G22 (NM_183175.1,391-409).
cagatgcacccattaaatt

SEQ ID NO: 808784 - DNA, 19 bp, Mus musculus
  siRNA target sequence for 9130217G22 (NM_183175.1,396-414).
gcacccattaaattcgata

SEQ ID NO: 808785 - DNA, 19 bp, Mus musculus
  siRNA target sequence for 9130217G22 (NM_183175.1,397-415).
cacccattaaattcgataa

SEQ ID NO: 808786 - DNA, 19 bp, Mus musculus
  siRNA target sequence for 9130217G22 (NM_183175.1,399-417).
cccattaaattcgataaga

SEQ ID NO: 808787 - DNA, 19 bp, Mus musculus
  siRNA target sequence for 9130217G22 (NM_183175.1,400-418).
ccattaaattcgataagat

SEQ ID NO: 808788 - DNA, 19 bp, Mus musculus
  siRNA target sequence for 9130217G22 (NM_183175.1,447-465).
gtagcgacggggaagttca

SEQ ID NO: 808789 - DNA, 19 bp, Mus musculus
  siRNA target sequence for 9130217G22 (NM_183175.1,470-488).
ccacgtggcaggtgtctat

SEQ ID NO: 808790 - DNA, 19 bp, Mus musculus
  siRNA target sequence for 9130217G22 (NM_183175.1,471-489).
cacgtggcaggtgtctatt

SEQ ID NO: 808791 - DNA, 19 bp, Mus musculus
  siRNA target sequence for 9130217G22 (NM_183175.1,477-495).
gcaggtgtctattacttta

SEQ ID NO: 808792 - DNA, 19 bp, Mus musculus
  siRNA target sequence for 9130217G22 (NM_183175.1,491-509).
ctttacctaccatatcact

SEQ ID NO: 808793 - DNA, 19 bp, Mus musculus
  siRNA target sequence for 9130217G22 (NM_183175.1,539-557).
ggtcaaaaacggggtaaaa

SEQ ID NO: 808794 - DNA, 19 bp, Mus musculus
  siRNA target sequence for 9130217G22 (NM_183175.1,668-686).
gaggttcaatggcttattt

SEQ ID NO: 808795 - DNA, 19 bp, Mus musculus
  siRNA target sequence for 9130217G22 (NM_183175.1,671-689).
gttcaatggcttatttgca

SEQ ID NO: 808796 - DNA, 19 bp, Mus musculus
  siRNA target sequence for A930017M01 (NM_183176.1,1540-1558).
caaacggctctatgatcat

SEQ ID NO: 808797 - DNA, 19 bp, Mus musculus
  siRNA target sequence for A930017M01 (NM_183176.1,1620-1638).
ggcagtgttgggacaacaa

SEQ ID NO: 808798 - DNA, 19 bp, Mus musculus
  siRNA target sequence for A930017M01 (NM_183176.1,1621-1639).
gcagtgttgggacaacaaa

SEQ ID NO: 808799 - DNA, 19 bp, Mus musculus
  siRNA target sequence for A930017M01 (NM_183176.1,1696-1714).
caaagctgcaaggcttata

SEQ ID NO: 808800 - DNA, 19 bp, Mus musculus
  siRNA target sequence for A930017M01 (NM_183176.1,1759-1777).
ctaccggccatatcaatct

SEQ ID NO: 808801 - DNA, 19 bp, Mus musculus
  siRNA target sequence for A930017M01 (NM_183176.1,1808-1826).
cctcctaaaggctatatgt

SEQ ID NO: 808802 - DNA, 19 bp, Mus musculus
  siRNA target sequence for A930017M01 (NM_183176.1,1809-1827).
ctcctaaaggctatatgtt

SEQ ID NO: 808803 - DNA, 19 bp, Mus musculus
  siRNA target sequence for A930017M01 (NM_183176.1,1812-1830).
ctaaaggctatatgtttct

SEQ ID NO: 808804 - DNA, 19 bp, Mus musculus
  siRNA target sequence for A930017M01 (NM_183176.1,1947-1965).
cttatctagtccaacatgt

SEQ ID NO: 808805 - DNA, 19 bp, Mus musculus
  siRNA target sequence for A930017M01 (NM_183176.1,2054-2072).
ggaaaggaacatcaagatt

SEQ ID NO: 808806 - DNA, 19 bp, Mus musculus
  siRNA target sequence for A930017M01 (NM_183176.1,2059-2077).
ggaacatcaagattttcta

SEQ ID NO: 808807 - DNA, 19 bp, Mus musculus
  siRNA target sequence for A930017M01 (NM_183176.1,2060-2078).
gaacatcaagattttctat

SEQ ID NO: 808808 - DNA, 19 bp, Mus musculus
  siRNA target sequence for A930017M01 (NM_183176.1,2119-2137).
gtggtctggcatttgtaga

SEQ ID NO: 808809 - DNA, 19 bp, Mus musculus
  siRNA target sequence for A930017M01 (NM_183176.1,2189-2207).
gatgaaaactcatccttaa

SEQ ID NO: 808810 - DNA, 19 bp, Mus musculus
  siRNA target sequence for A930017M01 (NM_183176.1,2208-2226).
gttcccaggcacaatcaga

SEQ ID NO: 808811 - DNA, 19 bp, Mus musculus
  siRNA target sequence for A930017M01 (NM_183176.1,2239-2257).
gacatctcactctgataca

SEQ ID NO: 808812 - DNA, 19 bp, Mus musculus
  siRNA target sequence for A930017M01 (NM_183176.1,2250-2268).
ctgatacaacggatgaaga

SEQ ID NO: 808813 - DNA, 19 bp, Mus musculus
  siRNA target sequence for A930017M01 (NM_183176.1,2285-2303).
gattcagacgaaattcaga

SEQ ID NO: 808814 - DNA, 19 bp, Mus musculus
  siRNA target sequence for A930017M01 (NM_183176.1,2309-2327).
ggaggtccatccaaaccta

SEQ ID NO: 808815 - DNA, 19 bp, Mus musculus
  siRNA target sequence for A930017M01 (NM_183176.1,2376-2394).
gtctccttgatctcttgaa

SEQ ID NO: 808816 - DNA, 19 bp, Mus musculus
  siRNA target sequence for A930017M01 (NM_183176.1,2384-2402).
gatctcttgaaaacaacta

SEQ ID NO: 808817 - DNA, 19 bp, Mus musculus
  siRNA target sequence for A930017M01 (NM_183176.1,2431-2449).
gccaaaaactccaaggaaa

SEQ ID NO: 808818 - DNA, 19 bp, Mus musculus
  siRNA target sequence for MGC58341 (NM_183178.1,142-160).
gggaggcgctaagaaaaat

SEQ ID NO: 808819 - DNA, 19 bp, Mus musculus
  siRNA target sequence for MGC58341 (NM_183178.1,476-494).
cgccaaggaaatcaaagat

SEQ ID NO: 808820 - DNA, 19 bp, Mus musculus
  siRNA target sequence for MGC58341 (NM_183178.1,534-552).
gccaaggtgagcgacaata

SEQ ID NO: 808821 - DNA, 19 bp, Mus musculus
  siRNA target sequence for MGC58341 (NM_183178.1,539-557).
ggtgagcgacaatatgagt

SEQ ID NO: 808822 - DNA, 19 bp, Mus musculus
  siRNA target sequence for MGC58341 (NM_183178.1,653-671).
cctcgtgtcagataactgt

SEQ ID NO: 808823 - DNA, 19 bp, Mus musculus
  siRNA target sequence for MGC58341 (NM_183178.1,706-724).
gcaagatcgaccactatgt

SEQ ID NO: 808824 - DNA, 19 bp, Mus musculus
  siRNA target sequence for MGC58341 (NM_183178.1,729-747).
gagtaccgcaagaccaatt

SEQ ID NO: 808825 - DNA, 19 bp, Mus musculus
  siRNA target sequence for MGC58341 (NM_183178.1,820-838).
ccttgacaggtctcaaatt

SEQ ID NO: 808826 - DNA, 19 bp, Mus musculus
  siRNA target sequence for MGC58341 (NM_183178.1,821-839).
cttgacaggtctcaaattt

SEQ ID NO: 808827 - DNA, 19 bp, Mus musculus
  siRNA target sequence for MGC58341 (NM_183178.1,851-869).
catgaacattcgtgtgaaa

SEQ ID NO: 808828 - DNA, 19 bp, Mus musculus
  siRNA target sequence for MGC58341 (NM_183178.1,882-900).
gcggtggctggtgaattct

SEQ ID NO: 808829 - DNA, 19 bp, Mus musculus
  siRNA target sequence for MGC58341 (NM_183178.1,903-921).
gagccggtgaccttagaga

SEQ ID NO: 808830 - DNA, 19 bp, Mus musculus
  siRNA target sequence for MGC58341 (NM_183178.1,1011-1029).
gggaaggtccaagatatca

SEQ ID NO: 808831 - DNA, 19 bp, Mus musculus
  siRNA target sequence for MGC58341 (NM_183178.1,1057-1075).
ggaccgcatcccctgtaaa

SEQ ID NO: 808832 - DNA, 19 bp, Mus musculus
  siRNA target sequence for MGC58341 (NM_183178.1,1061-1079).
cgcatcccctgtaaactct

SEQ ID NO: 808833 - DNA, 19 bp, Mus musculus
  siRNA target sequence for MGC58341 (NM_183178.1,1138-1156).
ggttcacagctgagtctta

SEQ ID NO: 808834 - DNA, 19 bp, Mus musculus
  siRNA target sequence for MGC58341 (NM_183178.1,1416-1434).
caaggcctcctatctttct

SEQ ID NO: 808835 - DNA, 19 bp, Mus musculus
  siRNA target sequence for MGC58608 (NM_183182.1,67-85).
catccccaagtggttcaaa

SEQ ID NO: 808836 - DNA, 19 bp, Mus musculus
  siRNA target sequence for MGC58608 (NM_183182.1,103-121).
gcagagccacaggtttgat

SEQ ID NO: 808837 - DNA, 19 bp, Mus musculus
  siRNA target sequence for MGC58608 (NM_183182.1,173-191).
ccatactccagacatcatt

SEQ ID NO: 808838 - DNA, 19 bp, Mus musculus
  siRNA target sequence for MGC58608 (NM_183182.1,466-484).
gacacgtttccgaggtttt

SEQ ID NO: 808839 - DNA, 19 bp, Mus musculus
  siRNA target sequence for MGC58608 (NM_183182.1,468-486).
cacgtttccgaggttttat

SEQ ID NO: 808840 - DNA, 19 bp, Mus musculus
  siRNA target sequence for MGC58608 (NM_183182.1,557-575).
gcctggaaccgctcacatt

SEQ ID NO: 808841 - DNA, 19 bp, Mus musculus
  siRNA target sequence for MGC58608 (NM_183182.1,559-577).
ctggaaccgctcacattct

SEQ ID NO: 808842 - DNA, 19 bp, Mus musculus
  siRNA target sequence for MGC58608 (NM_183182.1,654-672).
ccatcaaaagcgatcttga

SEQ ID NO: 808843 - DNA, 19 bp, Mus musculus
  siRNA target sequence for MGC58608 (NM_183182.1,682-700).
gaaaaagtccactggtaat

SEQ ID NO: 808844 - DNA, 19 bp, Mus musculus
  siRNA target sequence for MGC58608 (NM_183182.1,701-719).
cgtggcccctatgacattt

SEQ ID NO: 808845 - DNA, 19 bp, Mus musculus
  siRNA target sequence for MGC58608 (NM_183182.1,741-759).
ctttgccctatggacatta

SEQ ID NO: 808846 - DNA, 19 bp, Mus musculus
  siRNA target sequence for MGC58608 (NM_183182.1,745-763).
gccctatggacattactct

SEQ ID NO: 808847 - DNA, 19 bp, Mus musculus
  siRNA target sequence for MGC58608 (NM_183182.1,804-822).
gctttctggacgaaatgaa

SEQ ID NO: 808848 - DNA, 19 bp, Mus musculus
  siRNA target sequence for MGC58608 (NM_183182.1,842-860).
caaggggttttctcgaaat

SEQ ID NO: 808849 - DNA, 19 bp, Mus musculus
  siRNA target sequence for MGC58608 (NM_183182.1,912-930).
gtcagtgccccaaaaatat

SEQ ID NO: 808850 - DNA, 19 bp, Mus musculus
  siRNA target sequence for MGC58608 (NM_183182.1,918-936).
gccccaaaaatatggatat

SEQ ID NO: 808851 - DNA, 19 bp, Mus musculus
  siRNA target sequence for MGC58608 (NM_183182.1,1067-1085).
ggcgtaggccgctatctca

SEQ ID NO: 808852 - DNA, 19 bp, Mus musculus
  siRNA target sequence for MGC58608 (NM_183182.1,1068-1086).
gcgtaggccgctatctcaa

SEQ ID NO: 808853 - DNA, 19 bp, Mus musculus
  siRNA target sequence for MGC58608 (NM_183182.1,1122-1140).
gataccgttctctgtacat

SEQ ID NO: 808854 - DNA, 19 bp, Mus musculus
  siRNA target sequence for MGC58608 (NM_183182.1,1186-1204).
catgcagaaacggattaca

SEQ ID NO: 808855 - DNA, 19 bp, Mus musculus
  siRNA target sequence for MGC58608 (NM_183182.1,1196-1214).
cggattacacctattacga

SEQ ID NO: 808856 - DNA, 19 bp, Mus musculus
  siRNA target sequence for MGC58608 (NM_183182.1,1197-1215).
ggattacacctattacgaa

SEQ ID NO: 808857 - DNA, 19 bp, Mus musculus
  siRNA target sequence for MGC58608 (NM_183182.1,1229-1247).
ccaactgtggactacaatt

SEQ ID NO: 808858 - DNA, 19 bp, Mus musculus
  siRNA target sequence for MGC58608 (NM_183182.1,1233-1251).
ctgtggactacaattcaga

SEQ ID NO: 808859 - DNA, 19 bp, Mus musculus
  siRNA target sequence for C730021L23 (NM_183183.1,268-286).
ggtgactaaagcttcgata

SEQ ID NO: 808860 - DNA, 19 bp, Mus musculus
  siRNA target sequence for C730021L23 (NM_183183.1,350-368).
cagccagataacaatgcta

SEQ ID NO: 808861 - DNA, 19 bp, Mus musculus
  siRNA target sequence for C730021L23 (NM_183183.1,500-518).
ccagtgtctcccaaacaga

SEQ ID NO: 808862 - DNA, 19 bp, Mus musculus
  siRNA target sequence for C730021L23 (NM_183183.1,577-595).
cgctactgcacaaaaggaa

SEQ ID NO: 808863 - DNA, 19 bp, Mus musculus
  siRNA target sequence for C730021L23 (NM_183183.1,884-902).
gggcagaaagtcatcaata

SEQ ID NO: 808864 - DNA, 19 bp, Mus musculus
  siRNA target sequence for C730021L23 (NM_183183.1,885-903).
ggcagaaagtcatcaataa

SEQ ID NO: 808865 - DNA, 19 bp, Mus musculus
  siRNA target sequence for C730021L23 (NM_183183.1,921-939).
gtgaacctccagtaagaga

SEQ ID NO: 808866 - DNA, 19 bp, Mus musculus
  siRNA target sequence for C730021L23 (NM_183183.1,1030-1048).
caaaggggccacatgttct

SEQ ID NO: 808867 - DNA, 19 bp, Mus musculus
  siRNA target sequence for C730021L23 (NM_183183.1,1081-1099).
gtatcctgtgtcaaggttt

SEQ ID NO: 808868 - DNA, 19 bp, Mus musculus
  siRNA target sequence for C730021L23 (NM_183183.1,1234-1252).
ccccgcatatttaaaagaa

SEQ ID NO: 808869 - DNA, 19 bp, Mus musculus
  siRNA target sequence for C730021L23 (NM_183183.1,1372-1390).
gcaatgccccagcattgta

SEQ ID NO: 808870 - DNA, 19 bp, Mus musculus
  siRNA target sequence for C730021L23 (NM_183183.1,1493-1511).
catgtgacctccagtcaaa

SEQ ID NO: 808871 - DNA, 19 bp, Mus musculus
  siRNA target sequence for C730021L23 (NM_183183.1,1566-1584).
gacagcctgaaggtactaa

SEQ ID NO: 808872 - DNA, 19 bp, Mus musculus
  siRNA target sequence for C730021L23 (NM_183183.1,1570-1588).
gcctgaaggtactaatcct

SEQ ID NO: 808873 - DNA, 19 bp, Mus musculus
  siRNA target sequence for C730021L23 (NM_183183.1,1634-1652).
gggagtcaagctgagataa

SEQ ID NO: 808874 - DNA, 19 bp, Mus musculus
  siRNA target sequence for C730021L23 (NM_183183.1,1638-1656).
gtcaagctgagataaatca

SEQ ID NO: 808875 - DNA, 19 bp, Mus musculus
  siRNA target sequence for C730021L23 (NM_183183.1,1755-1773).
gaggtgccaacaaagacta

SEQ ID NO: 808876 - DNA, 19 bp, Mus musculus
  siRNA target sequence for C730021L23 (NM_183183.1,1827-1845).
ctgcgtctcctcttatcgt

SEQ ID NO: 808877 - DNA, 19 bp, Mus musculus
  siRNA target sequence for C730021L23 (NM_183183.1,1890-1908).
ccctattgctaaatcctaa

SEQ ID NO: 808878 - DNA, 19 bp, Mus musculus
  siRNA target sequence for C730021L23 (NM_183183.1,1891-1909).
cctattgctaaatcctaaa

SEQ ID NO: 808879 - DNA, 19 bp, Mus musculus
  siRNA target sequence for C730021L23 (NM_183183.1,1892-1910).
ctattgctaaatcctaaat

SEQ ID NO: 808880 - DNA, 19 bp, Mus musculus
  siRNA target sequence for C730021L23 (NM_183183.1,1905-1923).
ctaaatctcaggtaaagga

SEQ ID NO: 808881 - DNA, 19 bp, Mus musculus
  siRNA target sequence for C730021L23 (NM_183183.1,2321-2339).
gttgccatccagaaccatt

SEQ ID NO: 808882 - DNA, 19 bp, Mus musculus
  siRNA target sequence for C730021L23 (NM_183183.1,2357-2375).
gaacatgagaagatagtta

SEQ ID NO: 808883 - DNA, 19 bp, Mus musculus
  siRNA target sequence for C730021L23 (NM_183183.1,2390-2408).
cagactcgaagatcaattt

SEQ ID NO: 808884 - DNA, 19 bp, Mus musculus
  siRNA target sequence for C730021L23 (NM_183183.1,2414-2432).
gattcttcttcaagtaaga

SEQ ID NO: 808885 - DNA, 19 bp, Mus musculus
  siRNA target sequence for C730021L23 (NM_183183.1,2434-2452).
gcttaaagggagacaacat

SEQ ID NO: 808886 - DNA, 19 bp, Mus musculus
  siRNA target sequence for C730021L23 (NM_183183.1,2462-2480).
cagtccatgctgcaaaact

SEQ ID NO: 808887 - DNA, 19 bp, Mus musculus
  siRNA target sequence for AW556347 (NM_183186.1,132-150).
gtgaattcatctgttaact

SEQ ID NO: 808888 - DNA, 19 bp, Mus musculus
  siRNA target sequence for AW556347 (NM_183186.1,144-162).
gttaactcctcctttgaga

SEQ ID NO: 808889 - DNA, 19 bp, Mus musculus
  siRNA target sequence for MGC58343 (NM_183187.2,439-457).
caccgtgagctgcttatga

SEQ ID NO: 808890 - DNA, 19 bp, Mus musculus
  siRNA target sequence for MGC58343 (NM_183187.2,672-690).
caaagtccgggaaaaccta

SEQ ID NO: 808891 - DNA, 19 bp, Mus musculus
  siRNA target sequence for AA589563 (NM_183189.1,31-49).
gtcctacggctgctattct

SEQ ID NO: 808892 - DNA, 19 bp, Mus musculus
  siRNA target sequence for AA589563 (NM_183189.1,134-152).
cagagcactcgcttctact

SEQ ID NO: 808893 - DNA, 19 bp, Mus musculus
  siRNA target sequence for AA589563 (NM_183189.1,301-319).
ctgcagaaccacatatgct

SEQ ID NO: 808894 - DNA, 19 bp, Mus musculus
  siRNA target sequence for Ms4a5 (NM_183190.1,129-147).
gaggtcaccactcaagaat

SEQ ID NO: 808895 - DNA, 19 bp, Mus musculus
  siRNA target sequence for Ms4a5 (NM_183190.1,193-211).
gagtgcagaagatcattat

SEQ ID NO: 808896 - DNA, 19 bp, Mus musculus
  siRNA target sequence for Ms4a5 (NM_183190.1,252-270).
ggaatcatgaacttttcat

SEQ ID NO: 808897 - DNA, 19 bp, Mus musculus
  siRNA target sequence for Ms4a5 (NM_183190.1,342-360).
cctttctggggctctgttt

SEQ ID NO: 808898 - DNA, 19 bp, Mus musculus
  siRNA target sequence for Ms4a5 (NM_183190.1,406-424).
ctacggacactctgataaa

SEQ ID NO: 808899 - DNA, 19 bp, Mus musculus
  siRNA target sequence for Ms4a5 (NM_183190.1,409-427).
cggacactctgataaaaat

SEQ ID NO: 808900 - DNA, 19 bp, Mus musculus
  siRNA target sequence for Ms4a5 (NM_183190.1,411-429).
gacactctgataaaaatga

SEQ ID NO: 808901 - DNA, 19 bp, Mus musculus
  siRNA target sequence for Ms4a5 (NM_183190.1,434-452).
ggcaatgaatttacttagt

SEQ ID NO: 808902 - DNA, 19 bp, Mus musculus
  siRNA target sequence for Ms4a5 (NM_183190.1,471-489).
ggaatcattctcctcatat

SEQ ID NO: 808903 - DNA, 19 bp, Mus musculus
  siRNA target sequence for Ms4a5 (NM_183190.1,501-519).
ctagatggggaattcatct

SEQ ID NO: 808904 - DNA, 19 bp, Mus musculus
  siRNA target sequence for Ms4a5 (NM_183190.1,523-541).
gctattctccagatggtat

SEQ ID NO: 808905 - DNA, 19 bp, Mus musculus
  siRNA target sequence for Ms4a5 (NM_183190.1,538-556).
gtatgcagtgtggtgttat

SEQ ID NO: 808906 - DNA, 19 bp, Mus musculus
  siRNA target sequence for Ms4a5 (NM_183190.1,543-561).
cagtgtggtgttattacca

SEQ ID NO: 808907 - DNA, 19 bp, Mus musculus
  siRNA target sequence for Ms4a5 (NM_183190.1,549-567).
ggtgttattaccattctat

SEQ ID NO: 808908 - DNA, 19 bp, Mus musculus
  siRNA target sequence for Ms4a5 (NM_183190.1,601-619).
gcattgttgaactcttcat

SEQ ID NO: 808909 - DNA, 19 bp, Mus musculus
  siRNA target sequence for MGC57096 (NM_183191.1,148-166).
ccgggacacagatgatcaa

SEQ ID NO: 808910 - DNA, 19 bp, Mus musculus
  siRNA target sequence for MGC57096 (NM_183191.1,149-167).
cgggacacagatgatcaaa

SEQ ID NO: 808911 - DNA, 19 bp, Mus musculus
  siRNA target sequence for MGC57096 (NM_183191.1,434-452).
gatcacgggcctcaagtat

SEQ ID NO: 808912 - DNA, 19 bp, Mus musculus
  siRNA target sequence for MGC57096 (NM_183191.1,439-457).
cgggcctcaagtatctgat

SEQ ID NO: 808913 - DNA, 19 bp, Mus musculus
  siRNA target sequence for MGC57096 (NM_183191.1,548-566).
cggtgatggcttattgaat

SEQ ID NO: 808914 - DNA, 19 bp, Mus musculus
  siRNA target sequence for MGC57096 (NM_183191.1,549-567).
ggtgatggcttattgaata

SEQ ID NO: 808915 - DNA, 19 bp, Mus musculus
  siRNA target sequence for MGC57096 (NM_183191.1,550-568).
gtgatggcttattgaatat

SEQ ID NO: 808916 - DNA, 19 bp, Mus musculus
  siRNA target sequence for MGC57096 (NM_183191.1,584-602).
gctgatgcataaactaaat

SEQ ID NO: 808917 - DNA, 19 bp, Mus musculus
  siRNA target sequence for MGC57096 (NM_183191.1,635-653).
gtttcaggaagcagataca

SEQ ID NO: 808918 - DNA, 19 bp, Mus musculus
  siRNA target sequence for MGC57096 (NM_183191.1,665-683).
gggaaccttgacatttgaa

SEQ ID NO: 808919 - DNA, 19 bp, Mus musculus
  siRNA target sequence for MGC57096 (NM_183191.1,670-688).
ccttgacatttgaagagtt

SEQ ID NO: 808920 - DNA, 19 bp, Mus musculus
  siRNA target sequence for MGC57096 (NM_183191.1,686-704).
gttctgcgttttttacaaa

SEQ ID NO: 808921 - DNA, 19 bp, Mus musculus
  siRNA target sequence for MGC57096 (NM_183191.1,691-709).
gcgttttttacaaaatgat

SEQ ID NO: 808922 - DNA, 19 bp, Mus musculus
  siRNA target sequence for MGC57096 (NM_183191.1,718-736).
gacgagacctctatttgct

SEQ ID NO: 808923 - DNA, 19 bp, Mus musculus
  siRNA target sequence for MGC57096 (NM_183191.1,801-819).
gtggaacaaaagatgagta

SEQ ID NO: 808924 - DNA, 19 bp, Mus musculus
  siRNA target sequence for MGC57096 (NM_183191.1,803-821).
ggaacaaaagatgagtaat

SEQ ID NO: 808925 - DNA, 19 bp, Mus musculus
  siRNA target sequence for MGC57096 (NM_183191.1,824-842).
gacactggactattgtctt

SEQ ID NO: 808926 - DNA, 19 bp, Mus musculus
  siRNA target sequence for MGC57096 (NM_183191.1,884-902).
gaaaaacgtccttggtata

SEQ ID NO: 808927 - DNA, 19 bp, Mus musculus
  siRNA target sequence for MGC57096 (NM_183191.1,903-921).
gaaggcttcacgaacttca

SEQ ID NO: 808928 - DNA, 19 bp, Mus musculus
  siRNA target sequence for MGC57096 (NM_183191.1,928-946).
gccctgcctgtgacgtatt

SEQ ID NO: 808929 - DNA, 19 bp, Mus musculus
  siRNA target sequence for MGC57096 (NM_183191.1,929-947).
ccctgcctgtgacgtattt

SEQ ID NO: 808930 - DNA, 19 bp, Mus musculus
  siRNA target sequence for MGC57096 (NM_183191.1,930-948).
cctgcctgtgacgtattta

SEQ ID NO: 808931 - DNA, 19 bp, Mus musculus
  siRNA target sequence for MGC57096 (NM_183191.1,931-949).
ctgcctgtgacgtatttaa

SEQ ID NO: 808932 - DNA, 19 bp, Mus musculus
  siRNA target sequence for MGC57096 (NM_183191.1,952-970).
cgttgcaccatgaagtgta

SEQ ID NO: 808933 - DNA, 19 bp, Mus musculus
  siRNA target sequence for MGC57096 (NM_183191.1,987-1005).
cccctgtgcaactactaca

SEQ ID NO: 808934 - DNA, 19 bp, Mus musculus
  siRNA target sequence for MGC57096 (NM_183191.1,1051-1069).
ctcaatctaaagtggatat

SEQ ID NO: 808935 - DNA, 19 bp, Mus musculus
  siRNA target sequence for MGC57096 (NM_183191.1,1141-1159).
cagtggtccaccatggtta

SEQ ID NO: 808936 - DNA, 19 bp, Mus musculus
  siRNA target sequence for MGC57096 (NM_183191.1,1143-1161).
gtggtccaccatggttata

SEQ ID NO: 808937 - DNA, 19 bp, Mus musculus
  siRNA target sequence for MGC57096 (NM_183191.1,1145-1163).
ggtccaccatggttatact

SEQ ID NO: 808938 - DNA, 19 bp, Mus musculus
  siRNA target sequence for MGC57096 (NM_183191.1,1162-1180).
ctctcacttcaaaaattct

SEQ ID NO: 808939 - DNA, 19 bp, Mus musculus
  siRNA target sequence for MGC57096 (NM_183191.1,1191-1209).
gttgtggagaccatcaaca

SEQ ID NO: 808940 - DNA, 19 bp, Mus musculus
  siRNA target sequence for MGC57096 (NM_183191.1,1201-1219).
ccatcaacaagcatgcatt

SEQ ID NO: 808941 - DNA, 19 bp, Mus musculus
  siRNA target sequence for MGC57096 (NM_183191.1,1211-1229).
gcatgcattcgtgaagaat

SEQ ID NO: 808942 - DNA, 19 bp, Mus musculus
  siRNA target sequence for MGC57096 (NM_183191.1,1215-1233).
gcattcgtgaagaatgagt

SEQ ID NO: 808943 - DNA, 19 bp, Mus musculus
  siRNA target sequence for MGC57096 (NM_183191.1,1290-1308).
gctcagtacctgaaaggta

SEQ ID NO: 808944 - DNA, 19 bp, Mus musculus
  siRNA target sequence for MGC57096 (NM_183191.1,1293-1311).
cagtacctgaaaggtatat

SEQ ID NO: 808945 - DNA, 19 bp, Mus musculus
  siRNA target sequence for MGC57096 (NM_183191.1,1306-1324).
gtatattgcaggacaaact

SEQ ID NO: 808946 - DNA, 19 bp, Mus musculus
  siRNA target sequence for MGC57096 (NM_183191.1,1395-1413).
ctagtgaagggcaagaagt

SEQ ID NO: 808947 - DNA, 19 bp, Mus musculus
  siRNA target sequence for MGC57096 (NM_183191.1,1482-1500).
gaagatgagtgcaagttca

SEQ ID NO: 808948 - DNA, 19 bp, Mus musculus
  siRNA target sequence for MGC57096 (NM_183191.1,1527-1545).
gagcaccaggtagaatctt

SEQ ID NO: 808949 - DNA, 19 bp, Mus musculus
  siRNA target sequence for MGC57096 (NM_183191.1,1586-1604).
gattcgagacaaagaagat

SEQ ID NO: 808950 - DNA, 19 bp, Mus musculus
  siRNA target sequence for MGC57096 (NM_183191.1,1618-1636).
cagtgagggcgttactcaa

SEQ ID NO: 808951 - DNA, 19 bp, Mus musculus
  siRNA target sequence for MGC57096 (NM_183191.1,1639-1657).
ctacacatgaaggcttaaa

SEQ ID NO: 808952 - DNA, 19 bp, Mus musculus
  siRNA target sequence for MGC57096 (NM_183191.1,1725-1743).
gccaactttgggaaacaca

SEQ ID NO: 808953 - DNA, 19 bp, Mus musculus
  siRNA target sequence for MGC57096 (NM_183191.1,1726-1744).
ccaactttgggaaacacaa

SEQ ID NO: 808954 - DNA, 19 bp, Mus musculus
  siRNA target sequence for MGC57096 (NM_183191.1,1740-1758).
cacaagaaagctacgaaat

SEQ ID NO: 808955 - DNA, 19 bp, Mus musculus
  siRNA target sequence for MGC57096 (NM_183191.1,1750-1768).
ctacgaaatcacgttctaa

SEQ ID NO: 808956 - DNA, 19 bp, Mus musculus
  siRNA target sequence for MGC57096 (NM_183191.1,1906-1924).
ccgtggcagcccaggatat

SEQ ID NO: 808957 - DNA, 19 bp, Mus musculus
  siRNA target sequence for MGC57096 (NM_183191.1,1955-1973).
gtccttcagcgaaacaaga

SEQ ID NO: 808958 - DNA, 19 bp, Mus musculus
  siRNA target sequence for MGC57096 (NM_183191.1,1999-2017).
cagagcagttcatgatcta

SEQ ID NO: 808959 - DNA, 19 bp, Mus musculus
  siRNA target sequence for MGC57096 (NM_183191.1,2058-2076).
cgcatcgattccagtaact

SEQ ID NO: 808960 - DNA, 19 bp, Mus musculus
  siRNA target sequence for MGC57096 (NM_183191.1,2141-2159).
gcgaatgatgcagatcaat

SEQ ID NO: 808961 - DNA, 19 bp, Mus musculus
  siRNA target sequence for MGC57096 (NM_183191.1,2150-2168).
gcagatcaatcgagcaaaa

SEQ ID NO: 808962 - DNA, 19 bp, Mus musculus
  siRNA target sequence for MGC57096 (NM_183191.1,2151-2169).
cagatcaatcgagcaaaat

SEQ ID NO: 808963 - DNA, 19 bp, Mus musculus
  siRNA target sequence for MGC57096 (NM_183191.1,2208-2226).
cagcaaatgtgcaaaggta

SEQ ID NO: 808964 - DNA, 19 bp, Mus musculus
  siRNA target sequence for MGC57096 (NM_183191.1,2257-2275).
ctgccaaccccaaaaaaca

SEQ ID NO: 808965 - DNA, 19 bp, Mus musculus
  siRNA target sequence for MGC57096 (NM_183191.1,2348-2366).
gatcattgaccctttcgtt

SEQ ID NO: 808966 - DNA, 19 bp, Mus musculus
  siRNA target sequence for MGC57096 (NM_183191.1,2357-2375).
ccctttcgttgaagttgaa

SEQ ID NO: 808967 - DNA, 19 bp, Mus musculus
  siRNA target sequence for MGC57096 (NM_183191.1,2358-2376).
cctttcgttgaagttgaaa

SEQ ID NO: 808968 - DNA, 19 bp, Mus musculus
  siRNA target sequence for MGC57096 (NM_183191.1,2449-2467).
gggaagaaaccctaacttt

SEQ ID NO: 808969 - DNA, 19 bp, Mus musculus
  siRNA target sequence for MGC57096 (NM_183191.1,2504-2522).
ccttgtgtgggatcatgat

SEQ ID NO: 808970 - DNA, 19 bp, Mus musculus
  siRNA target sequence for MGC57096 (NM_183191.1,2510-2528).
gtgggatcatgatcctatt

SEQ ID NO: 808971 - DNA, 19 bp, Mus musculus
  siRNA target sequence for MGC57096 (NM_183191.1,2605-2623).
gactcacagaagcatctat

SEQ ID NO: 808972 - DNA, 19 bp, Mus musculus
  siRNA target sequence for MGC57096 (NM_183191.1,2611-2629).
cagaagcatctattttcgt

SEQ ID NO: 808973 - DNA, 19 bp, Mus musculus
  siRNA target sequence for MGC57096 (NM_183191.1,2627-2645).
cgttcacataaccatcaat

SEQ ID NO: 808974 - DNA, 19 bp, Mus musculus
  siRNA target sequence for MGC57096 (NM_183191.1,2679-2697).
ctgaaggggctgttcaata

SEQ ID NO: 808975 - DNA, 19 bp, Mus musculus
  siRNA target sequence for MGC57096 (NM_183191.1,2707-2725).
ggcacgcttcttcagaaaa

SEQ ID NO: 808976 - DNA, 19 bp, Mus musculus
  siRNA target sequence for MGC57096 (NM_183191.1,2855-2873).
ctctgaggcttcaagagat

SEQ ID NO: 808977 - DNA, 19 bp, Mus musculus
  siRNA target sequence for MGC57096 (NM_183191.1,2988-3006).
gacacggatggaaaagaaa

SEQ ID NO: 808978 - DNA, 19 bp, Mus musculus
  siRNA target sequence for MGC57096 (NM_183191.1,3041-3059).
gggagccgcaactagaaaa

SEQ ID NO: 808979 - DNA, 19 bp, Mus musculus
  siRNA target sequence for MGC57096 (NM_183191.1,3052-3070).
ctagaaaagacccacattt

SEQ ID NO: 808980 - DNA, 19 bp, Mus musculus
  siRNA target sequence for MGC57096 (NM_183191.1,3106-3124).
gtgcgctcctccacaaaga

SEQ ID NO: 808981 - DNA, 19 bp, Mus musculus
  siRNA target sequence for MGC57096 (NM_183191.1,3135-3153).
gggccaactgccagtgtat

SEQ ID NO: 808982 - DNA, 19 bp, Mus musculus
  siRNA target sequence for MGC57096 (NM_183191.1,3204-3222).
ccaaatatgacaaatgatt

SEQ ID NO: 808983 - DNA, 19 bp, Mus musculus
  siRNA target sequence for MGC57096 (NM_183191.1,3376-3394).
ccggaagcgttctttctca

SEQ ID NO: 808984 - DNA, 19 bp, Mus musculus
  siRNA target sequence for MGC57096 (NM_183191.1,3377-3395).
cggaagcgttctttctcaa

SEQ ID NO: 808985 - DNA, 19 bp, Mus musculus
  siRNA target sequence for MGC57096 (NM_183191.1,3383-3401).
cgttctttctcaaagttct

SEQ ID NO: 808986 - DNA, 19 bp, Mus musculus
  siRNA target sequence for MGC57096 (NM_183191.1,3484-3502).
gttctgacatccctgattt

SEQ ID NO: 808987 - DNA, 19 bp, Mus musculus
  siRNA target sequence for MGC57096 (NM_183191.1,3489-3507).
gacatccctgatttacatt

SEQ ID NO: 808988 - DNA, 19 bp, Mus musculus
  siRNA target sequence for MGC57096 (NM_183191.1,3519-3537).
ctacaggacactgaaattt

SEQ ID NO: 808989 - DNA, 19 bp, Mus musculus
  siRNA target sequence for MGC57096 (NM_183191.1,3524-3542).
ggacactgaaatttccaat

SEQ ID NO: 808990 - DNA, 19 bp, Mus musculus
  siRNA target sequence for MGC57096 (NM_183191.1,3529-3547).
ctgaaatttccaatctcat

SEQ ID NO: 808991 - DNA, 19 bp, Mus musculus
  siRNA target sequence for MGC57096 (NM_183191.1,3545-3563).
cattgatgacgtgacttta

SEQ ID NO: 808992 - DNA, 19 bp, Mus musculus
  siRNA target sequence for MGC57096 (NM_183191.1,3549-3567).
gatgacgtgactttaacaa

SEQ ID NO: 808993 - DNA, 19 bp, Mus musculus
  siRNA target sequence for MGC57096 (NM_183191.1,3555-3573).
gtgactttaacaaatgaga

SEQ ID NO: 808994 - DNA, 19 bp, Mus musculus
  siRNA target sequence for MGC57096 (NM_183191.1,3623-3641).
caaccacccggctaacgtt

SEQ ID NO: 808995 - DNA, 19 bp, Mus musculus
  siRNA target sequence for MGC57096 (NM_183191.1,3787-3805).
ccaccaaactggcaaataa

SEQ ID NO: 808996 - DNA, 19 bp, Mus musculus
  siRNA target sequence for MGC57096 (NM_183191.1,3813-3831).
ccttgtggagtgattggtt

SEQ ID NO: 808997 - DNA, 19 bp, Mus musculus
  siRNA target sequence for MGC57096 (NM_183191.1,3855-3873).
ggtgatgacccttcagata

SEQ ID NO: 808998 - DNA, 19 bp, Mus musculus
  siRNA target sequence for MGC57096 (NM_183191.1,3998-4016).
cacggagttggccatagaa

SEQ ID NO: 808999 - DNA, 19 bp, Mus musculus
  siRNA target sequence for MGC57096 (NM_183191.1,4001-4019).
ggagttggccatagaagat

SEQ ID NO: 809000 - DNA, 19 bp, Mus musculus
  siRNA target sequence for MGC57096 (NM_183191.1,4002-4020).
gagttggccatagaagata

SEQ ID NO: 809001 - DNA, 19 bp, Mus musculus
  siRNA target sequence for MGC57096 (NM_183191.1,4004-4022).
gttggccatagaagatata

SEQ ID NO: 809002 - DNA, 19 bp, Mus musculus
  siRNA target sequence for MGC57096 (NM_183191.1,4031-4049).
ccctgctctctctataaat

SEQ ID NO: 809003 - DNA, 19 bp, Mus musculus
  siRNA target sequence for MGC57096 (NM_183191.1,4032-4050).
cctgctctctctataaatt

SEQ ID NO: 809004 - DNA, 19 bp, Mus musculus
  siRNA target sequence for MGC57096 (NM_183191.1,4080-4098).
ggagaatctgaaaacctat

SEQ ID NO: 809005 - DNA, 19 bp, Mus musculus
  siRNA target sequence for MGC57096 (NM_183191.1,4121-4139).
ggaagaagctccaagtcaa

SEQ ID NO: 809006 - DNA, 19 bp, Mus musculus
  siRNA target sequence for MGC57096 (NM_183191.1,4128-4146).
gctccaagtcaacttgttt

SEQ ID NO: 809007 - DNA, 19 bp, Mus musculus
  siRNA target sequence for MGC57096 (NM_183191.1,4233-4251).
ccttctgaaatattcaaca

SEQ ID NO: 809008 - DNA, 19 bp, Mus musculus
  siRNA target sequence for MGC57096 (NM_183191.1,4272-4290).
cacagtatttctcatctaa

SEQ ID NO: 809009 - DNA, 19 bp, Mus musculus
  siRNA target sequence for MGC57096 (NM_183191.1,4299-4317).
ggtgctggctttgtgtata

SEQ ID NO: 809010 - DNA, 19 bp, Mus musculus
  siRNA target sequence for MGC57096 (NM_183191.1,4300-4318).
gtgctggctttgtgtataa

SEQ ID NO: 809011 - DNA, 19 bp, Mus musculus
  siRNA target sequence for MGC57096 (NM_183191.1,4303-4321).
ctggctttgtgtataacca

SEQ ID NO: 809012 - DNA, 19 bp, Mus musculus
  siRNA target sequence for MGC57096 (NM_183191.1,4305-4323).
ggctttgtgtataaccatt

SEQ ID NO: 809013 - DNA, 19 bp, Mus musculus
  siRNA target sequence for MGC57096 (NM_183191.1,4306-4324).
gctttgtgtataaccattt

SEQ ID NO: 809014 - DNA, 19 bp, Mus musculus
  siRNA target sequence for MGC57096 (NM_183191.1,4311-4329).
gtgtataaccatttctcaa

SEQ ID NO: 809015 - DNA, 19 bp, Mus musculus
  siRNA target sequence for MGC57096 (NM_183191.1,4319-4337).
ccatttctcaagttcagat

SEQ ID NO: 809016 - DNA, 19 bp, Mus musculus
  siRNA target sequence for MGC57096 (NM_183191.1,4330-4348).
gttcagatgcaaaaacgaa

SEQ ID NO: 809017 - DNA, 19 bp, Mus musculus
  siRNA target sequence for MGC57096 (NM_183191.1,4372-4390).
ctagggctccagatatgca

SEQ ID NO: 809018 - DNA, 19 bp, Mus musculus
  siRNA target sequence for MGC57096 (NM_183191.1,4440-4458).
ctgccaagcccatgcaaat

SEQ ID NO: 809019 - DNA, 19 bp, Mus musculus
  siRNA target sequence for MGC57096 (NM_183191.1,4450-4468).
catgcaaatccaaaagtct

SEQ ID NO: 809020 - DNA, 19 bp, Mus musculus
  siRNA target sequence for MGC57096 (NM_183191.1,4490-4508).
cattgcctgcaattttgaa

SEQ ID NO: 809021 - DNA, 19 bp, Mus musculus
  siRNA target sequence for MGC57096 (NM_183191.1,4555-4573).
gggacaagagcgtgactat

SEQ ID NO: 809022 - DNA, 19 bp, Mus musculus
  siRNA target sequence for MGC57096 (NM_183191.1,4557-4575).
gacaagagcgtgactatga

SEQ ID NO: 809023 - DNA, 19 bp, Mus musculus
  siRNA target sequence for MGC57096 (NM_183191.1,4564-4582).
gcgtgactatgaagacaaa

SEQ ID NO: 809024 - DNA, 19 bp, Mus musculus
  siRNA target sequence for MGC57096 (NM_183191.1,4654-4672).
gtcaagtgctctactcaaa

SEQ ID NO: 809025 - DNA, 19 bp, Mus musculus
  siRNA target sequence for MGC57096 (NM_183191.1,4667-4685).
ctcaaagcaggatgtcaat

SEQ ID NO: 809026 - DNA, 19 bp, Mus musculus
  siRNA target sequence for MGC57096 (NM_183191.1,4698-4716).
gcattagtcagaaagttgt

SEQ ID NO: 809027 - DNA, 19 bp, Mus musculus
  siRNA target sequence for MGC57096 (NM_183191.1,4730-4748).
gagcagagtgcgcaacatt

SEQ ID NO: 809028 - DNA, 19 bp, Mus musculus
  siRNA target sequence for MGC57096 (NM_183191.1,4776-4794).
gctggcaagcaaaaagcta

SEQ ID NO: 809029 - DNA, 19 bp, Mus musculus
  siRNA target sequence for MGC57096 (NM_183191.1,4815-4833).
ggagtggtccttagaagta

SEQ ID NO: 809030 - DNA, 19 bp, Mus musculus
  siRNA target sequence for MGC57096 (NM_183191.1,4816-4834).
gagtggtccttagaagtaa

SEQ ID NO: 809031 - DNA, 19 bp, Mus musculus
  siRNA target sequence for MGC57096 (NM_183191.1,4868-4886).
ctccacgggctcatacatt

SEQ ID NO: 809032 - DNA, 19 bp, Mus musculus
  siRNA target sequence for MGC57096 (NM_183191.1,4973-4991).
catggaccagttttgttca

SEQ ID NO: 809033 - DNA, 19 bp, Mus musculus
  siRNA target sequence for MGC57096 (NM_183191.1,4979-4997).
ccagttttgttcagataat

SEQ ID NO: 809034 - DNA, 19 bp, Mus musculus
  siRNA target sequence for MGC57096 (NM_183191.1,4982-5000).
gttttgttcagataattca

SEQ ID NO: 809035 - DNA, 19 bp, Mus musculus
  siRNA target sequence for MGC57096 (NM_183191.1,5015-5033).
gccaagcagcgaagataaa

SEQ ID NO: 809036 - DNA, 19 bp, Mus musculus
  siRNA target sequence for MGC57096 (NM_183191.1,5024-5042).
cgaagataaacccgaaatt

SEQ ID NO: 809037 - DNA, 19 bp, Mus musculus
  siRNA target sequence for MGC57096 (NM_183191.1,5028-5046).
gataaacccgaaatttatt

SEQ ID NO: 809038 - DNA, 19 bp, Mus musculus
  siRNA target sequence for Slfn5 (NM_183201.2,204-222).
ggatttggaactgaacttt

SEQ ID NO: 809039 - DNA, 19 bp, Mus musculus
  siRNA target sequence for Slfn5 (NM_183201.2,214-232).
ctgaactttgcggaatgta

SEQ ID NO: 809040 - DNA, 19 bp, Mus musculus
  siRNA target sequence for Slfn5 (NM_183201.2,216-234).
gaactttgcggaatgtata

SEQ ID NO: 809041 - DNA, 19 bp, Mus musculus
  siRNA target sequence for Slfn5 (NM_183201.2,219-237).
ctttgcggaatgtatacaa

SEQ ID NO: 809042 - DNA, 19 bp, Mus musculus
  siRNA target sequence for Slfn5 (NM_183201.2,296-314).
gcatgaaacagaacgaaat

SEQ ID NO: 809043 - DNA, 19 bp, Mus musculus
  siRNA target sequence for Slfn5 (NM_183201.2,448-466).
gacgagatgctgtatggaa

SEQ ID NO: 809044 - DNA, 19 bp, Mus musculus
  siRNA target sequence for Slfn5 (NM_183201.2,527-545).
ccctgtgctccaatttgta

SEQ ID NO: 809045 - DNA, 19 bp, Mus musculus
  siRNA target sequence for Slfn5 (NM_183201.2,549-567).
cagatgtggaacatttact

SEQ ID NO: 809046 - DNA, 19 bp, Mus musculus
  siRNA target sequence for Slfn5 (NM_183201.2,551-569).
gatgtggaacatttactga

SEQ ID NO: 809047 - DNA, 19 bp, Mus musculus
  siRNA target sequence for Slfn5 (NM_183201.2,609-627).
ggtccaggatcctaggatt

SEQ ID NO: 809048 - DNA, 19 bp, Mus musculus
  siRNA target sequence for Slfn5 (NM_183201.2,636-654).
ctctgactcgctaaatcta

SEQ ID NO: 809049 - DNA, 19 bp, Mus musculus
  siRNA target sequence for Slfn5 (NM_183201.2,687-705).
cttagcttctgatttgttt

SEQ ID NO: 809050 - DNA, 19 bp, Mus musculus
  siRNA target sequence for Slfn5 (NM_183201.2,721-739).
cagtacctggaaaaactca

SEQ ID NO: 809051 - DNA, 19 bp, Mus musculus
  siRNA target sequence for Slfn5 (NM_183201.2,750-768).
gtcctcacacgttgaattt

SEQ ID NO: 809052 - DNA, 19 bp, Mus musculus
  siRNA target sequence for Slfn5 (NM_183201.2,752-770).
cctcacacgttgaatttca

SEQ ID NO: 809053 - DNA, 19 bp, Mus musculus
  siRNA target sequence for Slfn5 (NM_183201.2,755-773).
cacacgttgaatttcaaat

SEQ ID NO: 809054 - DNA, 19 bp, Mus musculus
  siRNA target sequence for Slfn5 (NM_183201.2,827-845).
ctgcacttgccaattctga

SEQ ID NO: 809055 - DNA, 19 bp, Mus musculus
  siRNA target sequence for Slfn5 (NM_183201.2,842-860).
ctgaagggggctatgtgtt

SEQ ID NO: 809056 - DNA, 19 bp, Mus musculus
  siRNA target sequence for Slfn5 (NM_183201.2,849-867).
gggctatgtgttttttggt

SEQ ID NO: 809057 - DNA, 19 bp, Mus musculus
  siRNA target sequence for Slfn5 (NM_183201.2,923-941).
ccaacttgaaatctactat

SEQ ID NO: 809058 - DNA, 19 bp, Mus musculus
  siRNA target sequence for Slfn5 (NM_183201.2,927-945).
cttgaaatctactatcgat

SEQ ID NO: 809059 - DNA, 19 bp, Mus musculus
  siRNA target sequence for Slfn5 (NM_183201.2,980-998).
gtggacaaaaccacaaagt

SEQ ID NO: 809060 - DNA, 19 bp, Mus musculus
  siRNA target sequence for Slfn5 (NM_183201.2,997-1015).
gtgcaatatgagcttaaat

SEQ ID NO: 809061 - DNA, 19 bp, Mus musculus
  siRNA target sequence for Slfn5 (NM_183201.2,1039-1057).
gccctccatgggtatgtct

SEQ ID NO: 809062 - DNA, 19 bp, Mus musculus
  siRNA target sequence for Slfn5 (NM_183201.2,1049-1067).
ggtatgtctgtgcaatcaa

SEQ ID NO: 809063 - DNA, 19 bp, Mus musculus
  siRNA target sequence for Slfn5 (NM_183201.2,1061-1079).
caatcaaggtcgaacgatt

SEQ ID NO: 809064 - DNA, 19 bp, Mus musculus
  siRNA target sequence for Slfn5 (NM_183201.2,1105-1123).
cccgattcctgggagataa

SEQ ID NO: 809065 - DNA, 19 bp, Mus musculus
  siRNA target sequence for Slfn5 (NM_183201.2,1106-1124).
ccgattcctgggagataaa

SEQ ID NO: 809066 - DNA, 19 bp, Mus musculus
  siRNA target sequence for Slfn5 (NM_183201.2,1141-1159).
ccgctaactgcgaatgact

SEQ ID NO: 809067 - DNA, 19 bp, Mus musculus
  siRNA target sequence for Slfn5 (NM_183201.2,1161-1179).
ggcctctcggatgatagaa

SEQ ID NO: 809068 - DNA, 19 bp, Mus musculus
  siRNA target sequence for Slfn5 (NM_183201.2,1163-1181).
cctctcggatgatagaaat

SEQ ID NO: 809069 - DNA, 19 bp, Mus musculus
  siRNA target sequence for Slfn5 (NM_183201.2,1166-1184).
ctcggatgatagaaatcaa

SEQ ID NO: 809070 - DNA, 19 bp, Mus musculus
  siRNA target sequence for Slfn5 (NM_183201.2,1215-1233).
cccctggaagagtatgtta

SEQ ID NO: 809071 - DNA, 19 bp, Mus musculus
  siRNA target sequence for Slfn5 (NM_183201.2,1254-1272).
gaccgtgttcacacataaa

SEQ ID NO: 809072 - DNA, 19 bp, Mus musculus
  siRNA target sequence for Slfn5 (NM_183201.2,1257-1275).
cgtgttcacacataaatat

SEQ ID NO: 809073 - DNA, 19 bp, Mus musculus
  siRNA target sequence for Slfn5 (NM_183201.2,1315-1333).
gtgtcacccaacaggatta

SEQ ID NO: 809074 - DNA, 19 bp, Mus musculus
  siRNA target sequence for Slfn5 (NM_183201.2,1319-1337).
cacccaacaggattacata

SEQ ID NO: 809075 - DNA, 19 bp, Mus musculus
  siRNA target sequence for Slfn5 (NM_183201.2,1323-1341).
caacaggattacatatact

SEQ ID NO: 809076 - DNA, 19 bp, Mus musculus
  siRNA target sequence for Slfn5 (NM_183201.2,1340-1358).
ctccagagagcgtctacaa

SEQ ID NO: 809077 - DNA, 19 bp, Mus musculus
  siRNA target sequence for Slfn5 (NM_183201.2,1360-1378).
gacctcttcgcagattaca

SEQ ID NO: 809078 - DNA, 19 bp, Mus musculus
  siRNA target sequence for Slfn5 (NM_183201.2,1362-1380).
cctcttcgcagattacaga

SEQ ID NO: 809079 - DNA, 19 bp, Mus musculus
  siRNA target sequence for Slfn5 (NM_183201.2,1372-1390).
gattacagaggactaagaa

SEQ ID NO: 809080 - DNA, 19 bp, Mus musculus
  siRNA target sequence for Slfn5 (NM_183201.2,1379-1397).
gaggactaagaaacttaat

SEQ ID NO: 809081 - DNA, 19 bp, Mus musculus
  siRNA target sequence for Slfn5 (NM_183201.2,1415-1433).
gtttctctcaagggatatt

SEQ ID NO: 809082 - DNA, 19 bp, Mus musculus
  siRNA target sequence for Slfn5 (NM_183201.2,1421-1439).
ctcaagggatattgatctt

SEQ ID NO: 809083 - DNA, 19 bp, Mus musculus
  siRNA target sequence for Slfn5 (NM_183201.2,1423-1441).
caagggatattgatcttct

SEQ ID NO: 809084 - DNA, 19 bp, Mus musculus
  siRNA target sequence for Slfn5 (NM_183201.2,1558-1576).
ctggggaacaggcactatt

SEQ ID NO: 809085 - DNA, 19 bp, Mus musculus
  siRNA target sequence for Slfn5 (NM_183201.2,1622-1640).
gtggctaccctggaagatt

SEQ ID NO: 809086 - DNA, 19 bp, Mus musculus
  siRNA target sequence for Slfn5 (NM_183201.2,1668-1686).
gggttctcaccaaagagta

SEQ ID NO: 809087 - DNA, 19 bp, Mus musculus
  siRNA target sequence for Slfn5 (NM_183201.2,1669-1687).
ggttctcaccaaagagtaa

SEQ ID NO: 809088 - DNA, 19 bp, Mus musculus
  siRNA target sequence for Slfn5 (NM_183201.2,1673-1691).
ctcaccaaagagtaaggaa

SEQ ID NO: 809089 - DNA, 19 bp, Mus musculus
  siRNA target sequence for Slfn5 (NM_183201.2,1708-1726).
gtgtaccccgaatcctata

SEQ ID NO: 809090 - DNA, 19 bp, Mus musculus
  siRNA target sequence for Slfn5 (NM_183201.2,1714-1732).
cccgaatcctataacttca

SEQ ID NO: 809091 - DNA, 19 bp, Mus musculus
  siRNA target sequence for Slfn5 (NM_183201.2,1715-1733).
ccgaatcctataacttcat

SEQ ID NO: 809092 - DNA, 19 bp, Mus musculus
  siRNA target sequence for Slfn5 (NM_183201.2,1716-1734).
cgaatcctataacttcata

SEQ ID NO: 809093 - DNA, 19 bp, Mus musculus
  siRNA target sequence for Slfn5 (NM_183201.2,1762-1780).
caatctcttgtgatcatct

SEQ ID NO: 809094 - DNA, 19 bp, Mus musculus
  siRNA target sequence for Slfn5 (NM_183201.2,1787-1805).
ggttcagacccctgttaaa

SEQ ID NO: 809095 - DNA, 19 bp, Mus musculus
  siRNA target sequence for Slfn5 (NM_183201.2,1788-1806).
gttcagacccctgttaaat

SEQ ID NO: 809096 - DNA, 19 bp, Mus musculus
  siRNA target sequence for Slfn5 (NM_183201.2,1791-1809).
cagacccctgttaaatgaa

SEQ ID NO: 809097 - DNA, 19 bp, Mus musculus
  siRNA target sequence for Slfn5 (NM_183201.2,1793-1811).
gacccctgttaaatgaaga

SEQ ID NO: 809098 - DNA, 19 bp, Mus musculus
  siRNA target sequence for Slfn5 (NM_183201.2,1797-1815).
cctgttaaatgaagagtta

SEQ ID NO: 809099 - DNA, 19 bp, Mus musculus
  siRNA target sequence for Slfn5 (NM_183201.2,1852-1870).
caacagtacgggttgcttt

SEQ ID NO: 809100 - DNA, 19 bp, Mus musculus
  siRNA target sequence for Slfn5 (NM_183201.2,1855-1873).
cagtacgggttgctttcaa

SEQ ID NO: 809101 - DNA, 19 bp, Mus musculus
  siRNA target sequence for Slfn5 (NM_183201.2,1857-1875).
gtacgggttgctttcaact

SEQ ID NO: 809102 - DNA, 19 bp, Mus musculus
  siRNA target sequence for Slfn5 (NM_183201.2,2031-2049).
cattgtgaggaaaaacgtt

SEQ ID NO: 809103 - DNA, 19 bp, Mus musculus
  siRNA target sequence for Slfn5 (NM_183201.2,2092-2110).
gataatgtgcaacatatca

SEQ ID NO: 809104 - DNA, 19 bp, Mus musculus
  siRNA target sequence for Slfn5 (NM_183201.2,2112-2130).
cgtggacgaagctcagaat

SEQ ID NO: 809105 - DNA, 19 bp, Mus musculus
  siRNA target sequence for Slfn5 (NM_183201.2,2220-2238).
ggattactttcagatcaat

SEQ ID NO: 809106 - DNA, 19 bp, Mus musculus
  siRNA target sequence for Slfn5 (NM_183201.2,2272-2290).
caccagaagccgttattga

SEQ ID NO: 809107 - DNA, 19 bp, Mus musculus
  siRNA target sequence for Slfn5 (NM_183201.2,2307-2325).
ccgcagcggagacaacata

SEQ ID NO: 809108 - DNA, 19 bp, Mus musculus
  siRNA target sequence for Slfn5 (NM_183201.2,2400-2418).
ggtgggtgaagaacttgaa

SEQ ID NO: 809109 - DNA, 19 bp, Mus musculus
  siRNA target sequence for Slfn5 (NM_183201.2,2401-2419).
gtgggtgaagaacttgaat

SEQ ID NO: 809110 - DNA, 19 bp, Mus musculus
  siRNA target sequence for Slfn5 (NM_183201.2,2431-2449).
gtcacaggcaacttagaga

SEQ ID NO: 809111 - DNA, 19 bp, Mus musculus
  siRNA target sequence for Slfn5 (NM_183201.2,2439-2457).
caacttagagattactgat

SEQ ID NO: 809112 - DNA, 19 bp, Mus musculus
  siRNA target sequence for Slfn5 (NM_183201.2,2536-2554).
gttgctgttcttttcacta

SEQ ID NO: 809113 - DNA, 19 bp, Mus musculus
  siRNA target sequence for Slfn5 (NM_183201.2,2550-2568).
cactagagccagagatata

SEQ ID NO: 809114 - DNA, 19 bp, Mus musculus
  siRNA target sequence for Slfn5 (NM_183201.2,2627-2645).
ctgaggagcccagtttact

SEQ ID NO: 809115 - DNA, 19 bp, Mus musculus
  siRNA target sequence for Slfn5 (NM_183201.2,2695-2713).
gagagtgttcaccgatttt

SEQ ID NO: 809116 - DNA, 19 bp, Mus musculus
  siRNA target sequence for Slfn5 (NM_183201.2,2697-2715).
gagtgttcaccgattttca

SEQ ID NO: 809117 - DNA, 19 bp, Mus musculus
  siRNA target sequence for Slfn5 (NM_183201.2,2756-2774).
gatctgagacggccatttt

SEQ ID NO: 809118 - DNA, 19 bp, Mus musculus
  siRNA target sequence for Slfn5 (NM_183201.2,2759-2777).
ctgagacggccattttcta

SEQ ID NO: 809119 - DNA, 19 bp, Mus musculus
  siRNA target sequence for Slfn5 (NM_183201.2,2761-2779).
gagacggccattttctaca

SEQ ID NO: 809120 - DNA, 19 bp, Mus musculus
  siRNA target sequence for Slfn5 (NM_183201.2,2811-2829).
gacacatctgtatattgta

SEQ ID NO: 809121 - DNA, 19 bp, Mus musculus
  siRNA target sequence for B330003H21 (NM_183202.1,636-654).
ggagatggttctgatacat

SEQ ID NO: 809122 - DNA, 19 bp, Mus musculus
  siRNA target sequence for B330003H21 (NM_183202.1,685-703).
gtagagctctgtagtctta

SEQ ID NO: 809123 - DNA, 19 bp, Mus musculus
  siRNA target sequence for B330003H21 (NM_183202.1,752-770).
ggagagtaggggagtatgt

SEQ ID NO: 809124 - DNA, 19 bp, Mus musculus
  siRNA target sequence for B330003H21 (NM_183202.1,753-771).
gagagtaggggagtatgta

SEQ ID NO: 809125 - DNA, 19 bp, Mus musculus
  siRNA target sequence for B330003H21 (NM_183202.1,793-811).
ggattagaaccccaactta

SEQ ID NO: 809126 - DNA, 19 bp, Mus musculus
  siRNA target sequence for B330003H21 (NM_183202.1,799-817).
gaaccccaacttacagttt

SEQ ID NO: 809127 - DNA, 19 bp, Mus musculus
  siRNA target sequence for B330003H21 (NM_183202.1,804-822).
ccaacttacagtttacact

SEQ ID NO: 809128 - DNA, 19 bp, Mus musculus
  siRNA target sequence for B330003H21 (NM_183202.1,935-953).
cacgctccctggtgtattt

SEQ ID NO: 809129 - DNA, 19 bp, Mus musculus
  siRNA target sequence for 9130430E04 (NM_183203.1,831-849).
ctttgtccctattcaagta

SEQ ID NO: 809130 - DNA, 19 bp, Mus musculus
  siRNA target sequence for 9130430E04 (NM_183203.1,837-855).
ccctattcaagtaacagaa

SEQ ID NO: 809131 - DNA, 19 bp, Mus musculus
  siRNA target sequence for 9130430E04 (NM_183203.1,889-907).
gcacacagaacaaaagaga

SEQ ID NO: 809132 - DNA, 19 bp, Mus musculus
  siRNA target sequence for C630023L15 (NM_183204.1,346-364).
cggatgagctcgagtgtaa

SEQ ID NO: 809133 - DNA, 19 bp, Mus musculus
  siRNA target sequence for C630023L15 (NM_183204.1,351-369).
gagctcgagtgtaagatct

SEQ ID NO: 809134 - DNA, 19 bp, Mus musculus
  siRNA target sequence for C630023L15 (NM_183204.1,354-372).
ctcgagtgtaagatctgtt

SEQ ID NO: 809135 - DNA, 19 bp, Mus musculus
  siRNA target sequence for C630023L15 (NM_183204.1,359-377).
gtgtaagatctgttacaat

SEQ ID NO: 809136 - DNA, 19 bp, Mus musculus
  siRNA target sequence for C630023L15 (NM_183204.1,433-451).
gcgccaaatgcctctacaa

SEQ ID NO: 809137 - DNA, 19 bp, Mus musculus
  siRNA target sequence for C630023L15 (NM_183204.1,442-460).
gcctctacaagatcataga

SEQ ID NO: 809138 - DNA, 19 bp, Mus musculus
  siRNA target sequence for C630023L15 (NM_183204.1,541-559).
gcctgcccgatgacaacaa

SEQ ID NO: 809139 - DNA, 19 bp, Mus musculus
  siRNA target sequence for C630023L15 (NM_183204.1,552-570).
gacaacaacatccttgtaa

SEQ ID NO: 809140 - DNA, 19 bp, Mus musculus
  siRNA target sequence for C630023L15 (NM_183204.1,676-694).
cctctaattgcttggttat

SEQ ID NO: 809141 - DNA, 19 bp, Mus musculus
  siRNA target sequence for C630023L15 (NM_183204.1,739-757).
ccacccccgtggtagaatt

SEQ ID NO: 809142 - DNA, 19 bp, Mus musculus
  siRNA target sequence for C630023L15 (NM_183204.1,742-760).
cccccgtggtagaattcta

SEQ ID NO: 809143 - DNA, 19 bp, Mus musculus
  siRNA target sequence for C630023L15 (NM_183204.1,744-762).
cccgtggtagaattctaca

SEQ ID NO: 809144 - DNA, 19 bp, Mus musculus
  siRNA target sequence for C630023L15 (NM_183204.1,841-859).
cgtccatccgggtgttagt

SEQ ID NO: 809145 - DNA, 19 bp, Mus musculus
  siRNA target sequence for C630023L15 (NM_183204.1,893-911).
gcccttagggatctactta

SEQ ID NO: 809146 - DNA, 19 bp, Mus musculus
  siRNA target sequence for C630023L15 (NM_183204.1,895-913).
ccttagggatctacttact

SEQ ID NO: 809147 - DNA, 19 bp, Mus musculus
  siRNA target sequence for C630023L15 (NM_183204.1,933-951).
ctgggggtggtcttcgtta

SEQ ID NO: 809148 - DNA, 19 bp, Mus musculus
  siRNA target sequence for C630023L15 (NM_183204.1,1003-1021).
gcgtttgtcatgaatttct

SEQ ID NO: 809149 - DNA, 19 bp, Mus musculus
  siRNA target sequence for E330020C23 (NM_183208.1,745-763).
ccgcaaatcgagacaagtt

SEQ ID NO: 809150 - DNA, 19 bp, Mus musculus
  siRNA target sequence for E330020C23 (NM_183208.1,923-941).
cagtgatgggtcatttcct

SEQ ID NO: 809151 - DNA, 19 bp, Mus musculus
  siRNA target sequence for E330020C23 (NM_183208.1,925-943).
gtgatgggtcatttcctta

SEQ ID NO: 809152 - DNA, 19 bp, Mus musculus
  siRNA target sequence for E330020C23 (NM_183208.1,1186-1204).
ctgcacagccctatatcca

SEQ ID NO: 809153 - DNA, 19 bp, Mus musculus
  siRNA target sequence for E330020C23 (NM_183208.1,1292-1310).
gggcatccctccacatact

SEQ ID NO: 809154 - DNA, 19 bp, Mus musculus
  siRNA target sequence for E330020C23 (NM_183208.1,1480-1498).
gtcccacccaggcgtataa

SEQ ID NO: 809155 - DNA, 19 bp, Mus musculus
  siRNA target sequence for E330020C23 (NM_183208.1,1491-1509).
gcgtataacagccaattca

SEQ ID NO: 809156 - DNA, 19 bp, Mus musculus
  siRNA target sequence for E330020C23 (NM_183208.1,1492-1510).
cgtataacagccaattcat

SEQ ID NO: 809157 - DNA, 19 bp, Mus musculus
  siRNA target sequence for A830019P07 (NM_183214.1,125-143).
cttaagggacttccttatt

SEQ ID NO: 809158 - DNA, 19 bp, Mus musculus
  siRNA target sequence for A830019P07 (NM_183214.1,217-235).
cttggcaaggacaattctt

SEQ ID NO: 809159 - DNA, 19 bp, Mus musculus
  siRNA target sequence for A830019P07 (NM_183214.1,250-268).
gttcgggtctggccattta

SEQ ID NO: 809160 - DNA, 19 bp, Mus musculus
  siRNA target sequence for A830019P07 (NM_183214.1,340-358).
ggagccaaatgccaagttt

SEQ ID NO: 809161 - DNA, 19 bp, Mus musculus
  siRNA target sequence for Scd4 (NM_183216.2,174-192).
cccacttgccacaagagat

SEQ ID NO: 809162 - DNA, 19 bp, Mus musculus
  siRNA target sequence for Scd4 (NM_183216.2,204-222).
gtagcactaccaacatcat

SEQ ID NO: 809163 - DNA, 19 bp, Mus musculus
  siRNA target sequence for Scd4 (NM_183216.2,267-285).
ccctccaggcagaagatat

SEQ ID NO: 809164 - DNA, 19 bp, Mus musculus
  siRNA target sequence for Scd4 (NM_183216.2,281-299).
gatatccggcctgaaataa

SEQ ID NO: 809165 - DNA, 19 bp, Mus musculus
  siRNA target sequence for Scd4 (NM_183216.2,286-304).
ccggcctgaaataaaagat

SEQ ID NO: 809166 - DNA, 19 bp, Mus musculus
  siRNA target sequence for Scd4 (NM_183216.2,450-468).
ggctcttgggagtattcta

SEQ ID NO: 809167 - DNA, 19 bp, Mus musculus
  siRNA target sequence for Scd4 (NM_183216.2,452-470).
ctcttgggagtattctaca

SEQ ID NO: 809168 - DNA, 19 bp, Mus musculus
  siRNA target sequence for Scd4 (NM_183216.2,514-532).
gtggagccaccgaacctat

SEQ ID NO: 809169 - DNA, 19 bp, Mus musculus
  siRNA target sequence for Scd4 (NM_183216.2,516-534).
ggagccaccgaacctataa

SEQ ID NO: 809170 - DNA, 19 bp, Mus musculus
  siRNA target sequence for Scd4 (NM_183216.2,517-535).
gagccaccgaacctataaa

SEQ ID NO: 809171 - DNA, 19 bp, Mus musculus
  siRNA target sequence for Scd4 (NM_183216.2,520-538).
ccaccgaacctataaagca

SEQ ID NO: 809172 - DNA, 19 bp, Mus musculus
  siRNA target sequence for Scd4 (NM_183216.2,521-539).
caccgaacctataaagcaa

SEQ ID NO: 809173 - DNA, 19 bp, Mus musculus
  siRNA target sequence for Scd4 (NM_183216.2,809-827).
gctgtcacgctcatgttca

SEQ ID NO: 809174 - DNA, 19 bp, Mus musculus
  siRNA target sequence for Scd4 (NM_183216.2,812-830).
gtcacgctcatgttcatca

SEQ ID NO: 809175 - DNA, 19 bp, Mus musculus
  siRNA target sequence for Scd4 (NM_183216.2,816-834).
cgctcatgttcatcattct

SEQ ID NO: 809176 - DNA, 19 bp, Mus musculus
  siRNA target sequence for Scd4 (NM_183216.2,856-874).
cttgtggggtgagactttt

SEQ ID NO: 809177 - DNA, 19 bp, Mus musculus
  siRNA target sequence for Scd4 (NM_183216.2,859-877).
gtggggtgagacttttcaa

SEQ ID NO: 809178 - DNA, 19 bp, Mus musculus
  siRNA target sequence for Scd4 (NM_183216.2,861-879).
ggggtgagacttttcaaca

SEQ ID NO: 809179 - DNA, 19 bp, Mus musculus
  siRNA target sequence for Scd4 (NM_183216.2,882-900).
gcttatgcgtctcgaattt

SEQ ID NO: 809180 - DNA, 19 bp, Mus musculus
  siRNA target sequence for Scd4 (NM_183216.2,905-923).
cggtatgctgtgcttctaa

SEQ ID NO: 809181 - DNA, 19 bp, Mus musculus
  siRNA target sequence for Scd4 (NM_183216.2,906-924).
ggtatgctgtgcttctaaa

SEQ ID NO: 809182 - DNA, 19 bp, Mus musculus
  siRNA target sequence for Scd4 (NM_183216.2,914-932).
gtgcttctaaacttcactt

SEQ ID NO: 809183 - DNA, 19 bp, Mus musculus
  siRNA target sequence for Scd4 (NM_183216.2,998-1016).
gagaatcccttcgtttcaa

SEQ ID NO: 809184 - DNA, 19 bp, Mus musculus
  siRNA target sequence for Scd4 (NM_183216.2,1009-1027).
cgtttcaatggcatcttta

SEQ ID NO: 809185 - DNA, 19 bp, Mus musculus
  siRNA target sequence for Scd4 (NM_183216.2,1052-1070).
cacacgttcccctacgatt

SEQ ID NO: 809186 - DNA, 19 bp, Mus musculus
  siRNA target sequence for BC042698 (NM_183217.1,89-107).
ccgcaggaccagggaaaat

SEQ ID NO: 809187 - DNA, 19 bp, Mus musculus
  siRNA target sequence for BC042698 (NM_183217.1,123-141).
gacttggtattgaaagtga

SEQ ID NO: 809188 - DNA, 19 bp, Mus musculus
  siRNA target sequence for BC042698 (NM_183217.1,143-161).
gtgtcatgcctctgaaaat

SEQ ID NO: 809189 - DNA, 19 bp, Mus musculus
  siRNA target sequence for BC042698 (NM_183217.1,169-187).
ctgaggtattgtggaaatt

SEQ ID NO: 809190 - DNA, 19 bp, Mus musculus
  siRNA target sequence for BC042698 (NM_183217.1,219-237).
cagagcgtgcccaagttct

SEQ ID NO: 809191 - DNA, 19 bp, Mus musculus
  siRNA target sequence for BC042698 (NM_183217.1,223-241).
gcgtgcccaagttctgttt

SEQ ID NO: 809192 - DNA, 19 bp, Mus musculus
  siRNA target sequence for BC042698 (NM_183217.1,276-294).
gttggacagcactttacct

SEQ ID NO: 809193 - DNA, 19 bp, Mus musculus
  siRNA target sequence for BC042698 (NM_183217.1,355-373).
gcagaatttgtttatgtat

SEQ ID NO: 809194 - DNA, 19 bp, Mus musculus
  siRNA target sequence for BC042698 (NM_183217.1,364-382).
gtttatgtattcttagtta

SEQ ID NO: 809195 - DNA, 19 bp, Mus musculus
  siRNA target sequence for BC042698 (NM_183217.1,383-401).
cttgccatggtttgaagta

SEQ ID NO: 809196 - DNA, 19 bp, Mus musculus
  siRNA target sequence for BC042698 (NM_183217.1,526-544).
gtgtgaaccaagagctatt

SEQ ID NO: 809197 - DNA, 19 bp, Mus musculus
  siRNA target sequence for BC042698 (NM_183217.1,588-606).
ccgcactcctgtttcatca

SEQ ID NO: 809198 - DNA, 19 bp, Mus musculus
  siRNA target sequence for BC042698 (NM_183217.1,602-620).
catcacacctgacataact

SEQ ID NO: 809199 - DNA, 19 bp, Mus musculus
  siRNA target sequence for BC042698 (NM_183217.1,631-649).
cgataccggagagtagaaa

SEQ ID NO: 809200 - DNA, 19 bp, Mus musculus
  siRNA target sequence for BC042698 (NM_183217.1,714-732).
catgagaggcgcatcatta

SEQ ID NO: 809201 - DNA, 19 bp, Mus musculus
  siRNA target sequence for BC042698 (NM_183217.1,717-735).
gagaggcgcatcattatta

SEQ ID NO: 809202 - DNA, 19 bp, Mus musculus
  siRNA target sequence for BC042698 (NM_183217.1,743-761).
caaattaagcactgtaagt

SEQ ID NO: 809203 - DNA, 19 bp, Mus musculus
  siRNA target sequence for B230218O03 (NM_183219.1,197-215).
ctattcgctcatcaattta

SEQ ID NO: 809204 - DNA, 19 bp, Mus musculus
  siRNA target sequence for B230218O03 (NM_183219.1,202-220).
cgctcatcaatttaatcca

SEQ ID NO: 809205 - DNA, 19 bp, Mus musculus
  siRNA target sequence for B230218O03 (NM_183219.1,256-274).
gaagacttccaggtattca

SEQ ID NO: 809206 - DNA, 19 bp, Mus musculus
  siRNA target sequence for B230218O03 (NM_183219.1,484-502).
cccgctctactgtctactt

SEQ ID NO: 809207 - DNA, 19 bp, Mus musculus
  siRNA target sequence for B230218O03 (NM_183219.1,515-533).
ggctgccctcaaagagtat

SEQ ID NO: 809208 - DNA, 19 bp, Mus musculus
  siRNA target sequence for B230218O03 (NM_183219.1,516-534).
gctgccctcaaagagtatt

SEQ ID NO: 809209 - DNA, 19 bp, Mus musculus
  siRNA target sequence for B230218O03 (NM_183219.1,517-535).
ctgccctcaaagagtattt

SEQ ID NO: 809210 - DNA, 19 bp, Mus musculus
  siRNA target sequence for 6030410K14 (NM_183221.1,344-362).
gcgagagaacccctatcta

SEQ ID NO: 809211 - DNA, 19 bp, Mus musculus
  siRNA target sequence for 6030410K14 (NM_183221.1,345-363).
cgagagaacccctatctaa

SEQ ID NO: 809212 - DNA, 19 bp, Mus musculus
  siRNA target sequence for 6030410K14 (NM_183221.1,605-623).
gacctaccagccttcttca

SEQ ID NO: 809213 - DNA, 19 bp, Mus musculus
  siRNA target sequence for 6030410K14 (NM_183221.1,607-625).
cctaccagccttcttcata

SEQ ID NO: 809214 - DNA, 19 bp, Mus musculus
  siRNA target sequence for 6030410K14 (NM_183221.1,608-626).
ctaccagccttcttcatat

SEQ ID NO: 809215 - DNA, 19 bp, Mus musculus
  siRNA target sequence for 6030410K14 (NM_183221.1,775-793).
ggggtacgctggaaatgca

SEQ ID NO: 809216 - DNA, 19 bp, Mus musculus
  siRNA target sequence for 6030410K14 (NM_183221.1,835-853).
ggctagggagaagaagtaa

SEQ ID NO: 809217 - DNA, 19 bp, Mus musculus
  siRNA target sequence for 6030410K14 (NM_183221.1,889-907).
cagggagtcgcctcaaaca

SEQ ID NO: 809218 - DNA, 19 bp, Mus musculus
  siRNA target sequence for 6030410K14 (NM_183221.1,915-933).
gcacagatccctctagaat

SEQ ID NO: 809219 - DNA, 19 bp, Mus musculus
  siRNA target sequence for 6030410K14 (NM_183221.1,918-936).
cagatccctctagaatctt

SEQ ID NO: 809220 - DNA, 19 bp, Mus musculus
  siRNA target sequence for 6030410K14 (NM_183221.1,920-938).
gatccctctagaatcttct

SEQ ID NO: 809221 - DNA, 19 bp, Mus musculus
  siRNA target sequence for 6030410K14 (NM_183221.1,1113-1131).
gacagtgactcccatgatt

SEQ ID NO: 809222 - DNA, 19 bp, Mus musculus
  siRNA target sequence for 6030410K14 (NM_183221.1,1141-1159).
gctcagaaatggaatacga

SEQ ID NO: 809223 - DNA, 19 bp, Mus musculus
  siRNA target sequence for 6030410K14 (NM_183221.1,1195-1213).
ccaagttatctcaagtcaa

SEQ ID NO: 809224 - DNA, 19 bp, Mus musculus
  siRNA target sequence for 6030410K14 (NM_183221.1,1224-1242).
gcagatgacgaagataatt

SEQ ID NO: 809225 - DNA, 19 bp, Mus musculus
  siRNA target sequence for 6030410K14 (NM_183221.1,1225-1243).
cagatgacgaagataatta

SEQ ID NO: 809226 - DNA, 19 bp, Mus musculus
  siRNA target sequence for 6030410K14 (NM_183221.1,1408-1426).
gtcattatgtggatgtctt

SEQ ID NO: 809227 - DNA, 19 bp, Mus musculus
  siRNA target sequence for 6030410K14 (NM_183221.1,1410-1428).
cattatgtggatgtcttta

SEQ ID NO: 809228 - DNA, 19 bp, Mus musculus
  siRNA target sequence for 6030410K14 (NM_183221.1,1459-1477).
ctggtaacgaagaaggtaa

SEQ ID NO: 809229 - DNA, 19 bp, Mus musculus
  siRNA target sequence for 6030410K14 (NM_183221.1,1510-1528).
gggaggcagaacagtatgt

SEQ ID NO: 809230 - DNA, 19 bp, Mus musculus
  siRNA target sequence for LOC329693 (NM_183222.1,130-148).
ggttgtgactcctgtcaat

SEQ ID NO: 809231 - DNA, 19 bp, Mus musculus
  siRNA target sequence for LOC329693 (NM_183222.1,145-163).
caatggacagcatgatttt

SEQ ID NO: 809232 - DNA, 19 bp, Mus musculus
  siRNA target sequence for LOC329693 (NM_183222.1,214-232).
gaggtgctacgcaaagaaa

SEQ ID NO: 809233 - DNA, 19 bp, Mus musculus
  siRNA target sequence for LOC329693 (NM_183222.1,223-241).
cgcaaagaaaggcatagaa

SEQ ID NO: 809234 - DNA, 19 bp, Mus musculus
  siRNA target sequence for LOC329693 (NM_183222.1,270-288).
gtaaagctctgacattaca

SEQ ID NO: 809235 - DNA, 19 bp, Mus musculus
  siRNA target sequence for LOC329693 (NM_183222.1,280-298).
gacattacatcctcaaagt

SEQ ID NO: 809236 - DNA, 19 bp, Mus musculus
  siRNA target sequence for LOC329693 (NM_183222.1,331-349).
ggacaacggtcaatacaaa

SEQ ID NO: 809237 - DNA, 19 bp, Mus musculus
  siRNA target sequence for LOC329693 (NM_183222.1,332-350).
gacaacggtcaatacaaat

SEQ ID NO: 809238 - DNA, 19 bp, Mus musculus
  siRNA target sequence for LOC329693 (NM_183222.1,358-376).
gaagaagaagtggtctttt

SEQ ID NO: 809239 - DNA, 19 bp, Mus musculus
  siRNA target sequence for LOC329693 (NM_183222.1,379-397).
gtccctctatacttccaat

SEQ ID NO: 809240 - DNA, 19 bp, Mus musculus
  siRNA target sequence for LOC329693 (NM_183222.1,596-614).
cacattcctgccatatgga

SEQ ID NO: 809241 - DNA, 19 bp, Mus musculus
  siRNA target sequence for LOC329693 (NM_183222.1,711-729).
ctgcgagattccaaacaca

SEQ ID NO: 809242 - DNA, 19 bp, Mus musculus
  siRNA target sequence for LOC329693 (NM_183222.1,717-735).
gattccaaacacacatcat

SEQ ID NO: 809243 - DNA, 19 bp, Mus musculus
  siRNA target sequence for LOC329693 (NM_183222.1,742-760).
ctcaaagttggtgtttgaa

SEQ ID NO: 809244 - DNA, 19 bp, Mus musculus
  siRNA target sequence for LOC329693 (NM_183222.1,761-779).
gggcagttgctgttactca

SEQ ID NO: 809245 - DNA, 19 bp, Mus musculus
  siRNA target sequence for LOC329693 (NM_183222.1,762-780).
ggcagttgctgttactcaa

SEQ ID NO: 809246 - DNA, 19 bp, Mus musculus
  siRNA target sequence for LOC329693 (NM_183222.1,778-796).
caactgctcagtaaaagga

SEQ ID NO: 809247 - DNA, 19 bp, Mus musculus
  siRNA target sequence for LOC329693 (NM_183222.1,800-818).
ccaggacccctcaaattct

SEQ ID NO: 809248 - DNA, 19 bp, Mus musculus
  siRNA target sequence for LOC329693 (NM_183222.1,809-827).
ctcaaattctcctggtata

SEQ ID NO: 809249 - DNA, 19 bp, Mus musculus
  siRNA target sequence for LOC329693 (NM_183222.1,811-829).
caaattctcctggtataaa

SEQ ID NO: 809250 - DNA, 19 bp, Mus musculus
  siRNA target sequence for LOC329693 (NM_183222.1,870-888).
ccaacgcagaattcaagat

SEQ ID NO: 809251 - DNA, 19 bp, Mus musculus
  siRNA target sequence for LOC329693 (NM_183222.1,966-984).
catttcccatcaccataaa

SEQ ID NO: 809252 - DNA, 19 bp, Mus musculus
  siRNA target sequence for LOC329693 (NM_183222.1,1035-1053).
cccttgagggagacttgat

SEQ ID NO: 809253 - DNA, 19 bp, Mus musculus
  siRNA target sequence for LOC329693 (NM_183222.1,1046-1064).
gacttgatgacacttcatt

SEQ ID NO: 809254 - DNA, 19 bp, Mus musculus
  siRNA target sequence for LOC329693 (NM_183222.1,1048-1066).
cttgatgacacttcattgt

SEQ ID NO: 809255 - DNA, 19 bp, Mus musculus
  siRNA target sequence for LOC329693 (NM_183222.1,1083-1101).
ctccatgtatcctgtatga

SEQ ID NO: 809256 - DNA, 19 bp, Mus musculus
  siRNA target sequence for LOC329693 (NM_183222.1,1085-1103).
ccatgtatcctgtatgaat

SEQ ID NO: 809257 - DNA, 19 bp, Mus musculus
  siRNA target sequence for LOC329693 (NM_183222.1,1086-1104).
catgtatcctgtatgaatt

SEQ ID NO: 809258 - DNA, 19 bp, Mus musculus
  siRNA target sequence for LOC329693 (NM_183222.1,1118-1136).
gtctccctggggaatagct

SEQ ID NO: 809259 - DNA, 19 bp, Mus musculus
  siRNA target sequence for LOC329693 (NM_183222.1,1127-1145).
gggaatagctctatactct

SEQ ID NO: 809260 - DNA, 19 bp, Mus musculus
  siRNA target sequence for LOC329693 (NM_183222.1,1157-1175).
gcatacttcaatttctcta

SEQ ID NO: 809261 - DNA, 19 bp, Mus musculus
  siRNA target sequence for LOC329693 (NM_183222.1,1158-1176).
catacttcaatttctctat

SEQ ID NO: 809262 - DNA, 19 bp, Mus musculus
  siRNA target sequence for LOC329693 (NM_183222.1,1182-1200).
cagagcgatctggaaacta

SEQ ID NO: 809263 - DNA, 19 bp, Mus musculus
  siRNA target sequence for LOC329693 (NM_183222.1,1236-1254).
gcagtgaagctataaggat

SEQ ID NO: 809264 - DNA, 19 bp, Mus musculus
  siRNA target sequence for LOC329693 (NM_183222.1,1245-1263).
ctataaggatctctatctt

SEQ ID NO: 809265 - DNA, 19 bp, Mus musculus
  siRNA target sequence for LOC329693 (NM_183222.1,1251-1269).
ggatctctatctttgacat

SEQ ID NO: 809266 - DNA, 19 bp, Mus musculus
  siRNA target sequence for LOC329693 (NM_183222.1,1328-1346).
gctgttggagtgtttctgt

SEQ ID NO: 809267 - DNA, 19 bp, Mus musculus
  siRNA target sequence for LOC329693 (NM_183222.1,1401-1419).
ggaacccttcagattcaga

SEQ ID NO: 809268 - DNA, 19 bp, Mus musculus
  siRNA target sequence for LOC329693 (NM_183222.1,1402-1420).
gaacccttcagattcagaa

SEQ ID NO: 809269 - DNA, 19 bp, Mus musculus
  siRNA target sequence for LOC329693 (NM_183222.1,1441-1459).
caacgtaccagcctgtata

SEQ ID NO: 809270 - DNA, 19 bp, Mus musculus
  siRNA target sequence for LOC329693 (NM_183222.1,1492-1510).
ggaaaacgtgatttacaca

SEQ ID NO: 809271 - DNA, 19 bp, Mus musculus
  siRNA target sequence for D730018G16 (NM_183223.1,300-318).
ggtggtgtgagacttcaaa

SEQ ID NO: 809272 - DNA, 19 bp, Mus musculus
  siRNA target sequence for D730018G16 (NM_183223.1,301-319).
gtggtgtgagacttcaaaa

SEQ ID NO: 809273 - DNA, 19 bp, Mus musculus
  siRNA target sequence for D730018G16 (NM_183223.1,303-321).
ggtgtgagacttcaaaaca

SEQ ID NO: 809274 - DNA, 19 bp, Mus musculus
  siRNA target sequence for D730018G16 (NM_183223.1,357-375).
gagttactcgcctgtctaa

SEQ ID NO: 809275 - DNA, 19 bp, Mus musculus
  siRNA target sequence for D730018G16 (NM_183223.1,363-381).
ctcgcctgtctaaacagaa

SEQ ID NO: 809276 - DNA, 19 bp, Mus musculus
  siRNA target sequence for D730018G16 (NM_183223.1,423-441).
gcgtccttgacccaaacaa

SEQ ID NO: 809277 - DNA, 19 bp, Mus musculus
  siRNA target sequence for 7530404M11 (NM_183224.1,295-313).
catccgcagtcctagtgaa

SEQ ID NO: 809278 - DNA, 19 bp, Mus musculus
  siRNA target sequence for 7530404M11 (NM_183224.1,555-573).
ggacacaaggtcaaaacca

SEQ ID NO: 809279 - DNA, 19 bp, Mus musculus
  siRNA target sequence for B130021E18 (NM_183225.1,563-581).
cggagaagaacgatgaaaa

SEQ ID NO: 809280 - DNA, 19 bp, Mus musculus
  siRNA target sequence for B130021E18 (NM_183225.1,607-625).
gaatttcctacaaccaatt

SEQ ID NO: 809281 - DNA, 19 bp, Mus musculus
  siRNA target sequence for B130021E18 (NM_183225.1,614-632).
ctacaaccaatttgtatga

SEQ ID NO: 809282 - DNA, 19 bp, Mus musculus
  siRNA target sequence for B130021E18 (NM_183225.1,634-652).
ctggaaagccgcgttttga

SEQ ID NO: 809283 - DNA, 19 bp, Mus musculus
  siRNA target sequence for B130021E18 (NM_183225.1,636-654).
ggaaagccgcgttttgact

SEQ ID NO: 809284 - DNA, 19 bp, Mus musculus
  siRNA target sequence for B130021E18 (NM_183225.1,642-660).
ccgcgttttgactgatcat

SEQ ID NO: 809285 - DNA, 19 bp, Mus musculus
  siRNA target sequence for B130021E18 (NM_183225.1,643-661).
cgcgttttgactgatcatt

SEQ ID NO: 809286 - DNA, 19 bp, Mus musculus
  siRNA target sequence for B130021E18 (NM_183225.1,705-723).
gctggcttccacctactta

SEQ ID NO: 809287 - DNA, 19 bp, Mus musculus
  siRNA target sequence for B130021E18 (NM_183225.1,725-743).
ccagacttggtctttcaga

SEQ ID NO: 809288 - DNA, 19 bp, Mus musculus
  siRNA target sequence for B130021E18 (NM_183225.1,779-797).
gtatgcccgaggcatttaa

SEQ ID NO: 809289 - DNA, 19 bp, Mus musculus
  siRNA target sequence for B130021E18 (NM_183225.1,825-843).
caagtggggtactgaaatt

SEQ ID NO: 809290 - DNA, 19 bp, Mus musculus
  siRNA target sequence for B130021E18 (NM_183225.1,864-882).
gttgatgctactaatagaa

SEQ ID NO: 809291 - DNA, 19 bp, Mus musculus
  siRNA target sequence for B130021E18 (NM_183225.1,925-943).
cttctaggtgtgcttacaa

SEQ ID NO: 809292 - DNA, 19 bp, Mus musculus
  siRNA target sequence for B130021E18 (NM_183225.1,1087-1105).
gtggacttggtaaataagt

SEQ ID NO: 809293 - DNA, 19 bp, Mus musculus
  siRNA target sequence for B130021E18 (NM_183225.1,1089-1107).
ggacttggtaaataagttt

SEQ ID NO: 809294 - DNA, 19 bp, Mus musculus
  siRNA target sequence for B130021E18 (NM_183225.1,1140-1158).
caaactccattcagaagat

SEQ ID NO: 809295 - DNA, 19 bp, Mus musculus
  siRNA target sequence for B130021E18 (NM_183225.1,1243-1261).
ctagacccggtcatcctta

SEQ ID NO: 809296 - DNA, 19 bp, Mus musculus
  siRNA target sequence for B130021E18 (NM_183225.1,1436-1454).
cacacttcagtgcgaaaat

SEQ ID NO: 809297 - DNA, 19 bp, Mus musculus
  siRNA target sequence for B130021E18 (NM_183225.1,1487-1505).
gtcacatgtggcctttaat

SEQ ID NO: 809298 - DNA, 19 bp, Mus musculus
  siRNA target sequence for 1100001G20Rik (NM_183249.1,197-215).
cagtcacatctgtactaca

SEQ ID NO: 809299 - DNA, 19 bp, Mus musculus
  siRNA target sequence for 1810020D17Rik (NM_183251.2,175-193).
ggcttcccctaaaattgct

SEQ ID NO: 809300 - DNA, 19 bp, Mus musculus
  siRNA target sequence for 1810020D17Rik (NM_183251.2,195-213).
ccctctcttggggacaaat

SEQ ID NO: 809301 - DNA, 19 bp, Mus musculus
  siRNA target sequence for 1810020D17Rik (NM_183251.2,218-236).
gtgcaaggctctaccttaa

SEQ ID NO: 809302 - DNA, 19 bp, Mus musculus
  siRNA target sequence for 1810020D17Rik (NM_183251.2,225-243).
gctctaccttaacctataa

SEQ ID NO: 809303 - DNA, 19 bp, Mus musculus
  siRNA target sequence for 1810020D17Rik (NM_183251.2,228-246).
ctaccttaacctataagga

SEQ ID NO: 809304 - DNA, 19 bp, Mus musculus
  siRNA target sequence for 1810020D17Rik (NM_183251.2,238-256).
ctataaggattgcaaagta

SEQ ID NO: 809305 - DNA, 19 bp, Mus musculus
  siRNA target sequence for 1810020D17Rik (NM_183251.2,317-335).
gtgcagccagcagatgtaa

SEQ ID NO: 809306 - DNA, 19 bp, Mus musculus
  siRNA target sequence for 1810020D17Rik (NM_183251.2,354-372).
gggtacagactcttgtgat

SEQ ID NO: 809307 - DNA, 19 bp, Mus musculus
  siRNA target sequence for 1810020D17Rik (NM_183251.2,355-373).
ggtacagactcttgtgatt

SEQ ID NO: 809308 - DNA, 19 bp, Mus musculus
  siRNA target sequence for 1810020D17Rik (NM_183251.2,467-485).
caggccgtgaaggagtata

SEQ ID NO: 809309 - DNA, 19 bp, Mus musculus
  siRNA target sequence for 1810020D17Rik (NM_183251.2,469-487).
ggccgtgaaggagtataat

SEQ ID NO: 809310 - DNA, 19 bp, Mus musculus
  siRNA target sequence for 2610017I09Rik (NM_183252.1,266-284).
gactgtaaggcggataaga

SEQ ID NO: 809311 - DNA, 19 bp, Mus musculus
  siRNA target sequence for 2610017I09Rik (NM_183252.1,322-340).
gccaattggcacttatcaa

SEQ ID NO: 809312 - DNA, 19 bp, Mus musculus
  siRNA target sequence for 2610017I09Rik (NM_183252.1,323-341).
ccaattggcacttatcaat

SEQ ID NO: 809313 - DNA, 19 bp, Mus musculus
  siRNA target sequence for 1700025K23Rik (NM_183254.1,525-543).
gaagtcactgcctgacaat

SEQ ID NO: 809314 - DNA, 19 bp, Mus musculus
  siRNA target sequence for 1700025K23Rik (NM_183254.1,535-553).
cctgacaataactgatgtt

SEQ ID NO: 809315 - DNA, 19 bp, Mus musculus
  siRNA target sequence for 1700025K23Rik (NM_183254.1,591-609).
cgcaaagcagcaaggaaat

SEQ ID NO: 809316 - DNA, 19 bp, Mus musculus
  siRNA target sequence for 2310016M24Rik (NM_183256.1,233-251).
gccgatatcggctacaaga

SEQ ID NO: 809317 - DNA, 19 bp, Mus musculus
  siRNA target sequence for 2310016M24Rik (NM_183256.1,268-286).
gatgctcctcactgtgtat

SEQ ID NO: 809318 - DNA, 19 bp, Mus musculus
  siRNA target sequence for 1810073K19Rik (NM_183257.1,121-139).
cctatctccagcaacagat

SEQ ID NO: 809319 - DNA, 19 bp, Mus musculus
  siRNA target sequence for 1810073K19Rik (NM_183257.1,254-272).
ctgtcagtgctgtaacaaa

SEQ ID NO: 809320 - DNA, 19 bp, Mus musculus
  siRNA target sequence for 1810073K19Rik (NM_183257.1,282-300).
ggtatctgttgtgaagaat

SEQ ID NO: 809321 - DNA, 19 bp, Mus musculus
  siRNA target sequence for 2610001J05Rik (NM_183258.1,157-175).
gtttcaacgcaattgatct

SEQ ID NO: 809322 - DNA, 19 bp, Mus musculus
  siRNA target sequence for 2610001J05Rik (NM_183258.1,181-199).
ctcgcttcgctgcttttga

SEQ ID NO: 809323 - DNA, 19 bp, Mus musculus
  siRNA target sequence for 2610001J05Rik (NM_183258.1,232-250).
gacgcgattgcactcttat

SEQ ID NO: 809324 - DNA, 19 bp, Mus musculus
  siRNA target sequence for 2610001J05Rik (NM_183258.1,234-252).
cgcgattgcactcttatta

SEQ ID NO: 809325 - DNA, 19 bp, Mus musculus
  siRNA target sequence for 2610001J05Rik (NM_183258.1,237-255).
gattgcactcttattaggt

SEQ ID NO: 809326 - DNA, 19 bp, Mus musculus
  siRNA target sequence for 2610001J05Rik (NM_183258.1,361-379).
ctgaccagtgtgctgaaaa

SEQ ID NO: 809327 - DNA, 19 bp, Mus musculus
  siRNA target sequence for 2610001J05Rik (NM_183258.1,393-411).
gaggccgaccccaagattt

SEQ ID NO: 809328 - DNA, 19 bp, Mus musculus
  siRNA target sequence for 2610001J05Rik (NM_183258.1,395-413).
ggccgaccccaagatttga

SEQ ID NO: 809329 - DNA, 19 bp, Mus musculus
  siRNA target sequence for 2610001J05Rik (NM_183258.1,396-414).
gccgaccccaagatttgat

SEQ ID NO: 809330 - DNA, 19 bp, Mus musculus
  siRNA target sequence for 2610001J05Rik (NM_183258.1,398-416).
cgaccccaagatttgatct

SEQ ID NO: 809331 - DNA, 19 bp, Mus musculus
  siRNA target sequence for 5730446D14Rik (NM_183260.1,1975-1993).
gtggagacctggaattcga

SEQ ID NO: 809332 - DNA, 19 bp, Mus musculus
  siRNA target sequence for 5730446D14Rik (NM_183260.1,1977-1995).
ggagacctggaattcgata

SEQ ID NO: 809333 - DNA, 19 bp, Mus musculus
  siRNA target sequence for 5730446D14Rik (NM_183260.1,2250-2268).
gctgcggcagccacttgaa

SEQ ID NO: 809334 - DNA, 19 bp, Mus musculus
  siRNA target sequence for 2700033K02Rik (NM_183261.1,559-577).
gattaaaccgaagcataaa

SEQ ID NO: 809335 - DNA, 19 bp, Mus musculus
  siRNA target sequence for 2700033K02Rik (NM_183261.1,602-620).
cgtcctgtcttctcaaact

SEQ ID NO: 809336 - DNA, 19 bp, Mus musculus
  siRNA target sequence for 2700033K02Rik (NM_183261.1,619-637).
ctcatttccttccatagaa

SEQ ID NO: 809337 - DNA, 19 bp, Mus musculus
  siRNA target sequence for 2700033K02Rik (NM_183261.1,621-639).
catttccttccatagaact

SEQ ID NO: 809338 - DNA, 19 bp, Mus musculus
  siRNA target sequence for 2700033K02Rik (NM_183261.1,635-653).
gaactgactgaaaaccaat

SEQ ID NO: 809339 - DNA, 19 bp, Mus musculus
  siRNA target sequence for 2700033K02Rik (NM_183261.1,640-658).
gactgaaaaccaatcctat

SEQ ID NO: 809340 - DNA, 19 bp, Mus musculus
  siRNA target sequence for 2700033K02Rik (NM_183261.1,642-660).
ctgaaaaccaatcctatat

SEQ ID NO: 809341 - DNA, 19 bp, Mus musculus
  siRNA target sequence for 2700033K02Rik (NM_183261.1,676-694).
cagcagattgtctaggttt

SEQ ID NO: 809342 - DNA, 19 bp, Mus musculus
  siRNA target sequence for 2700033K02Rik (NM_183261.1,719-737).
gctttgggtatcagaattt

SEQ ID NO: 809343 - DNA, 19 bp, Mus musculus
  siRNA target sequence for 2700033K02Rik (NM_183261.1,730-748).
cagaatttcctgttcgatt

SEQ ID NO: 809344 - DNA, 19 bp, Mus musculus
  siRNA target sequence for 2700033K02Rik (NM_183261.1,752-770).
ctctgcgcttcattttgca

SEQ ID NO: 809345 - DNA, 19 bp, Mus musculus
  siRNA target sequence for 2700033K02Rik (NM_183261.1,860-878).
gagagcgctctgttaagct

SEQ ID NO: 809346 - DNA, 19 bp, Mus musculus
  siRNA target sequence for 5830405N20Rik (NM_183264.1,443-461).
ctcgtatccctgcaagatt

SEQ ID NO: 809347 - DNA, 19 bp, Mus musculus
  siRNA target sequence for 5830405N20Rik (NM_183264.1,445-463).
cgtatccctgcaagatttt

SEQ ID NO: 809348 - DNA, 19 bp, Mus musculus
  siRNA target sequence for 5830405N20Rik (NM_183264.1,446-464).
gtatccctgcaagattttt

SEQ ID NO: 809349 - DNA, 19 bp, Mus musculus
  siRNA target sequence for 5830405N20Rik (NM_183264.1,480-498).
ggccaagggcattaacttt

SEQ ID NO: 809350 - DNA, 19 bp, Mus musculus
  siRNA target sequence for 5830405N20Rik (NM_183264.1,482-500).
ccaagggcattaactttca

SEQ ID NO: 809351 - DNA, 19 bp, Mus musculus
  siRNA target sequence for 5830405N20Rik (NM_183264.1,621-639).
ctcctatgtgtctaagaca

SEQ ID NO: 809352 - DNA, 19 bp, Mus musculus
  siRNA target sequence for 5830405N20Rik (NM_183264.1,793-811).
cgagatcggctatcatcat

SEQ ID NO: 809353 - DNA, 19 bp, Mus musculus
  siRNA target sequence for 5830405N20Rik (NM_183264.1,796-814).
gatcggctatcatcatctt

SEQ ID NO: 809354 - DNA, 19 bp, Mus musculus
  siRNA target sequence for 5830405N20Rik (NM_183264.1,799-817).
cggctatcatcatcttaca

SEQ ID NO: 809355 - DNA, 19 bp, Mus musculus
  siRNA target sequence for 5830405N20Rik (NM_183264.1,802-820).
ctatcatcatcttacaaca

SEQ ID NO: 809356 - DNA, 19 bp, Mus musculus
  siRNA target sequence for 5830405N20Rik (NM_183264.1,927-945).
gtctgttcccccaatacaa

SEQ ID NO: 809357 - DNA, 19 bp, Mus musculus
  siRNA target sequence for 5830405N20Rik (NM_183264.1,931-949).
gttcccccaatacaaaata

SEQ ID NO: 809358 - DNA, 19 bp, Mus musculus
  siRNA target sequence for 5830405N20Rik (NM_183264.1,977-995).
gtgtttcctaccctaaaga

SEQ ID NO: 809359 - DNA, 19 bp, Mus musculus
  siRNA target sequence for 5830405N20Rik (NM_183264.1,1048-1066).
cagtaccacataaactcta

SEQ ID NO: 809360 - DNA, 19 bp, Mus musculus
  siRNA target sequence for 5830405N20Rik (NM_183264.1,1113-1131).
gccacgttcagctgagaat

SEQ ID NO: 809361 - DNA, 19 bp, Mus musculus
  siRNA target sequence for 5830405N20Rik (NM_183264.1,1115-1133).
cacgttcagctgagaatga

SEQ ID NO: 809362 - DNA, 19 bp, Mus musculus
  siRNA target sequence for 5830405N20Rik (NM_183264.1,1181-1199).
gggttcctgtggacaagaa

SEQ ID NO: 809363 - DNA, 19 bp, Mus musculus
  siRNA target sequence for 5830405N20Rik (NM_183264.1,1182-1200).
ggttcctgtggacaagaat

SEQ ID NO: 809364 - DNA, 19 bp, Mus musculus
  siRNA target sequence for 5830405N20Rik (NM_183264.1,1258-1276).
catgagctgaccaatcttt

SEQ ID NO: 809365 - DNA, 19 bp, Mus musculus
  siRNA target sequence for 4930583K01Rik (NM_183267.1,446-464).
cccccaagaaataaaacta

SEQ ID NO: 809366 - DNA, 19 bp, Mus musculus
  siRNA target sequence for 4930583K01Rik (NM_183267.1,447-465).
ccccaagaaataaaactat

SEQ ID NO: 809367 - DNA, 19 bp, Mus musculus
  siRNA target sequence for 4930583K01Rik (NM_183267.1,466-484).
cactaaagtacttaattat

SEQ ID NO: 809368 - DNA, 19 bp, Mus musculus
  siRNA target sequence for 4930583K01Rik (NM_183267.1,488-506).
gcgatatctccctatgagt

SEQ ID NO: 809369 - DNA, 19 bp, Mus musculus
  siRNA target sequence for 4930583K01Rik (NM_183267.1,489-507).
cgatatctccctatgagta

SEQ ID NO: 809370 - DNA, 19 bp, Mus musculus
  siRNA target sequence for 4930583K01Rik (NM_183267.1,490-508).
gatatctccctatgagtat

SEQ ID NO: 809371 - DNA, 19 bp, Mus musculus
  siRNA target sequence for 4930583K01Rik (NM_183267.1,505-523).
gtatatcccttacattttt

SEQ ID NO: 809372 - DNA, 19 bp, Mus musculus
  siRNA target sequence for 4930583K01Rik (NM_183267.1,517-535).
catttttccaccatctgat

SEQ ID NO: 809373 - DNA, 19 bp, Mus musculus
  siRNA target sequence for 4930583K01Rik (NM_183267.1,546-564).
cccacaaatccgtcaatga

SEQ ID NO: 809374 - DNA, 19 bp, Mus musculus
  siRNA target sequence for 4930583K01Rik (NM_183267.1,569-587).
ggatcctgctattccaaaa

SEQ ID NO: 809375 - DNA, 19 bp, Mus musculus
  siRNA target sequence for 4930583K01Rik (NM_183267.1,659-677).
gtcttctgaaaaatacgat

SEQ ID NO: 809376 - DNA, 19 bp, Mus musculus
  siRNA target sequence for 4930511N19Rik (NM_183269.1,104-122).
gtcctcaaggtcacacaat

SEQ ID NO: 809377 - DNA, 19 bp, Mus musculus
  siRNA target sequence for 4930511N19Rik (NM_183269.1,167-185).
ctctaagcaggtttgtcaa

SEQ ID NO: 809378 - DNA, 19 bp, Mus musculus
  siRNA target sequence for 4930511N19Rik (NM_183269.1,177-195).
gtttgtcaacataaaacga

SEQ ID NO: 809379 - DNA, 19 bp, Mus musculus
  siRNA target sequence for 4930511N19Rik (NM_183269.1,197-215).
gctccccaaaggtaaacga

SEQ ID NO: 809380 - DNA, 19 bp, Mus musculus
  siRNA target sequence for 4930511N19Rik (NM_183269.1,203-221).
caaaggtaaacgagttgta

SEQ ID NO: 809381 - DNA, 19 bp, Mus musculus
  siRNA target sequence for 4930511N19Rik (NM_183269.1,207-225).
ggtaaacgagttgtactta

SEQ ID NO: 809382 - DNA, 19 bp, Mus musculus
  siRNA target sequence for 4930511N19Rik (NM_183269.1,208-226).
gtaaacgagttgtacttaa

SEQ ID NO: 809383 - DNA, 19 bp, Mus musculus
  siRNA target sequence for 4930511N19Rik (NM_183269.1,251-269).
ctatgactcctgacttgat

SEQ ID NO: 809384 - DNA, 19 bp, Mus musculus
  siRNA target sequence for 4930511N19Rik (NM_183269.1,273-291).
ctcatcctacccaagaaat

SEQ ID NO: 809385 - DNA, 19 bp, Mus musculus
  siRNA target sequence for 4930511N19Rik (NM_183269.1,331-349).
ggatttgcccagttgacta

SEQ ID NO: 809386 - DNA, 19 bp, Mus musculus
  siRNA target sequence for 5330414O08Rik (NM_183270.1,250-268).
caggccttcagggattgta

SEQ ID NO: 809387 - DNA, 19 bp, Mus musculus
  siRNA target sequence for 5330414O08Rik (NM_183270.1,253-271).
gccttcagggattgtatga

SEQ ID NO: 809388 - DNA, 19 bp, Mus musculus
  siRNA target sequence for 1700049M11Rik (NM_183271.1,90-108).
caagcagcctcctactgtt

SEQ ID NO: 809389 - DNA, 19 bp, Mus musculus
  siRNA target sequence for 1700049M11Rik (NM_183271.1,98-116).
ctcctactgttcacaacaa

SEQ ID NO: 809390 - DNA, 19 bp, Mus musculus
  siRNA target sequence for 1700049M11Rik (NM_183271.1,184-202).
gtactgtccggagtttctt

SEQ ID NO: 809391 - DNA, 19 bp, Mus musculus
  siRNA target sequence for 1700049M11Rik (NM_183271.1,187-205).
ctgtccggagtttcttctt

SEQ ID NO: 809392 - DNA, 19 bp, Mus musculus
  siRNA target sequence for 1700049M11Rik (NM_183271.1,189-207).
gtccggagtttcttcttga

SEQ ID NO: 809393 - DNA, 19 bp, Mus musculus
  siRNA target sequence for 1700049M11Rik (NM_183271.1,228-246).
ccgtatgcagccgtgataa

SEQ ID NO: 809394 - DNA, 19 bp, Mus musculus
  siRNA target sequence for 1700049M11Rik (NM_183271.1,229-247).
cgtatgcagccgtgataaa

SEQ ID NO: 809395 - DNA, 19 bp, Mus musculus
  siRNA target sequence for 1700049M11Rik (NM_183271.1,248-266).
gggtgcaagggcaccaaaa

SEQ ID NO: 809396 - DNA, 19 bp, Mus musculus
  siRNA target sequence for 1700063I17Rik (NM_183272.1,93-111).
gctgcaatcatgctgataa

SEQ ID NO: 809397 - DNA, 19 bp, Mus musculus
  siRNA target sequence for 1700063I17Rik (NM_183272.1,122-140).
ctgtctttaccagaaaata

SEQ ID NO: 809398 - DNA, 19 bp, Mus musculus
  siRNA target sequence for 1700063I17Rik (NM_183272.1,293-311).
ctccctgccaccttgctat

SEQ ID NO: 809399 - DNA, 19 bp, Mus musculus
  siRNA target sequence for 1700063I17Rik (NM_183272.1,296-314).
cctgccaccttgctattgt

SEQ ID NO: 809400 - DNA, 19 bp, Mus musculus
  siRNA target sequence for 1700063I17Rik (NM_183272.1,304-322).
cttgctattgtgtcacaaa

SEQ ID NO: 809401 - DNA, 19 bp, Mus musculus
  siRNA target sequence for 0610041G09Rik (NM_183274.1,330-348).
gggaccaccccttccataa

SEQ ID NO: 809402 - DNA, 19 bp, Mus musculus
  siRNA target sequence for 0610041G09Rik (NM_183274.1,506-524).
ctggaccgtaaaatggtat

SEQ ID NO: 809403 - DNA, 19 bp, Mus musculus
  siRNA target sequence for 0610041G09Rik (NM_183274.1,509-527).
gaccgtaaaatggtattgt

SEQ ID NO: 809404 - DNA, 19 bp, Mus musculus
  siRNA target sequence for 1110002N22Rik (NM_183275.1,788-806).
gtatgccttactcaacaaa

SEQ ID NO: 809405 - DNA, 19 bp, Mus musculus
  siRNA target sequence for 1110002N22Rik (NM_183275.1,794-812).
cttactcaacaaaactttt

SEQ ID NO: 809406 - DNA, 19 bp, Mus musculus
  siRNA target sequence for 1110002N22Rik (NM_183275.1,830-848).
ccgcgtgctgagcataaat

SEQ ID NO: 809407 - DNA, 19 bp, Mus musculus
  siRNA target sequence for 1110002N22Rik (NM_183275.1,833-851).
cgtgctgagcataaatcga

SEQ ID NO: 809408 - DNA, 19 bp, Mus musculus
  siRNA target sequence for 1110002N22Rik (NM_183275.1,834-852).
gtgctgagcataaatcgaa

SEQ ID NO: 809409 - DNA, 19 bp, Mus musculus
  siRNA target sequence for 1110002N22Rik (NM_183275.1,836-854).
gctgagcataaatcgaaat

SEQ ID NO: 809410 - DNA, 19 bp, Mus musculus
  siRNA target sequence for 1110002N22Rik (NM_183275.1,1015-1033).
cataccggattgaagagtt

SEQ ID NO: 809411 - DNA, 19 bp, Mus musculus
  siRNA target sequence for 1110002N22Rik (NM_183275.1,1019-1037).
ccggattgaagagttgtat

SEQ ID NO: 809412 - DNA, 19 bp, Mus musculus
  siRNA target sequence for 1110002N22Rik (NM_183275.1,1029-1047).
gagttgtatgactcattat

SEQ ID NO: 809413 - DNA, 19 bp, Mus musculus
  siRNA target sequence for 1110002N22Rik (NM_183275.1,1031-1049).
gttgtatgactcattatta

SEQ ID NO: 809414 - DNA, 19 bp, Mus musculus
  siRNA target sequence for 1110002N22Rik (NM_183275.1,1086-1104).
gactcagagctcaaatgtt

SEQ ID NO: 809415 - DNA, 19 bp, Mus musculus
  siRNA target sequence for 1500015L24Rik (NM_183277.1,265-283).
cagctcggggcaatacgat

SEQ ID NO: 809416 - DNA, 19 bp, Mus musculus
  siRNA target sequence for 1500015L24Rik (NM_183277.1,346-364).
gccggattgagatctctat

SEQ ID NO: 809417 - DNA, 19 bp, Mus musculus
  siRNA target sequence for 1500015L24Rik (NM_183277.1,359-377).
ctctatgcctgttcttcaa

SEQ ID NO: 809418 - DNA, 19 bp, Mus musculus
  siRNA target sequence for 1500015L24Rik (NM_183277.1,383-401).
gtggctaccactattccaa

SEQ ID NO: 809419 - DNA, 19 bp, Mus musculus
  siRNA target sequence for 2200001I15Rik (NM_183278.1,186-204).
ctaaagaaagcccaagaat

SEQ ID NO: 809420 - DNA, 19 bp, Mus musculus
  siRNA target sequence for 2610018I05Rik (NM_183279.1,260-278).
gctggattccttttatcga

SEQ ID NO: 809421 - DNA, 19 bp, Mus musculus
  siRNA target sequence for 2610018I05Rik (NM_183279.1,350-368).
gacccaaagaccatttaca

SEQ ID NO: 809422 - DNA, 19 bp, Mus musculus
  siRNA target sequence for 2610018I05Rik (NM_183279.1,370-388).
cccgtgaagaccaaaggaa

SEQ ID NO: 809423 - DNA, 19 bp, Mus musculus
  siRNA target sequence for 2610018I05Rik (NM_183279.1,375-393).
gaagaccaaaggaagctat

SEQ ID NO: 809424 - DNA, 19 bp, Mus musculus
  siRNA target sequence for 2610018I05Rik (NM_183279.1,507-525).
cactggaccctgcaaagat

SEQ ID NO: 809425 - DNA, 19 bp, Mus musculus
  siRNA target sequence for 2310005G13Rik (NM_183281.1,192-210).
caagagtcggcccatatca

SEQ ID NO: 809426 - DNA, 19 bp, Mus musculus
  siRNA target sequence for 2310005G13Rik (NM_183281.1,252-270).
gagtctttttagttaccat

SEQ ID NO: 809427 - DNA, 19 bp, Mus musculus
  siRNA target sequence for 2310005G13Rik (NM_183281.1,272-290).
ggtctctggtggagtacaa

SEQ ID NO: 809428 - DNA, 19 bp, Mus musculus
  siRNA target sequence for 2310005G13Rik (NM_183281.1,277-295).
ctggtggagtacaaaaagt

SEQ ID NO: 809429 - DNA, 19 bp, Mus musculus
  siRNA target sequence for 2310005G13Rik (NM_183281.1,279-297).
ggtggagtacaaaaagtat

SEQ ID NO: 809430 - DNA, 19 bp, Mus musculus
  siRNA target sequence for 2310005G13Rik (NM_183281.1,280-298).
gtggagtacaaaaagtatt

SEQ ID NO: 809431 - DNA, 19 bp, Mus musculus
  siRNA target sequence for 2310005G13Rik (NM_183281.1,360-378).
ctcgagcagaaattttgga

SEQ ID NO: 809432 - DNA, 19 bp, Mus musculus
  siRNA target sequence for 2310005G13Rik (NM_183281.1,400-418).
ggtattagtagcaatggtt

SEQ ID NO: 809433 - DNA, 19 bp, Mus musculus
  siRNA target sequence for 2310005G13Rik (NM_183281.1,410-428).
gcaatggttggccaatttt

SEQ ID NO: 809434 - DNA, 19 bp, Mus musculus
  siRNA target sequence for 2310005G13Rik (NM_183281.1,411-429).
caatggttggccaatttta

SEQ ID NO: 809435 - DNA, 19 bp, Mus musculus
  siRNA target sequence for 2310005G13Rik (NM_183281.1,416-434).
gttggccaattttattgga

SEQ ID NO: 809436 - DNA, 19 bp, Mus musculus
  siRNA target sequence for 2310005G13Rik (NM_183281.1,421-439).
ccaattttattggattgta

SEQ ID NO: 809437 - DNA, 19 bp, Mus musculus
  siRNA target sequence for 2310005G13Rik (NM_183281.1,529-547).
gggtgtgaccaagatctta

SEQ ID NO: 809438 - DNA, 19 bp, Mus musculus
  siRNA target sequence for 2310010M20Rik (NM_183283.1,350-368).
gtcatcgaggtccttattt

SEQ ID NO: 809439 - DNA, 19 bp, Mus musculus
  siRNA target sequence for 2310010M20Rik (NM_183283.1,370-388).
cttgcacactcgaatgctt

SEQ ID NO: 809440 - DNA, 19 bp, Mus musculus
  siRNA target sequence for 2310010M20Rik (NM_183283.1,541-559).
cattgtacatggcaacaaa

SEQ ID NO: 809441 - DNA, 19 bp, Mus musculus
  siRNA target sequence for 2310010M20Rik (NM_183283.1,566-584).
cactatgctgccaacgtaa

SEQ ID NO: 809442 - DNA, 19 bp, Mus musculus
  siRNA target sequence for 2310010M20Rik (NM_183283.1,581-599).
gtaagacggatgtacatca

SEQ ID NO: 809443 - DNA, 19 bp, Mus musculus
  siRNA target sequence for 2310010M20Rik (NM_183283.1,585-603).
gacggatgtacatcaaaga

SEQ ID NO: 809444 - DNA, 19 bp, Mus musculus
  siRNA target sequence for 2310010M20Rik (NM_183283.1,717-735).
gggcacccctaaaagagtt

SEQ ID NO: 809445 - DNA, 19 bp, Mus musculus
  siRNA target sequence for 2310010M20Rik (NM_183283.1,720-738).
cacccctaaaagagttgat

SEQ ID NO: 809446 - DNA, 19 bp, Mus musculus
  siRNA target sequence for 2310010M20Rik (NM_183283.1,733-751).
gttgatgcccccagttaaa

SEQ ID NO: 809447 - DNA, 19 bp, Mus musculus
  siRNA target sequence for 2610318N02Rik (NM_183287.1,188-206).
gatgagttcgacaacgaat

SEQ ID NO: 809448 - DNA, 19 bp, Mus musculus
  siRNA target sequence for 2610318N02Rik (NM_183287.1,388-406).
cagcctctgggcgaagttt

SEQ ID NO: 809449 - DNA, 19 bp, Mus musculus
  siRNA target sequence for 2610318N02Rik (NM_183287.1,390-408).
gcctctgggcgaagtttgt

SEQ ID NO: 809450 - DNA, 19 bp, Mus musculus
  siRNA target sequence for 2610318N02Rik (NM_183287.1,414-432).
ctgtgcagggggatctaaa

SEQ ID NO: 809451 - DNA, 19 bp, Mus musculus
  siRNA target sequence for 2610318N02Rik (NM_183287.1,556-574).
gaaaccagatcctatcttt

SEQ ID NO: 809452 - DNA, 19 bp, Mus musculus
  siRNA target sequence for 2610318N02Rik (NM_183287.1,681-699).
caccctctgtctacactat

SEQ ID NO: 809453 - DNA, 19 bp, Mus musculus
  siRNA target sequence for 2610318N02Rik (NM_183287.1,741-759).
cgatggagaaactggatat

SEQ ID NO: 809454 - DNA, 19 bp, Mus musculus
  siRNA target sequence for 5730442P18Rik (NM_183288.1,846-864).
gcgactcggagaatgtcta

SEQ ID NO: 809455 - DNA, 19 bp, Mus musculus
  siRNA target sequence for 5730476P14Rik (NM_183289.1,604-622).
cggaggaatcggtactctt

SEQ ID NO: 809456 - DNA, 19 bp, Mus musculus
  siRNA target sequence for 5730476P14Rik (NM_183289.1,731-749).
cataccaggtggttgtcat

SEQ ID NO: 809457 - DNA, 19 bp, Mus musculus
  siRNA target sequence for 5730476P14Rik (NM_183289.1,741-759).
ggttgtcatgacagtctta

SEQ ID NO: 809458 - DNA, 19 bp, Mus musculus
  siRNA target sequence for 5730476P14Rik (NM_183289.1,742-760).
gttgtcatgacagtcttaa

SEQ ID NO: 809459 - DNA, 19 bp, Mus musculus
  siRNA target sequence for 5730476P14Rik (NM_183289.1,920-938).
ccggactgccccattctca

SEQ ID NO: 809460 - DNA, 19 bp, Mus musculus
  siRNA target sequence for 5730476P14Rik (NM_183289.1,1069-1087).
ctgcagcgaaaggcaataa

SEQ ID NO: 809461 - DNA, 19 bp, Mus musculus
  siRNA target sequence for 5730476P14Rik (NM_183289.1,1141-1159).
gtgatgaccgggttttctt

SEQ ID NO: 809462 - DNA, 19 bp, Mus musculus
  siRNA target sequence for 5730476P14Rik (NM_183289.1,1265-1283).
ggaggcctcagcaagtaat

SEQ ID NO: 809463 - DNA, 19 bp, Mus musculus
  siRNA target sequence for 5730476P14Rik (NM_183289.1,1266-1284).
gaggcctcagcaagtaatt

SEQ ID NO: 809464 - DNA, 19 bp, Mus musculus
  siRNA target sequence for 4921517D22Rik (NM_183290.1,339-357).
cgatgtttgctgtcagatt

SEQ ID NO: 809465 - DNA, 19 bp, Mus musculus
  siRNA target sequence for 4921517D22Rik (NM_183290.1,414-432).
gtctgtggcacatcattta

SEQ ID NO: 809466 - DNA, 19 bp, Mus musculus
  siRNA target sequence for 4921517D22Rik (NM_183290.1,528-546).
cagactgaggttaagaaaa

SEQ ID NO: 809467 - DNA, 19 bp, Mus musculus
  siRNA target sequence for 4921517D22Rik (NM_183290.1,562-580).
cgtccatgtcagatctact

SEQ ID NO: 809468 - DNA, 19 bp, Mus musculus
  siRNA target sequence for 4921517D22Rik (NM_183290.1,563-581).
gtccatgtcagatctactt

SEQ ID NO: 809469 - DNA, 19 bp, Mus musculus
  siRNA target sequence for 4921517D22Rik (NM_183290.1,565-583).
ccatgtcagatctacttca

SEQ ID NO: 809470 - DNA, 19 bp, Mus musculus
  siRNA target sequence for 4921517D22Rik (NM_183290.1,589-607).
gtctgttaatgggttacat

SEQ ID NO: 809471 - DNA, 19 bp, Mus musculus
  siRNA target sequence for 4921517D22Rik (NM_183290.1,610-628).
ctccattggatcaggtata

SEQ ID NO: 809472 - DNA, 19 bp, Mus musculus
  siRNA target sequence for 4921517D22Rik (NM_183290.1,612-630).
ccattggatcaggtataca

SEQ ID NO: 809473 - DNA, 19 bp, Mus musculus
  siRNA target sequence for 4921517D22Rik (NM_183290.1,656-674).
cggtatccctcctcctata

SEQ ID NO: 809474 - DNA, 19 bp, Mus musculus
  siRNA target sequence for 4921517D22Rik (NM_183290.1,670-688).
ctatactcgactttcctta

SEQ ID NO: 809475 - DNA, 19 bp, Mus musculus
  siRNA target sequence for 4921517D22Rik (NM_183290.1,675-693).
ctcgactttccttatggtt

SEQ ID NO: 809476 - DNA, 19 bp, Mus musculus
  siRNA target sequence for 4921517D22Rik (NM_183290.1,677-695).
cgactttccttatggttta

SEQ ID NO: 809477 - DNA, 19 bp, Mus musculus
  siRNA target sequence for 4921517D22Rik (NM_183290.1,710-728).
cttagttgctccaacacaa

SEQ ID NO: 809478 - DNA, 19 bp, Mus musculus
  siRNA target sequence for 4921517D22Rik (NM_183290.1,742-760).
ggattcaaagcatgacatt

SEQ ID NO: 809479 - DNA, 19 bp, Mus musculus
  siRNA target sequence for 4921517D22Rik (NM_183290.1,751-769).
gcatgacattccgaaaact

SEQ ID NO: 809480 - DNA, 19 bp, Mus musculus
  siRNA target sequence for 4921517D22Rik (NM_183290.1,762-780).
cgaaaacttctcttgtctt

SEQ ID NO: 809481 - DNA, 19 bp, Mus musculus
  siRNA target sequence for 4921517D22Rik (NM_183290.1,796-814).
ggctgttctacgaagaaaa

SEQ ID NO: 809482 - DNA, 19 bp, Mus musculus
  siRNA target sequence for 4921517D22Rik (NM_183290.1,1001-1019).
gcctctggttcgtaagaca

SEQ ID NO: 809483 - DNA, 19 bp, Mus musculus
  siRNA target sequence for 4921517D22Rik (NM_183290.1,1056-1074).
ggccactattctgttaagt

SEQ ID NO: 809484 - DNA, 19 bp, Mus musculus
  siRNA target sequence for 4921537J05Rik (NM_183291.1,268-286).
ctcctgcaagtctcagtta

SEQ ID NO: 809485 - DNA, 19 bp, Mus musculus
  siRNA target sequence for 4921537J05Rik (NM_183291.1,308-326).
gtcttaaagaggcttatga

SEQ ID NO: 809486 - DNA, 19 bp, Mus musculus
  siRNA target sequence for 4921537J05Rik (NM_183291.1,310-328).
cttaaagaggcttatgagt

SEQ ID NO: 809487 - DNA, 19 bp, Mus musculus
  siRNA target sequence for 4921537J05Rik (NM_183291.1,387-405).
ctcagagatttttacaaaa

SEQ ID NO: 809488 - DNA, 19 bp, Mus musculus
  siRNA target sequence for 4921537J05Rik (NM_183291.1,432-450).
ccttcatgatacttcactt

SEQ ID NO: 809489 - DNA, 19 bp, Mus musculus
  siRNA target sequence for 4921537J05Rik (NM_183291.1,477-495).
ctccattgcccaagattat

SEQ ID NO: 809490 - DNA, 19 bp, Mus musculus
  siRNA target sequence for 4921537J05Rik (NM_183291.1,479-497).
ccattgcccaagattatct

SEQ ID NO: 809491 - DNA, 19 bp, Mus musculus
  siRNA target sequence for 4921537J05Rik (NM_183291.1,480-498).
cattgcccaagattatctt

SEQ ID NO: 809492 - DNA, 19 bp, Mus musculus
  siRNA target sequence for 4921537J05Rik (NM_183291.1,484-502).
gcccaagattatcttgatt

SEQ ID NO: 809493 - DNA, 19 bp, Mus musculus
  siRNA target sequence for 4921537J05Rik (NM_183291.1,485-503).
cccaagattatcttgattt

SEQ ID NO: 809494 - DNA, 19 bp, Mus musculus
  siRNA target sequence for 4933428P19Rik (NM_183295.1,224-242).
ccaggaggagcgttttgga

SEQ ID NO: 809495 - DNA, 19 bp, Mus musculus
  siRNA target sequence for Nxph4 (NM_183297.1,447-465).
ggctggggggacttttact

SEQ ID NO: 809496 - DNA, 19 bp, Mus musculus
  siRNA target sequence for Nxph4 (NM_183297.1,529-547).
gtaccttcagtgtgtactt

SEQ ID NO: 809497 - DNA, 19 bp, Mus musculus
  siRNA target sequence for Nxph4 (NM_183297.1,540-558).
gtgtacttccgtcacaatt

SEQ ID NO: 809498 - DNA, 19 bp, Mus musculus
  siRNA target sequence for Nxph4 (NM_183297.1,560-578).
gtccagcctgggtaaccta

SEQ ID NO: 809499 - DNA, 19 bp, Mus musculus
  siRNA target sequence for Nxph4 (NM_183297.1,571-589).
gtaacctaagcgtcagtat

SEQ ID NO: 809500 - DNA, 19 bp, Mus musculus
  siRNA target sequence for Nxph4 (NM_183297.1,659-677).
gtccacgctggcacttgaa

SEQ ID NO: 809501 - DNA, 19 bp, Mus musculus
  siRNA target sequence for E030027L17 (NM_183300.1,451-469).
gttcgtcagtgcttgtctt

SEQ ID NO: 809502 - DNA, 19 bp, Mus musculus
  siRNA target sequence for E030027L17 (NM_183300.1,499-517).
gattaaggtgcatacagta

SEQ ID NO: 809503 - DNA, 19 bp, Mus musculus
  siRNA target sequence for E030027L17 (NM_183300.1,520-538).
gcccctcatccttaagtca

SEQ ID NO: 809504 - DNA, 19 bp, Mus musculus
  siRNA target sequence for E030027L17 (NM_183300.1,604-622).
gagaactttccagtttagt

SEQ ID NO: 809505 - DNA, 19 bp, Mus musculus
  siRNA target sequence for E030027L17 (NM_183300.1,625-643).
cagacgctgcacatagctt

SEQ ID NO: 809506 - DNA, 19 bp, Mus musculus
  siRNA target sequence for E030027L17 (NM_183300.1,696-714).
ccctcacatcctggatttt

SEQ ID NO: 809507 - DNA, 19 bp, Mus musculus
  siRNA target sequence for E030027L17 (NM_183300.1,721-739).
gttttagtagaaaatacct

SEQ ID NO: 809508 - DNA, 19 bp, Mus musculus
  siRNA target sequence for C630004L07 (NM_183302.1,667-685).
ccagaggaaactgaagttt

SEQ ID NO: 809509 - DNA, 19 bp, Mus musculus
  siRNA target sequence for C630004L07 (NM_183302.1,687-705).
ccgactcccgacaagaaga

SEQ ID NO: 809510 - DNA, 19 bp, Mus musculus
  siRNA target sequence for C630004L07 (NM_183302.1,688-706).
cgactcccgacaagaagat

SEQ ID NO: 809511 - DNA, 19 bp, Mus musculus
  siRNA target sequence for C630004L07 (NM_183302.1,701-719).
gaagatgcacatatgaact

SEQ ID NO: 809512 - DNA, 19 bp, Mus musculus
  siRNA target sequence for C630004L07 (NM_183302.1,726-744).
gactgtcaaatgcataaga

SEQ ID NO: 809513 - DNA, 19 bp, Mus musculus
  siRNA target sequence for C630004L07 (NM_183302.1,787-805).
ggtaaagtggacataaact

SEQ ID NO: 809514 - DNA, 19 bp, Mus musculus
  siRNA target sequence for C630004L07 (NM_183302.1,909-927).
cctcgagctcagaaagagt

SEQ ID NO: 809515 - DNA, 19 bp, Mus musculus
  siRNA target sequence for 6430702L12 (NM_183303.1,670-688).
gggcttggatacaactcta

SEQ ID NO: 809516 - DNA, 19 bp, Mus musculus
  siRNA target sequence for 6430702L12 (NM_183303.1,686-704).
ctagggagagcagtaaatt

SEQ ID NO: 809517 - DNA, 19 bp, Mus musculus
  siRNA target sequence for 6430702L12 (NM_183303.1,761-779).
cacccatttctggtaagaa

SEQ ID NO: 809518 - DNA, 19 bp, Mus musculus
  siRNA target sequence for 6430702L12 (NM_183303.1,879-897).
ccagggtataactgatgta

SEQ ID NO: 809519 - DNA, 19 bp, Mus musculus
  siRNA target sequence for 6430702L12 (NM_183303.1,953-971).
gtataaggtgcatcactaa

SEQ ID NO: 809520 - DNA, 19 bp, Mus musculus
  siRNA target sequence for 6430702L12 (NM_183303.1,989-1007).
gccaacagaacacaaatct

SEQ ID NO: 809521 - DNA, 19 bp, Mus musculus
  siRNA target sequence for 4732457N14 (NM_183304.1,681-699).
gttctcccttgctattttt

SEQ ID NO: 809522 - DNA, 19 bp, Mus musculus
  siRNA target sequence for 4732457N14 (NM_183304.1,728-746).
gatcataagccccatcttt

SEQ ID NO: 809523 - DNA, 19 bp, Mus musculus
  siRNA target sequence for 4732457N14 (NM_183304.1,780-798).
gttcccttttgattagact

SEQ ID NO: 809524 - DNA, 19 bp, Mus musculus
  siRNA target sequence for A430057O09 (NM_183305.1,25-43).
gcttgcacgatcattgata

SEQ ID NO: 809525 - DNA, 19 bp, Mus musculus
  siRNA target sequence for A430057O09 (NM_183305.1,26-44).
cttgcacgatcattgataa

SEQ ID NO: 809526 - DNA, 19 bp, Mus musculus
  siRNA target sequence for A430057O09 (NM_183305.1,48-66).
ggaagttccatgatctgaa

SEQ ID NO: 809527 - DNA, 19 bp, Mus musculus
  siRNA target sequence for A430057O09 (NM_183305.1,120-138).
gggagtcaatggagctatt

SEQ ID NO: 809528 - DNA, 19 bp, Mus musculus
  siRNA target sequence for A130052D22 (NM_183306.1,638-656).
gctcaggtgacatattcct

SEQ ID NO: 809529 - DNA, 19 bp, Mus musculus
  siRNA target sequence for A130052D22 (NM_183306.1,639-657).
ctcaggtgacatattcctt

SEQ ID NO: 809530 - DNA, 19 bp, Mus musculus
  siRNA target sequence for A130052D22 (NM_183306.1,644-662).
gtgacatattccttgcatt

SEQ ID NO: 809531 - DNA, 19 bp, Mus musculus
  siRNA target sequence for A130052D22 (NM_183306.1,648-666).
catattccttgcattacaa

SEQ ID NO: 809532 - DNA, 19 bp, Mus musculus
  siRNA target sequence for A130052D22 (NM_183306.1,654-672).
ccttgcattacaaacatga

SEQ ID NO: 809533 - DNA, 19 bp, Mus musculus
  siRNA target sequence for A130052D22 (NM_183306.1,793-811).
ccaccctcgcccaactgat

SEQ ID NO: 809534 - DNA, 19 bp, Mus musculus
  siRNA target sequence for A130052D22 (NM_183306.1,921-939).
cacatgctcgcccatatga

SEQ ID NO: 809535 - DNA, 19 bp, Mus musculus
  siRNA target sequence for A130052D22 (NM_183306.1,927-945).
ctcgcccatatgaacatgt

SEQ ID NO: 809536 - DNA, 19 bp, Mus musculus
  siRNA target sequence for A130052D22 (NM_183306.1,929-947).
cgcccatatgaacatgtat

SEQ ID NO: 809537 - DNA, 19 bp, Mus musculus
  siRNA target sequence for 4921511C16 (NM_183307.1,632-650).
gcagagctacggaaactga

SEQ ID NO: 809538 - DNA, 19 bp, Mus musculus
  siRNA target sequence for 4921511C16 (NM_183307.1,678-696).
gccgcaagtccttcaactt

SEQ ID NO: 809539 - DNA, 19 bp, Mus musculus
  siRNA target sequence for 4921511C16 (NM_183307.1,720-738).
gccaatacaaggaaataga

SEQ ID NO: 809540 - DNA, 19 bp, Mus musculus
  siRNA target sequence for 4921511C16 (NM_183307.1,722-740).
caatacaaggaaatagaga

SEQ ID NO: 809541 - DNA, 19 bp, Mus musculus
  siRNA target sequence for 4921511C16 (NM_183307.1,761-779).
gagaccaccatgcttctaa

SEQ ID NO: 809542 - DNA, 19 bp, Mus musculus
  siRNA target sequence for 4921511C16 (NM_183307.1,806-824).
gacatcaaccagaaaaact

SEQ ID NO: 809543 - DNA, 19 bp, Mus musculus
  siRNA target sequence for 4921511C16 (NM_183307.1,896-914).
ctgggagaactggatgata

SEQ ID NO: 809544 - DNA, 19 bp, Mus musculus
  siRNA target sequence for 4921511C16 (NM_183307.1,966-984).
ggacacaagaggccaataa

SEQ ID NO: 809545 - DNA, 19 bp, Mus musculus
  siRNA target sequence for 4921511C16 (NM_183307.1,967-985).
gacacaagaggccaataat

SEQ ID NO: 809546 - DNA, 19 bp, Mus musculus
  siRNA target sequence for 4921511C16 (NM_183307.1,1037-1055).
gtcactgtccactttgaca

SEQ ID NO: 809547 - DNA, 19 bp, Mus musculus
  siRNA target sequence for 4921511C16 (NM_183307.1,1296-1314).
gggaactggaacgtctata

SEQ ID NO: 809548 - DNA, 19 bp, Mus musculus
  siRNA target sequence for 4921511C16 (NM_183307.1,1316-1334).
gatcacgagacgaaactca

SEQ ID NO: 809549 - DNA, 19 bp, Mus musculus
  siRNA target sequence for 4921511C16 (NM_183307.1,1355-1373).
cttaacgaccgctctgaat

SEQ ID NO: 809550 - DNA, 19 bp, Mus musculus
  siRNA target sequence for 4921511C16 (NM_183307.1,1550-1568).
gctcgtttcacttatgtca

SEQ ID NO: 809551 - DNA, 19 bp, Mus musculus
  siRNA target sequence for 4921511C16 (NM_183307.1,1716-1734).
cgcaggaagcggacattta

SEQ ID NO: 809552 - DNA, 19 bp, Mus musculus
  siRNA target sequence for 4921511C16 (NM_183307.1,1717-1735).
gcaggaagcggacatttat

SEQ ID NO: 809553 - DNA, 19 bp, Mus musculus
  siRNA target sequence for 4921511C16 (NM_183307.1,1721-1739).
gaagcggacatttatgaga

SEQ ID NO: 809554 - DNA, 19 bp, Mus musculus
  siRNA target sequence for 4921511C16 (NM_183307.1,1785-1803).
cggtggagaagatgtttaa

SEQ ID NO: 809555 - DNA, 19 bp, Mus musculus
  siRNA target sequence for 4921511C16 (NM_183307.1,1855-1873).
gaaggtcacggacatcaat

SEQ ID NO: 809556 - DNA, 19 bp, Mus musculus
  siRNA target sequence for A630038D02 (NM_183309.1,235-253).
gctaaccattggaaagagt

SEQ ID NO: 809557 - DNA, 19 bp, Mus musculus
  siRNA target sequence for A630038D02 (NM_183309.1,263-281).
caaccccagctgacttcaa

SEQ ID NO: 809558 - DNA, 19 bp, Mus musculus
  siRNA target sequence for A630038D02 (NM_183309.1,271-289).
gctgacttcaaatctaaga

SEQ ID NO: 809559 - DNA, 19 bp, Mus musculus
  siRNA target sequence for A630038D02 (NM_183309.1,272-290).
ctgacttcaaatctaagat

SEQ ID NO: 809560 - DNA, 19 bp, Mus musculus
  siRNA target sequence for A630038D02 (NM_183309.1,305-323).
cccttgaatgcgaagatta

SEQ ID NO: 809561 - DNA, 19 bp, Mus musculus
  siRNA target sequence for A630038D02 (NM_183309.1,306-324).
ccttgaatgcgaagattat

SEQ ID NO: 809562 - DNA, 19 bp, Mus musculus
  siRNA target sequence for A630038D02 (NM_183309.1,310-328).
gaatgcgaagattatcgat

SEQ ID NO: 809563 - DNA, 19 bp, Mus musculus
  siRNA target sequence for A630038D02 (NM_183309.1,343-361).
ctcgcctcccagtttgctt

SEQ ID NO: 809564 - DNA, 19 bp, Mus musculus
  siRNA target sequence for A630038D02 (NM_183309.1,459-477).
ctggtaaggaccatataga

SEQ ID NO: 809565 - DNA, 19 bp, Mus musculus
  siRNA target sequence for A630038D02 (NM_183309.1,461-479).
ggtaaggaccatatagaat

SEQ ID NO: 809566 - DNA, 19 bp, Mus musculus
  siRNA target sequence for A630038D02 (NM_183309.1,467-485).
gaccatatagaatttcaca

SEQ ID NO: 809567 - DNA, 19 bp, Mus musculus
  siRNA target sequence for A630038D02 (NM_183309.1,469-487).
ccatatagaatttcacaat

SEQ ID NO: 809568 - DNA, 19 bp, Mus musculus
  siRNA target sequence for A630038D02 (NM_183309.1,579-597).
cagtaggaaaggccttaat

SEQ ID NO: 809569 - DNA, 19 bp, Mus musculus
  siRNA target sequence for A630038D02 (NM_183309.1,609-627).
cagcccagccatccttaaa

SEQ ID NO: 809570 - DNA, 19 bp, Mus musculus
  siRNA target sequence for A630038D02 (NM_183309.1,611-629).
gcccagccatccttaaagt

SEQ ID NO: 809571 - DNA, 19 bp, Mus musculus
  siRNA target sequence for A630038D02 (NM_183309.1,726-744).
ccttgctcacactagactt

SEQ ID NO: 809572 - DNA, 19 bp, Mus musculus
  siRNA target sequence for 6230405M12 (NM_183310.1,140-158).
gtctcccggttgccaatat

SEQ ID NO: 809573 - DNA, 19 bp, Mus musculus
  siRNA target sequence for 6230405M12 (NM_183310.1,306-324).
ctatcagcttccaccataa

SEQ ID NO: 809574 - DNA, 19 bp, Mus musculus
  siRNA target sequence for 6230405M12 (NM_183310.1,359-377).
cagaaccttagtatttcca

SEQ ID NO: 809575 - DNA, 19 bp, Mus musculus
  siRNA target sequence for 6230405M12 (NM_183310.1,361-379).
gaaccttagtatttccaat

SEQ ID NO: 809576 - DNA, 19 bp, Mus musculus
  siRNA target sequence for 6230405M12 (NM_183310.1,422-440).
gaggaacacgtcaaaacca

SEQ ID NO: 809577 - DNA, 19 bp, Mus musculus
  siRNA target sequence for 6230405M12 (NM_183310.1,465-483).
gcagttcacgaagtaagaa

SEQ ID NO: 809578 - DNA, 19 bp, Mus musculus
  siRNA target sequence for 6230405M12 (NM_183310.1,468-486).
gttcacgaagtaagaagat

SEQ ID NO: 809579 - DNA, 19 bp, Mus musculus
  siRNA target sequence for 6230405M12 (NM_183310.1,492-510).
ggtctttgacggaagattt

SEQ ID NO: 809580 - DNA, 19 bp, Mus musculus
  siRNA target sequence for 6230405M12 (NM_183310.1,493-511).
gtctttgacggaagatttt

SEQ ID NO: 809581 - DNA, 19 bp, Mus musculus
  siRNA target sequence for 6230405M12 (NM_183310.1,524-542).
gagccttcaactaataaga

SEQ ID NO: 809582 - DNA, 19 bp, Mus musculus
  siRNA target sequence for 6230405M12 (NM_183310.1,531-549).
caactaataagaatgtctt

SEQ ID NO: 809583 - DNA, 19 bp, Mus musculus
  siRNA target sequence for 6230405M12 (NM_183310.1,547-565).
ctttataaactgtctaagt

SEQ ID NO: 809584 - DNA, 19 bp, Mus musculus
  siRNA target sequence for 6230405M12 (NM_183310.1,608-626).
caaagtcgccgttctatta

SEQ ID NO: 809585 - DNA, 19 bp, Mus musculus
  siRNA target sequence for 6230405M12 (NM_183310.1,612-630).
gtcgccgttctattaaaca

SEQ ID NO: 809586 - DNA, 19 bp, Mus musculus
  siRNA target sequence for 6230405M12 (NM_183310.1,614-632).
cgccgttctattaaacagt

SEQ ID NO: 809587 - DNA, 19 bp, Mus musculus
  siRNA target sequence for 6230405M12 (NM_183310.1,657-675).
ccttctcatctcactataa

SEQ ID NO: 809588 - DNA, 19 bp, Mus musculus
  siRNA target sequence for 6230405M12 (NM_183310.1,661-679).
ctcatctcactataagttt

SEQ ID NO: 809589 - DNA, 19 bp, Mus musculus
  siRNA target sequence for 6230405M12 (NM_183310.1,666-684).
ctcactataagttttgtaa

SEQ ID NO: 809590 - DNA, 19 bp, Mus musculus
  siRNA target sequence for 6230405M12 (NM_183310.1,668-686).
cactataagttttgtaagt

SEQ ID NO: 809591 - DNA, 19 bp, Mus musculus
  siRNA target sequence for 6230405M12 (NM_183310.1,699-717).
gccaatccacttcattgat

SEQ ID NO: 809592 - DNA, 19 bp, Mus musculus
  siRNA target sequence for 6230405M12 (NM_183310.1,730-748).
gttctcgctggcaattgca

SEQ ID NO: 809593 - DNA, 19 bp, Mus musculus
  siRNA target sequence for 6230405M12 (NM_183310.1,735-753).
cgctggcaattgcacaata

SEQ ID NO: 809594 - DNA, 19 bp, Mus musculus
  siRNA target sequence for 6230405M12 (NM_183310.1,795-813).
gctctgtggatgtaacaga

SEQ ID NO: 809595 - DNA, 19 bp, Mus musculus
  siRNA target sequence for 6230405M12 (NM_183310.1,818-836).
gcaggaagttccttacagt

SEQ ID NO: 809596 - DNA, 19 bp, Mus musculus
  siRNA target sequence for 6230405M12 (NM_183310.1,866-884).
gctcagaccccttcagaat

SEQ ID NO: 809597 - DNA, 19 bp, Mus musculus
  siRNA target sequence for 6230405M12 (NM_183310.1,946-964).
ggcatcacactgtgacaat

SEQ ID NO: 809598 - DNA, 19 bp, Mus musculus
  siRNA target sequence for 6230405M12 (NM_183310.1,947-965).
gcatcacactgtgacaatt

SEQ ID NO: 809599 - DNA, 19 bp, Mus musculus
  siRNA target sequence for 6230405M12 (NM_183310.1,991-1009).
gcccacttccagtcttact

SEQ ID NO: 809600 - DNA, 19 bp, Mus musculus
  siRNA target sequence for 6230405M12 (NM_183310.1,1138-1156).
gagggaagtgtcactacaa

SEQ ID NO: 809601 - DNA, 19 bp, Mus musculus
  siRNA target sequence for 6230405M12 (NM_183310.1,1308-1326).
cattggctgaacgctttaa

SEQ ID NO: 809602 - DNA, 19 bp, Mus musculus
  siRNA target sequence for 6230405M12 (NM_183310.1,1370-1388).
ggggatcatgtttttaaca

SEQ ID NO: 809603 - DNA, 19 bp, Mus musculus
  siRNA target sequence for 6230405M12 (NM_183310.1,1371-1389).
gggatcatgtttttaacaa

SEQ ID NO: 809604 - DNA, 19 bp, Mus musculus
  siRNA target sequence for 6230405M12 (NM_183310.1,1372-1390).
ggatcatgtttttaacaaa

SEQ ID NO: 809605 - DNA, 19 bp, Mus musculus
  siRNA target sequence for 6230405M12 (NM_183310.1,1439-1457).
ctcgtgcaaaaattatgta

SEQ ID NO: 809606 - DNA, 19 bp, Mus musculus
  siRNA target sequence for 6230405M12 (NM_183310.1,1441-1459).
cgtgcaaaaattatgtaca

SEQ ID NO: 809607 - DNA, 19 bp, Mus musculus
  siRNA target sequence for 6230405M12 (NM_183310.1,1444-1462).
gcaaaaattatgtacatta

SEQ ID NO: 809608 - DNA, 19 bp, Mus musculus
  siRNA target sequence for 6230405M12 (NM_183310.1,1493-1511).
cgccatatcgtgaatgaaa

SEQ ID NO: 809609 - DNA, 19 bp, Mus musculus
  siRNA target sequence for 6230405M12 (NM_183310.1,1512-1530).
ggcacgtttcctttgtatt

SEQ ID NO: 809610 - DNA, 19 bp, Mus musculus
  siRNA target sequence for 6230405M12 (NM_183310.1,1513-1531).
gcacgtttcctttgtattt

SEQ ID NO: 809611 - DNA, 19 bp, Mus musculus
  siRNA target sequence for B930076A02 (NM_183311.1,254-272).
ctaagtgctgtcagaacat

SEQ ID NO: 809612 - DNA, 19 bp, Mus musculus
  siRNA target sequence for B930076A02 (NM_183311.1,471-489).
ccgttctgtgcgtgaaaga

SEQ ID NO: 809613 - DNA, 19 bp, Mus musculus
  siRNA target sequence for B930076A02 (NM_183311.1,472-490).
cgttctgtgcgtgaaagat

SEQ ID NO: 809614 - DNA, 19 bp, Mus musculus
  siRNA target sequence for B930076A02 (NM_183311.1,553-571).
cttaccaacggcaagtctt

SEQ ID NO: 809615 - DNA, 19 bp, Mus musculus
  siRNA target sequence for B930076A02 (NM_183311.1,583-601).
cacttctcagctgatgaat

SEQ ID NO: 809616 - DNA, 19 bp, Mus musculus
  siRNA target sequence for B930076A02 (NM_183311.1,660-678).
ctcttgttactttggatat

SEQ ID NO: 809617 - DNA, 19 bp, Mus musculus
  siRNA target sequence for B930076A02 (NM_183311.1,694-712).
cagttactccacacaactt

SEQ ID NO: 809618 - DNA, 19 bp, Mus musculus
  siRNA target sequence for B930076A02 (NM_183311.1,803-821).
gcaatggcagcgtgaagat

SEQ ID NO: 809619 - DNA, 19 bp, Mus musculus
  siRNA target sequence for B930076A02 (NM_183311.1,1006-1024).
gacccaggccaggtactat

SEQ ID NO: 809620 - DNA, 19 bp, Mus musculus
  siRNA target sequence for B930076A02 (NM_183311.1,1009-1027).
ccaggccaggtactataca

SEQ ID NO: 809621 - DNA, 19 bp, Mus musculus
  siRNA target sequence for B930076A02 (NM_183311.1,1032-1050).
cgagtctccggctggttat

SEQ ID NO: 809622 - DNA, 19 bp, Mus musculus
  siRNA target sequence for B930076A02 (NM_183311.1,1194-1212).
ggctctgatcgccaatttt

SEQ ID NO: 809623 - DNA, 19 bp, Mus musculus
  siRNA target sequence for B930076A02 (NM_183311.1,1277-1295).
cccatggcgtgtttctgat

SEQ ID NO: 809624 - DNA, 19 bp, Mus musculus
  siRNA target sequence for B930076A02 (NM_183311.1,1282-1300).
ggcgtgtttctgatcatga

SEQ ID NO: 809625 - DNA, 19 bp, Mus musculus
  siRNA target sequence for B930076A02 (NM_183311.1,1411-1429).
ccgcagcacgtctatggaa

SEQ ID NO: 809626 - DNA, 19 bp, Mus musculus
  siRNA target sequence for B930076A02 (NM_183311.1,1412-1430).
cgcagcacgtctatggaaa

SEQ ID NO: 809627 - DNA, 19 bp, Mus musculus
  siRNA target sequence for B930076A02 (NM_183311.1,1426-1444).
ggaaacgtgacgttcatca

SEQ ID NO: 809628 - DNA, 19 bp, Mus musculus
  siRNA target sequence for B930076A02 (NM_183311.1,2111-2129).
gaccctcgagccactgttt

SEQ ID NO: 809629 - DNA, 19 bp, Mus musculus
  siRNA target sequence for B930076A02 (NM_183311.1,2114-2132).
cctcgagccactgtttaga

SEQ ID NO: 809630 - DNA, 19 bp, Mus musculus
  siRNA target sequence for B930076A02 (NM_183311.1,2124-2142).
ctgtttagagacggatatt

SEQ ID NO: 809631 - DNA, 19 bp, Mus musculus
  siRNA target sequence for B930076A02 (NM_183311.1,2126-2144).
gtttagagacggatattgt

SEQ ID NO: 809632 - DNA, 19 bp, Mus musculus
  siRNA target sequence for B930076A02 (NM_183311.1,2167-2185).
ccctccttggggtttgtga

SEQ ID NO: 809633 - DNA, 19 bp, Mus musculus
  siRNA target sequence for B930076A02 (NM_183311.1,2259-2277).
ctcttcttgccaaaataaa

SEQ ID NO: 809634 - DNA, 19 bp, Mus musculus
  siRNA target sequence for AI852401 (NM_183312.1,1047-1065).
gagtacgatgtttttcatt

SEQ ID NO: 809635 - DNA, 19 bp, Mus musculus
  siRNA target sequence for AI852401 (NM_183312.1,1066-1084).
gccaagtataagagaaaca

SEQ ID NO: 809636 - DNA, 19 bp, Mus musculus
  siRNA target sequence for AI852401 (NM_183312.1,1085-1103).
cagaacggcttaagatgat

SEQ ID NO: 809637 - DNA, 19 bp, Mus musculus
  siRNA target sequence for AI852401 (NM_183312.1,1087-1105).
gaacggcttaagatgatct

SEQ ID NO: 809638 - DNA, 19 bp, Mus musculus
  siRNA target sequence for AI852401 (NM_183312.1,1219-1237).
ctgtggctcgtcatctctt

SEQ ID NO: 809639 - DNA, 19 bp, Mus musculus
  siRNA target sequence for AI852401 (NM_183312.1,1245-1263).
cagagatgtgcggacttat

SEQ ID NO: 809640 - DNA, 19 bp, Mus musculus
  siRNA target sequence for AI852401 (NM_183312.1,1247-1265).
gagatgtgcggacttattt

SEQ ID NO: 809641 - DNA, 19 bp, Mus musculus
  siRNA target sequence for AI852401 (NM_183312.1,1249-1267).
gatgtgcggacttattttt

SEQ ID NO: 809642 - DNA, 19 bp, Mus musculus
  siRNA target sequence for AI852401 (NM_183312.1,1254-1272).
gcggacttatttttttcca

SEQ ID NO: 809643 - DNA, 19 bp, Mus musculus
  siRNA target sequence for E330040A16 (NM_183314.1,546-564).
gaagaacccagacagatta

SEQ ID NO: 809644 - DNA, 19 bp, Mus musculus
  siRNA target sequence for E330040A16 (NM_183314.1,549-567).
gaacccagacagattatgt

SEQ ID NO: 809645 - DNA, 19 bp, Mus musculus
  siRNA target sequence for E330040A16 (NM_183314.1,553-571).
ccagacagattatgtatct

SEQ ID NO: 809646 - DNA, 19 bp, Mus musculus
  siRNA target sequence for E330040A16 (NM_183314.1,556-574).
gacagattatgtatctcaa

SEQ ID NO: 809647 - DNA, 19 bp, Mus musculus
  siRNA target sequence for E330040A16 (NM_183314.1,582-600).
gaagcttttctccgaaaat

SEQ ID NO: 809648 - DNA, 19 bp, Mus musculus
  siRNA target sequence for E330040A16 (NM_183314.1,784-802).
ccatccgggaagatcaaaa

SEQ ID NO: 809649 - DNA, 19 bp, Mus musculus
  siRNA target sequence for E330040A16 (NM_183314.1,811-829).
cctgtaaagaagatcatca

SEQ ID NO: 809650 - DNA, 19 bp, Mus musculus
  siRNA target sequence for E330040A16 (NM_183314.1,828-846).
catttccatgaggatcaat

SEQ ID NO: 809651 - DNA, 19 bp, Mus musculus
  siRNA target sequence for E330040A16 (NM_183314.1,963-981).
gttcaaccgactatttcaa

SEQ ID NO: 809652 - DNA, 19 bp, Mus musculus
  siRNA target sequence for 2010103A03Rik (NM_183316.1,126-144).
gcccttcaatccatgataa

SEQ ID NO: 809653 - DNA, 19 bp, Mus musculus
  siRNA target sequence for 2010103A03Rik (NM_183316.1,127-145).
cccttcaatccatgataaa

SEQ ID NO: 809654 - DNA, 19 bp, Mus musculus
  siRNA target sequence for 2010103A03Rik (NM_183316.1,128-146).
ccttcaatccatgataaat

SEQ ID NO: 809655 - DNA, 19 bp, Mus musculus
  siRNA target sequence for 2010103A03Rik (NM_183316.1,199-217).
gtgatatgtccctacatgt

SEQ ID NO: 809656 - DNA, 19 bp, Mus musculus
  siRNA target sequence for 2010103A03Rik (NM_183316.1,219-237).
gacaacgaagtgacaataa

SEQ ID NO: 809657 - DNA, 19 bp, Mus musculus
  siRNA target sequence for 2010103A03Rik (NM_183316.1,221-239).
caacgaagtgacaataaat

SEQ ID NO: 809658 - DNA, 19 bp, Mus musculus
  siRNA target sequence for 6430402L03 (NM_183318.1,384-402).
gccctgcgagaggagttaa

SEQ ID NO: 809659 - DNA, 19 bp, Mus musculus
  siRNA target sequence for 6430402L03 (NM_183318.1,385-403).
ccctgcgagaggagttaaa

SEQ ID NO: 809660 - DNA, 19 bp, Mus musculus
  siRNA target sequence for 6430402L03 (NM_183318.1,386-404).
cctgcgagaggagttaaat

SEQ ID NO: 809661 - DNA, 19 bp, Mus musculus
  siRNA target sequence for 6430402L03 (NM_183318.1,500-518).
ctggcccatgcccatagta

SEQ ID NO: 809662 - DNA, 19 bp, Mus musculus
  siRNA target sequence for 6430402L03 (NM_183318.1,644-662).
gtacgtctcagatgatctt

SEQ ID NO: 809663 - DNA, 19 bp, Mus musculus
  siRNA target sequence for 6430402L03 (NM_183318.1,648-666).
gtctcagatgatcttttga

SEQ ID NO: 809664 - DNA, 19 bp, Mus musculus
  siRNA target sequence for 6430402L03 (NM_183318.1,650-668).
ctcagatgatcttttgatt

SEQ ID NO: 809665 - DNA, 19 bp, Mus musculus
  siRNA target sequence for 6430402L03 (NM_183318.1,652-670).
cagatgatcttttgattaa

SEQ ID NO: 809666 - DNA, 19 bp, Mus musculus
  siRNA target sequence for 6430402L03 (NM_183318.1,672-690).
gtggtccaggactatacca

SEQ ID NO: 809667 - DNA, 19 bp, Mus musculus
  siRNA target sequence for 6430402L03 (NM_183318.1,744-762).
ctgcactcccccatgttaa

SEQ ID NO: 809668 - DNA, 19 bp, Mus musculus
  siRNA target sequence for 6430402L03 (NM_183318.1,794-812).
gctggagcggccagacata

SEQ ID NO: 809669 - DNA, 19 bp, Mus musculus
  siRNA target sequence for 6430402L03 (NM_183318.1,832-850).
cagtgtacctggctgaatt

SEQ ID NO: 809670 - DNA, 19 bp, Mus musculus
  siRNA target sequence for 6430402L03 (NM_183318.1,918-936).
gcatttctcatctcctttt

SEQ ID NO: 809671 - DNA, 19 bp, Mus musculus
  siRNA target sequence for 6430402L03 (NM_183318.1,1016-1034).
ggatgaaatccgtaaggaa

SEQ ID NO: 809672 - DNA, 19 bp, Mus musculus
  siRNA target sequence for 6430402L03 (NM_183318.1,1017-1035).
gatgaaatccgtaaggaat

SEQ ID NO: 809673 - DNA, 19 bp, Mus musculus
  siRNA target sequence for 6430402L03 (NM_183318.1,1020-1038).
gaaatccgtaaggaattct

SEQ ID NO: 809674 - DNA, 19 bp, Mus musculus
  siRNA target sequence for 6430402L03 (NM_183318.1,1050-1068).
ccctcacgcgtggctaaaa

SEQ ID NO: 809675 - DNA, 19 bp, Mus musculus
  siRNA target sequence for 6430402L03 (NM_183318.1,1051-1069).
cctcacgcgtggctaaaaa

SEQ ID NO: 809676 - DNA, 19 bp, Mus musculus
  siRNA target sequence for 6430402L03 (NM_183318.1,1184-1202).
caaaggcttgtcagaaatt

SEQ ID NO: 809677 - DNA, 19 bp, Mus musculus
  siRNA target sequence for 6430402L03 (NM_183318.1,1190-1208).
cttgtcagaaatttttcga

SEQ ID NO: 809678 - DNA, 19 bp, Mus musculus
  siRNA target sequence for 6430402L03 (NM_183318.1,1206-1224).
cgaaaggaactcttatggt

SEQ ID NO: 809679 - DNA, 19 bp, Mus musculus
  siRNA target sequence for 6430402L03 (NM_183318.1,1304-1322).
ctcgctcactggagttcaa

SEQ ID NO: 809680 - DNA, 19 bp, Mus musculus
  siRNA target sequence for 6430402L03 (NM_183318.1,1306-1324).
cgctcactggagttcaaaa

SEQ ID NO: 809681 - DNA, 19 bp, Mus musculus
  siRNA target sequence for 6430402L03 (NM_183318.1,1307-1325).
gctcactggagttcaaaat

SEQ ID NO: 809682 - DNA, 19 bp, Mus musculus
  siRNA target sequence for 6430402L03 (NM_183318.1,1308-1326).
ctcactggagttcaaaata

SEQ ID NO: 809683 - DNA, 19 bp, Mus musculus
  siRNA target sequence for 6430402L03 (NM_183318.1,1330-1348).
gctgcccctttgcactaat

SEQ ID NO: 809684 - DNA, 19 bp, Mus musculus
  siRNA target sequence for 6430402L03 (NM_183318.1,1331-1349).
ctgcccctttgcactaatt

SEQ ID NO: 809685 - DNA, 19 bp, Mus musculus
  siRNA target sequence for 6430402L03 (NM_183318.1,1335-1353).
ccctttgcactaattccta

SEQ ID NO: 809686 - DNA, 19 bp, Mus musculus
  siRNA target sequence for 6430402L03 (NM_183318.1,1336-1354).
cctttgcactaattcctaa

SEQ ID NO: 809687 - DNA, 19 bp, Mus musculus
  siRNA target sequence for 6430402L03 (NM_183318.1,1417-1435).
gcgggtacaggctttatct

SEQ ID NO: 809688 - DNA, 19 bp, Mus musculus
  siRNA target sequence for 6430402L03 (NM_183318.1,1419-1437).
gggtacaggctttatctga

SEQ ID NO: 809689 - DNA, 19 bp, Mus musculus
  siRNA target sequence for 6430402L03 (NM_183318.1,1420-1438).
ggtacaggctttatctgaa

SEQ ID NO: 809690 - DNA, 19 bp, Mus musculus
  siRNA target sequence for 6430402L03 (NM_183318.1,1647-1665).
gaggatagcgatgagaata

SEQ ID NO: 809691 - DNA, 19 bp, Mus musculus
  siRNA target sequence for 6430402L03 (NM_183318.1,1650-1668).
gatagcgatgagaataagt

SEQ ID NO: 809692 - DNA, 19 bp, Mus musculus
  siRNA target sequence for 6430402L03 (NM_183318.1,1677-1695).
gaagatgaagttatcgtta

SEQ ID NO: 809693 - DNA, 19 bp, Mus musculus
  siRNA target sequence for 6430402L03 (NM_183318.1,1884-1902).
ggctaccatgctgaaaatt

SEQ ID NO: 809694 - DNA, 19 bp, Mus musculus
  siRNA target sequence for 6430402L03 (NM_183318.1,1908-1926).
ggggtatccccttctgtaa

SEQ ID NO: 809695 - DNA, 19 bp, Mus musculus
  siRNA target sequence for 6430402L03 (NM_183318.1,1909-1927).
gggtatccccttctgtaat

SEQ ID NO: 809696 - DNA, 19 bp, Mus musculus
  siRNA target sequence for 6430402L03 (NM_183318.1,1974-1992).
ggccttcccgggaccaatt

SEQ ID NO: 809697 - DNA, 19 bp, Mus musculus
  siRNA target sequence for 6430402L03 (NM_183318.1,1976-1994).
ccttcccgggaccaattca

SEQ ID NO: 809698 - DNA, 19 bp, Mus musculus
  siRNA target sequence for 6430402L03 (NM_183318.1,1977-1995).
cttcccgggaccaattcat

SEQ ID NO: 809699 - DNA, 19 bp, Mus musculus
  siRNA target sequence for A630026F04 (NM_183319.1,639-657).
ctaacccacgctttacctt

SEQ ID NO: 809700 - DNA, 19 bp, Mus musculus
  siRNA target sequence for A630026F04 (NM_183319.1,649-667).
ctttaccttcccgtttagt

SEQ ID NO: 809701 - DNA, 19 bp, Mus musculus
  siRNA target sequence for A630026F04 (NM_183319.1,710-728).
gctttgtacatggttagaa

SEQ ID NO: 809702 - DNA, 19 bp, Mus musculus
  siRNA target sequence for A630026F04 (NM_183319.1,800-818).
gttcagttgaccctcattt

SEQ ID NO: 809703 - DNA, 19 bp, Mus musculus
  siRNA target sequence for A630026F04 (NM_183319.1,838-856).
caaagatagaccactatca

SEQ ID NO: 809704 - DNA, 19 bp, Mus musculus
  siRNA target sequence for A630026F04 (NM_183319.1,842-860).
gatagaccactatcattat

SEQ ID NO: 809705 - DNA, 19 bp, Mus musculus
  siRNA target sequence for MGC59495 (NM_183321.1,297-315).
ggagtcctggccatctagt

SEQ ID NO: 809706 - DNA, 19 bp, Mus musculus
  siRNA target sequence for MGC59495 (NM_183321.1,360-378).
ctctccaccctgcaactta

SEQ ID NO: 809707 - DNA, 19 bp, Mus musculus
  siRNA target sequence for MGC59495 (NM_183321.1,362-380).
ctccaccctgcaacttaat

SEQ ID NO: 809708 - DNA, 19 bp, Mus musculus
  siRNA target sequence for MGC59495 (NM_183321.1,365-383).
caccctgcaacttaattga

SEQ ID NO: 809709 - DNA, 19 bp, Mus musculus
  siRNA target sequence for MGC59495 (NM_183321.1,367-385).
ccctgcaacttaattgaca

SEQ ID NO: 809710 - DNA, 19 bp, Mus musculus
  siRNA target sequence for MGC59495 (NM_183321.1,368-386).
cctgcaacttaattgacaa

SEQ ID NO: 809711 - DNA, 19 bp, Mus musculus
  siRNA target sequence for MGC59495 (NM_183321.1,384-402).
caacgaggactcaatagta

SEQ ID NO: 809712 - DNA, 19 bp, Mus musculus
  siRNA target sequence for MGC59495 (NM_183321.1,610-628).
gcgcctcttcagaaagtaa

SEQ ID NO: 809713 - DNA, 19 bp, Mus musculus
  siRNA target sequence for MGC59495 (NM_183321.1,670-688).
gagaccctaagcctacaaa

SEQ ID NO: 809714 - DNA, 19 bp, Mus musculus
  siRNA target sequence for MGC59495 (NM_183321.1,885-903).
ctcgtcccaggcaacactt

SEQ ID NO: 809715 - DNA, 19 bp, Mus musculus
  siRNA target sequence for MGC59495 (NM_183321.1,887-905).
cgtcccaggcaacacttaa

SEQ ID NO: 809716 - DNA, 19 bp, Mus musculus
  siRNA target sequence for MGC59495 (NM_183321.1,1108-1126).
ccctcacaggccttctata

SEQ ID NO: 809717 - DNA, 19 bp, Mus musculus
  siRNA target sequence for MGC59495 (NM_183321.1,1109-1127).
cctcacaggccttctatat

SEQ ID NO: 809718 - DNA, 19 bp, Mus musculus
  siRNA target sequence for MGC59495 (NM_183321.1,1128-1146).
ggagaggccacctctttca

SEQ ID NO: 809719 - DNA, 19 bp, Mus musculus
  siRNA target sequence for MGC59495 (NM_183321.1,1204-1222).
gccaatccttgggtatctt

SEQ ID NO: 809720 - DNA, 19 bp, Mus musculus
  siRNA target sequence for MGC59495 (NM_183321.1,1205-1223).
ccaatccttgggtatcttt

SEQ ID NO: 809721 - DNA, 19 bp, Mus musculus
  siRNA target sequence for MGC59495 (NM_183321.1,1288-1306).
cctacctctacttcaacta

SEQ ID NO: 809722 - DNA, 19 bp, Mus musculus
  siRNA target sequence for MGC59495 (NM_183321.1,1518-1536).
gccagacactacagctttt

SEQ ID NO: 809723 - DNA, 19 bp, Mus musculus
  siRNA target sequence for MGC59495 (NM_183321.1,1520-1538).
cagacactacagcttttga

SEQ ID NO: 809724 - DNA, 19 bp, Mus musculus
  siRNA target sequence for MGC59495 (NM_183321.1,1712-1730).
cagagtcccgcaaaagtca

SEQ ID NO: 809725 - DNA, 19 bp, Mus musculus
  siRNA target sequence for MGC59495 (NM_183321.1,1801-1819).
gtccaaccacgtgaattca

SEQ ID NO: 809726 - DNA, 19 bp, Mus musculus
  siRNA target sequence for MGC59495 (NM_183321.1,1807-1825).
ccacgtgaattcaagatgt

SEQ ID NO: 809727 - DNA, 19 bp, Mus musculus
  siRNA target sequence for MGC59495 (NM_183321.1,1888-1906).
ccttccgaggacttgctat

SEQ ID NO: 809728 - DNA, 19 bp, Mus musculus
  siRNA target sequence for AY238603 (NM_183322.1,361-379).
gagtaagaacaatttggat

SEQ ID NO: 809729 - DNA, 19 bp, Mus musculus
  siRNA target sequence for AY238603 (NM_183322.1,370-388).
caatttggatcaaattaaa

SEQ ID NO: 809730 - DNA, 19 bp, Mus musculus
  siRNA target sequence for 2310040G17Rik (NM_183358.2,270-288).
ccgaggagcaagaatggta

SEQ ID NO: 809731 - DNA, 19 bp, Mus musculus
  siRNA target sequence for 2310040G17Rik (NM_183358.2,391-409).
gatgccacaaatgattgaa

SEQ ID NO: 809732 - DNA, 19 bp, Mus musculus
  siRNA target sequence for 2310040G17Rik (NM_183358.2,428-446).
cgagaacgctgggagaaaa

SEQ ID NO: 809733 - DNA, 19 bp, Mus musculus
  siRNA target sequence for 2310040G17Rik (NM_183358.2,527-545).
gctcgcttccaggaactat

SEQ ID NO: 809734 - DNA, 19 bp, Mus musculus
  siRNA target sequence for 2310040G17Rik (NM_183358.2,528-546).
ctcgcttccaggaactatt

SEQ ID NO: 809735 - DNA, 19 bp, Mus musculus
  siRNA target sequence for 2310040G17Rik (NM_183358.2,601-619).
gaagaaggaggcacgaatt

SEQ ID NO: 809736 - DNA, 19 bp, Mus musculus
  siRNA target sequence for 2310040G17Rik (NM_183358.2,604-622).
gaaggaggcacgaattgct

SEQ ID NO: 809737 - DNA, 19 bp, Mus musculus
  siRNA target sequence for 1110051B16Rik (NM_183389.1,624-642).
gaatcccaatcctgatcta

SEQ ID NO: 809738 - DNA, 19 bp, Mus musculus
  siRNA target sequence for 1110051B16Rik (NM_183389.1,673-691).
ggcatctctgagtctcaaa

SEQ ID NO: 809739 - DNA, 19 bp, Mus musculus
  siRNA target sequence for 1110051B16Rik (NM_183389.1,682-700).
gagtctcaaattatgactt

SEQ ID NO: 809740 - DNA, 19 bp, Mus musculus
  siRNA target sequence for 1110051B16Rik (NM_183389.1,769-787).
caggagcaggataaaccta

SEQ ID NO: 809741 - DNA, 19 bp, Mus musculus
  siRNA target sequence for 1110051B16Rik (NM_183389.1,774-792).
gcaggataaacctagagtt

SEQ ID NO: 809742 - DNA, 19 bp, Mus musculus
  siRNA target sequence for 1110051B16Rik (NM_183389.1,775-793).
caggataaacctagagtta

SEQ ID NO: 809743 - DNA, 19 bp, Mus musculus
  siRNA target sequence for 1110051B16Rik (NM_183389.1,809-827).
gcagaacgcacttcacaaa

SEQ ID NO: 809744 - DNA, 19 bp, Mus musculus
  siRNA target sequence for 1110051B16Rik (NM_183389.1,824-842).
caaagttccagactgatat

SEQ ID NO: 809745 - DNA, 19 bp, Mus musculus
  siRNA target sequence for 1110051B16Rik (NM_183389.1,868-886).
cggttccctgggattgtta

SEQ ID NO: 809746 - DNA, 19 bp, Mus musculus
  siRNA target sequence for 1110051B16Rik (NM_183389.1,926-944).
ccaggattcatatatggtt

SEQ ID NO: 809747 - DNA, 19 bp, Mus musculus
  siRNA target sequence for 1110051B16Rik (NM_183389.1,1022-1040).
gccctacccagaaaactgt

SEQ ID NO: 809748 - DNA, 19 bp, Mus musculus
  siRNA target sequence for 1110051B16Rik (NM_183389.1,1073-1091).
gcagcgcttcagttatact

SEQ ID NO: 809749 - DNA, 19 bp, Mus musculus
  siRNA target sequence for 1110051B16Rik (NM_183389.1,1197-1215).
gcaaaggagtgatgatcaa

SEQ ID NO: 809750 - DNA, 19 bp, Mus musculus
  siRNA target sequence for 1110051B16Rik (NM_183389.1,1198-1216).
caaaggagtgatgatcaaa

SEQ ID NO: 809751 - DNA, 19 bp, Mus musculus
  siRNA target sequence for 1110051B16Rik (NM_183389.1,1299-1317).
ccaaaacagagggcataat

SEQ ID NO: 809752 - DNA, 19 bp, Mus musculus
  siRNA target sequence for 1110051B16Rik (NM_183389.1,1338-1356).
ggcggtaccgcgcttagaa

SEQ ID NO: 809753 - DNA, 19 bp, Mus musculus
  siRNA target sequence for 1110051B16Rik (NM_183389.1,1340-1358).
cggtaccgcgcttagaaga

SEQ ID NO: 809754 - DNA, 19 bp, Mus musculus
  siRNA target sequence for 1110051B16Rik (NM_183389.1,1341-1359).
ggtaccgcgcttagaagat

SEQ ID NO: 809755 - DNA, 19 bp, Mus musculus
  siRNA target sequence for 1110051B16Rik (NM_183389.1,1342-1360).
gtaccgcgcttagaagatt

SEQ ID NO: 809756 - DNA, 19 bp, Mus musculus
  siRNA target sequence for 1110051B16Rik (NM_183389.1,1345-1363).
ccgcgcttagaagattgta

SEQ ID NO: 809757 - DNA, 19 bp, Mus musculus
  siRNA target sequence for 1110051B16Rik (NM_183389.1,1347-1365).
gcgcttagaagattgtact

SEQ ID NO: 809758 - DNA, 19 bp, Mus musculus
  siRNA target sequence for 1110051B16Rik (NM_183389.1,1373-1391).
cagctgtcaatcaacactt

SEQ ID NO: 809759 - DNA, 19 bp, Mus musculus
  siRNA target sequence for 1110051B16Rik (NM_183389.1,1451-1469).
ccatgcttgctgaatggat

SEQ ID NO: 809760 - DNA, 19 bp, Mus musculus
  siRNA target sequence for 1110051B16Rik (NM_183389.1,1466-1484).
ggatgcctgacaaagaata

SEQ ID NO: 809761 - DNA, 19 bp, Mus musculus
  siRNA target sequence for KLHL6 (NM_183390.1,268-286).
gttctgcaacgacttaaaa

SEQ ID NO: 809762 - DNA, 19 bp, Mus musculus
  siRNA target sequence for KLHL6 (NM_183390.1,271-289).
ctgcaacgacttaaaagaa

SEQ ID NO: 809763 - DNA, 19 bp, Mus musculus
  siRNA target sequence for KLHL6 (NM_183390.1,292-310).
gtatgagaagaggatcatt

SEQ ID NO: 809764 - DNA, 19 bp, Mus musculus
  siRNA target sequence for KLHL6 (NM_183390.1,296-314).
gagaagaggatcattatta

SEQ ID NO: 809765 - DNA, 19 bp, Mus musculus
  siRNA target sequence for KLHL6 (NM_183390.1,298-316).
gaagaggatcattattaaa

SEQ ID NO: 809766 - DNA, 19 bp, Mus musculus
  siRNA target sequence for KLHL6 (NM_183390.1,413-431).
gccaaccttttccagtttt

SEQ ID NO: 809767 - DNA, 19 bp, Mus musculus
  siRNA target sequence for KLHL6 (NM_183390.1,415-433).
caaccttttccagttttta

SEQ ID NO: 809768 - DNA, 19 bp, Mus musculus
  siRNA target sequence for KLHL6 (NM_183390.1,470-488).
gcattgaacccggaaaatt

SEQ ID NO: 809769 - DNA, 19 bp, Mus musculus
  siRNA target sequence for KLHL6 (NM_183390.1,475-493).
gaacccggaaaattgtatt

SEQ ID NO: 809770 - DNA, 19 bp, Mus musculus
  siRNA target sequence for KLHL6 (NM_183390.1,478-496).
cccggaaaattgtattgga

SEQ ID NO: 809771 - DNA, 19 bp, Mus musculus
  siRNA target sequence for KLHL6 (NM_183390.1,547-565).
ccaaagttgcatcattcaa

SEQ ID NO: 809772 - DNA, 19 bp, Mus musculus
  siRNA target sequence for KLHL6 (NM_183390.1,548-566).
caaagttgcatcattcaaa

SEQ ID NO: 809773 - DNA, 19 bp, Mus musculus
  siRNA target sequence for KLHL6 (NM_183390.1,691-709).
ctgggtccggcacaaacaa

SEQ ID NO: 809774 - DNA, 19 bp, Mus musculus
  siRNA target sequence for KLHL6 (NM_183390.1,694-712).
ggtccggcacaaacaatca

SEQ ID NO: 809775 - DNA, 19 bp, Mus musculus
  siRNA target sequence for KLHL6 (NM_183390.1,697-715).
ccggcacaaacaatcagaa

SEQ ID NO: 809776 - DNA, 19 bp, Mus musculus
  siRNA target sequence for KLHL6 (NM_183390.1,742-760).
cgagaatgtgcgtttacca

SEQ ID NO: 809777 - DNA, 19 bp, Mus musculus
  siRNA target sequence for KLHL6 (NM_183390.1,798-816).
cagaccctcttattagaca

SEQ ID NO: 809778 - DNA, 19 bp, Mus musculus
  siRNA target sequence for KLHL6 (NM_183390.1,948-966).
gtacaaaggatgaacgatt

SEQ ID NO: 809779 - DNA, 19 bp, Mus musculus
  siRNA target sequence for KLHL6 (NM_183390.1,1075-1093).
gtttgcatgtgtgacatta

SEQ ID NO: 809780 - DNA, 19 bp, Mus musculus
  siRNA target sequence for KLHL6 (NM_183390.1,1128-1146).
cacagcatgatgtttggaa

SEQ ID NO: 809781 - DNA, 19 bp, Mus musculus
  siRNA target sequence for KLHL6 (NM_183390.1,1139-1157).
gtttggaagtacaattcct

SEQ ID NO: 809782 - DNA, 19 bp, Mus musculus
  siRNA target sequence for KLHL6 (NM_183390.1,1150-1168).
caattcctccatcaacaaa

SEQ ID NO: 809783 - DNA, 19 bp, Mus musculus
  siRNA target sequence for KLHL6 (NM_183390.1,1155-1173).
cctccatcaacaaatggat

SEQ ID NO: 809784 - DNA, 19 bp, Mus musculus
  siRNA target sequence for KLHL6 (NM_183390.1,1170-1188).
ggattcagatcgaatattt

SEQ ID NO: 809785 - DNA, 19 bp, Mus musculus
  siRNA target sequence for KLHL6 (NM_183390.1,1196-1214).
ggtcgctggaggcataaga

SEQ ID NO: 809786 - DNA, 19 bp, Mus musculus
  siRNA target sequence for KLHL6 (NM_183390.1,1197-1215).
gtcgctggaggcataagat

SEQ ID NO: 809787 - DNA, 19 bp, Mus musculus
  siRNA target sequence for KLHL6 (NM_183390.1,1206-1224).
ggcataagatggtcgtatt

SEQ ID NO: 809788 - DNA, 19 bp, Mus musculus
  siRNA target sequence for KLHL6 (NM_183390.1,1225-1243).
gggtggcaaagtctatgta

SEQ ID NO: 809789 - DNA, 19 bp, Mus musculus
  siRNA target sequence for KLHL6 (NM_183390.1,1259-1277).
ggcttacaaagaatcaaca

SEQ ID NO: 809790 - DNA, 19 bp, Mus musculus
  siRNA target sequence for KLHL6 (NM_183390.1,1420-1438).
caagactcagtggtatgat

SEQ ID NO: 809791 - DNA, 19 bp, Mus musculus
  siRNA target sequence for KLHL6 (NM_183390.1,1436-1454).
gatccttccaccaataaat

SEQ ID NO: 809792 - DNA, 19 bp, Mus musculus
  siRNA target sequence for KLHL6 (NM_183390.1,1476-1494).
cagtagaggctaaatgcat

SEQ ID NO: 809793 - DNA, 19 bp, Mus musculus
  siRNA target sequence for KLHL6 (NM_183390.1,1506-1524).
gtttccaggatcacatcta

SEQ ID NO: 809794 - DNA, 19 bp, Mus musculus
  siRNA target sequence for KLHL6 (NM_183390.1,1513-1531).
ggatcacatctatgttgtt

SEQ ID NO: 809795 - DNA, 19 bp, Mus musculus
  siRNA target sequence for KLHL6 (NM_183390.1,1635-1653).
gcaacaacaagctgtatat

SEQ ID NO: 809796 - DNA, 19 bp, Mus musculus
  siRNA target sequence for KLHL6 (NM_183390.1,1741-1759).
gctgccacgaggagtatca

SEQ ID NO: 809797 - DNA, 19 bp, Mus musculus
  siRNA target sequence for KLHL6 (NM_183390.1,1744-1762).
gccacgaggagtatcacat

SEQ ID NO: 809798 - DNA, 19 bp, Mus musculus
  siRNA target sequence for KLHL6 (NM_183390.1,1772-1790).
gttaccatcaggaagtcat

SEQ ID NO: 809799 - DNA, 19 bp, Mus musculus
  siRNA target sequence for KLHL6 (NM_183390.1,1777-1795).
catcaggaagtcatatact

SEQ ID NO: 809800 - DNA, 19 bp, Mus musculus
  siRNA target sequence for Tnfsf18 (NM_183391.2,127-145).
gtgcatagtggctctgtta

SEQ ID NO: 809801 - DNA, 19 bp, Mus musculus
  siRNA target sequence for Tnfsf18 (NM_183391.2,162-180).
ctttgggtacactgatcta

SEQ ID NO: 809802 - DNA, 19 bp, Mus musculus
  siRNA target sequence for Tnfsf18 (NM_183391.2,166-184).
gggtacactgatctatact

SEQ ID NO: 809803 - DNA, 19 bp, Mus musculus
  siRNA target sequence for Tnfsf18 (NM_183391.2,206-224).
gagtcctgcatggttaagt

SEQ ID NO: 809804 - DNA, 19 bp, Mus musculus
  siRNA target sequence for Tnfsf18 (NM_183391.2,213-231).
gcatggttaagtttgaact

SEQ ID NO: 809805 - DNA, 19 bp, Mus musculus
  siRNA target sequence for Tnfsf18 (NM_183391.2,214-232).
catggttaagtttgaacta

SEQ ID NO: 809806 - DNA, 19 bp, Mus musculus
  siRNA target sequence for Tnfsf18 (NM_183391.2,217-235).
ggttaagtttgaactatca

SEQ ID NO: 809807 - DNA, 19 bp, Mus musculus
  siRNA target sequence for Tnfsf18 (NM_183391.2,218-236).
gttaagtttgaactatcat

SEQ ID NO: 809808 - DNA, 19 bp, Mus musculus
  siRNA target sequence for Tnfsf18 (NM_183391.2,266-284).
cctcactgtgtgaatacga

SEQ ID NO: 809809 - DNA, 19 bp, Mus musculus
  siRNA target sequence for Tnfsf18 (NM_183391.2,310-328).
gcagagtggcacatattta

SEQ ID NO: 809810 - DNA, 19 bp, Mus musculus
  siRNA target sequence for Tnfsf18 (NM_183391.2,311-329).
cagagtggcacatatttaa

SEQ ID NO: 809811 - DNA, 19 bp, Mus musculus
  siRNA target sequence for Tnfsf18 (NM_183391.2,378-396).
cccccttcgtagtacagat

SEQ ID NO: 809812 - DNA, 19 bp, Mus musculus
  siRNA target sequence for Tnfsf18 (NM_183391.2,379-397).
ccccttcgtagtacagata

SEQ ID NO: 809813 - DNA, 19 bp, Mus musculus
  siRNA target sequence for Tnfsf18 (NM_183391.2,380-398).
cccttcgtagtacagatat

SEQ ID NO: 809814 - DNA, 19 bp, Mus musculus
  siRNA target sequence for Tnfsf18 (NM_183391.2,381-399).
ccttcgtagtacagatata

SEQ ID NO: 809815 - DNA, 19 bp, Mus musculus
  siRNA target sequence for Tnfsf18 (NM_183391.2,382-400).
cttcgtagtacagatatat

SEQ ID NO: 809816 - DNA, 19 bp, Mus musculus
  siRNA target sequence for Tnfsf18 (NM_183391.2,410-428).
gatgtcctacaaactctaa

SEQ ID NO: 809817 - DNA, 19 bp, Mus musculus
  siRNA target sequence for Tnfsf18 (NM_183391.2,415-433).
cctacaaactctaatgaat

SEQ ID NO: 809818 - DNA, 19 bp, Mus musculus
  siRNA target sequence for Tnfsf18 (NM_183391.2,419-437).
caaactctaatgaatgatt

SEQ ID NO: 809819 - DNA, 19 bp, Mus musculus
  siRNA target sequence for Tnfsf18 (NM_183391.2,448-466).
gcctataggaggggtttat

SEQ ID NO: 809820 - DNA, 19 bp, Mus musculus
  siRNA target sequence for Tnfsf18 (NM_183391.2,450-468).
ctataggaggggtttatga

SEQ ID NO: 809821 - DNA, 19 bp, Mus musculus
  siRNA target sequence for Tnfsf18 (NM_183391.2,472-490).
gcatgctggagataacata

SEQ ID NO: 809822 - DNA, 19 bp, Mus musculus
  siRNA target sequence for Tnfsf18 (NM_183391.2,477-495).
ctggagataacatatatct

SEQ ID NO: 809823 - DNA, 19 bp, Mus musculus
  siRNA target sequence for Tnfsf18 (NM_183391.2,479-497).
ggagataacatatatctga

SEQ ID NO: 809824 - DNA, 19 bp, Mus musculus
  siRNA target sequence for Tnfsf18 (NM_183391.2,480-498).
gagataacatatatctgaa

SEQ ID NO: 809825 - DNA, 19 bp, Mus musculus
  siRNA target sequence for 3110079L04Rik (NM_183392.1,1433-1451).
cagacctgttacgagaaat

SEQ ID NO: 809826 - DNA, 19 bp, Mus musculus
  siRNA target sequence for 3110079L04Rik (NM_183392.1,1435-1453).
gacctgttacgagaaatca

SEQ ID NO: 809827 - DNA, 19 bp, Mus musculus
  siRNA target sequence for Pla2g12 (NM_183423.1,163-181).
ctgtggctcgccactgttt

SEQ ID NO: 809828 - DNA, 19 bp, Mus musculus
  siRNA target sequence for P518 (NM_183424.1,249-267).
ccccccaactcggttcaaa

SEQ ID NO: 809829 - DNA, 19 bp, Mus musculus
  siRNA target sequence for P518 (NM_183424.1,250-268).
cccccaactcggttcaaaa

SEQ ID NO: 809830 - DNA, 19 bp, Mus musculus
  siRNA target sequence for P518 (NM_183424.1,254-272).
caactcggttcaaaatcca

SEQ ID NO: 809831 - DNA, 19 bp, Mus musculus
  siRNA target sequence for BC019206 (NM_183426.1,321-339).
cccaccttctccagtgaaa

SEQ ID NO: 809832 - DNA, 19 bp, Mus musculus
  siRNA target sequence for BC019206 (NM_183426.1,331-349).
ccagtgaaaaccaacagtt

SEQ ID NO: 809833 - DNA, 19 bp, Mus musculus
  siRNA target sequence for BC019206 (NM_183426.1,588-606).
gtcagcaccacctcaacta

SEQ ID NO: 809834 - DNA, 19 bp, Mus musculus
  siRNA target sequence for BC019206 (NM_183426.1,612-630).
gacaagctgttcataccta

SEQ ID NO: 809835 - DNA, 19 bp, Mus musculus
  siRNA target sequence for BC019206 (NM_183426.1,778-796).
ctgactatgtaccatctaa

SEQ ID NO: 809836 - DNA, 19 bp, Mus musculus
  siRNA target sequence for BC019206 (NM_183426.1,780-798).
gactatgtaccatctaagt

SEQ ID NO: 809837 - DNA, 19 bp, Mus musculus
  siRNA target sequence for BC019206 (NM_183426.1,793-811).
ctaagtccaagattggaaa

SEQ ID NO: 809838 - DNA, 19 bp, Mus musculus
  siRNA target sequence for BC019206 (NM_183426.1,983-1001).
gcgtgctggttttctgatt

SEQ ID NO: 809839 - DNA, 19 bp, Mus musculus
  siRNA target sequence for BC019206 (NM_183426.1,1031-1049).
cacagtggctggcatcata

SEQ ID NO: 809840 - DNA, 19 bp, Mus musculus
  siRNA target sequence for BC019206 (NM_183426.1,1100-1118).
caatgacctcaagtatgat

SEQ ID NO: 809841 - DNA, 19 bp, Mus musculus
  siRNA target sequence for BC019206 (NM_183426.1,1153-1171).
gcattgcagtgcatgcatt

SEQ ID NO: 809842 - DNA, 19 bp, Mus musculus
  siRNA target sequence for BC019206 (NM_183426.1,1168-1186).
cattgagcaagatcaagta

SEQ ID NO: 809843 - DNA, 19 bp, Mus musculus
  siRNA target sequence for BC019206 (NM_183426.1,1307-1325).
gggcttcgatggtgtgatt

SEQ ID NO: 809844 - DNA, 19 bp, Mus musculus
  siRNA target sequence for BC019206 (NM_183426.1,1309-1327).
gcttcgatggtgtgattgt

SEQ ID NO: 809845 - DNA, 19 bp, Mus musculus
  siRNA target sequence for BC019206 (NM_183426.1,1455-1473).
cgcaacatgatatacatga

SEQ ID NO: 809846 - DNA, 19 bp, Mus musculus
  siRNA target sequence for BC019206 (NM_183426.1,1788-1806).
gcgcaccagcgcttcttta

SEQ ID NO: 809847 - DNA, 19 bp, Mus musculus
  siRNA target sequence for BC019206 (NM_183426.1,2106-2124).
gcaggagttatccgtatta

SEQ ID NO: 809848 - DNA, 19 bp, Mus musculus
  siRNA target sequence for BC019206 (NM_183426.1,2110-2128).
gagttatccgtattagtga

SEQ ID NO: 809849 - DNA, 19 bp, Mus musculus
  siRNA target sequence for BC019206 (NM_183426.1,2155-2173).
gcctggatagcgacttcaa

SEQ ID NO: 809850 - DNA, 19 bp, Mus musculus
  siRNA target sequence for BC019206 (NM_183426.1,2156-2174).
cctggatagcgacttcaat

SEQ ID NO: 809851 - DNA, 19 bp, Mus musculus
  siRNA target sequence for BC019206 (NM_183426.1,2157-2175).
ctggatagcgacttcaatt

SEQ ID NO: 809852 - DNA, 19 bp, Mus musculus
  siRNA target sequence for BC019206 (NM_183426.1,2159-2177).
ggatagcgacttcaattca

SEQ ID NO: 809853 - DNA, 19 bp, Mus musculus
  siRNA target sequence for BC019206 (NM_183426.1,2160-2178).
gatagcgacttcaattcat

SEQ ID NO: 809854 - DNA, 19 bp, Mus musculus
  siRNA target sequence for BC019206 (NM_183426.1,2198-2216).
cgatgatgtggtcattgta

SEQ ID NO: 809855 - DNA, 19 bp, Mus musculus
  siRNA target sequence for BC019206 (NM_183426.1,2520-2538).
gagaagcagcgcttcatga

SEQ ID NO: 809856 - DNA, 19 bp, Mus musculus
  siRNA target sequence for BC019206 (NM_183426.1,2544-2562).
gagaagctcgtggctatta

SEQ ID NO: 809857 - DNA, 19 bp, Mus musculus
  siRNA target sequence for BC019206 (NM_183426.1,2662-2680).
cagaccgtgccattcaaca

SEQ ID NO: 809858 - DNA, 19 bp, Mus musculus
  siRNA target sequence for BC019206 (NM_183426.1,2718-2736).
cccgagtacgtcttcctta

SEQ ID NO: 809859 - DNA, 19 bp, Mus musculus
  siRNA target sequence for BC019206 (NM_183426.1,2719-2737).
ccgagtacgtcttccttat

SEQ ID NO: 809860 - DNA, 19 bp, Mus musculus
  siRNA target sequence for BC019206 (NM_183426.1,2721-2739).
gagtacgtcttccttatct

SEQ ID NO: 809861 - DNA, 19 bp, Mus musculus
  siRNA target sequence for BC019206 (NM_183426.1,2723-2741).
gtacgtcttccttatctca

SEQ ID NO: 809862 - DNA, 19 bp, Mus musculus
  siRNA target sequence for BC019206 (NM_183426.1,2779-2797).
ccaagcggctcgaaagtct

SEQ ID NO: 809863 - DNA, 19 bp, Mus musculus
  siRNA target sequence for BC019206 (NM_183426.1,2839-2857).
gagacctgagcaagtacaa

SEQ ID NO: 809864 - DNA, 19 bp, Mus musculus
  siRNA target sequence for BC019206 (NM_183426.1,2890-2908).
gccgcgtccttgctacaat

SEQ ID NO: 809865 - DNA, 19 bp, Mus musculus
  siRNA target sequence for BC019206 (NM_183426.1,2892-2910).
cgcgtccttgctacaatca

SEQ ID NO: 809866 - DNA, 19 bp, Mus musculus
  siRNA target sequence for BC019206 (NM_183426.1,2893-2911).
gcgtccttgctacaatcat

SEQ ID NO: 809867 - DNA, 19 bp, Mus musculus
  siRNA target sequence for BC019206 (NM_183426.1,2968-2986).
ccttctttcgggacatgaa

SEQ ID NO: 809868 - DNA, 19 bp, Mus musculus
  siRNA target sequence for BC019206 (NM_183426.1,3108-3126).
cagaacgccctgttccaat

SEQ ID NO: 809869 - DNA, 19 bp, Mus musculus
  siRNA target sequence for BC019206 (NM_183426.1,3114-3132).
gccctgttccaatacttct

SEQ ID NO: 809870 - DNA, 19 bp, Mus musculus
  siRNA target sequence for BC019206 (NM_183426.1,3301-3319).
gcgtggaccgcggtatgaa

SEQ ID NO: 809871 - DNA, 19 bp, Mus musculus
  siRNA target sequence for BC019206 (NM_183426.1,3303-3321).
gtggaccgcggtatgaagt

SEQ ID NO: 809872 - DNA, 19 bp, Mus musculus
  siRNA target sequence for BC019206 (NM_183426.1,3320-3338).
gtgggaagaggcattaact

SEQ ID NO: 809873 - DNA, 19 bp, Mus musculus
  siRNA target sequence for BC019206 (NM_183426.1,3350-3368).
gctcaaaggtccctatgat

SEQ ID NO: 809874 - DNA, 19 bp, Mus musculus
  siRNA target sequence for BC019206 (NM_183426.1,3390-3408).
gtacgaggcagcaaaatga

SEQ ID NO: 809875 - DNA, 19 bp, Mus musculus
  siRNA target sequence for BC019206 (NM_183426.1,3499-3517).
gcctgtgccggaagtttca

SEQ ID NO: 809876 - DNA, 19 bp, Mus musculus
  siRNA target sequence for BC019206 (NM_183426.1,3733-3751).
gtagcagctacctacagat

SEQ ID NO: 809877 - DNA, 19 bp, Mus musculus
  siRNA target sequence for BC019206 (NM_183426.1,3747-3765).
cagattgtgcgccttaaga

SEQ ID NO: 809878 - DNA, 19 bp, Mus musculus
  siRNA target sequence for BC019206 (NM_183426.1,4079-4097).
ccagagctgcgacatcaat

SEQ ID NO: 809879 - DNA, 19 bp, Mus musculus
  siRNA target sequence for BC019206 (NM_183426.1,4080-4098).
cagagctgcgacatcaatt

SEQ ID NO: 809880 - DNA, 19 bp, Mus musculus
  siRNA target sequence for Glra2 (NM_183427.1,139-157).
gacagccttgtttgcattt

SEQ ID NO: 809881 - DNA, 19 bp, Mus musculus
  siRNA target sequence for Glra2 (NM_183427.1,205-223).
ctccaggtctggaaaacat

SEQ ID NO: 809882 - DNA, 19 bp, Mus musculus
  siRNA target sequence for Glra2 (NM_183427.1,234-252).
ccctatctccttcagattt

SEQ ID NO: 809883 - DNA, 19 bp, Mus musculus
  siRNA target sequence for Glra2 (NM_183427.1,291-309).
caagaatcaggccaaattt

SEQ ID NO: 809884 - DNA, 19 bp, Mus musculus
  siRNA target sequence for Glra2 (NM_183427.1,314-332).
ggtcctccagtaaacgtta

SEQ ID NO: 809885 - DNA, 19 bp, Mus musculus
  siRNA target sequence for Glra2 (NM_183427.1,323-341).
gtaaacgttacttgcaata

SEQ ID NO: 809886 - DNA, 19 bp, Mus musculus
  siRNA target sequence for Glra2 (NM_183427.1,328-346).
cgttacttgcaatattttt

SEQ ID NO: 809887 - DNA, 19 bp, Mus musculus
  siRNA target sequence for Glra2 (NM_183427.1,382-400).
ggactaccgagtgaacatt

SEQ ID NO: 809888 - DNA, 19 bp, Mus musculus
  siRNA target sequence for Glra2 (NM_183427.1,450-468).
cagatgattccctggattt

SEQ ID NO: 809889 - DNA, 19 bp, Mus musculus
  siRNA target sequence for Glra2 (NM_183427.1,464-482).
gatttggatccctcaatgt

SEQ ID NO: 809890 - DNA, 19 bp, Mus musculus
  siRNA target sequence for Glra2 (NM_183427.1,475-493).
ctcaatgttggattcgatt

SEQ ID NO: 809891 - DNA, 19 bp, Mus musculus
  siRNA target sequence for Glra2 (NM_183427.1,549-567).
ccactgacaacaagttgtt

SEQ ID NO: 809892 - DNA, 19 bp, Mus musculus
  siRNA target sequence for Glra2 (NM_183427.1,562-580).
gttgttgcggatttccaaa

SEQ ID NO: 809893 - DNA, 19 bp, Mus musculus
  siRNA target sequence for Glra2 (NM_183427.1,565-583).
gttgcggatttccaaaaat

SEQ ID NO: 809894 - DNA, 19 bp, Mus musculus
  siRNA target sequence for Glra2 (NM_183427.1,656-674).
gatgtccagacctgtacaa

SEQ ID NO: 809895 - DNA, 19 bp, Mus musculus
  siRNA target sequence for Glra2 (NM_183427.1,710-728).
ctgatatttgagtggttaa

SEQ ID NO: 809896 - DNA, 19 bp, Mus musculus
  siRNA target sequence for Glra2 (NM_183427.1,712-730).
gatatttgagtggttaagt

SEQ ID NO: 809897 - DNA, 19 bp, Mus musculus
  siRNA target sequence for Glra2 (NM_183427.1,762-780).
ccttgccccagtttatttt

SEQ ID NO: 809898 - DNA, 19 bp, Mus musculus
  siRNA target sequence for Glra2 (NM_183427.1,788-806).
gagaaggagcttggttatt

SEQ ID NO: 809899 - DNA, 19 bp, Mus musculus
  siRNA target sequence for Glra2 (NM_183427.1,902-920).
cccagcctgttgatagtca

SEQ ID NO: 809900 - DNA, 19 bp, Mus musculus
  siRNA target sequence for Glra2 (NM_183427.1,903-921).
ccagcctgttgatagtcat

SEQ ID NO: 809901 - DNA, 19 bp, Mus musculus
  siRNA target sequence for Glra2 (NM_183427.1,904-922).
cagcctgttgatagtcatt

SEQ ID NO: 809902 - DNA, 19 bp, Mus musculus
  siRNA target sequence for Glra2 (NM_183427.1,1173-1191).
gacagaagaggcagaataa

SEQ ID NO: 809903 - DNA, 19 bp, Mus musculus
  siRNA target sequence for Glra2 (NM_183427.1,1206-1224).
ctcgtgaaagtcgttttaa

SEQ ID NO: 809904 - DNA, 19 bp, Mus musculus
  siRNA target sequence for Glra2 (NM_183427.1,1208-1226).
cgtgaaagtcgttttaact

SEQ ID NO: 809905 - DNA, 19 bp, Mus musculus
  siRNA target sequence for Glra2 (NM_183427.1,1209-1227).
gtgaaagtcgttttaactt

SEQ ID NO: 809906 - DNA, 19 bp, Mus musculus
  siRNA target sequence for Glra2 (NM_183427.1,1211-1229).
gaaagtcgttttaacttca

SEQ ID NO: 809907 - DNA, 19 bp, Mus musculus
  siRNA target sequence for Glra2 (NM_183427.1,1244-1262).
ggtcactgcctccaaatga

SEQ ID NO: 809908 - DNA, 19 bp, Mus musculus
  siRNA target sequence for Glra2 (NM_183427.1,1245-1263).
gtcactgcctccaaatgaa

SEQ ID NO: 809909 - DNA, 19 bp, Mus musculus
  siRNA target sequence for Glra2 (NM_183427.1,1346-1364).
gtggatcgggcaaaaagaa

SEQ ID NO: 809910 - DNA, 19 bp, Mus musculus
  siRNA target sequence for Glra2 (NM_183427.1,1348-1366).
ggatcgggcaaaaagaatt

SEQ ID NO: 809911 - DNA, 19 bp, Mus musculus
  siRNA target sequence for Glra2 (NM_183427.1,1352-1370).
cgggcaaaaagaattgaca

SEQ ID NO: 809912 - DNA, 19 bp, Mus musculus
  siRNA target sequence for Glra2 (NM_183427.1,1403-1421).
ctcattttcaacatctttt

SEQ ID NO: 809913 - DNA, 19 bp, Mus musculus
  siRNA target sequence for Epb4.1 (NM_183428.2,1474-1492).
gacaacagagaagagttta

SEQ ID NO: 809914 - DNA, 19 bp, Mus musculus
  siRNA target sequence for Epb4.1 (NM_183428.2,1495-1513).
ggctgaagctgagaattct

SEQ ID NO: 809915 - DNA, 19 bp, Mus musculus
  siRNA target sequence for Epb4.1 (NM_183428.2,1538-1556).
ggagagggagccacaaact

SEQ ID NO: 809916 - DNA, 19 bp, Mus musculus
  siRNA target sequence for Epb4.1 (NM_183428.2,1630-1648).
gaagctgaaagcatccaat

SEQ ID NO: 809917 - DNA, 19 bp, Mus musculus
  siRNA target sequence for Epb4.1 (NM_183428.2,1651-1669).
ggacactccaacacatgaa

SEQ ID NO: 809918 - DNA, 19 bp, Mus musculus
  siRNA target sequence for Epb4.1 (NM_183428.2,1812-1830).
gtcagaaggagatagaact

SEQ ID NO: 809919 - DNA, 19 bp, Mus musculus
  siRNA target sequence for Epb4.1 (NM_183428.2,1913-1931).
gatcttcattcattaagca

SEQ ID NO: 809920 - DNA, 19 bp, Mus musculus
  siRNA target sequence for Epb4.1 (NM_183428.2,2126-2144).
gatgacacggtctacgaat

SEQ ID NO: 809921 - DNA, 19 bp, Mus musculus
  siRNA target sequence for Epb4.1 (NM_183428.2,2131-2149).
cacggtctacgaatgtgtt

SEQ ID NO: 809922 - DNA, 19 bp, Mus musculus
  siRNA target sequence for Epb4.1 (NM_183428.2,2134-2152).
ggtctacgaatgtgttgta

SEQ ID NO: 809923 - DNA, 19 bp, Mus musculus
  siRNA target sequence for Epb4.1 (NM_183428.2,2197-2215).
gcacctcaaccttttggaa

SEQ ID NO: 809924 - DNA, 19 bp, Mus musculus
  siRNA target sequence for Epb4.1 (NM_183428.2,2300-2318).
cgaggtgttccttggaatt

SEQ ID NO: 809925 - DNA, 19 bp, Mus musculus
  siRNA target sequence for Epb4.1 (NM_183428.2,2303-2321).
ggtgttccttggaatttca

SEQ ID NO: 809926 - DNA, 19 bp, Mus musculus
  siRNA target sequence for Epb4.1 (NM_183428.2,2343-2361).
cacccgacccagcacaatt

SEQ ID NO: 809927 - DNA, 19 bp, Mus musculus
  siRNA target sequence for Epb4.1 (NM_183428.2,2345-2363).
cccgacccagcacaattaa

SEQ ID NO: 809928 - DNA, 19 bp, Mus musculus
  siRNA target sequence for Epb4.1 (NM_183428.2,2347-2365).
cgacccagcacaattaaca

SEQ ID NO: 809929 - DNA, 19 bp, Mus musculus
  siRNA target sequence for Epb4.1 (NM_183428.2,2369-2387).
gacataacaagatactatt

SEQ ID NO: 809930 - DNA, 19 bp, Mus musculus
  siRNA target sequence for Epb4.1 (NM_183428.2,2371-2389).
cataacaagatactattta

SEQ ID NO: 809931 - DNA, 19 bp, Mus musculus
  siRNA target sequence for Epb4.1 (NM_183428.2,2450-2468).
gccctactcgggtcttaca

SEQ ID NO: 809932 - DNA, 19 bp, Mus musculus
  siRNA target sequence for Epb4.1 (NM_183428.2,2507-2525).
cacggcatggattatgtta

SEQ ID NO: 809933 - DNA, 19 bp, Mus musculus
  siRNA target sequence for Epb4.1 (NM_183428.2,2509-2527).
cggcatggattatgttagt

SEQ ID NO: 809934 - DNA, 19 bp, Mus musculus
  siRNA target sequence for Epb4.1 (NM_183428.2,2515-2533).
ggattatgttagtgatttt

SEQ ID NO: 809935 - DNA, 19 bp, Mus musculus
  siRNA target sequence for Epb4.1 (NM_183428.2,2573-2591).
gtcatggaattgcataaat

SEQ ID NO: 809936 - DNA, 19 bp, Mus musculus
  siRNA target sequence for Epb4.1 (NM_183428.2,2692-2710).
ggagggagtggacattatt

SEQ ID NO: 809937 - DNA, 19 bp, Mus musculus
  siRNA target sequence for Epb4.1 (NM_183428.2,2727-2745).
gcggccttctggtttacaa

SEQ ID NO: 809938 - DNA, 19 bp, Mus musculus
  siRNA target sequence for Epb4.1 (NM_183428.2,2728-2746).
cggccttctggtttacaaa

SEQ ID NO: 809939 - DNA, 19 bp, Mus musculus
  siRNA target sequence for Epb4.1 (NM_183428.2,2743-2761).
caaagacaagttgagaatt

SEQ ID NO: 809940 - DNA, 19 bp, Mus musculus
  siRNA target sequence for Epb4.1 (NM_183428.2,2772-2790).
cttggcccaaagtgctaaa

SEQ ID NO: 809941 - DNA, 19 bp, Mus musculus
  siRNA target sequence for Epb4.1 (NM_183428.2,2775-2793).
ggcccaaagtgctaaagat

SEQ ID NO: 809942 - DNA, 19 bp, Mus musculus
  siRNA target sequence for Epb4.1 (NM_183428.2,2776-2794).
gcccaaagtgctaaagatt

SEQ ID NO: 809943 - DNA, 19 bp, Mus musculus
  siRNA target sequence for Epb4.1 (NM_183428.2,2840-2858).
caagaacattatgaaagta

SEQ ID NO: 809944 - DNA, 19 bp, Mus musculus
  siRNA target sequence for Epb4.1 (NM_183428.2,2866-2884).
cttcaagctccccagttat

SEQ ID NO: 809945 - DNA, 19 bp, Mus musculus
  siRNA target sequence for Epb4.1 (NM_183428.2,2869-2887).
caagctccccagttatcga

SEQ ID NO: 809946 - DNA, 19 bp, Mus musculus
  siRNA target sequence for Epb4.1 (NM_183428.2,2885-2903).
cgagcggccaagaaactat

SEQ ID NO: 809947 - DNA, 19 bp, Mus musculus
  siRNA target sequence for Epb4.1 (NM_183428.2,2889-2907).
cggccaagaaactatggaa

SEQ ID NO: 809948 - DNA, 19 bp, Mus musculus
  siRNA target sequence for Epb4.1 (NM_183428.2,2959-2977).
ccccaaaagcaagtttctt

SEQ ID NO: 809949 - DNA, 19 bp, Mus musculus
  siRNA target sequence for Epb4.1 (NM_183428.2,3051-3069).
ggcctgctccacactttga

SEQ ID NO: 809950 - DNA, 19 bp, Mus musculus
  siRNA target sequence for Epb4.1 (NM_183428.2,3419-3437).
ggtgaaaacatttatatca

SEQ ID NO: 809951 - DNA, 19 bp, Mus musculus
  siRNA target sequence for Epb4.1 (NM_183428.2,3504-3522).
gcatcagtgaactgaaaaa

SEQ ID NO: 809952 - DNA, 19 bp, Mus musculus
  siRNA target sequence for Epb4.1 (NM_183428.2,3588-3606).
cacccttccggactcttaa

SEQ ID NO: 809953 - DNA, 19 bp, Mus musculus
  siRNA target sequence for Epb4.1 (NM_183428.2,3591-3609).
ccttccggactcttaacat

SEQ ID NO: 809954 - DNA, 19 bp, Mus musculus
  siRNA target sequence for Epb4.1 (NM_183428.2,3681-3699).
ccaatgctgtgaaaagtga

SEQ ID NO: 809955 - DNA, 19 bp, Mus musculus
  siRNA target sequence for Epb4.1 (NM_183428.2,3708-3726).
ccaaagatgtccctattgt

SEQ ID NO: 809956 - DNA, 19 bp, Mus musculus
  siRNA target sequence for Epb4.1 (NM_183428.2,3829-3847).
cgagaccacaagtagtaca

SEQ ID NO: 809957 - DNA, 19 bp, Mus musculus
  siRNA target sequence for Epb4.1 (NM_183428.2,3849-3867).
ccacgacacagattaccaa

SEQ ID NO: 809958 - DNA, 19 bp, Mus musculus
  siRNA target sequence for Epb4.1 (NM_183428.2,3857-3875).
cagattaccaagactgtaa

SEQ ID NO: 809959 - DNA, 19 bp, Mus musculus
  siRNA target sequence for Epb4.1 (NM_183428.2,3895-3913).
ccggatcgagaagagaatt

SEQ ID NO: 809960 - DNA, 19 bp, Mus musculus
  siRNA target sequence for Epb4.1 (NM_183428.2,3897-3915).
ggatcgagaagagaattgt

SEQ ID NO: 809961 - DNA, 19 bp, Mus musculus
  siRNA target sequence for Epb4.1 (NM_183428.2,3921-3939).
caggagatgccgatatcga

SEQ ID NO: 809962 - DNA, 19 bp, Mus musculus
  siRNA target sequence for Epb4.1 (NM_183428.2,3930-3948).
ccgatatcgaccatgatca

SEQ ID NO: 809963 - DNA, 19 bp, Mus musculus
  siRNA target sequence for LOC233001 (NM_194056.1,356-374).
gaagctaccacgaatttat

SEQ ID NO: 809964 - DNA, 19 bp, Mus musculus
  siRNA target sequence for LOC233001 (NM_194056.1,359-377).
gctaccacgaatttataga

SEQ ID NO: 809965 - DNA, 19 bp, Mus musculus
  siRNA target sequence for LOC233001 (NM_194056.1,360-378).
ctaccacgaatttatagaa

SEQ ID NO: 809966 - DNA, 19 bp, Mus musculus
  siRNA target sequence for LOC233001 (NM_194056.1,424-442).
ccagtcactgtagttgtat

SEQ ID NO: 809967 - DNA, 19 bp, Mus musculus
  siRNA target sequence for LOC233001 (NM_194056.1,492-510).
ggattgggcatcaagaaat

SEQ ID NO: 809968 - DNA, 19 bp, Mus musculus
  siRNA target sequence for LOC233001 (NM_194056.1,620-638).
cagagacagtggatgatat

SEQ ID NO: 809969 - DNA, 19 bp, Mus musculus
  siRNA target sequence for LOC233001 (NM_194056.1,630-648).
ggatgatattttatctgat

SEQ ID NO: 809970 - DNA, 19 bp, Mus musculus
  siRNA target sequence for LOC233001 (NM_194056.1,644-662).
ctgatccaaaaagaatctt

SEQ ID NO: 809971 - DNA, 19 bp, Mus musculus
  siRNA target sequence for LOC233001 (NM_194056.1,808-826).
cttgaattgggaaatgcaa

SEQ ID NO: 809972 - DNA, 19 bp, Mus musculus
  siRNA target sequence for LOC233001 (NM_194056.1,824-842).
caagtctttcaaacattat

SEQ ID NO: 809973 - DNA, 19 bp, Mus musculus
  siRNA target sequence for LOC233001 (NM_194056.1,844-862).
cctttgctgcaatatccaa

SEQ ID NO: 809974 - DNA, 19 bp, Mus musculus
  siRNA target sequence for LOC233001 (NM_194056.1,880-898).
ggattctctgaacaaacta

SEQ ID NO: 809975 - DNA, 19 bp, Mus musculus
  siRNA target sequence for LOC233001 (NM_194056.1,885-903).
ctctgaacaaactatagaa

SEQ ID NO: 809976 - DNA, 19 bp, Mus musculus
  siRNA target sequence for LOC233001 (NM_194056.1,887-905).
ctgaacaaactatagaaat

SEQ ID NO: 809977 - DNA, 19 bp, Mus musculus
  siRNA target sequence for LOC233001 (NM_194056.1,892-910).
caaactatagaaatctact

SEQ ID NO: 809978 - DNA, 19 bp, Mus musculus
  siRNA target sequence for LOC233001 (NM_194056.1,933-951).
gacaggtgtagaaatcttt

SEQ ID NO: 809979 - DNA, 19 bp, Mus musculus
  siRNA target sequence for LOC233001 (NM_194056.1,965-983).
gcattaaaccattgttcaa

SEQ ID NO: 809980 - DNA, 19 bp, Mus musculus
  siRNA target sequence for LOC233001 (NM_194056.1,1000-1018).
catctatgctggatgatct

SEQ ID NO: 809981 - DNA, 19 bp, Mus musculus
  siRNA target sequence for LOC233001 (NM_194056.1,1061-1079).
gtcgttttggtcgaacatt

SEQ ID NO: 809982 - DNA, 19 bp, Mus musculus
  siRNA target sequence for LOC233001 (NM_194056.1,1084-1102).
ctcctctacacaatattta

SEQ ID NO: 809983 - DNA, 19 bp, Mus musculus
  siRNA target sequence for LOC233001 (NM_194056.1,1104-1122).
ggttagcgcatttaaatca

SEQ ID NO: 809984 - DNA, 19 bp, Mus musculus
  siRNA target sequence for LOC233001 (NM_194056.1,1109-1127).
gcgcatttaaatcaacata

SEQ ID NO: 809985 - DNA, 19 bp, Mus musculus
  siRNA target sequence for LOC233001 (NM_194056.1,1110-1128).
cgcatttaaatcaacatat

SEQ ID NO: 809986 - DNA, 19 bp, Mus musculus
  siRNA target sequence for LOC233001 (NM_194056.1,1133-1151).
ggaatccatctaaacagaa

SEQ ID NO: 809987 - DNA, 19 bp, Mus musculus
  siRNA target sequence for LOC233001 (NM_194056.1,1243-1261).
gggatatctgaatcagata

SEQ ID NO: 809988 - DNA, 19 bp, Mus musculus
  siRNA target sequence for LOC233001 (NM_194056.1,1449-1467).
gttccacacacggatatta

SEQ ID NO: 809989 - DNA, 19 bp, Mus musculus
  siRNA target sequence for LOC233001 (NM_194056.1,1453-1471).
cacacacggatattattgt

SEQ ID NO: 809990 - DNA, 19 bp, Mus musculus
  siRNA target sequence for LOC233001 (NM_194056.1,1455-1473).
cacacggatattattgttt

SEQ ID NO: 809991 - DNA, 19 bp, Mus musculus
  siRNA target sequence for LOC233001 (NM_194056.1,1459-1477).
cggatattattgtttggaa

SEQ ID NO: 809992 - DNA, 19 bp, Mus musculus
  siRNA target sequence for LOC233001 (NM_194056.1,1460-1478).
ggatattattgtttggaat

SEQ ID NO: 809993 - DNA, 19 bp, Mus musculus
  siRNA target sequence for LOC233001 (NM_194056.1,1480-1498).
gccactgagcaagttaact

SEQ ID NO: 809994 - DNA, 19 bp, Mus musculus
  siRNA target sequence for LOC233001 (NM_194056.1,1529-1547).
catccaaggaggtaagaca

SEQ ID NO: 809995 - DNA, 19 bp, Mus musculus
  siRNA target sequence for LOC233001 (NM_194056.1,1554-1572).
catcagatacatcaaaagt

SEQ ID NO: 809996 - DNA, 19 bp, Mus musculus
  siRNA target sequence for LOC233001 (NM_194056.1,1608-1626).
gcatccccagaatttgttt

SEQ ID NO: 809997 - DNA, 19 bp, Mus musculus
  siRNA target sequence for LOC233001 (NM_194056.1,1664-1682).
gacaattgatggatcgatt

SEQ ID NO: 809998 - DNA, 19 bp, Mus musculus
  siRNA target sequence for LOC233001 (NM_194056.1,1722-1740).
gtcagcaactccatattgt

SEQ ID NO: 809999 - DNA, 19 bp, Mus musculus
  siRNA target sequence for LOC233001 (NM_194056.1,1724-1742).
cagcaactccatattgtct

SEQ ID NO: 810000 - DNA, 19 bp, Mus musculus
  siRNA target sequence for LOC233001 (NM_194056.1,2062-2080).
gcagcttcccttatcaatt

SEQ ID NO: 810001 - DNA, 19 bp, Mus musculus
  siRNA target sequence for LOC233001 (NM_194056.1,2066-2084).
cttcccttatcaattctga

SEQ ID NO: 810002 - DNA, 19 bp, Mus musculus
  siRNA target sequence for LOC233001 (NM_194056.1,2237-2255).
ctcttttgagcaatgaaca

SEQ ID NO: 810003 - DNA, 19 bp, Mus musculus
  siRNA target sequence for LOC233001 (NM_194056.1,2521-2539).
gtgcttggactggacaaat

SEQ ID NO: 810004 - DNA, 19 bp, Mus musculus
  siRNA target sequence for LOC233001 (NM_194056.1,2523-2541).
gcttggactggacaaatct

SEQ ID NO: 810005 - DNA, 19 bp, Mus musculus
  siRNA target sequence for LOC233001 (NM_194056.1,2524-2542).
cttggactggacaaatctt

SEQ ID NO: 810006 - DNA, 19 bp, Mus musculus
  siRNA target sequence for LOC233001 (NM_194056.1,2527-2545).
ggactggacaaatctttat

SEQ ID NO: 810007 - DNA, 19 bp, Mus musculus
  siRNA target sequence for LOC233001 (NM_194056.1,2528-2546).
gactggacaaatctttatt

SEQ ID NO: 810008 - DNA, 19 bp, Mus musculus
  siRNA target sequence for LOC233001 (NM_194056.1,2647-2665).
ggtgttcgtctgaagcttt

SEQ ID NO: 810009 - DNA, 19 bp, Mus musculus
  siRNA target sequence for LOC233001 (NM_194056.1,2648-2666).
gtgttcgtctgaagctttt

SEQ ID NO: 810010 - DNA, 19 bp, Mus musculus
  siRNA target sequence for LOC233001 (NM_194056.1,2725-2743).
ctgccaggaatgaagtcat

SEQ ID NO: 810011 - DNA, 19 bp, Mus musculus
  siRNA target sequence for LOC233001 (NM_194056.1,2766-2784).
cactggaggcacagtaaca

SEQ ID NO: 810012 - DNA, 19 bp, Mus musculus
  siRNA target sequence for LOC243874 (NM_194058.1,115-133).
ccaatatcctggacgaaaa

SEQ ID NO: 810013 - DNA, 19 bp, Mus musculus
  siRNA target sequence for LOC243874 (NM_194058.1,116-134).
caatatcctggacgaaaat

SEQ ID NO: 810014 - DNA, 19 bp, Mus musculus
  siRNA target sequence for LOC243874 (NM_194058.1,126-144).
gacgaaaatcgagaattct

SEQ ID NO: 810015 - DNA, 19 bp, Mus musculus
  siRNA target sequence for LOC243874 (NM_194058.1,155-173).
gcctggtaacgctattgaa

SEQ ID NO: 810016 - DNA, 19 bp, Mus musculus
  siRNA target sequence for LOC243874 (NM_194058.1,187-205).
ggacaggcatggaatatga

SEQ ID NO: 810017 - DNA, 19 bp, Mus musculus
  siRNA target sequence for LOC243874 (NM_194058.1,192-210).
ggcatggaatatgatgtta

SEQ ID NO: 810018 - DNA, 19 bp, Mus musculus
  siRNA target sequence for LOC243874 (NM_194058.1,193-211).
gcatggaatatgatgttaa

SEQ ID NO: 810019 - DNA, 19 bp, Mus musculus
  siRNA target sequence for LOC243874 (NM_194058.1,303-321).
gactacatttgaaaggata

SEQ ID NO: 810020 - DNA, 19 bp, Mus musculus
  siRNA target sequence for LOC243874 (NM_194058.1,529-547).
caaaatacagccgaatatt

SEQ ID NO: 810021 - DNA, 19 bp, Mus musculus
  siRNA target sequence for LOC243874 (NM_194058.1,620-638).
ccatacaggacctctgtaa

SEQ ID NO: 810022 - DNA, 19 bp, Mus musculus
  siRNA target sequence for LOC243874 (NM_194058.1,625-643).
caggacctctgtaattcga

SEQ ID NO: 810023 - DNA, 19 bp, Mus musculus
  siRNA target sequence for LOC243874 (NM_194058.1,660-678).
ggtgcccctgactgctttt

SEQ ID NO: 810024 - DNA, 19 bp, Mus musculus
  siRNA target sequence for LOC243874 (NM_194058.1,665-683).
ccctgactgcttttaagct

SEQ ID NO: 810025 - DNA, 19 bp, Mus musculus
  siRNA target sequence for LOC243874 (NM_194058.1,674-692).
cttttaagctccaaagctt

SEQ ID NO: 810026 - DNA, 19 bp, Mus musculus
  siRNA target sequence for LOC243874 (NM_194058.1,904-922).
gcgatttcccttatcaact

SEQ ID NO: 810027 - DNA, 19 bp, Mus musculus
  siRNA target sequence for LOC243874 (NM_194058.1,1257-1275).
cacctgcaaaacactgaat

SEQ ID NO: 810028 - DNA, 19 bp, Mus musculus
  siRNA target sequence for LOC243874 (NM_194058.1,1262-1280).
gcaaaacactgaatagctt

SEQ ID NO: 810029 - DNA, 19 bp, Mus musculus
  siRNA target sequence for LOC243874 (NM_194058.1,1366-1384).
cttggcagtggagagttaa

SEQ ID NO: 810030 - DNA, 19 bp, Mus musculus
  siRNA target sequence for Nanos3 (NM_194059.1,175-193).
gctcctgaacgcttatgtt

SEQ ID NO: 810031 - DNA, 19 bp, Mus musculus
  siRNA target sequence for Nanos3 (NM_194059.1,178-196).
cctgaacgcttatgttcat

SEQ ID NO: 810032 - DNA, 19 bp, Mus musculus
  siRNA target sequence for Nanos3 (NM_194059.1,213-231).
cgagtcccgtgccatctat

SEQ ID NO: 810033 - DNA, 19 bp, Mus musculus
  siRNA target sequence for Nanos3 (NM_194059.1,275-293).
ccattttgcgggattatgt

SEQ ID NO: 810034 - DNA, 19 bp, Mus musculus
  siRNA target sequence for Nanos3 (NM_194059.1,381-399).
ctacaccacccggaattct

SEQ ID NO: 810035 - DNA, 19 bp, Mus musculus
  siRNA target sequence for Nanos3 (NM_194059.1,392-410).
ggaattctgcaggcaaaaa

SEQ ID NO: 810036 - DNA, 19 bp, Mus musculus
  siRNA target sequence for Nanos3 (NM_194059.1,420-438).
gcctgacaaggcaaagaca

SEQ ID NO: 810037 - DNA, 19 bp, Mus musculus
  siRNA target sequence for Foxo6 (NM_194060.1,513-531).
ccccgagggcggaaagaca

SEQ ID NO: 810038 - DNA, 19 bp, Mus musculus
  siRNA target sequence for Foxo6 (NM_194060.1,827-845).
cgtcctcgccactcatgta

SEQ ID NO: 810039 - DNA, 19 bp, Mus musculus
  siRNA target sequence for Foxo6 (NM_194060.1,1339-1357).
caccccatcagccttatga

SEQ ID NO: 810040 - DNA, 19 bp, Mus musculus
  siRNA target sequence for Foxo6 (NM_194060.1,1594-1612).
gacgaaatggacttcaact

SEQ ID NO: 810041 - DNA, 19 bp, Mus musculus
  siRNA target sequence for LOC330490 (NM_194062.1,3-21).
ggttgactcatctagctat

SEQ ID NO: 810042 - DNA, 19 bp, Mus musculus
  siRNA target sequence for LOC330490 (NM_194062.1,326-344).
catctgagaccaacactta

SEQ ID NO: 810043 - DNA, 19 bp, Mus musculus
  siRNA target sequence for LOC330490 (NM_194062.1,359-377).
gctacaacaccattataga

SEQ ID NO: 810044 - DNA, 19 bp, Mus musculus
  siRNA target sequence for LOC330490 (NM_194062.1,360-378).
ctacaacaccattatagat

SEQ ID NO: 810045 - DNA, 19 bp, Mus musculus
  siRNA target sequence for LOC330490 (NM_194062.1,368-386).
ccattatagatcgtcaata

SEQ ID NO: 810046 - DNA, 19 bp, Mus musculus
  siRNA target sequence for LOC330490 (NM_194062.1,376-394).
gatcgtcaatacaaagcat

SEQ ID NO: 810047 - DNA, 19 bp, Mus musculus
  siRNA target sequence for LOC330490 (NM_194062.1,380-398).
gtcaatacaaagcattact

SEQ ID NO: 810048 - DNA, 19 bp, Mus musculus
  siRNA target sequence for LOC330490 (NM_194062.1,423-441).
cccagctactgcagttgta

SEQ ID NO: 810049 - DNA, 19 bp, Mus musculus
  siRNA target sequence for LOC330490 (NM_194062.1,738-756).
gaggctgccaacacaaaat

SEQ ID NO: 810050 - DNA, 19 bp, Mus musculus
  siRNA target sequence for LOC330490 (NM_194062.1,811-829).
gaattgggagagtcaagtt

SEQ ID NO: 810051 - DNA, 19 bp, Mus musculus
  siRNA target sequence for LOC330490 (NM_194062.1,816-834).
gggagagtcaagttgttca

SEQ ID NO: 810052 - DNA, 19 bp, Mus musculus
  siRNA target sequence for LOC330490 (NM_194062.1,817-835).
ggagagtcaagttgttcaa

SEQ ID NO: 810053 - DNA, 19 bp, Mus musculus
  siRNA target sequence for LOC330490 (NM_194062.1,818-836).
gagagtcaagttgttcaaa

SEQ ID NO: 810054 - DNA, 19 bp, Mus musculus
  siRNA target sequence for LOC330490 (NM_194062.1,822-840).
gtcaagttgttcaaaaatt

SEQ ID NO: 810055 - DNA, 19 bp, Mus musculus
  siRNA target sequence for LOC330490 (NM_194062.1,855-873).
gaatcctagggagatcatt

SEQ ID NO: 810056 - DNA, 19 bp, Mus musculus
  siRNA target sequence for LOC330490 (NM_194062.1,881-899).
gattatctgaacagtctat

SEQ ID NO: 810057 - DNA, 19 bp, Mus musculus
  siRNA target sequence for LOC330490 (NM_194062.1,892-910).
cagtctatatatttctact

SEQ ID NO: 810058 - DNA, 19 bp, Mus musculus
  siRNA target sequence for LOC330490 (NM_194062.1,917-935).
ccttcttcaaaattcagtt

SEQ ID NO: 810059 - DNA, 19 bp, Mus musculus
  siRNA target sequence for LOC330490 (NM_194062.1,933-951).
gttgggtgtagaagtcttt

SEQ ID NO: 810060 - DNA, 19 bp, Mus musculus
  siRNA target sequence for LOC330490 (NM_194062.1,963-981).
gaaaaacgaaccattgttt

SEQ ID NO: 810061 - DNA, 19 bp, Mus musculus
  siRNA target sequence for LOC330490 (NM_194062.1,973-991).
ccattgtttactttatgca

SEQ ID NO: 810062 - DNA, 19 bp, Mus musculus
  siRNA target sequence for LOC330490 (NM_194062.1,989-1007).
gcagcaatcctagtatgtt

SEQ ID NO: 810063 - DNA, 19 bp, Mus musculus
  siRNA target sequence for LOC330490 (NM_194062.1,1082-1100).
cagctatccacacgatatt

SEQ ID NO: 810064 - DNA, 19 bp, Mus musculus
  siRNA target sequence for LOC330490 (NM_194062.1,1084-1102).
gctatccacacgatattta

SEQ ID NO: 810065 - DNA, 19 bp, Mus musculus
  siRNA target sequence for LOC330490 (NM_194062.1,1085-1103).
ctatccacacgatatttat

SEQ ID NO: 810066 - DNA, 19 bp, Mus musculus
  siRNA target sequence for LOC330490 (NM_194062.1,1104-1122).
catgagtgcattcaaatca

SEQ ID NO: 810067 - DNA, 19 bp, Mus musculus
  siRNA target sequence for LOC330490 (NM_194062.1,1129-1147).
ggcttgggctcatctaaat

SEQ ID NO: 810068 - DNA, 19 bp, Mus musculus
  siRNA target sequence for LOC330490 (NM_194062.1,1239-1257).
gaataagatatctgaatct

SEQ ID NO: 810069 - DNA, 19 bp, Mus musculus
  siRNA target sequence for LOC330490 (NM_194062.1,1300-1318).
ggtaacaacattatgtttt

SEQ ID NO: 810070 - DNA, 19 bp, Mus musculus
  siRNA target sequence for LOC330490 (NM_194062.1,1349-1367).
ccctgttctattttctcaa

SEQ ID NO: 810071 - DNA, 19 bp, Mus musculus
  siRNA target sequence for LOC330490 (NM_194062.1,1399-1417).
ggaagcctacctcaacttt

SEQ ID NO: 810072 - DNA, 19 bp, Mus musculus
  siRNA target sequence for LOC330490 (NM_194062.1,1400-1418).
gaagcctacctcaactttt

SEQ ID NO: 810073 - DNA, 19 bp, Mus musculus
  siRNA target sequence for LOC330490 (NM_194062.1,1404-1422).
cctacctcaacttttagga

SEQ ID NO: 810074 - DNA, 19 bp, Mus musculus
  siRNA target sequence for LOC330490 (NM_194062.1,1492-1510).
catgtgatcactttgctta

SEQ ID NO: 810075 - DNA, 19 bp, Mus musculus
  siRNA target sequence for LOC330490 (NM_194062.1,1497-1515).
gatcactttgcttaaacca

SEQ ID NO: 810076 - DNA, 19 bp, Mus musculus
  siRNA target sequence for LOC330490 (NM_194062.1,1522-1540).
ggcaatatatcattcaaaa

SEQ ID NO: 810077 - DNA, 19 bp, Mus musculus
  siRNA target sequence for LOC330490 (NM_194062.1,1551-1569).
ggaaatcattagatacctt

SEQ ID NO: 810078 - DNA, 19 bp, Mus musculus
  siRNA target sequence for LOC330490 (NM_194062.1,1580-1598).
gtcaaccagagtgtaatga

SEQ ID NO: 810079 - DNA, 19 bp, Mus musculus
  siRNA target sequence for LOC330490 (NM_194062.1,1582-1600).
caaccagagtgtaatgaga

SEQ ID NO: 810080 - DNA, 19 bp, Mus musculus
  siRNA target sequence for LOC330490 (NM_194062.1,1603-1621).
ctggtgcatcccaagaagt

SEQ ID NO: 810081 - DNA, 19 bp, Mus musculus
  siRNA target sequence for LOC330490 (NM_194062.1,1664-1682).
gtcaagtgatgaatctatt

SEQ ID NO: 810082 - DNA, 19 bp, Mus musculus
  siRNA target sequence for LOC330490 (NM_194062.1,1744-1762).
ctgcgagcctcaaaattga

SEQ ID NO: 810083 - DNA, 19 bp, Mus musculus
  siRNA target sequence for LOC330490 (NM_194062.1,1746-1764).
gcgagcctcaaaattgaaa

SEQ ID NO: 810084 - DNA, 19 bp, Mus musculus
  siRNA target sequence for LOC330490 (NM_194062.1,1815-1833).
cgaatatggtagcttagaa

SEQ ID NO: 810085 - DNA, 19 bp, Mus musculus
  siRNA target sequence for LOC330490 (NM_194062.1,2055-2073).
cataatggcaactttcctt

SEQ ID NO: 810086 - DNA, 19 bp, Mus musculus
  siRNA target sequence for LOC330490 (NM_194062.1,2398-2416).
ctggcattggctcttatca

SEQ ID NO: 810087 - DNA, 19 bp, Mus musculus
  siRNA target sequence for LOC330490 (NM_194062.1,2400-2418).
ggcattggctcttatcact

SEQ ID NO: 810088 - DNA, 19 bp, Mus musculus
  siRNA target sequence for LOC330490 (NM_194062.1,2401-2419).
gcattggctcttatcactt

SEQ ID NO: 810089 - DNA, 19 bp, Mus musculus
  siRNA target sequence for LOC330490 (NM_194062.1,2494-2512).
ctgaaccacaaaaagtgta

SEQ ID NO: 810090 - DNA, 19 bp, Mus musculus
  siRNA target sequence for Nanos2 (NM_194064.1,85-103).
gacctaccgccctttgaca

SEQ ID NO: 810091 - DNA, 19 bp, Mus musculus
  siRNA target sequence for Nanos2 (NM_194064.1,107-125).
ggagagactactttaacct

SEQ ID NO: 810092 - DNA, 19 bp, Mus musculus
  siRNA target sequence for Nanos2 (NM_194064.1,397-415).
gctcatacactcaagtatt

SEQ ID NO: 810093 - DNA, 19 bp, Mus musculus
  siRNA target sequence for 1700111I05Rik (NM_194065.1,625-643).
ggaacctggcctatcttgt

SEQ ID NO: 810094 - DNA, 19 bp, Mus musculus
  siRNA target sequence for 1700111I05Rik (NM_194065.1,711-729).
caggcccaggaagtcaaat

SEQ ID NO: 810095 - DNA, 19 bp, Mus musculus
  siRNA target sequence for 1700111I05Rik (NM_194065.1,752-770).
gcctcagttcttaattcca

SEQ ID NO: 810096 - DNA, 19 bp, Mus musculus
  siRNA target sequence for C030004A17Rik (NM_194257.1,385-403).
ctcccctcgtaccagtaat

SEQ ID NO: 810097 - DNA, 19 bp, Mus musculus
  siRNA target sequence for C030004A17Rik (NM_194257.1,387-405).
cccctcgtaccagtaatgt

SEQ ID NO: 810098 - DNA, 19 bp, Mus musculus
  siRNA target sequence for C030004A17Rik (NM_194257.1,388-406).
ccctcgtaccagtaatgtt

SEQ ID NO: 810099 - DNA, 19 bp, Mus musculus
  siRNA target sequence for C030004A17Rik (NM_194257.1,404-422).
gttcgatccacatttttca

SEQ ID NO: 810100 - DNA, 19 bp, Mus musculus
  siRNA target sequence for C030004A17Rik (NM_194257.1,408-426).
gatccacatttttcaaaga

SEQ ID NO: 810101 - DNA, 19 bp, Mus musculus
  siRNA target sequence for C030004A17Rik (NM_194257.1,421-439).
caaagactgtttatatgaa

SEQ ID NO: 810102 - DNA, 19 bp, Mus musculus
  siRNA target sequence for C030004A17Rik (NM_194257.1,446-464).
gatgacctggaatcaaaga

SEQ ID NO: 810103 - DNA, 19 bp, Mus musculus
  siRNA target sequence for C030004A17Rik (NM_194257.1,521-539).
gccctagtattaactacaa

SEQ ID NO: 810104 - DNA, 19 bp, Mus musculus
  siRNA target sequence for Rbp1l1 (NM_194262.1,2028-2046).
ggacgagggaaaaatcaaa

SEQ ID NO: 810105 - DNA, 19 bp, Mus musculus
  siRNA target sequence for Rbp1l1 (NM_194262.1,2051-2069).
gtatgaagctagtataaaa

SEQ ID NO: 810106 - DNA, 19 bp, Mus musculus
  siRNA target sequence for Rbp1l1 (NM_194262.1,2095-2113).
ccctttacttggtgcatta

SEQ ID NO: 810107 - DNA, 19 bp, Mus musculus
  siRNA target sequence for Rbp1l1 (NM_194262.1,2097-2115).
ctttacttggtgcattact

SEQ ID NO: 810108 - DNA, 19 bp, Mus musculus
  siRNA target sequence for Rbp1l1 (NM_194262.1,2116-2134).
gcggatggaatgtgagata

SEQ ID NO: 810109 - DNA, 19 bp, Mus musculus
  siRNA target sequence for Onecut2 (NM_194268.1,79-97).
cccggagctgacaatggaa

SEQ ID NO: 810110 - DNA, 19 bp, Mus musculus
  siRNA target sequence for Onecut2 (NM_194268.1,80-98).
ccggagctgacaatggaaa

SEQ ID NO: 810111 - DNA, 19 bp, Mus musculus
  siRNA target sequence for Onecut2 (NM_194268.1,495-513).
ctacggtctcagacaagtt

SEQ ID NO: 810112 - DNA, 19 bp, Mus musculus
  siRNA target sequence for Onecut2 (NM_194268.1,626-644).
gggcttccgtccatgaaca

SEQ ID NO: 810113 - DNA, 19 bp, Mus musculus
  siRNA target sequence for Onecut2 (NM_194268.1,632-650).
ccgtccatgaacaaccttt

SEQ ID NO: 810114 - DNA, 19 bp, Mus musculus
  siRNA target sequence for Onecut2 (NM_194268.1,633-651).
cgtccatgaacaaccttta

SEQ ID NO: 810115 - DNA, 19 bp, Mus musculus
  siRNA target sequence for Onecut2 (NM_194268.1,723-741).
ggctgggtggccttcacaa

SEQ ID NO: 810116 - DNA, 19 bp, Mus musculus
  siRNA target sequence for Onecut2 (NM_194268.1,1150-1168).
ctggagtaaactcaaatct

SEQ ID NO: 810117 - DNA, 19 bp, Mus musculus
  siRNA target sequence for Onecut2 (NM_194268.1,1454-1472).
cgtcgcagcctggagaaat

SEQ ID NO: 810118 - DNA, 19 bp, Mus musculus
  siRNA target sequence for Mopt (NM_194269.1,337-355).
gacagtttaaggacaacat

SEQ ID NO: 810119 - DNA, 19 bp, Mus musculus
  siRNA target sequence for Mopt (NM_194269.1,363-381).
ggactggggacttacacat

SEQ ID NO: 810120 - DNA, 19 bp, Mus musculus
  siRNA target sequence for Mopt (NM_194269.1,364-382).
gactggggacttacacatt

SEQ ID NO: 810121 - DNA, 19 bp, Mus musculus
  siRNA target sequence for Mopt (NM_194269.1,393-411).
gcaaagtacactggaaatt

SEQ ID NO: 810122 - DNA, 19 bp, Mus musculus
  siRNA target sequence for Mopt (NM_194269.1,398-416).
gtacactggaaatttcaat

SEQ ID NO: 810123 - DNA, 19 bp, Mus musculus
  siRNA target sequence for Mopt (NM_194269.1,429-447).
gaaggtgagggagaataca

SEQ ID NO: 810124 - DNA, 19 bp, Mus musculus
  siRNA target sequence for 4933440H19Rik (NM_194335.1,2686-2704).
gtcaccaacctgcacataa

SEQ ID NO: 810125 - DNA, 19 bp, Mus musculus
  siRNA target sequence for 4933440H19Rik (NM_194335.1,2871-2889).
ccgacgctacctacagaat

SEQ ID NO: 810126 - DNA, 19 bp, Mus musculus
  siRNA target sequence for 4933440H19Rik (NM_194335.1,2872-2890).
cgacgctacctacagaata

SEQ ID NO: 810127 - DNA, 19 bp, Mus musculus
  siRNA target sequence for 4933440H19Rik (NM_194335.1,2873-2891).
gacgctacctacagaataa

SEQ ID NO: 810128 - DNA, 19 bp, Mus musculus
  siRNA target sequence for AI595338 (NM_194336.1,1216-1234).
gctggtggaattaatagga

SEQ ID NO: 810129 - DNA, 19 bp, Mus musculus
  siRNA target sequence for AI595338 (NM_194336.1,1350-1368).
cttgtggacacaagcttta

SEQ ID NO: 810130 - DNA, 19 bp, Mus musculus
  siRNA target sequence for AI595338 (NM_194336.1,1353-1371).
gtggacacaagctttacat

SEQ ID NO: 810131 - DNA, 19 bp, Mus musculus
  siRNA target sequence for AI595338 (NM_194336.1,1889-1907).
gtccgttatctaaagcatt

SEQ ID NO: 810132 - DNA, 19 bp, Mus musculus
  siRNA target sequence for AI595338 (NM_194336.1,1891-1909).
ccgttatctaaagcattta

SEQ ID NO: 810133 - DNA, 19 bp, Mus musculus
  siRNA target sequence for AI595338 (NM_194336.1,1892-1910).
cgttatctaaagcatttat

SEQ ID NO: 810134 - DNA, 19 bp, Mus musculus
  siRNA target sequence for Bms1l (NM_194339.1,199-217).
gcacagtgggcctaaagct

SEQ ID NO: 810135 - DNA, 19 bp, Mus musculus
  siRNA target sequence for Bms1l (NM_194339.1,207-225).
ggcctaaagctgagaagaa

SEQ ID NO: 810136 - DNA, 19 bp, Mus musculus
  siRNA target sequence for Bms1l (NM_194339.1,355-373).
gacgaaaaagcatcacatt

SEQ ID NO: 810137 - DNA, 19 bp, Mus musculus
  siRNA target sequence for Bms1l (NM_194339.1,421-439).
ggtgatgggacctccaaaa

SEQ ID NO: 810138 - DNA, 19 bp, Mus musculus
  siRNA target sequence for Bms1l (NM_194339.1,440-458).
gttggaaagagcactttga

SEQ ID NO: 810139 - DNA, 19 bp, Mus musculus
  siRNA target sequence for Bms1l (NM_194339.1,462-480).
gatgcctgattcggaattt

SEQ ID NO: 810140 - DNA, 19 bp, Mus musculus
  siRNA target sequence for Bms1l (NM_194339.1,505-523).
cagaggccctgtgacaatt

SEQ ID NO: 810141 - DNA, 19 bp, Mus musculus
  siRNA target sequence for Bms1l (NM_194339.1,519-537).
caattgtgtcaggtaaaaa

SEQ ID NO: 810142 - DNA, 19 bp, Mus musculus
  siRNA target sequence for Bms1l (NM_194339.1,530-548).
ggtaaaaagcgcagactta

SEQ ID NO: 810143 - DNA, 19 bp, Mus musculus
  siRNA target sequence for Bms1l (NM_194339.1,538-556).
gcgcagacttacaattatt

SEQ ID NO: 810144 - DNA, 19 bp, Mus musculus
  siRNA target sequence for Bms1l (NM_194339.1,563-581).
gggtgtgacatcaatgtaa

SEQ ID NO: 810145 - DNA, 19 bp, Mus musculus
  siRNA target sequence for Bms1l (NM_194339.1,564-582).
ggtgtgacatcaatgtaat

SEQ ID NO: 810146 - DNA, 19 bp, Mus musculus
  siRNA target sequence for Bms1l (NM_194339.1,567-585).
gtgacatcaatgtaatgat

SEQ ID NO: 810147 - DNA, 19 bp, Mus musculus
  siRNA target sequence for Bms1l (NM_194339.1,571-589).
catcaatgtaatgattgat

SEQ ID NO: 810148 - DNA, 19 bp, Mus musculus
  siRNA target sequence for Bms1l (NM_194339.1,574-592).
caatgtaatgattgatcta

SEQ ID NO: 810149 - DNA, 19 bp, Mus musculus
  siRNA target sequence for Bms1l (NM_194339.1,583-601).
gattgatctagctaaagta

SEQ ID NO: 810150 - DNA, 19 bp, Mus musculus
  siRNA target sequence for Bms1l (NM_194339.1,605-623).
gatctggtgctaatgctta

SEQ ID NO: 810151 - DNA, 19 bp, Mus musculus
  siRNA target sequence for Bms1l (NM_194339.1,610-628).
ggtgctaatgcttatagat

SEQ ID NO: 810152 - DNA, 19 bp, Mus musculus
  siRNA target sequence for Bms1l (NM_194339.1,639-657).
ggtttgagatggagacatt

SEQ ID NO: 810153 - DNA, 19 bp, Mus musculus
  siRNA target sequence for Bms1l (NM_194339.1,646-664).
gatggagacatttgagttt

SEQ ID NO: 810154 - DNA, 19 bp, Mus musculus
  siRNA target sequence for Bms1l (NM_194339.1,705-723).
gagttctcacccatttgga

SEQ ID NO: 810155 - DNA, 19 bp, Mus musculus
  siRNA target sequence for Bms1l (NM_194339.1,722-740).
gactccttcaagcataaca

SEQ ID NO: 810156 - DNA, 19 bp, Mus musculus
  siRNA target sequence for Bms1l (NM_194339.1,841-859).
gtatcagaaccaagagatt

SEQ ID NO: 810157 - DNA, 19 bp, Mus musculus
  siRNA target sequence for Bms1l (NM_194339.1,872-890).
cggtttattacagttatga

SEQ ID NO: 810158 - DNA, 19 bp, Mus musculus
  siRNA target sequence for Bms1l (NM_194339.1,904-922).
cacatggcagacttctcat

SEQ ID NO: 810159 - DNA, 19 bp, Mus musculus
  siRNA target sequence for Bms1l (NM_194339.1,909-927).
ggcagacttctcatcctta

SEQ ID NO: 810160 - DNA, 19 bp, Mus musculus
  siRNA target sequence for Bms1l (NM_194339.1,992-1010).
gaccgaaaggtgtctcttt

SEQ ID NO: 810161 - DNA, 19 bp, Mus musculus
  siRNA target sequence for Bms1l (NM_194339.1,1001-1019).
gtgtctctttatggttatt

SEQ ID NO: 810162 - DNA, 19 bp, Mus musculus
  siRNA target sequence for Bms1l (NM_194339.1,1025-1043).
ggggcctacctgaaaaata

SEQ ID NO: 810163 - DNA, 19 bp, Mus musculus
  siRNA target sequence for Bms1l (NM_194339.1,1062-1080).
caggcgtgggggattttgt

SEQ ID NO: 810164 - DNA, 19 bp, Mus musculus
  siRNA target sequence for Bms1l (NM_194339.1,1132-1150).
gaagaagcgctgtttgaat

SEQ ID NO: 810165 - DNA, 19 bp, Mus musculus
  siRNA target sequence for Bms1l (NM_194339.1,1194-1212).
gtgtgctgtacgacaaaga

SEQ ID NO: 810166 - DNA, 19 bp, Mus musculus
  siRNA target sequence for Bms1l (NM_194339.1,1303-1321).
cacccatgccagtatcgat

SEQ ID NO: 810167 - DNA, 19 bp, Mus musculus
  siRNA target sequence for Bms1l (NM_194339.1,1311-1329).
ccagtatcgatgctaagat

SEQ ID NO: 810168 - DNA, 19 bp, Mus musculus
  siRNA target sequence for Bms1l (NM_194339.1,1322-1340).
gctaagatggcttcaagta

SEQ ID NO: 810169 - DNA, 19 bp, Mus musculus
  siRNA target sequence for Bms1l (NM_194339.1,1335-1353).
caagtagagtgacactttt

SEQ ID NO: 810170 - DNA, 19 bp, Mus musculus
  siRNA target sequence for Bms1l (NM_194339.1,1347-1365).
cacttttctctgattccaa

SEQ ID NO: 810171 - DNA, 19 bp, Mus musculus
  siRNA target sequence for Bms1l (NM_194339.1,1450-1468).
gcgtcggaaagccattttt

SEQ ID NO: 810172 - DNA, 19 bp, Mus musculus
  siRNA target sequence for Bms1l (NM_194339.1,1461-1479).
ccatttttggagatacaga

SEQ ID NO: 810173 - DNA, 19 bp, Mus musculus
  siRNA target sequence for Bms1l (NM_194339.1,1462-1480).
catttttggagatacagaa

SEQ ID NO: 810174 - DNA, 19 bp, Mus musculus
  siRNA target sequence for Bms1l (NM_194339.1,1599-1617).
gcagcggtaactacatgat

SEQ ID NO: 810175 - DNA, 19 bp, Mus musculus
  siRNA target sequence for Bms1l (NM_194339.1,1876-1894).
gccctccccggtgagaaaa

SEQ ID NO: 810176 - DNA, 19 bp, Mus musculus
  siRNA target sequence for Bms1l (NM_194339.1,1931-1949).
gccgaggaggcgtttccat

SEQ ID NO: 810177 - DNA, 19 bp, Mus musculus
  siRNA target sequence for Bms1l (NM_194339.1,2038-2056).
gcgcgacagcggacagaaa

SEQ ID NO: 810178 - DNA, 19 bp, Mus musculus
  siRNA target sequence for Bms1l (NM_194339.1,2064-2082).
cggagagcctggttgatga

SEQ ID NO: 810179 - DNA, 19 bp, Mus musculus
  siRNA target sequence for Bms1l (NM_194339.1,2083-2101).
gaccagcgacattgaaagt

SEQ ID NO: 810180 - DNA, 19 bp, Mus musculus
  siRNA target sequence for Bms1l (NM_194339.1,2085-2103).
ccagcgacattgaaagttt

SEQ ID NO: 810181 - DNA, 19 bp, Mus musculus
  siRNA target sequence for Bms1l (NM_194339.1,2086-2104).
cagcgacattgaaagttta

SEQ ID NO: 810182 - DNA, 19 bp, Mus musculus
  siRNA target sequence for Bms1l (NM_194339.1,2088-2106).
gcgacattgaaagtttact

SEQ ID NO: 810183 - DNA, 19 bp, Mus musculus
  siRNA target sequence for Bms1l (NM_194339.1,2226-2244).
cagctccgaatcttcgaaa

SEQ ID NO: 810184 - DNA, 19 bp, Mus musculus
  siRNA target sequence for Bms1l (NM_194339.1,2506-2524).
gctctatggtgactttgaa

SEQ ID NO: 810185 - DNA, 19 bp, Mus musculus
  siRNA target sequence for Bms1l (NM_194339.1,2539-2557).
ggacgtgcacaaaggaaaa

SEQ ID NO: 810186 - DNA, 19 bp, Mus musculus
  siRNA target sequence for Bms1l (NM_194339.1,2677-2695).
gctgtttgatgcagagtat

SEQ ID NO: 810187 - DNA, 19 bp, Mus musculus
  siRNA target sequence for Bms1l (NM_194339.1,2712-2730).
cctactttgatgatcttaa

SEQ ID NO: 810188 - DNA, 19 bp, Mus musculus
  siRNA target sequence for Bms1l (NM_194339.1,2755-2773).
gcttaaccaggctgaattt

SEQ ID NO: 810189 - DNA, 19 bp, Mus musculus
  siRNA target sequence for Bms1l (NM_194339.1,2811-2829).
ggtttcgacctggaatgta

SEQ ID NO: 810190 - DNA, 19 bp, Mus musculus
  siRNA target sequence for Bms1l (NM_194339.1,2812-2830).
gtttcgacctggaatgtat

SEQ ID NO: 810191 - DNA, 19 bp, Mus musculus
  siRNA target sequence for Bms1l (NM_194339.1,2820-2838).
ctggaatgtatgttcgaat

SEQ ID NO: 810192 - DNA, 19 bp, Mus musculus
  siRNA target sequence for Bms1l (NM_194339.1,2823-2841).
gaatgtatgttcgaattga

SEQ ID NO: 810193 - DNA, 19 bp, Mus musculus
  siRNA target sequence for Bms1l (NM_194339.1,2831-2849).
gttcgaattgagatcgaaa

SEQ ID NO: 810194 - DNA, 19 bp, Mus musculus
  siRNA target sequence for Bms1l (NM_194339.1,2834-2852).
cgaattgagatcgaaaaca

SEQ ID NO: 810195 - DNA, 19 bp, Mus musculus
  siRNA target sequence for Bms1l (NM_194339.1,2835-2853).
gaattgagatcgaaaacat

SEQ ID NO: 810196 - DNA, 19 bp, Mus musculus
  siRNA target sequence for Bms1l (NM_194339.1,2845-2863).
cgaaaacatcccttgtgaa

SEQ ID NO: 810197 - DNA, 19 bp, Mus musculus
  siRNA target sequence for Bms1l (NM_194339.1,2846-2864).
gaaaacatcccttgtgaat

SEQ ID NO: 810198 - DNA, 19 bp, Mus musculus
  siRNA target sequence for Bms1l (NM_194339.1,2859-2877).
gtgaatttgtgcagaactt

SEQ ID NO: 810199 - DNA, 19 bp, Mus musculus
  siRNA target sequence for Bms1l (NM_194339.1,2879-2897).
gacccacactacccaatta

SEQ ID NO: 810200 - DNA, 19 bp, Mus musculus
  siRNA target sequence for Bms1l (NM_194339.1,2939-2957).
gtgcagatgcgcatcaaga

SEQ ID NO: 810201 - DNA, 19 bp, Mus musculus
  siRNA target sequence for Bms1l (NM_194339.1,2941-2959).
gcagatgcgcatcaagaaa

SEQ ID NO: 810202 - DNA, 19 bp, Mus musculus
  siRNA target sequence for Bms1l (NM_194339.1,2944-2962).
gatgcgcatcaagaaacat

SEQ ID NO: 810203 - DNA, 19 bp, Mus musculus
  siRNA target sequence for Bms1l (NM_194339.1,2953-2971).
caagaaacatcgttggtat

SEQ ID NO: 810204 - DNA, 19 bp, Mus musculus
  siRNA target sequence for Bms1l (NM_194339.1,2964-2982).
gttggtataagaaaatcct

SEQ ID NO: 810205 - DNA, 19 bp, Mus musculus
  siRNA target sequence for Bms1l (NM_194339.1,2986-3004).
gtctcgagaccccattatt

SEQ ID NO: 810206 - DNA, 19 bp, Mus musculus
  siRNA target sequence for Bms1l (NM_194339.1,2988-3006).
ctcgagaccccattatttt

SEQ ID NO: 810207 - DNA, 19 bp, Mus musculus
  siRNA target sequence for Bms1l (NM_194339.1,2990-3008).
cgagaccccattatttttt

SEQ ID NO: 810208 - DNA, 19 bp, Mus musculus
  siRNA target sequence for Bms1l (NM_194339.1,3039-3057).
cattgtattacattgaaga

SEQ ID NO: 810209 - DNA, 19 bp, Mus musculus
  siRNA target sequence for Bms1l (NM_194339.1,3149-3167).
ggatttttggcgatacagt

SEQ ID NO: 810210 - DNA, 19 bp, Mus musculus
  siRNA target sequence for Bms1l (NM_194339.1,3218-3236).
cttgacctggataaatcca

SEQ ID NO: 810211 - DNA, 19 bp, Mus musculus
  siRNA target sequence for Bms1l (NM_194339.1,3221-3239).
gacctggataaatccataa

SEQ ID NO: 810212 - DNA, 19 bp, Mus musculus
  siRNA target sequence for Bms1l (NM_194339.1,3359-3377).
cgaactgtcagtggaataa

SEQ ID NO: 810213 - DNA, 19 bp, Mus musculus
  siRNA target sequence for Bms1l (NM_194339.1,3442-3460).
gttgctaatgagtgatatt

SEQ ID NO: 810214 - DNA, 19 bp, Mus musculus
  siRNA target sequence for Bms1l (NM_194339.1,3445-3463).
gctaatgagtgatattgtt

SEQ ID NO: 810215 - DNA, 19 bp, Mus musculus
  siRNA target sequence for Bms1l (NM_194339.1,3489-3507).
ccattccggccttctacaa

SEQ ID NO: 810216 - DNA, 19 bp, Mus musculus
  siRNA target sequence for Bms1l (NM_194339.1,3499-3517).
cttctacaatccagtaaca

SEQ ID NO: 810217 - DNA, 19 bp, Mus musculus
  siRNA target sequence for Bms1l (NM_194339.1,3502-3520).
ctacaatccagtaacatct

SEQ ID NO: 810218 - DNA, 19 bp, Mus musculus
  siRNA target sequence for Bms1l (NM_194339.1,3509-3527).
ccagtaacatctttgttga

SEQ ID NO: 810219 - DNA, 19 bp, Mus musculus
  siRNA target sequence for Bms1l (NM_194339.1,3510-3528).
cagtaacatctttgttgaa

SEQ ID NO: 810220 - DNA, 19 bp, Mus musculus
  siRNA target sequence for Bms1l (NM_194339.1,3822-3840).
caatacacagtcagaaaat

SEQ ID NO: 810221 - DNA, 19 bp, Mus musculus
  siRNA target sequence for C330019G07Rik (NM_194340.1,376-394).
gaggcactgccatagttca

SEQ ID NO: 810222 - DNA, 19 bp, Mus musculus
  siRNA target sequence for C330019G07Rik (NM_194340.1,490-508).
ccagtaatatgcctatcat

SEQ ID NO: 810223 - DNA, 19 bp, Mus musculus
  siRNA target sequence for C330019G07Rik (NM_194340.1,516-534).
ctcttcctgacccagttta

SEQ ID NO: 810224 - DNA, 19 bp, Mus musculus
  siRNA target sequence for C330019G07Rik (NM_194340.1,530-548).
gtttacacagggcctaaaa

SEQ ID NO: 810225 - DNA, 19 bp, Mus musculus
  siRNA target sequence for C330019G07Rik (NM_194340.1,643-661).
cctcttgtaccttcaaatt

SEQ ID NO: 810226 - DNA, 19 bp, Mus musculus
  siRNA target sequence for Ap1gbp1 (NM_194341.1,67-85).
gggcaggcagcttcatgtt

SEQ ID NO: 810227 - DNA, 19 bp, Mus musculus
  siRNA target sequence for Ap1gbp1 (NM_194341.1,161-179).
catgcagcccaatatgcaa

SEQ ID NO: 810228 - DNA, 19 bp, Mus musculus
  siRNA target sequence for Ap1gbp1 (NM_194341.1,181-199).
gcatgatgggaatgaatta

SEQ ID NO: 810229 - DNA, 19 bp, Mus musculus
  siRNA target sequence for Ap1gbp1 (NM_194341.1,625-643).
gaatgcctccttggattta

SEQ ID NO: 810230 - DNA, 19 bp, Mus musculus
  siRNA target sequence for Ap1gbp1 (NM_194341.1,629-647).
gcctccttggatttacaat

SEQ ID NO: 810231 - DNA, 19 bp, Mus musculus
  siRNA target sequence for Ap1gbp1 (NM_194341.1,695-713).
gactccaactggaatagat

SEQ ID NO: 810232 - DNA, 19 bp, Mus musculus
  siRNA target sequence for Ap1gbp1 (NM_194341.1,706-724).
gaatagatactgctaaact

SEQ ID NO: 810233 - DNA, 19 bp, Mus musculus
  siRNA target sequence for Ap1gbp1 (NM_194341.1,748-766).
gacttcccagggaaactct

SEQ ID NO: 810234 - DNA, 19 bp, Mus musculus
  siRNA target sequence for Ap1gbp1 (NM_194341.1,758-776).
ggaaactctcggacagata

SEQ ID NO: 810235 - DNA, 19 bp, Mus musculus
  siRNA target sequence for Ap1gbp1 (NM_194341.1,771-789).
cagatatgggccttagcta

SEQ ID NO: 810236 - DNA, 19 bp, Mus musculus
  siRNA target sequence for Ap1gbp1 (NM_194341.1,773-791).
gatatgggccttagctaat

SEQ ID NO: 810237 - DNA, 19 bp, Mus musculus
  siRNA target sequence for Ap1gbp1 (NM_194341.1,922-940).
ccttaagcggctttcctat

SEQ ID NO: 810238 - DNA, 19 bp, Mus musculus
  siRNA target sequence for Ap1gbp1 (NM_194341.1,1203-1221).
cctgcttcctcaaaaacca

SEQ ID NO: 810239 - DNA, 19 bp, Mus musculus
  siRNA target sequence for Ap1gbp1 (NM_194341.1,1292-1310).
caaatacgcagtgttcaaa

SEQ ID NO: 810240 - DNA, 19 bp, Mus musculus
  siRNA target sequence for Ap1gbp1 (NM_194341.1,1399-1417).
cgacagacagtaaaccttt

SEQ ID NO: 810241 - DNA, 19 bp, Mus musculus
  siRNA target sequence for Ap1gbp1 (NM_194341.1,1503-1521).
gagccacccacaaaagaca

SEQ ID NO: 810242 - DNA, 19 bp, Mus musculus
  siRNA target sequence for Ap1gbp1 (NM_194341.1,1580-1598).
ccctctgaacttagaagat

SEQ ID NO: 810243 - DNA, 19 bp, Mus musculus
  siRNA target sequence for Ap1gbp1 (NM_194341.1,1586-1604).
gaacttagaagatctagat

SEQ ID NO: 810244 - DNA, 19 bp, Mus musculus
  siRNA target sequence for Ap1gbp1 (NM_194341.1,1722-1740).
gcactggcatccactaaaa

SEQ ID NO: 810245 - DNA, 19 bp, Mus musculus
  siRNA target sequence for Ap1gbp1 (NM_194341.1,1744-1762).
ctagtttggcagatgattt

SEQ ID NO: 810246 - DNA, 19 bp, Mus musculus
  siRNA target sequence for Ap1gbp1 (NM_194341.1,1776-1794).
ctctttggggagtattcaa

SEQ ID NO: 810247 - DNA, 19 bp, Mus musculus
  siRNA target sequence for Ap1gbp1 (NM_194341.1,1817-1835).
ggacgactttgcagatttt

SEQ ID NO: 810248 - DNA, 19 bp, Mus musculus
  siRNA target sequence for Ap1gbp1 (NM_194341.1,1818-1836).
gacgactttgcagatttta

SEQ ID NO: 810249 - DNA, 19 bp, Mus musculus
  siRNA target sequence for Ap1gbp1 (NM_194341.1,1844-1862).
cggtaacagctccatttca

SEQ ID NO: 810250 - DNA, 19 bp, Mus musculus
  siRNA target sequence for Ap1gbp1 (NM_194341.1,1845-1863).
ggtaacagctccatttcat

SEQ ID NO: 810251 - DNA, 19 bp, Mus musculus
  siRNA target sequence for Ap1gbp1 (NM_194341.1,1963-1981).
ctgcggcaaccaagtatga

SEQ ID NO: 810252 - DNA, 19 bp, Mus musculus
  siRNA target sequence for Ap1gbp1 (NM_194341.1,1966-1984).
cggcaaccaagtatgatgt

SEQ ID NO: 810253 - DNA, 19 bp, Mus musculus
  siRNA target sequence for Ap1gbp1 (NM_194341.1,2048-2066).
ctccaccaagagtgaagat

SEQ ID NO: 810254 - DNA, 19 bp, Mus musculus
  siRNA target sequence for Ap1gbp1 (NM_194341.1,2075-2093).
cgacttccactccagtaaa

SEQ ID NO: 810255 - DNA, 19 bp, Mus musculus
  siRNA target sequence for Ap1gbp1 (NM_194341.1,2076-2094).
gacttccactccagtaaat

SEQ ID NO: 810256 - DNA, 19 bp, Mus musculus
  siRNA target sequence for Ap1gbp1 (NM_194341.1,2232-2250).
gatgcactttctgttcaat

SEQ ID NO: 810257 - DNA, 19 bp, Mus musculus
  siRNA target sequence for Ap1gbp1 (NM_194341.1,2242-2260).
ctgttcaatttgacatgaa

SEQ ID NO: 810258 - DNA, 19 bp, Mus musculus
  siRNA target sequence for Ap1gbp1 (NM_194341.1,2268-2286).
gatgtgggaggagatctta

SEQ ID NO: 810259 - DNA, 19 bp, Mus musculus
  siRNA target sequence for Ap1gbp1 (NM_194341.1,2299-2317).
ctgatagctctttggattt

SEQ ID NO: 810260 - DNA, 19 bp, Mus musculus
  siRNA target sequence for Ap1gbp1 (NM_194341.1,2312-2330).
ggatttaccaacagttagt

SEQ ID NO: 810261 - DNA, 19 bp, Mus musculus
  siRNA target sequence for Ap1gbp1 (NM_194341.1,2387-2405).
gactgccttcccagctttt

SEQ ID NO: 810262 - DNA, 19 bp, Mus musculus
  siRNA target sequence for Ap1gbp1 (NM_194341.1,2499-2517).
gtggaccgcagccaagaaa

SEQ ID NO: 810263 - DNA, 19 bp, Mus musculus
  siRNA target sequence for Ap1gbp1 (NM_194341.1,2579-2597).
cgactttggagaatttcaa

SEQ ID NO: 810264 - DNA, 19 bp, Mus musculus
  siRNA target sequence for Ap1gbp1 (NM_194341.1,2580-2598).
gactttggagaatttcaaa

SEQ ID NO: 810265 - DNA, 19 bp, Mus musculus
  siRNA target sequence for Ap1gbp1 (NM_194341.1,2617-2635).
gcaagtttgacttcttagt

SEQ ID NO: 810266 - DNA, 19 bp, Mus musculus
  siRNA target sequence for Ap1gbp1 (NM_194341.1,2638-2656).
ctaattcccagagcaaaat

SEQ ID NO: 810267 - DNA, 19 bp, Mus musculus
  siRNA target sequence for Ap1gbp1 (NM_194341.1,2646-2664).
cagagcaaaatgaaatcca

SEQ ID NO: 810268 - DNA, 19 bp, Mus musculus
  siRNA target sequence for Ap1gbp1 (NM_194341.1,2838-2856).
gtcatccgagacaagtaca

SEQ ID NO: 810269 - DNA, 19 bp, Mus musculus
  siRNA target sequence for Ap1gbp1 (NM_194341.1,2886-2904).
gagagatacgcgtatgagt

SEQ ID NO: 810270 - DNA, 19 bp, Mus musculus
  siRNA target sequence for Ap1gbp1 (NM_194341.1,2923-2941).
gcgcgctggatgtcattaa

SEQ ID NO: 810271 - DNA, 19 bp, Mus musculus
  siRNA target sequence for Ap1gbp1 (NM_194341.1,2925-2943).
gcgctggatgtcattaaga

SEQ ID NO: 810272 - DNA, 19 bp, Mus musculus
  siRNA target sequence for Ap1gbp1 (NM_194341.1,2926-2944).
cgctggatgtcattaagaa

SEQ ID NO: 810273 - DNA, 19 bp, Mus musculus
  siRNA target sequence for Ap1gbp1 (NM_194341.1,3088-3106).
ctgtgtgtagtgagaaact

SEQ ID NO: 810274 - DNA, 19 bp, Mus musculus
  siRNA target sequence for Ap1gbp1 (NM_194341.1,3174-3192).
ctcacaccagatgagaatt

SEQ ID NO: 810275 - DNA, 19 bp, Mus musculus
  siRNA target sequence for Ap1gbp1 (NM_194341.1,3176-3194).
cacaccagatgagaattca

SEQ ID NO: 810276 - DNA, 19 bp, Mus musculus
  siRNA target sequence for Ap1gbp1 (NM_194341.1,3256-3274).
gagtgtgtctcttaaatgt

SEQ ID NO: 810277 - DNA, 19 bp, Mus musculus
  siRNA target sequence for AI551766 (NM_194342.1,365-383).
ggaaatccagcaacatgaa

SEQ ID NO: 810278 - DNA, 19 bp, Mus musculus
  siRNA target sequence for AI551766 (NM_194342.1,794-812).
cgctgaacctgaagagttt

SEQ ID NO: 810279 - DNA, 19 bp, Mus musculus
  siRNA target sequence for AI551766 (NM_194342.1,855-873).
ctacggtgcttggcatttt

SEQ ID NO: 810280 - DNA, 19 bp, Mus musculus
  siRNA target sequence for AI551766 (NM_194342.1,878-896).
ccttagggctgcagacatt

SEQ ID NO: 810281 - DNA, 19 bp, Mus musculus
  siRNA target sequence for AI551766 (NM_194342.1,1283-1301).
cggaagatctcttcaagaa

SEQ ID NO: 810282 - DNA, 19 bp, Mus musculus
  siRNA target sequence for AI551766 (NM_194342.1,2033-2051).
gacctacagccgttacctt

SEQ ID NO: 810283 - DNA, 19 bp, Mus musculus
  siRNA target sequence for BC024909 (NM_194344.1,382-400).
cctgaccaccgagtaagaa

SEQ ID NO: 810284 - DNA, 19 bp, Mus musculus
  siRNA target sequence for BC024909 (NM_194344.1,877-895).
gaaaggtcattcttcagaa

SEQ ID NO: 810285 - DNA, 19 bp, Mus musculus
  siRNA target sequence for BC024909 (NM_194344.1,1011-1029).
ggagcaacgagaaatgtct

SEQ ID NO: 810286 - DNA, 19 bp, Mus musculus
  siRNA target sequence for BC024909 (NM_194344.1,1057-1075).
gggactctgcagatggtaa

SEQ ID NO: 810287 - DNA, 19 bp, Mus musculus
  siRNA target sequence for BC024909 (NM_194344.1,1282-1300).
cggagcctgtacgatatct

SEQ ID NO: 810288 - DNA, 19 bp, Mus musculus
  siRNA target sequence for BC024909 (NM_194344.1,1284-1302).
gagcctgtacgatatctca

SEQ ID NO: 810289 - DNA, 19 bp, Mus musculus
  siRNA target sequence for BC024909 (NM_194344.1,1311-1329).
gctgagcaccgcactctat

SEQ ID NO: 810290 - DNA, 19 bp, Mus musculus
  siRNA target sequence for BC024909 (NM_194344.1,1447-1465).
gcccgaaagctcaaactat

SEQ ID NO: 810291 - DNA, 19 bp, Mus musculus
  siRNA target sequence for BC024909 (NM_194344.1,1531-1549).
ctggtggcggcagtgtata

SEQ ID NO: 810292 - DNA, 19 bp, Mus musculus
  siRNA target sequence for BC024909 (NM_194344.1,1534-1552).
gtggcggcagtgtatagca

SEQ ID NO: 810293 - DNA, 19 bp, Mus musculus
  siRNA target sequence for BC024909 (NM_194344.1,1977-1995).
cctggtactccagaatgtt

SEQ ID NO: 810294 - DNA, 19 bp, Mus musculus
  siRNA target sequence for BC024909 (NM_194344.1,2036-2054).
cctcccagattgcttacta

SEQ ID NO: 810295 - DNA, 19 bp, Mus musculus
  siRNA target sequence for BC024909 (NM_194344.1,2312-2330).
cagccgtggccaataagga

SEQ ID NO: 810296 - DNA, 19 bp, Mus musculus
  siRNA target sequence for BC024909 (NM_194344.1,2332-2350).
caggagtgtgttatgatga

SEQ ID NO: 810297 - DNA, 19 bp, Mus musculus
  siRNA target sequence for BC024909 (NM_194344.1,2335-2353).
gagtgtgttatgatgaaca

SEQ ID NO: 810298 - DNA, 19 bp, Mus musculus
  siRNA target sequence for BC024909 (NM_194344.1,2892-2910).
gtcggctctggattacact

SEQ ID NO: 810299 - DNA, 19 bp, Mus musculus
  siRNA target sequence for BC024909 (NM_194344.1,2894-2912).
cggctctggattacactaa

SEQ ID NO: 810300 - DNA, 19 bp, Mus musculus
  siRNA target sequence for BC024909 (NM_194344.1,3072-3090).
gctgggcctggaactgttt

SEQ ID NO: 810301 - DNA, 19 bp, Mus musculus
  siRNA target sequence for BC024909 (NM_194344.1,3419-3437).
gctcgcccctggaattcga

SEQ ID NO: 810302 - DNA, 19 bp, Mus musculus
  siRNA target sequence for BC024909 (NM_194344.1,3420-3438).
ctcgcccctggaattcgat

SEQ ID NO: 810303 - DNA, 19 bp, Mus musculus
  siRNA target sequence for BC024909 (NM_194344.1,3442-3460).
gagaccctgtactatgtga

SEQ ID NO: 810304 - DNA, 19 bp, Mus musculus
  siRNA target sequence for BC024909 (NM_194344.1,3498-3516).
cctgaaggacccgtttgat

SEQ ID NO: 810305 - DNA, 19 bp, Mus musculus
  siRNA target sequence for BC024909 (NM_194344.1,3555-3573).
ggacctgggccacaagaaa

SEQ ID NO: 810306 - DNA, 19 bp, Mus musculus
  siRNA target sequence for BC024909 (NM_194344.1,3668-3686).
cctttgcctcagaactgaa

SEQ ID NO: 810307 - DNA, 19 bp, Mus musculus
  siRNA target sequence for BC031509 (NM_194346.2,159-177).
gggattctgcgcaggtttt

SEQ ID NO: 810308 - DNA, 19 bp, Mus musculus
  siRNA target sequence for BC031509 (NM_194346.2,160-178).
ggattctgcgcaggttttt

SEQ ID NO: 810309 - DNA, 19 bp, Mus musculus
  siRNA target sequence for BC031509 (NM_194346.2,375-393).
ggcgctcagtgaagtttaa

SEQ ID NO: 810310 - DNA, 19 bp, Mus musculus
  siRNA target sequence for BC031509 (NM_194346.2,377-395).
cgctcagtgaagtttaata

SEQ ID NO: 810311 - DNA, 19 bp, Mus musculus
  siRNA target sequence for BC031509 (NM_194346.2,439-457).
ggatgtactacggttgtat

SEQ ID NO: 810312 - DNA, 19 bp, Mus musculus
  siRNA target sequence for BC031509 (NM_194346.2,472-490).
gcgcccagatggattgagt

SEQ ID NO: 810313 - DNA, 19 bp, Mus musculus
  siRNA target sequence for BC031509 (NM_194346.2,473-491).
cgcccagatggattgagtt

SEQ ID NO: 810314 - DNA, 19 bp, Mus musculus
  siRNA target sequence for BC031509 (NM_194346.2,793-811).
gtgcccagcttgtgacatt

SEQ ID NO: 810315 - DNA, 19 bp, Mus musculus
  siRNA target sequence for BC031509 (NM_194346.2,883-901).
cctgagctctagtttacct

SEQ ID NO: 810316 - DNA, 19 bp, Mus musculus
  siRNA target sequence for BC031509 (NM_194346.2,1068-1086).
gcaaggtgccgggaataga

SEQ ID NO: 810317 - DNA, 19 bp, Mus musculus
  siRNA target sequence for BC031509 (NM_194346.2,1118-1136).
gagcctgcacgggatcaat

SEQ ID NO: 810318 - DNA, 19 bp, Mus musculus
  siRNA target sequence for BC031509 (NM_194346.2,1147-1165).
gagctgtacctttgagaat

SEQ ID NO: 810319 - DNA, 19 bp, Mus musculus
  siRNA target sequence for BC031509 (NM_194346.2,1505-1523).
gagaaacaacgccaagata

SEQ ID NO: 810320 - DNA, 19 bp, Mus musculus
  siRNA target sequence for BC031509 (NM_194346.2,1834-1852).
gggctttgggcctaaggaa

SEQ ID NO: 810321 - DNA, 19 bp, Mus musculus
  siRNA target sequence for BC031509 (NM_194346.2,1854-1872).
ggtcactacaggcattgtt

SEQ ID NO: 810322 - DNA, 19 bp, Mus musculus
  siRNA target sequence for BC031509 (NM_194346.2,2082-2100).
cacccaggaactatgagtt

SEQ ID NO: 810323 - DNA, 19 bp, Mus musculus
  siRNA target sequence for BC031509 (NM_194346.2,2332-2350).
cactgatgacgctcagtta

SEQ ID NO: 810324 - DNA, 19 bp, Mus musculus
  siRNA target sequence for BC031509 (NM_194346.2,2334-2352).
ctgatgacgctcagttact

SEQ ID NO: 810325 - DNA, 19 bp, Mus musculus
  siRNA target sequence for BC031509 (NM_194346.2,2336-2354).
gatgacgctcagttactca

SEQ ID NO: 810326 - DNA, 19 bp, Mus musculus
  siRNA target sequence for BC031509 (NM_194346.2,2391-2409).
gcctagaccccgatgcata

SEQ ID NO: 810327 - DNA, 19 bp, Mus musculus
  siRNA target sequence for BC031509 (NM_194346.2,2392-2410).
cctagaccccgatgcatat

SEQ ID NO: 810328 - DNA, 19 bp, Mus musculus
  siRNA target sequence for BC031509 (NM_194346.2,2406-2424).
catatgccctgtttcacaa

SEQ ID NO: 810329 - DNA, 19 bp, Mus musculus
  siRNA target sequence for BC031509 (NM_194346.2,2450-2468).
cgagaccccaagttcttgt

SEQ ID NO: 810330 - DNA, 19 bp, Mus musculus
  siRNA target sequence for BC031509 (NM_194346.2,2669-2687).
caggaaaacggcattgact

SEQ ID NO: 810331 - DNA, 19 bp, Mus musculus
  siRNA target sequence for BC031509 (NM_194346.2,2775-2793).
gctgctacaacgcctttta

SEQ ID NO: 810332 - DNA, 19 bp, Mus musculus
  siRNA target sequence for BC031509 (NM_194346.2,2787-2805).
ccttttacgccaagaataa

SEQ ID NO: 810333 - DNA, 19 bp, Mus musculus
  siRNA target sequence for BC031509 (NM_194346.2,3071-3089).
caggcacactacaaagagt

SEQ ID NO: 810334 - DNA, 19 bp, Mus musculus
  siRNA target sequence for BC031509 (NM_194346.2,3073-3091).
ggcacactacaaagagtat

SEQ ID NO: 810335 - DNA, 19 bp, Mus musculus
  siRNA target sequence for BC031509 (NM_194346.2,3075-3093).
cacactacaaagagtatct

SEQ ID NO: 810336 - DNA, 19 bp, Mus musculus
  siRNA target sequence for BC031509 (NM_194346.2,3126-3144).
cagctaccttgtatgaagt

SEQ ID NO: 810337 - DNA, 19 bp, Mus musculus
  siRNA target sequence for BC031509 (NM_194346.2,3165-3183).
ctattcgctacctacattt

SEQ ID NO: 810338 - DNA, 19 bp, Mus musculus
  siRNA target sequence for LOC278676 (NM_194347.1,92-110).
gtaccaggagagaactaga

SEQ ID NO: 810339 - DNA, 19 bp, Mus musculus
  siRNA target sequence for LOC278676 (NM_194347.1,1032-1050).
ggggatcttcgatgaatca

SEQ ID NO: 810340 - DNA, 19 bp, Mus musculus
  siRNA target sequence for Mafa (NM_194350.1,768-786).
ggaggtcatccgactgaaa

SEQ ID NO: 810341 - DNA, 19 bp, Mus musculus
  siRNA target sequence for Mafa (NM_194350.1,1058-1076).
gcgcacccgacttctttct

SEQ ID NO: 810342 - DNA, 19 bp, Mus musculus
  siRNA target sequence for Mafa (NM_194350.1,1060-1078).
gcacccgacttctttctgt

SEQ ID NO: 810343 - DNA, 19 bp, Mus musculus
  siRNA target sequence for 9330175B10Rik (NM_194351.1,929-947).
ctttgcactgcccagatat

SEQ ID NO: 810344 - DNA, 19 bp, Mus musculus
  siRNA target sequence for 9330175B10Rik (NM_194351.1,1361-1379).
gactcttctccaactacat

SEQ ID NO: 810345 - DNA, 19 bp, Mus musculus
  siRNA target sequence for 9330175B10Rik (NM_194351.1,1363-1381).
ctcttctccaactacataa

SEQ ID NO: 810346 - DNA, 19 bp, Mus musculus
  siRNA target sequence for 6030430B19Rik (NM_194355.1,126-144).
ggtcctatcaggacgttat

SEQ ID NO: 810347 - DNA, 19 bp, Mus musculus
  siRNA target sequence for 6030430B19Rik (NM_194355.1,129-147).
cctatcaggacgttatgaa

SEQ ID NO: 810348 - DNA, 19 bp, Mus musculus
  siRNA target sequence for 6030430B19Rik (NM_194355.1,134-152).
caggacgttatgaagatct

SEQ ID NO: 810349 - DNA, 19 bp, Mus musculus
  siRNA target sequence for 6030430B19Rik (NM_194355.1,175-193).
gtcggaggcacccaatcat

SEQ ID NO: 810350 - DNA, 19 bp, Mus musculus
  siRNA target sequence for 6030430B19Rik (NM_194355.1,177-195).
cggaggcacccaatcatta

SEQ ID NO: 810351 - DNA, 19 bp, Mus musculus
  siRNA target sequence for 6030430B19Rik (NM_194355.1,213-231).
ccctgttcgcagaaaccat

SEQ ID NO: 810352 - DNA, 19 bp, Mus musculus
  siRNA target sequence for 6030430B19Rik (NM_194355.1,228-246).
ccatggaactgcatacatt

SEQ ID NO: 810353 - DNA, 19 bp, Mus musculus
  siRNA target sequence for 6030430B19Rik (NM_194355.1,229-247).
catggaactgcatacattt

SEQ ID NO: 810354 - DNA, 19 bp, Mus musculus
  siRNA target sequence for 6030430B19Rik (NM_194355.1,1176-1194).
cgcctttccgaccactttt

SEQ ID NO: 810355 - DNA, 19 bp, Mus musculus
  siRNA target sequence for 6030430B19Rik (NM_194355.1,1190-1208).
cttttctctaccatacaaa

SEQ ID NO: 810356 - DNA, 19 bp, Mus musculus
  siRNA target sequence for 6030430B19Rik (NM_194355.1,1222-1240).
gagctctcatccttttgaa

SEQ ID NO: 810357 - DNA, 19 bp, Mus musculus
  siRNA target sequence for 6030430B19Rik (NM_194355.1,1256-1274).
gtagcaggggctatgtatt

SEQ ID NO: 810358 - DNA, 19 bp, Mus musculus
  siRNA target sequence for 6030430B19Rik (NM_194355.1,1260-1278).
caggggctatgtattatct

SEQ ID NO: 810359 - DNA, 19 bp, Mus musculus
  siRNA target sequence for 6030430B19Rik (NM_194355.1,1262-1280).
ggggctatgtattatctgt

SEQ ID NO: 810360 - DNA, 19 bp, Mus musculus
  siRNA target sequence for 6030430B19Rik (NM_194355.1,1263-1281).
gggctatgtattatctgtt

SEQ ID NO: 810361 - DNA, 19 bp, Mus musculus
  siRNA target sequence for 6030430B19Rik (NM_194355.1,1277-1295).
ctgtttgagagagctttta

SEQ ID NO: 810362 - DNA, 19 bp, Mus musculus
  siRNA target sequence for Cdk10 (NM_194444.1,98-116).
gatgccgaagcgttaagga

SEQ ID NO: 810363 - DNA, 19 bp, Mus musculus
  siRNA target sequence for Cdk10 (NM_194444.1,104-122).
gaagcgttaaggagtttga

SEQ ID NO: 810364 - DNA, 19 bp, Mus musculus
  siRNA target sequence for Cdk10 (NM_194444.1,375-393).
ggccagcctattggaaaat

SEQ ID NO: 810365 - DNA, 19 bp, Mus musculus
  siRNA target sequence for Cdk10 (NM_194444.1,518-536).
cagacaagggctgtgtaaa

SEQ ID NO: 810366 - DNA, 19 bp, Mus musculus
  siRNA target sequence for Cdk10 (NM_194444.1,563-581).
cctatggtgttccagtaaa

SEQ ID NO: 810367 - DNA, 19 bp, Mus musculus
  siRNA target sequence for Cdk10 (NM_194444.1,768-786).
ggggacaccgagtgagaat

SEQ ID NO: 810368 - DNA, 19 bp, Mus musculus
  siRNA target sequence for Cdk10 (NM_194444.1,769-787).
gggacaccgagtgagaata

SEQ ID NO: 810369 - DNA, 19 bp, Mus musculus
  siRNA target sequence for Cdk10 (NM_194444.1,770-788).
ggacaccgagtgagaatat

SEQ ID NO: 810370 - DNA, 19 bp, Mus musculus
  siRNA target sequence for Cdk10 (NM_194444.1,890-908).
gactccgtctgctcaactt

SEQ ID NO: 810371 - DNA, 19 bp, Mus musculus
  siRNA target sequence for Cdk10 (NM_194444.1,915-933).
catgtatgaccctaagaaa

SEQ ID NO: 810372 - DNA, 19 bp, Mus musculus
  siRNA target sequence for Cdk10 (NM_194446.1,64-82).
cggatcagatccgattgaa

SEQ ID NO: 810373 - DNA, 19 bp, Mus musculus
  siRNA target sequence for Cdk10 (NM_194446.1,66-84).
gatcagatccgattgaagt

SEQ ID NO: 810374 - DNA, 19 bp, Mus musculus
  siRNA target sequence for Cdk10 (NM_194446.1,80-98).
gaagtgtatccgtaaggaa

SEQ ID NO: 810375 - DNA, 19 bp, Mus musculus
  siRNA target sequence for Cdk10 (NM_194446.1,90-108).
cgtaaggaaggtttcttca

SEQ ID NO: 810376 - DNA, 19 bp, Mus musculus
  siRNA target sequence for Akap9 (NM_194462.1,205-223).
gctcggtttcgacaaagaa

SEQ ID NO: 810377 - DNA, 19 bp, Mus musculus
  siRNA target sequence for Akap9 (NM_194462.1,239-257).
gggacattccgaagaaaca

SEQ ID NO: 810378 - DNA, 19 bp, Mus musculus
  siRNA target sequence for Akap9 (NM_194462.1,267-285).
gaggacgtcaagctctaaa

SEQ ID NO: 810379 - DNA, 19 bp, Mus musculus
  siRNA target sequence for Akap9 (NM_194462.1,269-287).
ggacgtcaagctctaaaca

SEQ ID NO: 810380 - DNA, 19 bp, Mus musculus
  siRNA target sequence for Akap9 (NM_194462.1,270-288).
gacgtcaagctctaaacat

SEQ ID NO: 810381 - DNA, 19 bp, Mus musculus
  siRNA target sequence for Akap9 (NM_194462.1,272-290).
cgtcaagctctaaacatga

SEQ ID NO: 810382 - DNA, 19 bp, Mus musculus
  siRNA target sequence for Akap9 (NM_194462.1,273-291).
gtcaagctctaaacatgat

SEQ ID NO: 810383 - DNA, 19 bp, Mus musculus
  siRNA target sequence for Akap9 (NM_194462.1,415-433).
gaacctgaaagtgaaattt

SEQ ID NO: 810384 - DNA, 19 bp, Mus musculus
  siRNA target sequence for Akap9 (NM_194462.1,555-573).
gaagcagcatgatattgaa

SEQ ID NO: 810385 - DNA, 19 bp, Mus musculus
  siRNA target sequence for Akap9 (NM_194462.1,661-679).
cagcgagacggcatcataa

SEQ ID NO: 810386 - DNA, 19 bp, Mus musculus
  siRNA target sequence for Akap9 (NM_194462.1,663-681).
gcgagacggcatcataact

SEQ ID NO: 810387 - DNA, 19 bp, Mus musculus
  siRNA target sequence for Akap9 (NM_194462.1,665-683).
gagacggcatcataactca

SEQ ID NO: 810388 - DNA, 19 bp, Mus musculus
  siRNA target sequence for Akap9 (NM_194462.1,726-744).
cacgatggtagaattctta

SEQ ID NO: 810389 - DNA, 19 bp, Mus musculus
  siRNA target sequence for Akap9 (NM_194462.1,728-746).
cgatggtagaattcttaga

SEQ ID NO: 810390 - DNA, 19 bp, Mus musculus
  siRNA target sequence for Akap9 (NM_194462.1,795-813).
ggctaatgaaactttgcaa

SEQ ID NO: 810391 - DNA, 19 bp, Mus musculus
  siRNA target sequence for Akap9 (NM_194462.1,827-845).
gccgaactgcgacagattt

SEQ ID NO: 810392 - DNA, 19 bp, Mus musculus
  siRNA target sequence for Akap9 (NM_194462.1,828-846).
ccgaactgcgacagattta

SEQ ID NO: 810393 - DNA, 19 bp, Mus musculus
  siRNA target sequence for Akap9 (NM_194462.1,830-848).
gaactgcgacagatttact

SEQ ID NO: 810394 - DNA, 19 bp, Mus musculus
  siRNA target sequence for Akap9 (NM_194462.1,853-871).
gccaaacgacagatcttca

SEQ ID NO: 810395 - DNA, 19 bp, Mus musculus
  siRNA target sequence for Akap9 (NM_194462.1,913-931).
gacctccaagcgcagattt

SEQ ID NO: 810396 - DNA, 19 bp, Mus musculus
  siRNA target sequence for Akap9 (NM_194462.1,916-934).
ctccaagcgcagatttctt

SEQ ID NO: 810397 - DNA, 19 bp, Mus musculus
  siRNA target sequence for Akap9 (NM_194462.1,918-936).
ccaagcgcagatttctttt

SEQ ID NO: 810398 - DNA, 19 bp, Mus musculus
  siRNA target sequence for Akap9 (NM_194462.1,919-937).
caagcgcagatttcttttt

SEQ ID NO: 810399 - DNA, 19 bp, Mus musculus
  siRNA target sequence for Akap9 (NM_194462.1,953-971).
gagcgtttgaaatggaaaa

SEQ ID NO: 810400 - DNA, 19 bp, Mus musculus
  siRNA target sequence for Akap9 (NM_194462.1,1014-1032).
gaagcaggcactcattgat

SEQ ID NO: 810401 - DNA, 19 bp, Mus musculus
  siRNA target sequence for Akap9 (NM_194462.1,1022-1040).
cactcattgatgagttgaa

SEQ ID NO: 810402 - DNA, 19 bp, Mus musculus
  siRNA target sequence for Akap9 (NM_194462.1,1035-1053).
gttgaatacaagagtagta

SEQ ID NO: 810403 - DNA, 19 bp, Mus musculus
  siRNA target sequence for Akap9 (NM_194462.1,1038-1056).
gaatacaagagtagtagaa

SEQ ID NO: 810404 - DNA, 19 bp, Mus musculus
  siRNA target sequence for Akap9 (NM_194462.1,1189-1207).
cagaacgagcggaagtgtt

SEQ ID NO: 810405 - DNA, 19 bp, Mus musculus
  siRNA target sequence for Akap9 (NM_194462.1,1224-1242).
gctaatgaggacagttgaa

SEQ ID NO: 810406 - DNA, 19 bp, Mus musculus
  siRNA target sequence for Akap9 (NM_194462.1,1308-1326).
ggaaacccaacggaaatta

SEQ ID NO: 810407 - DNA, 19 bp, Mus musculus
  siRNA target sequence for Akap9 (NM_194462.1,1353-1371).
gatgtatgggaagcaaata

SEQ ID NO: 810408 - DNA, 19 bp, Mus musculus
  siRNA target sequence for Akap9 (NM_194462.1,1374-1392).
gcaaatgaaacaagagtta

SEQ ID NO: 810409 - DNA, 19 bp, Mus musculus
  siRNA target sequence for Akap9 (NM_194462.1,1420-1438).
gagctcaaatcccaacata

SEQ ID NO: 810410 - DNA, 19 bp, Mus musculus
  siRNA target sequence for Akap9 (NM_194462.1,1425-1443).
caaatcccaacataagaga

SEQ ID NO: 810411 - DNA, 19 bp, Mus musculus
  siRNA target sequence for Akap9 (NM_194462.1,1457-1475).
ccttaaagtcggatacaaa

SEQ ID NO: 810412 - DNA, 19 bp, Mus musculus
  siRNA target sequence for Akap9 (NM_194462.1,1481-1499).
ccatcagtaaagaacaagt

SEQ ID NO: 810413 - DNA, 19 bp, Mus musculus
  siRNA target sequence for Akap9 (NM_194462.1,1482-1500).
catcagtaaagaacaagta

SEQ ID NO: 810414 - DNA, 19 bp, Mus musculus
  siRNA target sequence for Akap9 (NM_194462.1,1509-1527).
gaatgccgccataaatgaa

SEQ ID NO: 810415 - DNA, 19 bp, Mus musculus
  siRNA target sequence for Akap9 (NM_194462.1,1514-1532).
ccgccataaatgaactcaa

SEQ ID NO: 810416 - DNA, 19 bp, Mus musculus
  siRNA target sequence for Akap9 (NM_194462.1,1515-1533).
cgccataaatgaactcaat

SEQ ID NO: 810417 - DNA, 19 bp, Mus musculus
  siRNA target sequence for Akap9 (NM_194462.1,1577-1595).
gagagcttggcgtagttct

SEQ ID NO: 810418 - DNA, 19 bp, Mus musculus
  siRNA target sequence for Akap9 (NM_194462.1,1586-1604).
gcgtagttctgggagaaaa

SEQ ID NO: 810419 - DNA, 19 bp, Mus musculus
  siRNA target sequence for Akap9 (NM_194462.1,1588-1606).
gtagttctgggagaaaagt

SEQ ID NO: 810420 - DNA, 19 bp, Mus musculus
  siRNA target sequence for Akap9 (NM_194462.1,1623-1641).
gtctaatgacctcttagaa

SEQ ID NO: 810421 - DNA, 19 bp, Mus musculus
  siRNA target sequence for Akap9 (NM_194462.1,1635-1653).
cttagaagaggtaaggttt

SEQ ID NO: 810422 - DNA, 19 bp, Mus musculus
  siRNA target sequence for Akap9 (NM_194462.1,1801-1819).
catgaagccgagattacaa

SEQ ID NO: 810423 - DNA, 19 bp, Mus musculus
  siRNA target sequence for Akap9 (NM_194462.1,1807-1825).
gccgagattacaaattata

SEQ ID NO: 810424 - DNA, 19 bp, Mus musculus
  siRNA target sequence for Akap9 (NM_194462.1,1969-1987).
gaagtagaacatcgaataa

SEQ ID NO: 810425 - DNA, 19 bp, Mus musculus
  siRNA target sequence for Akap9 (NM_194462.1,1972-1990).
gtagaacatcgaataaata

SEQ ID NO: 810426 - DNA, 19 bp, Mus musculus
  siRNA target sequence for Akap9 (NM_194462.1,2032-2050).
cagatagacggcttacaga

SEQ ID NO: 810427 - DNA, 19 bp, Mus musculus
  siRNA target sequence for Akap9 (NM_194462.1,2034-2052).
gatagacggcttacagaat

SEQ ID NO: 810428 - DNA, 19 bp, Mus musculus
  siRNA target sequence for Akap9 (NM_194462.1,2038-2056).
gacggcttacagaatgaaa

SEQ ID NO: 810429 - DNA, 19 bp, Mus musculus
  siRNA target sequence for Akap9 (NM_194462.1,2086-2104).
gaaacagacaacctgataa

SEQ ID NO: 810430 - DNA, 19 bp, Mus musculus
  siRNA target sequence for Akap9 (NM_194462.1,2106-2124).
ccagcagaatcagttaatt

SEQ ID NO: 810431 - DNA, 19 bp, Mus musculus
  siRNA target sequence for Akap9 (NM_194462.1,2520-2538).
gaccgaggaccttcaacaa

SEQ ID NO: 810432 - DNA, 19 bp, Mus musculus
  siRNA target sequence for Akap9 (NM_194462.1,2536-2554).
caacaatgcctttatctaa

SEQ ID NO: 810433 - DNA, 19 bp, Mus musculus
  siRNA target sequence for Akap9 (NM_194462.1,2604-2622).
ctttgaagttaactatcaa

SEQ ID NO: 810434 - DNA, 19 bp, Mus musculus
  siRNA target sequence for Akap9 (NM_194462.1,2645-2663).
gtctgctcaagataagaga

SEQ ID NO: 810435 - DNA, 19 bp, Mus musculus
  siRNA target sequence for Akap9 (NM_194462.1,2649-2667).
gctcaagataagagatgat

SEQ ID NO: 810436 - DNA, 19 bp, Mus musculus
  siRNA target sequence for Akap9 (NM_194462.1,2650-2668).
ctcaagataagagatgatt

SEQ ID NO: 810437 - DNA, 19 bp, Mus musculus
  siRNA target sequence for Akap9 (NM_194462.1,2689-2707).
caggcattggaatatgaga

SEQ ID NO: 810438 - DNA, 19 bp, Mus musculus
  siRNA target sequence for Akap9 (NM_194462.1,2728-2746).
gaagagctcctttcgaaaa

SEQ ID NO: 810439 - DNA, 19 bp, Mus musculus
  siRNA target sequence for Akap9 (NM_194462.1,2769-2787).
ggggaagagttctggaatt

SEQ ID NO: 810440 - DNA, 19 bp, Mus musculus
  siRNA target sequence for Akap9 (NM_194462.1,2860-2878).
gtaaccaagcgagaaaagt

SEQ ID NO: 810441 - DNA, 19 bp, Mus musculus
  siRNA target sequence for Akap9 (NM_194462.1,2917-2935).
ctaaagcagacccattgta

SEQ ID NO: 810442 - DNA, 19 bp, Mus musculus
  siRNA target sequence for Akap9 (NM_194462.1,2925-2943).
gacccattgtaccatcaat

SEQ ID NO: 810443 - DNA, 19 bp, Mus musculus
  siRNA target sequence for Akap9 (NM_194462.1,2928-2946).
ccattgtaccatcaattct

SEQ ID NO: 810444 - DNA, 19 bp, Mus musculus
  siRNA target sequence for Akap9 (NM_194462.1,2982-3000).
ggaacagcttttattgaga

SEQ ID NO: 810445 - DNA, 19 bp, Mus musculus
  siRNA target sequence for Akap9 (NM_194462.1,3107-3125).
gggattctgggggatctat

SEQ ID NO: 810446 - DNA, 19 bp, Mus musculus
  siRNA target sequence for Akap9 (NM_194462.1,3108-3126).
ggattctgggggatctatt

SEQ ID NO: 810447 - DNA, 19 bp, Mus musculus
  siRNA target sequence for Akap9 (NM_194462.1,3109-3127).
gattctgggggatctattt

SEQ ID NO: 810448 - DNA, 19 bp, Mus musculus
  siRNA target sequence for Akap9 (NM_194462.1,3115-3133).
gggggatctatttctaaaa

SEQ ID NO: 810449 - DNA, 19 bp, Mus musculus
  siRNA target sequence for Akap9 (NM_194462.1,3158-3176).
caaaaccaatgatagaaga

SEQ ID NO: 810450 - DNA, 19 bp, Mus musculus
  siRNA target sequence for Akap9 (NM_194462.1,3210-3228).
gttgctcttgccaacaaga

SEQ ID NO: 810451 - DNA, 19 bp, Mus musculus
  siRNA target sequence for Akap9 (NM_194462.1,3240-3258).
gtctcatgcgacagttgaa

SEQ ID NO: 810452 - DNA, 19 bp, Mus musculus
  siRNA target sequence for Akap9 (NM_194462.1,3249-3267).
gacagttgaaccatgtgaa

SEQ ID NO: 810453 - DNA, 19 bp, Mus musculus
  siRNA target sequence for Akap9 (NM_194462.1,3304-3322).
gccgagcaggatgatctaa

SEQ ID NO: 810454 - DNA, 19 bp, Mus musculus
  siRNA target sequence for Akap9 (NM_194462.1,3449-3467).
ccgctcaacagaaaaagat

SEQ ID NO: 810455 - DNA, 19 bp, Mus musculus
  siRNA target sequence for Akap9 (NM_194462.1,3465-3483).
gatcgacgaacttcataaa

SEQ ID NO: 810456 - DNA, 19 bp, Mus musculus
  siRNA target sequence for Akap9 (NM_194462.1,3575-3593).
ctgagaaatgctttcacat

SEQ ID NO: 810457 - DNA, 19 bp, Mus musculus
  siRNA target sequence for Akap9 (NM_194462.1,3613-3631).
gttttcgatgaatgctata

SEQ ID NO: 810458 - DNA, 19 bp, Mus musculus
  siRNA target sequence for Akap9 (NM_194462.1,3701-3719).
gcccagaattacaagagta

SEQ ID NO: 810459 - DNA, 19 bp, Mus musculus
  siRNA target sequence for Akap9 (NM_194462.1,3702-3720).
cccagaattacaagagtat

SEQ ID NO: 810460 - DNA, 19 bp, Mus musculus
  siRNA target sequence for Akap9 (NM_194462.1,3703-3721).
ccagaattacaagagtata

SEQ ID NO: 810461 - DNA, 19 bp, Mus musculus
  siRNA target sequence for Akap9 (NM_194462.1,3722-3740).
gatacgaagttcaagactt

SEQ ID NO: 810462 - DNA, 19 bp, Mus musculus
  siRNA target sequence for Akap9 (NM_194462.1,3726-3744).
cgaagttcaagactttcaa

SEQ ID NO: 810463 - DNA, 19 bp, Mus musculus
  siRNA target sequence for Akap9 (NM_194462.1,3818-3836).
gcaagatccatgaacaaca

SEQ ID NO: 810464 - DNA, 19 bp, Mus musculus
  siRNA target sequence for Akap9 (NM_194462.1,3964-3982).
ctgcctgcgagtgagaaaa

SEQ ID NO: 810465 - DNA, 19 bp, Mus musculus
  siRNA target sequence for Akap9 (NM_194462.1,4128-4146).
gccaagcttgtccattgat

SEQ ID NO: 810466 - DNA, 19 bp, Mus musculus
  siRNA target sequence for Akap9 (NM_194462.1,4133-4151).
gcttgtccattgattctgt

SEQ ID NO: 810467 - DNA, 19 bp, Mus musculus
  siRNA target sequence for Akap9 (NM_194462.1,4188-4206).
ctgtggaagctgtctaaga

SEQ ID NO: 810468 - DNA, 19 bp, Mus musculus
  siRNA target sequence for Akap9 (NM_194462.1,4215-4233).
ggatggcacagcaaagttt

SEQ ID NO: 810469 - DNA, 19 bp, Mus musculus
  siRNA target sequence for Akap9 (NM_194462.1,4216-4234).
gatggcacagcaaagtttt

SEQ ID NO: 810470 - DNA, 19 bp, Mus musculus
  siRNA target sequence for Akap9 (NM_194462.1,4225-4243).
gcaaagttttctgatagat

SEQ ID NO: 810471 - DNA, 19 bp, Mus musculus
  siRNA target sequence for Akap9 (NM_194462.1,4230-4248).
gttttctgatagattcgaa

SEQ ID NO: 810472 - DNA, 19 bp, Mus musculus
  siRNA target sequence for Akap9 (NM_194462.1,4255-4273).
caagaaacaaatatggtta

SEQ ID NO: 810473 - DNA, 19 bp, Mus musculus
  siRNA target sequence for Akap9 (NM_194462.1,4318-4336).
gctaaggtcatcgtatcaa

SEQ ID NO: 810474 - DNA, 19 bp, Mus musculus
  siRNA target sequence for Akap9 (NM_194462.1,4319-4337).
ctaaggtcatcgtatcaat

SEQ ID NO: 810475 - DNA, 19 bp, Mus musculus
  siRNA target sequence for Akap9 (NM_194462.1,4323-4341).
ggtcatcgtatcaatgagt

SEQ ID NO: 810476 - DNA, 19 bp, Mus musculus
  siRNA target sequence for Akap9 (NM_194462.1,4329-4347).
cgtatcaatgagtatagca

SEQ ID NO: 810477 - DNA, 19 bp, Mus musculus
  siRNA target sequence for Akap9 (NM_194462.1,4357-4375).
cagacggaactctctagat

SEQ ID NO: 810478 - DNA, 19 bp, Mus musculus
  siRNA target sequence for Akap9 (NM_194462.1,4362-4380).
ggaactctctagattatct

SEQ ID NO: 810479 - DNA, 19 bp, Mus musculus
  siRNA target sequence for Akap9 (NM_194462.1,4408-4426).
gaacaagcacacactctat

SEQ ID NO: 810480 - DNA, 19 bp, Mus musculus
  siRNA target sequence for Akap9 (NM_194462.1,4455-4473).
catcacatcacaaagtcaa

SEQ ID NO: 810481 - DNA, 19 bp, Mus musculus
  siRNA target sequence for Akap9 (NM_194462.1,4536-4554).
caaagagttaggcgaatat

SEQ ID NO: 810482 - DNA, 19 bp, Mus musculus
  siRNA target sequence for Akap9 (NM_194462.1,4540-4558).
gagttaggcgaatatagaa

SEQ ID NO: 810483 - DNA, 19 bp, Mus musculus
  siRNA target sequence for Akap9 (NM_194462.1,4623-4641).
ggctatttcagaagaaata

SEQ ID NO: 810484 - DNA, 19 bp, Mus musculus
  siRNA target sequence for Akap9 (NM_194462.1,4651-4669).
gatgaaacatttatagtga

SEQ ID NO: 810485 - DNA, 19 bp, Mus musculus
  siRNA target sequence for Akap9 (NM_194462.1,4670-4688).
gaaaatctatgcatgatga

SEQ ID NO: 810486 - DNA, 19 bp, Mus musculus
  siRNA target sequence for Akap9 (NM_194462.1,4687-4705).
gaggtgttggtgtcaagta

SEQ ID NO: 810487 - DNA, 19 bp, Mus musculus
  siRNA target sequence for Akap9 (NM_194462.1,4899-4917).
gaaatcctccatagatact

SEQ ID NO: 810488 - DNA, 19 bp, Mus musculus
  siRNA target sequence for Akap9 (NM_194462.1,5062-5080).
gttgaggaacagacgttaa

SEQ ID NO: 810489 - DNA, 19 bp, Mus musculus
  siRNA target sequence for Akap9 (NM_194462.1,5140-5158).
gaaaggtacgctctcaaaa

SEQ ID NO: 810490 - DNA, 19 bp, Mus musculus
  siRNA target sequence for Akap9 (NM_194462.1,5145-5163).
gtacgctctcaaaaaagct

SEQ ID NO: 810491 - DNA, 19 bp, Mus musculus
  siRNA target sequence for Akap9 (NM_194462.1,5148-5166).
cgctctcaaaaaagctaat

SEQ ID NO: 810492 - DNA, 19 bp, Mus musculus
  siRNA target sequence for Akap9 (NM_194462.1,5162-5180).
ctaataatagacttctgaa

SEQ ID NO: 810493 - DNA, 19 bp, Mus musculus
  siRNA target sequence for Akap9 (NM_194462.1,5191-5209).
gaggttgtcaagacaacat

SEQ ID NO: 810494 - DNA, 19 bp, Mus musculus
  siRNA target sequence for Akap9 (NM_194462.1,5193-5211).
ggttgtcaagacaacatca

SEQ ID NO: 810495 - DNA, 19 bp, Mus musculus
  siRNA target sequence for Akap9 (NM_194462.1,5247-5265).
gattctggaccgatctagt

SEQ ID NO: 810496 - DNA, 19 bp, Mus musculus
  siRNA target sequence for Akap9 (NM_194462.1,5451-5469).
gctcgtgaggagtggtttt

SEQ ID NO: 810497 - DNA, 19 bp, Mus musculus
  siRNA target sequence for Akap9 (NM_194462.1,5454-5472).
cgtgaggagtggttttgct

SEQ ID NO: 810498 - DNA, 19 bp, Mus musculus
  siRNA target sequence for Akap9 (NM_194462.1,5465-5483).
gttttgctgggcctgtaat

SEQ ID NO: 810499 - DNA, 19 bp, Mus musculus
  siRNA target sequence for Akap9 (NM_194462.1,5477-5495).
ctgtaatagatcctgaaaa

SEQ ID NO: 810500 - DNA, 19 bp, Mus musculus
  siRNA target sequence for Akap9 (NM_194462.1,5500-5518).
gaacttatgctgaacatca

SEQ ID NO: 810501 - DNA, 19 bp, Mus musculus
  siRNA target sequence for Akap9 (NM_194462.1,5550-5568).
cctagaagccataagtgaa

SEQ ID NO: 810502 - DNA, 19 bp, Mus musculus
  siRNA target sequence for Akap9 (NM_194462.1,5551-5569).
ctagaagccataagtgaaa

SEQ ID NO: 810503 - DNA, 19 bp, Mus musculus
  siRNA target sequence for Akap9 (NM_194462.1,5570-5588).
ccaacactcagcttgaaca

SEQ ID NO: 810504 - DNA, 19 bp, Mus musculus
  siRNA target sequence for Akap9 (NM_194462.1,5571-5589).
caacactcagcttgaacat

SEQ ID NO: 810505 - DNA, 19 bp, Mus musculus
  siRNA target sequence for Akap9 (NM_194462.1,5613-5631).
gatgcgtgagtcctttaga

SEQ ID NO: 810506 - DNA, 19 bp, Mus musculus
  siRNA target sequence for Akap9 (NM_194462.1,5616-5634).
gcgtgagtcctttagacaa

SEQ ID NO: 810507 - DNA, 19 bp, Mus musculus
  siRNA target sequence for Akap9 (NM_194462.1,5617-5635).
cgtgagtcctttagacaaa

SEQ ID NO: 810508 - DNA, 19 bp, Mus musculus
  siRNA target sequence for Akap9 (NM_194462.1,5643-5661).
ggcaacagagtcacttcat

SEQ ID NO: 810509 - DNA, 19 bp, Mus musculus
  siRNA target sequence for Akap9 (NM_194462.1,5644-5662).
gcaacagagtcacttcatt

SEQ ID NO: 810510 - DNA, 19 bp, Mus musculus
  siRNA target sequence for Akap9 (NM_194462.1,5721-5739).
cgaggagctcaataaagct

SEQ ID NO: 810511 - DNA, 19 bp, Mus musculus
  siRNA target sequence for Akap9 (NM_194462.1,5752-5770).
gatgggtactcggatgaaa

SEQ ID NO: 810512 - DNA, 19 bp, Mus musculus
  siRNA target sequence for Akap9 (NM_194462.1,5794-5812).
caagaaaaaaccgatatta

SEQ ID NO: 810513 - DNA, 19 bp, Mus musculus
  siRNA target sequence for Akap9 (NM_194462.1,6043-6061).
caagtgaaagctctagaaa

SEQ ID NO: 810514 - DNA, 19 bp, Mus musculus
  siRNA target sequence for Akap9 (NM_194462.1,6187-6205).
gatgagcaggccatcgata

SEQ ID NO: 810515 - DNA, 19 bp, Mus musculus
  siRNA target sequence for Akap9 (NM_194462.1,6302-6320).
ccagagaggttgaacagtt

SEQ ID NO: 810516 - DNA, 19 bp, Mus musculus
  siRNA target sequence for Akap9 (NM_194462.1,6303-6321).
cagagaggttgaacagtta

SEQ ID NO: 810517 - DNA, 19 bp, Mus musculus
  siRNA target sequence for Akap9 (NM_194462.1,6309-6327).
ggttgaacagttaactaat

SEQ ID NO: 810518 - DNA, 19 bp, Mus musculus
  siRNA target sequence for Akap9 (NM_194462.1,6313-6331).
gaacagttaactaatcact

SEQ ID NO: 810519 - DNA, 19 bp, Mus musculus
  siRNA target sequence for Akap9 (NM_194462.1,6356-6374).
gtgagctgctgctatccaa

SEQ ID NO: 810520 - DNA, 19 bp, Mus musculus
  siRNA target sequence for Akap9 (NM_194462.1,6487-6505).
gtagaggaccagaaaaggt

SEQ ID NO: 810521 - DNA, 19 bp, Mus musculus
  siRNA target sequence for Akap9 (NM_194462.1,6563-6581).
gggatgctacagacagaaa

SEQ ID NO: 810522 - DNA, 19 bp, Mus musculus
  siRNA target sequence for Akap9 (NM_194462.1,6564-6582).
ggatgctacagacagaaaa

SEQ ID NO: 810523 - DNA, 19 bp, Mus musculus
  siRNA target sequence for Akap9 (NM_194462.1,6771-6789).
catgaaggaatctgattct

SEQ ID NO: 810524 - DNA, 19 bp, Mus musculus
  siRNA target sequence for Akap9 (NM_194462.1,6778-6796).
gaatctgattctgtatcta

SEQ ID NO: 810525 - DNA, 19 bp, Mus musculus
  siRNA target sequence for Akap9 (NM_194462.1,6810-6828).
catgctgtttggcaaattt

SEQ ID NO: 810526 - DNA, 19 bp, Mus musculus
  siRNA target sequence for Akap9 (NM_194462.1,6813-6831).
gctgtttggcaaatttgca

SEQ ID NO: 810527 - DNA, 19 bp, Mus musculus
  siRNA target sequence for Akap9 (NM_194462.1,6821-6839).
gcaaatttgcacagctaat

SEQ ID NO: 810528 - DNA, 19 bp, Mus musculus
  siRNA target sequence for Akap9 (NM_194462.1,6830-6848).
cacagctaatacaagaaaa

SEQ ID NO: 810529 - DNA, 19 bp, Mus musculus
  siRNA target sequence for Akap9 (NM_194462.1,6865-6883).
cggttaaatgagcagttta

SEQ ID NO: 810530 - DNA, 19 bp, Mus musculus
  siRNA target sequence for Akap9 (NM_194462.1,6892-6910).
cagcagcaacttaaactca

SEQ ID NO: 810531 - DNA, 19 bp, Mus musculus
  siRNA target sequence for Akap9 (NM_194462.1,6967-6985).
cagattgaacgtttgatga

SEQ ID NO: 810532 - DNA, 19 bp, Mus musculus
  siRNA target sequence for Akap9 (NM_194462.1,6981-6999).
gatgagtgagcgagaacat

SEQ ID NO: 810533 - DNA, 19 bp, Mus musculus
  siRNA target sequence for Akap9 (NM_194462.1,7100-7118).
ggaccctcccagaagatga

SEQ ID NO: 810534 - DNA, 19 bp, Mus musculus
  siRNA target sequence for Akap9 (NM_194462.1,7310-7328).
gtctacctaaggaaagtgt

SEQ ID NO: 810535 - DNA, 19 bp, Mus musculus
  siRNA target sequence for Akap9 (NM_194462.1,7515-7533).
ccagtgtcgtgaacaaaca

SEQ ID NO: 810536 - DNA, 19 bp, Mus musculus
  siRNA target sequence for Akap9 (NM_194462.1,7666-7684).
gtgccgttccaccaagaaa

SEQ ID NO: 810537 - DNA, 19 bp, Mus musculus
  siRNA target sequence for Akap9 (NM_194462.1,7886-7904).
gagttatagagctacagaa

SEQ ID NO: 810538 - DNA, 19 bp, Mus musculus
  siRNA target sequence for Akap9 (NM_194462.1,7969-7987).
gtaagagaaagctacatga

SEQ ID NO: 810539 - DNA, 19 bp, Mus musculus
  siRNA target sequence for Akap9 (NM_194462.1,8001-8019).
ggacttaggccaagttaaa

SEQ ID NO: 810540 - DNA, 19 bp, Mus musculus
  siRNA target sequence for Akap9 (NM_194462.1,8051-8069).
cctactccttagaaaaaga

SEQ ID NO: 810541 - DNA, 19 bp, Mus musculus
  siRNA target sequence for Akap9 (NM_194462.1,8259-8277).
ggtcagagataccatcaat

SEQ ID NO: 810542 - DNA, 19 bp, Mus musculus
  siRNA target sequence for Akap9 (NM_194462.1,8264-8282).
gagataccatcaatcaact

SEQ ID NO: 810543 - DNA, 19 bp, Mus musculus
  siRNA target sequence for Akap9 (NM_194462.1,8266-8284).
gataccatcaatcaactta

SEQ ID NO: 810544 - DNA, 19 bp, Mus musculus
  siRNA target sequence for Akap9 (NM_194462.1,8270-8288).
ccatcaatcaacttactaa

SEQ ID NO: 810545 - DNA, 19 bp, Mus musculus
  siRNA target sequence for Akap9 (NM_194462.1,8311-8329).
ctacatgccgctgagattt

SEQ ID NO: 810546 - DNA, 19 bp, Mus musculus
  siRNA target sequence for Akap9 (NM_194462.1,8318-8336).
ccgctgagattttggatat

SEQ ID NO: 810547 - DNA, 19 bp, Mus musculus
  siRNA target sequence for Akap9 (NM_194462.1,8332-8350).
gatatggaatccagacata

SEQ ID NO: 810548 - DNA, 19 bp, Mus musculus
  siRNA target sequence for Akap9 (NM_194462.1,8337-8355).
ggaatccagacatatttta

SEQ ID NO: 810549 - DNA, 19 bp, Mus musculus
  siRNA target sequence for Akap9 (NM_194462.1,8390-8408).
cgatccagttactgactaa

SEQ ID NO: 810550 - DNA, 19 bp, Mus musculus
  siRNA target sequence for Akap9 (NM_194462.1,8459-8477).
gatcctccattcctgaatt

SEQ ID NO: 810551 - DNA, 19 bp, Mus musculus
  siRNA target sequence for Akap9 (NM_194462.1,8482-8500).
gattctgttgcttatcaaa

SEQ ID NO: 810552 - DNA, 19 bp, Mus musculus
  siRNA target sequence for Akap9 (NM_194462.1,8550-8568).
gggatttgatacagcaata

SEQ ID NO: 810553 - DNA, 19 bp, Mus musculus
  siRNA target sequence for Akap9 (NM_194462.1,8552-8570).
gatttgatacagcaataga

SEQ ID NO: 810554 - DNA, 19 bp, Mus musculus
  siRNA target sequence for Akap9 (NM_194462.1,8587-8605).
gaaacatcagcagatttat

SEQ ID NO: 810555 - DNA, 19 bp, Mus musculus
  siRNA target sequence for Akap9 (NM_194462.1,8710-8728).
cagcagctttcggaatctt

SEQ ID NO: 810556 - DNA, 19 bp, Mus musculus
  siRNA target sequence for Akap9 (NM_194462.1,8720-8738).
cggaatcttggctgaaaga

SEQ ID NO: 810557 - DNA, 19 bp, Mus musculus
  siRNA target sequence for Akap9 (NM_194462.1,8790-8808).
gatgcaagtgcgaagagaa

SEQ ID NO: 810558 - DNA, 19 bp, Mus musculus
  siRNA target sequence for Akap9 (NM_194462.1,8793-8811).
gcaagtgcgaagagaaact

SEQ ID NO: 810559 - DNA, 19 bp, Mus musculus
  siRNA target sequence for Akap9 (NM_194462.1,8880-8898).
cataaaggaacgtagtgtt

SEQ ID NO: 810560 - DNA, 19 bp, Mus musculus
  siRNA target sequence for Akap9 (NM_194462.1,8886-8904).
ggaacgtagtgttttacta

SEQ ID NO: 810561 - DNA, 19 bp, Mus musculus
  siRNA target sequence for Akap9 (NM_194462.1,8939-8957).
ctagagatgtggatggatt

SEQ ID NO: 810562 - DNA, 19 bp, Mus musculus
  siRNA target sequence for Akap9 (NM_194462.1,8949-8967).
ggatggattgttaaactct

SEQ ID NO: 810563 - DNA, 19 bp, Mus musculus
  siRNA target sequence for Akap9 (NM_194462.1,8950-8968).
gatggattgttaaactctt

SEQ ID NO: 810564 - DNA, 19 bp, Mus musculus
  siRNA target sequence for Akap9 (NM_194462.1,8966-8984).
ctttggaacagagaataca

SEQ ID NO: 810565 - DNA, 19 bp, Mus musculus
  siRNA target sequence for Akap9 (NM_194462.1,9041-9059).
ggagtttactggctgaaat

SEQ ID NO: 810566 - DNA, 19 bp, Mus musculus
  siRNA target sequence for Akap9 (NM_194462.1,9044-9062).
gtttactggctgaaatcga

SEQ ID NO: 810567 - DNA, 19 bp, Mus musculus
  siRNA target sequence for Akap9 (NM_194462.1,9064-9082).
gatctgcgtgctcagatta

SEQ ID NO: 810568 - DNA, 19 bp, Mus musculus
  siRNA target sequence for Akap9 (NM_194462.1,9165-9183).
gcagtcgctggaaatgcaa

SEQ ID NO: 810569 - DNA, 19 bp, Mus musculus
  siRNA target sequence for Akap9 (NM_194462.1,9252-9270).
ggttgcggaactaaaaagt

SEQ ID NO: 810570 - DNA, 19 bp, Mus musculus
  siRNA target sequence for Akap9 (NM_194462.1,9318-9336).
gcataagcgcctaaaggaa

SEQ ID NO: 810571 - DNA, 19 bp, Mus musculus
  siRNA target sequence for Akap9 (NM_194462.1,9319-9337).
cataagcgcctaaaggaat

SEQ ID NO: 810572 - DNA, 19 bp, Mus musculus
  siRNA target sequence for Akap9 (NM_194462.1,9324-9342).
gcgcctaaaggaattagaa

SEQ ID NO: 810573 - DNA, 19 bp, Mus musculus
  siRNA target sequence for Akap9 (NM_194462.1,9343-9361).
gcattcaggtcggaagtta

SEQ ID NO: 810574 - DNA, 19 bp, Mus musculus
  siRNA target sequence for Akap9 (NM_194462.1,9344-9362).
cattcaggtcggaagttaa

SEQ ID NO: 810575 - DNA, 19 bp, Mus musculus
  siRNA target sequence for Akap9 (NM_194462.1,9366-9384).
gaagacggatgaaatccat

SEQ ID NO: 810576 - DNA, 19 bp, Mus musculus
  siRNA target sequence for Akap9 (NM_194462.1,9371-9389).
cggatgaaatccatttcct

SEQ ID NO: 810577 - DNA, 19 bp, Mus musculus
  siRNA target sequence for Akap9 (NM_194462.1,9373-9391).
gatgaaatccatttcctta

SEQ ID NO: 810578 - DNA, 19 bp, Mus musculus
  siRNA target sequence for Akap9 (NM_194462.1,9381-9399).
ccatttccttagtgataca

SEQ ID NO: 810579 - DNA, 19 bp, Mus musculus
  siRNA target sequence for Akap9 (NM_194462.1,9387-9405).
ccttagtgatacattagca

SEQ ID NO: 810580 - DNA, 19 bp, Mus musculus
  siRNA target sequence for Akap9 (NM_194462.1,9388-9406).
cttagtgatacattagcaa

SEQ ID NO: 810581 - DNA, 19 bp, Mus musculus
  siRNA target sequence for Akap9 (NM_194462.1,9522-9540).
ggatcagaaacggagaaat

SEQ ID NO: 810582 - DNA, 19 bp, Mus musculus
  siRNA target sequence for Akap9 (NM_194462.1,9523-9541).
gatcagaaacggagaaata

SEQ ID NO: 810583 - DNA, 19 bp, Mus musculus
  siRNA target sequence for Akap9 (NM_194462.1,9532-9550).
cggagaaatacacagttaa

SEQ ID NO: 810584 - DNA, 19 bp, Mus musculus
  siRNA target sequence for Akap9 (NM_194462.1,9542-9560).
cacagttaaacctcctttt

SEQ ID NO: 810585 - DNA, 19 bp, Mus musculus
  siRNA target sequence for Akap9 (NM_194462.1,9573-9591).
gcagctactaaatgaatct

SEQ ID NO: 810586 - DNA, 19 bp, Mus musculus
  siRNA target sequence for Akap9 (NM_194462.1,9621-9639).
gcatgatgcccagttatca

SEQ ID NO: 810587 - DNA, 19 bp, Mus musculus
  siRNA target sequence for Akap9 (NM_194462.1,9747-9765).
gttgcagagccgtgaagat

SEQ ID NO: 810588 - DNA, 19 bp, Mus musculus
  siRNA target sequence for Akap9 (NM_194462.1,9842-9860).
gccgcatagtagaactgtt

SEQ ID NO: 810589 - DNA, 19 bp, Mus musculus
  siRNA target sequence for Akap9 (NM_194462.1,9843-9861).
ccgcatagtagaactgtta

SEQ ID NO: 810590 - DNA, 19 bp, Mus musculus
  siRNA target sequence for Akap9 (NM_194462.1,9869-9887).
ctgaaaaatataaactaga

SEQ ID NO: 810591 - DNA, 19 bp, Mus musculus
  siRNA target sequence for Akap9 (NM_194462.1,9883-9901).
ctagattccttgcaaacaa

SEQ ID NO: 810592 - DNA, 19 bp, Mus musculus
  siRNA target sequence for Akap9 (NM_194462.1,10085-10103).
ggcttatgcaggaattcca

SEQ ID NO: 810593 - DNA, 19 bp, Mus musculus
  siRNA target sequence for Akap9 (NM_194462.1,10086-10104).
gcttatgcaggaattccaa

SEQ ID NO: 810594 - DNA, 19 bp, Mus musculus
  siRNA target sequence for Akap9 (NM_194462.1,10087-10105).
cttatgcaggaattccaaa

SEQ ID NO: 810595 - DNA, 19 bp, Mus musculus
  siRNA target sequence for Akap9 (NM_194462.1,10190-10208).
ctgatgatcggactagaaa

SEQ ID NO: 810596 - DNA, 19 bp, Mus musculus
  siRNA target sequence for Akap9 (NM_194462.1,10247-10265).
ggaacttcacaaagttgat

SEQ ID NO: 810597 - DNA, 19 bp, Mus musculus
  siRNA target sequence for Akap9 (NM_194462.1,10248-10266).
gaacttcacaaagttgatt

SEQ ID NO: 810598 - DNA, 19 bp, Mus musculus
  siRNA target sequence for Akap9 (NM_194462.1,10280-10298).
gagaacttgaccataatca

SEQ ID NO: 810599 - DNA, 19 bp, Mus musculus
  siRNA target sequence for Akap9 (NM_194462.1,10297-10315).
catgacttggaaatgatca

SEQ ID NO: 810600 - DNA, 19 bp, Mus musculus
  siRNA target sequence for Akap9 (NM_194462.1,10374-10392).
caggctgcagtttgaaaca

SEQ ID NO: 810601 - DNA, 19 bp, Mus musculus
  siRNA target sequence for Akap9 (NM_194462.1,10393-10411).
gccggtgatgatgcattta

SEQ ID NO: 810602 - DNA, 19 bp, Mus musculus
  siRNA target sequence for Akap9 (NM_194462.1,10394-10412).
ccggtgatgatgcatttat

SEQ ID NO: 810603 - DNA, 19 bp, Mus musculus
  siRNA target sequence for Akap9 (NM_194462.1,10530-10548).
cctaatgagacaaaatact

SEQ ID NO: 810604 - DNA, 19 bp, Mus musculus
  siRNA target sequence for Akap9 (NM_194462.1,10549-10567).
gagttaacaagacttatca

SEQ ID NO: 810605 - DNA, 19 bp, Mus musculus
  siRNA target sequence for Akap9 (NM_194462.1,10593-10611).
cttacggagcattgtcata

SEQ ID NO: 810606 - DNA, 19 bp, Mus musculus
  siRNA target sequence for Akap9 (NM_194462.1,10664-10682).
gttgttctaggttctcatt

SEQ ID NO: 810607 - DNA, 19 bp, Mus musculus
  siRNA target sequence for Akap9 (NM_194462.1,10836-10854).
gggccctgacactgatcat

SEQ ID NO: 810608 - DNA, 19 bp, Mus musculus
  siRNA target sequence for Akap9 (NM_194462.1,10902-10920).
ccggaaagctctcatatat

SEQ ID NO: 810609 - DNA, 19 bp, Mus musculus
  siRNA target sequence for Akap9 (NM_194462.1,10909-10927).
gctctcatatatcagaaaa

SEQ ID NO: 810610 - DNA, 19 bp, Mus musculus
  siRNA target sequence for Akap9 (NM_194462.1,11005-11023).
cacctagccttgaaagatt

SEQ ID NO: 810611 - DNA, 19 bp, Mus musculus
  siRNA target sequence for Akap9 (NM_194462.1,11082-11100).
gtccattgcgatttcaaga

SEQ ID NO: 810612 - DNA, 19 bp, Mus musculus
  siRNA target sequence for Akap9 (NM_194462.1,11084-11102).
ccattgcgatttcaagaat

SEQ ID NO: 810613 - DNA, 19 bp, Mus musculus
  siRNA target sequence for Akap9 (NM_194462.1,11090-11108).
cgatttcaagaatgaaatt

SEQ ID NO: 810614 - DNA, 19 bp, Mus musculus
  siRNA target sequence for Akap9 (NM_194462.1,11125-11143).
cagcaagtgacaagtacta

SEQ ID NO: 810615 - DNA, 19 bp, Mus musculus
  siRNA target sequence for Akap9 (NM_194462.1,11176-11194).
ctgagtccaggcattgaaa

SEQ ID NO: 810616 - DNA, 19 bp, Mus musculus
  siRNA target sequence for Akap9 (NM_194462.1,11196-11214).
gactgatccattctatcat

SEQ ID NO: 810617 - DNA, 19 bp, Mus musculus
  siRNA target sequence for Akap9 (NM_194462.1,11242-11260).
gaaccaagacacacaatgt

SEQ ID NO: 810618 - DNA, 19 bp, Mus musculus
  siRNA target sequence for Akap9 (NM_194462.1,11253-11271).
cacaatgtaccgttcaaga

SEQ ID NO: 810619 - DNA, 19 bp, Mus musculus
  siRNA target sequence for Akap9 (NM_194462.1,11259-11277).
gtaccgttcaagatttgat

SEQ ID NO: 810620 - DNA, 19 bp, Mus musculus
  siRNA target sequence for Akap9 (NM_194462.1,11283-11301).
ctatcctcggtctctctta

SEQ ID NO: 810621 - DNA, 19 bp, Mus musculus
  siRNA target sequence for Akap9 (NM_194462.1,11287-11305).
cctcggtctctcttaccat

SEQ ID NO: 810622 - DNA, 19 bp, Mus musculus
  siRNA target sequence for Akap9 (NM_194462.1,11322-11340).
gggtactccaggagactta
